United States Patent Application Publication US 2015/0315605 A1 - sequence listing, part 18

SEQ ID NO: 28002 - DNA, 2455 bp, Zea Mays
caaacgggtccttagtgatttcttgtagttgctctgagtctctctcgtctgtcgcccaaatccattttccacgtctcttccatcccatccccgtgacgccgtctagatttcaaatccgcgtcaagccagggcagagctcagggctcggtctcccccttcgccgccagttgccgcagcctccaacccctcgagatccgccgcgtgtgagaccgccgaccatggaggccatggaggagctgtcagagctcgccgagtcgatgcgccaggcggcgtcgctcctcgccgacgacgacccctccgacgccgccgcgccgcgccggcccaccaccttcctcaacgccgtcgccctcggcaacgtcagctctggcaagtcggccgtgctaaacagcctcatcggtcacccggttttgccgacgggggagaacggggcgacgcgggcgccaatagtggttgacctgcagagggatccggggctcagcagcaagtccatcgtgctgcagatcgacagcaagtcgcagcaggtttccgcaagtgccctccggcattcactgcaggacagactcagcaaggggacgtctggtggatcagggaggggccgtgctgatgagatttacctcaagctgcggacgagtacagctccctcattaaagctgattgatttacctgggatagaccagcgagctgttgatgattccatgatcaatgagtatgctgggcacaatgatgcaatactgctcgttgtcataccggcaatgcaagctgctgatgttgcatcatctcgagctctgaggttggccaaggatatcgattcagatgggacaagaactgttggtgttataagcaaagttgatcaagcagatggagatgcaaaagttatagcctgtgttcaggccctactatcaaacaagggtccaaaaaaccttcctgagattgattgggttgctctaattggacaatctgttgcgattgcgtcagcacaatcagctgggtctgaaaactctctagagacagcttggcgagccgaagctgaaagcttgaaaaacatcttaactggagctccgcagaataagcttggtagaattgctttggttgacacaattgctaagcaaatccgtaaaagaatgaaagtgcgggttcctaacctattgagtggccttcagggtaagtctcaaatggttcaggatgaattggcaaggctgggagaatctatggtacagagtcctgagggaacccgggcagttgctttggagctgtgccgagaatttgaggacaagtttcttgctcacataacatctgggatctggttggaaaattgttgcaagttttgaaggcaagtttccagacagaatcaaacagctaccgttggaccgacatttcgatctcaacaatgtcaaaaggattgtcttggaagccgatggttatcaaccatatttgatatctccagagaaagggttgaaatccttaataaagttagtactggaaatggcaaaggagccatcacgactatgtgttgaggaggttcatcgtgtattgttagacatagtcaatgcctccgcaaatgccacaccaggactcggaaggtatcctccattcaagcgtgaggttgttgcaatagcatcaaatgcattggataccttcaaaaatgatgccaaaaagatggtcgtcgcgcttgttgatatggaacgtgcctttgttcctccccaacatttcatccgcttggtgcaaagaagaatggaaaggcagcgtcgagaggatgagttaagaaaccgatcttctaagaaaacacaggaagctgaacagtcaacatctaagagggccttcagtccccaaacagatgctgagcaaggtggtggcagcttaaaatcaatgaaagacaaatctggccagcaagataaagacgcaaaagagggatcgaatttgcaggttgctggtcctgctggtgaaattactgcaggttacctcttaaagaaaagcgcaaaaactaatgggtggagtaaaaggtggtttgttcttaatgagaagagtggaaagcttgggtacacagagaaacaagaggagagacattttcgtggtgtcatcactcttgaggagtgcaaccttgaggaggtagaggaggaagaaccatctaaaagctcaaaagactcaaaaaaggcaaatggatcagaaaaacccccaagtcttgtatttaagattactaacagggttgcatacaaaacagtcttaaaagctcacagtgctgttctgttaaaggctgagagcatgcctgacaaggttgagtgggtgaataagatcaaagctgttattcagagcaaagggggttctttcaagggtccaagtactgagggtggttcaatgaagcaaagcaattcggatggcgctttagttcccttgtatgttttggatgtgccaatataaatactgctccattaaaatacacaaactaaacatctgatca

SEQ ID NO: 28003 - DNA, 247 bp, Zea Mays
taaccaataacacttgtgttgccttgttttttattcgaagcatttgagaacaagagaccaacagcatataatgcttcactgaccccggctgccgccgtgacgtgaccatacttgtaaccaccataatccggcaacggagaccacgtctcaagacacgtgaggggtaaagtctatgctcgacttcacttaggtactaaacttaccgatttaccatatttcttggcatgtgtttagtacttttgaacgc

SEQ ID NO: 28004 - DNA, 7570 bp, Zea Mays
ctcccagtcaaattccatctctctcctcaccacactcctgtcctgttgttgccacatgccagtctcctcctcatcacgccttccgccttctctctctacccggcagctctctggtccaccgctgcgggcagttaaaagccccccgctggcgcggcagctgctgcaggcagcacaagcggcgtcgccacggcccggggcgtaccaccacctccttctgtcgcgcccccctctcccttcccgcggtggctgggagggagcacgcgctgctgtagctcaacggcacgcatttaaggcgccccttggatcgcactgctgcccatatcctactcctccttcctctcctcctcctcctccccctcggcggcgatcggccgaacgcaagccacgcctctgcaactgcgtgcgtggtctgaacttcacagggtgaaataatggcggagccctaccaactgaacggcatactgaacgggatgcctaatttgagtcatccatcctctccatcagaggtcgatgaattctgtaaggcacttggtggtaactcgccaatacacagcgtgctagtcgctaacaatgggatggccgcggtcaagttcatgcgcagcatccggatatgggccctggagacctttgggacagagaaggccattcttttggttgctatggcaactccagaggacttgaagataaacgctgagcacataagaatcgctgatcagttcatagaagttcctggaggaacaaacaataacaactatgcgaatgtacagcttatagtggagattgcagagagaactcgcgtatctgcagtttggcctggctggggtcatgcgtctgagaacccagaacttccagatgctctagatgagaaaggaatcatttttctcggaccaccatcagctgcaatggctgcactgggtgataagattggttcttctcttattgcacaagcagctggagttccaactcttccatggagtggatcacatgtaaaagttccaccagaaagctgccattcaattcccgaggagttatataggaatgcttgtgtttccaccacagaggaagcagtggctagttgtcaggtggttgggtaccctgccatgatcaaggcatcatggggaggcggtggtaaaggaataaggaaggttcataacgatgatgaggtgagggcgctgttcaagcaagttcaaggagaagtccctggctcacctatatttattatgaaagtggcatctcagagccgacatctggaggttcaattgctctgtgataaacatggcaatgtggcagcactgcacagtcgagattgcagtgttcaaagaagacaccaaaagaatatctgtacagcatggaaacgggcgagtactattttctggagcttaatccacggttgcaggtagaacatcctgtgactgaatggatagctgaaataaacttgccagcagcccaagttgcagtcggaatgggcatacccctttataacattccagagattagacgcttttatggaatggatcatgggggcggctaccataattggaggacaatatctgctgttgcaactaagtttgatttggataaagcacagtcagtgaggccaaagggccattgtgttgcagttagagttacaagtgaggatcctgatgatgggtttaagcctacaagtggaagagtggaggagttaaactttaaaagcaaaccaaatgtttgggcctatttctctgttaagtctggaggagcaattcatgaattttctgattcacagtttggtcatgtttttgcatttggggaatctagatctttggccatagccaatatggtacttgggctgaaagagattcagatccgtggagagatacgcacaaatgttgattacacagtggatctcttgaatgcaacagaataccgcgaaaataagatccatactggttggcttgacagcagaatagctatgcgtgttagagccgagaggcccccatggtacctctcagttgttggaggagctctatatgaagcatcaagcaggagctcaagcgttattactgattatgttggttatctcagcaaaggtcagataccaccaaagcacatatcgcttgtcaatttaactgtaactctgaacatagaggggagcaaatacacgattgagacagtaaggggtggaccccgcagctacaaattaagaatgaatggatcagaaattgaaacagagatacattcactgcgagatggtggacttttaatgcttggatggaaacagtcatgtaatttatgcagagacagaggctgctggtacacgccttctcattaatggtagaacatgcttactacagaaagaacacgatccttcaaagctattggctgatacaccttgcaaacttttgcggttcttggttgcggatggctctcatgtggatgctgatacaccatatgctgaggtggaagtcatgaaaatgtgcatgccactgttgctgcctgcctctggtgtcattcactttgttatgcctgagggtcaggccatgaaggcgaatgacctgatagcaagattggaccttgatgacccatcttctgtgaggagagccgaaccatttcatggttcctttcccaaactgggacctcctactgctatctctggcaaagttcatcaaaaatttgctgcaagtgtgaattctgcacacatgatccttgcaggatatgaacataatatcaatgaagttgtacaagacctgctaaactgcctagacaaccctgagctcccttttctacaatggcaagaacttatgtctgttttagcaacacgacttccaaaagatcttaggaatgagttggatggtaagtacaaggagtatgaattgaatcctgacttctgcaagagcaaggatttccctgcaaggttgctgaggggggttattgaggcaaatcttgcatactgttcggagaaagatagggttacaaatgagaggcttgtggaaccacttatgagcctggtcaagtcatacgagggtggaagagaaagccatgctcgtgttgttgttaaatctctatttgaggagtatctgtcggttgaagagctcttcaatgataaccttcagtctgatgttatagagcgtctacgccttcaacatgcaaaagaccttgagaaggttgtatacattgtgttctcacatcagggtgtgagaagcaaaaataaattaatactgcggcttatggaagcattggtatatccaaacccatctgcttacagggatcagttgattcgcttctctgccttgaaccatacatcatattctgaactggcacttaaagcaagccaacttcttgagcacactaaattgagtgaacttcgcaccagcatagcaagaagcctttcagagctggagatgtttactgaggaaggagagcgtctgtcaacacctaggagaaagatggcgataaatgagagaatggaagatttagtttgtgctccactggcagctgaagatgcccttgtagctttgttcgatcacagcgatcctactcttcaacggagagtagttgagacatacatacgcagattgtatcagccatatcttgtaagtggaagtatccggatgcaatggcaccgagctggcctaattgccttatgggagttctctgaagagcatcttaagcaaagaagtgggcaagatgtgcccctacagcaagtagaaaatcccattgagaagagttggggcgtcatggttgtaatcaagtctctccagtttgtagcaactgcaattgatgttgcactgaaggagacttcacagtacggaattggtgtcagaagtgtctctaacagtaaccatgtacattctaatcaaagcaatatgcttcatattgctttggttggtatcaataatcagatgagtactctgcaagacagtggtgatgaggatcaaacacaagaaagggtcaacaaactattcaagattttgaaggataatactattacatcacatcttaatggcgctagtgttaaggttgtcagctgtattatccaaagggatgaagggcgtccaccaatgcgacactccttccaatggtctgttgacaaactttattatgaggaggatccaatgcttcgccatgtggaacccccgttgtctacattccttgagctggaaaaagtaaacttagaaggttacaatgaagtaaaatacactccatcacgtgatcgtcagtggcatatttatacgcttatcaagaacaagaaagatcagagattaaatgaccagaggatgttccttcgtaccatagtcagacaaccaagtgcaacaaatagtttcctgacaggtaatattgacaatgaagtagggcacacacaagcttcgtcatcgttcacatcaaacagcattctcagatcattgatgggagcactagaagaaatagagctacatgctcatagtgagactgtgagatcaggccactcacacatgtatctgtgcttactgagagaacaacaattgcatgaactaatcccgttttcaaggatgactggtaaaattgataaggatgaaggaactgtgtgcacacttttgaagcatatggtattgaatttatatgaacatgttggggtcaggatgcatcgtctttctgtgtgccagtgggaagtcaagctctggttggtttgtgatgggcaagctagtggtgcttggagagttgttgttaccaatgttactggccacacatgcaccattgatatttaccgagaagtggaagaccccaccacacatcagcttctctaccactctgccacaacctcggctggtcctttgcatggtgttgcattgaatgaaccatacaagcctttggatgctattgacctcaaacgttatgctgctaggaaaaatgaaaccacatactgctatgattttcccctggcatttgaaacagcgctgaagagatcatggaaatcaagtagctatggtgttagcgaagctaatgagcacaatcgattctatgctgaagtgaaagagcttatatttgctgattcggttggagcatggggcactccattggtttcagttgaacgtcctccaggcatcaatgatattggcatcgttgcttggaacatgaagctgtccacgccagaattcccacgtggccgggagattatagttgttgccaatgatgtgacatttaaagctgggtcctttggtccaagagaagatgcattttttgatgctgttaccaatcttgcctgtgagaggaaacttcctcttatctatctggcagcaactgctggtgccaggcttggtgtagcagaggaaataaagtcatgcttccatgtcggctggtctgattatgagagccctgaacgtgggtttcagtacatttacctcactacacaagattactcacgtctaagctcttcagtaatagctcacgagctgcaactaaaaaatggagaaaccagatgggtggttgataccattgttggtaaagaggatggacttggttgtgagaatctccacggcagtggggcgattgccagcgcatattctaaggcatacaaagagacctttactctgacatttgtgactggaagagctgttggcattggggcttatctggctcgtttaggcatgaggtgtatacaacgtcttgatcaaccaattattttgactgggttttcggcactaaacaagctcctggggcgggaggtgtacagttctcatatgcaattgggtggccccaaaatcatggctacaaatggcgttgtccaccaaactgtgtcagatgaccttgaaggtgtttctgctatcctgaaatggctcagttatgttcctccatatgttggtggtcctcttcccattatgaaacccctggacccacccgaaagaccagtaacatacctccctgagaatgcttgtgatgctcttgcagccatctgtggcattcaggatggtgaagggaggtggttgggtggtatgtttgatagggaaagctttgtggaaacattggaaggttgggcaaaaacagttatcaccggaagagcaaagcttggtggaataccagttggtgtcatagctgtagaaacccagactgtgatgcaagtcatcccagctgatccaggtcagcttgattccgctgagcgcgtagtccctcaagcaggtcaggtttggttcccagattctgcaaccaaaacagctcaggcattactggatttcaaccgtgaggagcttccgctgttcatcctagcaaactggagaggtttctctggtgggcaaagggatttatttgaaggaatccttcaggctggttcaacaattgttgagaatctgaggacatacaagcagcctgcttttgtatatatcccaatgggtggagagctacggggaggggcctgggttgtggtggacagcaagatcaatccagaccacatcgagatgtatgccgagaggactgcgaaagggaatgtccttgagcccgaaggattggtggagatcaaattcaggccaaaggaactggaagattgcatgctaaggcttgacccagaattgattggtctgaatactaggctgaaagagatgaagaaacaaaatgccagcatctcggaaatggagaccatacggaggagtatgactattcggatgaagcagttgatgcctatttatactcaggttgccacacgatttgccgaattgcatgacacctctgctagaatggccgccaaaggtgtgatcggtaaggttgttgattggaaagagtctcgggccttcttctacaggagattgcgaaggagagttgctgaggatgccctggccaaggaagttaaagaagctgctggcgagcagctttcccacagatcagcattagactgtatcaagaaatggtatctagcgtccaaaggaactgaaggtgatggtgaaatgtggaatgatgatgaatctttctttgcttggaaggatgatcccaaaaactatgagaattatcttgaggagttgaaggctgaaagagtatcgaactggttctcgcatcttgctgaaagttcagacgtgaaagctctaccaaacggtctttcgctgctccttaacaagatgaatcctttgaagagggagcaggtcattgatggcctcaggcagcttcttggttgatcgatggtggcaaagtggagcatgaagccctgtttagttgggaacggattgttctggttgtagtcatgtatttagctgtttaacatgtatttaattgggtggcgttactccacgtcatacggtacaacagcaatcctgatcaagtgattatttattcttcaatcgaagtagtacatgattttcatcagtaagctttgtgcttgcaattagggataaaatcggatggaaatgaactgaaaaacactcattttcgtttctatattttttttataaaaatggattctaattcagaaaaaccgtgagcaaaaacataaggttctcggtaaagaagggatttggacagcgcatatattgaaagaccggtaggagatgcaatagagacccgattctcgatttcttgtggaggatttctctattaggaataaaaaacggggaagtttctttctccacatgaa

SEQ ID NO: 28005 - DNA, 3240 bp, Zea Mays
ccgcaactcacatttcccaaacccaaacccaaacccaagcccccccattcaaaacggagcagcggtagccttcatcgccgatcgccgttacatcatcgccgccgcggctggcctcatccattgtcggaacggagcccgggccatggagaccaacgagaagcggcacggctggaaggaggcggcggcgctcagcgggggccacctctgccacgtctgcgggtaccagtacccaaacccgaaccccagcgccaagctccgccgttcccaccgcaagcactgcggcaaggcgctgccggaggctgcggaggaggcagtggtggcggaggttgacgaagccgttgtgggggtcggggtttgcgtgggtgagcgggaggacgtcgccggcaaccgcaatgcggccgggcggacggtgctcggtgaggaaggaggacggcagcgagaggagattggcacgggcgaggccaatggaggaggcgcggcgctgcgcggatctgcgggagaagttgacagttctgttgaggacaaggtgattgcagcagtgaaaatgtttttcttgaagatactgtacctcaaatggatgccagtgaattaagtgaaaacggccttgttgactgcaccagcaattctattgaaattgtaaacgaaagcagtgggactgaattactgattgctttgactaatggaagtcaaaatatcgtggaacgtccagctgagcgagaagacagcattgatgaataccaggatgcatctccgtttcttcatccatcagattctgaagatggcgctgcaccaagttctgcattttctacagaaatgagtaatttgaatgctattccatcagggtcaagtgtaactacagatgtaaattctctaggaacaaatggattactcaaagatcaaatttctggggaacccaatatgacagaaatatctgctgactctaaagctggacgtaatttggaggaaggagctcttagattggctaaacatgaagtaaacctgaagcttgggggtccatatgaacaatctgtgaatgttgactacacttacacagatatggttgatagtaaatctgatgaagcatctgttcatagtgtgatgatcgaacctttggatgcttcaccccttcaggaaacccgcctgacaattttggaaccagaatcagagtctacatgctcgaaaatggtggaaggttttatggaagatagaatgcatgttcttcttaccatgcctgaagcatcaccaaaatcaaaagtagtaggatcagataatgttcagttggaaacaataaccaatcctagcactaaccccatgtcaactgggagtgatctgaatgttgtttacactgataatactgctacagattgttccatggagctccccagactgaactggagtgttgaggatgttccaggtgatagtcaacctgttgagaattctagcaagaaaactttgagatgtcccactgccgtttttgaggatgatcttcctgttaccaagatggatgatactcctgttactaatgtggacgatgtagaattcacctttcatgagaagccacagacagatactgtagaagaaaatctttccatacagaagactaacgggttcactaaagaggaagtctgcaacaagcagattaaccctgagatccctacagaagatcaattttctaggggtcagaaacatgacactttactaatggatcgagtaccttctgtcaagaatccatttaatctagacgatgacaggaatgacgacttatttgaacttcccactgagagctgctttttggaggtaccaaatgttgttgaatcgagaaaacaagttgactctacatcccgaatggtggttccaccaatagtctctaaccaaattaggatggctgaagttcaacaatgccataactcaattgaacgcatattatcttcatcaagtgccagtgaaaatggtgaagtggttggtccggaagacattactgtcaggagtagttctgaactggtgaacaagacttgcttgactgaccatgccctgcaggaaaatggacatacaagtggtgatatttttgtgccatctcaggcagcctccacagagcttagcacaatatctatgcaggatatcagtgcactcagtgaagttgaaattatgcaaaccgaagatgctagtgcaaaggacatgactgcagtatgtagcattgattgtattgaaatgaaacaggctatcaacactacagcaaatgatacatatgcagctattgttgaagaaaagaagttgattgaaggcaccactgcaaggatgaatggggtgcgagagacatattatgttgaagaacagacacaagctagtgacacaaaggagttgagtgcagtacagaacatagggaattctgaagaaaataagcagactgaaaatactgatgcaaaggagactaatgcacggtttaatgcaaacgatgttgagcacaaaacacagactgcaaaggagattgctgcagccgaaagcacaagcagcgttgaagagaagcagcagctaaacatcgtggttgtccaagatggaagcaacaagaagatgaatgaagagattgcatcgacaggtgcccaactgaattcaggaagagttcgtgtcccgctgaaggtcctcctcgccgaggcaagcatggagaaccaagtgaagaaacccagcactaaggaacgaatgctgtcgttccggcgccaggtgaccaaggacaacaacttgtcagtgaaatcggggtcacgcaaatctggccctgatgaccaccattggagctccccagccaaactgccacataaggacgttgacaagatttccagagaaaagaagcagccgtggatgccgttcatctgctgccactccgtgcgctgataatatattttgcatcagttgacaactctacatacatgtgctgctgtaactaatgctatccgtctttgtgtagatagtctgcaatctagtatctgatattttgaatcagtgcaattttgatgtatccgctacctgacttgttagacatttgcgcgtgaatctgtcctgatgttcagattcagctagtgtttctgtggactgaacaggcctggaatcttgtaccggattaagctcggtgtggcctgctggtaattttgcggcaacgaaaagaagcaaagtgaaattaacgaaacgatttcatgttcatgggactgccggatctgatgacagttggctggagagtggggagaagtcaga

SEQ ID NO: 28006 - DNA, 2823 bp, Zea Mays
cgtagcctagcatagcgtccactagctagctagctagctagcatcagtcatggaggatggcgccgagaaggcgacgacaccggattcttcttcttcgcaagcggcaccgccagcgctgagcgcggtgtacgtgaacaggcgcctcgtggcgggcaaccgcgccatggccgccgtccacgtcgcgctggtcgccacggtcatcggccagcgcgccctggcgctgctctctgctggaaccagcagcgcgtcgcccgcgtcccggtccctgcaggtgcagcacgtggccatggcgctggccgacctgacgctgctgttcgtgtgggcgctgtcgcagtcggggctgtggcgtcccgtgacgcgcgccgcgttcccgggccggctgctggcggcggtgccccgcggcgcgctcccgcgcgtggacgtgctggtggtgacggccgacccggacaaggagccgcctctcggggtggtgaacacggtggtgtcggcgatggcgctggactaccccggcggcaagctgagcgtgtacctgtcggacgacgccgggtcgccgctcacgctgctcgccgcccgtaaggcctacgccttcgctgccagggcctgggtgcccttctgcaggaggcactccgtgcagtgcccctggccggacaggtacttcgccggcgacgacgacgacgctgacggcgatcggcggcgggaggagctcgcggaggagagggcaagagtcagggtacatgtctgtctgtctgtctctagtgttttgcttttgattagactattttttttcttttccggtccctctgggcgtgacgtgtgtgatgacgtcaaagtggcacatcgggatggagtctccaacacactccaaagtccaaactccaaagtgccgtaatcagtgtcacgtggaagtggaacaaccattttcgtcctcatgcattgcatgcatgaaactatacgagaagttgaaagcggatatagaggcggctaagaatgacgagactatttctgggagctggtcaaaagacaaacgtcagaatcacgatgcttacgtggagatcatcgaagacggcgacggcgttgaggagattccggcgctggtgtacgtagcccgcgagaagcggagagcgtggcctcaccacttcaaggccggcgctctcaacgccctgctgcgagtgtcgggcgtggtgagcaacgcgccctacgtgctggtcctcgactgtgacatggcctgcaacagccgcgcctccgccctggacgccatgtgcttcctcctcgaccgcaggccgccgccggacagcctcgccttcgtgcagttcccgcagctgttccacaacctcagccacaaggacatctacgccaacgagctcagatacatcttcgggacccgatggttcggcctggacggcgtccggggccctcccctctccggctccggcttctacgtcaggagagacgcgctttacggggccacaccgaccgcggacttcatgcccgatgccaccgccgtcgccgagctcaagacaaggttcggccactccgaccgtctcgtggcatccttacgcagccccggcgttccaccagaagcagaagcgatgatgtcccttgcggcgctggcctcctgcgcatacgaggccggcaccgcctggggcgccggcgtcggcttcatgtaccagtcggtggtggaggactacttcacggggttccagcgcttcttcgcccgggggtggacctccgcctactgctacccggagccgcgcccggcgttcctcggcagcgtgcccaccaacctcaacgacgtgctggtccagaacaagcgctggatgtccggcatgctcgccgtcggcgtctccaggcgccactccccgctcgcctgccgcccgctcctccgggcctccctgctccaggccatggcctacgcctacttcggcttcgccgcgctctgcgccgtccccgtgctctgctacgccaccctgccgcagctctgcctcctccggggcgtcccgctattcccctgccccgccgccaccgcggcggcgttcgcgtcctcgcttctgcagcacatggcggaggtgtgcgtgtccaggcggggtaggctggacctgcgcacgtggtggaacgagcagaggttctgggtgctcaacgccctcacagcccagctcttcggctgcgtcagcgccgcccaggagctgctcggcgcacgcgccttggacttcgacctcaccagcaaggccgccgtcgacgggagcctgtaccaggacggcgtgttcgacttcacgggctgctccgcgctgctgctccctgccaccacgctctccgtgctcaacgccgctgcgatcgtcgccggcacctggaagatgtcgtcgtcgtcgtcgtcatcgagcggcggcttccacttcgccccgcagctgttcctcatgtgctacggcgcggcgctcagctacccgctactggaggggatgttcctcaggcgggatcctgcgagggttccgccacgcatcaccgcactctcggtcgcattggcagccgtgctgcttgccgccatgcttggatgaacatcaaccgagagatgcacggcctgcttcaactcttgtctactgttctagatatactgtacttttaattactattcccactgtattcccaccgttgaagcacaacaacgcagtgaactaaacgacgaacgagaagaagcccaaggttaattagaactaatttatgatatacgttcggactaattattctacacatcaaagatatttatgtaatgcggtataatatatataatttgtttactattgcatacgcataaatttagaaagataagaa

SEQ ID NO: 28007 - DNA, 2298 bp, Zea Mays
actgaccttctcacgggcgagaggactaacctccctcccttcgcgccatctcccgcggtgctgcctcctctggcgccgattcgccgctgggagccccaattctataacccctctgttcgatctgggatccgctagattcgttggggcggtgatgagggcgatggcggaggtgatgcaggaggggtgcgtggagaatcggcagccactggcggcttcgagctcgtccgtgtcggatggcagcagctgtggcggcggagagcgggcggggacgtcgccgccggtgtcaagctccgggaattgcatctccgttctgagacgaacaagtggaccgataagaagaactaagggtggctggacactgaaagaggatgaaacactgcggaaggcagttgaagctttcaagggtagaaattggaaaaaaatagctgaattttttcaggacagaactgaggttcaatgtttgcatcgttggcagaaggttcttaatccggaacttatcaaaggcccttggactcaagaggaagatgaaaaaatcattgaccttgtgcgcaagtatggaccaacaaaatggtctatcatcgcaaaatcattgcctggccgcataggcaagcaatgccgagagaggtggcataatcacctgaatccagaaataaggaaagatgcttggactcctgaggaggaaagggcccttattgatgctcatcaagtgtttgggaataaatgggcagaaatagcaaaagttcttccgggaaggactgataattccataaagaatcattggaacagttctttgaaaaagaagttagaagcctatagtaacagcagtgttctttcagtttcaaagctgtttgttcatgatgatttcaaggataaaatgaagcccgtggctactgatggtcatcttgatctgaaccaaatgccaagcattggttccaaagattcctctggaagagcttatcattccattgtgagcccactttcacaggcatacaatttggactcaagctgcctctctctttctataccaaccatgcagcctctaacttcacatgaaatgtcatcactaattgatggttctgctgttactttggtggtacaatgtctggaaagtgactctgtccgtgacaaggaccaagaaattgactctgttcaagagaagggtgttgaggttagctcaacacctgatcctgttggggttgaattagaatctgcaccagccaaaagaggtgcagaattatcttcaaagaacgagttgcattctacccttggtcctctttgttatcagattttaaacatggaagatgtgatcccaatcagtaccccactctgttctgaacataatggtgcacatcaaacatcacaacaatgcatgtcacccaatggttatacttctctctctccaacgattggaaaagtatcaagtcagctaactgttgattcaattttgagaatggctgctgatagctttccatgtactccttcaatactaaggaaaagaaaacgtaataaagcaacacctggttcaggtaatgagttgaagacgggtggagtaaacaatgatagcttttacactcctaatggaactaatgggaaggacactactccacggtcatttaaaactgctgcatccttctcatcgctgggttctgttgatgggctattgacttctgtaaggagttttgattcttcaccaccctatcagaaaaggtcaaaaagaatggctatcatcaaatcagttgagaaacagctagatttttcagcagatggactggatacttctggttctgagattatgaactctccttgtcataattcccaaggcgtagattctaacaggatgtagcgcatacaagtgatttgaatgtaatttaattccataatgtgcaggaattaatggcaatcttatgaaaccggacaggactttatggaatcccttccgaactaaccagcctcatgcaaatgtcgtggttcaagctaaatccaaatcaatcaccttcagcggagataaagagcttcctgcaatggaaatgacgtacggaacacaggccaacagtttaccctgtcatctcatgtaatgagagtgtacaaaatactgtctaaattgaaagcacattccatagaagattacattgtttcctacatattgtgaacttacagctaggagttgagattgtagaagcccacagatgtgtacaaaaaaaagggaaaaaaaagcaaagtcaatttcctgtccttccggtctataaattaatatatgaaacatatataatctgcagaacgtaaaacagtaagaaactg

SEQ ID NO: 28008 - DNA, 263 bp, Zea Mays
tcctgtgtcgtcgtcgttccacgtgtcgtcaagaaattccaagagtcgagtgaagacggagccaacagcgtggtgttcaccaagtgcgcgacaaaaagttcgaacatcctgcgcgactcaagttcgattcgccaaaattattcagtcgaggagaagatcttcagcaattgattaccgaagaaaagaatgcccctggatgacatcaaccggaacccgtagtcgtgcttgcgactatcgcgtcgaattagtcagggtaagtaaat

SEQ ID NO: 28009 - DNA, 4015 bp, Zea Mays
gttggaccctggttgccttgatcacatagtgccttgatctggaaatggcacaataagtgctgctggtggtaatggatggggtggcggtggcggtggaaggatatctctggactgttacagcattcaacaagatttggaaataacagttcatggtggccagagttttgggtgtgctcagaatgctggtgcagcaggtacaatatatgatagttcactgcagaccctaaaggtcagcaatgggaatttcaccacacgcacagaaactccattgcttggtttcccaatgactagactttggtccaatgtgcttgtggagcgctatgcaaaagtgctggttcccttgttgtggtccagagtacaggtgacaggtcaaattagattactaaccaagggtagtatctgctttgggttatcagaaaatccaatatcagaatttgagctggttgctgaagaacttttaatgagtgactctgttataaaggtctatggagctttcagaatgtatgttaaagtgctcttgatgtgggattcaaatattcagattgatggcggtgctaaggatgttgttcttgcatctatgcttgaggcaagaaaccttgtagtcctcaggcatgggtcagtgatatcttccaacactgatttaatggtatatggacaaggacttcttaacttgagtggccctggtgatggaatcaaagctaagcgactgtttctgtctctattttacaacattgaggttggccctggttcccttgttcaggctccactcgacgaggctgttccaagcaacttggatgcactttcacgctgtgaaagtaaaacatgtcctagtgagcttattaccccacctgatgattgccatgtaaaccgctccttgtcatttacactacaaatttgtcgtgttgaagacataactgtcagtggcatagttaggggaagtataattcatattcatagagcaaggactgtgactattgcaaaggatggcacaattagtgcctcagagttaggttgcaaggaaggcatcggaaaaggaaagtttctcaagtatggagctggtggtggtgctgggcatggaggccgaggtggcacagggatttacaatggaatgagaagtgaaggaggcctagaatatggcaatgctgatcttccatgtgagctaggaagtggtagtggcggttctgctttgtcagcagataacactgccggtgggggattaattgttattggatccatgaaatggccactttcaaggttgctagtttatggctcgctgaactctgacggggaaagccatagaggcacatcgggaaattcaaatgggacttttaaaggtggagttggtggtggttctggaggatcaattcttttatttcttcaatggtttctgctagagaaaaactcatcattatcggcatctggtggcaatggaggtgtatacggtggtggtggaggtggtggtggtagaatacatttccattggtcatatattgctactggagatgaatatgttcacattgcttctgtcaatggcacaatagtatcaagtggtggatctggtaagaatgatggacattgtggagaagatggaacagtaacaggaaagaaatgccccaagggcctatatggaacattttgcactgaatgcccagttggtacatataaaaacgttgttgggtccaattcatctctgtgcatcccgtgttctgtggatagtcttccaaaccgtgctgaattcatatatataagaggtggtgttaccgagctgccatgcccgtataggtgcatatctgataagtacaagatgccaaactgttacacaccacttgaggaacttatgtatacttttggtggtccttggtctttttcaatcatcctttctttaacagttattcttttggcacttgtcttaagtgctctaagaattaagattggtgagagtgatatcacctaccgggcaactaatgcaatccacaatgatggttgttctttcccctttttgctttctttggccgaggtaccaggggcaagcagggcagaagaaactcagagccatgtccacagaatgtacttcatgggacctaatactttccgagagccctggcatctcccctactcacctcctgatgcgataattggaattgtttatgaagatgctttcaaccgttttattgatgagatcaatttggtggctgcatatgagtggtgggaaggatctatacatagtatactttctgttcttgcgtatccttgtgcctggtcttggaagcaatggcgcagaaggaaaaaaaaccatcgtcttcaagagtatgttaaatctgaatatgatcattcatgtctccgctcctgcaggtcacgggctctctataaaggcttgaaggttggttcaactccagacttgatggttgcgtacatagatttctttctcgggggtgatgagaaacgacttgatgtagcatccaccattcagaagaggtttcccatgtgtctaatttttggtggtgatggaagctatatgtccccatactatctacatagtgatacattgctatcaaatcttcttggccagtatgtatctactgcgatctggaatagattagtcgctggtttgaatgctcaattaaggacagtaagacaaggaagtgtccgttctactttgggccctgttgtttcttggatcaacagtcatgggaatccccaacttgagagacatggtgttcgagtggagttagggtggttccagtccactgcttctgcatattaccagcttggtattatcgtagctgtgaatgagaacttctacaagaatctccgccaccatgagcatgccacagaattttgtgaacgctcaaggaagaacgttgcagttccacttcaggatttcaatcaggcaaatctggatcagccttgcacaagctatgctgtttctagaaagcgattgacaggtggagtcaatggtgggatcataaatgagggaacgctcaagtcactgcactataaaagagactatctctttccattctcattgttattgcgtaattccaggcctctaggctatgcggaaacattgcaattgctcatttgtattgtacttctgggtgatttctccatcaccctgcttatgcttgtacagtactattggatatctgtcggagcttttcttgccatactgctcatcccccctcttgctttgctttcaccttttcttgctggtctcaatgcactttttagccgaggactaaaacgatcttcagtgacccgcatttttgcactttggaacattacttctgttgtaaacattattgtagcaatcatatacggctctttgtatttttggctctcttctttggcggtgtcctcagttcatcaagtatacaacacaaaaagcttcaagagtagagaagacaatgaatggtggatactgcctactatcctttttctcatcaaatcactgcaagctggactagttaactggcacgttgccaatttggaaatccaggactactcgttatttagcccggacccagatagattctgggcaatgtagtcgcctgcagcaagctaagaattgcagaaagcatggtttagtgatcgcaagaatggcaagtattaattattggatgctgaatatttgcgttttgtcccttgcaacgtcatcagcccaatacaatctctgaatctgaaggggtctaacacgctggctggaacttccttctatttatgggaagcgctcctgcgtagtgcactagtgcagatatgttcattttctttttctcagtttttttcccgtcttggtcgtgtgcctagaataggtctgtcgctcggtggggattagatttgtgcattttctttggttcaaattaaaccgttgattcgagtgtacagcaagaaactattgtgattgtcgctctagatgtacatcactgtaagtataatagtagaaccatttcaactgtatacaatcctcaaaggaaagtatgtttctttctattttctttttcctattgtcatcgtt

SEQ ID NO: 28010 - DNA, 2981 bp, Zea Mays
cccttccctggcatcagaatcaaacgtgtccccgcagacgctcccaatcccatgcgcccctctgctctcacggtttgatttccctttcagttgggccgccatggccgcggtagcagctgtgcgcctgcaccccggcctcccccatcgccggccctgacactgggtaaacgtggtggctgaagctgctgctgaggattcgggatcttcttgctgccgccacgagctgcctgcgtgatattgacacggcgcgctcccctggctcctgggcatgacgaggggaggcggtggacaaggaggcaaggaggagccggggaaggtgatgggtccgctgttcccgcggctccacgtcagcgacgcaggcaagggcggcggcccgcgggctccgccaaggaacaagatggcgctctacgagcagttcaccgtgccgtccaaccgcttcagctcccccgcggcctccgcccgcgccgcgggggccagcctcgtgccctccacggcggctgcccaggtttatggttatgacaggacgctgttccagcccttcgacgtgccttcaaatgagcctcctcgttcatctgaaaagttcaaaggaaacactatcaacgggcagtctaatagtacaagaagagaacctttgaggatgtcctcacagaccaagaacaaggacgtctgtgcttcaaaatcaattgccaagtgcacctcacagcatagagtgggcaacaccatcatgtcttctggaaagaaagtgataaatcaaaaccccaatctactacaaacccacacaaaagtcctgcaatgtccaaatcatctgtagagtgctatagtactgtgaacaagcacttggacaaaatcaatgaagctgataggaggttaatgaactctccaaaggttaaggagaaagaagcagtgcaaggatcaaaagctgtggaagttaaagaaaagagttcatcatttcaggcatcagaaaagttcaaagacaaatatgctaagctatgtcaaatgaggaataaggaagtctaatttactggaaagaagcccacgggaagttggtgctaagagaaaaagaggacatcacaatggagagcaaaatgatgatttatctgactcctcagtggaatgcatacctgggggggagatctctccagatgaaattgttgctgctattggtccaaagcatttctggaaagcaagaagagctattcagaatcagcagagggtttttgctgtccaagtgttcgagctgcataagctgataaaagtgcagaaattaatcgcggcatctccacatctgcttattgaaggtgatcctgtccttggcaatgcattaacaggaaaaaggaacaaacttcctaaaggaaattcgaaagttcagaccctgtcaatcacaaacaaagatgatatccagccaaccctagagcaaccagagttatcaaaacaagacacagaaggaaacttattggcccattctcatgatgatggacttggtgacaaccatcataatcaagctgcaacaaatgaaacctttacaagcaaccctccagctatgcatgttgctcctgacaacaaacagaataactggtgcatgaatccaccgcagaatcaatggcttgtcccagttatgtcgccttctgaaggtcttgtctataagccttttgccggcccttgtcccccagttggaaatctgctgacaccattttacgccaactgtgctccgtcaaggctgccttctacaccatatggcgttcctattcctcaccagccacagcacatggtccctcctggtgcccctgccatgcatatgaactacttcccgcctttcagtatgccagtgatgaatccaggaacaccagcatctgcagtggagcaagggagccatgctgctgcgccacagcctcatgggcacatggaccagcagtcgctgatctcatgtaacatgtcacacccgagtggcgtttggaggtttcttgcatcaagggacagcgagccacaggccagcagcgccaccagccctttcgacaggctccaagtccaaggtgatggaagtgctccgttgtcattctttcccacggcttcagctccgaatgtccagcctccgccctcatctggaggccgggaccgggaccagcagaaccatgtaatcagggttgttccgcgtaacgcacagactgcttcagtcccgaaagcccaacctcagccgtcatccggaggccgggaccaaaagaaccatgtaatcagggttgttccgcataacgcgcagactgcttcggagtcagcagcgtggatcttccggtcaatacaaatggagaggaaccaaaatgattcgtagctggttaccatatactttcgtgtcatccgatggcagcttagtgcagcattgcagtttacagggctacccgagctgcagattatggtggctcctgtattctgaccactgattgcgctttacccgatcgtcatagatattggatgatatgatcttgtgttctatgcagagttgtaagccaaagttgtgcccctgaagactgaagtgacagccctgaagttgggagtccttcctgattgtgctatgactggaattggtatatatataggttacttgaacggtttcactgtgttgagctcaccacacggccgcgcttctgtaacatacaatacaatagactatgagtggtacagtaggaagcagcagtcagaaaatgactgctggtaccatgctacggggtcgctatagattgatgtgtaccggtactctggttctggtagtatatgctgctgtataattcagtgtttaattatctatatattgtacattagctgtcaagcctgtaaggcattgtattgtgggcaatgaatttggttgcaaatgttcgtgtactgggaaccatcttttgattgtttgtgtttttgaacattgctttgcgcctttgcttgtggaccgccgtcgaaggctgagcatatatccattatcaccagaccagttcttg

SEQ ID NO: 28011 - DNA, 1021 bp, Zea Mays
gccacaccagctatataaacacagctgctctcctgctccctttcccttccccccttccgttccgttccgatttgacgagttggtggctgctatagattcactccacccctctccatttctgataagtatccagctagctaccagtgtatgcaccaggcagcagcagcatggcggagtgcaaggacgacgacagcggccggcggtctccgtcgtcgtccatggacagcagcacccaccccccggcgctctccaccgcgtcctcggcctcccgccgcccgccggagaggagggaccagctcagccccgacctgcagctagggctcagcctgtcgccggcgtcctccgccctcctggtagcggagacaaacaacagcatcgtcccttctacgccaaggaaccaagcactcccggattggcccccgatcaaaccgttccttagaagcgccctgactgcctcggcacgccgacggcgaacgctgttcgtcaaggtgtacatggaaggcgtcccgatcggccggaagctggacatgctcttgctggacgggtacagcagcctcctagcgaaactttgccacatgttcaaggcatctatcacttcgggttcctcacgagaaggccgcgcatgttctcacctatgaagaccatgatggagactggatgatggttggggatgtaccgtgggagctctttctcggaagcgtaaagaagctgaggattgcgagaaccgacaggtgctagatagcaaactttttcatgcggtggatcgactctgtttcttcttctttttttaatatatattaggttcattaggaaagattttgctgaacagagtggagtcgtgatgctgaggctatactaaccgtgtacagtgtactgaagaaacgccagccttgctaccatccctgcaaaattaaattttggtattttatgtttcctttcctgtttctttgactgccttgtaaataccatggttatttgttaaagaacaagcaatttgcatggaaaatattatagttccaag

SEQ ID NO: 28012 - DNA, 258 bp, Zea Mays
cactgaactagtgacggagagggaaagcggcgaatccgcatctagtcgacccgcgccgccgcgggtgaacttcaccgtgcttacgaccggtgccgagcagtggcgcactagggcttcacgggtcttgttgggtggtgatcgctgccgcgccgctcggaattgctcgtctgcgccccgagaatttctcaccgtcgcgatcgttccgccgcggaccgcatcctctctatggcttgagcagtacaccgcgaacgcgccggt

SEQ ID NO: 28013 - DNA, 913 bp, Zea Mays
agacgggaggagaccagaccagcagcagcccatccgaaccccgcctcctcctcctcctcccgggttcgcgtgaggctgtgtgctgctgggaggcggcgccggcgccggcgccatggaggcggagaagaagccgccggcggtgtccgacgtgggcgcgtgggcgatgaacgtcgtcagctccgtcagcctcatcatggccaacaagcagctcatgtcctcctccggctacgccttcgccttcgccaccacgctcaccgggttccacttcaccgtcacggcgctcgtcgggtggatctccaacgccaccggctactccgtctccaagcacgtcccgctctgggagctcgtctggttctcgctcgtcgccaacacctccatcaccgggatgaacctcagcctcatgctcaactccgtcggattctaccagatctccaaactgagcatgattccggtggtctgcctcatggaatgggtgctcaacagcaagcactacaccactaaggtcatatccgcagtcatcgtcgtggccgccggtgtcgggatttgtactgtcacggatgtcgaggtcaatgccaaggggttcatctgcgcttgcgtggcagtgttctgcacgtcgcttcaacagatcgcagcaaggcactgttattggaagcccgaactttgcaactcggctctgaactacagtaatacagatcaatggtaaaaagacaattggctcctttcagaagaagtacaacattggatcatttgagctgctgagcaaaactgcgccaattcaggcactttcactcattatactgggcccctttgtggactactatctaaatgggcggtcattgttgaactaccctttttcaggaggggcaacttgaaaaacccagccagtggcccacctgtacctgtagtaaattcc

SEQ ID NO: 28014 - DNA, 161 bp, Zea Mays
tgtagtggtataggagggtatgcgcgagagagaggttgcgagttcgaatctcaccatttacaaaacatataagtttgattcaaaataatagtgaaaaatgatagggcaacaggtaaggtaatagggtaggattggagagttgttcgtagaatttaaaaaat

SEQ ID NO: 28015 - DNA, 1538 bp, Zea Mays
  misc_feature (1537)..(1538): n is a, c, g, or t
tgcctctgcctgctttcgtttctgtttgtttgtgtgtcggagaacctcccggctccccgcagtccccctggcctcgcagatccgcggcctgcttcgttgctgccttgccagcaagcagccgcgctcatcctcgcggacgccagcggcggggcagccccctctcctgtgatccactccggcgcccgtggccgcggttgctcccgcttgacggcaaaaggaccctttcaatcaaagagaatttggtcgctgaggctggaaaaaatctggatgtgtttaacttttagggcttactatttttgagaggtggtctgacatagactatccacaattcagcgccaggtctcagggagcgacctaccccaaggtggggagttcgttccttttccagtaacgaggagggcaaactcatattccatcatgatggaagaggacatggaaaatggaaggtcgtatcaagaaagaccaaggactttttcaacagtacgaagcaagtcatctatcccgctgtggtgtgctatatgtgggagccagtacatcaccaattgtggtctttgtgttctgtatatgtactctcagtctattcttctctctctaccttacaaagtgggttcttgctaaggacgaaggaccaccagaaatgtctgagatatctgatgccataagagatggtgctgaagggttttttaagacacaatatggaactatttctaaaatggcatttattctggcctttgtcatccttggcatttatctctttcgcactactaccccacagcaggaggcgtctggcttgggaagggcaacactagcctatattacagttgcttcttttcttcttggagcattatgttctggaatagctggctttgttggaatgtgggtgtctgtgcgtgcaaatgtacgagtttcaagtgctgctcggcgctctgcaagggaagcattgcagattgctgtccgtgctggtggtttctcagccatcgtagttgtttgcatggctgtatttggcgtggcaatattgtactcaacattttatgtttggcttggagtagattcacctgggtcaatgaaggttactgacttgcctcttctccttgtgggatatggttttggtgcctcttttgttgccctttttgctcagttgggtggtggaatatacaccaaagctgctgatgttggagctgatctggtcggaaaagttgagcagggaatacccgaagatgatcctcgtaacccagctgtcattgctgacttggttggtgacaatgttggagattgtgctgcccgaggcgctgatctttttgagagcatagcagcagaaattatcagtgcaatgatacttggaggaactatggcacaacgctgtaaaattgaagatccctctggctttattttgtttcctcttgtcgtccattcatttgatttggtggtgtcatcagttggaattctctcaatcagaggaacacgtgactctggactcatttctcctatcgaagatcccatggcaattatgcaaaaaggctactctgttactattatnn

SEQ ID NO: 28016 - DNA, 2997 bp, Zea Mays
aaaaaaaactcggccgagaggaacttgactgggaatccatcgctgctggtttattgcatgacactgttgaagatacgaatgtggttacttttgaaagaatagaaaatgagtttgggccaactgtgcgacgtattgttgaaggggagacaaaggtgtctaagttggggaaacttcagtgtaaaagtgagggtagcacaaaacaagatattaaagcagaagacctaaggcagatgtttcttgccatgacagaagaggttcgtgtgattattgtcaaactggcagacaggttgcataacatgcgcactctcacacatatgcctcagcacaagcagtatgccatcgccgtggagacactgcaggtctttgcccctttagcaaaactccttgggatgtaccggataaagtctgagctggaatatctatccttcatgtacgttaaccccactggttttgctgaactaaggaaaagagttgaagacttgtacaagtcccatgaacaagaattggaagaggcaaatagaattttaaggcaaaagattgctgaggatgagtttctcgatcttgttagtgttgaaaccgaagtgcgttcagtttacaaagagctctacagcatttacaaaactacactcaaatccaagagttcaataaatgaggtgaatcaggttgctcagctgagaatcatcataaaaccaaaatcttgcaatggtgttggcccattgtgcactgcacaacagatctgctatcatgttcttggccttgttcatggcatatggacacccattcctcaagctgtggaagattacattgcaactccaaaacctaatgggtaccaaagtctacacacaacagtgataccatttcttaacgagagtatgttccatttggaagttcagataagaacagaagatatggatttaatagcagaaagaggcattgctgcacattacagtggaagaagggtggcttctggacctgttggccttggaatatcaagtggaagaaatgccaaggggaaagtaatctgcttgaacaacacagactttgctctgaggattggttggctcaatgcaatccgcgagtggcaagaagagtttgttggtaatatgagttctagggaatttgttgatactatcacccgagatcttctaggaagccgtgtctttgtgtttactcctaaaggcgagattaaaaacctgcctaagggagccacggtggttgattatgcttatctgattcatactgaaatcggcaacaaaatgattgcagcaaaggtgaatggcaatctggtttcaccaattcatgtacttgcaaatgctgaagtggtggagattataacttatgataaattatctagtaagtatgcattccagcgtcaccagcagtggctacagcacgcaaaaactcgcagtgctagacacaaaattatgagattcttaagggagcaagctgctctttctgctgctgaaattactgctgacgcagttaatagttttgttgctgatcttgaagatgaaagtgatagtgagctttcacttccaagcaccaagaaagaagatagtaaattcaactgggagaagatattaagttctgataaattattctttgtcaacaaaagtagtgatggctttttacctgttaataatgtctatccaaaggtcaatgggaagcaaaacaaaactgttaaggatttgggcatcaaaatcaatggtcattctacaattcgaggtgatagcttcagtgagttaatgcaccctagcaattccacctgcaaggaagttttccctggtttggatgactggaaatctggtaaaatttctggttggcataatacggaaggcaactctgtccaatggctttgcatagcctgtgttgatcgaaaagggatgatggcggaggttacatctgctcttacagcttgtggaattactgtatgttcctgtgtggcagaagtcagtaaaaggaggggaatgggtgctatgctgttccattttgagggaagctatgagaacgtggtcagtgcttgtttgagtgttgacatgatttttggtgttcttggttggtctgtggggtgtagctggtgtccattgggtgctcttgagtgctaatgggtatcaagagacgtatactgcagtagttcaccactaatactatcttcctccaagatgatgataatgttggaagcaccaagacatcggtggctcaaaattttgttggtcagatccttaaaatctgggaacatagagcttgtccatattcctcattttggaaacgttcgtccgttccggagacgtgggaacaatctcgtcccccatctcatccttgtagtgttaaaatcctttttaagcacgttcccgttcctcaacctcatcgatccagaaacttggttgctaaggtcagatcatgattggacaggtgagcgagtggaatcctttacttctctgtcaaatcagaaagtgagggtgagcaaagtagaactagatatatatggttcattctgaaagtgagtgtacatagcagagtgagtagggttgggctatggctaacaaatcgtacatatgatcatgtaaaacactgttttgcattgcgaattacactgtttacattgtgtagtttgaaataagagatagagatgaataagctgccgactatggagagtcagtgcatgctgggattgattggattatacagaaggccttgtaaaagattgttaagggcggttcttctcactttgtggttcgcatatactagtttgcttaaatgtgcagctagaattttgacctggacgctaattccaaattttgtctgtgtttagtttcctacctctgcatgtaaatgttattgtatagcttcagttttgcgagtcaaaatttgagcatacttaactggcagatgcacgcttctggattacttgccatttcctgcagtatgaatggtaacttaattagaggtttggttctgatgatggtgaccctttcatgaacatctccaaataagatg

SEQ ID NO: 28017 - DNA, 2744 bp, Zea Mays
atagacactggatgtctggatggcatagcgctaaatttgagaccggcaaaatagcaatttttccccctgtgagcccgcgacgcagcgcgaggtgcggccccgtcccctcgccaccggaggagcaggacgacgaggtggcgccggcgcgaggtagtcgcgcgcctggaagagcggcggcatcagagtcgcaggcggaggcgaggaagtgaggggagagccctatagccaccgccgcggggcgtcctgctcgctgcacgcactcccaccattttgtcccaactcgaagctcagactcgtgctgtcgtgcacttcccctcccctagcatcccaagctcctcactgagaaaacaggagatgggaagagacggggaacagactaggcgccggagccgcaagagatcccgcgacgcctccccctcctcgtcggattccgattccttcgactccccatcctctccgagcagtagccctgagcgacggagccgcagcagtaagcggaatagatcatcctcatcgcaccgccacagccgcaagaaaagcgaccggtcgcggagatcccgcgacgaggaccgccggcggcggagaagacggggccaggagagaaagcggcacggtggggatggtggcaggtcctccgactcccaatcgtcggaggaggatagggcggaggaggcgcgggagatcgtccgagatatactcatcgaattgccggccatagccgaagagcttcgccagcttctccaaattatagacagtggtgaaagcattgatatttctggaatttctgacaaactattggtgaagcgcttgaagaaacttttccgatctctgagattgaaagaaagtgcaagtggggcttacttgttgccttcaaaaaatgttcctacgcttgatattgttggatcattactattagcaagttccaaacttgcagacaacaaaagtggaaagccagtgtcaccaaatagagaagcactacaacaggctaactttgatgtgcaaaataaagataaagattatattgtttccgaagagccaaaaattgttgatgtggaagaggaacctcctaaaagaaggataattggtcctgcaatgccatctcgtgaattattggctgcagcagctgaaatgacagaggctcttaggtgccgggatgctgaactggaagccaatgatgatttgctcataggccctccaccgcctgccgtagttgctgaagctgcatctgcaaatgaagctgagcgatttgaagaggttactagaatattggcagctgacacaaattcaccttatgaggttttgggggtaaattggaagatgtcaactgataacatgaagaaaaggtattggaagttgtctcttttagtgcacccggacaaatgtccacatccttccgcacaagaggcattcgtgaaattaaataatgccttcaaagacttacaagaccctgataaggtgcgtgagttttccacacactgaaactaggttcatatttctatcaaagttcatttgccaaattttgccaagtacaggactactattacatttgtcttatttggagaaaatagtacacttaaactgtggccattaaagaagatactattgaagagataaaaacatttcatgaaggttccagcatagtttgtctttgactagcaaaattcaatgttctccccctctatttatcatatggcgtgaccgtcgtggcgagcggaggggcgagtgcaaggtcagcagggactgggaactcgaggggagcaggtagcgaggaagaacggcggtgggctcttcgctggtgacaactgctgaatctcctaatggcaccgtcgaaggggaaacctcaccctgacacagggagagaggtgcaatagacgagaagataaaaaagaaagaggagatggaacaatttgaggttgagcttaaagcaatgcgtgaggctgcggaatggagacgaatacaaggtgtatcactcgcaggtgatgatgaacttttagcaggtccaaaagagtcacagagacctacgagagatgaatggatgaccacattgccacctgagagaaaagcaggagtgccaatgcattcaactacatcatttagtatgaatggtaaagaaggacgtggagacacaagtgtctggactgatacccctcttgatagagcacaaaaagcacaacaaagctatctagaagcctacaataagacaaaggcaattgcagaaggcgacgacgtgaagagcaagaacccggatgcttcaatcgtagataaatacaacacctccaaacgatcagtgtcccttgtgcagaagcaccgagagagtaaaaaggagaaaaagaagcaaaagcagcaggagaaagaggaatgggagggaagccacccatggaagccatgggaccgggagaaggatctgtctgctgggcgccagaatgtggccttagacgcagagaacatgtcgcaaggattatcttcccgtttcgcatctggtgctgttcagcggaacttcctgtgagctgtgtggaaagatactcctggagcttggtctaatcgatgattaatgtccagttattacatcctggtcggcagatggcaaagataatgctgacatataaaaacgagttatgttaccaaggaccatcgtcctgtaatatcgatcgtgcttgttgtgcttattttctcagtgtattatcgggtgagctaaaatggtgccatagtttgttcgtacgatacaattactttttttttcaaac

SEQ ID NO: 28018 - DNA, 2105 bp, Zea Mays
gcaccgcacaggccctctctgccccctcgccaatcgccatggccatgaccgtggcggtcacctggctcccgtcgaccgcctcccgcgggagaaccttagccgctccgctccctccgttcgcgggccctatctccatccacatgccactgcgggcgccgcctcctattcccttccccacaagccgcgcctcgccgtcgcctccgcacagttcgatttctccagagctgttcaaacggtatggcgggtcggtaacgatgccgtggaggccggaagtaatcttgtcccaggttcagttccacgaccaattgctaggataggtgttgccgttgctgctgtgtcggttgcccttttccttcttaaatccattgtgtccactgcattgtttgttctggcaatgatgggcctcatatatctcggcttcctggctatgaacccaaaggaggcctccgactctaggttggatgaagcaacgggcgacccatcggaagaccaaattgaagaggcccgaaggataatggagaaatacaagtaatgaacctgcacaaaggtgttgtactctcagaggcccacccaggcacccacctaccctgtgctcatttgcggagccttccaagctagccacttcactggtcactccattagcagatgcgctctgcatcttctcccctctggaacacactcccacacagaactagagctccaaggccatggagaaatggagaagacgcaggcacttgctgcttgctgttgcagccgtggccctggtggcagcaataacgctgccgtccgcggaggcgaagctgtccccggactactaccggtcgacgtgcccggacgtggaggcaatcgtgcaggcagtggtggccaagaaggtgaatgagaccttcgtcacagtcccggccacgctcaggctcttcttccacgactgcttcgtcgagggctgtgatgcgtcggtcatcatcgcgtcccgcgacaacgacgccgagaaggacgcgcccgacaacgtgtccctcgctggcgacggcttcgacaccgtggtgcgcgccaaggccgaggtcgagaagaagtgccccggcgtggtctcctgcgccgatatcctcgccatcgccgccagggacgtcgtcaccatgtcgtccggcccccactggaccgtccagcttggccggcttgacgggctcgtctccaaggccggcaacgtcgcgggcaagttgccgggacccaacatgcgcgtcaaggacctcgccgccctgttcgccaagcacaacctcaccacgctcgacatggtcgcgctctcgggagcgcacaccgtcgggttcgcgcactgcacccgcttcgcggaccgcctctaccaccacggcgtcggcgacagcgatggcgcgtcggtggacccgtcgtacaaccctgcgtacgcgcggcagctaatggacgcctgcccgcctggcgtcggcgcagacatcgccgtcaatatggacccaatcacaccgaccgccttcgataacgcctactacgccaacctcgccggcggcctgggattgttcacctcggaccaggcgctgtacagcgacggcgcgtcgcaaccggcggtgagggacttcgctaagaaccagacccgcttcttcgaggcgttcaaggacgccatggtcaagctgggcagtgttggggtgaagaccggccggcacggggagatcaggagtgactgcactgcattcaactagtagatcgaccacccattcttttgaagaaaaaaaaaacagccgcgtacctgagcgaactcaaccacgtccacgtgacagcacagaactcaatccttagagctaggatgaaaacggacgaaatcggtctaaaaaaccgctctcccgtttttatttttatattttatttcaggatagaaacgaactgttagaaacgagatcgaaaacggaactagcaggatgacggaaacgaacctaagcgaacggaacaaattgataacagatcagaatcgaacataaaaacggaaacattgccgcatagagtataaaaataaagtagcattgtaattaattgaaatatctcatctagacatgtggaaacaatatattataatatacatacgactatcaaag

SEQ ID NO: 28019 - DNA, 2733 bp, Zea Mays
ctttcttctccctcgttcccgagtccgaatctgggtccagcggagacaaagaggagctggccgcgtcgtatcgactcctgccgccgaaaggccgagcccgagcccgtgtcccggtgcccgttcccgcaaccctaatcccctaccaccgtcggctctcgccggcgaagaagagggagccgcgcggcgtcgccagggagcacgcgccccctcccttcccggctccctccgcgccgtggggaggcgcgtccacccggatccgccctcaccgcgaggcagaggggaggagagggagccaggtccggcgcacccgctgtcgtccgcgccgaagagcgttaagagtctccccacaggcttggctgagggaaacttgtgctctgcgcatcttggacactacttcaccatttaccaagtcttgagttattgctccggtgccagacaaaaaaccaaactctctggccgaacacagtgatggcgcaagcctgtaagaagaggagaggagtttatataagcagtgaatcaggagactctgatacagattctgatgttgagggaagcaaacactctcaaaagtctggggtgacatcaatttctacatgcgagcaccagtcatcttataacctcaaggctgcaagtatgaaaagtagcaggatgataaggctgtgtggaaatatcgtaaggaagctcatcgatcacaaatgtggctggcttttcaaagaacctgttgatccagatctatatgggattccagactactttgatgttatccgcagtccaatggatttgggcactattaagaataaactcacaaaaaagaaatataatgggaatcagtagaaaggaaatttagaggccgaaaccttggtcaagaccagcagacaatgaaggccataaaagttcgagctatgatggattcaaagtctacagttgctagagggccggttgcatgctcaaaccctaaaactttggttgctagaggtccagtagcttgctcaaattcgattgcaaagaagacactgacagatgcattatcctccaaagtaaaaatcaaattttccgtgcgcagctctgcgcatacctcttccaaagatatactcgttcaagcagctggtagcaaagaggggtccttaaatcactctgtccctactggcaacaaagaggcatcttcaaattgtactattcctatcgctaaggaggctaaaatatcaagggcacgagaaattgagcgctgctctggttcaattggaaaacaatcatggtcttgcaatgacacttctacttcacctctcgcttcctctgtgcaaggtgaggaaagttaccttcatgatgaacctttgtcaccaagcagggctcttcgtgcagcaatgctcaggagtcgttttgctgggactatagtgaaggctcaacagaaggcacttctagatcatgggaagaatatagaccctgtgaaattgcaattggaaaaggagaggctggaaaagaggcagcaagaagagaaagcaaggatcgaggcccaggtgaaggctgctgaagcagctgcacaacaaaagtttgaggaagaaatgaggatgaagagaaagcaggaaagggaggcagcacgcctggcactacgcatgatgaagaagactgttgatattgacaacagtgacttcctaaaggagctggagaacttcagcaaaacatggcaggcaaatccacctggcaaattaatcgtggattttatcagtggggacttgccaccggggttagggagtccgctggagaggctcggcctcttcatgaaggaagatttcgaggatgaggtagaacaggaaatggaggacagagtgtcaccctcaatggatgttgacatcaggaaagatttccaggaagacttaggacatgaaatgcaggacagtgcatcacccgtgactgtcattggcacaaagaatgacgtacagggagtggcaggacatgaaatggaggacagcggatcaccagccacagtcattgacacgaagaaagaagagacagaacatgagatggtggacagcgtatcacctttgatggatgttgacacggaggaaggggagatcagctgctgacggtagctacacctctcttcacccgcataatttattgaggcagacatccttgcttggttgttagattaggcaatttcataagcagagtgatgcagaaacattagttttatctgctttcatcgtagaaccatgtggtgtggagaacatgtctcagacgaaatgacgagtggttttggatttgctgcggattttaattttcgtggtcttgtcagtctggcaagagtatgatgactctgtatgttgaatttgacctcccccgctggatgacatgtataaaaggatgagaaaaaaaggatagtttggagctagtgtatgttgttggagtttatggtggagccagatttggtgagcgtgtcgtggacgtaaatgtaggtatagctatatacttgaaatattgataagagtgtttggttcaaaggatcaattcattccagttaaacatcatgagcttgttaatgggtgtttggttcgagagttcgttaatgggtgtttggtttgaagaataagctagtctactatttttttatttggttgttgaatgtaattttttgacctgtcatctcatttcttacaagtgaatgattatttctaagtctatgagaaataagcttatggttagtattagtgttgcatctcaggaagtatataccca

SEQ ID NO: 28020 - DNA, 2207 bp, Zea Mays
cttcgccctcctgccctcccggcgaggtcgcctctgcttccgactccgctcgactgcgcccgaccccagtctcgcctgcgtccaccggcatggcctcacccacggtcgcctccccgacccgggcgagccccgccgacatccccaccgccgcaccctcgtcggccccccggccgcggcgcctcgcgtcggcgccgcccgcagtctacgcgtctgcgtcctcctccccggcctccgcctactccggggaccagctctccgcccccgacgcctcgagcccgctgctcgcgagcaggagcgaggagtacaggcttctgttccggctgccgcccgacgaggttctcgtgcaagattttaactgcgctctccaagaaaatatccttcttcaggggcatatgtatttatttcttcaccatatatgcttctactctaacatatttggatatgagactaagaaaacaatacctttgcaagaggtaacagatgttcgtaaagcaaagacggctgccattttttctaatgccattgaaattgttgctggtagtagaaggcacttctttggatctttcttgtcacgtgatgaagcctatcaaattatagtagatggctgggaacaacatgttagtaatgcaagattactccttgaacgtcaggagacaaagtcagctagtagcagtgaagaaaatggttatgttttattggaaggagcaaaggaacctaaacaagatgaagattcatcaccgctggacaggtctgtcaatagtacggctgtctccagtggtagtgctgatggtggtgattcgaacatcaacatttccagaaggttttcaaatgttgaggagaatggactcgaagacaacatcatcacactaaacccattcaatttggagccagttgatgatactcctagtgtacctgaatcttacacttcggtcacggagtcaaagtttcaggtgcctgtggaggttctttttaatttgttattgtctgatggtgcttttggctttttggatgatttccacaaaaattgtggtgacaaagaatttagttgctccaaatggcgtacagatgaacaagggggacttgtaagggatgtctcatttttgcacccaataaaaatttatcttggtgcaaaatttgggacttgtcaagaggtccagaaacttcgtctttacaaaaacagggcatctgggatgttgaacaagatagcctagatgagaactgttgttacctcaggatatatattaatgtagccttctcaaagaaaacaatatttagagggaaaatagagcagtcaacaaaagatgaatgccgagaagttttcagtctctggattaagctcggccatgatcttttgaagcaggagtatgatcgatcaaaaggcacttccagcacaactgattctggtgctcaatcaggggctataacgaacgaggaaaataccggggaagtagcagtacccatggtgagtacctcacaggatgtatctggtgcgaggagcctcattcctccttttcaagatccccagcagagaacaggaagagattcttccatcgggtccacttcacaagaactgtggggttcactaacgtcacacatgagatcaagccaacttggtccagtactagcagtggcgctggtggctatcattgtcctattgcaggtaaccatcatagttctgctaactaggtccccccaggtccagatggctcctcacgggatctcgacgggcagtttcgggtacagcaaagaaagcatggagtgggcgcagaagcgcctcagcctactcagggaggagatgcaggtggctgaggcgcacatggagaggatgaggcacgagtttgcctggctcagatcttacctggagggactggagaggctgaggcgccgcacatgaccgcagcgcgtgtacacgacaggggcacgattccgcgatgcggattcgttggtatacagtacgaactcggagacgttgttcaggtttcttcttcttctgtgttgctacagaccgtacagatgcaaacggagagctggtgccgtggtggtggtgttgcagaggtattgccgtaaggcagaactgccagatcccggtacagcattcaatgtaaatagctgggggacgtgtcattgccatgacgatacagcggcgtgatgttagaaacctcgcactacttttttttttcagaaagtaaaaaactttttgtggttta

SEQ ID NO: 28021 - DNA, 2833 bp, Zea Mays
gggttcggtgggaacttgttggtctgaactataaaaatggcagaatggaatccagagaaggatctgcttgctatggttactgatgactccaaggttctcctccatcgcttcaattggcaaaggctttggacaatctctccagggaagtgcatcacatcaatttgttggagccctgatggtaaaataatagcacttggcacagaagatggtttgattcttttgcatgatgtggagaatgggaagatgctaagaactacaaaatcccacgatgttgccattgtatctttgaattgggcagaagacgatccactgtcaaagtctgacaaggatgagtttttatcctatgaagaccgcaccacacgtttctttcctcctcctcctgtgatgcctaggataggtggactacgttctggagatactggtcttgcggatgagaacgaagaagctattccagaattttctagtgcttcctgtcagcgttttaacattctgtgcagtggtggcaaagatggttgtgtttgcttcagcgtttttggaatatttcctgttggaaagataaacataactaaaatcccaatcaatgttggatcctctagaaagagttaccaactccaggatgcttcagtcagcaaggtctctttatcaagaaacctccagaaatttgttattctgtgctttggaaagttggttgataccgacaacctctctgacagctgcgaaaattctggattacattgtctctacctagatacttctatcttcttcaaccggtgtcccaacaagcatcaagtattcaagatatggttgaagttgtccgtgcttctgtatctttaatatccaaacaatggtcaaacgccatgagtttattccatgagaaatttagtgccttgcccaatctgatatctacacatggagtggaatctagttctgaggatgagtttcttagccttttgtttgggacacgaacaagtccagcccttcaccattttttagctagttcacttggtgaagcgggtctcaagaggatagccaaggctgttgacagtgctggaagagatattcgtggcattatcactgagcatcttcagcctgcagtggagattatttcattcagactcgcagaattaagaggcctttcaagatggcgttcacgatttcaaactatcgggttagatggaaaccttattgatggtgtaactgagagtatagggatgctagttgttcaagtggagcgcttttcaagggtggcagccactgttgtttatctgtttcaaaatttctttgcctgggttttaaagtctgttagaatattattaaatgaacctaccgaccaagttccagcagcaaacaggtctcctttgtagtgaacttgtggtgatttttcttaagtttcttcttgataaggatccaatcaaacaactacttgaagcagatgagagaattgagtgtgatatggatactgcaagacatgtagaacagctagtagtttttggaggatttacagacacccaatttttggaaaagagtttggtaaatcaattcaatgaattggaagatagcttgaaggaggctttcttgatgccatttactgctatctcttcgcagatacaatgtcaaggattgcttcctttatatcctgttacatcatcagctaccttgtcatcatcctgctcgccaacatcaatatcattttataaggatgaagattcatcgcatgaggaatcctcctatagcttgactgactatgtatgcttgaagatacctgatggatcattaaataaagtaaattgcatcggtgtgataaagggctctggtaactgttgtactaccctcagcatgatgtcactttcaggttttctgttgcatatacctgacggatatgagtgtgttgacctgtcactttataaggacaaccaggtagttttactactgagtgaaacgtcttgttctgatagccctggaaaatcttggatggtgatgctgcaaatagagaacttttcctttatgccactctcaggaacattccctgcaaatatttacagtttgcaaaaactggtggcactcgatctgcaattggacacagattatgggaaagttcgtagcatacctcacaccgtatctactccatttgcagttagtgcatcgagaggagtagcctgtgtcttttcatcccggaggcatgccttggtttatatccttgatgaggatgaggaagcggagggggatgaaacttccgatatggagtgattattatccgattccttcaccttcggctcagccatttcagcttcaggcttcagcattgtcttatgtcttgttgcaatggaggcagaggcccggagatatcaatatgtacggaaacgtcgtctcattttcacggcaatgcatgcccgggttcagaagctacgtcgcgtggtaacagcctaacaggtcaccacgcacgcgcagccgcttttagagctcatgaaattgtcagtcgtcaccctgatgtgtgtaggccctgcaggttggacttcatcgtggttatttggaaagcgagcaaaattgtacacccatttctgatcgtgttgtgttatacgagtgcttgctagttgtgtaaaaaatctagaggtaacgtcaacgtgcaaaaaaaaagggtctgtcgcaaatcttgacggtcactagagctatcgcatttctaatcgtgtttgtgttatgtggattcattattttattgttcgagctgctaatgtacttggtaaaatacattgttgactgaactcgtgttgcgccttcaactcatgtttcctttcatcaaaccataggcatatctaagaacaagaaaacatgcctc

SEQ ID NO: 28022 - DNA, 3732 bp, Zea Mays
ctcgggacttctttcgctgctctctctctctccgagcacagctgggggtggtgttcacggtaggcagcagcgcactgcgcacgggcgcagtggtgaggcgcctaagggagagtggcagtagtgacgcctggcgccggtgcaggagtgcaagggagacggtggcggcagcggctcgtgtcgacggccggagcccggaggcagcggggcggcggaggcgtcagtgtacgcgggcggggcggaggaggcactgaagcagctcgcggcggcgggcttgagccagcgttgcggcactctcgggccggtggcttcgggagttgggaggcactggcctgtgcaagaagggcttccgagaagaaacggtagaagagaagttggggatacgaatgttttttatcgagtccttgtttatccgaatccacagggattcaaagttcaaacggggtccaaaccttcccgacttccagtacagtcttcctcagacgaggccgcaagacaggaggagacaacgccgaggcagccagctagggcgcggtcaaccgcagtaagccaataagcaatgcagtagtgggcgcagctccggaggagtggaatgacggcgccaccgaatgctagcatgggaccgctcagtttgggtggctgcggggctctcctctccactcctcagcctaattcgtggcattgccgcgggttctcgattcctgagaggagcgtctttatgttgccactgcgccggggtttgtcaaggaagaggggctgggttcttgattcaagaagtaacggtgctgtggctcgtgatgaggtcggtgccgggtcgtcagagcttcggcacatcgagaaggagctgacgttcagcccgactttcactgactatgttaaaatcatggagtcggtgaagttggacaggagcaagaatttacatggcgccgatggccagagtttgaggagaaggttcgcgggtgatggccgacaaaggaataggaggtctggtgatgcaaggaataaatcatttgaaaggaatcaggggcctcagagggacttggcgaaggatgagaatcagaaggatgttacaggctttgtggataaaagagcaactggtcatgtaaaaagtagcaatcgcaggcaaggggaggttgaagactatgcacagagaagaataattcgtggtggtacaagaggaaatggagacaatgggcagttctcatcacctgtgaaggctaaagatactaggggtagtatgtctgttcataggttggtgacgaacaaacagactcagtcagttgcagggaacgatttacaagggcgagcaacttatactccatctcggacttctgcccttccaaatagcagtattccatcaaagaatgctaaggttcaaatgagaaaatacgactatactatgacaagtagcagaatagacttaaaatatcctagagagacatttcccaatactgaggtcaacgctgacagtaatgttcaaagaaatcagcaaagagtggagaccttagggagaaactttgtagtacgtaggtttggggagattggcaccgactctaagaagtctaccgtaagcaaaatttatgggagtacacaggcaatgcctgagcatgatagccattcaagtgataatttggagagtgatgaacgtaggacagttcaattgcatagaggagcaaatgttaaaatggggaaatttgttagtagggatgctgaaactacagattttgatgatagagctgctttcaaaacttttgaggtatttactgatgtcaggaataggccacggatccttcgaatggaaatggaagagagaatccagaagttagctagtcggctcaatgctacagatgtaaatactccagagtggaaattctccaaaatgattcatgatgcaaaaattaaattctctgatcattctatcctaaggattgttcaaatgttgggtcgatatggaaattggaaatgtgttttgcaagtggttgaatggctccagtcacatgaaaggttcaaatcctacaagagcaggtatatttacacaacagttctcgatgttctagggaaggcaaagagaccattcgaggcgttgaatgtattttataccatgcagaaccaattgtcatcttatcctgacatggcagcttatcattgtattgctgttactcttgggcaagctggtcttataaaagaattatttgatgtgattgattgcatgtgttctcctcctaggaagaagttcaaattgagccctcttcagaattgggatcctcgcttggaaccagaccttattgtatacaatgcagttttgaatgcttgtgtgcaacaaaagcaatgggaaggggcattttgggtactgcaacagttgaaagagaagaacatttgtccaacaaattcaacatatggtcttgttatggaggtaatgcttgtctgtggaaagtacaatttggtttatgagttcttcaataaggtggataaatcatcaatacctggtgctctgaactataaagttcttgtaaatgcactttggagagaaggaaagattgatgaagcagtgatggctgtgaaggatatggaaagtcgtggaattgttggttctgctagtctgtattatgacctagctcgatgcctttgcagtggtggacggtgcaaagaagcacttctccaggttgaaaagatatgcaaggttgccaacaaaccgctggttgttacctacacaggactcattcagacttgcatagacaatggtggcatggaagatgctaaatacatattcaaccacatgtgcaactactgttcacctaattctgttacttgcaacatcatgatgaagtcatatattaaacatggaatgcttgaagacgcgaaagacctgctccatgatattctgaattgcaggataaggagtaaagcggattctaatcaagtggcaaccgctgacaagtttactttcaatactttcatggaggcctgtgctgcagcaaaaaggtggaatgacttcgagtatgcgtttcgtgagatgttattgaatgggtaccatttcgatgagcgaagacaccttcggatggtacttgacgcttttaggcatgggaaggaacagctgttggatgatctatggcactacctgtgccgtcacagccgtgtcccgccctcccctgtcataatggaaagattctgcctaaaactgatgcagggagatacactggcggcgatctcctgcgtcagcagcttccatgagggcaagatatgcaacgtctcctccatgtcatggctcaatctgctgagccgcaatgcagataggctgaaggaggagcatgttaccaagttagctcatgaactcaacagcctcattagcttgaggagttcctctgatagcattagtcttagcctgtaccaaaaaattattagtagctgtacggcattcctctctggagccacagttgtagaaaaggcaccttctggccaataggtggtgttacagaaattataataaccacagttagtaaattctagtactccaaatcataattaccacgactgatggagtgtattgcattcaacgtttggttatcggtacaaagttagaaatggaaaattttcacgtaaggaattagttctttttttagtataatacaaaggctgatttgggagcataagcgataaagcttgctttgtttgattaattttatactggttactttcaaattcacaagtcataataccatgagcatcatttattga

SEQ ID NO: 28023 - DNA, 2839 bp, Zea Mays
gccagcagcggcggtgctcgaccttcaggcatcagagctgcgggacatcacacgcaccgctacgatctcctcctgcgagcgagatctcaccaccgcagcggcgccgcggccatggcgggaaggtatcaccaggatcagggcggggacgggggcgcgtccatggaggtagtcagcacgccgaaccaggagctggcccttaccaactgcgcatacgtctctcccgctgacctccgccgcttccccaacgggctcgccctcgtcgctgacgcctgggtcttcaccctacgtgaccacaatgctgttgcaagtggacgcattgccttgaatgctattcagcgtcggcaggcaaaggtttcagctggggattctgttactgttagcagttttgtcccccctgatgatttcaagttggctttgctcactttagatctagattatgccaaggcaagagccaaccgaaatgacgagctggatgctgttgtgcttgcccaacaactccgtaagaggtttctgaatcaggtcatgacctcagggcaaagggtgccatttgaattttatggaacaaactatgtattcaccgtcaatcaagctttgctagagggtcaagagagttctacaccattggatagaggattcttgtccagtgatacatacatcatatttgaggctgctcctaattcaggaattaaggtgatcaaccaaaaggaagctgctagcagcaagcttttcaaacataaagagtttaacctggaaaaattgggtataggtggattaagcgctgaattcactgacatatttcgtagggcattcgcttcaagagtctttccgcctcatgttgtcagtaagttgggcatcaaacatgttaagggtatattgctatatggacctcctggtactggcaagactctaatggccagacaaattggaaagttactgaatggaaaagatcccaagattgtgaatggacctgaagttctgagcaagtttgttggagaaactgagaagaatgtgagagatttgtttgctgatgctgaaaatgagcagagaacacgaggtgatcagagtgacctccatgttatcatattcgatgaaattgatgccatctgcaagtctagaggatctacccgtgatggtacaggtgtacatgatagcattgtaaaccagctgcttacaaagatagatggtgttgaggcgttgaataatgtattgcttattggaatgacgaatcgtaaagatttgcttgatgaagctttattgagacctggacgattggaagtacacattgagataaacctgcctgatgaaaatggtcgtttgcaaatccttcaaattcatacaaataagatgaaggagaattctttcctgtctccagatattaatcttcaggagctaggcaccctaaggcaaggatcaagggaaagcttagcaacccaaaaccagattccctcctcacccatgtgaaaagtgccagcaaacagcagctgcacacaaccacacatgattgtgccagttcagcaataacattacttatgcacattagcactcagttttacctttggaaattctttatgtatcaaatgacaactgagtttcttaacaaagctgcgcggacaaagaactacagtggagcagagttggaaggtgttgtcaaaagtgctgtctcatttgctttgaaccggcagataaccatggatgacctcactaaacctttggatgaggaaagcatcaaggttaccatggatgattttgtgaatgcacttcatgaaattacccctgcatttggtgcttccaccgatgatctcgaaagatgcagattgcgtggtattgttgattgtggcaaggcacataagcacatttatcaaagagctatgctcctcgtagagcaagttaaagttagcaaaggtagcccactcgtgacttgcctattggaaggtcctgctggaagtgggaaaacggctatggcagcaagtgttggcattgacagtgattttgcatatgtgaaaattatatcagcagaaacaatgattggtttcagtgaaagcagcaaatgcgcacagatttgcaaggtttttgaggacgcatacaagtctcagttcagcatgataattcttgatgatatcgaaaggttactggagtatgtagccatcggaccacgtttttcaaacttgatctcacaaactcttctggtcctcctcaagagagttcctcctaagggaaaaaacttgcttgtcgttggaacaacaagcgaggttggcttcctagaatctgttggaatgtgtgacgtgttctctgtgacctaccatgttcccaaactgaaaaaggaggatgccaaaaaggtattgcatcatcttgatgtgttcgatgacggagatcttgacgcagcagcagaagcactggacgatatgccaatcaagaagttgtacacacttgttgagatggctgctcaggggccaaccggaggaagtgctgaagcgatttatgccggagagaagatagatatcaaccatttctttagcatcttgagtgatattatccgttactaagcccgcatggagccgaaatgaaccctataagtatccagtaggagtttgtttgcacccgtgcttcatcaaccatttctgtagattggtttgatctttgatgtgttgtttttgtttgatgcacctactagagctgttggattagatcagaggcgaattacacgatatatcatttttgtattgtatgacgatgtttatacagttcttaatgggatccagctttacacctcagaacaccgataattttcacattcctattagacccgcttgttttgttgaaattgaattctattttaata

SEQ ID NO: 28024 - DNA, 954 bp, Zea Mays
cccttggatccttgtttgcttcctgctgcctggccttctctcctccccaaaatcaatccctcgcccacaaaggagagccagccaaaccttccacctcctccatttccagccccgtccccacaccagctcgcgtaacctcctccccatggctggaggcggcggcgcaggcgcgggctcgtcgtccggcggcggcggagggggcggcagggagggcgactgggactgcggcagctgcggcaaccgcaactacgccttccgctcgctttgcaaccgctgcaagcatccgcgcctcctcgtcgaccccaacaccccgcgcgactccaagtggctaccccgcgccggggactggatctgcaccgcagcaactacttgcaaatgcaaactggccctatgggatggctggtagatatgggatgcaatcttctggttggccatttggcaacggcaacccaaatcagtttttaggtgttccaaaggattggcgtaatggagattggttctgcagctgtggatctcataactattcatctcgtactcagtgcaaagagtgtggtgcacctgtaccatcgagcattccctccacaacaatgaaagctacatctgatgcctcttccagtatttatgcaatgctgtacactgtgttaaacatctggcaagtggttcactggtggacgcatctccaggtccgagcgtaaaaatcttaagttttgagcataaaacccctcggttataagcgtaaataccgagccaatatgaggttcatatctatggtgggttgtattcacgatcctatttttatgttaattccgaaaaatatgggagtcacatccatggggtttatatttttatgcagatccaaaaattatggcagatttgtggtggtgtagtattgtatggttaagacttataagacttatgtatcgtgtggttgagagttgaaacttatttgtggat

SEQ ID NO: 28025 - DNA, 13514 bp, Zea Mays
agtactcgcagcgaccccacccgaaacgagccaaaaagaaccacaccgcacaagtgccaagtgccaacaccgccggaaaccacctcgtgctggcccatcccgacatcccgtcccgtgctcccctcccctcctctcgaccacctcctcgtcgtcttcctcgccccctccgccacctccgccccggcctctccgctcccacccccgcggaaaccctaactccctcttggcacaggaggcctatgacggagattcgccgcgcgcaaggagggagtggattcgcgactgcgcagccgctgccgtcgtcctagggcgcgtcgagcactgccaccccattgacgggcccatccccacgacatccgccatgttcgagggccacgtgctgtatctgctacgcaaatatttgggtgaatatgttgaagggctttctgttgaagctctcagaataagtgtatggaaaggtgacgttgttctaaaagacttaaaacttaaggctgaagccctgaattctctcgggtttccagtgacagtgaaagctgggtttgttggcaccataacattaaaggtcccatggaagtgccttggtaaagaaccagttattgtcctcattgatcgtctatttgttcttgctcatcctgctcctgatggacagactctcaaggaagaagatagacaaaaactttttgaagccaagcttcagcagattgaggctgcggaggcagctactcttgaagcaacaaataggaactcaagaggagggcctgcaccaggtggaaattcatggttatacaatttaatatctacaattattggtaatcttaaagtcaccatcagtaatgtacacataagatatgaagattctgtcagcaattctgggcacccatttgcgtctggtttcacgttatcaaaacttgcagccgttacagtggatgaggatggtaatgaaacatttgatgcaggtgtagccctagataagctacgaaagtctgttgaactgcataggctgggcatctaccatgactcagacagtaatccttggaagcttaataaaaattgggaagctctaaatcgtaccgaatggagtgagatatttcaagatggcattgaagatggctctcaaagttccatctgggcagtaaatcggaactacttggtctcgcctataaatggaacccttaaatataaacgacttgggaagaatgaaagaggggatccagataccccattggagaaagcctcacttgtcctcagtgatgtttctttaactgtaactgaggcacagtattatgatggcattaaactgttggaagcattttcgaggtttagaacacgtgttgatgtgtctcatttacggcctgttgtgcctgtaaaggaggatcgtcgtgcttggtggcgttatgctgtgctggctggtctgcgacaaaggaaactatgctattggttttcatgggagagaactagacgcctctgccagcttcgacgccgttatgttcaattgtatgccacccttttgcaacaagcagcaaaagttgacatttctgaaattcgagagatagagaaaattctagacatgaaggtcataatactttggaggttgctgggtcatgctaaggttgaaacagtgaaatcaaaggggacactatatagaaaaggggcctcaaagaaaagatggtggccttttgcatggaacacgactggtttaccttctgaggaagctacacacccagaatcacagttagatgaagaggaacaactgactaaagaagagtggcaggctattaataagctgttgagttaccaaccagatgaagatatgtcttttccccttgagaaggtttccccaaatgtgattcaatttatgatggatgtatccattggccaggctggtgcaaggatcatcaatattgatggaactgaggttttatgtggtagatttcatcagcttcaggttgtcactaagttgtatccgaagagcacatgttgtgatgtgacattgaaatattgtggtctatcatctccagaaggttctcttgctcagagtgtcgttagcgagggaaagagtcatgctcttgatgttagttttgtacgagcaccaattggtatggaccttgattggcagctcattgcgaagatatcaccatgccatgttacggttctgaaggagagttatgaacgatttatggagttcattaagcgaagcaacgctgttagtccaacagtaactatggaaacagcaactgctctacagctgaagctggagaaggtcacacgtagggctcaggagcagcttcagctggtgttagaagaacaaagcagatttggacttgatattgatctggatgcaccaaaagttaggattcctttgaatgctaatcaacctttgctgggcaatgagtactttgttcttgattttggccattttacattgcatacaagagatggtaagcatgatgaagaaagacagagtctgtattcaggcttttatattactgggagggatatggctgctttccttatttgtgatttagctcagaacatatactcaatacctgaaaatttagatcaagataccctcctaggtcatacctttgatgataatcagttctgttctcttcttgatcgctgtggaatgtcagtgataattgagcagatcaaagttccacatccgaattatccatcaactcgtgttgcttttcaagtacccaatctggacattcacttttcaccaaaaaggtactgcaagatagttgaactgcttggtgtgcttctccatatgaagggaaacaataatgaatattcaaataaccatgaaagtggtagcttggcgccttggtatcctgctgatctagctggcgatgctagaacattggtttggaggggcattggttattcgcaagctgaatggcatacttgctatgttgtattatctgggatgtatctatatattttggagtcagaattctccgcgaattaccaaagcatggctagtcgccaagtatttgaagtgccaccaactagtgttggtggatctccttacagtattggtgtgtgttctagaggtggagacacgcataaggcactagaactgaccagcacactggtaattgaatttcgtaatgaaatcgagaaggctatgtggatgaaagcacttgtccaggcaacataccgagcttctgctcctcctgacgtgaacatattaggagatcctgttagccctcccccagaatcaagtacaccacggcttaatagcttgggattagtggatcttgttgtgaatggctctgttattgaaactaaactttcactgtatgggaagctggacagaaagagcagtgattcgcaagagcttctaatgctagagctccttgggaatggagggaaggttaatgttgttcaatcttctcgtggtcttagtgtgaaaacaaaattgcattcattgaaaataatggatgagctacaaggtcgtctttcaatgacttcaaagtatttagtgtgctctgtcatcaatgaaagtgttggagctacctcttccgatacacttgataagggcggcgacctaagcatctttcctgtggatgaggatcctttcatggatgcattaacagattttactccagatcaaaattctaatccagatgactgtcaaattcccaacttcatttctgatgcaaatgagtacaatgaaataggttcaaaagatggttcatgctttgatggggatgaacagaacgcaaaacctactgaaatattttatgaggcacaagatagtaatgtggcagattttgttgttctgacattcttgagcaggagtcctgattcttgtctttatgatggtatagattcacagatgagtattcgtatgtccgcactggaattctactgtaacagacccacacttgttgctctaattgagtttggatttgatcttagcacggttaattctgtgccgaaatgtagtcttgatgtggcacctgcaattgaaactgtgaaacccacagggaaggaagaaggtgctcctactattgtaaaaggattgttaggttatgggaaacgtcgaacaattttcaacatcaaaatggatgtggatagggtatcaatgtttctcaataaggaagatggttctcagcttgcaatgtttgtgcaagagaaatttctgtttgatttgaaggttcatccaagttctttttcaattgatggtatgctggggaatatgagattttgtgacatgtcccttggtccagaacatcgttggggttggctttgcgatatacggaagcctggtgtcgagtcactcataaagttcacattccagtcgtacagtatcgatgatgaagattttgaaggtcataattacagcttgactggtcagctttctgctgttcgtattgtctttctctaccgttttatccaagagtttacttcttactttatggagcttggcacccctcatactgaagaggcaattaagtttattgataaagttggaggttttgagtggttaattcagaaatatgaaatggatggagcttctgctataaagctggatctttcccttgagacacccataatcattgttcctaagaattctcagagcgaagattatatacagtttgatcttggtcaattgaaagtaaggaatgagtttagttggcatggaggtaaagagactgacccttctgctgtaaggcttgatgttctccatgcagaaataaatggaatcaacatggcggttggggtaaatggaactctgggaaagtgtatgattcgtgatggtcgcggcatcaatatagaggtgcgacgtagcctacgggatgtcttcaaaaaggtcccgatactgtctatgaaatttcagataggattgcttcatggtgtcatgtcagataaagaatacaatgtcgcgataagctgtatttcgacaaatctgtccgatacacctaaccttcccccaagttttcgtgaaaatatgaacaggacaaaggagtcaattcgtttacttgcagataaagtcaaccttagcaaccatttgttgctttcacgtaccgttgttgtcatgaccgtggaaattcagtatgcgttgcttgaacttcgcaatggcccagatgcagagtcacctctggcagagcttgctgtggaaggtctatgggtatcctatagaacaacttcaatgcttgaaatggatctatatttgtcaatattgaaattttcaatacatgatatccgtccagatacgaagtctgagatgcgtctgatgcttggatcttgttcagagactgctaatctgtgcgttgatgactcttcaactgatgcaggggtttcgaacctcacaatgctgatactggattatcgttcgcgttcttcttttcaatcatttgttataagaatacagcagcctcgtatacttgttgtcctggattttctgcttcctgttgttgagtattttgtgccttctttaggctcgataactggcagagaggaaagcttagacccgaagaatgatcctcttatgagggctgatgatattatacttactgagcatgttttcttgcaaaaagaggattttattcaactatctcctgtaaggcagctaatagttgatggttgtgatattgacgagttcatttatgatggctgtgggggcactgtatccttatgtgaggaatttgataagaaaggacaggtatactctgggattataatcataattggttgtggcaaaagacttcgattcaaaaatgtcaaaattgagaatggtgcactgcttagaagatgtgtatacttgaacatgggaagcagttactcaatttcttctgaagatgatgtagaggtttctgtgttagaaagttctttcacgaatgatgaagactgtttaaaccttgaagaacataaaaagagaaatctgcagaatgccattgatggtcccacaaaccaaatactgaactttacatttgaggctcaggttgtatctccagaatttacattctatgacagttcaaagttatcaatggatgattcgttgcacattgagaagcttcttcgggccaagatggatttcagtttcatgtatgcttcaaaagaaaaagatatatgggctcgatctgtcattaaagaccttacaattgaagctggttctggtcttcttgttcttgaacctgtagatgtttcatggaaatatacttcagtcaatgaaaagacaaacatagtgttggtgtcgacagatgtttgcatccatctttctctgagtgttgcttctcttatgcttaaactgcaaaaccaaactcttgcagcattgcagtttggtaatattagcccactaatttcttgcacaaactttaagcgaatttggagctcaccaaaaggtgacctacctggttacaacctaacgttctggcggccacaagctccctccaattatgtcatattgggtgattgtgtgtcctcaaggtctgtgccaccttctcaggttgtggttgctataagtaatacttatggtcgtgtacgaaaacctcttggatttaggctaattcatgtattacctggttctctggatctcattgattcctgtcaatcaactgaagaaaacgaatgttctatctggattcctgtaccaccacctggatatttagctctaggatgtgtggtaaatattggaaggttaccaccttcaaaccatgtagtgtattgccttcgttctgatcttgcgacttctgcgacattttcagattgtatacacactctctcacctgctgctggaataatctctgaatttagcatctggcgtgtggacaatgtgattgcttcattctgtgcacataattctatagagcaacccactaaaacagaagctcttaatttgcaccatgttctcctccggaatccaaattgctatattgttaaagatctaagtgcagattcatctatccagaatgaccaatcttctgatcaattaaatcaccgcaagagtctttctggatgggatgtacttcgcactttgtcaagaccaagtaactattgtatgtctactccccattttgaaaggatatggtgggataaaggaaacgataccaagaagccattttctatatggagaccgttacctcgttttggttttgcttcggttggtgactgtataactgaagggtttgaaccacccactcttggcattcttttcaagtgtgacacagttgtttctgagaagcctgtacagtttactaaagtgacacaaattgacagaaaaggccttgaggaaatattcttctggtatccagtgccacctcccggttacgcttctcttggatgtatcgtaacaaaaacagatgaaatgccaagcaaggattccatttgctgccctaaactgagtctagtgagccaagcgaatatgtcagaggatcctatctccatgtcttctagctcaaaaggtccttgctgctggagcatctggaaagttgaaaatcagggctgtactttcctggccagaccagatgtcaagaagccctcagctcaactggcataccgtattgctgaccatgcgaagccgaaggcacgtgaaaacattactgctgagctgaagctgggttgtttgtcggttggcattcttgacagctcttgtggaatggtcacaccactttttgacacaacaatcgctaatataaatcttgcaacacatggaagatttgagacattgaatgctgtattgatctgttcaattgctgcatccacattcaatagacacttggaggcatgggaaccctttgttgagccatttgatggaatattcaagtttgaaacatatgataccagtgaacaccctccttccaaagttggtaagaggattcgtgttgctgcaacaagtcctctaaatgctaacctgagctctgcaaatcttgagctgcttatagaaacgttagtttcatggagaagacagattgatcttgaaaataaatcgtcaacaaaaagcgagggtaccattgaaaacatgaaaaaagctgatgattcttcgtactctgcattgaatgaagatgatttccagagagtggtttttgagaataaattaggatgtgatgtttatcttaaaaaaaaaatggaagatagtgaaatcactattgagcttttacagcatgagagcaaagtttcgttgttgcttccgcctcccaggttttcagataaactaaatgtgttatccaattcaacagaatcaagatactatgttgttgtacagatctttgagtctaagggcttgcctatcatagatgacggcaatggtcacagctacttctgtgctttacgcttacttattggaagccatgcttctgatcagcacaaagtgttcccacagagtgccaggacgagatgtgtaaaacctgtggaaactactgagttactgacccactgtgccaagtggaatgaacattttatatttgaagttccagaacaggcatcagctaatttagagattgaagtaacaaatcttgcatcaaaagctgggaaaggtgaagtaattggttctctgtctatgcctattggacgaggagcaaccatgttgaaacgagctccttctatgaggatgattcagcatgtttctgatgtcaaacgggtgctaacatgtcctcttacaaagaagggtcagatacctaattttgaggacaggaaaaaaggtggtgttttagtactctcaagctgttatgtggaacgttctactcattcatatttccagaggttgaaagacagtataaacaatgtggagagcgacttctgtataggacttagcccagatggtccatgggaaagttttactgcagctttgccagtgaccgtccttccaaaatcgcttaataataaccgttttgcatttgaggtcactatgaggaatggaaagaaacatgcaaccttgagaggtcttgcagttattgccaatgatgctgacataaaacttgaagtgtctatatgtcctgtaaacatgcttgataactctatgttaaatactagattggcaagctccaccagtgttattgatgaagtatttgaaaatcagtggtaccgaccaattgcagggtggggacataacccttcaattggtcacagaaaagacttaaagcagtggagcacaaaggactgctcatactcatctaaggcattttttgagcctggccttccatctggttggaggtggacctcaccgtggaaaattgaaaggttgaattttgtagataatgatggatgggcatatgctgcagattttcaaaacttgaattggccatcatcatcctggagatcttctaaatcaccacacgacttcgtgagaagaaggcgttgggtacgttctagacagcagtcgcaagaacaaagtgcagaaattcctagaaaagtacttgctactgtcagtcctcattcatctactgcgttgccttggacatcgatgattagggatatggatttatgcttgcaagttcgcccatattctgaaaaatcagaggaatcatatagctggagccagatttgttcactaggttctgagagtatacctaaacagcagcactcttcactttctaggcaaagcaccgtaaagcagtcagtggtatcatcaaggaattctgttcttaagcttgctgaactcgagaaaaaagatgtgctctcatattgccatcctcctgttagcactgaaagatatttctggtttagtgttggaattgatgcttctgttgttcatacagatttgaatgtacctgtctatgactggagaatttctttcaattcaattcttagacttgaaaataaacttccctatgaagctgagtatgctatatgggagatttccactaaaagtaatatggttgaaaagcagcatggtattgtcccttcgggtggaagtgtatttatctattcagcagatatacggaaaccaatttatcttacattgtttctccaaaacggttggattctagaaaaggatgctgtattgataatggacttgttgtccttggaacatgtttcttcgttctggatggttcagaagcagagccagaggagactacgagttagtgttgagcatgacctaggtgctagtgatgctgcaccaaagacactgagattgtttgtcccttactggataaaaaaccactcgtcaattccattatgttatcgcatagtagaaggggaatccacagaaagcacagaagcagactcacttagcagaccagactcgctaagtagagtgtctaagtcttcaaaattttcccttaaatattcttcaaagtctcttgtcagaagaggaacaatgtcgcacagaaatatgcaagtactggaagatattgaagattgtagcacagactatgtgatgctatcaccacaagattacttgaaccgatctgctggtatgcgctctgagtcaagggataacaatttcagtccagctcgagttgcaatatctatggctgttggtggttgcacacagtacagcgtaggagtatcgctttttgagcttgagaacaaggagcatgttgatatcaaaacatttgcttctgatgggtcatattactggttctcagttcaattgaagatggcttcagataggacaaaggtggtaaatttactgccgagagcacttcttatcaatagaattggaagaactatttttctatctgaatatcatgatgagactgaagagcccttacaaccatatgaacctccaaaagtatttcaatggcgatcagaatttggaagtgaacttttaaagttgaggttggagggataccaatggagtacaccttttagtatcaatgctaatggagttatgtgtgtgctcatgaacagcacaacaggaaatgatcaggcttttgtcagggtaaatgtgagaagtggaacaaaaagttcacggcatgaagttgtatttcagcttgattgctggtccagcccatacagggtggagaatcgctccatgttcttgcctatacggtttcggcagtttggtggtgatgatcattcatggcgtaatctgcttccgaattcatcagcttccttctttttggaggacctgagcagaaggcatctattggaagttttggttgatggaactgaccctatgaactccatgacatatgacatcaatgtcgtaatggatcatcagccccttactaattcagatgcccttaagaaggccttacgtgtcactgtcttgaaggaggggaaattgaatgttattcaaattattgattggctgccagataatagaaatcgaggacagataactgaaaggatgttatcaccaatctttcagccatcagaggtcgactatgggcagtcatctcctgatctggatagtgaatttcatgttactttggaactaacggagcttggcatttctgtaattgaccatatgcctgaggaagttctttacctctcagtgcagcaactgttacttgcatactcatctggaattggctctggagtaaatcggctcaaaatgcggatgcattggattcaagttgataatcaattaccatttgttcctatgcctgtacttttctgtcctcaaaagattgaaaatcagtcagactatattttcaagttctctatgacagttcagaccaacaattctcttgatttttgtgtctatccttatgtcggtgtccaggttcctgagaattgtgtgttctttgttaacatccatgaaccaatcatttggcgcctccatgagatgattcaacacctaaaattcgataggatatatagcaatcaaccttcagctgtttcagtggaccccatactgaaaattgggcttctgaacatctccgagatccgatttagagtgtcaatggcaatgtccccaagccaaaggccaaggggagtatttgggttctggtcgtcgttgatgactgcattgggaaacatggagcatatgccggtccgtatagctcaaagataccgggaggaattgtgcatgcggcaaagtgcacttatgaactctgctatatctaacattcaaaaggatcttcttagccaacctcttcagctactttccggtgttgatattcttggtaatgcgagtagcgctctgagtaacatgagcaaggggatagctgcattgtctatggacaagaaattcattcagggccggatgagacaggatagcaaaggtgtggaagactttggggatgtcataagagatggaggtggtgctcttgcaaaaggcatcttcagaggtgtcacaggcatattgacaaagcccatcgagggtgcaaaatcttctggtgttgaaggttttgtgcaaggagttggaaagggtataattggcgcagctgcacaaccagttagcggagttcttgatcttttatcaaaaactactgaaggtgccaatgcggtaaaaatgaaaatatcatcagcgataatggctgaggagcagttgctgcgtaggcgtcttcctcgagctattggtgggaatagtttgctctatccttatgacggacacaaagctactggccaggctatcttgcatctagctgaatgtgctacattccttggtcaaattgatatttttaaaatccgaggaaagtttgcttctaccgatgcttatgaggatcattttttacttcctaaggggaagatttttttaatcactcacagaagagtactattgcttcagttaccaatgatgacccagcgtaagttcaatcctacgaaggatccttgttcagtaatatgggatgtattatgggatgatttggtaacagtggagatgacccatgggaaaaaagatcctccagattcctggccttctaagcttattttatacttgaaagctaaaccttcaaattcgaaggaaattgttcgtttggtcaagtgtaatcgaggttcagatcaagcatctatcatttactcggcaattgacaaagcttataaagcttacggtccaaactcgttgaaggaattcttgagatggaaggtaccaaggccatatgcccctcgcaatagtagtggccgaagtatccaagacttatcatttggttaaaaggtcaacacaaatgcacactttagtgttaaacacagtagaatcttaggatgaaggtattttaggttgacacttttggttaccaggcaaatgatatattctacatatacactataggtatcagaggatagatctctatgatcataccttgctcattaaaagcatttactattcttgtgatggggagatccatgtccgagttttggccaaaccactacagatctggtttccttcggcatatacaatcacattcaatatggattttttgacggaccggttcttcgcgaagagtttatcacttcactactacaccgtgtctcttatagatgtatttatgatcggtttcaggattatgtcatgcagtttattaattgtttttcatttttagaaaactaaactagtgtctcagggttgtacatggcttaagtccctttgaatataataatagtatgcgacaatgcaaagttggtaagatgggagttcaattcatttggtgatgcaaccactactgttagac

SEQ ID NO: 28026 - DNA, 2112 bp, Zea Mays
tgagcttgccctttgtgttgtgaataacacaataagtacatcaaatttgaggaggcttctggtgaccctgctcgtgttcaagttctgtatgagcgagctgtttcagagcttcctgtttcaagtgatatatggatgggatatacaagttacctggatagaaccctgaaggtgccttctgtagtcagaagtgtttattacagagccacaagaaattgtacatgggttggtgagttatgggtccattatttgttgtctttggagcgtattcgtgcttctgaagaagagctgcagcatgtatttgaacgggcaatacaatgtaccttttcaaccatacaagagtatttcaatatttatcttactcgagttcatggtttaagacggaggatttctgatggcttggattttcaactgattaggcagacattaacgaatttctctcatctcaactgagtaccaaggagttactgcgcttatatgcttattgggccaaactagagcttagtctcggcaaagatctttctgcagctcgtggagtttgggaaaacgcgatcaagaaaagtgggtctgtttttgaagtttgggagcagtacattttaatggagataaaaatggaccatgtacatgaggcgagatccctttataagcgttgttatagcaaaagatttgctgggtctggatcagaggagatatgctactcatggataagatttgaagaggagaatggcaccttggatgattatgatcttgctgtaaagaaggttacccctcggctaaaggagcttatgacattcaagtctcaagaggaggctaaagttgaggcttaccctaacctcaatgataattctaatgcaaatgattcctctcagaaaagaaaaccaagtaacaataaacagcagccccctgctaagaaaagaaaagagaatccaccaaaaagtaccatgccatcagatgaccaaggatcaaatgtgcaaagtgggcacagtggtgctgttactgatgtagaagtcggaggggccagcagggagaaggtcatggcatctatcgagatgaaagtggacagtgacagccgaacagggaaatcaagttcaaatgaaccaaagccatccttttataatgacaactgtacagtttttgtgtcaaatattgacttgaaagcaaatgaggatgatctcaggcgattcttctctgatattggtggtgccacagcaataagattgctgagggacagattcaccaaaaaatcaagggggttggcctatgtggactttttagacaacaagcatcttgaggcagctattaagaaaaacaagcagaagctgcttggaaagaaagtgagtatcgcgcgatcagatccaagcaagggtaagaagagccgtgaagcaggtcaaacaagccaggataatttacctccgagtggtggtgatgatgcaaaagcaacaggatccagtggaccagacaatgaagtacccaagggtgatgcaaaaaccatagggaagaataccctttttgcaccacgagctctggttaaacctcttggatggacaaacaaggatgagaagaaaccagatgttgcaggggagttgaaatcaaatgaggagttccgaaatctgttactaaagaagtgatatcagttggcaggtgtggatctccatgccccaatccagtgccaagatttgtggtgccttcatctctatgttagaatgatggacctgtagtagcagcttgaactggggatctacaaccgttatgtcttaccccgatgtagacatgaatatttctttctgctagggagattatacaagccatgccgaattgcagggtggtgaaggtgaaaacgggacgttgcgttcgagcagaaaaaccctgcccatgtgaaaagaaaacactgaccttataatatgtgctcactttctttttgaaccatacgtacgcattgctggtgaaacatcactgcatctcaaaaatgtgtaatctactctacgcggcttgattggagatgcagatttatttgattgtacgttgggaccttttggaccttgcaactgcatatgttgagaggctaacatcttttcagagcggcagcccaacgacactttgcatacacgttttaaa

SEQ ID NO: 28027 - DNA, 2015 bp, Zea Mays
tgccaaccaagcattactatggtagaatctcatctgacgggtacgaggagatgctaggctcacggctagccacagttgtgcattgctcgagtgcatgaccactgaattgctcgagtgcatatatgatcggatcctccagtgatctgattgatgctcaaagaatccatgcactatgcaggtaggtggatcgatagctgggaggcattaaagcggacgatgacgccttggcctcgctgcaatcttgcagattgctgctgcagcgcttctttaagagccaaccatccacatataccttgcttgacgccaagccaccggcattccactcccagcagcggtgggaacaaagagtgccagcgtctcacccctgaggccgcgcagagccactgcttgcgtctctgtctctctgtctgctcgtttttctccaatggcggcgtccggggcatggctggcccgtgcgacggcgacggcggtgctgggtttcgtcctggcggtggcgtcagctgaggcggcatcgggggacgtggagatggtgttcctcaaggccgcggtggccaaaggcgcagtgtgcttggacggcagcccaccggtgtaccatttctctcccggctccggttctggcgccaataactgggtcgtccacatggagggaggagggtggtgcaggaatcctgatgagtgtgctgtccgcaagggcaacttcaggggctcctccaaatttatgaagccactctcgttttcagggatattaggcggcaaccaaaaatccaatcctgatttctacaactggaatagagtaaagatcagatactgtgatggttcatcatttactggtgacgttgaggctgtggacactgcgaaagatctccgttacagagggttcagagtctggcgtgccgtcatcgatgatctacttactgtgaggggaatgagcaaggcgcaaaatgctcttctttctggatgctcagccggaggtctagcagcaatactacactgtgacagattccatgatctgtttccagcgaaaacaaaggtcaagtgtttttctgatgctggatattttttcgatgggaaggatatctccgggaacttttacgctaggtcaatctataagagcgttgtgaatctacatggatcagccaaaaatttaccagcttcatgtacctcaaagccaaagcaatcacctgagctgtgtatgttcccacagtatgttgtcccgacaatgcgcacaccattgttcatacttaatgcagcctacgattcgtggcaggtcaagaacgtcctagcacctagtccagctgatccgaagaagacttgggcccaatgcaagcttgacatcaagagctgctccgccagccaactcacaaccttgcaaaatttcaggacagattttctggcagcactccctaaaacgcagtctgtaggcatgttcatcgactcatgcaatgctcactgccaatcaggatctcaagacacgtggctagccgatggttctcccacggttaacaagacgcaaattggcaaggcggtgggggactggtactacgatagggaggtccctcggcagattgattgcccgtatccctgcaacccaacttgcaagaaccgtgatgatgattgagcaattgtataagtagttcatgttatcgaaatgaaaacaataaaggatcacaacgcgcgcccgtagttgtagatgatgaattataaacacatatgactgagctcaaagttgtttaatcatcatctgttgcgaaatgaggaagacaattggtgtcttgaagctgtgttttcgactgtgtctaaagcgtaaatgtaacgtatattgtgtcttcgcctatgcttaagacattggactagttgattggtcaatttaatttattaaatgttttgattggtgtaatgaatataataagtcgtgcatgccgcatgactaggcttccagtcttccacttacaccggctaagcactgtctatatatatgtagtcactttggatcaatgaatcagctgtttttatca

SEQ ID NO: 28028 - DNA, 2672 bp, Zea Mays
tgagcttgtcagcctttttgccgccacagtagcaaattgaaggggtgcaatatcctcaattcgttgatttatgaagcagaagacagttggtaggacaaaggtgctccttgatacggttcctgtttacaggctagctgatatttttgttgctagctttgagataagttttgaggagcagctttcaatgctggattcagttgacttgaaagttagactttcaaaggcaaatgaacttgtagatagacacttgcagtccattcttgtagctgaaaaaataactcaaaaggttgaggggcagctatcaaagtcacaaaaagagtttctactgcgccaacagatgagggccataaaagaggaacttggcgataacgatgatgaagaagatgatgtggctgcactggaaagaaagatgcagaatgcaggaatgcctgctaatatttggaagcttgctcaaagggaaatgaggtaagctatcatgccatatccttctatctttgtgcacatgtggtattggagatttttgtatctagttagcctttttgtacaggcgcctacgaaagatgcaacctcagcaacctggttatagtagctctcgagcctacttggaacttcttgctgaccttccttggcaaaaggtcagtgaagaaagggagcttgaccttagagctgcaaaagagagccttgaccaggatcattatggactaacaaaagttaagcaaaggattattgagtatttggctgttcgtaaggggtccagtgctgtgttttgttggaccacctggtgttgggaagacttctttggcctcctccatagcaaaggccctgaacagaaaattcttaagaatctctcttggtggtgtaaaagatgaagctgatattaggggccaccgaaggacatacattggaagcatgccagggagacttattgatggactaaagagggtatctgtgagcaatccagtgatgcttctagatgaaattgacaagactggttctgatgtacgtggtgatccagcatcagcactactggaagttcttgatcctgagcagaacaaagcattcaacgatcactatttgaatgtgccgttcgacctgtcgaaagtcatatttgttgcaactgccaataagatgcaacctataccccctcctctgttagataggatggaagtcattgagctgccaggctacacacctgaagagaagttaaaaatagccatgaaacatctcataccaagggtattggagcagcatggcttgagtacggcaaatcttcagattcctgaggctatggtcaaactgatcatcgagaggtacactagagaagctggtgtgcgcaatcttgagcggaacctagctgcattggcccgtgcagctgctgttaaggttgcagagcaagttaaaactcttagacttggcaaggaaatacaaccaatcactacaactcttcttgattcgaggcttgctgatggtggtgaagttgaaatggaagttattcccatggggcatgatatgtcaaacacttatgaaaatccatctcctatgactgttgatgaggctatgctagaaaaagtacttgggcctcctagatttgatgatacagaagctgcagatcgtgtagcaagcccaggagtatcagttggccttgtctggacttcggttggtggggaagttcagtttgtggaggctacagccatggtgggcaagggtgacttgcatttgactgggcagcttggtgatgttattaaggagtcagcacagttagctttgacatgggtgagagcaagagctgctgacctcaatttgtcacctgcttctgatatcaacttattggagagccgtgatattcacatacattttccagctggtgctgtgccaaaggatggcccttctgcaggcgtgacattggtaacggcactggtgtcactttttagtaacagaaaagtcagagcagatactgctatgactggagagatgactctaaggggcattgtattgccagttggtggtgttaaggacaaggtacttgcggcacatcgttatggaatcaagagagtaattttacgtgaaaggaacatgaaggacttatcagaggttccatcaccgattctctctggcatggagattctgcttgtgaaacacatcgaggacgtactcgaccatgctttcgaaggcggatgtccacttaaatcacgctccaagttatagcatccaactcgcctttgctatggatatttgcttcggaggatcatcgtcaacagtaccacgaatggtcaacagtcagaataagagcctagctctcttgccagcacaggtcttgacacgcccatttttgttaggcttcgcatctgaatgtgtatactggtcagaattcggagagcagtcagaagatctgctcgttcacctgctgggactcattgcatagtttctcgacaccagctgttgatgtttatgcacagatgcaacagaaatcagggaggaattacgctggttggtttctctgtcgtgggtgtatatatgtatgtatgcatgtaatctaatccagggaaatatagctacaacaaggttgtcaaaactaaagacatcgagaaacatcacacgtcctttgggcttgggtgactttattataaatgtatgtacatataacccaaaatgcgcacgtgcgtggtcctgca

SEQ ID NO: 28029 - DNA, 2394 bp, Zea Mays
ttgccgatggttgccaagttatcagatgattactgaagtgtgatcattgaggttctggttaaagaaacttctagtatcgattggcttccctcccatggacaagatacaatctgattgcccttatcctggatgtttcttttgtgtcatgaaggaggcgaaccctagtaaacgaagagcaagtgtgttaaagtactttagggaacttccttcccaagacgatgatggtcaagttctccctattagtggtctctggaacacagcaatggctcacccaaatgatcccgagttcatcaacttgggcatatttgaatgcatggcatctcttatatggaaagggttgaaaaacaggcgttggcttgcacatgatcagaatatttacatcccatattatgcagctcacataattggatcatacacaatgaatatggaggagtttgcagagcgtgctgttcgtgctggtgtaatacctccattagttgaattattaagaggtaggttgacatgggtcgagcaaagagttgctgttagagctttgggtcatttggctacatatcctagtacatttcctgcagttgccgatcatggggaagtacttgaacttgccattcaacttgcttcgagctcgctagaaattgtgtactctcacttttaccagtttgtggatcgaagacttggctaccattgcgaccttcttactcgtggcatgggtggtgtggaaatggagtcccgcaaagctgaggaatgggcaagtcaactgcagtgctggtctttgcaactcattaactgctttgcatttaagcctgaattcctccatgatatttgcaagcctgattttctagtcaagttacctggaatgtggggtggacttgtaaatgagaactcacctgctggtgttggtttgctaagaacaatctgccagagcaaggttggccgaggtcatgttgctaacattcctgctactattgatgctttatgcaacattgctcgttcttcagatgactggcaatacatggcagttgattgtctgatctggttaatgcaggatgcaagtacttgtcataaggttaaagatatagttgcgccaacactgatagatttatcagatatttcggcactgggtgattataaaaagcttggtgacacaattgtcacagtcctccaagaatgtatgcaacagagtgggaactcacgtggtgcaattggtgttcagaccaaatcagaaattgatgagcttttgagatccaagcaaagtctgaaattggaaaagagtatgccaaaggaggatcttcatataaaacaagctgcggcattggttgtcaagttggaaggcaattcactgttctcctcagggaacatcgcaggagctgcagagaaatactctgaagcgcttgcgttatgtccgatgaaatccaagaaagagcgggtggttctctacagcaatcgagctcagtgttaccttctcttgcagcagccattggctgccataagcgatgctactcgagcattgtgccttcacagccccgtgaaccgtcatgccaagagtttgtggcgaagagctcaagcgtatgatatgcttggtcttgcaaaagagagcttgttggacgcaatccttttcataaacgagtgctctcagtcgaacgatcccgacttatccctgaagcaaaacaaagtccctgactatgccgagcggttggtgaagaagcagatgcgctccgcttggctattcagggaagcagctctgaagcacgggggcgtacactgtgaaggagatgctagcgacgcgtttggccaggatgctgacgactctgagtgggaaacggctagcgaaagcgacgccgagaatgatgacacgggagaagcggatgatggaactgaatggaagaacgatggacaccgggaagatatctgtgagaaaagctgaggagcagggcaagctgaacctattcagagggagtcaaactgagcagtgacagaagcagctgctgggccttatgaagtctgctgcgctatcagcctatcaagcatcagatctttctaatgcagcgatctgctagaagcgtactctcatttcaaaagatgccagggaactcgccctgattgagagtttcccgtggcccatggccgtggccgaagcgttgaaacaaacagcgaggacaggggtgcacggctggccacagcacatcagcgcaagcgacgagtcctgtcacctacacatagattgacgaaagagttaacgcagggcagcggccagccccatgcgtcgatcattgccttggttcatcactgcttgccaatggatggacgatgcgaacgcttggagcaaacatggtcttagttcgtagccatgataagctgttgagattactatctaatgggcataggccctgtttgttt

SEQ ID NO: 28030 - DNA, 554 bp, Zea Mays
caccacccaaccgaatcctcaaccgccgccgtgaaccgcggacctgactccgcgcgtgcttggactcaagttcgtccccggctggtggggtcccacctatcatcatctagcgccgtcggggtaaaaaccaggcagagctcacggtgaattctccggcgatggcttgcgctcctcaacggtctccgcccatctataaaaccatggcgtgggttttccctcccctcatccttctcctctgtgtaccgcgcgacctatgagagtgtgggcatggtagaccgaaccggggcggaatccgttcaccgccgtttggccttctcgccagcgtcttgctcctcgtgacagcaccggaggggccgcctaggaggagggagtctagtgctgacctcgggcagaggtgatggccactgtcgcggcggcgattcctcaccgtcgtggtcacggtgtcgtagttccgctccgcgccgtggactgggtcagctacgtctccatccctggtgaggtcacgagtcacctgaagagcaagttggtacctgcaaactcaagtgtcaggcaag

SEQ ID NO: 28031 - DNA, 2331 bp, Zea Mays
gtggaggtgtcctgcgcgccgcacccccgcgttatcaggctccgatcccatccccgtcccgctctgcctggcctctgtcgcggggtcgcatcgcatgcctccatgccttggctggcagcatttactatttagccgaggtgtgggtgggggcgttggcggcaaccggcaacaccgtcctcccctccccctcctcctcccgcgtgctctcctctcctatcctctctgcccccggtaactacaactgttggagtaggcccgggttggccacggccgccacactgctccgctctgctctctgaaggcattgcctgcgcggcttcttcctccgccggcgtcggtccgcgagttgttggcatggccgccgcagggacgcagctaggccggcttctgggcggcctatggttcctggccgcgttgctaggacgaccgggcgccacggcggcggccgccgggcagccggcggcaccagcggtggccgccgtcgacgggcggcgcgccgtcgcggcgaccggggaggacttcgtgtgcgcgacgttggactggtggccgccggacaagtgcgactacggcacctgcgcctggggccgcgccggcctgctcaacctggatctctccaacaaggtcctgctcaatgccgtcagagccttctcgccgccgctgctgctccgcctgggagggtcgctgcaggacaaggtgatgtacgggtacggcgccgggcggccgtgcgcgccgttcgtcaggaacgcgtcggagatgcacggcttctcgcagggctgcctgcccctgcgcaggtgggacgacctcaacgccttcttccggagatccggtgccaaggtcgtgttcgggctcaacgcgctcaacggccgcgtcccgttgccggacgggtccatgggagggccgtgggactacaccaacgcggcgtcgctgatccggtacaccgcgaacaagggctaccgaatccatggatgggagcttgggaacgaactgagcggcactggagtgggagctcgggttggcgcggaccagtacgccgcagacgtgatcgccctgaaagcgctagtcgacgacgtgtaccggagcgagccatcgaagccgctggtggttgctcccggaggattcttcgaccaagcctggtttactgagcttgtcgtcaagaccgggccggatctactgagcgtggtcacgcaccacgtctacaatctaggaccaggaagggacacgcacctgatcgacaagatcctcgacccgtcaaccctcgacgggatggtcagcacgttcagcgacctccagcggctgctcaagtccacggggacgtcggctgtggcgtgggtcggggaagccggaggcgcctacaacagcggccgccacctcgtcactgacgcgttcgtgttcagcttctggtttttagatcagcttgggatggcagcgaggttcgacaccaagagctactgcaggcagagtttggtcggcggcaactacggcctgctaaacaccacgacgttccagcctaaccctgactattacagtgctctactgtggcatcgcctcatggggaccaaagttctagcagtaacattcagcggcacgaacaagatccgcgcgtacgcgcactgcgcgagagattcaccaggaatcactctgctgctgatcaacctgagcggcaacgccaccgcgcgggtctcggtgacggcccaaggggctgccgcggcgcacgcgcacaggcacaggcacgacgcgaggaagcacggcggcggcaggaagttccggcacgtgcacgtccccggcttcgccggcggcggcgaggcggcggcgggcgccgtgagacacgagtaccacctcacccccaaggacggcgacctgacgagccaggtcgtgatgctgaacggcagggcgttggccaccgacgcggcggggaacatccccgccctggaggcggtcgaggtggacgcggcgcggcccatcgccgtcacgccctactccatcgtgttcgctcgcgttccgcatttcagtgccccggcgtgtagggtagaccggtagagtagcggtttagatgggtagattcataatgggtttggcgtgattggtgatgatggacagctaagctttccatctggtgagatgaggtgaagtgaggtgcaaggcatctgtcgaaagaaaagggatgcaatgcaatgggggtgagtttgttttctttttacgattggaattgtaaaaggtcgaagaaatttatgatgatcagcgatgggaaagggaaaaactcgttcccgtttgtctttctgttcatggttggaaacaccagtgaaatcgacgtaagagcggtactaacgaaat

SEQ ID NO: 28032 - DNA, 5187 bp, Zea Mays
caaagatcgaagctccgagcaggaaacgccaccgccctccatctcccccgtgtccctagccaggagcaccgtccccctcaccaccccgcctaactttcctatcctcatcccgacgcctggagatccatcctcaaacgccgctgctagggcaccgtcccgcgctaggaccccccgcgcctcgcaatcatgtcaccggcaactctgacgacctagggctcacaggaagttgactttcctctgctgctgttgtgctcagtgtggatgacattgtgctgcctcaggtacaactttccttttctgtgcttaagtaaaaaaatgttgttccattcgatacacagtcggattatttgatttaaagccttgctgaagttgacattgtgatatatcgtgaccctggtaaaaaatattttcaagttcagaaagcaggatacttcctttaatatgtctatcacacatgttcacggagataattctacacatggttttttatacctctttttgaccccacttggagatggaagcgagattttgaagttttaaggcctgcagtgccgtggtcttgcgttgatatctgtagttgtacatagaaattttctcatttggtgtatgtctttgctactttttccttaaacataaattatatttttataactatctggcagttattgatctatcactgccttactacatgatacctatctggcagttatgaaaatattcgaatccattttatatgtaaatcctaaaattttcgaatccaaagccacccattacaatattatgtactgaaattatatcttttacttatgtgtcactctgcatttttttaagatttaaaaaaatttcttccttattttatacatggttgaacaccaaccttcatgattcactggatcttcttagtattatctctaacaaaagaatttataaagttctttccccacaaatgcaaatataggtattagcttattgattttaaattggttattaaatgtctggcatggatctcctccctgctcacgggcctcaccatcctcaatggcgagtgtaaaacttcgcaccaacacactcgacaagcttgatggcgacccctacgtcaacatccgcatgggcaaggtcatgtaatttttatcttcatttcaatagtgattgaagcaaatgaaaattttaaaattttggcagtgagtatgcaacacttccaagcaatggataatgtattaatgtggggctgtgggcgttggaacgtgcgtgttgactagctttgattagcttgtcgatatacatacttagccatctattttttcttctcctttcaaatgctatgctattgctactgctgttggagtgtaccatttaacttgatatatgatttaatagatgctttgtgtgcataaatcgtctacagttaccatctggacttttttagccatgtttgagagatgtgacggagtttggatttcacttaaaaatgcaggtccagttgatgtttaatgtgcctgaactgcagttacagtcataaagctcaaacaatcttgagcatttggttttacattatattctctggtttctgtttttgtgatttgtgttctgatgatgcaaacgcttccattttttatgttgctcctgcacaagatttcctgcacaaccaactgttttttgaattctttatgttatttgatccagggagtggacacaatcaggctcttgcgcaagtatcccctgaatttactacctgtagtttcgaaatgggcttacccaaaaaaatatttgcactaagaatatttatgtttgtttagttggtctggacaaaccacaagatcagtttaagcattgcttccaaatgccattaaatatttatcttgactgaaaattcgcacacaagaatagtaatattctatgaccaagtgactgtagtatgaagaagcatgtgtcattttcctgattaatttagctggttcaactttgttggggtcccaagtcttggccagaacttgatgtaattaaactcctttagacaattgagtacctttctatgtggatttacatatccctttgcttatttagtaacttctgcaaaatttgaatcctaggcaatgtcaacctcaacaccttgatgaacatgttcagtgtgcttggtgctggtggtggccttggtggtcgaaatgcttctaatggctctggaccgccatgcttgcgtcggacgcgggacgtccacgccgccatcgcccgtgagcagctccgacagcctcatcgccgcgttgcacctgctcttgtgtcgcaggctcgggttaccgtcggtgctgacaccgaggaaggcatgatccatgcggagcagcccaaggcgcgatgccacctccgctgtcacgcatgatgagctgcttcgcctctggcaccgccttgttccttcgcgatctcacattggacggtggatgaacttgggcttccaagatccgtaatacaaggtaaattgagtaccttttgtgacctcttctgtatttctaggcctttgtataacagctgtggacaaaacctgtaaacatgttggatgaactggagcagctattgaaaggtaactctatggtgaaagagctaacgcctaggacaaatgactaccttgtttcatttcgagaatgtatgtccaccaggattttatctgttaatttgaacaaaattcatatcaaagcacgacaggtacttcttgatatttccttgatttgcacagtgattgagtgagcttttaagggtacgaatgtagcagcctagaataattctatatttacttactactataaagagcgggagcaaaatatagctatacaattgatgtatatttagcatatcaaacaatgctcaagatacttaattaattgcatactatagttaggctgtatataccaatgcaatggtcactagcaagataatgcagcctcacagtcttatgacatcagccaatatataaattagaccatttttgttgctgcaactgcaactaatactatgttgaagtgtttttcgttaactctgctctgaaaatgctttttgcttcactctttgacatatctatatgactatatagccgatgcctgtttttactatatgcttatcatgaatctcatgttttccatatgaataatgctagctgttgcaacatctttgtttggagctaatgatacatttaatcctagacttgatggcaaagaacgggtgcaattttttgtctctctatttcctatttatgttgcacaaataattgtttccttttgttatccaaataaataattacttccttctccacccttttctccagttgtagcgagtgagttttagtaagggataaacaatagtaggaagaactctgttgtgtttcaatctcgagtatttgatggatggggcattgttctatagatggtgtatacagaaatgatcttaactgtcattttggtcaaaaccacaatagttctacttatgttagaaaatcaaaagatttaagtgtcttccatggtttaaagttcatgatgagcaaatttgacttatttttaattgtttatcatattttgagaataattttgctgcctattcaacagataccatggggggagcatttgatccagctagctggcaaacaagatttggtggtaactgtttatgatgaaacaaatatttcgaatcattaattgctatgtttgtgtctgcatcctgtcagcaattaggatgtgacaggacatggcctccctccaatgcaaaaatcccaaaagctccttgcagacacacttatttgcattctttgcgctgacatgcagttaggatgcgacagggcctccctccaatgcaaaatcacattaaccatgtcaccgctgtcaattgttttcttgagtttgttcccaaaacctcttaattattattgcccacggatagtcatgttatctacataatccgttttgccactcttcagggttctgcattgtgaatagaggttcatctttgtgattagattgccaccgccgctgctttctactcattcgacgaatgttttgcaaagaagaaatctggtttatcttaccctcgattccttcctatgatacaactaacaaaatgaattggtacattcaggtatctttaaaaccttttcacttccaaattagaatgatatcatgctcaagaggtaacattttctgatgttttttattttaatagtaattattggtcgctgactttttaaaactatttgtgttgtacttcaagcatcttctacactgcatctaagctttgaagagttacggacaattttgtactaattgttttctttattttcccaaatgtgtgccacttcctttagtatttttgcagtgcagacgattgaaaactactgttttacatcacctctctgtcataggaatagtttactactctaatgctcattctattaacactaaaaaaagatatatcgcttgaaaacaggtatgtatttcaatcttctagatttatatttctttctttatatatacaaaacaggtaagtttgtaccatttgttttattttttaaaaaaagaaaaggtatgacacttacattagtattttttcccaccagaaacgattgaaaactattgtttcccgtcacctcctgtcatagtaagtgtttcccgtcacctgaggatttccaattttctacaatggtgggagagatcttcaactattgtttctgacacttgaaaggatggcttggaccctcttattatcctgggagcctcggtggtttggaagcatagaaacagagtggtgttcggtagagtttcttccaacctcactcttattctggagtctgctaatgaggaaagcgagaaatgacaagttgcaggagccaagggttatcctttctggctgctccaagccatataatttagggtggttggatccttcatggatattttaatgtacttctgttgttggcctccgtaagaagtgcatgtatcccgggcgtctttcagctctttgtattcttcgtcttttaatatagtggggcgcagttctcctgtgcttttcgagaaaaaaaaatatgtgcatctatttaagtctcttaccaataagtgtttataaaatatgtttcattgttcttagcttgatatgtggtaaggtcttcttctttcttgatcatctatgtatgccttaattcatatactccgaaataat

SEQ ID NO: 28033 - DNA, 4536 bp, Zea Mays
tggtgaggttttccagctaagatagcaaattgaatgacatcattgttgttcaggtacaacagtctaatcaggaaattagaggagcactttggtaatggtgctgatattaacacagatgcaaccaagatgcaagctcctgctccgcctacccttccatcctcaaaagatagaaggaggtcacttcacggtgcccctgagtctgaaagcggaggtatcctatcaagtgatgctgaggataacaaagggcatggacggaggcaaagtcaaagttgttcaaaatctccaaagcccagaagggagaaggaaaggaggcacaaagatgggcatcactcttcatcttcaaaagatcattatcccaaaaatcgctctagagcatctccatactcaaggcatcagagtgaagctcattcaagagatcacttgagatctggagaaagaggtgatgatactaatggttctgatcgtgagagcaatgatcagaatgggaagtctggcagacatacgactgggacccaggagaatgaaagagaaaggagcagcagccatggtattcatgatagacatggtgataggcataatgacagacatggcagccaggaaaggtacagagacgataggacatatagagacaaaattgattcgctagaagctacttggaagcacagagaaagaagcaggagtcatagtagatcggatctaagggaaagtacacgtcttcgtgatcaaagccgggagagtgaaagacggattggtagttcaatgcatagggatcatggcagcaagagggatacaagtaaacatagagaatctgacagggttaacagtgcatatgaaagggagagagggagagatgctggggacagggaatggcacagggtcaagggaagcgaaactcatagagctaaggaaggacgggacaaagttagcgatagtgataggtacagggattcaacacgctcgaaatatagtgtgtctgatggctacaaagagagaacaagatctggggagaaaggtagagatgttgaccgtaaaaaccgaaagtttgaagaaatgaaggaaaattatctcaaggaggaagatgaagagaagtaccaagagaaaatagaacagcagttagcaatgcaggaggaagaggaccctgaaaaaatcaaagaggaagcaaggaggaggaaagaagctatcatggcgaagtacaggcagcagcaatcacagaagcaggatatggaagctaaaccaagcagcaatgatgaagaagtaagagctatggatggaaatgtaactatgcatcagaaagatgataacggtagcagttccacgggcaatgacaaagctgaaaataagcatgattcttcagaggtatttgatggcaaaaccgacttttctgtgggaaagtctcctgctcaaaatgatacttcaactagcacgggagcattcactgatgagaggacaatagatgtttcaggtcttggagagggttctcccaagagtgagagatcagcagacatgttttgtgatgacattttcggagaatcacctgcgggagttagaaaatcgggcaagggtgatggtttgcatgttgagagaaatgctcttcatgacaactgggatgatgcagatgggtactacacttaccggttcggagaattgctggatggccattacgaaatcatagcagcacatgggaagggtgtgttctcaaaagtcgtgcgggcaaaagatcttaaagcgagtaaagatgatcctgaagaagttgctatcaaaattattcgcaacaaggagacaatgtacaaggctggtaagcaagaggtttcaatactggaaaaacttgcaagtgtggaccgtgaggacaaacgccactgcgtgcggtttatttctagtttcatgtaccggaaccatctttgcttagtttttgaatctctcaatatgaatcttcgtgaggttttaaagaaatttggtcgtaatattgggcttaaactgactgcggtgagggcatattcaaagcagcttttcatcgccctgaagcacctgaagaactgcaaagttttgcactgtgatattaaacctgacaatatgctggtgaatgaggctaagaatgtgctcaagctatgtgattttgggaatgctatgcttgctggtatgaatgaagttacgccttatcttgttagccgtttctatcgggcacctgagatcattcttgggttagcctatgatcatcctttagacatgtggtcagttggctgctgtctatatgagctttataccggtaaagtcttatttcctggtccatcaaacaatgccatgcttcggcttcatatggaattgaagggtccattccctaagaagatgcttcgaaagggtgcctttactatgcaacactttgatcaagatctcaattttcatgctaccgaggaggatcctgtgacaaaaacggctgtgagaaggttaattttgaacattaaaccaaaggatgtcggttttttgattttgaactctcctggcgaggatccaaaaatgctatccagttttaaagatcttcttgataaaatgtttatattagatccagaaaagaggataaccgtatcacaagcacttagccatccatttatcactggcaagtgacataagatgctgattcctcttgatattgaacttagcatctacactgtaaaatacaatttgggtttctcttgtctaatcatcgacgtttctgtcttgtgtcctgggagctctgagaacaaatacatggatgaagcacggaactatcgaagagatggctatctgcagaccttgttgcatgcacttatcatttggatatgttctgttgcttgattctgccagggcctctgctgtgtgtacactttatatgcttaagcgccaacatttgaagtatcaattgaatggttttgcttttatgttattgaggtcctgggatggagatcgctggaccctcctctcctcatcatggtgtatttctaattgtttttgcgttttggtaagtaatttctttttgtcagtttcatcaaacattgatcttccaaacaatttgtttgtcttttgtgtgtccgacaaacttttccatattaatgggttgtgaaattcaagtactatatagtatatactccggggattttagccccatccaatcccctccggttttctggcttccaaactagccatcaatcccatcatccaattcccttatcccaaactagccctaagaaaattgggtacagggaaaagaaatcccaacttggcctcccctctataagcatgcagaagctgaaaggctctcagcctgttgtccccgtagaatgctctcctttgtgattgcctgcacagcactgccataacacttgcaatggcgctgttaaaaacacatcattccaatctctcaagccaaccaagatagtgaattcaggcctaccatttcgcacttgaccgcctggctcaaagcacctattgataattggctgagagtttgaggtgcaatggaaataaatcaaagcctgtaagatcattctttagattgaacagttggttgaacgaacctattaccatctatacgtgggcatatgaatgacagcagtttattgtgttggatgcaagcggttttgtaacttctgttgagttctttgtatctgtagaaattgccgggtaaatctgaagaactggattgcagcccattgacccacccccgtgtagtagttatgtcagacatagtttaattgatatggcacacatgctaagatacgattaacttgtgccaatataataagttgcctttaagataccgcaggatacaggggtagtgggacggataatgtctgcgtgggggtgctattcaaatttgaatagtaaggatattcctctccatgggccatggatcctcttcatttccctgtccaccaaaccagccgtaagagttgtatgcttgtatgctcaccaaaccagccgtaagagttgtatgcttgtatgccagagcaggcatgccgtcacggcgagtctggcgacgattagtagtcagtaatcagtagcaatttagtgatcaagatcacaagttcatacttcatagtaaacaaatgtaagtggtatgtccatattgaccatagcaatcaaacaaactaaaaatcaaacaaacaaactaagaatcaaacaaacaaactcaattactcaaacatggtcaggtttatagtggtaggccattgcctaatggatatctaagcctatcatttaggccagcctcattcgcaccatcatggagaggagaggggtaggcagtagttggccatagtcacactcaacatctggatcgttgacaacaacgatgtccagatcataggcttcatctcctcttgagtcttgatcactcttcttcattagttgaggtagaaattaagggctcttaagtctctgtcacatcggatctttagatgctagttaaaagtattagatatagtccaattataaatcaattacacatatgaggattaaacgatacgattctattaaatctaatttgtttgagtcgatcatgcg

SEQ ID NO: 28034 - DNA, 2251 bp, Zea Mays
ttttactccattcccctcggtgcgccgccgccagtccgccccgccccgccccgcccagcagacagcgcagccatgccgctccacctccacctgctgtcgtccccggccaccgctgccaagctcgcggcaggtctgcgcgcggcgcctctccgccggtgccacagcttggccccggcgccgcgccacacggatcgcgtggcccttgcgtcgtccctctcggcggtggcgcggtctgctggccccgccgtggcagcggcgcagaccaagcccagcgtttcaggaaagaaacaagtattgatatcgttgtcggataaaacggacttggcttatcttggcaatggtcttcagggtttggggtattccatcgtttccactggtggaacagcatccagcctggaagcagcaggagtcagtgtaacaaaagttgaagaaatcacacatttccctgaaatgcttgatggacgagtgaaaacattgcacccaagtatacatggtggtattcttgccaggagagaccaggagcatcatttgaagggacatttgatgtggttgtggtgaatttgtatcccttttatgacaaagtcacctctggtaacatctcttttgaggatggcattgaaaatattgatattggtgggcccacgatgatcagagctgcagccaagaaccataaggatgttcttattgtggtggatcataatgattatcctgctttactggagtaccttaaaggaaagcgagacgatcagcagttccccaggatgttggcatggaaagccatgcagcatgtcgcctcttatgattctgcagtgtcagaatggttgtggaagcaatcaaataaaggagagatgttccccccaagctttactgtgccactggagctgaagtctacactccggtatggcgaaaatcctcatcagagtgctgcattctatgctgacaagagcctttctcttgttggtgctggtggtattgccactgctattcaacaccatggaaaggaaatgtcttacaacaactacttggatgcggatgctgcatggaactgtgtatcggagtttgatagtcctacttgtgttgtggtgaagcacacaaatccatgtggtgttgcctcacgaaaggacattcttgaagcttacaggttagctgtaaggggagatgctgtcagtgcatttggtgggatagttgcattcaacacgactattgacgaggatcttgcgaaggaaattcgtgagttcaggagtcctacagatggtgagacgcggatgttctatgagatagtggttgctcccggctatacggagaagggtcttgaggttctcagaggcaagtccaaggcactgaggatactcgaggcgaagagaagtggaaaagggatgctttcacttaggcaggtgagtggtgggtggttagctcaggagtctgatgatctaacccctgaagagatcacctttaccacaaagtctgagaggtctccgcaagaaaacgagcttgccgatgccaaatttgcctggctttgcgcaaaacatgtcaagagcaatgcgattgtgatagccaagaacaactgcatgctgggaatgggcagtggtcagccgaacaggcgagagagcgtccgaatcgccttcaggaaggcaggagaggaggccaagggagctgcattggccagcgacgccttctttccttttgcctggaatgatgccgtcgaggaggcgtgccagaacggcatcggcatcatcgcccagccaggaggcagtaagaaggacgaggacgccgtcgcgtgctgcaacaagtatggtgtgtcgctcgtcctcaccggcgtcaggcacttcaagcattagccgtcatgccccatggctggtcatcttagcttagggagttacggaaaaaaaacaaagcttcggaggctgcagcttgtggagctgccctgatgtttagctttctgcaaagtgcaaaaactgcaaattttggtttctgtaaggcgtaggctttgctgggtgagctcgtggggaaggtaatgtttctcctggagtcgaataagctgatgggtgtaccgcgagtgacaattgaacccaacctaaggactttcaggttggtacttttttctgtcacaaaatcagccgtgcgcctatgcaccaggagaaacatcgatgtgacctacacctcaacggccatcgatgtgacctacaatctttggactacaaaccattgaaaaataaaaagagaaaaggtgcctgggaatttctgtgttcac

SEQ ID NO: 28035 - DNA, 3467 bp, Zea Mays
tgagctatgggttatgtgggcttgaggagatataaatataggctgagtcagctgtaaaaggcatcaaacaacgaaatacaaaataccaatttacttagaccccgtctagctctcgtcttccttccgtcttcctagctctaatctctgatctcctttcttctaccttctgtggtgctaacatttggtatcagaggaggaatccatggatactgtgctgcaacgacttctggacgaactgacgcacatggaggcgcgcttgacatgtgtgttggctggccgttgtggcgagcagtctgcacgcgcgcgcactccctcctccgacgatggatccacaccgtcctacctcgcccccaccagcgaggccgtcgacaagctccgtcaggacctcaacccttgctgcgtctaccgagacagcatccagcaccaccgagtcgaagatccctctgcagaggaggacctgcaaccgcaagcggaggtggtggagtcgttcgagtcggagtccgctcctcctcccatcgtctacgactgctacgacgagccgaaccacgacgagattgccgaggtgctcgcgctactagagtacaacgaggggacttcgtcggccacagtcctcgtcgactataccaccaccagcatgtcgcctaccaagtgttcgacgatggatttctccgacgccgacagcgccaggacttgcgatgtcaccgacgtccccatcgtgcactccgcactcaaggcgttcgtcaaaatgctcaacggcgggagtgagcatccgcaggaggtgacgcaaacctccatcgcgcgcctgatggacagctcacggagctggatcttcaccgagctcggccaaccaacatactgcccagagactttcccggaggtgccatttgagagaccaactccacccataattttcttcgacgaggaacatatcttcgaggaagagtcgtcttcttccaccacggcgacaccaagaaatccgtccgatccgaagcaggcgggtggcgacctcgattccatcgctactgcggcgctgtcggcgtcggaggagatcccccagtccctgctcgtcatcgacctcgagcgcgccacctccaagtgcatcaggacccacgctgtcaacgatgtcccagctgtgcactccattatcaagggcctgcaactggagcggatcggtctggcggggagcgcgcccgacctggacaccctcaccaccgcccgccattgtggcagtgagctcagctgccagctcggcagcaacaagcgggatgtcagcctccgagttgggtgcgaccaaagctatgagtgggtcgacccggagaccctggacaggagcttcgtcgtgctagataatgcttgtgctacccatgaggtgttcgaggtattgcctctaagcttccctgctgcttgggttaatgttggcaagctcccaaccactttatgttggaaaattccatggccacctcccgttttgtgggtgaatttgcatgctggcggtcgttatataacttcattgttggaagaatgtcagctagtgttcaccatattcttcggtggtgtttgctcacttgccaagattcagtggccttatatggtgttggaataccttgctaatttgcatgtgattcatgggaaaattcatatgcatccggtacaagtttgtgtcaggtcctatgcagtgatgccatctgctaagggtcttgtggcagagacgcacctccacttcatcggcacctacaggggcgtcgtcagcaccgccttctgtactgagattgttgagtctgcagatgcctatatctttgcaggctccattttcaaggactacagctccgtcggttactcattcctcctcaagaaggccaaggccatcattgtccagcctgagcgtgtgggagtgggaaatgggttgtcattcagatgtttgatgatgaaggagtactggactgaaattgctaagaaggttaaaaagaacaccactacgtatgagaactacaagaggaactttgtacctgaagggcaggcgctggagagcgagccgaatgagccactgcgagtcaatgtgctcttcaaatacatccagaagatgatgacagttaatagtgtcgtgatggctgagaccgatgattcttggttcaactgccataagctcaagctgccagaaagctgtggatatcaattccaaatgcagtatggtttaattggatggtcaatgggtgcactgcttggctatgctcaggtttgctatgaccatgatattataatggatgctgccggttttggtgatgagctggtggtcatcagcttgggtgctgactgccaaattattgcatcctaccacaggtggcctttcggacagactggaactggtcatttctccccaattggtggctaccaggttagacaagatatggtgctcatcttggatgttgctcgtttcattccattacaatttttttgggaagccatgaatacaactaatgactcaactctgagagggtccatgcttatatcaagaaaggttgcagagtcttcattgttgtacacagtgagttgcagagatgaaaactggaaaatcatgccaaagttttgtgttgaagatttaccaagtcttctgaaggcagggattggtgcttgcgtgggcttggttacctctggtctgagtgttgtcagcagtggccaaggcaatttttcagtatttgtttgggatcctggtgatagcggcttggttacctctagtctgagtgccgtcagcagtgaccaaggcaaattttcagtctttgtttgggatcctggtgatcgtggcttggttacctatggtctgagagttgtcagtattgcaagagttactgctattatgtcaggcacatatgcaagaggtgctgctacaacttcctctccgaagatgcgccagacccagttcagatggagggccgaggagaggcatgatgcattcaacaatgatgctaatccacagataaagttgatcctacaccgtcagcggcttgggggcaagccgtatttcaaggagtggggaatgttagatatattaggtgtagtagatgagctatgggttatgtgggcttgaggagatataaatataggctgagtcagctgtaaaaggcatcaaacaacgaaatacaaaataccaatttacttagaccccgtctagctctcgtcttccttccgtcttcctagctctaatctctgatctcctttcttctaccttctgtggtgctaacagaccaactggcggaacgagaacgggccgagccgaatggacccgcccgaccacgggacatcgagaagcgaagggaacgccaaccaaccagagtccaatcccggaacggaagcctacactgcaacctgtgctctctgccctaacctgccattgcaatctctgccttggacttagcacgccaacaagcgacacaatcgaccacctcaaccatccggtccgtggcaacggtcag

SEQ ID NO: 28036 - DNA, 288 bp, Zea Mays
agtaagaaacttacaagaacaacgatggaacacccgtataccatcactgagacgttattagtgctcctattgtgccatttctgggcagcttcacataggtcgctgaatatgagatggcaccaatcaatgtgagggaatcgatccaattgttccttcaatagaacctcgttgtaagatatcgaccaactagcagttgggaaaagtagccggttgaagaggataaaaacattgaattgatagctcatcatcatttcctagcctcaatctgtcctgaagctttgaaatcac

SEQ ID NO: 28037 - DNA, 2097 bp, Zea Mays
cccggcaccctgcccgcctgtcgacactgtcgggtccggttggtgccccagcgaaaagcaaaagaaatactactaccggaagaaactgcctcctcctctcctcgcttctctctttggaggcaggcgcaggcgggcgagtggtccggtacacctctagctgcagatcccagctcgcgcggtccagcaggattctagcggatggaatgccacagctggtacgcgctgaaatcaagaagatctgtagcgatcgctggtgcggggtttgaagatgctgcagaaggcgccagcgatcttggtgacacgatgagtcttgcacgcaagcagaaggttgtcaaggaaacagtggagatggaggaggagcaggagtttgtttggaaatctaacctgctcccctacaaggatgatgatgccttcgttcttcctgagagtagcaaggaggaatacgcatcaacatcaggagacacagctccgtctggcaaaatggaccccaggatagaaaggtctggaagcaatgggacaagcaaggtccctagactgggttccatgcttgggacagccagcatggctggatttggcaaggcagtggagattctagacacgttaggctgcttgatgacgaccttgagctcagatggtggctttgtttccaggaccaagaccaaaggatgcaagatatcaattcttgcttttgaggttgccaacacaatacttaaaggtgctagtattatgcaatctctctcggaagacactgtcacatacttcaaacaggttgtgcttccttccgaaggtgtgcagaatttggtttccagtgagatgagtgaactgatgcgaattgcagctaacgacaaaagagaagagctgaaaatattttcccaggagattgttaggttcgggaaccgctgtaaagatccccagtggcataacctggatcgctactttgtgaagttagaatcagagagtgcaccccagaagcagctgaaagaaacagcaatagcagagatgcaaaagttgatgaacctcgttcaacgtacaactgatttgtatcatgagttgcatgcactagacagattcgagcaagagtaccgctctaggctaaacggaaagggtaatacagatagatttgaaaaaggagacaatattcaaattgtgagactagagttgaagacccaaagtagttatgtgaagagcttgaaaaaaagatctctctggtccaagacgttggaagaagtggtcgagaagcttgtagaagttgtgcactacttgcatgtcgagatcgacaatgctttcggaccttctgatggaggaggtgtggtggtgaatgcggaaccaaccgtgagctgtcaaaggctaggtcctgccgggctcgcattacattatgcaaacattatcatccagatatatagcatcgtttctcgatccgggtatgtgccagcaaattcaagagacgccctctaccagggactgccaccgaggatcaagtcggcgctaccaaatgagctgaggacgacctcggcgcctcaggtggtaaatacaagtagagaatttaataatcggcaaaataataataataataatctccacacgttgtaatctgatccatggattctgatgcagctcaccgtcgaccagataagggctaggatggagaagaccctgaaatggctcgcgcccatggccatcaacaccacctgcgcccgaggcttcttcctgaggtttagcgagtgggcgaaatcagggaccgagagcgttggcagacgactgggccaagcggatcgggtcgagacgctgtaccatgcggacaaggcaaggaccgaggatcgcattctggagctggtcgtctggcttcaccacctcgtcagccagagtagccggccggcgttgcaaaaaggccactgaccagatagatgccaggaatggtggaagaagctggagctgttcttgccatggagaggaggacgtccgggtacagtcggggagatgcttgtatatgcgtgctttgtaacatcagctgagtaggttttagttactactttgttctgcttgttgtttgtaagtgtacttgtgaataccacgttatacaatgcaaagaaaaacgca

SEQ ID NO: 28038 - DNA, 4380 bp, Zea Mays
cgtctcccctcccggcgaaggaaggaaacgaggcacgccctgacgcccacgcgaaagaaagttgacgcccacgccccacgcgcccaggaacaccaccggtgacgcgtgatcagactcgagaaccaatcccccccgactccctagccgccgcgctaaaatctacacaaagcctcgcaaatctggcctgatctcgcgcccccgatctcgcgctcgttcgcagcccaccgggaggtcctccagcctcccgccagatctcagcgtcgttcgttcgcttttagatttggtggggtaagggaggggaggcgggatgagcgcgcggataaaggagatggtgcgtgtggccacggcgcggctgggcggtgagcaggtgggggctggcggggtttcctcctcgggtatcgcgcgtcgggagtccacggcgcggctcggcggcgggggtacaagcctccggaggcagccgcagccgatggcgccctccgtgcgcaccgtctgctgcaacgaccgcgaggccaacgcccctgtcgggtacaagggaaattctgtgtcgactacaaagtacagcatcctgactttcctacctaaaggattatttgagcagttcaggcgggttgcaaatctttactttctcatgatctctatcttgtctactacacctatcagtccagttcatcctgtcactaatgtcgttcctctaagtcttgtgcttctggtgtctctcatcaaggaagcttttgaggattggaagcgtttccagaatgatatgtcaattaacaatgcacatgtcgatgtattgcaaggtcaatgttgggaaagtactccatggaaacgactgcaggttggagatattgtgaggacagcaaatcttgatggggaaacaaatctgaaaataaggaaggctttggagaaaacttgggactatgtaattcctgaaaaggcttctgagttcaaaggtgaagtgcagtgtgaacagccaaacaattccctttatacttttactggcaatcttatcatggacaagcaaactatacccctctcaccgaaccagttactcctaaggggatgcagtcttcgtaatacagaatacattgttggcgttgtcatattcactgggcacgagacaaaagttatgatgaattccatgaatgttccctcaaaaagaagtacattggaaaaaaagctagacaagcttatccttgctctttttgcaaccctctttacaatgtgtgttattggcgccattggaagtggcatatttattaatgaaaaatacttttatcttggattgcgtgggcatgtggaggatcagttcaatcctaaaaacagatttgtggtgaccattttaaccatgtttactctgataactctatactcaacgatcatccccatttccctttacgtgtccattgagatgatcaaattcatacagtgcacacaattcattaataacgatcttcatatgtaccatgctgagagtaacacccctgctttggcacggacttctaatcttaatgaggagcttggacaggttgaatatatattttctgacaaaactggcacacttacaagaaatctgatggaattctttaaatgctcaattggtggagaaatgtatggaactggcatcacagagattgagaaaggaggagcagaacgggctggaattagaatcgatgatgatgagggcaaaagatctgctaacgcggtccatgaaaaaggattcaattttgatgacgctagaatcatgcgcggtgcatggagaaacgaacctaatcctgaggcttgcaaggaattctttagatgccttgcaatctgtcatacagttcttccagagggtgaggagactccggaaaagataagttaccaggctgcctcacctgatgaggctgcacttgtgtctgctgctaaaaattttggtttcttcttttataggcgtacacccacaactgttatggttcgtgagtcacatgttgaaaggatggggagtatacaagatgttccatatgaaattctgaatgttctagaattcaacagtacaagaaagcgacaatcggtggtttgccggttcacaaatggaagactagttctctattgcaagggtgctgataatgttgtatatgaacgattggctgatggaaatcatgatatgaaaaagatcagtagagagcatctagagcaatttggttctgctggcttacgtacactttgtcttgcctatcgggatcttagtagggagcaatacgaaagctggaacgagaagtttgtacaagcaaagtcatctttacgagatcgtgataagaagcttgatgaggtggctgaattgattgaaaaagaccttatattagttgggtgcacagctatagaggacaaactgcaagaaggggtgccaacctgcattgaaactctctctgcagcgggcataaaaatttgggtgttaactggagataagatggaaacagcgattaacattgcatatgcatgtagcttggtaaacaatgacaccaaacagttcatcattagttcagagacaggcgctattagggaggctgaagaccggggtgaccctgtggaaattgcacgtgttattaaagattcagtaaaacagaatctgaaaagatttcacgaggaagcccggcattctttaattagcacccctgaaaggaagttggctctcattattgatggtagatgcctaatgtacgcactggacccaactcttcgtgttgatcttcttggattgagtctaagttgccactctgttatatgctgccgagtttctccgctgcagaaggcacaggttacaagcttagttaggaagggtgctgagaaaataactctcagcattggtgacggtgctaatgatgtgagtatgattcaagctgctcatgttgggattggcatcagtggccaagaaggaatgcaagctgttatggctagtgactttgccattgcacagtttcgttttcttactgatttgcttcttgtacatggacgatggtcttacttgagactgtgcaaggttatcacatacttcttctacaagaatctgacatttacactaactcagttctggttcacttttcaaactggtttttctggccagcggttttatgatgactggtttcagtctctatataacgttatttttactgcgctacctgtaattatagttggattgtttgataaggtaggattattcttacttgtttatggagttgtctcctgcaattgcactaagctctgagtcgtttcaggatgttagcgcgtcactgtcaaaaaaatacccacagctttacaaggaaggcatcaggaattcattcttcaagtggagagtgattgcagtgtggggtttctttgccttctatcagtcaatagtgttcttctacttcactgcagctgcaagtcggcatggtcagggttcatctggcaagattcttggcctatgggatgttagcaccatggcatttacttgtgtcgtggtgactgtgaatctccgccttctcatggcatgcaactctataacgaggtggcattacataagtgtggcgggcagtatagtggcctggtttatgtttattttcatatactctgcaataatgacgtcatttgacagacaggaaaatgtgtattttgtgatttatgttctgatgagcacctttttcttctatctgacaatcgtacttgttccgatcatcgccctgtttggggatttcctatatctatcgatccaaaggtggctcttcccctacgactaccaaataatacaggagcaacacaaggatgagccacacgagtacagcagggtgccactaccagagaccagccacctaagcccagaggaagcgagaagctacatgatctcgatgctcccacgggagtcatcaaagcacactggctttgccttcgactccccaggatacgagtcgttcttcgcctcgcagcaaggcatcggcgtgccacacaagccgtgggatgtagcccggagagcgagcatgaaaccgcaacgagcaggaaaatcctagtcgggcgaacacctctccgctgtgtaaagtcttgtatatctggtttcttgaccacaggagtttttgtataggtagcagtactgtagcccttttttcgtgtttgtcacccatatgttgttttgggatgaaaagtaggcaacggtccgtttggctgttaaacaatcatgtagggatacttggtagataaaaccaaaggggtattggacatgcagttaggaattttagtttctggcgttcattgcgtgatgtagtcgagttgattggtcggcccgccatgcaacttaaatcatgttactattattggaggcctgtgcattgatcatatcccattttatttcaatataagaacacatcctactcc

SEQ ID NO: 28039 - DNA, 1069 bp, Zea Mays
cccccgcctctatataggccatgggtggcgcactcggtgccgggcatcagctgcgctgctcaccaggaaggccatctcatccatccttcattgtattgtagtggcatcaccaggaacagcccagccgcaagaagacagacgacagcagcgagtggggatcggaagaaagaggaagcggagacgaaggtgagagagagaggcaaaagggcagccatgacgatgaagcagtcgaggttcaagaggatctgcgtcttctgtggcagcagccaggggaagaaggcgagctaccatgacgccgccgttgagctcggcaaccagctggttgcccggagcatcgacctggtgtacggcggcggcagcatcgggctcatgggcctcgtctcccaggccgtctacggcggcggacggcacgtcatcggggtcattcccaagacgctcatgacaccagaggagggtatggcacgctggaggagctgctggaggtcatcacgtgggcgcagctgggcatccaccacaagccggtcgggctgctgaacgtggacggctactacaactcgctgctgaccttcatcgacaaggccgtggaggagggcttcatcaaccccagcgcccgccgcatcatcgtgctcgcgcccaccgcgcaggagctcatggacaagctcgaggagtacgagccttaccacgacagggtggcgtccacgctcaactgggagaccacgatggaccacctggcctactgacgcccacgctgccagagccgccagcaggcgactgggacgacatctctgatccatcgatgccattcaggaaacaagcttttagcttgccgtcagattggggcttttgtttcgtttttaactgcatgcagatcggttttatttggagtgccggagggagagagaaaaaaaaaacaggttgattattcggttcgcgtagcaggagtacgtagtacgtgcttgttttgtgtatatggtgccttgtgtttgcttcccaccaacggggatgattgatggcttgcagtgttgtctctgtaccagttcaaaaaaaaaaaacccgaccggtttcccct

SEQ ID NO: 28040 - DNA, 1042 bp, Zea Mays
cgacggcttgggccagagtgaaaatggtgcttgctggtatcattacaatctggtagttttagtggttgggcttgacttcctactattcagaaacacagtaccgagaagtctttaggtggggtcaaagatggtgtcgctgaagttgcaaaagcgccttgccgcgagctacctcaagtgtgggaaaggcaaggtgtggcttgacccaaatgaagttagtgagatctccatggcaaactcccgccagaatatccggaagttggttaaggatgggtttatcatcaagaagcctcataagatccactctagatcccgtgcaagaagggcacatgacgccaagcaaaagggacgccactcaggatatggtaagcgtaggggtaccagggaggctaggctacccaccaaggttctgtggatgaggaggatgcgtgtgctgaggcgccttctccgcaagtatcgtgaggccaagaagattgacaagcacatgtatcatgacatgtacatgaaggtcaaaggtaacgccttcaagaacaagagggtgcttatggagagtatccacaagtccaaggctgagaaggccagagagaagacactttctgaccagtttgaggccaagcgcgccaagagcaaggcgagccgtgagaggaagatcgctaggagggaggagaggttggcccagggtccacgagaaataacaccacctgtctcatccacagctccagctactggggcaccgaagaaagcaaagaagtgaagtattgaaataaagctgtagctttctagtccagtactgcactttcttttataagctctagtcaaattttggagcgcctgaactgttttgctgttatataacttagtgtattgataaattcgactatcacatctggattattctgctggataatgtccgtgtctttgatgtttgtgttaaattcctattctggatgagcacctggccctaactttactccctccctggtttcctttatgagaggagagactcatttggttaggctctggaactcatgacgactgtagtcgc

SEQ ID NO: 28041 - DNA, 3385 bp, Zea Mays
cttggccgctgcgctcctccactcccctattccccacatcactccgcttttgcggccgcttgtggcggtgccttccacggggctgcggctgcgctccgccggagcgagcaaatatccttgcccccacgagaccctcgcacagtcgcacctctccgacgtgaccggcgccgtagaaccaccgggtcttcccttgtgggattattcaagaacatggagagaaagagaaaccccattgtctttctggatgtatctgtaggtgatgagccagatgaaagaatgatctttgagttgttcgctgatgttgcaccccttgtgactgagaacttcagagctttatgcacaggtgagctgggaattggacacaagactaagaagccattatgttacaagggatcatcgttccaccgtgtcatcgaagggttcatggcacaaggaggtgacattgcgaaaggaaatgggtctggtggagaaaacatatatagtggaaaatctgcaggtatcaaccttggtgtgaattcttttatatagcggagatgttgaataccaataacagaataaccttgcaaccttttatttgaggatttataatgttggttaccagtacatagtcaaatgctgtgttgttatgtgtctactgtctatattaggagtgtgttcaaattctaataatctatttcaagttactgcttttatctttttgtctgctactctgctttgctctgcggatctggagatagtatccaactgttctggtaagcactaaagcatgtagtatatctgtaatgacagtatattgtttgcatttcagatgaaacttgtgttctacctcatgatgatcgtggtctcttgacaacagcagatactggatccaaagctagtggctcccagttctgcattactttcaagcctaattctcatcttgacaggaagcacacagtttttggcaagcttgttgttggaagtgatgttctgaagagaatcgagcaagtagatgtgcaatcccctgattcaactcctgttgttccggttactatagtaaattgtggggagctcactgaccgtaaagatattggatctatgagaataggaattgataaaaagagggccgccaaatcaaagttgtcaaagggtatatcttctgatgaggaaagtaatgaaggacagcacaagggccgccgtaacaaatcttcaaaaaggagaaggaagaagagatatttttattcggagtcagatagctcttctgagtcggagactgaatcatctgattctgagagcgattctgatacttactcaagtgactcatctgatgtcagcagttcaagtgatgacaggcgaaggcgcagaaagagacattcgaagaaaaataaacgcaagcgttcaagaagaaagcatgaccaaaggcgtgaaagaaggcgtaggaagcgtgataggaaatcaaaacagaagtcaaaaaggataaagggtgacagtgaagctgaaagttcgagtgatagcagctctgaagatgctagaagcaagagacaccgccacgggcggaagtccaaggcatcatctcaagtttttgaggaaaatattgctgcagtgtctgctttgaaggatgccacgtcacctcaacaaaagagtggcataccaaacagtccagcacaagatgtctccccgctgcaaaatggggaaaactatacaaatggtgttaacgaatcaaaaattgaaaggaatgcagctgtcatgcctgttctaactggcaaccaaagcaaatctaggagccagagcatgagtgttaatcactcaatgagcaagagtatgagcatcagcccaagaagaagcccaatgaaaaggtcaattaccaccacaaagaggtcagttagcaggagccctgttcaccataatcgcagtggaagtcctgtcggtgctccccaaaaaagcgtgagcaggagttcagccagaaggcagagcatcagcaggagccctgctaggagcctcagcaagagcccacccagagatgcaagcagaagcccccacataagcaggactcctgttaaagctcacagaagaagcattagcaggagctcagctaggtccatggaacagagaagtctaagcaggagcctggagagaattcatgtacgaaaaagtgtcagcccaagaccaccattggcgaagccaaaaagcattacccgaacccctgtgacatctccattgcgaagcgttagccggagcccagctaggatttcaaggagcccacttaggccttctaggagaagccctatgagaagtccacgacggaacattcacagaagtctcagcaggagccctgcaagaatacttagaagtgtgagcagaagtccagtaagaggtggtcgacctcgccggaacattagcagaagtcccagtccacttcgcagggcattaacaccaccaaacaatggaaggagccgatctaggagtgattctcctgatgggtcacccaaacgcataagacgtggacgtggttttactcaacgctattcatttgcaagacaatatcgctcaccttccgctgatcgcttgcatcgttatggcggaagaaatgaccgtgacagatacatgggttaccggggttttcgccaccgatcacctcctcgacgttataggagcccctctagaggcagagtgtcatcgccaaggtacaggaggaggagccgaagcgcatcacgcagtcctgtccacagaggaaggagaggtgggtacaacaagagtcctgtacggagccgttcaccccccgccaggaaaaggtcacctagcgatcgtgcacggtcagtttctaggagccacctttctaggtcagtatcaaagtctccaccagtgcatcatccctccccacttgattctccatctctggagcgtgcaagtgatgggaaatctcggtccccatcaccgtctggtggaggcaagaaaggtttggtttcctacggtgatggcactcctgattcagctgggaagtaggtttccaccggatgtattgtactacctttggccattgtctcttgatcggtccagtgttacgtcactactgtagagaagagaacggttttggtccttgaggcgccccgtgtactggtgttgtcgctgtagaattgttacttaagttgtttgggatgatcgtcgttgtccttagattatcttaagacctagtactctgagcttagtttacgctcatgctgaacatgtagcagggcttcagcttaattaccattggtggaatttggatgttataatgtttgacgcatagagaatcattacattattttgatctcggagcacaataacatgtataattaataattaattccttctggaactatccaacactagcgtttctgcatgtatgcaataattcgcttggccg

SEQ ID NO: 28042 - DNA, 2049 bp, Zea Mays
cgattcgcagagagaggagcggcgccaacgaacggaggcgcgcggagcaaatcggagattcggagcccgggaccgggcgcgctccaccaccacacgtgacctcgctctcggcctcccgggcctcggcttgggcgcttggcaggctccccgctcctgcgggagaacgcaaggtttccacctaggcagagataaataagatctgcggaatcaagaagctctgtccaaggaggaagccagcggcacggcagtgccctcggcggtgatgaagtacgtctccgggccgtacttcgaaccggacttcgacccgctactcgaccgcttcggcaccccaggggtcgtcgtcgacaatgagacacgcgaggactgcacgctcgtcaaggttgacagcgtgaaccgggacggcgtgctgctggagatggtgcagctgctcaccgatctcgacctcgtcatctccaagtcgtacatctcctccgacggcggctggctcatggatgtgttccatgtgacggaccagatcgggcgcaagctgacggacccgtcgctgcccgagttcatccagcgcgcgctcgtgccgacccaccggccgggcaacggcccgtctccgaggttcaccacgtgcctgggcaacgtggtcgggccgggcggccccgacgtttcgggctgcgccgcgctcgagttcacggtgcacgaccgcccggggctcctgtcctccatcacgtccgtgctggccgacaacgggtgccacgtcgcgtccgggcaggcgtggacgcacaacggccgcgcggctggggtgctgtacgtgacggacaccgcgggcggcgccgcgctgctcccgggccggtgcgcgcgcatcgagcggctggtgaacgccgtggtggacgcgcgcgagaacgtgaccggggagcgccactgggtgcgcgtgtcggagcccgcgcagggccgcgtgcacacggagcgccgcctgcaccaactcatgcacgacgacagggactacgagtccggcccggccccgacccccgtcgacgaggacctcttcagcgtgggcgaaaaggcggcgaccgcgcggacggcccgccgcgccgtgacgcgggtgtccatcgacagctgggaggagcggggctacgccgtcgtcaagatgacgagcagggaccgccccaggctgctcttcgacacggtgtgcgcgctcaccgacatgcagtacgtcgtcttccacgctaccgtcggatcccaggggcctcttgccattcaggagtattacatccggcacaaggacgggcgcacggtcgacaacagcgccgagaggcagaaggtctcccggtgcctcgtggccgcggtggagcggagggccactcatgtcaggctcgaccattcctcgccgccatacttatcgggcgccgaccgccgcctcgttaaactaacacgcggccggcgttgaacgttgcagggcgtcagggtggaggtgcgcgccgccgaccggtcgggcttgctatcggatttcaccagggtgctgcgggagcacggcctgtcgctgctgagagttgagctcaagaggcacaaggacgaggccttcggcatattttacctcgtcacggacaccggaggcgaggtgcgcgctgagtcgttgcgcgccgtgcaggcgagggtcgccgagatggatatctcgctcgacgttgtgaaggaggcccctggctggccgccggtgaggaagactagcgtaccagccccgcccgccgccgggtctcagcctcaggagaggcccagaccttccctggggagcctcctatggtcacaccttgggaagctctcgaataacttcaacaacatcaggtcttgatacctgttcgcagaatgcacctgttgttctgcatagacgcttccattggtgcgtcggttccaataacttcctggacctcgagtaccaagaatttatgtcaggaagcagtacaaaactgtacataaagtgtatcagataaaagtaagcagagtgacgttcaatttatcaagaacttaggtgtgtttggttcgagaaataactttatctaaaatgag

SEQ ID NO: 28043 - DNA, 945 bp, Zea Mays
gaaacaagagcatgttcgctgggggttctgaaacaacggcgacgacggcggaatgggcgatgtcgctgctgctaagccaccccgatgttctgaagaaagcgcaggcggagattgacgcgtccgtggggcattcccggctgctcggcgccgacgacctgccgcgcctcggctacctccactgcatcgtcagcgagaccctgcggctgtacccggtcgtgccgacgctggtcccgcacgagtccaccgtcgactgcacggtcggcggccaccgtgtgccgagcgggacgatgctcctcgtcaacgtgtacgccatccacagggaccccgcgatatgggcggacccagccgcgttcaggccggagcggttcgaggacggccgtgccgacgggctgttcgtgatgccgttcgggatgggaaggcggaaatgccccggagaggccctcgcgctgcggacgctggggctggtcctggggacgttgatccagtgcttcgactgggacacggtcggcggcgccgaggtcgatatggccgaagggggcggaatcacgctcccgagggctgtccctctggaggccatctgcaagccgcgccatgctatgcttggcgtcctcaagggactgtgagcgccatgctatgccttgatacataagtaagctttttttctttagtaaagcagtcatcttgcgtctcaagcagttgcttgctttattgcttgaaactcactttcttcctggagtgtagccgccgcagtgtaagcgcgcggggttcaaatgttatttcattcacagccatcagccatgtatatgttgaactagcaatgtgaatgtgacccacgtaaaatcgcatgggtttactagttttttttttcagttatagcatttgtgtttttttatacttgaacatttttcccacatatgttgttttatttatttgattctaatcgca

SEQ ID NO: 28044 - DNA, 3675 bp, Zea Mays
ccgccaattcgctcggttcggcgccgcgctgattcgcttcggtactctctttctgcttccccccctggaatgtttccggtgattcgcgcggcatgagctcgggttggaggtggtgcctctgattcccgctggcccgaggcggaggcgcgagggcatgtgggtttctctggtgtggatccggggctgcgtgggcgtcacgttcgtcgatttccagagcgggaggggagccgactagatctctcggctcctgcggttgctgcgctccgtcgggagagttacctgtgaccggagaaggttgccggagggttttgggaggtgaggggacatggaggccgccaggttcggcgcgcggagcagccacttgtacggcagcgggctgggcgagcttgatctcaacaggcgcgagagcagggtgtttggctgggatctcaacgagtggagctgggacagtcagcggtttactgccacgccggtgcctgttgaggcggcgaatggctctggactgaacagctcgccgtcatcgtccgaggaagccggggaagagatggctaagaatggtggcttgggaggtgatactgacaagaggaaaagggccgtggtcattgacgacgacgacgatgatgaaacggaggatcaggacacggtcgtgaatggtggcgggtcgctcagcctgataatagggggtagtgctgctggtgctggagcgatggagaacggcgatgtaaatgaggatgagagaaatggaaagaagatcagggtgcaaggaggcggctcaagtgggccggcatgccaggttgagggctgcggagcagatctgactgcagcgaaggattatcaccgccggcacaaggtctgcgagatgcatgctaaggccaccaccgccgtggtcggaaacactgtccagaggttctgccagcaatgcagtagatttcaccttcttcaagaatttgatgaagggaagcgaagttgccgtcgacgcttagcaggccacaataaacggaggagaaaaacccgccctgatactgcaagttgtgggactgcttcaattgaggacaaaatcagcaattatctactgttgagccttattggaatctgtgctaatttgaactctgataatgttcagcattcaaatggccaggagttgctatccactcttttgaagaacctagggtctgttgccaaatcactggagccaaaagaactatgtaaactcctggaggcataccaaagcctgcaaaatggatcaaatgctggaacctctggaacagctaatgccacagaagaggctgcagggccatctaactctaagttgcctttcgtgaatggtagtcattgtggacatgcatcatcatctgttgtgccagtacagtcgaaggctaccatagtggtaactccagagcccgcatcatgcaagcttaaggattttgatctgaatgacacttgcaatgatatggaaggctttgaggatggacaagaaggttcacctacacctgcctttaagacagctgactctcctaattgtgcatcatggatgcaacaagattctactcaaagtccaccgcagactagtggcaactcagattcaacatcaacacaatcattgtcaagctcaaatggagacgctcagtgccgaactgataagattgtcttcaagctttttgacaaagttcccagtgatttacccccagttttgcggtcacagattcttggttggttgtcaagtagccctactgatatagagagccatattagacctgggtgtattattctaacaatatatctacggttagttgagtctgcatggcaagagctttctgagaatatgagcctgcacctggataagcttttgagtagctccactgacaacttttgggcatctggcttggtatttgtgatggttcggcgtcgcttagcttttatgctcaatggtcaaattatgttggacagacccctggcacccagttctcatcattactgcaagattttatgtgtcaaacctgttgctgcaccttattctgcaacaataaatttcagagtcgaaggatctaatctactcagtacttcctcaaggctaatttgttcatttgaaggacgttgtatattccaggaagacacagactctgtagcagaaaatgatgagtatgaggatagggccatcgaatgcctcagtttttgttgttccgttcctggtccaagaggaagaggatttatagaggttgaagatagtggttttagcaatggcttcttccccttcataattgctgagaaagacatatgctttgaggtttctgagctggagagcatatttgagtcctccagtatcgaacatgcagatgctaatgataatgccagggaacaagctctggagtttctaaatgagctgggttggcttcttcacagagcgaacagaatgtctaaagagaatgtaactgatacatctgtagctacctttagcatgtggagattcaggaatcttggtgtatttgccatggagcgggagtggtgtgctgtgatcaaaatgctgttagatttcttatttattggccttgtcgatgtgggatcccgatctccagaagaggtggtgctttcagaaaatttgttgcatgctgctgtacggaggaagtctgttaacatggttagatttctgctgagatacagaccaaacaaaaactccaaggggactgcacagacatacttatttagacctgatgctctgggcccgtcaatgattacccccctccatatagcagctgccactagtgatgcagaggatgtgttggatgtgctgaccgatgatcctggactggtattctatttctagttcttggaattttacctcttattttccaccacctcaagctgagctatattaatttacaacaattggaattagtgcttggagcaatgcacgggacggaacaggttttaccccagaagattatgctcggcagagaggcaatgatgcttacctgaatctggtccaaaagaagattgataagcatcttggcaaaggccgtgttgtcctcggtgttccgagcagtatatgctctgtaataactgatggtgttaagcctggcgatgttagcctcgagatctgcatgccaatgtctgcatcagtgccaggttgcctcctctgcagccgtaaggcacgggtgtatccgaattctacatcgaggaccttcctttacaggccagcgatgttgactgtgatgggagttgctgtggtctgtgtctgcgtgggcatactcctccatacctttcccagggtttatgccgcgcccacattcagatgggagttgctggagcgtggacccatgtaagttttaggatgagccttagctgttgtttgtaacttgtaagttgagagttttagcgttgtggctaagatcaaaggaacatgattaccgtgtgaagaagttcatctgtgtttaacgcaagatgctgttgcggctgtaagctttatatacatcgtcgatttcaactatatttacagcctatcatgctcccattccattcatccattttgttttagaattcattccttgcggagaatttgtgaaccatcagaataaaaaacaggttcttgtatttataatcgttgagacataatatttcttggaatgatgctgaaaaactcatgattgcatttgctgaaagtatatgttacaatccaag

SEQ ID NO: 28045 - DNA, 1692 bp, Zea Mays
cagcgcccctgtttcgggttaatttcaagtgcaacttctgatgaatgtctcagagatcgagggagcgagaagagagggaggcaaaggagacaacatatgggatgtatttacagatgacaaagaacgtgtcttagacagaagcaatgcagaaattgcagttgaccactaccatcgatacaaggaagacattgagctcatggcaagtctaggttttagcgcatacagattttctatatcttgggcacgtatatttcctgatggcttgggggaaaaggtcaatgagcaaggagtcgccttctataatgacctcatcaactttatgatttcgaaaggtattgagccttacgcaacactgtatcattgggatcttccaaacaatcttcaaaaaactctggggggctggatttctgacaagattgtggagtactttgcattgtatgcagaagcttgctttgcaaatttcggagatagagtaaagcgttggataacaatcaatgaacctctccaaaccgcaatcaacggttatgggattggaatttttgcgcctggaggatgccaaggtgaaactgcaagatgttacttggccgcccatcaccaaatcttggctcatgctgctgctgttgatgtttatagaagaaaattcaaggctgcacaaagtggtgaagtaggcttggttgttgactgtgaatgggcagagccattttctgaaaaactcgaagaccaaattgctgcgcaacggaggattgactttcaacttggatggtacctagatccaatatattttggtgattacccagaaagcatgcgtcagcgactgggcagtgatcttccaaccttctcagagaaagataaaaaattcatcaagaacaaaattgattttattggactaaatcattatacttcgaggctcattgctcatcaccaaaatcctgatgatgtttatttctacaaagtgcaacaaatggagagagtagaaaaatggagtagtggtgaaagcattggtgaaagggctgcatctgaatggcttgtcatagttccttggggccttcacaaattgcttaactatatagtgaagaaatacaacaacccagtaatttatgttactgagaatggcatggatgatgaagacgatcagtccgcgacgattgaccaggtcctaaacgacacgaagagagtcggctacttcaaaggatacctcaattcggttgcacaggcgatcaaggacggggctgatgtccgtgggtacttcgcgtggtcattcctggacaacttcgagtgggctatgggctacaccaagaggttcggcatagtctacgtcgattacaaggacgggctctccaggcaccccaaggcatcggccctctggttctcgcgcctcctcaagggcgaggctgccgaaaacagctatagctagagctgccacagactgagggaacagtccgcggcaagtacagaaacattacacacatttctcctgttgttgtgtcttgttgttgtgtcttaaaggtgagtgcacctatgtatgtatgtatgtatgtatgtatgtatgtatgtatgtatgtatgtatatatgtattcatcctaataatctcaggatgtgctagtctgtcgttgatgcgacgctggctgagatgtgttctccaagaacaagaacaaccagaacctcagcaccaaataagctttgaatccatg

SEQ ID NO: 28046 - DNA, 3614 bp, Zea Mays
gtcaactcatctcgaggcagttccgctgccggaagcccgcaattcaacacgcgaagctaaaaaagaaaaaaacaattcgaaacccccgacctacgcgaggacaaaacagcaaaaccaaagcgctcagccgctcgcgaggagcgaaaggcgagcgcgcagccgggcgcccgtggcggaggcgaaacccccgccgccgcatcgccctgagaccctccggttcggcccgggccgagctcgagcccgcgcaatctcgccgccggcgggcttgatctgatccaaggccaccgcgcgccggcgcgggcggcgaggaatggggagcgtggacggccgcggggtcgaggggatccacgaagctaatcggcgcgcgcagttgattggatggatgaatgccttactcccggaattcagtttgcctccggattcatcgagtgaagagctgcgagagctgctcagtgacggcgtggtcctgtgccgtcttgtgaacacactcatcccgggggttcttgagggatcctgggagggttatgcaccgtcagatcagaggttaggcaacgtgaagaaattcctctcggtggtctctgatatggggctgccaggcttcagtttgaaagatcttgatgagggattaatgtcttctgtagtggaatgtctcttggttttgaggggcagtgtggatcctagattaggtgatgatattccaccagatgttaccagaactcctttgagaaaacaatggggagttcaggaaatggacaagcctcaagttcccgctgcagcactagggaaaagatcccctgcagaggacatgagaaacggcgttgcagattccaaaacccatcagaaaacttctgtcttttctggacaaaaggttcgtgaagttttccaattaaaacgcggatcatattcagatcttactgctgccaagatttcagagatgatgcactctaatagcttagataatgcaccgacacagtcgcttattagtgttgttaatggtattttggatgaaagcatagaaaggaaaaagggagaaataccacatcgtgtagtttacttactgcggaaagtcgttcaagagattgagcaccgtctctgtattcaagcagagcacataagaagtcaaaatgttaccatcaagacaagagaacaaaagtactgttcaaaaattaaagcacttgaaatgttggtaaatggcacaaatgaagaaaaccagatggcaataaacaggcttcagatagtcaagaatgagaagtcacaaatcgaagagaaaaaagaactctgtgagaaagatgttcaacgattaatgaaagagaaagaatattccaaaagcatcataatgaacctaacaaaagatatggaagccatgaatagattgcatgagcagcaacttgagcaaattggaagaaaggcaaaggaaatggaggaacaattaaccaccagggtaaaagaagtagagtatctcttgctacaatcgaataagaaagttgaagaacttgagattgcttctaggctaaaatcacagttatgggatcagaaagagaacatttttcagagttacatggataatcaacaattagttatcaaggacataagaatattgtcacagtcatatgaaaatgatatgtatgcacttcaaatgcagtggagaaatgaaatctctaatttaggatctgggttaaaatgtttggttgatgccgctgaaaattatcataaagtcctgacagagaaccaaaagttatttaatgaagtgcaagaactaaaaggtaatataagagtatattgtcgtgttaggccatttctttccggtcaagataaaaagtccaccacaattgactacatgggggaaaatggtgagcttcttatatcaaatccatttaagcaagggaaggacggacatagaatgttcaagtttaataaagtgtttactccatttgcttcccaagctgaggttttttctgacatacaaccactgatccgatcagttctggatggattcaacgtttgtatttttgcatatggccagactggttctggcaaaacttacactatgagtgggcctaccacatcaaaacaagattggggtgtcaattatcgagctttaaatgatttgtttgatatttcactaagtaggagaaatgccttctcatatgaggtgggggtacaaatggttgagatatacaatgaacaagtccgtgatctgctatcaaatgatattgcacaaagaagacttgggatttggaacacttctcaacccaatgggcttgttgttccagatgcaagcttgcactcagttaagtcgacatctgatgtattagacttgatggagattggacaagcaaatagagcagttggttcaacagcgctaaatgaacgaagtagtcggtcacacagtattctaactgtacatgttcgagggatggatttgaagaatggatcaacctctaggggttgtttgcatcttattgatcttgctggtagtgagagggtagagaagtctgaagtaaccggcgatagattaaaagaagctcaatacattaacaaatcactctctgcgttaggtgatgttatttttgctttgtcacagaaaagtgcccatgtgccttatagaaacagcaagttaacacaagttcttcaaagttctttaggtggacaagcaaaaactctaatgtttgttcagataaatcctgatgttgagtcatattcagaaactataagtactttaaagtttgctgaaagggtgtctggagtagagttaggtgctgctagaagtaacaaggagggaaaagatataaaagagctattggaacaggttgcgtctttgaaagacacaattttgcgcaaagatatggaaatagagcagatccaggtcatcaaagacaaagtaaaatccccaaatttgttgttagatagaaatgtgcctggcttgacgaagactacagcaaaccaacctagccaactattatcaggcgaacgaatgcttaagtctagtgacagagttctatcggatcgtcagagttacggcgaggtgaatgtagatcctaaccaccatgtgatggatactgcaccagtgagcatagatgaagcaggatatgagaacaatgcatcggatgatggtttatcgggtgaaaccgagaatgataattcagctgctgagatgacagcggaacggctgcatagatttccatcaagaataagcaggttcactctcacaaagaacgggcagccatctatgtctagatcgaacccaaaggatgctaagactccaagcaatacgaaagctccatcgagccggttgacaggaggctcttcagccaggtctaaaagacggcagtagagcacgatcatgttgctcgttttgatgtgcattgtagttgaaatgtgaatttgatgggtagttgtaggaccgttttatgattgtaactttagaaaatgtcagacactgatggcagaatatttgaggcatttgtttgatcatttgcttatgccgagcaaaacagcaaacaatgctcgattgtatgtgaaacactctgacctgtgaccatttgaatgtcggtgcgcctccggaagtccggagttgtgtatataccaccaaattgccggcctaaaatttccag

SEQ ID NO: 28047 - DNA, 3244 bp, Zea Mays
cacctcacaattttccatgggattgattgaggtccagctttttagctggcaggtcttaaggtttcagagtttttcctttcaatttatcaaggactaggccaacaatacatcgcaatgaagtacatgaagctcggttcaaaacctgatacgttctataccgaagaagcagtcaggtcagtcgtatcagacatacccgccgatctcattatccatgtaaataacaccaagtatcagctacacaaggtacatagtgatgtttttcttccatttaaatgcaaaaaaaaggtgatcatcgtcttctttcacgaaacactctcatacattctctcgtgtagtgctaatcaattacttcatggtttcgagacagatatgcatttttcttcttaccggtgaccaaaaagtagcttttaggatcttgtaagtcaactgaaatacccatatatcaatccgatgctctacgctgaaagcacaaagttgattgagaaaaacatattcctgtcaatcaacagcagttgcagccacttgtaaaggcttagagatttaactttacaaaaaacaactccagataattatctaatagttcatcgcttcacatgttaccaatttctttccatgcgcattgtcacggatctcatgatgctatgaacagaggcacctttactactaagtcgccgctcgcaatgattagcgcgtatcaaagcctaatgatggcatcagactatataattctatctttgtttatgctagtaactaataaaaatggtcaatgaagaaggaatctgggtttggttcataggcctaaggatctgctttggcaggattgtcatagttcacatgctgaaccagacacgcagccggctttttcagatacacgcttcaaaagcttgttctgaataataacatggcaacaacctagcgagtcggaattgattgtgcagctctttaatagcttttcatcaggtggttagtttattggcaaatttgtaaagtgatcaagtggtgaaatctatgcatggtgtgcttctgctaggctagtttcaagggttggtatttttttatattttttctactaagcaaagagttctggtgaactcgatttgaaactattttgacagatctgcttatgtatcacttttacatttgaaatggcggttaacctgtgtcaagagttatgaagttgttttcattttgttggttctacattatttgcagctgaaattctctgtctctgacgacattatttacaaacaaagtatatgcgaacgttacttcgtcctagtatagtagggtggtgacgacaaagaagcgagttttccatttccaatgtccagcctcttgatttcaggtgttgtttacctgtagttcccactgctcctcaagtgcggcctcctgcagcgcctctgctccgacaccgacgacggcgatgaggagccggtgcccgtggcgctgcacgacatccctggcggcgagcaggcctttgagctgtgcgccaagttctgctacggcatctccatcagcatcagcgccgggaacctggtgcccgcgatgctggcggcgcgcttcctccggatgacggaggccgtcgccaagggcaacctggtggccaagctcgagaccttcttcgactcctgcgtcctgcagggctggaaggactcggtcgccgcgctgcaggccgcgtggcggatctccggctggaacgagagccgcatcgtacagccctgcatcgactccatcgtcgagaagatcctcctgccaccgtccaaggtcacgtggtcctacacgtacacgaggccagggtacaacagcacgaggaaaccccaccagtccgtccccaaggactggtggacggaggacatctccgacctggacatcgaggtcttccgctccgtcatctccaccgtgcgcgcgtcgcggctgctcccaccgccgctcatcggcgaggcgctgcacgtctacgcgtgcaagcacctcgtcgacccgctccacgttgccagcgacgcaggactgaccgccaacggcgtcctccaccagccgccgcagagctcagacgacggcgaggagaagctggtggccatgcagcgccgcgtgctcgagtccatcgtcaccatggtcccgggcgagccggggtcggtcaccggccgcttcctactaaggctgctgcgggtggccaactacgtcagcgcgtcgtcgtccacgcgcgcgcagctgatccggcaggccggctcccagctcgacgaggccagggcggcggacctgctcatcccgctgccatcggacccgcacgcgtacgacgtcggcacggcggaggccgtgctcgagcacttcctggcccagttccagcggcccgcgccgaccgacgagcggcgtcggatgagcgccgccatggagaaggtcgccaggatcttcgacgagtacctgcggaccatcgcgctggaccgcagcttccctgtcggcaagttcgttgacctcgtcgaatgcttgccggacatcgcccgcagtgaccacgacggcctctactacgccatcgacatctatctcaaggagcacccggagctgagcaaggcggataagaagcggttgtgccggctgatagactgcaggaagctgtcgccagacgtgcgggcgcaggcgatagccaacgaccggatgccactgcgcaccattgtacagcttctcttcgtcgagcaggagcggaccatcggtgcagccgccggcagccatgctgcttccggtggcgccgcagatcgggcctccgtcggtgttatctcccagctcgcggcgggaaccaaagatgaagaaccagcctcgtctgctggccacaagtcagacgtgcacagaccacgccgggaccatgcccgggtagccgatggagcctctgccatggcgaggtcgctgtcggcgtcaaccaagactccaccggcagcgaggaaggagaggacgccggaggagacggggagcaggatgaggaacaagcagtgaagcccagtgcacaatttgttcatacttgtgattcttgattatattttttttatttcagtgcatcccatttttggtgggagatgtaagaggtagatttttgtaattaaaatggataaggagttaataagtggctacgtgcagtcatgctcatataatctagggtagctcaccgatgaacaaaggttcgtgttcatcacattcttcctccggcagaacttatgtttgcccatgcatcggcagcctacgaaaaatcagccaatttaac

SEQ ID NO: 28048 - DNA, 1571 bp, Zea Mays
cgcacaactacatccactagttgtggggtaataattaagaatttgttaatgagcaggtgcatggcctcaacactagtgcgaactgggtttgtacggggatctatgacccaaggaaatggctgttatcagcaccgctgcacgaacaactcactagaggttgctgttgatgggatctggaagtcatgtccacaatctggtgggcctgttcagtttccaggattcaacggggaattaatttgcccgatgtatcatgagttgtgtactactgtaccagttccaatgattggccaatgtccaaagtcatgcagttttaacggtgactgcattgatggaacctgtcactgctttcctggttttcatggccatgactgcagcagaagatcttgcccagacaagtgcagtaaccatggtacatgcaaagctaatgggatctgtgaatgtcaaagtggatggacagggattgactgctctacagcggtttgcgatgaacaatgtagtttacatggaggggtttgtgataatggtaaatgtgaattccgttgttcagattatgcaggctacacatgtcagaagggttctgcaatactgccaagtctgtcaatgtgtcatgatgtacttgttagagattcagatgggcagcattgtgcgccaagtgaactcagtatactacagcagcttgaaactgtagttctcgtgccaaattacaatagattgatgccaagtgggcggaccttccttaacttcttcaacaatgccaactgtgcagcagctgcaaagcggctagcctgctggatctcaattcaacggtgtgacgaggatggggacaacaggctcagggtatgctactctgcatgcgaattgtacaatacagcttgtggagcgggtctggattgttcagaccagaccctttttagcaaaagggaagaagaagagaagggtgttccgtgcacaggatatggcgagaagaagtctttctggctataacatctctgaagcttcttccgttatggctctggatacgggaagtaagcgtccgtttcacctaggcacccgaagatgggctgccctggtgtacaagctatgttggagtgggctctttgttagaagaatcatttcaatgggagcccgtgttgtgttctttgctccacgcggccatgccccttgccccatttcttaagctgtcgttggcttttatgatatttgattgacgcatccttggccaacacagtggcagtggcttcgcttatgttcaactggaattcgttataacatagatgatgacgcttgtgggtgattacttcgcttagcggctgccgtggaactagatcctgtattgctgatccctgatggcttgatacgagtgttggagccgtcacatgacatttagcacaagtatgtcacaatataaacagcagtaacgaagtgtcaaggacagtagttatatgagcagctttcgttgttggaaaaagtatatattactgtgatggaatagtcattttggccgctcaactattgcctaaggcgcaaattagtccctgactgtacttcgaaaatatttgcttcaatcatca

SEQ ID NO: 28049 - DNA, 2990 bp, Zea Mays
ctttgcaatcttgatttaacccgagaaaaaacttgagaaatgctgatgagcgagatattcattgtgttgcagccctatggtacagttaatctgctttctgctttgacgtcagaagctgtcaagtcggttctgaataaccagagtgaagaggaaacctggggcatagattcccttgatattttgttagaaacatggaatgttcttttgggggacgtagatgccgataaaaatccaatctcaaccgatggagcacttgcatcttcaagtttgtttaagatgattgtggagtcacacttgaaggctgctgctgattctgcgttcgaggatactgatgatactgaatattttcatgtttctgtttcaaaacgtgatgaacagttagccttgtatgctctaatagcacgggcttctgcaaatactactattccatttcttgcacagttgttttcagaacgatttgcccggctaaatcagagaaatggtgaaagtgatcctactcaaacactggaagagctctattggctgttgttggttactagtcatgtcctaactgactctggcgaaggagaaacactacttatccctgaagcattacaggctggattccctaatgtgattgaagcagcacatcatcctgttgttacactctcctggtctataataaatttttccaggcagtgtttagatccaggaattagggcaaaatacttcagtccacgactaatggaggctgtgatctggttcttggccagatgggttgcaacctatttagtgccacttgacgtgagtagaggaaaagtaagcagagaaattgataatgtgggtacaaatggatcccaacattccagaaaactgctaaacagttttgcttgggaaaataaccaaggagagcttgttcttgattttgttgttctcatttcaatgttagctcttactacctatcagggagaaaatgagttgcagacactgacatgccagaagctacttgctacagtcgttcgccggaaacacacatgcacttatcttgttcaactggattcatggcgtgatcttacaagagcttttgcaagtggacggtctttgctttcattgagtggacgtttacaaaggtctctagcagaaacacttgcctctgcagcttcctgcatcaaagatcctgaagcatctgcacagtacctgagggatctcatgggaccagtggcagggtgcctggtagaaaatgctagcaggagtgatctaaaatctgtggcacagcaagcagatgttatttacatggtctgttgcctattggaacgactaagaggcgctgctagagctactcaaccccgaactcaaaaagttctatttgagatggctcatactgtgatgaacccacttttgactcttctggaggtctacaaaaatcattccacagtcgtatacatgatactcaagtttgtggtggactttgttgatggtcaagctgtattcctggatgctaaagagacatcagctttggtgagcttttgcttgcaactactccagatatactcctctcataacattgggaaggtaatgctctctctttcttcaagtctgcgtaatgagtcacaagcagaaaaatataaggatctgcgagctttgcttcgtcttctgacaaatatatgttcgaaggatttggttggctttctgtctgattgtggcggtgaaggttcacctgatatcgcagaggttatctacattggtcttgatattgtgacccccttgatatctttggatcttctgaaataccctaaacttagtcgtgattattttgtgcttatatcgcacttgttggaactgtacccggaaaaggttgctcacttaaatagtgatgcttttacaaggattattggaagtcttgacttcgggctccgtaatcaggatagcgatgttgttgagaggtgcctggcagcagtaaatgctcttgcttcatacaatttcaaagaaagattaggagggagaggaagactgaactcgcagctcatggaatctgaaggatctaatggcaaactgcaggaaagcatatcaagtcacttcttgagacttctgttgcaaatacttctttttgaagatttcagatcggagttagcaggttatgctgccgatgctttgcttcctttattgttctgtgaacaggagctatatcagaggttggtccatgagttgttggataaacagcagaatccgaccgtaaaatcaaggctggcaactgcgttccataaccttacaagttcaaacaatctctcaagctcactcgaccggccaaacaggcagagattcaggaaaaacctccttagcttcatggcggatgtatcgggcttcatgcagatcaagtagatgcgatggcagggaacaggtgatgtttgaccggtcaattaaaccccgaggaagcactgcaccactgtggtaggggtgcatgtgggcaccacatgtctgtggattgatgagagcgaagactgccacgacaagtctagtagatcttgaagagctagtgtcaccagaaaagacagggagatgagctagtcttagggttggcattcatagcgcatttgctggacaagatggaggcgtccctggccacgagatcgtcgtgtaaatgcgtttgttagacgcacagaaacggtggggattttgtggtggcgactcgttttgttcaattcccacaggcagaaggtagagatgttaagttgatgtaaataccgtttgatttaaacatgccttattcgtaggagaaagcgacacggcttgctgtaacttagggtttattactctttctcgtggcataggatccccaaagaagtctttgctggggtatttgcagccaaacgatgaccagtatgattgcgagaggttttcaatcttttgtaccaaatttggcctgcagttatgatgacactgagtgccgatacaggcatgaggcattccaaaattggcgggcaccacatgtgtctgtctgctgtctcagtggg

SEQ ID NO: 28050 - DNA, 1257 bp, Zea Mays
ggaaattttgcccatggtgtaactgatgtaccttgccctagaccttgtgcacaggtgtggattttaaaatcaagttccttacagttggtggaaagaaactaaagttgacaatatgggataccgctggccaggagaggtttaggacaataactagttcttactacagaggtgctcagggaattattttagtatatgatgtcacaaagagagagagtttctcaaatttggctgatgtttggactaaggaaatagaagcaaactcaacaaacaaagactgcataaaaatgcttgttggaaacaaagttgacaaggatgatgaaagaatggtcacagaagaagaaggtcttgcttttgctgaagaatctggttgtctgtttcttgagagcagtgcaaaaacacgagaaaatgttgagaaatgttttgaagaacttgcattgaagatccttgaggtccctagtctcctggaggaagggtcttcttcggttgtcaagaggaacatcctgaaacagaagcaggaaagtcatgcaaagaacggcagtggatgctgtcaatagatgtgctgatccacgcgacaaggttggctgttttcgtgtgagctgccctgacgttctgctgtacatgagttgtatctacatggtcttgtgagtaaaacagggttaaagaatcagcttgtttggcggggagggggagtgagcataattgatttgtacaaaggacatggcagtttggtgtcattgattttctctctctctcttatcatctccggtttagcgaagcaattttgttgtcgtccctatggaatcctctctcgccacagtattgtactagctgacctgttggggcaactcgtgtgagcattgggcagaccaactccagcaacgctatacatacgggcgtgtataacactttacagtgtagatgtactatttgcagagtggagtttgaaatagagtgatactttgaaatagagagtgatactgggagtggaataggaaggcttagtagtagcgccgatgttggttagtagtcgttggctatatcattttctaccgtgtttggttgggaagtaaatgggatggtttggtaacaaaaatacctagggatacaatcatttcatgtgagaaatatttctgttagggcttgtttaggagctagaatactagagaggattcgataccagaggatattagaggggctaaaatctctctgctatattcaattatgaatatatgattttagtccctccaatcctcttcg

SEQ ID NO: 28051 - DNA, 5241 bp, Zea Mays
caaaaccctaaccctaaccgcggggatggcgacgcagtcgcactcctcctccgctgccgcgatagacatgtatgagacggcctctcagccggacgcctccgttgccggcgacgcctacaccttccttgagttcaacactcagggtgacgaattcgactaccccgactttccggagctttctcaaccgccgccccgatcgacgccgctgacgtcttccatccccggcgctggcgcgtcgtcctcgtcgtggcctgccccgccgccgccgccctccgacgcggcctccgctgaacccgatctcacgtctctggacgtccccaccccgccggcctcctcctcctcgccgtcgccgcggtctgcctccaaggcgcgctcgttggctgcggcagatgggctcgcctccggggtagccgcactcagcttcgaggatcctgttggagccggcgccggagaggacgggtacgactacggcaagggagacttcgtggaacacgcctgccggtactgtgggatccacaatcctgcatgcgtggcgaggtgcaacgtgccctcctgccgcaagtggttctgtaactcgcgggggaacacctctggctcccacattgtcaaccacctggttagggcaaagcataaggaagtgtgccttcacaaggatagccctttgggagaaacaatccttgaatgctacaactgtggctgtcggaatgtatttcttcttgggtttatctcagcaaaattggagaatgttgtcgttcttttatgcagagagccgtgtttaagtgttaatgcactgaaggatatgaattgggatctcagccagtggtgccctcttattgatgacaggtgtttcttgtcatggcttgtaaaggtaccttcagagcaggagcagctaagagctcggcaaattagtgcacagcaaattaacaaagtggaagagctttggaagacaaatcctgatgcatctcttgaagatcttgaaaagcctggcgtagatgatgaacctcagccagttgttttgaagtatgaagatgcttaccagtaccaaaatgtttttgcgccactgataaaacttgaggctgattatgacaagatgacgaaagagtcacagagcaaggataatgtaactgtccggtgggatattgggttgaacaagaagcgtgtagcttactttgtctttccaaaggaagacaatgagttgaggcttgtgcctggagatgagctacgcttgagatatcctggtgatagctcacatcccacatggcaatctgtgggacatgtgattaagctcactgcacaagaggaggtggcacttgagcttcgtgcaagtcagggggtgcctactgagctaaacgttggattcagtgttgatttcgtttggaagagtaccagttttgataggatgcaaggagcaatgaaaacttttgctgtggacgagacaagtgtcagtggatacatataccaccaccttttgggacatgaagttgagcatcaaataatacgtaacaccctaccaagacgctttggtgcacctggacttccagaactaaatgcttcccaggttttagcagttaaaagtgtcctgcagaagccagttagtttgattcaaggtccacctggcactggaaaaactgtcacatctggtgcaattgtgtatcacatggccaaacaaggtcaaggacaggttcttgtatgtgccccaagtaatgttgctgttgatcagctggcagagaagataagctcaaccggtctcaaggttgttaggctgtgtgcaaaatctagagaagctgtttcgtctcctgttgagcatctcacacttcattatcaggttaggcaccttgatacctctgaaaagagtgaatttcacaagttacagcaactgaaagatgaacaaggtgaattgtccagcagtgatgagaagaagtacaaggcactaaagcgtgccactgaaagagagatactgcagagtgctgatgtcatttgttgcacctgtgtcggtgctggagatcctcgtctttcaaacttccgtttccgacaagttcttattgatgagtccacacaggcaacagagcctgaatgtcttattcctttggtgcttggtgtcaagcaggttgtccttgtcggagatcattgccaattgggtcctgtcatcatgtgcaaaaaagcagcccgtgcaggattagcacaatctctctttgaacgccttgttatccttggagtgaagccattcaggctacaggtccagtatagaatgcatccatgcctctcagagtttccatccaactgcttttatgaaggcacactgcaaaatggagtgactgttaatgagaggcattcgtctggaattgattttccttggcctgttccaaatcgcccaatgttcttctatgtgcagatgggacaagaagaaatcagtgctagtgggacatcgtatctcaatagaactgaagctgcaaatgttgaaaaaattgtaacaacttttttaagaagtggtgttgtaccaagccagatcggagttatcacaccttatgaagggcaaagggcatacattgtaaattacatgtcaaggaatggctctcttcgccaacaactttacaaggaaatcgaggtcgctagtgtagactcatttcagggtagagagaaagactacattattctatcttgtgttagaagcaatgagcaccagggaattgggtttctcaatgacccgcgcaggttaaacgttgcgttaactcgtgcacgttatggcatagttattcttggtaatccaaaagtactaagcaagcagccactttggaatagcttgttgacacattacaaggagcatgagtgcttggtagaaggacctctgaacaacttaaagcagagcatggtgcagtttcagaagcccaaaaagatatataatgatcggagattgttactgggcggtgctcaaggcatgcatggagctaacttcggggctggggcctcaagccaagcagcagataagagaagtggcagggggaaagggcaatcatttgtttcttatggccctccaaatggggtgcacaagcctggtgtgcacccagcaggttatgctgtacctcgtatgccttttcctccatttcctggggctccacattctcaaccatatgcaattccgactcggggtttgcatgggcccattggagctgttccaccggtgcatcaacctggaagtagaagttttggggcacctcgttcaaatactggtgggcctattggtggccaccttgctcatcaacagaattcccagcaagctatgggtggcattgggtcaaattttaactacgctggcatggagaattcgagtagtcagccttctggtgtagcccaaatgtcccaatcgggattaatgacacaggacttcattgtagatgattttaagagccaaggatcacatgtgccatacaacattgcagaattttctacccaggcttctcaaggtggttatggtgttgagtttactcaagcgccccaatctggatactctgggaattatatgaaccaaaacacacatcctggatactcccatattggtacaacaaatgacattgtatctcaggatcacatggcccatggatctcacggaatgtttacgcaagtggggtataatgatccgtcgcaagatgagtcatctcagattcattatggaatggctgctgctggtcccctacattcgcagagcatgatgaaccccttatactctcaatcctatgctcactacaacacccagccacattctcttcaacctcctccccagtgataattaaggcttgtgatatggtgaagccacattttggaagtttggtgggttgcatcttttggcccacatgttgtgcccttctctgctatttcagaatcgatggtgcatagacatcagatgcaagcaatgtgaacaagcatatgacacactttgtattggatgtttatcggggcaggcttgtacaagatggctatggctactgaccaacagccagcgccgaggagcacaaggattgcaatgtatcatgttcttgatcgttgtggttcactacccgtttagaccacaagaggggtcatattgtgcatcggaagaggttggcggcactatcctcatccctcacctgtatataaaggcaatctgggcctatagtggtacaatgtgaacatattccaggatttgctgccactcaagtcaagttgcagcaattgcatgcctccatggtgtagagtggctttgtataaaggtgctataggttgggtggccacaacccttttggatatcacacatgacaagatatttacctttacattttgtatgcatctgatatggttttgatatttatgccagagatgatttaggtgatggtaaaattagttagtgacgactggaaatttgggagtgttctgtgaaagtaaatttgaccctgaatcctgcgaggaatggctgatcatgaagtttattgtaaaaaatcgagactcctcttcaatctccaccaaagaggtggacatggtaattgtaccagctacaactggtcagatgggcgttttgccaggccatgttgccacgattgcagagctcaagcctggtgttctctcagtacatgaggggaacgatgtgaccaagtactttgtgagcagtggatttgctttcgtccatgcaaactccattgctgatattgtggctgttgaggctgtccctgtggatcagatcgacccagcttttgttcagaagggtctcgctgaattcactgccaagcttggttcggcctctactgacctggagaaggctgaggctcagatcggtgtcgatgttcacagtgcgctcaatgctgcattgaccggttaattggtgtcatcttaaattgtctgtcttttagattgagtttaactttgcaaatcctaaataaattatagtccatctaaaacatggacatatgtttcttgttacctgaatcctgcatggatttatttttgtactcgtgaatattttaactctggagctcaaaacccggagttgctttctttttccgttgagttgcggccttggatcagatgaaatcgatgttcctccatagctccagtaaattgttaaatattgttaagtctattttaagagaaatataaaccacatttgattactgcatgagatgttttggatcttgtgtcagaattttcagattttgaaattccatcttctgtactaaaaaggttgtatttttagatctggtcgaagtaaaggac

SEQ ID NO: 28052 - DNA, 1801 bp, Zea Mays
gatataaagaaatctcaaccaacctaggagataaaagagaaagaactggaatctttggtgcatgttaagatgatcaaggaactagaagagcaattgaatggttcacaaaatgccatggcctctcttaaggttgagctgcagagggcaaatactgaattagagctgacaaggaaaactttagctgatgaaagaatgaatagccttcccacatccaataatgtttattattctaataaaaacgtcagcccttgttctaagatacatccacaaggaggaaatatattgttaaagaataaaaaaaacgctgacaacagtgatgacacttgccttgttctgataaccgaggagaatgaagcagtggacaaattggaggacaaggatcgtcgcagtcctgatctaccatcattcatgaaaagaaataagaaaccaaagttctgtcataatgggtgtacacagcgtatccatgcacttaaacagcagactcaaagtacagatgcattcctgaagcaaaatcagaagcaggccactgcattcaatagccactcaaaggccagaaagaaaaatgctgccaaaaactcatgccacacaaggtccgtcacggagcagatacttcaaacgaaatttcttggtaagttcaagcgcaagagaggtagaagaaacaggcctagctataagcatgataattccagtgagcacggggaagcagaatacaagttatctgatagatctgaatctgacggaaatggctgcttgctgctacttcaggcacttgaacaggatctttcacctccaaagttgtccactgaacatgatggggaggccttaactgacctgaaggaagatttcgaaatgagcgggggggatgctgagttaagtcggtgtactgctttctcggaactggttaatgtacttgcagtcaacagtgtgcaaatcaaaagaagaaaaagaacaaagactgtcagggttttggaagttgatttttccgatactaaaagtgttcctgaaccagctaacacccagcttaggaccagttcgaaaagcatgtctggtaatcaatcggtctctgagatgactgagaatcgctctgatacacccatcagaaacagtagccctttcttgaaatgtgctactgcaaacttaatgcatcagattgctgctggtaatggtcaatttgatcctgaaatcggctctgcagtgtcccttcagtcgaccaaaagtgaaactacagattatggtaacttggtggtggaccagcaggagctgataacaccaaataataatactacaagcttgaaagaagtaaatgaggatggaagctgcagtttggcttcacctaaggctgatgcttcgactcctgtgcaagctttagagaaatatgatatttcagttggcagctccctgaacaaagaagagcatacaaaggcatcttgtggagcttccatacaagctgaaggtgccagacaaatcaaatacacattcaatcgcagaaagcgcaagggtatgtctattgacagcacccctcagcgtgctgtccctgaggagagcagtgacctgtgtagtccaactaacaagcaaaagcttcaccccgattgtgtggaacaggatcatttgatagattctccacaaggccacagtcaactagttcaggttgccgaacagctcattttgttgtcagagcatatgtgatgagagttttgaaacataaagctgaaggaatgactagtttggtgatgtaacatttaggaggcttctgataagtgaattttgtaatattctaaatccgtttgatttctttcctggc

SEQ ID NO: 28053 - DNA, 2750 bp, Zea Mays
cccgcgtgagatcggctcgaatccaatcctctccaataatacgcaccggcacccatttgcgccatgctgccgcggccggccaccacgacgagccaagaacacgcgcggcatccctgagccacccacccaggcttaccaaaacggattccttttccctcttggatcccagccgctcccaagcgtgcgcgcgaattctctgcttgcctcgcccagcgccgtgtgctcttgtgctgaagatccatcccatccatggaagggtgccaactgctagtaggctgtaggatggagatggaggaggaagcgttctttgactcgcgagaggagctcacggcgtcgccggcgcccagcccgggccctgcattgccgtggtcgggaagcctcgacagtgtgtgtcagaggagggagcggttcatgagaagcatgggcctagagtgctgcccggctcccctgcaggccgatgccgtggccaccgtgggcgatgtcgacaaggaggaagaggctgtgccggaatttgggagatcgtggtcgcagtcggatgagaacgactgctccatgtcgagttggtccacggaggagacgaagagcttagaggatggtgtctcggatgacaattctgtcagtggatccagccgggatgatgctagcagcaaggtgagcaggagtttcagttcgttgtccttcatccagaggctcatgagccgcagtggtaagctctctggtgttcccaaggcggtcgagaggaggagaaacggatggcttcggaggctgggcttgaggtctggtatcctcgatcatggaggcgatgaggctagcaccagctcctcagagagtgagcaaaacaggggtggaaggtatgaaagggtcaaggtccgcagctacaggaagcggtcgaaagaactgtcagcagtttatcaaggccaagtgattaagggccatgatggtgccatcctggctatgaagtttagtccggatgggcagtttcttgctactggaggggaagatggagttgtcagggtctggggcgtcgcgcagtctgaggactgcaaaatcccaatggatgatccttcttgtgtttacctcaaagctcatcgccagagtggcttgggtcctgttgatgctgacaatgagaagaaatgcaaagttaagggcgtgaagcaatctgcagattctgcctgtgttgtgattccaacagtggtgttccagatctcaaagcaaccactgcatgagttccgtggtcactctggtgacgtactgagtctgtcatggtctaacaacaagcatctactgtcagcatcaacagacaaatctgttcgcttgtgggaaattggatctgcaaactgcatcactgtttttccgcacagcaactttgtgacttgtgtccagttgaatccaaccaatgagaatcaattcatcagtggatccatagatggcaaaatccgtgtgtgggatattcccagatgcagtgtcattgattgggtggatattagagacataataacagcggtttgctatcgacctgacggaaagggagcagtggtcggaaccattactggaaattgtcgattttatgatgcatcagataatctcctgaggtttgaaacacaagttgcactcagtggcaagaaaaagtcttctcttaaaagaatcactgctttcgagttctcaccaagcaacccaagtaaattaatggttacctctgctgactcgaaggactccgtactgggtcttgccagtccttggcaacattcactcctgatgggcagcatatagtttgtgcaagcgaagactccaatatttatgtatggaaccatgaaaaccaagacgaggcttcactgaaacatgcgaaaaccatatggtcctcagagcgcttctactccaacaatgcagccatcgcaataccatggaatggcccgaaacccagaaacccggtctctctggcctcccaaatcttgtcaccacaaggagataacttgtggtgcatgagtaaggctgtcaagtgcagttcgagtcagagcgaagattctgctatcaacagttttgtgtcaaggtttgctcctggtattttcaatttgaatcaggagttctcctctgagtccacttgcagaagttcagcgacctggccagaggaaatcctgccgtctcgctcgattcgtgcaattctggacgagtcgcagtacaagttcctaaggaactgtttccagagcacaccaaactcgtggggtcaagtgatagtcactgcaggatgggatggcaagatcaggtcgttccagaactatggcttaccggcgcaccagtgaacaacagctggagcatctgctgaaactacaccggcagttttggcacctcacatggcgtgtggtttgttggtacaagacatcacatgctcagtgctcctcctgctgaattgtacatggaccagtgttgtacataatcaacctggtggtcctttgagatctccgcgtcagcggttgttcatggcaggacccgtggattgtacctttttgtagaaattttttgtgtgtagatcagatctgactctctccctttgcccccccttatcaattgctcattgatatatatactacagaaatgttagtctcagctgagtgtaagttcccctcccattgtattgcgggaacagccagatatatatatgtgccactcaagtatacaaaattctttcatttttttttgaacttttcctgctctgttgttctgcaagttttcattttgtcgatcgaatttcagat

SEQ ID NO: 28054 - DNA, 1013 bp, Zea Mays
ctctcgtaccaaaaaaaaaaaaaatcgtgctcggcacacgcaggcggctctcagcgacggaggggcagacgccagacgggcagtcccagctcgctacatcaacatgaggctcaataaggtggaagtgaaccttataaggctgttggaggctgctccacggcagcaaaatcaggctaaacttgtctattatgtaaccacagcgcgggagctgttggagcagctaggagctgagacaacaccagaagggatatcaagcatttcaaaagctaagctttctgagtattcagaaaagattgaagcacttgcttccaggcttgctgcttcagtgcctgaaaatgaaaagccgattattgaaagcaaagatgaaatctcttatgaagaagcaaagccagaaagtccaatatctttatcatcaggactgcgaaggagatcaacagcccatgctgtggttggaacaagccatcaggaaaataaagaagatatcggagcaccgataaaattggatgcagaagctcaggctcacattgagaagcataggaagctccaagaagatttgactgatgaaatggtcgagttagcacgtcaactgaaggaaagtagcctaatgatgaaccaatccgtgcaggagacagagaagatccttgattctaccgagagggccgtggagcacagcctggcaagcacaggccacgcaacctcgcgagctgcggaggtctactcgctggcttccaagactacgtgcttccagtggctgctaatgtttgtgatgacctgcatgtttgtaatggtggttctgctgataaggatcacttgaatgatgaggctgtagcaggcactcaaatcgtagtcacccttgtctttgtttcatgggaattctttgtggtcaggtcatggtatttttccgagcaagtgtccccaaccaaacaagcctgctgtatgagagagaaactggaacagctgcctgtacagaggcttggtggtcgctgttttattggtcaggcctgagagactcc

SEQ ID NO: 28055 - DNA, 229 bp, Zea Mays
cgcttcatgcttgacgtacgacacacgaaactggtgctttaaaggattagagataatgtatagtataagcacttaatccaaagaacatatctgatgcaactgttgtatttatgggctaggcccaaattgtgaaattcaattaaattctagaaaaatctcaaaagcctatgtatgggtatgactagggaatggtggaacaaatagttccatattgctagtccaagtggag

SEQ ID NO: 28056 - DNA, 608 bp, Zea Mays
ccttcccctaactccgccgccactgccgtccgcgctcgccgtcgccccgaacctatcgcccactgcatttttccggcggaggtatgcgatgaggctgctgcaagcggaggagctatttcggaaggttctggaggtcgggtcgaagaataaggcggctcggctgctggggctcgacgtcggcagcaagtacgtcggggtggccatctccgatgagaagaacagggtcgctatgcctctgagtgttttgtgtcggacaaaaacaaacatcaacttgatggcagatgatttcaaaacattggtttcgatgtattccatagctgggttcgttgtgggctatccattcaaaatctatggtcaaccttgtgcaagtgcaatccaagtaagtcttgctggggaactttgtaaaacagggaaacttgatgatctgccctacgcatattgggatgaaaatttcacctcaaagtgtgtagaagccctcttgcatcccctgaatctaaaagacttggacgatgccaaaacaatgacagacaaatttgctgcagtctgtatactccaggttttctgaatttggagcaggtcaacatttttggattgtagaagctctcgga

SEQ ID NO: 28057 - DNA, 238 bp, Zea Mays
gcagcggccctgctgtgcgaagaggggtctcgggtcgagggcaattcctcgtgtcgatccagcgcagctgcggatcggccttgcgccatgggcagggctacatgttgcacaaaccatcgcgatggcgccgccgtgagcaccctgtgcgcggttgggatgaggatgaaggcgtgtggctggtatgatctcaagtgaatggtctagattttgttatcgtatcccttctctgtataaaatc

SEQ ID NO: 28058 - DNA, 3595 bp, Zea Mays
cagctatgcttgtacgtcttggatctgaggcctcgctcaaggaacgaaccaagtctggagttttctggtgattggataaaactttggcagctgcaagtctaataatctgaagctatggacacacaaatgtctgagagaaggtctatttacgcggagaacacgtttgatgcagctagagaaatactctatcaagtggagtatggatataagcatgcaaatgtgttctactttgatggctgggatggaattggtgcatctgctgctctcaaggaagcagcaaaacgcctaaaatcttcagcatcaaagtttgacagcgttctccatttggattgctcattatggaaaagtaggagggccctacagaaggctatcgccgaggagataaagctcccccattcagtgatggccatcttgagccagcatgacaaggaggatgatttcaacggtgtagaagaaggcgctagaaatgaggtacgggaaatcattaagcatacctacacaaagctagccaccgtcaaaagattagttgtggtcttccataatggaagtggtagcttcattgacctgagcgagtttggtatcccactgaaccgaaacttcaaaggtgatgtgttgttgtggacaatgcaagggaggtttagaccctatgttagctacactataaaagaaaaggatcctaatatggtgtacctttatgtggatcctgatacggtgcaattagatgacacttcattatggggcattgtgaatgaggaagctaaggaggttgctcagtacacaggtaccattgaccacatggcagtggtggcgtgcatcctgtacacgtggaagctaaaagacatgggtaacatagattgggatactcatgcttcaaactactgggtttgtgatggcattatacaaggcagtagtagctcggaagcatgggattggaaggttggtgatgcactacagagaaacatgcatttgggctggattagtaggtcttatatggattatttcttttcatcctcagctattgagatgcagatgcagcattatttaccacgacctccagcgatttgctgcacttccgagattattagtgtgcctgctgaagcaacatccttttttctacaaccaaaatatggagatgaagaatctcaattacttgcttctatgttcaaacattcagccagtaatctgcgtgtgctgcatctctctggatgcacctttagatttgcatctccaccattcctctgttgcagcaacctaaggttcctcctccttcaccgttgcaaggacgatggcacaagtatcacaccaacagagggcaaggaacttgacgaccagagtggagcatggagggcttgcttcgggaagctgcaagtaatggatttgagctacaccaaatggtggtggttgctgtcacaaaggatgaacataatggccaacctcagagagttgaatgcaaagggaatcaagaatttgagcacaagtcatctacgtggttgtggcaggcttgtcaagcttcgagtagaagacggcagcgttgacggacaaagattaatacttgagaactctgttgcactggaactagccgtcctcgttaaccatgctaaagatgaaggcgctacatacatctcctttcgtggttgtgctcagttgaggagtatattgctgggaggattattttgttgcctccatgagttggacctctcttgcacatctgtggaaaccgtcgacttgcgagaggtagaagcccagagattgaagcggctcatcctacttgggtgccagaagctccgtgcaatactatggccaccgagatcctcgtctattcttgagaccttggatgtgttttgtgtgagcaccaccccatccacagcatcaggacaggaatggccacatctatgtaaatgggaagaaaagaggaaggaggctacctctgcttctactgcagaatcatcatccttggatagaaactggtacatttgtgtaagggatgcgaggctcctacggtcgctagatgtcttttatacctatgaaaacaatcgttgttccattggctggcctgcacgtgtggagttcactacaccaccagcatcaggtgatcttgttgctgctcaaggagtcaatatcttgcagcagtctatacatgttgtagatgtatatgcaagagatatgatcacccataaccaacttattcatgatgaggatgcaactgcgggtgatgaggacggtgaaggagcgatccactggatgtgggattgcccaacgacccggacgatgcatggtcatggcttgtatattcacgtacaagcagaggatgatgagcaggagggagagttgaacataggtggaacatggtctatgccccctagatttatatgcacaagtgctgatgttatgcatgtgcatgattgcctgtccatcacctccggcatttctctgtcatacattacctcatgggatctacttaattggtgccgagttgaaaggtgccccatgttgcgatctgtcttcactgccttttctgaaggaaaagaaaatgatatttctagtgattcatggctgatatttcaaaacctgacaacattctgggcatcacacctcccgatggcaaagcacatctggaactggagtccaagagcttatccatctgcatactcctttcaacagctccagttcttgcacctggactactgcccgagggtcatcttcgtgctccccttggactcgaatatgtcgctgcctcagcttgagaccctagagatcatttgttgcggtgatcttagggagatcttccgcccacaggatcccaggctcgagaaccaagaggaggttgtcaagcatttccccaagctacgacgcatccaccttcacaacctcccgacgctgcgcagcatttgtggccgcatgatgtcttcaccaatgctcgagactatcaatgtcacgggctgcctagcactcagacgtttgccggcagtcggcggccgtctcgggcagccacccacagtggtgtgcgagaaggactggtggaacgccctcgagtgggatgggttggaggccaagcaccacccttccctcttccgccccaagcactcatgccactacaggaagcccaagcttcttagaggcagcgtcctcaggtaatcaacaacagctgccattggaggcggatggatccctccactccatatatatgttgcgggttgcacagtgtcgacgtccattcctgacagcagtcgatgaaataagactcctattaattattggtatctccctcttcaagtcgtggtgtgtggttggttccctccgcttcaactacgttgttcttctgcctttctctgcatccacatcaccaccaccagtttattgtctacgcttgtgtgtgttgtttcatcgctgagcaacattaaatatgtgttttatgtgttgtgtttatctatttggtaccctggttgctatataattatgtgtgttttatatgttgtatttatctatttggtaccctggttgctatataattatgtgtgttttatgtgatgtatctatttatctatttggtaccttgattgctatatacttatctgcttttatgtgatgtatctac

SEQ ID NO: 28059 - DNA, 2283 bp, Zea Mays
tctctgaccaccttcccctccccctgaggccctgaccaccttctcctcctgtacacagctcagcacttcagcagcagcatcgcatcatatcgccctcgtctccagttctcctctctctcggtcttaaaaatccagcgccaacgcggccgccggacgcgcattgctctccctccctgcctcgtctcctcacctcattctcgccacatcttcctctgctcccctcctcccaggtggcgttcttggagctccagctcctcgagctgcgtctgtctacgccgccgcggttgtcgcttgggtggcggcagcccgcaatggggaggagcagccgcgcctgctcccttctcggttccgcccagctgctcctcctgctgctgctctcgctcggctccgcggccgcccagaagggctccacatggaagaccctgagcggcaaggctccagtaatcgttgctaagggcgggttctccggtctatttcctgattccagtgattttgcttatcggattcttgggaccattagctcccctgacacagtcatgtggtgtgatgttcggttgacaaaggatggcgatggtatctgcctaccgagcataaacatggataactgcacaatgatagacaatgtttttccagaagggaagaagacctacaatgttaatggtgtatctacggtgggatggttctccgtggactatacgagcactgatctgctgccaaacgtgacactgccttctctgtcgatggtgtgttgactgatttcccgattactccttcagaagcagttggttgctttagtaacctgaacaacagcaagatcgaccatgctgtcctgttcaagtgaccaaagatggcatactgatatgcatgagttctgttgacctaatggatgttactactgttggaaaatcatcatttacttcgcaagtaactaccatcaacgatctgaaggctggtcctggagtcttcaccttcaaccttacttgggatgatatttctaagaacctacagcccatgatatcgaacccaatgagcacctataaactgtacagaaatcccagaaacaagaatgcaggaaatttcatgagattatcagactttttgacgtttgcaaagggaaaggatttgtcaggaatcatgataactgttgagcatgctgcattcatggcagagaagcttggatttggagtggtagacgcagtggtcaaagcacttgatgactctggttatagcaaacagactgcccagaatgttatgattcagtcaaccaacagctcggtgctaaagaagttcaagcaggaaaccaagtacagccttgtctacatgattgaagaaggtgtcagagatgccgcaccttcatcccttgcagacattaagaagtttgctaatgccgtctctgttagcaccacatctgttttaccacagacccattattatttgacaaaccagaccaataagcttgtcacgtcccttcagtctgcgggcctccaagtttacgtctatgtgctcatgaatgagtttgcatctcagccgaatgacttcttcgcagacgccacttcacagattaatgcttatgtgcaaggtgctaaggtggacgggatcatcactgatttccctgggactgctcacagatacaaattgaactcctgcacgagcatgggaaacagcgcaccactatttatgcagcctccgcaaccaggtagcctccttttaaccatggccccagatgtacagccaccagcagcggcgccaatgccgctcttgacggacgctgacgttgcagaaccagccctacctccagtcagtaacaccacaacagctgcatctccttcgcatgccgccctcagaatgcgaaccgatgtctcgatcctcatcgcattgctgatgctatgtgcttccctcctcatctgaaggtagtcctgcacaacatcatatgcggcgtggtgcattagagctgaggatttcacattgagctgctaatagcaattctttccaccatttatgtagcgatttttttttcttgttctgtccggtgttttgaaggatggatggatgttcagcttgatacctcaacggtgacacttgtgtgtgctgccgctgcctctaggtatattttggtacatatatgtggtgatacattgttcaggtcatcttttctactgccaaaccctggcccggagggcaaaaatattcactgcaaactgttgtaactgatgttaggcatacacaaattcatctcaaacataaacacaatcttattgatagtctagaacacccagagaaggt

SEQ ID NO: 28060 - DNA, 1325 bp, Zea Mays
taggagggtttcatgggcaggtgtatagccccatatcagctatataattgtgattgcttgtgtacctgcattaaccaaatacttgtgctgtttatacttgttgtgtgtgcgtgcgtgcgtgtgtgtgtgtgtgtgtgtgtgtgtgtgtgtgtgtgtgtgtgaaacaaagatccagtgtgtgttttgtttgtgataaacactcaagagggattgatttccaacattatcgactagcatgtcatctttactaaagcatgctaccagtaccagtatgtaatgagaagagtttctttcggtttatgttgggaatctttcgccatctacttcggtctttgatcttgagaaagtgttccaggcttttggaagaattaaacctgatggagttgctatccgaagccgcaaggaggctggagtattctttggctttgttgagttcgaagacatgtctggtattcagaatgctttaagtgcatctccagtagagttaaatggccgttttgttcatgttgaagagaggaggcctaactgcggattccctcgtggaagaagaggccgtggaagagctgatttctcaagggaccaagctggtgggagatacgacggggagtatgctactcgatcgaaaggaattgggcaccagaaaaaaactggacgccagtatgacagttactactagttatgtaccgctctgctggtaaatggccgtgtaccattggtgttctctacttggtgctgttctggccataattttgctaaaagtcacaatgatgtcgggactagtatttctgctttgttgacattcggcggagtcttttttgggggatgggcatctgttaccattttgttgcgtcacagtagtttttggttctcagttaccgtgaccagttacaaatggatcatgctaccgtcggtgtcaaactttttaagcaatacctaggttgtacttgtaccgatgttaatagttggggaaatttggatccataccattcaaagatcaccactttggatccataccattactatctcacttacatgtgggtccacatgagtcaatgactacatgtgggtccacatgagtcaatgacatgtggggtccatggtatatatctaaagtttggatcttttaatgatatagatccaattgttcctaatagttggtattcttagattgacatagtttgcatacgtcggtattcacgttggtgttgtgttttcatattgtgctgttttgacctgagggtcctaaccaatcagtgaatttgtgttatatgtcccagttcagatggttgatgcaagaagatacaagatttatcttggttcggtca

SEQ ID NO: 28061 - DNA, 2260 bp, Zea Mays
gacatcgtagcgtaggagcaaaaaaaaaaaaaaaaaaaaaaaaaaaacggcaaacgacgcgcgcgccgcctcttcgtaacaccactctgccgccccctcgctcgttcgatcgccctgtgagcttatccgacgccgtggtcacttgagccccgatggagtttgccgccggcgctgcggtggccccgcgcccgatgcccgccgggcccggccgaaaccgccgggtgggcggtggagcgatcggcatcggttgggcccgccgcgcgaccgcgccggggctctcgctggctcccgccgtcgcgagacgggcggcctccgcgtcgggaggaggccacgggcgcgtcgtcgttcgctcaaccggcggcggctgtctgtggttccgcggcgagggcgccgacggtgatcgatcatccctggcgcgcgcgtctccgtcggatggcgcggctcctgcgcgttcagttcgggaacagactataggaattaagaaggagctcttcaatctggccgttccagccatagttgggcaagcgatcgaccccgtggcgcagttactggaaaccgcatatgttggccgcttaggtcctgtggagctggcttcagcagccgtcggtatgtcagtattcaacattatatcaaagctcttcaaacatacccctcctaagtatcacaacatcatttgtggctgaagatgtgtcaaaacatgactcttcacagtatgcttcgggaaatatatctggcaaggttggagaaaggaagaggcttccttcaatttcttctgctttactcttggcagctgcaattggtgtcattgaagccttggctttgattttggggtctggaatactcctcaacattatgggtgtctcacatgcatcagctatgcacaatccagcaaggctatttctttctgtaagagcacttggtgctcctgctgttgttgtttcattggctatccaaggtgtgtttcgtggactcaaagatacaaaaacacctctactttatagtggtttgggtaacatctcagctgtggttctgcttccttttttcgtgtattccttgaaccttggattgactggagctgcacttgcaactattgcttcacaatatattggtatgtttctgcttctttggtctttaagcaagagagcagttctattaccaccaaaaatgaaagacctagagtttgttgggtacataaaatccggtggcatgctgttagggagaaccctttcagttctgataacaatgactctcgggactgcaatggctgctcggcaaggcacagtagcgatggccgctcatcaaatatgtctgcaagtttggctggctgtatcattactttcggatgcattggctgtttctgcccaggcactgattgcaagttcatttgccaaacttgactacgaaaaagtggaggaggtcacattctatgtattaaaggcaggagtgttcgttggtatcgctttagcacttcttctgtttgtctcttttggtagacttgcagaaatattctccaaagaccccatggttatacaaattgtgaggagtggtgttttgttcgttagtgctagccagcctatcaatgccctcgcttttatctttgacggactccattttggtgtctcagacttctcgtactcagcttcctccatgatggtagttggagcaatatcctctttgtttttgctgtgtgctccacgatttttcgggcttcttggtgtttgggctggcctggctcttttcatgagtttgcgcatgactgctggatttatgagattgggatggagagcagggccttggtggtttttgcacagaaaagaacccaaatacaggctgcaatgaacaaaatgtggatctatggagccgaataaccaaatggcgagattaggatggaggatacaagttatgaaggcacactacaatggcgaaacatactttcatgttgactcccgtgtatgttttaaccagttcggttattctaattccatgtgtggtttggaatgtattttgacttgttatggatttcaaccaactcaatatcagtcaatccacatagattaacggtgaaacgaacaagcccttaggtggttttagaacttggaatttgagagtaaagctacattggacaaattttcgcttgtatgtgtcacataggcgatgattgttcagtatctctatcctctctgtcaaactctagattgaatattgcagatttatttagacatatctgatgggttcaaactttacggttcaaacactcata

SEQ ID NO: 28062 - DNA, 2032 bp, Zea Mays
tttaattgatcggcgttacatcatggtaggtgacttctctgaggacaaccgatctgggatcaatcactcgttgcaccggatcagcgctatccggaaccggaaagctcaaatcataggcctcacttgccgtgttggtcgagctatatctggcagtgcagagatgatccgggaccttgtggtgagtggtggttcaatattggtgattggacctcctggagttgggaaaaccactctgatcagggaaatagctagaattttggcagatgaaggtaagaaacgtgtgatcatagtggacacatctaatgaaataggaggtgatggggatgtacctcactctggcattggacgtgctaggagaatgcaagttcccaaagttactatgcagcacaacgtaatgatcgaagcagttgaaaatcacatgccggaagtaattgttatcgatgagattggtacagaacttgaggcaatggcagctaccactattgctcagagaggtgttcaactagttggaactgctcatggtgtgacaatcgagagcataattaaaaatccttgtttgcaaatgctcgttggagggattgagagtgtgactcttggtgatgaggaagcaaaaaagcggaaggtgcagaaaaccattctcgagagaaaaggacccccaacatttttatgcgctgttgagatgatatcgaaaactgaatgtcgagttcatcacaggttagatgccacagtggatgctattcttgcagggaagcctcctaagtttgaagctcgcaagatgcataataagtctaccgagtttgaaatgccgttggtgatacctgatagagagtatgaaatagaatcactgccactctatcaggaagttatggtcacgaggtcattatcatcagatggcaacttcagcgatgattttgctgcatccaggcaaacaaaaagcaagagtatgccatcagaagataattttggtgataattttgtttatacaaggaaagcaaaagggaataaacctgtgcatggaaagtctctagtccaagtatacacataccagatgtaacagatgacattggagcagctgatgtgattcttgcatcgagttctgaaatgaagcagaatccttggattcataatgttgccaaataccacaagcttcccatatttgttgtcaagactaatacgatggctcaaatagttaaggctatcagaatgattgttggaagggacaacacatcatcaagtaagcagcctgaggttatggagggagagatagagattgaggatgatgctccgaaacgtaagccatctttggaggaaattgatgccttggaggaggctcgtcttgcaatcgagtacatcgttattccaggtggggagccagttgagctcctcccaagatgttcagaaatagttgctcggcagctggagctcgtagagagctaccagctacttgctgaaacctttggaagtgactccaattctaggttacagattctccccatgaaaataaccaagaggggttctagtaaagacaatggagcatcaaagcccactaaacaaaccggatcagatttgatcgtcagtgagaatggtggtggctcaagtttttctcggctgccatttctgccaaagtgatcgtctagatcttctgatcaccactgtcgaaaatgtacatcattcctctctcttgttgttcattgtacaacattgtgcagtgttgtaaatagtgtgtcgaatgttgaagaagcgaaagagcaaaagctaactgcaattgccttccattcttttgctggaataaaatccgttcatttctggtgtcagccaggtcagctcacatgctcatgtggaaaaaaattgcacgcggccgtgccgcacgaggccgccggtgcggcccggcaccgattaacgacgcgtggatattcaacggcatctgtatctcatggataaagcctcggacgtatacgcagctcggctaagcctcggacgtatacgcggcttggcttacagaacggctcgctttaccatcgttgcttccata

SEQ ID NO: 28063 - DNA, 2434 bp, Zea Mays
cgctaaagacccttttgcgtttgttaggatatggggtgatcaaggccaaactgcactggagaaggccagcatatgcttgcttaactgtggtcctaccggaacagaagcattgaagaatctcgtgcttggaggaataggaagtgtgactgctgttgatggctccaaagttgaagcatctgatctggggaacaattttatgtgtaatttctttgctatgtgattccacctgttcttctgaattcatccccagaaattgatggaactcatattctggtaccttatatttgcattcagtggatgaaggatgtttggggcaaccaagagctaaatctatatgttcattcctacaagagcttaatgacgctgttaaagccaagtttgttgaggagtttccaacgcatttgatagacactaatccttcattcttttcccagtttactgttgtcattgctactcagcttccagagagttctttactgaagctagatgatatttgcaggaaagcagacatcgttttggttgctgcacgttcatatggtctaactggtttggtcagggttagcgtcaaggagcactgtgttatagaatcaaaaccagatcacttcttggatgatttgcgacttcacaatccatggactgaactaaagcaatttgcaaaatcaattgatataaatgataaagatcctgttgtccacaaacatactccatacattgttgtccttgtgagacttgctgaaaaatgggcagatgcccatgatggtaacatgccttcaactaggcaagaaaagaaggaatttaaggacctaattcgagcccacatgcttaatgtagatgaagaaaattacaaagaagctgtggactcatcatataaagtctcagtcactccaggaatcagtaatgagatccatcagataattgatgatgactctgcggaagtcaattcatcatcagaagatttctggattttagtagctgctttaaaggagtttatttccaaggagggtaatggtgagctacctctggagggaacaatacctgatatgacttcccttactgagtattatgtaagcttacaaaagatttaccaagctaaggcagaatttgactgtcttgccctggagcatcatgtaaaggaaatcttgaaacagattggtagagatccggattctatttcaagagcatatatcaaaacattttgtaaaaattctaggaaactaaggatttgtagatatcgtagtttcaaggaggaatttagctccccgattgtctctgagattcagaggtatttcagcgatgaagactgcagttacgcaatgaacttctacattctactacgggctgtcgatcgattggctgccaattatagccgattacctggaatcttcgacaggctgaagacagttgcggcttcagtgctaagcgagatgggtttgaacggagcatccttatcccaagacctggtaaccgagatgtgccggttcgggggtgcggagattcatccagtggctgctttcatcggtggagtcgcttcacaagaagtgattaagctggtcaccaagcagtttgtgcctttggggggaacattcatttttaatggaatcgatctcaaatctcaagttttggtgctataacatggatgtggagcgttggatttgagctggtccagattttgtgccagggcaccgcgctgcccaacgagtacccaagtctcgcagaaaatatcaatacttgcttcgtatgattttttgccaaatgactagcaaattcctagctcacgcggctgttatgcgtaaaaccagaagagctgctgcttttagactacgcctgttatatattagtaggcgaagtaatatgtcagtggggctgatgtgataagatggatggtgttaaagactagcgtgtgcgcgatttgacgaagacgactacgagacgggatgagcaatgagcatgtcggccgagctatggacgcttccatcatatcatggaccgacatcaatgtgcatatgatctcaggtgtccatcgacagaccgaatcttccgtggccagtattccttcggcgacgcggttgccgttagacgaaggaaactgtcgtgtgacagcgaaatgtggttgctacatgctggtagcgcacatagcacactttgggcgtgtttggttcggcttttttctaaatagcttttctgaaaagctggctgtggagaaaagctggctgttgggaaaaactggtggttagaatttaggtgtttggttcgccagctgtgcaaaaaagttgttcgttagaatataggtgtttggatacacagattctcagactgcagattctgtttgaaaaaactatacacattaacaccgaaccaacaaaaggtcattacatataattagtagagttcattacaacataactaccgttacatttacatatttaactatgac

SEQ ID NO: 28064 - DNA, 222 bp, Zea Mays
accgatagcgaacaagtaccgtgagggaaagatgaaaaggactttgaaaagagagtcaaatagtgcttgaaattgccgggagggaagtgaatgggggctggcgacgcgcaccggccgtatgcggaacggctcctgctggtccgccgatcggctcggggcgtggactgttgtcgcccgcgccggcggccaaagcccgggggccctaggcgcccccggcagccg

SEQ ID NO: 28065 - DNA, 3160 bp, Zea Mays
aaacgaaagaaagccggaggtggggaggcttggtgttgcgggcgcacctacctaccggatccccacccggcaacccctgtgtactgccgcgcttctctcggtgccctgcctcgtgcctcctactcccaccttcatcaggagctcagtctgcggctgctgctccattccacactaccccgcgctggactggagtcgagttgagctcacgctctcgcacactcgcactcccattcccactggccagattgatcttgcttcgctaatcatcctagatctccattcccgcccatgggatgcttccagtcgaaggtggcggggcccctgccgcccaacgacgccgccgctctccccgccgacaagcctgcagatcctgaggcggcgaatggcggcgccgacggggaaggcgacggtgacgacaaggaggctgtgaagcgcgcggtgccggtgttcagggagtttgctctggccgagctgcgcgccgccaccaagggattcagcgccgacctcatcgtctccgagagcggcgagaaggcgcccaacgccgtctaccgcggccgcctcgacggcgggcggctcatcgccgtcaagcgcttctcgcgcctctcctggcctgacccgcagcagttcctcgcggaggcggcgggcgttgggaaggtgcggcacaagcgcctcgtcaacctcattggctgctgcgccgagggtgacgagaggctgcttgtcgccgagtacatgcccaacgacaccctgtccaagcatctcttccactgggataagcagccgttaccatgggaaatgaggctgagggttgcatatttcattgcgcaagctctcgaccattgcaatgctgagaacaggaaaatctatcatgatttgaatgcttatagggtactttttgatgaggaaggtgatccccgcttgtcaagttttggattaatgaagaacagccgtgatgggaaaagttatagcactaacctggcttacactccaccagagtttctacgaactggcagagtaattccggagagtgtgatctatagctatggaactgtcctgttggatcttttgagcggaaaacacattcctcctagtcatgccctagatttaataaggggaaagaatatactgttgctgatggattcctccttagaagggcagtatgctaatgaagatgcttcgaaattggttgatcttgcatcaaagtgtctgcaatttgaatctagggatagaccgaacataaagtatcttctgtcttctgttggtcctcttcagaatcaaaaggaggttgcatcacatgtgttcatgggtattacaaaagccacatcagtactgccaaccatttgttctccactcagaaaggcctgcactggtatggatctttcagcggtgcatgatattttgctcaaaacaggttataaagatgatgagggtgcagaaaacgaggtaactaatagtcaaatttacatctgacttgtgccatcgatttgtgatcaattttcctcagtcccctcttccgttttgattcatttttccacttgactcaattgataactttttcataaaggtttatttgttgattgttttcttgtcgtaactctgtgttctttccactccgaccctttcatcattgcatggttagaaaaaataagaaacaccgcgggtcaattagaatgtgaaatgtgtacatgtgacgttttctcttggctatgcacagaagtggacttatataaattgcagcatgacttgtttaatctgaaaggcaaataattttgcatggataaccacacattttatcagtatttaattcagaagattgtaatgccgactggactttggacttgtcttcacatatcattttgtgagcaaaaatctgatgtatgctttcaaatgtttttatttgtgtctgcacttgctcaagtatttttaaattatcaagtcctacttgtttttttaagatgagtctatttcgtctggtgcatgttttaaaaactgaagctatcctttcaagaatggacccagcaagtgcaagagatgctgaacacaaagaagtttggtgacattgcatttagagacaaggattttaagactgcaattgactactactccaagctagttgcgatgatgtcgacgccttcagctacggtttttgtcaggcgcagtttttcctacttgatgaatgggcaagcagagctcgctctacgggacgcaatgcaagcccaggtctgcatgcccgagtggcctacggccttctacctccaggccctggctctttcaaagctcggcatggaaaccgatgcccaggacatgctcaacgatggcgccacgtttgaggccaagaagcagaacggctggcgcagttaggagccgacgacgaacaaagtctctcttccaacgactccgtgccgttgccctttgagagaagaaggtacaatggcgagtctcctccaaatcagttcactgggacacgcctgttgcactactagtagtgggattgaaacgcactgttttatcgtgcaatctcctctcgaatgtcggtaacgagtgatgatcatgatcaggggtggaaaaataggtcagggcctttgaacgcatagcgtactcttccgtgggttgcgctttgtgttgctggcgatggtggcaggatctgcctgattgttgcaactgcagttgtaattaaagggatgctttctaacaccttctggttttacgtggaatctttgggccccagagcacatgagcggtgtgcaaaaagccgagttcattgtgattagctacgaagaataaactagagccgtcgggattccattcgattcagccatatttatatgcggtgttatctttttttccctttttttatgatcaattctgtttgtttcttgaatcttgatcggccgagtcgattcagacagccagttgcacatccaccgatttggtttcaaagcagcaggttaggttagagtagctaagctatttgagttgtattgctaataattagctagaccattagctggcccgttctaattctctctagttttagcggttaactattggtttgaggtttgctaattgtcgtaaagaacttgcacaactgtctgttgggagcttatgtggtgtgtaattttattttgtgttgttagattattgtaatgtttaagtgttatgg

SEQ ID NO: 28066 - DNA, 4671 bp, Zea Mays
cgataaaccccccaaccccatcccccaactccgcacgcatccgacttgaaagttgaaaccctagtgcaggcacacgacctccgtgtgcaacgcgtcgccgccatggcggcccccctgcactccagctccggccacaacgccgccgcaggcggcggggccaagaccatcgaggagatgtaccagaagaaaacgcagctggagcacatcctgctgcgccctgacacctacatcggctccgtggagaagcacacccaggcgctttggatatacgaggacggtgccatggtgaaccgctcggtcacctacgtccctggactctacaagatcttcgacgagatcctcgtcaacgccgccgacaacaagcagcgggatcccaagatggacgcgctccgcgtcgagattgacgtcgacagctgctgcatctccgtatacaacaacggcgacgggatccccgtcgaggtccaccaggaggagggcgtctacgtgccagagatgatattgggccacctcctcaccagtagcaactacaacgacaacgagaagaagaccaccggcgggaggaacggatacggcgccaaactcactaacatcttctccactgagttcgtcatcgagaccgccgatgggcgtcgccagaagaagtacaagcaggttttctatgagaacatggggaagaagtcagagccccagattaccaagtgcaagcagggcgagaactggaccagggtcactttcaagcctgatcttgccaagttcaacatgacccatctcgaagatgatgttgtagccctcatgaggaagagagttgttgatatggcaggcactctcggcaaaacggtgaaggtcgagttggatggccagagggtgcccataaagagcttctgtgactatgtcgacctgtatatgaagagtgctaactgcgacagacctgataatttcaaaaggatttatgagcaagtaaatgatcggtgggaagtgtgtgttagtcaaagtgaagggcaatttcagcaggtcagctttgtcaacagaattgcaaccatacgaggtggaagtcatgttgattatgttaccaaccaaattgccaaccatgtggtggccattgtgaataagaaaaacaagaatgcaaacatgaagctgcacaacgtgaagagccatctatgggtctttgttaatgcgctcattgacaatccggcttttgattcacaaaccaaggagaccttgaccactcgtcagggaagctttgggtcaaagtgtgagctttctagtgatttcctcaagaaagttgagaaatctggtgtaattgagaatgtcctctcttgggctgatttcaaacttagcaaagaattaaagaagactgatggaagcaaaaagtcaagaatttctggcatccctaagcttgaggatgcaaatgaagctggtgggaaggactctgacaagtgcactttgatcctgactgaaggcgactccgcaaaagcacttgctatgtctggcatagctgtcgtagggagagattactatggcgtatttcctctcaggggaaaactgttgaatgtcagagaggcaaaccacaagcaaataatggacaacgctgaaattcagcacataaagcaaatacttggtttgcagcatggaaagcagtatgagagcaccaaaggtttgagatatggtcatctcatgataatgacagatcaggatcatgatggctcccacattaaagggttgctgatcaacttcatccactcattctggccgtctcttcttaaagttccatcttttttggttgagttcattactccaatcatcaaggcaaccagaggtcaaactacgaaatcattttacacaatgccagagtatgaagaatggagaaagaatttaggagcaagtgcaagttcgtggactataaaatactacaaggggttggggacaagcacagccaaagaaggccggaagtactttgaagatattattgatcacaaaaaggattttgtctgggtagatgaccaagatggcaaccatattgagttagcattcagcaagaaacggattgctgataggaaacagtggcttacaaattttcagcctggaacatacatagaccaacgtgagaaacaagtcaagtatagtgatttcatcaacaaagagctgatactcttctcaatggcggacctgcagcgatcaataccttcaatggttgatggccttaaaccaggccagaggaagattctgttttgttcattcaagaggaattttgtcaaggaagctaaggtggctcagttctctggttatgtgtcagaacactccgcataccaccatggtgagcagagtttagcaagtacaattattggcatggcccagaattttgttggcagcaataacatcaaccttatgtcccctaatggtcagtttggcacaagagctcagggaggcaaggacgctgcaagtcctcggtatatcttcaccaagctgtctaatattacacgttcaattttcccgaaggatgacgatattcttcttaattatctgaatgaggatgggcagtcaattgaacccacctggtatatgccaatccttcccatggtattggtcaatggaagtgaaggaattggaactggatggagcacatatattccaaactacaatccaagagacattgttgctaacgtcaggcggttgttgaatgaagagtctactgtaccaatgcatccttggtataggggattcaaggggtctatagagaagacagtcaatacgaaggtagctggttccacgtataccgtcaccggaatcattgaggttgttgacaacactacactgaggatcactgagctgccaatccgccgatggactcaggattacaaagattttctcgaaagtttagctccagatcctaagaacaaggacaaagtaacattcatagaggatgtcacatcacaaggtgataatgaagacgtctacattcaactcaaattaagtgaggcaaatgtgaatgtagctaaggaagaaggactagtgaagaagtttaagttgacaacaacaattggtacaacaaacatgcacttgtttgattcagatggtaaaattcggaaatatgacactcctgagcaaatacttgaggaattctttcaattaaggcttgaattctattgtaagagaaaggaagcattgttgaagaatatcaagctggacttaaagaagcttgaaaacaaagttaggtttatccgctgtgttgttgataatgaaattatagttaacaacaggaaaagggcagatctatttttggagctccggcacaagaattttgaccctttcccaaagaaaaaaaagaaggctgaaccaactgctgtaggtgctatagaagaggaggaaaatgaagagtctcctgaaactgcagcaggagtggatcctagtgactatgagtatctcctctccatgtcaattggtaccttgactttggagaagatacaagagctcaatgctgagaaacaaaagttggtggacgatgttgtggaactgatgaacacatcgccaaaatcactttggttgaaagatcttgatgcttttgagaaagaactggatgtgcttgatcaaatggatctagcagaggaggtgcaaagggaaaagaggataaaggaaggcaaaaaaggcggatcaaaagctgcacccaagaaacaacctaaaaaggctgcacctataaagctggaaagcagtacagaaggtatctgttaatcctccactgcagaaccgtctccatgtgaaaatgacaatgctgctgaaccagtagtcgcaaagcgtggagctcaacagaagaaagcacccaaaaaggctcccgtggacgaagaggaagttgatatgccttcactgaaagaccgtcttgctgcctttaatataaatgactcatctcctcctgatcactctgctatggaaactgaaacaacagaacagccggctcagaagaaagggagaggaaagaagcctgccgccgccgctgtgaagccgaaggctcctgccgccaggaaaagggcgccgactcaagggggcaaggcaacgcagaagaaaatagatgagatgctcaaggtcactgaggataacaccagcagtgctttgtcccctgagaagaaggtccggaagatgaggccctctcccttcaacaagaagagtggctcaatcttacagagaggctcgactgccgcttctgcaagctctgaaactatcgctgaagcttcaccaccctctggtagctctgaagagccagttgctgcagcaaaacctagaaggacagccagggctacgaagaaacatgtctatattagtgaaagcgatcctgaggatgaagtggtggagttgagtgatgattcggactttgatttggatgctgactctgactagtgagggtaactgtcatccgtagcatgtgctacctttattgatgatgcatttcttgtgcatgtgctactttaattgacgagtgcgggtaactgtcaatctgtcatccgtgttgttctgttgactgttgtatgtgtgttttctgttgactgttgtcgggaacccaagacattgtctggttaactgatttgtctgtctataattttggcattcaagtgtgcttgtggtatgctctgcagcagtacagtggacatactctatcctgagttctgatggacacgaatggtc

SEQ ID NO: 28067 - DNA, 1315 bp, Zea Mays
cgaggtacctcctcccagagtctccaaagggcatttacccttttgtgactatggcactagcggctatctataaccttttcatcattaacaaatcaggcggccttatatactacaaggactatggttcagcagggaggatggataccaatgacagtctaagattagcaagtctgtggcattcgatgcatgctatctcccagcaactctcccctacccctggctgtactggcattgatctcttacaagctcataactttgatctccattgctttcaatccctcacagggacaaaatttttcgttgtatgcgaaactggagctccaaacatggaaatgctgctgaaagtgatttatgagctgtacacggacttcgttttgaagaatccgttctatgagatggagatgccgatccggtgtgagctgtttgatcacaacctggctcagatgatccagaaggaccgtgttgcgcttctgggtcggtgaatcttgaaaactcatggtctcagcccttgaaaaccctacttttccgttttcgacgcttggacttgctctgctggaaccctaaattctaccttgcggcactgctgtgctgtgcataaccgataacttgaatagtgtgttgctcgcttgtaatcttcttgcggtgtgatgaaatgtagagctttgcgggcataaatgccgctgcaaatagtaacaacatggaagcagcttttgttcttgcatgttttccctgcaatgagcttgagcagctagatgagggctggtttggtggaagtggaattgaaggggatccatagagaggaatttccttgctatttttgaatagcaagtgaatttctcccatagatcccttcaattccattttaccaaattggttatcagtgatttttcaatgcccttttaccaaattggttatcagtgatttggtgttcctcgttgttggggatcattgttcgggtgacagatggtcaatgttctgtcgactgttgtaggaccaccggtgccatggcaccagccttcgggcctgattggttcagcttttttctgaccagcttttctgaaaatctggttgtggggagaatctgagtatcattacgattacatgtggaggaagataaagttgtttatagggctaaggatctagaaagtgacagattcctactattacaacgactcaatcgattatgtgtttatgttgattttggatggtttttgccccaacgaattttatagaagctggctgaaaagctgagcgtttggcagtccgcagcagcttttggcttttgaaagatggaacagtcagtactgtttgtaat

SEQ ID NO: 28068 - DNA, 1747 bp, Zea Mays
ttttccttctcccgcgtgcggcgcgccctagcttcctccttcccttccactcccgtccatagcagcgctgccaccaccgacggaaggcccttagcagcgccgccaccaccacgggagatgcgtggagagatgaagcaaaccaagtcaggaagaatagaaatgagggcagaatggaatgaaacaagaacttgtttttttgtgagcttactgaaggagtacaattcaccaagatatcgtgcccaaaatggttggacaaaagaagcatggaacaacatgacacaacgcatcaacgataaatttgaaacaaattttgtggtgacgtaattgaagaacaaatgaccagtgggggccgaataaacttacaaattcataccgaattttgcctggtccactaaagctgcctgcgcccccccccccccccccccccgcatgggctcgtagcccacagacgtcccaggagctggcccaatttatcttcgccatccatttcgattgaatggccacgatttaccgaaatcgcatatataaatgaaaatttcggcatgccctaaccctagcttcattcgcttccgatatttccggagtggtatagggcggatttggtggcggcgactgtgaggcgggcgagcgaggtggtcattgggctcgcgccggagaacgctatgatcccgctgttcgagacggggggcgcgcagctcgagctcatacgggatgccgagattgagccgtgtgcctacgtgaggtgggagcaagggaggccgagaggatccgcttcatgagttggatgcacacgagagacgttggggatcccagcttcccaatgcgggagatccagaagagtcaacggcggatcgatcaagtggattagcactctcccctgtctgcgtgatctgtagaacaaggataagtcggggacgctgttctgctttgccgcgatggaacatgtgttccaatccgagaatttcaggctggggcggttgggatgagggggaagccaatgggagatggatcaaggagatgagcatgtatttgttagggttttctccgggattgaaggcactgctgcaggctgaaacgtttctcgcttgattggcggaagaagggattccagcgatctgtttgctgctagctgcgagagttcaatatgtctcggaccttcaaatcgacgacgggtctctctcggcggtttctgaatctgatcgcggccaaccactcccctggcgtcaagtcgctgcaccgcatcggcctgggtcgcatctttaactcaacgccagcgccaataccaaacggagatcgattggagtccgcagcaggacaagaagactacatggtgcggccccgcgcgttggatatcattcggctccccacgccggtaatgagcttccgatcttcagcgtcatttgaaagcaaagaatggaagttggattgcttcccgttttcggactgcaaagttttctgcatggaccagtcagggcgcggtttcctcttcgatgccaactcgtgcggggtgtcaaccgtggcccatctccatacacccaagcagctgaagacttcttttctgctatgcttgattgatggggctgcgtcttcacccagttctgcctgtggcttgggctattttatcttcctctgcgcattatgtttttcggctcactttcgagcttgtatccccggtattgtaataacattattcagactctgtaactatttgaagtaatgaatgtggttactagcctcctgggactag

SEQ ID NO: 28069 - DNA, 1702 bp, Zea Mays
cgtgactcgtcaactgctttcggcccaaaacacttccctgctctctcggtctctcccagagtcccagctccctcactctactctggacgcgactcgaacttaaaccctagagccgcagccccggtcgctccaccgaccccaaatctcaaatcagcgggagggaactcgcacgcgaaggctgaactcatggctcgcgtctacgttgggaacctggatccgcgtgtcacggcgcgggagatcgaggacgagttccggatgtttggggttctgaggagtgtatgggttgctaggaaaccaccagggtttgccttcattgactttgatgaccgcagggatgcacaagatgccattcgtgaattggatggtaagaatggttggagggttgagctgtcaactaaagttggtggtggccgtggccgagaccgtaacggttctgatatgaagtgctatgagtgtggtgaagctggccactttgcacgtgaatgccgcttacggattggttcaggaggcttgggtagtggaaggcgtcgcagccgaagtcctagatatcgcagccgcagccgcagccgcagcccaagatatcgaaggagcccaagctatagcagaaggtaatttgctaatgacaccaattcaccacatgtattcatccagtagttttaattaagggttgggaaacacgacctagaaatcctaaaacttttgagaacgaagcaaaatttcggagataacacgttccctttaaccaagtgagtatccactatccagtatggtctcagatttgttggatagtatttaaccaaacattcgactatgcatttgacttattgagtgttgttctttatcttgcattggtactatataatacaatgcattctacaccccctcccacctgttatagctttgttagcgttggcctaatatttcaggggaacatgttgagagacttcataaaatacagatcaatgtcttcttgcctaactagcagccttttcaatgcgttattttatgttcatcctgaaaacaaatgttcggtttttccggagctacagcccgcgagatcgttctcctaggaggcgaagttacagcaggtcgccactgggatctcctgcacggagtctcagcaggtcaccgccgctgccgccgcctcctcccagaaataacagcaggtcaccaccggcagcccgagacgtgagcaggtcaccaccggcagcccgagacgtgagcaggtcgccaccaccacctcctgatgccagaagaagctatagtggatccccaggacagcagccacaacgcgacgagtccccatatgccaatgacgcctgagattctcttagctgccccaagatgctggaaaatgctaggggcccccagcatgttttgcctgtccggtcggcacaactgtaattctgtaggatcgagtctgagattttgttccagtgttttgggtttcccttgacacatcgctgctgatacaattgtggaggcaggagcacaacgtttctgttttaagtattgactggatgactttgggcgcttgtagttgtcaaggcaggacctgatttgtgttaggcttgtattactagactgcattcgaatttggagaaagtgttcatcgtgctgtatgttgagatatctcactaggtcaggctctatttttatttattttaactaaatttatttaggtctctaagaaattgtgaag

SEQ ID NO: 28070 - DNA, 425 bp, Zea Mays
gttaactcagactgtgttggcaccctgggatcattcctttgctgcatgcttgacatgttcactagctctggcatttctactactgttaccttctccttcatcataaggttaaactactcaagagccctgcacaccatcgccagtctggtgaccatgccacccggttccctcacctcgccgtgggcaagacgtctcagggagtgaccagcccgaatgaccctcgttccacgttctcctaagagcacctagaagaagtggtgtttaaaggaggagtctactccagtggctgctaatcaagtggaggagccatctaactgggtattggatagtaggatctggaacctcttcactgcaataaggcaagccccggtgcatgcaaccccttccttgtattttaaaaatacttttatacactttaagtctag

SEQ ID NO: 28071 - DNA, 1961 bp, Zea Mays
aactacctgggccgccaccgccacagccccgccccgccccgcccccgcctcccgagctgagcgagcgactcagcaagcgcgcaacggaaccagccgccgcggcgcgccatggcgccgttccagatgcgtttcgggctccagatctctcccgcgcgctccgacgacgacgaggaggaggacgacgacgacgacaacgaggaggagtatgacgagatggcgagcgaggggacggcctcgccgccgatgatgctccggccagggaggggagggggagggctggtgagcgccgtcgtgggcgcgctgcggaggtcgctggtgatgtgcagcgctggcgccgtggatatcgacgacgacgacgacgaggaggagggcgggatcgagatcgggcggcccacggacgtgcaccacgtctcgcacgtcaccttcgaccgctttggtggcttcctcggcctccccgcggacctcgaacccgaagtgccgcggcgcacgccgagtgccaggtcaaattctacatgcagtgtaagcgtatttggggtttcacctacctctctgcaatgttcatatgatccaagaggaaacagtgtgcccacaatattgctaatgatgcagaggaagttatatgatcgcggaggacttaaggttgaagggatctttaggattaatgcagaaaatagccaggaagtctatgtgagggaccaattaaacagtggagtggttccaaatgaagttgacttgcactgccttgccgggttgataaaggcatggtttcgggagcttccttcaggtgtattggatgcactgacaccagaacaagtgatgcactgcaacacggaaggggggtgcgctctccttgcttctatgctaccaccagtggaagcagcattacttgactgggcaattaatctgatggccgatgttgtagagcaagaaaactacaacaagatgaacgcccggaacatcgcgatggtttttgcgcccaatatgactcaggtgatgaatttcctcaagaccttaatcttgaagactctaaaggaacgaaacaaaaaggatgaggcacttgaggcgttgcaaccatgctccagctctccaaatgaccaagacgaacatcaggtgtccgagcatttggagaaaccttcagttctgccaaatcaaaaaggcttcggtttccacatgaatgatagtgccactcctgttcaagtccttggagctgagaaaactctccatcatcactcacaaatccgttctcacgagccaaaaaagtttggaaccgatatggaccacaagaaaagacagagtgatgcctcctctctcctcggcagcgattcgagcaaccgattcaacagttctgggagagaattcggtagcagaaatggcgcgtccgacagatttagttttaggaaaggggtggagaggctttgcaggcatcccgtgtttcagttgaataggtccatgaagaagtctacagatgccgtggtcttcgatgccccccgagaaacaagacaggcttgggtgtgatacaataacgacattgtatgtattatgtagttctgtttccacctgtgtttcagctgataagccgttcccactagtctgtgtgagtagaatcggttagcctcttaggtgttacaaaatcgaggttatttggagtgtacattatcgcagtttactcttccgacgaaagtgtcaggagaagtagtacacactgtacactagcacttggcttctgcggaacgaacgaaagcgagagtgaactcaggctccatggctgcgcgctgcgtacctcgagcgttagtgaccccttgatattataaccttgcaccttgctgatattttgtaacagtatcggcttgtacaacaactatgtacgctggtgttcccaacttgtatagatgcctgagactgctaggcgtggtcctcggtacccagctgcatctgaagtccgaaccgttgtgatgcttttg

SEQ ID NO: 28072 - DNA, 791 bp, Zea Mays
gccaatttgggagcggctttgtgataatggaaccaaccggcaaaaagcattaacgatgcaaaaatcaatgcaccaattgcggtacaatagagttgtaattcactagttattccggatgctcgccaaatctgaaaaaaaccagaggttatttggattcctcggaaacccccgcctacatcaccattcaaaatttcttgtcctactattggccaaactacctgagcactgggtccaatgtgagtaggatcgcttagccatgcttcataattggaaaaacgggcaccgtggaagtacatgccactcaaccaaagaaagataatggagagttggccgaaatgagcactaaagacttttcgggagatctcctccaaatcaccggtatgactatcgaaatcgtgagcatcagcatgtaggttccagatccaagtggtagtatcggggcccttagctattgttcttgagaaatgcccgggtctggcccattcctcaaaagatgtttttataggatccctatccacagcaattttaacttctggttccgacgaacgaataatcattaagtcctcctctttccggacaagacatacaaagagacccgccaactgtctttttattgaatcttttaaagatagatattatgattagtccttttctttactatctaccgtccttctatttttttttttagttattcactggagcaattatatattgaagtcaatccgaggcaagtgttcggatctattatgacataaggattaggtgcctaacggacattggttattctggaa

SEQ ID NO: 28073 - DNA, 198 bp, Zea Mays
tgagaagtctttttcctttgtcgggtaagacttgcaaaagtacacttcgtactcagggttttcgaacccatgttgttgcaggtactggatttgtgctgctgtggaaggtgttaagcgccggtgggcacgacctacttataggttaaactaactcttctatacttattgaggattgtcattgagctagcatatatttcg

SEQ ID NO: 28074 - DNA, 3842 bp, Zea Mays
  misc_feature (3841)..(3842): n is a, c, g, or t
gactggcctgcacgtcttctccagttctattttgctgccagttcagagtttggacactgcttggacttggagtggcatttcaagccagctaagggtccagatccaccatccatggctgtgcttccaacgcgtcaggatcccttattaaatatcccggcagcgccttctccactccctgctggccgtcttgagcatgagcatgatggacctactccttttctttttccagccaggagaatcaacaacttggcccttgcaagcacggtgcttccaaaacgtgtgccgctccatttattacagaaaataacaaatgatttctctaaggaccgtgaacttggttccggtgcatacggaaaagtttacaagggagtgcataaaaatggcgaaacgatggctgtcaagttgcttcactccatggctggacttgatgataaactttttgaggaggagtttcacaacattgcaagactccaacacaagaatattgtgcgtcttgttggcttttgccatgaaactcaacgccaattcataccgcacgatggaaaaatgatttttgctgatagcaaatatatggccctttgcttcgaatatatgcataatggaagccttgacaagttcattattgatgaaaatagtgtccatgactggtccacacgctatgcaataatcaaggggatctgtgagggcttgaaataccttcacgaggaattgaatcctcctatttatcatttggatttaaaaccagctaatattttgttggatgacaatatgatgccaaagcttgcagattttggcttgtcaaagatttttgaacaggaacgaacacgaatcacacaaagttgtgtaggaacacatggatatctaccaccagaatatatagacaggaaagtaatctcaaataagcttgacatattcagtctgggtgtcatcatcataaagattataagtggacctacaggttacacccagtgtgctgaaatgccttccaaacaatttgttgagcttgtacatgaaaaatggaggaataagttacaaacaacaatggatgcagctgcattggagacatattgtgaacaagtagtgagatgcattgaaatggctttaagttgtgtggagaccgatcggcacaaaaggccgagtataggggctattattgatgagctaaataagatggagacaaataccgaccaggtattttcagtggatatatgctcgactccagcacaaacacaaccaccaccccttcctgattctagccacagcacagaagaaacaagcaacacaaagggagttagcagactgggaccgagagagtacgtacagagcacaatgcgggacctggtaattgggataaccaagtcggtggtggagggggtgatcagcaaggcccagtcggtgatggaggaagaaaatatgctacttattagcatgcagcatgacctccacttcatcaccgatgagtttcagatgatctattcattccttagcatcactgatgaggagcgtatcaacaacgcggtagtgaggatctgggtgatgcagacgcgtggtctggcctatgacctggaagactacatggatgccttctcctgcctggacaagaccagaaaatggtggtcccgcttgttccgagcatgcctggcaccaccggggtctccatacatgtcagtgacatctctggccgtggaactcaagcatctaaaggcaagggtcgaggacgttagccacaggaacactcggtataacctcatcagcgacgccggctcaaagcccggcctcgtgaggcaacagccggtgcctcctggtgctgtggcatacgaaaacgacacaagaaggaaacacatcttaggggatctcacccagcttatcaccaacaaggacgatgctgatcttcaattgatttcaatgtggggtgcaggtggaggcaccgggacgacatccatcataaggaagtgctacagtgatccagagatcatccaaaatttcatatgccgagcctgggtcaacctcagccatccattcaacccccatgagtttgtgcggtctttgatggctcacttttatgcaaacagttgccaagaaagacaaggagggatcatcggtgttgatgtcctaactagcatggatgcgactgccacccagggggatctcctcagcgagttcgttcagctagttgacaagaacaggtaccttgttgtcttggaagacctgcccaccatggcagagtgggactctatcaggacgttccttcccgacagaaagaatggcagctggatcatcgtgtcctcgcagaaatatgaaattgcaagtttatgtgtcggacatccctaccaaatattggacctgaagcagtcctcgcccactgagcactccgtatgtgccttcttgagagaggaggtcacattaaaagaaaaaaaaggaggcaatagaaaagaaaaaatttatgtcggagatgaaagcgaggtgaacaacggtagtacatcaaccaacagcaaggtgatatcaactgagtatgacttaagccataaccataggatggtcgccaactctaaatggaaagaagccagagactggatgcagaattcttcccttgtcggacgcagattgcagatgtatcaaattcatcgctgtatagctgaagcacaaaggaaccattcccatgttatgtctgtttggggaatagttggcgttgggaaatcagctattgtcagaaatttttactgcgacaggatacttgagaatcagcaatttcaagaatacggttgggtggatttatcacactcccaacccttcaatttgaaggacttctcacagaacttgcttacgaattttcaatcagattctcttcaagccaatgaaactacaccctctcgtggtatactggggacagtccgaaaatgttgtgagtttctaagtacacgtcattgcctcgtggtcatagatggccttcagtccaaagaggaatgggatttgatacaatcatcattggtatctagatactctaaatctaatactattatcattgtgataacaactgaagcaagcattgcagcatactgcgcagataaggatgaccttgtgtttaatgtcaaaactttagaaactgatgcagcctttgatctcttcgaaaatgagatatctaagaaggctccgttgtggaccacttcattatgtgatcgaggaaattcagtgacgcaagaacttgtttcaaagtgcggggggctcccaatggtaatagtggctatagctggcatattggctaccaaggtagtctcctggatggacactgcaacatccatcaatttgaggtttatgtttgagctagagatcaatccagacctgcaggatctgtttagctgggtgcattcctgcttccgtacttgtccagatttcatcaagccatgtatcttctacctatcattttttccaagagaccacaacattcgacgaaggcgtctagtaaggcgttggatcgctgagggttactgcagggacagtgatgataaatctgcagaggagaatggggagttcttcttctccaaactcctcggtatgagcataatccaaccggagtccagtgacgcgaggatggtctcgtgtcaaatcaatggatttttccgtgagtgcatcctctcacggtcaggggaaatggaagaccttgtcattgaactggccgacagatgcaacctaaccacccaacgcagtgggcgtcatcttgtcatatcggaaagctgggacagagataagattttattcgagagcatcgacttctcacggctacggtcaatgacagtgtttggaatgtggaaatcattcttcatctccaaaagtatgaagcttnn

SEQ ID NO: 28075 - DNA, 2578 bp, Zea Mays
tttttttcccgttgcaacgcaggcatgtttgctagtcattagtaataaaacatcaatgcatcttatttacatgttctcaaatcaaaatttacatgttggtgactaggaatccttaacacaccagttagccttttcacagaagttaattaggagatccaacagagaacagtgtgtcttacgaacttgaattctactgctgtatgttatctggaactcatattgcatcacgaaaacaatatgtcagcagatgctttatccagtaaatgttaggaattctttttgccacttcagttgtgtcacatgacactggattgtcagaattctagtgctgttgcagaacatcccatgaactccgaagtaccaggccgcaggccgtatagtttacatgccagaagctgccctcaaatataccagtcgtcttctacaaccttgcaaaaaaaaaaagaacgtagaataaaactgtgtatgccaatccagccggttgattgtgctctaaaatatacgtagcagtgaaattaagttggaacaggtccaagctctactaacatcaaaggttgtcgtagaatagatactgaacactctgaacacgtaacggtagaagaaccagcattgactaattgactaaaaggcactcggcacccttcaaatcataaaatcaggagatcatttacttatactgacatgttcttgtaagaattagcactcgccttgttatgacttcatgaagtctgcttgcaacatcctaacacaacagtacccgctgtaatatcgtaccgtactgcttgtttatccagaaagtaaacgaaggcgcattaaaatagcctccacgttgcaaaattggacatgtcagattgcaatttctagttctagtaataaatattgttccctcttagttttgtactctttccattccaatttataagatgttttggcttttctagacattaatttttgccatgcacttagatatataccatgtctagatgcgtagtaaaatcaatgtatctagaaaacccaaagcacctcataatacctaaaacatcttataatttggtatgaatgaagtacctaagagctgctgtgtgtaattgtgtatcatgctgcaagattccaactaaacgtcatgtcttaccaacatataccagttaaaatctgtgccaatgtgttcattgataacataacctgtttcttcatagttttggcaaagggaggcagcaagcttgagacaacaactgcacaacttgcaagaaaattatcggcagttgacgggagatgatctttctgggctgaatgtcaaagaactgcagtccctggagaatcaattggaaacaagcctgcgtggtgtccgcgcaaagaaggaccatctcttgatagatgagattcacgatttgaatcgaaaggcaagtttatttcaccaagaaaatacagacttgtacaataagatcaacctgattcgccaagaaaatgatgagttacataaaaagatatatgagactgaaggaccaagtggagttaatcgggagtcaccgactccattcaactttgcagtagtagaaaccagagatgttcctgtgcaacttgaactcagcacactgccacagcaaaataacattgagccatctactgctcctaagctaggattgcaattaattccatgaagaagagtaaaactgccgtcttatgatgctgaaggaaactatttattgtgaagagatgatactcagagaaagacatatttgtggcagggagatttgagatatgaacttataaatgtaatgcaaataattttcagaccggaatggggtcgtggaattcagaggatgattgctttctagttgcatttgatgtttgatgagacttttctcatgtgaaacgtttattaaaacttcaaaatggtgcagatgttgctactacacttgttaggcttgtataaatatctgaccatgtgtactagcattacgaaaacagaaaagaagacagacagccctgtcgaacatcttgacgtgtttctaaaaggtttgataggggacaatgatgcgatctaggagtacaaacagagtctagtttccactcagttgagttttatattgctctcaagcgttatcaagggtttagtaggatacagatataatatgaagatgcagttagatgtattggtcatttgttgggccatatgggaaagccaaagcacagcctgattcgacaggaaaaataatattatacccatgtaaaatactctcaagcctgtgtttatttgaagtattaggcaggtttatacaaatcagggctaaaggaagctaccgtcgaaagggctgggcgtcattccacaggcagccatcaggatcgtgacattgcaggtgcaggtgcatgagacattgaatctgatcaagtgctaggaagcaagctactgtgttcaggtccagcacggaagtggaatacaaagttctaaccaatgccatcgccaagatcatgtgggtacagaaattgtttactgagttgggcatacaacatccacagatggctcatccagtaagcgataacctgggggctaagtatttgttgtcaaatcctatcttcc

SEQ ID NO: 28076 - DNA, 985 bp, Zea Mays
cctaaggtgaggcgagtacagccccggcacacaaccaatcacggtgacgctctaggattgggccatttggtgtggcactgtagcgaggcccagctcggtccatgagcagcattctggtcggcttgacagatccatcacgccatcggcaaaaatatctggctctcgagaaccctcccggtcccagcgcggtaggcccacctcgggatccttatcctccggtcggaccgttgtttgcgcggtcgccgcccgatccgatcatgacggcgcccgtcacgtccgtcgcgctataaatctgcgggggttccttagggttttgtggaggggcgatggcggcggctgatgtggagtaccgttgcttcgtcggcgggcttgcctgggccaccagcaacgagtcgctggagaatgccttcgcctcctacggcgagatcctcgactccaaggtcatcaccgaccgggagacggggaggtcccgcggcttcggcttcgttaccttctcctccgagaactccatgctcgacgctatcgagaacatgaacggcaaggagctcgacggccgtaacatcaccgttaaccaggcccagtcccgtggcggtggcggcggcggctggagggactgatgtgtgggcccatcctggcttcggccgagttatcttatctatctatagtatcgtgttaccgttcgcttctgtcaccgtgttagtgtccgttctacctttggattaggtgttggtaccctgttgttcgctttggttgctcccgctatgaaacgagacgagagaagaatgagcaaggtttttgttcgcagctatttttgtccaatgatattgatatattgttcccctgtctgttgctggattgttgtgtggctatacaaatatcatcaaactgttactccgagagccctataaatatcaaacttccagaacacaatacagtaaagtacacgataacagatccaaagaattcgccgcttcgatgcaccata

SEQ ID NO: 28077 - DNA, 4194 bp, Zea Mays
  misc_feature (1)..(1): n is a, c, g, or t
nttagtattggtgagaatatccagaaggaaagccaaatgcccatggatccaagtgcttttcaaataatagaatgtgccgaagctcctaatacaggagttgttagtagtaagtttgctctgaatgtagcatgcgatagtcccatggatttaaatttgacaaatgttgggacttcagataacatcctgtacacttcagagtttgctgtaccaggtcgaaccgaggatagaagcatgcaagttgattttcatgatgcgaaagctgctttacataagccaaatcttcccctggaagtagtggatacagatacccatgatctgcagtcatccagaaatactgagagcacaattctgccatcattcggtgatgatcctatgaaggattcctctggtgctctgaataatggtctagggaggagcacttcatctcaagtaaccgaactgacacatcttcatagatcccacccgcctgctgactacaatccattctccttgcattcccatgattcaccatctgtatctggtaacagtgagcattctgttccgacagctttgacacttggtaataatatctatttcagtagtgcagagagtgagggacagcctgaggaaaaccataacctattggatgtaaacttaggatttgatgtgacaacgacagaatttggtaatgttgtcaaaagaaaaggtgaatctggcaatgacttaatgaatgcaggcagtcagaattggttgactttaccacttactgtcagctgcttggataatgcttctgctgttagtaatgggaggataggtttagagcagattgtggatgaaggtgtccctgttatctgtcaggatcatgatattatgctggatattgaccagcggggcagtattgatgttttgtctggccaggatcacaacctcaaactatgtggtatcagtattcctcaagcagtccttttggcaacagaagagagaaataaggatgttgatgatgagatcgttcgcccaggtcgagacttagcttctcagatatctgttgattctgatcacacttaccatggaagtactgaggatcctgtgggcatgtcaagtacaacacctgattcggtatcctcctggattgaagccattgtaccagaagctaacaaggaacaccaatcatgcaaatcttctctacttcctatctgttcttcagaaaaggtagctttgcctggttcattgctagagccccctcgcttaaaccagaatgcaaggaacaggacatggcgtcgtgacaatgcatcatcttctaattcgtcattgcatgtttcacagacttcaggattaccccctaaactgccattaaaaaagaacagcaaaagtcaaaactcttatatccgcaagggtaatgccctaattagaaatccagccaatggaaatcatcttcattcttcttctagtctagattctcaaaataagttgagtaagcctgttatgaggagaagcatgaactttgtcaggaatgtcgattcaaaagacgcagcacattctcatatttcagttgaaagacccaagaccccacctttgccacttcataccaaatccatcagttgtgctgtgaatgttttggagccattgtctcaaaatttgcagcaacaggtccttgaaactgaaaaggaagattccagtgggcaggttaactcaggtgctgacaatctaagcattattagtttgcacaagtctgaagcccttgatgctggtaaagcaatttatgttaggccaaagttaaatcaactagttgcacaggggcggcatcttggtgagtcgagtaacatttccttggataaagtgacgttgctgcagccttccgcaacatctgatctctatttcaagaaaaggaaaaatcagattattttgggtccctctacttctgatgccccgagttcaaaagatacatttcaggctgaaaatataaagtcaggtgagagtaaagttctaatgtcttcatcttccaacaacaatatcactgtggcaaaggacaggctgcacaaagctcttcagacaacaaatactgtcagaagtttctctcatgtatggacacttaatggacaaaatcctcgaaagaaatcttatgtgggagctagtcatatgaaggtcttacctcgtatacttccatggaaaagaaaaatattctgccagaactttagaggcagttattcttcgttgttgaatacaagctctataggaataatgagaaaattattgcaaacaaggaagagaagtactatttacactgtctctactgatggattctctcttcggaaatctggagtgttaagtataggcgggtcaagtttgaaatggtcaaggtccctcgagaaacattctcgaaaggttaatgaggaagctacacaggcagttgctgaagttgaaagaaagaaaagagaaaagagaaaacggcagtctctccgtagcaagggaaggaatgatcggtactctgcatcagttgctgccaatcaattaacaaacagaagcagagcatcttcagattcaagggtgtcatcaacttgcaatgaatatgtgcgtgttaacaaaggtaaccaactggtcagaaatccgaagaaagtaatccgcatgctagcaagtgagaaagttcgatggagtttgcacactgttagaacacgattggcaaagaagaggcaatattgtcaattcttcacccgcttcggcgagtgtaaaaaatctggtggcaagtgtccctacattcatgaccgagctaaagtggttatttgtactaaatttcttaaaggcttgtgttctagtactagctgcaaactaactcacaaggtcctgccagaaagaatgccagattgttcttactttctgcaagggctatgtaccaacacagcctgtccctataggcatgtgaaagtgaactcgaatgctcctgtctgtgaagattttttaaagggatattgtgctgatggtgatgaggtatttatgatatcactagaattatatagatgtttactttttttctgcaccttgcatcgaagagtaggtaggcacatgaattcttatggagatggcatgaagcttgcttccattgggtttttagcgaacaatattttatatcagaattaatatatttaggttggagtcctttatttgtatatttgttccaacacgaaatgttctatgggacacgtagtgtcaacatatccacaccttctagttccttatatttttggatagtgttgattcttcatctgaaaaagcatgctgtctctgctttaaaacaatggtcgtattatcttttaaatttctgggaccttagatgaacctttacggttctgaatggatatcactaatcttttcatggacttgaaacaatctctgttacgagcagtgtcgtaaaaagcacagctatgtatgcctcgtctttgaggcaacaggagagtgcccacaaggatcaagatgcaagcttcatcacccgaagaagaaaagcaaatccaagagaagcaaagtagacaccgtccaaaacaacagttggggtcggtattttgagacaaacgttggccatggcagtggagcaagaatagtttatttggaggaagatgagagacagaaaccagagcaagtctctggtgaggagtttgctgacttcattgaacttggtgccggtattgaagtccctgaagatgcagacacttcggatgacatacagctgatggaactggacttagggaatctcgaggtgcaggctgacaataatgacgcgataatcaagccacttcggatcatgagaacggcaagagtttgatgagttctttggttggatacagctgcagtgttcctgggtcagggtggtattttacgctatgtttgacgtggcatataggcgctgactggagtttctatttctcgaagactggttctgacgggggcaatcggtttttgcttggttgaaggtttgattttgttcatcttgtacatcttttattaggaaatatattaggaccatatggcagtggtagaggccatgagggttactggctgttaacccgtgttttttcaacattacccagagttgaatgtaacaaacagtgctttacaatatgaaatgaatgaaggtttgcatacaggaaatgaagctttcattttgtgtatattgcacatttgcaccgcacatcttttggttataaattcgttaattccttccgtaag

SEQ ID NO: 28078 - DNA, 2209 bp, Zea Mays
ggcggccgctgcacgacagcgacctccatgcggggacggcggagccctagatgcgtcgtggctgacccccactggcgccgccactccttccggtttgacgacattggagatcaaccatgctggagctggtgggttgtggtcagagctcgtaagcaacagaggatttgaggctggtgggcctaatacaccttcgaatattgatccgtggctgatcattggggatgaatcaagtatcattgttggaactgatcggacatcatgttttgaacgtaacccagttgcacttcggatggaagttctttgtggttctaaaaaaactaatgcctgtccatcgggaggtgttggggtctataatcctggctactggggcatgaacattgaaaaggggaaggtttataaggtgagcctgcatgttaggtcatcagatgcactgtccttgactgcttccttgacaagctccgatgggctacaaaagctcgctgctcataccatcacaggtagcaagaaaacctttgcaaaatggacaaaggtagaatttcatttgagatccaaccaaaataacagcaactcaaggtttcaacttacaacaagtaaaagcggggtagtttggcttgatcaagtatcagttatgccaatggacacttacatggggcatggttttcggaaagatcttgcttctatgttggccaatctcgagcctcagtttctcaagtttccaggtggcaactatgccatgggaaattatctacgaaatgcatttcggtggagtgagactgtgggaccatgggaggagagacctggtcactttaatgatgcctggggatactggactgatgatgggcttggattttttgagttccttcagttggctgaagaccttggggcttccccagtttgggtggtgaatgatggagcaagccttaatgaagaagtttccactaaaacaattgcatcattggttaaggatgttgttaatggcatagagtttgccagtggaggacctaagacaacttggggttctgttcgtgcagcaatgggacacccagaaccctttaagcttgattatgtttcaataggaaatcaagaatgttggatgctctactatagaggaaattaccaaaagttttactcagcgattaaatctgcctacccagacatcaacattatatcaagttgtgataggccaactatttcgccatccaaccctgccgatctttatgatgttcatgtctacacctcttcgactaatatgttttcaaaagctagtatgtttgacaacacaccacgtggagcaccgaaggcaattgttagcgagtacgctgtgaccggaaatgatgctggcaaaggaacactggtagcagcactggcagaagctgcatttctcattggattggaaaggaacagtgatgtggttgagatggcaagctgtgcacccctttttgtaaatgacaatgatcgcaggtggagcccagatgccatcgtcttcaactcggggcagcactatgggtgtcccaactattggatgctacacttcttcaaggaatctagcggcgccaccctccatcctacagccattcaggtctccagctacgatcagctggttgcgtctgccatcacttggcagaacgctaaagacaagagcacttacctcaggataaaggtggtgaatttcggcaatcaagctgtggatctgaacatatcggttgtggaactggccaccggcgtcaagaagtctggatcgaagcagacggttctaacgtccagcagtccgcttgacgagaactccttccagcagccagagaaggtggcgccagtgtcgagcccaatggcgaacgcggggcagcagatgggcgcttccgtggggccgtactccctcacctcgtttgacctgctgctggagccgagcaagcatgacagcgtgtaaaactgtcaactgaagaagcatgacagcggtgtacgtaaaggaggtcaaagatagaggagacaggtcagaggtcaaaattgagaccttgataccatattggattggattgtatgtatcaacaagttcaacctaaaagtttaagctgatagtgaaatgcggacagttcacattctaacaaatcccagtcaatgttgcatccaacaatactttgtacttgatgtctgaatccatttgattcagaagatagcgctttattgttttgccaatgcaaatacacatgcgatc

SEQ ID NO: 28079 - DNA, 2606 bp, Zea Mays
cgtcggacatccagtagcccgctgcagcacattctatcatcgagtaaactctacgtcgagtaaacgcaacaacgcgcactcgcgcagagacactgcccatcaggatttcgcaaaagcaacaaaacccactcgacgtcgagggtagaagaggcctgcaaatttccgaagagctcgcggaaatggcgacggtgctgccgcttgccgccgcctcggcctcggccacgccgaggacttgcatctccggcggcccagttcccgcgcgattcctcgggacttgcatgcgtctccgcatccacatcccaccgcggggcgttgcctgcgccctcagaaggagacccaccaagtacaagactaaaatccagagtgaggaggatgtggtggctgcagaagatgtcatggatgatgatgacgacgaggatggtgcactggaagcacttttcaagcagctggaagaagatcttgacaatgatgatttatctgtcgatgataatgatatatcagaagaagatatggcaaggtttgaaaaggagttggcagaagcaattgaagatgtcagtggtgttgatgactcagcgggggattcgttgctgagctctggcgactatggtattgatgagcaactagatggaagcgaacgggcagagctgaaaacctggcaactccggagattggctcgtgcactgaaaataggccggcgtaaaactagtattaagaatcttgcaggggagctaggcctagataggggtttggttattgaaatgctccgcaatccaccaccgaagcttctactcatgtctgattctttgcctgatgaagtcccttctaaatctgaagtgaaggaaatagaaacccctagtacgaccactgttgacgaggttgataccagtgaaatcaaaccacagttggagcttccagtgcacgtcatgagtgcagaatggtctgcaagaaaaagactgaaaaaggtgcaacttgagaccttagaaagagtctacctgcgaagcaaacggcccacgaatacaatggtcagcagcatagttcaagtgacaaaccttccgcgaaagaccattgttaagtggtttgaggatagaagggagcaagatggagtccctgaccatcgtgctgcattcaagagatccctatctgagattggtgctagttcataacttcttcagataagcctttgttacggtgtttacttggaaccattacaaacatgtaaatttgagctttgaaattatgacaagttttgcaagctcaacatgcagtatcttttagattgtagtctcagcctatcatgcttatcaaagcggtaaagcgaggagtggcaactaactaccgccttacgcatgagcgagttaaatattaataacccctgcagaacccagttgcttactggaaaacaggcccagccaccacctttccatggcactggcaccggttgttgactgctctgctgcctgcacactaatggcggtctctgtccgtctacatatataacacagagggggccgctgcaggagcgggcgcggagcaacaccgtccagtccatcactgccctttgttctcctccacagtcgcagacaaagctggttcgtctcgcggagaggggaagccgggaaggtggataggcggcacccacccatcacccatggctgggttgcaaagatcggcgaccacgttcagacggtccggctcgtcgggcctggtctgggacgagcgtttcctgaccgaggccgacgccgaggcgaaggccggcgccgcggaggatgccgagcagccggagctccggcactcgaggagcgtcggcatgctgcgccgtgcgggcggcggtggagacagccgcagcaagaagggcaaggagagtaggcagaagcaggcggagtcggcgcggcgcagcaaccagcaggtgttccggaccaaggacgtggccccggacatggatcccccctcgccgagggtgtccggctgcgccttctgcgccgtcttccgcgggggctctggcggtactggccgcagggcacaggcacgccgccggtccaagcccaggaagaagtgacggcgtagcaacacgtacgtacgtgcggtacgttgttgtttgtgccatctgtaaagtccgggccatggttgttcgtgcgtgtacatgtttactatactaaatactagggtcatatatagatgagcttgctactcggtaatcggtatacgtacgccattatttagttcaggatagttcctccttttttgggtcggtcggttggtttcttgatccagatccatgcttttgaggtttgggcgacggttagatgttacttgtctactatatatgcagcagctatttatgagatctggggctgttgttcttgttcttactagcttggtgcaactttttcgcttgggttctgccgctggtccttcgggaagcgcatgtggttttggttttgaaactgggagggaagcagggtggagcgacgatgaattggtccgtgatgcggctgaactgggagggcagacaggcaggctggtggtggcagatgggatgagcggcgataattcagagtgctaattactagcaagttggtgagcgacatgattgcgctgtggaggtg

SEQ ID NO: 28080 - DNA, 186 bp, Zea Mays
caaaatagttaaataattacatcatatgaagacaatgatccagcaaccaaagttgactaggagacgacggtctagacctctcacgaactcatctcagcatccttcacgcgcctcatcctgtggtacctattcttgacctgggggatgtgagtatagcaagagtgagctcacatacgttcatcgctc

SEQ ID NO: 28081 - DNA, 2806 bp, Zea Mays
gagaagccgaaatgtaccccccacggccggcggcgcgtttgccaccgtccagttccatgtcggccaccgtgttctttctgcccgcaaatccaagctcgacggctagtcccgctaacactctccggcaacttacgccggcttccacctccggaaagctccacttcgcggcgttcccgctccgcctcccccgccatgcctgcgcaaggacctatcgctccgccgcattcgggaggggatcgcctgtggccgggcgtagagagaaggactactacgccacgctgaacatccgccgcgactccacgctccaggagatcaagtctgcctaccggattcttgcccgcaagtaccatcctgatatgaataagagtcctgaagcagaagaaaagttcaaggagatcagtgctgcatatgaggttctatctgatcaagacaaaagatcattatatgatcgctttggagaagaggggctcagcggtgactacagaaatggagatattggcacacatgggattgatccatatgaactcttcaatgctttctttggtagttccgacaaactttttggggatagtatggggtctgggggatttcattatagtgcagaagcaaaggacaatagggcacttaacatcagagtccatcctcggaggcaaacgtgaaatcaatgtttttcgccatgaaacatgtggcacctgccatggaactggagctaaatgtagcaatgacattacagaatgcacccgatgcagaggtcaaggcaggttgatgaaaactcaaaggacaccttttggtatagtttctcagaattacatgttatgcatttctatcttattgtgcaggggtgcaagtggtgacctgtatatatttgttcgcgttaataaaaaacaaggcatccacagagatggtctcaatctgtactcagatgcttcagttgattatactgatgtgattttaggtaccacagtgaaggttgaaacaatagaaggactcaaggatcttcacattcctcctggcacccagcctggagagaacttaaaattttctcagctgggagttcccgacattaagaagcctaatgtcagaggagatcactacttcatgataaaggtgaaaatcccgaagagtatcagtggccaggaacgtttgctagttgaagagcttgctgcactaaagaaagctcagaatatctcagttccagaacctacaaagatagaaaattttcgggagagaaaccatcatccatctgcaaagagaagatcattctggggacgtgtctggaattttttcagggatgataaaggtgataaaagatttgcttcaatcagtgtgcaacctattatcccaggatggaattcttgccgaggaactgatacggctgtccccttgctattaaaaggattcctcatgaccgcaatattcttatttgtaatcagaagtaaactcaggtacactgggaagcgcattgaccgtccaactcaagctgaaatacctgttgagccagagtgaatttctgtcgtcttcatttctgaacgtttgcgacatcacagttttgatgatgatcataaatacgtaactttgccgcgcaaagcttcgtcctgggaaaagaatccggctttgcttgcagtgtatggtatccagacgcagcagtacaggttaacagaatatgggttgcttctcattagtcatttcttgattcattattccaatatgtagaagacacctgcagcaattccgagttttgacgaaagccacatgaaagacatgaagaaacatggccgtaggctaatgtacactgtatgtatcttgtctgcacaaagttttgtaaccatcccggcttgatatcgtttaacgattttgttgcaacataattcataagcactgaatttatgcaaacaacagttctgacgcgagacgaattggaataatcacaattcacaaacacaacaatgctcctattcacaaaaaaaatgctcctatccatacagttcaaatgcctctgtcatgttcaaatggaaacgattcgtttcgctttgagacgaagcagttcaaatgcctctgccgtgttcaaatgaaaacgattcatttcgctttgagacgaagtagttcaaatgcctctgccatgttcgatcgatttccagaccgagacaagcgccgcagcccgcagcagaaggctcgcgacatcagctcgagccagctgacgggatccacacggtgccatgtcttcccggcggccgtcgcatccgtcccaccggaatccacggcgattcccgtccgcctgctatcttctagtactcacccttgccctcctcgtcgtctccgccgccgccaagtcctcccgccgccccatctccgacaacgagatccggcagaagaaggaggcctgctacaccgacgtcgagaacgggctgtggggatgggtgtgcaggtactcgccgacggagaaggagaactgcgtgctgcgctgcctctcgccggagtgctacgacctcatatacggcggggatccgcttgaggaaggggagttggactatgttcgaagccaggagtacaagtattgtatgcacaaatcatcccttggagaaagcttggatggtgtgaagggatccttcagctactcatgaaggaatgagaagaaaaaggttctgttagtctgctgtaaattttatttacaatcttgaacagacatgcatctttttagataatggaattgtaattccagactttgctttttctcaaagcatcaccggtgcatcatcttatattaaacttacaaatgcaaattaaacattggattcatttgttggcc

SEQ ID NO: 28082 - DNA, 1917 bp, Zea Mays
acacggtcacacacaccacaacccagccacccaccacctcccccaattgcctcttctcttctcccagcagctgccgcgacgcagtcctactcctgcggtgcctccagtttcgcagcaccgttgccacacatcgccaactaacgccatcgatcacccggcggccgcccagagtcctgccctgccatatccgaacctgctcctgcagctagccagcaacacagacagaataggtcggtcggtcgatcgatcgatggccagcgttatcgacggcaatggaggcagccggctggtggtgacggagctgggccacctcaaggagctggcgatgcagctggaggggcacctcggcggctcctcgccggacctctgcaagcacctcgcctcgcagatctcctccatcaccgaccgctccatcagcctgctcatcaccgccacctcatcaagcccccacggcggcgcctctgacgcgccgcccttcatcagggctactaccaagaaaaggaagaggatggacaagaagaggcatgaggtgagggtgggctcggccggaggcggcggcggcgaccatccggccgacgacggctacagctggaggaagtacggccagaaggagatccttggagccaagcacccaaggtgcccacttgacacatgctgtgctatcagaagatttttttcccccctccttcatcttttccacactccacagcccaatctcatctgcacgtgttcttatcgcaacttcgcaagtggaatcgaaatcattttgcctctgctttctttgtcttctttccatggcggggctgcagctagtattgtcctggtggaaatgtcagtacagcctctttttgcttgtcttgttttgcaattgtttggctggcctccactttttgtccgatgtcgggggcgaacagggattcatcatatcgtgcgaatcttgctctggatgcacaagaaaattctctcttctccttctcctcctcctcctcctcctcctcttttttcccctaacaaacaagatgccggagctcacaagcaaaatctcatgggcctgcctgacctacctgcccggacctgacatgatccaccgtgcgaaatttccaggggctactaccgctgcacgcacaagagctctcagggatgtgcggcgacgaagcaagtgcagcgcaccgacgaggacccggccttcttcgacgtcgtctacctcggcgaccacacctgcgttcagagccagagggcggcagcgacggcgggtcgtcaggctgccgcggacgcgcaggcgccggagtacgacgccaacctcatggtgaagaccgaggggccggccctggagccagagcagcagcggcggggctgggaggacgcgcccacgccctttctcttctcctccacgccggcgtgccttgtgccggagcgcagccccttctccgcaccgtccacgtccgagaactggggcgtgtccccggcgacctcggactccaaccacgtcgtctctttcccgcctttcgaggtcgccgccgccgctgccgcgcagttcgagttcgaggaagtcatgtcagcgatcgacagagccgacggcgagtttctcgaggacctcgacatctatgtctcaagcttcttagcgtgatctgctggatgtaatgtaaccgatgaacgctagggaatgggaatctgaggcagctgttaccatgagttgctctctgccgtttgtccaggggcagagcagggaagaacacatgttcttcctcggcccgtcccgttgtaaaccttagggtgtgagaatattgaatgtcccatctctctctctctttttcttcggtcgagggtttgcaaggaaaacaatttcgtaatagtgctgtcagttcagctaaacatgtgagtttctcgtgaatttaaacatttttccaacgtataaca

SEQ ID NO: 28083 - DNA, 1562 bp, Zea Mays
agttccccaaagttcccaacgccgccgcgacggcgctgctagctagtctttggtgttgcaggtgttcgattcctgattccaaattccagactccaaactcggttcttcaatcgacagattccgatttacatcccaaagctcttcggattgaaatccagccgcgacccaagagataagagtatttgggattagtagatagggagggtagataggatagtagaatagaagaggagcactttcgctgatgattacggcggaggagaagagccccgaaagggaggaggaggaggaggaggcgaacccgcgcgcggaggcttttctggagatcatctgccgcgtcccggcgggggaggtggaggcggcgctgtccgcttgcggcatcggccccacggccgaggtcgaggaactggtgctcaagtcccgcgaatgctacaagcgccctaagtccgccgtccgcttcttccgctgggcggggcagtccgtgtcgcacaccgcctacgcatggaacctccttgtcgacatcctcggcaaggccgccatgttcgagcccatgtgggacgccatccgctccatgaagcaggagggcggcggcgggctcgtctccgtcgccaccttcgcctccgtcttcgcctcctactgcgccgctggcaacatcaaagatgcaatcgcggccttagacgtcatggaccgctacggcctcaagcacgacgccgtcgcgctcaactcgctgctctcggcgatttgccgcgtcgagggtcgcgcgcaggatgcgcaggacgtcttcgagcgtaccaaggcaaccatcccacccgacggcgacacgttcgcgatactgctcgaggcatgggagaaggaggggaacgcggtgcgcgccaagagcgtctttggcgagatggtcgtccgcatcggctgggacgcagccaacgtatccgcgtttactgaggtgacgaagcgtgctgatgagatgattgacatgagagttgagttgtcacggtccacaatggagaatatgaagcgtggttttgctaaggctggcaggcaccaatcatatgacaacattgcaagaaggctaaagcgatattagctgcacatgaatgctttaatcagctgaaactttgcggctcacggggtagaagtttaacgcctggactgctgaattgcatgacaaccaagaatttggactagcctggatcctggaatgtaagtctggaagtctggaactgtactctgatcccacaagcagtggtcgggatgttagtgtagctcttgtagattccggaccccatttgttagctggttactcatcgagtgtaataagtggctagtttagtgagactgcacattatcgctgtttatttttcagatatattttatgaatatgaaattgggttatgtaagtatcagatattcctggctgtcagcagcgtcaggcgcctctgctgatcctttgaccatattgtttttcgtggaagaagctttttaacttctttttttttttaccgggaaggtttgagcggttggtgttttctcttgtcattcttttaatcaggtcacttgctcat

SEQ ID NO: 28084 - DNA, 5781 bp, Zea Mays
ccccaccttcttcctcacttgccattcttcgctgacctctaaacctaaccgcccatgggcaaaggggcccctcctgccgttgccacagccacctccgtccctgaggcgccggtcttccaccccacagacgaggagttcgccgaccccctcgcctacgtcgcccgtatccgccccctcgccgagccctacggcatctgccgcatcgtcccgccgtcctcatggtccccgccttacgccctcgacttcaaggctctctccttccccaccaagaggcagcccatccaccgcctcctcgcccgccccgcccccgctgaccccgacaccttcctcctcgactatcgccgtttcctcggggcttcctccgcacatcgccgtggccgcaggaagggccttcccaagtcgccctctctctcggatggtcgcccgctcgacctctgccgcctgttccatgctgtcaagcgcttcggcggttactacggtgcctgtgaggggaagcgctggggcgacgtcgtccgcctcgttgatgataaggcgccaatgcacatatcagagtgcgccaagcacgtgcttgcgcagctatattacgagcatctctatggctatgagaagttcgccaacccacagcatgggaacaagggaaggaagcagccacggcccggatctgatgatcgaccatcggtttctcgttcacaggacgaagagagcaacatatctgttactggggagatggttgaggaggttacaggccggaaaaggagaaatttctcacgcaaggaattaggcagagggacatctcatggtcgttatggccgtgttgttaacatcactggaaataatgtggcatctgctgttgcccagaagcggacgaggaggaactctgatgctgtggttaccacagtcgatgaggtgtctgctggtgtccggaagcggaaaaggagaaagtctgatgccgcgtctaccgtgtttaatgatgaagtggatcaagtttgtgagcagtgtagtagtgggttacatggggatgtcatgctcctatgcgatcgctgtgataaaggctggcatttgtactgtttgtcgccgccgctcgagcgagtgcctccagggaattggtattgctcagattgcctcaactccgatagagattgttttgggtttatccaaaggaggaagtcctgcttgcttgagactttccggcggtttgacgacagggtgagaaagagatggtttgggcagaggaatcccagccgtattcaaattgagaagcagttctgggagattgtggaggggaaggcaggggaacttgaggttatgtatgggagtgacttggacacttcaatttatgggagcgggtttcctcgtcttggtgatacagtgccatcatctatggacctagagacgtggcagaaatactgttcaagcccgtggaatttgaacaattttccgaatctgcctggctcagttcttaggacagtcaaggataaaattcctggtgtcatggtcccatggctctacatagggatgctgttttcgtcattttgttggcatgttgaggaccattgtttctattcaataaattatttgcattggggtgagccaaaatgttgggtatggggtgcctggagcaaaagcaaatgcctttgagcaggttatgcgccaggccttacctgatctgtttgatgcacaaccggatctgctttttcaccttgtcacaatgctgaatccatctattttacaagcaaatagcgttccagtatatagcgtgatgcaggaacctggaaacttcatcatcaccttccccaggtcattccatggtggcttcaatttaggtttgaactgtgccgaggctgtaaattttgcccctgctgattggttacctcatggtggaattggggctaatctatatcgtttataccgcaaagcgcctgtcttgtcacatgaggagcttctgtatgtggttgcaaagaatggtgtggatgctgagtcacttacccatttgaagggagaaataaaaaggctttttataaatgagagaagacgtcgagtagagctttggattaatgggactgtcaaatctagcctaatgttgccaaggattaatccaaactttatcggaagtgaagaggatcctacatgcattatttgtcgacagtatctgtatctttcagcagtctcctgtaactgtaggctgtcttcttatgtttgccttgagcactggaagcacctttgtgaatgcagtccgaagaagcattgcttactttatcgacacacccttgcagagttgggggatttagtgtgcgaggtctctttggttagcccccaaagggacaatgttatgcagaatccacacttgctcaatgatgtttatgtgccgtctaaaaaggtcaaagatcactatatattatatagacagcttgcagaagattgggtttcaaactctgaacatattctccagatgccatttgtggaaaggtcttatgccactgctttggaagaagctgaacaatttctttggggtgatcatgccatggattctgtccggaacataacagtaagactaacaaaggctatgaagtgggccttgggtgttagaaaatgtctctccaaaattcaggactttctgaaagatggctgctctgaaaaagtaaattatgtggaaatagaagaactagttgctacgaaatgtgccccgtgctgtgagcctagtcttacaaaattgcaggcgtatgcagaggaagcgaaattgctgattaatgaagtaaacaatgcactatcatctttcttaacagtagacaaattggaaacattatactcaagggtttcagaattcccagttaagctaacagaatcatcgactttgttttgggagttatcttctgcaaagtcctggttgaagaaagcaagtgattgccttgaacagaataaactgggcattatcgacatagatgtcctcaataaactaaaatcagagataatacaacttcgagttctacttccagagattgatcttatctcaaagctgtggaaagatgtggaatcatggcaaacccgttgtcaattatatctccaagacttccctgatctaaaggagctggagggttttctccttgctgcggatggtgccaactttagcattccagagctgaacattcttaagcaacattactcaaattgttgctcttgggtgagtcgtgctaagaacatactcagaaaactttatgctacgagtgactatcacaatgctgttgaggagttgacagttgatgaattgcctattgtggagaaagaactaaagaggtccttatgtaggaagcaagcatctgaggcacttgcaacagtaatgccaatggaggtggttgaagaaattttaaaagaagcttcgatactacatattgaagaggagcaaccatttgatgatctgtctcggatgctcaaagaggccacttcctgggaagagaaggctagacttattcttgaacgatcagcttctctctctgagtttgaagaccatatgaggtgttcagagggaataagagttatccttccgtctaaactgcatatgaaagcagaggttgatattgctaaattgtggatagacaaatgtcaggcctatttgagaccaggctgcaataaacttgcatttggagactttcttaaagttgatgatatcaaggatttaatcaatcagcctgcaaatttgaaagtcattcttgacacttcagaacttaattctgttctcaacaatattgaaaaatgggaacacagttcactaagtctactcaataattttagagccttacttcatttgaatagtattggctctacagttgacacacttcaaagaaaattggaggagctgcaaggtaaaatgaacacagaaatagaagttggattatctcttggttttgagttcaaggttctttgggaactgaaggattcttcgttgatgctaagatggatattgaatgcactgtctctgtgctgtatgattcctttattgcagatgttgaaaatattctagcagaattcaaggaggttgatgttccttatcctatcatgactgccaagctggaggatgctgtaaacaatcataattcatggatagagcaatgcaataccttcttcatgctgtctgatggccagtcgtgggctatgctgcaaaatctcagggacaatgggcagtctgttgcatttgattgccctgagatggataaagttgttgatgaggttaaaaacgttgaagagtggctcaatcagtgccactgtactctacttctagatggaaataatagttctttgctctccatacttgtaaagataagaggattattggatgatgtttgcacgttatatgctgaggattgtatgaagttaagattatgtgctgtatgctcatgtgacatcggagataggctggcatctagatgtgtgacttgtcaagactggtaccatggctcctgcgtggaaaacctgtctgctactacacaaacgacaattgaatggatgtgttcattttgttcacttttacagagtgaggaccaattgaagaaccaactatctgtaaagatgtctaaaggaaactgccctgcacttgccgcacttgatgaactcatctcttctgcaaagggtttatacactgggattgaggaaattaatttgctaaaagaaattgttgataaggctcgtaacttgaatgcctacttgatgcaaattctggatgattcagactgttatcatggagaagatcttactgtcatattcaaatctcttttagttgctctcaaggcgacatcagcttctggcttgtatgatgacaatgtcagttgcagaattgagtctgttttgagcagatatttgtggaagaaacaaatacataaactattgtatggtggtaaaaagtcatcgattcaagaagtactgtgccttgatgaagagggttcacatttagagatatgtgatcaagatttcttcaagttggagattagtaaaataaaggaaaccagcctgcagtggctggctaaagcagaggaggttgcatgtgattctggtgagcttgcactggatcttgtgtatggacttatagctgaaggggaaaatctctctgtagactttgagaaggaactaaagttactgagggatcgcagtgtcctctactgcatctgctgtaagcccgacgataacagggccatgattgcatgcgaccagtgtgatgagtggtaccattttgattgcatcaacctgcttggaccccctccagaaagcttcttctgccctgcttgccatccaaacaatggtgaagaatctgtatcacttgcacgctcagaggatgatgaggatagatcaagcactggagccggagctcacacgccgccggacagagtggtggagcgagacttaataaagcttcttagctgccatagcggtagctcatggagcgagagcagaagggctcctcatcgaacagctagaaggcgtagtagtttcgtcggattgttatgatgtgcaggaaccttcttagcaccgtgaattgattctttttagttaggttagaagcaggaacgatccatcatctgctgttgtaatttgtagctgttgacaggaggtagatgtagcaaggcagagctgtaagaacccattattattgatcttgtagcagtctgaggttttggaaattgtatcatatactaccgccgttcttgaatatttgtcgcctattgtttcaaaaaacgacaaataaaaaaattaaaaaagaatggagagtatttttatgctgctgctatgcacggc

SEQ ID NO: 28085 - DNA, 2641 bp, Zea Mays
cacagatctcatatcgcggtagtctagtaatacaataaaccgttgaagcttggttgtgcagaaggtgtcgttgcattgagctgagccgcggtacgtggaggagcatgtggaggttaaagatcggagagggaagagggccgtggatgcagacggtgagcgacttccatggccggcaggtttgggagtacgacccggacgccggcaccgaggaggagcgcagcaaggtggagcagcttcgccgggagttcacagagaaccgcttccgaaggagggaatcgcaggacctcctcatgcgtatgcagttaactggacaaaaacatctgcatgcggacgatatgggagcggccaccaagatagaggatggcgacgaggtgacggaggagaggttgcgggagtcgctgaggcgagcgctggggtggatgtctgctctccaagctgaagatggccactggcctggtgatttcagtgggattatgtacattatgccgttctggattttcgccctgcacatcacaggatccatcgatgttgtcctatcgaaagagcatagacgtgagatctgccgccatatctacaaccatcagaacgaggacggaggatggggcttcaacatcttagatgagagcgccatgttttccacatgcttaaactacaccgccctgagacttctgggtgaggtgcagcaggaggagaacgatgggctagctaaaggtcgagcatggatcctatcccatggaactgcaactgcagcaccgcagtgggcaaaaatactactctcggttattggtgtatatgattggcgtggcaataatccagttgtacctgaactgtggttggtaccacgtttcctcccaattcacccagggcggttctggtgtttcactaggattacatacatgtcaatagctttcctttatggcaaaaaattcattggtcccattacaccaactatattagaactaagggaggaactctacagtttgccttatgttcagatagattggagtaaagctcgtaattcttgtgccaaggaggacatacgcaataaaccttcagaaatattcaaatttatttcaacatgcttgaacatgttcgtggagcctgtgttgaactattggccacttaacaagttaagagagagagctttgaaccacattctggaacatatccactacgaagatgaaactactcaatatattggcatatctcccgttacaaaggcactaaacatgatttgttgctgggttgaaaacccaaattcagatgcgctcaagcgacatattccaaggatacatgattatttgtggattgctgaagatggaatgaacaccaaaatatacgatggtacccacaactgggagttagcacttataatccaggccatgttatcagcagatgctgccaatgagtatggtccaaccattcagagggctatggaatacttaaagagagcacaagttactacaaaccctccagggaacccaagttactggttccggcataggtcaaaaggatcatggccactttccactatagacaatggctggggctcatcggatactagtgcggaagcaactaaggcacttttgatgttttccaaggtatatcccaacctcgttgaaaattcaaatggagatgagtggatgttgaatgctgttgattgccttctttcatttatgaacaaagatggttcagtttctacatttgaatgtcaaagaacttattcttggctagagattctgaatcctttggagagttttcgaaatattgtcgctgattacccgacggttgaatgtacatcctcggtgttgcaggcattggtattatttgaggaattcaattcagagtaccgcagtaaagaaataaaagaaaatgttaagaaagctgccatatatattgagaataatcaaaacaaggatggatcctggtacggcacatggggaatatgttttgtctatgggactctctatgcaataaaaggcttagttgctgctgggagaaattatgagaacagtatttgcattaggaaagcatgtaactttttgctctcaatacaactcaaaactggtggctgggcagagagctatcattcctgtgaaagacaggtttatgtagagggtcatagcactcatgttgtacaaactgcttgggcgatgctagctttgatttatactggacagatggaacgggacccaacaccattacatcgagcagcaaaagtattgattaatatgcaactggagacaggagactatgctcaacaagaacatgttggtagcaccaactgctctgtatacttcaactaccccaactatcgtattttgttccctgtttgggctcttggagagtatcatcgcaaagtatgtaccaaaagtaattgaaaggaacccatggaatgcaaaaatgtcatatgtagtactatgttacatactaaaggaaaatcatagcggagtcgatataatcaattgtactttatataatgaaatgtaaatgggtagccacatacatgatttcaatggaccatgtagtgatgtctaacatttgattatgatgtatgtacactagtatgaatacgccaaatcgcaaataagtaacaattcagtttatgtgtaatcaaattgtctagacattgaaatttttc

SEQ ID NO: 28086 - DNA, 2132 bp, Zea Mays
tttcctctccccaccgcacgcatccagtggctgctgccgcctcgcccccgctcctcctcctctcccgccacccacgccgcgcaggcctcacctactggtcgtcgttgcctaggggccagaacgcagggcccacagccccgccgcccgccaccgcctccaagcctgctgcgccgctcactgtcaacctgcctcgccaagtcgcccggatctcgacgccccacctgcggccggcggcggccccgccaagctccgccactgccgccacctccctgctccaaccccgcacctccgcttcgccatgaacccttcgtcgtcatccacctcctcctctggcgggtaccactctagggccgctgcctttgcttccccgcagccgcgcggcggtggcggtggcggcggccgagatgggagcgaccgcatcgacgccctcggtcgcctcctgacgagggtgttgcgccacatggcggcggagctgcgcatagatatgaggaccgatggatacgtgcgcgtccgcgacctgttgaagctcaaccttcagaccttcgccaaggcccctctcaagtctcacactgttgacgagatcagggaggtatcgatgatactggttttatttcgttggttgattgattgatgaactgctgtcgaacttgttaggctacttgatttgtgctaaacgctgtttcttctcattactcctagcttgtataggtagacttgccttttggaatgctggcatgctcttgatttctttggattatgaattttgccgtgaactatgagcaatactcagtttgatgagaaattgtgacattttggctggcgtgcaggcagtcaggcaggacaacaagcagcggtttagtctgttggaggaagatggcgagctgttgatccgggcgaaccaggggcacacagtaacaactgtcacatcagagagcctgctgaagcccattttgtcccccgacgaagtgtcagaaaaaaccttgactcgattttgcaatttgggctaaagcgtatggcaaggttacacatacatttctcaagcggcttaccatcagatggagaagtaaccagtggtgtacggcagaatgtaaacatcttgatacatctggacgttagtaaagcacttaaaggtgggatgaagctttatatttcagacaacaaagtgatcttgacagaaggttttgatggcgtcgtcccggtgaaatactttgaaagagtcgaaacatggccaggacgagctccaataccgttccagagataacaggccatgttaccatttttcgacgagttagtttctctgtgcctgaggatgtcaagagggtttgccaaccatctatcctaattaatggagtacgagaagtttgcggagtatgagcagaagtactcagaggatgcagcaaccaaacattgaaaagtatcatggggagttgcctgcctgctgggctgatgcccttcctcagctcagtttggcaacttccagaagcatacgcctgaggtgcgcaacgtctgcttcggagcgagggagcatggcatgggcggcatttgcaacggtgggcacagcccagggctccgtttcatggccaacgactgctatgcaagcagtccttctttacaagcgtgcaagcaaacatccggtccattagattacgatccaaccacagatataactataatttgttatggttttttataaagattattgagttggtggtgaaaaggtttaagtattaaatgtgacctacggttgaatcacgatctaatggaccagatggtttgcttatggtttgcttgcacgcttgcaaagaaggactgcttgcatagcagtcgttgccccgttctatgttgttggtacctatcttgcttctctgatcgatcaataaaaggagacattatttgagggaccctttttgggtgccttgtatgctgtagctgttcaagtggctgaataaggctgcaagtcttgtgtaaggtgagactctgatgcataagctttgcaacttgcaagtgatgttggattttggaatgttatcaactttagtacacgttttctggccgtctgatcgaatcctggacaccaggggtagaattaattggtcgatcagagctgttaatcgtccaggccttgaaaaacg

SEQ ID NO: 28087 - DNA, 787 bp, Zea Mays
tcatcgcaaagatgtattctctcacaatctgatacccctccttaagaaagggaagaacctactatgcttagaccaattcgacttggaaactacggaaccaacaatgctatgaaagagataggatgcagacagagcaatgtatcgtatactcgcccacaacccagacaagacaaactctagatttgcggaaatcaaccaacatcatctaaatgatgtcctatttgtgcagttttccaaccaatttttgttcacaagattgcattctttcaggatactccttattccttgctttagtcattgaccggctgcacaactatgtcaaagaaaatcgaaggctcaggaagaaattggaagaggtgttgaaacagaataaggcactagaagaagcaacaaatggaaagctagaagagaacaggcctgaccagaaagacctttcccatgccaaggataattaacaatgacatgcgctcaagaaactccctgccatcactgcctatgcctgaataggatgccggtcactgatgttctccctgttgagaattagcattggtaaatgaatgctcggttacaacgtgctaaatcctttgcatctggccaaatttgtaaataagcactgggtgatgcccatcagtaaacacatgatgctactgctgttaaactaaatgtggcaaatttcataatgctagttggcttcggaactaaacactacccaatacaacgccggtactgtgagcgataaagaccgacccacgattttgtttctggctgagctatgcatttctgtatc

SEQ ID NO: 28088 - DNA, 1806 bp, Zea Mays
caggcctcccgcctccctgcacagcacagcacagcacagcaccccgcatctctccccttcctcaccaaccccgccgcctccgacgttcacctcggcggccgccaccggcgaggccgcacctcgccggtcacccacccccgctactcgatattatatcctactccgaggatccgcgtagccgcctccggctgcccacccgcggaactctagatctccgataccccgcgctccctcccgccgacggccacccgaccggaatgggccgctgtcttcagtaaggtctaaggacccaagggaaccctcctccgccttcgctcgtgcgcgaagcgcggccgcgatggcgatccgcattacggtgtcctactcgggctacgtggcgcagaacctggccgcgtccttcggcctccgctgcaccgtggctgcgggcgcaagcgcggcgctcggcccggggtgccgcttcctccaggacgcgctatcccaccccttctgcctcttcgcttcctcccgccgcgccgacccccaccatgacgccgaggatcacaaccacccgaagcccaggtccaaggctctagcccccgccgccgcagcaagaggaggcggccactcattgctgctgccgcggtcgtgttccgggaaggcggcgccgccggtggatgaccccccagcctcgttggccgtggggctgctgtcggtgttcgcgtctgggatgggatcgactggtggcattgctggtgcgtcctcccttgctgcgtcgccgtcaatatcagccgggttcaaccctgcggcgctcctcccgttcttgcaggcgagcaagtggctcccctgcagcgacatagtcactgttgcaacgacgtcgcgcagctcaggacgcccagcaggttcaactgcttcgcctgtaccgcggacaactgcaccatcgccccgtcctacacaacgcgcagccgctccatctccctgccctgtgccatcacctgctgttgctgctccttccaaggtcggcatacaagcattggttggtagtgctagcatcgcctcaggttcagctgagattggaaggggagccattgcctctggtgtggctggaatggtgaagaagagtggtgctagtattcctgctggtgcaggggtgagaaggaagactggttggctctcaaagtgggtgagctcatgctcagatgatgcaaagacagtcttcgccgccgtgaccgtgccactgctctataaatcatccctagctgagccgagatccatcccatccaggtcaatgttcccaacatttgatgttggtgaccggatccttgctgagaaggtttcgtacattttccgggagccagaaattttggacattgtgatatttcgtgcacctccagtccttcaggcattgggctacaactcaggtgatgtgttcatcaagagagttgtggctaagagcggggacaccgttgaagtaagcttttatcccaatggtacgtgatggtaacttgttggttaatggagtagttcaggaggaggaatttgtgctggaaccagccaactatgaaatggatccgctgactgtgcctgaaggctatgtctttgtcctgggggataacagaaacaacagctttgattcacataactggggtccacttccatttaagaacatccttgggagatctgtgctccgatactggccaccatcgaggataacagatacaatatatgagcatgacatagtgcagtacacagctgctgcatcctgatagtacattgtggcaataccacatgctgcaggagtccacttccatttaagaacatccttgggag

SEQ ID NO: 28089 - DNA, 5365 bp, Zea Mays
  misc_feature (3846)..(3853): n is a, c, g, or t
ctctagtagcaaaagggagaggcgaaccagctcagagccggcgaccgccaccccacaccgcatctcccgactcccgctgctgtagtgctgtgcactagccaagccagcttgcatattccttctcccccacgctttcccgtgcttccattccaccaccagggccgcggaacgccccgccccgcccggcccccgcgcctcccctttccacctgttcgtcgcgtgcgcattcgttcgcgcagccagcgagccagccaccaccggcccccaccatcgatcgatatcctcctcctgtctctcttgctgctagctctcgcagttccgtccgatcgactatactgatccagctcctgctatgcgcggcggctagctcctcgacgacgagctgatcaatccgacaatccgagtccgccggcgcggatcgtcgatcgatcggccaccagaccatggggactccggtgaacatcatcgtcggctcgcacgtgtggctggaggaccccggcgaggcgtgggtcgacggcgtcgtcaccgagatcaaaggcggcgacgccaccatcgccaccaccaacggcaaaacggtcgtggcgagccttggcagcgtataccccaaggacacggaggcgccgccggcaggagtggacgacatgaccaagctagcctacctccacgagccgggcgtcctgcacaacctctcctgccggtacggcctcaacgagatatacacgtacaccgggaacatcttgatcgcggtgaaccccttccagaggctgccgcatctgtacgacgtgcacatgatggagcagtacaagggcgccagcttcggggagctcagccctcatctcttcgccatcgcggacgcctgctacagggcgctcatcaatgaccaggcgagccaagcgatcctggtgagcggcgagagtggcgctggcaagacggagaccaccaagatgctcatgaggtacctcgcattcatgggaggacggtccggcaccgagggacgcaccgttgagcagcaggttctagagtctaacccggtacttgaagcatttggtaacgccaagacagtgaagaacaacaactcaagtcgattcggcaagttcgtggagatccagttcgacaagcatggcaagatatccggggctgccgttcgcacgtatctcctcgagcgatcgcgagtgtgtcaggtctccgatcctgagaggaactaccactgcttctacatgctctgctccgcgccccccgaggacgtgaagaggttcaaggtgggagacccaaggtcgttccattacctgaaccagacgaactgctatgaggtggccaacgtggacgacgcgagagagtacatagaaactagaaacgctatggatatcgttggcatcgatcaagaggaacaggacgcgatcttcagagtagtagcggcgatcctccacctaggaaacatcaacttttccaaagggcaggagatcgactcgtccaagctgagagacgataaatcggtccatcaccttaaaacagttgcggaactgctaatgtgtgacgagaaggccctcgaagactccctctgccagcgtgttattgttacgcctgatgggaacatcacgaagccccttgatccaggctctgcggcgttaagccgtgatgccttggcaaagacagtgtattcacgactgtttgactggatcgtagacaagatcaataactcgattggccaggatccagatgcgaccaatataataggcgtgcttgatatctatggatttgagagcttcaagatcaacagtttcgagcaattatgcatcaatttgacaaacgagaagctgcagcagcacttcaatcagcatgtgtttaagatggagcaagaagaatacacaagggaggaaatagactggagctatgttgaatttgtagacaatcaggatgtgctggacctgattgaaaagaaacctggaggaataattgcactcctggatgaggcatgcatgtttccaaagtctacacatgagacatttgctcaaaagatgtaccaaacgtataaggtccataagcgcttcagcaagcccaagctagctcggacagcctttacgatcaaccattatgcaggggatgtgacgtatcaagcggatcagttccttgataagaacaaagactatgtggtagccgaacaccaggccctactaaattcttcaaggtgcccttttgttgcaaacctcttccctccattacctgaggaaacctctaaacagtccaaattctcttcaattggtactcgctttaagcaacaactgcaatccctcatggaaacactgaatactacagaacctcactacatcagatgtgtcaagcctaatgctgtactcaaacccggcattttcgagaactacaacgtcttgaatcagttgagatgtgggggtgtcctggaagcaattcggatcagctgtgctggttatccaacgaagaggacatttgatgagttcattgatcggtttggaatgcttgcaccggagcttgtcgacagcagcgatgagaaggccgcctgtgcagcgatatgtgatagaatgggtttgaaaggatatcagatagggaaaactaaggtattcctaagagctggtcagatggcagagctggatgctcgaagagcagaaattttggctaatgctgcgcgactaatccaaaggcgtattaagacacatcttatgcgaaaggaattcatcaaattaagaaaagcctcagttcaatctcagaagttctggagagcacgactagctaaaaagatttttgagtatatgaggagagacgctgcttcaattaggatacaaaagcacgtgcgtgcgcattctgccagaaaagcgtacctgcaagtatatgaatcagctacagcaatacaaacaggattacgagcaatggcagctcgcaacgaacacagattccgaagagagaccagggcatccataattatccagactcggtggcgccaacacagagcttatactgcttacaaacagcaacagaaagcttctttgattctccaatgcttgtggagggcacgcattgcaagaaaggaacttcggaaactgagaatggaagcaagagagaccggcgcactgaaagaagcaaaagacaagctagaaaagagagtagaagaactcacatggcggttagacgtcgagaagcgtttgagggctgaccttgaagaagcaaagagccatgaaattgaaaagttgcaatctgcactacaaaaaatgcaagaaaatctcgaggaagcccatgcagcaatagtaaatgagaaagaggctgcaaagttagcgattgaacaggcaccaccaaagatagtagaagtgccggttattgacaatgcgaaacttgaggagttgacaactcaaaataaagaacttgaggatgaactaagtacgtttaaacagaaggctgaggatcttgaaaataagcttattgagttccaaaaacagtctgatgaactgtcacaagagacacaagaacaagcatccaaagttactgaacttcaagagctggtcgaaaggcttgaagcaagtttatccaatatggaatctgaatacccttttctacgacacatactcatgtcctatgagaaagtctcataaactaaaaataataatacatttagcttggaaagcaagatcgccaccttggagtcagagatagagttgctccacagcaattctgcactagctattcaggccgtggttactcctgaaatgaatcagacaacagtaatcgaggaatttgacaagggacaccagcttgaagaagtaaaacggtcaatgtatttgctattatttttacctggcaaacatttatacagtttaagataannnnnnnngcttccacaggaaaaccacgacgccctgattaaaagtatggtagaagacaggagatttgacgacaaaaaatccgctgcagcatgcattgtctacaaatcactcctacactggcattcatttgaagcggagaagactaacatatttgatcgaatcatccaaataattaggtcatcagttgagggagcagaaagttctggagagctagcctattggttgtcgacaacatcaactctcctctacttgttacaaaacactctcaaagctagcagttcattaagtaaaggaacaaatcgcagccggaccacaacaggcagtctgttcagtagaatggtgcagagtgcccggacatcatcaggcttaggcatagctagtggatacagtggaatggtgggaaggcctgacactgatgcatcgatggtagaggcaaaatatccagcacttcggttcaagcaacacttgacagcatatgtcgagaagatatacgggataatcagagataacctgaagaaggaaataagtccgttcttgacaatgtgcatacaggctccaagagctaaccgtgtgaggccatcacggggatcactaaaaagcatacactctaatgcactagctaggcaagcatcaagtctgcattggcaaaacattgtcaagtgcctggatcatacactggaaacgatgaaaaaaaactatgtagctccggtgataatcaggaaaacatttaaccaagtatttgcatacttgaatgtgcaactcttcaacagcttactgcttcgtcgggaatgctgctcttttagcaatggggagttcttaaaggctggtttacaagacctggagcagtggtgctctaggacaactgaagagtatgtagggacgtcctgggatgaactgcaacacattaggcaggcagtcgggttcctggttttgcatcagaaatcacacaaaatcctggaggaaattacgaatgagatttgccctgttttgagcataactcaaatataccgcatagcaacgatgttctgggacgacaagtacggtgcacaaggcgtatctcaagaggtcattggaaggatgagaacgatgacaacggacgactcagtaactactccaaacagttcgttcttgctggacgacgactcaagcataccgatatcgttggatgacatagctcggctgatgcttcacatcgatccgtccgatgtggaaccgcccccgctactgaggcagaattctcagtttcactttcttctgcagcagcacacggactgatatcttctacagataaagagcagaatgaatggtacagttacttgtggagttacagggaactgaagatttttttttaggagtgcacagattgagttgtgattttttttcccttccttttttttatggttttgggtgggaaatggctacaaagaaagggaaatatagggtatatcgtgatatcattcatttgattggtttgattgtttggaacagagagatttgtaattatttgaatatgtatataa

SEQ ID NO: 28090 - DNA, 494 bp, Zea Mays
gttgttgaatgagttccgtggagtttgttgtcgcattgctttcgtctcggcgcttgcgggcgccgccgcggctggagctgggttcggtcggcgcggacgcgcggtgcccgttttgcgggttacggcgaacttttcttaatgccgatggaggttgcggacgtgtgccaccaggtactgttacatctggcctggtggtgcgcgcgtctgtggtggtggccggcttgatgtttgacgaaatgccgaagcgcttttgaacaaaaggctgcagcgacacgcgataaatccaccggctcacacattcagacagagtcaaaggagcatatgaaaggttttttgtcatcttttggtggatgtggatgcactaagaaaaggggctcatggaacaggtgcaggtttatgagcgtatgggtttgttgtgtgtacaccgaaaacatctgccttgttaacaaagcggggcgagggtgtcaagatgagtagagctcagctggtgaggt

SEQ ID NO: 28091 - DNA, 3424 bp, Zea Mays
cccgacctttctccctcgaaaggtgaagggctgaaggcgagaaagaagcttcaaaacgaatcatccatcatcttgccaacccagcaaccctgccaagccatcgcattccagctctgcctttgcaagatcgccgccactcgcagccagcaagcaaccattccaccacatacttttttcctccggtttcgtccggcggcgagcgagcgaggtagcgcttgtccatgccgcggccgtgagggtgatcgaacgaggactacttcggcctagcgcggggagccatgtcggcgtcggcgtcggcgggtaagctggcggcggcgctgcaccggaggacgcgcagggtcacgtccgcgctggcgtgcgcggccctggagtgggtcctcatcgcgctgctcctcgtcaacggcctgctggcctacgccgtcgccaggttcgcggactacttcggcctcagcccgccgtgcctcctctgctcccgcgtcgaccgcctcttccaggccgaaggcggtggcggcggcgacgctagcggcgccggcgcgcggtggctgcgggacgccctctgcgacgcccacgccgcggagatctccgcgctggggtactgcctccgccaccgccggctcgctgaggccggagagatgtgcgtgggctgccgcccgtcgtcgtggaaggagaggacaagcgacgcaggtgcgtgcgcctgctgcgaagctgctgctgtactgcgcgcttctcctgtgcgcgagctggaagatactacaagggatgcgcgtgtctcggagaaagaggtagaagatggcgaccagggctacgttctgctggctcaagatgatcacgaggaggagccggatgaggtcgaaaaccgacaacaagaaccgcagagcgaggtggatggccgacaacatctggaagacgaggtgatggctgccgttcaggacgaatccttggaattcatggatcaggtcgaagacatcacgatcgaggacgaccggttggtgtcggtggtggcgcttgacgagatgaccatcgccgatgattcgggtctccatcgggatgtagaagaggtggacggaacgaatcatgtagtagaagatgagcaggatccgagggatgtggatgtcggagcggttctggaggagaagaggatgttggattcctcggttgcaacgccggtcgatttgaccgaggactctgtcgtgcccaccagccccgtaccttgtcctgagacttcaacagacccatctcatcctgatcatagctccgtttcccaagacgatggagatgttcttgaagatacttccacggccgaggaagaacacatctttgtgcctcaagcttcagtatcggaagccgtttccgaggatgacaacagaacagctgctgaggtggacacgaactgcgaagtgtcaatcgggagcgatatatgcgaacgggaacaagatgagcatgtcgttccatttcaagatttggcagcatttgaggagctggttgctccattggcaactggagatgatctaccattgccatcggaggtcctagagccacctgaccaagcaggtgaagttgaacaggaggacgtgaccacaagcacgggattagacctccaaccaaatgaacagaacgagatcgaagaagacagagcacctgagacgccgacgaacagcgtcgccacacaacgctccgacagaatgttcttgctcgagaggaaacggtcgctgtcgctgtctctggatgggagcgtagcgagcgagatggaaggcagcgagccgtccaccgtggaccagctgaaatcagcgctgcaggccgagcggaaggcgctcggcgcgctgtacgccgagctggaggaggagcggaacgccgcggccatcgcgaccaaccagacgatggccatgatcaaccggctgcaggaagagaaggcggcgatgcagatggaggcgctgcagtaccagcggatgatggaggagcagtcggagtacgaccaggaggcgctgcagctgctgaacgagctggtcagcaagcgggcgagggagaagcaggagctggagagggagctcgagctgtacaggcagaaggtgcagcactacgaggacaaggagaggaggaggacggcgagcttcaaggccaatggggtaagccccagtggcagtggcacttccgtgtcgtccagcggcgaggacagcgacgggcactccgacgactactgcgagctcggcgactctcctgacggcggcaacgtccagagctcatcggatgctgcccttagctccatgagggaccaggacgacggcacgaagcacctagcggctctggacgattccttgacgtacttcgaggtggagagactctccatcctggaggaactcaagacgttggaggagaggctcttcacactggaagacgacgatatcaacaccagcaaagaagttactggccattcctcgagtgacatggatttaccacacgatggccttcagtcgccggagtacattctcaccggtgacaggccaagattcggaggaagggcctctatcagcagagggaagagccttctgcctctgttcgatgcagtcggcgacgaggcctgtgaccgaatgccgccatctgcaggagcaggagaggcagaccaggccgacgatgcagcaacgaagccggcatccgtgcttgtcaaagagcaggagaggctggcgatcatagaggaggtcgaccatgtctacgaaaggttgcaggcgctggaggcggacaaggaattcctgaggcactgcatcaagtccctgaagaaaggagacaagggcatggaccttctccaggagatcttgcagcaccttcgcgatctccgcagtgtggagcttcacgtcaagaatgccggtggtgccatggctgcaaattcagcctagcaagttcatctatacgcggtaacgatgacactactagcttggtatggattcagtcgattggattgtaggactccaaagcactgcattggtgatggtccctgcaaggtactgccggagttatagggaggctctgctcattttgcctgtgggccggaagcaagccctcccttttgtgctggtccagcactgccaactttttctgtcgtggtggtcgcctggtctggtcggtcggtcgtaggaatcattagcccttccaaagctgcacaaagctgaatcacggtgacagcttctgcagcatgcacggggcaaaagaaaaaagatagccccagtggagatgtggatgtttttttttcttgtctgatttaatcttttgattaactttggatttgtttgtgcgctgaggtagggagtcctcgtgtattttttttttggtgaggatgtagcttgaacggttggtatgtgcagtttgtgctttctcaatatccaggtttataatgaaaggaaaggcggtctcacgaagaaatccctgtggtaaa

SEQ ID NO: 28092 - DNA, 1907 bp, Zea Mays
gtcctttggcactttccaactttccagcctttataagaagtagggtgtaaagttttgtatatgatgccaggcatggatgaaccccttcttggcaatggtcttaagaccagcgggaaaagagagagcctggtagtggccgaggtcagaaaacagatgtaccttgctgggccactcatcgctgcatggatcctacagaacattgtccagatgatatctatcatgtttgtcggtcaccttggtgagcttgccctctccagtgcctccatcgccacctcctttgcaggcgttactggcttcagcttattgtctggcatggcgagcagcttggacacactgtgtgggcaatcgttcggggcaaagcagtactatcttcttggcatctacaagcagagggcaatccttgtgctcactctagtcagccttgtggttgcgattatctggtcatacactggacagatccttctactctttggtcaggatccagagattgcagctggggcagggagctatatccggtggatgattcctgcgctatttgtgtatggtccactacagtgccatgtccggtttctgcaaacgcagaacatagtcctcccagtgatgctgagctcaggtgccacagcactgaaccatctgctggtgtgctggctgctggtgtacaagattggtatgggcaacaagggtgctgccttggccaatgccatctcatactttaccaatgtatcaatcctggcaatttacgtcaggcttgcaccagcctgtagaaacacctggagagggttctcaaaggaggcttttcatgacataaccagcttcttgaggcttggtattccatctgcgctgatggtttgcttggagtggtggtcatttgagctcctggtacttctttctggacttctccccaatccaaagcttgagacatcggttttgtccatttccttaaacacaggctctttagcgtttatgatcccttttgggcttagcgcagccataagcacccgtgtttcaaatgaacttggtgctgggcgaccccatgctgcccatctggctacccgtgtggtcatggtgctggccatcgtggttggcgtattaatcggactagctatgattttggtgcgcaatatctgggggtatgcatacagtaatgagaaggaggtggtcaaatacatctccaaaatgatgccgatcctagccgtgtcattcttgttcgattgcgtgcagtgtgttctttcaggtgttgctaggggctgtggatggcaaaagattggggcttgtgttaatcttggtgcatactaccttataggaattccagctgccttctgtttcgcctttatgtaccatctaggtggaatgggactttggttgggaataatctgcgcactcgtcatacagatgctattgcttctcacaattaccttgtgcagcaactgggagaaagaagctttgaaggcaaaggacagagtatttagtacatccgtaccagctgacatgatgacatgatatttctgaagatatttttttgaaggaaatgcccatgaaactttgccaaggaacatactaagaattggttgttcagattcaaggcctttctccatgccatcagaatgatgcttgggtctagtaatagctcctgagcagtctgttttttacttttggtcaatactcaatacatggaagatgtttggtttgaagaaccacgccatcctagatgaggtggtatattataagttgatataacggctccatactagttattgaggaatgagacgatgattatctcatgtaataataatgcttttccccctctagttattgatgtaagacaattgaggcaaatgaacaaaatgtcacatttgattaaataagttgcattgtctatttgtgcagttgtttgggaaataattaaa

SEQ ID NO: 28093 - DNA, 2959 bp, Zea Mays
tttacccatctgtgacttctctcgccctgaggtatatgtctgcgctgccgtatcatctgctggagcaaataaagggcacatgagttcttagtacggcttctctccctcccacactatacccgtgcctccaactcgtatttgttaagcggctaatctcagagcttctgttgggagctggggaccatttgtttagattcagtgcggggtttcctcgcctccctccttccatgggagcttggaagctgctggatctctgcaagtgactatgagccagaaatcacgagaggttcccgatcacccatgaggcaccaaagaagccgcccagtggttccctattcctttacaatcgtcgtgtcaatcgttatttccggagagatggtcacacatggcggcggaagaaggatggaagaactgttggagaggctcatgaacgactgaaggttggaaatgttgatgctttgagctgctattacgctcacggggagcaaaatccaagtttccagagacggtgtttctggatgctggaacctgcatacgaacacattgtgctggtacaatatagagaggttgatgtggttagaaattattcatcacaactgtcaaatggcctcccagaacctctttcatccttgggatatccaaatgccatctgtggaaaccaataccacagctcctcttctggcgctagcgagtgtagtgagtcccatcagagctattctaatttgagttctgtaactgaagtaagttcctattccggtaacaaagagtacaccaaaaatgatggcggtttactgagcataccggaggttggacacacttgtctgcaacaaaatcggactgataatggtaactcgaaaaataaatctgggcttaatattgctttaaagaagatagctgagcagttaagtttgggtgaagatgatgatgactatattttctcaaatcaagctcattctgtgggaggcgacaaccaagtaaaacatattcaacaagaaggaacacagaaaggtttaagtaggaatatagcgccatcatgggaagatgtactgcagtccagttcaggtttaccaatttcatccatataccagcaatcggatgtcgagtatcagaaaaattcagaataccatccaccagaacgcctggacagcagtgatttacgcatacaacttgctgctgctaaaaagtttcttttaggaccagaagccaccgttgactcaccatctttgaactctgtgctgagaaatagagcgaactgtgtaactgatactatttcagcttatgacagtagatttggaagctctctgaacccagattggcaaacaaaaacagcattaacatttcaaagcaattctcagggctctgaaataacggagttgtttgaccatggtcattttgaacactactccagagaagatacaacattttctttaggacagacaaacaagtttaatattcgtgagatctctccagaatgggcattttcatatgagatcaccaaggtcatcattactggagattttctatgtaatccatcgaatttgggttgggctgtgatgtttggtgatagtgaggtacctgctaaagtagtccagccaggtgttcttctctgccacacgccactgcactgcagtggaaatctcagaatctgcattacttcgggaaacagagaagtttgcagtgaattcaaagactttgagttccgctcaaaaccctcttctagtttcacagacatcgcaccatcttctagacatctgaaatccagtgaagagttactaattcttgcaaaatttgctagaatgcttttgtctgggaatggaaaccctgaagttccagatggtgatccccaatctggacagtgtccaaaacttaagatggatgaagggctctgggataggttgattgaagaactcaaagtagggtgtgaaagtccattaagctcggttgattggattttggaggaactgctgaaaagtaaattacaaaagtggttatctgtgaagctcagaggattcaatggaacggattctatatccaagcatgaccagggtattatacacttaatctctgccctaggctatgagtgggcattgtcttcagttctcagtgttggtgttggtctaaattttcgtgattcaaatggatggactgctcttcattgggctgcttattttggaagctgttcattcagaagaaatacaaaggttgcaaaggtcgcaacatttctcaacatgagaagaaatgcagttaaaatacaggctcatgtaagaggccatcaagtgagaaagaaatacagaacaattgtaagcactgtcagtgtgctagagaaagtaatacttaggtggcgccgtaaaggtcatggcctccgtggcttccgagctgagcagcaatcaatggtcgaagcaatagaggaagatgatgaggaggatgatgacttcgatgatgacgaagcagtcaagatctttcgccggcagaaggtcgatcaagctgtaaaggaggctgtgtcaagagtgttgtccatggtagactctacagaagcgaggatgcaataccggcgaatgcttgaggaatttcgccaggcaactaattggaaggatcaaatgaagtaacatcaatatttgacagtgatttagagttattacttattagggatcaacgacttcatgtaaggagcatttatgtctcgagatctgccagcacccatcaatgacataaattaagtatttagggaatgtgttccagttgctactaattggccgtctaattgtacagtgttagcgaaatcgaaagtagattatttctgccacgatgtattttcactttctgtatttaggtatattttgacaatggcagatcaattaagtatattttttatgggttgttggcttcgccagtttggaaaaaatcagtttctcaacaatggcagaacttcataatgctgttaaaaaaaagacagcatgag

SEQ ID NO: 28094 - DNA, 1492 bp, Zea Mays
tgccgtgaatccaccgtcttctccgcctacaatctctcagcaaaaccaccaaagccagctgctcatttgggggaagaccttctttgagtgaggtccaacccttgggggccatttcaaccttcgtcctccgcaataaaagttgggcaatcctatgtcagtcacttctcttctagcccaacccattccatcgctgtttgctccttctcccgcgccttcgagagctcgccgaaaccgaacctcccggcggcgtttcttagctgcaacaaaactaaccatggatggcactagctttgacctgacagagcacgaaggttcaaatttgtctccttttctactcaaactttttaatgagtgggatgatcgcaagacaaggggcttgtttcaccatgacatcagttcctgtgaaacaaaggtgctacctggagtacataattttgtggcaacattaattgaaggacgtgaccaaaagaagcggccaactgagttcacaatgaaccaagttctccagccatttgttagtgagaagttcaatttcacaaaagtcagcccgttggaggtgatctttagattcaatgacactgagaaagattctgcacaatattttgatggtgttcctgatactgtttcagcttcttctagtgccatcttgattaatgtgagcccaattggctactgccatgtgctattgactcccaagatccaggactgtttgccgcaaaggattgatcaagagagcttcttaatagccatgtatgttgcaagagaagcaaggactcccttcttcagagttggttataacagcctgggcggctttgcaactatcaaccaccttcacttccaggcatactacctgaaagtacagtatccagttgaaaaggcaatcacggagaagctcaagaccctagggaatagcgtgagcatttttcacctggtggattacccagtcaatggctttgtgttcgaaggtggtgcgagcctggaagatttgtcagatgtggtctccaaagtctgcatcttcctgcaagagaacaacagacctttcaatgtcctcatctctgaatctggcaagagaattttccttctaccacagtgctatgcggagaagcagctcctcggaaaggcgagccaagagttcctggacatgagaatcaatccagcaatctgggagctcagtggccatctggtactgaagcggaggaaggactacgaggaggcctctgaagcaaacatatgcaggtttttggttgaagcagctctttctgaaacagaatttcaggagctgaacctatgcgtgctcgacttcctgaccagctctcttggttgaaactcggatgtaggttcctatagatagtaacagttctgaggttccagttaaaacagttgtgctggtactgttactttatgatggtatatcatgtagtagtatttctgatttgactcgtcacctctgcgatgaaataatatgtcttctccggcttcaatttcgtaaaga

SEQ ID NO: 28095 - DNA, 1357 bp, Zea Mays
aggggtggggagccaaccaccacctctccccctgctagtgctcagtcctcgccctctcgctttccgagggagcctttgcctttcccctccgcccgccagccattaatggcggcggcatctccatccactcccccctcgcccccctcccactgctgctacttctagaagcgctggtggcagggcaggcggtatcccggccgctggcgctggcgcgagagttggttggtggtggtcttcagcccccctcgctcttcaggtttagggtggagcgatccgtgcaggccaacgcggggtgcgtgacccagaaagggaaaccgccggctttttctcttctgccgccccgcttttccaatccctcctcaacctcatccgcccccgcccgcaccccgcaggcaccatcaccaaaaaggtccccgccttcttcttcttcttcttcttctcctctgcccctgcttgtcgtttgctcgtgctcccccaccccctttctgattcagcaagggttccttccgcggcgcggcgcgtcgccatgggcaactgctggggcgccaagatcagctccgacagcccgtcccgcggcgcctcatccccgtcagggacggcgtccaagttggcgagcaggaacggggcggcggcagccctgagcgggtgcagcagccacgcgtcgtccgcgtccatgctgccgacgccccgcagcgaggacgagatcctggagtcggccaacgtcagggccttcagcttcaacgagctgaggaccgccaccaggaacttcaggccggacagcgtgctgggcgagggcgggttcggatccgtcttcaagggctgggtcgacgagaagacgctcgccccggctaggcccggcacggggatggtcattgccgtcaagaagctcaaccaggatggataccagggccacaaggagtggctgactgaagtgaactaccttggaacgctgtcgcacccctaccttgtgaagctcgttggctactgcctcgaggacgaacagcgcctcctcgtctacgagttcatgccacgcgggagtctggagaaccatctgttcaggaggagctcctatttccagccgctgtcctggaacctacggatgaagattgcgctcggagcagctaaaggcctcgcgtatctccacagcgacgaggctaaagtcatctaccgtgacttcaagacatctaatgtccttctagatgcgaacttcaatgcaaagctctctgatttcgggctggcgaaggatggtccgaccggcgacaagagccatgtctccactagggtgatggggactcacgggtatgcagctccagaataccttgcgacaggagtcattttgaacctaacaagtgccatt

SEQ ID NO: 28096 - DNA, 2072 bp, Zea Mays
cccgtttcttctcccacgaaaacctggcagccgccgccgaactcgaagcagcagccatggtgctcgcgcgcaaaaagttgaagctgaagctccacacgctcctcccagccggcaaagccgcggaggaggagcatggagaggatgtggaggccgtaaaggagaggctcgcatcctccaagcggctgcgccccaagcgggagcggaggcccaagaagaagctgtcgctccccgaggtggtgcggcagacggaggaggagataagggaggaggtggagcggaggagggaggagaggaggaaggagaagaaggagaaaaggaggatcaggaggttgatggaggccgaggccgcggagccggaaacgcagcaggtggagggggagataggggaggccgattctgctgccgggtctgagtctgaccagccggtcgaggcaaaggatagcgaccaaaatataaacaagttggaagtgaccaaccccgctgttgggtccaacaataacattgttccagacaataggcagcagaatcacaaaatgcagttggccaaaactgttgtcgtgtctgacaatcatgtagtcgcagagcatagggagcaaagcataaagaaggtgtatgttggtggcatcccatactattcatctgaggatgacataagaagtttctttgaagcatgtggtagtatcacaatgattgactgcatgaattttcccgaaagcgggaaattcaggggtattgcgattctaactttcaagactgatgctgccgcacagagggcattagctatggatggtgcagatatgggaggattttatttgaaaattcagccttacaaacataaccgtgagaaggaagattttgcaccaaagttgatagaggggtataataggatatatgttggaaatctgccatgggatataacagatgatgatctaaaaaagttcttctccgagtgcaaaatttcatccatccggtttgggacagacaaggagacaggtggtttcaaaggctacgcgcatgttgatttttctgacagcgcgtctcttgctgctgctttgaagctcgaccagaaggtgatcaaggaacgcccagtcagaatcagatgtgctgttccaaaaaaggataaccaaaaagtcaatgacaatgggaactcagatcatctgaaaagtaaaactaggacatgctatgaatgcggaacccctgggcacttttcttcttcttgccctaataagaaggattctgaagcaaggaagtgctatgaatgtggcaccccggggcacctctcttctgcttgcccaaataagaaggattctgaagtaagaaagtgctatgaatgtggcaccgctgggcacctgtcctctgcttgcccaaataagaaggattctgatgaaaaggaggataattctaactccaccatagcagcctcaaagaagaggcgaacatgttatgaatgtggcatccctgggcacctctcttctaattgcccaaacaagaaggatcctgaatttatttctgatgaaaagaacactaatgttgattcagctcctgcatcgtcgaagaagaggcggacatgttatgaatgtggaactcctggccatctctcatcggcttgcccaaacaaaaggacatcagaatctgttctgaacaacagagagcctgctgacgcaaaacctgcaaccaccatcaagcccgaggaaacaaaagctggcgatgaatcgaattcagtagcttcaaagaagaggcgaaaatgctacgagtgtggcatctccggtcatctctcctcggcttgccccagcaaaaaggccgctgagcctgtctgcaacgaagagaagcctggcaatcactcaaacgctgtactaccagtcgtttctgacgaaaagaaggcaagtgaggacgcaaaatctgcacctgcaaagaaaaagaagaggcggacatgctacgagtgcggcatcgctggccatctctcgtcggagtgcccgaacaaggcagctgctgtctgctgagggttacgttgcctgagcaaggcagacgctgagtcagcaaccgtgttccgcgcgatgatgtcactgcgctgc

SEQ ID NO: 28097 - DNA, 9411 bp, Zea Mays
gctcgctaatcctgccacgtcaagattcaagaaggcactgacaggcaggcctagctaaaaaagcagccgcgaccagtgatcgcgcgcccgcagcgacgccatttcttcgccttccccgctcggccgcttcctttttctctcttcctccgccactcccacgccatgcaccgcgccaccaccgttaatcttggactagcatttcccccaaacaccgaccgtttctccccggcctcatacccaaatcgcaaattttttgatcaagagattcgcataattttcccccaattccatcgtcgtctccagaaccccattttttcgccattgtgtttgatccttgctcatttctccagtgactctccaattcctcacatttttctcaaactttatggagtaagcttttgagatgggggaggaggacaccggcgagatgcccgatgcctcgccgcccgcgccgtgggagcacggcgtcgacgagcggttcgctgacgaatcgctcggcctgttcgacgacgaggcgtacaccgtcgaagaggaggatgtgtcggacacggagatgaccgccggttccccggcagccccctcggagccctccccgccgctgcggaggcgcctggcgccggtagtgccgtcggacgtgcccgagcaggtggtgcgcgccgtggacgcggtgattatgggcggcggggtcgagcgcctccgtgacatggtctccgaggagaatggcgaggtctcgcatttcatcgtggacgtgctgatggtcaccatgggaggcgtggatggactcgacgagggcgctggcgaaggcatcggcgcggccaccggattgccacccagcatcatgtccagttcgcgagctgccgcgatagcggccgagctcgtaccatacctccccttcggcgttgagccgtcgccgcgcacccgcatgactcgtggcctccttgccactctcagtgcctgcacccgcaaccgaaccatgtgcgccgcttcgggtctcctcgcagtcctcctcgaagtcgcagagaagctgttcgtcggaatgggtcggggcagcaagtgggacgggacgccgcttgtgcagtgcattcaagtgttgggtgggcactctgtcagtgtaagggacttacacacctggctccttttgatcaagaaggcgctcggcacgcagtgggccacgcagctgactatcgcgttggaaaacgccgtggctagcaatgaagctaaagggccggcggtgaccttcgagtttgacggggagagctccggcttgctcgccccgggggacaaccggtggccattctcgaatggtcttgggtttgccacatggatatacgtagagtccttctcaggctcacttaacacagctacggccactgcagccgttgcagccgctgcagcatctgcatctgggaagtcatcaccttcagcagcagcggctgctgcctgcacgcttgcgggagaagggacaaagcacatgcccaggattttcagtttccttacttcggaaaaccatggtattgaggcctatttcaatgaccagtttctagttgtggagagtgcggctgggaaggggaagaaggcttctctccatttcacttatgaattcaaaccccggtgctggtactttgttggtctggagcactctagcaaacaagctttgcttggtaagtctgagagtgaattgcggttgtatgtggatggggaccttcatgagagctgtccatttgagcccccacgcatcgtgaaaccactggttttttgttgcattgggaccaatccatcaccaactattgccggtcttcagcggcggcggcggcaatgtccattgtttgctgagatgggacctatctatatctttacagagcctatcgggccagagaaaatgagtcgacttgcttccaggggaggagatgcacttcccagcttcggcaacggtgctggttttccttggaaagctacaagtaaccacatcagggaaactgcagaggatggttatacactcgatattgagattggtggaagcttacatcttctttatcatcccagcctgctcaatggccggttttgttctgatgcttcaccttctggctcaacaggtactcaccgaagacctgcagaagttcttggcatggttcatatctctaatcgtgtccgtccagctgaatctttatgggcattggcttatggtggtcctatggcattattaccactgattgtgagcaatgtcgagatggataacctggaacctatacttggcgatttgtcatcgtctcttgctactgcatctctttctgttcctattttcaggatcatttctgtggctgttcaacatcctgggaataaagaagagttatgccgtactcatggaccagagcttctatctcaagttttacattatgtattggacacactatccagacttgaaagtggaaagaaagagatactgagtgatgaagagcttgttactgcaattgtatctttgtgtcagtctcaaagaaacgatcatagtcaaaagaatctacttgcatgcgtgatgcaaatgcactgcaaatgcttcttgatgggtgcagaaggtgttactgggtagttcatgaagcagattcaattgataccttcacacttactggaaacgagagacctttgggaaatgtgaatgctctggtcgatgagcttttggttgttattgaactgttgataggagcagcaccttctacattggcttctgatgatgttcgttgtttggttggatttattgtagactgcccacaacctaaccaggttgctagggtattgcttctcatctacagattgattgtgcacccgaacacttctagagccaatacgtttgctcagtcgttcatttctcgtggagtagtagaagcattactcgttcttttgcagagggaagctaaatctggtgatagcaatattctccatagctgtaatgtgtcacatgattctgcttcgtggaatgaatcttctaagcttaccaataaggattcaaaatttaaaaatgccagtggtgaaacaaactgccaggatcatcagattcaatcagtgcagcattatgaacccaactctcatgaaactggagttggacttggatctactagcaaatggagcctattaaagggtcagttcttaaagaatttgggtggcatggatgttccaaatatctctgacaatgtgcaaaatattgataatggtgatggagttcttgttgggatagtccgtgttttgggcgctttagttgcttcaggccacctgacttctacctcgcctactgtgagaccgaagttaccaagtggttttctgactacctctaatggagaaggaaataccatgtttgaagacagagtatctctactgctctttgcattgcagaaagctttccaagcagccccgaggaggcttatgaccagaaatgtctacacggcgttaatttcttcagtgatcaatgtttcttcaaaagataacctgaaaaatttacaagattctggataccattttaaacacattcctcttttggtagtcctacttcgttctcttccatatgcatcaaggtcattccaagctcgtgttattcaggatcttctatatttggtttgcagtcaccccaagaacagaagtacaatgacttccatcaatgaatggccagaatgcatattggaagttttgatttctaatcatgagatgggggacaacaaagattcagatggtataagcatatgtgaggttgaagacgtagtacacaatcttctacttgttgtgctgcagcattcaatgcgaaaaaaagatgggtggaaggacgtagaggcaacaatacattgtgcagaatggctttcaatggttggaggaactagcaccggtgaccaaagaattaggcgtgaagaagcattaccaattttcaagaggagattactgggtagtctgcttaatttttctgcccaggagcttcaagttcagcaaactgaagggattgctgctgctgcagctggtgttgcagcagagggtttagtgcctaaagaaacaaaagtacatgcagagaaagttgccaatctctcagtaatgttggctgagaatgcagttgttctgctgatgcttgtggaagatcatttgaggtcacgcagtcaacaatttttcatggcctgtttagctgatagtgctgcctcacctgcttcaatggcttcatcagctgtcagtaggtcaaattcattgagtagaactggcagtgagcatttggaagctggggactcgagacagtctttgtcaagtgatgctggtggtcttccagttgatgttcttgcttctacggtagatacaaatgggcaactttctgctgaagtgatggaacgtgtaacagcagcagcagcagctgagccttatggatctgtcagacatgcatttgtatcttatgggagctgtatttcggatctttcagaagggtggaagtacagaacccgattgtggtatggtgtatgcatccctcccaaatctaatgtgtttggtggtggggggagtggttgggtgtcatggaagtccgttcttgagaaggactccgatggaaactggattgaacttccattggtaaagaagtcagtagcgatgctgcaggcacttcttttagattctggacttggtggttgcctcgatagtggagttggatttgggcctggcatgggtgttatgggtgcctttaatcagttgttagatagtgatcagccatttttttgcatgctccggttgatccttgtttcaatgagggaggatgacagtggggaggatgacattttcatgaggaacattagcatgaagaatgtgatttcagaagtattaggctgtcaaactggaagcatgctgggacttggtggtaactccagtgcatctatgagaaaacgtccagctgcacttttgtggagagtgcttggccctgttcttaatatgccagtttctgaatctaagagacaacgagttctggttgcttcttctattctttattcagagttatggcatgctgtaagcagtgacagaaaaccagtgagaaaaaagtatgttggattgatcatgccgccatttgtagctgtcctgaaaagatatcgttctgttttggctggtatacatgagcttacatgtccagatgtgcaaaatccactacttattgatgactgggcttcgacagcagacacttcacctgttgaggttggtgttgcaatgatatcacctgcctgggctgctgcttttgcctctccaccagttgcaatggcattggccatgattgctgctggtgcctctgggacagaaacaatagcaccgccaaccaataagttgcgcaggcgtgacacctcattgctagaacgtagggcagctaaattgcacactttctcaagttttcagatgcctatagatactacaccaagcttgcccacatcagcaccaaaggacaaagcagctgcaaaagctgcagccttggctgctgctcgtgaccttgagcgtagtgctaagattggttcaagaaggggtcttagtgctgtagcgatggctacttcaggacagaggaggtctgctggtgatattgagagagcccaaaggtggaacatatctgaagctatgggtgctgcatggatggagtgtctgcagtctgctgactcaaagtctgtttcaggaagagatttttctgctctttcatacaaatatgttgcacttcttgtttccagttttgcgttagcacgcaatttgcagcgagttgagatggagagacgaacacaagtcgaaatattgaaccgcagttgcatgtctattggacttcgggcatggcagcatcttcttcactgcttgatagagacaagtagactctacggaccttttggagaactcctctgtagtcccgatagtattttctggaagttagacttaactgaaagttcgttaagaatgagaagatttatgaaaaggaactacaattggttgaatcacttgggtgcttctgctaattatgtggagcagaagtttctttgtgatggtgcagacgcatgccactcagaagatggagactctttacttagtgttcttcctgcaagttctttgattacagtagatgaagtacatgaacaaattgtgcagagacaaagtgataatatctgcagcagtgtggatgatcaactgacagattcgtcaacaactgatcagatttttacaggatcaatagattcaagaagttctgacttttctggtgttcgcaacttgattcgatccacagtagttacacctggttacaagactaataatgagcgaattattattgaacttccttcaatgatgattcggccattgaaggttgtacgaggaaccttccaagtcacctcaaagaggattaacttcatagttgatgagcatatgagtgacagttacatggatgatattgcatccactagtggccaatatgatcagcaagatagagatcggagctggttcctatcatcacttcatcagatttttagtagaagatatctactacgtcaaagtgctttggaattatttatggtagacaggtcaaactttttatttgatttcgaggatataggatcacgtacacatgcttatcgggcccttgttcacaccaaacctccttatttgaacaccgtttccgttgctacccaaaggcctgaacaaatcttcaagcagacacagttgatggagcgctgggctaaatgggagattagcaattttgaatatttgatggaactgaacactctcgctggccgcacttacaatgacattactcagtatcctgtttttccatgggtaatagcagattacaagtccaaaactttggatttggaaagtccgtccacataccgagatctttcaaagccaattggtgcactaaatcctgcacgtttgaagaaattccaagaccattactccagtttcaaggatccaatcatcccaaaatttcactatggttcacattactccaatcctggcacggtattgtattatcttgctaggatagaaccttttagcatcctctatgctcagctgcaaggtgccaagttcgatcatgatgattgtgcattctctgatgtcgccagaacatggaacagtgttcttgagggcatgaatgatgtaaaagagctagttccagagatgttttaccttcctgaggtatttactaatgtaaacccaagtggaagactaggttctgtagcactgcctccttgggctaaaaatgctgttgattttatacatatgcatcggaaagctctcgagagtgatcatgtctccacacgtttgcatgaatggatcgatctaatatttggatataaacaaagaggtaaaggagcagaggtagccaacaatatcttccctcatgttacatatgatgggatggtggacattgataaaatcactgatccagtgcaacggcgaagtgtacaaaatcaaatatgttattttggacagacaccatctcaattgctgacagttccacacataagaaggcggtcgttgacacaaatattacaattgcagacaatattccggaacccaagtgaggttagatcttatgtgcttccaagtccagagcactgcaatgttcctgctagcacgatgcttgtatccaatgattgtcttgtagtcatagattctaatgttcccacagcacatgtggcattgcaccattggcagccaaataccccagatggcctaggggcgcctttcctctttcatcacgggaaaaatgccataaattcaagtggtggtgcaatatttcgcatatttaaaggatcttcaggttctgcagaagactatcagtttccacgagctgtagcatttgcagcctctgcagtacaaagttcatcagctgttgttgttacatgtgacaaagaagttataactggcaggcatgcagataactctgtgaagatgatctctccggatggagcaaggactatcgaaactgcatttgggcatcttgcacctgtgacctgcctcgcactgtctgcagacagtagctatcttgttacagggtctcgtgacacaacagttatactttggaggatacgtcaggtgggttctgcacataagaaaaatgctccagaacctccaccatctacaccgacaacacctactagtcctctagccactggtagtagcagcgacagtagtccaagcaaaactctagaaacctacaggaggcgacgaattgaaggccctatgcatgtactaagaggacatctcggagaagtaacctgctgttctgttagttctgatttggggcttgttggttcatcttcgagtgtgtctggtgtcctattacattccttgagaacaggtcggctaataaagaagctcgatgtgccagaagcccattccatatgcttttcttctcaaggcattgtattggtttggaatgaagttgagaacagactgtccaccttcactgttaacggaatccctattgctaccgcagttgtgtcacctttctctgcacgagtcagttgcattgagatttctacagatgggcaatttgctgcaatgggaacttgttcatctagcaatgacaatcatgactgcagcactgctctggaagataattctgagcttgacaagcccggtagtgatgaggatgtacaaggatcaaatgagaccaggctatctgttgacgctccctctatctgcttccttgatctatacaaacttgaggtaatccataagctgaagctggaagaaggacaggacgtcacagcactcgctctagaccaagaaaacaccacccttctggtttcgacagctgataagcagctaatagtctacacgggtccggctccaagtaccccgtaggtcaatccattagctccccggtgcttggttggaaaaaatgtaatggagatcagcgctagctaccttgacggcccaactgacagtgagctcggagacgacagtacagataatgcacgttaggcgacgggcttctcttgccgtgagcatggcgctgctgtacgtagaggctccaatggattgtgctgtaatacaagactgagactggaacctgaaatgggcgacatgtgcaccaaaaggtgaagagccgttgcgctgctggaaaactctcctgtacagggacctcgttgacattttccatgtagtcgtagtgaaacctgccacgctgcggccaaaataattgttagaagcagcaatccgaatgtaattattgccagtgcctcgtacaagtcgcgttagcttcttgttagccgtgtgcaacggcgagccggcacgcaaagatttgttagcttgttgtcattgcatctgtgtacaaagtctcgtccaagaaattgattcactttcgcttgcgcacaacgtagacacgcaatcccttgttcagatgtagtagcttataggtagattgtgttgattata

SEQ ID NO: 28098 - DNA, 3782 bp, Zea Mays
taaatctgcagcttctgattggggatgctgcattatctatattacacagtatgacatctgcacggtccgatcttgatgatgcaggtgaaatagtaactccaactcctagggtgaaacgtatattgtcaagtccaagatgccttcctcatgtggcccaggttatgcttactggggaaccaagcattgttgaagcagctgcctcattgcttatggctattgttacaagaaaccctaaagctatgattcgattatacattactggtgccttttactttgcattggcatatcctggttcaaatctcctatcaattgcacatttgttttcggccacacatactcatcaagcttttcatggtggtgaagaggcagcactatcttcatctttgcctttggcaaagcgtagtgtactgggtggactcctcccagaatctttgctgtatgtcttggagcgcagtggcccttctgcttttgccggtgcaatggtgtctgattctgacacaccagaaattatatggacccacaagatgcgagcagaaaaccttatttgtcaggttctgcagcatctcggtgaatttcctcagaaattggcacagcattgccattcattgtatgattatgctcctatgccacctgtgacttacccgaatctgaaagatgagatgtggtgccatcgttactacctccgcaacctatgtgatgagattaggtttcctaactggcccattgtagaacatgtggagtttttgcagtcattgttggtgatgtggcgtgaagagttaactcgtcgtccaatggatttatctgaagaagaagtctgtaagatactcgagatttctcttgatgatcttgtgcttggtgagaacggtagcatcaagcagtcatctgacttaagtttggctaattccggaaacaaaattgaaaacattgatgaggagaagcttaagcgccaataccgaaagctagcaataaaatatcatccagacaagaaccctgaaggaagggagaaatttgttgctgtgcaaaaggcttatgagcgattgcaggctagtatgcagggattgcagggaccacaagtctggaggctgctactcttgctgaaggcacaacgcatcttgtacaagagatatggagatgtcttgggaccattcaaatatgctggttatcctatgttgctaaatgcagttactgtagataaagatgacagcaattttctttcatttgataggacccctcttctgatagctgcttcggagctaatttggttgacatgtgcatcatcttcattaaatggagaagaacttataagggatggtggtatccccttgttggcaacacttctttctcgctgtatgtgtgttgttcagccaactacaccagcaaatgaaccagctgcaagaatagtcaccaacataatgcataccttctctgttctcagtcagtttgaatcaggaagagttgagattcttaagtttggtggccttgccgatggcattgtgcattgcacagaacttgagtttgttccctcagctgtggatgctgcgctgctgacagctgcgaatgttttggtttcatctgagttgcaaaatgctctgctcagggctggatttttatggtatgtgctacccctgctgcttcaatacgattcgacagcagaagagaatgagacatgtgaagcacatggtgttggggcaagggtgcagattgccaaaaatctgcatgctgttcatgcaactcaagctttgtctaagctttgtggtctcagtggcgatgatatcctgtacccagataacaaacctgcatacaatgcactgaaggctcttcttactccaaagcttgctgacatgctgagaaaccacccacctaaagagttattatcaaatctaaattcaaatttggaatcaccagagatcatatggaattcatccaccagaggggagcttctcaaatttgttgaccagcagcgtgctagtcaaggccctgatggttcatatgatttgacagaatcacattctttcacctatgaagctttatctaaagaattgaacgttggtaatgtatacttgagagtttacaacaaccaaccggattttgaaataagtgaccaggaggaattttgcattgccctgcttaagtttatagtagagttagtactacagtggaattccattaatttggagacgattcatcaacatggttcagttactgaagcatctatgtctggaaatgatgaagtcagtgattcaactattgaaggaaaaatggataattcatcaggaaaacaaagtacagatggagattctgaagttattataaacctccaaagtggactaacatcacttcagaatcttcttacaagtaatccaggcttagctgctgtttttgcttccaaggagcgtctgattcctctttttgaatgccttgcactgcatgttccttctgaaagcaccagcccacaaatctgtttaagtgttctttctctgttgactaagcatgcttcttgtttggaggctatggttgcagaaaggatgagcctgattttgctatttcagatactccactgcaatcccccttgcagggacggagctcttgctgtactgtattctttagccagcacaccagagcttgcctgggcagctgccaagcatggtggtgttgtttacattcttgaacttatgttgccacttcaagaggaaatccctgtgcagcaaagagctgtagctgcatctttattgggcaaacttgttgggcaaccaatgcatggccccagggtagcaatcacccttgccaggttcctgcctgatggtttggtttctgccattaaagatggacctggtgaagcggttgtttcttctcttgagctgacaactgaaactcctgaactagtatggacacccgcaatggcagcttctctttctgcacagttggcaacaatggcatcagacctctatcaagagcagatgaaaggacgtgttgttgattgggatgtacctgaacaagcttccggacaacatgtaatgaaggatgaaccacaggttggtggaatttatgtaagactttttcttaaggatcccaagtttccactgagaaaccctaaaagattccttgaagggctcctagatcagtatgtctcctctgttgctgctacacatcatgaagcaattgctacagatccagagcttcctttgctactgtccgcggcattggtttccttactacgagttcatccagtgcttgctgaccatgttggctacctcggttatgttccaaagcttgttgcagctatggcttatgagggacaaagggaaactatggcatctgggcaggcttccagtggatcgcaggcagaacctggtgaacatgacaattcatctcactctgaggccactgtgcagactccacaagaacgtgtccgccttagttgtttgcgtgttctgcatcagcttgcgtctagcacaacctgtgcagaagctatggcatcaacaagtgcaggaactcctcaggtcataccactgcttatgaaagcaattggatggcaaggtggaagtatactggcattggagacattaaagcgtgtagtcggtgctggtaatcgggctcgtgatgctcttgttgcacaggggcttaaggttggtcttgttgaagtgctccttggtattcttgactggcgtgctggtggaagacagggactccgtaataaaatgaagtggaacgaatcagaggcttcaattgggcgtgttttggctgtggagccatcgtctgccttccgactcgcgctcgaacga

SEQ ID NO: 28099 - DNA, 2036 bp, Zea Mays
gcaagatgtgcagctacttgatttgtcaacaccgttgcaagtaattcatgttttgggaaacttcatgagaatttggtctgtttactccttgtatagctacctatccaacagtggagattcaatagttggctttatcttcagttgtcttgtacccacttcagtcatattcttggtcttacagaagccttggaaaggccgacctttgcccaactcacaggttgttcctacagttgtcaatggaggaatcctggcattctactttgtattatggggtaaaggacttcttgcttgtggtccactagtgtaagtatcttgttctatcaggaccatggatttttcacatagctgcatggtctgtagtgtgtggtgcggtgcatttatgccagggaatatctagttcaatctccacctatgtgcaatgtttaaagaatgctgcgagccagtgatatcagatcattgtggaaacaaattacacttcatggacatcaaccgtaggacatttgtatgtcgtccttacctgttgatctaatgcatgatatgatgatagtcattctgacttgagagctgcacacatgaatttgcatgattgcatttggggatggggagttgcacttactctcctcgggttgtgcagtatgattctgaacacttcaacagaaaaacagcatttcattaccattaaccacatcattggtatattttgcactgctttgagcatactaaagaagcatttactggcacttctatctaaactcatttttgctgtctatcgagtctagtgctctactggcagagtatgcaggtgctgttcttggagttctctctgctgctttatatggaaggaaatctaacatctggaaaaagattggtggacttgctgctatgttggcagcatattatctcttgtcaaatggatggtctacaagaacccattctcctctatatagctttggaagtgaaccagtggagaaggcagcacaaactattggagtgaaagcaatgatggtgccaattactgctgggatcttgtctgctttaaggagagtattagctcggcgtgtttctctcaagaatcaacttaaaaggcggctccatgctataactattgcttctgctacttgtttcctttttccgtttgccatgtgggatacgatcctaggttcggcatctgacagcattgttaaattacaactaccaagttgggcatactttagtactgttttatttggaatggtgcttatattctatgttgacaatgttgctgaagaaaagttgcatctggtcttctcttctccaaggcacttaatggtctcaacaggttgcatcatcgtgttggaaacagtgtaccaaatggatttctcccttttaggatttctggtctgttctgttattttgggattcggtatttctgaagcaacctccttggaacgctcaaagaaaagccctttagagacccatgaactatcgaatggggtgttccacaatcaattgcctatttcagaacttccaagctgaagaatatatgacctaggttgagatcggtgaaagttaatattacacaacacgtttcaagagtggactgttacggtttgagtagtaacgaagaatattaaagctacgacgttgtgaatggctgcggttgcacacctcaagctcaatggttcgattctttgcgtgaaggttttaacgagacagaaaacacggatgtttttgacctgccaatgcccaatgtgtctttgtaatcctccattattgttggccacctgcatcctgtacatgtgaacaactcaagtagatgtgtatccgtattccccttgcagatattgcaattgtcacagcatcctgtttaactgcttgggtagtttcgaaaatttgtttttctcacttggagacgcagatggttcaagctgttaacagaagtgcactgattgttctttttcagaggctgaaacctgtatgtaacccgtccatgatatgattaacaagctgactttatctttgacctattcgtgaatgcaatcagcgagtctcctgca

SEQ ID NO: 28100 - DNA, 235 bp, Zea Mays
tagttcaacaagttggttttactaacttgtaactgctcaatgaacgaaggatgagtttagagatcgttttatcgatttgcctgaactcactttggttcaactcactctaaagaaagtacttacaagattcgagattaagtcgattagtaaccacctagtcatcgctctagtcgtgccttgatcgcctcacgtgtgcttttccagcatgtgtgatcaagtcaagtcgtgactagtg

SEQ ID NO: 28101 - DNA, 1125 bp, Zea Mays
ggccttatcgcctccgcgctctgatggcctcacaccgcgccacgcagtaaacgaaaagacgggcccactccctcaatcctccgcacgccccttccatggggcagccgcacctcttgccgcagctctccccctccccggtcctctactccctcttctcgccgccggagacgggggccacgccctggcggcggccgctgaaccggggacgggccttccaaccgccgctctcctcgctgcgggagaccaacaaggccacgctccgcaaggccacgcccaacgcccccttccgcctcggggggggcggggggcggcagccccaaggatcgccgccccgccgccgacgacaaggaggacgaggacgagggtcgcggcggcgccggggcactcacagggacgctgatcgcaggagcattactggttggtttcgtaggggggtttggggcggccggttacgtgtacaaggaccagatcaacaccttcctcacgcagttctcggggttccttgacggctatggtccagccggatatgctctgttcgtacttgtatatgcagggttggaggttctcgcaattcccgcaatacctttaaccatgtcagctggtctattatttggtaatgtgactggtacaattattgtttcagtcggtggaacgctagctgcagcggtggccttccttattgctagatactttgccagagagagaattcttaaattggttgaaggaaataagaagtttctggcaattgataaggcaataggtgaaaatgggtttaagttggttgggaatgcttccaggttcatgggcttacgtcagtgccggtgcattcgggcgagctttaatccaagatgagtcggaaattggtttgggaggaaacgaacagctatggacactgggcgttggattattgtttacagccattgctgccgcttatgtaacgaggctcgcaaaggacgctgtaaaggagatcgacgactagaatggtaggattctctaggagaaagggccatctggatagtgtactagcctagcacattgtacatcactggcacctttggtgcgataaaatcttatagaaagccagagcaattttatgaggtaatgtgatctcttgttgttgtggtg

SEQ ID NO: 28102 - DNA, 1466 bp, Zea Mays
ttccgctcgtcccgccaatcgccattattaacagctccgcggtccctccctccctcggtcggtcggcgtcggtccctccctccccacccagttagtcctcagcctatcccgtgcccgcgcagagcaccgcctctgctcgacccaccaccctctgtgcagagttaattaaccttgaggtttccgattgcccttcccttccgctcctctcgcccattcgcggcgagattcagcggcaaggatgcgcctgcacgcggaggtgcgggatgagatggaggaggggagcgaggagggggctgtgacggcttcggcggggctgtcgccaccgccactcatcggtgcggcggcgccggttccccggctagtggtggggttcgccctcacgaagaagaaggtgaagagcttcctgcagcccaagctgctcctgctggccaggaagaatggaatcagttttgtatctattgatgagtctcttcccctctcagaacaaggcccttttgatgttattttacacaagattactaggaaggagtggcagaaggttctggaggactatcacgaagaacatccagaagttactgtccttgacccaccaaatgctatcgagcatctgaacaatcgacaatcaatgcttgaagaagtagctgatttgaacctgtcaaatttctatggagaagtttgtatcccacgccagctggtcattacgaaagatccatcctctataccaacttctgtagctatggctggactaactttgcccttggttgccaagccattggttgttgatgggacgtctaaaggtcatgaactatatcttgcatatgacgaggcatccttgtcaatgcttgatccgcctctggttctacaggaattcataaaccatggcgggatcctctttaaggtgtatatcattggtgaaacaatacaggttgtccgcaggttctctcttcctgatgttaacacatatgacttactaaacaacgttggcatctatcgattgccaagagtttcatgtgctgcagctagtgcggatgatgcagatcttgaccctcttattgcagagcttcctccaaggccacttctagagaaactgggcagggagcttcgtggccggcttggtttgagattgttcaatatagatatgattagagaacttggaaccaaagatcggtactacataattgatatcaactacttcccaggttacggcaaaatgccaggatatgagcgcatgttcacagacttcttactaagtctcgcacaaagcaagtacaaaaggtacttaagcgggacatgaggtgcaaggaagtttgtgaagaccatgctactgacgagatggcatataacggtggcaggtttgaggtctacgcaagtcaggagaccaccaaatagctgttgatgatcggatcatattaatctacatacaatctttctagcagtcatactaatacaaccatcatgggtttgtg

SEQ ID NO: 28103 - DNA, 893 bp, Zea Mays
cttctatctgcagcattctattagctatgttaaagggcaggtggagtttttaagcttgaactctttttacctgaggaatatcccatggctgccccaaaggttaggtttctgaccaagatttatcatcccaacattgacaagcttggtaggatatgcctcgacattctcaaggacaaatggagcccagcacttcagattcgaacagttcttttgagtatacaggctctactgagtgcaccaaatccagatgaccctctctccgataacattgcaaagcactggaaatccaatgaggtagaagctgttgaaacagccaaggagtggactcgcctgtatgcgagcggtgcatgagagcgcagtgctgttcttggtgtaataaccccatcatacttcagtcctaatccgttgccatttgcttgataaaaatagactggagatatttgccatggaatgaagtctctaaatgactaccactctgaattgtttggttgtacacctgtggtcggttccctttacctttgggcacctttgactaatcagtatatgtggtagaacttgcagttactctaatatatttgtcacttcatgtagaagagcttctcaactgttcataatgttggaactgaggctggttagcttggttgcattttcgctgtaccttcctctgttcgcctgtcgactgtcgcctgagaacgaattttgccgaaactcgagttgcacctggtcatgttttctacgatgtgctttcttattaggtgatcacaggttggttttatcacaacacttcggctgttttgcggggatttgttttatcgcaatacattttggcagtcataatctcgaggaatatgaaaatccataaatattatcctctggttataggctggataata

SEQ ID NO: 28104 - DNA, 1755 bp, Zea Mays
gcctccggggctctcttgcgctcacactcccaccgccgcatatccgagtagagcgccacgaactccacgagctctccgcccagcgagactgtccgatgccccctccttcacccgcctcgcaagtgcgcacttgcgatgctggcgccgcgtagtcgcccacgcgcgggacggtgagtgagatggcgcgctacttccgcagcagcaacctcgcctctaggatcttcgaccgtcagctcatctccccgctccctggcgctaccgttaacacgattagacagttttatgaaaatttggtcccaagctatactatatatgacatagattgcccagattattcgtttcgcaagttcactgatgatgggaaatatcttgtggcttttagccgaaaccatcaagatttgattgtataccgtccaatctggttcacatattcatgcaatgaagaatgtgaaactcatgagcttccgccaaaggcaaagaagtttgacagcttctttaagcagctttattcaattcctcttgcatctagcaatgagtatatttgcaaggactttttcctgtacatggaatgccatcgatttggtttatttgcaacatctactgcacaaagtaacgaatcaactgccactgagggtgcaatacatggggtgccattgattgagaaaataactttccatcttgtgaggctagaagatggtgtgatcctggatgaaaaggctttctgcaatgattttatcaatctggcacatagtattggtgcttacatgtatgaggacctgctttgtattgtttctttgcgataccaaacaatacatatcctacagatacgagattcaggcaaccttgttgaggtacgcaacattggtgcattctgtcgggaagatgatgagctatttcttcactcacatattcagactggttatgggggttcttttcttcctggcataaagcaacggttgttgtcatatattttttgcaagacgtggaatgaggttccagatcagactttgagggtccaacatctaaagaagaagttctattttcacttccaagattatgttgatcttatcatatggaaggtacagtttttggatcgccatcacctatttgtcaagtttggtagtgtggatggaggggtttctcggagtactgaccaaaacctagcattctttgccgtgtacaacatggagacaacagatatcgtttcacttcatcagaattcttcggaggatatctatgccttgtttgaacaattttatgatcattttcatgcaaatccacaagcttcatcacatggaaaatttatctcctctcattccaatgatattcatgctttggatcaacttcgggttataaaaaacaaagcaagtagctcctcacagtttgtgaaaaagatgatgacgtcattaccttacacttgccaatcacaaagtccttcaccgtacttcgacctgtctctttttagctgatttcagcaattgatcggcatcggcattgcacagagcatccaataaaatttatgtcagtgaggcaaaatgttgtcaaatttaagatcaagccaggttcagattctggtgcttctgacagcagagcaaaaagaatctcgtccttcttgtttcacccatttttcccgcttgcactttcgattcagcagacttatatgcagccaactgttgtcaacatccatttcaggagatagaaaagtttagccataggttccaaacacttgctcagataagactacagaaaacaatc

SEQ ID NO: 28105 - DNA, 315 bp, Zea Mays
gggcatggccggggtataaactggtcccgggtatcctctcccctagctcacccttgccaatttctctaggagccaccatcgccgtagaatttgcgcgcgcggcggaagaacctcgccagaccccgccgtcgtcgaccggcatccgcacgcgccgccccgacctcaacctgtgatcgggggtcgtctctgggttcgcaaaacctcgcgaccaagtgcccgagcgcggggttccgcgggtggccggaatttcgtcaccgtaccgtcgaatttgtcgcgacgcgtgaacagcctgtgtgcagcttcgttctcggtgag

SEQ ID NO: 28106 - DNA, 172 bp, Zea Mays
ccaggtgaagagtaggtaccgccggaggaggattactacgatgagtttgatgagatctaggtgtcatctccccagttaaactgttggcgccgaggacaaaagttatcttagtttgatttatttatttatttatttatttatttattatttgctattttgtaagacatttctc

SEQ ID NO: 28107 - DNA, 297 bp, Zea Mays
acattctccgtctcctagtgttttccttgaattctgtataccgaacgaacgagctagcgggaaagattgattccttgaacctaatctctgcccaaacaaatgagaaattgccagatggtatcagttgctggggaatgatctcaggatgcagtattcaaatcaccaaattttaacagctccgcatggtgtcaggataggttgcaggcgtgcccagccagagtgtgtgtgtgagagtgaggactatatagccgatcaaccaatcagcgtttctggtcagtcacgacaaaaagaacaccc

SEQ ID NO: 28108 - DNA, 132 bp, Zea Mays
ataatgtgcatgcagagcaagagccatgaatgcgaacagaaaaagtttacaaaacgtgcggcgcgtacgcacacagaaagtacccttgacatggcgctaaaacgagcttgtggttggctcgcacacctcgcc

SEQ ID NO: 28109 - DNA, 2461 bp, Zea Mays
cagccatctcctcaaccgtcgcgggatccccgcccttccctcgaaaccccgccccgcgcccctccctgagctctgtcgcgtcatccctgccttgtccccttcctcccactccgacgcacacgaggaagctgttaaccagcgccgccacttccaccgagtccctcgtggcgcttgaggcccgctgtctctccccccgctgtcgaggctcgcgccggctagaggtccacgctccccccccccagagatagctccctccccgaggagctgaaggcagcggcgtcacgggggctgcggtaggagctcgacaccgagcgggagttcgcggagacggcagccagatccggatcgaccctcttcgccttattcgagctcctggggctcgcagataaaggggccgaccgggtcgctggagccctcctacgacgaggccctgtggccggatgaggaggccggcgtcgacgcggcggaggccgcgccggcggaagcggacgatggcatcgaggtctgctgcttcgacaatcgcggtgtcggccacagctccgtgctccccaacaaatcctactactcgacggcaatcatggcgacggatgccttggccttgatggatcatttggggtggaagaaggctcacgtcttcggccactccatgggtgccatgattgcttgcaagctagatgtgatggcacctcacaggctatgttcgctggcattgcttaatgtcaccagaggtggctttcagtgcttcccaaaggtagacgcgcagatgctatctcttgcattccgtttcttaagggcaaaaactccagaggaaagagcccttgtggacctggaaacacattatacaaaggtattacactccctgagctccatcgcgtcatccctgccctgtccccttcctcttcccactccgacgcacacaaggaagccattaaccagcgcctccacttccacctcaaagctactcgtggcgcttgaggcccgctgtccctccccccgctgccgaggctcgtgccggctggaggtccacgctcgcaccccccagagattgctccctccccgaggagctgaaggcagtggcatcgcgggggttgcggtaggaactcgaaacccagtgggggtctgtggagatggcagccagatccgactcgaccctcttcgccttattcgagctcctcacgctcccgaccttctccaaggtacgcactccacccttcagcgtcctgctttgttacaccgggacccactattggacttgggttagggttttggttgagaagaacagctttgccccccccacacacacacccacactaaggcaacatctgacctacgctcactggctacccccccctccatctgcagcaatatagtcgtctttcctcatatgctgacgtaattgtgcctgtcgtgcattatcgtaatggttggcctacaatgctgagcgtttgaccatataaaatatatacggctactaacgtttgtaccattctgaaaactaaaatttgttgaggttagcactgttaattttgctgcagatatctattatgtgaagccttacccctgtgatgtgtatgccactatgaacttttattgaacaacaaagagtagtgtaatgttctattgtagtttcttttcgttctcttatgtttatgttgcaggctccaggctgcatagacaaaagtgttgtaaccagatctattcttaatggtgatagtgaactgaatatattttcacaattagtctagatttatggatgtgtgcctttcttttcggatggattttgctaccactctaaaacataagagacaagagtttagtgtgcctgagcttattgggtctcttgatgttgaggagagggtgagagcaaaagacacttgtgggaaaggaggtgagacttctagtgccaatatggtacaaaagaactccaatgcgtcacataaaaccatgaagcccaagcaggcaaccttgtttaaaaagaagaacaaaggagttggttgctttgtttgtgggagtattgatcaatgggcaagcgcttgtccagaccgcaaatttaagcaagagaaaaaaccagctcaagagaagaaaacaacaaacatggttgttagcgataccgcagaaggaacatcaggtgcaaaggggctggaacattgctgatggggaacggatcacatgcgtgtgttcttagtgttggtacagtcattctgaagtttacttcgggaaagacggtgctattgaagaatgtgcagcatgtcccctccatcaacaagaatcttgttagtggctcattgctatgtcgagatggctataaacttgtgtttgagtccaataaatgtatactatcaaagtatgggacatttgttggaaaaggctatgacagtggaggcttgttctgcttatctttgcatgatgtttgcaataagtctgtgaacaatgtgatttcgaacgagtcatatatttggca

SEQ ID NO: 28110 - DNA, 2739 bp, Zea Mays
cggccctacgtgtcggcgacagccgagtaagcacgggccggctcctcctcgcccaacaaccaccgcggcgtgcgccgaccgtaccctctccctccggcgcaccgctctggttcatctccaactacatccaccgcgccccaaatcgcaccccgcctcccccattcgcgccgatcgaaccccaaatcggtggcgatgagcgtggtcggcttcgacgtcggcaacgacaccctggtggcggcggcggcgcggcagcggggcatcgacgtgctcctcaacgccgagtccaagcgcgagtcccccgccgccatcgccttctcccgcaacgcgcgcctcatcggctgccacgccgcgtccgcctcgtccgcgcacgcccccttctccagcgtcaagcgccttctcatgggcgccacggggaggcacccggactcctccctactccgcgacctgtcccgcctccccttccccgctgccgtcggtggcggcgctgtcgtccacgccgaccacatcggccgccgcatcgcgctctcgccgacccacctcctctccatgctgctggcctacctcaagcagctcgcggaggccgacctcggcggcgcccccgtagccgactgcgtgatctccgtgccctgctacttcactcaagcgcagcgccgagcctacctcgacgccgccgccatcgcggggctcaggccgctccgcctcatgcacgacctcgccgccaccgcgcttggctacggcctctaccgctccgacctcggcggctccgggggtcccacctgtgtcgcgttcgtggacgtcggccaatgcgacacacaggtcgcggtcgtctctttcgacatgtcggggatgaaggtgctgtctcacgggttcgatgcagacctcgggggcagggacttcgacgaggtgctgttcgagcatttcgccgaggagttcaaagacaggtacatgattgatgtcacaggaaatgtcaaggccagtatgaggttgagggcagcctgtgagaaggcgaagaaggttctgagcgcgaacgcggaggctgtggtgaacattgagtgcctgatagaggagaaggatgtgaggggggtgatccgaagggaggacttcgagaagctatgtgccaggctgctggagagggttgttgaaccttgcaacagggcggtgacagattcaaggattggattggagaggctgcattctgtggaactcgttgggtcaggttctcgtgtgcctgccattgccaaggtgcttaaggaattcttcagaaaagaacctagtcgcacactcaattcaagtgagtgtgtggctcgggggtgtgcattacaatgtgcaatgcttagtcctacgttccgtgttcgggaatacgaggtgcacgatgcaatccctgcttccataggattttatactagtgacggcccagtttcaacattgtcaagtgatgcattgttccggagaggcctgccctttcccagtgttaagatcattactctacagaagaacgacagttttagttttgatgcctattatgtggatgcgaatgaattgcctcctggtacctcaacagacatcggtagttttcagattggcccattccaagcacatatggaagcttctaaagtcaaagtaaaaattcgtttgaatttacatggtttggtttcagttgaatctgctgctttgatagatgattatcaaaggaatgcaacttctgctgaccatatggaggtggataccagcggtgatgacatgggtcacaagtcaagaagtgaaaggtctatccagcggcaggagttgccaatcactgagtacatctgttgtgcaatgagcaagcaggaactgctggaagctcaggagcaagagcaccaattggcttatcaggataaacttatggaacggacaaaggacaggaagaatgcattagaatcttatgtatatgacacccgtaacaagactgaagattggctttatgaagaaggtgatgatgagacagaagtggtttacagtagcaaacttgaggagctgaaaaagcttgtagatccaattgaaaatcgttgtaatgatgacgaagtgagagctgaaatcgcaagggagcttttgaagtgcattgttgaccacagaatggctgccaagtcattatccgcacctgaaagggatgctgttgacaatgagtgcaataaagctgagcagtggctaagtgaggggtccaaacttcaagaatccttgcccaagaatgtggacccagtactttggtcctgtgaaatcaagggaaaggaagaagagctggatatgttctgtcgaaacataacaaggcacaagggctccccagcaaggacagatggcagcaggggttcagatcacatgcctacacctgatagagattagatatattcacaaggtttcttcactgtacgactgataacaccgtcatataattgactctgtaccacactaggcccgcattaggtgaccgcttcttggttctccagggtgttgtgcagttttcacttgagagcctactaatcatggttattgatacctgttaattctttttctgtactcggaccatgggtattgtctgcttcagtttgtgctgaatgaacaggaaaactaaccgcgtgtttggttggtggacgagtgcgtgcagctgtatgcacggagcgttgaagcatggtttgtttggttgccgcaccgcacacacgcaaactaggatgggttgaatctatgacaactaagatgtgattgtac

SEQ ID NO: 28111 - DNA, 4201 bp, Zea Mays
cactcttccccaaaacacgaccgtccgtaccagccgccacccccgcccgtatccgccgccaccttcgcgtcctcctcctccgccgtgccttgctgccgtgcctgcgtcccggcgagccgctcagccgcggagcgtcgacctcgccgtatgcagagaccgaggcgctgccggcctgccgcgcctagcccgcgagcagcgagccaccgttcgccgaggcaccgacgtcgaggggagggagctgggagcgcttgcgccgttctcgagccgctgcgccctgaccagctgccgcacaggcgccgccgcagggagactgcggtcaacaagttaggaagctgcagcgctgctcggacgcgtcttcccagcagcaaaggaggaaggaagtttcacctttatcctttagctccaaccccaagcaaagcaaagaaccatcagcctttactttagtgaaagcactgaaagcagaatctaaaggcaaagctacataagaaatggcatcagaagctcgttgcacatttgcatcaagctacaacattgacagttagcaagctccttgtgttacagaactatagcttccttttgtcaaatattatgcggtgtggcactggcactggatagtggatacatagctgctctcaagataagggacatcaggcagaacggatgggttcggggtcttcaaagtcagagtttgaggactttcatgccaatgcggttgaagaggctgtgaaaaacctagctccttatttggaggacacaagggtgcgaaaccaggccatttactttgatggatgggatggacttggtgcatctgctgtccttaactcgatcgctgaacgccctccgccatctctgaggaacaaatttgatgatattattctacacattgactgttcaaggtggaaaagccggagagcactgcagaggacaattgcacagaaactagggcttcctcaacatgtcatggctgtttttgatagacaagacgaagaggacgatctagttggagtacatgaaggctcaagaactgagataagagacatcgggagagagatatatcgagtcctacaaagacagagcttcttagtggtcttccataacgggagtgataccatggttgacttcaatgactttggcatccctcgagctgctgcagatccttggtcaaacattatccggaaggtattgtggaccttccgtggaaggcttcatgccatcaaagaaacggaggaagtttcaggtcatctcaaacctgataaacgacaaccaaagggaactgagaccgtggacacttcatatctttgctttcgttcgttattttctggaggcccatcagatgtatcttcgtacaggcttcaaatactgtgtgaggaagctgcagcaatagctcaatacacgaataatcctatagtcactcaggaaatagctgaaatatgctgcaggtatttgttatcattgaattccaaggggaatggcaagctagatttcaactggagtgctcatgcctccaactattgggtttgtgatgggattctaaacgaatgccaaccagagcaagcatgggagattgccgcttctctgcacaaagagttacgactggagggctactcatctgctcgtaagttctgtcatcctggtgctgacacaacatcctgggttgtaaccatcaaatctagtgaagatattgtaccaactgtgaagccagagacaacgtctttctttttggcagtcaaaagaaaacatggccattcggttttgccattacccatgaaaatgttccaaagatccgagcaacttcatgttttgaagctctaccactgcagcttcagctttgcttcacctccattcctttgttgcctaaacctaagatttcttggacttgatagctgcacggatcatcaatcaatgaaaccgaaagaaaacaaagaagaggagtcggaggaggcaggggcagagggggaggaggagaatacagcaacaatcgaattctttcaaagcctatgggtgcttgacatatgttgcactgattgggaattgactttatccccaaatacaatagtgaaaatggcaacaaacattagggagataaacataaagaggggaagaatctggcacagcagtatttcatggagatttcttggtaacattcacaagcttcgagtgattgagcctacaagtccttgggagacaagtaataaggatgaatttatggacatggtgaagctggagcttcttgacctgtcagggaataccacaatacaatttttgccaagcttgtcaggtgcaatcagcctcagaacccttattctagatggttgtattgaattgcaacatgttgtgcctgaaacactccctccatggcttgaaacatttagctttgatggaggatataaacaagctaaaatctcatgtatctccttggctggttgtgcaagactggtcaacttcagattgtgtgggtcagtacagaaccttgaggagctggacctctcaaacacatcaatcaaaacacttgacctcagtgataaagtggtgcaggtcccatgcctagagcgcatcatcttgctgggatgtgagcggcttcgtgctgtcctgtggccaaaggatggaatgcccaatctaatggtgctaggcattgacactcggggaggcgcagaagcagctagtgcaaaaacagtacatgataactttgccatcagtaaagaacgagaagaaggttgtcgtgcatttgttgctgttatggaaatgaggttccttcagtcgttggtgctagcaagttccaataaactttgctgggacactgaccgtaagtatgatcttaacatctgcttgtcttcctctaggagtagcagcaaaggtgttggacaacacagctacaaggaggagacgatgggccctctgcagaagtcgatgatcacctccaagacttacctgacctacagcgatgtgaatattgacaaggcaggtagtgtgaggcagtttcagccactgcaccgtcatgtagagattggtgagggaataagcaactctagcatggtaaccgttcgtgaaatcagcgctgcgatccttttgataaatagggtctactcattgctcgtgcatgacaattcatccatcaggactgttatccctgaaaacataatgtctatagacacgaagaaggtctattggtcttgtctcaggtggtgctgtgtcgagagatgccccagtttggacagtgtcttcgccactaactacgatgccgtctgctttaatgctctagagaccttctgggcagctgatctcttggtggcccgatgtatctggagtaaaggaagaacaactaatgtgaaggacaccgaatccttcgctaaactgcaggctatacatctccactcctgtcctaggctggcatttgtcctcccactatcgtggttctacaccctgtccagccttgagacccttcacatcgtctattgtgataaccttggtcaggttttccccgtagaggcagagttcttaaacgaaatatctactggccatccaggaggtttgttggaattcccaaagctgaagcacatctggctacaggagctacccaagctgcagcagatatgtgaagccaagatgtttgctccggagctcaggaccatcaccttaagaggatgctggagccttaagcgcctccccgctaccgccgaccgcccaggtgatcgccctgtcgtggactgcgagaagaatttgtgggcgaagctggagtgggacgggaaggaggctggccaccacccttgtctcttcgagccacgccactccaagtaccacaagaagagagttcttagaaccacgcttctccgatgagccaaactgaccctggtaggtaagaataaatatatagcttcctgttgttttttccgtttcacgttggattgtgtatcatatgcaataccataatccataatctactgtactgccgccatggaacatcttttagctatcctgcatgctgttagagatggaactaagaacaaatacttatacacacattgttagatgtgttgtgatcggcttatggtcttcctgagctgcacaagtttgtattttccttttgtttatctcgttagttaatcatttacattatcaattatgtaagtttaatttggtgctgtgctggattgaaggcgacatatctcccagctgcttcctacggtacagtgccgactgcccg

SEQ ID NO: 28112 - DNA, 2777 bp, Zea Mays
ccccggttgccccaaacccccaatcccttaccgatccccaccccaatggccaccgccaccgaatccggcagtgcgccgccggtcgacggcgaagtgagacagcgcggccgtccccgcgggagcgggcgtgggcgtgggcgtgggcgtgggcgtgggcgcgagcgctcgcagagcgcgaggcggagcaaacgcccgcggaagccccggccgtggcggtccgcgtcgccccccgcgctggagccgctagtgcccttgcctccaggcaccgaagtcgaggtccgcattgatgacgacggtttccacgggacctggttcgaggccaccgtcctcgacttcgcgcccgcgcgcggctaccgcaaccccgcgcgctacacagtcaagtacgtgcacctcctcgccgacgacgagggcgcgctctcggagcccttcgcgccgtcccaaatccgcccgcggccgccgcctctgtcgtccccgccgcgcttccaactccacgacatcgtcgaggctttccacaacgaggggtggtggtcgggcatcgtcgtgtccgcccccgacgccaccggcgccggggtcaccgtctcgttccccatcacccgcgaggtcatcgagttcccgtccagcctcgtccgcccccgccgcgactacgtcgccggtgactggattccctcccgggccgcgatggttctccgccccaaccgcgcggtcaaggtctatgaggtcggagagaaggtcgaggtgctgaggaaccgggacgtgtacggcaactcctggttccccgccacggtgagggttgtcatcgacgatctcagctacgtcgtcgagtacttcgatctggaggaggggaagggcggatcggagaaggccaccgagtacctgcattggtggttcatcaggccagctgttgagcattcgccaagcaagcgtgagttccagctccggcctggtgctgccgtggaggcctactgtgatggggcatggtcacttggagtggtgacgagggtcgtcggagaggatgaatatgaggtcggtattattggcaagaagacgagactgctggtgaccaaggttgtggaattgctcaagccacagtatatttggaatggcaaccaatggaggattacaacagctaaggtgtcaataggaacaaaaaggggttcaagtacaaaggttcttgcctgtaagaaattggctaagaggagaagatccaaggaactgtgcaatctaaatagttcattggatgtgactaggactgaccagcagagaggaagaaaggaagcggcagagccaatgaaagatcaccccttagcattggagtgttcgaaatctgatgctcaagggcagcttgacagaactttggaggatgcacagaacataactgaattatcaaatcaggagaacctgttacccacggtgtctcctggctttatatcaacgtctaatgggaaaggtactaacatacatgatactcaatttgaggaagagccgacagctaccctacctattgatgggagttcacagtgcatcattgacatttctccattgaggagctgctctgctttggagagatctttgccttcaccaccgcaggcttcgttcgtcaagaggtcacctgtgtggcgtgtagttgacgcaaaacatgtgtttaaggagttacctcaacaaccacatttccttccactccaaaaataccccccaacactgcgtgaaggaatagcattaggtatgatggtgtcattctcggaattggtgaagtttacaatggaagcaagcatagacgacagcatggaatggttcgaggacaaggtcaggacagtctcccttctggaggcaaatggattcagtgtgcaatctatacagagcgtcttgaccgaactgatcgagatcaaatctgagcgcgcccgtatccatggagagatcggcaagctgagttcaaagctagcggagaacacggcttcctcctcccgagtcggtgcactgctcgatgaaaaagatggagccgcagctcagctcgagcaagaactcgggcgcatccgccaggaaagccagaagatggcacaggagaaggagaaaatagatgcagagggcgtgagtatcaagacagcatgcagcgggtacgaggatttgtgcagcgacgcggaacgcaagttcaaagaagtcttggctcagctgcggcggaagggcgccaggtgatgcacaagctttgggtatcgtttcgctgcttctaactctgacacctgtttatgctgtagggctgtagttttatctatgtatcgcagtgggctcagatcgatgtgctgtggttacttttgtgcaagccgttcggtatcgtttatgtatctgtaggtatccatctatggcttaggaagcctgatgaagtctcgactctttataattgctactcctatattaattgccagctagttggaccgtacttagttgcttgtagcatatttagggtgcgtttggacacttgaatcagttctgtttatcatctaaatcagctcaggccttgttcgtttgtgtcggattggtgggtcggaacgattcctaactgaattgcttctctaatttatataaactttgattagctagaacgattccgggtgcaatccgacagaaacgaacaagccctcagctgaatcggtgccaaacggacggatgtgggaatcggagccgaaactgctacaccatggcaagacagtgaaagaagacgccaatgaatgtatcatcttgtgctcgctgatgcatcatctacaatattgtatcctgaattgcta

SEQ ID NO: 28113 - DNA, 1972 bp, Zea Mays
atgtatgtatctgcgcatttgccatttctggttacgctttcctctccggcctttccatcatcgccaccatttcgcacctcctccacaccggcaaacaacttcacgtcgcatgatctcgcgggagcgctcgaggatatgcaagtggcggccgctgcggcgtcaatgcgcggcaccgagacggttggcgcgaagtctgctgcgcggcggttgagccgcgtgctggtcgggcgccgccgccgggccgccgtgctgctcctcgcgctggcttacgcggctgcgatgctcatgctcaccattggcggcagcgaggggtctggatccagcggcgtggtggcgggtgtgctaaggcggggcgcgcaatcggcgccccccgggtcggtgtaccgcagccacctcgtgttcgaacggctgctcccggaaatgcgcgccttcgcctcccgcccgaacccgttagtgacatctcaatacaaaaagtttggaaagcaatgggaaccttgtatcagcaaggggttgatacactcagagctaccgccttcaaatggtttcctcatagttgaggcaaatggtggcttgaatcaacaacgcatttcaatttgtgatgctattgccgtggccaaaattcttaatgcaactcttgtgacaccagcatttcatttgaatagcgtttggcgtgattctagcaaatttggtgatatctttgacgaagatcacttcattgagtcacttagaaaatatgtaagggttgtaaaagatcttcctgaagatgtttttctgcgattcaaccataatatcagcataataccaaacatgagaaccaaagctttctcacccccaagttactacttacaacatgtgcttccaaagctgttggagctaggggctgtgcgtattgcccctttctcaaatagactggctcattcagttcctatgaatatccaggcattgagatgtttgacaaactataaggcattaagattttctgaaccaataagaattcttgcagataatatggttgaccgaatgatcaagaggagttttttaagtggcgggaagtacgtctcggttcatcttcgctttgaagaggttttactaaagtttatcttgtgtggactaatattactacttttctcaagttgtgatgagttatatgtctaggacatggtagctttttcatgctgtaattatgatggtggctcgacggagaataatgcaatggaaaatgctcgcgaaaggagctggagagggaaattccaccgacctggtcgagtgataaatcctgaggctaaccgaaggaatgggagatgccctttgacacctttggaggtcggaatgatgctgcgaggaatgggatttgacaacactacttccctttatgttgcatccggtaaaatatataacgctgaaaagtacatgactcctcttcgacggttgtttccatttctacaaacaaaacacgctctagttacacctgaggagcttgcacagttcaagggacattcatcaagacttgcagcactggactatactatctgtcttcatagcgaagtgtttgtgatgacacaaggaagcaatttccctcactttctgatggggcacagacgttatatgtatggaggacatgcaaagacaataaaaccagataagcggaagctagttcaactctttgacaatccaaatatcagatgggatcgattcaagcaccacatgcaggacatgcgtcggcacagtgagatgaaaggtttcgcattaaggaaaccacaggaatccatatacacccttcctatgcctgactgcatgtgtcagcaagctgaagcacgatcaagggacacggcaaggagctaggcatgttccacccttcttctaacttgtaagcaggcacattaagcaaaggaaaaataaatattggtttgagcgtagaagagaatatagagatttcaaattatatggcccttgatatgaatcccttcctcaa

SEQ ID NO: 28114 - DNA, 760 bp, Zea Mays
ttttgacttgttctccagaacgtggatacaattgtaaggtggtctgctgccaagggaattggtaggataactgcatgtttaacacctgcattgtcggaagatgtgctatcatcaatattgcaacttttttctcctggagagggtgatggctcctggcatggaggctgtttagccttggctgaacttgctcggagagggttattgttaccttctagctttcctgatgttgttcctgttataataaaggagaactgcacatcatattatattaagaagagaaaggggggaggcaaatagatccaggatacaacaaccatctcatggaggccaaaaacagagacaaaaaactattcataagaaaactataaaactaccacatcctgttattctcaagcggggcaaggagataggagatccctttatccctagcttattgccagagacgacgctcatctctagcctgagtaagagcaagggtgagatttggtgcaagtccgtcaaacacgcaccggttatggtagttctagataatccaagcgcccatgatgataagagacttaatccttgttgtgcttgcccgttaaccgcaactgaaacagacctccaccactccaagaagcttggagcatcaggctgagataaggactggagacgaacaaaacaaggccaatttgctgctgaaattagatattacaagggcttttgattctgtttcttggccttttttgattgaggtcatgaagaagctgggttttaggca

SEQ ID NO: 28115 - DNA, 77 bp, Zea Mays
tcggtaaagccgatcctacactctttaccaaaaccattgcaaaagacttgtttgtatgccaaatttatgttgatgat

SEQ ID NO: 28116 - DNA, 5067 bp, Zea Mays
ccctccaccaccatttaatccgcttctagcttgtttctctatctctctctctacccccatctctggcagcttggcttcgccattacttggcttgcaggagctggccgtggagttcccgtgaggtggagaccaagccatgactgactcgctcgaccctacccgcacccgaaagagacgcttcgattcctatgcataaataggaaaaaaggagaggaggaattcgagaaaatcaccgcctctcttcctttcttcatcgccctgcccttttctcttctcctctcctctccacctaccgaatcccgtcgctgggggtcctcgatctggtcgggacgtgcggtagattggtggtggcttcgtggcgctatcaatgctggtggatttgagcaggggcggtgggtgcgcggatagacgcctgagaaatccgggtgcccggggcagtgctgctccggaaatctgacctgccggcggagaagaattacactaacggccatgctgatggcccggtgaagcgcaaggtagccgcgatgccagcagcggcacctactactccaaggaggcacccgtcaccgaatgccggcggtcgggcgtcgtccccgacgccagctgggtcacaggcgaagaggtcccagtccaccgaacggcggccggtgactccgtcaaggccgtcttccggcggctcgcggccgagtactccgtccaggatctctgccccggcatcgccatcgtctgcgacttccagcccgtcctcattctctagctcgtcgacgccagtgggtgatgccgttccagaaacgcaaatcgctctgaggaggttgcctggtggccgggctcctgatgggctgtggccttcaatgcggagtctgtcttcttctttccagctcgaatcaaaggggaaaaagatttctagtagctcctctgcagatcaggccaagacgagggatgcagcacccgctgataggaagaggagcccattgagaggtagagctacccctgagcaatcggagaatccacatgccaaggtgattgatcatcatcgctggcctgctatgatggggggcagggtgtctgcaagcacaatgtccaagagcatggatctcactgataagatcagtaggtctgctcttccatcagttccgtcacgtggtgtttcaccgaagcgaacaacagtgtcctctgctgcaaataccttgtcaagaagtattgatcttgctgataaaattgatcggctggtctcttcgtcaatgtcatcacaaggggaatcaccaagaaagtcaccttgtaatggtgcagatgatgtgtccaaaaaggttggtgttcgtaaagatctcaaactctcatccttggcaatatcaagaagggtgtcaccagtaacaacagatgataaaattgatcggctggtctcttcgtcaatgtcatcacaagggggatcaccaagaaagtcaccttgtaacggtgcagatgatgtgtccaaaaaggtcggtgttcgtaaagatctcaaactctcatccttggcaatatcaagaagggtgtcaccaataacaacagctgcatcagatggcactagaaccttatcaggaagcatggatcttactgaaaaagataacagtacactctcgccagtttcatcacccagcatttcaccaagtgcatcattatcaagtgtgtctaatgccgcatcacagactactacaaagtcatccgagagattaattggacctgtttccaacctgtcctcatcgagaggactttcacctagaagaacaacttctggtggcattgttgatttaatgaaaagcattgatttccctgaaaaagataggagaccagcttcatcaagagggttttcgccaaggaggagactcgtgtctgatggtgttaatgatattgggaaaaatatggattttgctgaaaaggatagcagagtagtcagctcatcaattccatctcgaggggtttctccaaggagaagacttgcctctgatggtgttgatactatgtgcaggagctcggagttttctggaaaggataacaggccatccacctcatcttccacatcacgtggaatgtctccccgaagaaggcttgcttctgatggcataagtgctgtaaccaaaggcatggactttggtgataatgctaacagaccatcaacctctaaaggagtgtcacgagggatttcaccaagacttcaattagcctctgatggtgttggcaatgtatcaaaaggcacagatcttgctgatggactggacaggccatcaacctcatatgcaacaccgcgaggtatgtcaccacgacgcagggttgcatctgatgccagcaatgccacttcagaaaggatcaagttcaccaaagaggattctggaactgtgtcctcttcagttgcacctagaggggtctcaacattaagacaacttgcttctgatggtgttgaatctgtctcaaaaagtatggatcttgttgagaaagatactagacctactacctcatcagcttcatcacgagggctttcaccaagaaggcgactttcctcagatggtgtcaatgtgatttcaaagagcatggatcttgttgaaaacaataacaaacttgtcaccatgtcagctgcagctcgaggggtttcaccaagaagacggctcgcctcagatggtgtcaaagtgacatcaaagagcattgatcttgttgaaaacagtaacaaacccttaacagtgtcagctgcaacacgaggggcttcaccaagaagacggctcacctctgatggtctagcatttatatcaaagagcacaaatattactgaaaaaagtatcagaccttcaacaccgtcaatgtcatcacgagggatgtcaccaagaagacggctggcctctgatggtatcaatgctgtattggacacagaatttgctgacaaaaattgtagaccatcttcctcatcagctgctttacgaggggtttctcccagaagcaggtctgcctctaatgccatatcaacaggcatgactaatgctgaaaatgacagcagaccatccacaacatcaagtccgtcatgtcagactctgcagagcagcaggcttgaatctaatggtgttaacatcctatcaaaagatatggaaatctcatcaactgtatctggttgcacttcagacagtagacttgatggcgctggtgctctagtaaaaagcatagatgtcactgagaaacttactgtgtcaactgaagatggtggtggtgaagacgatcctggaagaatagattctagtgacgtagttactagtgcagtttcatcatcccttgcatctcaagaggtatcatcaagacatgttactgatgacgttaagaatgcgtcagagagtgttggtgcaacgcaaaaaggtaacagaccattatcagtgaaggttccatctcgagtagcttctccaagaagacgacttgcatccgatggcattgatactatatctaaaagcatggattttgctgagaaagataagaaacccatgacagtgtcagttccatcacgtggaatgtcaccaagaagaacagcaagatctgacagtgctgatataatgtcaaaaagtatggattttcctttacaagtgttttctacaagaagagtactaggacctgatggtgctaatgccatgtcaagaagcatggatctaactgataaaattagacagaaaatatcttcaactatgcaatcatccagagtctcaccaaggaaaatgcctcttgcttataacagaataaaaggccctgaaattttatcaggtgatgctgagagccctggttctgctgatggaaatgaaagtcaagaggagaatgccagttcaagtccagatgcaccttcaaatagttcagaaaaatctacacctccaaagcagctagctaggagatcaccttcgccatcacatattttaatatgcccttcatcatcatccaatgcttcatcgacaccatcatttgtctccaggagattaccaagcccatcaaggactagaccttcaacacctgtctcaccatgtagttctgccagatctgattcagcctcttcaattcttagctacattggtgatgctacaagagggaagaagagcccaactcacacggaagatgcccatcagttgcgcctcctgcataataggaacttacaatggtgttttaccacttcttatgttgatgaactgctgtcaattcagaagataagtgctgagactatgttgtatagtgtatgggatgctaactcaaggatgtgtgactctatggttataaaaaggaactatgtacaacagctaaggcaagaggtcaaattgggaattgtcttgaaggagcaaatggattaccttgatcactgggcagcgctgcaaacagagcattcttcttctttatccagcgcaactgaagctcttaaagcaagcacattgcgtcttccagtttcaggaggagctaaggccgatgtacttactgttaagaatgctgtcagttcagcagttgacattatgcaagcaatggggtcatccgtttgccatttgctatcaaagttacaggcttcacactctctggttacagaactttcagctgttgctgctaaagaaagtaccttactcaacgagtacagagaactcttggcaacagcagcagcactacaggtccaagagtcgagcctaaggacacagctcatacaagaaacagagtgaacaggttaaggtcctgtatttctaactaggaagatagaagtaaacaccattcgttagtttcagtgactgctgcatatgtgtacctttgatgtcgttttgtttttcctttgctcttccttttcccccccacttattagctagctcatatttctttacatttctactcccccccccccccctgttcttttctgttcgaacaacttacatggaagataagggaagcaacatggaaatggaatcatggatttactccatgacaaagctgccaatgtggtcttttattgcatcctagaccaatgagccaaaaactgaaagctttgttgtaagctgtaaatctgagcagttatgtgtccttcagtgtaatgcctttggatgt

SEQ ID NO: 28117 - DNA, 2189 bp, Zea Mays
cgcgtgcgtgatggtttttttcttgttagcacctctatttgctctcctcccgacgagtgtgattaacggaaagcactgtttgactagtccttgctagccctcctctctctctctctctcttacttatctactcgtttcctcttcctttccgtaaagattgcacacaaaaactattggatcttttcccctttcgatgtgctcatctcatgtgtggttctgtgactgttgagagagaggtgggcgaggcagccatacgaagttggtggtcggagccagatctgcttggatgcatagtgaaagggccggagatcggcacggcacctacctccggcggcgggcgacggctgcttcttctagatctggaaactaatgtttcttctccgatccagcaggtatcatctgaagaaagagaaagacaggttcttggaagccaaatcaagagttgatgatgccttcagaagaaaggaataccttgcattagtggattcttacatgaaggtaactaagatggaatgattttcccacaaagaaagagcacaaaataaattgaattctagaagttaattttgtacaatttaatttttctgcatgtaataatgattaacatgcatattttcctttggggggaggcaaaggacctgtttgttgaagttgatgtgttcttttagttgggtttgtttcttcaatgctgtgttcgtgaagatcaacaaggcttactattaacatgcttcgcagggttgagccatatgttgcacactggagatagatctacacagtgacaacatgtacctcaggagcacaagatatatatgcagatgtaatagcttgttcctgaccaattcctcgctgtattatgctgattgtgggagcacagtgttctgtagtggtcaggcgctaaagaacattgcgccaaccttattcatgaaagcatgccaagcccttacaaataatcgctggatgcacttttgttctccttacacacatgaggaagagataaaagaattcatttccctccggcaaggtatcaacagcactcaatgatctcgacgatactattttatggaggtggagttacagttcaagtagtgcatacaaaattcagttcacaacgaatttttgtaaaatcaaaatttctcctatatggaaagcgagaattgagccaaaatgtcgttttttcgtatggaccatgttgtataacataattttgactgcagacaacctacaaaagcgaggatggccttgcaatccaatttgttgtctttgcaacttatcacaagaaactatgcctcatttaggcaaagactgcccgtttttgtagagttgtatgattggtggaagagattaaggaatcgttgctgcaaggagtcaaagaagattttcgatggactcctcatctctttctggtggaatatatggttagaaagaaataacagaatctttcatagacttcaaagatctgctatccaggttatgcaattggtgaaagatcaaattgtgagttttagtgtatgcaattggtgaaagatcaaattgtgagttttagtgtatgttagattgagttagtgtatgtttttctctttttttgttttttcttttgctcagtcttcagtatctatttctcttctaatatattgatgaggcaagtcttttgccgcttcctttaaaaaaagagtaattctaatcttcatacactagttttcagtgtagcctttttcctatgtggttaactgtccatagattatgccatacctctcctaaactggacttcaacgatgtgaggtccaatcttattcatctcgagcggctagattttcatatcatagaagtgatgatttatctcaagtttgctcttactcatcttttgtttatttatattttttatttttggattcagagaaacgtcatattcacaactgcaactagtgcgtggtgatctggatgaaaacagtcaggggaaggcagaggtttttgtctaacatggagtttttttcagtgattttagatattcttacaagctgtaacacaatcaagcagataagatcctgctgatatatatgaattaagcttcttatctttttagttccagtagcaaagtacgtttacttgcagtttgttggagggacttgtgatggcttttgatattacttcatgagtcaattgctaattagcaattggctactatatataat

SEQ ID NO: 28118 - DNA, 2849 bp, Zea Mays
cgcaccaccaagcccctgcccccgcaaccccgctgcaccgcgcccgatctctgtcgtcgacaccgccgcctccggcgaggccctttccgctcttgaggtttccacaggttcattccctgctcaatcgggcgccccatttggctccctctgccccccacagacccgtagggttgcatttcaggaaacagcgtgtctcttttctggacttgggaatctgagaagatactgtgcagtttaatggcacacactgctgactatatgcgcatataatgatgcatgggctaactgtgcttctctggtctagtggctattgagctgtgctctatgggaggtattgctgaatgtggtgtgagcattgacactaaagcttcaccacgccgtgcagccatagagaaagctcaggaggagctcaggcaggaatatgatgtccgtgaagaacgaaggagagagcttgaatttcttgagaagggaggcaatcccttggatttcaaacttggccatgtagcttcccttagtgtacagtccacttctgtgacagaacagatagctgaacaaaatgtgataagtgaggccaaaggtagttctgcatttgctacgtcatctcatggagattctgttgaaagcaacgacaagccaggaaattcattgtgccgtgaaggcaatacagccgataatcttacgcttttggatggagatgccagcaacctgggtgtggataaaattgtgaaacatggaactaagagaactaattcagctcaagctgagcagttcctgcactgtgatggtcagaacaatgcaaaagaagaagattctgggttgttccgtcttggtccaaagagccaagcgtatgcacgacgtaggtcaaagcctatcagagaaaatgcatatagtctatctgttatgtacccaccaattcctccattaagttctcagcaaaaagatgtgacaggattaatcccagaaaccaagactgaggataatggtgtttcatccattggtgattcaaaaccgactagtcctaactctaaaaatatggtgacaaatgcatcattactgaatgataaggtggaaatggagacagaaaatgttcaagcaattcctgaaggcaatcaagcaccaaaaaacgagttatcaaacagcaacaatggtagtcctgctatggagatttcaccaaatagtgtgcctgataattctcgtcttactgtaagtgatcagatggctactgcatttgtttctgtggaatccccagatgctatttcaaaagtagctgcttcaaggatagtttgttctctcccatatatatccaatgaaatattgaaagaagcacaaactcttgagaaggcaggtaataacccatctatggtaagtgtggttgacgttcatgcatatggtatggataacaatggtgcagcaccttactctgctgtgaaaagtgctagtttgaatgaaaatgaagttgatccaattcatgcatatgctgccaaagctgttactgaacatccagaccaaaatgagaatcttgtaccagtgaatgcagatgaaatggctgatgaaggcttgaatgagatcctacctgatgacaaggatgacaagaaagattgtcaactggaagttagtagtgggcctgtcattttgaatgacagttctactcctgtctatcctgaatttagcaatttcttttatgcaaaagatggaacagaagtttctaacaatgcagtagattcaaaaaataacgcagaacagcatgcttcttctaatcagggaaaagggaacatggaggaatgtaaagattctgatggaaacaatgcaagtgaatcgagtgttgcccaaaagctagtgtctgttattgtgctccctgcttcagacacaggcgatgtgagtaactttgtagaaaatgatgttgagaaatctagcagagatcaggagaaggtagcaaagaaggaatatgaagattctgtcgtggcaaagaaggatcacgaagatgctatcctcagaagggcacggtatatagaggcaaatattaagagggctggtgaatggtctctctgcaatatttctctagagaagaagcagaagagccactgggattttgttctggaggagatggtctggatggcaaatgacttcacacaggagcgtttgtggaaaaatacagtcgcagcacagatgtcccattggatttcttctagaggtcgagcggcatttgaagaagcaagcattcagagaaagcagaaatctgttgctagagttctagccaatgcaaccgaatgagctagaggaaaataagcttggtggggtcaaaaccagaaaagcggatgaggagtgtttggagcaagaaaagtcccgtcagtctcctattcagagctttgcacttaggcttcttgagtataacattaatgcatctgaatttctgccattagccgaagcaccatcaactcctgacaggctaaatgattttggcattttgaaagtacctgatcaactttcagaagcaaatctcttttatggcgtagcacccggtgcaatgcaggcatacagggagtctatggagcgtctccttatttataataacaagatgccagctggtcattcaggtcctggaagtccatggtcaagttttgaggatcaggctcttgttgtccttgtccatgatatgggtgaaaactgggaattggttagcgatgcccttaacagcatcatccaattgaagtgcatatacagacggcctaatgagtgtaaggaacgccataaacttctcacggataaaagttgtggcgacggtgctgacagcgctgatgactcaggctcatctcaacactatccttctgcattgcctgggattccaaagg

SEQ ID NO: 28119 - DNA, 933 bp, Zea Mays
gcttgggccgcgctccctttgcttcctccaccaccaccttttgtcggcgacgtaggcaaaacaagataaacatcaaccccaaccccaacgactccaactccaagtcaaagagagcagcaagagcacgtgccggccgccgatcaaatccaccgagcaatcgcgcgcggccgccgaggtgccaaggcggcggcggtcggtcggtctgcgatatacgatggcggcgccttactacggaggtcctccggcggcgccggcccccgtggcggtggtgtccccgcagttctgtgcgccgtacgtggtgcccctgacggtgaccaagaaggccatcagcctctccgacggcgacttcaccgtcaccgacgccaacggcgccaccgtgctgcaggtcaagggcgccgtcttcagtatccgccaccgccgcgtcctcctcgacgccgccggccagcccatcctcaccatgctggagaaggtattcagcatgcacaacagatgggaggtgttcagaggggacagctcgaacgagagcgacctgctcttcaccgcgaagaaatcctcgatattccagctgaagacggagatggacatcttcctggcctccaacaccgcgcagcaggtgtgcgacttcaagatcaagggcagctacttcgagaggtcgtgcgccttctacctcggcaactccagcagcatgatcgcccagatgaaccgccagtttaccgtcaccaatgtgctgcttggaagggacacgtttggcgtcactgtgttcccgcacgttgactacgtgttcgtcgctgctcttgttgtgatactggatgagattcatagggaacggtccgactgaggaacataccacaccacaccaccaagcttctccaccgttgctcgaccatgctatgctatgtatcatcatcacagttatcggggatcttgcgtcag

SEQ ID NO: 28120 - DNA, 2814 bp, Zea Mays
cactttgtagaaattcgctcaatagcccggctgacgtcactaattcaccctctctttccggccgccgccacgggctctccatggaacggctcaaatcggcggtgccgcccgacctccggcgggccgtcggcgagggcacggccgccgatctagctaacaccacctctcgcctgttcgccttcttcgacagccttcctctcttccaccaggttatgcaagaactgaccgaccccgagcttgcgttgtgtcgcaaagacaaggtgaaggctgtagagttgaagggccacggcaacgcgtgcttctctaggagggagttcgggaaagctctcaggttctattcgcaggcattgcgccatgtcccaattaattcgggtggcatggatgtgaacttggtatcttcattatatgtcaatcgagcctccaccatgcataaattaggtctgttcgaagaatctctaagggactgtgacagggccataaccatttctcctaattattctaaggcttggtacaggaagggaatggtaaaaacagcgctcaagaattattcatctgcaatacatgatttagaggtggcattgagccaggaagtgacttcttcggggaagagtaacatagaacaagagctgaagttgattttagagaagcatgaaagtgtcaatgaagctgggacatcaaactgtgatagcaaggatagagatttgcctcttgcaggacaacctcataaaattgttatagagagtatttcaacaccaaacaaaggtagaggaatgatttctacagatgatatccccccagcttcgttgattcatgttgaggaccctcttgctgcgattatcatgaaatcttcccgtgaaacacactgccacttttgcttcagtgaaactccagccgatgttgtattctgtccttcatgtacaataccaatttattgttcaaaaaggtgccaggagcaatcagcaggtcatatttctcgtgatgaagatactaatcttggatattcaacgaatgttgcaaacctgagtataacttcgagttgcaagtctccaagatctaagctatttgctgaacataggcatgaatgtggaggtgcccactgggcagctgttttaccagctgatgtagttttagctggacgaataatagcacacagcatagtaaaaaggatgccgtctgggaagagctttgctttctctggcccaaatttggatctagttcaccattatgatcaacattctcctgccaacaagttggaatcacatatatatgcaattgtcctattgttatgcctccaaaatcattatagatcagaccttttgtggacagaagattctttatcacagctggttcttttgatatttcaaatcaaagtcaattcaattgctattgtctgtatgaggtcgatggacagaggcccagagcacacaataaatagaggtttttatgtagctgaaggtgcaaaaatgtgtagtgtggagcaggtcagggttgcacaagctctttatgtatctggtagcctgttcaatcactcatgtcagcccaatgtgcacgcatattttctttcacgtgcgttcgtgctgagaactactgaatttataaagtccgggagcccagttgaactgtcatatggtccacaggttggcgagatgcatatttcagagagacagaagtcacttcaagagaattactacttcagttgtcaatgttcaagttgttcagagctaaacctatcagaccttgttatgaattcattctgttgtccacaaagcaactgccttggtgccatatcggaatcaacttactacaggtccaaagagaatttcgtgaatgtttcccttggaggatcttatgtctgcaaactatcattgcccgatgtatcgaaggttgatatggatatggagaatgtcgccaaatctctcttgcaaaatagtggtgtcagtctgaacatagatcatggatgttgcatgagttgtagatcctgtattgatctgtcgtctgctctggctacatcacacagggaagaatctaccatcgataggttgaagaaacatacattcctagacaagactctcatcacagaggcattacaatctctaaaacaactcaagaagttgaggcacccatatagcaaggctctcgcgcaggccgaagacacaatcgcagaggcctttgcgaaggtcggagaccaagaactagcacgaaagcactgtgaagcatcaattcagatcctcgagaagctgtaccacccaaaacacatcatcattgctcacgagcttattaagcttgtttcgattctgctgtccctgggagatggggcaagcgccgcagccacattcgctcaagcagaggcaatattctctctttactacggatctcatgtggagaaggttttgacatacatgggtgccctgaagaaagctgtcattgacgtgtagcgtgctgacaatcctcacgcgggaatggccaacacggttctgcagaatcatctcaccttttgcgcttcttcgaggagttaatgtaggggaaaacccaaaaaatatttacaaagcagtgtggtattgcttgtagtttagtttgttctagaaaacacaaactagctcaaccaaacttcctggctaatgagtttggtggatgttctgagtgcctatgttaatgacttgtttcataaatttttttcgtatatactcgttgccttacaaactcggtcggtagaggaaagatcgctcccacggtattatattaagaagaagctcaattgaagcctcaaccaagaaaggtcatgaaagctgtcttcctgcaacatgagggtccgtc

SEQ ID NO: 28121 - DNA, 2811 bp, Zea Mays
tctgaacgaaaggctgccgtatggaggaggggaacagctgaaatttctccaaaaataccaatccgccttccatgttctcgtcgctgcctccgtctgacggctcgaagctccctccagttccgatctaaacccgccgaaaccctaatccccatggctgccgccatgggcaaccccatcctgaccctccccgcaccggagggcaacggcaccgggggcggcgacgccgaccagcagctgcagcaggcgccgcctaagccgcctcctcccggcgcgaagacggaccccccggcgacggtggccacccacacgcgcaccatcggcatcatccaccctccgcccgacatccgcgtcatcatcgagaagacggctaccttcgtcgccaagaacgggcccgagttcgagcgccgcatcatctccctcaaccagggcaacgccaaattcaacttcctgcagccctcggatccctaccacgcctactaccagcaccgcgtttccgagatagccgctgcgccgcccggcgcggacggcccctcgggcgccgatactggcgcggctcccgacgaatcgccagcgtcggccccggccgacggcgccgccgccgcacccgtagatggcgctgctgcggacgcaaaggccgatcactccgcgcccttccgcgtggggccgccgcccaaggtgctggtgccacccaaggctgagctgtacacggtgcggctgcccgagggtatcacaggggaggagctggacatcatcaagctgaccgcccaatttgtggcgcggaacgggaagaacttcctgacgagcctggcgcaacgcgagagcaacaacatgcagttccacttcatccgacccacgcacagcatgttccccttctttacggccctcacagatgcgtactccagggtgctgaggccggcagagggggtgcctgcattgctaaaagagctgagggaggggtcaaaggacctgactacagtgttggagagatgcttgaaccggttagagtgggatcggtcgcaggagcaggcaaggcagcaggcagaggatgaggttgagcaggaacggatgcagatgtcaatgattgactggcatgattttgttgttgtggagaccattgaatttgcagatgatgagtatgaggggcttcctgtgccacttacactggaggagttgaagcgccagaagaggatggagaacttgggagaggaggaagcgatggatttgactgaaccttctaaggaggttgagatggaaatggatgaagaggagatgcaacttgttgaggaaggaatgcgggcagcacggcttgaggagaatgatggagcagcacaagttagcttgccgggtgatgacgaggcacctatgaggattgtcaagaactacaagaggcctgaggagaggattccggcagagagagacccaactaagtttgttgtctcgccaataactggggaactcattccgatcagcgagatggaggaacacatgcgcatctcactcattgaccctaagtacaaggagcagaaagagaggatgttagccaagatcaaggagactacccttgcacctgatgatgaaatatcacggaacattgttggccttgctcgcactcgccctgatatttttggaaccactgaggaggaggtgtctaacgccgtcaaggcagaaattgagaagaaaaaggatgaacagccaaagcaggttatttgggatggtcattctggtagcattggacgcactgctactcatgcattatctcagcctcagggtggtgaggaacagtttgatgctacgaatgttgatgggaggcctgttcctggtccagctccacttgtccgacctggcatgccgttgcctcgacctcctcagccacttcctcttgttaatgttcctcgttttatcgctccaccagcaccatactctgttccacccccaggttctcatatgcctggagttccacacatgatgcctcacatgcatctgcctccacagcagatacctggccagccgccgatggttaggatgccaggtcaaatggttcatatgccaaccagcattcctccgcctcctggccaaactcagtttatgcctggtccaccacgcacatttgctatgcccccatcatcgcacatgccacccatgatcaatcccattggaatccctcagcctccagcaccgcctctgcctccacagcctcctgctgaagagcaaccacctccacccgatgaaccagaacctaagaggcagagaacagatgatgcttctctcatcccagcagagcagtaccttgttcagcatccgggtcctgctagcatctctgtatctgtacccaaccttgatgaagggaacttgcgaggccaaattttgcagattcctgtccaatcactgtcagacacagttggtagtctgaaggagcaaattgctggagagttgcaactccctgctaataagcagaagttgagtgtgaggactagtttcctcaaagacaaccttactcttgcttactacaatgtgggtcctggagtggtgatcaatctaacactgagggagcgtggtgggagaaagaaatgagtcttttggttctcagttggcagtttaatgcttacaactataattcagcagctatcatggagaaccaggcatccattgcgtcacagctgaagtaggagttttttttgtatacgctgaaatatctgaagtagggatatgaaatattttttgtttgttatgtacattatctggttgtttccttgtgttattgaactgatctatcctgcaaaaactgttgtacgctaaccaggttttgttgta

SEQ ID NO: 28122 - DNA, 162 bp, Zea Mays
tcggcctcagcggtggatagggcaacaaaggtttgtttcttggagttccacgacaccagggaccttcctaagaattggcacgtccccgatgtactctttctatcgaccttacatccagcatagtcggaatcggagtatccaatcaagtcaaaggtagacccc

SEQ ID NO: 28123 - DNA, 1503 bp, Zea Mays
cctcccctctactgtacctctgatccttacttcctttcccggcgcctgatcgtacaaagctgcgcgcttgctcgagtttgaagaaaaacttagccttttcggtttccttggccgttcggatctggcttccccgtcggcgccggcgtgcagagtttgcacggcggatccgtttcggtgcgggtgtagagggcgtgtgcgagggccgaggttcaacttcactgtgaatacgctgacgctacgagaagtcatcacggaaggggtctcgaagcaaggtgtgccatttgggcggagttcgcgtgagccaagttaccgcgtcgaattccatcctgttgattcaccattccatccagagaatggtcaagaatcggtaccaatggctagtcatgatgggaaacgttataaatgctttctaccagttgaagaaactaaaaccatgaagtcaatgcttccgcaaaatgcaactaatgttataatagaaagtgaaaggagaattaagccaaaggagccagatgagttacttgaggttctcaaggaccagtgcttctacaggcatgaaggttggtggtcgtatgaattctgttatcatgggaaaatcagacaggtccatgtagacgacgataaggttatccaagaatttgttctaggcgaattcgatgacgacgcgactgctgcataccatgaaaatatcacttctgagttagttgacgatgaccatcatgtgaaagatatatctcagaggtatcatgttcacttgtatacaaatgggactgtatgcgatctcacagatattccgcgggagacagaggttagatttgtctgctcggagcctactgtactgattagttcagtcaaggagatctcttcctgcagatatgttgtaacgattcaaagtcccatgctttgcaaaaacccgttattccaggaagaaaaacgaaccctctccatccactgcaatgagttgcctgctagagcggaatccagcgcggaggatgactcgcttccaaaagaagctcagatttccatcatccccgatcaggatgagctacatgatttcccagcctatgctacttgatttgcctccaataattatgtttgatgtagaaaaaaaaacaccattttggaggcgcaggggcaactgagcaacactatgtattaactatctcgtagatactacagcagaggctccttgtaaagcaggttgagacgatcattctgcagttcttattatataggatgattacgaaggtaacatgtttgggacagtaacatttgcttgaaatgtatatagtctacaacaagaataatgccagcattcttgaaatgtaggtgtgcgagcacttttacacgaagtaatattgctctggtgtgacgaacgatctgttgtcggttgagatgaaaaggcgttcgccttctattaagaatgtaaatggtacaaaaggatgtaaatggtacggatattatctgttcgtatttgaatttaatccggtttgagatgtatccgag

SEQ ID NO: 28124 - DNA, 1278 bp, Zea Mays
gcgcagggtcaggagaggcagaggcctcagagatacgccgggacgcaacacgtcgtgccgcgcggagggttttgccgagattttccctcaaaagggtattgccacccgcaccgagaaaagaaaacgatacacaccgcgataaaaacataccctctccatcctctcctcttcttcctcctcccgtagcggcttcccccgatttgcacccgggcgcggccccatccccacctggccgccgcgcgccgccatggacggcctgcacggtacggacgcatgcttctcccccgcgagggctatctcgccgcaggtgaggccccccgggccgccggacgtaggcagtcagtacctggcggagctgctgcaggagcaccagaagctggggcccttcatgcaggtgctcccaatctgcagcaggctgctgaatcaaggtgttccgcaaggagctatgggttggcaaggacccccacagagcccctcttcttatattgtcaagaagattttgcggttggaagtaccgacagaagcataccctaatttcaattttatcggccgtcttcttggaccaaggggaaactctttaaagaggattgaagcctccacaggctgtcgtgttttcatcagagggaaaggctcaattaaagattctggcaaggaggaacaactcaagggaagacctggctatgaacacttgagtgaacccctccatatcttgattgaagctgagttacctgctaatgtgattgatgcaagacttgcaaaggcacaagagatccttgaagagctgttgaaaccagtggacgaatcacaagactactacaagagacagcaactgcgagaacttgcaatgctaaattcgccactccgagaggagagtccacatccaggtggtgctcctcctagtcccttcagtaacggcggcatgaaaagagtgaaacaatgacaccgccgaggctcgttcctccatcttgactccccagcaaccccaatgcagtccataccttcacaccctatttttcaatgagcaagctttcatgacggtgttggtagtgtgtgacattcttcactgtactagcaggtgaattttgatctcccatcccatgttacattaaccttgagtgacagatgactatgcgtagtgtatcctctatggcagtataactagaacatttgatttatttgttactggtaatgctgagatatagtactgtgcagattctgagttacggtgaactagtgtgccggtatttatctcaattttgtttgcttttcaattttaac

SEQ ID NO: 28125 - DNA, 1420 bp, Zea Mays
ctgttatgtgcggcggctagatctgcttgtcgctggtgcagtaggagtttctcgctcggttccgatcctgagaacccgaccgcgcgggtatctgtattccttgatcaacatgtcgcgggaggagaatgtttatatggccaagctggctgagcaagcagaacggtacgaggaaatggttgaatacatggagaaggtggctaagaccacagatgtgcaagagctcactgttgaggagcgtaaccttctatctgttgcctacaagaatgtgattgcggccccccgtgcctcatggcgcattatctcctccatcgagcagaaagaggagtcccgtaagaatgaggaacatgttgcacagatcaaggaataccgtggcaagattgaggctgaattgagcaacatttgtgatggtatcctaaagctgcttgacacgcaccttgtgccttcctccactgccacagagtcgaaggtgttttacctcaagatgaagggtgattatcacaggtaccttgctgagtttaagactggtgctgagaggaaggaatctgcagagagcacaatggtagcttataaggcagctcaggatattgcattggctgaactgccacctattcatcccataaggcttggacttgcacttaacttctcagttttctattacgagattcagaactctccagacaaagcttgcaatcttgccaaggaggcgtttgatgaagctatttctcagttggacatgcttggtgaggattcctacaaagatagcaacttgattatgcagctcctgagggacaacttgaccctctggacggaggacggcattgaggagggcttagaatcctctaagggcgatgctggtgagggtcagtagcctggtaaacttagattgatggttcgacgtgtttctcaagcacatcgtgttggacgcccagtgctgacaaaaggcttttgctgctccatgcattccaagcttctgccccctcgttcgcaccctctttatgttgttggctggtagtggtcagatttagtcccattggtttagttggccctgggtccatctgaactgatgtattgttactgctatggaagtcattcctttagttttgctctggcagtggattgctgttgggtcgtgttttcagtctttattggttccgatcggacgctgttgcggcaaaccacccctgtagatactcttcacatgctgaagaaaactaccagcagccgtttagcctgaataattgctaaatgataggttaccgttgaggctgattggtttttatttttttttaccctgtgacatcaagttcttgggtaactttttttaccgttgaggctcaaacaaattgttaagtgggagaattgtgaagtgggagtggtaatggatcatgatctaaatgattcttcacaattcattgaaacc

SEQ ID NO: 28126 - DNA, 1086 bp, Zea Mays
cgcaaaactggtcaattcttcattaaaacatcgtgattacagaaggtgtaatgaaaagatatggttttggtgggatgcctgcatcacatggaacatctttggcgcatcgcagtggtggctctactggtcaaagagatgctcctggaagggttttcaaaaacagaaaaatgcctggacgcatgggtggtgtgcaacgcacagtgaagaatgtatgggtctatcaaatagacccagccaggaacttactgtatctgaagggccaggttactttatttctgatgtcacagcagattttgttgaagcatagaagttgtgttctatgtatctttcgttgccctttttgcaggttcctggtcctcaaggtagctttattttcgttaaggattctatatataagaaacctgacacggctttgctcccatttcctacatacttcacgcgtgaaggtgagcctgaagacttggagcccctgattgctgatcttggtgatgttgacccattcatggcagccgattaagacaatgcacaaagttggttaattcctttttgtgttctaagcactccttgagctcgtccattccacgagattgtcaaactctcgatggatgtgagcagttcctgaatcacaagctttatccggttactggccagcctgatcaatgttgttccatgtacattacctgagctcaaacgtcatctattacgactcagggaatatatcataataacataaggccagttttagtgggtgtgtttgatgtgtttcatcccaatggttagattccctttgattttgtttctctctttgttcctctgttttcagttcaattgagtatatatataggcagtagggacccagtctcctgtttcatcaaagaaaactgtgcaaagggagtgcttcagtgatcagccattcacccaaagttactacctatttggagcaaagggttgcattccttttttttagcagaacgatcctcaagctaaaagccgctgtacaaatattaaaccagaatcctcccattgatacagaccaggcgctcagtatgtcgagcaactgttccatgtacaaaaactagtttgatt

SEQ ID NO: 28127 - DNA, 545 bp, Zea Mays
gcctattgaattcagcctggaagctgctctgggagttctgccaatcaggcacatcatagaatcagcataaataaggcacaccctttttttgggagattctgcacttgcctaactaaatgatcctcacgatggaataaaattcacagcttcattggtccctcttcctccaaggccccgaagatctgcgcgacgatcactattctccgtgctactcgggcggctatgaacatcgagttcagcaaggacatactccttgacaagctcgctaagctcagcaacatgcagatgtagcaatgcatcgagaggaggctcaacttttgaatctattgaagcgccatgatcaagaatacaatgttgatgagatcagcatgaatgacaagctcaccaactgtggccatcagataactattatgtgcatatatgtgaatatacttgtacgcttgaggcgtgtgctcattcattctttgacgaattacgagaatcacatgcaagactccctaacggacgcccatttcctccactattcaactttaagcaggaagtaa

SEQ ID NO: 28128 - DNA, 3355 bp, Zea Mays
ccggacccctccaattattgcacgacccaacatcggtgctgatcttcgtccggctgatcgcgttcacgctgttcgtaatctggcgcatctcgcaccgcaacccggacgcgctgtggctgtgggtgacgtcgatcgcgggcgagttctggttcggcttctcgtggctgctggaccagctgccgaagctgaacccgatcaaccgcgtgccggacctggcggcgctgcggcagcggttcgaccgcgcgggcgggggcgccggcggagggacgtcgctgctgccggggctggacgtgttcgtgacgacggcggacccgttcaaggagccgatcctgagcacggccaactccgtgctgtccatcctggccgccgactaccccgtggagcgcaacacgtgctacctctccgacgactccgggatgctgctcacctacgaggccatggcggaggccgccaagttcgccaccgtctgggtgcccttctgccgcaagcacggcatcgagccgcgcggccccgagagctacttcgacctcaagtcccacccttacatgggccgctcccaggaggacttcgtcaacgaccgccgccgcgtgcgcaaggactacgacgagttcaaggcgcgcatcaacggcctcgaccacgacatcaagcagaggtccgacgcgtacaacgccgccagggggctcaaggacggcgagcccagggcaacctggatggccgacggcacccagtgggagggcacatgggttgagccctccgagaaccaccgcaagggagaccacgccggcatcgtactggtgcttctgaaccacccgagccacagccgtcagctcggcccgccggcgagcgcggacaacccgctggacttgagcatggtggacgtgcggctcccgatgctggtgtacgtgtcccgcgagaagcggcccgggcacaaccaccagaagaaggccggcgccatgaacgcgctgacccggtgctccgcggtgctgtccaactcgcccttcatcctcaacctggactgcgaccactacatcaacaactcgcaggcgctgcgcgcgggcatctgcttcatgctcggccgcgacagcgacacggtggccttcgtgcagttcccgcagcgcttcgagggcgtggaccccacggacctgtacgccaaccacaaccgcatcttcttcgacggcacgctcagggcgctggacggcatgcagggccccatctacgtgggcacgggctgcctgttccgccgcatcacgctctacggcttcgacccgccgcggatcaacgtgggcgggccgtgcttcccggcgctgggcggcatgttcgccaaggccaagtacgagaagcccgggctggagctcaccaccaccaaggccgccgtggccaagggcaagcacggcttcctgcccatgcccaagaagtcgtacggcaagtcggacgcgttcgcggacaccatcccgatggcgtcgcacccgtcgccgttcgcggccgcctcggccgcctccgtcgtggcggacgaggcgaccatcgccgaggccgtggcggtgtgcgcggcggcgtacgagaagaagaccgggtggggcagcgacatcgggtgggtgtacggcacggtgacggaggacgtggtgacggggtaccggatgcacatcaaggggtggcggtcccgctactgctccatctacccgcacgccttcatcggcaccgcccccatcaacctgacggagcggctgttccaggtgctccgctggtcgacgggttccctggagatcttcttctcccggaacaacccgctgttcgggagcacgttcctgcacccgctgcagcgcgtggcgtacatcaacatcacgacgtacccgttcacggccatcttcctcatcttctacacgacggtgccggcgctgtcgttcgtgacggggcacttcatcgtgcagcggcccaccaccatgttctacgtgtacctggccatcgtgctgggcacgctgctgatcctggccgtcctggaggtgaagtgggcgggcgtgacggtgttcgagtggttcaggaacgggcagttctggatgacggccagctgctccgcgtacctggccgcggtgtgccaggtgctggtgaaggtggtgttcaggcgggacatctcgttcaagctgacgtcgaagcagcccgcgggggacgagaagaaggacccctacgcagacctgtacgtggtgcgctggacctggctcatggtgacgcccatcatcatcatcctcgtcaacatcatcggctccgccgtggccttcgccaaggtgctggacggcgagtggacgcactggctcaaggtggccggcggcgtcttcttcaacttctgggtgctcttccacctctaccctttcgccaagggcatcctggggaggcacggcaagacccccgtggtggtgctcgtctggtgggccttcaccttcgtcatcaccgccgtgctgtacatcaacatcccccacatccacgggccaggcggcaagcacggcggcgcgatcggaaggcacggcggcgacgcacaccaccatggcaagaagttcgacggctactacctctggccgtgaagcgccgagcagccagcatcgtcatgcatgcacatataccgcctgccctgatggtgacgatggtgagccgccaaggtgaagactgaagagtacgttcccgttcatccatccatcgtctccttagtactgctgcccggtgattagtcgatgaagagtgaaggtgaaggctacccacacacacacatttggtcgacgtacccgccaaaatttgaattttttttcttcccccttcttccttctcattcttttttcttttagttttgtccagaaatcgaaaggtgtgttgatttgatttagtttttttaattaccgtgccccgtggtaattaattatgtacgtacttatatatatatacattacgccgaagaggaaggagcactttgtataagagaggaatggggaacgtacttatgggtggggggccggggtgtcagcgtctgcctgtctgtactgtacatggcttagaggagtcacatgcagagagggagggccctggctttggggtggtattcttttggtacatggatcaagaataaattgaatttcattcttgttgtttggaaaagaggtgtacaccctcctccctcctggactctggttcctgtggagagtatgtatctttattattactgatgtaccacctgtgtgttgtcggtactgtaattggatagtaagtactacactgatctgctggtctaatcaatgttgttgttttatatggataataataatgattagtaagtcaatggtgaacatgagcttgctgtccattactccattgcgtg

SEQ ID NO: 28129 - DNA, 1091 bp, Zea Mays
aataagtgttggactgctgatagacttagaaggagagggttgcatcaccctcttgtctgtgttttatgtgaccaagaacaagaaacagttcagcatcttttgtgcacttgcagttttgccagacagttttggcatgatatcctattgccccggagacaaggggatctcacccctgctgctgatgaaatatcttttgctgaatggtggaaaaaggtgcataagagcaagaggaaaggcttcaatagcctcataattttgggggcgtggtgcttgtggcttcttcgaaacaaagctgtttttgatggagcttgcagagttagctaattctgagcttcggatgtctgtatggacggatgatgtctacagctttatgcgctcgcaaaagaggcgtcgaattcaaagttctgacatttctcaagattttgatgcaatgagaaagcagctagtatcagatgctgcaagagtatgtaggtcaaaagttccggagtcgctgatggaaaatcttattaaacgcctgagatcatactttgaggacaaatatccaccaaaagcgtagtttttcatgcagcagttctttagaagctacttaggtgtcaattggatcttggtggtggtcaactccctaactcctcgcgcggcttaattttgaggacatttttgtattctttgctgagacagagacgaggtgttctaaattgcatgtacaaatatacttttcgttgttatccctgatgttataggtaccacaccaccatccccaccacttttctgtagaatgtagatccctttttatcctggcagattaaagcatgagtttatggtgtttttgacacgtatttttgccccgaccagacccagttttagtcaatgtttttcttttcattcttttttgtcctgattttggtttctgtctggccttgctcagcatggccttcttgtaaatatctttgctttcttcctatataatgatacgcagtgctcttgcgggatcgaaaaaaaatgttttgttatgggggttgattcaataacaacattttttagtttttggagcgtaatctccggaagcaaattgacttgacagtatatttatt

SEQ ID NO: 28130 - DNA, 1866 bp, Zea Mays
cactccttccccttcccttcccttcccttcagggaccaggccatcagttcttcacgagctgggaagagctcgtgagccgtgcattgaaggcaatggccgctgttcgtagatgctgcctgctggccgcggtgctgctgtggtcggcgctcgcttcagcggccacggccgcgccggcgcctgtggtggccgggccggtgtccagggtggaggacgccaccatgttccggatatactacggtcagagcttcaaggtcatcaagaactccggcgatggcaagagctaccttctcatgcagaacacgtccaagatggcatccaagacgaagtactgcacggggaggattaagtcgttcgtcatccccctcgccagcttctccgtcgacaccacgacctctccagtgtcattctttgagctgcttggagtgctagagagcttgaaaggaataacatcgaaccaagtcgcttctcagtgcgtgctccagtcatatacaagtggaaatgcccagcttgtgaatagaactgatgtgcagacactctcgcagtttactgcgcatttcataagcgatacagatgaagacagaggttgcaactttgcagcatatgtacccttagaagagggcacaccattgcagatggctgagtggatcaagtacctgggaactttcacaaactctgaaaacagggctaatgctgtctacgatgcagtaaagacaaactacctgtgcttaagcaaagtagctgcaaaccttggcacaagattcaagcctgtagtagcgtggattgaattcacacagggaatgtggacatttgttaaagaaagttacatcttacagtatgtcacagatgcaggagcagaaattgttgatgcaactattacggataagagatttaatagttcagatccagaggatatggataacttccatgctattctgtgtgtgagtatcaatcactcagaatgtaatattacaactgtaatgttagttgacgagctcactgttgcatgtgagtgtgtgacgtacaaaagacacatcctcttttggccataaaagggattaatgctgacacaattaataattgaaataaactggactggttgtatcaaatgaacaatgcctgcaaaacaccaaatggtctattacttgacacatttttcaaatgactctgcacttagtaacagttaactaagcttggttcacgaatattacagacagtggacgtggtcatagatcagacatatgctttggagcctgcagagtacaaactatccacctttttggagaatattaatgttagccacgactcctgttacagttttgtatcaaatcgcagcatatggagatttgacaaaaggataggagcttctgggacacttgattggtccgatggagctatctcacagcctcagttggttcttggagatctcatagaaattttcttcccaacggggaactacataacaatttacttcaggaatcttgcaaaggatgaaggggtcacagagattggtcctgaaatgtgcactaggagcatatccacacccatggatcctataatcctgtcatgtgaatgatgaacccagatgaacacgaagagttgtcaagctactgtactaacagacagtggcaactagttgacagaagcatttaagttactgacaaactgatctggacagaagcatttgcaacaaagattagattacacaatctagaaaaatactttctttcaaatattgagcagcaactgctgtttggtcagttgatcaataagtgattacaaacctcggtgtatccatgttaaaaggaatttgatgtaattatccaagagaccatcttatgaaattcaaacgactgttttcaatatgat

SEQ ID NO: 28131 - DNA, 208 bp, Zea Mays
agatcagtttgatgagccgaacgatgagtggctgaactgtattgaggcaactagtgacgagttgcttggggcctatacaagggacgaagatgatgccatgaccttagcattcggaggacgaggcaagaaaagattaaacagagttttcgatgtaattggttttgtatatcccgactattgctatccctcgcgaaagcagggaaagaaa

SEQ ID NO: 28132 - DNA, 2579 bp, Zea Mays
aaaaaatactgttggattctgcttcaggctcagccgcccaacgccccaaccctaccctgccttttgttcttccgttccatcgccaccagcctgcgcggaaccccccaccctcacgactgggccggccgtcgctaacgccttcggtgccccttcgccggcgacgagcaccaccagtcatcatgtcatcatatcctgttctaaacaaccgaccaatcgatcagtggagagttactgatctgaaggatgagctccgtaaaaggaagcttcctgttaaaggtttgaaagaggaactcgtcaagagactctctgactccattcagagtgaaagagaagctgacgaagctgatgaggatgtgggagtgaatgtggatgatcagttgcctgatgccaatgctattgaggaaaatacagttactgttacagaagttcatcaggaaactgtggttgatgtcactcatcaagttgaagttcctacaaccgaagttggtcaagaatccataatttctcccactagaggcccccccagtgttgatgttgaagaggcctcaacaaccaaaggaaaagtacctgaatcagttgctcgaggaaatttgacatttgaagaagtgcaagtgcatactaaaagtactaatgagcctcttcatgagaagaccacagatgttgacaccaatgatgcagtcgatgtgaattcagacttgatccctgctgaagtcaagtttggtgctacagaagcaagcaaaattgaagaacaggattttcccccagcgcctgtagatgacttaacttcagattctactggtcctttgggtactgatgttgtcacagctgcaacttcagttagcgacgaaggggagaaactggcacccaaggatgcttcgggtaacaaggtgtcaatgcatgatgaagagcagaataattctgataccatgaacgaggactgcaagcccatcatatcacaatcaaataatcaggtacccgagaactagagattcagccgaagatggtcgaaccatcatccggcattactccattaggtggagatttgcagccattggatgatgacaaagagctggttaagaaccagacatctttggaagacatagattccacagataatgtggactcatacaagaaagatagtcctgaaggtggatctccagagaaattaaatctagacaggagttcaggtgatgaatcaatggaggaggatactgtggaaattaaacaagatgagtccaatatgaaatctgatgatctcggaggaaagaatgagtttaactcagaagatgtgaaagaggtgatcctccctgattctgttgttgaggcttccaaggaggctatggctgaagaaaagtcagcagcttcaacagaaaagaggaaacttgaagctgaagaaggtgttgcaagcactgaaccaatcaagcgacaacgtcggtggactgcagatattgccaaagtttcagggagacaagcattgagtcaaactggtcctgaaactcctaaggaaagttttcagcctgctttcaaacgatcttttgggaggtctgattcaacagccagtgtagattctcctaaggagcggattgtaccaccttccgagaaacctcccacaacttctttgagaattgaccgatttgtacgcccatttaccctgaaagctgtgcaggagtttcttggtaaaactggatctgtacaagacttctggatggaccatatcaagactcattgctatgttacattttcttcggtggatgaagctgtggctactagggatgctgtttacaacctacagtggcccccaaacaatggcaataagttggttgccgagtttgttgatcctcaggaagtgaagctcaaggtcgaccctcctcccccgccagctgctcctgttagcccagctgctgccacaagggcacctcctgttcaacatactcagacaaatcaaagtgtgccacgccaggctgctgcaccaaaggaggaactgccacctccacctccccctccccttgctaagccccctatggctgacctgacgcctttaggaagagagaggcttccacccactccaaaaaagccggagcctcctgtcgtgacacttgacgatctctttaagaagacacagtcctctccgaggatctattatcttcctttatcagaagaggaggtggcagccaagctcgccgcacagggcaaaggaaaaaagggataggaggtgttagcttccattttcggctagcttggagtttgttgcggaacatggcgtgcggtggtcacagcagctgacacgtgctactgctgtggcgaaagagttgtagccttgtagggctgttctgtggaaaaaggacactagtgtaggagcagcagcttgtatttcctaatgagattgttagttttgattgggtctccgagtagagtgtgtgctgaagttatttgatctacatgaagtgttgaggtacttagtttaatttatgctgccaggtactgtaaaactgaaagatactggttctagttttgagtctatggagaatactgttacaccgtctcttattttagtcttcgccttggttgctgaccgtgaa

SEQ ID NO: 28133 - DNA, 2377 bp, Zea Mays
gcaatcctagtcgggggccatgtttgctccaccgttgccgcttggcccggcccggcggatgcagattgtgtggtgcgaggcccacacgtcagtcgcgtagccgctcagggtccacccggtggccggtgcggtgccgactgctcctcgcctgtcgcctcgcacaccggatctcgtcgccgccctcgcttctgtagtttgttcctcgcgagatctcgtgcgccgtccgtcctaccacgctgccctctgccgccaccgccaccgccaccgccaccatcaccacctgcgccggcgctcctctaggacgcagttcgcctccgaccccgactccagattttacatgcttctctagtagtccattggagtaattaacatcgattacacggtcatggaagagcaccaagtcaagccatcggatctgccacccactagtttgcacaaccaggattcagccgcaactcctgttaccagtgctgaccctgctcgtcctgctgcttcaaatgattctcccagtcaggttgccagtgcagctcctgctgctgtttctgcacctaccgctgctcctgcagaagatgctgcagggcgtgaggcgtcagcatctgtgttctctgcgtctggtttatcctcctgggctaagaacctaaaaattcctcagccttcaccaggtcaagaatcacctacaggaaagaatacctttgcccgtttaacaagtggccttggactgcgtttgtctccaaaagcggcacagcaagatgagggtgctgaaggaagcacctccccaacaacaggacagcctggtgtttttggttctttaacgaaaggcattgtggattcctctaagaatgctgtaaaggcagtgcaagtcaaggctcgccacatggtctcacagaataaaagacgataccaggaggatatagaaaatgtggtggttgtccattgcaaagctggtaaggcaaggacaggattgatgatctcgagtcttctactatttctaaagttctttcctactgctgaggagtccattgaatactataaccagaaaagatgtgtagatggaaaagggctgattctaccaagtcagattagatatgtgaagtattttgagcgcatcttaacttacttcaatggtgaaaatcagccacccaggaggtgtatgcttagggggtttcgtcttcatagatgcccctattggattaggccatcaattacagtctctaaccacaatggtgttcttttttctacaaagaagcatccaagaacaaaagaactaatgccagaagatttctggtttagtgcaccaaagaaggggattatggtttttgcattgccgggagaacctggcttagccgaggtagctggtgatttcaagatccagtttcatgatcgacagggagatttttactgctggctaaacacaacaatgatggagaacagggtaaccttgaacccaactgatcttgatgattttgacaagagaaaactgccctcacctggattccagattgaggttgtcctggtagattacgatggctcgcaaccagcaaaaccaaaaccaggcgctggacctgctgctgataaatctcatgctgattcctcggctagcacggttgcaaaagaaaatagtgctgcacctgaagaatccaacaagggaactggaagcaataatgatagagatgaagtcttctctgacagcgacggggaggatggatcttctaacggaaggaaggagaagactgccggcggtggtcaaagcagtgtaaatgctgctaaaccatcccagacaggcaacatggaggaggcggcggcatctgctgctgctagcagactggacaaagtggctataagcagcgaacagggaaccacaaaggcacctgatggtacatctctcaaaactgaagtcagcagcaaggccagctccaccacagcaccacctcctccagctgctgactcttccagcatgagcgaattcaaggcgattgccgcagatgcctcggtgttctcgttcggagatgaagatgattatgaaagtgagtaatgattctatgggtgggtacggtgttgagtttccgctgtacagtttggtgcttctaggaccccccatcatagaatgccaaagtccagagatgttaattcattcttgcatttcgtctccactgtagcagtgtcatcggtctgatgttgtacccagatgatgaaacttgttgtaactcaaccaggtcttgaacctctcctgtttgtttacagaaatgccttgtacacgaactcacttaaacagcgcaactactttttattattgatagttaaaagtgtgggtaatgtgtgtgcagccttggaaattaacaacggaaactaacactttggttgttttcggataaaaaaa

SEQ ID NO: 28134 - DNA, 372 bp, Zea Mays
ggcttagaaaccaatacaaagatgatgcaaatggtcttccttcgagcttttggacggttcttcaggacatatcagaagggatgcaggtaatgttctaaagacaatgtcattttttagttatttgtggcttgatgaatacatgttgaaatttactttcttcatttgcaggatccggtaatgtgatattggtgcaaggaagttatttcagactttgtgagcgtgttgcgtgtatttggtgtactgccatgtgtcatcttatttatgtaccctttttggaattgtaatcttaaattcttagtgttcacttgtctattggagacttgtcacttgaagtatggactatgaacaaaacttgggtttggaactgtaatc

SEQ ID NO: 28135 - DNA, 2250 bp, Zea Mays
acatccatggatacgttaaatgaggatcccgattctcagcaccgctgctcgccctctgcctcttgcatgtgaagcagcacaatcagaatgcagaaggctttccatctcatagaagtaaaaggatgtctttggaagtctctatgcagaaatctcttggttttggcttgaagtctgataatggcaaacatgattatgttgcaaatgatacggttcaatccctgcataagcaagatagtaagatagtgataaaaaagaccataaaattgttggacggtccaccttatccaaaaaggccaaagcttgagccagcacaaactggtagagatgctgaggctaagggacatgaattcatatcacagaagaatgtgcctgatttaacaccatgcacaacatctgaaaaatctcggttgctcaagcagaagcgcatttctgatggaaagagaactgataagaagaatattaggtctggtgtcagatcgaaacatgattgtttctcatcaaaggctggtttagcaaattttgattctggtttctcaggaaacagcgtgcttggagcacatggccttaaatctgatattcgtgacatcacacatcacattgagaacctgtcattgatcgaacttcttgatggcacttacaagtattccagtttaggaagagataaaggaaagaagtacttctagctgtgatatcaaagaacaatgtggtgacaagccacccctcttggttaaggacccatcacaaattaatctctgtgatagtgcactttgtcatccaaaagatatcttaagccgtttaactcttcctcatcgacaagatctagactctcttttagcacccggaagggagagcacagctgcagttaagccttatatgccttccatgacagttcatggagctagtttgccaccatttccttggtcacattcacaggctgggggctgtcgacaaggtgttgactgtggtaaacatggatcaagtaggagtaactcccagtggcaatgggtgcgggttggctccaacctcacttctctagatcatgaagacacgtctgtccatagaattgatgatctccttcaagagatggatgcagcaaaattatgtatattggatccatgtgatggacaacataatttgtgtggcacagaatcaacttctggatcacttgtacaaaacattcactccagaaaaattgggggtgagcatggttctcagcaactgcagccccaggatcatcttgactctttagatggtttccagaagcatgacattgattattctcttttaaaaacatctcaagtatcgccaaagatacagtgcgccgctgagatcttatgtgatatgagaaggagcactgaatcatggattggccaaggatacagcaatgggacaattaagtggccaaaatcaccacctgaaaaggcgatgaaagcccggaagccctcatcccagtttggtacaactgagagctcgtcaggttctcgtaacaatgaggcaacttggaatgggagcagtcactctaccaagaaaattgttgacaggaacaatgattctgcacgcttgaataaccctggtaagggaactataagatggcctgtccctgttgaagacaatgcttctcctgtcaggtccgagcggggtcttatggtcgacatgaggcagccccatggaaatggcggaaggcatctggtccaggtgtcatcacagacacggcttgagaaggagtatgagaaccagcagaagttgaggaaggcaacactgacctcttctctaggatctgcaggagattggaatagggagaagaacaggagaatgtgaagtgtacattattcatgtcaaaatcatagggtacggtatatcgtctgggggacagcgggaaccaggcaactgtttcataagaggtcacagaacattggcagatgtcataatttaggtggctggtgatgtatctattgggccatttgttgttggggggaaactgctgtatttagtgtaatttattttttattgccatcgtatcacaggtctcgtctcaaagtcgcccgttttgtattatatagtactattattatgtgtcgacttattcgtaaaagcaataatagcaggcgaggtaattgcgttccaggcgtcagccctcagtagtttacggcgcgagcggattatctgcggtaactttctggacgtagccgcgggtggatcacggcggtggtcggaagttaccgtagaggatccagctgcggaagctcagtg

SEQ ID NO: 28136 - DNA, 563 bp, Zea Mays
ctcaaccttatcccctatacacagcacctcagctccctcacgcagcactccctgctctcccacgcgtcgctctctctcgctggacgtcatctcccagccgatccctcccatggctgcctctcctccatctccctccctccctgtgtggtgtccagccgatgctctctcccatggacgccctccccctcttgcagcaagtcagcaaccccatctcctctgccctccatccccagctcgcccctcaaccatggatactgccagccctggcactcgccctctgcacgccattgctctccttcctgcagcaagccccatctctactggcgctctaattttcagtcatcccgcatggccggcgtcctccccattttctacaggtactagatttgtgttgctatggatggtgttaagcaccggtgggcacgaccttcttataagcctaagtacctctcctatacttcttattgaggattatcattgagctagcatatatttcaaaattataaataatttataacatttcaaagtttatttctttgaatcacttttgtaatcacttcgat

SEQ ID NO: 28137 - DNA, 1001 bp, Zea Mays
ccagaccttaccgatacgcatacatctgtaccagcaagcgctacagaagcacggagagcccggagaatgttgattaatcagaacagacttgctaaaagagaaaaatggaatacactttattacctgatttagcaccgcataagatacacgcaaagattcaagtacatgtatctagaaagtggcttttccgaggtgctactgatagtggaccactacaacatgttgatatggttttgtctgatcgagagggtaatgctatttatgctgaaatccctggaaatttagctgaacaaaaagcaacaaatattgaagaaggaggagtttatgatatcagcagattcagagtgtgcgcagcaaaaactgttttcaaaatagtggatggggacaaaatgatccaattcacatttcataccatagttaaacgtgccacaagccctccaacaacatttccattatatgtttatcggctaacatcatttgatctaattgagcctcatgttcaaactacaaataactttgttgatgttcttggtgtcataactgaaattcatgaactgacacctgtgcatgtccgaagtcaactaacaccaacagtgacaaggaccattatcatagaagatctcagtgcaaacaagagtaatatcaatagcccagaaaaagatgatggcgataaggaaaccgcacagcttgatacaatacccaataacaaaggaaaaggaccagcagatacaattgaatcgccacctaaaaggttcaaataagggacgatacgcatcggaaaagaaatggacatcaaatcctccgagaactaaagtttcactcagatcttcgtcgaccttttgagttgcacaatgtctattttgcaacatatgtataattatatatgatgacctactcagctctttgaaaacaatttatgtaaatataacagcctaattctacgtagtggacaaaaatgttgactctgattatagctcaggtaactctatttcatataaaca

SEQ ID NO: 28138 - DNA, 1965 bp, Zea Mays
atattttctatgttttgttagcgattgatcttttttacatggtcaagttaagatgacattcatcagcgaattttcccaccgctcagcagtgacctcgttcccgtcctcctcgcatccctctcgtccgccgccgcctggctcgcgccgccgacagtttctcggcccagatcgagacacgcccgccatcctacaccaggtgccgaggccttcgccgatcaaagagatcccagacagcagatccgtccgtgccctgctcctcgaaccatggggacctctgcccaggaatcgcctctctggaagcgtatcgacgatgccgagtactatctagtcagtggatcatttgaccaggcggtgttgactgctttatccgtcgccgatgaaatacacatggcttctttggagagcgctagcgaccaggatgagctcctggagatgcttgaatcggctgggatggtgcttgtgcaggcactaaaagaactcaggagggcctctgagatgtttgctcagcttaagatgatgtttggttcagtgccatcagtgcctgctagagttttccttacaggagctaccattcaaatggcagaaggatctatatctgacctcagaccaatctttgaggagtaccttgccaattggagatatacggatgatgaggtttatgtttttgatggaggaaatgacagcacttcaaatggttttgtcgttaaatctattatgtcaactggccagtattttgaggtggcagaattgtatacagtaacattcctctgtattgtctctcaagatagtgaaactgctatctcatgggcagaaaaggctcatctaactgagcaaagccggcaggttttttttttttgtaaacgctacttaataattctactacagcataagaatctgagtgttccattatgctaacataggtcttccagcgtgggatcttataggtccagataattttcatgctaaagtaggattcttatgttcccaaaactatttcttgtatgaattaattcccactacagtatgcttctcatttccgaataacttctatagttccatgctaaactagggctcttcatatttccaaagcaatttgttttgaattcccgtcattctttattttctttagaggttttactgttgcattcttttttcatcaagacattttttttctttctttctacaggacctactaaaaaagcttcatgcagtgcaattagctgcaaataaaaaactgtccactgttgaaggggtaaaacaaacagcagagaggaacctttctacttctacaaatgactcaacaccatcgccacatgaggatcctccaaagatagttcctgcgtgcgatgggctcaaaaaggtcctgctgaagtctgctcaacaagctcagcatgttgcaaatcattttgatccgtttttctggtggtttcattcaattcgcctgaagtttgggaaaatacatattgttctacccagtggtaagttagtgtttctgttctctctgctgttctcagccatgtacgtgctgcgaaggaaaactgctggcttgaagagggctgtgttccagcaagctgcttccctgcgacgagcattttttgatgcacttcagcttgcgttctctgtccagatgaaccctctagctgctgttcaacaagtgccacaagcccctcgaggaagctggtgattggtgatgttctttatgccttgatctatgtaacattataactcaactgaaattcaacaggcaaccagatttcatgtcgcggaaaatgtggctgtgtaaatactagtgtgcttaatgcagcatgaatgtgatgatgacctgggtttttttgtgtccattctcacctgaagcatattggactggggattatttacaagagctatggcttttgaattggggaaacggattaagtgcaaccaaaccaattagtgtaaccgatgaaaccaagacataaggatgga

SEQ ID NO: 28139 - DNA, 1532 bp, Zea Mays
taatatggttacagagtattactgatgggcttacctgcagactgcagatgttgttgcaaatgagttgtggagaaccgtagattcaaatggttggagagcatcttctgcaccacgcatctgttggcctcgtaggtcttattctacgtgctacgggatttgataactcaacatggatttaccttgctcctggcaagctctttggtgggaaacacttcatgaagccattcaaggctatgtttccacgtcttaaaaaccatagtatgatcagaagtggaaagctggaagaaaatatccgagggctagcagggtcagcagttgattacatggtctgtctcctgtcggacatttttatatatgatggtccgagcaacttcgcagacaatctcatgggtcatcgtctatactatggtttccgaaccacgatcacaccaaacaagaaggcccttgctcggatattcatggacagggaggaagggcacacatctgcatttgaggagagggtcaggcaggtcatgctcacccattttggcgccccccacaagcgcatccatccagagtctttctacacaaacccatggccagagtgcttctgccagacgaaagctaggaatcatgctgaccggtgcccacacaacagtgtaaatgatgtccttgaaagttggttccataataaagaagatgtagaagtggaagctactaatcaaactgactccaccagctaaaccgagagttggctggtggaactgagttatcaaaggtttattgattgagaacagattgtttgtcacagacctgcgaatgacatcattggaggaaggattgatggctccagatctctgtaggcgattatgttcgactcaagatttagttgttgagattcttagtctgggagggtcagaaccagattttggataggtttacattgtcatgtagagttctgtggaagaaaaatcatacgaacgtcatgaactatgtggctactacaattggagatctttaccccatatgctatagctgagtgtttggtggcttcagttctgttggagttatttgctgttcctcactatacatatctggttgaattcatgcgttcctggtcctggaactggaacttccccagttttgatttttgcaattcaccgtaatgctaaaaagtcgactatctccaggctccctatcccactccctatttcaaagttctctctgcaacaatacatctatagtgcaaaacagtgttatacacgcctgcatgcacgacgttgctggagttggcctaattccgggttgctggagttggcctaattccgggctccttcgaggtccatggcagcatgtaactgtattgatttgttctccttgtttgtagcctcacacttggttgaatatttcgaaaaatctagaattccaatattttttcttatttttattttgtttttttagtttctttagaaagagataacagtcctttgtacttgtatatatgtacacaacacatattaatgcaaaccatgtattgtgtcagtcgtttgaac

SEQ ID NO: 28140 - DNA, 1316 bp, Zea Mays
  misc_feature (1)..(2): n is a, c, g, or t
nnatcgttgagaagtattccaactccaacattgaaattcatactttcaatcagagccagtatcctcgcattgttaccgaggacttcttgccacttccaagcaaagggaaatctgggaaggatggctggtatcctccaggccatggtgatgtgttcccctctttgaataacagtggaaaactcgacatcttattggctcagggcaaggacacagagatcctgaaccatctgatcaataaccagaatgaatactgcatggaggttactccaaaaacattggctgatgttaaaggcggtactctcatctcttacgaaggaagagttcagcttttggagattgcccaagtacctgatgagcatgtgaatgagtttaaatcaatcgagaagtttaagatattcaacactaacaacttgtgggtgaaccttaaagctgtcaagagactagtagaggctgaggcacttaagatggaaattattccaaaccccaaggaagttgatggtgtgaaagtccttcaacttgaaactgcagctggtgcagctattcgtttctttgacaaagcgattggaattaatgttccccgctcaagatttctcccggtgaaggctacatctgatttattgcttgtgcagtctgatctttacaccttggttgatggctttgtcatccgcaatccatccagagcgaatccagctaacccttcgattgagcttggacctgagttcaagaaggttgccaatttccttgctcggttcaagtccatccccagcatcgtcgagcttgacagcttgaaggtttctggtgatgtctggtttggttctggaattacgctcaagggcaaggtgacaatcaccgccaagtctggagtgaagttggaggttccagatggagctgtatttgaaaacaaggatgtcaatggccctgaggatctttaagctatgcttgccgtcaccagtttttcccaaggatttgtcaataggagcagccaacccaaatcactcccactgagctctaccttttgtaattctcgtgccattccgctcccgctgtgagggtcctgtgagcccgctagagaatatgactgtaatcttctttggtgcgtctgcccttctgtttttgtgcgccagggacgtatattttgctgaaatgatactaccatagctttgcgtgccggaggtgctatgtggtgtttctgtgcgtttggttgcaatgataggacgggatgagatgagaccctcaaattaggttgtttggttctgggtcaaagattgagacaagaatatcctagtattgtttcatgttgtcctttaaaattggag

SEQ ID NO: 28141 - DNA, 1734 bp, Zea Mays
tcgactagcagattctaccatttaaaaatcccacaaaatccccaacccctcctatctcctagtgcattccaccgctcaccatggccgccgccgccatcgaagcagctggtcgccggaagggtagctgcttcttggaagtcggccgccgcgagatcggctcttcattcccccgcgtctcttcccgccgaatcagcggctccgaggtacgagtaggacgactaaaggagggcggtgaagtcacaactaaactagttggggagcacgattcacgggtgcataagatggctattgaaccaggaaacccttacatattttacagttgtggagaggatggcttggtacaacattttgacttaagaagcgattcagcaacaaagcttttcacctgctgttctttcttgaatgacagacgccgtgtaaaactgaatagcattgtcattgacccacagaatccttactatttttcaattggtggttccgacgagtatgcacgtttgtatgacatgaggaaattccagttggatggttcaagaaacacaaaccagcctgtagataccttctgccctaagcaccttattaagggtgcgagtgcgagggtccacatcaccagtattgcatattcctatgcaagggagatacttgtatcctacaatgatgagcttatctatttgttccaacacaatataggtcttggtccaaatcctgtgtcggcagagccagagtttttcaacatgcttgatcagccacaagcatacagagggcacaggaattttcgaactgttaagggagtcagtttctttggacaacatgatgaatatgttgtgagtggatcagattgcgggaatgtattcatatggaggaagaagggaggtgaattgatcaggatgatgaatggtgacaaaagtgtagttaactgcattgaaccccacccgcatttcccatttatggctactagtgggattgataacactgttaagctttggactcctgcagctaaaaaattgattatgccgctgcctaaaaatgcaaagcaaataatagccgctaatgaacttgagaggacagttcatatttctcaagcaacagcgacactttcatctgatgtcatgatgcatgtgttgaggttgttacgtaggagagattctgaaatgaatatcgagaatgagccggctagtgcagatttggccagtgatgacgatgaggctttcgactttggatttgacgatgcggaaaggaacgaaagggaaaactctgatcccagagaatgcaacatgacatagctaaaacaactggggattttttttttgcagcctgggcctggccctgcctctatgttggagtaaactgaataggtcttagatttcagttctacatagtaaggtgtgctgaatgggcctgaccgcctgatacacatgggaggactatacaggtcgtgattattaatggagaaactaaacgggtagagccacatcctaccactcggttattctgctctagttttaacgcatgttcaatcttctcgattgccgtatacctagcctagtaaaataagttgtgcaccccagcctgtgtgattatgaactgtaaacctgaatttttagttatcatcaggcaatatgtacataggttttccgtagtgtggaaatgttgagaagtttgttgtttcatctgtctggcaatgtgttctcatacgtaatctggaagtacggtgtcttggtatttccgtctgcttcc

SEQ ID NO: 28142 - DNA, 893 bp, Zea Mays
ctaactgccatcccaaatttccaaccccgacggagacgaaggtcaacagtcatttgcacttctcaaggcacgaacatgtagcaggtcgggccattcgagaccatgcctcgcgcagccaccgaggccgtcgtccacggcgagggaggcacgatcaaagtaggcacaacgggcaccatcggctccctcatgacaagagaactggacgccgtcaaggtcgcgccgccgccaccggcagccgcgggcaacccgcgcctgaggcgccaccaaggctgtcctgtctcggtgccgtgcggagccgctactcctcggaagaccgtgctgaggaaaagctcctcggacatctccggcggcagcagggccgaccgcgtgagcgccgaagatgcctgctgcaagcccaggagggtctcccggaggaacacgttcgactcgccgatgctgcgctcggacggcgcgctcgtggacgtccggaccccgagtggaggcagggcgaagaagaaggggggcgtgtacggcgtcgagttggtggacgtcaagtgcggtaaccccatgaccagcaggctcaggaagctcggcttctgcaagctgtcggagacgtttgcgtaggtggagcctggcaaggaccatggccagcatctgaataccgtgtgcctgatttagtgcagcaattatctacgagttattcctatgtctcatagattagaagggattagaaaaaaattataaaataattttaattgctatggattgaaactcactcaatcaccttcaattcatatgtattttgatgaaacaggtcctaacactgttcggccttaggctgcgatccagtttgcatatctagttcttgtcactttttctagctggtcctttttttctccctatgtcgaaattgt

SEQ ID NO: 28143 - DNA, 1965 bp, Zea Mays
ggaaaccgtgtttcgacgggccgcagtgggcagtggcttggcccatcgaacccacttgccactcacttccacctgaactttgccctgccttctctcgacgactcccctgtccccgccgccgccgccgccgcaaatccccttccgcgtctgtctggcctctggggcttctaggttagcgcgtgcgaccaccatggccgaggaggtccaggctccactttccgccaccatggcgaaggaggcccagtcgccgccgtccgcaaccatagcggaggcgacggcgccgccgcagctcttattatttaactcctttacgaagagggaggagccattccagccccgggtagaggggaaggtagggatgtacgtctgtggcgtcactccctacgactttagccacatcggccacgcgcgtgcctacgtcgccttcgacgtcctctacaggtaccttaaattcttggggtatgaagttgaatatgtccgtaatttcacggatattgatgacaagattattaagcgtgccaatgaacgcggtgaaacagtaacaagcttgagtagccagtttatcaatgaatttcttcttgacatgactgagctccagtgcttgcctcctacctgcgagccacgggtaacagaacacattgagcatattataaagttgataacacagataatggagaatggcaaagcctatgctattgaaggagatgtttacttttcagttgaaagttttcctgaatatctcagtttatctggaagaaaatttgatcaaaatcaggcaggtgcacgggttgcttttgatacaagaaagcgtaatcctgcagacttcgcactctggaaagctgcaaaggagggtgaacctttttgggatagcccttggggccgtggaagaccagatcattgctctttaccatccaatggctttaagatttttcttgatgcgcacacattatagatcagatgttaaccattctgatcaagcgcttgagattgcatctgatcgtgtctactacatttatcagactctatatgactgtgaggaagtgttagctacatatcgtgaagagggtacctctctcccagtgccgtctgaggagcaaaatctgattggtaagcaccattcagaattcttgaaacatatgtcgaatgatcttaaaaccacagatgttctggaccgttgcttcatggagctgctgaaggccataaacagcagtctgaatgatttgaagaaactgcagcaaaaaatagaacagcaaaagaagaaacagcaacagcagaagaagcagcaacagcagaagcagcagcaacagaagcaacagcaattgcaaaaacagccagaagattatattcaagctctgattgcactggaaacagaacttaaaaacaaattgtctatacttggtctgatgccatcttcatctttggcagaggtactgaagcaattgaaggacaaatcattaaagcgagcagggctgactgaagaacaattgcaagagcagattgagcagagaaatgtcgcaaggaagaataagcagtttgagatatctgatggaatcaggaaaaaccttgctaccaaaggcatcgccctgatggacgaaccttctggtacagtatggagaccatgcgaaccagagcggtctgaagagtcatgattagctcactgactcaacaagtgatggcggtgtaaaatgagatttttgcctgagggcagttatcgcattttgaagactaacaaaaatcgccatctctggatgtggtattctacagggtaggggttccaggttgactcaccagttaaaacatgcatttctggttgtataacaagcaatgaaccccatatatatacttgacagttgactcctttggaggtttggtttttagttttggataagactttggtactctttgcttgtgtcgggtggttcctttagtcactaaagtttagtcgctaaggtaccccgtttagtt

SEQ ID NO: 28144 - DNA, 2148 bp, Zea Mays
gtcctcctcttcgccggtttccacacgttcgccggccgccgccctccccgctccctctcccgtccgcttggttgtttacgcctgcacccaggctagggcaggacatccaacgcgccaccttgtacggctgctgcctgggcctggtttgagtctttgacgaaaccgcagaagcatccggcgcccgcgctagcctcctcctcccccaagcgttgtttcgccgccgttcgatagctgagggcagaggcgggcaagtataggagatgtcggtgctcatcgtcaccagcgtgggcgacatcgaggtggatctccacaccgaccgaatgaagtactacaatgggtgtctgttccacaaggtggagaaggatttcttggcacaaactggcgatccaactggaactggcaccggtggtgattccgtatacaaatttctctatggtgatcaagctcgattttttgatgatgaaatccgtccagagttgaggcattctaaaactggaaccgttgctatggccagtgctggtgaaaactgcaatgcctcgcagttctacattaccttgcgggatgacgtggattaccttgatgataaacacactgtgtttgggatggttgccgaaggttttgatacgctgacaaaaataaatgaagcttatgttgatgataatggaagaccattcaaggacataagaattaagcatacatatgtcttggatgatcctttcgatgatcctcctcaacttgctgaacttattcctgagaattctcctacaggaaagccacgtgatgaggttgcagaagagcgcttagaggatacttgggttcctttggaccaaacagttgctcctgaagaacttgaggaaatgatccgctctaaagaggcacacacaaatgcagtaatacttgagagtctggcagatattccagatgctgaggttaaaccgccagataatgtcttatttgtttgtaagctcaacccagtaacacaggatgaagatttatacacaatcttttctcgttttggaactgtgacatcagctgaaataattcgtgactacaagactggagatagtttatgctatgcttttattgaattcgatacaaaggaggcttgtgagcgtgcatatttcaagatggacaattgtctgattgacgatagaaggatccatgttgattttagtcagagtgtttcgaagctgtggggtcaattcagacaaagcaaaagaaatgcaaagaaagatgggtgttttaagtgtggcgcccctgatcacctagccagagactgcgatcaagacggtgagcagaaaaacaaaggcccaagttatgttctaaaagatgaaaatacacaacgtggtggaaatcaccgtagaagctatgatctagtatttgacgaagacgaagctgattgttctgaagagagagatcatgaaaatggccacagaagaaagaatcgaagaatagatgatcgaaaatcagagctaccacctcgtggtggtcgtgatagaaatagccatgagagaacacacagtgatgagaaaggaagcaagcatgggaaagatgataggaaccgaggggatcggaaacatgatgactaccacagttacagtagatccggtgacagaagctctggtagaaacgatgatcgtgattatagcaagcgccacgacagaagcagaagtggggaggaagagaagggctacagacgaagggataagtctgatggtgagcggcaccatagagacgatggctacgatcgccgcaggagagatgaagacagccacaggaaaaggagcccagatagtaaacatagaagagaagacggagggcaccatgtgagaaaccagcagtctgatgataggtcctacaaggagagaaggcacagagatggtagataagaaagtttctgcacgactcggttttcttgcctgctttccactgatgtctctataagctggtattcttagctcaacttttttttttgtaagtcaatgtaactgcctggaatatgttgaattgttgtagtgtccagatctgaatctttttttgtgtgtttacagtttttgctggataatttattgcaatcaaaaaattgctgacttagactgtttgcgcttattctattgtaaggattggcatgggcccataaataattct

SEQ ID NO: 28145 - DNA, 1112 bp, Zea Mays
caaggtcatgccgaaactcatgagtactcgattttgatccgatccgacctctacgtttgaaacaggtggaccgagagatccagctgccaagttattgccgcgggcacggccgcacggccaatcccaggagcccaccgaaacgcccaacgatcccctcccggcctgccgcccgtccggacccgagccggcctcgcattcggcgccgcgccagtcgcgcctccgcctccgtcgccgcctgctccggcgagcgggacccagctcgcctctactcccctactgcgaggtacacgatggagggagccggaagagatgccaaccctttgagcagttaccgaattggcagaaccctgggaactggatcgttcggtaaagtgaagatcgcggaacatatattgactggccataaggtggcaatcaagatcatcaatcgcctgaagatcagaagcttgaaaatggaaaagaaagtgaagagagaaatcaagttactgagattattgatgcatccttatatcatacgcctttatgaggtggtacatacacctgctgatatttatgtggttatggagtatgttaaaaaaggagagttgtttgattacatcgttgagaagggaagactacatgaacaagaagcatgtcgtttatttcagcagatcatatctagtaagctatatgttggtcctgatgttgatgtctggagctgtggcgttattctttatgctcttctttgtggcactctcccatttgatgatgagaacattctagagcttttttacaaaataaagggtggaatatatatccttcctagtcatttgtcactttcagcgagggacttgatttcccgaatgctggttgttgatccaatgaaaaggattacaatacatggaatccgtgaacatgtgtggtttaagattcaacttccacgctatttggctgtgccgcctccagacacagcacaacaagttaaaaagctcagcgaggaaactcttaatgatgttcttaatatgggttttgacaagaatctgctaattgaatctctgcaaaacagattgcagaatgaggcaacagttgcctattatttactattggatgataggctttgtacaacaagtggt

SEQ ID NO: 28146 - DNA, 2972 bp, Zea Mays
agcccaggcacacacgactagaaccaggcaaccagctgcggagggaggaaacctagcggaacactgtgcaggtgacggcggcgcgctaccggtgacaggggatacggcggcatcgtcccctcctccatccccggcgcggcggcgccagcagccggcctgcaggcacacaagtggccacccttccaatggcggtggagaagtccagcagcggcacatcaactccctccaccacctccaccatggaccggtttcagaagattgtcctaagctgggattacctccgtctcatcgctgaatccaagggcggcaagcaggccaaggtgctgcagcatgtgaagaacacatacgtctcggtggctgagtaccttggtgtctttgagccactgctctttgaggaggtcaaggcacagatcatccagggacgcagtaacgacgaggaagaatctgggatggactggaggaggggagcagtggggtcgtgcacggagtctgaggggttccacaagctctctgtggcggtggaagacaattttcaggataatgtgtcagagaatgatctactgcttatctccaaggagaaatttgaggagggatcgacccctaatgcatatgcatttgcattagtggagcagcgaggtggtggcatacatatttcacttagaacttttgtggcaggtgaaattcaaaatctgaatgttgcaaagcctgtgaagtctacaaggctgcaacattttgcttccattattgcaagtcaaaacagcttgctgtggatactgaaggtctgcagcttgtctacaataatgcgggagttcacagctatgcattccgtagcttctctaccttttaaggatttgattctttcagctaccgaggcgcacaaggatggtgatgatcaaagtcgtgcgtggaatgtccctgagccacttatggattatctcaaagtgaatcttaatgattcccagctagaagcagttaatgtctttcacgcagatcctttgttcttattcagggccctccaggaacaggaaagacacaaactattcttggactccttagtgccgttctccattctgctcctgcaagaatgcagatcaaaggaggatttgatgttctaaaacatgggccagaactggacattgatggcaagcgtgcacactggataaaggcatctccttggttacttggtgcaaatcctcgagatctgattatgcctgttgatggtgatgatggattttacccaacgggaaatgaactgaaacccgaaatcgtaagttccaatcgcaagtatcgggctcatgtgttggtgtgtgctccatccaactcagcactcgatgagatcgtgttgcgtgttcttaagacaggaattcgagatgaaaataacaacacttataaccctaaaattgtgcgcattggagtgaaggcccttcattctgttaaagcagtttctatggattatcttattcaacaaaaactttctggtgtagatcgcacattagatggtgggagacgaggtgctggtgaatatgatcggattagagcttcaatactggacgaagcagccattgtattttctactctgagtttcagtggatcatcaatttttagcaggatgacccgtgcttttgatgttgttataattgatgaagctgcacaagcggtggaacctgcaactcttattcctttgatccatggctgcagacaaatttttcttgttggtgacccagttcagttgcctgcaactgtcatttcacagactgcacagaagttgggatatggaacgagcttgttcaaaagatttcaagctgccggttttccagtgcaaatgcttaaaatccaatatcgcatgcatccagagattagtacattcccttcaaaagaattttatgaaggggtactacaagatggggagggcctgagcaggaaacgtccatggcattcctacagctgcttcggaccattttgtttctttgacgttgatggcattgaatcccaaccatctggaagtggttcttgggtaaaccaggatgaagtggaattcataactctcctgtaccaccaattggcattgcgctatccagagctcaaatctagtcctgaagtgggtgttatatcaccatacaggcatcaagtaaaactattgaaggacagttttcgatcaacctttggggatcaatcaagggaattgatagatgtaagcacagttgatggattccagggacgtgaaaaagaaatagtcattttttcatgtgtaagatgcaataaggaacaaaagattggctttgtttctgattttcgacgaatgaatgttgccattacaagagcaaaatctgctgtactgaagggcaggcctggtgtagtggttgtaggttctgcttcaacattgaagcaagataaacactggaacaaccttgttgagagtgccaaggagcgaaactgcttattcaaggtccccaagccattgaccgcattctttgcagaggataacctgaagactatgaaggtggaaaggcgtcctccgccagagctgaatgctcgagtactggaagagatcaaccaagaagttgtaaggcaggagctcatgaatgtcgatgatgctgccgaccatgcagacgcaggggacgacgatgatgctgatatggatgctgacgatggaggcggcgatgattgattttaaattgatggggctggagcctggaggttcaccagctccagtatttgtcttcacggattgagttgaggcagtgaagaacgtaagcatgtggataccagctagggaaaacaggcaacagcgttgatccaagcagcgttttacagttacatgcggaaaattgtgtgggttgtatcttacaaacacatattcatctcccaaacacggaaatctctgacttcgaaggagataaacttgtcgtttcaaccagaacgtctctgtgtagtacgaaaataacaaaaaccagctccgtggtgtcatttta

SEQ ID NO: 28147 - DNA, 2418 bp, Zea Mays
atggtcctgccttgtgaagcagggaacaagaaagaaagaaagatgcacgttgtgcagtgtgaccctagcaaaggagagatgcgatacccccggccggaccagcgatcgccattcaaagctgccagtgccacccgccatcccctgctcccactgccactgccagcacataagccctaccagtaccagaggctaccagcagagagagaaggcgagcgcgcgggcagaacccgcgcagaaaagcaaccacctccctccgcctcccccgcagggctgggccgcaccgcatcaccctcgccctcgcgagatccccaattcgccgcaggttcctcgccggagcgagcggcccccattgtggcgtggggctgccggttccgcggccaacagtccccctcctccctgctgctggagctgccttgagtcccgcgactcgactcgagctctgctgccgtggaggcggccaaggccaaggcgcgcgcattgcgagggtttttgctacctctcggattcaagggtattttatagatgacgaaggcagcaactatttatgggagcaagacacagagcgatgccttgcggccagggccattgcgtccagcaaatattatcagaaataaatttcccacatacaagaatggttcaaatggtatagtaatcaagctggctgatggtcccgaaataccacctctcaaggagatagttgcaaaggagactgcagatctacttgatcgtcgtcagcgtctctctgtccgtgaacttgcgatgaagtttgagaagggtctcagcactgccacattgttgtcgaatgaggttaaatggagacaagtagctttgatggagcgggatatccttttgaagaatctaaagagtgtattagagtcactgagaggtcaggtgacaggcaaaactaaggatgaaatcgaggagtctatatctatggtggagatcctcacggttcagctctccaaaagagaagctgagttggttcaacaaaaagaagaggtcacaaaattagcaaaatcattaaagcaggcttctgaagatgcaaagagaattgttgaagaagaaagagctaatgctcatacagaaatagaaactgctaagggtgctgtccaaagagttcagcaagcagttcaggagcatgagaagatgtcccaaaatactgggaagcaaaagcaagacatggaagaactaaagaaagaagttagggaagctcggaggatcaaaatgttgcatcagccaagcaaggcaatggatctggaaaatgaaatacgaattttacgtaacacatttgctgagaagtctaaggattgtgttagtcttttgaaagagttggaaacgcataaaaggttaaaagaaaatggtaccatcccttcattcgatctggagggtctccaatgcttaggatcaatgctacgtatagttggtctgagtggtactcacatggatctgtcaaatatttcaatccagtggttccgtatacatccaaaagaaagcaacaaagagattatttcaggtgccacaagaccagtatatgctctagagccacatgacgtaggacgctatttgcaagctgaaatcgacgtaggcggcgaaatcgcagtagcaaagactgctgggccagtagaccctgatgctgggttggttgattatgtggagacgctcgtaaggaaacctgaaactgaattcaatgttgttgtgcttcaatccaatggcgtcgatcagccaaaagagtcggttcatgtactaaatgtcgggaggctgcggatgaggcttactaaagggaagtcggtagtcgccaaggaattctattcctcatcgatgcagttatgtggtgtgagaggcggaggcgaagcagcctcgcaggcgatgttttggcgacccagaaacgacctcagcttggtgctagccttcgagagcactcgagaacgcaacgcagccatcatgctcgctcggcgtttcgctgtagattgcaacgtatgcgccttcaccaagcgctatatcatccttgctgggccaggcgacaaaactccctggtgaacgaagatggcacctgtgctctgccgataccagataccacccagcacccaccactcctgactgtcctgctcttcctcgcgtcgtaggttcctgaaagaaggcgccgtccgcaccattttaaccgcctgggcgccgcctttctatgtcactgtgctatgttttcccagtccgcgagggttgtaatctgttgttgctgggagatgcgacagcaatgtaagctacaagtctaactgtgtttgacatatgtttaggcctcgttcggttggcctggaacggccctattccatccggatatatttggtcaggattgaaaccggaaacaactaataatggttgttcggttatgtctaactcataataaaaccagattgaaaacaggtc

SEQ ID NO: 28148 - DNA, 2316 bp, Zea Mays
aaagacaacctccttccacgtgagcgctttcttccttcagccttctcgttatcctgaacgcggcaatctccgaaggtcccatccaaaacctcgccgccggattcgcacctcactctcgcccgcgcactacgaattgactgacgcctacgccctaccgctgcaagcagcaccatagcgggagccgctaccatggcgtcctgctacaacccgtggcgcctattcccaggcatgtcgacggcggtccctgccgggcccgtcacggcgccggctcattctcgcacctgcaagtcctcgaaagtgttcagtgctttgcctcaccggaggggtctgctgttcctgggcacgcggcgtgccaggatcaagtgcgtcaaggacgactctctccatttcgacccgtcgaagatagaaccgccaccgtactccagctacttcgactccacatccggtcagctcgagccggcgtcgggcgctcgggcaagcatacccgggaaggagtactggccagagggcacggcggcccgcgtccgtgccgcgcgagcgcctgctccggttggggagtcagctgggatgccatcatttggcacgaagcccgggagcaggaggagagggtataaggagcaggtgacgtcggcgtcaggaacggagggtgcacagactgatgacagaaaggatggtgatgaacctgatgtggctattataggctctggggacgatgcattggaggagataaaggattcggtggatgagtatgtcatttatgagacaccagaggaagaggagctgagtgagtatgacatggacaaaatgatggggcggccacacccgttcattgatccagcaaaggcaatgtcactaggggagccgaaaaccagtgaagagctctggtggcactggaggaggaagtctcaggaggaggaaatgtggtcaagatggcagaggaggcgtccagatgttgacacggtttttgcaaaggcaatggcggagactgggcaaattaaaatttttggggaccatccttcacggacagaagctgctcttgcaaagacaagaagacatttgtacaaagaggaaaggttagaagcagagcaaaggagactagaagaaatagggccaatagcgtactactcagaatgggttgaagcttataaaaacaaggatacatcacgtgaggccatacagaagcactttgaggaaactggcgaagatgagaatgttcaacttataaaaatgtttcaacaccaaactgctggggaatatcgtatcatgatgggcaccgatgtgcgtattcagcgagatcctttggccatgagaatgcgggaagaccagatcaaacagatttggggcggtgatcctgtctatccaacaattaattatgttcaggatcctgatgaagtgattgactacagaggtcctgaatttcatgagcctacccctgaagttgtaccttacctgatggagcatgggataatgatcacaaaggaagagctatatgcacgtctgaatgaagagagagaggacgtcaatcaagacataacgtatattcctgaagctaaagatcctatggctaccgccattgatataggagagcattcttacaatgaagacagtgatgatgaggatgaggatgtcgataaagctgctgcacagcctcaatcactagaggatgaggaagacgatagggatgatgttgcagaagtagaagagaaagtgaaccagaattggagtgctctaaagtctactggacaggctgaaaagcccaaggaaaaatcaaagaaagatgaaatgacactaaaagaagctattgacgattctgagaacctaactgactttcttatggactttgaggaaaccgagtaatactctggacattttgctattctgtcccatcacacatgcccttaggggctaggggcgatgaagaaaactggatgtccacaaaactctacttgctcaatacgatggaaggtagctccagctgcctgttttgattcacaagttggcaatgctatcagaaaaaaggaatccagatagaatgttgtggcgcatggctcaagaattgacaacaatcttcatgcttttgaagaaacaagagaagccacaaaacaagagataaggagtagcttaaccatttgcagttggaactatgttagccttcttaggctgtccgcagaagatcgtgtaaaataggaaattcacactgtagattacattatttgcagagttaagtttgaaaaagaagataagacatgagatgagatatgatagctgctagagacagtgttacaccataaataatatatttcgactaggcatgag

SEQ ID NO: 28149 - DNA, 210 bp, Zea Mays
cacggccccacccacatgtgcatgcacgcatgcgactagaggagaaaacggttcccctttcctcacgtgatccccaatttgctatggggattttctgtggccaagtcatccagttccttagccatctttgcatataaggctgcctccaacaagaccctctaaagggtcctgtactctaaatttagaggacgagacttcctccagcaacgt

SEQ ID NO: 28150 - DNA, 673 bp, Zea Mays
gaagagactgcacggtgaacgggcttacgcgcccaaaatgtgaaactggcccgtttgcgaaattggcagtcgcgcagcgcagcttttatatagccaaatctttctttcttttttcatcgtcttggcccctcctccctttcgccttcatcttccctaaaccctaggcagtgtcctaaatacgctctcccccggtggggtcgctacagcgatctgatctttcgccagtcaccggcgccggaggctccgcgctctatactcatggttgtcccgcgcgctcccgagacacagcaggaccaggatgaggagatgctggttccgcatcaggatgccattgagggtctgcagaaggatgttcttgagggtccgcagccgatggaagaatttgcatctgctgttgagaaccaaattataccagatacctccacatctagatttacatggtatattgaaaatttctccaaacgaaatgttagaaagcactactctgacgattttactgttggggggtacaaatggcgagtgctcgtcttccccagaggaaataacgtggactacctttcaatgtacctggatgttgctgattcgaacttgatgcctcccggttggagtaggaatgcacaattcagccttgctgtggtaaaccaattagacagcaaagcatcgttaagaaaag

SEQ ID NO: 28151 - DNA, 838 bp, Zea Mays
atgccgcccccttccgcttccgccatcgccacccgcttcgcaacccactggatagctgacgccctcgccgacgacgagtccttcgacttctccgtgctccaggatctgatgccgttgacatggaacactgacgtggtacttgtacatagcgaatgtgcaagtaggaatggaggagggtttcttctaattacttttgcagcccttaatcctgtagcactgacgtggattggttgtgggattcggtgaacctaggcctcctctaatatgcacgtagatgatggtagagagattggtagattcaaacctacgcgaagaattgccaatagatgactttggctgcttcgttcgttcaaatcgcacatatatgttgctgccgtgactccataccgtgaagaagcttgcccaaagtctgcagttttctaaacccctggtcaaaaaaggcaccgataaaatcatatctccaagttgtcagttgactgcaaaacaaattagattttgtttggatactctagtattgacctcaatccatatatgttgagatccatgtatgttgaggtggattgggttgtaaattagtttaagttgtactccaatttacctcaacatatgtggatttgggtcaatactagagtatctaaactaagttaaggtgcatgtagagataaatacggatggaaaacctccttctgtttacgtttcttgactcggtgtaggtacatcctagtgactttaatagtagcctaaggctctatttgtttgagcttctcgtcatctttttagtgtaaaaagccagaagctaaaacaaagagtttatatagatgatgttatatagaaagct

SEQ ID NO: 28152 - DNA, 1053 bp, Zea Mays
gactagtaattgtatcacatttgagtcccagaggatcgggacgcttcagtaagcccacaaacaaagaagttttctagcttccttgtggagaaggcaacgactcctagacctcttggggctataaaaggagcccctaggtgccctctcctggtatccaagcatcacaagtgcacactacaactccgagactccacgaccacactgttcagtgatttgagagagatttaagcgcatttatgagctgttactctatcgttttattattgtgctcttgtatttgctttcatgtgtgttgttgttttgttatatacttgtgtgtgttctactccctcccttactctgattttggattgtgatcatcttgtgtaaggcgtgagagactccgacttattaagatttctcacaaacaagatttctaaatataaggaagaaccgtggtagtcaagtttgatctttgaatcacttagataagttgagtgtaaccattgtccattgggacgccacaacgtagagtagacaagcatattacgcttgaccgaaccgcttgaccaaaccatgagataaaattgtcgtgtctcttatgccatttgcattattgtaattttatctcttcttaattccatcttatcacatgtgatattgctccaagtataaatcatatcttgataggtgaaaggaacttacctctctttatctactttcaatctaagtttaattttctctaacttatatttctctactatacttaaagcatcagtttcaacggtcgtcctacgtcatcttcttacaaaaaagtccctacatttttcaaaatcaactcagcgtaaggccttcgatattggccattaagccaaccttactataataagtcaatgaagtgcatgtctctactatacttaaagcacaagttttaacggtagtcctgcgtcatctttttacaaaaaaagtccttacatttcttcaaaatcaactcagcgtaaagtattaaaaagcaacatgtggggtttgaacccacaccctgatagaagaatggtgggtggaagacattgggcg

SEQ ID NO: 28153 - DNA, 3393 bp, Zea Mays
tccacttccacctccgtccgttccccttctcctcctcctctcctccccttccatgccctcttagcttctgaaggtctccgccacctcctgctagctacccttctgagctttcaagctttgctgaacgcacgcgggcggacgcggtaaagcatcacatcttctttgagagctgcagggaagagatcgataagagttctattttttgcaaaggcacacagacatatatagttcttctgctagatctcaccgccagtcagctcgcagcgaaggttccctgggctaccttgtcgctggatctgttgctggtcgtgttgttacttgtcaggcaaggtataatatatctccgtacagctaggaataggattgggtagtaggggggtacgcatgtgccagtgaagaaatgggaaggagctagtgtggaggcagcaagaattagggttggagaggttccgcgagaggagaaatgatgatcccggcgaggcacatgccgccgacgatgatcgtccggaacggcggcgcggcgtacgggtcctcgtcggcactgtcgctcggccagccgaacttgatggacaaccagcagctccagttccagcaagcgttgcagcagcagcacctgctgctggaccagatcccggcgacgacggcggagagctgcgacaacacggggcgcggcggtggtggccgggggtccgacccactggccgacgagttcgagagcaagtccggcagcgagaacgtggacggcgtctccgtggacgaccaggacgaccccaaccagcggcccagcaagaagaagcgctaccaccgccacaccctgcatcagatccaggagatggaagctttcttcaaggaatgcccgcacccggacgacaagcagcgcaaggagctgagtcgggagctgggtctggtacccctccaggtcaagttctggttccagaacaagcgcacgcaaatgaagaaccagcacgagcggcaggagaactcgcagctgagggcggagaacgagaagctgcgcgcggagaacatgcggtacaaggaggccctcagcagcgcgtcctgccccaactgcggcgggccggccgcgctcggcgagatgtccttcgacgagcaccacctccgcgtcgagaacgcgcggctccgggaggagatcgacaggatctccgccatcgccgccaagtacgtgggcaagcccatggtgtccttccccgtgctgtccagcccgctcgctggggcgcgtccgtcgccgctggacatcgacagcggtggcgtactggggggtgctgccacttatggcggcgccgctgacatcttcggcggcggcggcggcgtcgctgcttgtggtgcggccagggattgtgacaagcctatgattgtggagctggctgtgacggccatggaggagctggttcggatggcgcagctggacgagccgctgtggaacgcgccggcaggcgggcacgacgggtctgctgagacgctgaacgaggaggagtacgcgcgcatgttcgtccctgctggagggctcgggctaaaaaagcagtacgggttcaagtcggaggcgtcgcgcgacagctccgtcgtcatcatgacccatgccagcctcgtcgagatcctcatggacgtgaatcagtatgcgacggtgttctcgagcatcgtgtcgagagctgcgacgctggaggtgctgtccaccggcgtggctgggaactacaatggcgcattgcaagtgatgtcggttgagtttcaggtgccttccccactggtgccgactagggatagctatttcgtgaggtactgcaagcagaacgcggatggaacatgggccgtcgtcgacgtctcgctggacaccagctcagtcctcaagtgccggcgccggccgtcgggatgcctgatccaggaaatgcccaatggctactcaaaggtgacctgggtggaacacgtcgaggtggatgacaggtcggtaaacggcatctacaaactgctggtggactcagggctcgccttcggtgcacgccgatgggtcggaacgctggaccgccagtgcgagcgccttgccagtgtcatggccagcaacattccgaccagtgacatcggcgtgatcactagcacggaggggaggaagagcatgctgaagctggctgagaggatggtgacgagcttctgcggtggcgtgacggcctcagccgcgcaccagtggacgacgctgtccggcagtggtgctgacgacgtccgtgtcatgaccaggaagagcgtcgacgaccctggcaggccgccgggcatagtcctcaatgctgccacctctttctggctccctatcacacccaagcgtgtcttcgacttcctccgtgacgaaagctctcgcagcgagtgggacatcctctccaatggcggcgtcgttcaagaaatggctcacattgccaatggccgcgaccatggcaactgcgtctcgcttcttcgtgtcaatagcaccaactcgacccaaagcaacatgctgatcctgcaagagagctgcacggacgcctcgggctcgtacgtcatctatgcgccggtggacgtggtggccatgaacgtggtcctcaacggcggcgaccccgactacgtggcgctcctgccctctggcttcgccatcctgcccgacggcccgtcaggcagcagcaacatgcaaggcggtggcggtggcggcgtcggctcaggcgggtcgctcctgacggtggcgttccagatcttggtcgactccgtccccaccgccaagctctcgctggggtcggtggcgaccgtgaacagcctcatcgcccgcaccgtggagcgcatcaaggcggcggtctccggcgagagtgttacccagcagtagctagcttagtcgaatcagacactcttcttatccttgcatcattgaaggagcagcaagttttagagctttcatcagtgggaagtcaagaacgcacctcagactctccttgccatgtggtgctcatagttcgagttcttttttcgcctagtttccccaaaatttctgggtagaaatatttcagtcgcgcaacaagaaaatgagtcaccactacgcaagggttgttggttcgggtattgacttcctctacatgtcggcctctcggatgctgctacctctgaatttaggcttctttttcttctcttgtgggatacaaaaaccgtaatttagcatgtaatttgtgctgttgctgcagttgttcagatttatccagcatatatcctggattccccaaattgagatttatttgtgtcccttagttttgtgtctagccaccatctcagacgtgcctgtgtgtctcagttattgccttgtgcttgcatacttgcgttattgctgagtgtcttcactgctattttgcagcttttaaattctcagttagtttactt

SEQ ID NO: 28154 - DNA, 2305 bp, Zea Mays
ctgaacagccccccggtcgctcctcctccctctaccctccagctccagccgccagccgccagccgcccacgcccggagcaccgccgcaacccgcagcgccgctcgcccggaggccggagcaccgccgctctccccgcacggagcaccgccgcgaccacgccgctgtccatccgccgctccgcgctccctccttcgaccttcgccttggttccgacgcggtgaccgtgcgctaaacccttcgaccttcgcccggaggcgggagcgcggcggaccggagtccggagcaaccgtgagacgagcaggggcggccggcgggcgcggatatttgggcgcaacaactttctgcccttccatttctccaactaagaaggaataggatgccaagagagtttctgcaaccccaatgaagatggcaccagctccgcctccggaggggactgcaattctgctaattcgtggagctcagagttctatcttaacggtgctgctagttatgcttgggtgttagtgctatggctactcattaccaagctgctaccttgattgcctctccgtcttacccaaatgccattgcttggtcaagtgacaatctcgtggctgtcgcatctggtcatattgtaactattctgaacccagctgcgcttgatggaccccgtggattggttggacttcgtcacagtgacccttttcctataggagtggttaagagagaagatctcttggagccatgtttattgcccacttccttagcgcgtgaaactgaaccatgtgcccgatcgatttcatggtctcaacaaggatttgcacctaactatgggtgtttgctggctgtttgcactgtgaatgatcatgtgaagctttaccgatcaccaatttgggagttatgtgatgaatgggtagaggtcgcagatatatcacagttgctgtttaactattataaaattataaacttcggagaggataatggttctcatttgacttcttcgaagaatacaaattctggggaggcagaagttttaggatctacttgtcgatcggaagaatctctttatttcaggggtcctggacagagaaaaataaagccagcaagagttggtggttttatttatgacggcaatgaagttgatttagatgcttcaaaggatgcagacttctcgatggaaccatgctcaaaatcaaagaagaaatctttgaaaaagactgtaaaacccagggatgaagtggttgctgtaaatggacgaaacagcacagggaatgttaaagcatcattgtcctccaatgaacaaaacaaatctcttcctcttatcacggcaaaacagtatgcctgtcgtgctgcacatttgtcttcccttgtagtttcatggtctccagttgtgtcattaagtgatagaacttcttgtttattgaggcattggtgcattcttgctgttggctctaaatctggaaatatttctttttggaaactatataagccagaatattacacaatagatgctggtgtggttaccagtgatccgatgctcatcggggttttgcatgctcatgaatcatgggtcaatgccataacttggcaagttctttctgcgggctcttcaaaatcctcgttgcttttagctactggatgctcagatggaagtgttaagatatggttagggaatattgaagggttaaatcaatgtgcaattggagaagaagtgccatttgtgttagttgctgaggttgccgctaatttatcagctccagtgtcgtcaatctcattgggcatacctgcccggtctcaacatgaggttagtttggcaattggaagagtatccgggttactagaaatatggatatggaatgcatctaccaacaaaattgagagttccagtgcatggcatgcacatgatcaagtggtttacgatgggctatcgatggcaattgtttattcagctgcagtcaggccaccagggtaatgggtgtattgagcccttcttcagacaattgttcttgacattaacgttgtttccaatacaccttccaatgctctgtacattgtgagaatgaaaatgaaaaacgtagtgttaaaaatttggtatgatgctatgtgaagcaagcagtattctaggtgcgccaagagggtgaacgcttcaatggcagcatgaggcagcaggaacgtgtggtgagcgtgccttggttataatatatatcaggttgttagtcttcacttcagactttcattttcttaggctataggcagcagactgcgcatatcaccgtgcaaaacactgttttatattgtactactatagactgcactgtttac

SEQ ID NO: 28155 - DNA, 1084 bp, Zea Mays
gaatagcaaggatcgaatggacagctgattgcttgagcccatcggacggccgcgtggctcccaggagccctatatcaccatccttgcccaccgcctcccctcatcaccagcgtccgccaccgccgccgcctttcgtaccgcggcccctaaacccctttcttatggaaccgatgatcacagtctcagagacgagtttgccaaatatggacaagttattgaagctaagattatccttgatcgtgagtctgggaggtccagaggttttggctttataacttacacgtcttctgaggaggcttcggctgccatcactgccatggatggaaagactctggatggacggaacatacgggttaatcatgctaacgagaggacaggtggcttccgcagcagcggtggttatggtggtggcggctatggtggtggtggtggtggctatggtggcggtggctatggtggcggctatggtggtggtagcggtggctatggcggcggcggcagtggtgactatggtggcggcagcggtggatatggtggcaactacggcgacagggctggtggtggctatggtggtggtggtgattatggagttgcagctttggcgcaatgggtggttccagtggcgctgatgggttctctgccggcacacctggtgacggtaacaagaatgatgaaatcatggatgatctcttcaaggacgatgagcctgacagctacgccaacaagaggagctaatttgtgtccaccaccaccatgcgaggccgtgtggattctaggccatatgtattcggtagtgttttctgttaacatgataggtgtctgatgtctaaataatggaacgagtccttttgttgagtttgagttgtggaactttcaaagcgtgcgttgcatgctggcgcttgtgccggcaaacatggcatactttcatgttatattgttatttgctagtacctgtgtgccttggtgggagtcgatctggcttacaaatggggtcttgtccgagaattgccagcagaccgtgtagactgcactgttgccggtcgtgcggcagaactgcagtaagacattatgcagcagtttatcc

SEQ ID NO: 28156 - DNA, 1979 bp, Zea Mays
ctaatggcatggcagattttgtaaccgtagggtgatgacggcatttggagcatcgttggtgggaaggcatcttgccggagaaatttcattttggaagtagtactaaccaacgcttttggtgaacctgtgaaggataaagaggtcgtttcttcacttgtctatgctgatgatggaacagtagttgcaaaatcaagggatgattctgagcctcctttgcttattacttgcgaaggacttgaatatgcagcgataagcaggcctctaccaattatacgtgggcgagcactatttaaactcaagatatctcagctctcttccaaatgtgacaataagctcttccgtattaaattctctacacttcacatgcaaagatattcttttctggaagcatattccaaaccgattcgctgtatatctcgaagccgcactgtccgccccttgggtcctacaaagcgggcgagttctgcaacagcaaatgaaattgacatgctcagtaatggccaagggtttgttagtactgacaaagtaaatagtcgtggacattcagtgtgtctgcatacgcccatgtttcccaagatagaagatggaatggtggaggtagtagaggcccacaaaatagtatcacagaataagaatgccagaaaagtggtagtaagcaaagaagcacagaatgtaatagggactgattcctcaacatccaactatgacagctttgattcaggaagttcttggagtggatcagaaggagatgatggtattgaaaccttttcagacgctgtggttttcagatactgtctagacagcacatatgaccggtcaaagtttcttagaggtgcatctcttactgttaacaaagatgacttggtaaaacttgcagaccgagtctcgttgtatagtggatgctcccaccacaggtaatttaactcttgtatctgataaatttttcctcactcgtattattgacagtaattctgcgatttatttttcccttctagaaaccaaatattaatgtcgaagagattgctcagagagggtgctgacacttggaacatgatctcaaagaacaatgaacgtgctctttggtcatctgccattccagagatcataacaaaatttacgaacattgcccattctgtgcgtaggggtttatcagagcaggatcttgaggttttaagaggcattgctggttgtggtgaggacataggaagagatgaatttgataggctatggtgctggttatacccagtggctgtttcattatcgagagagagaattaaaaagctgtgggattgcacagcacctagatggatagagggcttgattacaacagaagaagctgagagtgcactaagaagttccagggaattgttaaaggaggcaggaacatttgttctcagatttcctatcacccgaagctggccacatccagatgctggaagcctagttgtcacttacattggctctgatagctcaattcatcataggctactctctcttgattccagtgatgctagcgctgagaaactgcaagatttgctgctccaggaaccggaactatcacaattgggcagggttgatcgggtctcaatcaccatccggagatgaccgaggcttcaaacggttaaacttacattcaaaagcaggatttaggatgctgccacgagaagagggtcagcagcagctcgacgcatacaagttcattgtcatccaagagcatagcccataacacccattgcctgttttttttttgaatcaaacacccattgcctgttgttaccatgtacaggttgtaaattggttcccttggtagtttagttcgtacaaagagaggtactagtgaggtctagttgcttcagaaaaccaacagtaacatgagctaccatgtgtgtcgcaaaaagaaagaagctgtcatcatgtgcctcgaaactggaggattttcagtggctaacatgttgcatatagaattgacagttgattta

SEQ ID NO: 28157 - DNA, 2101 bp, Zea Mays
gtttctacagctgtgtaggctgctgagcgatttaggccttagtgtaggcgtacaatctacgtcgacgccaaaattaaatcaccttcctacatccatagttgatatgaactggtgagattcttactgatgcactaaatttcaatcttaggatactctttaattgatgtatgctttgcttcagtcgtataatattagagcaacttatcatcccccatgttttataatccatcctagcatggtacatttttttctgcacaattgtacatggaagcattagtcataggatatcggttgttgaagtacgtcgtcaagtgtacatggaagcattagtgcattgaacggccgaagaatcaccgcaggtacatggctgatgtgttcatcttctagaggatatcttgcaccagagtacaccattcaagggcagctgaacaaaaagagcgacgtctacagctttggtgtgctgctgttggagattgtcagtggcagatgccacactgatcctagattacccgttgacgagcagttcctcctagaaaaggtctggacactctatgagttcgatgatctcgagagcatcattgataggacactaaagcgcgattttgacaccgaggaagcactctggttgcttaaggtaagtcttgtgtgcatcccggatagccctaagatcaagtcctccatgtcaatggttgccaagatgctgcaaggtgagtgtgttgtgggtgataggatcatgaggctggcctgatcacagacgtcatggacctgaaagtcaggatggtagagccggttcagttcagcttgacatcatgctcgagcactatcgcgttgtggcctggggcgcgatgcgcccactccttgttggggatttcccattcagctactacgagtcatgccgtgtaggtacgcggttgttgattcaatcgtgagggtcctcaattaaggtcgaatggatgcaatcaaaactagaagggtgtgcgccatcgaggatcactgcagctaaggcaatcgtgaaggctggaatcgttgttatggcaccgcaagctattagtgtgctaggtggatttaggcctcaagggaaaacgattgacaatgttgtaaaggttgtggagacaacacttgccatgcaggaggctggatgcttctctgttgtgtattagttgttggcagatgatttataagatattgagatcaaaatcaggatgtttccaaactgtctataatcaggatggctattgtagcttttacagtaggttggtattatatgtttccaatttgtgtttttattaaaccattgtctaattggtgtcaggtcttcttcccatgggcggatcattgtcgactggtggtgtcaggtcttcttcccatgggcggtgccctggagcgcctgattgtctcacgtatttgaccagcaacaagggacgaagattggagctgtgtggattgtgtggaggcgacacgggtcaggagcatttcatctgatcccttttctctgatggatatgctgatattcaaggctgtggaagagcaggtcaagaagagagtagagaataaggcaatgatcttcgagcagaatgccactgatagtgagtgcaaggtcgatcctaaagtgctctccaagctatatgatcattgggtggatgccacacaccaaggatgtctgccttgactaatcaccgattagctgtagctgtaaattttatgtatacatggtttcagttgcgctcgatccaattgtcttaaccttgaatggacattttgatgtttctttcatgaatgttcaggtcaacggcaagataaaccaattgcgttgtatgagttttagatcataactcaagttttttgtagatcttggtgctatttcatatgatgtgtcatgtttcagtgattgctttatagtgaacccgtaagatgtaaaatgacctttatgacagaaccatatgtaataacagagtattctgaggaacctttgttgaagtaaatgtaatcgagtttcctagcaatcttgttcctgcagacgagcattggaaaataacagagtattctgaggaaccttagtcgtattaagtttgtgtagaaagaaactgatcataatataatg

SEQ ID NO: 28158 - DNA, 3691 bp, Zea Mays
catttttaagagtagagaagaaaacactggaccgccttcaccctgcttttcgtcttcctttcaccccgcttgcgctctctctccctctccccacctctctcctgcgccaactgggcgaccgccgccgccggctgccgggccgccgcacgcctccaggtgcccaggtcttcgtaggtcccttagctcggccttcgtcagggttcggggtccttcgctggcgacgatcacccatcaggtctcctttgaaagaagaattaggcagcacatctttacgaatcgaggatgtcagtttctatgaaggacctggacccagctttccgtggctctggacaaaaggacggcttggaaatatggcgtattgagaatttcaagccgatccctgcccctgcatcttcgtatggaaagttcttcatgggtgattcttacattatcttgaagacaacagccttgaaaaatggttctcttcgccatgatatccattactggattggtaaagatactagtcaggacgaagctggaactgctgcgattttaacagtagagcttgatgctgctcttggcgggcgtgctgttcagtaccgagaaatacaaggcaatgaaacagaaaaattcctgtcctattttagaccatgcatcatgccacagccaggaggagtggcatctggattcaaccatgttgaggtcaatgagcaggattacaagacccacttatatgtctgccatgggaagcatgttgttcatgttaacgaggttccctttgctcgatcatcccttaatcatgatgacatatttattttggatacgaagtccaaaattttccagttcagtggctcaaactcatccattcaagagcgagcaaaagctcttgaagttgtgcagtacatcaaagatacatttcatgagggcaagtgtgaaattgcatctgttgaggatggtagaatgatggctgatgcggaagctggtgaattctggggtttttttggcggctttgcccctcttcctaggagggcacctgcagaaggcaatgagaaacatgatgaaactgctttcaaattgctatgttttgaccaaggaaagctggagcctgtcgactgccaatctttagcacatgaattacttgagacaaacaagtgttacttcttagactgtggtgctgaattgtatgtttggatgggtagaattacatccctgatggagagaaagggtgctagtgaagctgctgagaaattgctctctgattcaaaccgaacaagaacacatataatcaaagtgattgaagggtttgagactgttacgttcaagtcaaaatttaaggagtggccacagacacctgagttgaagttgtcatcggaggatggaagaggcaaagttgcagctcttctcaaacgccagggcttaaatgttaagggtttgatgaaagctgctcctacacaagaagaacctcaatcctatattgattccactggcaatctgcaggtttggcgtgtaaatgataaagacaaggttcaactctcaccctctgaccaatccaaattttacaccggcgattgctacatatttcagtatacttatcctggagatgataaggaggaatgtcttattggaacctggtttgggaaaaagagtattgaggaggatagggtaatagcagtttcacttgcaagtaagatggttgaatctgctaagtttcaggctgtccaggcgcgcttttatgaggggaaagaaccgatccagttctttgtgatatttcaaagcttccaagtgtttaagggtggtcttagttctggatacaagagatttatcgctgaaaatggcatcgatgatgaaagttattctgaagatgggcttgcactctttcgtattcaaggttcaggaccagaaaacatgcaggcgattcaagttgaacctgtggcctcatcattgaattcatcatattgttacattctacataatggaaacactgtgttcacttgggctggaaatctgaccactgcattggaccaagagttaatggaaaggcagcttgatgttattaagccaaacacacagtctaggtcacaaaaggaagggtcagaaacggaccagttttggagtttactggggggcaaatctgagtactcaggccaaaaaatggtgcgagaactcgaaagtgacccccatcttttctcatgcatcctgtcgaaaggtaattaagaatgtagattttgtagttttgggaaagttatccacattaacagttcaaatacatactgatctcgtactgctgttctccctattaatgttcctaatctgtcgggtccatgaaggcaatttgaaggtcaaagaaatacaccactttactcaagatgatctaatgacagaagatgttttcattctggactgtcacacgagcatatttgtttgggttggtcagcaggtggatgttaaaggcaggttacaagctctggatgctggggagaaatttattgtgcttgattttcttatggaaaaccttgcccgtgaaacaccagttttcaccgttatggaggggaatgagcctccctttttcactagattcttcacctgggactccgcaaaatcactgatgcatggcaattcataccagaggaagctcgccattgtaaaaggtggaggtgctccagcattggataaaccgaaacgacgaacaaccgtctattcaggaaggagtactacacaagataaatcccaacgctccagaagcatgtccttcagccctgaacgtgtgcgtgttaggggaagatctccagcattcactgcattggctgctaattttgaaagttcaagcaacagaaatctttccactcctccacctgtagttaagaaactttacccgaaatctgttacacctgatccgtcgaatactgcttctaagtcacctgcaattgctgctctggctggttctttggatcacccttctcaaactcctgctctagaattcatgaaaggtggctccgagtcagagaagccaaaacaggagggagatggtaaagaaggtgttgatactgtggccacaagagttgaatctctgactataaatgaagatgtaaaagaaaacgagccagaagatgacgagggccttccgatttacctgtatgaacgtctgaagaccacagctgctgatcctgttactgaaattgatgtcacgaggcgagagacctacttatcttcaactgagttcaaagagaagtttgggatgacaaaggaagcatttagcaagcttccgaagtggaagcagaacaggctaaaaattgctcttcaacttttttagcctgatcatcaacacttccaatgtaatcaccatctgcaatgccacatcaattttcacattgtcctggatcggtctcctttttcctagtttggatttgttttgctagctaagtagctctcttattcttccagttcataggtgtgctattccctttttcctttttttgtcaagtgctcttcattgattcaaggtcacacaggtttgattctgaggcttgatttttttgtgtatcaactctgcctgctgtgttctttttttgtttttgagatgagttgcggtttgagggagcgataagtatgtacagcagagtgccggcactgtaacatcacaataccgttatctttgatcaatataattattttttgtgtgtaacttaatattgtttttccagaggatttaagg

SEQ ID NO: 28159 - DNA, 1736 bp, Zea Mays
aaaacgaaaccctcgcatggacgatgctgactcgcgtcactgtgtcagggctacactacactcaccatagcacatgatacccatgttaacgtgaacggaatccatccaacaagcaaacacacgatcagcgcaaacgaaacacgacaacccatgattgaggcgtgcgcgggacgtgacggcgaggcggcgactagtattaacctaccacaacaccaagtccccccccacctccgcattgtctccgccgcgatttgtcaacgtgacgtcacgccgcgcctccgagagggagccagtgtggtggaggacacgaggctgccggagccgcaggtgttgctccggtcagcatcggcatggcggggcggatggtgcggagctgcgtgcagacggcgctcaaggcggccaactccgtcgtggggctcgccggcatggccgtcatcctctacgcgctctggatgctccgcgcttggtacagggaggtcgccgacctccaacaacacctcccggtcccctggtgcatctacacatttcttggactggggatctttctgtgcctactgacttgctctgggcatattgctgccgaaactgcaaacggtcactgcctctcttgtgtatcctttttagttgatagatacatggagttagatgttgcttcatataccagcttccattgcttgtgtttgcttgctgactacctatgggtaattgctaaatacatggagctacatattatctgatataccagctgccatcacttggggtttgcttgttgactacctataatggatcagtggttagcagcttctgctggtttatccaaggttttcagttagtgcgacctgacgttgatattgcgtctctttttccttaacctgacaacgtagtacatgaccatcgtatttgtgcttattatgctggaaggcgcaatcactatggatgtatttttgaatagcaactgggaagaggatttccccgctgacccatcaggcaagtttgaggatttcaagcacttcgtgagatcaaatttcgagatatgtgaatgggtaggcctctcagtggtggctgctcaggtgttatcgatcattcttgggatggtactcaggacccttgggcctgaccgtgagaccgactatgacagtgatgatgacgtgaccgtgcctgcaaggctgcctcttttgataaatcagtcccagcatggttcatactatgctgaacctaacacgtctggaaggagtgattcatggaaactgcggattttagacaaggtcaacaactaagatcttaaggatctcatacaacagaccctccagtaaagactctctctccaaggggttcgggagaatgataagagtatacctttttcttcatctcatggagagatgattagcagcagcagtagaatagtttacacacatttgaatgcaatccaacatgcacaagtatttgagtagcatgtgacttgacccccccccccccctcctacaaaacctacacaatgtaggggaaggatgtttattgtaccaaaatgtttcagaaaagagataaagggcatgaacggtggtggtgccttcactgaccaaagacagaaatatttgttctcccccccccccctgcctatcagctcagctgcatcatgcatgtgtttttgatctgcttgtcgggccggcaggtttcctatttgcaccaactgtcaatgccaaagggtgaaaaaaaatgaaatgaaaatgtcttgaaat

SEQ ID NO: 28160 - DNA, 212 bp, Zea Mays
aaaaaggggagaaataattaacaaacaaagggaagtcataagaaaaacataagatgaagaaagttgataagtgcattccatgtcatgagcatcacgtttattttatgacacactgcaccctatgaatagtatgatataagttgtctatactttgacctaaatatgtgcttttggcatttgagtacaaaagtgttattttctgaaatgcacat

SEQ ID NO: 28161 - DNA, 766 bp, Zea Mays
aaatgtttggatgggagatgattgcaaggaaaaggaaaggagatatttgcttaaggaatttcctgaactttgtagcagcaaagatcatgccaaggttttagaagtggggtgtgggaatggaagcactgctgtttccattctacggtctagtgaaaggatcactgtctttgcttgtgactgtagtaaagacactcttgagaaggcatatgaaattatatccaatacaaaagggattaatatcaaggataggttccacccctttttaatggatgtttctaaagaaactttcccagattggttattttgcaaagcctgtcaaacttcgctgggaaaagctgctgcatctttacttgatccaagtcaccatggaattagagaagagcacccagtcttccttggagagaaccaatgttgtgctggtggcatggattttattaccatgatattcacactgtcagccatacccttcgacataatgccaactaccatagaacaatgtgtttctgttctgaaaccaggcggccttcttctttttagggattacggtctttatgacatgacaatgcttcggtttttacctcatcaaagagtagggtttcgggaatatatgcgatcagatggtaccttttcatacttcttctcattggatactgtgagagaactctttcgtgctgctgggctagtagaggttgtggccgccagaagctaattgtgggcgccaaacgccctgattctaggtcggcttttccctgaagcgcttctttcg

SEQ ID NO: 28162 - DNA, 1985 bp, Zea Mays
ggattggaaccacggtcacgaagcgcagcccaagccagccccatcccccaccccccatttccccaataggccaaccccgtctccctcctcagcaacgtgctcggtttcttcctccctcgaatcggctgcaccccgtgccgcgatacgaaaacccaccaaaccctaaccctagctgcagtgccactaccgcccgcttgcccggtctccggagaggaagccgacccaagcaacgatgccgtccgggtcagcgacgcaatttcggtacacgcagacgccgtccaaggtgctgcacctgcggaacatgccgtgggaatgcaccgaggaggagctcgtcgagctctgcaaacccttcggcagggtcgtaaacaccatgtgcaacgtcggcgccaaccgtaaccaggcattcgtcgagtttgcagatcaaaaccaggcaatttcaatggtgtcctattatgcttcatcttcagaacctgctcaagttcgcggtaaaactgtctatatccaatattcaaacaggcaagaaattaccaacaataaaggcactggggattcttctggcaatgtcctacttgtaacttttgaaggcgttcagcctaatgatgttaccatagaagtcattcatttggtattttcggcatttggatttgttcacaagatagctacttttgagaaagcagctggtttccaggcacttatccagtatactgatgccccaactgctcttgaagctaaaaactcattggatggaagaagcatccccaaatatttacttccagaacatatcagtgcctgccacatgcgcataaccttctctgcacataaggatttgaatatcaaatttcagtcgcatcgcagcagggattacaccaatccttaccttcctgtgaaccaaacagcaattgaggggattgtgcagcccactgtaggccctgatgggaagataaaggagcctgagagcaatgtacttttagcatcaattgagaacatgcaatatgctgtgacggtggatgttctgcacactgtgttttctgcttttggtgctgttcaaaaaattgccatgtttgagaagaatggtggaatgcaggctctaattcaatatccagatataacaactgcagccgttgctaaacaagctttggagggacactgcatatatgatggtggttactgctcatgatgatagaagcagagactacactctttcagaccctaatgcgcagctgcaagctgctgcacaggcgccagttataagttctccgggagtggcatggcagaaccctgcatcagcaccagctgctcctttctatggaagcacggcggcttcaactcctgttggacaaccgcctgcttggaaccctaacatgcaggcccctggttttgcatctgcatcgacagcgtaccccaacccaccattaatggccaactccacgccttactatcctgctattggatcaagttcaggtgccccgccggtatcgtttcaggcttcacagcagaggccacagtatggcatgccccctggtgctccaccgcacgcaccaccagctggccaaccaatgtacttccagaaataagtggtttcgattcaatgttatcaaagagcattcacgcatattacctgcaactattgttgtccgcaaatgccatctggaatttttttggaagtgcattgtaactcttgtaacttacgagcgccctacgcaagaataccccaggctggctggctattaaaccgtcaaaaatagttttaacctattagcctgcgtggtatattgttatctcaatgccgagttgttttgatgcctcaagtgtttggaaagaaagtatttcgaaaccgtggttttggaatacagttttaagatgtcacgacatgactgtagtactggaatacagttttaagatgtcatgacatgactgtagtactccctctatagaactgtattttttatatcgttcttaacaatacgtgtttgatgattatctca

SEQ ID NO: 28163 - DNA, 1750 bp, Zea Mays
ggaacaatcggcatcagagtggcttttcacatttttataggccctagaactagaaattctgctcatgcttttatccttgttatagatgggcagccctagtcccaatgagtcactagtttggtgttcgaagcagcctctccgtatttgtgggggaagcgcttttctaggcctcactcatgtatagcaggagcttaaaactgaactgttggtagctctgttcttaaggcgtcgcctaggcgtccaggcggtggtcaaacgcctaggcgccttgcccgcctacctcgcctaggcgtcgcctaggcgccgcctaggcgtccaggcggtgctccaacgccttggaccgccttaccgctttaaaaacccgtttccatgccatgtcattctttgcttcgcaggagagtgacgagagcaacacagaatggctctctggttacgtagaggactgcttttcgagctccacgtcgtacacaaatcccgtctctgcaatggcaagcgagggtgtcggaaaaccaaagctacctccaccaccatcctccaacggcaggagaaagaaacggagcttggcctccgtcatgaccaacggcgactaccaacaattcgtcctcccgctgtacgtcgagccaccgctgatcctgatcgaccagaaacactggatggcagagagcgagctgatccaccccaagaaggacgacgacgaccgagaggtttgccagcaacaagggcaggagcaagagaagggcgtgccgcggctggtgaagatgtgcagcaactgtctgtcaagccaaacgccacggtggagggacgggccgtcggggcgccagatgatgtgcagcgcatgcggcatgaggctcaagccagagaccaggttgtcagccgagcagcagtgcggccaggaagaacccaccaggaaggagcaagagccagacaggaagaggaagaaggcggccaagaagacgtgctacgagagcagcgacgccccgccgtcgtcggaccagcaagagaagcggtgcgcccactgcctgtcctccaagaccccgcagtggagggcggggcctctggggcccaagaccctgtgcaacgcctgcggcgtcaggttcaagtccggcaggctgctgcccgagtaccggcccgccaacagccccaccttcgtgagctgcttgcactccaactcccacaagaaggtcatgcagatgcggcaggccgtcgcgcagcagcagtgaggccgacgtctcccggaatctatcgttggaagcgcgttaggggatctcttagatcgtagcttagtcgatgctcagagaggatgagaacagagactttggttatagtagtagtaggcaatcgtcgttagctctagcggtgttctagctcagactgatttgctcggtgtttttagacgtcggattcaatacaatctcgatgttgtcctgaattgtgctatgggttttcggtccattagatgttcaaggtttcaattgggaactcggtgtttaaagagaattgctatgaaaaggcatcagttcctggaagatctggggttgtacgttgcctggcgcgatctcgtcccagaatcaatggcgcgtttttctggcaccaagacctccaggtgcagtgctttgctttgctctgaaccaatggcagcaggttcagaacacaggtatctgcaggtcaaggtcgtccaagtatctgctaccaagctgcctttgggaggcagaacgcaacgatgggacgcaaaagtactcgtcttcgtcct

SEQ ID NO: 28164 - DNA, 3551 bp, Zea Mays
catgtaccacccttagttagcactattttcatataaaaccaccatttttaagagtagagaagaaaacactggaccgccttcaccctgcttttcgtcttcctttcaccccgcttgcgctctctctccctctccccacctctctcctgcgccaactgggcgaccgccgccgccggctgccgggccgccgcacgcctccaggtgcccaggtcttcgtaggtcccttagctcggccttcgtcagggttcggggtccttcgctggcgacgatcacccatcaggtctcctttgaaagaagaattaggcagcacatctttacgaatcgaggatgtcagtttctatgaaggacctggacccagctttccgtggctctggacaaaaggacggcttggaaatatggcgtattgagaatttcaagccgatccctgcccctgcatcttcgtatggaaagttcttcatgggtgattcttacattatcttgaagacaacagccttgaaaaatggttctcttcgccatgatatccattactggattggtaaagatactagtcaggacgaagctggaactgctgcgattttaacagtagagcttgatgctgctcttggcgggcgtgctgttcagtaccgagaaatacaaggcaatgaaacagaaaaattcctgtcctattttagaccatgcatcatgccacagccaggaggagtggcatctggattcaaccatgttgaggtcaatgagcaggattacaagacccacttatatgtctgccatgggaagcatgttgttcatgttaacgaggttccctttgctcgatcatcccttaatcatgatgacatatttattttggatacgaagtccaaaattttccagttcagtggctcaaactcatccattcaagagcgagcaaaagctcttgaagttgtgcagtacatcaaagatacatttcatgagggcaagtgtgaaattgcatctgttgaggatggtagaatgatggctgatgcggaagctggtgaattctggggtttttttggcggctttgcccctcttcctaggagggcacctgcagaaggcaatgagaaacatgatgaaactgctttcaaattgctatgttttgaccaaggaaagctggagcctgtcgactgccaatctttagcacatgaattacttgagacaaacaagtgttacttcttagactgtggtgctgaattgtatgtttggatgggtagaattacatccctgatggagagaaagggtgctagtgaagctgctgagaaattgctctctgattcaaaccgaacaagaacacatataatcaaagtgattgaagggtttgagactgttacgttcaagtcaaaatttaaggagtggccacagacacctgagttgaagttgtcatcggaggatggaagaggcaaagttgcagctcttctcaaacgccagggcttaaatgttaagggtttgatgaaagctgctcctacacaagaagaacctcaatcctatattgattccactggcaatctgcaggtttggcgtgtaaatgataaagacaaggttcaactctcaccctctgaccaatccaaattttacaccggcgattgctacatatttcagtatacttatcctggagatgataaggaggaatgtcttattggaacctggtttgggaaaaagagtattgaggaggatagggtaatagcagtttcacttgcaagtaagatggttgaatctgctaagtttcaggctgtccaggcgcgcttttatgaggggaaagaaccgatccagttctttgtgatatttcaaagcttccaagtgtttaagggtggtcttagttctggatacaagagatttatcgctgaaaatggcatcgatgatgaaagttattctgaagatgggcttgcactctttcgtattcaaggttcaggaccagaaaacatgcaggcgattcaagttgaacctgtggcctcatcattgaattcatcatattgttacattctacataatggaaacactgtgttcacttgggctggaaatctgaccactgcattggaccaagagttaatggaaaggcagcttgatgttattaagccaaacacacagtctaggtcacaaaaggaagggtcagaaacggaccagttttggagtttactggggggcaaatctgagtactcaggccaaaaaatggtgcgagaactcgaaagtgacccccatcttttctcatgcatcctgtcgaaaggtcaaagaaatacaccactttactcaagatgatctaatgacagaagatgttttcattctggactgtcacacgagcatatttgtttgggttggtcagcaggtggatgttaaaggcaggttacaagctctggatgctggggagaaatttattgtgcttgattttcttatggaaaaccttgcccgtgaaacaccagttttcaccgttatggaggggaatgagcctccctttttcactagattcttcacctgggactccgcaaaatcactgatgcatggcaattcataccagaggaagctcgccattgtaaaaggtggaggtgctccagcattggataaaccgaaacgacgaacaaccgtctattcaggaaggagtactacacaagataaatcccaacgctccagaagcatgtccttcagccctgaacgtgtgcgtgttaggggaagatctccagcattcactgcattggctgctaattttgaaagttcaagcaacagaaatctttccactcctccacctgtagttaagaaactttacccgaaatctgttacacctgatccgtcgaatactgcttctaagtcacctgcaattgctgctctggctggttctttggatcacccttctcaaactcctgctctagaattcatgaaaggtggctccgagtcagagaagccaaaacaggagggagatggtaaagaaggtgttgatactgtggccacaagagttgaatctctgactataaatgaagatgtaaaagaaaacgagccagaagatgacgagggccttccgatttacctgtatgaacgtctgaagaccacagctgctgatcctgttactgaaattgatgtcacgaggcgagagacctacttatcttcaactgagttcaaagagaagtttgggataaattgctcttcaacttttttagcctgatcatcaacacttccaatgtaatcaccatctgcaatgccacatcaattttcacattgtcctggatcggtctcctttttcctagtttggatttgttttgctagctaagtagctctcttattcttccagttcataggtgtgctattccctttttcctttttttgtcaagtgctcttcattgattcaaggtcacacaggtttgattctgaggcttgatttttttgtgtatcaactctgcctgctgtgttctttttttgtttttgagatgagttgcggtttgagggagcgataagtatgtacagcagagtgccggcactgtaacatcacaataccgttatctttgatcaatataattattttttgtgtgtaacttaatattgtttttccagaggatttaagg

SEQ ID NO: 28165 - DNA, 2018 bp, Zea Mays
gtataacttttatgaagggaaggttgcggactttggtgtttctgcacagctgactaaaacaatgtctaggaggaagacatttgttggaactcccttttggatggcacctgaggttattcaaaattctgaagggtacaatgagaaggcagatatctggtctttaggtatcactgccattgaaatggctaaaggtgaaccccctctggcagatattcatcccatgagagttcttttcatcatacctcgtgaaaatcctccgcagcttgatgagcatttctcgaaaccaatgaaagagtttgtctcactatgtttaaagaagaatccagcagagaggcctagtgccaaggagcttcttaagcatcgtttcataaaaaatgcccgaaagactccaaagcttttggagcgaataagagagcggccaaaatttgcagcaaaaagcatggatgccacacaaaatgggcaaacacatgatgaagaggaggattttggtacaggcactatcaaggtcaataggacaaaagatacagctccatctttgagtcaaggaacagttaggaaatctgcagtcagagatttttctgatagatcagagggcacaggaactgtccgagttgtttcaaggcctcctcaaatcgcctccacgaaggatggtagatctgatatgcctcaaagtccaaaagcaccaatacgcacagctgatcgagaaaatcagtggaggtcatcagggactggatctgaagaatctctctctctcagagatactcagagcggacgagggagagtagaaagttctactgatgacaatgatcactctgtaagtgggtcaggaactgttgtgttacgctctccaagagcatctcagttgtactcaacagctagcaaccacagtgccaagcctcccagcagattctcctcttatgaagatatgtctaatagtgggacagttgttcggacccaaaatgaagacccagaaactccacgatcttcaaggtcaaggctggggatccaagaaaaaacatcaaatgctcctcttgaggatagtgccattaaccttgcagaggcaaaggctgctttgcaggctgggttaagaaagggaaatgctcgagaaagaccttttatcaacaggcatgaaaagggatcacatgagcatagatcttctggagtaaatagtcaagaggttcaaagcgaggatgtggacacgcagaaaggtcacaaattacggcaattacctgatgggcagtcagcctctcgtgctagttctgtagcttcacctgcagtctcatcattgctactcccttccctgaaagaggctactggtgacaagtttgatcggcctgctgttcatgccttccttgattccttgatggatttagaacgtgatatacctggatcatgcgaagtactggttggcagattgctacaccggctagggagctcaaaggattcctcattgcaaggtcttcaggagacggcgatgtcaattttcactaaggaacctgaacctccctctgaaaaagcaggcgacaagaagttagctaatatgccaccattggctgctcctaccgtgagcccactggcaaggttccttctcacaaggtggcaaaaccaagtttctcaagatcttaactctgtttgatccctgcgatgcagaaaagtgatttcatgttcgattcggtgtataattaatatttttcagtgtacataatgcaaactttagaactttatttcatccagtcggtctcaaccacctgttatttcatttgttttgttcatggcgaatactccctctgtccccaattaaaatttgttttacaattaatgtatgtgttgtatatatatgtttagtttcataatcatccatatgaatatggatgtaaaaatctagagctagtacgagtactatttttgggctagtttgagaacgtcattttccaaggattttcattttctcaagtaaaattagtttattttttcttaggtcatgtttttctctttattttgaggaattggaatctaac

SEQ ID NO: 28166 - DNA, 849 bp, Zea Mays
cgggcctgcggcattcctttccttctcctcgaaggcgaagcaaagctaccaacgcatacaagagtgagagcagggagcacgagcgctctgagtgagtggaagacgagaggagttggagttccccagggctagggtttcattcgccacccgcgccgcccttcccttccccaggtatcaataacacctgaggttacttcacgcggcgtcaatcgtgctgtcatggcagagctagtaaaactttacagacactcccatttggatgggcgtctgcctgcatatgatggaaggaagagtctttatacagctggagcgttgccatttgcttcgaagacattcgaaattactctgcaagatgaggaagacagtcttggtggaggccaaaggcgccagagggtatttcgggtgaccatcaaatttgctgctcgcgctgatctccaccatctggctatgtttcttgctgggaggcagccagatgcccctcaagaggctcttcaagtacttgacatcgtgctacgtgaaatgcctactgccaagtattgtcctgttggtagatcattttattctcccaagttagggagacctcagcaacttggtgaagatatgtcctctactgcattttttgaggccctccctgtaattgattttgtttctcagcttcttaatagagatatctcagttagaccattgtctgattctgatcgcgtgaagattaaaaaagccctacgaggtgtgaaagtggaggtcacacaccgtggaaacatgcgtaggaaatatcggatatctggccttactccacaagcaacaagggagttatcgtatgtgcatgtttcttagtttatatcagttgat

SEQ ID NO: 28167 - DNA, 188 bp, Zea Mays
gaggaattatatataagcggcaaccccaacctgcttaggcgttgcagggaaggagtgggggaggattggccccttgtctcacatattcaaaatttaatgctagaagactaggggcttcagatcagtgcatcatattctaaggaagacaaggatggccagaatctgcagtggttacatatatgtgcatc

SEQ ID NO: 28168 - DNA, 1112 bp, Zea Mays
ctgcatttatggaatctgaatacctcttatgattaattttagtgtatatgatgtcacaaagagagagagtttctcaaatttggctgatgtttggactaaggaaatagaagcaaactcaacaaacaaagactgcataaaaatgcttgttggaaacaaagttgacaaggatgatgaaagaatggtcacagaagaagaaggtcttgcttttgctgaagaatctggttgtctgtttcttgagagcagtgcaaaaacacgagaaaatgttgagaaatgttttgaagaacttgcattgaagatccttgaggtccctagtctcctggaggaagggtcttcttcggttgtcaagaggaacatcctgaaacagaagcaggaaagtcatgcaaagaacggcagtggatgctgtcaatagatgtgctgatccacgcgacaaggttggctgttttcgtgtgagctgccctgacgttctgctgtacatgagttgtatctacatggtcttgtgagtaaaacagggttaaagaatcagcttgtttggcggggagggggagtgagcataattgatttgtacaaaggacatggcagtttggtgtcattgattttctctctctctcttatcatctccggtttagcgaagcaattttgttgtcgtccctatggaatcctctctcgccacagtattgtactagctgacctgttggggcaactcgtgtgagcattgggcagaccaactccagcaacgctatacatacgggcgtgtataacactttacagtgtagatgtactatttgcagagtggagtttgaaatagagtgatactttgaaatagagagtgatactgggagtggaataggaaggcttagtagtagcgccgatgttggttagtagtcgttggctatatcattttctaccgtgtttggttgggaagtaaatgggatggtttggtaacaaaaatacctagggatacaatcatttcatgtgagaaatatttctgttagggcttgtttaggagctagaatactagagaggattcgataccagaggatattagaggggctaaaatctctctgctatattcaattatgaatatatgattttagtccctccaatcctcttcg

SEQ ID NO: 28169 - DNA, 824 bp, Zea Mays
tcctgccgcgctctctctcttcttctctctgtctcatagttgtctcccagccacgccgtcttcctcctcgccgcgctgcgttggccgtccgcctccacctcgtccgccggccggcccagcttccacgtcgccggccacctccacctccgcctccacctgacgaactaaaccagcgaaacaaagcactggttcttttgcaggcagaacaagattcggatggctcggcacaaagcacagctgatatgacggcttttgtgcaaaaccttcttatgcagatgcaaaccaggttccaagctatgtcggagaacatcatttcaaagatagatgaaatgggtgcgagaattgatgaattggaacagagcctcaatgacctcaaggctgagataggcggtgaaggcatgtcgacgccatctaagatgaaggaagagtcaagaccttcagacagctccgcatgagtgcagcagaagcagcatgactcgtttcagaggccgttgctgtgtcttgggcgttcatcactaacaaatacgtacctgttttaaggtctcatttgagcaagagattgtaacccgtgctacttgtgttttgctgaatggtttgccataaattgtacccgtcttcgttctgtgtagacctacccgtggttatgcgctgagcatgtagtgacagctgctagaatgctagcaccccaattactaagaattcgggattcgcaagcataatttactttgcttctgtgttagttttatcacttacatggatagtagtgtatatatttttaattggcttacatattaaattcatgttcgcaacataatttactttgc

SEQ ID NO: 28170 - DNA, 1148 bp, Zea Mays
ggcactgtcccccttccaccaaacgcgagaaacttgattccaggcagcaacccctcttccattccattcccgccgaccccgacgccgccctgtctcctcggctcctctctccgatccaatggcctacgccgcacgcctcgtagccaaggtccacctcgccgcgacgccgcaggccgagccgcgccacctctccagcttccgcgtagtttgttgctaaatctgctatctcggctgtggaaagtggtgatacatttgttggagtaaagcaaaatactagacctatcatagtcatagacaactatgatagcttcacatataatttatgccagtacatgggagaggttggagctaattttgaggtttatcgcaatgatgagatcactgtggaagaaattaagaagatttctcctagaggaatacttatttccccaggccctggcactcctcaagattcaggaatatccttgcaaacagttacagagcttgggccctcaataccgttgtttggggtttgcatgggtttacagtgcattggagaggcatttggagggaaggttgttcgatccccttacggcgttgtgcacggaaagggctcccttgttcattatgatgagaaacttgatggaactctgttttatgatattcctaacccattccaggctggaaggtatcacagccttgtaatcgagaaggatagtttcccgcatgataccctggaaattgttgcgtggacagatgatgggttgatcatggctgctcgccacaggatatacaaacatattcagggcgtgcagttccatccggagagcatcataactactgaagggaggctcatggtcaacaattttatcaagattattgaaggctacgaagcctcgaattgctctccgtgatttatctagttggaagcagcagcagccctgcgtggggcgggtgacaataagatgatgtaaaagcttgtaactacatagctcgaacatgtaaactcagatgtatatgttcggatgtcacaaactcacgacactcagagtccaactactgtacatggtcgcatgtggcgtgtcgatgtcaaatcaaatcattgaacttttagctcggtgaccgctatatttgtttttttacagtagttaccactatatttgttcatt

SEQ ID NO: 28171 - DNA, 2353 bp, Zea Mays
cacagtccacacccgccgaggccacccccgtcctcccccacgcgccgctcgcgtgatgctcgaatctacgctcgcgatggttatgccccgccgctcgctgccccagccccctcccctgcgtgcgtgcataaaaagggagagcgacgatggaaatattccgagcatggcttgaacacctggtcaatgctagatgatctgttggttgaaagactagcaagctgtccaagtggaactacgacggatcgagcaccggccaaatcccagctgacacggtgtggacacgagttctgcgctactcctgtggtcattgtttggagaagttttcctaaagcttctttatgtatattcttagtctttttttagaacaatgtcataacctactaatagttgtttatcactatattcttttgttcctactattccttgatatgccagatctcaacttttgtgctaatatacatctctaggcatgttgtatgtgcatcatttcaaaaaaaacacttaccaaaagagtggtctgtaccaaacattttgccttcaagacttcaactcataaccttgtatagtctgaaatccttaggattggttctgaacctcagtttgatggaggtgttacaaaacttagaagggatactaaatttctctttgtagtatgagtgaacagaagtaggatttgtcacaatctcactattttaccaagctaaccaaataacaaatttggccagtatgtatgtgcatcatttcaaaaaaaactgttaccaaaagggtggtatgtaccaaacattttgccttcaaggcttcaacccataaccttgtacagtctggaatccttaggatttgtactgaacctcagtaggtgttacagaacttagaagagatactggatttctctttgtagtaggagtgaacaaaagtaggatttgtcacaatctcacacttttaccaagctaactaaataccaaaattcggccagttacagacagtcagacactgatcttaacttgctcgaacagtcttaaacctttttgtatcaaaggctcatagcatatcaaacgcttctaatgaaaccttaacacaccgcaagaaaacaccaagcatcgaatttgttcagtgtgtgtgaagtagtagtgtatgatcatgccatacatatttttctacacatctcaaattctagatttaatttggttacatgttatacatgtatcttagatttttgataactggtcacagagcggttcaaattgaatttgacatggagttcagatgtcctttcatattctgttactgaggttatttccaaatagtgattcagatctaatgattttatgatgcaatttattctacaacatttaaatgccagaacgctcattagaggctgaacatttaatggttataggattaggcctaaaacggcgttttgcagcgattaaacgctacattttttgtgtttaaacgctttaagctagaaatgctgttgattttgtgtattatatttagagtatgacatttttccaagatctatgttttaaatgcaaggatattgagattttttagatattttattttaaatgctaattcatatatttttttccttgccgaatgtaacccctaagaagactgaagagactgctttgatatctgatgttgttgcaaattcaccacaacaaggttttcatagtgggcattgctggagtgatctcatctgagatgattttggcataactcctaaaagaggaggcgcttctgctcatgctaagaaagcaagctttgaccgtgaaacctaatggcagaaaagtccttcctcccccaagtccctagagcctagacgaatggcgctgcagctcactgttccttcttcagttcactcatgtagtcctattcatgtccattaaccagactaaagtagtgcatattttaaattgaatatttttcttcttttcggtgagaagtgaaaagtggaagacatttcagttctgcactttgtagttgaagttatcttcctgattggaagataaggaaggtttgaggagctcatttctgaagttgtagctggaagggagaagagctcatgttaatggtattttgactgctccaaaacactttcgacttgtgatattctttaacctatatgcgttgaagaatttttggagacaaagcatgcaagcacagagtctgctctggtggtaagataagtgaggtgacttctgaagaagcctacagagaatgtaaaaataagtgtgttattttcactgctttgacacagtctcaattgtgcaatgatttattatcacattgtaatttgacatatgctacatgatcctaaattatgttgtaatgaatgttctactcccta

SEQ ID NO: 28172 - DNA, 2429 bp, Zea Mays
ctcattgtccgtgtcatatctggaggtggagcagttgtcttctctctctctcttctatagagccaatcgcaaagcgcggtgctgtcatggaggttgggagaggagcacgtggccgtccagaatccagtgatccaccacaaccgcccgtccattctccaggccatgccgcgcacggcactgctccgcctcgccgctgcttcgacgacgcgcgcgtcctcggcttccgcggcggcgcggcgactgtgcccgtcctcagagtcagacgacggcggcgagcggcacgcggccgcccggaaggatgagctcctcccgccgccccgcacgccgcgccccgacgagcggcggctgtctcggcgtggagagcatcggagagagttattatctgtcacaatggcctccagagaccacactggcttgacccgacaacttttggattttcaacatgatacaatagatgaggtaggtgcagaacacggtccattcatggatttgaaagcgagattcatggacttcaaacagagaaactatgtggagaatttttcaaattaccaaaatcttgctgaacagcaaacaccaaagttcatggtgattgcttgtgctgactccagagtctgccctaccgctgttttggggtttcagcctggcgaagcatttacggttcgtaatgtggcgaatttggtaccaccatatgagcatgagggatcagagactagtgcagcactagagtttgctatcaatacactcgaggtagagaatgtactggtggtaggccacagtaggtgtgggggcatccaggcactaatgagcatgaaagatgattcaacgtccggaagcttcattaaaaactgggtttcaattgggaagagcgcaaggttaagcacaagagctgcagctggaaatttgagttttgacatgcagtgcaaacattgtgaaaaggaatcaataaatagctctctgttgaacttgttaacatacccatggatagagaagagggtgaatgaaggtactttgaatctccacggaggctactacaacttcgttgattgcacatttgagaaatggacattattgtaccgtgaagggttggaaggtggaagcaagtacgctataaagaataggtccacctggtcttgaccaatgaaggcctcatttacttgggtaaatttcactctgcgccctgcagttaagcatggttttgctttgccactacgctgtgcatttccgtcgcacctttgctccattgtggtattgatgtcctgcagaagcgagtccctgtatcaaataactgtgtccattgcgatgcatggcactatggcactagcatgtcagcttgctgtagtattgcatactcacgggcaggtgcatcggcattgtagttgtagcagctattgtttgatacgtacaggaactctccactgtggaagcacaaagccacaatggagtgaggtgcgacgcaatgaacaatatggtggcaaagtgaaagtctgtggaactaccggggggcaaagtggattttgtgcaactatttgtgtgtcgttttccggttgataccattgagaaaatacgaataagttacaggatcagtcatagtgcatgtaattgtcgccacatttggcgttaccttgttattgtaattgtaacatttgtaccatttgttgtatcattataactgtgagatacaatacaaatattatacggtctcggcaaatttgcttgatgacagtgttgttcgttcggaagagtcggcaatgcaaattctgtgatattccacatgttccaactaaaaaagtacgagtagcaccatgggagacatgtcacacagtaccccttcccttccgtctcccatcactccatcagtcagtcacttctacggcgccactgtcgtaaaccctagcgaggtgcgccgagaagcgctgcctcttgtagcactcggcgccgagcatctcctcccggctgagcagcacggcccggagcgccgcctgcagcgctggccgtgacgacgtcgacgttccctcgccatcgtggtgccgcccgccgacgtccagctccaggacgctccgcgtcctcccgccgacggtggctatctccgcgcgcacggccctcgcgctgacggaccgcacggcgcggcccagctcggacatgagccccgggcggtcggcgcagcacacccacgccctgacgcgcctggcggccctctccccgccgtggcagaagcggtgctggtggccctcctcgacgccgacctcgtcgccttcccccgggacggccactgccgcgcccgccgccgcggcgtccgcctcgccccgcagctcccgcacgtgccgcaccacctcccctagcagcgccgccttgtccatctgcatgattaattcgtacacgcacacgtacgtaaccgtgttcgctatcgagttcgatgatgaactgccacg

SEQ ID NO: 28173 - DNA, 2994 bp, Zea Mays
gacggcattacctaaaccataccatagaccatcaatcacttctaacacttttcccgtctcccccttcctcgccgcctccactacagggctttgctcctcccaactctcgaaaccctacccacgcgatgagagatcgatcggtcgagcgcgaattccccagccgcgagcggggggatcggccgccgcccggggtgctgggtcccccgcgccgcgggccggcttacaagacgaagttgtgcgcgctgtggcagcgcggcggctgttcccgcgacacatgcagcttcgcgcacggacacgccgagctccgccggttccccggatcgcgcacctcgttcccaccccgcgccggttttgttgtaagatgtcactaattctgcaccctaccgtgaatggttgctcatgtaatccatgtgatctatctgtttcggaagaacaacggtatgtgaccattcaatttatgagatgaagaagaaaggccatggtgcagcaaaaaaagggggatatttaactttttgccatctttatggatggccctaaaccaccagtcactgaccatctgtggagctacaaggggtgacatacatggacatggaaccacatgtgtctgggtatcaatgtccgatttaggtgtatgatttagcagattttttgaaatgccgaatagcacctgaattctgacacggtgtttataattatactggtgtcagtccgggtaactaatgtacctctggacatcgtggttcaaatggaactttattttttctccatgattttatagtagcatgttctctatgttttgtattaagtgctcgtgtgttttattaaattcgtgcttcaattcaacctcagttgctgcagatagaaaataattctcacaagtggaagcttgttgcagtctgcagaattaggcggcattcttactggttgccttttgatttaactaccattcaaattagcagactcctgagcagatttattagattcaactgctgccagaggataagatgacttttatatagattcttcagttggcatttcaacgatttattgtgacctgtaatgcttgtccctacatcaagaaggtgggcatatcagtatcttggatgatgactccactgaatgatgtccataatacatttgatgtgctatggtcatgtgcttagcagctttaacggttaattgcacatacccttgaatattgtgcatcagttagatcattgggaagtgttattctcactggtaattgcaagttattgtaattcttgcaagtcgccgcggaagatatctggacaaatgatagtagatttatattgtgatattgggattatagaagacatcaacttgtcataattgttatgtgatgttgttcatggtcttcatcaatttgattttcaacaatcaacattatgagtttggtatcatcttaatgggtatgtcagtggtttcataccatactttggtatctacccatggcattaatttttggctctactttgttgtggctaatgatattatcctggagacccttctacttattgtgcattgaattatcttatagctcaaaggctgtggtaaggttacaggcttatgggtgacctatctctattagttcatattgacacattttttgttcagcttcatttatccttttcttgtataaatttttctctatcctgacttctagggagaagagattatagaggtggtgactttagagataggtttgataggaggcgctcacctcataggaggcattcccctgatggagattccaggggccatcgctcccttcgtgaccgacgaccaaattcccaagaaagggaatctagctattcacggtctcccagtaggaagagtgaaatgaggcatgataagaagcctgatgatggagaaactaactcatctaggagtctcagtgtctctgacaataatgatgatagaaaaaaggagacactgttaagtggtgatgataaagaggatcacgaaatacagctcaaacaaataagacaggacatggaacttttgcgtgatgataaatctctcttggagataattttggatgagaagaatgctgaagtgcgcaagatttctagcagattaaatgatcttgatctgcagttaaggaaggagaaagaggaatgccacaggatgacctcaaaaattaaaaagttccttaaagcccatgctcgctttttgaaagcacaggaagaattaaaaaggtcacaagctcgttttgagagactcggtgatttacttgcttcagatattctgaagcgtggtgctaatgaagaagtttctagtatcaatgttgatgaagatccaaatgttccttatgaaaggagcccaaatgctgctatagctaagaagagatcaataccatactcaacaagtgaagaagcgaaagccgtgaagaaaagaagagagcgggactctgacacaactaggccagataaatataggtttgaaggtactattgcaggatttgaaaaactaagcaagggaaccgagccaacaaaatctttatatttgaagaagaaactgtgggaagatgaaaaggataagataggcaactttgtctcctcagccaacaccgacaagtacgaggctgatgacgaggaagtcgacgtggaatgattagaatgccgagatggtactggaatgagctatatagctctcgcgcctgtgtaaagcattatgtaatatgtatttgatgctggagtttaccttgcataaaaagaatcgtcattaatgatccttggtggatgcggtttaagcactcaacttttttgttaatttgatgaaggcaacatgccctgttacctgtacctaatataccacgtggtggctagctagccagccttgtcagtgccctggtacttttgggtggtcttgctgtgctgttcgcggcacttgaaaactgatgttttgtaggactgatgttttgtaggagtattatttgaatggtagccgttgatcttcggctgttgatgcgct

SEQ ID NO: 28174 - DNA, 4910 bp, Zea Mays
agagaggagagaacgggtggcgcgatgcgacgtcggctgtcgtgctcgtgaccgcaacctcctaccgcgatcccgatctgccgctccgtccgtccggccggcaagtccccgcctccgcctccgcgcctgactgtcccctccccaccatttcattccaattgagagccgtggggaccaatcaaccctagatccacctcgtccctccacgcgacaggagaggtatctccctgatccaactccgcatggcctcctcctccttcgcccccgacgaccagaccgacgccgacttcttcgacaagctcgtcgacgacgacgacccggccaccgacttgcctcgggccgtctccgccaccagcgtcgccgacgacccaccacccgtcctggagccgcaggttccggcgccggcgccttcggaggggtcaggcaagggcggcgccggcgtccacaccgcggtcaagcaggtgcagtgggcctccttcggaggtggcgtggacgacggccctgatccgttcgctgatctctcgggaggcgccggtgacgacgacggcttcctcgggaacacggcggggacccaggcggccttggatcacgccgccgaggtgacggatcaggacttcttcgctgggagcagctcctccgatcagcagaatgtccatggtcagcacgaccagggcagaggcagcgccgcggtggattccgcagatcccaaatctctggaggccatgtaccctgggtggaagtacgacgaggcctcacagcaatggtaccagcttgatggcagtgtaaattcaactgggaatgcagctcaggcgctggacgatagcgctcagaatgcacatcatcatcagcagcagctcgacgcggcttacctgcacaattcagcgcacgcggggcttgggacaattgccgaggagagcactaccgcagctggtgctgccaatagttggggccaaggggctgccccggagtacccacccagcatgctcttctatgcagagtatcctggttggtactttgacaccaacactcagcagtggcactcccttgagtcgtaccagcaggccgccgtgcaggctggaacatctagcacgggtcagactgttgttgcaagcgatgatgttgttgcgacttcctctctgacaggccataatgccgggcaaactgaggaccttgttgcccacaatcaggtgacacaacgcaactcatcctcgaatagtttcacccatcagaaccaatggcagaccaccgatgcacttggtaacaatgtacaatctgaaagcctggctagtagcttctatggttttgaacaacacatgaatgctgagactaccagttcctctacgagccaacagactggttttcacacagctgaaacaattacagatcactatggtggacgcaaagccttcgaatcatcaagtcttcagagtggttatagctcctctgacagtcaacaatccagtcacaaggcattcgaaccttccacgggttatcaggctggttacaacgggtttgaacctgcttcaggtcaccacacggcgtttgaacctgccatgcataaccagagtggatacaaggcatttgacccttctacgggtcaccatagtgcttcgtggggattcatgccttccacgggtcagcagactgatttcaagggttccagagcttccacagttcaccaggccggttatgaagagtttgaaatttctagaggttacaatacaaatttcaaggcatttgaatcatcttcatctcaaaatgctggttacaatggttcccagccttcttcaggtcaccaacctaactacatgggatttgacacctctgcaaaccaccatggttatactgatgtcaatggtgttgcgagtactcaaggctttgtcccaatgcaaaccacgtaccagggccagaaacaagcaaatgcaacctcacaagggcacctgtcaaatagctatttgggtactgacaactccatgaactttaatcagcaacaatttctgggtgcaaatgcctcaaatttgcaattcggtcactccccgcatgaaggtaggtcatcggctggacgaccaccacatgccctcgttgcttttgggtttggagggaagctcatagttatgaaagaaactacctccatgcctgcaagttttaacagtggaaatcaggagacagatggtccagaaatggcagtaactaagctattttcatcgtgtaagagaagcactgttcatatgggagattatggatccctagttccctgcatgaaaagtattccttcagaaagtcagatgcaggctgttgcacaagaggtccaaagtcttctagtttctgggagaagaaaagaggcccttcactgtgcacaggcaggtcaactttggggacctgcaatcatactggcattgcagcttggtgataagttttatgtggatacagtgaagaaaatggcccacttccattttgtatctgggtcccctctgcgaacgctatgccttctcatcgctggacaacctgcagatgtttttaatgtagagaacaatgtcaacagtgactatggtgcatcccatcaacctgtggagcctggtcctaatatgttggatgattgggaggagaatttggctattattactgcaaacagaacagaaggtgacgttctagtaatcacccatcttggtgattgcctctggaaagaaaaaaatgaggttgcagctgcccattcatgctatttagttgctgaactaaacattgattcatactcggaaagtgcaaggttatgcctcattggtgcagaccatttgaagtgtcctcgaacatttgccagccctgaagccattcagaggacagaggtttatgaatatgcgaaggtgcttggtaattctcaatatatcctactatcctttcagccatataagctgatatatgcatacatgcttgtggaagtggggaaagtttctgattctttgaggtattgccaagcgtctataaaggtactgaaagcctctggtcgtgcccctgaattggaggtgtggaaacaattattttcttcgctggaggagaggatacgcactcaccagcagggtggatatggcacaaatcttgccccaggaaaaatagttgggaagatttttacctcgcttgataaatctatatcccgcatgatggtcaatgactgagatagcagaggatagtggtggcactggcaggaaaattgcacacaacagaagtgtttctgagccggactttggtagatcatccaaacagggtgctggtggatcagatggtacacagagcagtgcatcaggatccagcagttctcgatttggttggctagtgcagaagactatgggattagtgtcaaaatcccaccgccaggcaaaattaggggatcagaacaaattttactatgatgaaaaattgaagcggtgggtggaggaaggtgctgctgttcctgccgaagagcctcctcttcctccacctccaacaaaaccatctttccagaatggtatgctagacaataagttgaatggccccatgagcgtaagccatgctcccaatggagtcacagaatggaaatcctcaaattcttcagagcaaggtctgggtatgccgccaattccacctagccaaaaccagttttctgctcgtggacggatgggtgtccggtccagatatgttgacacattcaatagatcaggtgcatctggtgcaatgccatcatataacaaaccagctgctccatctatgacaccaccagctggtgccaagttcttcatgccaactgcagcacctgttgccgcggatcagatgataccacaccaagcagcagagatacacagtgaaaccatccatcaggatgagcggtcagcctcaccgccagcagaaacatcattttcttcaaccccaccacccacgcaatttccatcaccagtgcaatcaacaatttatcggcaatctagtatggagaacatctccaccccttaccagggttccggggtatcgtcattaagcaacgacagctcattctcaaaatctcgagccgcgtcctggagtgggacatactctgagcagtttaatgcttttgcgggcactatatcgcctgacagacagacgacgcattcaccactgatgcctggcaaaccaccacacagccgttccaacagcaactcatcagggcatctcaatggattggcagaggatcttcatgaggtcgagctgtaactggcgactggtcagcatgaccgtcgcaactcgtgtcttaaaggcagcgatgacaacccctccccaagcaggtgacagaaaagaaggtgcccttaaaatgctgaccacggggatgccgcagctggaatgggcttggtgtgactttgcacgagattctggggcgcgctctaaaccaccgaggtgcgtcaggcctgtactaatagagatgcagggtttttttttgtagccatatatacatatatgttggttttgtgttttagagagaagggaaagggttgggtgggcctttgtttacaggtgggaagggaagagaagcagcatgcagatgcccttgtacagataatctgcccctacccagtttgtttaaaacgcaaacaacgccattttggttttagttccctggagaaggatagaggagaaggtgtgtgtctttgtagtgtgagaagcatggctctgtagtgttgttgttatagtgtactactactgtgctagccagccgcatacacagactgtttattctttggagacgaatcaattctttcatcttgactagggcattattatttgttaacataatgctgcatcttgttatgtacgtaaaagtcaagagaaggtacaaattaagccatatgttatgtactagtaaacaatgatacaggatgcagatgcttatcgattgatacgttgatgtagcaaga

SEQ ID NO: 28175 - DNA, 1167 bp, Zea Mays
ttaaggaccttcatgcaaaaccccaaccatttccccttctgcactccacggagcagtgaaaccgacctttctcccctcccccgcgttccacttcgcggagatctagcccttgggtttcgccagcggcgaggcctaagtcatcggcggcgagccaaactccacgagcggaggaagaggaggggaagctgagacgaggaggcagctatggggcagcagtcgctgatctatgcgttcgtggcccgtggcacggtcgtactggccgagtacacggagttcaccggcaacttcacaaccatcgcctcccagtgcctcatgaagctccccgcaagcaacaacaagttcacctacaactgcgacggccacaccttcaactacctcgtggaagacggattcaggttaaggaggatttcacaaaaaggtatggtggcgggaaagctgctaccgctgcggctaacagcctcaaccgagagttcagattaaaacttaaagagcacatgcagtattgtgtggatcaccctgaagaggttagcaagctggccaaagtgaaggcacaggtttctgaagtcaagggtgttatgatggaaaacattgaaaaggtccttgatcgtggagagaagatcgagctgcttgttgacaagactgagaatctgcgctcacaggcacaagatttcagacagcaaggaacaaatgtgaggagaaagatgtggttgcagaacatgaaaatcaagctcatcgtcctgggaataatcatcgcacttattctgatcattatcctctctgtctgccatggtttcaaatgccattaagcacagccagaacactgggtcttgctatttggctttaaaaaaaaatcggtgcaccgccgcggcagcagtcaggtacgagaatgcgccagaagtggtaaatggtctctcgtcaggtgccgggcatcgaagaatcacgtagagggtgtttggttttactgaactcgtatcaaatatttggatatcaattacgcctattatatatatgtttaattagatttaataaactcgaatcgtcttttagtgtttgtaattagttttataattaaactacttaatgttcataattactatttaaacatttgatgtaaattgaacttagttgtgtggaaccaaacacactctaaagttagctcctctggac

SEQ ID NO: 28176 - DNA, 1945 bp, Zea Mays
aaatcctaaccttctctccttccttttgatcttcccctctacgcgatcgaaaccgaagctcgaatcaatcctccacccgtttccagcccctcgtcccggagccccgatccgcctcccgtctcctcctgggcaggtcccccttttccgcgtgtgcgttggccggccggttcccgatgagggggttgctggcggtggaggccgcgggcgcggcgtcggtcccggcctcggtactccacggcgccgtggactggtggcgcgacgtcaacgagtcgccgctgtggcaggaccgcatatttcacgcgctcgccgtgctctacggcatcgtctcggccgtcgcgctggtccaattaatcagaatcgagtgtagggtgccagagtatggatggacaacgcagaaggtgttccattttctaaacttccttgtgaacggcggtgagccagcatttgtgccgcttgcaatacttagcttctgctaggtgtttaatttggtggactgatcgatgtgaatgctctattcctgctcgcagtgcggtctgtcgtgtttgtgctgcggcgaaatgtgcaacttgtagagcctgagataatacaacatgtgcttctggatatgcccgggcttgcattcttcacgacatatgcacttttagtgctcttctgggctgagatttattatcaggcacgtgcaatgtcgactgatgggcttagaccaactttctattggatcaacggtgtggtctatgcaattcaggtgataaatgtgctgtggtaatttaatgctacatatgccaatgtgctcttttatagtgctgtgctgtggacattgatcacatctaaagttttaatagtctatgaaagtgcgtggcaggtaccaggtcactgtttgccattgttattagcctgcaaaactagctaatccttttgggtgccaaggactgtgataccttcctataccaataaggaaaaatatcctgtaagggctagtttaggaactccatttttcaaagggattcctattttcccaaggaaaaatgaactcatttcccttgggaaaatggaaatcccttgctagccctaaacatatttagcgcactatcttaactaccatcggtaaatgctaggccaggaacctctgtagtacatgccataattgtcttgagtctgatctcggagtaaaaactggataataatcacactgggtttgtagtgtattcatttttatttgatactgacattctggtttctggactcagttgacatcaatgtatttcagataattctatggttggttttatggtggaaaccagttcgagttatggtcattttgccaaagatgttctttgcaggtgtatcactatttgctgcccttggatttgttctgtatggaggaaggttatttctgatgttgcagcgttttcctgtagattcgaaaggaaggagaaagaaattgcaggaggttggctatgtgactaccatctgtttttcttgtttcttgatcagatgtgtcatgctgtgcctcaattcatttgataaagaagcagatcttgatgtcctgaaccatccaatcctgaacttcctctattacctgctggttgagatagtgccttcggctctggtgctcttcattctacggaaactgcctccaaaacgtgggatcacacaatatcacccaatccattagagagcaggccttggtggacaggcaaatgttttctggtggattgtcttatatagcgtggtaaatacagaaggcagagtgaaaagtaccacctttgctctcgagcttgcccagcttttcatacgagggaaggctttagaatctcaggtttagaaaatgcgatctctttctctcagatttagaaaatgtaaaatgtaatttatataactttaatattctcagtgcatatcatttgttcacatctcagtaatcgtttgcatgtttcatttggta

SEQ ID NO: 28177 - DNA, 2718 bp, Zea Mays
gggatcttgctgagcaagttccccaaggatcctacacaaccccaaggaaattacaaaccggaaccaaaggatgacagaagaccaatctgtacttggtcgacggaggatttactatgataccagttgtggtgaagctctaatttgcagtgatagtgaagatgaagccattgaagatgaggaggaaaaaaaggaatttaaacattctgaagatcacattattcggatgacagttcaagaatgtggcatgtctgatgctgtactgcaaacgctagctcgacacatggagcgggctgctgatgacataaaggccaggtatgaaattctgcatggtgagaaaactaaggattcttgcaagaaagggactgagcataatgtcaaagtggaagatttgtactgtgacaaagatttggatgcagcattggattcttttgacaatctcttctgtcgacgatgtctagtgtttgattgcaagctacatgggtgttctcaagatttagtatttcctacagaaaaacaaccagcttggagtggcgttgatgacagtgtaccctgtggtattcattgccataaactggcatctgaaccagatgctgctgctggtgctgatcacatgctttttgatgttgaggagccaactcactcatcagacaatgtgatgaaccagccaggttcaaataggaaaaagaacggctccagtggaaggaagactaaatctcaacaaagtgaaagctcttcaactgcaagagttatctcagaaagcagtgattcggaagtacatccaataagcaataaatctccacaacactcccctagtccctcaaaagttaaaattgggccgaaaggtggaatcagaaagattaccaatagacgaatcgctgagagaattcttatgagtgtgaagaaaggacaaagggaaatggcatcatctgattctaattttgttagtggatatcttttggcaagggacatgaagcttaggtctgatacacgaaatggaaataaggaattaattgtatcctcacaacagagttctccaagcacaagaagttccaaaaagaagagtacacctcaaattgggaacagctcagcttttgctgaggctcataatgattcaacagaggaagcaaataaccgtcattcagcaacagatggttacgatagttcaaggaaagaagaattcgtcaatgagaatttatgcaagcaggaggtgtacttgagatcatggaaggcaattgagcagggacttcttgtgaaaggattagagatttttggaaggaacagttgtttaattgctcggaaccttcttggtggaatgaagacgtgcaaagatgtttttcaatatatgaattatattgaaaacaacagtgcctctggagctcttagtggtgttgattctcttgttaaaggatatattaagggtactgagttgcgcacaagatcaagatattttagaaggcgaggtaaagtccgtcgtttgaagtacacctggaaatctgcaggttacaatttcaaaaggattaccgaaaggaaggatcagccttgtcgacaatataatccttgtggttgtcaatctacatgcggaaagcagtgtccatgtctttcaaatgggacatgttgtgagaaatactgtgggtgtccaaaaatttgcaagaatcgttttcgaggatgtcactgtgcaaagagccagtgtcgcagccgccaatgtccatgttttgcagctgacagggaatgcgatccggatgtttgcagaaactgttgggttgggtgtggtgatggtacattgggagttccaaaccagagaggagataattatgaatgccggaacatgaaactgcttcttaaacaacaacaaagggtcttacttggaagatcagatgtctctggctggggagcattcctcaagaatagtgttagcaaacatgaataccttggtgagtacactggggaactaatctcacacaaagaagcagataagcgtggaaagatatatgatcgtgagaactcatcgttccttttcaacctgaacaatgagtatgttcttgacgcatacagaatgggtgacaagctgaaatttgccaaccatgcccctgacccgaattgctatgccaaggttatcatggtaactggtgatcatagagtgggcatattcgccaaagaaagaatcctcgctggtgaagagttattctacgattaccgctatgagcctgacagagctcctgcttgggcccgtaagcctgaggcgtcgggagcaaaggatgatgggcaaccgttcaatgggcgtgcaaagaagctcgcccaaaacaaccgaggctgaatctgatttgattctttcattgttaggacaaatttggcagccattcaactaatacaaggaacctgtcattcataggccccaatttatttgaactcgtcattgtaactcgtatgtgcttgaattctccatggcatctggtcctgccatccgtagagttaggtcccgtttgttttgtttgttttgaggaactaaaaattaatccctctattttagtcacattgagtctctagattgtcaaacggcgggactaaaacaaagactaaactatttgtctctagttcctcaagccatgacttaaagggaataaatcacataaattttatttttatccttcctttatttcagttacactaatgatgtaataattgtatgaggtattttggtcctcttagagcatctccaag

SEQ ID NO: 28178 - DNA, 472 bp, Zea Mays
ccaacaccgctggattatactaatggatactgatccgctctacttggccgccctttgttgctgctgcctattggaagcctgcttctgagatctaagctgcgcacaacttgttctacaaacaccacttcaatttgcacggttgatataactggggattggcttgttagcgaagaaccgaagataccatgggttcttatgcaaatcacagttctcctagttctttctatcgttctgattgtccgttgcgatgtttggtgtacctagtagtatcttaattatataccttacactgtttacctttccaatggaattcttggtctagctaacattgtgagattatgtcacttttctcgttctctgtagtcattgcattttgctcctggtgttgtcttctttgtgggatgtccaatcttttgtggcctatacaagagcttgtttggttgatgccaaagctacctacacctaatcttag

SEQ ID NO: 28179 - DNA, 2000 bp, Zea Mays
aacaaatgttgcttgcaaatgttcgtgacttcgtgtggtccctagtgagggctggagcgaaaccgcccgctgtctcgcgtccgtcagacagcacgcacagacgcaggcgggcgacgcacggcagtgttgccaatggactcgcgctgcccccatctgctactgctcctccctctcctcctcttggccgccctcctgcccccgccgtcgtcgggggtgccggaggtcatctggctgccgacgagcgggggagcggggcccttgtcctgcgcgccgccggaccccgccgtgtacgaccgccccgtcatcggcatcgtctcgcacccaggggacggtgcgggcggcaggatcagcaacaccaccgcgacctcctacatcggcgcctcctacgtcaagttcgtcgaggccgccggctcgcgcgtcatcccactcgtctacaacgagcccgaagaccgcctcctcgagaaattgagtttgttgaatggagtgctgttcactggtgggtcagagaaggaaggtgtatattttgacacgataaaaagagtatttcagtatgttttggacaagaatgatgcaggtgaaccatttcctttgtttgcccaatgtcttggctttgagcttgtaagcatgattgtcagcaaggacaataatatcttggaggcatttgacgcccaggatcaagcatcaactcttcagtttcccagctatgctttggagggttcagtttttcaaaggtgtctgcttcatgctaagcaaatctttattttgctactgcttgatggggacattttagaatttagacaagttatcttgtagtgtgatatgaggcaagtaattgttgtagggtgatatgaggcaagcaacataggatggttccagtggaatattatctttttattctgtgttaccaaaactgaaactttagaatatatggtttaagctgacacatttatgcattcataaatgactactacggcataatattatctacaatgggtccctagaaggcaggggactacaagaccacatgcactccagcagagtgcggttaatttaaagaatgactgggaataaatttcttatgggaagatgtggttagtatattaaaaattattgttttacttgtggccttcgtgaattccacttgttgtaactactgacttgcaattgctcataggtttgacactgacctcatcaagaaagtcagcaccaactgtcttgtcatgcaaaatcacagatatggtatatcaccaaggcgatatcgagagaacgatgcactatcaagtttcttcaaaatcttgactacatcacctgatgaaaacggcaaggtctatgtctcaactgtacaagccaataattatccaatcacttgcacgcaatggcatcctgagaaagccatttttgagtggaggaaaccaatgatcccacacagcgaagatgcagtacaggttactcaacattttgccaatcattttatcagccaagcacgcaagtctccaaacaggcctcctgccgacaaagtgctggataacttaatttacaactacagtccgacatttaccgggaaaaaatcgaaatcgtttgaggaggtctacatcttctcctgagactggattgaacgcctgagtgtcttcaggaatctgtagttctgcactacattgctattgtagtgtaaccgtgcattagtattacccgtggtaccagaagttgtatttgtatagattcgttggactgcctgtattgcagtaacctttccaccgtatgggtggctctatagaatgcctataagcagcgcaataataatgataatgtaagactgaaaaaaaatacttgtatggagattttctgaatttaaaagtttctccaaatcaggtgaaggtcgaatgttcctggacctgattcatgaaatccatcgaatccaatttgtttggagtgacgtctttgctatggcgctatggcttggctcaagcatcttgcgtcgagaacgtcaccgtgttacctag

SEQ ID NO: 28180 - DNA, 570 bp, Zea Mays
ccgatctctgccaccagcgcacggtacgctagttgatcacgtgatatggaggactagaaccgagtcgaccacaagatgttgttaagcgcgggtttcttcgtaaggtgatgctgatggataaagttaaggatggatggcctgatcaactgccaggacaaggaagatcatcaagagatcgtcgtctaaccaacactgacttagtgttattccaggcaagccccgatgcatttgccacctccttgttgttataaaacttttatcacttatatgttgcattaggtgataggagttgagtgatgaaaaacaattgatgcattgccattccttggaatttgattactattccttgattcctgtttataaaagagaactaaagatgcttagccctgcttagataattaaaagttgtttcttttaaaaagatgatgtgttacacgggatatgggaaattgttgtgaaaaagaaattgggatggtgaatccatatggccatgatggattcaacatccagaaaaagtacctctgtcaggtaccaaggattgggaaatggtttaactaaaatgagaccaga

SEQ ID NO: 28181 - DNA, 1159 bp, Zea Mays
ttttctctcactccatctcaagtcaggcacggtgacttgacgaggcccatctaagcacactacagcaccgggcgaggcggctaggccccctcaccgtccaccggcgactgggccggccgtcgctgccgccctgcctctccaccgtcgccggcgacgagcaccactaggatcttcgggaagcccaaggagcaggccaactccaatgctttggccactctggacaagttaaatgagacacttgatatgctggagaagaaagaaaaggtgctggagaaaaaagcaaacgctgagcttgagagagccaaggagttctcgaaagcaaagaataaaagagcggctatccaatccttgaagaggaaaaaactttatgagcaacaaattgagcagcttggaaattttcagttgagaatccatgatcagatgatcatgttagaagcagctaaagctacaacagagactgttgatgcattgagaactggagctgcagctatgaaagcaatgcaaaaagcaacaaacattgatgatgtcgacaagaccatggatgaaattaacgaacagactgaaaacatgaaacaaattcaggatgctttgtcagctcctcttggagcttttgctgatttcgacgaggatgaactggaagctgaacttgaagaactggagggagcagagttggaatctcagcttcttgagcctgttgcagctcctccggtgcatccagtgcatgtcccagccaacaagcaaccagctcgccctgccccacagaaagttacagctgaagatgatgaacttgctgcactgcaagcggaaatggcattgtgatcagttgtcaaaaatagagcagagctggtgccggaggatcccacatgagtgtggtctagactgtagagaagggataaaccgaggcaggcctccccctcaaatgtggagaggctgcatcgatttcccgacctggtgactcggtgagacagctctcaccactacaccaagcctgccctttgtgtagttgtcagcattacttatttgttaactatccgatgcagaggtgtacatatattagctagcttttaaattattctatactgttttattccttcatttcttttggatcttcaactgtttaggctctgttttagctcccaggatatcatgatgcgttagg

SEQ ID NO: 28182 - DNA, 1655 bp, Zea Mays
tcctcctccccctcttgcctcaccttgcctcacgcttctccctcagcaccatccgcctgcccaccgtgcccctgctcgcccttcccgtcgcggtgctcgtccgccctgccgcgccctgcccgccgcgtcgtgaggggatgtgtctagggttattgggagagcaccccttcctatggcgtccacgacaagcactagggcgtcgccatagacgcctcgcggatgccatacacccagttggcaaggcgtggactgtggcgttcggcctggagcaccgcttaagagacactgtacggacgccataacaattaacaagcatggctctagtgcaggtgcgatttactcgtgcagaagctccgacaactatttccgaattacccgggctggtttgtgatgacatctctggagggcaagaaaatattcctattcctgctactaacttggttgatgatccacctgttcctccatctggtttcaagtacttgaaatctctacaaattccaaaggacatcaagattccgtctagtattattggctgtgattgtgaaggaggttgtgctagcaacaaaaaatgtttgtgtgctcagcgcaatggttctgatctgccttatgtatcatataagaacattggcaggttggtggagccgaaagcagttgtatttgaatgtggggctaactgcagctgcaaccatgattgtgtaaacagaacatctcaacaaggtttgcagtaccgcttagaggtatttaagacagcttcaaaaggatggggagtcaggacttgggacactatcctccctggggctcccatctgtgagtacacaggggtgttgaggaggaccgaagatttggatggttcacagaacaactattgttttgacattgactgtcttcaaaccatgaagggtttggatggaagggagaaaagggctggatccgaaatgcacctgcctaatcttcatcctgagaatgattcagatgcacaacctgcacctgagtactgcatagacgctcactctattggcaactttgcaagatttataaatcacagctgccaacctaaccttttcgtccagtgcgtcttgagctcacacaatgatgttaaactggcgaaagtgatgcttttcgctgctgacaccatacttcctcttcaggagctatcctatgactacggttatcgattggacagtgttgttgggcctgatggaaaaattgtgaagctggcctgccactgtggtgctcctgattgccggaagcgcctctactaacctgcagtgtgtttatttctatttggatttttgaggaaacagcttatattgtaggaaaaacagtcatggtacctatgtagttgacatgctcttgatcatatatagcaaaagaggagcaatttatggggtgttcggtttaagaatgaaattagagatttagaggacatggtggtcatggtagcatattttgccgacaatcttcgattaactgatatatctggacatctggtcctgcaacacttatcctctggataaatatatatacgttacatgtttcctcaatgagtcaatggcttggatctgtgttttttctatcatttgccgtctcgcgcgtgcgtgtctgtgcttaatcgataaatacacggactactcaggtacctttttcaaattgtg

SEQ ID NO: 28183 - DNA, 2100 bp, Zea Mays
agccctccaatctctagcagaaacgtcttgcccgacacgactactcgtccgactagaaccaaacttttcaatccatcgttcgcagttcagttcacacttcacaggcgagcagcgaccatggatacccaagcacgtccggttcctccccgcgtcaagctcggcatccagggattcgaggtgtccaagctggggttcgggtgcatggggctgacgggcgcgtacaactccccgctggacgacgaggccggcatcgccgtcatcgcgcacgctttcagccgcggagtcaccttgttcgacacctccgacgtatacgggcccctcaccaacgaaatcctcctcggcaaggcgctgaagcagctgccgcgggagcaggtgcaggtggccaccaagttcgggatacggcatgacgagagcggcacgcggaccgtgtgcggccggccggagtacgttcgcgcctgctgcgaggccagcctgcgccgcctcggcatcgactgcatcgacctctactaccagcaccgcattgacaccacaactcccatcgaggagacgattggcgagctcaagaagctggtggaggagggtaaggtcaagtacatcggattgtcagaggcgagcccggacaccatcaggcgtgcacatgctgtgcacccgatcaccgcggtgcagatggagtggtctctctggtctcgcgacattgagcccgaaattgtgccgctctgcagagaattgggcattggaattgtaccatacagtcctcttggccgtgggttttttggtggaagaggagtgaaagaacaagtgtctgctgaatctaatctgcatgggatcccaaggtttgctccagaaaatttggagaagaacaagcaaatttatttgcgaatggaagaactggccaataagcaccagtgcagccctgctcagctagctttagcatgggttctgcatcaaggagatgatgtggttcctataccaggtgttaccttataatctcattctcttatcattgacgacggtctgtgctttcagactgatgagttatacactttgagagaacagtgtattgcatcatgttcatagaccattattaatgatcggaaatagtttaggtcgtataacttaggagtaaccttttcaattataatataatctgctttggcagagaaacacaataatgtagaggaacacatccagttcgaacagcatttcattgttttgaagggaagcaacctccttccatccaagtgtgtgtgcataatagcatgttgaatagtttttgccatatgatattttttactgatctatgaactactctgttcatttgaaacattgtgcgatttaactgacttattcttgagtcttactcttgttattcccttcccaagttcaaacaagtcatcagtagtcatgcttcatggctatatatatgttccgatagtcctgtatttagtcactgacaagtgttttctacaatttctcagggacaaccaaaatcaagaatctagattccaacattgactccttgaaggtgaaactgacagacgaagatctgaaagaaatgggcagccagatacgggaagaagatgtggctggtggaagacaattcacttcatttgcacataccacctggaagtacgctgatacgccaaagaagcagagctaaaaaatacttgaaagcaacaatgatgatgcgattggtatggccctctccctgcagatgccctcaggaacattgccgatgcccctttgtgaacagcctcttctagtaaataataatgtatggagaagaacaatgaagggcccagtcttgttggaagtacgaataatgtacagttacaggaatgtgtgctaccatatatttcgtcgcatcagtttgagttgtggttgtgtgaacctaccatatatttcctcgcaaaagaataatgtatagttacaataatatgtgctatctcaatcagtatgcaggcaggaaaaacatgcaccatctgtagtacagtacatgaattctcgcttgtaatccacatttagacctgaaaatgcgaaaaagaaaaaccaaaacacaacgcgctgagaccgtgttgaggaatgtcaagtatgctgctg

SEQ ID NO: 28184 - DNA, 276 bp, Zea Mays
cccccgcgattattccaagctccccgagcccatggccgcaatggctccagctgccgtgtcgttcctggcgatggcgctgctgttgctcagtgacgcggaggccaagttcctgcccaacaacatcaccgtcgttggctccgtctactgcgacgcctgctccaacaataccttctccaagcacagcttcttcctgaaagtatgtgttgcccaagttcattatgcactggaatttacgggtgatactgcttcgagctgaaatgggccctcacagtcggg

SEQ ID NO: 28185 - DNA, 1627 bp, Zea Mays
attgagcccgacagcaaaaagaaaggtgacgtttctctttcttggttccggcgccccaccgggagagtgagctgctgcctgcgcaactcgagcgccgcttgtcgcgagcaccgcggcctcgatccgtcaagctaaaagcatgtctggacagcaggaccacgctagtaaaagctctagctcaagcatcagcagcagtactcaagagagcgaggaggaagcacctgtccgaagcgtcaccattggtagcctccttgcccaagcaaatagcaccagtggacatagtcttgggaagcgcctgtcccatttggggtcaatcccgtatactccccgagttaatggaaaaatccccaatgttggtaatgcaacactggaccacgaacgattgctggaaaggttgggcacttatggtctagctgaatttcagatagagggggatgggaattgtcagttccgagctttggctgatcagatatatcacaatcctgactatcataagcatgtgagaaaagctgtcatgaaacagctgaaggaattcagaaaacaatatgaaagttacgtaccgatggaatataaggtgtacttgaagaaaatgaaaagatctggggaatggggagatcatctgaccttacaagcagctgcagatcgggtaaaatagcactttcagtttcatgatggtttattggtttctttgagtaaattaaatgcatgtttttatacataaattaccttaatcttttcctaattcttattataccttaaccaacacgacccttttcccctatgaatccaactcttagtcatgatactaaaaaaagcccggtggatatgaagtgtgtactgtcaatttgtttaggaatccttgtcctggaaaattttgtctgttataattcgttgaattatgaaggttaaacttcaaacatgagccattggttgattagtcaacttttcatttgcatttatgttcctgtagagatatgttgttctgatcaattatgccattgctgcatcagtattatctaatgtctgtatactgtaaattaactaacaccttatgtatcttaaatcctcacagtttggtgccaaaatttgtttgctgacatcatttaaagacacctgtttaattgagatagtccctagggatctaactcccacaaaagagctttggctaagcttctggtgtgaagtacactacaattccttgtatggaatcgacgatctcctgacccgcaagacgaagaagaagcactggctgttctaggagggttctgaaggatccaaattctttcagcagctcctgctctgtccagccagcgcagcctctgtcttagtacttactagttggccaacactgtatcatatcctaagttgagtctaggctttacgcttttatgtacagtcgatctagatcttgtaaaattccctcaaggagcaacaggaactgtacaactcttagatccatgagattttggtgatctctcctccatgggaatgatagtgcttgggtgtatgtacattataaaagctaccaggggcattttgacgtgggcgtttggatgccattctccataatttttattctgaattcgtagagtggccatttccaggcatggggatctgccggattttg

SEQ ID NO: 28186 - DNA, 226 bp, Zea Mays
ttaaaacacaaggaaggggttgcatgcaccggggcttacctgggataacactaagttagtgtttgttagacgatgaccacttggcgatcagcttttgttctgatatttgctcagtctatccgtcttcaggttgatccaccaatattatcttgtggagtagcccacccattacatcatcttggggtcgacttggctcatcttccgcatcacgtaatcaactagcgca

SEQ ID NO: 28187 - DNA, 1292 bp, Zea Mays
tctctatccggcgccgcgagtcactttcaccagctctcactcttatccgcctgcgcgcccaccgcgccgcccacccgcgcccaccccagcgccccaaataccgctccaaccctagcctcccgccacgcctttcgatctcgggcggccatgggcaactgctgccgctcgccgaccaccatcgcgtgggaggacgtcagctcctcgcacttccccgcatccaacgcaaagaagaagccgcaccaagcgcggaacggcggcggcggcgacgggcagaagcggctctcggttctggccgggcgacgaggggagctgctcgcctgcaagtccatctccaagcgcaagctgcggacgaccatcgacgtggaggacgtgcgccgggaggtggccatcatgcgccacctgcccaagagcccgagcgtcatgtccctgcgggaggcgtgcggggacgagggcaccgtccacctcgtcatggagctctgcgagggcggcgagctcttggaccgcatcgtcgcgcaggggcactacaccgagtgcgccgccaccaatgtcacccgcaccatcgtcgtggtcgtccagctctaccatcggcatgacatcatccaccgcgacctcaagccggagaacatcctcttcaccaataagaaggagaactcgccactcatggtctctccatcttcttcaagcctagtgagtcacaccagccgagatcctttcccaatttcggacgattttctgcgcacttccgtgatttctggttttagtgggaggaaatttgacggtagagctcagagtagcaaaatgtacttcttttttcctgcaatccataaaacatgtggttattactagctctgcatcccggaaacaacttggtggttctttcataggcaattggctattactagctgcaagatagtatttggtagtgatctggtagatactgttaatctcctttttttcaggataatatctagtggtactgacgataattttcaggacatcggttcaaccgagctctttcttccctattacagagcattttggtttgatgaagaatgaaaatatattgtgttgggctttgcctggttggtacatcaaagtcttaggatgtttgtggtgtggtacacacttttgggattatgatgaacaattagtggtgcataaggtgtgaaatctgtttagtatcacattcattgttatcgatacattatttctttgatgctggaaggtgaatatgtgacaatgagcacaggttccgctactgtgtagaagttatataacactgaattgttagt

SEQ ID NO: 28188 - DNA, 2653 bp, Zea Mays
tgagaggaaagcttgctggttaatttggtaggtatcctttgattggacttcatcagaagcggcactattttcattccagctattaaatatccccttttcttttgttcctagtggaagttttttggatgtaaaagatgacggtgtcaaataatatggcacctgtggagctcacaggatgcacatatcttgtaaattgtattctaaaactgtctacctgataccattgttactgtttaatgcaaaatttaaggtttctattccaatgtgcacatcaccaattagttaggaacttatgctgatttgacaaaagaacaaaattttgaactttttgtacgattaaaacattatgtgtgacttgcgatcctcatacttgtatgtagcgatgtgaagtcaattttacgtgctcgtgcgttgtgggtacgtcgatgtgattatatgatagagctggagtgcttgcatgtgaatatgtgatctattggttgagccttatcatgggcgattcgatggatctaggcaactcggcttatctttttttttatatagaaaaactaagaccactttggatggctaaataaagaggcgctaattgcaggaattttttttatcgacacacattgtagtcattagcacattatctggtcaatggggcaaatttgagctaattttaaccagctaattattagcccatctggtcataagtgaccttatgcccttattatccatgcgtgaagccattctctttgctttcgtctctactctactctcgtgccagcggttgctttgcgcctatgcctgcaagaaggttaccaagtatgtatccacgagctaggtttgttttccattgttcctaggccattgttcttatgccatgttggccatatttgtttctctcctaaattatatataagttagattatgataaaagagtagtagagtaacatatcataaataatctgaaataagctatttaggtagcttatttcagtttatttatgatattttacccttctaccgttccaccagaatcacaactaggtttgttttccattattcttagtctggttgtgctcttgattttggctgtgacggccggtgacatacgactacgcatacagaacattataggtcacaaattcacaaacaattaaatttctctgtgattcgattgttatgcacacagaacattattgttcctcgaccttacatccattaggttggtggacgacactgatgttagggtgtgtcctatacacgagatggttaacgggaattaggttagagttaattctaaccgtccatccgcacccttaatcgggaggctatcctaaccgttggatgcaggccccggtcacacgtctccatataaacagattaaggggaccaatgggtttagccaacgctaatcgctcgaccacaaaccctaatcgacatccacacagaggtttccatcacctagacaatgcgtagtgactggaagagttgtgatccatgacgacgagccccgtgattgtcccaacgggcacgggatccgagcctccacctacatgcgccactggaggaggagatccaccatctatcggtgacaggaatccccaacctcatcctggacagaacacgcaaggaggtggaggccacagaggaggcgagtctacggtgtaagacgtcaccgccattgcagccgtgcccataaacaacaacaatgatgatatgcctacatataccttttagcagattagatctactcatcattgaggttttcctactcatattggtattctagggtcttaagaattgatcctaggcaccacatgacctaacaatggtatcaaagccacctaagtaacctagatctcctaattcgtatgatttgagatcaaataagggattctcaggtcaagtgattaacctcagttttacctcattggttaatcacctcgagaatagacaaaaccgagaagatagagaaagtcaggaatatgtttgtgatctctggttaaggtttttctaaccctaagttcttggatttaggccatagtaagagacacaaaggtctcaaccatgaacccatgaacaaaccgagtaagagggaaacaaagcaaagggatttcagtttattgaaaccctaatccccaaaatccgagtcatagtgactgcatagggctcatgatccatggatccgcgtccaaggcaacagaaaagagagtaaaagaacacaagaaatagattagggatagaacctaactgtttcccccataaccgagcagataaagtgcataaagggcattgtccaagcacataggttagttttggaccgaatccttcaatagatcaatgcatggggcccggatctacgcgtttcacctcaagaacacgattccaaccatataagatatccatttcatacattcattcacacagaaaagagaatcaagttattgagggctaaatccgggtgtaaatcaatagagacggttgagaggctgtcggttcttaccatgccgccgatagggacagtcgctggagcaccgaccgacggcagcacgccctcccaaggggacaaatagcagagatagtcggccggagtaagcaaagaaatggggaggcgaggtgaattttagagagacaaagaaataagacaaatagcagagatagt

SEQ ID NO: 28189 - DNA, 223 bp, Zea Mays
tgtcgacgctcacgcgcctgctcatcgtctctgcggtgcacccgctctcgtccatcgggtttcacgcgtgctcgcgtttgccgtcgagccgttgaacccgttttcccccgctcgacctcgtcttcgcccttctggtggccatcgttaatatggtgctggactaagctcctttatctggtcgcactggctgtcgaccttgttggttctttccgtgtcaaaccag

SEQ ID NO: 28190 - DNA, 1998 bp, Zea Mays
cacgctctcatcccctccacgccgccgccacccgacccgcgccgccggaccgcgtcgacgctccctcgccgctggggttaaggcgatcatcgatcgatcgagtttctgtgcacaatcgtggcgctgctgtacttcaccttcggcgaggtggacctctgccacatctcgctcccgtccttacccgtctccggctcgtcccccttccgcgcggctgccgtggcggcgcccttcgtggagcggcgcggggcttctttctattatctagcatgccctccgccacatcgagtttcagtgaagatttgttctcaagttgatctgtgcaatccagaccaacgctggaaaggcggtgcagtgtctttacacactcgctcaactcggacggcttgtactgcgtgtagtgagcaagcgtggagttctacttccagatgtaacgagtgtcgtcagccaccaagacagcatcattctcatcaggcaacaactgctacacaaagaagatatgatgccaacctacccaaggatacttcgttggctggagtacaaatctcgccaagaaaatagctgaggcagcgattagtgatggagagtaagacagaagactgtactccagcagggatagctcagcgatgtaattggccaggaactccagatgcagagcaggatcctgtacaaacaaagagtaggggcattatcacagaatccctgcctgccacatatacatgtaattcctggcagcagtacctcatcacacgcctgcatccgtgtccaagactccaactatcatacgcctgcatcctgtacaaaaaaattgttggatacttgaatacttgaatccaagctgccaagttggatacttgaatccaagctgtattcttacacctgcaaaagactccaactatcattcttgtgtcaaaaaaattgttgaaccggacacccatgtccacatccaagcagcactggtttagcatccttgtcctctacaactccatttggacaacattcatttatgcaaaattacagtatattgaatgaagttgatatcaagcggcgccaagaggatgacataaatagggtttcaactgttctttcaatttccaaaccagaggcatgtgtcttctccgcaactataactggagtgttagtaaggtgcatgacgaatggtttgctgatgaagagcgtgttcggaaggtggttggtttaccagagaagcatattgaaatgccaaatgacagagaagtattcccatgcttcattagtttcacttgttcttccagttgcctaagcatgtttgctctagagatagaatcacagctcctaattcgaatctataatcctagtatataagttataagttgtggtgatctgctggagatgaatacagtattatcatcctcaaacttgtttctttcaatatcctcaccccacttataggatgggtattggatgatggaaaaaagcccgtctgtatagtacatcagtaccacagtgcataaaatatagacacatgtattgcatttgtagacctgtagtcactcatattatttgacccatgcgtatttttagtggacaatcattaaattagcaacaatctatgtctggacaatcattcgtttatttcagaatatgcaccagggctatcccaaagaaacactggtgcatttccttaaggctagagagtggaatgtagcaaaggctcataaaatgattgtagaatgtttgaattggaggattcaaaatgaaattgatagtgtgctggagaggcctatagccccagtagatttatacagatcaatatgtgattcacaacttattggcctgtcaggatacacaaaggagggtctcccaatttttggcattggtgttgggcatagcacatatgacaaagcttcggtaattactctgatgcttgctatttgtttggtaggctacaactacagccaaaatcataaaagtgtctggtttgaagctatcagcactaagccaaataaaggtacatgctat

SEQ ID NO: 28191 - DNA, 302 bp, Zea Mays
ttcagggtgggggatcaggtgggtgctcctacagtcaacaaactataggtatttgtactagatcatcaagacatcaacactttggtgtgcaaagattccagcaatcgttggcaagtaccacgaaaatacggcaagcagtaaaacaccttggcaggtagtctgatgcgtgactgccacacgtacatactcatcaactgggttgagcgggcaactgtactatcggacctcttgctatctctattcaaaagaatacaactcggtgctaacagtgttgctatattaatcatttttttaaacttaac

SEQ ID NO: 28192 - DNA, 1771 bp, Zea Mays
aatcaacacgtcctcgccttaccatgccgatccagccccagctctccatggaaggcgcgacgaccgagccccaactctccatggcctcccgcaatcaatagtctctcgccccaccacgacaaccctgccctggctccccatggaaggccatggaaggtgtgactgagccccagctcaacaaggaaggcgcgatccactctcctcgccccaccatcggcgtccactatccatcgaaaagtcccgccttcctagtcccccttccccacctacgacgaccgccgcggacgtatcaaaaaagattcctcctcccagtgtcgcctccacgcgtggaggcggcgatccattccgccccctaggattttgctcctcccgatccggacgtcatatctcgcgtggcggcacgcggatctgggggtttctctagaggcggcggtggcggccggaacaggggcagatggcgctctcggggatgcgagggctcttggtcttcatcagcgacatacgcaactgccacaataaggagcaggagcacctccgcgtcgagagtggacaccacacttcacccattccttctcggcgctcgcccaggaagactatagccaggtacgatgatactatatattatgtagtgttccttgcacaatctagcagaccgggacgccagtggggaggcgacgggtgttcgtgtagatagagactggctgcattctcggcatgtacctggaccgcggggacaacatgcacaccgtcaagcgctacttgcagctcacgctcaacgtgcccagcggcgagaccttgctcaccttcgacgatcgcgtcctagaccaaaaatgcttgggtaaaggagtttggcttggaggctatgtggaagagcccaaatggcacaattaggaacattctgaatggcactgtgttcagagaaccaatcatctgcaaaaatgtcccatagcttgttgtagatatggaaggaagaccacaatcatagagggaaaagaagagcaagttgagctggaggtgttcaacttcactggtgtaggaggagttgccttatcaatgtacaacactgacgaggtgcacttggtgcttgctactattccattaagaaatggccattgtatcttcgcaccaagaacattattttgaagaaatattatggcaagttcaagtatctccagtttcttgttttaccatatccaatccaatttgtgcatgggcctccgacgatgccacggtgatcaaggtagacatcgtcaatagccatgacacgctgctcgccgtcgtccaggtcatcgccgacctcaacctaataatctggaaggcatacttctcctctgatggcagctgattcatggacgtgttcaatgtcaccgaccgtgaagtaacagggttctcgacgcccaatcatcctacatccagaagacgctgtaggtggatgactggtactatctggaggcacgcaacacggtgggcatcgtggcattggaggactacacctccatcgatctcatgggcacagacccgggcctgctattcgaggctatctgcccagttaacaagaagatggcttttgtcggttatgccagagcatgagcttgttcatgttggtccagatacccgcttgaactacaaagttatcgagctacgaacactctcaaaccaagccatattccagatctagtgtcaagttgaaaacaaagcgaatcgctgaatgaaggatagagacggcaccccctgatcattctcggcgcgcctgtgcatgctggctgccgcg

SEQ ID NO: 28193 - DNA, 1079 bp, Zea Mays
ctcgcttgccgtcttcatctttcccagccgatcccctctccctcacggcgtcctctcccatggccgtcggccctccctgccatggtggtcacgccgctgctcgtcctcgctgctccccagtgctcggccagggagcttcctttcctctcgcgcccatctccctctcgcctttccttgctcgccagccatgtccctggcgcccgttccggctacagtctcccccatggtggctctttggtccttttctgcagctggtcagcatcccatccccttccctctctgctgatgtccgcggcacccagaatccttcccagacgcgctcgacccccttcctgcagccggccgtcgtttcccctcgctgctcttggagccggtcgtccccgtcgtgagccccttcttggtcgcctctcttttttccccatccggccgtcgttcttcagaacaggtcatcacggcgcctcagtccaacgcgccgctgcatcgccctttctagcgtcggccttggaaccgcttcccctagcgccccagtcgagctcgcctaggccgcggcctcgccgaaccgtgcagcccctgctctccttccccagccgcgcttagcccagccctccctcctagctccctgctcttttccatcgcccaagatttggccagcgctctccctactcgcctctaccctgctgctcccctatgtgttgtgcgatggggaatttttagttgcggcaatcgctatctgaacctccaatgttcatgttcttttggtgtgcaatttcaggtacgctagatgattatgcgaatgggagagcatggatcaggatggatcacaaggtggctttgatggccccatcccgatatggacgacttgatcaagtgtcaggatttttgaggctcgccaagcggacatcatctaaccatactaacctagtgttattctaggaaagccccggtgcatttgccagctccttctgttttaaaaagttttagcaccttgaatgatgcattaggtgataggagttgtgtgatcaaacagttgatgcatttccttccttgattaaacaaccctaatacccgttttatgaaaa

SEQ ID NO: 28194 - DNA, 964 bp, Zea Mays
ttcacaccatttcagcattgtaccctatgttcatgccaccatggaagggcttcgtattggagcaccgattatgcaggtttatcatgagaaatcttttatcttacctgatgtttcaagggtgcttgcttgcctttatgagaaggatgtcaagtttgagactcacacagcctcatacaggagcctactcggattgcaggcatcatctcatgctccagttccattctatgaaggccctacttttctagaagaatccagagaaatctgccgttatatagcagaaaagtatgaaaatcaaggatatccgttcctccttggaaaggatgcccttgagagggcttcaattgaacaatggctccacaacgaggagcatgctttcaaccctccgagccgggccttgttctttcatttggcctttcccctgggtgaaggagaagatgatgatattgatgttcatacaaggaagctagaagaggttctggaagtttatgagcaaaggctcagtgacagcgaattccttgttggaaacaagaggtggtgggatgctatttctgaccggagttcttggaagaaagtgctgaggtatatgaagagcgtggaggagaagaacaaacaagaagaactcaagaagcagcagcagcagcaggaagaggctcctagaacctccaccgacccaactcgggtagactcgagaaagcagagcagaacagagcctcggacaatattggttcctcctgctgataacgagtcatcagcttcgatagttcctcgaacaaagaagcctcttcctggtgatcacttagtgtctactcaacaaattgatggtgttggtatgccagccacaaattgatggtgatggtcgtcttagtggtgtttgtcttgtcttttattgtttggttctttaacaagagttatatttttaccttctgaccaaagagttgtttaacaggatagtcattgtacgaca

SEQ ID NO: 28195 - DNA, 1457 bp, Zea Mays
tcatgactttggatacccacagacaacctctactgaagttctcaagtcgtacatattcaatgaacccattatggttgatgctggaaggctgccaccgcttggtcctgctgctatgttcatgcaaggcacgaagcgtatgcctggtacagctgttacaaaatctgttgttgctactgagcctggggggaagaagagggaggaaatttttgttgatatcattgagagaattagtgtaacattcagctcgagtggctatatacttacatctgagattgatggaacaattcaaatgaaaagttacctcactggcaatccggaaatccgtcttgctctcaatgaggatttgagcatcggaagaactggatcttcttcatacgattacagaagttcttctggaggaggaacagtcattcttgatgattgcaatttccatgagtcagtacatctggacagttttgatattgacagaactttgactttaataccgcccgatggagaatttcctgtaatgaactaccgtatgacccaagaatttaagccaccattccgtgtaaccgcactaattgaagaagctggaccagcgagggctgaagttctactgaaaataagagctgacttctccgcgagtgccactgctaacacaatcgtagtacaaatgccagtgcctgcatacacaatgagagcgagttttgagttggaagctggagcagttggacagacaaccgattttaaggaaggatccaggagacttgagtggaatctaaagaagattgttggtggttctgagcacaccctccgtgcaaagctgacattttctcaggagtcacatgggaatatcacaaaggaagctggcccagtgaacatgaatttcactataccgatgtacaatgcatcaaagttgcaggtcaggtatcttcagatcgcaaagaaatcgaaggcatacaacccttatagatgggtgcgatacgttacacaagccaactcctacgtagctcgtctatgaggaatcagcatctgtactcttgtttccagtccattttttttgggtgtaatatttgagcgttatcatggacatagtggcgtgtattgtgtaactgtatattgaggttcgcataccgctcagctcctgtagtaacaattgtttttcgtcgtgcaatgtgcagatgaataattcatgttctaatgctgcaaaactgattgaggcgagtacctattgtcttgcataattcctgcgaggttttagaaactgtgaactgacctcgcctgtgggacattgggtcctattgtttcgcataatttctgcaaggttctagaaactatgaactgagctttggccagtaaagctctttgtattaaagtaataatgtattttcagttgagttcaggtactcatgtattcccgttttttttccccaaaaggatatttggtatgagtttttctttctgcagtttggtag

SEQ ID NO: 28196 - DNA, 3964 bp, Zea Mays
agagggagcactcctcttatctgtgtcgtcgcctcgtcggttccttcgccactcgcaagtcgcaaccaaaccctcgcatacagccgcagcgccaaatctcgccgcctccggggctacaagcgcgccgccgccgcctccgctgacggggaccacggaaggacgcgccgacaccggatctccgaacgcacgccactgaactgacgcgggacttggtttgggtgctcgattgcgcctcccggaagagggagagcccccgccggatttaaccagacacaccgaacgcgcagctcctccgcgccgggggccgcagagaattcatgctgccgaggtcccgcattcggggccgtgacccgccgccgtcgggaggacgctaccgccgccgatctccggccccgccgtcaccgcgccaccagcgccgcccgcgtgacccgccctatccccagccgaagaggcgcagctccgagctgccgccgccgcggcgatacgacgagaatcccctccccagcggcttcgccgccgctgccgagaggcgttcgcgcggcgacatcctgctcgaggccggccgcctggccgctcactacttggtcgccgaaggcctcctccccgagcacgttctcctgtcaagggaggacccaaatcacaatcacagttaccgccccgagcctcccgttcccgttcctgccccggttcccgctcccgctccctccagctatgggaggaagagagacgaggacgacggccccaggtggcggcggagtggaagtggagccggggacctggaccgtggctcaaagtgggacgacaacagggaagccaagaggtcggggtgggacaggaggagccacagctttgacgagaggcgtaaatacaacgatggcggtgacgttgaccggggtggccgccggacacgcgactacaatgagctgaagagaccaccaatgtcaaggtcctattcgcataacgatcgccgggctttggctgatggcacagttgatcggaggaggagaagtagaagcaggagcaggacgaggggctactacactggcagcaggagagatccagatctgcgagcaggcactcgagatttggatcgcaccaaggtgacagactctggcgctgttcctgctgctggtggtgatggaggcatgcacaatgtggatgccaacgaaataccaaggcagccgaaggtgcctggttcagtggtggtttcggagacggatgacagcgctgttgaagctgtggctatcgaagataagcaaatggagtcagataccgctggactggaccatgctcaagacatgtctgaaggcgaggacagtgagtttgccgaagacatttctgaagacgaggatggtgagtttgcaggctctgacttgaatgatgaagatggtgatgaaatggataacacccagagccaactgtccgatgtgcatgttcatacatctgaatctgttgaggaacttgatcttagacagtctcagctcagcaatgctgaggagggaatggaaacatgcattgcacacgtctatgcatgcatggtagagccattggcagagaacaatgtttgctctgaaacaaggtatgaaatggaggaaccacaaaatggatctgaaactgctgttggtgatctttatagtgatgaacaagagcaaccattgacagagtataatggttgctctgaagtaaagtgtgagatggaggctgcacggagtgaatttgaaactggtgttgataatcttgatagagatgaacaagagcgactattggcagagaacaatagttgctctgaagtaaggtatggcatggaggctccacaatgtgaggttgaaactggtgttggtggtcttaatagagatgacaaagagcaaccattggtggtgaccaatgattactctgaattaaggtatgaaacaacagcttcacaaactgaagttgaaaccgtcgtcggtgatctcagtagggatgaacaagagctgccagcttggtacaaaatttttgatctcaacgtcattgaaactccagtgggttgtgagttctccgagatttctcgcagtcctccagcagatgatctttgtgattctgtgcctgatttaattggtctggtgaatcaacaagaaaacaatgacacttcagaaattcatggtcaagatgatcgtgcaggggccaatcaaatgttggaggatgagtctaatttggataactatgatctgaacaatgaggctgatgaacatgcacgggatgatacttcagtaaatcaagttcaagacgagaatgcagaggataatcacctaccagaggatgggcatggtttgatgaagtatgatatgaacattgaggctggtgagcctgcacatgataatcaccaaatgaacaatgcggaaatacatctaaatcatagtatggttgcacatatttcagataattgccatatgaacaatgagaaaatgcttctaaagcaaaatgtggacgagcaacagatggagaatgagcagatgcttatagatcaggtcactactgttcatgttttggatagtcaccatgtgaatcatgaacaattgctgctaggtcatagtgtggatgatcatgaccaaatggagccaaatcccatggctttgggtgttcataatttggataactactatctgagcagcaagcaagtactcctgaataatgatgcagaccaacatgcaggagatatacaccatttgaaggatgggcaaattattttagatgaggctgcagatggacaagctagagttaatgggcaaacaattcatgtaattgatctggaagaagattatgcacagcagtctgagagcaggaatacaggagaatatctagaatccacaagtggcacctcgcataaatacacggataatgttcttcaagagcatatgtgttctcaagactagcaaacctcaacttttcgtgacaatcttcagactaacacacaagcagcttcttcaactgccacaccagatttttgaaactggtgtagtgaaaaggtagctgtgaatgcagatgcacaggtgattcccatttctcagtgatgacgatgtcctgtactcctgtattatatttggattcaacaatatgccattagaagttatggatgtctatgacctgccgtcctctgagcttgggagatcctttgctgaactcgtcaggcagaggctgttgcttgcacgggagtaccagtatccatgtccacttcaatcgactctagtctaactgaagcgtgccgtacacatctgcagtaactcctaaggtattcgtggttatcagcttctttaaagcttttggacacgagctttaggatcttccaaacgacaaaaaaaaaaaacttccatgggccaaaagaaaaaaaccaaaaactttgtccccaaataaaggtcgttattatcagcttctttaaaccttttgaacatcagctttgggagttgggaccctccagaagactaaaaactttgtcccaaaataggtggattttgcctatggaatctgtcgttgcagttgacatcacagggaagccgtttgcatgaaagactgagctctggtagctttttccggcgtgatgaggccgaattttttgtattttagcccctaaaccgaagtaaatttacgtttagacctaaaaaaattttaaatgcagttttggaccctttgctcggcgccataggccgtggcaccgagctaacacagctcgacgccacagtctatggcgccgagcttcgtgacgtggcagcccgcgtggcacacctagctcgacgccacagatcttggcgccgagctaggaaacttaaccgaaacgcctttcctcttcgtttcttctctgtttcgctcgcgtcttcattttcctacgcccgccgtcgctcataccgccgccgagctcgccgccagcccgccgccgccgagctcgctgcccgcccgcagcccgccgagcgcgcccggcgagcgcgccgcc

SEQ ID NO: 28197 - DNA, 159 bp, Zea Mays
tcataaaagtaattattacatagcggaggtcttacaaaataaaagataaatataaaatgaactaaagtccatccttggcgccataaagtcgactgggagacgtcacctagatcaagtcgtactccttgttgtgcggctcctcctgggccacccgttctt

SEQ ID NO: 28198 - DNA, 1946 bp, Zea Mays
atcaggggctgggcaatgaggcccaaaaagggcctatccctccctctcccttttgcgtcgtgaattcgctctgtcgcgcacggcgcacacacgacacacgggctcccaggcccatcatgcccatgccccagccaccgcaggcgggtcccacacagtcgcgtcgcgtcgcgtcgcgtcatcttttcagcgcttgtccactgcgggcctgcggcattcctttccttctcctcgaaggcgaagcaaagctaccaacgcatacaagagtgagagcagggagcacgagcgctctgagtgagtggaagacgagaggagttggagttccccagggctagggtttcattcgccacccgcgccgcccttcccttccccagcatccgtccgccatggtgaggaagaaaagaactggccctggagagagttctggggagtcttctggagcgcctggtcatggctcctcacagcgtcctcaggcaacacaacagggtacccgtggtggagggcaacaccagggccgtggtggatatctgggccctggagtgccgccttcacagcacccaggtggtggcccacctgagtatcatcaaccgcttgactaccagggacgtggtggatatcagggccgtggtggaccaccttcacagcatcctggtggtgggacaccccctgggtctcaaccgcgtggctaccaggggcacggtggataccagggccgtggcgggccaccttcacagtatcctggtggtgggacaccccctgggtctcaaccacgtgactaccacggacgtggtggtccgcgtcccagagggggaatgccacagtcataccgtggcgggcatgtgggaggtagtgttgtaccaagtgttccttcaggtccatctaggccagttcccgagctgcaccaagccccagatgtccaacatcaagcccctgtggtggcaacaccatcttcgccaggagctggctcgtcctcgcagcctgggaaggctgaggtgagcgctggacaagtccagcaacagttccagcagcttgcgattcgtaaccaaagcttagccagccaagctggtcagatggcaccagcgtcaagcaaatctgttaggttcccattgcgccctggcaagggtacgcatgggtccaggtgcattgtgaaggcaaatcatttctttgctgagctgcctaataaagaccttcaccaatacgatgtatcaataacacctgaggttacttcacgcggcgtcaatcgtgctgtcatggcagagctagtaaaactttacagacactcccatttggatgggcgtctgcctgcatatgatggaaggaagagtctttatacagctggagcgttgccatttgcttcgaagacattcgaaattactctgcaagatgaggaagacagtcttggtggaggccaaaggcgccagagggtatttcgggtgaccatcaaatttgctgctcgcgctgatctccaccatctggctatgtttcttgctgggaggcagccagatgcccctcaagaggctcttcaagtacttgacatcgtgctacgtgaaatgcctactgccaagtattgtcctgttggtagatcattttattctcccaagttagggagacctcagcaacttggtgaaggtttggaaacttggcgtggtttctaccaaagcataaggcccacacagatgggtctttctctgaatattgatatgtcctctactgcattttttgaggccctccctgtaattgattttgtttctcagcttcttaatagagatatctcagttagaccattgtctgattctgatcgcgtgaagattaaaaaagccctacgaggtgtgaaagtggaggtcacacaccgtggaaacatgcgtaggaaatatcggatatctggccttactccacaagcaacaagggagttatcgtatgtgcatgtttcttagtttatatcagttgat

SEQ ID NO: 28199 - DNA, 2262 bp, Zea Mays
gttgacactccccatcagagagccctcttgacgccagcccactcccagctcaaccatttccagcctcaattagccgaggcccggcccattccttgcccacgtcatctttctgtctctccctctcatcgccgcgtcacgcacagccgccgccgtcgtgcgcgtgtgccggaacggccgcgtggatcctccgccccgtcccagcggcgacttgtccgtgcgaagatgctggggttctcgaccggacagctgctggtcgtcctcggggcctgctccgtcatgatgaagcccagtgatatggtgaagattgcgaggacggccgggcggatgactggaagagcggttgggcggctcatagtggctcgccggcagctggacgagattctgggccagtctgcagccacccaggttcataaggagcttaaagacgctatgacacaattagactcgatccgttatgaagtccagaacttatcaagattatctcctgggcagtttatgttgaagcaacataacgctggcatggctgaagcagggaaatctgactcctctgatggtcctacaaccaacgtatggtggtatatcattttatttcagttttagtccaagtacttgaagggcctggtgcaatgcaggtcgcgggttcgaagcagtctcctcatttgcggagaaggcttgtcttggttgattcgttccccaaaccccactcatatgggagcctccgtctgtccgccactgggtctgcccttttaatatgagtatttgaggtctaatggttgatatttcaacagatttaaaatgcttaaatgtgaatttgctataagtagcagcctgatgtgcctactatgacatacagatacagtctgttgtgtgacttcagtacagatacattttaggctgatatagtcctattctgtgcattctggccatgattcattttgaaattattccaaggcttaaaacatgcacaagaaacaatcacacgaaggatgtgcttttttaagttatgtgttgttcaatgttttttcacttttttgtagatagatcatagatctgagtgttgaccatgttgtggtcgccaatagctacatgatgttggaacttttcatttcaatgcttgcactgcacttgaaacattggttccttctacttgttaacttttggtttacttctttgtcaagagatatacttaatagagcttttatggcaatgcagcaagaagaatttcgtcaggaaattcgcagtataattcgcgatgaatttgaaaaatactgtagaacacagcccattcaaaactctgtgagcacaactgaacacagaaaacttcatgtggctgatgaaccaacggcactgaaatccaagatggctaattcaggattgacaaatctgcacaaccaagcaatgacgtatgcaaggctatctgaagccccaggacttaagatggattcttccttgagtgggaactacaaagatcaatctaaggagatggatgggctgctaactgtactgccaatatcagctgaaagtgctggattacttccaagccgcccagataaaccaacaggctcagatctagtccttgaggctgtgcttgaagcggaagttgcggagaacgctaaactgtttgtgtcgcagcctcatgatcagctacctaaggaatgaagacgaagatgatgtgcttgaagacgttgcaaacaggaccaaactgttcagctgacagccgcatggtcagttgcctacggagcgatgatggtagtttttgatccttaacaggatttggcatactaggcctgtttggtagagctctagaagttgatataccgatctggcgtccagcaccagcggtgtagcttgtagtcttgtaccctcaggcctcaactagccagctaggattcggatgccatggtagaaactggcgacatagcttgtagcctcaactagccaggtaggtttggctgccatagttgaggtaaagctgtggccggtgggcacgtagcttgtggcctcaaaaggagcaagaaagaaaaatagagtaaattagttgtggttatcaatgtgcatggtgattttaaagcttttaaggatgtcatctgtattctgtgtcctcgcaacactgatattctttgcaactctgagtagagagatacacggaatgttcagcttttcagatccattgatggtagtgttgtttttaatgttcccaagacttctgaggaagctgcaagagcaggaattgtgcatggcctccgagaacctgatggtcat

SEQ ID NO: 28200 - DNA, 954 bp, Zea Mays
ttacagctggtgtccactgtcctcctgcacggactgatcccagtacagcaccttcttttagcaaaccattgaaaatggattggaagaatgaaccttccacagaaactccactagcaccatgcatctcatgaagctgttgttgcaaggagttccaaacagatggcaggtttgttggcactgttataccccttgcagcaccacgaaccatagcagtaatccgtgagacatacgctggagtgtatagctgtccgccttctagccttcctttcacctggaaggagggcagtaatgatagcagaacagcatgtaaaagtttttgtgaatgacatatatgtaaaaatattggaaataaagtattgcaacatggagatttaaagttagaaaatgtgaaactcaactaaacattctgatcctaagcaccagatttgccaatggaccatgatctaaagcaccacacataccaagagactaacacatacaacactgcctaaaaccactttatggttcttctaagagctgactcatatgaatcagctaattcataatgcttgaaatgacaggttgcatcaagattactgaattcaaactacagaacaaagggaaatgagctaccactacaagaaaagccatgagaagcatacaatagttccaagccgcggctcgaggatactgatgacaagctcggatccaatatgtaactgagcagcaatctctgccaaggcaatctgactgcgctcctgaagcttctcatttatctcttccgtcacggtgtcccagtaagattgtgacatgatctcgccatttatcagcattagagtgggatcatcggagacgaccttctgtgactgcctctcaacatggtaaaggtccacccccagggtatctgataagtcaactagagatgcacggcctctcttcttgatctccatcttaatctcatgcttcaaatggtcc

SEQ ID NO: 28201 - DNA, 2895 bp, Zea Mays
cctcgatgaaacaaaagtatgttctgtctgccaggtaggtcccgccggaacggatcccctgcttcttctaccgaaatcgttgcttccgacgcaccagggccgcgcgccgccggcgaccttgccgtggcccttctacaaaaccgacccgcgccggagctccgccgtcggatgtggcggagacggcgtcaatggcgtcctcctctgctgccgagtccagctcccgcctctctgatcgagcgaggaggtcggcgctgggactcagattcatggtgctcctgatgcacgtgctgttcgttggcgctgtcttcatcctcgatccgaccctcgactggcgaatccacggggagccgtggtatatagggttgtatggagtgcttgttctgctcacgctagtgcaatacttctatacagctggctcatgtccagggtatgttattgatgtaatgagagctggttccatgatgcatgcaaccttcgtcaacactgctgctctttcaaatcaaattcaagaaatggaaacataaattctccgacgagtcgtgctcaactacagaaacttagcacgatgactcctacatcttcatgggcacagatggttatggatctttatcctccagggtcaagcagcagggattggacttgcacttactgcaggattgttcaggtattcttgtatcctcacgcgctaaatgttctctaagttttacaagtaagtaggaattaatatagttttgttatacaaaaattgagttggttgcatgagttattaactttgagttatgcaccaccaatttgtttgactaaaatttaagaataatatacattcaatacatccttcaaaatttaccaagtctgttaaaaaaactatgtaaaagtctgaaatgaatttgtggtatgtttgattatatttgtcagtgtagttaaagttactagaagatttgctcttcacatccttgattggctagtggtttatttaccagtttgtgacattcaaagattcgtttctgatcatgaaggttatttgtgcattaagaatcttctaaaacttaatacattgattggttgatgagtaactgattcgcaatgcagcgggcacaggacctctctcttagaaaagtaaacttatgctatcttatttgctcagaattgttcctccaaaatctcatggtttcatgctaatttcatctattatgtctttagaaagtttcccataccttgttgcttctgatagtcagagttaaagttttgctaccaacatctttttgcagccacctcgcacccgacactgccatgactgtgataaatgtgtccttcaatttgatcatcactgtatatggcttggaacatgcattggcaaaaggaaccattgtcgttttttgtgagcttttaatgtgttttcacctatatgttccattcacttgcacgtcagttgtggtgtgatgtgttataaactcactgtttgcgtacacagccgtttaacccacgtacacagcggttatttgtgtaaatgctacagtggcttattgtgtccatttaatcagccatttataccgtttagcccaattaaatagccaaaaaggttgtgactgtttagtcatttaaatgtttaggctaacactgtataaactaccatacttgttgcggaaacactatagttatttctttgattcggacactgataaactttctttggagtatctatagatgttttccagagttgtagttttgtgactgaaagtacatattgatcagaccaatgttatcgagtatttacattgtgcaccattaaacagatagaacataaatgccactgagtatttcagaaccaacacccctcctcttgtaatataatgatttaccttatttattgacataacataactactgcttctactactttattgtgaattgtgattacacattgagacttccatgttgtctctcgccatgctgtacgattgcagtatgatactattgttttaatctcttggttcttatggttgtataaccgcctttactaggtggtacatatttgaagaaacaatcttgtgtatctggactgctgctctctgcatcgagtcattgtgtttagatgtggacaaggcctggtggaaggactttgttggtgttatcctgttggcagcgcttatccttatcctgatattcctactactattgtggttatttcattcgtacattgctctaacaaatcaaacaacctacgaaattgccagaaggaagcgaatattctacctaaggggagtccctgaaagagttcttccattcagcaaaggcatatgcagaaatctctacgatttctgctgttctagccagaagggatatattctggaagctgtgcccccaagtgaagagctggaagctagagctgcccgttacacgtgccgagatgtcatttgctgtcgttgctgctgataggttgtaccatagcattctgcccgtatagcccagttgcgctgttctctgttcaaggttaagttaatggaagcaaattttagtgacctgcgaccgttagatgcccccagagttcattatttgtgcatagtcatttgtacatttcactcagaaaaatgtgcgctctgagatccagttgttcacattctgtatggctttgaattcaaataggttttcaggacagagaactgatctgtacttcagttttttagtcgaaatgtgtgttggtaatttattttaagattttcttatatttattcctagccatatattttatatttatttatcttgagggcttgtgttgtaacacccactttgtaattgctaggaataataccagtagaggaacaatttctctttatgagagttggatctttatgcatcatcttatgtgaacatcatgcccaaaacaattaataaaaa

SEQ ID NO: 28202 - DNA, 1842 bp, Zea Mays
aaaaaagggaatagccaaatgcggctcaggagaaggccccgtgtggccgtgtgagcttcccccggcccgaacggcagtcccccgcattcccctaacgttcaatcgcgtaccgtcgctcgccgtattcccctgccgcgcacagttcactcgcgcacctctcgccccctcgctctacgacgactagtgggccgccggcgctggcgccgccttacgccaggtgccgaggtcttcgttgatctcttcgccggcgacgagcacccaccagctgggaaaaaatctatagccaaacataataatggctatgattgatgaacctctctacccgattgctgtactgattgatgaactgaaaaatgaagatattcagttgcgccttaactccatcaaaaagctttctacaattgcccgggcattgggtgaagaaagaacaaggaaagagctgattccattccttagtgaaaacaacgatgatgaagatgaggtgcttcttgcaatggcagaagagttgggcgtttttattccttatgttggaggagtagagcatgcacatgttttgcttccaccactggaaacattgtgtactgtggaggagacctgcgtcagagacaaggctgtggaatcactttgtcagataggagcacagatgaaggaaaatgatattgtggactggtttgcccatgtcgtaaagaggttggcggtaggtgagtggtttacagctcgagtttcttcatgtggcctttttcatatcgcctatcctagtgcacctgaacaactgaaggcagaactgaggacaatttatggccagttatgtcaagacgacatgcctatggtacggagagctgctgcatccaatcttgggaagttcgctgcaacagtggaacaaagtcatttgaagacagaaatcatgtcaatgtttgatgatctaactcaagatgaccaagattcagtgcgactattggcagttgagggttgtgctgctcttgggaagttgttggagccccaagattgtgcagcacatattctcccagttattgtaaatttctctcaggataaatcttggcgtgtgcgctatatggtggcaaatcaactgtatgaactatgtgaagctgttggtactgaacccacaaggggtgatctggtgtcagcgtatgttcgccttctctgtgacaatgaggctgaagtgcggattgcagctgctggaaaagttacaaaattctgcaaaatattaaacccacaaattgcaattgaacatattcttccgtgtatcaaggaattatcatcagattcatctcagcatgttcgttcagctttggcatcggttattatgggaatggctcctgtattgggaaaggacgccactcttgaacaactgcttcccatttttctttctttgctgaaggatgagttccctgatgttcgactcaacattataagcaaacttgatcaagttaaccaggttattggaattgacttgttgtcgcaatcacttctgccagccattgtagagctctctgaagataggcactggagagttcggcttgccataattgagtacatacctttgttggccagccagttaggtgttggtttttttgatgacaagttaggggcactttgcatgcagtggttggaagataaggttttctcgatcagagatgctggtgccaataatttaaagcgtttgacagaggaatttggccctgagtgggcgatgcaacatataattcctcaggttatatgcgcaaaacccatgcacatcatctcttatgcgagggcgacaatggagtcttctgtgaaagggcctctagctgagatggttaggtggtctgggtagcactcctt

SEQ ID NO: 28203 - DNA, 464 bp, Zea Mays
cttaagctcaagtccaccagctcgagcagcatcagcgcgtatccatcatggcttccgtcctgcacgcaaagcttccggctttcgtcttctccgtgtcgcttctcctctcctctgcacttggggcgagggtggtgtgcgagcagctgacggcggaggtgtgcgcgttcgcggtgtcgtcgacgtcgcggcggtgcgtgctggagaccacgcactgcgcggggcggccgacggagtacgagtgccggacgtcggaggtggtggccgcggacgggcggctgtcggggctggtggagaccgacgcgtgcgtgcgcgcgtgcggcgtcgaccgcgccaccgtcggcatctcctccgactccctcctcgacccgcgcgtcgccggcgccgtctgctctgcggcctgcctccggggatgccccaacatcgtcgacctctacgccaacctcgctgccggagaggcttttcat

SEQ ID NO: 28204 - DNA, 1355 bp, Zea Mays
cgtgccaatcatgttctcatgcgacgactcccaaatcatcgacattatgctactgcttcagttggaacaaccgcagagatacgtcaatttggaaggttggaagatggttcattaaatgttgttgcccgtgggcagcaaagatttcgtttaaggaggcattggattgatgttgatcgggtggtgtggggtgaggtacaaattattgaagaagatactcccttgagaactcctagagatgcatttgctcaggttgtgccatctaggttcacagtcaagtgactcgatgaaatcatcctcagatgaagacggggatttgatgcccaaacagttttggaagcggaaacaacattctgtgagggaaagtggtgcatcaagtcattccgacaagaagaccaacatgagaaatgataacaatctttgcttgacgcctctccagtcatcgccaatagcaaaaacaagagatgctaagcggcggcgacagtaccatgcttactcaaagcaggcttctcatgcaccattatcattttggcctcggtgggtatatgaaatgtatgattcatatacacttgctcgcagtgctgcagagttatggagacagataattgcaaacccaagcatggacgatcataaagaaattcagcttctcaaggccttcaatcatattaaatgtagaaattgccagtctcatatagcaaaacgtagtgacatggtggtgatgtctaccgacgggcctcttggtgcctatgtcaaccctcacggttgtgtccacgagacgattacagtcagcaatgcaactgggctagcactcattggcaatccttcgaaagtccacagctggtttcctgggtactcgtggacgattgcagcatgcatggcctgcgagtcccacataggctggctattcagagccaccaagaagaatctgcggcctaggtccttctgggggatccgcagctcacaaatcgcagacgacacacaagtagatcagggtgactgatgctccaaacttccatgcgtataaggccatagtagcagtggactactaagtcatatatgacctggtgttcccaatcctccagtcgtgtctggttcatacgcactgcctgccttttttgtgttggcatagtagggacggtggagttccctgtaaaacaatcactctttttctactgttgtagtagtgctctgcactgaagggatttactgaatctctctttttttggtctaaataagatatctgttttcaatagtatatgcatgattttcatttacagatgttccatggtgtggcatgggtgaagaaaactgttctatgttaaaagaaatgttctagatcgaagaatagtgttctggct

SEQ ID NO: 28205 - DNA, 4717 bp, Zea Mays
gcttccgtagtacagggcccccatgtgcgccttgccgccttgcctccactccacacaaccgtgtcagtacggcacccggacaagaggcaaacggcaaacccgatcggccgatccattctccaaccctagccgccggccgccgccacctacccggctaccccacgtttccagtccccactccctccgccggcgcatcctgcttccagcctccatcggcgcatcctgctcctggcctcccgccaccggcgcatccttgctcccggcctcctgccaccggccgcatccccagggccgcgagatcctgctcccgccaccggccgccgcaacctgccagcgtccagggcactcgcccccaccatccgccgccgccccccaccggcagtcgcaacctgccagcgtccagggctccaggcaagggccgccacgtgaccacgtctcgcaggtcagcaggtcccttgcctccttccatggcgcatgctggtaggagcggaaccggcgctcaagcacaaggtgccccgaggccgagcagtcatcaagttccctcaaagacaagtgctgtggctgcaggaggttcctcaagtgcacctacaccgacgagtgctgctgcaaatgcaatgccatcttcaagtgctcaagctccaccatcagaaggtcctgacacccttgctgacaagaaacgggcagcgggcggtggctctgtgtttaagccaccccctcccatggtagctgttgctgtgggttccatcgatgaagatgagaagccaggacctacagagaatgacgcgacaagcctctctacgacaattcgcagtaactcattgcgacgctaccgaggaagtggttccgatgataaaacatctttgaatgtcactgatgaggacgaaagggccccatcacccaaccatcaggatgagccccaccggcaagaggcccacatctctagaagctctcaaggttctcgtcctcatggcactcctcgtggttatggttactatgatgatagaggatcccatgataaacatggtgatcgtgagagatctgcatccattggctatagtaatagtggaaggcgaagataccatgatgatagagaatctcatactaggcgcgctgagcgtgagaggtctacatcaaatgaatatactaacaagagaagtcgacatgagcatagctcaagaagctcaagaacatctgcacgatctgattgggatgatggacgctgggaatgggaagatacacctcgtcgagattatcgtgataatcgtcctggctcccggagacaacatccaacacgatctcctatgctcgctgctgcatccccggatgcacgcctggtatctccttggttagacgggaatacaccacgtctagcagcgtccccgtgggataatgtatccccttcacctgctccaatacgtgcttctggttcctcaaaagggtcttcttattcacattccagtggaagatcacaccagcttaccttttcatcaactactagttctaatattattgatgctgatagaagcccctcaaatcctgataggaacagtgagataaccgaggaaatgatgcaggagatggactacaatgctgaccgtgcatggtatgactgcgaagaacacactaccatgtttgatggtgatcattctatgtatcttggagatgataattcctacaaaaagagggaagcagagatgccgaagaagctgactcgtagagatggtagcctgatgacccttgctcaaagcaaaaagatgtcacagatgactgctgataatgctcagtgggaggatagacaattgttgagatctggagctgttaaaggaacagaagtgcaaactgaatttgatgatgaggaggaacggaaagtaatacttcttgttcatgacacaaagccccccttcctggatgggagagttgttttcacaaaacaagcagaacctgtaatgcctctgaaggacccaacatctgatatggctattattgcacgcaaaggttctagtctggttagggaaatccgtgaaaagcaaagcatgaacaaatcaaggcaacgattttgggagcttgctggatctaagcttggcaatatcttgggtgttgagaaaacagctgaacaggttgatgcagatactgctgttgttggtgaccaaggtgagattaattttaaagaagaagcaaagttttcacaacatttgaaggataaagcagaagctgtcagtgattttgcaaaatcaaaatccctttctcaacaaaggcaatatcttcccatatttaccgtccgggatgatctgctacaggttgtgcgtgaaaatcaagtggttgtggttgttggtgaaactggttctgggaagactactcaactgactcagtatctgcatgaggatggatatactaccacaggagttgttggttgtacccaaccaaggcgtgtggctgccatgagtgttgctaagcgagtcagcgaggaaatggagactgatctgggagataaagtcggatatgccatacggtttgaggatgtcactggtccaaacactataataaagtatatgacagatggagtgcttctccgtgaaaccttgaaagatgctgacctcgacaaatatcgtgttgttgtcatggatgaagcacatgaaagatcactcaacactgatgttttgtttggtatactgaagaaggttgttgcacgtagacgggattttaaactaatcgttacatctgcaaccctaaatgctgacaagttctccaagttcttcggaggtgtgcctgtattccatattccgggtcggactttcccagttaacattatgttcagcaaaacaccatgtgaggactatgtggaagctgcagtgaagcaggccatgactatccacataaccagcggccttggtgatatcctaatcttcatgactgggcaggaagaaattgaggctacctgctatgcgcttgctgaacgcatggaacagttaatatcgtcatccaccaagactatccccaagctagagattctgcccatctactcacagttgcctgctgacttgcaagccaagatttttcagaaggctgaagagggcgctcgcaagtgtattgttgctaccaatattgctgagacctcattaacagttgatggtatcttctatgtcattgataccgggtatgggaagatgaaggtgtacaacccgcggatgggtatggacgccctccaggttttcccagtcagccgggcagctgccgaccagcgtgcaggtcgggcaggaagaactggccctggcacatgctacagattgttcacagaatcagcctaccagaatgagatgctccctaaccctgtgccagagatccaaaggactaacctggggaatgtggtgcttttactgaaatccctcagagttgaaaacttgctcgactttgactttatggacccaccgccccaggagaatatcctcaactcaatgtaccaactctgggtgttaggtgcattgaacaatgttggtggccttacagaaattggctggaagatggtggagttcccgttggatccaactctggcaaaaatgcttcttatgggggagcagctagagtgccttgatgaggtgctgaccattgtatccatgctatcagtgccgtcagtcttcttccggccaaaagaccgagcagaggagagtgacgcagcaagggagaaattctttgtcccagagtctgaccacctgacactcctgaacgtgtatcttcagtggaagtcgaatcagtatcgaggcgattggtgcaacgaccacttcctccatgtcaagggtctccgcaaggctcgtgaggtgagatctcagctgctggacatactgaaaaccctgaagatccccctgacatcatgccatatggaatgggacgtggtgaggaaggctatctgctctgcgtacttccacaattccgcccggttgaagggtattggggagtacgtcaactgccggaatgggatgccgtgccacctgcaccccagcagtgcgctatatggccttggctacactcctgactatgtcgtctaccatgagcttgtcctgaccaccaaggagtacatgcagtgcgtcaccgcagttgatccacagtggctagcggagatggggcccatgttcttctctgtgaaggagacagacacctctcttcttgaccacaagaagaggcagaaggaagagaagacggcgatggaggaggagatggagaagctgaggcggcagcaagcagaggccgcgcgcatggagaaggagaaggaacgggagaagagagctaagcagcagcaacaggttgctatgcccggcctgaagaagggtgcgacttatctgaggcccaagagaatgggtctgtagataagacctgatataacttaactgtctccggtgattttgttactaggctgagggaacttgtaatgtgtagcctgctcaagcagcatgtaaaacaacacgtcaatgtgaatgtatacaacatcgacatgtgaaaaaatgaaaagaaaaatagagtgttgtcgacatagagtttgattttttgctgagttagctcttaaaagtatgcagtcattatgtttgatatggtatgtcctcttaatgaaaaatatgattcttgaaggtctatgaattctgcaggcaagctaaattagctcttaaaacatttcaagaaacaacgtgaccctgaatggactcaaccaatcgtccattgctgattagag

SEQ ID NO: 28206 - DNA, 2561 bp, Zea Mays
cttgcttctgttctctcgcgtcgttctcccgtagtcccgtgccctcgcgtgcgctctatctgtttctggtggcgacgacttggcggtccccgctgccgccgtgcccaggcctctacttcgggaccttcaccggcgacgagcacccatcggacctcagatgacactagcaacagcagtcatgctttgccatcgcttctatttacaccagtcccttgccaaaaatggatggcaggtgagagattatattgttgtgccagtgatggttgctgatgtctatgaaaagcgacaagagtgcagagtttcattgccaagcatttgttggaaatatgttctccaccatgtctaacttaacattacagatgttacaacttaagcaagtttgacatactttgacggatcatcttgtaaattacatattcaccaacagttgcaacagtatgtgtatttctggcgtcgaaagttgaagatactccttgtcccctggaccatgtagttagagtggcctatgaaacaatgtataggcgggacactgctgcggctcaaaggatccgtcagaaggatgtttttgagaagcagaaagcgctcattttgatcggagagagattgcttcttacaactattcgatttgatttcaacattcagcatccttatagaccacttcttgatgccatgcaaaatcttggcatcaatcaaaaagaagtgaaacaagtagcatggaactttgtgaatgactggcttaaaacaacattgtgtctacagtataaaccccagtacatagctgctggttccctttatctggctgcaaagcttcacaatatcaagcttcccttgcatggagcgcatgtttggtggcaccaatttgatgttgcaccaaagcctctggaagccgtcattcatcaaatgatggagcttgcggctttgaaaaagttgatgcctgctcgacccaatccggttaagctgaaggaaactttatgtgaagctaaactgagcttatctaatagcccagactctgtgttgaatcaatcaaacttgttaataagcagctcaagtcctgatattggcgagcccagtgacaaagtgcaggtggattcctgccaatacttgataagcagtcacatgggtgattgtagggtctcaggtcctgacagcagttcgttgaatacttgtgctaatagaaatgtctcttgtaaagcacatgatgaagagagcttggatcaggccttaataatcaaacatgacagtgggatgatgccttctagtaatcagacatcattatatgctactgtaggcactgagggcagtgctgaactgaagcaggatgtaagccattgtaatgacttcaatatcagagtcaatgacgaaagcttgaaccaggtgttaagaaatcagcatggtgatgctatcccattacctgacgtggtatcgctggatgccaaggtggacaaggaaaggagttggtgtgtggaaccattaattgcaaactctgattgctgtactgacagtgttaatgtggatagcttgtgcactgatcagagattggctgatgctccttcaggccccacagctgatgcaccatccatgctggccgaggaggaatcttatccttttagtgcaaagcttgaaaatattgatgttgccaggatcaaaggtttattgatgaagaggaagagccggagagagatccaagaccgagccattgcttcagatggtctaagtgaagaagactggatcgagagggagcttgaatctgggattgttacaaaccaagaagccaattgtgctgccatctcagacgagctaagtgacgaagcctggattgagagagaactcgagtcagggattgtggtcggaccaagaaatgagcaagcgatcacttttgatggtttgagtgaagatgattggatcgagagagagctggagtctgggatcatcgttgagccagcacctgctaccaagaagcggaagctggagtcaagctgttagctctgcattcgaaggccagattccaagcaggtgaataataacagatggttgcgagtaggaccacatcgaagccaagagatacatgtcgcacagatgggaggatcaatattatcctttttttatttctttataaccaaacaccttggagtactttgacacaaggggtgtgttcacagtgggatctccccagtttcttgaatgcagaaccgtatccgttgtatttgttccttcttgtcgtgagtgtaaatctagcgtgtccgaagttcggttttagattgtaggtgtaactgtagcagggattatctggtgttaagcccaacgagaaaatgattcagtgtaactgttactgtaaggaaagaagttattcagtgtagatttatggttaacacaagaagaggcaattactggtgtatgatgtttataaattgatgatgaatgttactggcagctcaaaagaaaagacagttactggtaactaaagaaaagtacgtttaacggagctgatcacattcaatcccctattgagctgcccttggtcgtcaattgtataacaactttctgcgtgaccatcaaaaaat

SEQ ID NO: 28207 - DNA, 2327 bp, Zea Mays
ctgcgctcctcctgccgcccctccagacgcccggacccgtcccgccacctacacaatgacagcaggccccgcagagacgcggccccgcgagtaaggggagcactctggccgccgtcgacgtcgtcgtcgtccacctctccccgctcctccttaatgacgtgctaatcagcgagcttaacccactggctcgggcgagcgccagtgcctttgctagcgcacaggcacagcggcgcacggcgcgggcggggcggcattcgcgtgcgtctcgccgtctcgtcacatggtggtgagggtgggccggtggggcttgtacgctagccattaatacggcaggtcgcccatcccatcccatcgcggccgccgcgcccgccggtctccacccctccccccaccccctgcttaaaatcccgcgtcccggtcgcgcaccccactccgcctccgctccccgctcgccgccgcgattgctggattggctgccgccagcgccccggtgctagctcccgttcctcgcggtggtcactggactagcctggacgccgcggcccgccgcctggtcgaagagatggactcggtcatggccgcccccgactcgccgccgcagactgtcgtgctcgtctctgccggcgccagccactccgtcgcgctcctcacgggcaatgtcctgtgctcgtggggcaggggcgaggacgggcagctcggccacggcgacgcggaggaccggctcgtgcccacggtgcttagcggcttcgacgcgcccgcgatcacgtccgtcatctgcggcgccgaccacaccaccgcctactccgaggacgagctgcaggtctacagctggggctggggagactttgggaggctggggcacggcaactccagcgacgtcttcacgccccagcctgtcaaggcgctgcaggggctcaagatcaaacagattgcctgcggggacagccattgtcttgccgtcaccatggccggagaagtgcagagttggggccgtaaccaaaacggacagctaggccttggaaccactgaagactcgctgctcccacaaaagattcaggcttttgagtaactgaagacggtgacctctacggatggggttggggtcgatatggaaacttaggtcttggtgaccgtaatgaccgtttgcttcctgaaaaagtatcttctgtggagggtgagaagatggtgcttgtggcatgtggatggcgccatacaattacggtttctgactctggtaatctgtacacttatggttggagcaaatatggtcagctagggcatggtgattttgaagatcatttagttccacataaagtagaagctttgaaagatagcactatatcccagatttcaggcggctggaggcatacgatggcacttacatcagagggaaagctttacggatggggatggaacaagttcggacaagtcggagtcggcaacaacgacgaccacagctcccccggacaagtcagttttccagaggatcagaaaatctcccaggttgcatgcggatggaggcatactctggccctctccgagaagaaaaatgtcttctcctgggggaggggcactagcggacagctcggcaacggtgaaatagtcgacaggaacacgcctgtgctgatcgatgccctgagctcagacggttctgcctgcaagaagctggagtcatccacggcagccccattcgcagccaaagtttgggtgtcgccgtcagaacgatacgccatagtccctgacgagaacgtccgtaaagcaggcggaggcacggcacgaggcaacggcgccgacgcgaacgtgccggagaacgacgtgaagaggatgcgcgtgcagtcgtcgtagtaggtcttctactaccgtccactccaccacccccccgttaaccctactagtagtaagtactacgaagacgaaccggtgccccatctagcggcgcccgatttttgtgcgttacgttctgcctaaaagtgctttccgtcgacggacggacctcctggtgttgagatggtagcggtagcactgcctcgcggcgatggtgtgtgtcgtgacgtgattcacctcttagagtagagaggtggctagcccagtcgacctgtgttgtgtgtgttgttaagatgtgtcctggatcttttgtgacattgcatggagggtacaataagcgcttcgtttctcgtttcttcccacttgttgcatgatagccaactgaaaccaagtactccgtgagacgaaagcaacgagcacacaaagactattttgcctatcttcatcatcaatcttcgcatcgcatcgacggtcacaagatcagcaaccaattcattgatcga

SEQ ID NO: 28208 - DNA, 301 bp, Zea Mays
actcggattccagtgcccagccatggaactcccctgcaagctgctcgccggccgcctagctcccctgtgcgcacctggccggatttcccagccgagccctttccccaaccattcctccatccctacctcgcctccatggcgttgccgtggatttccttgctgcgctctgctcgccatcgcaagccgcggtgttccctgcacgcctagcttgctccagctcctgtgctgaccgtcgtccttacgcttgggcctaggctgcggcaaactctgccagtcgtacagcagcaacacctatggcaac

SEQ ID NO: 28209 - DNA, 3635 bp, Zea Mays
ccacgagacaaaatccagaaccaggccggcggcccactcccaccgccgcgcctacgccttcccccgccccccgcgcggaggagggtgccgccggcgatggagacgacggccgcgggcgcgccaagagcgcagacgctgcgggacctcgcggaggagggcaagaagcggggcgtcctgctcctcgtcttcgccttcgggctggccttcctcatgtcccttacgagctcgtcagtttggtttaatctgccatttgccatagctctgattgttttgttccgctacatatcgcttgattatggccttcgtagaaagagcgtaactagaacagatcatgccagtcattcactcgtcaaaacaaaaggtactgaggtaaagaaagtcattcatcagactgaaacggatggaaaaatagattggaggagcaaggttaactcgcctccagttgaagcagcattcgaacagttcacaaggcaccttatctcagaatgggtaacagatctgtggtactcgcgcgtaacacctgacaaggaaggtccagaggaactcatcgatgtagtcaatactgtccttggggagatttcagttcgggcaagaaatgttaaccttatcaatctgctgatcagggatttggtcgatcttatatgcaataatttggaactttatcatttctgtcaagccaagattggaagagagaagtttgtgggccttccttcagagcgtcgtgatgctgaactgaaaatgatccttttagctgaaaacaagttgcatcctgctttattttcagctggcgctgaatacaaggtattgaaaagtcttgctgacgggttgatctcaatcacagtgaagcctcaggatctacaatgtactttcttccggtgtacagcgcgggaacttctcgcttgtgcagttttgagacctgttgtgaacttagcaaatccaaggtttataaatgaaagaatcgaatcctttgctctttcgcatgccaataagttggagaaaggaactgcagaatccttggatgttgtcacaactgttaagcacagggaaccacatatgccctctgttgatgaattttcggcactaatagaccactcaagttcaggtgttgagctcgttcaatttcgtcagggtcaatcgaaaactgcatcagatatacaacctggaaaaagtacaaatccatatagtctaaaattagaatcctctcatgcacctttagtcagtagttcacacccactggagtcaacaagtttagcttcgtcttcccacgttacttctgataatgggttttcgttgcataccaaaagcagcaacagagcaactgcaaatggtcatggtagagagtgtgcacagcccttgggtatcagttctgagcgtgcacatcaagctttagcacttgagcaccttgagaatatgtggacaaagggaaagaactacaaaccagaaaatgtagaacatgtcgcaaaagtgtctgttggatctgcttctctgggctcgacttcagttcagcaatcagttccttgcagcacttcagtttgttacaatcaaagtaattctgaaagaccaacagcgtcatctcagtcaaaggaccagcatttggtaagacactcaactacacctacatatgtaacatatccaaatggcaccccgaaaagcctatctgcagaaatggcagaacatgccggtccagaagactttgcagtagagagtgagagttcatatgccactgaggacgatgaattcaacaatgtgactggacttgattctcctgttaccagagtttgggaaagcaaaagtaaaggaaatgctaccttatcacatatacatcacccactcgaatctcctggtttccatagagcaaagaagaacagaagtcatgtgggaaaactgaagatgtcaagaacttcttcaggaagaaaaaggtcaaggtcaaatgctcagaagcctcctatctggcaagaagtggagagatcctctttctctgttggtgatagtatggacatactaaatacatctgcaaatgatctaaagacgcatgagctagacgaggatcctgaggtggaaagtatggctaggatgtttagtagttcaaatacttcatctttattgttgccatcaagtgactctgcatattcttcaaattattgtggtgccaatgtgctacaagactcttatttgaagttaagatgcgaggtggtaggagctagcattgtcaaaagcgggtctggcatgttttgctgtgtattctatttccgtgaccgacgccaatggtaatagttggtccattaagaggaggtttcgtcattttgaagacctgcatcggcgtctaaaagagtatgctcagtacaatcttcatttacctccaaaacatttcctctcatcaggtttagaggtttctgttgttcgagagagatgcaagctgctcgacatatatctgaagaaccttctgcaaattcctattgtttcaagctgcatagaagtctgggattttctgagtgtggattcacagtggatggccccgaatcttagtgttcccttgtttcatcttgttgatgtggtctttcagctccaagatggaggctggataaggcgtcaagcattttgggtagcaaagcaaatactgcaattgggaatgggagacacgtttgatgactggcttgttgacaaaatccaattacttaggaaagggaggataattgcttttgctgttaagcgcattgaacaaattctctggcctgatggaattttcatgacaaaacatccaaagagaaattcgcctccacctcctcctggtgctcagagcaatggcatgggaaactatctaagcgatgaacaacggatagaagctgctcatcgtgcaaattttgtccgtgaactgataatagataaagccccatctccactagtgagtcttgttggtcgaaaggattatgaaagatgtgctcatgatatctatttctttcttcagtccccggtttgtttgaagcagctagcgttcgaactccttgagctgcttgttctttcttcatttccggagttggatggcactgtgaggaagtggcacgaagataaagagcaattctgcgcccagtaatgtttatcaaacgtttgaatttgtcacgggcggtgtttgtttccaacacatatcgtctttccagagtggtgtggcctgtgaattctgcgaaaataaggtggtggcttcagaggagtgcccgtggatatctcagtttgaagtgggtggtggctttgtgcagtgtgaatatggttagatagtgcgaggatatggtccctttttccaccgggccatggcagaacggtttttgtgcccgatagagttcatttttccccctccagatttggtatacgtaatgctgctgcctgaaaggaaagagatggtggcgcattttttttgcacccgttttggtggtacactggtacccgtcttgtgtaaatctgcatagagataaatgaagtttcgaggtggtcaatgaatgataatagctctctggcatcgtgatgattcgttgtggctccgccttgctgtacgtttttttggtgctgcccctgcgaatcatctcggcactattttgtgatgataaaaaaaaagtaatatgcgctggagattcgtttattcaaat

SEQ ID NO: 28210 - DNA, 4219 bp, Zea Mays
cacgcaagagccgacccgagcgctaacacgtactcctcgattatactagcggtctagcctagcgccaccaccccaccccaagctgcttcgcgaagcaacaactatccctcgttccctcccagtccccgcctcggctccctcgcctcctcctccattcctacttccttcgctctctcctttatcccttccttgcagtccccttctctccccgacgcctcgtttttttatccatcggtgtcgacgaggggaccgacgaagcggaggacgcctcagatctagggttccttccttgcgtgcccttcgaggagagacagagagagggtctgcatcatgagggccaccggggagcacacaactgcggtgcccatgcccgccccgccgccgcctcctgctgcggcctctgcgagtgaggaagacgacaaggagaggaggaagaaccgccgccgctcctcgcggcgctccaggcaggcggccgttgccgcgccgcagggcctgcacgcggacgctgcggggccgaggacggtcagatcgatgccgcccatgcacgtgggcagcagcgccggcgtcgacgccgaggcagagccgtccgcggcgggaacgagccaatcctgccccctgccccccacgccgagacccacggaggcgcctgtgtcgaggctgggcaggggagctccggggacgcgttacttccagcctcactggcctgagcgggccgtggaggaggccgtcaagagagggcatgctttcgtggggaagttcagggtgaatgctcacaaccgaaatgaggcgtactgtacgattgatggcgtctcggtggatgttctcattacaggattggcacaaaaccgagcggttgaaggtgatcttgttgctatcacactggaccctgttgctcactggactagaatgaaaggaccaaacgttgcgtgcaaccctctgataggagattctgtggtgtgtgaggttagtgaaacaaataggaatcatagttggaagaaaggacaggcagacgacggctgcaagtttgaaaattgcagtaacggagtacctgttttggataggacacatccccctcacaagaacagtggttttagtcaagctgttaagtgtggaaatgggaatgctactatccctgaaaggaatgagatagacttgaatgatggaaagagtgaggttgcaagagcattacaaaggatcagtgccacgatatactctcatccaagcagacgtcctactgggaaagtattatcaataattaagaagtctccgcgccgtgatgccattgtaggtttccttgcttctttctcagagttccctgacggagagcagcagaaaaaccagatgggtctaaacaggatgaacaacagaacacaatcagttacaggcttgttttatctcttgcctactgaccccaaattccctcagatggttgtgagttttagcactttgccagatagtgtcaggcagagcctaagaggtaacgtagctgttaagaaggaattggttgctgcacgaattgatgaatggaatgaggaaaacctctatccctatgcccatgttatacggttcttggggaaggttggacatgtcaaaacacacatggatgctatattatttgagaatgtgatctgtgatgctgagttttcccctgagtccttggcatgccttcctgacaattgttggaagattcctcaaaaagaacttgaagctagaaaagatttgaggaaggtcttgacttttacaatagaccctcctactgcatcggatctggatgatgctatatcaattgaaatactttcaggaggaactgtccgtattggggttcacattgctgatgtttcttactttttacatccagagactgctttagatgctgaagctcaaagtcgatctacaagtgtttacaccctgaaacataaaatctcaatgttgccttcaggattttcggaagtggtttcacttaatccaggtgtagataggcttgccttttcaattatttgggatattgatcctcatggtaacctaattagtcgttggattggtcgaagcatcatcttttcgtgctgcaagctgtcatatgagcttgtgcaggatctgatttgtaatgaaaccagtcagactaggcctgaagtttcttctcttgaagtacatggtatatttgggagagatgatgttatcaagtcacttagaggcctctatgaagtctcaaaaaatctgaaggaaattaggttcaagggtggagctctttctcttgatactgcaaagattatgatcctgtttgatgaagatggggatccatgtgatagctatcgttacgtgaggaagaatgcgtgcttcattgttgaggagctaatgttgttggcgaatatgtcagctgcagaagtcatatctaatgcatttcctgattgtgccttacttcgtaggcaccctgaacctaatttgcggaagtccagagagttcgaggcattttgtgctaagaatggttttgaattggatgtttcatcatctggtcaactccacctttcactttctagaataaaggaaaagctgcaggaggatcctgttatgtttgatattatcatgttttatgcttcaaagcaaatgcagtcagcagaatacttttgcacaggggacctgataagcaagaaagatgattgggcacattatgcgctgactctgaatgcggtgattgaagctgaacaagtgtatatgaaacagaagaaatcttccgcaggccagaatggagtcaaagcatcttgtgaattgatggatatgtgttttactggccttcagttgtgcaaggatgctgctgaatctgaagaagggaaaaaggcactttctgctgcagctaagaaatttaaggttccttcctctgaaaatcttggggagattgctgaacactgtaatgaaagaaagtgggctggtcgccgtgcagaagaagctggacagaagctctacatgtgggctctgataaagaacaaagagactgtggtatgcaatgctagagttctgggacttggtcccaggttcatgtcagtttatgtgcccaagcttgcgatggaacgaaggatatattatgatgaagttgagggattatcagttgaatggttagaagtcactggaacgttagtgcttgatacatgcaggaacaagcctgctcaaaggagaggaactcagatgaagcgcaggccgattgaggaagtcgcggtggtggtgaacccttcagagttgtctgaagaagacgaggaatcaggagcaacagaagctggcggctgcactgccaagtctgttttgttgagtggcgacgcagtgaaagctcagaccgccccagccgttctccccttggtgatacattaccttagtgacatccctgtggttcttcatgcaattggtggtgaggattgtgcggtggacattggcgtaagactgtacatggcgtcatacttcaagttataggaaacctcctgtcatgacaggaaatagttggtcgatttcaacagtttttcagtcgaacgaaagtaataaaatgatggtgggcaaattccaacttagtgctgtagatatttcattcatgtatagcaaattaggtacccttccagcacagaaaaagaaaacccctaccccaatccgttctttcccatcctgtgacatgaggttttgatggcagagtcaagtggcttccgtttttaatcccagactgcctgttgaggtaccaaaatggtggaagtgggagtctacattaatgccacactattttagtggttccatcaatgatcttctgctagtttgtgaaacgagggtttgttccttttgctcttaattcatgtggattgagtgagtttaaatcctaaataaattaaaaaattataattcattcaatcttatccaattcatatgggacagaaataactgaactagccctgatgtttttttatgggttcactcaaatgttgggataataagtctatttggtgattgttgctgtcgtttgtgtaattgtgttttcatccgtttcgtgaggccgagatatatggcgcagtactgcagtgctctttatgaagttgtggtcatgtaattattctttgcgattgcagttttacccgtgcacatgcgagcaactcagaaatgttgtatgacatccattttgttgagactaagctctcagtgtaaggacagttgattgtactccatagtttctaatttataccggtttattcgg

SEQ ID NO: 28211 - DNA, 3889 bp, Zea Mays
caattttccccatttgccattcccgacgagcaccttcaccgtctcctcccagtcccacctcgcgtggcacgccatggctttctccccgcgctcgccgtggtcgcgtgccaagaaaaccgacgtctactcaaccttcgttgtccacggcgatgacgatgaagacgacgcccgcggcggcaggggcccctccacgcgggcggaggaagacgaggaggaagacccctcctcgctgcctccgcttcttcagcggctccccaaggactttggcggcgcctcgttcgacgacgacgaggacccctactcctccgaccctgacgatgcttccctctctgccacggcggccttcaagagcggcgtcccggcctccggtcgatctccgttcctggatctgcggcgctcaagcccccgcgctaccgatgacgacccgtactctaccttcgtcgttcattccaccacacgctcggggagaacctcctccagccctcgcgggtccgcctccggcacattcatccgtcgctcgggtggctcgtctagccctcgcgagtccgtctctggcacattcatccgccggaccggcagcccgtcgagccccgggaagtcagcctccggcacattcatccgccggccagggagcccgtcgagcccccgcgggtcgttctctggcaccttcattcgccacaccagcgggggctccagttcccatgaatctgcctctggcggcggcgggggtttcgggtcctctttctggactccagcggtggagcagtcagaggagctccggcagccatcgcctctgatgcagcaacaacagcaacaacattcaaggcggaagccatcggtcagctcggtgccagacagtgttaccagggaggatccttccaccaagtacgagctgctccatgagcttgggaaaggttcatatggtgcagtgtacaaagcaagggatctcagaacgcaggagcttgtggctgtcaagatcatctcattaacagaaggggaagaaggctatgaagacatacggggagaaattgagatgctgcagcaatgcagccatccaaatgttgtccgctactttggaagctaccaaggagaggagtacctatggataattatggaatactgtggtggtggaagtgttgctgacttgataggcatcacagaggagcctcttgatgaatcccaaatagcttacatttgtagagaagcactaaagggccttgcttacctgcactccatttttaaagttcacagagatattaaggggggcaacatccttctaactgagcaaggcgaggtgaagttgggtgattttggtgtagctgcccagctgacaagaaccatgtcaaagcgcaacacgttcattggtactccacattggatggcaccagaggtcattcaagaaagtcgttatgatggaaaggtagacgtttgggcattaggtgtatctgcaatcgagatggcagagggcatgccaccaagatccactgtgcatccaatgagagtaagcggtgcttctcaatgcgttgtcagtatctgcagttaatgaggctaataggctgtaacctgtaacagaataaactgctctatctttggtgcagtgtacttgtctctttaatttcatttctgatgcatttgttttaacttcatcttgctaactatttggtatacatatcaatctattatttcattttcgtttagattgatagactggctaacggtctctcttccccctgcctatctcaggttatcttcatgatatctagtgaaccagcacctatgctggaggataaagagaaatggtctctcctcttccatgattttattgcaaagtgtcttactaaagaccccagacttcggcctgctgcaattgagatgctgaagcacaaatttattgagaagtgcaatagtggagcttcgaaaatgttggcaaagatcaaggtagcgaagaagattagagccacactagctgtgcaaaatgagctgtctgaccctgacaatacaacgcaagatgtgccttttcgaataaatgaggactatggggaaactgtccctacaagttctcagcaacacatgaaacatggcacatataatgattgtcaggcaggtgattttggtactatgattgttcatactgaagatggggacgaagtgacagaatcacccattttcccaagaacagaattcatacccggccttggtagcatcaattctttcacacatgatccaaagagagcagaacttatttcaagtttttgggcggagaacataggtgatagtgatgccaataaagaccgagatacagattatggtcctgacatgcaggaatcaaaagtgatctcacctttaactggaacagtgaagaagaatattggtgcagaagggactataaggtgccatgataatcaaattaacttgtcaccaggacttgcaaacacaacaactaaattgaacaacagcccaagccgtaaagcgttttcagttcaggataagctctggtcaatttatgctgccggcaacactgtaccaataccatttcttaaggcaattgacatttcaccactagctctagtatcagaaaatgaatcaggaaatggcctggctgggtcaagtacaaatgatgctttggaggcagttagggagctgttcagtggtgatgggcaggcaaagaaaggacggaaagggcaaaacgaagtatgcggcagattcttttctttaactcttgcagagtaacttatcttttaatgattgcagagggaaacttaggccgttcttagtgggagtttcattctcattaaatgacataccacctaagcaaacaggatgacatggcatgcaattcaatgaagggggatatgagtttcatactttcatgaggatgtatctagacctagacaaatgttgacttgacagctttggaaacagtgcgatggaactatccattgagaatgaccttaggccaatttcagtggggagttctctaacacagttgccgggactgccacgccaacttttgtgtctgtgccaacgggtttcatccgataaaactccctctatctctctccatagttaacctggcaagtcatcaaaattgctgatgtgtaatagcattaaatgcaaatgaaactcagatgaaactcccagtgagatcgaccttagtctaatactgcatttggtgcattaggtccctcttcctccgggtgtgcatcacaggctgacgacaagccccacattgatgaacctggcccaagctctagcttatcataaaacgtgctatgaggacatgccgctacaagattcacaagcgacgcaagagcagcaaacgatacaaaatctttgtgacacacttcgcacaatactgaggttgtagatctgcaagagtgaaggctgcaacctttggagttccgaagcctgcatggagccaagggtgaacgtggcactgatcctgctcgtggtggagaactgaggatcgaaggaacgcatgacatgtgcctaccgtggagcaggcctaatggcttctgcgttttagcctgtggacgctttggtcactggaagctgggttgacacaggaatctctacggaagtggaaatttctgtccctgttaatagcctcttggagtttcactatgtagagacggcatcaaattttgctaatcagattttgtggcactaacgcatattgtagcctggttttgtatcgttgtcaatgcatttgttctccaaataaagagaaatagttaagcagaaataaacgaaaagttatttatgttggctattcgaaatcatgggaggcgtgatttctgctgtcttgaccccgtattccttgtgtctggccattgtacgccatgcttcgtgttgttaagtgtcagttttttttagcgcgcgtgtgaat

SEQ ID NO: 28212 - DNA, 1480 bp, Zea Mays
cgaaaggttatcccacctcttttctattcttttttccgcccgaagacaacgtaacaaaccaacgataatcctccctcttgctacaaaaaaggaaaaaaaaacatcaataataatccactgcggtcgctcgtcctcctcccaacctcctcccaagttgcctcgtgctctgcttcttcggttttcaggagcgtcggccattgctgctggaaaagcagaccattgggactccctcgtgcgttttccaaatcagtcaggttgatggcgatggagggaccagttttatgccgccctgcaatgcaagccaaatcgcctgctgctgcgctggtcaacaactccctgaccagattcgggcagcttgggaccatttcaaaatacaggaacgtttcaagattcatttctcccatctctcagccatctacgaagaacataggtccatgctgtagcttcagctcgtcttctgatggcaatggatacatggctggaaactttagcgacagtgatgaagattatgttaattctactgtgctagaagcagttgaggtgagaagtggatcggaaggatatgtgataaagatgcgagatgggaaaaacttgcgttgtgtccataacaattctcaagggagaaatattccagagagtgcaccccaacctgctattgttttgaggattgaagatggaagcgaaactttacttccaatcattgttttggagatgccaagtgtacttctgatggcggctattcgtaatgtccacattgcacgaccaaccatatatcaagttgtcaaggaaatgattgataaaatgggctatgaggtaaaacttgttcgggtaaacaaaagaattcaagaagcgtactgtgctgaactttgtctaacaaagattgatgattctacagacagcatcaccttcgatcttcggccttcagatgccataaacattgctgttcgttgcaaggttcctgtacaagtccatagaagtcttgcatacagtgacggcatcagaccagtcgagccagcaagaatggcagtagcagctggcctatcagatgggttgttatttacagagcttgacagacccgatggacaggcatctgttgaggctcaagagtttggattggtgaagaacatgctcattgcagccgtagaagagagatacaaggatgctgcatcatggaaggacaaactgatgcggctgaggtctaagcggaagaactgggcctgacagcgttgcatgtctggatggtgtaaataaagatgatgcccagctgaattccagtacgcattccagataattgatgctgggttatggctatgtaactagctgtacatattgtatggacccgaggatggtcttctgtaaattcagactaagctttgaagtgaaacactaatccttcggagaaacttggtaccttgtccgtgttcacttgtggtatataatgttggaaattaacagggttaagattaatttgataatgcag

SEQ ID NO: 28213 - DNA, 2491 bp, Zea Mays
attgttttcgagattgctagcgaaaagcatctcaatccctgaatcgcacacccagccagaacgaacgccagaaggcccagaaccgctacctcctccaatacactttcgtggctccgccgcagcacgaaaccctagcttctgcatctccgccccctccacctcccctccgcgaagcaggcgagatgtcgtcgggcggcggtggggggcagcagttccgctacacgcagacgccgtccaaggtgctgcacctgcggaaccttccgtgggagtgcgcggaagaggagctcgttgagctctgcaagcccttcggccgcatcatcaacacaaagagcggcgtcggcgccaaccgcaaccaggccttcgtcgagttcactgacgttaatcaggcaatctcgatggtttcttactttgcatcatcttcagaaccagcacaaatacgaggcaagactgtttacattcagtattcaaacaggcaagaaataattaacaacaagagtcctggagagactgctggaaatgtcttgcttgttactatagagggtgttcaagctagtgacgtcaccattgatgtgatccatatggcccatgttaactggagaaaatgtcgttatcaacacctgcaatgggagagataccatgtttgttttgccgcctctgtcttctaactagtacattcaaagttcttatgaactcttatgtctcatcttgaggatgcaactttctaagtatcccccatcaacgcgcttatctccggtgtagggcacctcctgtttattcaagttattcatgaaaggttaaattccaaacctttagaccattagtatctctatggtgcttattttagatcattgtttggtgatattatacatttcagcctttttattttaacagtatgttgaatttcatccattgcttctctctcgctgacccttcccttttttctgtttgggtgagggataagcttcaagagtttatatccattgtttggaaatggtgtttatttttattatcaaatatctatcattgtgtgtttaactgcaggattttttttacatgtgccatgagattggtatgcacctaaaacaatctcccctttatctcctatgtatgatccttttttgtattcctttcaggttttctcggcctttgggtatgttcataaaatagccacctttgaaaaggctgcaggttttcaggcattgatccagtacactgatgcagatactgcttcagctgctagagaagccttagatggaaggagcatcccaagttacttgcttccagagcacgtgacatcctgctgcctgcggatttctttttctgcacataaggatttaaacatcaagtttcagtcaaaccgcagcagggattataataatccatatcttccaattaattattctgccatggatggtacattgcagcctgctgttggatctgacggaaggaaagtggaggctcaaggcaatgttcttcttgcatcaattgagaatatgcaatatgctgtttctgtagacgtgcttcatactgtgttctcatcatttggtacagtccagaaaattgctatttttgagaagaatgggggaacacaagctttgattcagtaccctgatgtaaatactgccgctgtagcgaaggaagcattggaagggcattgcatctacgatggcggctactgtaagcttcacctgtcatactcccgtcatactgatctgaatgtgaaggcacatggtgacaagagcagagattatacaattccagctggcgtaatccaaggggcgccacaaccacctggtatacaagccacgtcccctgggtggcaaggtaaccttcaagcagcagggccatatgccccacccggtgcccctcctcaaaatcacagtgccaatggacaagtgccgaactggactcctggcaattcagggtattccccagccccaggaacatatccaggccagatgtactcatctccggcacagtatgtagcatcagggagcttccttaatacctcagcggccactccgcctcagtatgcaacctcagggggcttccctaataccccatccaccgctccgtcacagtatgcagcatcaaggggcttccctaacaccacacctgccgcccctcctggtgctccatcacaaacgccgcacgcttcccagcagatgccgcatcagcatggaaatcattcaggaggaggcacgcccggaactagccaaccgccactgccagcatcatattaccgttaagttggatcttcttttgctattgtacttgacctgtgttttgaactgagtaatcatgtaatactgcaataacctgcggtctgtaactgtgtttagatgtgatagcagatggatacgagtgaggaatacatgaatatgtttggggttttcattcattttaaaaaacggatcagtgttggctcatggcgattactggcaagatcatgattgatgttggattggtggtaatgttctgaacagccgac

SEQ ID NO: 28214 - DNA, 806 bp, Zea Mays
ttggaatacagagtcagtccacgttgtggattgattcatttagtgtcatcatttgtagtccccaatcatccgacgctgatcccctcgattcgcggcgccctcgcctccaccactctccaaccacccgacgccgaccgccatcaattcacgcccccaccagctgcatcggttccctccagcgccccgcctcctggcgcagatccgtgcaccccttgccctctccggactcgatgattcacagatccgcccagctgcccaggcactgactaccggcatccggatctcctgctccactgctcgccgcctcggggctctccggcgttggctcagcgcgacgggccccccaatagcctagttccggatcccccaaccgcccaagccccacaggtcaagcaccggccaccgatgtctgacgaacgagcgaactccccgcggatgcaggaggaggaggtgcaggagcgaccgccgaccgtccgtgtttcaccatccccttcttcgatcacaaggaatcataaaagcatatggaggaactatgtataggctacaaagaagcataagaagcatttttatagcagaagccaagtgttctgatgattttgttttttcaattgtgttttatgttattagttcagcatgtacatatattgacatgatttatggcatggcatctgtcatctttgttatatttatgacatcgttcttgattgatgtgtgcgacatgaatgatggtttttttaacatcctgaccatcattgtgtcgctcattatcgtattttgtatatcgtttatgggttcacggatatgaa

SEQ ID NO: 28215 - DNA, 1499 bp, Zea Mays
cgtctctgtggctggaatcactgggggagatgtccgcgaccgcatcggcatcgctggtttggacaggcacggactctgatctgacgggctcaaaactgaaatgggctcgcattcttttgtcacccgccgagagagcataagcataacacaaccatggcaatttttcggcgagatcagctgtggcttcgaagcccagaaaagaccagttgaatcgttaatgggctgggctcgcagtagtggtggggctgtggttgctacaaaagcaaggtttttaccttcgtaagaaaaaaaaagtactaatagtgaggcatggggcccaaaagtttcggcccaacgaggcctcggcctcggcctcggcgacggcgaaccacatccatccaggaaacgaatgaatcagagcaacggacaaccaactccccccctccaccatctacgaacgggggccgggaaaagatcggctacagacagatgaggctctgtctccggcaagcggcggccaccagctcacccctcgcagctaccctccgcggcaagacttctacgagcaccctcgccccccatggccggctcagcttcagccacaccacgtcgctgcagacggcgcccgggcaccgcgggctccgagcagggtgggcggtgcgcgtgctcccgctgacggaggagaacgtggagaaggtgctggacgaggtgcggccgagcctgatggcggacggcggcaacgtggcgctgcacgagatcgacggcctcgtcgtcgtgctcaagctgcagggcgcgtgcggctcctgccccagctccaccatgacgctcaagatgggcatcgagacgcgcctccgcgacaagatccccgacatcctcgaggtcgagcagatcgtcgacaccgagaccggcctcgacctcaccgccgacaacgtcgacaaggtgcttgatgagatcagaccgtacctctccggcactggaggtggaagcctcgagcttctccagattgacggatacgtcgtcaagatccggatcggcggacctgcagccggtgtaatgacagtacgagtagccgtgacacagaaactgagggagaaaataccttccatcttggctgttcagctcacagaatagaaatgcgagagctcacttgtgcatcatcacgacgaaactctggctttcaggcgaatgtgcagtgttcatcagtcttatatttctgtccttacagtacgtacagtgagttgcagaactgattaatacaattttcatgcaagaattctgccttgacaaaacaaaaaatcttagctctgaaagataatcaaattagcttctaagttacatctgttgataattcagtgtataatcattacattttgcactggatcataccagttttatatttcaagcgcctcttcttggcaaatgccaagctcttttcacagaacttcgctggagctgaacattgggctttaaaccttcctcaatcattagcttgctgtttttggatcgggcggatggacgag

SEQ ID NO: 28216 - DNA, 953 bp, Zea Mays
cttatctcgttgtcgctcttggcatcttcttcaagggctggatttttttgaagccatctccacatctgctagatatttgtttacgtgcctcatcttcattccttatcctgtacacgtcaagtctttggaaggaaatttctcagcgtgtagcttcatcttcccctccgtgctcggcgtctctggcatgctggtcgaccagcccgtgactccctgcctccctgggacgccgcacggctgcaggccgcggagcagtccacgccaggggcagccgaggaggcggctgggcgaggaggacacgcacgcgcagggcatgctcgtcaagttcggcgacgtgctcgacgtctttgctttcacttgcgtggccgtgctgaagctcctgcaccgcgtgggcatgcgcgcgctctcctctgtgcgggagagcaggctctcttcacgccacgcgcagggcaccgtccagcgtcgccagtcgacttccgccaccttgccggtctggccatggatttccccttctcccctgcgagctccaccagtccgacccaggcgaccacggtcaagtccccagctcctcgtctttgtgcatcgtcgatcgtcacaggccgtcgtgggcgctgccccgccgtcgcgcccggggttttagcacatctccctgctccgaccaatttcgcacctcgccgtccatggagccgatcgtcaccagctcacgcgcccagcttcatgttttccctcttcctcccgcgctcagacactagaaaagatatcaaagcttatgacactcataaattatcactggcagtttcaattacgccagtaaaaaaaatcaggagctatacgctcgcagccaacttccattggaggcgattttggaggtccagatttcacaaaatacaagggagaggttttggtcttcattttttggaagaaggtggataagaaaggttgatttatgttttttt

SEQ ID NO: 28217 - DNA, 2955 bp, Zea Mays
cttaattgtactgctagatatgcttggacattagtgccatggctcctcaataccaagctgcgaccttgattgcctctccatcttatccaagtgccattgcttggtcaagcgacaatcttgtggctgttgcatctggtcatattgtaactattctgaatccatctgcgcttgatggaccccgtggattggttggactttgtcgcagtgacccttttcctataggactggttaatagagaagatctcttggagccatgtttattgtccacttccttagcgcgtgagactgaaccatgtgcccgatcgatttcatggtctcaacaaggatttgcacctaactctgggtgtttgctggctgtttgcactatggatggtcatgtgaagctttacaggtcaccaatttgggagctatgtgatgaatgggttgaggtcgcagatatatcacagttgctgtttaactactataaacttataaactttggagaggataatggttctcatttgacttctctggtgtcctggacagagaaaactaaagcgatcaagagttgatggttttatttatgacgtcaatgaagttgatttagatgcatcaaaggatgcagacttctcgatcgaaccatgttctaaatcaaagaagaaatatttgaaaaagactgtaaaacccaggcatgaagtagttgctgtaaatgaacgaaacaacacaggaaatattaaaggatcattgtcctccaatggagaaaacaaatcccttcctcttatcacggcaaaacagtatgcttgtcgtgctgcacatttgtcttcccttgtagtttcatggtctccagttgtgtcatcaagtgataaaacatcttgtttattgaggcattggtgcattattgctgttggctctaaatccggaaatctttctttttggaaactacctaagccagaatattacacaatagatgctggcgtggttaccagtgatccaatgctcatcggggttttgcaagctcacaaatcatgtgtcagtgtcatagcttggcaagttctttctgcgggctcttcaaaatcctcgttgcttttagctactggatgctcagatggaagtgttaagatatggttagggaatattgaagggttaaatcaatgtgcaagtggagaagtgccatttgcgttagttgctgtggtcgccactgatttatcatctccagtgtcatcaatctcattagccatacctgcccagtctcaacacgaggtcagtttggcaattggaagagtatctgggtcactagaaatatggatatggaatgcatctagcaacaaaattgagattttcagtgcatggcatgcacatgatcaagtggtttacaatgggctatggatggctattgtttattcagctgcagtcaggacaattctgcacgttgttggatctctcacgaaaaccaccttgaagaaatttttatgcattcaaattttccagagctaagggagtcagcagacctatcagaactctctgatcgatgctatggtcttacactagcacctggagaacagatgattgctgtggtccgcagtttggatctgaaccttctgaaccagatgtatcaagtcaggacacaaaaggcggtggttgagttcatttggattggtggccaatttgttggtattccactagacaggagcattgatatttgcagttcacagtccacagacttatcctcaagtaatctcatgtggtggggatccaacattttgtggtcgctgaagaaatacgaaaatgtagaaaagaggcttgtgatatgggatgttgtagctgtgctgcaggagttgaagaaatccgcacctgcctttctggagactctagtgcatagttgggtctcagtgttactttcgggcgacccccagtgtgtttctatcgatgctccatcacgttcaatgcatgacatgatgccctatgtcagcacgcggaagctacacttactgaacataatgtgcagaaaagtaatggtcagcattcacacacatcatggtcctggtgctgaaaacggcaatgaggaaacaactgatttctggagcactcttttggtgaggagcgaaacagagctgcgagagaggctggttggcttcacctttgctgcagtcctgaaacggacagcgtatttgttcaatggtacctctactgaaaattgctggtttcctgttggggttgcccagatggattcttgggtaaccatgaattacgacggacaagtgcatgaccagctgcagtctatcagatcaaagatcaaagatttaggaagcaggatcgacggatactctgacgtagaaagctgcccctactgctcttcgccggtccatttcgagtcgcctgacgtagccatctgtggggaaaggcacacactgccgcggtgcagggcgtccatgatcctgtgctccgttgtgcagcctttgtggcactgcgtgtgctgcggaggcacggtcaacaagctgttgccggagtcgttcttcaccatgcaggcgtccaccatgcatgatgaaggatcgctcgatctgtcagcagcctccgtcccactttgccccttctgtggcatcctcctgcagaggtcgatgccggcgttcctgctctccacctcgccggcatagaggctctctgtggatgctagtaggcatccaccaggtgtagcatgcagtagcaatgtagtactagtaaagtttgttctagtcgatgctgcttacactcagttactcttaccaagtatggctggcagagtgtcggttactggtcattttttaggtcccttttgaatgaatacgatgagttcttttgtttggtttcttttggaccctgacggtggcagattaccaggccaagttcagctatctcgaattgtctcattcgattgttgcggacatgcagttctggcagttccaattggttgttgcggacatgcagtcctgtcagttgact

SEQ ID NO: 28218 - DNA, 2492 bp, Zea Mays
tctgttctctgcaaaataaaagaacaaataattgacctctttgtgtactttttcccctaaattcaaagcctttttgagtcactgagatattgataatgtacactgatgctcagctcaactagaaacactgagataataataaaataataataaatttgagatagctctagacatcctatgaaatatgcttcgaatgtaggtgcagatcgacgtccacaccaagagcctagaatctcaattttgcagtggaactggaagagaaacctgctcccaattccatgctgaggcagaagatggtgtcggtatacccgaggatgtcttgaatgacacaaggtttgagagggccatgcgattttatttcgtgtatctccgattggattggctctggtcacttaacctatttgctttgattctattgaatttcctagagaagcctctctggtgtcaaaagtacgccccacatacttgtgatcaaagggatctttactttcttgggcagttgccatacttaagcaaaacagaatcactcatatatgaggcgctaacccttgtcattcttgtcttggatatcttctacccactttcctacgaaggtttaaatctattctggaagaactccatgaataaattgaaggttcttcttctcttcatcttagcatgcgacatacttgtgtttatgcttagttctggacctttcagagtagctccgtacattcgtgttgtgtttctaattatgacaatcagctggctagcctatgtaacatttgaggacacaccacaaggaaagaccattttcacatcatacggtacaacattatatcagatgtttgtcctgttcaccacatccaataatcctgacgtatgggtccctgcttacaagagctctcgttggaacgccctgtttattgttatttatgtgctgttaggagtttatttcctaacaaatttaattcttgctgtcatttatgatagctttaaagagcagcttgcaaaacaacttgctcaaatggactctataaggaaaagtattctacagaaggcatttgatctcatcgatactaacggtcagggttaccttaacaaagaacagtgcatatcgttactggatgagctaaacaagtacaggtcgttgcccaaaacctggagggaagattttgaactaatcttttccgagcttgatcggagtggtgatttcaaggttacctccgaggaatttgctgacctatgcaatactattgcaataaaattccagaaagaaccaccaccttcatatctggagaagtacccatctttctaccattcaccacagtgtgaaaggttgaagtcctttgtacggagtcgcctgtttgagtatattgttgtctttgttcttctggtgaacctaattgctgtcgttattgaaacaacgctagatatagagaacagctcttcacagaaagtgtggcaagaagtggaatttgtctttggatggatctatgttgtggagatggcacttaaaatattttcattaggatttggcgcctattggatggagggtcagaataaatttgattttgtgattacttggactatttttattggagagactctgacatttgccttcccatcaacgcttccttttctttctaatggagagtggattcgatatcttctccttggaaggatgttgcgtttaacaagaattttgttgcaaattcggcgtttcagagcatttgttgcaacattctttaccctcatgtctagcttgttgccatacttggggactgtgttttgcatactttgtgtatattgctccataggtttacagttttttggtggcatcgtgtatgcaggaaacttgaagttggaagaaacagatctctttgggaacgattatcttcttttcaacttcaatgactacccaagtggtatggttactctgttcaatttgttagtcatgggcaattggcaagtctggatggagagctatgcacacctgactggaagttcttggagcctggtttattttatcagtttttaccttatttcagtattactgctgcttaatctgattgtggcatttgtgttggaggcgttttttgctgagatggaactggagaaagctggagaagctgatacgcaggattctaccccacaaggaagaaacaagcggcgatccatgcgtgtgaggacgaagggtactatggttgacattcttctgcaccatatgttgagcaatgaacttgatggatctcaaaactcggattgattactcatcttaatggtaccagatcactagtactaccctgctgttcttttaactttgaccacggcttccgttatgaacacctgtctcatctatactctacagcatccgagacttcgattgtgtggaatatgccgtattgagtagacagtattggttgtattaagcaactcgtatgaagcgaaataacagttcaaagggagttgtatatttctccaacaaaaaggacctacttcgttaggggagg

SEQ ID NO: 28219 - DNA, 1672 bp, Zea Mays
tgagaggctacggcccaaatttgatgcttcggttgtggagttgcaaggctgaaggcgcaatctcaccacaatccctcccggcgccgcccgccggtcgctcccgacgctatgttccgccttcgaaattgcattcttccacatctactcttctcgtcccgccgctcctcttcctgcatcacccccctccatcgcctcctctccggttccgccgccaccaccgcgagcaaccctttcacggtcgccgactacctcgtcgccagatgcggtctctccagggagcaggtcctcaaggcatccaaaatcaaaaggatcctcgacctcaggtctccctcgaagcccgacgtcgtcctcgccttcctggcgggcctcgacatctccggcaccgacctcacaaccgtcatcgccaatgatcccagactcctttgcaccgacgtggggaagaccctgtctctccgcgtcgccgagctccgcagcctcggcctgtcaagccaccaggtcggccaggtagtcatcgccgcccagatccggttccgcagcccctcgttcctccgcaattttgaattctggcttgggctcttcggctccttcgacgagctcttgcggttcgtcaagatgaacggcaacctcctcagcgtcaacctcgagaaggttgccatgcccaacctggccctccttcagcgatgcgggatggagatttccgatattcccaacactttcctgtcccggatacttgtcaggagcactgagcacctccaggaaactctggcacgcgtttcagagtttggaatccagcagggatcgtgggttttccctttcgcgttcatgaggtttgcgatcttgaaccgtgagaagctcgacagtaatatacagctgtttgagaagcttgggtggtcgagggatgatatagcatcagcagtgaggaaggcgccgaatatcctgagcttaactccggaaagggttcataaaaagttggattttctaatgggtgttgttgggttgcagatggcagtcattgtgtatcggccagtgctgctattgcatagtgtggagcgtcggttgttgccgcggtattacttgatgaaatttctcaagaacaggggattgatgagttctagtttaagcttcctaactattgcatcgatgggcaatgataatcttctggataaacttgtgcaccctcacgagatgagtgtcccaggtcttgctgctgcttatgcttctagctgcgctggaaaacaccagtgggagctccttgacgacatgacaaagggaaagagaaagagaaagtgctaagacatgttctggtaactagtgctgtgaaggatctcttctaaggagacctatactgtcaatcaccaaaaagagcattgggtttgatctgaagggcagtgctacgtctatgtgactttgagcaatttctggtacttagggcttcgctttcaccaggttctcggggcattgtgtttttggaataccttctaggactgctgtctgacggccttgctggctaaggaaaaagaaacgctgtgacgctgctttgttttagtggggattgcggtctctaagttctgtctccaacaacaccctgtaaagggtcctgtcctctaaatatagaggactgtcaggtcccctatggctccagcaaggcactctattccgtcctctaaatttt

SEQ ID NO: 28220 - DNA, 1106 bp, Zea Mays
caatgactcctgtacgcatcatcccggatccgagaggcaccaactcactctttctacgcccttccctccgcctccttcctctccaagaaaaagtaagcgtggagagcaaaaatctccgccgccgcgcacctacgcccacggaacacgccgtcatatgagtggagagagaaccccgcgcctcctcctccgtgagctccgtacaaggaggctagagcggcggcagcatcggaggggtcggtgaggagggcgatggtgctcccgctggtgaagctcggctcgctcgcgttccggacgctgagcaagcccatcgcggcccgcctcaagtacaacgccggcatccaccccaagttccgcggtctcatcatcggcatcgcgcaggcaaaccatcgtttcacgacaaatatgcagaggcgactttacggacgtgcgactgacattcacattcggcccctgaatgaggagaaagctattcaagctgccgcagatcttctcggtcgctggtgctgcgattatctatgaggtgcaaagaagtgctaggtcagaagccagaaaagaggaggcccgtcgtctggaaattgaggggataaagaaaagggaggagcaactagcgctggaagtacagataatgaaacacaagattagcgagatggagcggcagtactcgaagtggacccttcccgggcttcgcggcttcggcactgcccaggcggcggcacagcctgctggtactcagcacccaacagctgcgtgattgctctacttctgcaactgtcgacagctcgcgatctggatggccgactgcagactgcctctgtttagcttgcattttactccgttacataattgattcgacttcagtagctggcgaaaggctgagggttacgttgtggtacaactgaatcgaagttgttatcgccttataggttgatcggatcggcgacatgacattcagaccatgtttgtcgtagcttaacttatttcacagcttcttcatagatttaagcaggagatagatttaaatagaagtaccaaacagtagcttctgcaacagtctccccttttagtcgtagcttaacttatttcacagatttgtcgtagcttaactt

SEQ ID NO: 28221 - DNA, 1969 bp, Zea Mays
cgccacccgacccgtttcgcggttgctccggtcccttttcctctcctattttctcttctctctctcccgtcgtccagagacccagaaggagagggagacagagccacagaggcaggggagaggaggagcagcgtggcgacgcccaaatcgagcgacctgatcgaggcccctcgcccctactcgctgaatcccaatccgagcccgccaattgggcgcccccccccgcccacgcaaagatagaagaaaattattggcgctctgacaaatccaactgaggttttcttggactacagatgaagcgggctcgaagggcgtatgtgcaagagatgactgatgagggatgctagtgaaattgatgaacttgttacgggcgtgctggcgaccgtcatcgaaccggcatgcccgaacaggctcagatgttaccggtaggcaggatggacttctatggtacaaggacgccgggcaacatgtcaatggggagttctccatggctgttgttcaggcaaataacttacttgaggaccagtgtcagatcgagtcgggcccactgagttttctagattctggaccatatggcactttcgttggtgtttacgatgggcatggtggtccagagacggcctgctatatcaatgatcatcttttccagaatctgaaaagatttgcatctgagcagaatgcaatgtctgctgatgtactgaagaaggcatatgaagctacagaagatggattcttctccattgttaccaaacaatggcctgtaaagcctcagatagcagctgtcggctcatgctgcctggtcggtgtaatttgtggtggcatgctttatgttgccaatgttggggattcccgtgtcgttttaggaaaacatgttaaggccactggagaagttttggctgtccaactgtcagcagaacataatgttagtattgcgtccgtgagaaaagaactgcagtcaatgcacccagaagataggcacattgttgttctcaagcacaatgtttggcgtgttaaaggactaattcaggtttgtagatcaattggtgatgcatatctcaaaaagcaagagttcaacagggaacccctatatgcaaaatttcgcctccgtgaaccttttcacaagccaatactaagttcagaaccatcaatcagtgtgcaaccactacaaccacacgaccagtttctcatatttgcatctgatggactttgggagcagttaaccaaccaagaggcagttgatattgttcgaagtagcccccgcagtggctgtgctaggaggctgataagagcggcactgcaagaggcagccaagaaaagagagatgaggtactcggacctcaagaagattgaccgcggtgttcgccgccacttccacgacgacataacagtcatagtagtgttccttgactccggcctcgtaagccaggcgagcacacaccgaggtccaactctttccttgcgaggcggtggcggcagcgctggcctgcgcagcaacacacttgcacctacgtgactataaagtgcctggtggagtggaggctactgactgaaggagaggcgccgaagttcctcaccagcgtatctgaatgccctcaatggtgtcaagttgtggactcaagtggatagcttcgctgaatcttctgatgatgctctgtggaaagctcgaatcctttccacctgaaaaagcaagtaatatgtcttccagtgctggaattaacccctagtgcatatatatatgtatgaaataataataaggcaaaaggaggagtaacttatttaactaatgctgtgaggtgtatttatgttttgtatgtgtactgctttttgactgctactgcatctactgttgttaattgaccactggtgaagtgaaatcactggtttcgtcttgctgtctcactgttactagttgttcacagcattgctggtttgactgttcctactatatacatatagtttatatattata

SEQ ID NO: 28222 - DNA, 461 bp, Zea Mays
atatcgccggggcattgtgctatgccaaactgctcgcctcgctaaatccgctccattccctcgccctcgccgatcgccggatctctccctccgcctcgcttccgccgcacgccagggcgcacggcttcttcctccgctccctcgcctcagcgcagttcctatggggttcctgcaaagcactttttcgctgttgatcggcaccggctgcggcatctacattgcccagaactacgacgtcccaaacataaagaagctcatgaggagcctggtgggcaaggccaaggaggttgaggagtcatacaagaagacgggcaacagcaagaacaaggataacgaatagcgttgacccgcagtctgcggtccaccatctaggaaagctaattgttgcaagattattctgattattggagaggcccttttcatgacggcatcatgatcaagtgtgggatgaacgatgtgtg

SEQ ID NO: 28223 - DNA, 923 bp, Zea Mays
cggtctaagataaaagaaagaagaaaagcagggtcccttgtagagctggcacatgcacaactcctattcaagtaacatcatctcagttggtctcaaatgatatattcccagcagctgttgtgaaggccatgctctaccctggagctaccgtgagcagcctaactaaaagcaagacatttccgagttggaatgacctgtttgacatgtacaacctgacagaagcaaaaaatgcttctgcagtagttgatctccagcgtctagagatacttgccggaagctacttctgtgttgctggagcgctcattggcatcataaatcctgggaggatgactttgtttggtacccttttgattatctggggtatggtgaaagaagcactatttgggaagccagtgaacagtgatctgactcaatcaactcatgtctacccaaccattttgattgcacttatctgtgcattcatgtcaataacttacaacgtaaagaagacagcaagaagtagtactcctgtttctatcgctaagccactgataagttctgccaagtcaaaactgaagtagacttacaagtttaatcctcgtaactcttttgagatatttatttatgtgaaaaaaaacaggtttgaggatgacctgaggatgcttttggtgtatatctgactctttcaatactgtaacattcagtttcctttattgtattaacaattcgcaagggcacaccgtctgtaatgtttacaaaaaaaaccagctaaatcttggttttcccccaatgtttctgctatctaggcaggtttaattcagtttcatattgtatccaataagattgtagtctattttaccacaaggatggaaagttgtaattcctgacaggttctgggtcagttgttattcttctgtgtttggattttcatttggggggtcatg

SEQ ID NO: 28224 - DNA, 1629 bp, Zea Mays
gctccaagaacggcgccgggtcttcgggaaaaaagatagtttcttcagtccgacaccgcttctagcttcccctcggcgatctgtgaagctatgaagccacctctcgagaggaacccgactaagaagcgccactcgtggtggtgggacagtcacattagccctaagaactcgaaatggctcgccgaaaatctcgaagaaatggacaagcaagtgaaggaaatgctccagctgatcgaggaggacggcgactccttcgctaagaaagcgcaaatgtattaccagaggcgtccgatgctcgtcacccacgtcgagaacttctaccgtatgtatcgtgctctagccgagcgctatgacaatgtaaccggcgagctgcgcaagaacatccctacaaggctgcagacaaccggatttttaaccagttcagagtacggttctgagctgcagaggtcgccctcaccgtctcctgagccgttacagaggtcgtggacaagggagcagagccctagggccgctggcttcgacttcttcctgagcaataggagcaatgactcgccacctgtctacaggaaggaacccgaggacgcggcatcgcagtcggagtctgacgcgaagtctgcagacggtgaggatgatggcatcgcctacacgctgcaccagagagttcttgagctagaggacgagctcaatgcgacaaaccagaaactacaagatgcaaacgagaagcttgaggttctggaggaaaagagcttgaggtgccattgcgattataaagagaatggaaacggtgctcagcgaactacagaagtttcaggcaaagagggggagctggaagccgaaatcgtcaatctccaggagcaagcggactcggcaagaaggcgattcgaagaggcattgtctgaacgagatggagaaatcagcaagctaaagcaagagcttgctggtgcttctgagaagctgcagcgagagaagtacgccaatggcgtgcaggtatctgagctgcagcgatcggttgaacacatcaggtccgaactagagagagtttctgaagagaaactactgtccgagaacaagattaaggagctggaggcagcaaacgctgaagccgataagtacggccacgagctcacgcgagctgccgagaagatttccgaggagaagttcgcgctcgaagctgagatcctcacgatgcggcagaacattgaagatctgaaatccaggatcgagagcctcgctcgagagaagtccctgctcaaatcatggtttgaggacttggagcaagtcgtggggcgaggaaggggcatcttcgccgattaaccgagtttttctatccagaacatcatcggtagctagaatttagcaagctagtaacattttgttttgttttctggtacccataccatcttgcgaaattgagatacgtcagtgtacttcctttttgtttgctgaatcttaaacttagacgtgatggatggtggtgatgtactggtaatatatgaaatattatactgaaccgcgctcgacgtcaataataagattcctatagtgcatctaaaagttctgtctcaatgtaagtccagttcggatactgatactgttcatattgtttgaaaatcatgttcttgcataatt

SEQ ID NO: 28225 - DNA, 1432 bp, Zea Mays
gaaattattatactaggagcccctaggtttgggaatccctatgataataaattggatttattcctcttttatctattgcaccgctagcgtgcaccggtgattgggtgagcaagcctttccaatctctcgctcttgtgaccctacgccaagagtgggtgaataggttttttttggaaagcacatttctattaggccctcaacactgggtccactcaagagtccgcttcccttcattcctggcctcctcagtcatctagtttcaccagtgttttggttggagggaataaagatgccatgttgtcagttgatgctcgatgcaattatgtctatgaatcatactgccaccagcacaccatcatggttgcgtcgtttgcatgcgaaaaaaggaatatctgtgccatccaacctacaaattgatgacttcatcaatggagatggatcccaaccttcactatgcttgcctgtaccaacttcttcctaccaccaccataaaaatcttcttgacatttccaaaaaccaacatcaaaaggctactgagaccgaacaatgtaaaccacctaacagtcagacacaacaaagcccaaggtttgaaaaacctcacatgccacaaccacagcccaaagccatgatttctaatgttttggggaccccttccattgatcccatggataccttgcccctcaaggcttttcgcaagaaaaagaaatccaccagcagcacattgtgcaacaaatccatcaataaagagatgcagaccaccttcatgatgtcaaacgttctagatgtcccctcatgtaattcgatagaaaccacaccttataatcccatatgcaagcagccaaaacccaataccaatgtcaccaatgctttagcaatcccctcctccactccaatgaataccatacagcctcgcaaaggtatgaaaatgaacacaaaaggaaaaaatcggtatgaaggcaagtggaatggtaatatttattacaccatcgtcgacaccagtattgataaatgcaagggcaccaaaaaatcaatttgtagcaatgacttcatggtctctagcaaaaatcctaagcagacctttgaacaacatgattccatcataaagggaaagcgaaggtttaatctcctctccaatctacaagaaaagtatgagaaggataaagaggtcaccttacaggaaaagagcacaaaagtcaagaataatcatgacactagggatacgacaagtgcagtcatagagaggccccaaagcattgatatcactaccattgacactagtatcaatggatggaaagccaccaaacacctcatccataggggacaagtttgggagattgttgatagaaaatccacaatacggcctctacacaagaaattgtctacgatgaggaagagaaaatggctacacacaagaaacattacttattcctgg

SEQ ID NO: 28226 - DNA, 1760 bp, Zea Mays
actccccaatggttaagccgatctatctagggaacaaaaatggtctacaagcatttggccacactatactttgtttttgtctttgatagctctgagaacgagcttgccatgctcgacctcgtacaagtgtttgttgaaacattggacagatgcttcaagaatgtatgcgagcttgacatcgtatttaacttcaacaaggtaccatatgtccatatgatcctactttttttatccttttatactagaatagtgtgcctatcgaggatgcatggtttctatcctgctgaaaattccatttatgattcttcagttgcatgttttaggcagcagaaaaggtgggacacagaagctgcatcaccatttttgacagcagttgggttatctgtatcaaattacgcctttttatgcacatgtcatatgcagtgctgtgcaaatctgaaagtttgagtataacaaatgcctgaatccaagaatccctgttatgcagaatagctataccattatctatccatctaattaattattgtggttgtaataggcaatatagataggcttcaaatggataattttcttaggagctgggtggagtttggatggcagctgccttaaatgatggagggcactgggcacccctgtgagagaggctttggctaagcagagagatagagttaagaacttgagatacataggactcctttttttaattccattgtctgctttggctctgcactgcgcacatcgttatgttgaagagaattctcactcttcagaaatctaagttaacatagacagaaacaatctaaacaataaagatggaatcatgtatatattacacagtacttcaaatagggaatctgcaccatccttcctgctgcctacccattgtggctgctgcccgtgttagtttggcaccacctcccagtggtgtagaaattgaaaaacaaggaagaagtgaagaacgagtctactggagcatattttcatgccgtggcaatagaattttgttagtatgcaggtagttgtagctctacgccaaacttttgccccttagcactgaacctgtggatgcatatggtgctggttttcccttgttctttgaattctcaacttaagtgttggcaatgaaatgctcaatcttaagacaaaatgccctgatgattcattccactattcttgtgtttcttcatgttcctttatttaattgtcaatatctgatgcagctgcacaccattttggatgagatgatatcggggggacaggtgatcgaaacaagttcagaacagataatgaaatctgtggaagagattgaaaggctggagaaacaatcgagcacaaccagcttcatacccaagtcgattacagagcgttttacccgttgagcttccactcgtttccagaacaatgtgacatttaaggtgtgaacagaactgagatatactattcagtctcattttagttctccgataagaccttgtatgcccccgccccccggctgtattctgtaagcctgtaacctggatatgaatgcggcatctgcagtccaataatactgcctgcgttatatgcttgatcgtctgacagtgctcgctaaggtttagacatgccccagtaacaaattagcaatattcttatcctgagaactagtgtatccatggtgtccgagaaagaactagtgtatccatggtgaccagaatagaactcttcggaattaactaccatccttggggcatggtgctatcatcctgagaactattttggtc

SEQ ID NO: 28227 - DNA, 1038 bp, Zea Mays
tgtgcttagattatagatgatgaagtaatggacagtatgtcaataagctcggtaccttctccagatgttatgaactaactgtacactgtgctggtctcaactactggaaactcttccccttcctaatataaaatggatatgccccactgcaccttcaagacccgtgtcagtgtttggcgggttcccctccacagcatggtttgatgttgctgatctttctgaggatgctcctgatgacattgagggaatcgatgcctcagcagcacatgttgcgaatttgttgtcaactgaacctgctgacatcaaacttggtgttggcggctttagtatgggtgctgctactgctctgtactctgcaacttgctttgcccatggaaaatatgggaatggcaaaccattccctgtgaacctaagtcttgccgttggtcttagtggctggcttccatgtgccaggaccttgaagaacagaattgaagcctcaccagagtgtgcacaaaaggcttcatcaatacctcttttgctctgtcatggaaaagctgatgatgtagttgcctacaagcacggggagagatctgctggtgccttgaaggcaaatggcttttccaatgtgctcttcaaggcatacaatagtcttgggcactacactgttccagaggagatggatgaagtttgcaaatggatcacagcaaatttggggcttggcactaagtcatcttgattggaatttgatgcgagaaagactcgcagggacggtgtccaaataataccggtatcttttccaggaggtatatggtttaatagcaaatttgggcttgggtatacggccatgttctagcttttcttaacgcagacgtgtctgcgaatgatgtatgcttataatatctatattttggtctacgtcgatttggttgtggcacggataatgtttgtttcaaatattctgctctgcgaattggaattgtgatgttttgctttctccgcgtgtctggtttgccttgtgtcagaatcattttgtttgtttattgtataatattgtcg

SEQ ID NO: 28228 - DNA, 2762 bp, Zea Mays
cagcaaaaatctcctcggccatatccgtgaatcaatagacaagggaagaattgggacaacacacattcacacgagcacacactgctagaacccagccgaggatcaccgtacgctttgctccgctcatctcctcctccgcggagcaattccgtcgaacgcctcgcgcgcgcacgcgctctcgcaccgccctcggcctttgtcccatcgaatgccgtagcgctgtggacgggcgcgcgcggcggtgcctgccatggcttcgctctgccccttatcagccgcgcccgctttcccgcgcgctgctcgacctcgtgccgcaagcttcaggggacccgcttcctggagcggcctcgcggcgaccgcgagcaatgcctgtgtctgtagctgtggacttctgcccactggaggctacgcgaggctgcggtcgcgactaaggagtcccgtgcgcgccaagatcgacgaggcggacaagggcacgggcgccggtctgggcttcccctcgccacgccgtaggaagctacgcttgcgcctgcgaccacggctgcgcctcttgtggtggcggctccggcggctgtcgccgcgggagctcatgaccgacgccggggccgcgctgcggcgcgccgttcgccgcgtgcctcccgcggccgcggcgccggtcgtcctggcgcttctcctcgccgtggcgcggctcgcgctgcccaagaacgtggcccgggaggtggcctactcggacctcgtcgcggggctccgcgagggcgccgtggccgccgtcgctttcgaggaggactcgcgccgtatctacttcagcaagaacgctggggatgatgttggctccgacacgaacgagaccggtgagaacgctgcggcgccggcgccgaagtggccgtactacgcgcggagggtgccgcacgatgagggcttcttgctcgggctaatgcgggatggccgggtggactaccgttcgtcgccgcggcctgctgggaggctgctcgtggacatgctgagcacgctgctcacgctttgggtctcgctggtgcccgtgatgtggttcatacagcgtcagatgtctggtgcgggcggtgctgacaagcgacgcaaaccgaggaagcagagggtgggctttgatgatgttcagggcatagatgaagccaaggaggagcttgttgagatagtgagctgtctgcatggttcactgaattataagaagcttggagcaaaattgcccaggggtgttctgcttgttggccctcctggaactgggaagactctgctagcaagggcagttgcaggagaggctggaattccgtttttctctgtttctgctagtgaatttgttgaagtttttgttggacgaggtgcagctcgggtaagggatttgttcaaggaggccaaagaagctgccccgtcaatcatttttattgatgaacttgatgccgtgggtggaagtcgaggtagaagttttaatgatgagagggaccaaactctaaaccagctgcttaccgaaatggatggttttgactcggacatgaaagttattgtaatggctgctactaacagaccaaaagcactggatgctgctctttgtcgacctggccgcttctccagaaaggttgttgttggtatgcctgatgtggagggccgcaaaaagattctggatgttcatctaaggaatattcctttggaagaggatcacggaataatcagtgatctggttgctagagtaaccccagggctggtcggcgcagatctagcaaacattgttaatgagtctgctctactagctgcacgaagaggtcggaatactgtgtctcgggaggatattatggatgcaatcgagagggagaaatacggggtcactgggaggcaagaagctgattctgaaaggcaaggcctcaccaagttatttccatggctatctaaacctggaaataaaccatcaagccctgatgatttccgaggattgatgggttatcacacattaagctaacttagtagctcttgcaagaactgagaaagaatataaagtgcaactaaatctggggaactgttgcctgtaattttatgtacatcagcaaatatacttgtcgatattatgtacgaagtatgctgcaaattgcaaccggtggccattgggactttgagaagaaagctattacgaactacacgaggacagtttgcgaatacaaaattccaacaattttcctagcttaagagtcagtttggataccaagggctaatcagtttcgtgcttcataattttgttagaaacacgactcaagtttcgtcacataccctgtaaagctagtggcgctcctgcttctttacacagaccaatcattcctctgattcttcccaactagaagtctggatgtgcaacgctgtgcaagtttacaaatgcagtgtcaagtgcggcgcatgggaactgaatctgcagcgaatgtgcaagaaatacacggcatcatatttcacagttcacaccgagcaacatttaatttctttttcctgttaacttacactaccgctgtctgtattttcattgaattactgtcaagaacaaactgcaactctagcagtttgagatgtgaaaccacccgatctgtaaacatgttgacagaaacctagaacccaaaaccatgtttttaaaaaccaattaaatcaatatttactctgctcatttatgtgccattttatctggcgtctgcttggtggttgggccttcaatagtgatattttggccatagggacggtccctcctgcatgacaga

SEQ ID NO: 28229 - DNA, 1636 bp, Zea Mays
gtgcaattctttaaggtcccatgcccgtacccgaatcaccgtgcggcgatttcttggtgccgtatgagtaaatgccaggtttctgcacatgaacaacatccgcgaaaaaagtcgcatcctttcactgcattcagggcctgagggtcagggggtgctggtctcactccactttcgttaggaactgcgagagtgatgcgctcaaggatccgcatccgcgacaatggcttcgctggtgccgggcgtcctggtgaagctcctgcagcacatgaacacgggcgtgaaagtcggcggcgagcaccggtcctcgctcctccaggtggtcagcatcgtgccggccctcgccgggagcgacctcttcaccaaccgagggttctacctcaaggtgtcggactcgtcccacgcgacctacgtctccctgccagaggagcagcacgatctcatcctgagcgacaggatccagctgggccagttcgtccacgcggaccgtctcgaggcggccactcccgtccccatcctcagaggggtccggccggtccctggtcgccacgcctgtgtcggcacccccgaggacctcgtgctgaccgcctcctcgtcgaactctcacggcggcggcaagaacaagaaggcgcgaccgtcgaatgcgaaaacgaaggacgccagcgccagcgtcctgtcgctagacaaggaatcgagcaagctggagaagataaacgcctcgcgcaagcctaccgctaccggggcggaaaacaagaagccgacgctcaccagatccaactcttcgctgccaagagaagctctggatgggaggatcggtgatgacaaggtagcggcggttaagtcaaaaaaggtgaagccaggtgttactaggtccacaccttcgtcaccaaccagcgtctattctctgcctgcgtcgttcgacaggttctcgaatgacctgaagcagaggaacagagtgaaaggagcggagaataaagcttcgtcttcctctaggctttcattgttggaaaaggccgcttctgttttgaaggccactagtgccgccgggagagtgtcctctgctggcattccgatcggtagctctgtgctgagcattggatcgtcagggccaaaggccctgagaagaagctgggaaggaaacacggatgttaaagggaaaggaaaaccagaatcgaggacagccaaacctgacaggaagtctgatagcaagattccaatgactcctagacggaaatcaccagtggatgagaaggtggcgccacataaagatgacaacagtcagaaagctgctaggaagagcaccacaagtgctcccgcctcagacgacgctgctgacaaagcagtgaagaagaagcatattcctacagcgaagagaacttccgggggtttagggaactggagtgtcacaaatctagtgaagattcctcccagcagcagaaaactagcagacgttagcgcttcatggacatcactcccgccatcacttgccaagctaggaaaggagcttctcaggcacagggaatcagcacagatagctgctgttgaagccatgcaagaagcttccgctgcagagagcttgctgagatgtttgagtgctcttctgctgttccattgttctagaaatcctcttaacagaaat

SEQ ID NO: 28230 - DNA, 3360 bp, Zea Mays
gtggacaacaagtaacagcgccggctggccgtgtccgtcgctgctgctgctgctgtgaggaagacgagagcacagggcaaacggaggagaaggagaaggagaaggcggccgacctcttctccgtcttcaaccttgcgccgcgtccagcgcgtaggtgaggagccgagtttagtagagtactctactaaacaaacaagcaaagcaaggccgacgaatcgagggagagggaggaagcaggccagcacggggtacgccgaggcacagaacaaccgacaggtcatcaggcgagccagccagggacgggagtaagagagaaggggttcttccatttatttttttcctctcggttgatccaccgccaacggcaagaagaaacggtaccaccgccacacggcacaccagatccagcagatggaagcgctgttcaaggagtgcccgcacccggacgacaagcagcggctgaagctgagccaggagctggggctcaaaccccgccaggtcaagttctggttccagaaccggcgcacccagatgaaggcgcagcaggaccgcgccgacaacgtcctcctccgcgccgagaacgagagcctcaagagcgacaactaccgtctgcaggccgccatccgcaacgtagtctgccccaactgcggccacgccgccgtcctcggcgagatgtcgtacgaggagcagcagctccgcatcgaaaacgctaggctcaaggacgagctcgaccgcttggcgtgcatcgcgacccggtacggcggcggccgacagccgagcatgtcgtcgtccgcgctggtctgcttatcggcgccgccgccggtgctcatgccgccgctcgacctcgacatgaatgtctactctcgccatttcaccgaccagtccccagtcatgggttgcggcgacctcatccagtccgtcctcgggccgccgtcgcagcagatcaccgggggcgccgagcaccacgcctccacgccgtcgttcatgggcgccatggcgcctgtccaggagcaggacaggcagctggtgctcgacctcgccgccgcggccgcagacaccctcgccaagatgtgccgcgcgggcgagtcgctctggctgcggcgccgtggcgcgagctccgaggtcatggtagccgacgagcacgcccggatgttcagctggcctgtcaacggcggccagcaggatagcagtgcctcccctggcggcgccgcggccaggaccgagggatcaagggacggcaccgtggttatcatgaacagcatcacgctggtggatgccttcctggacgctaacaagtggatggagctgttcccttcgatcgtatccaaggcaagaaccattcagatcataaaccatggagctgcatctggtcatatgggcagtggatctctcctcttgatgcaagcggagttgcagttcccgtctcctttggtgcctgcgcgagaggtggtgttcttcaggtactgcgtgcacaacggcgacgaggggacctggtccctcgtcgacttcccggccgaggggttccagctggaggcactgcaaaccccatctgttgtaaggtgctgtaggcgcccctccggttgcatcatccaggacatgcccaatggctactctagcgtggtgtgggtggagcacacggagattgttggagaggagaagccactgcaccaggtgttcaaggactacgtcgccagcggctctgccttcggcgccacgcgctgggtatccctgctccagcgccaatgcgagcgccttgccagtgagctcgcccgcaacatcgccgacctgggagtgatccgcacaccagaggcgagaacaaatatgatgaagctgtcacagcggatgatcactagtttctctgccaacatcagtgcttctgggagccaatcttggacttcactctcagaaactacagaggacacgatcagggtcactactcgcaagaacacggatccggggcagcccagcggtgtcattctaaccgctgtctctacaagctggcttcctttcaaccatcagaaggtcttcgagcttcttgccgatgaacaacagcgttgtcagcttgagattatgtcaagcgggggctcacttcacgaagtggcacatattgcaaatggatcacacccaaagaattgcatttctcttcttagaatcaatgctgcaagcaactcatcccagaacgtggagctcatgctgcaggagagcagcacccaccccgacggcgggagcctcgtggtgtttgcgaccgtggacgtggacgccatccaagtgacaatgagcggcgaggacccttcctacatccctctcctcccgctgggcttcgccatcttcccggccgccaacccttcggctgcagcaaccagcgccgcaggctccggcgacggccaaagcagcccagcaggtaacgccgacgagcccgccagcggctgcctcctcaccgtgggcatgcaggtgctcgctagcgctgtgccctcggctaagctgaacctctcgagcgtgaccgcgatcaacagccacgtctgcaacgccgtccaccagatcacagccgcgctcaagggcgctggggcgagcggggccgctgaaccggcggctgctgcctccgagtagtagcaagagcgggagcagaggagagcagatccatacaccacaacaaaagccaaattgccttccaggtccggttgtttctgctgacagacatcccagtgcaagagagggtttgacaggagcccgaaaccaacacacggaaagttcaaaaaccccccttctctttcccgccatatgcctcttaaaatgacaaaaatacccctgaccgaacgaagagaatggtgggggcattttgatcattttgggaagctagtgcggtgtcatctacagctactggaaaagaaagggtcctgtcaagctctcacttgtgccggccgattctctatcacgcagaaaacaatccggggcagcttggtcatgcaggtgttgctgctggtagctctctctctctcggtctgttcccttgctcagaagtcagaactgtgaagaaggttagcttcgattggtatgcttatttcgatttttgtaataataataagacgggagatttacctagtagttcgcgcgtaatggtcgggcgtagagccgtgtaactctgtattagaagagactgaggacttgattgtttaggagagcaagagaaaaggtgcgagaggaggagtcaagagcgaaccaaaccagttgtgaccatctgatcccaggctatcagggaagaagggtcttggttcgggaattgacttgttccctctctgcaccgcctgtttgtgctgctactcaagctcgtttgattacgttggtaggttgtttttatcatgc

SEQ ID NO: 28231 - DNA, 11229 bp, Zea Mays
agcgcggcggccgatgagattgacggcgtggcggtcgcgacaatgcaaacccctcgtccctcctacgcgcaccaccagctccagcagcacctctcctccctcctttccgccgccgccgccgatcccccgcacccctccgacgatgcctcccgcaccgccgccctctccaacctccgtctctccttcctccacccacctaaccgccccctgttacctgccctcgctcccttcctcgccccgcccctttcggtcctcctcgccgacgatgcgtcctatgccgtgcggcgggcggcggtatcggcgtacgcggcgctctgcgcggtgctgtgctcgcacgaagcgcccgggggcctgccggacgggttcgtcgcctgggcactgccgctcctgggtgacccctcctcagctgctctcgtcgccgaggggctccgggagctcctgtccactggggacgtgtccccagtcgagaggttcgtgccgcctctccttgcagcctgccgtgacgtgctagaggatgagcggatgtcgcccgctgtgctccggtgtctgctcagcctgcttatgttggttgccgccaagtttccccactgcttccgtccacagtttgttgatatcatggacctgcttcttgggtgggcgtttgtgcaggacctagctgatgcagatcgcagcatgatcattgatagttttccgcagtttcagtggcattggcttgggaatctgcagttttcacttggattactgcccaagttcttggccgatatggaggggcttgtgcatgatctcaacctgggaggcagccataatcctgggaggcttcgttcgctgtttgcttgtttctctacggtactgcagattatgtcttctggtgtggctgagcgaaataacctaagagaacttgtagctgggcctctggaaggtttagctcctcaacttttaaggtgtgcatcagtgatagcctctaaccttggctggtctgagaggatggaagacgcatccaaatgcttggtcttgcttgcagagattctgcaggaaaggtttgctgatttttatgtccattttgtggatgtgttggtccagagcttggaagttgcctcctcggcacagttggcggcagcacttaagactaacctgcaagttctatcactgcaaaatttggggctccatgcagcttctgttggagctttgcttgacttcagttcaattttatctaagtcacgtcttcatccaaaccacagcgtggttgcaaactcagcagctacctacattttttgcttacagcatggattggaagatgtagttgatcaagcaattgcatcagtgatgaatgagttggagctgataaaatctctgctagcggaagggcaagcaagttgccctgatatccatagtccccccttagaattgaacagtgaaaggaaaaacgagtcgaactcaggtgtgcattgttggccacaatattcagaggatcagttgctttgcctaatgaaatttgatctcaagattcttctggcgactattgcactggatacaaaaaagagaaatgagagaacaactaacttgatacaattcatcttaaagaagcttgacccatttggtgcccctttccataatttccttgagatgcagtttcagattttctctacactacacaaactgagcaacatggaactctcaagcaatatgccagcatctgaaccatttgaaagagactctggaggttataaaacacagccggttgtgttagaaaagaagatttcttgtgaatgtaaaaagaagtttgtgcataaatatggcaaatacatagttcagggccttaatgcatcatcatctttgacactgaaattagaggctctagattggataggttcatttgaaaaattgatccatggattggagaggggtgtggataatttcagtttctcttatgaggtaatttgggatgctaccctttcgagtgatatcctttttgctgtcttggattgtgcatatgatagggagtctaaagtaaggtaccatgttgcaataaccttggagttactatttctgggaaggctcatcaaccccatgaatttctatgttgttgctcaggttctgctagacaagcttagtgatccagatagtaatgtaaaggatgcattcttaaggttattttcaatcaccttgcctatcacaacatatgcgtttggcttgtttgcagatgaacataattatcgtaattcctcagatattgttaacatgtccaaccattgcatgaactggaggcatgtgcttgctgtgaagcaacagcctaggaaactccactggcagcagcttgtttctgttttgagttacctttctctcagattgaagttacctctttcgtcttgggtgcaacggctggtctttagttaccgtgggaagaaagatacgcgttatggtcaaattgatatgtttggagatgctgatgggaatgaactccccaaaggccctggtgtggacagaaatactattgatataatatactcagtaaataatcatgctgctgtttggtggggaatccatgaagctgcccggcactgcattaaccttcggcttcgaactcatctaggtggtcccactcagacatttgcagctctagaacgcatgcttttggatgtaacaaatgtattaatggtggaagctaaggaagctgaaggaaggtatatagggccagctgacatttgcttattgccaatgcgtcttctattggattttgttgaggcattgaaaaaatatgcttacaatgcatatgaaggttcctttgttctatcacccccaccaaaagcaagttccgtgtttttccatgcaaacaaacgagtttgtgaagagtggttttcacgaatttgtgatccaatgttgaatgcaggattagctatgcattgcagtgatgcagtcattcactattgttcactgcggctggtagatctcagaaacctggctgcatcatctctcagaggcaatagtcacatgggtggggctactgaaagtcatgcctttagagagaggttagaagcagatgttatgaaagtcctccggcatgcttccctggcactctgcagatgtcatgaaacagatgccttagttggacttcagaagtgggctgcatcaacattctattcttactttgagcaagataatcaactagttcggggcgtatctgatcgcgacaatcgcttctcctggatatcaggattgatctatcaatcccaggggcagtatgaaaaggctgctgcacattattcacatctactgcagtcggaggaagcccttatctccatgaaatctgatggcattcagtacatcatagagcgtgttattgagtgctacacatccctttcagattggaaatgcttagagagttggcttgctgagttacaagtgctccgtgctgtacacgccggcaaacctttttcaggagctctaacaagtgctggcaacgaacttaatgctatccatgcaatggcgtgctttgatgagggggactttcattcagcttggggttatcttgacctgactccaaaaagcagcaatgagctcacccttgatcccaaggttgcacttgagagaagtgaacttatgcttttgcgtggaatgctgcgatgtaatagcaagttagagggcataacagaggagcttcataaggctaaattgatgttggatgaagcactcactgttgtcccactcaatggattgcctcaagctgctgcttgcgctggccagcttcattgcatatttgcattggaagaagccttggggttgacctcccaaaatggacttaatcaatcacaatcaataatggattctttactgaaagcactgcatgatcctgtcgataaaatgcatcaagattgcaacatgtggctaaaggtcttcaaagtgtaccgtaatacacggccatcttctttatccactcttcttctctgtcagaagcttgcaagtctttctagaaagcagagcaattttatgttggctactcgtttaaatcaatacctcatagatcatcctttgaagtcatctgatgagatggacaaggaaatacttgaattgaacattaagtatgaaggtgccttgctgaagcatgcaaatggaaataatgaagaggctctatctgatctgtggtcactggtccgagctagtgttctgtctagagttagttgttcatctggcattggcacttcacattcactggttgctagggcttgtttgaaactctcaacctggatggagcaagcgaactcaagtcctttaaattcgatcattccaatggtagtaaaagatttcagcgattctgatggatttcaagatggggcagagaaacttctatctggtgatagtgtatctgtttcgactttggattatcatgcacttgctcaagaaatcataggcactgctcgaaagatatcctggcaactttgccccactatgggtaaggcttggcttgcttatgcatcctggtgctttgctcatggcagttattctctgtctggaactgattcaaatttgcagaattcactgtcccctgttcttcagtctgaactctccccgagtagatgtcatttaacagatgacgagaaatctgaggtgggtgaaataatcagaagtatctgtgctgatgaacatgcaaatcatgtgggttgtgaatacccaatgacaccagggtgttacaattctgcaccagagcaccccatatctttacttgttgaacaggcaattagtttgatagaaactgcagctggagcaccaggctttgagtcccgcgaaggtgatgatccctctgcagttctagcatcagagctggtggttctttgtaaatgtgattctggaaaggacactgcacctttgattggcaagcttactgaaatatggtggtctttaaggaaaaggagggtatcactcttcggacatgcggcacatgcttattttcagtatctttcccattcatcaactgagcttcaatcttcatatcaccatgatgctttgaaagggaaaacaagaagctacactatgcgtgcgatgctgtatctacttcacataatgttgaactatggggtggaactgaaggaaacacttgaaagtgggctttcaacagttcctttattgccatggcaggagattatacctcaactttttgcacgcttgagttcccacccagagaagatagtgagggaacttttggagagtatattgctgaagctaggaaagttatctccttgctctattgtatatcctacattggttgatatcagtgcttgcgaaggagaaccctctgaggagcttcagcgcatatcggactttatggttaagctataccccaatttaattaaagatgttaagcttgcaattgaggagctaggtatgattactgttctctgggaggaacaatggctcagcacattacaagatctccattcagatgttttgaggagaatcaatatacttaaagatgaagctgtaagggttgctgcaaattctacactgagttcggcagaaaagaacaagattaatgctgcaaaatattctgctgttatgactccaatagttgtagccttggaacgtcgtctggtgtctacatctcgtgaaccaaaaacaccccatgaaatgtggttccataaagaatacaatgctaagctgaaatctgcagtcacaacccttaagatgccccctggatctccagcagcattaggagagatttggcaaccttttgattcaattgctgcttctttagccacacatcaaagaaggtcacacataatgttaagtgaaattgctccacagctagctgttttgtcaacctctgacattccaatgcctggttttgagaagatacttggttcctcagaatccttttctggaaaccatggcattgtaaccatatcttccttctgtaaagaggtaacaatactttcaacaaagacaaggcctaagaagctcatcttgcaaggatcggatggtcagaggtacacttaccttctcaagggccgggaagatttacgccttgattcacggataatgcaactgttggaggcaataaatagcctgttgtattcgtcttccgacactcgaagtcgaaatatcacactacggttctattccgttacaccggttagtggacgagctggactgatccagtgggtggaaaatgtaagcagcatatacaatgtgtacaaatcatggcaaaagcgttcacagttggcacatgcacatgcagaggcacaagtatcttcagttagcactggtaacattcacaaccctgttgcacctgttccccgtccaagtgacatgttctatggaaagattataccagcactgaaagaaaaagggataaaaagggtagtctcacgaagagattggccattagacgttaaaagaaaagttctattggagcttatgaatgagactccgaaacagattctgtggcaagaaatgtggtgtgcaagcgaagggttcagaaactttaactccaaagtaaatagattctccaggagcgtagcagccatgagcatagttggccatatactgggtcttggagatagacatttggacaacattcttatggatttcagcaatggggatgtggttcatattgattacaacatatgctttgataaagggaagaggttgaagattccagaaattgttccattccgtctcactcaaacaattgaatcagctttaggattgactggcgtggaaggtgtttttagagttacttgtgaggaagttatgggtgtcctcttgaagaacaaagatattatcttgatgttgttggaagtatttatttgggatccattgattgagtggacacgtggaaatatccaagatgaagcaggaattgccggtgaagagaagaaaggaatggaattagcagttagtttgagcttgttctcttctagaattcaagaaattcgtgttcctttgcaggagcacaaggatcttttcttaactaatttgccagctacagtatcgtctctaaagaaattcttggatattttagatcagtatgaggttgcatcggctatattttatcatgctgagaaagagagatcaagtgttttgcagcatgaaatgtcggctaagttggtcctagctgatgctacatcgggtgctgagaaatctcgcacttcatttgaaattcatgctcacgagttagcagaagcaaaagcggcggcagttgatgaagctaacaagcttgcaatatgggtcgaaaaacatgcactggttcttgaggctatacgggagaactctgttgcgtgcattgagtcatgcatgcaattgaattgtaaggacaagacattgagccttatttcagccgtcctagaatcaggggtcccacttacagttgtaccagaaccaacaagagcgcaatgctcggaattggatagggagatttctcaattattatctgagttacagggtggactttcctctgctttagactcacttggtgaatattctttagtcttgaagcaagttcttccggttaactacatcacaaccagtccggttactagttgggcgcaagtcttgcagcgatctgtaaggagtacatcgcaagatatgctttccctggctaaaatacaggctgcagaagtcattgctaaggttcaaggtgaaggcattaatctggtgcaacaaagatatcaggatctcgtaaatcaaatggaaagttatgtttcatgtgtggagaaacttgcgagggagtgttctgaactgatgaattctattgggttgaataacgaagtgcaatcaaaagagcggatactttctgtattcatgaactctgttcagttgccttcacaaaagaaggatggtgatagtactcatttatcgcattcaggaagtcctcagcagggtgagatcaaaactccagccaagggcgatgtacaggagacaacaggtaaggtcctctctattcttgggattgctgtgagtcagctatatggtgatattagagccaaagtgtctgaactctcaattaaagctattggaaaagctaaatttaggacagatgattctggtcttcaagctgatgctggaatgagcttgcaagtatttgaacaacatatagaaaaatgtgcattaatttctggagttgttgatgaagtgcatgaagttattgggagaaccttagcagaaacaagtgctgcttatgcaaagcccagtcctaggcactgggcctctacttttcaggcagctttgcactcaagcatcaacttgattgaacaaatgactgaagcttttcttccagaatttatcagatcagttgttccacataattcagaggtaaaggaaaccgtcaggtcaatttctgaggtacgtggttctgttgataatgctctagagaagctgattgaggttgaacttgagagaacatctcttgctgaattggaacagaactactctgtgaaagttggcagaattactgagcagcaaatagctcttgaagaagctgctgcaagaggtagagaacatctatcatgggaagaagcagaggagctagcttcacaggaggaaatctgtagggctcaattggaacaattacatgaaacatggagacagaaagatatgcgtattttgtcacttatgaaagtagaagacaatatcatgaattcgctgctttcttctaaacagtatgtttcatctttggtggaccatgatcaggaaagtgagtttcattatggacaaattaaggccctcctttcaatcttcgcaaagccctttgctgacctggaatcgctggaccatatgctatcatcatctggcatgtttcctcacatagacaatcccatttccaatattaaagatgctttgtctttgggctcttcattgtctgacgtggtgtggcctttagctggcatattgaaggatcatgctttttttgtttgggaactcaatcttcttgattcggttcttgttttatgcatgcgtgagatttcatcttctcttgagcatggcattaatgccaatcaactttacatgactcttaaaaagaagcttgcgatctatgtggaaaaacaagttttccggtatgttacagaaaggattgctcctgcgctcaccctaaagttagatgaagaaattagcgctttgctgcagctgagtcaaggaataagagcatcagatcagcctaaaagagattctgctgccgttggaagggttgcattaatgcttgaggagtattgtaatgcttatgaaacagctagagctgccgggactgcagtttcgctaatgaaaaggcaattaaatgagctcactgaggctctgcgcaaaattattttggaaatagttcaggttgaatggctacatgatatttcatcgtctcatgcacagaaggtgaaggttttgtcacaaaatattcttagtgatgataagttcatctctttgatgttaaatctgagcagaagcaatttgttagataagatccaatcttctgtctcattaataacaaggtcaattgaagtcctgcaagcttgtgaaagcatttctgtttcggccgaaggacaacttgagagagcaatgggatgggcctgtgctgggccaaatacttccagtgcaggtggttcaacggcaaagggttcaggaatcccccctgaatttcatggtcatctattaaaaagaaggaaattgcttcgggtggttcaaaaagaggcatctgatcttgttaaagtttgcacctctgttttggagtttgaagcatccagagatggactttacttcgttcctgaggataaagcttccgaacaatcttcggacaaaggcagggcctggcatcaaactttcttgaatctcctggcacgtctagatgcggcatttcattcttttacatgtgcagaacaagaatggaaacttggccagctcagtctggaagctgctggaaaaggcctgttttcagctaataaccaggtttcagtagtctctgtgaaagcaaactctgctttagttaatctccaggatgttcttggtgccatgtatggtcatgcttgtgaagcaagtgcattgctatctggattcaaacatgtatcacaagactgcactgctttgacttctgaatgtggttcgttgctcgaggaggttttagctatagcagatgggttgcatgatgtatacactctggggaaggaagctgctgctgctcacagttcccttatgaccaatctttccaaggcaaatacaattttgtttccacttgaggtttgtctatgtgctgatgtaactgttatgtctgaagcgatttcaaacgaaagagagaagaacaatgctagtatgcctcttattcatggaaaggcattataccaatcttataatattaaagttagggaagcttgcaaaactttggaacctctggtgggtccactttctgacaatgcgaaggaactgcattccatggtaatgaagcttggacacctttcaagtcttcatgctgggaatcttcacaaggctctagaagttccaggagaaagggaatctatgagatcccaggatttgctctcaacacatcctgatcttttgcaaagtgattcatcaactgagaaggatagagcctctcttggcatggattctggctctccagatttggaattgaatactgacatttgtttgcaagatagatgttggatttcacctccagagcactcatatactagcagttctggatgtaccacagggttgacccagattaatccctatgacaacttagagaaaatagatgctcttatggatgatggggctgaaatagatggttctggttctactgacctggaaacaaaagacagtaatcaggaagttgaaaccgatttggtggtgggaagaattgaaagtgtggataacaacagtgcagcagccttcagacaagttagaggacaagaatgtgacaacagcgatcctaaatcctatggagactctactactcgagtgaccagaggtaagacaaaaacaaaaggtaaaaatccttttgccctgtccatcctgaagcaagtggagcataagttacatggacagaatatagatggcaccaggtccttgaatatttctgagcaagttgactatcttcttaaacaagcaacaagcattgacaacttatgcaatatgtacgagggatggacaccttggatatgattcaaagatgtgactttccttcattgtgcatggacaaatagtccagttgagactcagaatgatcattttacccaactttcaagtacgaactcg

SEQ ID NO: 28232 - DNA, 940 bp, Zea Mays
ctagaattatctgtataccaaaaatcaatttcattatctgattttatgaatatcatagcactaaggactgcggttacaattctttagaaatccagggtcgattttataaggttttggacctggttgtgaagttcttcgaacaagagtggagcacggatttatattctaaacaacacaggggctcttatgagaacgaccacgaccgaaggggtatcggcaatcgtgagccgtcagatctatatcagaccgcccagattaaatcatccattatgtgaaccggtatgcacccttggccaccagatccacgaaggacggacacgacttaaaacagggcgaatcattctctacgtctgatctgaattggatggtctaacacgcacacaccgaagcggtacgcacaaccagatctcggccgcccaacacatagtctacggccacgatcaaactgagcttgaaaggtgccatcttctaatatccaccgccgatgcccgatctaacggttctggtcgttctccccaacattccccttccaccaccggccatccgtgcggcggagtatagagcccccgcggcgtgagctcaccggaatcatgcggaccgacgatgcaaggcaccattccatcatctaacggttgctacgcgatgcgaagtggttataggaacttctgaggatgttcttacccgcagtgaggttatggagaagctagcccacgacatgaagcggatcctcggcggagttggattccgacgaggaatccccgtgctccagctgcaccatagcgctcaatccaaccatgaaatcatgcggtgtagtgggtcaaccttctttgactaatttctggtcaccttacaacgacgagagggagaagcgacggcggcgaccctactgtgatccacggcagggcacagggtttctaggtcccatggtggcccaacttct

SEQ ID NO: 28233 - DNA, 1651 bp, Zea Mays
cgagacttctgtgtgctgcgattgcgacgaattaaagaaacagcggtgccggtgcagcgctagctgcagttgggttgcggccgcagagcagcagcaggaaggatggcgaccaaggtggtggtggacctgcggtccgacacggtcaccaagccttccgaggccatgcgcgcgtccatggccgcggccgacgtcgacgacgacgtccggggcgcggacccgaccgcgcgccgcttccaggaggagatggcggcgctcatgggcaaggaggccgcgctcttcgtcccgtcggggaccatgggcaacctcgtgtccgtcctcgcgcactgcgacgtccgcggcagcgaggtcatcctcggcgacgactcgcacatccacctctacgagaacggcggcatctccaccctcggcggcgtgcaccctaagaccgtcagaaacaactccgacggcaccatggacatcgacagcatcgtcgctgcaatcaggcctcccggcggtggcctgtattacccgaccaccaggctcatctgcttggagaacacacatgggaattccggagggaagtgtttatccgcagaatacactgaaaaggttggcgaaattgccaagagtcatggcctgaagcttcatatcgatggagctcgcattttcaacgcctctgtggcacttggagttcctgtggacagacttgtgagagctgcagattcagtttcggtatgcatttctaaaggtttaggcgcccccgttggatcagttattgttggctcgaaggccttcatcgacaaggccaaaattctccggaagaccctaggtggtggaatgaggcaggttggagttctctgtgctgctgctcatgttgccgttcgtgacaatgtgggaaagcttgcagatgaccacagaaaggctaaagctttggcagacggactgaataaaatcgaacagttcagagtggattcagcatcagtccagaccaatatggtattcttggacatcgtggattcacgcatatcatctaacaagctgtgccaggttctgggaacgcacaatgtgctcgcaagtccaaggagtccaaaaaggcttgtccttcattaccaaatttcagatgatgatgttcaatatgcactgacgtgttttaagaaagctgctgaacagctactaatgggcagtactgaactcgagcatttggctgaacagctactgatgggcactaccaagaactcgtacgggcaatagggcaccctgatgcataagctcggtgtggtcttatctgtaatcagctcgaaatattgtagccgcaccaaacctttgctgaataactgttgcttctcacttgtttattggatgtgttcgttcctgtgctttggcctgtttggtttaacttttctctgaccggtttttctgagaatctggttgtgcaaaaaatcctgctatagagagaatctagtatcatggggattacgagtggaggaagatgaaggtgttcataaggttcaggatctagaaataaatggatttctactatttcaaagactcggctgattatgtgtttatgtcaattttagatatattaccaaatcggttcttatagaagctagccgaaaagctgagtgtttggcagtccgcaacagcttttggtggctagaaaatgaaaaaa

SEQ ID NO: 28234 - DNA, 3633 bp, Zea Mays
gcgacggatatccgaaattaaaagtacatgtattttcacccatttggcacttggtagtaagcctaaccctagtctcacacgcttgagtcttgacgctcacggacacggagtcacggaccgtggctctccgccggccaccaccagccgccgccccatgtagcaaattagcaacccgccgagcaagagcaaccgccggcggcccggcgccgaccctgccgtccaggactccaggcccgtcctcctgccgcggtgctgcctgcgtccctgcccccgccaccgcccaccgccagcagtaggcatcaagccgagcgaggagcgagtagtggcgctgcgtggctgcgtccctggctcggtggctccctgcccagtgcccagtgcccctgcgtcagcgtcgccgtcactgcactccgagttgcagctccagcaagtgaccattgctctagagatccacatgtgggtttcagtgcattttcgtatcttttagaactgaactgtgaaaaacacaatggcaacaatcatatctggagcaaggagccttcactcactcgctctgcgatcgcggatgttgggcgaaatgactcagctcggtccttttaaccgcaacgtgcagcggaggtggagaaagcctgtagattcggcaagaacacgtctcgagggaagaactatggatcataggctggacaagctaatggttcagctgaggaacttgaggctggccttggctttgcatgaggtgatatctcagcagaggaacggatatgcgtctctccagctcctctcaaggtggaggcatgaggtcgggctgaacattgaggtcggtgctttcctcaagaaatacccccacgtgtttcagacctacgtgcaccctgtcaagaggaaccactgctgcaagatcacgcagaagatgtccgacttgatcgcagaggaagacgctgtggtcagggagaatgaggtcggcgtagttcagcggctgaagaaacttctcatgctctctgtggatggaactctgaacatgcacgcgttatggctcataagaagggaacttgggcttccggatgattacaggtcctctatactgccgaaccatcgacatgatttaattctcgaatccccagctactctatcacttttctctatggatgaaacattggctgtagctaaggtcgacgagtggaggaaaagggagtacacagaaaaatggctagctgaatcagagacaaaatatgctttcccgatcaacttcccaactggatttaaggttcagaaaggtttcagggagaaactcaagaactggcagaggcttccctacaccaaaccttatgagaagaatgattcgcattcgatccgcaacgtggagcggcttgagaaacgcattgttggtgttcttcatgagcttttgagcctgacgatcgaaagaatgatgccacttgagagactgtcacacttcagaagattgtacaccatggaggtaaacctgctagaattttttctcaagtatccaggcattttctacatctcgacgaaaggaagcacacagacagttatcctaagggagagttacagtaaaggatatctgattgagcctaaccctgtgtacattgtgcggaggaagatgctggacttggtattatctggatctcgtaacgttggtgaatgccaacaggatagtgcaacttggtcagctgaggagcatggtctgggaagcagtcatgggtgccaggataacatatgccaggtggattctgcaattccatactggaacatggagttagaagtgacgcatggaaagaaccaattaactcaaccgtgatcttgctgtaatctctacatataaaaatacctactgatatcgtctgcctagggtgaagcgatgcctagctgcggcattgcttgctgccttgctcacctgctttcctgagtatctgtgttcatcaattgcgaattatccttccttcgattccgacctcctcgggtggctcctgccgtcctgcgtgcattcccattttcaaaccagcatgttcagcactgcttggcgtgggggtttgccgctagtgggggtccaagaggcgccattcctgttccaaattcttaggcggcggtgacgacgctgactgttggttgaggctgttggagcagtccttgaagagaaagtgcctctgatatattctctgctcaaaggattagccttgcagttgccagacgatgtacctgataaaaatgagataattagattgagaaaggttgcaagcagtgttggtgttggcgacaaacatgatgctgagtgggtacactctattctggcagacgctggtgcagctaatgataattcttggatcctacttccatacctttgtgctgcattcatggtgtccaacatttggaacggtgctgtttatgatgtcaatataggtggactcagtaacaatttgcactgcctagcaaggtgtgtaagtgctgtgattgggggaagcgaatacactcgggtcgaaagggagcagcgaataaattctctttcaaatgtgcatacagatgaactgcaagaggccgagttaccgagccgtgtctcagcagaagcaaatatcaaatcttgtatgcagatctacgtcaaactgtctgcagggatcgtcctggattcatggaacgacacaagcaggcagcacatcgtcccgaagctgacattccaggaccagctctgcgagctgtccccgtacgtgccaaggagcaccttagaagctcacatcccatacaccatcctgcgctcgatataccaccagctgtacggaggctctctgctggcctcggaaccggcggagcagtccccaaggcagtcgcctctcatctctctggcacacgcgtccccgtccgcaaggcagatgcagaaccgaccagagacaacacccaggtcccacaccttcgacccaggctactacagctcgtcggggtcccagcacgacgatggctacgacgcggataggagggccggacggctgctgcgcggagcatgaggcgctctggaccgctcgacttcggtgcgagcagaaaggcgaagaagttcgtcgagggctccagctccgggagcagcgatggagctggctcgttgcagaggttcgcagtgtcgagatctggccctctatcgtacaaatagggccgcatgtaatgtaaactctagagcagtagatcttcctatgcgtgctggtttacgtagctagcagcagcagctagttgtgctgtaagtaaaacccattaattgttttgttttgtttgctgctctatcgtacaaatagggcatcatgtaatgtaaactctagagctagtttttattttggttagttggtatatttagtttgagagagggatattcacacttttaggttttgtttggatactctagtattcaccataattcacatgtgtgtgaggtggattgggggtgcacactatagtatccaaataagaccttagggtgcgtttggttggagagtcaattggaatggagtgactccattccagtttttgagaatggagtcatttcattctgtgtttggcaattacaacggaaacattctattttttgtttggttgaagactagaatagaatggagccgctccgttcattgtttggttagatagcca

SEQ ID NO: 28235 - DNA, 2743 bp, Zea Mays
gaggggaactgggaagggaagggagcggaagagaggtgggtgaccgccgctcctccgtccagccttccagttccaggcgtggcgaactaggcaagcggcaagctcaccgctcctcgagtgaggcccaggttccgtcgccgccgtactcagcagcggataccggcgagtcaacaggtagtagagggggaaggaggggagcagttcctgttcgcccggtcaccgcgcggccggagcaatcccgctggtgcgtccgcctcagtttgccgtcaccctgttgcacgtacggctagggtttggagatagatccgcccgccagctcgtgtggaggcgcgccgtggtgcggggaggaatagaggaagcgcggttttggttccttgctcctgaagcttcagggcgtgcgaaccggttcggtcgcaatgtcgggctcgtcggcggcaggggaggacatagtgcagcacctatcgtccaattctaacccgtcttcgtcgaagctcgcgaagctcgaggcacgcatggccggcaaggctgtctccgcgccatcgtcaccgccacaccatcccatggctgcccccgcctccgcacctgccatatccttcatggaccaggaggagctgcctgagacttcctcttccgatgacgataactgtgaggagtttttgatacaaaagaataccctgaagcgtccgagatctccagatggtgacaacatctctgctcttggaaattttgagggttcatcaaacgaggcagcaaagattttagatgtcacggatacaagaccatccctggacaattcaaataggaaaaaacaaggccgtggaaggggtcgtgctggtacaggccgaggccgtggctcaaagactgttgatcaaccacgactgactttgatttcctcagcagttgtaacaaatggtcaactagataaattaaccaacaaggaaccccaatcgagtgttcaactgggccatgacgacagggctgctttacaggaagaattgtcaatgttacatggcaaagttgcatttttggaggaggaactttctaaatcgcgtcaagacgcaacaaattaccatcaactgagtgatagggtagcaaaggaattgaaggatctcaaagatcatgaccaacaaatgagatctaagcaaatgaaggtgctgtctgatctgctgatagctgtgtcgaaagcagagaggcaagaagcgcggatgaggataaggcaggaatctttcagacttgggaatgttggtgttatgagagctggaactatcatatctgaaatttgggaagacggacaggcaataaaagatcttaattctcacctgaaatctttactggaaactaaggagactattgaaaggcatcgtaaatcacttaagaaaagacaatctgacaagggtgatggcagtgacgctgagactagcatgtccgaggaggacattgtcttacaggacgaaatatgtaaatctcgtctaaccagtatcaaacgggaggaagaacagtatatgagagagagagatcggtatgagttggaaaaggggaggcttatacgagagatgaagcgtctcagagatgaagatggctcacgctttaacaacttccaaattcttcaccatcgttatgctctgttaaatcttcttggaaagggagggtttagtgaggtttacaaggcttttgatttggtggagtacaagtatgtggcatgcaagcttcatggattgaacgctcaatggagtgaggagaaaaaacagagctacatacgtcatgcgattcgtgaatataacattcacaaaactttggtgcatccaaacattgtcaggctatgggatatatttgagattgatcacaatacattctgcaccgtcctagaatattgcagtgggcctggtttatctaaacaagaggggccaaaagatcattcactacgatctaaaacctggcaatgttctctttgatgaggttggtgttgcaaaagttacagactttggcctcagcaagattgtggaggatgatgttgggtctcagggaatggaactcacttctcagggagctggaacctattggtatcttcctccagaatgctttgaccttagcaaaacaccatttatttcatctaaggtggatgtttggtcagctggtgtaatgttttaccaaatgctttatggaaggcgtccttttggtcatgatcagactcaggagagaatacttcgggaagatacaattatcaatgcacgaagagtggagttcccctcaaagccagctgtatcgaatgaggcgaaggatctgatacgccggtgcttgacatacaaccaatcagagaggccagatgtactaaccataactcaagatcattatctctcgtatgcaaagaagtagccactaccccggagaacattttggcgatggtatctgttcaggcattgagattatggatggggatggataatctcgtggaagagctaagtattaaacaagctcaagaagaccacaaagggtgtataattgtaaattttagtctgccctattacggcaatgacctgaaatccagaaggcatcagttcaaaggccagcttcttttgtaacatagagaaaacatgcattaacgggcccatttaccctttgactgagatctccttgactcgcttgtggcatgcccccgtgcgtaacgcgacggttacttggctggtgggcaatggtcctcttgattttctgtttgctgatactgtcgataaggactgccgaatca

SEQ ID NO: 28236 - DNA, 1735 bp, Zea Mays
gtttcacatcatcaacaaaataccgatcgcccgaccccttcagtgccttgactcacgcccgcggcaaccggcgacgaggcggcacgaccctccagtccggagtccgccatgcctcacgccgccgccaccgccgctgcggcgctcccgcgtgcctctctgctcgttatctcggcgccgctccgcgactccctcgccgcggcgccgtacgagccccccgcgggcgcatccgcctccgtcaagtccctcctcgcctctctcctcccttcgccttcccctccccagccccagcttcaggagccggcgggtaaggagtctggggacctcctcctcttctgcgctgccgtactcgcggcctccccggagtaccccgcgctgcactgggtcccggcgagcctcgtgggcgcggccgccgccgcggtgaacgagctggcggcggcgggaggttggggcagcgttggggatatggtggtggccgtggcaccggaggtggtgcctcctctcaaggccgtggtgaaggactcgtgcgtcgatgctgacagcgacgagattggggctgtgaagccgcccaaggagcacgcagcagtcgccgcgcaccagttccggtggctggtgtctcaggtaagctaccctaagctcggggatttgtgttcgttagtcattccatgtgccctgacaaccttagatcattggtcaccagaagttaaggtacagggaatggtaagctttgtacacatagcgaagaatgtgaaagcaacggaattaagtttgtatgaagatgccatacttgatgcgtgctgtcagaacattcctgcagatgatgagttatggtaccaggttattgaggtatctgtgatgttgctgacattcacccagcggagcaatcctcgtagcccctggtatgatcgaatgcttagtgagatgttgggccacctggaacggcagccactaaataaagagcgtcgtgttgcatggttgacccttattgggccagtttttgatgctatgggcctcttcctgttggcacattttcgccgccttttctcactgtttttccaatggatgcacactgatgataataagacagttcttctgactttaaagcaaatacatgccattatcaagcttacctggatcaggaagtcaccttatactttgagatccacttatttgtggataggctggtggacgagcttgttctattatataaagaatcagccacaaggagcaaccgtgaaatcatgcgagatcatatcctggagatacttgtactgcttcagaactgcaagggacatcaatttgaggaagcttggaagaaacatgaactagacccagacttgacgatgctgctgtccactttcaataagctttgtataaaaaacagttcaccgtgatgttgagttcaactacatgtgttatcagtgtaaatatttcaccatcgcctatcctgtcactgaatatttcactactgcctattctgccactctcatctgctgaaggaaatcagccttgattcttgtggcagatccattttaaaaaaaaatctagtacctgtagaggcagctggacaaggtaatgaacaactcatgccttgtcgacagccttcttcctctgcatccgttctggtacacgcgtttgtgttctgtgtgacttcatcgtggattcagtgcagctgactgcactgcatgcaacgtgtatattttgctcacactcagtgtggctcacagcttgatgatag

SEQ ID NO: 28237 - DNA, 352 bp, Zea Mays
ccagcgcctccgggttaaaaaacgcacacctgcgacctcccttcccctatcggaaccctcaccgtgaacccggggcctcgccgccattattgcgggggatccaagccgccacggtcaaggttgccttctattgccgcccgacccttgaagtgtggctgcagtagttcgtcgtgactcgtggagtcttgtgataagcctcaccgggcgtggaggtaaccgggtgagggggaattcctcatcgtcgtcatacggtaccttgtggccgtcgtacgccatggctagccaatctgccaccaccccatcagcgaggttacgagtcacctgaagagcaagttggtacctggaatctcaa

SEQ ID NO: 28238 - DNA, 3211 bp, Zea Mays
gcaccccgctgtccacctccactcgcagctcctccatttccgcgcgtccgctccaccacaacgccccgcgaacccgtccccttcaaagcggtcacctcttcctccgaccctcgctagcttcgcctcccttctcctgcgtgccctactgcccttcacctctcgtaccccccctcccccgcctttcccgcaattccggctcacatgaccgtccgggccgcggccgtgctggtggccgccgccgtgctcgttctcctcctcccgggatgggcggcggcggagtggaatctcacgaagaaaggcagcgtcgtcacctacgatgggcgctctctcatgatcgacggcaagcgggacctcttcttctccggcgccatccactaccccaggagcccgcctgaggtgtggccgaagctgatcgagcgggctaaggagggcggcctcaacacgatcgagacgtacatattctggaacgcgcacgaacctgagcctggcaagtacaattttgaaggccggttcgacttgatcaagtacctcaagatgatccaggagcatgacatgtatgcaattgtgcgcatcgggcccttcatccaggcagaatggaaccatggtggtctgccttattggcttagagagatcgaccacataatattccgggcaaacaatgatccctacaagaaagaaatggagaaattcgtgagattcatagtgcagaagttgaaggatgctgagttatttgcatctcaaggaggacccatcattctaacacagatcgagaatgaatatgggaacataaaaaaagatcatgcaacagacggtgacaagtacctcgaatgggcagctcaaatggcgctcagcacacaaacaggagttccatggataatgtgcaagcagtcttcagctcctggtgaagtgatccctacttgcaatggaaggcattgtggagatacatggacactacgcgacaaaaataagcctatgctttggactgagaattggactcaacaattcagagcatatggcgatcaagtagctatgcgttcagctgaggacattgcatatgctgtgttacggttttttgcaaagggtgggtcattggttaactactacatgtatcacggaggaacaaattttggaaggactggggcttcttatgtgctgactgggtactatgatgaagctcccatggatgaatatggtatgtacaaggagcccaaatttgggcatctcagggacttgcacaatgtaataaggtcatatcagaaagcattcctcttggggaagcattcgtctgagatattgggtcatgggtatgaggttgggagcaacttcttcaatcattttggttcctggaaacttgtgttctctgacctacaaatcaatcttctttggtgttgtgattaattttctatgttgcaggcacacatctttgagttgcctgaagaaaatctttgcctctctttcctttccaacaataacacgggcgaagatggaacagtaatcttccgaggggagaagcactacgtgcctagccgttcagtctccattcttgcagggtgcaagaacgtggtttacaataccaagagggtgtttgtacaacacaatgaaaggtcataccatacctcagaggtaacaagcaagaataaccaatgggagatgtactcagaaaaaatcccgaagtaccgtgatactaaagtcaggatgaaggaacccctggagcaatttaaccaaaccaaggacgctagtgattacttatggatgcgcacgcggaagcaagcaggtgaagggtttcatgtttgaaaaacccgttgatctgaaagtaggtgtgaaccatgttgtattgttgtcgtcaactatgggaatgaaggacagtggtggtgaacttgctgaagtaaagagtggcattcaggagtgcctaatccagggtctgaacactgggacgttggatttacaagtcaatggctggggccataaggctgcactggaaggtgaggacaaggagatctactcagaaaaaggtgtgggcaaagttcagtggaaacctgccgagaacggccgggcagccacttggtataaggtaagttgaaccaggaatacgagcactataggttttggaaacatcaaacatccatttcaattttggttgcaaccctggcccttggtgtcactatgttcactgccatgctagagatacttcgatgagccagatggagatgatcccgttgtacttgacatgagctcaatggacaaaggaatgatttttgtgaatggtgaaggcgtgggtagatactgggtctcataccgaactcttgctggaactccttctcaagcactataccatattccgcgtcctttcttgaaatccaaggacaaccttttggttgtcttcgaggaggagatgggcaagccggatggcatcctcgtgcagacggtgacgagagacgacatatgtctgttcatctcggagcacaacccgggacagataaagacgtgggatacggatggtgacaaaatcaaactcattgcagaggatcacagcaggcggggcaccttgatgtgcccccctgagaagacaatccaagaagtcgtctttgccagcttcggcaacccagagggcatgtgcggcaacttcactgaatgcctcggcaagccatcctgcatgctgccggtggatcacacggtgtacggcgcggacatcaactgccaatcaacgactgctacactgggggtgcaggtgagatgcggaggcggcaagaagggtgcctgagaataacaagatggatgctgctaattaatggacgtttcagcttgtttgtttgttcatcccttcggtttggcactgatgcttacattgttctgacattgcaattgaaatgtgattggaacattcttgatcgggaactaacatgaaatgagtggagggtagatgctgatcagaccaaagatgtgtatttcccccctctttccttctgtctcgtgttgtttcatgtaaccatcacaatatatatagatgttgaataatcatgaccagtagtatagatcttagagcatccctaacttttgaataaaagactcttggagattggagctggactaactgattgcttcttgcaacatgtatatgaacatttcattaaaaaacgagcgatgagcaaaacaatataccctactaattaagatgttgcaaatgagtttaatcctacagctttgatactgc

SEQ ID NO: 28239 - DNA, 3266 bp, Zea Mays
tagagtccgggcaggcagccatctccgtcttctccgcgctctccatcctcggcgggcgggtgggaggggcgagtcgacgaccagcacgcgcgcgcgtccagcgcaaccgcgtcacggaaccctagcgtcgcctcgttcgctgcccaactctcctccagactccagtgcacaggtctccatcacggggaattctcatatagcaagtcgtcgtcctcgtcctcgtcctcgtcctctcctccggtgggtggatcggccatcgcgccgggccgggcgggcatacctacgtacacactccccggttcccgtccccgtccccgtcccgcattcgattggttccttcgtcttcgtctgccgattatcagaatgcctcgaggacaaggctcttctgtgtcaacccgtgagaatcccaaagttgatcgggcaactgattcaaatgatgacagccgcaagaataggaggggtgcttatttgctactgggattgctgatagtgttccttcatggatcatggtctgtttatcagatccagtttggaagccttcctttgccccttgatgctgagcaggctggaaagaggggtttctcggaagcttcggcgctgaagcattatgtatatgcagtagcagaaaaaataaagaagacagctcattgggaggttgatgttcaattggagttgtttcacacagatataggcgcaaatcgtctatctggtggtcttttcaagggaaagactctcttgtattcagacttaaagcatgtgctattgagagttactcccaaatatttaccagaagctgaggaaaacttgattctggtttcttctcatattgacactgtttcgacaacggaaggagctggagattgcagttcatgtgtgggagtcatgttagagcttgcacggggagtggcccagtgggcacatgggtttaagagtggtatcttgtttttatttaatactggagaagaagagggtcttgatggcgcccatagttttataactcagcaccactggagaaattcagtaatatttgcggttgatctggaagctatgggtatcagtgggaaatccacactcttccagggtactgaccattgggcattggaaagctttgcagctgtagccaaatacccatctgctcagatagcttcacaggatgtttttagttctggcgcaataaaatctgctactgattttcaaatatatgaggaagttggccgtcttcctggacttgattttgcatataccgatacaacatctgtgtatcatacgaagaatgacaagatggcgcttctgaaaccagggtctcttcagcatattggagataacatgcttgctttcctactccattctgcagcatctccaaaatttttgaaagatgcacaacaaaggaagcaaggaaagacagagcaggatagagctgtttacttcgatatcctgggaaagtacatggtggtctatccgctgcgacttgctaccatgtttcacaactcaatcatattgcagtcacttctaatatggggaacatcattgcttatgggtggacaccctgcactggtgtcctttgcaatatcatgtttgagcatcattctaatgtggatattttctatctgcttaccagttgtggtagcatttgctctgccctatatgtgtccgtttcctattccatatgttgcaaatccatggttaactattggcttatttggttcacctgcactgcttggagcatttattggtcagcatattggatttattctcctgaagaggcatcttcgacgcgtgcattccaaagcaaaaacaggcataactcctagcatgatagaaaatgttactgacctggaagctgagaggtggatttttaaatctggttttgtccagtggttaatagctctgatactaggaacatatttcaaggttggatcatcgtatatagcactcatctggcttgtttctcctgcttttgcatatggttttttggaagctactctctcccctgttcggctacctaaacagcttaaggttgtcacgttggttgtgggtttggttgcaccagttgtgtcttctgctggtttggctgttcgtatggcggatgtaattgttggaagtatagtacgtattgacaggaatcctggcggactaccagactggcttggaaatgtaatagtttcggttgccattgctgttgtcgtttgttccacgtttgtgtatctgctttcatacattcatatctcaggtgataaaagaattctgggtttgctattatccttatcctttggtctttcaattgctttggcatcaagtggcattgtgccagcatttacggaggatgtcgctcgatctgtaaacgttgtacatgtcgtcgataccacaggagtacatggcgggcatatagaaccagtatcctatatctctttgttttccaatacacctggaaagctgacgaatgaattagtggaccttggaggcgaagaattttcttgcggaaggaacatgactactgacttggtaacatttacagtgaagtatggctgttggagttacaaagagagcagtaccggatggagcaggtctgaggttcctgtgctccttgtagaaagtgattcggttataggtggtgctcgacagacagtagtatcagtggataccaagtcatcgacgcgttggacgcttggaatcaacaaagatggaatcgatgacttcacagttcaagtggattcggagaagatagtcctacctggtgataagagcgagatagatgggtggcatacaatccagtttgcagggggcaagaactcgccgacgaagttccagctgacgctatactggtcgtctagcaaaccatctgagagagaagctaaacaagcagcggacgctcctttgctggtgaaactaagaacagatgtgaatagagtcacaccgcaggtggcaagggtggtggagaagctgccacggtggtgcacgcccttcggcaagtccacctctccgtacacgctagctttcttgacggccctccgtgtcgatatttagtcagtcagcagcatttgtttcccatacataggcgtccagtccagcacctttcgttttgaactgtattttagtttgatagtagcaagttataggcccatagaattgtacacaaaagctgccaagggcggtctggtgtaaacgtgctttgcacttgctctaatttgtcctgtatcaaagtttcagattagtttgtggtatttgtgtgtaccattcctgcccccatccttcaagctacgttttct

SEQ ID NO: 28240 - DNA, 3443 bp, Zea Mays
cgccatttgtaaatcgcgctctcccggctcccgcaccccactccccgtttttctccgcaccgccctgctccccgaccccaactgccgtctccttcctcggggaatgcgaccgcgcgccagagcatgctccgcccggagcccgcgctagggttccccgccgccggccccgcccgcgcgcccgagcgccgccgtaagaagcagccgccgacgaggcggaggcgaccggccggtgccacaacggtgggactgggaccacgcggcgcggccgatccagatcccgcgcactcgtccgcgctgctgcctctcaccagcggcggcagcggcagcggctttgcctcgcggggcacggttgcgccagacgaggaagaggggagagacggggcgagctcggctgaatcgcaggaagtggcagaagcagcaaacgattcgttctcctactcactaagagagtgccagaagcagcggcgtctcaagtcagagaggtctgcactggtgcggccaccggcctcgcataagctcaataatgccggaggtattgagcttctagtgctctcgccgaggtgcttgattggtggtaacccgggaggaatgagcaagagctcaacgacatcatcccggagcagatcaggcacaggcacgttcccaagccctgggactccgagctgcaaccggcattgtgcaggcagcatgcagtactccaagggttggagttcagagcgcgtgccactgggcactggtaggaatagaaggtatgggggcagtggggttgtgcttccatttaacaatgggaggaagctgccatcgaaatgggaggatgcagagaagtggatcctaagtccagtttcctgtgatgggttggggaggatgtctgcaccagctccacatcatagacggcccaagtcgaagagtgggccacttggccatccagctggcattccaggggcttatgcggctgtttcaccgcttgttccttgctttgatggtgtgctggcagcagctaatttcgcagcacattcacctttctctgctggggttctcataccagagcacgggcgcattggcgacttcagcagtggaagagacagatgtggtgatgacggtagcagcagatcctactccgctgagaaagagtcctatatattaagatctgcaagcatacatgcatggacagaaacacttatggaggcatctgcttttgctaatatctcagaagaaaccgtacaagatgataaactgcaacgccagacagaagcaacttccatgatttccagtccaatcataaagaaagacatcggcacacagatgagtcctgaggatagtatatcttctccaaaagcgagacattcctgctccagtctgccttcaggacatctgataaaggaagcaaatagtcatatacctaaacctgaaattcgggacgtgcaggttgatgaccaagtaactgtgacccggtggtccaagcgacatgtaacacgaggctctgataagaggtcaacaaatattattgaatggaggaagaagaccactgaaacccgaactccatcttttgatgaaaaagaaagagaaagatgcatgtcacagtaagatattgcctatttctgcccatcagctaacaatcccattttgcaccactgcccagttttgaattggatttacacaaaaagaatatattgctccaattgtcatcttgtagctttcaatactccaagctgtcgttgtcgtgtatcatgtttattaagaaaggtcagctcaatgttgaagtgaagctactatggctgtaatacatgttcaaattcacagaaaggagtaagtataaaaggtgctgaatgttgattagactattatatgacttgctaatatgctcttagtgttattgagaaatctacataacttgaagtcagggtcagatggtgtaagttgcagatattgagcttaggtgatacactagaaatattttgcccattttcatcctacagctagtggcacatgctgacatgcagaatatcgcttaacatgaggtcattatattgaattcagaaccgaacaaatgtttgtatattagagcgcctacctgagctttgaaccatggtattcaaagactggtcattgagaactctgatttcagcaaaattttcctggccagcgagggtctggtaatcccctcttttaagaatgtcttcggtggactgtgtaaaatagtggacgtggcactgtagatgacactgtttgcagagtgaagtttgaaatagaggatgcgataggagatgtcataggggagctgctgaagacagcctaagaggaacccaagtggatatttttctcgcatggtctagtttttttcccccacaatccattagaagctcagtctataaagtgttgttcattttctagttttcttactgatgaggtggtaaaataaaaaaagcatgggtcaattagaaagtctagtaagtcatagaattgatgcgctagtcttacacaatatttttcattgccatttcgaaaaaagagaactcttactgaggatataaatctgctacattttgtatttagagacctggttatttgtgttttaaggtgcaaaagggaggaagcaaagatcacagcttgggaaaatctacagaaagcaaaagcagaggcagctatccgtaagctggagatgaaacttgaaaagaaacggtcatcatcaatggacaaaattttaggcaaactccgctctgctcagaagaaagcacaagacatgcgaagtgtagtttcttctagtgaaggtcagtgtagtgtgagggcaaccaagaagacatcttcctctgtcaaaactggcaggcctttcagctgctgctttacctaccgtgcttgctagttgtgatacacagttggtgcctgtggatacagcaatggatataggtctattcgacctcttctcaggcaacagttatggacgcgaagggaagtcagttgggttttgactacaaggcctaattgttaatgagatttgcactgatgaatgagatatcgttatggagcagcagacgaagaaagccacgcgaaatccactcatgtaactgatggagtggactaatgcagtctagtatgcgacgatcaatctctgtacacccggtagaaaaagttcatgagcttcatggcagttagaatcaggattgagctgatattcatcccgcttgatgtgtagctagcattcttgtaactggaattgtgtgtgtaatgcaaatcatgggcgcattagactgtaatgaagaaaaagtcagggctgcgcctttagaatgcagcttgctcactttttgagtttagtactgagactgggcttgtttgttattggttggcagcaattggaactgtgacgacgtatattttccttttttttggaacgcgctaaacttgttttcccgaattttatggcgaccaacaaagtacatattccattg

SEQ ID NO: 28241 - DNA, 2379 bp, Zea Mays
aaagtcgtaggctcaatctccctcataatccttgacaggcggcacccaatcccatccacctgcgacacatttccccccttttcccgcaacttccgtgacgacttcaccactacatccatgccaccggcgacttcatggcctccccattcagcctctccttcccaagacaaagatggttccagggaggaagggatttaatgcacaagggaacccagcaggtaatttcatcctaatgactctcgtcttctgtagggttcgggctggcggtgcgcaatagggttagaggctgtagggtactggctatttttctccatttttcatcttattactatcctactgggtacatatacgtgtagttgagcggattggtttagctagctgctacatgtgcatatccaatttgaatggacgcaagtttgcaagagctattatttcaggtttacactactacatttgatcctcattcatgtcattttgctcattggagtagtgcaggcgatgttaaaaggagatctcaagtcttcctttctagtcgcagacttccatctgcaattttagatttgggccttgacctactgatctgttctcaagttcatatggacatacactagccagttgcaaagcacaatctagttcttcaaaaaccgatgttataaacattttcagattaaggtgtcgctaaatgctgactttatagtactttggacatctacatataaatgcctttctgatggaaccttgcaaacttttctctgagtatgtgatcaccacctctaggactgattactcttcacctcctcaaggaaagcagaagttcaggtgcaattcaaggatgttcctgatgacattttagaagtatgttcatagaagttactcatagtgtagtatactcttagcatagatttacttgtatagtaatgatagtgcctttacataaccactaaccagacacaacaaagcaatatgttctttcataggttagagatcatggggtctgaaactatcaaaggattagctaaaggttcaatgactacagaatggggtagggcagatccatgcattgatactggaaaaccagtatagtggtccctttttagattgaatgaaatgcagttgtgcagagcatgtgcattgctgcaactatttttatactgcttttttactgatattgctatggagatcaacaattttgtttttattttgcagtgatatgggctgtcatattgatagctttattgttgtggtcacatacacatttaattgaaaatgggcttgtcacaggtagaactactgatgttcttgctgttgccaacacagtggcagaattgcttcagaatcattgttgactccccctaagcatatatatttgaaagatgttagaagtggtgacctaactaagtatttcctttctcattttttggcgtctaattatgtgttcatttcattactgaagcaattcaaaatatggatgttacttaatcaattcagaaagttgctgatgcttatgattgcaaagttctggaaacacttgcaagcattatgtttctgctggaatttgctctaggtattttcctgcacaagttctatggttttgttcttagctaacactacaagtgtggatgaatctgggaagcagcatttccttgatgcatcagttgcttacaagcgtgtagtcctgaacgacatcgaataccttgctaggtttgggtactccaaggagcaggtgtatctcttactatcatgttgtccctgtgaggcaggatctctggaatagtagactctccttatgcagtgtcaactcttgacatccctacaacaatatttgatcaggatgatatggagcaatggtggcagcactagttgaagatgatcagcttgtgaagtcttttacacaagttgttttccacgttttgtcgagctcaagtaaattccttcacaatgttggccttcagtatgtctccaagacaagcttagtttcatcaaaagtgcaagaactctaatctcaactagagactaagacaagaaaaacgatagactttggcgaaaatggaaaccttgaaggcgtcacaagaatttgcagccactgtagctaatcaaccaattgaggtcaaggcgtcacaagaatttgcagccactgtagctaatcaaccaattgaggtcgaagattttaagaagttgctaatagaaaataatactcggtcgaagatttaaagatagactcttaatgtttgatgaaattatatgcacaatttggattgcattcaagtgtacgttgatttttattaattggtgatgaaataaaaatgtcatagtttgtttgacatgtcagctactatattatctgccacttcatctcacttgcgacaaaactaatggtca

SEQ ID NO: 28242 - DNA, 3368 bp, Zea Mays
gggcgctgcgcgctagcagaggcgctgagctgagctctcagccatggaagtggtcgatctctcccccacgtcccgccccctctcaccgctcctctccaccgcacccgcccgccgcctccgcctcctccctccccgctgcgtcgtcggcctgcgcgcctctccccggacccgaggactcggctgcgttggaggtagtctcagcagaaggcattctttttgtaagaacggattcttcgcaacaagcagttcgtcagcctcagtagaacccgctacccaggaattgggaacagcggatgcagtggagtggagtggggatgccatacgtcggcgtttccttgaattttatgcagcccgtggccacaagatccttccgagctcgtcgcttgtgcctggcgacccaactgtgttccttaccatagcgggaatgcttcagttcaagcctatattcctcggcaaggaacctaggcgtgtgccacgcgccactacctctcagaagtgcatacggacaaacgacattgaaaacgtgggtcgcactgctcgacatcagaccttctttgaaatgcttgggaatttcagttttggtgattacttcaagaaggaagcaaccacatgggcatgggagctggcaaccaaggagtatggattgcctgcagaaaggttgtggattagtgtttttgaagatgacaatgaagcattcaacatctggcacaatgaggttggtgtgccaaaggagcggatacagaggatgggtgcagaagataacttttggactagtggcgcaactggaccttgtggaccttgctctgaaatttattatgatttctatcctgagagaggatcatcagatgtgttgtttgcaggatttgggcgatgatagccgattcattgaattctataatcttgtctttatgcaatataacaaaaaagacgatggatctctagaaccgttgaaacaaatgaacattgatacaggaatgggccttgagcgtatggcacgcattcttcaaaaggttccaaacaactatgagacagacttgattttcccaattatagaaaaggcagctagcatggcgatggtgtcctatgcaaaagctgatgatgccacaaagacaaatctcaagataattggagatcacatgagagcagttgtttatctcatatcagatggggtaattccctcaaatatcgggagaggatatgttgttcgaaggctaataagaagagtagttcggatgggtagattgataggaataagaggtgacgggcatggaaactctgaaggtgcatttttaccttcactagctgaggtagtgatcagccttagcactgagatagattcagatgttgaatcacgacggagatcgatccttggagaacttcaaagggaagagatgcgatttgttcagactttggaaagaggagaaaagttattagctgaacttctggatgaagctttattaaatgctggtaataatggaaacaagccttccttatctggaaaaaatgttttccttttgtacgatacatatggtttcccagtagagattacagctgaaatagccagtgaacaaggcgttactgttgatattgagggatttgatattgaaatggaaaaccagaggaaacaatctcaagctgctcataatgtagtcagactttctgtaggaaatgagaccgagatagtaaagaacatcccggatactgaatttttgggatatgattctctctctgcttctgctgtcattaaaggtctcctagttaatggaaacccagttaatgaagtttctcaaggttctgaagtagaaatattattagaccggacaccgttctatgctgaatcgggtggtcaagttggagataatggtttcttatatgtgaatggaggggaagatagaagacaaacaacagttatagaaatcaatgacgtccaaaagtctctgggaaatatatttgtgcacaaaggcatgattaagcaggggtctgtagaggttggcaaggaagtagatgcttctgttgatgcaaaattgaggcagggggctaaggctcatcacactgcaacacatctactacaatctgctcttaaaagcgtagttggttcagaaacttcacaggctggttcccttgtggcgtttgaccatctccgatttgacttcaatttccatcgcccactttctgaagaggaattaacaacaattgaagcacttataaaccaatggattggcaatgcagcacatgttgagacaaaagtcatggctttgcaagatgcaaaaaatgctggtgcgattgcaatgtttggagaaaaatacggtgaacaggtcagagtcgtagaggttcccgggatctcattggaactctgtggtgggactcacgtcagtaatactgctgagattcgtggtttcaagataatttcagaacaaggaatagcttctgggatcagaaggatagaagcagttgcaggtgacgcttttgttgactatgtgtgtgctcgggacaattacatgcggcgcttatgcttatcccttaaggttaaggctgaagatgtgaacagtagagtagaaacaattcttgaagagctaagagcaaccagaaacgtagcatcatctctacgcagcaaaattgcagtgctaaaagcagcttctcttgcaagtagagctacaactgtggagccccagaatgtcaggattgtggtcgagaacatgggtgatgtcgacgcagatgggctgaaaagcgccgcggagtatctcatagataccctcaaagaccctgctgcggtgattttaggatcaagcccaggggatggtaaagtcagcctggttgctgccttcagccctgcaatcgtcgaaatggggctgcaggccgggaagttcgtgagtggcatagccaaactctgcggcggaggcggtggaggcaagcccaatttcgcccaagctggggggcggaagccggagaacttgcccgacgcccttgagaaagcccgagctgaaattgtggcacgggtatcaggttcgagctgattctccgctgcctcacacctgatactggaagtatagggataggattcatatgaaatgtatatgtaattgtcattggcattctaagcgaaaacacttgtatttctccctaccttgccgtgtacgctttctgcagatgacggagcaaattttgtagcttgtaattgtaactagtggccgaacagaacggggaaaagatcaaatcttcacacagcaaaactactgctcatgtttaatctaatcttaaaaacataagaaattatttgtcacatgatcaactaatagtctaatacctagactagaccaaatacatctgatcaagtcagccagccacgtgcgtccaagcaaagattgagc

SEQ ID NO: 28243 - DNA, 443 bp, Zea Mays
attccatccttcctctcgtaacataagcacgacggcattaacccgtgtatataaacctctgcgcgttaatggcggtcctccgtcgacccaacgatctgactgggggcgtgcgtggttaattctatcctgacattgatgagatgcaagcagcaacagcagcctgcaattagtggctgccttgttggttgttgggtgagtgagtgtgtagcagaccgtgccgccggcaacggcgaagcagcgcggggtgggcatcgggggcgggtgttcaatgcgccacagctttccgccctctctgcctgggcagagtattatcgccgcggcaggataggttgccactgtagcaccgtgcgctcgtcgtgattgggggccggccactcaatgcgatgcgagccgagctgacagctgagccttttcacccatgtctctttctgattgcaactccg

SEQ ID NO: 28244 - DNA, 3878 bp, Zea Mays
ctcagctccaacccccagctgtttttaattcgaaaattttcgaaccaagccctcatctctctcgtcttccacctcctgccttccccaccccaccgcacagcgccctgtccggccccagccagagaccagactagacagctccgtttcccctccccgtcctgcatccatctcgaccgcgcaccaaacccgaaaacgcagccacattccctcctgcagccaccccccccccctccgctctcgcgcccctccgctgcgcgtcactccgagcggcggcggcggcggcggcgcccgcccccacagggcagtggcggcggcgaacgagggagggtttgttccccggaagagggagggaggctctggcgggagtgtgttacgggcttacggccgcctcgtgctggtgacaggcgcggcgcgagatccgggctggaagggctggcgggtcccgttggtggcgccgtggcgtcggcgtgatctgagatgagattggacccggctgcgcggtattcgctgcggaggtagacggccatgacgaccaacaccaagcgcgcctacaagctccaggagtttgtggcgcactcgtccaatgttaactgcctcaagattgggaggaagacctcgcgggttcttgtcacaggaggagaggaccataaggtcaatctttgggctattgggaagcccaattcaatactgagcttatcaggtcacacaagtgctgtggagtcggttggttttgattccacggaagtgtttgtggctgcaggagcagccagtggaacaataaagctatgggatttggaggaggcaaagattgtccgcactcttactggacatagatcaaactgcatgtcagttgattttcatccgtttggggaattctttgcctctgggtcactggacactaatctgaagatatgggatataagaaggaagaattgcatccatacatacaaaggtcacacacgaggggtgaacactattagatttacacccgatgggcggtgggttgtgtctggtggcgaagataatatagtaaagctctgggatctgacagctggaaagttattacatgaattcaagtgtcatgagggtcagatccagtgcatagatttccacccccacgagttccttctggcaacaggttcagctgataaaactgtcaaattctgggatttggagacatttgaattgattggatctacaggacctgaggtgtccgatccatgacattcaatcctgatggaagatctttgttatgtgggctgcacgaaagcttaaaggttttctcttgggagccaataagatgccatgatactgtggacgtgggatggtctagacttgccgatttgaatgtccatgagggaaaacttcttggttgttctttcaatcaaagttgtgttggaatatgggttgttgatctgacgcgtcttgagccatatacaatgggtacttcaacaaaagtaaatggtcattctgaattgaagactgtttctagcggcactttgcctttacaaaatgatagtggttcaagggctaacatagggcgatcatcagtcttgcaaaatacagagaacaaccttaaaactacttcaggaagactgtcggcttcacagaactcagattctgcacccaaagaaactaactcggcaccttcaagcgggttgatcccaagcacaccacatagggctggagttggctcccataatagatctgttggaaattcagcttttcaatctggtggtaccaccttgaagagaagttcgttgaggaataacagtgcctctaatgttcacaatttcagtaaagctgatgtagtgcctgtcattgttcccagaactagctcaggaggggagttggctactgattctagaagcgatgctgctgatgtggcacccgttcttccgaaggtaaccagaagggttgaacctgctaccgattctagaaaagaaagtaatgatgtggaacttgttgttcctagagcaagctcaagaatggaaatagccgatttagcacccatttctagttccaagtcaggcagaaggttggagtctgcccctgattcgaaagaagaaagtgctgatacagcacctgttgttgtttccaatcccagggctaatgtaagaatggaaatagtctctgattctgcgcccgctctttcaaagtcaaacagaaagctagattctggcactaactcaaagaaagaaagtgctgatgcagtcattgtacccagaacaaattctagaatggaaatgatttctgattctaggagagaaccctctgctggaagaatatcaccattcagaatccagtcaagatatgctgagccacggaagctagcccatgccagaactgattcaaacaaagttgatagcagaagtaaaattactgaaacagaagacttcaattgccaaatatttcttccccgtagaaacagtgtttttcaaacaataagttctgaagaacctcgtgaagatgtaaagtgtggtccagttgacagggtgggattttcaaattcatcagaaccaaatgcgagtgtccgcaatgagaattatgttcctagaatgcgcaaaccaggagacaactgctatatcgaagtttcaagagcaggaagagcaaggtcaagtgtctctaattgggaagggagggatcagccccctagtcatgaagaaccaacaacaagcagttctacactggctcctaccggccatccatattcatctagaggaagcaatcaagcttctgaagctccaatcatagctagtgatgaagatgttctatctcttatcatggagcgacatgatctatttttaagctcaactaagtctcggctgatgaaattgcagattattcatcaaatgtgggaaagaaatgacatcaggggtgtgctctctgcgatggacaggatgggtgatcatgctgtctgtgctgatatggctagcgttctcatggagaaaagtgaaacaatcacactagatttatgtacctctatcctgcctgtcgtcaccgatcttctggagagcaaaattgacagacacttagtcgtcgcattggaattgttggtgaagcttgtaaggacttttggtccaatgatacattcaacagtatcgtcaggtccttgtgttggtgtagaccttgaggcagagcaaaggagggagcgctgcaacttatgcttcatcgaattggagaaggccaaaaataagcttccatctctaacaagaaaaggggcggttgcaaatgctgcacaagaacttgctcttgtcttccaggaaatcatgagttgactgacgacacactagatatacacaattagatgggacatgcttcggcctctgatggcaacaagattggatatcagctgccatggagggtgctagctattcagtcttagcgacgtcatcaagctccaaggccacagcaccaacaaatgcattttgttgctgctgttcgtgccttttgtacacatgctaacacataatccatgtcatttgtgaagagaagctgccatggacagtgacttcatccacaatattatgtggatggcggcagctggagatgttaggccccgatcgaatggtgatcagcagatgagacttgcttgggcttttctggcactcgtagttctttgctgtctgtaacatctttctcatgtaccgttatcatgtgcatgtgcaacagtcaagtggttgcatttggtagtttatggttgtgctgtgtgttggtcgatttagtggtcgttgatgagtgaagcgagccatgtacatcatttttttttaagatttgatatcttctttttccttgatgactcctctcgttatacttgagtgaaaatgatatcttgtgtacttgccttgacagcttttcggaaattcccttttgtctgg

SEQ ID NO: 28245 - DNA, 2694 bp, Zea Mays
tttattataatacgactagtgaagtatatttatgttacacgagtggtcattatctatgtgtattgattttgatcaccggctattcatattcatatattggagaatgttcgaatccatatgtgtattcactacaaaatatgaatattgatgtgaaatagactatctaatttgtattcgatcagttcattttcactggaaaggcagaaagcagagaaattccatacgttcgtactcgttggctagcatattatcctctaccacttgaaaacaacaattcgccaaaaaaaaaaacattcatagcacggcccatttttgcaaaaatggtggttgggccttatcagcatcacagctcagcccagtccagcgacagtgatgttagtttgtgttggcctcctgctgctcctcctcctgctgctccacggcgtcggcgtcggtggcgccgttccggcgagccctccgaatcctactcatcctagctagcgctgcctgccctgcttcactccctcccaccctcactggcgcctcaccatgatccatgtcgactttccctcctccaccccccagcgccgctaggagccccgtcgccagggtgcgcctcgaccacctggtcccgttcgacggcgccttcaccccggcctacgcgcgcgcagtcgaagccgtcgctgcttccctcacgcgccacggcgccgccgccgtcgacctccctgcagcggacgccgctgtcgtccggtgcgccctcgagtccgcgcgcgccttcttctgcgaccgctccggcctctacgtctaccgcgccgggagggctctggatgatggagagttgtcacctgcttgcatgtctgatgctttcagatgtttgggtaagacagcccgtgctgctctctgtgcaatagcacggaaccttcgcttacgttcagatgctttcagccatttgcttgatgacaacccattgcctcttgatgaggtttcagcttcagaattgatggtgtcattttctcatgggcacccccaaagcagccaggcacctatggtgggcctcaggccatcaatggctgaagttgatagaggttttgttacactggttgcttctgaccatccaggaattgaggtttgcaacccaaatggtcattggtacccagcggatgtgggctcaagccctgatgtcctgttgcttttgactggaagagccttgagtcatgttactgctggcctacgtctaaattctcagtacaggatcattaataatgaaaacagggcatcactcatgtttaggctcatgcctcgtgccaatgcaatattggactgctctccaatttcagctgctgggcattgcacaccacagatccaccggcccatatctgcaagtcagtttatggatgatttgcgtgctgaagagaatgtttaccatcacttagaagcaccgcctgaatcacagggaaactttgttaatgaaccatcgctcagaagtgtactgtcagaccctttgtctggggcttttcttgaagatgctatggttctcccatgtgggcactcgtttggtggcctcatgctgaagaaagttcttgaattggtatattcagagactttgtattcagtttttttaacatttctcaaaaaaattggtttgtttgtaaatcagtgacatcaagaataaagctatatgctttactttagatactatattgttcttttagatatgatcaatatcctgaatctttgatttatctggttatggttgtgtatagcccagtccgctgtttctgcaacttagttgttagtaggtcaatcccttatatgcaaaatttctctgttctggaaccagaatacagtacaactctgagaaagtaattaccgatcagaagccacatgtcataagaaactgataatgatttagtaatccacaaagtatttttgttaggacctaacatgcaacggagacagcataccattttttttttaaaaaaatcttctcaggcaaggtgcagcatttgcaacggagatgttgatgaggcctccttatttcctaacctcgctctaagagcggtagctaccgtggtgaagatggaagacgataggaggctctttcacaatgcggcccttcgaaagcgcaggaaagaagtgactgagcatatggatgcccaaaggcgaaatggaagtagcaaggacagtattgagctggggctagaagctgaaagccctagagcgttcaagggggtgcagtacccgtttgtggtgggtgagagagtcctgatcatgggaaacaaaaggacgcctgataaattcgttgggaaggaggcagtggtgacatcacagtgcctgaatggctggtaccttgtgaaggcagttgatagcggagaaagcatacggctgcagtacaggtcgctgaggaaagcaggggagctacaagtgcaagcactcctgcagagtagacgatgattttttgcactagtgttgcttgtctcgtgttttgtttctgtcctatgcgatgaaaaggaaaaggaaaggatgcagcgtccttttgtacaaatttccattcagttttgccagccaagtcacgtagctgtaaaatgacagatgttgtgtggtgttctgtggcctttgtgcttgtgcactaagtcttgttaattgtcatacatgctcccttcgtaaaaaaaaaggagtcttaagtacaagattttttttctaaatattttgatt

SEQ ID NO: 28246 - DNA, 1922 bp, Zea Mays
ctcttacgtgctcttcgctccttccccacggttacgctgggcttctataacacgcgatcccgcttccactcggcgaccaccgggcaccgccgccggtacaccgcgcatcgaatcgccaccagtgccgattctgctgacccctcgccatcgccggcgggcgaatcgacaccatggccgccgcacgccggggccgcgccgacggtgccaacggcgtcgtccgtccccgcccccgcgaccgtgtcgtcggcgtcagcggaagcatggcggggcgcgtggccgtcctcgccttctgtgtcgccgggatctggtccgcctacatctaccagggcgtcctccaggagactctatccacgaagcggttcgggccggaggcgcggcggttcgagcaccttgcgttcctcaacttcgcgcagaatgtcgtatgcttcgtctggtccttcctaatgactaagttgtggtcgggcgggagcgggagcagctccgacggccgtgcgccgctatcgaagtactggggcgtcagcgtaaccaataccatcgggccgaccatggggatcgaggcgctcaagtacattaactatccggctcagggagctctttggaagtgcttcctcaagtgaacatttaggaagaacattgcattgattggattgtatgtgatatggcgactggcgatcgtgtgcggtatcgaccatcggcaatccatctctagctatcttattgcagagagcattgatccaagcatcgttcttgctcaacggatttgtttttttctcttgacaagctcgaagatatgtggcgcgaggtttctttacgcaatcccgactaatttctgttggtgtgaacaggtgttggcaaaatcttctaagatgatcccttaatgctgatgggaacccttctctatagtgtgaagtacacacttccagagtatttttgtacctttcttgttgctggcggtgtgtcctcctttgcgttgttgaagacaagctccaagacagttaagaagcttgtcaaccctaatgcacctcttggctatacattgtgcttcctcaacttagcttttgatgggtatactaactcgacccaagatataataaagtcaaggtacccaaacacgaatccatgggatataatgcttggcatgaacctctgggggaccatatataatgctgtagttatgtttgttgcgccattactattcagtaactggccatatgcagatggtttcgaggcattgagattttgccaggagaacccagaggtggcctgggacatttttctgttctgcctatgtggcgccgtgcgtcagaattatatcttcttaaccatcagcaggttcggcgctcttactaacacaacgatcactaccacccgtaaattcatgagcatcgtggtttcatctgtcatcagtggcaatccattatcttcaaagcaacggggtagtgttacgatggtcttcttaggcctctctgtccaaatatatctcaaatggaagagagagaagggcagacaccccagtgagtaagctcgattgttgactcttgtacctgttccgatttgtaacttcaattggacagatctgttgtgaggttgaccaggataatgttaatgtagtctgctgaaattatgagctatgcctagagcgatacgtaatgtgaggctgtgagagccttattcatgtagatatgtaaattggtctaggaatgtttatagtaaggatttaggttatgttcccaatcgtaatgaatatttgttgtcaggagatgttatgagagccttattcatgtagatatgcgaatacaatgggtgctcaatgctccattacgaaatgtaaatgacagactgatactggtaaattccatattttcgttgcacgtccattttctttggcaatttaggttaataatgtttgttcacaataaata

SEQ ID NO: 28247 - DNA, 857 bp, Zea Mays
ggggacactatgggttcacggtggtgctgaagtgagttgaggtgggctagcgaggatcctaagaaggcacgtaaaacattcaccgaaatgttagataacattaaagacatagattttttgtggaacccatacaccagaacatgtattgaaacagttgcaccacatggtctctcattgttgtgctcttgtgacaaggaatattggaaaaccaaggatggcctcatcttcaacaacactgtccagaagcacccggtagagcgggtgatgcgacattttagtttataccaagagcagttgttggttgcagtagaggatcagcaagaaggttgatattatcacatgggcccaggagaaaacggcagcagactacaaccaggagactgtaacagatgaggccatgatattgttagatatcaatgtgaagtgcaaagaattcctggattattataatgaacttcagccaacgaccttggatgcataggatgaactaacagaggacaaaactcacacaaccatggatacagacgtcaatccaaattctgcttcagtttgtaacggctcttaaaattctacttccttttgtgaaggtggcagtcgtgaaggtggccatgaacaaaaaaatccaaacacttttgtgagagaaagcaggtcaaaaaggcgggctctgtataaagcttgcatagatttggcttgtacaaaaagtgaaaatgatacatacaaaaaaaatcataggaaacagggctgctttggcagaattatcaagcaaatatctgcgtcacctaatgcctgtgtaagcattttgtttctcaaatgttaaatcactctcaaagattttctttgctgataaaatattccta

SEQ ID NO: 28248 - DNA, 2306 bp, Zea Mays
ccgtatataaccgccgcctcgccagcgtcacctcgaatccaaacctgcctccgccgcctcgccagcgtcacctcgaatccaaacctgcctccgccgcctcgcgcggtgtcttcgccattcctgacaaggaagatcgtgaagaagcgcgtcaaacagttcagcatcgacgtgctgcagtggacggcaagcggatatccgtcacatcggttctgatgtacgcgatgcgcgctctacacaagatcagaaggtcaaaggtactctgaccatcctctcagtttgtagtctcgaatcctgctcagagcttagctgcactccgttcaaccctaatccctcccaacctaggccttgtttgaatgcaatctacttgtttgagtggattaggttggattttagttagggtggaaattaaactaaattccaccccatccaaaagagggctcatgtggatagctcagccaaacaacccgccctcgaagggttcactgtcttgtattggacaggttacaatctgtacactgacatagtcctggttttcatatcttagttctgaaatgaaacccgtggccttagttgcaaacggtatcaatgtgaatcttgctttctattgccatgtgtcgcttgagtaactttattgtgcctttaaccttgttgagtaattccttatgttgtgaaatctgaaatgtgaagacggtgtttcttaaactggtggtcactgtttgacagcaatgctctcctcctggttggtcaatcctgttttattgctgttactttttctgtttgagtagagacaataattctgaactatgttcccatgtggcaataaaagtaaaatgaagagaaagacaaaataatgtgcagttaaattttctcacggcacctagtgctttcatgagccttgatggagaagagttacgaatttttagttgtatttattcagttgtttttttctttttatatattgttgttctgaaagaaaggatatgatggctttgtaaaaggtctgagttagaaaatatgtttcttaagcaaacatgggtataaaggaagacggccctagccctttcttaagtatagcattgtggctctagcaacctcttctacagtaattgcttcatggcatcatgaagtgggttggattaaaaggcgtgggcttcattcggagcatgaatgtttgcctagacttctcccaacattcttaacccaatgttttcttaagaaaaccattttctgcatgatctcatcattattgctgatcctttcatgaaacaacttatttcactctcaaagcaactttgtcgaggtgttgtttttagtgcaactttgctgcagtagattccgctttttactctcgatgaaaggtttcctatatggctgatcgaattttgcttatccttgctgatcaatactactgcagtagattcctcttattgtttccattaaaatttcacccattaactttaccttttagcttttaatggtaatatatttgttggcattctcttgtgtccaaagagattcttcctcagtgccttcatcctgtgcagtacactatttttcaaatgtttacagtagaatgtatggctgcatgtagtgatagcttagttttgcatggtgttgaatcttttgtgatcatgcacgcatagaccaaaatatttgacttcaaagcttggaccaagctaatatgacctgtaaaaaagaaaggagggatgagtacagagtattatgtgatgaaattgtgcaaggacatagcggagcgtgctccaaagcttgacattgtggtcacaaacaagcttgctaggcttcacggcgacgactaatgtgcaatcaggccctatgtgcaagcgtgcaagtgagcattctggtcctttagatcatgaatcatgatctaactagccaagaagattagatgactatatgatgtagtaaagattgcaagtttggttaatttgtctgtaggaaactgccctgattgaagatttccttttcccccctatgatattttgttgtatggattgcaatgagctcagcatagagcagctacaattccgaatgatgctctgcgacgttagcttaggtaccgcagggagcagggtgcaatatcatagggatatagactttgccagcaatcagttttgccaaatggcgcagcaaagtccacaacttaagaccaaaagtccacaacctatagacacaggcaggaacattttaacattctagggatatagacttcgtatagtcaattatgaaggtgaggacctctataacaacctaccatatctactatccatgagcataaaatctctact

SEQ ID NO: 28249 - DNA, 609 bp, Zea Mays
agagaataaggttgcagccgactccatgggatcgccggatgtggacgaacgaacgtcatatcacatggacgcccatttcttgccactacttgctcggttgttcttttatctcggaacgcggtaggggttgcggattgggagcaaaggaggagagggagtactgggccgccgccggctgcgaacgcggaggaggcagcttccaccaatcagtgcaccctcatcctcaaaggctgatgctgacacggtggatccggcgtggctatcgatcaggtgagaagcttaccatcgatcaagaattcgagcagtatttttcgaacctgatgctgtaggatcgaatggatagttttgtgaccaaaaaaatggcgctagctgggacctccaaacatggtttgcttgctgagcgaggtgccgaaccgtggctattagtattattggagccatcggtttatatgtacaccgaatcctatcactgaatgtatgtatctgtggtatgtgtatctttttcagcttgaccatcagatgttagcatcatggtgtatggtaatgtgtgcagataagaacatgtctaagcaatatagtaaatagtgtattccttgtcaaaaaaaaaaa

SEQ ID NO: 28250 - DNA, 1145 bp, Zea Mays
ggctactttttggttcgatgttagttgtttgattttatcgtcgatttatgttgcacgtcttcgagtctgtaaatctagccccaacatggtaacccaggcggatcatgttccaagacagccttttgataccgccgactatttgaactgttctaataacattgtccgtatcagctcaaagatttttctatgtgttggtagctccattgaagttatccataaacaaatgtgtactccctccggtcaagatatggtcattactgtcgtgttcattcattattttgggttacaatgtttttctaacgaatttgatactaaataaatatttcctctatttcaaaatatcttcaattgttgattctttttatttttctaggtacacagtttacaagattacattttcattacaagatgcttgattgcaaccaatattttcatttctttggtgcttgtgtagaagtatcgccttgcaaagtatgtaccagactctcatgctgaaggtttcaaggacggcaagaaagttcaaggattatgtaccaggattgcaaatcaatgaggcactaaagatgcaaatggaagttcagaagcggctacacgagcaactggaggtatttgaaagtatttgagataaataatgatgctaaaatgaaaaggacaatgcgacgtcccctgccatctggtcgtgttagttctacacatgctgccatgtgggctaccttgtgggtgatcggccaagaccaccaactgaagaaatttttgattgactgtggatcctttctgtccatgggagctgctgcaattttctcaccttgtcttacatagtgccggtcctgtatgaggtcaccctcagatgaacttcagtgattgctcccaggcgcggcatgcatgctttgctttattcacaggatctttgcatcatacaattccatgtggggatttcagctctctttaatttcttagggagttttttttgtagactattgattaagagaaaaccaatgatcaggtctccataacctaacatgattatgcgttgggagagcccatcatttatcatgattcaagtgctgaccggcacttgagacattgttaataagctggtgattgttagcaccttcataattcgcatgcacttattagcggtcaaa

SEQ ID NO: 28251 - DNA, 3938 bp, Zea Mays
cccccttccacgagacaaaatccagaaccaggccggcggcccactcccaccgccgcgcctacgccttcccccgccccccgcgcggaggagggtgccgccggcgatggagacgacggccgcgggcgcgccaagagcgcagacgctgcgggacctcgcggaggagggcaagaagcggggcgtcctgctcctcgtcttcgccttcgggctggccttcctcatgtcccttacgagctcgtcagtttggtttaatctgccatttgccatagctctgattgttttgttccgctacatatcgcttgattatggccttcgtagaaagagcgtaactagaacagatcatgccagtcattcactcgtcaaaacaaaaggtactgaggtaaagaaagtcattcatcagactgaaacggatggaaaaatagattggaggagcaaggttaactcgcctccagttgaagcagcattcgaacagttcacaaggcaccttatctcagaatgggtaacagatctgtggtactcgcgcgtaacacctgacaaggaaggtccagaggaactcatcgatgtagtcaatactgtccttggggagatttcagttcgggcaagaaatgttaaccttatcaatctgctgatcagggatttggtcgatcttatatgcaataatttggaactttatcatttctgtcaagccaagattggaagagagaagtttgtgggccttccttcagagcgtcgtgatgctgaactgaaaatgatccttttagctgaaaacaagttgcatcctgctttattttcagctggcgctgaatacaaggtattgaaaagtcttgctgacgggttgatctcaatcacagtgaagcctcaggatctacaatgtactttcttccggtgtacagcgcgggaacttctcgcttgtgcagttttgagacctgttgtgaacttagcaaatccaaggtttataaatgaaagaatcgaatcctttgctctttcgcatgccaataagttggagaaaggaactgcagaatccttggatgttgtcacaactgttaagcacagggaaccacatatgccctctgttgatgaattttcggcactaatagaccactcaagttcaggtgttgagctcgttcaatttcgtcagggtcaatcgaaaactgcatcagatatacaacctggaaaaagtacaaatccatatagtctaaaattagaatcctctcatgcacctttagtcagtagttcacacccactggagtcaacaagtttagcttcgtcttcccacgttacttctgataatgggttttcgttgcataccaaaagcagcaacagagcaactgcaaatggtcatggtagagagtgtgcacagcccttgggtatcagttctgagcgtgcacatcaagctttagcacttgagcaccttgagaatatgtggacaaagggaaagaactacaaaccagaaaatgtagaacatgtcgcaaaagtgtctgttggatctgcttctctgggctcgacttcagttcagcaatcagttccttgcagcacttcagtttgttacaatcaaagtaattctgaaagaccaacagcgtcatctcagtcaaaggaccagcatttggtaagacactcaactacacctacatatgtaacatatccaaatggcaccccgaaaagcctatctgcagaaatggcagaacatgccggtccagaagactttgcagtagagagtgagagttcatatgccactgaggacgatgaattcaacaatgtgactggacttgattctcctgttaccagagtttgggaaagcaaaagtaaaggaaatgctaccttatcacatatacatcacccactcgaatctcctggtttccatagagcaaagaagaacagaagtcatgtgggaaaactgaagatgtcaagaacttcttcaggaagaaaaaggtcaaggtcaaatgctcagaagcctcctatctggcaagaagtggagagatcctctttctctgttggtgatagtatggacatactaaatacatctgcaaatgatctaaagacgcatgagctagacgaggatcctgaggtggaaagtatggctaggatgtttagtagttcaaatacttcatctttattgttgccatcaagtgactctgcatattcttcaaattattgtggtgccaatgtgctacaagactcttatttgaagttaagatgcgaggtggtaggagctagcattgtcaaaagcgggtctggcatgttttgctgtgtattctatttccgtgaccgacgccaatggtaatagttggtccattaagaggaggtttcgtcattttgaagacctgcatcggcgtctaaaagagtatgctcagtacaatcttcatttacctccaaaacatttcctctcatcaggtttagaggtttctgttgttcgagagagatgcaagctgctcgacatatatctgaagaaccttctgcaaattcctattgtttcaagctgcatagaagtctgggattttctgagtgtggattcacagacatatattttcacggacactctctcagtcatccaaacattgtcagtcagtttagatgaaagatcaaatgggaaaaatataaaagcattgaactcttctggagctttgaatggaaattctatctctggaggtcaatctttgcatggacatatagacgacaccgtacataaggattcagacatcgcttgtgatggtttgagatttaggaaagggaatgtgaacaagaacttgggaaacggtgttagccacacaacagatagtgttagcaacacaactgccaatcattatcaggacaattctggaagtgatccagagcagaatgatcattccttttcaatagattcattaaatcctaagaagttgcgttcaactgaaaccaatgacacatctcaaattccagagtctggaggattttcagtatctcctaatgattggatggccccgaatcttagtgttcccttgtttcatcttgttgatgtggtctttcagctccaagatggaggctggataagattctctggcctgatggaattttcatgacaaaacatccaaagagaaattcgcctccacctcctcctggtgctcagagcaatggcatgggaaactatctaagcgatgaacaacggatagaagctgctcatcgtgcaaattttgtccgtgaactgataatagataaagccccatctccactagtgagtcttgttggtcgaaaggattatgaaagatgtgctcatgatatctatttctttcttcagtccccggtttgtttgaagcagctagcgttcgaactccttgagctgcttgttctttcttcatttccggagttggatggcactgtgaggaagtggcacgaagataaagagcaattctgcgcccagtaatgtttatcaaacgtttgaatttgtcacgggcggtgtttgtttccaacacatatcgtctttccagagtggtgtggcctgtgaattctgcgaaaataaggtggtggcttcagaggagtgcccgtggatatctcagtttgaagtgggtggtggctttgtgcagtgtgaatatggttagatagtgcgaggatatggtccctttttccaccgggccatggcagaacggtttttgtgcccgatagagttcatttttccccctccagatttggtatacgtaatgctgctgcctgaaaggaaagagatggtggcgcattttttttgcacccgttttggtggtacactggtacccgtcttgtgtaaatctgcatagagataaatgaagtttcgaggtggtcaatgaatgataatagctctctggcatcgtgatgattcgttgtggctccgccttgctgtacgtttttttggtgctgcccctgcgaatcatctcggcactattttgtgatgataaaaaaaaagtaatatgcgctggagattcgtttattcaaat

SEQ ID NO: 28252 - DNA, 5386 bp, Zea Mays
cgtaggtatcgtgtcggtgtgcagtgtgttgtcatctccatctccagctccagcgccgccttgctctgtgtgcttccgcccgctctgtgttgctattgctaaactagtgtgttctgtcgctatgggctccctggccaccgcggacgggccgttgccgccgctcaagtaccctcaggctcgccgggacgaagacatcgtcgacgactaccacggcgtcctcgtgccggacccttacagatggtggattcgaaggaggtgaaggagttcgtggacgcgcaggcggccgtgaccagcgccgtgctgtccagctgcgaccaccgcgggcgcctgcgcgggcagctcaccgcgctcttcgaccacccgcgcttccgcgcgcccttcaagcgccggggcagctacttctacttccacaacccgggcctccgcccgcacagcgcgctctacgtgcagcacgggctgggcggcgagcccgacgtgctgctggaccccagcacgttcagcgaggacggcacggtgtcgctcggcgtggtcggcgtgagcgacgacggcgagcacctggcctacggcaccagcggcagcggcagcgactgggtcaccatcagggtcatgcgcgtgcgcgacaaggagcacctgcccgatacgctgtcctgggtgaaattctcgcgcatcgcgtggactcgtgacggccaagggttcttctactcgcgttttccggctccaagggatgcgctggattctgggatgaagactggcgtcaatctcaaccacgaagtctactatcatttccttggaacagagcagtcacaggacgtgttgtgctggagagaccctgatcatcccaagtacatatacatccctcaagtcacagaagacggcaagtacgtgatcctttcggtctcagaaacgtcagagccggtgaacaagctgtactactgcgacctgtcggctctcgctcacgggctgggcggcgtgaagagcgcccatggcaacggcatgctccccttcgtcaagctcgtggacaggttcgaggcctactacgggctcatcgctaacgacggcacccagttcacgttcctcacgaacaaagacgctccaaggtacaagctggcgagggtggacgtcgacgacgacgagcccgggtcgccgtggtggaccgacgtggttcccgaggacgaggacgggaaggcggtcctggagtcggcgtgcgccgtccacggccacaagctgctggtgagctacctgtcggatgtcaggtgcgtcctgcagatgaggagcctggtcactggggagctgcttcacgacatacccgtcgacatcggcactgtcagcgggatctccggcagacgatgcgacgccgaggtgttcgtcgagttcgcgagcttccttacccccgggatcatctacaggtgcgatgtcggctctgcggtcccggagatggacgtgtacagagagatctcggttccaggattcgatcgaaacgagtttgaagcgaagcaggtgttttatccgagtaaggatgggaccaagatcccaatgttcatcgtatccaagaaggagatcagcctggacggatcgcacccggcactactgttcggctacggcggcttcggcgtgagcgtgacgccgcagttcagcgtcgcccgcgtggtcctgatgaggaacctggggttcgtggcgtgcgtcgccaacctcaggggcggcggggagtacggcgagggctggcacagggccgggtcgctcgccaacaagcagaactgcttcgacgacttcgtcgccgccggcgagttcctcgtgtccgctggctacaccagcccggcgaggctgtgcgtcgagggcggcagcaacgggggcctcctggtagctgcctgcgtgaaccagcgccctgatctgtttggctgtgccctggcccatgtcggagtgatggacatgctacggttccacaagttcaccataggtcgtgcatggacatgcgacttcgggtgttcggagaacgaggaagagttccagtggcttatcaagtactcccccctgcacaacgtgcggcggccgtgggagaacaaacgggcggccgcagctgccaacggcgacgcaagctgccggggcttaggcggccagtaccctgcaaccatgctgctgacggcggaccacgacgaccgcgtggtgccgtcgcacacgctcaaattcctcgcgacgatgcagcacgtcctgcgccccggcgcggatggcagcccgcagacgaaccccgtcgtcgcccggatcgagcgcaagagcggccactgctgcggccgctccacgcagaagatcatcgacgaggctgcggatcggtacgcattcgccgcgaagatgatgggagtctcttggatggactgactgagtaacccaccaaatgagtactgcgcatttggctcaggctgttagaccaacgccagcagcgacccgcaaacggctccggctgcccaatctccggaaaaaaatttgttgcagcccggctgcaaaccaggttgtttgcagcccctcacaaaaaggaagataggtcccacccgcaggtaaataatacaactaaaacgttatctggtggacctgcaggtggggcctatccacctttttgtgaggggctgcaaacagcctggtttgcagccgggctgcaacaaatttttttcccaatctccgcgctcgcgtcaactgtagacgtctccagcagctcccgcatcgcgcccccatcctccgcgccccctctcgccaacgcccattccggcgcgcgctgctcgcgccccgcatctcgcactcgccaaccgagacgcgccgcgtgtccgccgcgcggggcccacagacgacgctccacaggcgagatgcgccgtcgctgcccggatgcgtgccgctgctggagatggtggccgcgcatctgtgggccccgtcctccacaacgcgcagaaagggggtcgggagcggggacgttgctggagatggtcttaggttacaatgtatcggtgctgtattgtaagcggccaggctggcaacttggcgtgacacatgtttggttctgcttctggtttggaaaattagaagctgaactaaaagggcttcttttctgcgactactttaaaaaaaacagcttttctttagtgtaaatttgagaccttgttattgatacttacgaagtttgttatattaatgcacagtaaattgaaactagattagaatttaaataattaagtgttataataaacgagatatttttaataaaatattattacaaatataattaaaaattgatttatttgtaaaaatatcagaaacacaaattgattcatctattttctagagtctagtacataaacaaaacttttttttaaagtgttgatcttttatctctactactctatatgtccttattgtaggcgtgcacacccgtgttctgcctctcgacgcctgtctgcccgcgccccccgcttgtgatgcccatctcgtctccccgctgtggcagccgccttcgcgtccgccgcgagatccctccgcgcacgggcgcgtcccccacaaaccgcgctccgtgaaatccgcactcccctcgccgcctccccagcccgcagcctctcctcaacctccctccccaaggagctggcggcggcgcgactgcgtcgggagaggacgcagaggacgccgcgcgggggctgcggcaggagctcgactccgagcaggcctccccggagatggcagccagatccggctattgagccccctaaccgagcggatccaagttgctctacacagcaagtctatgaggaaggagcaaaagaagttgctctttcagttgtcagcggaattaatttaactcaagcatacttgcctatggcaaacaagcagtggacttacacaatgatcgaaatgacagagtatactgttcgtgctatcggtttggaaagaacatgtggaaagctaatctcggatcttgcttccttcaggtacagacaacccttgtttttataggagttgtcagagaattgttttcgtgattaaacatgtgtgtttgtttagtggctggtattgttatcatatacccttgtttttagttctatacatattccttaagcatgagcaaattgggggcatttttagtgaagcaattactggtatgtacatgcaattactggtatgtacatggttaatcaaataatttgcatcatggatgttgttttagtgattaatcactcagaaccgatttcctgatgaactggatacactgtttagtgccagctattatttaagcacaagaagtagtcatatacccttgtttttatgtctgtacataccacctggaaatttacacatggggccattttttagtgaagcaattactaaacctgtatagttctggtggctgctataatttttcctgattaatcagagaattgttttagtgattaaccatgtgtgtttagtggctggtattgttgtcatataccttgtttttaggtctgtacatactacctgagcatgaccacatcagccttatgtttgaacaatttcacacatttacatttgtgaatgtgttgaccgtaagcatcatctttatttaaatcagaaacttggttttacaatgatgtctcattgaagttcttgcttttccttgtttgcaaatctgaaatacccttgtatgttctggcggaaagaagacccaaaggaccttgaacagcaaaatctaaggtttcaacattgcagacacacaagagtccagcatgcgccaacgctcctgcagttgatgcttcttccagtagtttgtgacagattgctcaaagaaaagcaagacagctcgccaatcctagaagtggaaaaaaacaacatagaataattagccagctacagggagtaaaccattaagagaagaaacatcgtaatgccatgtttccaaatgggcacaaagaaacttcaagcacctctagacggaagctgtctgcactgaagatcaggacacgaatatcgcgagctttatcaaggctcgccttgtgcggaaggtgtatttctgtgagatctccaagatgaagcattagggggtcaatcgccccagattttacatgtagctaacttagtagggcacccataatccataatttattctctgtagttgtagcagcgacctagaggtgttattctgtagcacattgtgtaacatgtaggagagagataaacacatatccccattctttctactgaaacaccagaaatagttgctcttgctccataattcattaatgtgaacttctgaagccatgccaaggtcttatattgatcctctgttgtcatattgataaaaatagggtatgtaaaaccttttctcataacagtttaacacatattttatatataagttatcgtaatattacatgtttcc

SEQ ID NO: 28253 - DNA, 2047 bp, Zea Mays
cgcctcgcttcctagtttcttcgcggccacaaccacaattattcgccgggccgggatccgcccaccgagccaccggagcaccagccaccagtgcaccaccatcgcagggagttagggacacacaccggctgccgcggcccgccatgtctcactgctgcccctgcgcgagtgcctcctcctccaccgcgcccttcttcctcccttctatccccgactcctcttcctgcaggagcggcagcggtggcgccttcagcgctgctgttggtcggagcaagctgcggtgcggcggcgggccgaggcgcgggcaagcgacagtcgcggcaggcagcaaggacggcgggagcggcggcacggctggaggggagaagggagaagacgacgccccggcgttcaatccgttcgggttcgtgacggacaacccctccagccgcagcgccatccagctgcccgcggttcccgccgaggacggcaatgtcggccagatgctctacaggatcgaagacaagggcagggaatacggctcgtatgtcagagcaggagagtttcgatggttcgtcagggaaacagggtcacctgatgcacgacgtgggactattgtgttccttcacggagctcctactcagtcatttagttaccgggtggttatggctcagatggcagatgctggctaccactgctttgcacctgactggatcggatttgggttcagtgaaatgccacaacctggatatggattcgactttaaagaggacgaatttcacaaggcatttgatgatcttcttggtactctaaatatcaccgagcccttcttcttagttgtccagggctttcttgttggttcttatgggctgacgtgggcactcaataactcaagcaaagtccttaaattagcaatccttaacagtcctcttacagtttcttctccagtccctggattgtttcagcagctaaagtcagttatttcttcttatcttagctccttacacttaatacacattaatttgctagtacaccagatctggtcttggacaaacttatagggcccataaaatgggctctcctcacccacccaacctctactagaacatgaaaaattccacttacagtattttctaaaagaagcggcaaaagctttgcccctctgacacagattgcatgtgcagcaggacaatcaaccctaccctatatgagtatatgactacacgctaacaatgcttcatttccaatgcagatggccactctttggtgaatttacttgtcaaaatgctgttttggctgagcgtttcattgaagcaggtagcgcatatatgctgaaattggaaaaggctgatgtatacaggttaccgtatctatccagtggcgctcctggattcgctttgcttgaagctgccaggaagatcaatttccaagatgtactaagtagaatttccgccggattttcgtccaacggttgggaaaaaccaatactgcttgcatggggaatatctgacaagtacttaccgctctcgatagctgaggaattcaagcaagctaatcctggcgttgtaaaactagaggcgatagaaggagctggtcacatgccgcaagaggactggccggagaaggttgtgaaggcgctgacatccttcctgtaaacatgtgcaaagatcattatgtcatccgcacgggaactttcaaacatgcatgatgactgtcgtggcttcattacgtcctcctgtctaatttaattatgccttggattgcttagatttgtgactgtacaggtcaagatgtatattagcaaacgctttgcatttgtaaattgcgacgtggacgatatcagcgacgtgttagctcacgtcagagatggataacatgttgtattttcggattcagaattatggatatggagcacgaccaggacgaaggctgagccagacgaaggtcgggggcagccgaagctgtacgcagggaagcttcggcgcgatggcacaagggggaaccgaccttaagatgaaaagacttcggggtcctcaatagatttccataaaccgttaacaaatgtaat

SEQ ID NO: 28254 - DNA, 1192 bp, Zea Mays
gtttgcccctgcacaccgctgcgctactgggaggagcacaagtgtatcgctgtggctgcggcgcccggcagtccgccacaagcacacgcgcacacaggggccaagcgcctacacctacagaggagagacaaggtctgccgtccgcgcgtgcgcggaagaggggacggaggaagaaggctgccagcaatcagagatggaggtggggttcttgggtctgggcatcatgggcaaggcaatggcgaccaacctcctccgccacggcttccgcgtcaccgtctggaacaggaccctcgccaagtgccaagagctcgccgcgctcggcgccaccgtcggggagacgcctgcctccgtcgtctccaagtgcagatacaccatcgccatgctctccgaccccagcgccgccctatcagtcgtcttcgacaaggatggcgtgctcgagcagatcggtagcgggaagggctatgtggacatgtccactgttgacgctgcaacttcgaccaagattagcgaggcagttaaacaaaaagggggagctttccttgaagctccagtttcagggagcaagaagccagctgaagatggccaattggtcattcttgctgcaggggacaagtcattctttctgggagagattggaaatggggcaaagatgaagcttgtggtcaacatggtcatgggaagtatgatgaattctttgtccgagggactctgtttggccgacaaaagtgggctgagcccccaaacacttcttgatgtactggaccttggtgccatcgcaaacccaatgttcaagctgaaggggcctacaatgctgcaaggcagctacagccctgcgtttcccctgaagcatcagcagaaggacatgaggttagcgcttgctctgggagatgagaacgccgtcgccatgcccgtctcagcagctgccaatgaggcgttcaagaaggcgaggagcctggggctgggagaccaggatttttcggcggtctatgaggttgtgaagggcgcgggtggttctggatctggccagccgtgatagaaggaccatttgtgactgtgttagcccatttccatgccgatttgcaacatagcgacgtacgagtacgtgtgtattcgagatttggaaccagaccatacgttgcaaaagaaataataaatcaaagagatgatgctagcttgcacgatagtcttcagg

SEQ ID NO: 28255 - DNA, 2368 bp, Zea Mays
ctcagagtcagaggctcagagcccagcccaggccggagaccactgtccactgcgtctgtctctgtcccgagctcccgatccatccatctgcatcgtgggaacaagaagaacaatgggtataatgcgagtcgcggacgatgtggaggccaggttggtggtcggggcaggtggcggcggcgggaccgccaccaccacgacggagccgcttctccgccactgccacggcggccgcaaggaggaggacgaccaggggtctaagatccgggacagcccggaggcggagggggcgtccgactgcgggaggacggacggaggctcgctgcggatggtccttgtctccaccgccgtcgccgtctgcggctccttcgagttcggcacctgcgtaagaagacgccgctgccgccgccgcctatccctaaatgcattccttccttccatccctcacctttcgcggaaatgcaacaacacgctcgctgattcgcgttcgacgttactgatgacatgcagctatatacggccttttcttcgtcactaccgtacttttccttctgttctgcgagttgtcgccatttgttttactaccgtcaatctgtaatgcacgcgtgtctcaagaagaagtagtagaatgaagcagacaaagcttcgcaccttcgcccaaggtcctacatgattcatttgcttgcaggtcggctactctgcgccgacgcagtcagggattgtagaggaagtcgggctatctatctccgagtttgcaatttttggatctgtactgacagtcggagcaatggttggtgccgttactagtgggcgcttggctgattttctcggacgaaaaatgaccatgcggatatcagctactatttgtatattcggttggctctccatacatctggccaagagcgctatcatgctctactttgggagaaccttgctgggtttcagcactggagttctttcttatgtggtgcctgtgttcatagctgaaatagcgccaaagaatctccgcgggggtctcgcaacgtcaaaccagctcttgatctgttccggaagctcagctacctacatcataggagccctggttgcatggcgcaatttggtacttgttggtttagtgccttgtgtcctcttgctagctgggcttttcttcattccagagtcgccaagatggctggccaatgtcggaagggaaaaggaattccacgcctcattgcaaaagctgcgtggagaggatgctgacgtatcagaagaggcaattgagatcaaagagtatattgaatcactctatagccttccaaaggccaggcttcgagacttatttctgagcaaaaatatatatgcagtcattgtgggcgttggcttgatggtttttcagcaactcggagggataaatggtgttggcttctatgcaagttatatcttcagttctgctggattttctggaaaacttggaaccatcttgattggcattattcagattccaatcacattgtttggggccatactcatggataggagtggaagaagggttctcctgatggtctctgcatctggaacatttttgggctgcttcctcacaggagtatcattctatctgaaggcacaaggactgttctcagaatgggttcccacactggctctttccggcatactggtttacatcggggcatactcaattggaatgggtcctgtcccttgggttgtcatgtctgagatattctcaatcaacatgaaagcaactggtgggagcttggtgacccttgttagctggctgggctccttcgcgatttcttactcgttcagcttccttatggactggagctctgcaggtaccttcttcatgttctcttcagccagcttgatcactgtactcttcgtggcgaagctggtccctgaaaccaaaggaaggacactagaggagatccaggactcactaaacaccagaagatagtaatgaatttacttcacactacagaataattaattctaagatggaaaaatgggaatttacaggacacagcagaataattccaagatggaaaacgaatgtaccgtcagacctctgctcatcgatagatatgtatacaagaaacaatatatataattctcacgtcctcccgcttcccctccctttctctcccgcaccacctccgtgtaatacgtagtgtactgtgtaccctatgtaggttaaggaatgctgcagattcagattacgcattatgtaccgtgcccctccagattgtttgagcatgagcagcgacagaaccgacattatgtttatgtaccatgtccctctagatcaaccagcagtacattttttatattcaggatcaacatttatgtatcatgtttttttagggaaaaggctcag

SEQ ID NO: 28256 - DNA, 2452 bp, Zea Mays
aaactgccttttcttccggcttccaacttccaagtggcgactgctgccgactgccgggtgcgagaagagggagagatcagagtatcagacaagctgttgtccgaatccactccggcgaggacgagtgctgaggtcgaaatggggagaggagcggatgaggtggtgaaggtcgtggattcggaggacggcgagggggaggaggaagaggcagaggccgcggcggcggaggggtcgagcaaggagacgccgatgctgccaaggatgccggtgcgcgtgctactcgccgagggcgacgactccacgcgccacgtcatctccgcgctgctacgcaagtgcggctaccgagcctctgatggtgtgaaggcgtgggacatattaaaggaaaaatctttcaacatagaccttgttttaactgaagttgaactgcctttgatgtctgggttcctcttgttatccacgatcatggagcatgatgcatccaagaacatccctgttataatgatgtcttcacacgactctgtaagcatggttttcaaatgcatgctaaagggtgcatcagatttccttgttaagccgctaagaaagaacgaattaaggaacttgtggcagcacgtttggagaaaacaactggcaaacggtgggcccgatgtgcagcacatacaagaagagaatcttgcagaaagaatggaacagaagactggcgtgacaaaagatgataatttgaacagcgatggtccctgtaaaaatagagaatgcagtgaacaagaaagtgatgctcaaagttcttgcacaaggtcagagttggaggctgaaactaagggtaataacttgattccaacaagagaagacgatttattgccaaagaaaagaacatgtttgaatgacaataattctgagagaacttccagagatatggagctagtccacattatggacaatcagcagaagcatgacacacagagggatgtggatactatgagaacaacatccaggagaaatgatgagaagaactccatcccagcacaccagttggaactttctcttagaagaactgactatggaaaattagagaaccacgagaaaaatgatagaagaacactgaaccattcaacttcatctgcattttacttgtataattgcaggacagcgtccagcttaggaaatgctggtgatggtcaattatgcagcacctcagaaacactagtggatgttgaaaatagaaatggagatttggcagctctgtctgaagacacgactgaaacaaatcgtcctcctatcagagttgtaccatttcctgtccctgttcaatgcttcacatttgatgggcagccgttctggaatggtacaccggtggcatctccattctacccacagtcagctccccccatttggaatagcaaaacaccaacgtggcaagaatcaactccacaagcaacttcactgccacaaaaatcgcaacagaaagaaccagttgaaatggatgctaaaccagttgaaaatgcagaggaacaatttgtcgtaggtcctcccagtgccagtgggaagcagctgcatgttgaaattcctaaagatgatctacggcatatttctcctgtgaccggtgaaagtggaatcagtacggtgctagacagcaccagaaatactctgagcagcagtggctgtgatagcacttccaaccagatcaccgcccctactgaaccatcatccaatgtatacaggggcgttcctgaaaccgcaagagccgaaggtttacgacacctgagccagcgtgaggctgcactgaacaagttccggctaaagaggaaggacagatgctttgagaagaaggttcggtaccagagccggaaattactcgcagagcagcgtccacgggtcaagggccagtttgtccgtcaagatcatagcatccaaggaagctagggtccagttactgagctggaactctttcccattatctacaaaaaaaagtcactgtaagtgactccactgcggggtaccctgatgtcaggttttttcgaagagttggaagcaaccacactgagttacggtttgctgtgtatgtttgctaaagcttgtaatatatgtatgtataggctgactcttttctttccttaggttaggcacaggacctggcacgttctagacggtttgtcggtagacgttaaaaaatacaggcatacttgtgtcctccagtagcacgtgtgctttaagccttgtattatgtaactagccaagttgtttttgatgtttcggattagatgtacactgtggatgtatggcgtgaaggatgtccaccaaagtatgctcgtttctgtgtagcttgttgcaatgaacattgttggcctggttttagtaatgctctcttgccttgagtattagtactgtgaaattttctacagacggtatgaagtgctaaatttgggtgacggtttttataagaagatcatgtctc

SEQ ID NO: 28257 - DNA, 2996 bp, Zea Mays
aaacatacaaaagcagaagccaggcttacctgcccagcgcgctgcgcaatcgccgccctcctcccctcgcccaacggcaacgaatctgcctgccttcctgcagcctcaccggctcatcacttcgtcagccatcttcacagcccgcctggcgccccccagcatcagattcccctgctaaaccctcctgttgcggtttctatctggtccagataatcactcccttccctccaattatttttccactgctcgaaggcccggggcgcccaccggagccaatcagttccgttcacctttccaccggaatccaccccaccgccaccggtggatgatttgatggagttgccgttttgcggaccgtggaccggcgtggaggaagggttgatagggaggattttttggattgatctataagccttttggtggctaacggttgggagctttggaggagaactcgagtccttgggctctaggttggtctggacgaggccggaggaagttgccaatggagccgccgactgggttctgggcctcgcttctgagcttcctcaagttcctcccctacttctgcggcctcctcgtccttggactcatcaaaggtgttttgttgtgcccttgggcatgtctgattatggcgattggaatatctgccctggtcctgggcttatggcctatgcatctgatttggacatactactgcattgtcagaaccaagctggttggacctgtggtaaagcttctgcttcttattgctgcgactgcagtcttgatcatatggttgataattggcatcccgggaagcatatttgctggattggtatatggttttctagcacccataatggctacatttgatgctgtaggagaaggcaaagaaaagccatttgttcattgctttgtggatggaacatggagtactatcactggaagctgtacagtagtcagggacgtgaaagatttgcttttccactcctatttttcacttatggatgaccttcgtcttcagaaacctcctgacggggagccatatgagataagattgcttgatattcctggtgcactaatagcggctgcatttgggcttctacttgatggaataatgttcacattaattgccttctataagtgccccgtgatgcttttcaaaggatggaaacgactgatccaggacatgattgggagagaagggccctttctggagactgcttgtgtgccatttgctggtcttgctattcttctttggccatttgctgtagtaggagccgttctggcatccatactctccagtgcccctttaggtgcttatgctgcagttgtagcttatcaggaatcctcccttatcctgggaattgcctatgtgttctcgtcggtgtctatatttgatgaatacacaaatgatgttcttgacatggcgcctggttcttgttttccaagatttaaatatcggaagggcaaagatgagtcttcacacgggcacagtgttccattatccagaccagcctcattcaatagggagaagcaagaagggaaaaggcctccgtctcgtgttacttcatttaagaacagcattgatgatttcaatccattcaagctgctggaccacctatttgccgaatgcaggaaccagggggaggatttggttaacagaggagtgataacaatgaaggacattgaagaaacgaagtctggcaaagttggcagcggtgttcttaatgttggtctaccagcgtatgttattcttaatgcactccttcggtctgcgaaagctgattctgtcgggctaatcttaagtgacggctctgagattacatctgacaatagacctaaaaacaccatctttgattggttctttgaccctcttatggttataaaggaacagatcaaagctgagaatctcactgacgaagaggaagagtatctgaaaatgcgagtgctattggctggtgatcccagtcgcctgaaaggctctctgcctcatgttccatccttgactgaacgtaaaaaggcagatatagacgcattcgctcgcaggttgcaaggaatcacaaagtcgatatctagatatcctacatcaaagcgccgcttcgacgtccttgtgaaggcgctcttgtcagagctggagaggacgatgggccaatctggcaatggatcccagtcccaggcgcagaggctgcgaaactcggtagcccggatgttgagccagaaatctatgggcaagactgccaacattagggatgaagacccagaagcgcagatgacgagactgtctcgcaccccgtgatcgtctgtttgttagtttgacgatgccgtatcacatgctattccagccttgtacaaatgatgagtagatagaatgctgcggcttgaactgatgctcttacatctcatgtatgatctgtatattttaggcactatatgtatcgtgtatgcaatgtttttttgctcccgaaaagaaaagagtatgcacagaggagaacaataaataaaaatacgcaatcctcaacggataacgccggcgcgcatgtgttttagacaaattgtgggaggttaagctacagcaattgcaaagcacaccggctttggggctcgcatgaaacttgcaccgtattaggtggataattgcaaaaggttgacgcatgttcaaccccgaagaccatccgtgggctggctatcaggcacaatggtgtcatcatcgtctaacagctcctccagcttctttcttgccttcttatagctacgggaaccacggaggatggagctaatgtgcagaccacctttgagactcttctgagatctgaacgagtgcgagaaaatcggattaaggtgtcagtaagcttcagctgacgccaaggaaacaatcatgactgtttctaactcagttccaaaataggggattctgaacctggacaacacgggtaagtagtagacaaacaattttatcaaacaagtcatcactgtatggttgttttaaccagctaaggttaatgaatgaatgaatg

SEQ ID NO: 28258 - DNA, 3271 bp, Zea Mays
atcttcatctagacactgttcatgactttgtgcaaaaattctcatgtaggattagtgatttttcgaagctttgccagtttagcacaaaatataaacagcagtaagtcttatcaagtgcaaggaacagattattgctgaaaatgtatatcttgaccttcttgcagacgtatggtcctgtggggtgactctttacgtcatgcttgtgggagcatacccatttgaagacccagatgaccccaagaatatacgcaagaccattcagcaaataatgcaagtgcagtacaagataccagattatgtccacatatctacggaatgccagcaacttattgcccgtatctttgttgccaatccagtgaggagaatcacaatgaaggaaataaagagccatccatggtttttgaagaacctaccacgggaactcacggagactgcacaaggcatgtactacaggagggataacaaggtgccttcttattcagaccaaacgtcggaagaaatcatgaagatagttcgtgatgcaaggaccatgccgaaatcatccagatcaggctatgggtggagcgctgagtattcggatgaagaagagaaggaagaggaacacagactagaggaagatgaatacgataggagggtgaaggaggtccatgcaagcggagaactccgatccagtgggatgtatgcagttttggcttctgaattgcttgtgctcggtcaattttcatgtaacataattcaatacactgaggcagactaccatgtccttgtgttgacgtccaccacggagcgccgcacggccgtagccctagccgccaggcaccagcggccagccagaggcccggacgactggactgccaaagccgtcgtcgccacagggaagcgccggtacgccgctcggcccttctacaggtgttcatgtggcaaatggaatttaggatttggtagcaccatggtccatgtatgtaaatcacatcactgagatggaggatggtttaaatgatgatggaatggaatatccatttgagggtgatgctaataccagtaacaatgatcagatagtagaggaccatgctgatgatgcccctattgctagtggtgataatgccatcgtccaacagcaagttggtctgagaaagaagaaatacatgtatgtgaattaccatcgtgttgagcaacctgatggttccagtgttaagcaaaagtgggcaaaatgtcttcgatgttcacataaagctaagtctgatgcttcaaatggtacaaaggcttttagtaaccacttaaaattgaaacattgtcttgtgaagggtcaacaacagctaattcagagtggaaatgacatagcaacatataaatatgatgagaaagctagtgtgagacttctatattatgccatcattatgcatgaatatccattcactgttgccgaacacaagtattttgtgaaatttatcaaatcactacggccatcatttcctttcaagtctcgtatcactgttcgtaaagagatcatgcaactttataaagaggaaaagaatatgttgtatgcacagttcaaaaagctgacatgtcgtgttagttttactatggatgcatggacatctatacaaaacaaatcgtacttatgtgtcacagcacattggattgatgataattggaacatgcaaaaaaggattatcaattttatgcatgtagaagacagccatggtgggataaaattgagtgatattttttttgtaaatgtgctcaattggaaccttgataagaaaatgtttgctctttctttggataatgctgcggcaaacaaggttgcagttgatatagtgatagataatgctaaagacttgctcatatgtggtggaaagttctttcatgttagatgtgcaaatcatatattgaaccttgttgctaaagatggcttagcagtaatgggaaatgctattgcaaacattagaatgttcataacagctatcaagaggtcacctttgcaatttgaggcatttcaaaaatgtgctaaagaatgtgatctagacactaagaaagtcctttccttagatgttgctacaagatggaattctacatatattatggttagagatgctatttactataaggatgcttttgatcgtcttgctaaaaaagataaggatagatttggtcatatggctccttcaagtgatgattggttgaatgcaataaatatcaacaagtgtttgaaaaagttctatgatgtcacattacttttttctggcacttcatatcccactgcaaatcatttctttcgcaagttttctgagattaagatggctattgcaagatggtgtgagagcagtgatgtcataatttgtacaatggcattctctatgaaagagaagttcaataaatattgggacatgaacaatatggctttagcagtgggggcatttcttgatcctaggtacaaacacaaaatggtggagttgtacatgtctaagatgtatgatagtgagagggctgagctagagaagttgtctttcattaatgtcatcaatgagttatttgctttgtattcatcaaacatcaatgcaaaaacaaccaatatggcttctacctccaaggagagtgaacttgttccacacaaaaatggttctttcatggatgatgaggatgaggatgaggttgatcttgatgagttgtatgcagcagcaaacaatgtgaagaaggtttcagaattggatgtgtatatgagtgagggtttggtgaaggtcaatgaaggtgatgctccatttgatatcctatcttggtggagggggcaagtgacaaatcttcctatcctttcgacccttgctcgtgatgtgttatctatgcaagtttctactgttgcttcggagtcagcatttagctctagtggacgtattgttgatgcctttcgttcaaaacttaaacctgaaattattgaggccttggtttgtaccaaggattggaagattgcttcagagaaagatttagaaactgaaattagaaccataagtgaagatatgaatgcaatggacttggacgaagatgctattgcggcgacttgatacattgaaattagactcttcgctatgttgtttgcgcttttgtaataaactatgtagcatgttgtgtatctcttttaatgttgcggtgaacttgtgtgaaatatctactatctattatatatttgtggacttgtgaacttgtggattatacataaaagaggggatatgctgctgatttatttttaaaactgtgttgtttcttctataatgaa

SEQ ID NO: 28259 - DNA, 2991 bp, Zea Mays
cacactcgcatcgccgtccccttggcccttgcccctttctcgcgctctctctctctctacccggagaaaacaaaaccagaccatcagcaggagactggggtgtgagtgaccgtgcgagaagggggaaaaacaatccaaacactctcgccagcacacaaatctcgcgcacgggttcgggggcgccagctcgatccgcggccgaaaccctaggtggtgacgacggtggtgctccgtggtggtgctggaggacgaggaggagggctgggagcgatgacgtcgccgaggaaggacgcggggttcctgacgcaggaccagcgggagaagctgcggatcgcggtgcagaacgcggagacgcagtcgctcgcctccccgcgctcgcccacggggggcaccacctccgcgctgctgcagcagtacgagctgcagatgctggagcagaagcgcgccgccgcggccgccgccgccgcccggggcggcggcggcggcggaggtgggcccaggcacgtgcgccggtcgcattccgggaaggccatcaaggtgaagaaaatggagctggcggcaaagggacttggggcaaactaattgagactgatgcagaggcatgccttgatcgaaatgatccaaattatgacagtggtgaggagccatatgagttagttgaggcccctgtttcaaccccactagaagactacaagaaatctgttgtccctttaattgaggaatatttcagcaatggggatgtaaaattagctgcttctgatcttaaagagttgggtcatgatggtttccactgttactttgtcaagaagcttgtttccacagcaatggataggcatgacaaggagaaagagatggcatcagtgcttctgtcgtatctttatggcaacgtggtcagttcaactcaaattaggctgggatttgtgctgctattagaggctgttgatgacttggctgttgacatacctgatgtggttgatgtgctcgcccttttcattgcacgtgcagttgttgatgacattctgccacctgctttcctcagcaatgcaaaagtgagtctgtcaggatcttcaaagggtatgcaggttgtacaaattgcagagaaaagctatctttcagcaccccaccatgcagagttaattgagcgacgatggggtggttcaacccacatcacagtagaagaggtgaagaggaggattgctgatcttctgaaggaatacatcagaaatggtgatacagctgaggcttgtaggtgcattagagaattggcagtgccgtttttccatcatgaggtggtgaagcgagctcttactcttggaatggagagtccagctgctgaagctcttattgtcaagcttctgaaggaagcatctgaagaatgtttagtaagctctagtcagatgatgaaaggattccaccgtgttgctgagagtcttgatgatctcattcttgacataccatctgcaaagtctgaatttcagttgttggtatcaaaagccatttctgagggatggttagattcttcctatgtgaactcaggtgtcaacggaagcgttgaagacgatgaacatgagaagctggctaggtacaagagggaggctgtatccataatacacgaatactttttctctgatgatacaacagaggtcatccgtagtgtcaaagagcttggttatccggaatacaatccgatcttcgtcaagaagctcataacaattgctatggaccgcaagaacagggagaaagaaatggcatcggttcttctcccttcattaagcatggagctgttctcgtctgaagacatcgccaagggatttgtaatgctccttgaatctgcagaagacaccgcgctggacatattggatgcctcagatgagctgggactgttcctagccagggctgtgattgatgacgttctcgcacctctaaacttggatgagattagcagcaagcttccaccaaactgcagtggggctgaaacattgaacatggcacgctcccttgcgtcggcccgtcatgccggtgagaggcttctgaggtgctggggcggtggaaccggatgggctgtggaggatgccaaggacaagataacaaagctcctggaggagtatgagagtggaggcgatgtaggggaggcatgcaactgcatccgtgagctgggtatgtctttcttcaaccatgaagttgtcaagaaggcgctcgtgatggcaatggagaagaagaacgagaggaccctgaacctgctgcaggagtgctttggtgaagggatcataaccatcaaccagatgaccaaggggttctcaagggtcagggatgggctcgacgatctggctctcgacattcctgatgccagggagaagttcctttcctatgtgcagcgcgcgaagaagagtggatggctcctgcctgggttcggtgtggcatcttcggcttgaacagctgggcagaagagaagtacgaagctgaagcggctcagcaaacccagtttggatgtgtgttttcgtcgttcgtggttgcccttgcgcctaggttagcggagcgagcccttcctggttgcggtggtggtggcttgtgtaggtctcgcatctgacatgttcatgctgttcttgtttcatttcatttaactctccatagaccctttttttttacatcaagctaaaacagagaagagaaaaaaaagaccatgttgtaaaagttctcccatgctccgcctgcattgcggccggttttttcatcctcatttagctgcaatcgtgcgttcctgccctctcatggccgccgtagctgtttttctatgccattggatgcttggattgtgattgctagtttgttactcttttattctttgtggaaatggtgtggcctggtgaatgcctggattgctagcatgcaccgccggccgcccggcactgtatctttcgatgctttctttgttttatgatgcgacgaatgctcatggacttggatttcagagactatggcatgggctttttc

SEQ ID NO: 28260 - DNA, 2032 bp, Zea Mays
ttcattgacaacaaagatgcatgcaataaacatgttactgcttgttatgtccttgtgccaaactgccaattttgagttaaattcttggatgtggttgggttttattttgtaacatagtcctcagacattggttcgagctttgagggttgttgaaatgcaagagatcttagatcaacaagttgcagaagaagcagctgaggctgagggtgctggtgctatggcgacaataacaaaccaacgtagaactgcaaaaaaaggtgcaggggcaacagttaccccaagaaagggcactcaagaaaaatcgaaggttcagggaaagggctacaaggacaaatgctatgagtctatcaggatggctgttgaggcccgcttcaacaagttgcttactgagcttgtttttgtggaggacttgatggaagctttggaggaagccaaagctattggagatgagcttggcgatatatatgattatgttgcaccatgctttcctcctaggtatgaaattttccagctcatggtaaacctgtatactgagagattcattcagatgcttcgacttctcagtgatagagcaaacgatattcaaaatataaatatcctgaaggtgactggttgggtcgtgcaatatcaagaaaacttgattggtcttggtgtggatgaatcacttgcccaagtttgttctgaaagtggtgcattggatcccctcatgaacatgtatgttgagcgtatgcaggcaacaaccaagaaatggtacagcaacattttggaggctgacaaaacacaaccaccaaagagtacagaggatggaaaactatatacacctgcagcagtggatctattcagaatattgaccgagcaagttcagatagttagagacaacagcacagacgtcatgctatatcgaattgcacttgcggttattcaggtcatgcttgattttcaagcagctgagaggcaaaggcttgaggagccagcttctgatgttggtctggaatctctatgtgcattgattaacaataatctgcgttgctatgaactttcatcagagctaagtagcagtacattggaggcgcttccacaaaactatgctgaacaggttaattttgaagacacctgcaaaggatttcttgaggttgccaaggaggccgtcctccaaactgttagtgttatttttgaagacccaggtgtgcaggatctactcgtgaagctttaccagaaagactggctggagggaatggtcacagaatatcttgtcgcaacatttgctgattactttggtgatgttaaaatgtatattgaagaaagatcatttcgaagatttgtggaggcttgcatagaggaaacaattgtggtctatgttgaccatctcctttctcagaaaaactacataaaagaagaaacgatagagaggatgaggttagatgaagaggtgcttatggatttcttcagggaacacatcaacgtgacaaaagttgaaagcagagtgcggattctggcagatatgagggagctagcttcagctgagagtttggatagctttactctcatttacactaatatactggaacatcaacctgattgcccgcctgaggttgtcgagaagcttgtggcaatgcgggaaggcattccaaaaaaggaagcgaaggaggttgtacaagaatgcaaagagatatacgagaactcgcttgtggatggcaaccctcagaagtccggttttgtgtttggcaaattgaagtgcttgacagcaaagaaaggcatatggaggaagcttgggcagtaagtgtggacttgagcagagtggacagaagtaccacctaggcaaagactgtacgtttcacttctctatgatcattcttttgttcttttgtcgatgctactgttgggtttcacgtttagactatcagtgtgtactcagcttgaggagcaaaaatgtatattccactttgcttagctacagaggattttggtgtaagaatatgtaatttattcaataaaatggttgctatttgcaataagttggcccaagtcatcg

SEQ ID NO: 28261 - DNA, 1164 bp, Zea Mays
gcggatgcagcagcaccaacgttggcagcttttctgggattggagttggcaagaccttgctgaatacgacgttttggcaatgttaagctatgtatatacagttgcacagtccaaaattttgtatgtgggacattcacagggaactatcatgggtttggctgcgtttacaatgcctgaaacagtaaagatgataagctctgctgcgcttctttgtcccatttcttaccttgatcacgtcagtgctagttttgttcttagagcagttgccatgcatcttgatgagatgcttgttattatgggcatccatcagttgaacttccggagcgatatgggtgtacagatattagattcgctgtgcgatgatgaacatttggactgcaacgatctgttatcttcaataacaggtcaaaactgttgtttcaattcatctcggattgactattatttggagtatgaaccccatccgtcatcaacaaaaaatttgcggcatcttttccagatgatcaggaaaggcagcttcgcaaagtacgactatggatggtggggaaacctaaggcgctacggccagctgcgtcctccctcattcgatctaagcagcataccggaatcactgccgatatggatggggtatggaggccttgatgccctggctgacgtaacagacgttgagcgcaccatcaaagagctgagatccacgccagagctcttgtacattggtggttatggccacattgatttcatcatgagcgtcaaggcaaaggaagatgtttatgttgacttaatgaggtttctcagggcccagcagggaatgcacagtagctattaggacgcacgtcacgtacgccttcaaataaatgcttatgctatgatgacagtacgaccatgtaaatacggacacagcatagcatgtaaatacaaacagtctattgcattgcatgtaaagtggtgtgtggattgttctccatttgatgtactgctttctgagtacagtacacatgtacatcagtacatgtaacatgtgtatatgacaaaaatgtagcacatgcaacttggcttatttcgtgccgattgtgtgcttgcatttggggaggaaatcgagttgcaaatacataagactatctctagcaccttaggcatctctagcagcttaaccatcaccattcc

SEQ ID NO: 28262 - DNA, 2180 bp, Zea Mays
cgcgagtaaaacagaacacagggagaagaaccggtggcaaacgaacagggaaaagggtaaattcgctttcagaggcaagcgctgcgttgccacacagcgggaatcctgcccagagctgccgaatcgggtccaatcccgtcgacctttctggccgccgccgccactggactccatccagaaattaccttcgattcggccggggccgtgggagcggggatggggctcggggaggcggcggggcggctcctggcggccgtggactgggagcgagaggcctacccggcgtacgacgacttcctcgcgctccccgtcttcgtccttttcttccccaccgtccgctacctcctcgaccgcttcgtcttcgagtgggttgcaaggaggcttataaatagaaatggacatcagagcactaataatgaaacagaagaaggaaggaagaagataagaaaattcaaggaatcagcttggaaatgtgtttatttcctgtctggagagcttttagctttgtcggttacatataacgagccttggttcaccaataccagatatttttgggtaggaccaggagaacaggtctggcctgatcaaaagataaaattgaaacttaaggctgtatatatgtatgctgctggattctacacatattccatatttgcacttatgttttgggaaacaaggcgttcagactttggagtgtcaatgtcacatcatgttgctactgtcgtcctgattgttctatcttacgtgttcagatttgctagagttggctctatagtattggcaattcatgatgcaagtgatgttttcctggaagtagggaagatgtccaagtacagtcattgtgattggcttgccaatgtttcgtttctgttttttgttatttcatgggttcttctccgcctcacttattttccattctggattctgagaagtacaaggtaaattcttctgttctggctcataagtctatcagattcttatgccaagaaaaatcatcgagttcgtaaaagtttgtttgcatatacagtcgaaagtagattggtatcttatttgttctgtactcaaacggttattgtgaaaacttggacagtgacttcctctagtctaaagaacattcctttatatagtcggacagtagcatcttagactctaaagagaattttactatgtacttccattggccacacaaatgaaggtttggatattttttgtatgcaccactggagacttcacacctttgtggacttggctaatcatataactcagtgtccaaaatatatcataataaacaattatagacatgtcaaattctgacaaggtaccatacagattcgccccattgcagtgttggtctggttcacagtttctttgttgtggtgcttgttgagttgctgtgaggttgtggccttcatcatctatgaggtcttgttgactttggacaaaaagaagcacaattttgatggtcctatatactattatgtgttcaattcccttctattttcactacttgttctccacatatattggtgggtcttaatatatcggatgcttctgagacaaatcaagacaagaaatgttggagatgatgttcgatctgattctgaaggagaagacgaccatgaagactgattggcgtcaccatcttagtttgcatattatgtcggtgctagaagcatcacccccaataccgtccctgagcttatacattctttggctggattccaagaatacgtgcagattatgagaggacgagcatttgttcctcacgagaatcaccgaagccgggctacgatttcttctgtctcgactgctcatttgtgttgtactaagtatgcattagaaacagcgctgcaatgtgttaaaaaagttggatgtcggatataacattcttgtgagtgttcagacaaagtgcagcggtaaatgtagcattccagaaaaaggactggctgtaaactatatggcctttctttcgacaaaccattgtaaaaattgtgtatgccaggatagccttgcttgggatttaccacaatcccaatcagaaactgtcccttctgaagcatgtatttcaccattcagtgattcgcctgatgataatttgataaattcatttatccaacacacctgatgcatatttgctgaaaaatggttcccagttacatatttatcataggggagaccgg

SEQ ID NO: 28263 - DNA, 482 bp, Zea Mays
gttgtcacttgttgtcaggctaccggaccaaactgcgtgctccggcctccgggagaggagagagggtagagccagaggagttgggcgcgcagcaggatgagcggggaggaggccgacggctccaagccccaaggaggcggtgtacactacggcaccttccaggggccgcccagctacccgcccccgcgcccgccgccgagcctctccgcccaccaccgcggcgactaccaggccgttcccgctcgagattacgaggcaggtgtgcggggacgtagccatgatcgacttccctgttgtggcattggttttggatggttcctgttcatagtcggtttcttccttggtgccattccctggtacgttggagcctttctgctgtgctgttccagagttgattacagggagaaaccaggttatgtcgcatgtgttgcagcggctccctgaagaagaataagaaaatatttagctgtactttgagcttg

SEQ ID NO: 28264 - DNA, 639 bp, Zea Mays
atgacatatttgatagcgggccgcaggctaagccattccttctaactgcaactgctgctcctctttgtctcccccgttccgttctccactgaactcctcgccctcgtcgacccgtgacccgtgagcctcttccactgccgccgtcgacgagagctgcgttagccgctagggacaggtgatttcggctgcttccctcatggcgaccgcgctcaagtcgttcttgaacagccccgttggccccaagaccacccacttctggggccctgttgccaactggggcttcgtcgtcgcgggcttggttgacatgaacaagcctcctgaaatgatatctggcaacatgacagcaggtacctggagaagaaagagccagagacacaacagtaaagagggtatgcaacactgcagtgacttgttcctttagtgaccatgcagtatgccgaggagatttcatatacctagcgccgttacaagcttctgcttgcttacttttctgtgcatttggtttttacaatgcgttatgcaatgagtttcccccaaacacgcaatgagtttgggcactattttcgttttacctggctcatgtgcccatagtgctttgtaaaagaccagtcgttgcaaaattttggtccggtcctcggc

SEQ ID NO: 28265 - DNA, 2552 bp, Zea Mays
aaaaaaacggctccctccggcctccgccgagcgacggtacagcaagtcagcaactcggagtagttcgttcgcttgccggcgtgccgtttctctcccccccttcaccctttgccttcgtgagccagtggctcagcgcgcaattcacgatttacgagatgaggctgagatagccggtgaacgatcagagccccccatggcggcattcgcagccccctccttgtcctcgctcatcctcctcgcctcgccccactccgcgcccactctcctccgcctgcgccgcgcgggcggccgctctctggagctgtcgtcacggcgcggcgggagcgcgcgccttcgggtcgttcgacgagcggtgacggaggaggagagcgaggccgcgcgcggagacgaggaggtggaggaggccccggaggagccagtggctggccgcgacctcgtcacgctcgccgcctgcctcgtgggcctcctcaccggcgtctccatcgtgctcttcaacctctcggttcatgaaatacgtgacgtattttgggacggtattcctttgcgaggcgcttcatggctgagggaagaaccgattggtgaagtctggcagagagtgatatttgttccggtcagtggaggtgttatagtgggtggattgaacgctctaagaagtcagatagaaactaactcagatgcccctgtgtccaagataaagagtgcatttagaccattcttgaaagctgtggcagcatctttcactcttggaactggcaattcactgggtcctgagggtcccagtgtggaaattggttctgcaatagccaaaggatttggtgatgtatttgagtgggacggtgggaaaaggctgtctcttgtggcagctgggtcagcagctgggctttcatctggttttaatgctgctgttgctgggtgtttttttgctgtggaatctgttttgtggccttctgcggattcctcatcccttgccaactcgacacctatggtgatactcagttcagtgatagcatctgttgtttcagagattggtctaggttctgatcccgctttcactgttccggaatatgattttcgctccccaacagagattgaaagtatgaggatatttacatgacttcataactgtcagaacttcctctataccttttgctgggtgtcttctgcgggttggtgtcaattgcattatcaagatgtacatcacttgctatgaaggcagttgaaagtttacaaaggacaacagggttaccgaaggctgcatctccggctttaggtggcctcattgttggtctccttgcacttttgtaccctgaagtattgtactggggctttgaaaatgttgatatcttgctggaatcacggccatttacaagcggcctctcaacgaccatattggttcagcttattggagtgaaaatattagcaacatctttgtgcagggcttctggattggttggtggttattatgcaccatctctttttattggtgcagctacagggatggcatatggcaaattcatgaagtttacatttactggccctgaaccattgctgcatgtcccattcttagatgtggcatcacctcaagcatatggcctggtaggtatggcagctaccctcgccggtgtatgcaaggtgcctctgacatctgtcctactactttttgagcttacacaagactatcgtatagttctacctttgctcggggctgttgggttatcatcctggattgcttctcctcaaaggttctctaaaagaattaggagtaagctggattcttgggaggataaatcgagtattcctcagcaagcaaacgacatgctcactgaaaacaaagaggccacttccatggatgcagctgatttgtcgttagaattatataaaattgaaagctccctttgtgtctatgatgccaacgacagcaatatgttcaaaaatcttactgttggtgaggccatgaaaactaactacttctctgtctcaatgacaaccccattaattgaggcactagatcttatgcttgccgagaagcagccctttgttatgataactgagaataacacatctgcaagaggcttgctggcactaaagaatatccaagatttttgcaaagctgcaaaaactaccagatcacaagctgaggtaaaggaactcctgatatctcatgtttgccaagcaggcaagtgtaaatcgtggtctgtgacgcctcagatgccacttactactgcagagaagattatggactctcatgatgtggatcacctacctgtagtttctgaggatgctaatcttcaggacagaggacttttgataggttttgtagaccgagaatgcattgccattgctcgaagagccatggcaacaaaagaaattttcagttctatgtatgggatcaggaaggaagagaggtagcacgaaaggaaggaatgacacgacacagaagcactccctacttggcaaatctggcttcttttcctggtcaaggctaatacctctccaggttattagttgctaagtaaaaacgtgcttcaggcatgtggttaaggtaccatgca

SEQ ID NO: 28266 - DNA, 2443 bp, Zea Mays
ggccgagtcccggagacacacggaaacgtcagaggaacacctcgccgacgtcaccgtccttttacagttctacacttctactacggccgcacgactctcctccaagcaccgccgtccgtaccacttctcccgtgcccgcagcgtacgcaatgccgcaccaccaccacaccaatccgtcgcatcctcctgcggcgcgcaagctcctctcctggcgccgcgtagtcgccgcctgcgccgttgtcgcggcgctcgcgctcctcctggccgccgcccctgccacggaggaccccagccgatggcgctcctatctcttaggacccctccctggggatacccgcaaggagacagtggcggccgcagtcgtggccggaagcttcgcgggccccgccgcctcgacgtcgtcgccatccgaagcgccgctttcttccttcggcgagattaatttgtcagctaggattgctccagcagcagccccctctatgttcctggccccttcatcttcacctgcagaaattttttatgatggttcaatggaggaacccgaacatcctgatataaagagaaatccgccaaaggagtcatccccttttctcaaagaagagcccatttttagtggtttgcctacaatgagttctgatgtcaatggagaaaatgtcatggataccaaatctgttctccctgtaacgccagaggcgcctctttggtcaacagcagctgatgaagagcttatatatgcaaagaaagaaatcactaatgcaccattgacctcagatgaccctgatctttatgcacccttgttccggaatgtatccatctttaaaaggagttatgaactgatggagagacttcttaaggttttcatatatcatgatggagcaaaacctattttccattccccagagttgaaaggtatctatgcgtctgagggatggtttatgaaattgatggagacaaaccagaattttgttgtgagagatccaaatacagcccatttattctatcttccatatagctctcgtcaactggagcataacctttatgtgcctggctcaaatacaattgagccactgtctatctttgttaaaaattacattgaccttatctcggccaagtacccatattggaataggacaaaaggagctgatcatttctttgttgcttgccatgactgggggccttacacaacaaaattgcatgatgaattgcggaagaacactattaaagctctctgcaatgcagatctctctgaaggattttttatccgtggaaaagatgtttcccttccagaaacattccttaggtcaccaagaagacctctaagagatattggaggaagaccagctgcgcagaggactatcctggccttctttgcagggcagatgcatggtcgagttcgacctgtacttctcaagtattggggaaacaaggatgatgatatgagaatatatagtaggctgccacaccgaatcaccaggaagagaaattacgttcagcatatgaagtcaagcaagtattgcatctgtcccatggggtatgaggtaaatagcccgagaatagtggaggcaatatattatgagtgtgttccagtaataatcgctgaccattttgttctcccgtttgatgccgcactcaactggagtacgttctctgttgtcgtaccagaaagcgatgtacctaagctgaagcaaatcttgttggcaatacccgagagtcgatacataacccttcaggcaaacgtgaaaagggtgcagaagcattttatgtggcatccgaatcctgtcaagtatgacattttccacatgatactacactcagtctggtttagcagggtgaaccagatccgttagagcagcacctgtggttcacatgcctgaattacatatggagggttgtttgctgacccgtttttggtgtgctcgtctgaggaagctgctcatgtggtgggatttggattgtaatcttgtcgacacagctgttccgtgctcaaggtgctgaatggagatgttgatctgacagtagaactggcagtctgtggataaaatacagtttatataggagcaggcttatgactgagttctcattactggtaatttccctcatggatagtttggtgtaaagcgttgacaaaagccgatgaggtgttgtgacgactgacgatgtccctttctgtaagattgtaattttcgttactctttttaacctgggcacgggaaaagatctggaatagggatgcacggggaattctctgtcaggttttagctctccattcccgtttccgcgacaaaaaaaatccttgcaggatccccacaaatgcttgcggggtatttcttctccatccctattttccatggggataaatccccttcggggatcaccgttttcgcttaaattataattagaacatacttattatgttattaatgcaaagcattgtcacttctac

SEQ ID NO: 28267 - DNA, 1560 bp, Zea Mays
cattgccctttattatattcattcatccgaataaaatgcttaatggaacacacaaatttgtactcgggaatattcatgttttgtttaatccaaagcgcggtgatgtaaaactgggccagagtgctatctacaagttcttgtcgacaatgaagctgaacatttctttgcacgatagaaggcatttatctggacttgatagcactgaatttgggtatgagctttgtagcctgctcaagtatcaatggactgatgaagaagtgagaaatgccacagggtattcaaatgtcatggtggctgaacatccactgaagctcagtagttcatatgccatgttaaagggaaattcaaacaataggggtcttcatggtgaacccttggcaacttcctaccacaggaagtttcttggaactgttgattacctgtggtatgcctctaaatgtttgcctgcttgttgtatgtatacacaacgtgactgacattctttgtccaaggcacactcatggaattgaatgctccagagttttggacacgttacctattagtgttttgaagagaacgaggggtcttccaaccagggaaattggcagtgatcatttgcccattgttgctgaatttgctttcacggaatcagttgaagatgattccgatgaagatgatgaatctgagcaagatgacgaatctgagtaagaaatgagcgaagcgcaatacttatttttctcctcagacagtgagtcccgttgaagtgactggagtgattcagtatttcagttggttaaaaaggttcgaggtaagttattcaagaacagggagtatggtgcaccagagactacattgcatctttcatggtccataaacagaatatctccggcttcattgcacaatgaatttctcggtatctttgcccgtgtactgtatgggatcctgctgttcacagaatcaagtatcacattgagcagaatcaagtaccacattgagcagaatcaagtacgtgctgctgtgtgaaaggcaagattgcaacgaagtgctctctgcaagtttgtacgaactaattagtacttacgaagaaccgtcaatttagtggacatatttattccgtatcagatggttaactacaatttttaaagaactggcaaacggccctgtcccattttccattaaaaaatatagaaaacaccacgacaaactcataaagggttacaacctaagatctatgactatattatgttaactggtcttattttattcattccatcggtacatgtaattatgatatgtctgctagaaccaaacgctctttttgtgtagaccttcacgagtaatcattgctttttatgtttttccgcttatcgtaacagcactttccgcaccggatgtccactgaagcacgggcctttgcgctcgtcgctgaacattatgctatggatctggatgttaagcttagtatcttggttcgtgatcagaaaaaccactgctgatggatgacgtgctctgcctgctggatgcctctgttcatgtattgtgttttattattatatatgtgtaggtgtaatgaaaataatt

SEQ ID NO: 28268 - DNA, 2047 bp, Zea Mays
atgggccgtggcggctggacgggcggctcaatggctggacggaagacctcccgtgagctgcctcctaagactcctgctccctctaatcctatatgtgaggcagccgacggggttgctaaaggtagaacgaagcttccgcagcacagcgtcgtcgtcgaggagataaggtacgtagctcgcttctgccggaggtaaagaacaagctagactagccagccagtactcctctttgccggccggttagcgcgcatctgcaattcgatcatcactagattcctgccaagacaagtcaaaaaggtttggagtatcggaaaggagaagatctatcgtttcctgttaagctgatcatgccttgtttgtcgcttctcggctttgcgcttctgatgcactgtggcatgcaaattaagctgccttataagagccgaatgcttccctgccgtgtccaggtccagacagaggtctctagccgtgcagcggtgctgtcgttggtggcggccggcgacttggagctgtcgaggtaagcaagctggtgtggcggcgattggagctgtcgactggagcgcgcccgatccaccagagaccgtgaagctggcggccggcaagtggtgggagcggccagatgacacgggcatgcccggaatggacccaggcgggggcggcagctcgcgctacttccaccagctgctgcggccgcagcagcagcagccctcgccgctgtcgcccaattcccacgtcaagatggagcaccacaggatgtctccagacaagagccccgtcgtcggcgaggccgacgctggcgggagcggggccggcggcgaccagccgtcctcgtcggccatggtcccagtcgagggtgggggcagcggaacgggcacgcccacgcggcggccgcgcggccgcccggcgggctccaagaacaagcccaagccgcccatcatcgtgacgcgcgacagccccaacgcgctgcactcgcacgtgctggaggtggcggcgggcgccgacgtcgtggactgcgtcgcggagttcgcgcggcgccggggccgcggcgtgtgcgtgctcagcggcgggggcgccgtcgccaacgtggcgctcaggcagcccggcgcgtcgccccccgggagcatggtggccacgctgaggggccggctggagatcctctccctcaccggcacggtgctgccgccgcccgctccccccggcgccagcggcctcacggtgttcctctccggcgggcagggccaggtcgtcggcgggagcgtggtgggcccgctggtcgccgcgggccccgtcgtcctgatggccgcgtcgttcgccaacgccgtgtacgagcggctcccgctggagggggaggaggaggaggatgagacggcggcgggcgccgccggagccgaaccacaagatcaggtggcacagtcgtcggctggaccaccgggtcagcagccgacggcgtcccagtcctctggtgtgaccggaggcgatgccggcatgtcactctacaacctcgccgggaatgtaggggcataccagctaccgggagacagcttgggaggctggagtggcggcggagtccggccaccgttttagtccaaagtccatgccttgagagatatccgattcgcatcatccacaccatccgagaaccgggagttgaagctaccctgagacatcatgtatatgcaattattgtatgcatgctggatcattgttgataggagagaaggatctttcatctgggcgccatacaatataatgcatatgcgtttacacacgtggaggatgcattgcaaatcatgatgtgttttaaagacgatttatcaaatgcaagaggggaagaagctagagattggatgcatgcaagagctagctcaataaactaaaggtcagtagtagtgagatccgatgtttcgtgtttccaacttttcctctctttttccctttttttttcatgttcatttgtatttgtgttaattatattctgattgtgtgtctctcgcagtcaatcgctgtagaatggtgttttctgttataaacaatttggtcatcgcct

SEQ ID NO: 28269 - DNA, 3392 bp, Zea Mays
cgttggtgttatgggcctacttgggccctcgagttctgtcgtatggcctgctagatattctgtgagatggctggccccttggacggcgcagatcgcttgactgctcagcctggtcgacgttagaggatttgatacccctcgccaccgccaccgccaccgccggtgtcgtctatcctgaccccgacacctcgccgcccggtgccacctcaccgccggattcacatcgcccagtcgccccaccagccagaacctcgtcgcctcgcccgccttgctccgcaggttaggcagccagtacccccaaaccctagcatcctcggcgctgtcggtcgtagaagagcactgggggcgtgagagagggagtcaccagccctcgagacctcctcccgcttctaccactcagccgacgctcccaaaaggggcatctcaaatcccacctcactcccttcgacctctgagatgtcgatatgaatggagacctgtaacttgtatatatattagggcttagttttcttgtttcagtatctgtttggagttagaagcaagggttctcatggcatctccacaagaatccaattctctgtgcttgaagcgaaagcttgttgatgactgcctgtcaaaagactgcaaatctcgccgtgtcaaatctgagaatgagccctcatctgattcatttgctaaacgctgcaactgttgctgcactcgacctaatcttgccaatgattgtgtgaatttcctgaagagtggagcgccaaaccgtgtcatgtattacaaaaaaggttcgtggcacaattttccagagcaaataatgaattccctcatcgatgaatttaaaggaaataaatcaagtgttgtctctgtgatggatgatgaaccaatccttgttgatttcttatcaatgaccctggtcaacctgaaaaccagaaagcagcggtctgttgcctggtttgatgacactggcaagcgtttctttccttctctgttctttgatgaggaaagtgatgaaatgcccaaacaggattctggcaatgttaataacactgcacaaggaataatgttagataaggtcacgagttctccacctgaagtggtcaagcaagttgttcttgaatctagtccaccagtccctcaaaaaccttcaactgtggatgtcttgcgcaagaagatcacatctgtggaaagaggtagcgaagggtttctatttgtccaggacctttttctctctggtatgaacccgtttgcaacaccaaataacatacttcatgtccaccgctactctccaaacgatatcaccgcacaatgtagatttgaagcttttgaaagacagatgaagtcaactaaagaagcacgtggtgatgcaaatgttaagtatggctggctaggatctaggaagagtgacatagttaggattctcattaatggtttgggtactactgcaaatcctgttgagaaagctggtttgagtgctggtgtatatctttcacctgaaaatcgagcctttaccagtgtcggtctttgtgatgttgacgaaaaaggagtgcagtatatgttgctgtgccgtatgatattgggcaatgtagaagctgttgaacctggatcccaagagtcttttccaagcagtgagatatatgattctggtgttgatgattgttcaaaccccaagtgttatgtgatgtggccatcacatctaagcactcacatccgtttagaatatcttgttagtttcaagcttgccccaaaagttcgaaattatttgcttgacctgaaaggtttatggtttaatccatcactaaaagaacttggcacggacatttgtacacttcaacctgtgagccagcctgaatcttgttacccccccggtgcatcttgtaatgtgtgaaacaggtgaaggaccaacttccccatggatatcattcagagttctgtttgcagttattcaagacaatatatcatctgtggcaagggagttaatcttccatcattatgaagagctgaaggaaagcataattacccgtgaagaaatggtgaagaaaatgataattgtagttggagagaaagtacttttggaggccttgaagaagcttcattactgtccatcattatggtacaggccttctgttgaagcagtgtctagtgattctgtaatggcagcaccaggaaaattatccttggataaggcagcggatatggtgcccaatggtcaagattgtccggcaccaagtggtgtgccagaaacatctagttctgctgttgccatgcgtggggcttctacaagtgtggaacccaagcgcagagatcctcctgtacagattgtgccacctggaagctctgcaaccccatgtgccaaaaatcaagattcttttgtaggaagagtgacacctatagctcgtgatgggcttttgaggacaatttgtggaagctcttcatctcctggcggttatgcttctctagcgcaagctaatacctcccaaaccaatggagtttctgccccaggtgtcactcctaggggctatgaatctgctgtaccaagcttgtcacttggaaattccgaaagtacaggcgtgaaacaagtaaattctgcaccaagaatgacacctgaaggccagaagttcctttcgctgggtattgcgccacgaagcccagcactgcgtgatttagtaaaatgccaggccagttcgacactcgttgccatgcctccagcgggcctgggaaaatcacggtccatgaagatcgagggccatgattctctggcaccgagtgtgaaggagccaaaaggcaatggtggtctagcaccaagtaaaacgccaaagctgcatgaacctgtgatagctgatatgagcatcaagagctgtgattctctagcactgggtatcgcaccaaatggccatacccatgatggtccagcatcaggaagtggggaggccaagaaagagcaggcagcactagtaactggctcgcagagtaaatcatctgtaccaagtcttgacgctagcagccatgttaccggggcagcgagcgcccttgtcgcactatcaactctgcgggagaagggcgggcgttagaggagcagcagcagcagcagtgtagttcccgttggatcagatcctttttctctactgtacatgtttctatgtacaggaatcatccccgtcgactctgatccccagtgcgtacggttgctgttggtggccagtcccctatatgttgcttggcagcaaatgttttggttaataattagtttttataaaaggaatattcacccttgttatgttctctacatgtaaattatctgaggtatacttgcattattatgagtgctataatcttttcttttactacatgctctaaactgtatcgtgtattcaataataaaatgttaatttactccctccatt

SEQ ID NO: 28270 - DNA, 888 bp, Zea Mays
caatcagggtatgattgccacaggttgttgcacttcccttagtgcgccaccctccttggctatatattgtaatcccttcaccatctaatacattaattctattcagccacttgtcttacaccctcatattttcttcttaataatataatgatgtatgatgtctagttctcttgcgcgtttgagaaaaaaaagttcaccgcacttagccaacttgtccttgactttatcatttgttgaaactacttttcaaaattgtacgcttattattttgcaggcgaaggtgcatggttgttgaaactctggctgaaaagcattttgatttagctttcagaatgcttcatgagtttgatctcccagctgttgatatttatgctggggtagctgcatccctcgcagaaaggaaaaaagggggccagttgacagagttcttgaagaatataagggggactatagatgatgatgaatgggatcaggttattggtgctgctataaatgtttatgccaacaagcataaagaaagaccagatcgccttatcgacatgctaatcagcaatcacaggaaagtacttgcttgtgttgtctgtggacgtctaaaaagtgcattccaaatagccgcacgaagtggaagtgtcgctgatgttcaatatgttgcccatcaggtcagttatcttcacaaatttacagatgtttgctgcttattaataatcgaatgaattttatgttgcatctttctactaccatcaatgacttgtagccccctgcccctcttcaaaactatagttcagctttgtactactccctatcctaaaattactgtcattttagctttgaaagtatgtcccacaaagagtgtcgtttcgctagctacggaagtcctgtgcctattgg

SEQ ID NO: 28271 - DNA, 2263 bp, Zea Mays
agtgtcctgccccacaccacagtggtggaaggaaaggaaacgggagggagagaaaaacccaggccccccgatctcctcctcccactccgatcgcccgaccgatcgccgagcttccctgttccctccccgcccccgcgacgccgcgacgccatggagccgccgcacgccgagcaggccgtcgccgctgtagcagcaggaggagagggcggcaccgcaagcccgggcaccggcctcgaagggccggtgcttaggcgggggctggacggcggtggggaaggggaggacggggagctgggggcggggcaggaggcgaacgcacggctaccagagcggcctggcgaggcggactgtggctactacctccgcacgggcgcctgcggcttcggggagcgttgccgctacaaccatccccgcgatcgtggcggcactgaggatatctgaggtctgctgcaaccaaatctctagctgccaattgctaatgttttctaatagattcgtagcaaatggcttcacaaaattctcctgaaacgccaagctgataaatagtttcttcttaaaacctatttcaaaaattttagtttggtggaggtgccaagaatggcgcagcacaagactttccagaacgacagggccaacctgtatgcgagtattatttgaagactggaacttgtaaatttggttccaattgcaaatatcaccatcctaagcaagatggatctgtgcagtctgttatattaaacaacaatggattccctctacgcctgggtgagaaagaatgctcctactatatgaagactgggcaatgcaagtttggttctacatgtaaatttcatcatccagaatttggtggtattccggtgacccctggaatatatccaccattacaatcaccttctgtgccctcccctcatacatatgctccaaattggcaaatgggaagatcacctgcagttcctggatcatatataccaggctcatacactccaatgatgatctcatctggaatggttccattgcaaggatggagcccttatccggcatcggtaaatcctgtggcatcaggtggagcacaacaaactgttcaagctggaccattatatggtataggacaccatggatcttccaccgcaattgcttatggtggtacatacttgccatattcttcctcagctggacaatcgagcaataatcatcaagaacatggatttcctgagcgaccagggcagcctgagtgtcaatattatatgaggactggcgattgcaaatttggaactacgtgtaaatataaccatcctcgagattggagcactcctaagtccaattacatgttcagccatctatgccttccacttcgtccgggtgctcagccttgtgcgtactatgcccaaaatggatattgcagatatggagttgcatgcaaatatgatcactcaatgggtacactaggctacagttcatctgctttgccactatctgacatgccaattgctccctatcctattagcttctccgttgccacgttggctccatcttcgtcttccccagaatatatttcaactaaagatccatctatcaatcatgtagtatcaccagtggcaggacccgcgcctgttggagcaatcttgccaaaaggggtattccatcatgataccattatgcaaactcagactcctacaagtgccggcagttcaagccctggtggtgggcgctgattttactgagctggtgggagtgatcctctcatcataaattttctatcacttgacacagagaagctgcggcgagggtgggtttctttaccatcagaataagagagcattgataggtcacacgcaagctcgattcactagcaattttgggttcttccgttcatgtccaaaacgggaaaaaggaaaggtttttgaatgtcaggttccgtagagcatattgggcgccttggtggggctcaggtccataccctcggtaaataattctcaggcaagaaaattttcgttgttatcaagaaaattttcacatgcagagttactgggttcctccacctttcaatttttctctttccttttgttttctgtatttcgtcatactgggagcaaggcgcattgtaatggataaaaaatgcttaattgaagagatcttgctgtcaatactgaaatggctctattcacgagctcgacttgacacttatatattacgtccatgtccatttcataaagtgtagcgtttcagttttgtcctaagctaaagtgttttatcagatttgtag

SEQ ID NO: 28272 - DNA, 1186 bp, Zea Mays
gtcggcgtcggcgtcggtcacggcagcggtggcagcggcagcgccagcgccaccggctccgcgtcctcgtcctcctcctcggcgtcgtcctcctcggagtccttctccgggagtgggagtgggagtggcggagggcatgtttggtcggcgccagtgtcgccgcgcccggcgccgccgccggcgctcgtcataccggcgcgcgcacggagcaagcgctcccgttcgtccgcgttcaccggagccgccgcgcgcgccggggcggagacgcccaccatcctcgtgccgacgcccatgtactcctccgggtcggcccactcggaccccgagagcatcgccgagtccagcccgcacccggcgccgcccatgaagaagaagaagaaggccaagaagcctgtggtccccgcgccagctgcctcttctgacgacaacgatggcgacgccgactacgaggaaggcggcgagcaaacggagccgcagggcggcgccgtcaggaggtgcacacattgccagatcgagaagacgccgcagtggcgcgcggggccgctggggcccaagacgctctgcaacgcctgcggcgtgcgctacaagtccggtcgtctgttcccggagtaccgccccgcggcgagccccaccttcgtgccgtccatccactccaactcgcacaagagggtggtggagatgcgccagaaggctgtccggagcggcgacccgtcgtgcgaccttctccatttcatccgccgccgggattgacgtcccggcatggcgtcgccggactgtcggtcggtctcgtcccccatatagctatatatgtatgcatgcatggttgcttcatcagtcgtcgtcgcccatcatggtcatcatcaccgcttcaccggtcaccgccatggatcgtctcccgcccatcatcacatgcattggtttgtgtcagcatccatccaatcccaatccatcgccgggcgtcccgacgttgttagttcattaggtcttttttttcctcatcgggggctagtgttattttacctttgatccttttgtctattggttaattggttccccctggatgttttttgtttgtatagagagtgaaaaagagagaagaaatagatgagtcagagtggttgctgcattgcaataaaaaaaacaaggagaaaaaaaataaactaatttcccttgaaaaaaataaaaa

SEQ ID NO: 28273 - DNA, 9486 bp, Zea Mays
gagagtaagatgtaccttgataccatcaccagcagcactgtgtcttctcttggtttacataattcgaagagttgctggcttaaaacagcggtgtgggtcgtgtttcctacttgttttagtcggtgatccgtagaacttctaagggttattcgaagattgaatttgaaagagcagtggactgacttgtcactccactttataactttgtactctctgaggtcaactatatctgaaaatgttcgtgcacaaaatcatttcagaagtatagggggactggaggttctattagatggactgggactgccatcaagcaaattttcagtctcgaagcagtcttttgttcccagtgatgaaaggagtggcattctccagctccagatactatatttggaaattctgagggaagcagtgtatcctgtcccattatttttaagtgcttatcatcagcaaaaaattcttaatgctcaggccatcctgaaagctgataaagaaagcactgggccttcaccaacattggaatctttctcaaatcctgtagatattcttgatacatcagaatggaacgagtattctgtaaaattaagcataacactttgctcatttctccttcctcccaaggagatcaaatactgccctgctccaactgatgttacccaaatttcactatccatctcattggcttactgggagcaatgtgcaaggtggattataaaggttctttcaacagttttcccgtgcatgaaagcttgtgctagtgaaactgatttgcctaaccatataaggattttagcaaataccatgcagcattacatgctttgcacgtttaggaaggttcttatttcagcaccagctctacttaaatcttttcgagaggagggtctctgggatctgatattttcagagaaatttttctactttggatcatctttggactacattcaacagaatgatcaacttattgatgctcccaaatcaatcgattccaaaagtttcagtgaaaccgatgtcaacgttcttcaagcagaagctatttccttcttggagtttgctgcaacactcaatgaaaactcaaataacttgccagaatgcttagcattggtaggtgcacttgaacattgtacctatgatcctggattggccggtggtattgttaagagctttcacgtgatcctacaacttgcaactgaacaaactctagcttctttcaagtcaattgatgtgctcactagagtcctgaaggttgcatgccttcaagcacaagaaataaggaagctgtcccaagatgacttaaatcaaaatggttctcaatccagaaatgctcagacgacttattcagatgagagaattaagaacacttgtgcatttgtgaaactggctttcaaccttttcaaggagtatgccacaatatctgacattggaaggattacagttttatgcaatgctaattgcatcgagtgtttatttgatttgttccaagaagaatacctcaggaaacacatattggagcaagtacttgccttatttaggttaccttcgtcatcagcacaacaccacgcagcaaagatgctactatgctccaaatatcttgagactttcactcgtgcaaaagaaaaggaaaaggcttttgcagaattgtcaattgatctattagtcaatatgagagaggtcataatgatagaccgtgtgtattatcaaaatctgtttcgcaatggggagtgcttcttgcatatagtctctttgctgaatggaacttttgatgaagcagttggggagcaattggttcttaatgtccttcggacactgactgctctacttgctgaaaatgatgagtcaaaggctgccttcagattgctggtcggtgcaggttatcaaacactgcaaagcttgctattggacttctgtaagtggattccaagtcctaaactcctggatgccctacttgacatgcttgtcgatgggacatttgacataaatgaaaaagcaacaataaagaatgaagatgtgattatgctattaataaatgttctgcaaaagagcagcacttcactccagcattatgggcttatggtcttgcaacagttgctcaaggggtccattacaaatagaacttcttgtttcagagcagggttgcttagtttccttcttgattggtttaaagttgagaaagggaatgacattgtaatgaaaatcgcagaaataattcagatcattggtggacacagtatttgtggaaaggatattcgaaaattttttgccctccttcgtgacgaggagattattgcaaagcagcagcacagttcattgcttttgacaagtgttagtcacatgctcaaggaaaagggtcctgaagctttctttgagtttagtggtcatgactctggcattgaaattaaatcatcagttcaatggccttacaataaaggtttatctttctgttgctggctaagggtggaaagtttccctgagaagggtttgatgggtctttactctttcttcactgaaaatggaaaaggatgtttagctatgattgggaataatactctaatctatgagtctgtcaatccaaagcatcagtgtgttttgttatctctaagcctccctatcaagcaatggaaattcctttgtgttactcatacaattgggagaaccttctctggagggagtcagctgagatgctatgtagatggcgatctagtatcaagtgaaaagtgcaggtacacaaaagtaaatgaactaatgactcgctgtagtgttggtacagaattgatgcccatcggtgaagaaccttcttctcttggctttgagaacactcttgcttttactggtcaaatgggccctgtttatgcattttccgatgctctctcccctgaacaaataaggggcatttataacctaggaccaagttacatgtactctttccttggtgatcagaatttgcttacaaatgatgactcacggtacaagggaatacttgatgcaaaggatggcatttcatcgaaaatgatttttggcttgaatgcacaggctagtaacaatcggactttgtttaatgtatcatctgcactggatggtcttgacaagagtaagtttgaggcaaccaccatgggtgggacaaaattatgctcccggcgcctgctgcaagaaataatctattgtgttggtggcgtttctgtatttttccctcttctgatccactttgatgatgctgtggttcagaatggagagtttgccaccagagatcaattggctggtcaagttattgagcttgttgcatctgttctagatggaaatatagcaaatcagcaacagatgcatcttctttctggattttctattttagggttcctgttccagtctgtttcaccgcagctgctaaatatcaagactctttcagcatcgaaatacatgtttactattttgaagacctctagcatgtcagatattctattgagagatgctctttcacagttttacttgaatccacatatctgggcatatgcaacctatcaagtacagagagaactttttttgtttctgatacaatattttgaagctgatgggaaatttttaccagtattatgtgcgctccctaggatcattgatgtcataaaacagttctactcggaaaagctagatccaaggttttctaagcctttgctggtaagcaaaaaggtgactggggagagaccaagcatggaagaaattcgcaagatccgacttctcctgttgagtctggcagaaatgagcttaaagctaaaggtttctcaacatgatatcagagctcttgtttcctttcttgaacgaagtcaagatgttgcatgtgttgaggatatactccatatgattatccgcgccctttcacagaactcgcttgtaccatctttcttggagcaagtaaattcacttggtggttgttacattttcatcaatcttcttaagagggaatttgagccaatccgcctattgggccttcagcttcttggaaagcttttggttggggttccatctgagaaaagagggccaaaaatttttggcctccctgtaggacgacctagatccattgctgaagatataaggaaaggggcaacagcagcacctcaactgtttttttattcaatatctgatagacttttcaaatttccactttcagatcatttatgtgctagtctttttgatgttcttcttggtggagccagtcctaagcaggttttacagaaacgttcccaatctgatgctttaaaagataggagcatggctcctttttttgtccctcagattctggtttgcatttttaaatatattcaatcttgtcgagatgcttcagtgcgtacaaagattttaagtgatcttcttgatttgctggattcaaatcctgtgaatgttgaatcccttatggagtatggttggagctcttggcttgaaacatctgcgaagcttgatgtacttaggaactacaaatcgaattctgtagccaaggctgacggtttggagaccaatgagctgattcttgtgaggaacatgtattcgttggttctctcctattgcatattctctgtgaaaggtggctggcatcaactggaagatacaacaaatttccttctactgaaaattgagcaggggcagttaccaaattcctccatgctccgagacatttttgaagatctcattggaagccttcttgagacatcttctgaagaaagtgttttcaattctcagccatgccgtgataatatcttgtatcttttaaatcttagtcatgaactctttgttgaccaaattggaattaaactcttgtttccttcacctgacatgtctgcacatttgtcatctgatgacatcaactcggcagttctagaaattatgaatactgagggcaatggtctgcttacaagtcttccttggagtaatatattatttaatgatggagaaaagttgactgatgattggtggagcttttttgacaagatatggacgcttctgtgctatttgaatggcaaaggccaaaccagattaacaccaaagggtttaaatacagctggaccatctattgggcaacgggcccgcggattagtagagtccctcaatatcccagctgcagaaatggctgctgtagttgtaacaggaggcatcagtagcgcattaggtggaaagactaacaaagttgctgacaaagctatgatgctaagaggggagagatttccaagaattatcttccatctcatcattatgtatctctgcaaagctggcttagaaaacgcatccaaatgtgttcagcaatttatatcactgctccctaatattatctctgaagatgatcagtgcaaaaatagactgcatttcttgatttggtccttactaagggtaagatcccagtatgggcaacttgatgatggtgcacgtttccatgtcatgtcacacttgattcttgaaactgtgatctatggaaagtctatgcttacaactaatatagtaggcagagatgattctactgaagcaaataacagtaaggaggctgggttcattcttaatcttgtacagaaggaccgggttctcactgcggctactgatgaggcaaagtacatgaaggatgcaattgctgatcgcatgaagctggtccaggaactccattctaaacttgatgaacgctcaattcaagacgttgaacaactgcaaagttttgaggatgatgtacagtttgccaagactgctgctatagctgcggacgacagtagaaaagcagctttccagctagcatttgacgaggatcagcaaattgttgcagacaagtggattcatattctccgtgctctgagtgatgagagggggccatggtctgctgctccttttccaaataatattgtgacatactggaaacttgacaaaactgaagataaatggcggcgccgactgaagctcaagcggaactataagtttgatgagtgcctttgtcatccatcatccatcaaatctagtaacgataatgctgccccaactgttgacccatctgctaatgccaagataacagaaaaaatgaagcacttacttttgaaaggagtgcgtggaattacaggggatatcagttctgaatcatgtgaggatagcaacgacatgattgatcctccccagaatgtcccgccagagaaccacactgttagtgatacttctgattctgcagattcctcagattatcctgctattgttcaaaatagaaaagaaagttcatcaaccagtagtgataatgattatatcgaggtgctatcatcagttcactgtgttcttgtaacccccaaaagaaaactagctgggcaattgactatcacacgaaatgccctacatttttcttttgaatttctagttgaagggactgggggatcatctgttttcgacagatttcatgataaaaaagattcagactccaagaatgagatgggaggtgtggaaaaactgaagggcaatcttgatggaggacgaggcaatgctgctgaatctagcgacactcaaattaaaaatcaatctggtaaaatcaaacaccatagaaggtggaaaataactaggataaaagcagttcattggacacggtacctactacaatatactgccacagagatattctttgatgatgcaaacgcaccagtatttcttaacttttcatcccaaaatgatgctaaaagtgttgggtctcttttagtttccctgaggaatgatgctttgttccccaaaggaacaaccagagacaagaatagtttaatttcctttgttgacagaaaggttgcccttgaaatgtctgagagtgctagggaaagttggagaagaagagaaataagcaactttgagtaccttatgattctcaacactcttgctggacgatcttacaacgatttaactcaatatcctatatttccttggatattggctgactactcttcagaaaagcttgattttaacaaatcatctacattcagggacctttcaaaaccagtaggtgccttggatgcaaagcgctttaaggcttttgaagatagatatcttaattttgttgatccggatataccaagtttttactatggatcccactactctagcatgggaattgttctttattaccttctaaggcttgagccttttactgcgctgcaccgcaatcttcagggtggtaagtttgaccatgcagatcgtctatttcagagcattgaaagcacatacagcaactgcctatcaaatacaagtgatgtcaaagagcttatacctgaattcttttacatgcctgagtttcttgagaattcaaattcatatcaccttggcataaagcaggatggtgaaccattaggtgatgttggtctccctccatgggcaaagggttccccagaagaatttattcatatcagtcgagaagcccttgaaagtgaatatgtaagctctaatctacatcattggattgatctcatatttggttacaagcagcgaggcaagcctgcagttgaggcagcaaacatattttattatctgacatatgagggtgccgttgatttggagaacatggatgatatgttacaaaagtccgctattgaggaccaaattgcaaattttggacaaacaccaattcaaatttttcggaagaaacacccaaggagaggtcctcctataccaattgtgcatccactatattttgcgccacaatcgataacagtgacttctgttgtcccgaccatagtcacccctttatctgtattattcattggtttgttggactcaaacgttgtcatgatgaatgaggggctcatactctctgtaaagctttggctaacaacacagttgcagtctggtggaaacttcacattttctggatcactggaacctttcttcggaattggttctgatgttatttctccgaggaaaattggcacttctttggctgaaaatgttgagtttggaagacaatgcttagcaactgttcaaattcgtggtgacaattacttaattttgtgtggtaattgggagaatagtttccagatcatatctctaagtgatggaaaaattgtgcagagcatccggcagcataaagatgtagttagttgtgtggcagtttcatctgacggaagtgtgattgcaacgggaagctatgacacaactgttatgatctggtatgcatttcaagggagatcaaatgacaaaagatataggaatgcaaattacgatctatcaactaaggatcatgtcatcattgaaagcccttgccatatcttatgtggccatgatgatattatcacatgcttatttgtcagcacggaattagacattgttatcagtgggtcaaaggacgggacttgtatgttccatacactgcgtgaggggacatatgttcgatcgattcgacatccgtcaggtgctggtttgtcaaaaatggtaacatcacagcatggcaggttagtgatatactctgatagtgacctttctttgcatatgtattccataaatggaaagcatattgcttcttcggaatccaattgtcgtctcaattgcatggagctaagttgctgtggagagtttatggtatgtgctggtgatcatggtcaaattgttctccgctccatgcattctcttgatgttgtttggaggtacgagggagctgggaaaacaataacttccttagttgtgactcctgaggagtgcttcttggcgggaaccaaggatggtagcttgattgttttttcaatagaaaaccctttgcttcgtaaaaacgccatgcaacggcacaaggcaaaaccttccattggtggttagaggtgtagatcaaaacagtaccagaacttcttgctgcatttcaaataaaggttatcaatccgcaataattataacagagaagattctataactcctgtataaatgtacatacgtcatcagatcgagtttaccattctgaagagtgcatgtgccgatcacaatcaagaggataattcttctaactgcaaaacacatactatggtaactaaagtagattgatgtttcatgttcaagacaagagcaaggggataggaccttcaatatgatactcttgatatttgtagggtggtagctagttagtaatgggggtgcatttgagtgtaatataaacttattttgtgggggcattcttgctagataagagcgagccacagttttcctagatagaatttttaggtaaataggttgccactgacctgtaactattaatctgaacattgtaaatggaactgatgcgggttcataatagaaggcttgcaactttggaaaagatataattaaatcttatgagccgtctgaatttgtcactgaaaagctactaatgtgttgtatgagtgcacaacttgatgttgatttatcgttcgaacatggtagcgtcaatttcacaagcctaccaatatttcgagataacagttacaaaccgatactaatttttccctatttcccatctcgtcctactatgagctacttctgttcaaaaaaaaa

SEQ ID NO: 28274 - DNA, 3046 bp, Zea Mays
gtctctctctctgtctgcgacgactgggtggtctaccgccgttgtcttctccggcgaagagcgcccaccagattatgttgacctaggatcagataaccatgtgctgatgcaatggacacccttcatagcgacccttattccaggagcagcttgcaactgcaaattagggatggctccatgtcctttgagaacaacagtgcagttttggataaacatgaggttgtcagccctcgagttggcatgacctttgagacggttgatctggcatatcaattctacttagagtatggctatcgtgcaggctttggggtctcaaagagaacttcccacagtgttgatggggttaaataccgtgctacatttgtttgttacaaaggtggcatagctaggattaagcctggcctcaaagctcgaaggaggcttgttgcaaagactggttgcaaagcaatgatggtagtgaagtttaatgccagtgagaaccattgggaagtggtttttgtcgagttggaacataaccacccatgcaatcctgagatggtcagattcatgatgtgctttaaagaccttcctgactggcaaagggagcaccgcccattcaatgccaaaactcgattgaacccgaagattcactctggtagaggcaggccacccaaccaaaacaaagatttcatggtgagatccttctcccagtcaaattattccatcgatggggcagggaagactggaaagttaaggtttgcagagggtgacgttgaagcactcttagttttttttgataagatgcaagctcaaaactccaacttcttctataactgggacatggacgatgaaggtcgtctcaagaacgtttgctgggttgatgctagatccagagttgcatatcaacacttctgtgatgttatttgctttgatactgtctatttgacatatcagtttgtcattccattggtcgcatttttgggaatcaaccatcatgggcagtttgtgttgttaggatgtggtctacttggagacgagtctccagagacctttgcgtggttattcaaaaaatggctaaaatgtatgaatgataaatcacctgaagcaattgttacgactcattcaaggccagtagtcaaagcagtcagtgaagtatttccaaatactcggcacagatacaacctttggcatataatgaaagaacttcctgaaatgtctggaagagttgaggataaagaagcagtcagtctgagaatgaaaaaagtagtctatgatacaattacatcagctgattttgagagggagtgggctgaaatgatcaaccaatataatctccatgataaccagtggcttacaaccttgtttgaagagagggcaaaatgggtaccagcatatgtaaaggatactttttgggctggtatctccactgttcgccgtagtgaacgattggaggccttttttgatggatatattacaccagaaaccacaataaagacgttcattgaacaattcgatactgctatgaagctcaggtctgatcgagaagcctatgatgatttccgttcatttcaacaaaggccacaagtcctgtctggtcttctgtttgaggagcaatttgcaaatgtttatacaataaatatgttccagaaattccaggatcagttgaagcagctgatgaatgtgaattgcactgaagtcagtaggaatggttcaatagtgacatacacggtgacagtaattggaaaggagaggaagtttgactacagagtgatgtataacagtgctgagaaagaagtgtggtgcatctgcaggtcattccagtttaaaggtattttatgtagccatgctcttgctgtcttgaagcaagagcttgtgatgctaatacctcccaaatatattcttgatcgatggcgaaaggactacaaatgccctgaggaacctaaggaaacccccatttcacagaaagctgctaaagatacagggaagggctcaaaaccagaaaacattcgggaagatcaagtggacaatctctacaagcatggacaccagtactttgctgacattgtggaaatgggagctactgaccctgatgcgatggaatacgtcctttctgtgatgaaagaagctaaagagaaagtgcgcaagtttgaggagtctcgaaaagagaagaggcctggagagggtccagtttctgctggtaaaaaaggggcgaagttttcgaagccatccacacaagaagttggcaatacaacatcagtttcgactccgactgaagcagtggcttcggtcacagtggtgtcatctcctccaatggcggcagccccaacaatgatggctatggcgccaccttcagcagctgtggccggaggaatgtttttagtaccaatgcacccgcatcccttggtgttcccacccttcccccctgcagtcccaccagcggtagctcctgtagcaccacctgctgcaccagcaaccaatgttgtctccaacacctcaaagaagcgaaagaaaagaaaggggaataattgatcttctgatgctgatgaaatgatgaatctaaaacaagatcagatcggcgaagtagaaaatgagtttgatctcacactacgcatcaggcctcgacatgagagtgagctatcgatttatctcttctgcgcgggttggtctttcgagaaaaatctcttctgcgcgggttggtctttcgagaaaaatctcttctgctggctgtgctactgctacctatgagactacctactgcagtctgcatattcctggggtgttggcttcactgcttcagctagatgctctgctgtggctgacgcagttcagtctaaggagagatgcattttgggctcagcacactgatcttgattactgtagattactagattagattgcctgtagtgtacattatcgtcctcagtgccggaagtaatctaacatgtagtccagcttatgaatgtaaagatctgtttctgattatggattgcatttatggggaaggatctggatcttattaagaaattctgatttacaagcatttgccgtcatttgagtttattggact

SEQ ID NO: 28275 - DNA, 843 bp, Zea Mays
gcaaaaacttgaaggcctcaccatcactatgtttgaagagtggatcctgaaacaaaggagcttattaagagaacccttgacattgggcatgtgacctatgaagtccaagtccaactgcctcaggtcagatttttagacatatgggaaccagctgttctagcaataaagagggaaggttacagcattaaatgtaatgggcagcgtggtgttctaatcacagagaagtttcagcaaggaactgctattcatattccatatgggcgtccaacagagttctcgattacatctgctgcgtctgctgatggtgtcagttataatctgaagccagtagaaaatacactattgcgggataccattgttctagtactaaggttgttcaaaaatatggctcttgagagaagaggaagaagaaagaagggtcttttcttcaagtagtttcagctatattacacttgtttctacgctgcttctaatgtatgtatgtagcattttggttgatcggcgtggtgcacaagtgttctgtttctgtaaaatactagacgattgtgttgtaaaactaaccaaaatgccaagtacacatgttaatattttctgccccactcagaagagctagagttttgccataacgagtgcagctccgcgtttggcttccaggcacagctagatatagttcaataatgtaatcgggtgaaaaagaattgggcggccccagaagatgctctttgagattttatctttgccaggagtcgtccgccctacacctggtgggcggtgtctgcctgcctggcttgtgacttcaaaattggcagcgtggagatgatgaggtcacggttcacgcccgag

SEQ ID NO: 28276 - DNA, 205 bp, Zea Mays
cctggatatagtacgcccacatatcccgcccacggtacaggtggctccgcggtggcgcccccaggttcgatgacgaattccggacgagtcccgccattccccgccccgaaaggtcacgcaaacacacggtgtatgtctgtgaagcactcagccctcccaatttggcctgaccggcaaggcagccgaaaggcaccggtaatgcccc

SEQ ID NO: 28277 - DNA, 1332 bp, Zea Mays
gggcaacccaaaagacgatgcaaatgaaggtaacatttgtaggcgtcgtagcttggttttgcttcacgagcacaacaagccatccatctatgatctatcccgctccctccatccgcaagcaaaagctaatcgatcttcccatgatctccttcaattgctactaataaactactcctataatagaatcagttacctcagttgctcgtatagggcatgttctccaagctactccgtccccagtccccaccatttcaaattgcaaataaaactgcaatctcgcagcggctgatggattagcaagcaggacaagagactgagatccatcctccagacacgcgcacgccaaggatcgcattcgccaagcaacgtcgggtcggcggcgcgggggcgatggagacgcggcggccgcggcgcggctggaacaaacgcttcgtcctcccgctcgcgctcctctgcctcgccgtgctgctccccggcgcgctgctcccgccgtccgcctcggcgtcgtcttcgtcgccggccgcgggaggtggcagcaggaaacgccggtgggttgggtttgactactatgtactggcgctgcagtggccgggcaccatctgccgcgagaccagcaactgctgcgacaccaatggctgctgccgatcacagcctctcaagtggttcacgattcaaactcatgggacctgtgcttaccctgaaatacaggatgaatatgactacttctccacagcactgtatctctacagcaaatacaatgttacgaaagctctgagaaaagcacgtatccggcctacaagcggcagaaaatacgccgttggccatattgttgccgtcattgaatatgcgtttggggcaatgccgtcactcgtctgtaagaacggctcagttcaagaactcaggctctgcttccacaaggattatcagcctcgtgattgcacgcttgaggccggctctgcaccgaacggcagaagctactgccctcgctacatcacgttcccgtcgtacaaaccgtccgtggtggccaatactacggaggggatcaacaaccaatccaatggcgaggttccgagctacatgcgtacgtctgactctgagtagcgtccaggactccaggttctgtgggcctctgccgagccgagtttgtatcaaatatcaatagagcgagacgccacggcgtgcttgcaaaattaccggcccggtatggtcctgtataattctttcattcacagtatcgaatgactggccaccgcgcaccgggatttggaaatgaaatgtgaatgttaatgtatattatattcacttgactgtaccagattcgtgcacaggata

SEQ ID NO: 28278 - DNA, 1009 bp, Zea Mays
ttagtttgtcataaaaaagatgaggaagggagaggggtggtgacttgagatattgccagaaatgttgccactataaacctccacgtgcacaccattgccgtgtttgcaagagatgtgttctgaaaatggaccatcattgcatttggattaataactgtgttggacatgagaactacaagattttcttggtctttgtattatatgctgtggttgcaagcttctatgcattgattctgatcgtagggagcgttttgcatagtgttcctaaagatgagcagccaggcagcgattcttctcgaacatccatttaccatgaaggagttagagcgatgtggttggcagaaaaaggtggagacctctatcatcatccatatgaccttggtgtctatgagaatcttatttcagttcttgggcctaacatattttgctggctctgccctgtattgaatactgttggaaatggccttcggtaccgtacatcctatgatattccggtatctacaccaccaaaaaaaatagcagcacattcacaataggtagtagttgctaatttgtgaaaggatttcccattaagctgctagaacgtgtttggtctgaacgattccgaaggcaggtcgtgtaactctgcaacatacaggagatgatgactaccacagcctctcgccaggtgtttgtcctgaatcgagacatgaactcttaaccttgttttttatttcattcttgacatacttgataatgtctcgcttgtaatctggagtaggctgttcttaccaaaaagaaaaaaaaactgcaattctgttgtaaagttagttcgtatgtttgggggccatgtaatgtagccaagggccatgaaaccgattttcccagagtatttgtgtacatttgtttaaaatgaaatgtaacatctggtgtacttttgcgcgcctaggcatacgtaggtaaccactgagagctacttcagggctttcggttatctccatcgaggagattggtatgaattggaagaaat

SEQ ID NO: 28279 - DNA, 985 bp, Zea Mays
cggaaaaccgcgccagcaggcccagctccaaccaccgctcgtctcgtctccttcctcctctgcttcctcccgtctcgtctccgacgacctcgtctttcccccccagccagcctcgcctcaccgactccccgatccggtccctcccttcgccagctatgcatccctcctccggcgcgggggactacgccccttactacccaccttatccctccccggccgcgccgcctcccgccgcctacccgtcggtgtccgccccggcttctgcgcccccgtactcgtcgtaccccgcggacttcgcccccgcgccttcgtaccccgcgtacccgcccgccgacctcccccactacgcgccgccgccggctgcgcccgcgcccccgcagccgtactacccctacgagccggcgccggcgccgccgctgccgccgtccccgcacaacccggtgccctctccgtacccgtcgctggatcgggcggggagctacggctacggatctggccctggctccgggtacggccaggagctgtacccgcccaagccggcgggcgggtggtccgacgacggagcgtacgcttacaacgggggcgacgcgccggagccgtacgggtccaggggcaccgcaccgaggccgggctcgggatccgcgctgtttgatgactacgggaggtccattggctcagctgccgataggggtggccgtgggggtagcgcggccagccccaaggtggtgagggccgtgcccaaggcagagacgtcagaggacgtcaggggtggggtgcagaagttcagggtcaagctgctgccggagggcgctgggagccccatggatgtgctctgtcagtccacctcagggcctgtcacgccaggagggagctcaaagtgtgggattttaccatcaatgtaatccttcagtatctgtcgagcagtagtggaaacgatggtgatgatcaaggcgtggatgctatttggtttgtgaactcaacttat

SEQ ID NO: 28280 - DNA, 1632 bp, Zea Mays
aaagttttctctgttcagatattgtgatgctctaatgctgttggatctgataagatggatgctaaaatgcttggtgaagcaagtggatctgtgacacccattcatgtttctagtgaacccgatgcctctgacaatcgtgaaattaatcgccatgagagtcctcatcctttaggaaactctgcaggcttgacattggaccagtctcctgctgcagacgaaaatgaagcgaaaataactacagaaaggacacccccagtatccataggtgatgctaagacagtcaaggtgcatacacttcctggagctacttgtggagttaacttgcagtgcatggttgaagcagagaacattcaacaagagaaatacaaagaaaccaatgggagattgattgctgaaaatactatttcagagcagaagtgtgaagatagatctaattccagtcgttcaaattcatgtgctactccggtgactgtggatcaatgttctcatttatctaatgagattgggaaaggtgacaactgtttatctagtgaagtttctgttggagctgctcccataacaggcaaaactgaatctagtttgacatctgttcattgcgctaaccaagaggatgagaaagcttacgcagcccctgtggacactaaaatacctttagtcattatggatgaaaagcctgataagcatgagtttaaaactatggttgtagggtgtagtcaaggctcaatggaacctaaaagtttggaaaatagaactagtattgtaaatggaacctcaatggacgcctatagagataaaatacctaatgaagatcacagtgcttctgcagttgacactggagtatctgtgaagctatatgctcagcaaatggagacgattgaggaaaaaactggctcagttttaccagattcggaacactcttctagttgcaaagatgtgttggtgaccttgactgagtcaaagccacttaaaaatgacattcttgaaatggatgatgcagttattaaggtaggaatgactggtcagagtttcaatgaagcaggaataacagctcctgcgctcaacatttcagatcctgttggtgaaaatgtggttaagcctactcaaacttgtggggagggtcaacttcgtggagaggatgtcatatacagtaataacgtcatggaagatgacctaacttctagagcatgctgatgtatgatcattgtattttctgctagaaaaggaactattttagtggacatcaagaatagctggtagtgggcactcattggtataaaggagagatcgttgggctggcgactggcatggatggatttttactgtgtgcgaggcacttctgggagcgcggggaccgtccgcgggaaggcatgacacagttggctcttaagctttcctgacttttggttcttctacattgaggctgttgaccatggagcctttttttagtagtagaacgtgactcgtgcgaaggacactgcagaggatcagccgaagggatgatgggtgtatctgtagaatgtctgtatctgaatggagtcgatgcgcccttgtcgccacatttcgacctttcaagcagtctgatccggcagtgtaaagatttgccttcaatatcttccactttgtgcaccttcg

SEQ ID NO: 28281 - DNA, 1796 bp, Zea Mays
gtttacaccgagggttctctctttgtctgttcactgttctactgggacgaccccaaatccccaaatcgaaaggggccgtccggctcagggtttctcgacggctccttgccctctccgccatggacgcacagcgagccctccttgacgagctcatgggcacagctcgcaacctaacggaggaggagaagaaggggcacaaagagctgaagtgggacgatccggacgtgtgcggcccttacatggttcggttctgtcctcacgaccttttcgtcaacaccaagagcaatatcgggccgtgctcgaggatccacgatccgaagctcaaggaaagctttgagaagtctcctaggcacgatacttatatgcaaaggtttgaggcagagcttgcacaacaatgtgagaaattggtaatggacttagatagaaagataaggcgtggtcgagaaaggctggctcacgattctgctgtgccaatgccaatccctggaaaattagctgagctgctttcagtgcgaaaagaacaggtgaagaagctgctggagcaaattgaggagcttggtgaggctggtaaagtggatgaagctgaggcacttatgagaagggttgacattttaaacgctgagaagacagctttagctaacgaagcagacaacaaagtagctatgcttgagaagaagatggaactttgtgaaacatgtggatcattcttagttgctgatgatgctcttgagagaacgcagtcccatgtgactgggaaacaacacattggttatggcatggttagggatttcctggcagaatacaaggcagcaaaagagaagacaaaagaggaagagcggcttgcaagggagcagaaagcagaggagcatcggaaacagaggggaaaagagtatgatagtgggggcagggatagagataccagaagggagaggtctggggagcgtgactttgaccgtgatcgtcagtatgagcgaagcagaggaagagatagggtttatgattacagggacagaggatcagaacaccgaagcaatcgctacagaaatgggagggattctgaaagaggtggacacagatacaggagtggtggtatgacaaatgaccgagggagaatgaggagcagatcacgttctccaaccaggcatggctatggaagatctagaagtccagatcattagctgcctagctggacatttagatagttttattcacagttgggactcatgagctctgttggaaccctacagtctccctattttgcatggggaaaaattcccagttaaatttagtaaggccggtactggatttcatatatggatgatgatgtttacagcttatagcaggtaaaccttgaacatcgatgtttcatgttacacactttttatctcccttaataactctgctagaaaccttagttctgctgtttggcttagatttttacactactcaggccaggtatctttttctaccaaaacttatgtgcataattatgattaatgtggctttagtagttgatccatgaaaattgtcaatcatcaaccatttcttttcctggaaccgttgtagtgtacaagagatcaagctttggtttgtagacaatggtgccctggctagaaccgcgaggattgggcctatttcctgactgtctagttattgtctcagaagtctggtttagataaggttctgtttccgcggcaaactattagatacctttgcagttgcggagttctgtaattgatgtattatttatgcagatagtgtagtctaactatgcaaactaatatatgatctgtttc

SEQ ID NO: 28282 - DNA, 1184 bp, Zea Mays
cgacgatttcccccgggttttatttgaatttttcgggcaatgctacgtgaagcgtaactctatttcttgatcaacatcaacatgtcgcgggaggataatgtttacatggccaagctggctgagcaagcagaacggtacgaggaaatggttgagtacatggagaaggtggctaagaccgtagatgtggaagagctcaccgttgaggagcggaacctcttatctgttgcctacaagaacgtaattggggcccgccgtgcctcatggcgcattatctcctccatcgagcataaggaggagtcccgtaagaatgaggaacatgttattcagatcaaggagtaccagtcgaaggtgttttacctcaagatgaagggagattatcacaggtaccttgctgagtttaagactggtgctgagaggaaggaagctgcagagagtacaatgatagcttataaggcagctcaggatattgcgttggcggaactggcatctactcatcccataagacttggacttgcacttaacttctcagttttctattacgagattctgaactctccagacaaagcttgcaaccttgccaggcaggcgtttgatgaggctatttctcagttggatacgcttggcgaggattcatacaaagatagcaccttgatcatgcagctcctgagggacaacctaaccctatggaccgctgacagcacaacggaggacggcatcgaggagggcaatgaggcctcgaagggtgatgctggtgagggtcagtagtctggtaaaacctcgattgatggttcggcatgtttttgaagtctactgtgttggaaaccatgttctaatagaaggcgtctcccgctccatgcattccaagattctgtcctccccctccctccccccatgttgtaggctggtagtggtcaaattagttggccctgggtccatttggactgatgtattgtttactgctattgaagtcattcgttctcgttttgctcttgcagtggatcgctatagccttgtgttttcaatcttttagggcctgtttgggaatgcagtttcaaaatactgtaattttgagataccatagtttataattgtacatgacataaatactacggtattgctttaccacaataaaactatagtattgctcaaaaccgagatctgtttggttctattggaaaaacaaa

SEQ ID NO: 28283 - DNA, 2655 bp, Zea Mays
caaaaacctaaatctctcaccccgcgcgtctctcttctttccctctgtctaccgcacgcgcccgtggctagctgccagccgcgcgcccgccgccaccccgcgcccaccccactgcgcgccggctggcgcgccgccacccagcgcggcccgccctcgccaccctgtggccccgccaccgccccgctgccccaccgttaaggcaggtgatgcggccgacaagggggcggcgtccaggaacccacaaaatcacgtcgtggtggggaggcacgggattcggatccggccgtggccacacccggaccccatcgaggtgatgcgggcgcaacggatcatggagcgtgtgcaggaggaacagcgccgctggtacggcgtcaaggagccggggcaggtgctcgccgtcaccccgacctactcacgcgcgttccaggcgctccacctcaccggcctcctccactcactccgtcggaatccttgcgcatactggcaaggcagaccaactgctgctcagcgaggaggacaagcagaatatgcctcttccagtccatggccctgcttgcaagtcctcagggcatctgattggatggcacacgttcaactcattgcccttctctaggaagacggccacagttgttggtgaagcagcccctattctgcccagggatttctagtgggctagttttgtgttgaactcgaggatgctgtggaaggaggctgacggcaagcctgactgggtgaaggatcttgatgctgtgggcgagaactttgaggagcgctggttaaaggcatcaaagcgcagtgccgctaagaaactgtcaaaattgtcgaggtcgcataatgattcgctgctgtggatcaacaagatacctgatattatttctattgacgacgaaatctattcaaatgacgatgatccagagagatgggacatgcagattttccgatcaattgattcgaattctgtcaagggttttccaaaagatccacgggaggccactagtaagaatcttgtttgtgggaaaatgtactgattgatatgagcgtgcatacaacatatgtgaatgccatccgaggtgctcaacatttcatctatattgagaaccagtacttccttggctcttcatttaactgggattcacatagagatgttgaaaatgacaatgcaaattatgtatgagataatctataaggccatgaaagaagtaggactagatggtacatatgagccacaggattacctgaatttcttctgccttggtaaccgtgaagccgaggacactacttgcacatctagtggaccattctcaaccagtaacccacagcttggatatccaatcaggaccaagctcggaataataggagattcatggtgtatgtgcactcgaaaggcatgattgtggatgatgaatatgtgataattggatccgctaacatcaaccagagatccatggaaggaactagagatacagagattgcaatggctgcataccaaccccagcatacattggcaaatatgctttctgctcctcgtggatagattttcgggtacaggaaaatacagtgtacgtgttgaaactgttatcctgccccaggttgggatagacggtggtacattcgtgttggtagaactgtgagaagaaaagatgggaaaactttgctttcttggctgtgatgattatctgctcaaacaagacatgcaaattgcaaaactcttaaaggatagtattagttctatttgttcatatagttctacagctagttgtttcttgctttgttcatggattgcaatactggataagatcatgatggatgttgtgtgtgttttaatcaccatttctaaaatttattctattggtaagacgattctaagatataggtcggagatggattccttgcatatacataaatagataaagaagcaaccggtttataacaaaaatatgtcttctattttgcctgttgcccaattctcttttagtgtagcctacttacaataattaaaagaagagttggtgtctgtttgagtagacaactaagtgcatatataagtacgtgcatgattttgattactaattgtgattttgatgatctttcttttgaagacggtctaacatataagcgcatgatttagatgaacggaattactattgtgccatttctgaagaatcttactgatttctcttgccttcttagaacaacatgggaagaagtgatgatgacagtccatcgccgccaagaggtcacaagagaagaacttgcagcccaagtcctcgtggtagttatggaggccatggcaagcgccccacaactaatcttatggtgacgaatcttggtccggattgtaggattctaactctcatcaagtgactcctcccctcacgatgactttgcggacagatgtctcaattatagtggtggagctacgaacaacaatccgatgtcctgatcgagagcgatggagctaatgtttgaacttgtgtgtttgaacttgtgaactaaaaatgtgaactatggatgtgaatttatgtgaatttgtgaaattatgtatttgaacttatgtgaatttgtgaacttatgtatttggacttgtgtgaatttgtgatatgaatatatatccatgtgtttgaaatttgtattgtatgtgatattctgtgttgc

SEQ ID NO: 28284 - DNA, 4924 bp, Zea Mays
cgggtcccctcttcctcacctttcggtctttcctacccgcacaccagaagcgaaggaaagcccacaactgactgaggcgcacaccatccccaccgccggcgcccgccccgcctcttcgccggcgacgagccgccgccgaggagctcagcgtggaggggcttcctcgcgtgtgggagaagctgccgttttttttcctgagcgggtcgtcgttgccgtgtgccgccgagattagagtttttcaaagggtgtctccttcgcggcactggcctcctcgagttagtttatttggagacagctcgaggctcgcttcggaagcgacccggtcgccgccgccgccgccgccatcggccgtctctccccgtagtcgccgtctcggggctggctgtggtgatgagctccgtcggatcctagggtttttgaattctgagtttctgacggcttcgtcgagctgcgcaaggcgtcaagaaggagatggtgccgggtgggttgttcgggtgggcgtcgccccatgtacagccgctcacacccgtatcggaggtctccgagccgccggagtcgccctcgccgtacggggacgggccggcgggggatgccggcgtgggggcaagggagggggaaggcgctggcgccggagaggaggaggtggaggacgacgaggtcgagccgccgcccgcggcggtgtccttctggaggcttttcgagttcgccgatggggtcgactgggcccttatggctgctggggcgcttgctgctgctgcgcatggcgcggcgctcgttgtgtaccttcactatttcgggagggccctgaatttgctcgactctgagcgggttgggtcgtctctctatggacgcagcgatgagctgctcagccggtttaaggagcatgccttgtatattgtctttatagctgctggtgttttcgtcgcaggatggatagaggtatcatgctggattctcactggggaacgccagactgctgtcatcagatcaaaatacgttcatgttttgctaaatcaagacatgagtttttttgatacatatggtaacaacggagatattgttagtcaagtgctcagtgatgtattgctcattcagtcagctataagcgagaaagtggggaactacatacataatatggctacatttgttggtggtctcattgttggccttctgaattgttggcaaatagcacttctaactcttgccactggacccttgattgttgcagctggaggaatatctaacatattccttcatagactggctgaaaacattcaagatgcatattccgaagcggctagtattggtgaacagtggtttgaatcaagcagctacaaacttctattcattcgaccaagggcgcattgctgcttatagactatatgagatgattagtcgttcaacttccagcaccaatcaagaagggacaaccttaccccaggtgcaagggaatattgagtttcgaaatgtgtactttagctacctgtctcgtcctgaaatcccaatattaagtggtttcttcctcactgtaccggcgagaaaaactgtggcacttgttggtagaaatggctcggggaaaagcagtataattcctctgatggagagattctatgacccaacattaggtgaagttcttttggatggggaaaacataaaaaatttgaaagtagaatggttaagaagccaaattggtctggtgacacaagaaccagccttattgagtttgagcattcgggaaaatattgcttatggaagatctgctacctttgatcagatagaagaggcagcaaaaacagcccatgcccatgggttcatcagttcacttgaaaaggggtacgaaacccaggttggtcgagctggtctagcactcactgatgaacagaaaatcaaaatttctattgctcgtgctgtgctttcgaatccatccattcttttgcttgatgaggtcaccggaggacttgattttgaagctgagaaggctgtacaagaagcattagatgttctgatgttgggaaggtcaaccattataattgctagacgtctttgcctcattaaaaatgctgattatatagctgtaatggaggagggccatcttgttgaaatggggacacatgatgaacttctaaacttggatggcctttatgctgaacttttaaggtgtgaggaagcaacaaaacttcccaaaaggatgcctaccaagaacagcagggaacataagtcgctccaatctgaggatgcattggtgagccaatactttcaagaatcctcctctcctaagatggcaaaatcaccatcactacaaaggacacatggtatgcttcaattttggcgatcagatgccaacagaaactctcatgattcaccaaaggatctaagtccaccttctgaacaaactatggacaatggaatacctatggttgcaattgaaactgaaaggacaccgtccattaagagacagaatagttttgaaatgaaattacctgatcttcctaaagttgatgtacatcctatacagcggcagtcatctaagaattcagaacctgactcacccatatctcctcttttgacttctgatcctaagaacgagcggtcacattcacaaacttttagcagaccgcagagtgaacaagatgatacgagttctgaacgtagtgaactggatgaggttcagcaccagaaacctccatctttttggcgtcttgcaacacttagtatcgctgaatggccttatgctcttttaggtacaattggtgctgctatatttggctcatttaatccactgcttgcttacacaatagcacttatagtgtcagcatactatcagatagaaatccgtgatatgcgccatgaagtgaacagatggtgtttattcatagtgggcatgggtgttattacagtgctagtcaactggctgcaacatttctattttggaataatgggggagaaaatgactgagcgcataagaaggatgatgttctcagcaatgctacgcaatgaagttggatggtttgacaaagatgaaaacaatgctgatacactgtccatgcgcctcgcaaatgatgctacatttgtccgtgctgcgttcagtaaccggctttccatatttatacaagatactgctgcagtatctgtggctctccttattggaatgttgttgggatggcgggtggcacttgttgcacttgcaactttgccagtccttgtcatatctgctattgcacagaaattgtggcttgctggtttctcaaaaggaatccaggaaatgcatagaaaggcttcgttagtacttgaagatgcagtccggaacatatacactgtagtagcattctgtgctggcgataagatcatggaactctacagactacatcttgggaagatactaaaacaaagtcttgtgcaaggattggctataggctttggttttggtctctcccagttcctcctttttgcctgcaatgccttgcttctttggtacactgcaatttcagttgaccgacaacgtctgacaatagccacaggactaaaagagtacattctgttttcgtttgcatcattcgcgttggtggagccatttggactggcaccttacattcttaaaaggagaaaatctcttacgtcagtctttgaaattattgaccgggagccaaaaattgatcctgatgataccaccggcttgaaaccacccaatgtctacggaagcattgaattcaagagtgttgatttttcttatcctgttcgccctgacattcttgtcttgagtaattttaatcttaaagtgagtggtgggcaaacacttgcggtggttggggtctcaggatcagggaaaagcaccattatttctttgattgagagattctatgaccctgtttctggccaagttctgctggatggtcgagatctgaaatcatttaaccttagatggttgcgtagccacatgggcctgattcagcaagatccagttattttctcaacgacgataagagaaaacattatttacgcaaggcacatcgcaacagaggctgagataaaggaagctgcaaggatagcaaatgctcaccatttcatcagcagcttgccacatggatatgacacccatgtgggaatgagaggggtcgatctaacacctgggcaaaagcaacggattgccattgctagggtggttttgaagaatgcacctatactgttgttggatgaggccagctctgcaatcgagtctgaatcaagtagagtggtacaagaagctctcgacactctggttatgggtaacaagacaacgattctcattgcgcacagggcagcaatgatgaagcatgtggataacattgttgtcctaaatggtggtaggatagttgagcagggcacacatgactctctgatggatcagaacggtctatatgttaggttgatgcaaccccattttggcaagggccttcgccagcatcggctagtgtaattattattgagcttgttaggtgtaaattatcctagggcatgatcaggtttacttccgctcttggtgcagccactcagggcccgttttggcacatgaaaaatgctgggaagttgccgccttgctggtgttgttctgagtaagcggaatgcagacctgatcttgacaaaaaaaacctagcttggagattcaggtaagtaactgttggaactgtagggcacaactcattctggaaatagttagcaagtttggatggcattgtaattgttgtaatatgagttgaaacattctttcagaggctcgtgcttgtgatctctcgcatctgtaatgttagtgttttgatcatttaatgtgtgtatattgttcgattcttggtcggtccgagtcttgtagccgtgatgaaaagctttttacatggaaattctgagcttggcgttattttcgtccacgagaccattcagactacgagttgca

SEQ ID NO: 28285 - DNA, 828 bp, Zea Mays
atgggtggaagaaaaattcagatgcttatcctaatattgtctttaatgcctagggatttcatggctattcctgtgagtacggggtcctcagaatctgcctttagtgcagctggtagagtccttgaaaaaaataggacatcactatctcctgaaacactttacgctttagtctgtgctaaagactggttgattggattcaatgacgaagaagaaggtgaaccaatgactggaaagcgaatgtttgattcagatgatgaggaatatgattgggaaatttgaagcaggctaaggagttccttggtgcttccggtgacaagcgaaaggaagtcaattaactctgaatcagtggttctgctgcaagtttgcatgcaggttacacacaacattttattgaatggaaagaggacactcggtgaccacaagatcatcagatgatcatttgatgaactaattctcatcaagcatcaatgtcaccaactgtgtagaaatactgaattttagcatggagcgtctttgtaaacattttagcatggagcagtttctcatcgatcatggctgtcaagttctatttctctacacagttgcactttgtggttgttttctatcatttgtttgtgagcccatggattttactaatttattagcttgtggtggtgcttgcttgtatatgaaggcccttggattggcccgtggatttttaaaaggatcgaggcggattaggatgtcggggcattaaaaaacggattgaattgagttgtatcaaatcaatttggatttaagtagggctgggttcactttttaaacttataggattggagtggggttggg

SEQ ID NO: 28286 - DNA, 2889 bp, Zea Mays
tctcctactagtgagatttttcttttgctgattgctgatgggttcttgcagatttgggtcggggacaagccatgaacaacgcaaccaccagttgttaactaaccctcttttaaacttcaagcaaccaaagccaagagcagaaatggttttccaaaagtggtcgtcgtcgtcagagatggagtcgtgcggtggaggccaagtcccggagatgccacgcgttcccaagtccgcgaggggcaagagatcggtcaggaagaaggaggcccagagcccggcccagatgtctgcaatcgaccttctcgcaaccgtggcagggaagctgtttgacgagggggcggggtcgctggggaacacgagcgccggtgccccggccttggctgcgttcgcaaaggatgccctggtgaagcaggagcagtgtgatgagcaaatgaagctgttcaagcatgaggcgacggatcaggatagctgcaatgagagtgcaatcctcccccacattgtgctccagcgggtggtgaataatgctaggaatgaggatcctaaggcgaagtctgaggtccaggacaaggaatcctccatgatcagctatacgaaggctgaattgggttgtaattttggtgtgatcgcagacaggtggtcgcctgaatccgtggaatcaggagccttcacaggagatgcagtggcgagactgatgatgacggccccggcaggatttcataagaatgcacccgaaatgtatagtttgcttgattcaatggatgtggatgtcaagccgcctcctttggtcagctctgacagcaccggcgagatgccattgcatggcgataaaattcaccgctcaacctccttaccgagggccccaaagggggtggggttttttgctgtagatagagatgatgacgacgacaagtcctctgggtgcactcatccgagcaccgccactaacaaggatttcacatccaattgtaaagctgagtataatagggtaaggaagctgctcactagtaagcacaggaaagttgctccagcgaggattcacaaatctgatctttcctatagtgatgtcgagcggaagccttctttccggtacaaaaaaatgcatacacgacagaggacacaaaggagtacattcaagcggaggaagctctttgatcgccatttagctctagcatctgaatttggtacagcaaatggaaagggaaacacaaaggttgccggaagaaactccaatgctgtgtctttggaagcaaacaaggggactaattcaatgccattccagaaatcttgtgggtcaaatgattgccatgtgaaacttagaattaagtcttttaacgtgcctgaacttcttgttgaaatcccagacagtgcaactgttggctcactaaagaaaactgttctcgaggcagtgactgcgattcttggaggtggcctacgtgttggtgttcttcaccatggaaagaaagtcagagatgatagtaaaacgttaattcaggctgggattggtcaggatgatatgctggacaaccttggcttttcacttgaacccaactgtactcaaaacccacaagtacaagctcctgaagatgtcagtttcctcgaaaacattgatactaccgaacccctcgcaaggatcacacctgctgactcgtcttctaagcttggtgaagttgacgtatcacaggagcttgcattaaccccattagcaatgaactaccagggcagtgatcatgattccgtgcactcccctggggctgtctcgtcgcgcgataaagactcgcgagccttatttctggttccagctgcagatcccaatgcaggagctgtagttccagcaaataagactaagaggtcaccagagcagggacaccgcagaatcaggcggccgttctctgttgctgaagtagaagcacttgtgctcgcagtcgaaaagcttggaaccggaaggtggcgagatgttaaacttcgcgcttttgacaatgcaaagcaccgtacctacgttgaccttaaggacaaatggaagacgctggtacacacagcgagcatctcgccgcagcagcggcgtggcgagccggtgcctcaggagctgctcgaccgggtcctggcggcccaggcctactggtcccagcagcaagccaagctccagcctaagacgccctcgctggctgaggctcgcttgctcacccaataattcgatgatcccggctgatggcctcctctgaggccgttgcagcctttgtataaagattctctctccttgtgaatttaaccaaaggaaagggcatttctttggcaattgtacattttgatgatggaagaagaagatgatccatgaactgagatctgcagtgtctacctactaatggctcacaatttttgcaattgtgattaagaaattcaaggtgctgcttgaccaagctcggctccggcttccagtttttggattctcttgtgaagaagttgctgcctcttttttatacagcagaagctgagagccgaacagtgtatttggcttgaattgcagcctatatagtttcatccactcatacagacggccacaaatgccgtaaaaggagggtagcttcttttgctgagtctagtcttgggagcaaagctcaggaccgaagtctagacttgagacggagcgggggccaaagcggcacccgaatgaaagcttcagattcttttgttcagttaaattcattctttggtagtggagactgacggaaggataggagattaggtggggtggatctttggttctctttttctttcttcttctattattacattattagttgtattaatgtactatattattttaccaatcttgtagttaccctcaaatttgtaattggtgaaattaacaaaattgaaggaaatacatttccacca

SEQ ID NO: 28287 - DNA, 438 bp, Zea Mays
cagaacctcccaagttattgggcccacatgcacctgtccttgtctcaaagacctcagactgctatgcatgtgcatcagataacttaacaggatccgtccgattgcctcaaggacatcggataaaccacgaacaaccagaaccgcgagattaagtaacacaaatcacatacaccaacctttttgcaacagaattcttactaccaaattttacaagttacaaaaattttacattattttatcggagtggttacaaaagtataagtttgaaatatatgctagctcaaatgaccatcctcaataagaagtatagaagggttacttagacttataagaaggccgagcccaccggcacttaacaccatcacaacaacacaaggttagacctgaaaaacaacagggaaataaaccctgagtatggaattactcagcaagtcttac

SEQ ID NO: 28288 - DNA, 321 bp, Zea Mays
gcaatgctcagctttaaccatctcctttggtaagccttatacttcacatgagctcccacctttggtgagttcatgcacattattccctgacaacttgttgagcgatgaacatatgtgagctcacccttgttgtactcacatccaccccaggtcgagaacaggtaccacataatgaggcgcatgaaggaattctacgatgagttcgtgagtggtctaggtcgtcgtctcccagtcaactttgggttgctggatcattgtcttcgtatgatgtaattatttaactattttgtacagaactgtgttatatattaatgatgtgac

SEQ ID NO: 28289 - DNA, 1136 bp, Zea Mays
tagtagcctggcagttccgacgctgcttgcggcggcgcttggcaaggccgacaaacggcgaccaggcaggcgagctcgtcgcctcgggggcagggaggaccggagcccctcgcctcggaggaagggaggacctgagggtgcacctgaagggagttatggatcggaagaatcaaactcctcaaggtcaaatagcacaggtggttgtggaatttcttgaggtagcaatcagctgcatcgtcttcctcaaaggcttctatcctcctcgtgcctttgagaggagaaggtacatgaatgtggtggtccagaaagcactgcatcctgagcttactagctatattcactctgtgactttcggtcttctacctttcattcagaagggattggtagagagggtcgtggtcatcttctatgacaaagggcatgtaccgaccgagaagttcgtcttcaagcttgcagtcaaccagtcataccgttccaagttagaggaggcgaacctggagttcgctctgcgagcattcttgatcaagctgactgttgctgagcctgttaccagaccccttccaccagatggtagctgggaggtgaccgcctacttccggtccctccccggcgacggtgaccgagaagctcagctgtggattcctacggacgccgagctgtggatgcagcctccgcagatcacccccatcaagtcagtcagctgtgaccctctgacgatgcagctctacttggagcaccctagcgtcacggaaccgaaggagccaccggcataatgacaggagcctgcacctgtgggctgtgatacactgcaatgtatagaatttttttttgcaaggcaactttggcacgaaccctcgagtcagtgaaaccttttttgttcagacagaggcaaggaaactacttctatccagtggcttcaacttctggctagagaaggcgacactgtaacaatcttgggccttgggattttggctgaggctgaggctgaggggggtggcagagacggacgacacatgggtgagaagcacatggctagaagaagagtggggaggaaactgcctgactgaaagatagaatagagaccaaacagaaccctgccaaacatggcattttgccgtgactcgtactctcactct

SEQ ID NO: 28290 - DNA, 1804 bp, Zea Mays
gcgttctacacgagcagctttcctgcgacacatggtttgcccaaccgccccggagcacacggttcaggttcaccgaccccggagcatgccatcggccagccgagacgcgatccttctgaaacacagcgactttctactctactacctgcaggagtgcaggctgcaggcgcacacgcaactcgcagccgaccacgccccccgcaggccgcgatgccgccgccgccgcagcagcagcccccgcaccggcacgccaagacggactcggaggtgacgtccagcatggcggcgtcgtccccgccgcgtgcggcctactacgtgcagtcgccgagccacgacgacggcgagaacaagacggccgcgtcctccttccactcgtcccctgcggcatccccgccgcggtcggcgtccaggcactcctcctcctcctcccgcttctccgccagcgcaaagggcaccgcctccggcgccggcggcggccggcgacgcggcagcgcgtgggcgaaggaggcggccatcgaggaggagggcctgctcggcgtggacgacggcagcggcggcgatggagacggccgcggcgggatccccaggcgggcgcgctacttgctcggcttcgcgggcgccttcctcggcctgttcctcctcttcgcgctcgtcctctggggcgccagccgcaaccagcgccccgtcgtggccctgcgcgccgtcacgttccaccgcttcgtcgtccaggccggcaccgacgcgtcgctcgtgcccaccgagatggcctcgctcaacgccaccgtcagcctcaccttccgcaacgtcggtaccttcttcggcgtccacgtctccgccgaccccgtcacgctccactacgcgcagctccagctcgcgtcgggcaacatgaagtacttctaccagccccggaggagccagcggagcctggcggtggcggtggtcggcgacaaggtgcccctgtacggcggcggggcggggctgagcagcaccccgacgacgctgccgccgccgaggaagcgcgcgccgccggtggtggtgccgccgccgcccgtgccgctgcggctggccgtgcgggtgcggtcgcgcgcgttcgtgctggggagcctggtcaagcccaagttctacagcgaggcgcagtgcagcgtcaccatggaccaggccaggctcggtaagccagtctccctcaacaaggcatgcacctacacacactagcttggctaggctacatacatacgcctgctgccgtgggtcgtctcgtcgccaccatgcatggtcgtcgcgtcgtgaactttgcccttcttcttgaacaacacacactctctctcagtctctctctcccttcgcttttctgcgtgcgtgcgtttgttggtcgcttgtcttgtacatagaaatttttagtttctggtgtacgtaggagagttttgagtgagatggaataagaatcaggcattatttccctcatacggcgtttccgattgcgtgacatgccgtggagggcatgtaaaatgtcggtgaaattcaatgcgcctgtttggtgaaattcaatgcgctcgaagcagacgtaagattctggtgaaatacacctaaaaattcacggccgcgcatgtaatatagcttcttcaggtgaagtttggaccccggccgacagtcaccgaccgcaagtgctcatccggtgaggtttgtcagttagattcaaatccactaccgttcatataaatccgattcttttttttagatctgacaaatgtaacacggagccttcgcaatgaatgaatgaatgattgaataaacaaataaataaaaa

SEQ ID NO: 28291 - DNA, 2516 bp, Zea Mays
aaaccacacccggtctccgcctccgtctctgcctcctttcccctcgcttcctcgccggctgggatcttgcggcagctacgctcgctagctctcctccaacccgccgtcggctccctccgattccagtcccgtcctgtctcgccgcttcctggccccccgcttctcacgcggagaccggtcggatttcccacctcaaacatcgccggttttatccactcccgcagacctcttcctcagggacgggattggattggtggtggatcttctcctcaggggaggcacaagatccgttcatcatcctcgtcgcctaaacttggccgctcccgctcccacgctgctgctccaccctcgccgctactagaccagaccacggaggaggagacgaagcgccatgaggcggggagccaccaaggacgacgccgcgcccgacaaggtcatgggccctctcttcccccgcctccacgtcaacgacaccctaaagggcggacctcgcgcgccacccaggaacaagatggcgctctacgagcagttcagcgtcccctcccaccgctacagcgccgccgtaccgcccgcgccttccccagcgcctccatggggcgcgcaacgacccgcctccgcggtcccgtccacgtccgccagccaggttggcggcggcgatagacctatcttcccattatttcgtgtgccttcaactgaacctgttcgttcatcagatcagacgaatgccaactccaatggccagggtgccaatggtacaatagctgaatctgggaggcagaggcagtccacacatcttaagagcaaggatactaatgctgcaggaccacctgccgagggtaataattccgttgggaagaaattggctaatgatgatgattttacagttccctctgtcttgtattctggaatgcctccgcattccagccaagaaaagctcactctcttccctaccacaagcccatgtaagagtgtgcctgcaaaatattctagcactgacaagagacgcttagaaggaatggatgcttctgatgtgaaatcgaagggtccctcaggtatcaaggagaaagagccagtacaagtgaggatagacttggaagacaaagagacaactccgtcatttcaagtgctaaacgacaaaacatggagtccagacccaaagttatcttcgcacatggacaggctgaagaagcaacatgctgaagctgagagttatcagataaggaccaggaatgagaatgctgtcgagacccaaagccctccaaaaaatggagtgtcgttgttgtctaagccatatgttgataggagggaacagaatggtgattctgatctattggggcatggcctaagagagacaggtgtgaagaggaaaagatcacatcatgacgtggagcaaaacgatgatctgtctgattcctctgttgaatctttgcctggaatggagatttctccagatgatgttgtcagtgctattggtcccaagcatttttggaaagcgagaagagctattgtcaatcagcagagggtatttgctgttcaagtattcgagctgcataggttgatcaaagtgcagaagttgatcgctgcatctccacatgtacttattgagggggatccttgccttggcaaatccttggcggtgagcaagaaaaggctggctggagatgtggaaacacagcttgaatcagctaaaaacgatgatggcgtgcgaccaacgcagctagagcactcgaaagagaagactgaagcgaaccaaccttcaccatctcaagacgaacaggccgcaactaatggtgacgttgctgcctcgatgcataccccttccgacaacaaacagaagagctggtgcattcctgcacctccaatcttttggcgcccccattttttgccagctaccccacctcctcctcctccacagctgggggggatttcatgagttcggcatgtggagccaggctgatgagtgcccctgtgtacttcccgtctttcagcatgcctgcagtgtcagggtctgcagttgagcaagtgagccatgttgcagcgtcgcagcataaacggaactcgtgtagtgaagcggtgttggcatcaagggacagcgaggtgcaaggcagtagtgctagcagtccggcatcttctgaaacagcagctcaacccagggtcattagggttgttccccacacggcacgcacggcttcagagtcggcagcaaggattttccgctcaatacagatggagaggaaacaaaacgacccgtgactggcagataaaaatgaaagaacggagggagtagactaattttttgaccgataattataatgatcgccgtaaattggctggcccgcccgccttatgttttttgttcagtgtaaatatgctgtgtctgtcagaatgatatggcatctgtagctattttggttctgtcagaatcatgttgattggaattcgtcggtcggttgagtaggatgaaaattgggcacagcccatacgtctacagcaacgtcaaataaaggaagagaaag

SEQ ID NO: 28292 - DNA, 2054 bp, Zea Mays
aagcatggggccaatgctgatcttgtgaatgctctgaagctggtccaacctatcaaggacaagttttcaagtgttacctatgcagatctgtttcagcttgccagcgccacagctattgaggaagtaggtgtccctaaaatccctatgatctatggaagggttggcgttattgcccttgacaatgcgcgccaaagtgctaagattattgaccaatctcttaccccaggaaagatttatgatggagatgggttcaattacatcaaagaatcttttgaaaatggtactcttcaccttattgggttgttgagtgatggtggtgtacagttaagttacaagcgtaccacaagatttacttttatttgctctatccagttacttctgaaaggtgttagtgagagaggagcaaaaaaaattcgtgtgcacaaccttaccgatgggcgtgacgttttggatggaagcagggttggtttcgtggagaccctagagaatgatcttttggagcttcgaggcaagggtattgatgcacagattgcatctggtggtggaaggatgtatgttaccatggaccgttatgagaatgactgggatgtggttaaacgtgactgggatgctcaggtgctcgaagaagcaccctacaaattcaaaagtgcacttgaggctgtgaaaacactgagagcacaacccaaggctaatgatcaatacttgcccccatttgtgatagttgatgacagcggcaaagctgttggacctgtattagatggtgatgcagttgtcactatcaacttccgagccgatcgcatggttatgcttgcgaaagcactagagtatgcagattttaacaactttgaccgtgtacctgtccccgaaattcgatatgctgggatgcttcaatatgatggtgagttgaagcttccaaatcgctaccttgtttccacaccagagataaatagaacatctggggagtacttggtgaagaatggcatccgcacctttgcttgcaggcaaccagggaagacaacgcgttcatcctcccacgcgcttcctccgccctattttagtctgctcgacacgccaccggccactgacatcccatatcgccaagtccccttccctcgcctcgcgttagtagcctgcttccgacccgcacatctccctccggttctcgccatgggcgccggcgccaacaaccacgaggagtcgagccccctcatcccagctgcggtcgccgcccccgcgtacgagaagcccgtgtcggcccacgccttcggcggcgtcccgcgggagagctggaactccgggatcctctcctgcctcggccgcaacgacgagttctgcagcagcgacgtcgaagtgtgtcttcttggaacggtagcaccatgtgtgctctatggtagcaatgttgagaggcttgctgctggacaaggcacatttgcaaacagctgtttgccttacactgggctgtatttgcttgggaactctctctttgggtggaactgccttgccccatggttctctcatcccactcgtactgcgccgcagggttccccaccctggattcaacaatgggcactccgtctttgtcatgatgccgcccatggagcagaccatggggcgtggcatgtgagctattccaccaccttccctaccctagttttatctgtgcttcccgtggtttatcatctgctgctgttggccttgatgtgtgatgtgtcgccgtcagtaaatacgagtttgtgatatgaggtcgtgctgggaactttggattgtttgcttcttatcgactgcagtttggattctggacagtcacttatctcctgtgttactgtgtttgtacggtggtcctcgatgggcctgtcaatgtgaaatgcatttcgtcgtaccttattctgaatgtttttccctccaaaatatgagccccatacactaatatggcggtagctctcgtcacaaaccctcggatacagcagcgtttgtgcgtggaaagaaaaatcgggtgtcttaggtatgttcggttatgtctggattaaagtagattgagggtccgttcgttaaac

SEQ ID NO: 28293 - DNA, 228 bp, Zea Mays
gtgtaaaataggatacacgagacgcaacattatagatgacactgttgtcaattaaaatttgaacattatagatgacactattgtcaagtaaaatttaaaataggagacgagatatgagagttgctggagacattatcttaaaaaattattgatatcctgaagcgtcccgatcatccgggactcaaatgtgatacaattgttgagaactacgttaccatggatcaccag

SEQ ID NO: 28294 - DNA, 1577 bp, Zea Mays
tcctttctcgggacgacaatgacctccaagacgagcggcagcataaccaccaccagtcagagcaccacggggaagctctcctccgtgggcagcagcttcatggcgtccgccggcagccgcagcaccagcggcggattcgacgagggggccaagtaccccgacggaggccagatcctggaggcgcccaacctccgtaccttcacattcatggagctcaagacggccaccaagaacttcaggctcgacagcgtcctcggcgaaggcgggttcgggacagtctacaaagggtgggtggacgagaagaccatgaccccgaccaggaacggcaccggcatggttgttgccgtcaagaagctcaactcggagagcatgcaggggtacgaggaatggcagtcggagataaattttctaggaaggctctcccatccgaacctagtgaagctcttgggctactgctgggaggacagagaactgcttctcgtgtatgaattcatggccaaagggagcttggaaaaccatctattcaggagaggatgcgccccgttgtcttgggaactgaggctgaagatagccatcggcgcagctcgaggactcgcattcttgcatgcatcagaaaagcaagtgatctaccgtgacttcaaggcgtccaacatacttttagatgcgaactataacgctaagctctctgattttggccttgctaaacttgggccgactggtagcaagtcacatatcacaaccagggtgatgggaacgtatggctatgcagctccagagtacgtagcaaccggccatttgtacgtgaagagcgacgtgtacggcttcggcgtggtgatgctggagatgctgtccgggcagcgcgcgctggacccgaaccggccgaacgggcagctgagcctggccgactgggcgaagccgttcctggccgaccgccggaggctggcccggctcatggacccgcggttcgaggggcagtacaactcgaagcaggcgttccaggcggcgcagctgacgctcaactgcctggccggcgagccccgcagccggccgtcgatgaaggaggtggtggagacgctggagcagatcgagtcggtgaagagcagggcgcgggaggcgcgcggcggctcgtcgcgggaccggcaccacggccgcgccggcgcgacgcaccagcggtcgccgcgcgccggtggcgagccgcgcggccgcggtgggtcccgggccgccgccaacggccacgccgccagggccgccgcgcggtgacgcgtccagacgatgacgattcttcatgtaaatggcgttttttttttgcctaatctgtgtgcctctccttctgcttgtggtgtttgtcatggctcacgaggttgttcttgcccaatcattgatgagatgtattattattataagattaattagcagtgaatttgagaagggatgggtgttgttgcaagttgtagccagtagtgcaatgcaatagtagaagaaaggatcaatcatccagaatctgtaattattctaaatcaaattgtattttggaatagagggagtagttatcagagataaacaagaacatgagaaaa

SEQ ID NO: 28295 - DNA, 2520 bp, Zea Mays
acttttgcccttcgaactaaaagcgcctgcatctcaaacccgacggcgctctcttctctatcctctgtgtcccctccaccaaaaccgacgacgacgtcgctctcctccaccggtgctcggcgctctccctccaccagcggtggtccacagacgctcggcgagctccaccggcgggcgctggcggctggtcagatccgctcggcagtcatccatctggcacatcgggtagctcgcgcctccgttggcagtcccaccgccgcccggccctcccccagcgcccccggtgatccggaccgcacccgcttactcggcctaacgaccggctcctgccccgacgcagccgaagctcccagcgtcctcctgcaggccgagctgaaggttcagcgcgccggtggagttagacgacgaaactccgtcacgtcatacctctccgcctcccgtcttccagacgtctctaatcggggtcccagcgtctcggagaagaggagcagcacggcacggcagctgtggcgaggaaggctcctgtcccatcccaacccagttagcagccgcccaaggaggaggagatccaatcggcgtgcgggcgtccgcggtccatccatcgatccaattccaatctgcaggtacacccttccctcccggctgtgcgaagcaactccaccctaatttattttgcagaaaaagttatcggtccgcccttggttactgaaactggtcaggtgtatgtaattttgaagtaacaaaggatttggaacccagccctctgttctccaccaccgcttcgaagatgccgcaggtaatggtggtggcacggaacttcatggatatggtggctgctcttcctgcgggcaagcttgatatgctctatgactcagcctttatctgtgaggcagtactcaggtcacttcccccactggcaaagaagtatgcactgcagatgttgtatgtgctggcaccagtgaccgctgcagcaatggaagagtgggtgcttgatgaatatgctgccaagcataaggttgccattgataagcttctacagctcagggtctttgttgaagtgcgcgacagacgacgggacgtgagctacaagatgaatcagaagttccagggaaacatgcagaagtatttggttgatggtggaagtttaccaagggaacctttaccattaagtgtcactggtcgattgcccacaccagcagatctggaagcctatgctcttgatcaatgggagtgcttcttgttgcaattgatcaattcatctcaagtcgaaaaagggtcaagttttagctcctccatgatgaagacgtttcagcgtggtcttctgagttcaagggatggtgaagcttcaaagttgactgaaaatggcttccaatttcttctgatggaaacaaatgcacaactttggtacataatgagagaatacatttcatctgctgaggaacgtggagtggaccctacggagctgatatcatttctcttggaacttagctttcataaattgggagcggcttatagcttgaacactctgactgatgtccagaggattgccatcagggatcttgcagaattaggactagtcaaacagcagcagggtcgaaaggatagctggttcattcctacccaattggctactaatctttcagcaagcttgtcagattcgtcatctaacaaagagggatttgtggttgtggagacaaactttcgaatgtatgcatactctacttccaagttgcactgtgaaattctacgcctttttgcaagggtggagtatcaacttccaaacctcatcgtaggagctgttacaaaagaaagtatctatggtgcttttgaaaatgggataactgctgagcagataatttcatttcttaggcaaaatgctcaccctcgtgttgctgacaagatacccgctgtcccggagaatgtcacagatcagattaggttgtgggaaactgacctcaacagggttgagatgattccatcgcatttgtacgaagattttcctagcaaggaatggtttgaacaatgctgtgattatgcaagggataatgggtacttgctgtgggaggaccccaagagaatgagactaattgtacgaggggagttccaccccgaaatgagggagttccttcgcaggcaaagatgaggaacgaccttgtacttgacggaccatgctatgcttctttgtagtgcatagaaacactgtatcgggtaatagttctcctttaaatatcaggaaagggtctagaaaagggctcagtttttgaattattttggtgacctgtgagctgtggaagcatatgaataatgtggtgttcaatggagcaaggcccaacatccttgatctgcttctaaatgttactagtgactgtaccctatgctggtgtatggctggtggccaggtcctgttggaactcttaggtaggtagtatggtgggatggagttggtatgctcttaatttgttgttatttggattgattctatataggacggagtgattttaaaaatgaaaaaaactcaaa

SEQ ID NO: 28296 - DNA, 272 bp, Zea Mays
acacagagactaagttggttgtgcacacatcaagaggcgcaaggtccctgattcccactgctctggttctggagtaaatcgattagtttcctgcttttttctgtttcagcattcaagtatcattgaaggaaccttttcatgtcctctcatatttgcatgtaccataaccatacatgctctgttgcatagcatgatgaaaatcattcaagggtatctctcatgcattctccatcacttaaagactagatcatgctcacttcaaggttcaatga

SEQ ID NO: 28297 - DNA, 2517 bp, Zea Mays
gtctctcttcctcctcctacctcccagtcccacctttctttctttcttttttctttctttttgggtttctctttctcctggtccggtccgggagacctgctggaccagacggtgccgactcactgcaggcgttcgcttgacagccttcctattacgagacgagctcttggttttccgcagacacggactctaacaagcgagggcctgtcatggcctggcctgctgttaagtctcgtctcctgcgtgactgcgtctctcttctctctctctcgctctttctcccggagtagattttattcctattcattcctcgtgtgagtgaggtccctccgctcctcctctctctctctctctctccctctccgcggagtggagccggagtcgagaggcaggcagacgagacgaggaatgcttccttcttcccatgccgccgccgtccctgttcttctcctccctccctaattccagtgctctcacgtaccagatctgaggccgcggcggagcgtgacgacgacgaagtcggtcaggatgagccgcgaggataccctgaaagtgcagaccctcgagctcaaggtgaacatccactgcgacggctgccttaagaaagtcaagaaggtgcttcacaagatcgatggggtgtaccagagcacggttaatgcggcggagggcaaggtgacggtgtccgggctcatggacccggacaccgtcatcaggaagctgcacaaggccgggaagccggcgcagctgtggggcgccaccgccaagcctgccgtggcgacccagctcgagaaactgcagctcaaggatgccgggggcaagggccagggccagccgcccaagaacgcaggcggcaagggtcagccgcccaagaacgccgccggcaagggccagggccagggccagaagcagcagcagcccaagggtggagcgggcggcgccggcgccggcgcgaaagtggtggcgctgccgcactcgcagccgacgccgcagcagctgatgcagatgcagcagcagatgcagatgaacgggatgaagtttgctcatccggagctcatggccatgggcgcaggtcgcatgccgatgccgatgccgttcccggcggcagcgcaggcgcaggcgcaggccgccgcggccaaggaccccaagaccgtcaagttcgacctcccggggggcgaggagttcggggacgacggcagcgacctcgacgacgagttcgacgaactagacgacgtggatttcgaggacgacggcctcgacgacgacgacgacggcgacctgtacgacggccccgggatggtgatgaagcccatgggcatgcccccggccgctgctgccggtggcggcaacggaaacggcggcggcaagaagggtggcggcgggaacgaggtcccggttcagatcaatgggaacgccagcaacggcggcggggcgaagcagaacgggggcggcaaaagcggggccaagaacggcaagggccgccgcatgcgggcatgatgatgaggccgccgaacatgatgggcggcgcgggcggtttccccggcatgggccagatgggcggccacccccacatgggtggcggcggcatgccgcaggcaggcgggggcgccgcgcacggcatgccggctggtggcagcatcagcatggccgctggcggaatgcctggggccgggttctttccgcgcggcgttggcggcggcatgccggccggcgcggagatgctgggcatgtcgcagctgcctccgcagcagcagcagcacatggcggcggtgatgcagcagcagcagcagcacatggctgcgatcatgcagcagcagcagcaacagatgatgatgatgaacgggcacggccacggccacggccaccatggccacggcgggtacgggtacgggcgcccggcgatgccgcagtacccgccgccgccggcgtactactacccgatgccgcagcgccacccgcacgacagcatgttcagcgacgagaaccccaacgggtgctcggtgatgtgaggcgaggcgcggcggcggcctgcggggggctccggagaaagtgaaccaggcaaccagccagccagccaaccggaaggagggagctcgggcccgtcaggtcggaggcggccgccgtgagtggaagagtcgtcgtcggtatacatgaagaaaaaaaaaactagctatatgctatagcaccagccgtaacctcgccgccccatttcgttttcgtctttcccctagtttgttttcacctttggtactttttgtttcccttctctgaacaaagaaagagcggcatgcagcttcctcttccttgagtggaaggtaggtatagtggtaacaacaatgatagtggtgatgctagctgatggctgtcttccttcgcttctttctttcttgcttgcttgcttgcttgcttgcttgccccatatctaatgaatggacaatgtgcaagagcagtgcctctctctgcctgcctagcttgttgtgtgagagagacagagaagaatcatcatggatggaggtagat

SEQ ID NO: 28298 - DNA, 3109 bp, Zea Mays
cagaagttgaagaacatcattacaaacgagctccctacaaagtatacagactaaaaaaaatagaaaaggaattccgcataaacccctcccagccaaaaaaaaccacccccgccgcggccgccgagcgagcggtaagcagccgccgcaccacgagagcgggatggcgtcggctccggagccggagaacgggagggaactctacgcgctgctccacctctcgccggacgcctccagcgaggaagtccgcagggcgtaccgccagtttgcgcaaatctaccaccccgataaataccaggacccgcagatgaaggatgtagcaactgaaaacttccaacgaatatgtgaagcttatgagatactatcagatgataacaaaagacaggtgtatgacatctatggtatggaaggtttaaattctggcctggaacttggtcccaagctaactaaaccagaagaaatcaaggaacagttagaacgactgcggcggcgcaaggaggaagaaaaacttttcaagcatgctctacccaatggctcaatcattgctaatttctcagtgccacaatatttaaatgacgggagcatcatgagaggaatggcgatgcttagtcaagttgagttgccagtgtccaagcaaaatactgtcgttgttggtgggaatttgattgtaaatggctcagctggatctggagcagcaaccactgtgctgcgacaccagttgtctcctgtttcctctattgagtttatggccacagctggactacgttctgttattggtgggcagatgtttcgtcaaatttcaccacattctacagcaacttctggacttgctgtttctttgagagatgggtctatcaacttgtcaaatgcctggactcgccaattgtctgacaatactgttggaaatatacagctagtccttggcgatgaatcaagtatttctgttggatggcaaaagaaggatgaaaaacgtactgcaactggagaagtaaaggtagtttcacttaggtagtgtttggttgaagagccaagtagaacggaactgttctgtcccagttttgttgttgtttggttacaaagtaactagaacggaatgactccaattagggaatattctcctcagatctggaaccatcccgctccaaaaaatcaaccggacggagccgcttcgttcccagcccgctcgcacagtcacgctccgttccgttcactctccaaccaaacaaaaaacagagccgctccgttccatattaccaaacacagaacagagcggctccgttcctagaatcagggatggaacgactccgttctacttggcttctcaaccaaacactaccttagaagccaactcagacattaatgaaactgttggcattatcttagaaatgcatggttaactccgtatagatctagtttgatagatgtgttcttattgttttgttctgaagaatctatgccccttttcatataaatattcccatctagttctctttggaacataagagtagtacttgttgtagtcgtttcaaaaactttccattgtgttctgaagctagttgtgtagtcagtaatgaggtaggattatagagcagcttaaaagtggtcatagcttcatggccatcatatactttattttttaggagaacagtgatgaaggtcctccagaaattttaatatcattgatataggctaatgttgtgcaaagacttgcaaaacaaaacaaaggtcttcatgaccaggaaaaggcagtatacttctaaaagatgaagatgcatttttctgtctaatagtttaagaactatcttgtgtttaatgtgggtccttgaaaacaagaagcacatctatgcacataacctgtggtgagtatgctacaattccatgtgatatcttcttacaacacatgcggagtatattgtccacacatttgaactgattttgtgtattttggttgtaaatctgcaatgccttcttccttcaacagctatctgtttttatgtattttctcctcttatgtcaggccaacatctgatgctctcagtggtgttcatttattaattaccttttctttttctctttagtttggaactaatttttttggtgcatctgctcattatacacatcgcttctcctccaaatctcatgcacgcatcgctggtagagttggaagcacaatccttgattttgaaattggaggagggaggcgaatatcagaatttagtactgtaaggatgatgtataacataggaattcagggcgtatcttggaagtttgagttacatcgtgctggtcaaaagttaatcatcccagtcttgctttcaactgatttaaatccattatttgttaccagtgcatttgctattccttcaacactgtattttctacttcagacatatgttgtaaagccttactaccttaagcgagaaaagcagaaaacactagaaaagatggaaggcttatctacacagctaactgaagccagaaaggcagctgaaaaagctcaaaaattactggaacctgtctccaaccgtaagaagaatagacagctagagaacaacggattggtgataacgaaggctctatatggcagtcgccaaaaaatcaaaatgagcagtgaattgaatgatatacacaatgacatggcttcacaagtatttgatgtgaccatcccactgaacttcctcgttactgaggcaggccagctcaagcttcatgacgggataaagaagtctggaataatgggtttctacgatccttgtcctggagacccgaagctattacttgtcgagtatacgtttcatggtcataaatacaaggtcatggtggatgactatgaggcgctgttgataccacaagatatccatcaattttgaacggttcctgatgtaaaagccacatcaaaacgattttgggtcatcagctccctttctcacattttttgttccttttgtgttgagctatctctgttttcggtcattccttaatgcgcctcgtatttgtatacacatgtcggtttgtgccacctcgaggtcatacacaccaacagcaggtaataaagctgtagccagtagttttccagaaagaaaaaaaataaaaataaaagtaaaactcaatg

SEQ ID NO: 28299 - DNA, 1083 bp, Zea Mays
cattatattgcccccacaccacaccaccccccgactccccacgaccattaatctgaagcagtgctttggtgtaggcctgctgcttgctcatcagctcgcgtataaacatgtctcttcccacgcggacgtctagatgtgtgtgcgtagaatagcgccagtagatcccggccaaccttaagaggaggggagacacaaacggctctggcttctggaactcttccggttgctgacagagagggaaggggacatatggggaggaagctgggcggcctggacagggtcctgcactgcttctcgctctccctgtgctccagcgcctgcgcctgcgtacactccatggatgaagaagaggaggacgacgaaaggaaggccctgctgctgagcagccagctggtgcagctcaggggcttcgtcgatggagccgccgccaagactctcgctttccatctggagcctaagaccgtggagctgaaggtgtccatgcactgctacggatgcgccaagaaagtccagaagcacatctccaagatggacggtatggcgtgacgtcgttcgaggtggatttggagaacaagaaggtggtggtggttggggacgtcacgccgtacgaggtgctggagagcgtctccaaggtgaagctcgcgcggctatgggtggccccggaccccaagcagcaagccgcacaaagcttgcaggcgtagaggatctctcatcacatcagcgctccatatttcgtcctgctacagcgtgcggcaggcaggcaaagaacagacaggatttgtaccgtagggacgaaacattcgttccactgaggaaccgtgtccacgcgtgcaaatcattgaggacgcgagggacatgttgctctgtgtgtgtttttttatgtaaagggcaggcagatggggaggggaaacatgtgcttgcgtaaaacatactacttgcttgttgtttcgctctcacaccgcattcaaaaacagcgaatcctctacgacaggcgaacagcattgcacctgagctagccccttggtccctgctaccgatccactcatgccgagtgatccttgtcatcgagtaggttgccaccgg

SEQ ID NO: 28300 - DNA, 767 bp, Zea Mays
ggtggtattgctacgatgagagctacacctccaacacgaagactgcagctgtggccacctaccaggctatggtatcgatatcaactagtacatctacatgacgtcaacagatcatattacaagtaatctggacaagctagcagttcagaacaaggggacaaattggacctcacagccagcagggcagttctacggatggaactggatatacaaaactttatgcagaaccctcagctgcaggagtttgaattccagaactttccgacttcttacctccgctgtgctgctcatcgtgttgcacaacattatggcttagagactatagtagcagatagtttagtagaaggctcagttagcaggattgttgcaagaaaaacagcagaaagcagattctgatgctgcaagtattatgggaactctttctactggcaaagatgaaccagtaaatgttgacccttctgttgatgaaaccaaagtcagcacaatgaacagtcgttccagagttgctgtttttaaggatactgaaaaggatcgtagtgacccagactacgatcgaaactacaaaagtttatgcagtatgacattggttatgtgcaatctcctggcatgtccacaaaccagcatactatgtactttggccagcctgatctaacaatagggtcttctggagctgctgtttatcgacattggccaaccccaacaatgatgtatccccattgctatgataatgttagtccaatgatgtctcagacgaaatgagtgggata

SEQ ID NO: 28301 - DNA, 1702 bp, Zea Mays
ttcgagggtgtgtgctaatgtgttgaatgcaatgcttcgtgttaatgcctggcagggagctccaactggtgggaatccagttatcgagagtttcttagtagacatctatccactaaaaatttatctgactgaagcaatgtacagaatgatgtggggatattttttccctggagatgaacagcaaccacaaaagcgacaggagcttttcaaggtctccactacagcaggaacaagacgaaagaaaaacacttctgttgcagagacaaacagtcccaataaccagtcatcaaaagaaactacatttgcacagaagcctgaacttcgaaggacatcttcatttgacaggacatgggaggaaacagttgctgagtctgtagctaacgaacttgtttcacaaatggagggtcaaacaaatacccaatatgaacctcaagatgctgctaaggattccaagttattacgtcctgtccgctctacccgcgaggataagaaaattgtagagcccaatgagttgaaacaatctagacctcaaaaaatgatggacttccgcaatataaaaataagccaggttgaactgcagctcacatatgaaggattgccatttgctgttagtgatgtaaggctacttatggataccttccatcgtgaggattttacaggaacatgggcaagactgttttctcgagtaaagaaacatattgtatggggtgtattgaagtctgttacaggcatgcagggtaaaaagtttaaagctaaatctagcagccaaaaagaaccatctacagctttaatcagtgccgctgattttaatttaagtgacagtgatggtgatgaagctggcagttctgatcaacttccagcatttctaaaaaaacctagtgatggagctggtgatggatttgcaacctccgttaagggcttgttcagtacacagaaaaagaaagctatggcatttgttttgaagacaatgaaaggagacgctgatcatgatttccatggtgaacggagtgagaacgaaattgagttctctccatttgctcggcagttgactataacaaaaacgaagaagcttatacggcggcacacaaagaagttaaacaagtctaaggttcataaagttacagctactgagctagaagtggcagagctgccaccgcgtgctcctgggtacaacacggactcctcctccgactcgtcatcggcggaaacaagcccaaaagattagcctgtgccccatgtgaaaggttgattcagagggatgcttcgaagtcgtcctgagccctggagtgatgtccaagttggttctttacaaattctggttttgatcgatacatcgttgatcctcaagatggttttgcagccatccgaatagatatagatagtgtttcaacattccctcctcatcggatgtggtgttgtctgagctgaagtttttagttgtgacgatgaattcagtgctctgcagacaacaactattatcataacctgagggtagagtgaattattcattgtatttttcttgagttgagggtagtgtttgagacatcattctcggctttgtagtactcacagtggacagtataaaatcaagtgcgacagcaaatatcgtattttaaatattgtacttaataaaatatttaatatatactagtatatatgcagcagagataagaagctttgctgttgaaggttctgactctgt

SEQ ID NO: 28302 - DNA, 903 bp, Zea Mays
gttcgccgcgccgtcactcccctccccttactcgcaaccgcgtcgtaaggcactccggcggcggcgatgattacgtcccccctcctcccgccggatgcatcctcccttgttaatgtggtccaaaccaacacttgcaagaactcccttgtttaagccaatggtagttgaaatgggccattgagggaggccagcattggtacacctgcaagaatggggatccaacagacatagctgcaatggcggtcactgttttcaagtcatctgattaatcacgattagtcgcgattaatcgtccaagtcggtttgaatcaatcatgattaatcgcccaaattgtccaactaaatgtgattaatcacgattaatcgtccaagtcggtcagttagaacgaccagcaagttgtccgacttgaaaacaatgatggaggctgacaggggtcccccaaagtagatgcagaagaaagcagctaaagaggcagttgttaatgttgtacataagaaaagaaagaggcaagccccttcatcatcatgtgtgaagaaaaacaagggatcagttacaaatacaacatcaactactactcctaatcctctgtctagcaagtataattttcaatgtgtccattcgttgtcgatacttggcaatgccagttatcataactgaactgagttttgtgtttctttatcacaatatatggaactggatccaatttcatcacctgttctcatccaagttgtgtaccttgccacatgttgtccagattgatggcttctacagaatcctcctttaaacactattcaatgggttagtaaagaaacccacgaaagaaattgcatattagtaagggagtttcacagcaaaacatagcttgcaacacaaatttgtgtgaattttctaccttatgttgg

SEQ ID NO: 28303 - DNA, 1354 bp, Zea Mays
cgcgaaacgcgccaacaaccagatcaatggagtgaggcagtgactcagctcagggcctcgggcccagcacaccaaccctccagtagtatctctgacgtgcgggctccgccagacaacgagctcacgagtcacgatccaaatcccttttccactccgccggacgtcgagagaggcggtgggtgcgggacgcgaaggcgaagccctagccccctccctgccgcggacgccgatggacccacctcgcgccgtcgcctttcttctcatactcctgcccgtgctcgccccggtggcctccggtgtacctttcgtcgtcctacacgggattggcgacgagtgcgggaacgatgggctgtcatccttcaccaagatgcttggggagtggtcaggctccaagggttactgcattgaaattggaagaggagcatgggactcttggttaatgccacttcaagagcaggcaaatacggtttgtaagaaggtcaagaaaatgaaagagctcagtgaaggttacaatatagttggcctgtctcaggggaacttaattggcagggctgtaatcgagtactgtgattgtggacctccggtcaagaatttcatatcaattgggggtcctcatgctggtacagcttcagtgccactttgtggtgatatggaagattatttgaagggttgcaaatttcttccaaaacttaacaatgagatcccaagtgcaagaaatactacctataaagaaagattcagcagcttggaaaacttggtactgatcatgtttgaggacgatgcagtattaatacctcgggaaacagcgtggtttggttattaccctgatggagcctttagcccagtgctgccccctcaagagacgaagctgtatacagaagattggattggcttgaagaccctggacgaggctgggcgtgttaaattcgtgtctgtgccaggaggtcacctgcgtatcaccagaagcgacatgaagaagtacattgtgccttacttgacgccggaggcgtcatccaagaagaacatacacatacaccggatgctgtcgctttgagcgagtatctaacaaggtttgtatcggtggccattgtgccctgacacgtgggccatgtgttgacgccttgtaaatacgctgaacacgaagggaggaaatgatagctccttggaagagtggatccgaacttgtgaagtgaagcgtgtttggtcctttccgtttcctatctgacaaacaaatatgtccatgccgtggccacaacacgcataaatcattatgcacatttcctattgagtaaaatacaattccggtctgtaaacttgtcgaaccatgtcatgccggttcataaacctttaaaat

SEQ ID NO: 28304 - DNA, 1200 bp, Zea Mays
ctgccatgtgccagcgcatgagtggagactggagaaagagccctactaccctagctaagccggcacagcggcggccggcgatacacgtgcgagcggcggcgtgaggaaaggcgggcggggtgagagatacctaaccactaagcggctgcggcagcgccgcagcataaccggcaccaggtcaaaaaacgacgactgggcagggcccttgccacaccagacaagcacagacaaacacgcgagcggcatgccatgtcatcaccggcagcaaggagcatcacttgctactccaaaattccagagttcttggtgggcactaatgggcagccaatgcccgcagtggggctcggcacagcatcacacccatttgtggcggaggatgtcaggacatccgtgctcactgcgctggagcttggctaccgccacatcgacactgcgggactctacgcctctgagcgagttgtcggcgaggccatggctgaggcagtgtcgtgcggccttgtggcgtccagggacgagctgtttgtgacatccaaggtgtggtgcactcaatgccatcctgagcttgtgcttccgtccctcaaggagagcttgaagaaccttcaaatggaatatgttgatttgtacctgattcattggcccatggctgtaaagcctagcaagcctcacttcccaatgaaaagggaggacattgtgccgatggaccttagtggtgtatggcaggcaatggaggaatgccatcgacttggccttgctaaaatgattggtgttagcaatttcacaacaaagaaattgcaggagctgcttgccattgcaaaaatttccccatttgtaaatcaggttgaattgaatcccacttggcaacagaaaaaactaattgagttctgcaatgacaagggtattcatgtgacggcttattctcccctaggaggccaaagaatctctaaactgaatccagtacgacaatctgacatattggaagagattggaaaggctagagggaagtcagtggcccagatttcactgaggtggatatacgagcaaggtgcaagcatggtggcaaagagcttgaaaagggagaggcttaaggagaacattgaaatcttcgattgggaattgagtgacgaagatcggtttaagattggtcagatagcacagcgcaagttggtcacagtacagaatctcctgtgtcctgaagctcct

SEQ ID NO: 28305 - DNA, 262 bp, Zea Mays
tcacactaccattgccatctcgccctgaggttgcgatcccctcggccgcgaccctgcctcagtgcctcaccccgggccgcatctcctgcgctcgtgctacgaggacgggcgagccgcccgtgccgcagggtttcaggaggagagtggagatcatcccgatgatgatgcgaggtggaaggctcacgggtttgacctctcaggttctgaggtgcttcagcacggagatatttgtcagcactgaagttggtgggatatgtgtggt

SEQ ID NO: 28306 - DNA, 1611 bp, Zea Mays
ctcttctccccttctcccgacggcgccaccataccgcctccgccctcaaccctagccgtatcgcgccctcgccctgcctccagccccgcgcagtatgctgctcgctcgtcgttggctactcgcctgctcccatgctccctccggatctgctgctctcggggatttggcgcagcggctttgcgcctccacacttggtcgccggcctcctcacctccacaagcccacgtcatcgccgtctcctcttcgccatcgccccgctcgcctcctgtgccaacgacccgaccaacctcgccgccaagcagggccacaccggtgagctccccttctgttgatgttgtgggagcggatcgaaggcccggattcgtttggggtttgctttttatggacgggactgggtagaactctttgttgtcttcagctgataggctttactcttggcatcattcggctggcctaggctggaatttgtttgacatccggagcttcgaagttcaacttgttggcattgactgggtgggctgtagatggaatttttcgagttctgcaattcagttcacaaaggggaaatagaaatggttgcgggtgatcccaacctgctgacagttctaactgttttggtatgttttaagttgattcactgtcagctgatgaggttcctaccataacacttaagcaaggaatcctgtacacttctctcctggtaaatagactgatagtagagtaatacatattgttgccatgataaaatgctaactgtgctgcatagactgatagtagagtaatacatactgtcagcttcaattcgtttggtttgattggcaggtgtgaggtgctatgagcatgtgactctaaatctactagtcctagaatggattacagttgtcaggaatttttgttgggactggtgagcttcagtaccgtagaaagacacagctacattatttgtactctagtacagtaccgtagagtcattatcaggccaataggatggtttaatattcaaagactagtttcttgcctgttcatgttagctgattttaaacctaactatttgatttttgtcttgcagtgatataaaaaagttgaaactttcatagcttacctgccgagaatgcattgttgaagttgcaaagatccctcaatgtgcgggacaagaagggaaatactgctttgcacatagctacacggaaatggaggccccagggatctggaataacaggagcctgatggttgcatcagtagagttgaccacttctcagtattgcgagatgcatcttacatggtcaagaagataattcctattctgagctacttgctcgtgtacaagtctccttatcatgtcctcctttcaagccagtctattctttgcttgattcatcacgggtgcacattattgtaattagaatcttcagagtactcgaaggatagttaaagctgtttagctagtccttcagattactgaaaatatagttaagaacatttgtattttgctatttcgatttccaacagtacaactattgagtacaactattggggatgattgtttatgtgatgtggatctatcattgtgcaatactaattaaatttgtatatctatgtgattatgtgtat

SEQ ID NO: 28307 - DNA, 2758 bp, Zea Mays
gcgctctcttcgggttcggacccgaccgcacgcggttcaacgagttgtgccgaggcaaaaccctagctcacctccatggatagccacggccacgtctctggcggcaagcgcaagggcaagcgcgcccgcaagccggagccgccggtactcgcctctcccgacaacagccacgaccacaagcaccacgacaccgcaccatcctcctcgcccctctccaccgccgccgtcgcggcgtcagactccccggaccccgagccggcgtcatcctccccagctccccgccgccggggccgcaagtcccgccgcatccgcaacgggacccactccgaggtcgatgccgccccctcaccctcgcctccgccgcgtcggggcgggcctaagggggcgccgaacggtgcggtggacgttgcggagccgtctcggcgggagctggcggttaagatggtggaggttcccgcggcggtggagcccctgcgttgggaccaggtggtgaaggtggtgccgtcgatggacgccgtggtgaaggtgttctgcgtccacacggagcccaacttctccctgccgtggcagcggaagaggcagtacagctcgagcagcagcgggttcatcattgggggccgtagggtgctcactaacgcccactcggttgagcattacacccaggtcaagctcaagaagcgtggctcggacaccaagtaccttgcgactgtccttgccataggcaccgagtgtgacattgcaatgttgaccgttgaggatgatgaattctggaaaggcgtttcacctgtagagtttgggtcgctgccagcacttcaggatgccgtcactgttgttggttacccaattggaggcgatactatctcggtgactagtggtgtagtttctaggatagaaatactttcatatgttcatggttctacagagcttcttgggttacagatagatgcagctataaattcaggaaattcaggggggcctgctttcaatgataagggaaaatgtgttggtatagctttccaatctcttaaacatgaagatgcagagaacataggctatgttatacccaccccagttattaaccacttcattgaagattacaaaaaatctggagaatacacaggtttccctatacttggaatagaatggcaaaaaatggaaaatcctgatctccgcaaggcaatgggaatgaaagctaaccaaaagggtgttcggatacgaagggttgagccaactgctcctgaatctggatgtctcgaaccttctgatatcatccttagctttgatggtattgatattgccaatgatggtacaggttagcccttgcttcacatgactggatatgctaattgtcacctttttatatctaatttgtctgcattgtcataagtgttatatcatattacaagtctgtagctggtacaagtgttatatgcaatctcctaaaggtaagacaccaatttctgtttttaatccaaacatctgaacaattttactcattattttttcatgaaaaagggagaatttattcttcaggctttcagggacacctttctacataatttgtcgagctaaaactcagtgtctatcattccccacaaccatagacctcccacccagataaacatgttttatcttgattaaatcaatccacagggggattgggattttatgttttagctgagtagtgtgcccacctcccatgcagttttctttacaatttgttgactttgacactgagggtcaccgtagtcataactatttgaatccaatcacaacatttcttgttaaggcattcaaacaaaaaaaaatctcaattatcttgtcataggccttcttgaagtttacctttaggactagaccatctctcttcttaattctagtatcatggagtatttcgtgcaaagccattaccctatgatttgtttcaattattttaaaagcttctaagtacgtttttaggtgcttttcacatttctctcgaggtggtttgcattgaatattttcctgggacaagggaacttcacttaacaatgttggaatttgtaaatttgatactttctcatccagttgaaacttaccttttcatgctactcagttatatccagtgaggaaaattgatttgatctcttgctctctcactgcttggtcatccagttccttttaggcatggtgaacgcattggatttacctaccttgtttctcaaaagtacactggtgagaaggcacgcgtgaaagtacttcgcaactcaaaaatccatgaatttaacataaagctagcaacccacaaaagactcattccagctcatatcaagggaaggccgccgtcatattacattgttgctggctttgtttttatggctgtgtctgttccatatcttcgatctgagtatggaaaagaatatgaatacgatgcccccgtgaagttgttggacaagcatttgcatgcaatggcacaatcatctgatgagcagcttgtggtggtgtcacaggtgcttgtggctgatataaacattggttacgaagatatagtcaacattcagaatcacataccatgcaagggatattgctaccaaagtgcaattacttagcggtagtacttacatgagaaaatttactccaattacgcttgcatccagatgcagcgcaacaaaggctaacaattcattttgctaaacattggagttcatatgtcaggccacgtatgcacctcaccaaagaactgttatttacattccagacatacagtcgtggagaggtg

SEQ ID NO: 28308 - DNA, 4647 bp, Zea Mays
gaaaaaaaacaacaacagaggagagagactagagagagagagagagagagaggagcgttggagtttggaagcagttcctgcgacctgcggccggagccccggggcatattcctcgcccggagatcccgtacccgaccctcccctgataaacagacgcaagcgtcagggagggagggagggacagagagaggtagagagggccggggcgaagggggcaaagatgcgttcttgaggagcctgtgcaggggaggtccaatccagaggccgccattccttttcttttccccccaacctctgcaggctcttcagatccagcaatccggcttgtttcttttgctggttgatttatactctatagtggttctctacttagcatcaagtcttggcatggcaatggcctcgtagctcgcggctctctaataggaataattttactcaaaatgaagctatagcgtcatgctatcttaggttgtttggacagttccttaggatactgaaactgtcttagataatggagatgatgttcactcaaacatttctcccgatagatatacaattgtaattacaccagaactgtacttacaattaagaacaacatcagctgtaacattagtagtaagaaacagttcagatagtgtgaagaagttcatctgttggcctgctatttcagatactgtgtgtgttcctgaaacttcatggagacttccatatctccaccaggcacatcaaagcagtcagctgtccgcaaaccttctcctggaagctctcttaaggatctgtgccttgtttccaaacaagggtcaatagctgaagtagaatctgctttggccttgttgaaaaaaagtggtgggaacattgatggtagaaatgcatttggtcttagtgccctccaccttgcaacatggagaaatcatctacccattgtgaggcgactcctagatgctggcgctgatccagatgcaagggatggagaatctggctggagtagcctgcatagagcacttcattttggtcacctatgtattgctggtgttcttttacagtttggtgcttccctcgctttggaggacactaagggccgtacacctgttgaccttatctcctgtccagtatcacaggccaatggagattttccagatgcagttgcaacggaagtcttcagttggggaagtgggacaaattatcagctgggaactggcaacgcccacatacaaaaactaccatgcaaagtagaagctttgcatggatcatatatcaaaacagttgctgcatcaaagtttcacagtgtagcagttagttctaatggtgaactatacacatggggatttggtcgaggtggtcgtcttggtcatccagatattcacagtggacagacaactgctgtgattacccctcgccaggtgacagtaggattaggccgtaaacgagttaatgctgtggctgcagccaaacatcatactgtgattgctacagagctgggggaattgtttacctggggatcaaatagagagggtcagcttgggtacccttctgttgatacccaaccaacaccaaggcgtgttggttcgctcaagcaaaggataatttcagtagctgctgcaaacaagcactccgctgcagttgctgatactggcgaagtattcacctggggttgcaataaggagggccaactaggatatggcacttcaaactcagcatcaaactgtatcccaagaatggtggagtacttgaaaggaaaagtacttagaggtgtttctgcagcaaagtatcatacaatagtgttaggagctgatggagaggtgttcacttggggccatcgccttgtcaccccacggcgtgtcgtagtagctcgatgccttaagaagggtggaaatacaaatctgaagtttcatcgtatggaacgacttcaagtgatttcagtggctgctggaacaacgcacaatactgctttaacagctgatggtgctcttttctactgggtttcatcagatcctgatctaaaatgccagcagatattttcaatgtgtggaaggaatattgtgaacatctcggctggaaagtactggaccgctgtggctacatcaactggtgatgttttcatgtgggatgcaaagaaacgtaaggacgaaacgccaattttcactcgggtgcatggtgttaagcgagcaacatttgtttgtgttggtgaaacgcacatgcttgtgctctcaagtatataccatcctgagtatccacccaagcctaaaagccaaggcttaaaatccatgttagaatggaacggtggaacagaagagctgggtgaagatatcctgtttgatgatgttcagcccaacagtggtttatcaggaagcagtggtgaaatgagcaaaggtgtgcctagcttgaaaagcctctgtgagaaggttgcagttgagtatttattggagccaaaaaactcaatacagcttcttgaaattgctgattccttggaagctaaggagctcaagaagcattgtgaggatttagctattcgcaacctcgattacattttcacagtgggagcttcttcaattatgaatgcttcttctgaaattcttgtgaacttagagaaattgctagatgagaaatcctcagagccttggagtcagcaccgtcttcccacaatgacagctacctatcctgctgtcattgacagtgatgtagaggaagatgaagcaagagaattccccaagacccgtaaatgtgggaaatctgcatcaaggccatctgcgatgtctagtgatgacagcttccttcagaaagactgcaccgctgaacaagccgtctctaagcagatcagagcacttcgcaagaagctgcaacagattgagattctcgaggctaaacaacttgcaggtcatcagcttgacagtcagcaggtagcgaagctcgagtctagggctgcccttgaaggtgaacttgctgaacttggcattccctcagagatatactcaacttcctctgcttgtccagcagaaggtaggacaaacagaaaacctgaggtttctaagaaacagaagagaaagaacaagcagtcaacacagaccccgtcagtgaaaaatgagcctgggcaacaaatccccattacggaacttcaagttctacaagtcaatgtctctgctgaaaaggaggcgtatgccgctgatccaattaaacctatggaggctgccgcgttcagcaacacaaaggacaccgcttctccaccggagaagaaaccttcccaaccaactccatcaaagaagaagaacagaaaaggcggcctgtcgctgttcctgagcggcgctctcgacgacaccccaaaaccaagcctccctgcccccgctgtgcctgccacaccgaagcccgaaggacccgcctggggcggcgtgaagataaccaagggacccgcttcgcttcgagacatccagaccgagcagagcagaacaaacgagcccgcgtcggccaaggcgaaggaccgccacgagaactcgccggacagcgccggccgcgcgacaaggctctcctcgttcatccccgacgcgcgttccagcccagtagccgtcgtggcgcctgctcgcgcagcggcggcgccttcttccgaaggtgacaggagcacgccgccgtggtcgtcctctgccacctcgcccaacgtgtcgcagccttcgctcagggacatacaacagatgcagcagaagaggcaccatggcggcgtctcccacagcccgaaaacccagacatcgggcttctgtataccgccccacggcggagcgccagaggccgctggcggtggcggcgtgaaggacaacgtgcccaaccggtggttcaggccggagaccgacgccccgtcctccatccgctccatccagatcgaggagcaggctatgaaggacttcaggcgcttctacagcagcgtgaggatcgtcaagccgcaggtctagtagcactggcggcggcggcggtggcggccttggcggagagtgactgatggcacaacaaccccctttaggctcaccctcccatttgacactggctcgttgtacattcgagtgtacagttggttctgttcgccataggttccttgagctgaacaataaacaaacaccctttgctgctgttgctgctgctttcgcagtgagtggtctcgtttagttgtaacagaagattgtacaggccatgtgagatcaccaccccccggctttggcttaacagtttaacttgagccaatgcttctttttttttttttggcgccaaaatgtctttggttgttccaagcagaggtcataaaaactgtgtggtgcgtctgcacccaggtacccaacatttttagcttcgatcggacatgatctcactttggggctgtagcctagtgcttctatatgctctcgatctgcttgactggtcggtgtgagaatttggtagatagcggcatacttgtgctgttgtgcaatagtagcactatgcatggtcatctgctaagatcgatggcagctcgtaattaatggagctagtctgcctggttcagtagcttgtcgcctatggctatcggtaataaggccggttgcaatatttttttgtttggtgagcactagctagccatgaggcgatcaaatgtcatgtgctcccatgaaccctgatgacatgtatcttcac

SEQ ID NO: 28309 - DNA, 3732 bp, Zea Mays
cgtagaggcattggatccacgtgcggattcacgcgcgcaaccggaaactggtactccgacccaccaaaagcagcgaccattagttcccccctcctttttattaattccctggtttaaaccaagcagcaaattcttgccgtagaaattagaactcccaacagaaataggtgcgtcatcgcgttcttgtaatctagtaaaagtcttccatttttctgtgatccttccccttctcccgcatcgatcgtctctcaagaacagagggtagaatcacaggtagaaagaaacaagaactgaattagccagtggtaattccggcctggcagctgaatcgtgactcaattcctgacgaatttctcgtggattccgtggagaaaaagtgtgacctttccgatgcagtacaaccaccgcagccgcttgccgccgccgccgctgccgttcggccgcggagggcatcctcgcggccccaagcagccatgctacgctccgcttcctccgccaccgtttcctccggcgccgccgccgccgccgccgtcgctagagcgcaagtacgaggtgcttatggaggccggtcgcctcgccaccgagtatctggtcgcccagggcgtgctccccccggccgctctgcagcgcggcgccggcatctctggcgcgtggcctgatcatcctcttcctccgccaccgcagctgcaacagcaggaaccccgggggggttatggccggaggcggtacaaagatgaatacaacaataatcctaggcgagccaatgacactagtagtagcaccagtagcagagatgattgcagccgtggcagctacaatggaagagggaagatgaagtatgggaaatacaggagggggtatttggattcagggagggacagggagaaggagaggagaaggccatttccaaatggccggcgctacgaggaggataaggatgaagatggggcacctgggtttcggagggagcgacacggcaatcgggggagtgatgaggtgaggcctcatgatacagaggcactgagggaagggacaccattgacagcgaaggctgtagaagggttctgcatggaggatgcaacgtcaaagattatgagctctttcaaagatactattaaggattctaatgatgcgccaaaggtgccggaggagactgaggaaggcgaggtggaggatgacagggagacgcagaattcagaaactgaggtagtgaagcaagggatagataccgatgtaaatcatgcttcttgttatgttattacagagtcaaatcccaaccagttatcagatggtaagattcaagatgagattcctgacgaggaagctgaagatgacaaaaaagttatggatgaggctactttggatcacaacacttgtgatggtgaggtgacaaatatggaagttgagatgcacgttggtaaggagagtttgattgactattgtaacttcacgagaaccccaacaaggcctaggtcagcacgtgcacacagaaatgcagcatctatcccaggagaacctgcagtagttgaaacatttgatttagtttcttctggtcaagcttcacatatggtaagcgctgaatctgctgagagattttttactaaaattgtgtcagaaaacacagaagataaattttgccaagaaaacactagctctggtgatgtccgtgctccaccaaaggagctgatgcttcttcaagaaaatggaataacagttgtgactgaaaacatggcagaagataatgttgatgcagaaccacatgtggtcgtccagcaatataaggaagaaactaacctatctccgttaacagatgccctcgagaagagcttgaggcaggaaatcacattatctccatttgcagcttctcacaaggatagcttgatgcaagagggtggcttgatgcaagaagttgatttatctccgttgacagctaatcacagggagagcttcactgaagaaaccgaattgccaccatcaacagcttctcacaaggacagcttgattgagggaactgacttaactcagacaatatcttcttataataataacttgaaattgcaatttaaggaaggaacacaggtatgcgatattgatatgctgccacaagatgtgaacctcattgagttgcccgatcaaaggaaaatcattggtcgtgatgttggtgctaaagctgtcaccggaatggaagaaggaaagctggatcaatctagctcactaaatctatcggatgttgacctagttggtggtacagaggttgccgctatacacaataatccagtgttggtccagctgtctgcagctggatcttccacagagtcaaataataaacagcaacaagatcctgaaacttttacaggtgccaatgccagtcctacagatgatttatgccagcttccattagataataaggatgttcaggtagttaatatagaatgtggcacaccagttgaagttggtggatttggtttgtcaaaatcaatacacaataatccagtgttggtccagatgtctgtagctggatcttctgcagagttaattaataaacagcaagaagatcctgaaacttttacaggtgccaatgctaatcctacagatgatttatgccagcttccattagacaataaggatgttcaagtaattgacatagaatgtggcacaccagttgaagttggtggatttgatttgtcaaagtcaaaaaataagatggtatgctctagcatggatagcatcatggaccctggcgatggaatacatacggatgttattcctgttgttcaagatggctacagccttgcattttcagattttctcagttctgatataccatgctacccgtcaatgcaatcagatcttcatgctggaataagtgccaacgactcagagggtattaccgttatggatgatcctatatatgggtctctcgctgatattggtttcatggacatgtgggggcagcccactcaagactacgacaaattcttctaggctgccgccgaaggcccaagttcatgaatttgacaaggaaaattagttgagttagctcagtacaggcgacaataaatagatcgggttatatcagataaattagttgagtttagcagcaagatcggccgggccaatgcagcccgcctctccgacttgtcctcggacagaaggtttggattggatggagccacccgttggcccgtgaccgtcctggccgcggcgcaaggtcgcagccgccatgcccaataaggccttagttcggtttgagatggattaaagagatccacctctaaccgaacaagccgacatggaggaaagtcctaagccgacatggcgacacagccgcaggatttacggtgcctcgtctcatctgccaccgtcttcgtccggccctagcccctagcacagcacgtagccggacttgtgtccaccaaagcatcagttgtaattagttgcagtccatgataattcttaatcccgttgttagcccgactgtggagataatttgcaatagttgaccacctgatttgttcatgacagcagtttaaaactggattaacgtagacataggcgctactagatgacggacatgcgtaaaaggtgcgttttgcagtacttgttgcctatgaatcccgtgaaaacagacatcgcttttttctcgcgacaaaagaatcaagagatgtcacctttcagtactgtttcattatgttgagttcaattttatttcggtgtaatcatgagtttcag

SEQ ID NO: 28310 - DNA, 2242 bp, Zea Mays
atccatgccgtccatcggatcagatcgtcttctcccgcgctagggtttagcatcggtccccaatggcgtccccgccgccgccacgttcgccaaggtgcccgcgctgaacgggatcttccgccaggcggtgcgggcgctgcatgtcttagtgcgcatcgagctcaacgcacccgtcaaattggggaagagggatgctggtgaaaccggtgaggggaaggaggaggcactggtggtgctggccacacagctcgctagagcagtgcaggcactcagcaagctgagcattgcccgggcacggctctgtgcggagagtattgctgatgctgagcttcgggagaagcttactggtggcgttagcgttgatgatttgaaggggatgcttgacaatgttttgattgattcagatgccgtatcagtcttgaagggggtgtacaaccacttgctcaagttcagggactttcttgcctgggaagcagctgtggccatggcagtaattgaagcagacagttcaattgagaagccacaagctgctgttgagaatgaagcagccagtgtaactgagaagccactggctggtggggacaaagcaaagggtgacaagaagagcaagaagaagaaaactttgggtaagggtacttctgctgtgctcatgctgcttagggaccatgtgacaaatggaagtactgttgctgccatgaattctgcgtcggttgcagagtgggcaacctctctgtcattgctatttgatcccaaatgtccaggattggagtcacttgtggagaaggtgaaggagattgttgagagcaatgaagtgaggagattgcctaaaattccaaagggtacacgcgactttggtaaagagcaaatggcgataagggagcgagcattttcaattataactagtgtattcaagatgcatggtgctactgcgcttgatacacccgtatttgagctgagagaaacccttatgggaaaatatggtgaagactcaaagttgatatatgacttagctgatcagctggatataggcacatatgagataaaattaaatcacagaaagttgcttgatggtatgttggagatttgtggtgtgccccctcaaaagttcagaacagtttgctcgagtattgacaaactggacaagcaaacattcgaacaggtgaagaaggaactggttgatgagaaaggtatatcaaatgaaactgcggatgaaattggcaatttagtgaagactaggggccccccgttggaagttttgatggagttgagaaaggagggcagcaagtttatgaataatgtagggtctgttgctgcactgaatgagctggagatattattcaaagctctggataaagcaaatgcaataagcaagataacttttgatttaagtttggccaggggccttgattactacactggtgtcatatatgaagccgttttcaagggtgcagctcaggttggctccatagcggctggtggtcggtacgacaaccttgtgggtatgtttagtgggaagcaaatccctgctgttggtgtgagccttggaattgagagagtctttgcaatcatggagcagcaggagaaagaaagaaatgagatccggcctacagagacagaggtgctggtgtcaattctgggaaaggaccttaccctagctgccgagctcgtgagcgagctgtggaatgctgggataaaggcagagttcaagctcactaccagggtggcgaaccacatcaagtatgccttgcaatcaagcattccgtggatggtgctagtcggcgagtctgagctgcagaaaggaactgtaaagttgaaggacgttgaagccaaccaggaagaagaggttgataggaaggattttgttcgagagttgaagaagagattgagtaaatcctaagaggaaaattttaggcgttgatatcatcttttgacacccatttgacgcaaactcaattagggggagaatgacattacatcattataatttaaactgacgtgaatgtttcagtccggttggcatagggccacttgttatgttcataaggtcattcgaatcccctgagtcccaatgcattatgctgatgaatcaggctgcagacatattgtgaattatattctttttgtactaccttgaggaatgaaaagtttttgtcctcacatgtaatttggaacaaagccagcaacctgtatttttattgcatttattattttaaaataaaaaaccgacattgaatctcgcact

SEQ ID NO: 28311 - DNA, 451 bp, Zea Mays
tcttagcatagtaccattcactgatccaagacaaaacatggttgtgaatatgagcaccatgtagtcgtcgatgcaggcacatgtggcgatggctgtggcattggcgttcttggtgagcggcgcctggtgcggtcctcccaaggtcccccctggcaagaacatcatggccacgtttggcaaggactagccggacgctaaagcgacatggtatggcaagcctacgggtgtcggtcccgacgacaacggtggtggctgcgggtacaaggacgtgaacaagccccccttaaatattgtgaaaacgaaaaccatagtaacatactgacaactgactagtatatacaaaagaaaatgttataacaactagttagaagaattagttgcctatgcatgcgcgtacaaaatagtcttttttagcaaagaagaacgttggggttctttggaaagctcgcgg

SEQ ID NO: 28312 - DNA, 221 bp, Zea Mays
tatgctcaggtaaagaagaaggagtcgaggcggatctctaggagttccaggacttcgacgagttcgaggattaggctagcgacctcccccagtcagctgcctgtggtgggtttgtttacgttggctacgtttctattctgtgtactttgatttgtgctatgtaaatgactctagtctttaatattattactcattctatattgttattcgaagcattgtgc

SEQ ID NO: 28313 - DNA, 2822 bp, Zea Mays
ccgtccgtgcacacctctctctctattgtgcgttgtcgatcccccgcgagcccgccctccctcacccccacgagatggtcgggagatccgccctcgccttgcctccgcgcaacaatcgtgcgcccactcctcatcgcaatccagtagctccggcctcgcctcctcaaccgcgcattcccctctcccacacccgcctcgttcgcccctaccgcgccatcaacgcgcctcccccgccgcacaccccgtcctccccatgccgaatcgtgatggttatgctccccacccacgcgccgcgtgcctcctccttccccgccgctcccacccgagatggttagctcccctccttctggtcccttcccctgcctcactgccagccagcgatggagcaaggccaggggattcgccggattcaccgagcgggctctggtggcggccggcgctgccgtcgtgtccgccattcttgtcaacccccttgacgtcgccaagaagtaatattgctcgaaaatgtagagctgactcttgaagcctttgactaaatgcagctgccattcacgctgaaaggacaaattaggaagctaagcatctagataggagaatttgattgcaactggaatgttgtcaacatcagcggcaacgacgacaacgccacatcgagaaacaacaactgtgggctagggagcacaatcccgtggtgcggtgacttgcccacgtttgccatgctgccttgatgcatggcacatcaacaagaagagcaccagtttggaaggctaattccgaaggaattgagatgtgcagagggagatgaagaatgtggagaaagacatcagggtagctactaagcgcaatgacatgttatctgcaaagagctgatgctgctcggagtcatctcgctgctgctcagccagacggcacgcttcatatcggagatctgcgtgccgtcctcgctcttcaccagccgcttctacatctgctctgagagcgactaccaggacctgctgcgcaacacggacgccaaccagacggcgctcgacaagaacatgttcggtggccagcggctgcacgtctgtggcgaggtattggtaacccagatgtcctgctcccagcctattgagatcaatggaactgggagtggagcagactgttcactcatcgcttgggttggaacctaatctgtcacttgtagggccatgaaccttttgtttcgtacgagggccttgagcagctgcaccggtttctcttcatccttggtatcactcatgtgttgtacagttttgtaacagtggttctgtccatgatcaagatctatagctggaggaagtgggaaaccttagcaggtccaattgctgctgaggaattgaaagctaggagaaccaaggtgatgagaaggcagtcaacctttgtttttaacaatgcttctcatccatggagcaaaaataaaatacttatttggatggtaaaattccttttctgtttcttgatctttctgtggaacagatactgactgtatcatcctttgttatctgattagtgtattaccgtgtaaagacataaaaatgccttatttttctagctcatccagtcatttcgaattcaacctcaagtttactgatgaaagaacatctaagagtgtcaccgaccatagtcaaaagattcatgtatctgaagcctcaaataagtagtatacatccataatcacttggatttaaagtttctttaattgcattatagctttgctttttgcgccaattcaagggctccataataaggtcagactatttggcactgaggttgggctttgtcacagtgagtactctaatttttttctaatgttttagcatcctcgccccacctcctccccctgccaagatgattctaatatgccactttgttcatgtgtttttcttattagtatcacaagctaccacattcatatgacttccataaatacatggtacggagcatggaagattattacaatgggactattggtatcagttggccactttgggcatatgtgattgtctgcgtattaatcaatgttcatggtatctctactacttattaaggctgtaagggtagcctccctttttttgttctgtctttttcattttcctgttttgccctttccattcccacccgcgcattgcattgatcaccaatcgcatcgcagcagcacaagcagcacgccgtgccgctccaaccgtcttgcttccccgcttagcttcccgccgcgccatggcgtcgaccaaggctcccggcgagaagcaccactccatcgacacgcagctccatcagctggtcccaggcaaggagtgctacgaggtctcggccgactacgagggcaaaggagacacgacgaagctgggcgagctcagcgccaagctcatggggctggcccccgtcgacgccatcctcgtggcgagctccatcctgcacatgctcaacctcgccaacctctccgaggaggtgcagatcacgcaccgctgccgcaacagcaagctcaagaaaggtggcttcgccgacgagggctcagccaccaccgagtccgacatcgaggagacgctcaagcgcctcgtgtccgaggtcggcaagtccctcgaggaggtgttcgaggcgctcaagaaccagatagatccacatttatgcttatgtttattttatattttttgatttgaatatctaaactatgatgttctatgaaagatcattcttgaatttttgcctttaaattttcttgttaaatcttgtatactacactattaaatgagtgctcgtgcgtcacagtcccgagtttctctttaacgtcatcctggacggttcgt

SEQ ID NO: 28314 - DNA, 477 bp, Zea Mays
ccctctcttcttcaccatcgcctcgctcgcctcctccgtcgtcgagccagcccttctccgtatccgtcgccatcacccccggatctgcctcccccatgaccgacgaccaacgagagcggcgtgagacggctttaggcgacgaaggcggcccacaccatgtcagccaacgacgcacagcggtggaagcacgcgatgggagctgacgacgcccttcctcggacggtatgcctacccccaatcaggtcatcgtcggcctcctgcagctgtccctccatcacctccttcaaggtttaggcgctccaccacctcagtccgggtgcactgtcttgccctcgactccagtgcctgtcacctcctcctgggccttggcgttaccgtggcccctcgcacagagaaccctcggtccaacaagcatctaggcgtctttggtagtggtctgtcaacaacttacaagttgtcaacctaactgtcggctgg

SEQ ID NO: 28315 - DNA, 680 bp, Zea Mays
tttggaatacgaccatatagaggccacggcaggctttgttgaggaggtactcgaacaagaggaaggcgtgtctgactctgctcagatgcgtcgtccgcatcgcagaaacaaaggagacagccgcggcggcggcgtcatccgcctgtggcggcctcgctaggccccctgcaccccgcgctcgcccacgccagacgtcaccaccgccccatcttacccctccctgctcctgctctctccgtcgggactccgagcagatcgaggccggagaggaggatgagaagaacacgccagataccaacgccgcacaccgtgctgcccctggcgtggagccgcgagcaggcccagggtcaccgaagcctggtgttgagcaccgtttgtggcactcggcacgaccggacggttcgacctgcggacggtccgtccataggcgcggacggtccgcgataggattagatcagcctgttaaaactcctatctcctcgcgtgtttatccctctaatcacgcgggagctgttggagaacgccttgtaacgggtccagacctcctccctttatatagatgaagggttacggtcgattgagcgacacaatcgaacccaaatcaatatattaccagttctttactttcatgccctaggagtagccagtaacgtagccttcttcgtctcattcttcacctc

SEQ ID NO: 28316 - DNA, 902 bp, Zea Mays
tttcgcggctcgaagagtctcgacgtttccggtcgccggttcctctacctcccacggatacgcggccgctagaccgcctactctccccatccctcgccgcctcgcttcaccccacctatggtcgccgctgctcgcatcgccctgcggcccccacctctctctccctttctcctcgcaacgccgcccccgtttgtccaccaagtcaccacgcgcctgggagatggatcaaggggcgcgcagcagtccggtcaagacacgctcaacgaaagcttcaagatagcacgggagatggaagccccaccatcggctaggaatcgttgcatcacgtcatccgattcctctcccttccgttcctttgctttcgtggtggatgagaagaaagcggcgaagggcgcatcggaaaagagagcctggaggaggaggcacaccatccttcctcttgcacacggagtcctcaagctttctcctcaccttgctggaattccgggtgccatacatcatctctgtcggcagggataaaatttcattcccaagctgctaaatggggcataagtggtttcatctcagaataaaaaacgagtgctgctggagtattatgatgcctttctaggcacatggtcttattctacgggctacctgctatgggatttgactaaaacacacatttaccttgcttgtggtgagctctttggtgggaaacgtttgatgaagccatgtttccatgtttagagaatcacatcacagtcggacctggaactctggaagagaatacctaagggctagcaggatcaacaattgattacatggtttctgtaattttttgtactgaactgaatttaagcatttatgttatattataaagttcaatttagaaggtaaaaacaaaattgttttgtgctaaa

SEQ ID NO: 28317 - DNA, 3623 bp, Zea Mays
cccaaccgacgtcacgtcccaacggccgtggcttatcttcgcaaatcgaggctccctgtcgccggagcaactctcggcgcgttccggttcagcgatctctacagtttttcttcttcttctgaaacacctttgtggttgctgttctgctgcgccccccacgagctttttgctgagtggcagtgtccgctgggctgggcgacctaaaaccgcacctcggggccgcgacctcggcatgcagggttccgcgcgcacggagcagccagcagctgggtgcagccggaggacgacgatggggttccttctcgccgtggccgtcctgctctccgcgtgcgcgcaacagtgctcgggcacgacagacagccaggacacttccgtgctccgggcgttgatggatcagtggcagaacgcgccgccgtcctggggccagtccgacgatccctgcggagagtcgccgtgggagggcgtgacgtgcggcggcgacaaagtgatctccataaaactttccaccatgggcatccaaggaagtctagctgctgacataggccagctcagtgacctgcaatccatggacctgtcattcaacaacgaactcggcggcgtgctcactccgaccatcgggaacctgaagcagctcaccaccttgattctgtccggttgcagtttccatggcaccatccccgatgagctaggaagcctgccaaagctgtcctacatggcactgaattcgaaccagttctctgggaaaataccagcttcgctgggaaacctctcgagcctctactggtttgacatcgccgacaatcagttgagcggtcccctgccggtctcgacagacggcggaatgggtctagacaagctcatcaaaaccagacactttcacttcaacaagaaccagttgtctggtccgatccccgacgctctcttcagcccggagatggccttgatccacttgctcttcgatggaaacagattcaccgggaatatcccggactctcttgggtttgttagtacactcgaagttgtacggctggacaggaattccctttctggccaagtacctttaaatctgaataacctcaccaaagtcattgaactcaacttggccaacaaccagctcaccggaacattgccagatctaactaggatggatcttctcaattacgtcgacctgagcaacaacacatttgatccttcaccatgcccggcgtggttttggaggctgccacagctctcagctttgatcatacagtctgggaggctctacggcaccgtgccgacaaggcttttcagcagcccgcagttgaatcaagtgatcctcgacggcaacgccttcaacggcaccctggacatgggcaggagcatcagcagcgagctgagcctggtgagcttcaaggacaacgagttcgcctccctcacggtgacctccagctacaacggcacacttgcgctggccgggaacccggtgtgcgagcgcctgcccaacacgccctactgcagcgcgacgcagcggccgctgtcggcgccctactcgacgagcctggtgaagtgctactcggggtcctgcccggcggggcagagcctgagcccgcagagctgcctgtgcgcgtacccgtaccagggcgtcatgtacttccgcgcgcccttcttccacgacgtggccaacgacacggcgttccaggagctggagagcatgctgtggaccaagctggccctcaccccgggctccgtctacctgcaggaccccttcttcaacagcgacgcctacatgcaggtgcaggtcaagctcttccccgccggcagcggcgcctacttcaaccgctccgaggtcatgcgcatcggcttcgacctcagcaaccagacgttcaagccgcccaaggagttcggcccctactacttcatcgcatcgccgtacccgttcccaggaagcgagcaatcgtcgaagagcaagggcgtcatcgtcggcatagcggtgggatgcggcgtcctgttcgttgcgctcgccggagcagccgcctacgctttcattcagaggcggcgggcggagaaggcgaaggaggagcttggcggtccttttgcgtcgtgggctcggagcgaagagcgtggcggcgcgccgcggctgaaaggggcgaggtggttctcctacgaggagctgaagaggagcaccaacaacttcgccgaggcgaacgagctcggctacggagggtacggcaaggtttacaggggcatgctgccgacggggcagttcatcgccatcaagagggcgcagcaggggtccatgcagggcgggcacgagttcaagacggagatcgagctgctctcgcgcgtgcaccacaagaacctcgtcggcctcctcggcttctgcttcgagcagggggagcagatgctcgtctacgagttcatgtcaggcggcacgctgcgcgacagcctcgccggcaagagcgggctacatctcgactggaagaagcggctccgggtggcgcttggcgcggcgcgcgggctggcctacctccacgagctcgccgacccgccaatcatccaccgggacgtcaagtccagcaacatcctcatggacgagcacctcacggccaaggtcgccgacttcggcctctccaagctagtgtccgacagcgagaggggccacgtcagcacgcaagtgaaaggaacactgggctatctggaccctgagtactacatgtcccagcagctgaccgagaagagcgacgtctacagcttcggcgtggtcatgctggagctgatcgtcgcgaagcagccgatcgagaagggcaagtacatcgtccgcgaggcgaagagggtgttcgacgccgacgacgccgagttctgcgggctcaaggacatggtagacgcaaggatcatgagcaccaataaccacctcgcggcgttcggcaagttcgtccagctggccctcaggtgcgtcgacgaggtggccacagcccggccgtccatgagcgaggtcgtcaaggagatcgagatgatgctgcagagcgaggggctcagcagcgcctccacgtctgcctcgacgtccgcgaccgagttcgacgttacgaagggggctcctcgccacccgtacaacgatcctcccctccctaaaaaggacaaggacgtgagcaccgactccttcgagtacagcggaggatattctttccaatcaaaggtcgaaccgaagtagctgatttctggattgaggctatcttcttcgttcggccttttcctttcccaacaattggcttgacgaaatgaagagagatatgggtaacctttttattgcattgagcttaatacttgtgggagactagtgaatttgtatggttaataggagacgcatcaagatcaaactcgtctgcctctaaagtgctgctaactgttgtttacggactagaggaataccaaccgtatcatagaacaaaggtggcaacaggggtgtttggtctatgggcaaatagtcacttaagtccacattgctaagtttgtctctaacagcttttctatcacatctcctatttcaaaatctactttagaaacattacactctaatagtgtttgtatgaccatatgaacggtttgctgaaaacggtctaagcaattccatcagcacgagtaaagcg

SEQ ID NO: 28318 - DNA, 1337 bp, Zea Mays
atcacctatcgtttggaagtcaaacctagtaatttatcacaaagatgttcacattcttgaatggacatcctattcagtaccacctcgtgattgtggtgttggggaaggcagttgggctggggtatgctttagcccaatgcagcaatccatggtagctgttgctcgtcagttgtgcaagaccattgatatctatgatcaagatattcacgttcggagtttacgcacatagagcctatattacaagctactgcatacccaaaatgactctagcttcctcatcgactcttaatgatctttgtatgcacaatctttttattcaaaggaggctgctgtggattcaacacataaaccatgagttcttttagcagcatccattatctcacaattgcagactgtaatttgcacgatttagggggtaaaacttaacttgcaggctatggtatccatcttcgtttagctttgttcaatactctccacatgtgaacgaaagtagttctctcttggcaactgcagaaggttctcagctgagcatctgggacctaagaatgaataacaatgggggatgcgtacatcgcattactggatcagttggagacattatatactccacatgtagctcaccttcaggactgattgctagtggtggaactgatcgtgctgtcaccatctatgatcctcgcaggtggtctgctctgtcaagatgggtgggctgctccaagtttgagattacaggtcttgcgttttcatcagttgacgaatctttcatctacgtccaaggtgttgattatgagattacctgtggacattggaaacaaagtgagcgagcattctcatttcgaggggattccaactggttggggttttcaaagtgtgccaacaatgatgtgatagcagggtggtgcgagtctggaagtatcttcattgctgatgctaggcagctataggatcaatatccccttcatctggtgccctggagccccggaagtcaccagtatgtgttgtgttttgccatttctgtaagaatgtgatgtttacaggaggaactgttcttaactctccagtaccaagtagcatgcgaactcatgcccattggccattatggttcttgaaaaacatgattattccagatttcatccagcaaattgaattgaatttggtcaccagaaggggtattggcttgtaccaatcattggtatcttttattaatggggtctcagcagtcatcatatcacgtcaagttcacgctttatcttgaatattttgatcattcaagcaccaacaaggtacacgcctctggaagctccctggcattacgatgtttcagtttacgcaggtaa

SEQ ID NO: 28319 - DNA, 4228 bp, Zea Mays
gtagaatcgaacatgaaattcttccgcctccgcccgccggtcgccagagcccggagggagagcgctgagaagcagcggtagctggggaccgggggctcagcttcatcatttcccaaagcccccgagctagcagagggagtggtgcgagggtctcattggacgatttggttcttcaaacaagaagaacatcaccatacttaagaatgtcaatggtatcctcaagccatccaggatgacacttcttcttgggcctccatcctcggggaagagcacactcatgcgggcactcgccggcaagcttgacaaaaatctcaaggtctctggcagcattacgtattgtggccatccaatttcagagttctatcctgagaggactagcgcgtatgttggtcaatatgatctccacaatgccgagatgaccgtaagagagacactggatttctccaggcggtgcctaggcattggtgccagatatgagatgatcgccgaacttgctagaagggagcgggatgcaggcatcaagccagatcccgagattgatgctttcatgaaagctactgcagtacaaggacaggagactaatattataactgatctcactctcaaggtgcttgggctggacatttgtgctgacgttattattggcgatgagatgatcagaggaatttctggcgggcaaaagaaacgtgtgacaactggggagatgctaacggggccagcaagggctttatttatggacgaaatatccactggtctggatagctcgagcacatttgagattgtaaagtttatgaggcagttggtccatgtaatgagtgaaaccgtcatgatctctctgctccagccaccgccagagacatacaatctttttgatgacataatcctgctatcagaaggatacatagtgtaccatgggccgcgcgagaatatcctagaattctttgagtctgccggtttccggtgccctgacaggaaaggtgtcgcagactttcttcaagaggttacttccaagaaagaccaacaacaatactggtatcttgatcaggagcagtatcattatgtatctgtacccgactttgcagaacgtttcaaatcattccatgcatgccagcagatgcagaaggagttgcaaataccttttgaaaagtccaaaactcatcctgctgcgttgaccaccagaaaatatgggctttccagctgggaatcactcaaggcagtgatgtcaagagagcagctattgatgaagcgcaactctttcatctatattttcaaggtcacccagttgatcatccttgcactcatgtccatgactgtgtttctcagaataaagatgccccatgggcagattgctgatggcaccaaattctttggggctctgacttttggtttaataacaatcatgttcaatgggttcgctgagctacaattaaccataaagaagcttccagttttctacaaacatagggatttcttattcttccccgcttggaccttaggagtggcaaacataatcttaaaagttcctgtctcgttcgtggaatcagcagtatgggttgttctcacgtactatgtgatgggctttgcacctgctgcaggaaggttctttcgtcagtttatagctttctttgccacacaccaaatggcaatggctttattccggtttcttggtgctgttttgaaaacaatggttgtggccaatacttttgggatgtttgtgctgctcattattttcatctttggaggatttgtcatccgtagaaatgacatcagaccatggtggatctggggttactgggcatcacctatgatgtatagccaaaatgcaatatcggtcaacgaattccttgccagtaggtgggctattccaaacaatgacacgactatcgacgcgccaacagtaggcaaagcaattcttaaatccaaaggcttgtttactggagaatggggattttggctttccattggagccctcataggattcattattttgttcaacatgctctacctttgggcccttacatatttaagtcctagtagtggctccaatgccctggtttcagaaggtgaggatgatgtaaatgaaatggcattggaaggaagaaggaaagatgcaagaagaagcaaagatgaaatatcccaagttgtatccagtgatccaggcactaatggaggaacaaacacgctagctcaatcacgagtcactttgcctttccagcctcttgcactttgctttaaccatgtaaactattacgtcgacatgcctgcagaaatgaaggaacaaggattcacagaaagccgtttacaactactctctgatatcagtggcacttttaggccaggggttctaacagcactggttggtgtgagtggagctggaaagaccactttaatggatgtcctggcaggaaggaaaactagtggagctattgaaggagatattaccctgtcgggataccccaaaaaacaagaaacttttgcccggattagtggttattgtgaacaaactgatatccattctccaaatgttactgtatttgaatccatcacctactctgcttggttgcgtctttcctcagatattgatgatggtacaaaaaagatgtttgtggaggaagtgatggcccttgtagagcttgatgtgttgcgcgacgctctagtgggtctccctggagttagtgggttatcaactgagcaaagaaaaaggctgacaattgctgtggagctggtagcaaacccttcaatcatcttcatggatgaaccaacttctggtcttgatgctcgagctgcggcaattgtcatgcgtacagtaagaaatacggttaacactgggcgtactgtggtctgcacaatccatcagcccagcatcgacatatttgagtcttttgatgagcttctgcttttgaaacgtggaggtcaggttatttatgctggtgaacttggtcgccactctcacaaactagttgaatattttgaggcgattccaggtgttccaaagatcacagaaggatataatcctgcaacatgggtgctggaagttagttctcctctatctgaggctcgattgaacatgaattttgctgaaatttatgcaagctctgtgctttataggaaaaatcaagaggttatcaaggagttgagtattccccgatcagacaaccaggacctgtcatttcctacaaaatattcacagaatttctacggtcaatgtgccgcaaacttttggaagcaataccgttcgtactggaagaatccaccctacaatgctatgcgctatctgatgacatgtctctttggccttgtatttggtacagtattttggcaaaaaggaaagaacatagattcacaacaagatttatataatctgcttggagccacttacgctgctacattctttcttggggcttcaaattgcatcacggttcagcctgttgtatcgattgagcgagcagttttctaccgtgagaaggcagcggggatgtactctccgttatcctatgcatttgctcagacatgtgtggaggtcatctacaccatcttacaggggatactgtacacagtcatcatatatgcgatgatcggatatgactggaaagcggataaattcttctatttcctgtttttcatcactgcaagcttcaactacttcacattgttcggcatgatgttggtagcatgcactccctccgcattgctcgcgaacattctcatcacgtttgctctacctctgtggaacctctttgctggattcctcatcgttagaccggcaataccaatttggtggaggtggtactactgggcgaaccctgtgtcgtggaccatctatggcgttgttgcgtctcagtttggcgagaacgaaggtgagctttcagttcccggtgggacgcccgtggtggtgaagcagttcttgaaggataatctcggcatccagcatgacttactcggctatgttgtgctcgtccatttcgcctacgtcattgtgttcttcttcgtattcggttattccatcaagttcttcaacttccagaaacgttagcgggatcatttgtatgtaattaatcggtcgccgtaagttctagttctagttctagttctagtcaaagcaagtgcttgttttgggaggaagcctgtatgcaagtagcagtgtattcctcttgtttcttcaatgcaaaaatattaaaaggaagatgacgaatgcaaaagtgacatgtcttgttccttttcttcttga

SEQ ID NO: 28320 - DNA, 1613 bp, Zea Mays
tcaaccctgaaaagaaccgcgcacgcgcacccaatgaaagcaaacagtttccaatccagtccatcatcgcccaatgaacgcccgcccatgcacggtggtgcggtggacagccggcgggggtctacaatttcctctttttgtttccccccattattggcagcggagttgttggattcgatccttgcatcatctgcctggcgtgacgatcctgacgatctcgacggcggcgccggggctacggccggcgtcctgctccgcgaccggcggaggcgtcgtcggggagtgcgcgcgggcgtcgggggcgcagctgggggtgctgtacctggcgctgtacctgacggcgctgggcacgggtgggctaaagtcgagcgtgtcggggttcgggtcggaccagttcgacgagtcggacggcggggagaagcggcagatgatgcgcttcttcaactggttcttcttcttcatctcgctggggtcgctgctggccgtcaccgtgctggtgtacgtccaggacaacctgggcaggcgctggggctacggcgcctgcgcctgcgccatcgccgcgggcctcctcgtcttcctggccggcacacgcaggtaccgcttcaagaagctggccggcagccccctcacgcagatcgccgccgtcgtcgtcgccgcctggcgcaagcgccgcctccctctccccgccgaccccgccatgctctacgacgtcgacgtcggcaaggccgccgccgtcgaggatgggtcctccagcaagaagagcaagcgcaaggagcgcctcccccacaccgaccagttccgcttcctggaccacgcggcgatcaacgaggatccggcggcgggggcgagcagcagcagcaagtggcggctggcgacgctgacggacgtggaggaggtgaagacggtggcgcggatgctgccgatctgggcgaccacgatcatgttctggacggtgtacgcgcagatgaccaccttctcggtgtcgcaggccaccaccatggaccgccgcgtcgggggctcgttccagatccccgcgggctccctcaccgtcttcttcgtcggctccatcctgctcaccgtgcccgtctacgaccgcctggtggtgcccgtcgcgcgccgcgtcagcggcaacccgcacggcctcaccccgctgcagcggatcgccgtcggcctcgcgctctccgtcgtcgccatggcgggcgccgcgctcacggaggtccgccgcctccgcgtcgcgcgcgattcctccgagtccgcctccggaggcgtcgtgcccatgtccgtgttctggctcatcccgcagttcttcctcgtgggggcgggcgaggcgttcacgtacatcggccagctcgacttcttcctgcgcgagtgccccaaggggatgaagaccatgagcacggggctgttcctcagcaccctgtcgctgggattcttcgtcagctccgcgctcgtcgccgccgtgcacagggtcacgggcgaccgccacccctggatcgccaacgacctcaacaagggccgcctcgacaacttctactggctgctcgccgccgtctgcctcgccaacctactagtctacctcgtcgccgcccgctgccgccgccgccgccgccgcc

SEQ ID NO: 28321 - DNA, 1219 bp, Zea Mays
gaagagatccgtgtggccaaggtcttcctctcctatatattgactcgccgccacacagatagggttttctctccacgcagcgcgctcctcgatccccaacaggcaacagcccagccgctgtcgccctcgttccgtagtacggcgccgccagatcgtcagtcaccatgatcatctccaagaagaaccgccgcgagatctgcaaatacctcttccatgagggggtcttgtacgccaagaaggactacaacctggccaagcaccccaagcttgatgtgcccaacttggaggtgattaagctcatgcagagcttcaagtcgaaggagtatgtgagggaaaccttctcatggcagtactactactggtacctcaccaacgatggcattgagcacctccgcagcttcctcaacctgccatcagaggttgtgcctaataccctcaagaagtcttccaagcccccgtctcgccccttcggctctggcccacctggtgaccgccccaggggccctcctcgttatgaaggtgacaggcctaggtttggtgatagggatggttacagaggaggtccacgtggcgctccaggtgactttggtggtgataagggtggtgctcctgcagatttccaaccatcttttaggggtagcagacctggctttggccgcggtggcggcggtgctttcggtgctggtggatcttccatggagtgatgtgtcaacatgagctagcataacattcgtctttgaactatgagaacaatgagattttgttttgttttaccgagctgttgccgtgggttgacatggttttgtgatcgtttttgtttagatgaaattattgaaatcaagcagcgagttatcagtctatcgcgtgctgaattccttgtgctttctggtctatggttcgtgttgcaagttataacttttgcatggagaccaaaaagtttcaagaaaaaaatttgtcaagacacacgataagtatggcaacgaagagctgacaaaaaaacattcctcctagccccgttggtgtgatgtcctcattaccttccaatgcagtgcaagaatttgcaacagccaacgttatgaattatatatatgaacatccataggaaaaaaatccatctacttttaaggcatgcatttattgcatgaatttgcaacagccaatgttatgctgaatttgttggatcaactagaaatcaaaatatcccatctacttttaaggc

SEQ ID NO: 28322 - DNA, 2585 bp, Zea Mays
cacacctcacaaaccacgcagcggaggcgacccacaaaaaacacgcgcggcaggaggaaggcgaggaagcatccccttgtgcgcgcccccctcatcctctcaatcccacggattcgccggggtaatctcgccacggccgtgctttgacgccgaattcgtgctctgtaggttcaattgaccccaccaccgcccgctgctgcttcgtttctagctcgagagagtttagtgggttgcttgattccgaagctccgagctcgtgggattgaattgagcccccccaagatcagaattggagcagcgggttttggtttcctgcttggtgccgctgattggagtacgcttcttttgtggtggttgagaggctgctcggcttccgccgaccatgtccgtgccggcgatagccgtgtacaccagcccgcccggcgccgtctacgcgccgccggagctcgagtccagctcgcgcggctcggcgccgtgcgcggccgcggcgtccccgtcagcgccgagctcccaccgccacgcggccgtcgcgggcggcttgtcctgcctattttcgtccccgtccgcggccccgcgggcaacggcgcacgaggagctcggcgcgctctggcacgacagatccgatgagccgccctccgtcgccgggggcttcggcggcgggggctactcgtacccccagtcgtcgccgtcgccgctcaagctgcgggaccacctccaccgcagcccggtgtctctgttccacacccctgcctcctccccggcgtccaggagcccctcggtttcctggctcgctggccgtgagcgcgagcgcctcttctctagcttcgtgcgcaacgcgcttggctcctgcattgactacgcaccggtcaccagcttcccgctgggtgtgcgccccgcggccactggtgtcgacgccgcggagctggccttcgagcttgacgaaaacctctctgaggcggagccgtcctgcgaacctgatgctcatgaactcctcgccggcgcccaggctcgccaccacatcttccgcgacgagcttgtcgtcaaggccttcaaggaggccgagcgggcacaccgtggccagaagcgggctagtggtgatccatacttgcagcattgtgtggagactgcggttcatctggccaatattggtgcaaacgcaaccgttgtgtctgctggccttctccatgacacaattgatgattcgttcatggactatgatcatatcttcaggatgtttggtgctggtgtggccgatcttgttgaagggcacttcttacatctacgcttcataacttggataaaagccttagagatgaaggcatttcatatcacagtctttctggaaggcacaagagtttgtacagtatatactccaagatgataaagaagaacttaacaatggacgatgtccatgacatccatggtctacggcttgtggttgaaacagaggaagattgttatcgagcacttgacatagtgcacaagctgtggccccgagttaccggaagatttaaagactatatttgtcatccgaagttgaatgggtatcggtcgctgcacactgtcatcatgtgtgagggtgtccatccatttgaaatccagatccgaacaaaggaaatgcacctacaggctgaatatggattcgcagcgcactggaggtacaaagaaggtggctgcaggcattcctttgtgctccaaatggtggaatgggcgaggtgggtgctcacatggcaatgcgagacattgagcaaagagcgtccctcgtctttgagcagttctgttggcataaggccaccatgcccttttcccctgcattcggaagattgctcctactcttacagccgacagtgcaactatgaaggccctatatttgtcatcatgcttgaacatgacaagatgtctgtccaagagctcccagccaactcgactgtagttgatctaatggagcgagtcggggccaacagtccgagatggagcccttgcagcttcccactgaaagaggagctgcgaccgagggttaaccacaagcccataagcgacccaaataggaagctcagcatgggcgacgtggtggagctgacgcctgcgctccctgacaagtcgctgtccgagtaccgggaggagatccagcgcatgtatgagcggggagggtttgcgctcgccaccacccctagaagctgacaccatcgtcgccatgttaacctgctgctgtacaatacacctgtaaatacgaactaatccttgcagcagagaaatcccagatgaacaaaccccccaactgaattggctaatggtgcggggtttgatccaggacgctgctgtgtgtaacgctttttacaagttgaaatgtggccaagttcctccgaagattcatgagaaacatgaagtacttgtgtccttgtacgcttttggtttggtttcaatgtttcatttggactggatcaagtccgacctcttccgcgctctaatcaggacgcgacaactgtgttgattgtggcttctcttccacaccatgtaaataagcaggaaaatatgaaccaacgttatcgtaccttctcgtccacatatatctaactaaatactcc

SEQ ID NO: 28323 - DNA, 2154 bp, Zea Mays
gttggctcagccggaaggcccaattgatgaagacggataagctcggctcaggttaggccccggcatcgccgtcgactaggctggccctccgccgtctgccatgacgagatccgcgtccccgagcgtggacgctccacgcctccgcctcccggacgccggcgaggtgcgtccggcgtccctgctgcacacaacctgacaacctacttctctcttctatctaccacaagatccttccgccgcctccccctcctgacagagcagaggcagagctgaggcccggcctggccgggcttcggcggcccagcccaaataacccgacgggtccgcatcctgagctccgcctccacacaccttggcacctcgccctcgcctccagctccgcacgtcccgtcgcccgcttccacctccacgcgacgcgacggctcgccttcacctcctcgccgccagacgcgcccgccgccacccagcgagccggcagccgcccgctatcccaggcttcgttttcttgttggctccgccactgtgacagatggctgcggggggcgggcggtgcttgctcgccttggcgctcgccgccgcttggatctccggcgcggtggtcgccgcctcatcgtcgggtgagcagagccggggccgtgatgcgcgttcatgtatagtgtctggaaagggctacggaaagcgttcgtttttagctcatgctgaattttaccgtacctgtaagctgaaggcggaagccgcacacccgtcaaatgcatgccctgctctagaacgtacattggtggtgcacatctggacaccttgacgggccagcttgctcagcgtcgtgacatagtggaaatgtctgattctggtgaattgtgcaaaggacttgctgatgatgtcgaagttcctatgctttcaaaactacgccggcaactggttggtaaaggttctcaccgccgtttagtctattctgtggattttggtgcccatgaaggtgctatggttaatttccttgatcactacgatgcccatctggtgatatttgaaaaacttcctgatggagtgtttgccgacccatttgagctacagcattttgttgagcgcaaagttttcgttgatgttgctgtttttggagacgccaaccttgaactgcccacagctctatccaatgggtcatctgttgagatccattttgatctcaggcgaatcatttcaatcaactgtaaccttgtaatagagatgcctctccatgctagatacccgcctcttgatgccagtggctatgccacagtggagtttggtagcgcagatctattcctccgctacagaaaaaaggacatccattctggttcctgtctttgggtgatcaataatctcaaagctgcacccctggagaaagctgcatggcgcataccctgtggagacgaggcccacataggatttgtatctagcatcacgtttctttcagctcttgtttgctccatgtccattgtcttggcttctctcattttttgacgtcttagggtcctatcagaccttttttttgtttacataaatactgaagtgcgagacaggagaattctcttcatgcatccacacatccttgcaaatgacaacccagttgccattaattttgctagctttagtggagtctttgcaagttccattgaacggagttgccaacttcgaatcacatacagaccagaaccagataagggtgttcctctttgtgatggaaaaaggagtcccaaaagaaaaatcatctacttcaagttcggtttgtgctcatgagtcatgaggcagtcagagccagaagctgaatgccaccatcatcttggaagaagacttgatccgctggctggaaagaaatcgaaacctaaccagtctgtcggatgctgacaaacattactgcagagcacctgatgtcctggttgatgcctgacagaaataacaaatactactaaaaagaatacaattttagatgcactcttaattgaaacgtgtaaaagtttgatcagatatatagatttaaaaggcactgatgtttatgacgccgaaagtaaatatgctatgaaaacatacctaatgacaaatttgatggtatttatttgatattagaattttctgttctttttaataatgttattacagatttaaagacattaacttggt

SEQ ID NO: 28324 - DNA, 1695 bp, Zea Mays
ctctctccccaccattcagctgccgctgcccccgattgagccgccgccgcctcagattcgccgtcgccacctcagattcgccgccgccgccgccgatttggacgctgtcgccggcgattcagcctccgccgccctggatttggcctccgccgctcccgattcggcgctgccaccctgaaacagcgccgcccctttcccttcccctatgccctatgccctcttgctgcttctcacctaggcgacggggacgccttggatccttcgggcgcctggacgcctaggcgacgcctttaaaacaagggtcttctctgtattaaatattttctgatgttttttcggcatttgggtttgttcacaagatagctacttttgagaaagcagctggtttccaggcacttatccagtatactgatgccccaactgctcttgaagctaaaaactcattggatggaagaagcatcccaaaatatttacttccagaacatatcggtgcctgccacatgcgcataaccttttctgcgcataaggatttgaatatcaaatttcagtcgcatcgcagcagggattacaccaatccttaccttcctgtgaaccaaacagcaattgaggggattgtgcagcccacggtgggccctgatgggaaggtaaaggagcctgagagcaatgtacttttagcatcaattgagaacatgcaatatgctgtgacagtggatgttctgcacactgtgttttctgcttttggagctgttcaaaaaattgcaatgtttgagaagaatggtggaatgcaggctctaatccaatatccagagaggtgtcggagttcgtgaaggcttaaaatggacatctgcaactttccacagctataaagttgtttttaatataactaccgcagccgttgctaaacaagctttggagggacactgcatatatgatggtggttactgtaagcttcatctgtcatactctcgtcatactgatctcaatgtaaaggcacatgatgagagaagcagggactacactctttcagaccctaacgtgcagctgcaagctgctgcacaaacgccagttctaaggtctccgggagtggcatggcagaacactgcatcagtaccagctgctcctttttatgcaagcacagcgacttcaactcctattggagttggacaggtggctgcttggaatcctaacatgcaggcagggagttttgcatctgcatcgactgcataccccaaccaaccattaatggccaactccatgcctcactatcctgctattggatcgagttccggtgccccaccagtagcatttcaggcttcgcagcagatgacacagtatagcatgccccctggtgctccgccgcacgcaccaccagctggccaatcgatttactacccgaagtaagcggttttggttcaatattatcagagagcaatcaggcattgttacctgcgacaattgtggtccgcaaatgcaatcttgcgaattttgcaagtgcgctgtagcacttgtaacttgcgagcgcccttcgcaagaatgcatcagcgtctgctgtgtctgtaaaactgtcaaagatagtgtttacctattagcttgcatggtatattggtggtgagatatgttggagtagttttgatgcctcaagaatctcttacgcatcttttttttttaaaaaaaactgcgctttgcttttggtct

SEQ ID NO: 28325 - DNA, 738 bp, Zea Mays
tcgagcttacccgctgcacaagtattgccatcttttctcgcggtgacctatgcccctcaatttgagagccctcaagataccaaggagaaactggaagttaggagaaaagaagtccttggccgaataaaatcatctgctggcagacctgaaggatcatctccagctcagggatcatctagtgggaatcaccaccaaatgaactctaataagagggaatatatgaagacaattcatgcttctcctattgaagatcctcgtttcagtcatgtgtcctcagacaaggattattttccatccgagtcgatgaatgctactgtaaagctagtcagagggaagcttgataagatacaatctggtggtgataattccagtacctcagcagcatccaggaaaccaggggttgataagcgcaggcgaatttgattgcagataatgccgagcacgcgttcaatgttttggtgtaatgttgatattagcataacataccaggattttaatggacttttttctatcaattttctcactcacattctaggccattaagttgtttatgtttcagggtggcggtgctatactatatggttagctagaattgctggaatatcgataaccgagttaagttaaaaatgcctcgcgtttagttttcccagctgtaatgttatgttactcttgcaatcaattgcatcggaattctcatattttatattgacgcgcctccgatgcatgtgtacggtgaga

SEQ ID NO: 28326 - DNA, 805 bp, Zea Mays
ggcgggtccacctgtttattttcagtagcgcgcggtaactgaaattgagagtataaatttctacgtgtcgtcagcttagagctcatttctactagtgctattcaattttaaggtgcatatgggggtcacagctctaaggcctgatttggtgattagggatcccgaatggatccatgggggaggaatccccttgcaatttaattttgaataacaagaggatttcttctcatggagatccccgatcaccaaatcagtactaaaagagatgtctatcgtccacatgctgcgtgatatacataacaacatgactttgcatgagccacgattctgtgtgtgttgttttgcacgtgccaccattccatgtgatacgtaggttacatggctttgcatgatggcaattggcaccgtaccgccacgcccacgccatgcgggcgtcacggtggcgtcatgcagggtccgtcgtctcaggggtcaggacggaccgaagcgccgcgcgtcgcgtcgttttcgtcggggtctcgctctctcgcatggaatcaacccgatgggacgtcgcgccgtcgccacgcgccaaataagctcgcaccggccgcggctcccattgtctcgtcgcgacgtcgcctggctcactggctggctcccgtcgctgtccccccgcgtcccctgcggccctgccacgggttcccccggagcctgtgtcgcctgtggcggtgcgcgaacagagcgcagccacccatgcgcggccacgggcgtccgtccgtcggtccgctgcgacgcggacgtgccgggccggcgtgcggacggg

SEQ ID NO: 28327 - DNA, 754 bp, Zea Mays
ccataatacgatcatcactgtaaaatcttccccaccgcccatatctccctcttatcctctcacgttactctttcctgtttccagaatccactcgacacggttcctgggatccctgtgggtgctccatccgtttcctttcgcctacaacaacatcgtcgtgccgcgttgtcgactgtgttcagccccgagccatcgaccaccgaccccaacagcgccgcgcttccctgaccctgaccccaaacatcacaaagacctgcgcacgtgctcctcatcgaagtgctcgacaaaccttgcctcgccaacgtctcgccaagttgtcagacccgtcctcgagtttggtggagtcccaagcttgcacgccgtcgactccctgctcgcctcgcttcgttgtcatcgttcactatcttcgtcctcgtcgtctacctcgccggttctcgcgcccaactggccatcgtgctcgacgtgttttcctccgtgcagattcgcatgtacctttcactccatccgctagtcgcgtggtagagaagatcacgttatcggtggatcaatcgccttgtggagtaatttcttggaggctggtcgtcaccctgaagatttgtggcaaattattttcttagtcattggctcttcactgcaacaaaggtactagagttgtgctgttgtggatggtgttaagtgccagtaggcacgaccttcttataagtctaagtaactcttctatacttcttattgaggatggtcacttaagctagcg

SEQ ID NO: 28328 - DNA, 7760 bp, Zea Mays
tgtctaaactcaaagaagggcgcaaatcactgaagaattcacgagcttcccaagcaaatgatccgtccgctccaccaatcccgtctcccccgaccacggccgcgcctggagcggcgggccgcgcgcggccaccctcgccgtctccacgccaccgcggcgagcgcggcgcccactcgcccaccgggcgcaccctcccccacgtgtcccccctgccgcctgagggccccgcctgtcacccaccgtccccggggtgggcagccgaaagcgacgcgtgaagcgctctgccctgcctgctgccctcagcgctcgcctctcgtcacgcgcccccttcacaacccccgatgcgatgggtgcccctgcccctcgatagtcgcgccgctctcctgcccgttcggccgttccccatttgcctcgtcgcccaccgccccattagcgccgccctcccctatccgacccaacgccgccgccgccgccgcatagacctcgccggcgcctctgcgccgccccgtggcctccagaggtgctattcgcgcgcgatccgccgctgcgtccgtcgctctggcatcgattcggcggcgctgggagtatgtctctggtgcaagtgtgctgaagatgaaggagaggagctctttatgtgaaagtgcagccgatggaaactggggtttgaaatataaaaggaaaagaagcaagttaaccgttagcccatctaatgagaatgaggctacctcaccaacatctgactctccaatgagccatggttccaccaaaaagaagttgaagcatgacactaacatttctccatcagccaagaagataagaggacacgatgggtatttttttgagtgtgtagaatgtgatcttggtggcaatttgctatgttgtgatagctgtcctcgtgtttaccacttggaatgcctcaatcctcctcttaagcgtctaccccctgggaagtggcaatgtccaagatgccgtccgaaaaaaggtagcttgaagatgttaggtaatgcagaggttggcacttctaaacatgaaaaaagtacaaggacatatgcaggtacgacatcaggtagtccaccttcgcatacaaaagtctcctttaagaccaggaactccacacaagacaaaactggatcaaaagaacaaggaaaacagtcatctggtggcacaatgatgggtggtgacccgaataatgaagttgagaaaaagaacacattgatattacatttgaagaagcactcaatgaaggaattatcagagaatgctaaacctttgaagtcaaaatttgttggagagccttcagaagagaaaattgttaaacatggaagtgtcttgaaactcaagaaacattcagaccgtatggacttgtctccaaataaatctaaaagcagggggcaaaatagtcagagagagagtaaaaggcctggcacaaaaaagcttaaatattcaatgtctgatgatgacagtgtttcctcatcagaaccatcgacatctcttgataacaatgaaccaccaccaaaaagaaaaccctcagatggaaaagcaccttcatccagtaccaagaaagggaaaaagaaagtgaagttcattgagaaaaggcactctgaggaacagtgtgtggtaggagacaaaacaacgacttcccaggaggatcagcaggtcgatcgcattctaggctgtcggcttcaaacaaacaaaatcaacccactgtcccatgcttcattcaagcagtttgaatcagctaatctccaggtggaagatatggctcttccgcttgcttccgctggcattcctaataaatctcatgatggaactgagtcttctagaaatggtacagtcgaggatatatgtgctgatgaatcagccaatcatagtggtcacagtttggaaatgcagaaggataggaacagtaaatcccatgaaaacgagtcatgtaaacgagaacaaggcaataatatattgtcaatatgttttgttgatgagaccagtataatgaaagatgatcaagtaggcagagagaatgttgcagcttccaaaaagggtgaagatgcgacatatgatttacctgcagaaaaggatgataccaaactaccagtcactagagctgatgcaatgaccaggaccaatcaagagcatacagatgagagcaaacagcatgggaaaataaagcaaataacagataaagactacaatgatgctggatatgagttcttgatcaagtgggttggaaaatcaaatatccacaacacctgggtttctgaatccgaggtaaaaatattagcaaaaaggaaactagaaaactacaaaacgaagtatggaacgagtttgataaacatttgcaaggaacagtggtgccagccacaacgagttattgctcttcgagcatctgtagatgaagtggaagaggctttaatcaaatggtgtggtctttcttatgatgaatgcacttgggaaagattagatgaacctacactgatgaaatatagccacttggtcactcagttcaagaattttgagtgccaggctttggataaagatgtggtaaaagattatgcaaacacaaggaaccgacatgagcttaatgtgttagctgatcagccaaaagaacttaagggcggcatgctcttccctcatcaactagaagcattgaactggctacgtaaatgctggcacaagtccaaaaatgttatccttgctgatgagatgggtcttggaaagacagtgtcagcttgtgcttttctatcatccttatgttgtgaatttaaaattaatttgccatgtcttgtcttggttcctctttctacaatgcccaattggatggctgaatttgcatcttgggctcctcatttaaatgttgtggaatatcatggttctgcaaggtcaagatctatcattcgccagtatgagtggcatgcgggcgattcaagccagattggcaaaacaaagagatcgtacaagttaaatgttttgcttaccacttacgaaatggtgcttgttgatgctgcatatcttcgttctgtctcatgggaagttcttgtagttgatgagggacatcgccttaagaattctagcagcaaactctttagtttacttaattcgttatcatttcagcacagagttttgttgactggaactcctttacagaacaacattggtgaaatgtacaacttattgaacttcttacagcctacttctttcccttctctgtcatcatttgaggagaaatttaatgaccttacaacagcagaaaaagtagaggagctgaagaaacttgtagctcctcacatgcttcggaggttgaaaaaagatgcaatgcaaaacatccctccaaagacagagcgaatggtacctgttgaactgacatcaatccaggctgaatactaccgtgctatgcttacaaagaactatcaagtactgcgcaacattggaaaaggtggcgctcaccagtctttattgaacatagtaatgcagcttcggaaagtctgcaaccatccttatcttattcatggaactgaacctgaatctggttcacctgaatttttgcatgagatgcgcataaaggcctcagcgaagctaactttgttgcactctatgctaaaaatattacacaaggaaggccaccgtgtccttatattctctcagatgacaaaacttcttgacatccttgaagattatctgactttagaatttggccctaaaacatttgaaagagttgatggctcagtatctgtggcagagcgccaggcggcgattgctcgctttaatcaggataagacacgttttgttttcttgctgtctacacgatcatgtggacttggtattaatttggcaactgcagatactgttatcatatatgattcagatttcaacccacatgctgatatacaggcgatgaacagggcacacagaattggacaatcgaatagactcctggtttacaggcttgtgaatcacagaaagaagtggaagatatcattcgctggggtacagaagaactctttgggagtagtgacagtgtggatggtaaagatagcaatgaagcctcaggttctgttgctgatgttgaatttaagcatagaagaaaaaccggtggcctaggtgatgtttatgaggacaaatgtattggtggttctaccaaacttgtttgggatgaaaatgctattttgaagctgcttgatagatcaaaccttccatcatcagtggccgaaagcactgatggggatctggacaatgatatgcttggtactgtgaagtcaatagactggaatgatgagctgaatgaccaccctggtaccaatgaggatattgcacctattgataatgatgggagtgagttggcatctgaatcaaagcaaggtgctactaatcgtttagaagaaaatgaatgggataaacttttacgtgtcagatgggagcaatatcaaatagaggaggaggcatctcttggtcgaggtaaacgtttaaggaaggctgtttcttacagagagacatttgcaacacttcctaatgaagcattaagtgagggctctgatgagggagatgaaccaaagagagaatatacagcagctggactggtcttgaaggaaaaatatggaaagcttcgagctagacaaaaggaaaggattgcgcagcgacacattatcaagaactatgctgttgataatcttgaggagttcatgactccatatatctctattgctaatgaacctgctgaaaatcctttgataatcgtagaagacccaagttcttcacagctatgtggtgctaaatgtttcagtgaatcaactggagaaatgaggcaatcctccaagaaatcaaggagatattctgaaatccctcaagatctttatgccagaattcctgataacgctgcttcatccaaggacaactcaaaggccaccgatgtcttcaatccagggaccccaaatcacctgctacctgtacttggcctttgtgctccaaatgctgatcaggtgaactcatacaaaaactcaatttgtgcaccaagcataaaggagcataaaagggccagtggtgacgtagtcaacaaacaactgtcaactcccgctgaccattctaatgagcttagaaacgaagttcaatcagcttctgataaggtcatctttcctggtgcatctgaggaagctttgcgaaggataagtaacatgatcccagataattattttcccttcagtcatattcctcctatatcagggaaggcggttgatcctgttgaatatattggagcttcgaatgcatcatttcaagggaaactgggtcttccaaacttcagtctggaagacaacactccacttaagcatattaagcctatacctgatatatttccttacctgtcactgggtgctcataaggattatattcgtagttctgtcccagagttgccagatagttcattattaccaaacttcatggcagatattgctggtacttcaaagcaaaaatcattcatgtctggtccacttcctgggctgggtcttagcccaggacaaccaatccatttgactatgcctgataatcacaagaaagtcttggacaacataatgatgcgtgctcagtatgcctcaaacaaattcttgaagaagagatcaaaactagattattggtcagaggatgaacttgatgctctgtggataggagttcgtaggcatggaaggggaaattgggatgctatgcttagagatccaaagttaaagtttttgaacaaccgaactagtgaagagctggcctcgagatggattttggaggagcaaaagattatagatgaacctatgtctgcagccacaagacgttctaactcaacagcatttcctggaatatctgatgcaatgatgtctcgggcgctcaatgaaagtaatttatctaagatgaggatggagcagcctaaattgcagtcccacgtaactgatattcagttaggttcgagtgatatcctatccagatttcctcatgttgaggctcctaattacattaactcaggggagggtggcccacctcagataccatggcaggatttcaagcatagatcaagttatggtggtgattttcctggcggtgcatttgacaagttggagaaacctgatgttggactgatcccgccatttatgcctaatcctttcatgactgatagcattgattcacttcccataaacagaaaaaacaatagttccattccgcgtagtgaaatcagatcaagttctcgtgagaacattcttttttctggtgtttcggatggacaaatcaacttgcttcatgagatgcagcgtcatgtgaggtcaggcaaacaacccattgagataaagctcaaccacatagaccactcaaatcctcagcttggtaatgctagtgacctcggaggtttaaaatcaaacaagttacctcattggcttcaggaggctgtacgtgctcctgcttcatctaagccacctgaacgtgggctaccagcaactgtctcagcaattgctcagtccatgtgccttcttcttggagaacaagaaccatcaatacctccattcttgatcctgggaacccctctttctcccccaaaagatccaaggattaattcaaagaagaggaaactccgcaaagctcatcaatctacctctcatgtaggtgattgcatcgctacccaagcacccccatccgttaaagcttcagctgctcctcttgctgtcgattgcaatgatggtgcgccttcactcaacttgaactctgcattgctgtcatcttcagctgtaagcaagaagctagatgagttacctcccacatttaaagaatcaaaccaaaccatggatggttcagaagctgttgcaggcaagttggaggctcctgaaattggttgtcaggtaactggttcctctccagtagatgacaaagctagagaatcttcaggatcaccagtgaaggatactcctgatgctggagtcagattgcaaggatcagataactcagctatggcattttctgcactcccacttgaagcacctgtgacaagcagcagagcagagcctgtggcatgtgatggcagtgacatgaaagaggatattccactagacgctgaaagcaacgggaacctggaggagcgatgaactggctcctcttgtgaacatggatgcatcacatcaagtatctgctaaaacgtcaacggagattggatgaaatgttctcagatgagcattagacttgagccagttagctcgacattcctttctcttccgttgagcagaatactgggattttccctctcccaatgtttccagtgttgatgatctcatgttgtgtaatgctttagtgcagagtgcagataggataaaattcaacgacaagtggtgcttcttagcagtagttgggcactagtccgtcgggagcaactcttggaaacctgtatacaagaaatgtatatttttgctaacatggtgttggttgggtgtgtagactgtagaccgctattcatttatttatgcgtatatggttcagtaatttgccgtctgtctagcggtcgctgtaagagtagacatggtgatgataatacctcgccttgagtggtggcctgatagaacatgaaactcactttccccagctgttattgtttgataattgtagcggatgcctttatggttggactaaagagaaagctgagatgttgtgtttacttcgcaaaggagagtttttactgtttttgtgggaaaccctatccctcacaaggggttgtgtaatgtatatatagactgagttagatgagtcag

SEQ ID NO: 28329 - DNA, 5971 bp, Zea Mays
caacgctaaaaaaaccacccccagctccgttctcttccaagtggccagtgccgtctccggccaccgcccatggctatgccttcctccaccacggcggcgctctcccgcctcgtcgaccgcacccgggttccggaccccacactgcaacgccatgcggttggggccgtcttccgccacctcctctccctccccgcgcccctcccagcggccgcccacgacgccacctcagccctcctcgcttcgccccaccctgcagtcgccgcgcacgctgcggcctccatcgcccgtctcaccgccacccgccccgatctcctcccctcggatgtcgccctcccgctcctcatcgcgcccctcgcggcctcaccgtcccccctgctcgcctcctgcctcgtcaaggcagtctccgcgctcgcaacctgcgccctccgctccggctctcgcttcccggcccacgaccaccccttcatccaggcgctcgcgtcgggggctgacggcgctcgagcggagctgatgcggcaggcagccgggatggttgccgaccgggtggattgggtggtcaagtttctgaggccgttcgtgatgttctccgtggtgaggaagggggacgccgcatttgccagggatttgatcggtgcattggccgcagcagccgtggcagcagggaaggctagtgtcgcgatcccggttctgaagatgctccaagacagcatgctgcatttcggccgcggggacgatcaggaagtgcggctatggcttagttccgcagagtgtttggttgatgcttatgtcgtgctactgaggaagttagctcatggtcaaatgcctacatatgatgctcaagcaagtagtgcgacattgatggaaacactcctatcacaatattcatttcatcaaaaatttctgggaattgattcaacaatttttgggttatcaaaacatttattcttggtgcaaaaggatcttggattatgctatatacctgagatttctgttgtccttagctctctttcttactctctcactgggctagagtttgaacatgaacagctagctgccttgaaacttctgagctttttgattgattggaaatatgaaaatgtgcttgacagtaaagaacaaacacatcacgtcagtgtggagcttctctgtgttctggcagttatcaaccttaccatttcaccatccaaatctgtgaaagcagtggcatatcatgttctgtcaaggttcagcttgtttgttttagacttgccagcttctcattcatcagaggaacaagatatttcaacgagttaccacataagcaaacctgcacttcttcttcctaaacttttgcatcatctatggtccaagccatcttcatcatgcttcagttttatgaagtacatagctaccaaggcctcacctgattctggccagagtgacttggaagcaaattattggactcatcaaataaatgcctatctgacagcccttcacagagaaaagcatacattagatgtcaggtcttcaaaaacgacttcagtagccatatcatctctgataagctctgtagcatctgttttggtaatgcatccaaaacttggtacttctgcagcagaatctttggccatgcttggcacatcggacccaagattgggtatgccactttttgtagttatcctcttctacagcaagattctatgcagcagcggtaaattttcagcggaaatctcgctcagtttgctagagtcattgccatcacttgctatacatggttttgttcttccactagctctgcaatggatatcgccaatgcttaaaagggactcaaattcggttttgtatgctatggctgttcgattactctgcaagatatgggctgtaaccgactgggcatttccaaacttacaagtggttctggatcctgagaatttttccaatttcatctctgacagagagatctctgcaagtattgccacatcaatacgcgatgtttgcaagcaaaatccagatagaggcgttgatataatattatctgtctctttttgtattgagagtcgtgattctgtggttcaagctcttggcctcgagagcctctcgtacctttgtgaagcagatgtggtcgatttctacacggcgtggaaagttatatcaaagcaggtgcttgattattacgttgagcctgctgttgctcacagtttgtgtattctgttgaggtgcggagcgatggatgctgaggcatattctgtaatatctggtaaccttgtaagaacattgtggagaattggaacatccaagaaaaataatcccgatccactctgggataaagcaagaggaactgcttttcactccttgtccaactacaaggtatcacttattcaagatgctattcctgatttctggaaactaaactatgagttctttacgaacgaacataatctggcagttctcaaggccatggagcaccttcaagatgagatcatcagatatgagcacataaatcgtcgtcgagtgactactgacaaaagaactgcagtgcataaatttgagaagctactggaggtttttcctcgggcggtatttaaagggatgttatctcatcatcagttgcctggtgctgctcttttaactctcaattttactccaaaggacatacttaatgaagggaaacctaaggatttgcctagagttcattccgcttttgagcaagcttttgtggaaattgctgaatctatgtatgtgtcaagaaacatagtggtagctcttcttgccttgcagtcatggaagtcatttgtttccaactggatgcaagcagttgtggcattgcttgacactaaagactcgtcaaagttgaacaaagcaatgaaagctgctaatgatatatttaaggagctctgcatttcaattaagaatggaattgacccagttttaaggaaaaccgggcctgaatcctacacagagcgcacaaacaacccagacaacgatagccccacacaaagcccatctagatttatcgttgccgagctcaacacaagggacgagcagctccgactccgtgagacgagccgcacatggccaaaggaactcgacgacacctacatcgaaacaccgattctgtgcgaccaagttccggtgtctactcctcaagttgttgttaacatagctcttgttattggggcactggccttgattgttccgccaactgctcatttggtagtatcttcggtatcagattttcttttaaaatggttgcttcaatacgagcatgagcacaagcaatggtcagcagctctctctcttggattaatattcaattgttttcatcctacggacaaaaagagcagacttcaggttattaatgggtttcttgaggttatctcaaaaactgaaagctgtcttgtaaaaggagcttgtggactggcattaggctatgtttgccacggtcttttgacaagagcacataatgctgttgattcagaagtagaggctattacacaactcaatgagcgtgcatcagttgaggatattcttcatgctttggttaccttgttaattcaactatgtccatcctcatgctattctctgaagaagcttagtatatacggaatatcctccatgggagggatggaagaaaatattcatagcttcagtgatgatccttgggctgtcgctggacttgtcattggtctgggaaactctgttgttgctctgtatagacttggagcttatgaagcagttactgaagtcaaggatgtattgatatcatggataccaaatgttgattcgaactctgcattatttgatgaaatagattcagtatcactatgtatgggttcatgtcttgctcttccatctgttgtggctttttgccaaagagtggagctgttgaatgacgacttggatgcattgttcaatcgctacacttctttagcttctgagctcctgaacctcaataaatctgggattatctttcagaatttgttaatggcaatctgtattggtgctggatcttttctctcttctatattgaatgatggcgtgcatgctatggaatttaatggtgttaaaggctttctggacactctcagacatatatatacccacccttttcctccccttgttcatttgggaggcatgtttggtgtggtcaacgcttttggtgcaggtgcaggagatcttactggggtgttttcaaagcctatgacttctcaaatcaaacatgaggagtcatcttttgtgagtggttcattactgacaagtcctgttggtgagactctgtcaacatcaatgattcaggaaatatttcttcttgctaaggatgctaaggataagcacatacaagattatgctgcatgggctatttcatttctcagaagcaggtggtcgaagaatcagaatcagattctttatgaggacaatggttctaatagaagtcctgatgatcatgatcaagcttcaagtttttctgaacaaagcttagtttggaacttaagtctctggttgagtgatctaaaatttgaaaagtctggtgatgtggtgccaataagtacagttggaacagttttaaaatgcctttccaaagctccccgattgccaactacagactggggagctattgtacggaggtgcattaaagctgaggcgcagatttctcataagttaaccaatcaggaagatcctaagatactaaaggaggcatgcttatatttgactctagctcatgctgctcacataagtccccttctgcagtttttggatgatctgactgacatactcagattccagagattagatataaatgttcagtctattttgctcaaacatttgttacacctaatgaagctattctctgattcaagattggataaattgcatgaggattttaccgaatacttgtattcccccacttcttcatacttgaattactcatctgaacagaaaagcatgctaagaatgtcgttctgggaaggcatttatacgtgcctggtggatgtttctgaagaatctggtgttttttcattcattgaaaaatgcattcagtgcttgttgcctcttttgacgctccatagtgatggtcaacctgaattcatgaaagagtggtctgttgctatcttatgtcttacaaacgcccagaaaaaatggctggatgatattttgcagattcgcagtactgccttagtcaatgaaggacatgttgatgttgcaaaaaagattatcctcagagcaagattgtgtgcaactggttgtggttcaacacatgagctgggaaatataaagacagcaatattgtgtacaaaagctgatggtgtttggtggagtgtccttgttgagatcacttcagccttaaactcagccgaaaacatcatcaaaagacagtggcttctggatgcattagacattggctgtgttacagctcacccctcaacggtgctgtgttttgttggcttgctttgtggtagctgctgcatctatatgccgcttcttcttgttaattcgataaatgtactgagcgacttgccggtcaccctgcctgcctttctctccaccatcgtttctgatgatttcaggaactctgtggcagacaggctatggctgttgactactgacatctatacttgggctgaacaattagctcacggacacgatcaacctggacatgatcgtattcatagaagtgaaactgagattgcgacttttttggccaatattctgctctctacatgcattacagtcgaggactacctgtctgttgataagcggctaaagcttgcaaatcttgaagcactctaatcaaagggagatgtgtttcttttctattttatgtatgtatttatgtacggtatcagtcatgttttaatagttgatgtccctgctgatgatccagcaatgtttttttcatgtacataattaatttaactaactcatcttatgcactgaaaacaatctattgttcaaagatagatagacctatgaaataatattgttgtgtaca

SEQ ID NO: 28330 - DNA, 770 bp, Zea Mays
ggcgcatgcttccgatgctatttttatggtagattcaaaaagtatgacaaccaccagccgcatgcattcgattcctacttttattcattcagatccaaaaattatggtaggtcgtgagagttttgtattgcatgcgtgcaaattttgaatgacattttagtttccactgtatacacacaaaagttggatgacaggaatcacgcaaaagcataaattctcatagaaagttgaacaaatatctacactgcgcatcatagtggatgaaaaagttctaatatgtgtccaatcaatagccccatgcataaataataattggagaaaagtcgtcttcacacgcggacgcctttgggatccgccaccgccgccacactcacctcggatgcgcgtcaccgtcacgcgcaccttaggtggttgccgctgcggcgcgaccttggggagccaccgccgtcgcgcgtcttaggtggccaccgctgaggtgcggccatggggagccgtcatcgtcgcacgcacatctaggaaccgtcattgctcttcgcacctatgggatgcagttgttgtcgcttgtgcctaagagaggccgccgtcgcagctccggcctcgaatggccgtcgctgtcgtgctcccttaggaaccgctgtcgtgcgtgtatcggtggtgtgggggcgccatcgctcatgcattgtgatgggggcgtcactgccgacgccgctaaaaaatggaaccctagggctctggggcttcttttatagacgcccgagacctgatgcgac

SEQ ID NO: 28331 - DNA, 725 bp, Zea Mays
gggataaaatcccgtcgcgcgcagcctctgctcaccgtggctgcaaatcctctgctctgctcccacggacggctccctcccatggcggccgctcgttccacctccctgcaccgcgccgtgaaggtctctgcctccctgctcggtttccggctccagctcgcgtcgagctcccttctctgcttcctgccgcgaagttccatggcgctcggcgtctagcttcctacgcgacggccgccggccatctccagctctcccttgcgcgcgcgatgctccctgctcgcatccgtacagaaccgcgccagctcctgtgctgagctctgcagccgcgcttcctccaacagcagctgcgtcactaggccctcgacgtcgtgttgtgcgctgggacgtgcccagccttctcgaatcacgccgtcgatttttggcacccttacacacatctctacagatcctgtctcatcacgcgtccgcatcattgattttgtcgtcgttcgtgcatccccaagaaatcccaagaatcgggtgaagacgaagttaatagtgcgatatttcccaggcgctcgacaattgactagatcggaaaatcactaccgatctcgtggatttgagtcggctattgaaacggtaagctgataaattatccaaaatagttcgatcgttgcataaattgatgtgctagtacgaggtgcattaaggtgctcgataaattgtgtgagtcacgaaactct

SEQ ID NO: 28332 - DNA, 235 bp, Zea Mays
aacaggaaacctcaaattaagtgtggagttattacataaatcggagtttttgcatagcaaataaagttcacaaaataaagtgcagcggataattgatgtcgtcggtatcgaggaatcgggcaaggcctagcccactactccttgtgctcctctcctgccggagcaacatcccactcgaccgtccaacccggtggcagggtggtaggccaagtcacaccatcaaccatttcctgaa

SEQ ID NO: 28333 - DNA, 1758 bp, Zea Mays
cctccccttcctaatctcgataggggtgcgcgaggacgaggagaaaaaacagaggaggaaaaaatatcaccttctcttcctgcattcccctgctcgatccccggcgaggaattcgcccccgaatccatcgatttgctcagtccagtccgccgatccgtggatcgattcgtgcgtgggctctgtcctccccggggttccgatctggtcctcgcctcgccggaggaggagctggaggagatgaacggcaccgggggcagccaccaccagcagcagcacaggctccggcagcagcagcagcagcaggcgctcctgatgcagcaggcgctgcagcagcagcagcagcaacatcagtaccagtccggcgtcctcgccgccgcggcagccgcggccatgacccagatggaacctatttccaatggcaatcttccacctggctttgatccttccacttgtcgcagtgtgtatgttggaaacgtgaaccctaatgtcacggagagccttttgattgaagttttccagagtgctggccttgtggaaagatgcaagctcatacggaaagagaagtcatcctttgggtttgtggactactatgatagaaggtctgctgctctagcaatcatgacccttcatggccgtcacatatatggacaagcaatcaaggtgaactgggcatacgcaagtacacagagggaggatacgtcggtgatgctcgagtcatgtgggacaacaaaactggacgttccaggggttatggttttgtctccttccgtaatcaacaggaagctgaaactgctataactgaaatgactggaaaatggcttggaagcagacaaataaggtgcaattgggcaacaaagaccaattcagaagagaaaccagaaactgacaatcataatgcagttgtactaacaaatggtagctccaccaattcagcaacagatgcaagccaggatgcaggaagtaaagagaacccagagaacaatcctgattgtactactgtatatgttggcaaccttggacatgaggttaatcgggatgagcttcaccgccacttctataacttgggggtcggggcaatcgaggaaatccgtgttcaacaggataaggggtttggatttgtgagatatagcacccatggggaagcagcattagctattcagatggccaatggattggtagtccgtgggaaatcaattaagtgctcatggggaaacaagccaactccacctggcaccacctccaagcccctaccccctccagttgcttcataccagcctgctgtagcaatgtcaggtgtcccacaaggtttcacagcagccgaacttcttgcttaccagaggcagcttgccttaagccaggctgcagcagggcagattgctggccagcatggtctcgcgggtcaggtttctgcaggtcttcttgctgctgctggttctcaggccctctacgatggctacccgaaccagtcatcagcccagcagcttatgtactacaactagagttcaagaggacggcgttggccatcgtcgccctgttttttattttgtggttcatgtactatttgtgtgagagttcttgatctcttgtcgccgcggaattgtgttactatcttattactgtaccattgaccatttttcttgtgagattcatttgagtagtcactttaacagagtaagagatgtattctatgtgacttcgcgattgattaatgtaatgctcccctgtgcatagaagtatggaagaaaaaaaatacagaaa

SEQ ID NO: 28334 - DNA, 1003 bp, Zea Mays
caagatttcacctcctacgtgccgaatggctcctgtgtctcacaacaatgattccgattcgagtgatagtgacgacaacacaatcatactggccactcttcttaccctatgcatcgaagctaccaggcgtaggcgcaggcagtcttctatccctcgccgcgtgatcgctagggatcattttgctagggagaaccttatccgccatcactacttcggccctaaccccgtgtatccagctcacatgtttcgccgaaggtttcgcatgagtcggccattgttcctccgtattttgcaaggcctccagcagcaggatagttacttcactcaacaggtcgacgctacaggcctcgccggtcttggaccacttcaaaaaccattcggcacccctgggaggaaaagaagatctatttcacgcagatgcaggaaagtcaccggaaagatatcgagcgcgcattcagtgtgcttcaagcacggtgggcagtgctacgtggtcttgcttacagacgggatcgtaaccgtctaaccgagatcatcactgcttgcataataatgcacaacatgatcattgaagatgaaggggagtttgctgccaacaccgactttggagacaatgcttctgccactgcacattgcgaactcatacaagagggaaggtcggattgggtcatcgatcactttgatctacgtcgccaggaacgattttgcaatcttcaaaatgatcttgtcgagcatttgtggaccaaacgtgggagtatgtgatgaaacttgaaccttagtcctttaaatgatgtggctccgtagtgtatgttccatgtgtgtggtggtcattgtgttatgtttcatgtgtgtggtagtgggtgtgctatgttccatgcgtgtcttagtttgagttaggggttctgtggtcacgggcaatgagtacgaattcatttactcttagtggtcaaatgtgtactcttcagtatgaaatcaaatgtggcaccatctatgcaagagaaatgag

SEQ ID NO: 28335 - DNA, 1005 bp, Zea Mays
gtttggcttcttttcatgtttccttgtatagacactagccaagatttgtgcttctggtatacttttgtcaagaatgcaggcaacaacaacaacatagccttttgtcccaatcaagttggagtaggctagagatgaaacccacaagaaacaagggtggtagattgccgtatctgtggtgatcctaactcagtgcttcgttttgcttttatcgagtttgctgatgacgttgctgcacaagcagcactagcacttggtggaaccgtgcttggcttttatcctgtcaaggttctgccatcaaagacagcaattttacctgtgaaccctaaatttcttcctcacactgatgatgagaaagaaatggtatccaggactgtgtattgtactaacattgacaagaagatcgcagaagatgaagtgaagcaattctttgagggaacatgtggtgaagtttctcgtctgaggctacttggtgattatgtgcactccacatgcatcgcttttgttgagtttgtccaagcagatagtgctattctcgctctgaactgcagtggcattgttcttggaacgcttcctgttagggtgagcccatcaaagacaccagtccgctcgcgatcgccccgtgtgacgtcatactgaattcggctcatctgaagccgtcgtccagggcagcaaatttctgggcaacaaagccctagtcgtgtggccttagagactgccgcatcgcggataagtaattgtcgttgagcagagttctcgttggttaaagtccagtctagtaggaggcgcagagacccgtctgtatggtcgctgggagatctatcttgacctcctttttctgttctttttggtcttagttatcgtggttggattctatagcagccttgacaggcattcgaacaacaatgtttatggttatcctatccgctttggactcttaagcatgttttcccagtctttaaatattaagagatagtttggtaactatattttttcgagggattcata

SEQ ID NO: 28336 - DNA, 189 bp, Zea Mays
aggagcctcaatcaccggaagccgtatgggattcgaccgtaccttgcgaggattttcacgccgtgtctgatttgtgccgtggggattctgcaccagtgggtcggtgtcgtcgtcgggctgccatggatcgcgcagccgctgcgacgcgttgaccgaatcatcttcgctcagacctatggtaagaaaccc

SEQ ID NO: 28337 - DNA, 7148 bp, Zea Mays
ggtgctgaggctttcatcggtctcttcgccggtgtctttgccggcgtcgagcacccgccaggctatccatgatttttgcctacaaaaggtgattgaaaaggggggaggatggaaggggagggacaccacggagttgttttggcatgcagcatctgtgggttcctcttcgctgtccttagccctttcagcttttgggttttatgggctgtgaattggaggccatggaggttatacagttggatatatgcaaggaaatggccaacatatgttcaaggacctcaattgagcacactttgcagccttttgactctttgtgcatggcttgttgtcatttcccctatagcagttctgctcgtgtggggaagcgtccttattgctcttatggaaaggaatataattggtttagctgttataatggcgggtgttgctttgctcctgtcattctactctataatgctctggtggagaacacaatggcaaagctcccaggctgttgcttaccttctcctcctggcagtatgcctgctatgtgcctacgatttttgtgctatttatgtgacagctggtgctagtgcttccgagcttaattctccatcagggttcttcttcggggtgtctgtaatatcattggccatcaatatgctttttatatgtaaaatactgtttaatgtaagtggatttgatgttgatgaatatgtgcggaggtcatacaaatttgcctattctgactgtgttgaagtggctcctgtttcatgctctcctgagccaccggatcctagtgaattatacatgacaaaatccagcagggtcaagcatttagggcttctgtacattagctctctgcttgtgcttgttggttattccatcttgtacggtcttacgtcaaaagaagctcgttggttgggtgctttaacttcagttgcagttgttatccttgactggaatctgggcttatgttcatttagatttgagcttcttaaaagtaggatgatagtgttatttgtggctggaacatcaagggctttccttgtatcctttggagtgcattactggtaccttggccattgcatcagctatgcttttgtagcatctgtgcttttatctgctgctgtttcttcctggctttctatttcaaacccctcagttgcaaggatagacgctctaagaagtacggtaataaagctacgagagggatttcgaagaaaaggacaaaatagttcttcaaattcatcagaaggctgtggctctagtgtgaagcgtagtagcggtagtgttgaagctggtcaaaatggtaatgcaatggattctatgtacagaagcaactcacaaagcgatggtgtcaattggagcagtattccttttgatcgatcaaacagttgtcaagaaggccggagctccgacaagaacatagatagtgcacgtgcaagcttagctcatcggagtaattcatgcttatctgccgtccaagactctgaaaccgctgttgtttcagtagataggcatggagatcccattacttcacttgtttgttctagcagtggtttggaaagtcatggctgtgagcctagtggatcagccaccacctcaggtaatcaacagctattggatttgaacctggcagcgatatttcaggacagattaaatgatccaaggatttcatctatgctaaaaaagaatggtggacttggagatgtagaactggctaatcttcttcaggataaaggactagatccaaatttttcgtacatgctgaaagacaaagttatggatccacgtattttagctttgctacagaggagcagcttggatgcagatagagagcatcaagatgacgtagatgtcacagctactgattcagatagattggataccactattgcaaatcagatttctctgtcagaagaactaaggagaagtggtctagaaaaatggttgaacatttcaaggctaatattccatcatttagctggatctccaatacgtgcttttattgttttcacagtaatgtttataatagagactgctactgtggctatctatcggccagagaccatcaaggtgataaatgcaacacatgaacagtttgaatttggtttctcgatactgcttctgtcaccagttgtctgctccattatggcattcatttggtctctgcgtgctgaagaaatgttgatgacatccaagccccagaagtatggtttcattgcatggctactgagcacatgtgttggtttgtttctctctttcttaagcaaatcatctgttatattgggcctgtctctcacggtaccacttatggtggcttgcctctcatttgctgttcccatatggatacgcaatggttacagtttctggattcctggaagggagtttgcaaatcgtgaaaatgttagtcaagctccaggagagaaagagcgggctctctttgttatcaccattgctgttttcactgcatcaattattggccttggtgcaatagtgtcagcaaagcctttagacgctctaggctataaaggatgggatgctgataagaacagctcctattctccctatgcaacatcaatgtatcttggatgggcattgtcttcaacaattgctgtgattaccacagggttgatacctattgttgcttggtttgcaacataccggttttcaccttcatcagctatatgtgttggcctctttgcaactgttcttgtgtctttttgcggtgcatcctactggggagtggtaaattcacgagaggatggtgttcctctaaaggctgatttccttgcagcattacttcccttgctttgcattccagcatttttctcactgttcactgggctttacaaatggaaggatgatgattggaagatttctcgtggtgtttacctttttgttggcatgggaatgttgctgttgtttggtgcagttgcagctgttattgtcacaatcaggccctggactgttggagttgcttgcctcgtagccattctgttccttgtatttgttattggggtcatccactactggacatctaacaacttctatctaacgaggactcagatgttgcttgtttgttccattgcttttctcttagccttggctgccttcctgatgggtttatttcacggaaagccttttgttggagcatctataggttatttctcatttatatttcttctcactggaagggctttgactgtccttctatcaccgccaatcgtagtgtattcgccaagagtattgcctgtatacgtttatgatgctcatgcagactctgctaaaaatgttagctatgcctttcttattctgtatgggattgcattagcaactgaagtttggggtgttattgctagtctaataatgaatccaccatttgttggggctggcgtttctgctactactcttgtaattgctttcagttttgctgtttctcgaccatgcctgactcttaagatgatggaggatgcagttcattttctcagcaaggatacagttgtgcaagcgatgtcacggtctgctaataaaactagaaatgctatatctgggacttactcagcacctcagaggtccgcaagttctgctgctcttttggttggagatcctgctcttacattggacagggctgggaactttgtgcttcctagggctgatgttatgaaactgagagatcgtttgagaaatgaagaaattgctgcaggatctttcttatgtggagtaaaagattgtttactaatttgcccccagtccctgtcaaacatagattatcggaggaatatgtgtgcccatgcacgtattttggctttggaagaagcaattgatacagaatgggtgtatatgtgggacaaatttggtggttatttacttctgttgcttggattgactgccaaagctgaacaaatacaggatgaagttcgtctaagactctttttggatagcataggcctttccgatttgagtgccaaagaaattaagaaatggatgcctgaagatcggaggcaatttgagcttattcaagaaagctacataagggaaaaagaaatggaagaggaggctttgatgcaaagacgagaggaagaagggaagggaagagaaaggaggagggcattgctagagagagaggagcgaaaatggaaggagctcgaaatatcattgctttcttccattccaaatactggaagcagggatgctgcagctatggcagcagctgtcagagctgttggaggtgattctgccctggaagattcttttgcaagagatagggtctcttcaatagccaatcacatacgaaaggcacaattggctcggcgagcagaacagactggtattccaggcactatatgcatactcgatgatgaaccgaggagtactggtcgtcattgtggagaacttgacttgtgcctctgtcaaagtcaaaaggttactttgtctattgctgtcatggttcagcctgtatctggcccagtgtgtctttttggaagtgaattccaaaaggtttgttgggaaatcttagtggcaggatcagaacagggtatggaagctggacaagttggtcttcgattagtaactaagggtgaaaggatgactactgttgctaaagagtggaatattggtgcgtctagtattgcagatggcaggtggcatcttgtcactgtaactttagatgccgacctaggtgaagcaacttctttcattgatggagtttatgatggatatcagaatgggttgccgttgccaacagataacggtatttgggaacctggaactgatatttgggttggtgctaggccacccatggacttagatgcctttggtaggtcagatagcgaaggttctgactcaaagatgcagatcatggatgcttttctatggggaagatgtctcagtgaagatgaggttactgttttacatactgccatgtctcctgctgagtatggattttttgaccttgcacccggcgatgcttggcatggaagttattctgcaagggtggatgactgggaaagcgaagaagcttatgagctttatgatcaaggggatgtcgaatgggatggacagtactcaagtggtaggaaacgtccggtacatgatgctgtagctattgaccttgactcctttgctaggagaccaagaaaaccaaggtttgagacacgtgatgaagtcaaccagcgtatgctttctgttgaaagggctgtcagggatgctcttatcgcgaaaggagagagaaacttcactgatcaagagttccctccagaggatcgttctttatttgtagatccgatgaatccacctctgaaactgcaggttgtttctgagtggatgaggccttctgacatagcaaaggatatatctatcagttgtcagccttgcttgttttcgggttctgtgaattcctcagatgtgtgtcagggtcggttgggagactgttggttcctaagtgcagtcgcagttttaactgagatgtctcggatatcagaagttataatcactcccgagtacaatgatgaagggatttatacagtcagattctgtattcagggtgagtgggtggccgtggttgttgatgattggattccttgcgagtctccggggaaaccagcatttgctactagtagaaagcaaaacgagctttgggtatccattcttgagaaggcttatgcaaaacttcatggctcttatgaggcattggaaggtgggcttgttcaagatgctctagtcgatctcacaggaggagctggtgaagagattgatatgcgaagtcctcaagcccaacttgatcttgctagtggaagattgtggtcgcagttgttgcatttcaaacaagaaggttttcttcttggtgctggaagtccttctggatctgatgctcacatctcatcaagtggcattgttcagggacatgcgtactcaattttgcaggtaagagaagttgatggccacaaactcatccaaatcagaaatccatgggcaaatgaagttgaatggaatggaccatggtcagactcgtcaccagagtggacggaacggatgaagcataagctcatgcatgttccacagtcgaagaatggggtattctggatgtcttggcaagattttcagattcactttcggtcaatatatgtttgtcgtgtttatccacctgagatgcgttactctgtccatgggcaatggcgtggctacaatgcaggtggttgccaagattatgactcgtggcaccaaaatccacagtatcgacttagagtaacaggacgtgatgcactataccctgttcacgtttttattacccttactcagggtgttggtttctctagaaagacgaatggttttcggaactaccaatctagccatgattcttcaatgttttacattggaatgaggatactcaagacacagggctgccgtgctgcttacaatatctacatgcatgaaagcgctggtggaacagattacgttaactcgagggagatatcatgcgaactggtcttggatccttatcccaaagggtacacaattgtgccaactaccatccaccctggggaggaagcaccttttgttttgtcagttttttcaaaagcatcaatcagactagaggctgtttagttcaagattgagatcccatgtgtttgatggtagctgcgtctgctgggcacccgtgcacgcaggatccagctgtgggttctcgggaactagataatgggtataggaattgcctcctggacaacttcaatcaatcttgctgcatgcaagtacctaagttcggttgcttgttgcagatctgacaaacggcaatgcttcttgtgctgaagggaaaggagagaaggcatgatccatggttctttggtagctgcgcaaagtgcagggtgagaggcttggttcaatgtttgtagatagccgtggtaactgacctggtagcccatcctatgtataggtgtcccgtttaccctgtaaatgctatagagttaggttaggtagcctgtcgttcctgttaacgcatagggctcttatgcagctgtgaaatgtcttgttagcaagctgcagttttgctgatttgagcgtggagtagtcggccatagctgttcccattggtttgccctgtatgtaatcggaatctgatgtcattcaatgaacctattttttgggtgccatgcgaagctgtctaa

SEQ ID NO: 28338 - DNA, 4834 bp, Zea Mays
ccactccctgcccacctccacttgctccacgtcacggcgagcgcttcccctcccccctggttatctatcgcatcctccgcggccctcctccctcccactcctgtcctctcctctcctctccccgccatttggctccgaaccctcacaacagtgcatcgtctctcctgtccccgccatttggttcggaactctcgcggcctcaactcctcctcgtcatcgtaacacccacgcttagagttcgtgagggtcgcccccaggggatctcgagacgtccgtttccaagagtggaccggctcgcaggcgctgctgttaccttgggtggagctcggacctgcggatcagttggattctcaagggagacggtgtcgggagcaactggttttgggcgtcgcggagcacatggcttaagaataatttcttccagcccggcgacaaattcgcagttggattcagcatatgcattttttatgctgacataggatgtgctcaaccatccgtggactccctctagttgcacaaaccacctcagtgctctctctttcttcgaatcgggctaataatgggcagtgcttgccaagctggcacagacgggccttcccgcaaggatgtgttagggatagggaatgccgccttagagaatggccaccatcaggctgaagctgacgcagatgaatggagggaaaaggaagaggacttggccaacaacgggcacagtgcgccaccgccaggcatgcagcaggtggatgagcataaggaggaacaaagacaaagcattcactgggagaggttcctacctgtgaagacactgagagtcttgctggtggagaatgatgactctactcgtcaggtggtcagtgccctgctccgtaagtgctgctatgaagttattcctgctgaaaatggtttgcatgcatggcgatatcttgaagatctgcagaacaacatcgaccttgtattgactgaggttttcatgccttgtctatctggtatcggtctgcttagcaaaatcacaagtcacaaaatttgcaaagacattcctgtgattagtaagtagatttcctcaactaccctaatgcacgtgaaattttatcttgttaattgttgggtttaaatacttttagctgctacactgatgtgttttgcatgcagtgatgtctacgaatgattctatgagtatggtgtttaagtgtttgtcgaagggagcagttgatttcttggtaaaaccactacgtaagaatgagcttaagaacctttggcagcatgtttggaggcgatgccacagttccagtggaagtgaaagtggcatccagacacagaagtgtgccaaactaaatactggcgacgagtatgagaacggcagtgacagcaatcatgatgatgaagaaaatgatgacggcgacgatgacgacttcagtgttggactcaatgctagggatggaagtgacaatggcagtggtactcaaagctcatggacaaagcgtgctgtggagattgacagcccacaacctatatctcccgatcaactagttgatccacctgatagtacatgtgcacaagtaattcaccctagatcagagatatgcagtaacaagtggttaccgacagcaaacaaaaggaatgtcaagaaacagaaggagaataaagatgaatctatgggaagatacttaggaataggtgctcctaggaactcaagtgcagaatatcaatcatctctcaatgatgtatctgttaatccaatagaaaaaggacatgagaatcacatgtccaaatgcaaatctaaaaaggaaacaatggcagaagatgattgtacaaacatgcctagtgcaacaaatgctgaaactgctgatttgattagctcaatagccagaaacacagaaggccaacaagcagtacaagccgttgacgcaccagatggcccttccaaaatggctaatggaaatgataagaatcatgattctcatatcgaagtgacaccccatgagttgggtttgaagagatcgagaacaaatggagctacagcggaaatccatgatgagcgaaatattctgaaaagatcagatcagtcagccttcaccaggtgcaaaacataatatcagtgtcattactaggttattaacataacagtaagttgcatgctaacccattatgatttctgcaaggtaccatacatctgtggcttccaatcaaggtggagcaagatatggggaaagctcttcaccacaagataacagttctgaggccatgaaaacggactctacatgcaagatgaagtcaaattcagatgctgctccaataaagcagggctccaatggcagtagcaataacgatgtgggatccagtacaaagaatgttgctgcaaggccttcgggtgacagggagagagtagcgtcaccattagccatcaaatctacccagcatgcctcagcatttcatactatacagaatcaaacgtcaccagctaatctgattggggaagacaaagctgatgaaggaatttccaatacagtgaaaatgagccacccaacagaggttccacaaggctgcgtccagcatcatcatcatgtgcattattacctccatgttatgacacagaaacagccatcaacagaccgtggatcatcagatgttcactgtggttcgtcaaatgtgtttgatcctcctgttgaaggacatgctgcaaactacagtgtgaatgggggtgtctcagttggtcataatgggtgcaatgggcagaatggaagtagcgctgtccccaatattgcaagaccaaacatagagagtattaatggtaccatgagccaaaatattgccggaggtggcattgtaagtgggagtgggagtggcaatgacatgtatcagaatcggttcctgcaacgagaagctgcattgaacaaattcagactgaagcggaaagatcggaactttggtaaaaaggtagcctgttttcagttacatgcctgttgtagctatgacttgaaatcagtaatagttatttgagggttgaagggccttccacttaatatataaaagtaagggtagggattcaaatggtttgcacaattataatcagaaaaaagatagaagtgattattaataatctctacctttggaggatataaaaatgcttatgctacttccagctatgccttttgtctttttttagaaaaacttccagttatgacttaattgttaatattgacaataccagtgtaggaatactgaaattagtcttgaaagtaagacattagttgctgctgtttgcgtgatggcccctagcttgaggatactttgccgctactcttgcggatgctttgccgctccatgtcatctctagcggacgctctgctgtcgtgctgctggatgtttgtctcgtctcctctcaggggatgctctgccactgcagtgtcttcgtctttattggcaacctggagttgatgtgcttttccttctgcaggttcagtcggttagattttaggtggagagtccttcttactgcattttctttctctggttctttgggtcggtttaggttgctaaccacttctgtgcttttgtaatatgggcgacggggtctctcagtagctttgtcataaaacaattctacttccccttaatatagtacatgtgactctgacatgttatcgaacaaaaaaaaacattgctcgctctaaattttatgagatctggcatgatttcaaactattcttcttttcaaaatcctgttttctgactgcagtttttacaagattttatggtcttgccgcttcatttttctgactgtttgcattggaccgataccttctgatggccttgtccgcctattttcaggttcgctaccaaagcaggaagaggcttgctgagcagcggccacgggtccgaggacagtttgtgcgacaatctgagcaagaagatcaaacagcgcaaggttcagaaagatgacacgtaatttctaatacaacgtatcatcttcttcggcagatctgagaattaggcggttcttcctattgcgcatcttcgtcgacagatctgagaattaagtggtccttcccattgctgatagtagcccactgattcccaacgttagagtacacaataaataagactctagttgtcaatttctgtggttgactgcagatgatcaccctagcgctatggagtcaacaatgtaatatttatatactatgttcgtgccttggcgccttggcggtttgcaatcttcagtttcctttctgagagattcttggccaagtgccttgaggaggagcaaactagcagcgtcgccattgctatattaatagctggaatcatgtagtagtagttcatccattcattcgaagatcgtgttccaaatcaacacaagtaggggtttgcttctcctctttccaagaaaagtggttgtagcgtgagatgcaaataggtctcttgtgctagatcaagctcaataaactttaggccgtgttaggcagctgatctacttcaccaatgtggcaaggcattcgtcgtattctgttgacagaaacaaggtgttcactgcacgggcatgccgcacgactcctcgcagatcaaaagagggaacacggcatgcttttaccaaaattattttcgaataacattgtgaggaacagacaataattaacttcccaaaacgtctcgctatactggatttttcgatgttggattcgtaatcagatccttttgacaataattttcgtacatcaggcatgtcaacagtaactgaagaatatgttagagccacatgtctcaaaagaaaaaaaaaacagagataatctcttcagtggttcagacatttcggaagagatatacgctcttcaac

SEQ ID NO: 28339 - DNA, 912 bp, Zea Mays
caagacttgggggcaacagtgctcatgctgatgaccggaccggaagacaaaacatgccaaaattgtgttcagcattaaaggctgctggtggtagagctaatggagatggaacaaggaagacaaggacacgggaccggcctagggctgttccagctccagaggcaaacgccgaactgcaagcaaatattgataaaagaaggttaataactcatgcaaatgcgaagagcaagagtgaaaagttccctccgccgcatcaggatggcgcacttggatttcccttgggctgttcgaaccacatggaaccttcatttgaacccccagacccttcttccttcagcactgtatttccttacgaaaaaagcaccgtgccaacctggtccggaccattggcggactctgcagctggcaaccagaagcggaaacacaagtctggccgctcctcgaaacaaccagcaaccgcccgtgctagatgatacacatcatgccatgcttagtccaaaccaaatcttcaatacctcccaaagaaataccttgcagtggttcctacaaactgggatacctgattcggaatcaagagctacagcaatgaactgttttcttttcctcagatccattcatgtacgcattttttttcctgagcatcgagcaatgtataggctggagatggagctggattagtcagttatgtacattaggttctcttttccattcttacaagcagcaacatgtcagtttagatttattcgagtgaggaatggagctggtaggtcaacttagcaagctatcattctacatagatacttacaatcaattgaaatattttttactttttattttgtctattttccctttattcattttacaatattttgaaataaaatcaaaagtgtagcaaaattcaaatgctttgcg

SEQ ID NO: 28340 - DNA, 1222 bp, Zea Mays
tccaggtaccaacttgctcttcagatgacacgtgtcctcacttatagtcgtagtaatacaaacaaacatgtatagacacaattaacattacaccaaacataagtacaaactgcataataatagcctacgcgtcgctacaagatcgtgggaacaagaattactaaattcggagctacgtttaccgagttatgattttctaaagatccacgtggttaaatatagaatagactaagtgcaacattttaacctatatttcatgacaaaacaatgttaccagaggataataaatattattgtgagactaatgcaactagaatgaatcaaaacggatttattgttattgagttatgaatttctggagttattgagcacatggtatagattaattccgatgaataattttaattcatgttttattgctaaacagagatactaggtgatagataataataaaacaaaattattgcaactaaaatgactcaatttggagctaaaatgaatttaatatgaattatataagtttatggatttatttttgtattaaaaattcatttctaatattaattccctatttcccaagtttctggtctgcgcgccaaatacagaaaagtgtagggtctgatctacaaaacctctctagactaagattgccttgctggaggacggcaggttgatttggttaaagtcaggggtttcttttgtaaaacacacatgctgaaggggggtatcggccgttcatagccgttggatgaaacgttgatggttcagatttgataagacgaaggggtaagttggttctaatttcagccgccccgccggatagaggaacaatcatgggcgagtctcaggggcggtggcccgcgacgacgttgcatcgaacgacgacgactgcaccccgccaaaacaccgtcagccgccccagcgacttgcttcttctccctgcgcgaacacggcacggtgggacgagcggtgagccccagcgtcaacagccagcgccggatcctagagcgccatccgccccgcatattcccagacggcggccatgccagagctttcccccatggccggcatgctgttgacgacgaacgaaggagttgctctgatctggtgaccctagctctaaattttctcgtacgacgctggctactgtctcaatgacttcaatagcgcaggtgatggttcggctgctcatatatatacttgtggacgggaccgattccgg

SEQ ID NO: 28341 - DNA, 2133 bp, Zea Mays
aactgccccgctccgatcctgtcgacggcggcggccacctgttcgaaccgcgcgctcctgctgccgtcgcccctcgctgcggcggcgaccttggcatcggccgcggggcgcggcggcggcgggtacacgtccggagcgccgacgacgccgaggtggaagcgaaacagaccccacgctgccgcggcgggctgcgcggacccggtgctgcggcgcgggcgcgccgagcgcagccgcgacgacgggctcggatgcgcgtagaacaggctgctcgacagcgagcgccgcggcggaggcgccccggcgccgtggtcggaggaggcgctcttggacgactggctccggctcacgcacccgctgctgctgctgctcgagctcgagctcgcgctgcggctgccggaccgtgacaccaggcccacggtggaggccactgactccgacctcggtagcgtggcgacgttggcatcgtcggcggccgcaaccgaggaggcgcggagcgggaggagcttgccctagcagaagacctcgtcggccgcgcacatgtccgtccccgcgctctctccggctggtacgatgtcgccggacgacaggatgcagaactcgaagtcgtcggccgagtccgaggcgcgacactctcagatcccgtgctcatcaccatcctgcccctcgctcgccgcccccacctcaccaagagccttagccgtccctagagaagacacggaggtgcagtgccagtgctttcctcaagtgcacctcggattttcggtaccggccagattgggacgaattcaacattcatcggctccaccaaaacactgccactatgatgtgtatgcttgcgtcaggacaggagacccaaaagtacttcacagatgaatgtgacattttccacaagaacgagatacgaaatggccaaggactgctgacgatgatgacgacatggccaccatcgctgccctcaggtaggccatcctccaagagctcaacccccacgcctctgttctaaaggtcctttcctccccacctatatgttttctattgaatccacaatgactagattaggcaaagcttcaccgatgagcttagcatcctactataacatgatgaatgtacacacagatcagtttagaaaactactgaaacttatctgttctattttcaataaagataaatcaacttccccacatcactcatgttcttcttgcagctttgctgcttgctattgtcttagattaattaagccatatttgagcagaccactatgcttttcctgttgcattacttgatccttgcaagttacaatccttttctgcattgatattatgttttttgtggaattttcatgtgctcaatcagaagccaaaatataactttatggctgtaactgcaacagacttatctatactacttattaaggctgtaagggtagccagcctttttgcgttctgcctccaggagatctggatcgtcagttagcctgtgtgaatctgcaccgtccgttcgtgactccctgtccacccacgccgcccccagtccacccacgccgcccccagccttccgcgccgcgcgagcaaccctccctctcagttctccctctgctgcgccgcctcccgcacccccactggcccctcaccgcggtcctccctccgttgccccgcctccccggtagttccttcatccagtccctctcacatctcctgcgatccccacccacaggagccgagcttcctgcccgcttgcttatccgccataggcttcaacacatttgaatccacgctgtgttggcgtgtatcgatgattcggtgacggtgggtgatggaggtgtgtgacctgcgcaaggtgcccgacgcggccgccccgggcgaccctcgaccatgtcgccaatcaggctgctaaccgtttcactgaccatggagcttcaccatcgagagctgggagtttggagaacagaattattggtagtgaagaggttcctaggagattcggatatgaggccttggaattgaggaatggtggatctgattattttggcaaaggtgttcttaaggttagttaaccaaccaatgtttatatttcagtctgagggtattatactagctttatttgccatgcactcgcattcaccatagtcattca

SEQ ID NO: 28342 - DNA, 1705 bp, Zea Mays
ctagttgcctctttttttattcttatctttaaatcgattgtaagtttactattttttctgtcttcttttctccctcttccacctaagtatttagcacgtttatagcctcctaccatcccaatccaaacggtacaaagtcaacgatcacatacatggcggtggaaaattctgtacatacgtttccttgggtgcaacagttgcgcattgatcgacgactagtacctcctccgtgatagacgcgagcaacctatatgcacatggagccatccttacacgctaaattggagcaacttcacgtattttctataaataacatgctaaattaataaatttagcaatgtaataacataagtagtaaccataatttatttctctctctaataatttattatagtacgtccttcgttttttatttgtttcaaaatcaactaaagagcgacaaatattttaaaacgtataaataaataattgggaacttggactatttttaaccgacctagcatattttaactgtttcttttctctatctcttatcattttctcacctgaaaaagttcgcagcttcaccgaacgaaaatgtcctgtcgttccctttccaaccccgtctccgtctccgcccgccacaacaatatcgcattgacagatcgttcatcgtagcctcctccagtcgtctcccgggatcttctccggctataaatttccgccccaattccccaatccagatgcgcaaacatcgaatcgtctcgctcgtggctgccctgctcatactgcttgccctcgccgtatcgtccacccgcaacgcacaggaggattccatggccgacaacaccgggacgttggcgggcggcatcaaggacgtgccggggaacgagaacgaccttcacctccaggaactcgcccgcttcgccgtcgatgagcacaacaagaaggccaatgctcttctggggttcgagaagcttgtgaaggccaagacacaagtggttgctggcacgatgtactatctcactattgaagtgaaggatggcgaagtgaagaagctctacgaagctaaggtctgggagaagccatgggagaacttcaaggagctgcaggaattcaagcctgttgaagagggtgctagcgcctaagctcaaagcaaagttgcagaataaggaaccatgctcccttgtgtaatttcataagactacaacccttttagggcttgttcgtttgtgtctgtgtctaagggaattgaaggtgattaaatttccttctatacaaatagaggggctttaatccactccaatacttttcaatccacgcctaaccgaacaagcccttaatatgatatcttagattgccgtacctgtgtaatatcatgaataaaatttgctattatggattctaaggtttatgaactaccatacatggcagaatcctcatgttactttgctgaaatctttgttggaagttggaacgtacatggcagaattctcacattacttggctcaagtcttcggcttggaagtttacatgcagattttttggtcacatgacgatcccatccaatctcagcttggtcaattcagattataccttgtaaaccaagcaagcgcctgagtgcatagtcagctcaccagatgaccagagagaatatgtttgcgatcacttcgaagctgtttgagtgccgtatacttcaggatagtcaaaagtttcgcgttcgaat

SEQ ID NO: 28343 - DNA, 1693 bp, Zea Mays
ggcgtcttgagggtacccctaattatggtccccgacaatgtatatgttctatatatataggtttataatcatctatatatatgaatactgatataaaaatctatagctaaaacgattgctattttgagatgttgagagtaatttttaaaggagtctaagaaataaaaggattcggcacatttatgacggaagagacggagatatggagtactcggagtaatcagattcgatccctacgcggaagcggaagggtaggtttgtgtgtgtggtggcctcaagcaagatatccgcaccgaagccgagcgcgaggaggaaatggaaaccctgcctccacatccggacaacccacccaccgcacgcatagtgccagcatccgccgtccagctccctcgaccaacggccccgatcctctaacttggagcccaacacgcggcccgactgcgcaccacgcacctgccctcgcgccgcgccgttcatgcccatatattctgcccgcctttcgtccttttcgtccccatttccattcctcgctcaccaagccaacaaccaaatcgaattcgccgacgactctctttattcctcccgctcgccgccgcggccgccgcctgagggcaagaagcgagcgagcgcaccgcggatctccctcccggccccgccgcgcgcaccggtgaagacgacgagcccctcgtgaatggtgggagcccgcgcgacgtccgtcgcctcgcagccgcagccggaggaggcctccttccgcggcttcggttactgcatgcagggctggtaccaccgctgcatcggtctcgacccctgaaccccgccgccacttgcttctttgatttgatttcattcggttcgttcggtgcccctcccgtcctggatctgttgcgcgagagcgcggcagcgcgcgagattcgcccccttctcttctcataggaagcaggaagcaagccgatcgctcgctgagcgccgccgccgatggccgtcgcggtgccgatgaagctctggagggtggagacccgcggcaaggccgccgccgcggggcccgacgaccccctgcgcgtcctggtgacggtgaccgtcctcgggagcgccggcccgttgcgcttcatcgtcctcgagggcgacacggtcgccgcgctcatccgcggcgcgcttcgctgctacgcccgcgagggccgcatgccgctgctcggcaccgaccctgccggcttcgtcctctccaccgccaacggcggatccggcgcactcggagaagacgagaggatcagcttcaacgggtgccggaacttcctgctttggcagaaggctgcggctcagggtgccgccgccaaccacgccgggtccgatgctctgacggcaaccctgagccccggcaggaagggcagcggtggattcaaggctactgatccgagccctggcaggaaaggcggcggcggctggaaggctggactgaacaagttcctcctcagcttcagcatcaaggtgtgatccatacgtggacgagagaaggggggcgtttcttggtgtcgaggcaccgcgcaacaataaaaatgcattgcattggtttgtctgttttttcaattaatcaggattgtttgttgccgccagtgagatggcgaagtgtaattcgtcatgcgaatccgagtcgagtcgaggcaatgtgattcatcgtatgtttgagtcgaaaaaaaaa

SEQ ID NO: 28344 - DNA, 2004 bp, Zea Mays
cagcttcacatgaagttagacttttttcactggaaagtgatgctgtgatattggagtaaatgccattttaaagataatggttcagcgatccaggaagtccctcgtgaaaaagtgaatttctcagaagaacttttgagcagcacatcatttgctcgccaattagtggatcagatgactctagcaaaggcatatgtcatccttgcaaaagagcaaggtaatcttcagcttgcatgggagcttagttcacagataaggaattgtcaaagattgctatctgaaggggcagttaatggaagagcaatcactaaagatgaagcccatcctataataagccggctagcacggttaatatacaaggctcaggactctcactatgatatcagcacaacaatagtgacattgaagaaccatgccttggcactagaggagcgtgcaaaggcagcaattgttcagagtgctgagtttggccagttagcagcagaatccttccccaaaaatctgcactgtctaactgtgaaactgacagaggagtggcttcggaacccgaagcataggagtcactcagaggagaaccggaattccacacgattggtggataataatctgtaccatttctgtatattctctgataatgtgctggccacttcagttgttgtcaattctacggtctccaatgcaaatcatcctcaacagcttgtgtttcatgtggtcaccgacagaatccattttggcgcaatgtcaacttggttcctcataaatgacttcaaaggttgtactgttgaagtccgctgcatagatgagttctcgtggttgaatgcttcttcatctcctcttgtcaggcagctatctgaggcggaaactcagggttactattactcagctggttccaagaatcctgaaagagaaacaaaattccataatccaaagtttgtttctctactgaaccatttacgtttctacattcctcagatacttcccaacttggagaaggtggtgtttcttgatgatgatgttgtggtgcaaaaggacctgactcagctgttctccattgagttgcatggcaatgtcattggagcagtggaaacctgtttggagtcgtttcatcgatacagcaagtatctaaatttttcgcaccctaccatcagctccaagattgatccacatacttgtggatgggcttttggaatgaacatttttgacttgatagcctggaggaaggcgaacgccacatcgttgtaccattattggcaagagcaaaattcagatctattgctctggagaacgggaattcttcctgcaggccttttgacattttacggcctggtggagcccctagaccgcagatggcatgtcttgggtcttgggtatgatgtagacatagatgaccgtttgattgagagtgctgctgttgtgcactataacggaaacatgaaaccgtggctgaagctggctattcgccgttacaagtatatatgggagcggtatgtgaatatctcacatccgtatgttagagagtgtatgttgcaatagaaagcctgcaaatctctgtatgttcttggatggtgttgaagctgtttcctcacacgaggctgctttcgagcacattgtatgagggaaaggttcagaggtagtagaatatataccagtcatcaaagaagtcaactgttaagtttctttttctttttgggttgggggaagattcattttgagatgaaaataattcctttgcagagtttacatacaaatctggactgggaattttagcagtctaaccagatacatctggatagatattgtaaaagagatacagttggatcaatgagcattttttctttgagatttaggaagtgcaaactgtgagctcaactgtgcagggtcagtggtgctgcattcttttagtactatcttgttttatactggcgaagaaggttctgcctccctacttgtataagtaactgttttagtttgtgctctccatacttaaaggctctgtttggaagcgac

SEQ ID NO: 28345 - DNA, 1162 bp, Zea Mays
ctggacccgcagtatctaccgctgccgtttcttgcccgtagtttgtagtaaaaattacatgttgttgccccttgcccgcccggggagttctgctcgtactgcatcatcagaggtgacagggggaccacagaagcattagctgggtgaactctttcaaaaggggcaggtgcgctagtttgaatggctgctacaaagcttcaggccttttggaaccaccctgctggccccaaaaccattcatttctgggcgccaacattcaaatggggtatcagcattgccaacatagccgactttgcaaagccgcctgaaaagatatcttaccctcagcaagttgctgttgcatgcactggaatcatttggtcaaggtacagcttggttatcacaccgaaaaactggaaccttttcagtgttaacgttgcaatggcgggtacaggcctgtatcagctttcacggaagattaggcaagattacttgtctggtgagaaggatgctgctccacaactgcaagaatagataatgacaacacacaaagaataactgattgagaagtctgcggcctagggatcttactcttgatttttctgggcaggcaaggatatgtctcgatccaggacgggtcatgtttgttttcttgttcttctgaaatcatgagcaggtcaatgtgaaaatctcctgccaaaaaaagaagcccatgaagtaatattttgtgcatttttgtgggaaaaaagtcatgccaggacatgattcgtatattgtccttttgttcactctatctcgtatttgtgaactctaaattgtttgccaatttgattgatcatagcccagtgttcagagatgtcagtgcccttcaccgtcctcattttgttatgatcgtggtgaagctgaattgttatccctggagaatgagggcattcaataaggagtgtttggtttaagaaaatcactccctccaagatagagggtgtatgtctattctttaagggagtgtttggtttgagaaatcatttcatgcaaaatgagttggtatatcataagtttattccctaaatttggttggatttggttgaatgactctatttcccatgttaatactaactaattaactataattaatgaggtggtaatgaatcaatttattacattccacaaaccaaacaaaaaa

SEQ ID NO: 28346 - DNA, 1170 bp, Zea Mays
caacaaacccatgaagagggtcacgccggcccaatattacactgaggagtgaggagcacaattccttccaggatcccagaagattcgacgttccacgggctccggcggcggcaggaacgcctcccgatttcgacggcagaactagagagcgatggcgctgactaacttcatcgtgacggtggccgtggttggcgcgggggtgcttctctttaccaccgacatccgcaggtctggcgccctcttccgccgcaacgcgcgccagctccggctgtggctcgaggaggacacggcctccgccgcgtccaagtctgcaaaagaagcagctccaaagaaactcgactcgacggtccccaaggagaagccaaaggaagatagtcactgattggagctgtttatatgaacggagaggaaaccgtcggcattctgaatcagatagaggtgacgcaacctgggacagctgccgggtggacggtccgtcgactggtggaggaggagaggtgagcagcgactgtacgagtcggaaggtggtgttgaatgatggctgctccagtgcagtgcatgggatcactcgaggttgcactagcaactttcgacgtggttgttggttcagttaggtttgcaatcgtcgtcgtccctcgcagatcatcacagggtggcgaggagatactaacagtgtatggacggtgagtctgaggagaccatcatgcctttgtcgttcagagccgggctagcacttgactgattggcctgcagagcggaaatggaaagccagagccaaaccctgctctgctcaccgtcggagataagagctcgcattgcatcagccggtctcttccgcgcacagccggactctcttcaccaaggcacacggccacacgggtcacgaggaaagtttcctttaaatacccactcggtactcatatagtataagacataaccacttttttattttatccccacgatataaagtgttctctctaaatagtgttctctctctaaatatacgtgaattgatgtaatattattagtactaatatagagaattaaatacatttattggttttgaaccagaggtgggtacaccttatatactaggacaaagagattatgatctgttcagttgggttattgctatgaaaaaagctatcatgggttgtaggctattaaaaa

SEQ ID NO: 28347 - DNA, 640 bp, Zea Mays
atggcaaacattaggcagctaagcctgaatccgctttgtggcgcctatgcgcccgcagcaaccaacgaggcaacggatcgagttcctctccgaactccaactctgcgccgcaatccactcaagaaggttagccctcgtggtctcggatttggataatcctccgccgaggtatgaaacaggaggcggccaccagcatagtggtgacccaggaggacgtcctgcaccactacaaggagcctccaccccgccgcgaggacgatccgccagcactggctgcgtcgctgtcgttgccgtcgtcactgtcggaggacgatggcgacgccatgccgcagccatcttcatacgcggtcttgccgcgccgggaaggcgagctggtgtctgcggaggagctgctgctggtgccgccgctcaacttcgccatggtggaccacggcgtgtaccgctccggattcccggacgcctccaacttgccgtttcttgagacgctccgactccgctccgtcctgtgcctgtgcccggagccatacccggaggctaatctggagttcctccgtgcccacgggatcaagctcttccagttcggaatcgacggctccaaggttcgcctccgccgctcccacatgtagccccggtgccctcc

SEQ ID NO: 28348 - DNA, 187 bp, Zea Mays
gccgggtctcgtcttttctctctgtctgtctccgacgtccgacctcttgccctcggtcacctctcttttttcttggtcacttgcaggcatgccgctccaccctccacgcgtgtaaagctcacaggggctggctcgaagccccatttttgagcccacaacaacagaacagcaagcatgaggctcgctt

SEQ ID NO: 28349 - DNA, 2143 bp, Zea Mays
atggacttgtgtggccatggtgggaggtgttggcttgccagagaacgagaaaggaaagaccgaggaaggaggggggcctttgattctttattggctgccctcgatacacgtggcacccgggaggcacagctgcattcaatgttgcaagtgatcgagccaaccttcaaggaagctattaaaagaaatgtgagtatagaattatctgctggaaggtatccaaagaatggagctactgacatgataagggcaaattatcacagtgaggttggaagctcaagcagtactcctagtgctacatctgacagtataacagcatattctgattcttttaaagtagagcttgggcgtaatgattttgagaagacagctatctcaaaaagggcagatatatttttaaaatggatgtggagggaattctacaatcaggaattgacatgtgccatgaaatacggcaagaaaagatgctctgaattgttgcattcgtgtaattgctgctatcagatttacctagcagaagaaaggcactgttcttcttgccataagactttcaaatccatttacaatttttctgatcatacaacacaatgcgaagagaaacagagaacagaacctttctggaacatgcaaaacactgattattctgtcccaataggaatggtattactcaagcttcagttagtttcgattgaggcatatataccatcagaagcacttcaaccattttggactgatgtgtatcgaaaatcttggagtgtgaagctgtacactaccaaatctattgctgaaatattccagcttttgactgttctggaaggtgcaataagaccagattgcctctcttctgattttgaaacaagtgagtgtctaaactcacaggttggatctgcttctgtccttccatgggttcccgacactacttcagctgttatgctccgaatgttagaccttgactcagctattttgtatgttcaaaatcaaaagatggatagagatgatggaggtttcatgaaatttccgtcaaggtatacagttgctaagagcaaacaagaaacaacacctgaaacagctggtttggatctgtatgatggaaggtggcttcctggtagtggccgtaggggtcgtggacgtggaagtagaggaggtagcaggggaggcagaggtcgaagtcgaggtggaaggatcccaagaggtgttagcagctcatcaaggatcgagttcaagggtggtattgttgcttctgataaagcgccaaggaagaatgtacgccgagggcgtggtcgtggtcgtggtcgtagacgtggacgtcgaactgtgaggcctcggcagccatctgttggcagagccagatcaattccaaaggaaaatttgttgggaagctttagcatgcttagcagctcaaaggctgctaccattgaggagtctccacgaagctctggcgcagacgagtggggcttggagaccagaacgacatacactgaatgtgatgagaacagctctggatcacagtcagaagataacgaggaaaatggccagcccatggatgatgattatgaagatcaagttccagattactcaataggctattctaccggctcgaggcaccatgtaatgatgtccatgatggaccatgatagtgacgaggaggatgaagatgctgaaggtgatgagaatgtggaagaagatgcagaccttgcagttgacgatgccgatgttgagatggacgaagatgatgaaattggtgatgatggagaggatggtggcgttggaggggagatgaatgcggatgaggatccggatgctacttcatattcatccgattacagcgactaagaaagcagaaataagggaaccttatcccagattcctccctcggcatggaatgcatgtagtaccgagtaggcattcccccccgttgtgagccaaaagggagcttagatgcttaggttcgaaggagcgaggaactgttttttaggcaccgcaggttttaatagaatttctgacgcattcgacgaagtgtttggttgtaccgtggtagttgtgttactggggaattccccgagttattatacaatgtgttaagacaaaatactgtcatatcgcatctggttgccatgcgtctaactggttcacggttttaccgtta

SEQ ID NO: 28350 - DNA, 2970 bp, Zea Mays
gcccggcgtgcccgaacagcgcctcaccgcgccgcacgcctgcgtcggtcgccgaccccagtcaccggtccacgcccgcctccccctttctcctccgccctttcttgtgaccgccgccgcgggccctagcccgccgttccctctccggcgccccgctcccgcacccgcaccggatcagtccgggccgcgtggtcgcccccacctaccgcctcgggtccactcgctcgcggttgcgtgtcccgcggggtggcccctcgggcctcggcagctccggtttcgaatggggctctcgtcggccgccactggcgacggggtgcagctctgcgtgttcgacctccagagggggcaacaggagggccaggagctcgacaagatcctctacttctaccccgccgactgccccatcctgctccagctctctgtcatcggcctctgcgaggggatcgtcactttcactagttatatgcagaatattttccccagaagaggattgcgaggttatagaatcagagaaacactcccatgttttttaccaagccgaaacggatatttggatggttctggttgtggaaaaaaacaaggaaaatgaattgacttggcgttgtggtgcactacaagggattcttaaagaggctcattctctctttgcaatgtttcatggaccaatccgaactttgcttcacaaacaacccagtgcagagcttgctcgtggtcacctccgcacatttcttacagattatttgagcgattttaatgttggaaagaagttacaatttccaacctaccgtgacagcctaaaggagaggggaacagtccaaatgcttacggtatcacgagaagtggcacttgacgttcaggtatgctgcacttcttatgctaatagttttttaagaaaacaaacgagtcttttcttactctcctaattaattaaagtcattttcatgttatcatccttatatgcaagttgatgttacatcttgtccagagttgtaaggtttgttaaactactgtaagaccgatcctgatttccatactagctggtgcagtaccagctgaaaatttttttattgagtttcttcaatggtgtggtatcatgctactttgcgaggaattggataccatgatgagttcataactttgattaactcagtgtaaatgaactcctttcctgaaactggttgatttggacaaacatcttatactgttcttgtttcctgttcctttcttgtttccaaaggaaaaactacattttagtcctatccatacttcatagtttatctaatatggatttgtattacacaagccttcttggctgttatgctaacatgggaagggtttttgttgtcatattcattttctgcgctgcatcagtatttggaaagagttgtttttgttgcagggttagagttactgcacaaagatctttctgagaaccaatgagtcgccattttgcaaatttcaaactggcctcctgccatctatcagtagtgtgtgtcatatttgcaatattatttagaatcatgcgatcgcaagttgcaatagttgcatagatttattttatttattccaactattgaagtattagtgtttcagtcactcgccacagtacttggatcatgtcttggaaatgttacctgccaatcacttgtactatttgaagacctcttggtgtcaacgacactgcccccggatgatactttaaacctatatacatatgctgttctgaggttaactccgcgtgctttatattccaatgcaagttcttggtcctatttgcggaaaggaacttctgttagtgctggccaaacatcaagttcatcaaatggaacaactgcaggagaaaggtaccgtagtcgatctcgtgatacttctccaggtggacaaaatcagatgaatcgtaatttcaggcctctcctacgtgagaaattgtcaaagggaaaggatggctttgttgctgctgatttcacagctacagaagctcgttgtgctgtaccctcgactccaatactttggttccagcaggcagatgagtgcatgcacctatgcatttatcagcacaaaagtctcactatcttactgctggttcctgcttcctcagtgataaatggagaagagggcattactcatgtgaagaaggcgatgcttgaaaatgcatcacagaagattgtcactgttgagcagaaattgacacgaggatggggaggagaaaatgcgtatcatgttagtggatatcgttatttgcttgttgatccggagagaagagtatcaagagcctccccacctgggaaagtcaccaccctagcaaaggattctctacttgccctcaacatgctaagacaagaagtagatctagagaagtcaagatacaagagaggcgacccttgtcatgataaggatttcgaagtatgtatcagaacaaaaaacaatgcgtgggttattgctaaaatcagtcaaggaagggagctttacatggctctagagaagggtggtgaaacgcttctatatgcatccacagctgtagagaaattcagcaacaggtactgtgagggagcattctctacagattagaagcaccagagggagatcttagcttttccatacattacctattatgtacatcctgtttttttcccagctgtatcgttgccccctattgttgagagactcggaccactctttgcgaagggaataaggagttcgtatcagttgtacagctgctctgctgtcgtgtgctatctgcaaaagaatagcctagtctgggaataacgcagagcgggatagagtttgtttgttcacttatgcccttccttaacgcagagcattgtgcgtgttttcattttgctgtaacagccggcgatttacctgcagactgggaaagtaacttagcgtttaatttggtattctgcattttgatggtctcatatcatatggttcgagttgacgggttcgttctgcctccggagaggagag

SEQ ID NO: 28351 - DNA, 3096 bp, Zea Mays
ggctccctccctcctcccctctcccctgtcccctctctctttctcaccgtccacgcgcgactgcgcgggacactggtcaacgccccggtggcaggcggctccgttggggggtgagtctagctccgtctgttgcgccggaataacgcggcgggtgctacctccggccctcgggttccatggggaggaacggtagcgtgaggcgctcggcgttttcgggcgccgcgggtgctgccgcggggccgccgtccttctctgtgaatcccgccgactaccggttgatggaggaggtggggtacggtgcgcacgccgtcgtgtaccgcgcgatcttcctcccgactaagggtgttgtcgcggtcaagtgcctggatctcgatcagctcaataacaacatcgatgaaatacaaagggaggctcaaataatgagcttgatagaccatcctaatgtcatcagggcttactgctcatttgttgtggagcacagcctctgggtgataatgccattcatgacagagggttcttgtttacacttaatgaagatctcataccaggaaggttttgatgagccgatcattggctccattctcaaggaaactcttaaggctctggattaccttcaccggcagggtcaaatacatcgtgatgtcaaggctggtaatatccttatcgatggtgctggggtagtgaagcttggagactttggtgtttctgcttgtatgtttgatagaggtgataggcaaagatctaggaatacatttgtaggaacaccatgctggatggctccagaagtgctccaacctggcactggatataatttcaaagctgacatatggtcatttggaatcactgctcttgaactagcacatggccatgctccattttctaaataccctcctatgaaggttcttctcatgaccctccagaatgcaccacctggtcttgattatgaacgtgacaaaagattctcaaagatcaaacaaagagaccaacagctgagaagttgcttaagcattcatttttcaaaaatgcaaagcctccagagttgactattaagagtatcttatctggtttacctcctctctgggaccgtgtaaaggctctccagcttaaagatgaagcacaattggctttgaagaaaatgccttcttctgaacaggaggccctctccctgagtgaatatcaacgcggcgttagtgcatggaacttcgatatcgaggatctcaaggctcaagcatcattaattcatgatgacgagcctcctgaaataaaagaagatgaggacattgcaagaaacattgaggttgaaaaggacttgtcttcacggaaccatttgggaaagtcatttgcaaatgagtgcaattccaggcagcgagcctttgtcaccactttaaaatcggatggaaacagacccaccacgaatgaagcttttgattttgattttgattttagcgaggctgccactacaagaagggctgatggacatgaaagaaacataagagagaatgattcattgccctctacagcaaagcgagatccagagtcgaatcattggacaagtgacgttgggcagagacaactgtcttctggtgggagcaatagctcaacagctgaaaggggctatggttttgagagggatgcagttgtgcaaacaatacctgaaaaacaaagaagtgaggcgagaaaaacagcaagccttagtggtccactttcactgccaactcgtgcttctgcaaatagtctgtcagctcctattcgatcttcaggaggttttgtagattcatcaggtgacaagtccaaacgaagtgtagtagagattaaaggccgcttttcagtgacatctgagaatgtcgatcttgcaaaggttcaggaaggtccacttagtagcctctcacggaaatcaccagagggttcactgctaaaaaaatctgccagcactggtgattgtttgattaatactaagctgatgcgtaacgctaatcagctgaaggaattctgcaatagttctgtatcatcttcagtattaattccccaccttaacaaccttgtgcaacagaccatgtttcagcaggatgtaatcatgaacctacttagtaacttgcaacaggatgagaaagttgatagaacacagcctggaatatcttctcaagtccgaacgatggagaatggtaaagtggctgatacagctaactctgagaaggaacggtcattacttgttaaaatttcagaattacagtctaggatgataacactgactgatgaactaattgcagctaagacaaaacatgttcagttgcagcaagagctaaatgctttgtactaccgagaagaaattgaggatgttagggatgaggatatcgaagaaacatagtgtatgaattatctgcctctccctgagacagatcaattacccgcctctccctgaggtcaggggagaacaagagaaggaaagcggcagggagaactagcgatggaaagtggcgatgccgcaaatatttgctggatctagagaccagctgcggttctacggaatttgttctttgaaggttgccgtgcccctggcctgctgccatccagtgtgtataaccgtcttagttcgttttttttttgtggccacaagattgaggcgtggtcatgcagctatttcggccatgcctatcattgggagtagctgtagtccgtaggctaccgggtggttatctatgcagaatttcagaagactgcaaaataaactgtattttatctagcaataggatgtatattggcgcattcgttgatatgtatcatatagggctattcgcaaacatccaaacagagttgtttgcacatatctaataaagtatgcatttactgcatttatcactgccatgtactaaatgattgttttaaaggcattatacattacatgatctgggtaaatcttctctataattggatcttcatgctattttccagcggtgtttctatctcattacatattttacctcctatttcaaatttcactatgcaaataatactatttacaatacaaagcaatgttataaacgattggaaagcaatgttataatactatttagtgatctttctttctttttcttttcc

SEQ ID NO: 28352 - DNA, 2506 bp, Zea Mays
ggctagtactagcaagcagtagtggtgtcgcatctgccgatctcctctgtccgagtcactcactcccccgactgaggaggcggccggcgctccccaggcacgcacgagttgacgggtccagcagcggcctcgggatcttgccgccagctgcagcggcaatccggtccgtccgcccaggaaaccagtgctgtcttaggtattgttgattcatgattcttgattccgggaggcggtttcgtgttgtgacagcccgatcttgcggttcagcagagagccaatccgctgggcttccgtggatatacatatactggtctgagttgtcaagtccttgacctgatcatatcagttttgcttataaggatgggggtttacctcagtactccaaaaactgacaagctatctgaaaatggagaaaatgatagacttaagtttggtctttcatctatgcaaggatggcgagcaaccatggaagatgctcattcagcattgctagatcttgatagcgagacagcattctttggtgtttttgatggtcatggaggaagagtcgttgccaaattctgtgcaaaatatctgcatggtcaagtcctcaaaagcgaagcctattcaactggtgacctaggcactgctgtccatagagctttcttcagaatggatgaaatgatgcaaggacagagaggttggcgagaactatctgcacttggagacaaaataaacaagtttagtggtatgatagaaggattgatttggtctccaaggggcagtgattcaaataatcaacaagatgattgggcttcagaggagggacctcactctgactttgctgggccaacatgtgggagtacagcgtgtgtagcattaataagaaacacccaacttgttgtggcaaatgctggtgattcccgatgtgttatttcaaggggtgggaaggcatacaatttatcgagggaccacaaaccagagcttgcagctgagagagaaaggataatgaaagcagggggcttcatccatatgggacgagtaaatggaagtttaaacttgtcaagggcaattggagacgtggaattgaaacagaacaaattcctgcctcccgagaagcaaattgtgacggccaatcctgatatcaatgtcgtggagctctgcgatgatgacgactttgttgttgtagcatgtgatggcatttgggactgcatgtcaagccaacagctggtggattttatccacgagcgtataaacacggagagcagcctgtctgccgtgtgcgagagagtgctggacagatgcctggctccatcaacgatcgctggagacgggtgcgacaacatgaccatgatcctggtgcagttcaaaaaacctgtcgatcggaacaagaaggccgaagcagcagggcaatctgccagcaatgtggacgaagccaagagtcgtgttgctgaggagtgaagcatggctggcactcaccagggcgcaaccatttgctttcataaggcaggtgaaaaaaaggaacgaagaaacctgcagtgtaatagaatgaacatagagggcgctttctgtttgccgtgttccacaaggaagagagcaagttatagacctttccgagtgtacagtttatttggagggaagaaggataaagatgagaatggtgatgaggcgccatcgaaagcaggaatttttggaaatatgcaaaatctctatgaaactgttaagaaggcccaaatggttgtccaagttgaggctgtccgggtgcaaaaggagcttgcagcgactgagattgatggttattgtgaaggcgaactaatcaaggttacactttctggaaaccagcaacctattagagttgaaatcacagaagctgcgatggagttgggtgctgaaaaactttccgggttggtcaacgatgcttacaaggatgcacaccaacggagcgtccaggccatgaaagagaggatggctgacttggcgcagagcctgggaatgcctgcgggcctcggcgatggtctcaagtgatgccgcaattcgggaaagctttccaataatcctttttcctcaattttgtatgctagccgtgtgagtagtaagcataacccctccgcgacctctcataagaagtgtacttgtgagcacttgttttctttcagctttagctgccatttgctgttctgcgcacgcagatatttgcacattaacttcacgtctggtctacaaagttgcaagatgcgggccatgatcttttgggcatttttccaacaagttgttgggctggcccagttgtagcccttcgaagatgagacaaccaagcccatatatataacacacaccgaaagccttcagaatctgtcgtgtgtgaccaaggataaatcatggctttggtgaacagtgatttaacagcaaataaaacactaagtgggtgttcggtttgaggaatcactctatccaaaatgtggtggtgtatcatgggtcaattcctcaaatttggtgggatgacctattccttatattagtactaact

SEQ ID NO: 28353 - DNA, 1024 bp, Zea Mays
gggcgcgcgggcggcacagacggaggaaaactttggtggggagtgcagtatccaatactttaaaaatactacagttttatctaaaccacagtattgaaaacaatgttttagaaggaccaaccaaacacatataggcctaaaatactgtagtatcctacaataccgcattattgcatcgaaactatgaaataaccatgctaccaaattgttatggctgcggcgtggtggtaggcgaggggtatgcaggggagagtggaggaggagagcggcttgagaacaagaacgcagaacgtagcgaggaggtctgtcgtcgccggcggctgaaggcgccaccgtcgaagaacagcccacctctaggagaacgatgaaaagtatagctgcagcgaaactggctatcgcctgcccttgaaatgtgtacaggcacaaaatgctacaaaagaaggaaacatgagcaagcagaggaagatattggatgatgcatccacatcaggtggcacaaaatccgcatcaggtggtccaaagcattatattacttacagaagttgtgtgccgttggttggagaggagaatttatctgttcttggttttgagataatgatggccggaatgttgctagtaagtggcccgttcgtatattaccggaaacggcgtacaaatcttatgcagggagctgcaagaatcccgacaagtgatcctaggttctagtatggggggacatggggtaataacggatcgcatacttgtgttgatctggtctatctttcttgtgattttgactcttgtcattgtactattatatttcacacatgtaattctggaagaggcgaagtgcttttttagttctcacaggagtaggaaccacagtggttagtctcatcgacctggtttacttgggtcaaatcacttgtgttacatattcaaatttatggttttgttacccccaaaaagttgctctaacagaggaacaactttgttcatgttgataatttatgcgaccaatgcgatcatttttctgaaagctgca

SEQ ID NO: 28354 - DNA, 1521 bp, Zea Mays
ccagcagcagctagctagtcgatagccggccggccaaaaccacctctccctttccttcttctctgtcccccttaattctccagccaatacagctttctggggcttacaccgcaggtccagagccggccggtcgtcgatccacatcaccattactccatctcctgataccgatcgagagctcctccctcgctccgggctgagtcgccggccggacggactcctccgacccgtgcggcgtcaggccggcccgccagctgggccatcccgttttttgattcatcagccgtagtaggactaggagccatggtcgaagctatttgatctatctctgagctgagctgggccggcaatttgatgatgcttgtgtgtgtgtgatcatgagtggataataagagatgataagcggcaacctcaccaatgaagacctgggggccgggcgcaccaaggccgaggggccgacgaccgcggccagggccgtcgcgaagagtcccgtgctgccgagctcccggcactggccgccgtcgacggagtccaggatcgtgcgcgtgtcgcgggtcttcggcggcaaggaccggcacagcaaggtggtggactggctgctcgacgccgcgcagcacgagatcgacaagctgcctccgcttcagttcccaccgcaggcagcgcaggacctcgtcgcccatctgccgccgccatccatggtggcgcccttcgcagccgaccgggccgaggccgacggcgacaaacgccactgccacgccggcgtcaaagggctcatgggcctcaacaattccatccgcctcgtcaacgccaccatgccgctggctcacggcttgtactacacgcccggcgagtcttggaccggtaccaatgccgatgatgccgccgcccatgatcatcagacggtggctcacggccactcgcccttctcatctctgctgtctcttgctgctccggggcctcagctcgtcttctactcgtcggaaggcggcggattcaccatgaaagaagaagccaccggttatcagttcccagtacaaaatagcctcgaccactcgcaaggccagctctcactgagctcagctagaagcttccttcgccccggcaaccaggtatgattaggtcactgatctctactgctccaagaaggtacgtagaagaataaagcttggtgtagtagtaatcaagtactcatttgaaggttccgtaacggttgtaactgcagttttgagatgctattgtttggtatgatcgagtagagggtctctagcatgcataattgaggttatttttgcaggacatgcaatgcaattcgttgcttcttttttatacaaggaagcaacgacaggtcatatgggtgtgtgtgtttgtttgtattgtaataacaattttaataatccattcttgattttgtgttatctatatgtatatatggaatatgataatgatgaaaattataccaatcatcacggaaaagattgcaccatgcatgatcaatttgcatgtaaacagtcttccaatgta

SEQ ID NO: 28355 - DNA, 1624 bp, Zea Mays
gcttacattgggacaggcctaacaacagtagcccaacacggcctgccactaactccgcgcacggacggcgaggccgacgccgccggtactgtctctgccggagtgctggatatccgcccgctgctcctcagtcgaccctccgctcccgcccatgcctcgacccaagcccgccgctgccggtggcggctggctttcagggtgggggtgggacctcatgctcggatcgattgccgcgttctacgccgtcatggcgccctacaccaaggtggaggagagcttcaacgtgcaggccatacatgatattctttatcacacttatcacatcgagaagtatgatcatttggaatttcctggagttgttcctcgaacgtttataggagcatttgttatctctattctctcatcacccacagtctttgtattgcgtttacttcgtgttccaaagttctatagtcttcttacagttcgattaacattgagttgtgtcactttgatgagtttgagacttctcagagttcaggtaaaaaagaagtttggccatcaagcagaagcattctttgtggtactaactgctatccagtttcacttgctgttctactcaagccgtccgcttccaaatatctttgctttagctttagtcaacttggcatactctttctggttcaagggaagctacctatgtacattacgggctctggtatgccttatgcccttttctgatgccttacctaccgagggaagctcggttctcaccaaattcagacataatcattatttctagtacccaagatataattcttcgtttcagcaccaaggatctggatcaacaaaggattaaagctttcacacaattaaaatcataccgaactatgtgtattgtgcaattttcattttcttgcagattgttgcagcagttgtttttagatgtgatatgattctgcttcttggcccaatagggcttgcacttttgctcagcagatctgtttctctcttggaagcaataaaatgttgcataagcactacccttgtatgcataggatttaccgtgctaatcgactctataatgtggcgtcgaatcctgtggccagaatttcaagttctctggtttaattcagttctgaatcggagttcagaatggggtacccattcaattcattggtactttacatcggcgcttccccgttccatgatagtggcataccctctctgcatggttggtgctcttcttgatagaaggatagtaccatacatgtttccggtcttcttatttgttgtgctctattcaaaacttccacataaggaactccgtttcataattggctcaattcccatgtttaatgtgtctgcttcactaacagctagcagactatataataaccgaaagaaagctgggtggaatttgctttttattctcatgcttggtgcctttcttgtcagtctaggatattctactgtgactttcatggcatcctacaacaattatcctggtggctatgctttaaaggctctacatgaagcagattcttcagtgaaggaaaagatggtacatattgatgccttcactgcaatgagcggggtttctcgtttctgtgaaaatgaatatccttggagaaatggaaatcag

SEQ ID NO: 28356 - DNA, 1126 bp, Zea Mays
atgccgttaggtatgttagtatgttcaaacgtggctatagtgactgtggcacttactgcacaatggccttgggcggctgacatcattgctgtttgtacctcgttgttggatacgttgccagcagtcacaacacctactgaaagggcagatgacgatgatgagatgcccatggatgtcaatattaaaattaatcttgatgttgatttggaaagacagataactgcagcaattgattcaaagctacttcaacatttggtgaatgccctcttcagaggtacattaagcacaaatgattctgatctgtctggaccatcagatgctgaagttgatgctgtaggatctatttgtgcttttcttcatgttacgttcaatacatttcctctagagcgaattatgactgtcctggcataccggactgaaattgttcctgcactatggaagttcataaaacgttgccatgcaagccgaagatggccattttttttgaagtttgcatcttcattacctgctgattctcctggttggctccttcccatgtctgtattctgtcccatatacaagcacatgttgaagatcattgataccggggagttctatgaacaggagaaacccctttcccttaaagatttgaagtccttggttctcattttaaaacagacgccaggtgaagctctgatattgggtgggtgggcattatggcaacttctgtgggttattccatcctcttctactcagaaagtgtcacccaacccttcaggccttaaaaagttgtcagtggagaatgtcaagactagagctagggttgggttatctgaacttctcacacagttgcaagactggaacagccgactaccattcactgctgcaagtgatttctattctcaagaagctacgagcgaaaattttgtgtctcaagcaatacttggtaatactcgagcatcagagatcataaagcttgctccttttttggctccatttaccagtcgagtcaaaatattcacttcccaattaacgtgttctagacaatcaacatcacattctgcattgacaagacagcggttcaaaataagaagaagtcgacttttggaagatgcttttgatcagctaagtttgctttctgaagaag

SEQ ID NO: 28357 - DNA, 1974 bp, Zea Mays
atggacgatccctcctccgcctccaacaagcacaagcgcaagcgggggcgcaagcccaaggcgtcgccgcccttccccgaccgctcctccccctctccctcggccgcccccgctccggctgggcgtcgtggccgcaagccgcgacgtcacgaggcccccgccgacgcggacgccacgcgtccgccgtccccgccccgccgcggggagccgaagccggtggcaaacggaggcgatgtggtggcagtggcggagtcaggccccgcgagctgggatgaggtggtgagggtagtgccgtgcatggacgctgtggtcaaggtgttctgcgtgcacacggagcccaacttctcgctgccgtggcagcggaagcggcagtacagctccagcagcagcggatttatcatcggcggccgccgtgtcctcaccaatgctcactccgtggagcactatacccaggttaagcttaagaagcgcggctccgacaccaagtaccttgccaccgtcctggccatcggcacagagtgcgacattgatgcagctattaattcaggaaattcaggtggcccagcttttaatgataggggaaaatgtgtcggtatagcttttcagtctcttaaacatgaagatgcggagaacataggttatgtgataccgactccagttattacacatttcattgaggactacaaaaaatctggagaatacacaggctttcctatacttggagttgaatggcagaaaatggagaatccagatctccgcaaagcaatgggaatgaaaccagatcaaaagggtgttcgtgttagaagggtggagcccactgctccagaatctggatgcctacgaccatctgatattattcttagtttcgacggtgttgacattgctaatgatggaacagttcctttcaggcatggtgagcgcattggcttcagttatctggtttctcagaaatatactggagagaaagctcttgttaaagttctgcgtgattcaaaagttcatgaatttaaaataagctatctctgttccatatcttcgatccgagtatggaaaagattatgaatatgatgcacctgtcaagttgttggtgaaacatttacatgcgatggcggaatcacctgatgaacagctagtggtggtatcacaggtgcttgtatcagatatcaatataggttatgaagaaatagtcaatactcaggtacttgctttcaatggccagcctgttaaaaatttaaagaacttggcgaccatggtggaaaattgcaaggatgaatttttgaagtttgatctggagtatgaccagctaataaaagcatttctcatggacacaaatatctggagtttgattgttgtcctcgagacgaaaactgcaaaggctgctacccaggacattctgacgacgcactgtataccttctgcaacgtcggatgaccttaaggcctagtgggaggagaagggagcatgacgcagccctgggcctgagccagggccatcaggtgggccaatagtttgggccacaatttcggctgaattgattagcgcagcgtacgatccgtgatgaagaggaaccccaatgtttatctgtttaagttaaatatcttttgaggggttgtggatgtgagagtgctggctggtgtctaaagctccgccattatagaaggtttgagggactgtcactgtcagataacaataaactggagttgttacagacagagtcatcgtgaaaacgatagtgtctagtaagaagctgagtttgttttttctttacatgatttcattacaactacaccaaattattgacggggaaaggaatcataattggtccgtgatttcattacatccttggtgtctcaagcttgttccgcatagtacctgctatttgtcaacgatacttttacttctgcttgtaaagtatttgcatcttgtttctggacaagtggtacttaaaagatatttaagcgttgtgaaccaaag

SEQ ID NO: 28358 - DNA, 3382 bp, Zea Mays
gtccagctccccatgtcgcatcgagacgaagcctttcgtttagattattctccccaaagtttcttccggcctctcctccacccccacctccgcctcgccctgctgcttcccttcttccgcctccgcctccactccacctccgcctccgcgcccttccgacctcccagtcctcctcatctcgcgattggcgaattatagggtttcgcggcggccacccggatccagctcggcttggtgagcgcctccaaagcttcggatcgcgagagggcgctgtgctcactcgctgttccgccgccgccgcgacgacgacgacgagcttctgtgcgcctgtgcctgggttcggagcccccgtcgcccctccgctggccaccggataccagctcatgatgtggaaatctcagctctaaatccgcttaggttgtgataccgtgacagtgtgggactgacataattgtcactgtgcaagatgttttggcacgtgccaggattctccgctgcatcacctgtggatactattttggacaaggaaaattttaagttggaggatcttcttgatgaggatgaaataattcaggagtgcaaagcactgaatacccgcttaatcaattttttgcgggataaggttcaagtggagcaattgctccgctacattgtagaggaggctcctgaagatgcagaaaagaaacggatatttagatttccatttatagcttgtgaaatatttacatgtgacgtggatgtcatcatgaagacattagtggaggatgaagatcttatgaatttgcttttctccttcctaaaacctgaccaccctcatgggacattgttggctggttactttgctaaggtagtaatttgtttggcgatgaggaagacacttcaactagttcattatgtgcagggccatcctgaaatagttagccagcttgttgatcttattgggattacttctatcatggagatgaaactatgtattcaagccatgcagattctatgcaatggttagatgacatacaagtccttgagatgattgttgacaagttcagcacatcagattctgctgaggttcacgcaaatgctgctgaaatcctttgtgcagtaaccagatacgcccctccagcacttgctgcaaagatttccagtccaagcttcgtagggaggttatttcaacatgcttttgaagattcaaggcctaaatcggtgctggtccactcattatcagtgtgcatatctttgttagatcctaagagacttgtatcggcttcctaccaagctttccgtagccagttgagccatggaacacttgtcactgcaagtccagagacagtaaatggcatgctggatagcctaggggatttgttgaagctgctggatgtttcatctgccgaaaatgttctgccaacaacatatggaagcttacaacctccactcgggaaacatcgcttaaagattgttgagttcatctctgttctactatcaattggtagtgaagttgccgaaacgcgactgattcaactaggagcaatccagcacgctatagatctattttttgagtacccgtttaacaacttcttgcaccaccatgtcgagaatatcattgggtcatgtctggagagtaagcaggatcacctgattggccatgtccttgatgagtgtaaacttgttacaagaattctggaagcggagaagaactctgctctgtcgtcagatttaactaagcatacattgtctacagagggaagatgtccaccaaggataggaattgttggtcatatgacacgaatagctaacaagctccttcagctggccaataccaacatcatggtccaatcatatttgcagcaaaattctgattggattgagtggcacaccagtaccctaacgaagcgtaatgcattagaaaatgtttaccagtgggcatgtggtcgaccaacatcactacaggatcgtggtagggatagtgatgatgaagacttccgagatagggactacgatgtggctgcacttgctagtaatttaagccaggcatttaaatatggtatctacagtaacgatgacattgacgaggctcaagcatcacttgagcgggatgatgaggatgtatattttgatgatgaatctgcagaggtagtaatctcctcccttcgccttggagacgaccaagaaagtggctcgctctttacaaattccaactggtttgcatttgacgaggacaaggcactgaatgatggtttggttagcccagaagcttccccatctccaaattcagaaatatccgcactaaaagaggatgatgaagtcattcttggcgaagtaatagatgacacagaaggttctgaaccaactctaccagtctccaacaaagacgcaaacgaagagtctggtcacaccgtcttggcaaatggtaccattgacaaacaggaagatgatatcaggccactgactccggatgtaaaagagagtcaacccgagtttgtggaatggaaggaggaagaagctgaacctggtgatgttgctgagaaggatactgcagttcctggtattgaggttgaaagtgagaagcagctgaattccatggacgatgttatgctttgtgatgccgagttaggagaggaaaagaagagtggtggtatgcttggatcttcagcacctgaggcagaagcagcatcgcctgtttcatctgacatcgattcaatcaagcacccggaacaagctgctgacagtgctgtatcagagtatccaatgggcgaacaaaatcctgagatatgaaatgaatttgagggcagcagagttccgctcacgtgatggcggatgatgatggacgtgcaggaagcacttggaactggttggaccattactgtacaagcagtttgaggatcatgtgtgggttttctgttctactctcttggaggaaggtggtcccggaacatgcatctgatggagcctcaaaggttccacttagtctcatggagatgcttaggttcgatgtgtaacatattcatggagacgcaaaattcagaaagttgacttccctgcccttttccttaatcagtggggttctggttgtgtcactctggtaaatagccgataattgaataggtgatatctggtctggctacatgtccattactgtagttggtgctatttgtacgaaagttttggctcaaatgcagtcagttgattcttgtcatatttagaacttgtttgaaatttgtgtaaacgaaaaaaatatagcttctatttttcccaggtgcttggtgcttaattcatctgttataaatatagattttattttcccctcttgttctttgttttccccagcagaacagaaaaagaaaacttcgttccttataccagttgctaaagcacatgctttttcgaa

SEQ ID NO: 28359 - DNA, 1115 bp, Zea Mays
gcagcacgtagaacacgcagcgggctcgcactgcaggacggagcagcagccgtcatagcaggtcatttggagaaggatggatcggcggcaatcaagcagcagcgggatgatggagggaccgttccgattcttgccggccgaagtgaaagagatggaggagcgcctgttcccggtcaccaatcgcaggctggatcacatcctcatggatgagctcgctctgaaatttagctgcttccggcgccgtgctggcatggttcccgtcaagccaaagcaggtgctcaactggttttataacaaccgtaacaagacttctgccaaggtagcagccagggaagcacatgctccatgggagttttgggccaaccatcagcaagctagagctagaggaggctcatccatcagcaagctgaagccaaagaaggcgactacgcacgcaggatcttcctcagggaataattatatcgatgtatatcacaccaagtttgaagctaagtcagctagagatggctcttggtaccttgtcgaagaattcttgactgaaaagttttgtgaatcaggcgatttgcaagtattggttcgctttcctggatttggagttgaggaagctgaatggatcgatgttcgtacatgtactttgcggcaacgctcagtgccatacaaggccacagaatgtgcagatgttcatatttgggaccctgttctttgttacaaggtaagtgaacagagtggtctctattttgatgctgaagtgcatgctattgaaaggaaaacacataattcaggagaagaatgtgattgcaaaatccttgttctttatgtgcatgataattctgaggacatcgtttccttgaagaagttgcgccgtcgatacgtagaatatgactacaaacctcaaacttcgtatgagctgccaaaaggaacgaaaatagcttaagtacaccatcaatttattgaagtgttcaatataatacctttctagaagattttgtatgttctgtgttacagtatatatatgttggtggctcatgagtcatgagcattgctacataatgcaaactaatattaattgtgataatacacaatttggagatgataagttggtctttgaatttaag

SEQ ID NO: 28360 - DNA, 1306 bp, Zea Mays
acacgaaaaagacggcccgttggcccggaattattaccgtctgtttgtcctcgtctccctccgctgtccgattgtgcgctgtcgcagcctctgccctctcccagcccgctcctccatctccggtgagacgcgaattgaatcgcatcgaatccatgggcagctcctcgaataccaacacgagcggcggggccagcgacaaggaggagaagaagaaggaggacaagatcaaaggcaaggactcgtcggggccatccttcaaggagaacgaaagggtcctcgcctaccacggccccctcctctacgaggccaaggttcaaaggatcgaaaaccatgaagatgaatggcgctactttgtccattatctcggttggaataagaactgggatgaatgggttgcaaatgaccgcttgttggaattgacggaggaaaacgtgcgcaaacaacaagagcttgataagaatcaggtagttgacaaaacaatgaagtctggacggtcaacacagcataaaccaaaagtctccaatgcggatgcaaaagctgataaagatgacactaagagtctcatttcagtgaaggggaagaaacgtaaaagtcagcttgggactgagattcaggacaaggaaaaaagatcatcacatagtctactagtgttgcagtttcctttgccactgaagaagcaacttgtggatgattgggagtttgttacgcagatgggtaagcttgtgaagctaccacgatcacctactgttgatgatattctaaagaagtacttggaacaccgggcaaagaaggatggcaagataaatgactcctatgctgagattctgaaaggattacgctgctactttgataaagcattgcctgcaatgcttttatataagaaagagcgagatcagtatgctgaagaagttaaaggtgatgtctcaccatcaactgtatatggagctgagcatctattgcgcctttttgtaaaattgccagagctacttgcttctgtcaatatggaggaagatgcgttgaacaagctacagctgaaactgctggacgttctcaagtttcttcagaagaatcagatcaccttctttacctctgcgtacgatggttcttgtaaagatgctgcagattcctgaaagacggtacttgaactgcccggagcatgttgtattttcttaagatgctggaactaagacggcttagttgaattttcactatcaagtgagtctcggtcttgccccaaaaagaatgttttgtacctcctctgtcccaatttatacgacaatttataattcgtatgacttttttggac

SEQ ID NO: 28361 - DNA, 1627 bp, Zea Mays
atgccgccgccctccctcgtctccatcctccccgccgcgtccatctcgccacgaagacgccaagcaaagcaccccaagacccccaccgcgagccatcccttcttctcccgaagacttgtgtcccaaccgccgcgccacgcctcgatctccccctccgctgccggcgggagcgggagcgacgagctccaccttctcgagaagccgttacctgccgtcgcagaggataacgaggccgaggaggagctcgagtctgctccggtgtcatcaacagaagaagcgctcgcgccttttctcaagttcttccaggtgaagagcaccgaccccgacgtgggcgcagacaccgcggatggcgaggtgccggaggaggcgtcaaggagagatgtattgtccgccgctggtgagcgtggggttagttactacgaccccaagcccggggacttcgtcgccggcgtcgtggtccggagtgacgggaggacgctcgacgtcgacatcggttccagcggcgaaccagcgctgatgctggccaaggagtcggcgccggtgcccgcggaggagttcgggtacctagcgtgcgacgtcgcgtccaagtgtgcggcggagtttgcagcggaagggcgggtcggcgtcgtggtcaggcaattcaggggaggaggagagggggacggggaggcgatcatcgggaggaatgggaaggagaaagttgcgccggtgctgcgcgccggtacgatcgtgttcgctgaggttctcggccgaacacttggcgggcggccgctgctgtcagcgcgcagactgttccggcgcgtcgcgtggcacagagcgagataaaacagctaaatgtacccatcaagatcaaaatttatgagtggaatgctagtggcttgctatctagaattgagggccttcgggcattccttcccaaacctgagatgatgactagaccaagaaatttcactgacctaaagaacaaagttgatcaagaaatgcatgtctgcattacgaggattgatgaagagaccaacgaattgataattagtgaaaaagaggcatgggcggtgacatgccttagagaagggactctcttgcaaggcacagtacgcaagttgtttccatacggtgcacaaattaggattggcgagactaacagaggtggtttactacatatctcgaacatgacacatggcaagctgagatctgtggctgatgtgctgaaagtcggcgagacggtgaaagctcttgtcataaaatcaactccagacagaattgctctgagcacaaaggacctcgagagcgaacctggattgcttatcactaacaaagagaaggtgttttctgaggctgaagagatggcgcgaagataccgggagcaaattgcagagccacagccacctggatccattgccgcggaagactcctgtgacgatgctgtccccttcaacgacgaatcccggtcctatgctaactggaagtggctgaaatttagcaagtccgacgacgtggcaaaccccaaatctggcgtcgaatcgtaatcgtggtgcaggaactctgtagaaattttgatcaattcagatattcagtttccatgcttacttaattgtgcggcttggcgccttggccgcctgcacccggg

SEQ ID NO: 28362 - DNA, 4318 bp, Zea Mays
cccgcagtccaaaaaaaacccagcaaaccgacacgtccaatccaaatagaagaaaaaaaaactcgggcaattccgccgggcgccggccatccgatcgatcccgtcccagctgtccttcctccccgaagtatccatcatccatgaacatggagcgcctaccgccgccggcaggatcgcgccacggtcaccaccgctacacgcggatgccgcggcaggcggacctcgagggcgaagcggcgcctgctgaccaggagcgggaacccgagcggcggccggaggtcctggcggcctcagcgtcggcatcgctccgagtgcccgacgccgcgcgggtgttcgacgagctgcccagggcgtccatcgtagccgtatcgcgccccgacgccggggacatcacgcccatgctgctctcctataccatcgaggttcattacaagcagtttagatggcgtctatataagaaagcttcacaggttctctatcttcactttgcattgaagaggcgtgaatttcttgaagaattccatgaaaagcaggagcaggtcaaagaatggctccaaaatttgggaattggggagcatatgccagtagtacatgatgaggatgaagcggatgatgtaaatgttccaccacagtctgatgataactcaattagaaatagaaacgttccttcaagtgctgttttacctgtcattcgaccggctcttggacgtcaaaactctatttctgatcgagcaaaagttgcaatgcaagaatatctaaaccatttcttagggaacttggatatcgtcaattcacgggaggtttgcaaatttttggaggtgtcatgtttgtcatttttacctgagtatggtcccaagttaaaagaagacaatgtttcagttggacatttaccaaagattcaaaaggaccggaaaaaacgatgctgttcatgtggattgtttaactgttgcaagagcaattggcaaaagacctgggctgtcctgaagccaggattcttggctttgcttgaagacccttttgatccaaagcttttagacgtcattatttttgatgcattgccacatatggatataactggagaaggccaagtttctttagcaaaagagattaaagaacgtaatccactgcattttggattccaggtttcttctggtggccggacaataaagctacgcgcaacaagctcttctagggttaaggactgggttactgcaataaatgctgctcgacaacctccagaaggctggtgctatcctcatcgttttggctcatttgcaccaccgaggggtttgttggaagatgggagtatggtacaatggtttgtagatgggcaagctgcattcaaagctattgcatcctccattgaggaagccaaatcggagatatttattactggctggtggctctgcccagagttgtatcttcgacgcccattccaacatcatggatcatctagacttgatgctctactggaagcaagagctaagcagggtgtacagatttacattctcttgtacaaggaagttgctcttgctttgaaaattaacagcttatacagtaaacagaggctacttaacattcatgaaaatgttaaagttctgcgttaccctgatcacttctcaagtggtgtatacttgtggtcacaccatgagaagattgtgattgttgataatcaagtatgttatattggaggtcttgatctgtgctttggtcgctacgatagtcctgagcacaaagtcgctgattctcctccagagatgtggccaggaaaggactactacaatcccagggaatctgaacccaattcctgggaggacaccatgaaagatgagctggaccgtgataaatatccccgcatgccttggcatgatgttcagtgtgctctctatggcccaccttgccgtgatgtagcgaggcattttgttcagcgctggaattatgcaaagaggaacaaagctctaaatgagcaagcaattcccttactgatgcctcattaccacatggtaattccacactacaagggtagaagcaaagaaacaaatgatgaggctgagggtaaacaatacaatgataaggatgttgatattggaaagccagtcttgacatcacgcacatcatgtcaggatgttccattgctcttacctcaagagcttgaacctcgtgaattatccagttcagatttaagggtgaatgatttagatattaaccattcagatcgtttaaacaagaagaactttaatcagcctttgctcaaccgaaaggcaaaactggattcttctcatcaggatttacctatgagaagttttgtagacaatctcagttcccttgagccatcatctgttagacgttttgattcgtcaaaagatgataggaatcacattgacaaaaaatggtgggaaatgcaggagcgaggcaaccaagttgcttcattacttgatattggacaagttggtccaagggtaacatgtcgttgtcaggttgttaggagtgtcggtcaatggtcagctgggaccactcaaattgaaggaagcatccacaatgcctacttttctctgattgagaaggcagaacacttcgtatacattgagaatcaatttttcatatcgggtctgtcaggagatgatacgattaaaaaccgcgtactggaagcattgtatcggcgcatacttagagctgaaagagagaaaaagcgctttaaggccatcatcatcatacctcttttacctggttttcagggaggcattgatgatggtggagcagcatcagtcagggcaatcatgcattggcaatatcggactatctgcagaggttctaattcgattcttcagaatctatttgatgttattggacctaaagcacatgattacatctccttttatgggcttagagcacatggtaaactccatgatgggggtcccttggttactagtcagatttatgtacatagcaagttaatgatagttgatgaccgcatcacattgattggctcagctaatattaatgatagaagcttgcttggatcaagagactccgagattgctgtggtcatcgaagataaagaggttgttaattcaaaaatggatggaagaccttgggaagctgggaagtcctctttaagcctacgcctctcgctgtgggtggaacaccttggccttcatccaggagaggttagccatatcatggatcctatagatgattcaacattcaaaaatatctggatggccactgccaagacaaataccatgatataccaagatgtcttcgggtgtgtacccaacgatctcattcactcaagggttcaatttcggcaaagctttgctcacttgagggacaaaattggccacactacaattgatttgggtgttgcccaagagaagctagaagcttaccaagagggtgatctcaaaagtatcaaccctatggacagactacagttagtcaggggccaccttgtttcgtttccgttggatttcatgtgccaagaggacttgagaccatatttcagtgaaagtgagtactacacatcaccacaggttttccattagcctctctgtctgcctcgtaaagttactcaaccggctgtacatgttgcaaagatcaccttgtagatgctctacacatgttgtcaaataggaaacaaaaaaaaattaatatattatcataccattagagtattagaattgtttcctagaaagaaaatagtatatcagtatagttcattcgttccaacaacttttagtttcgggaaagaaacaatcaaattcattgtttataagtgcaaataataggagtttccttagttcaacacattttctttggaatgaatatacacctcccatagcagttcattttcttcctatcctattgtgtacctgctacactatccagaaatataagggctagtttggaaacgtaaatcctttataggattcttggggattaatttcccagtcaatcccctagaaccccggacgggatttaagttttcaaattggccggcgatgtctatgtggtcacataacatgtatattcttgtattagtttgtcggtcaaactcgatttttgacagtcgaaacacgccttatatttctggatgatagggagtagtgttgattaaggatatttgacaattgacactatttttgcgagcacttgaaacttgtgtgtctacctgaaatggcgggacaataaatatacatgttctgtgttgaatcttgtctgctatgacgaatataaagaattgctgtcactactttgtgctttggtagaaaggcacattgggaacttctacatgtaaatctttgagaccttgaagcag

SEQ ID NO: 28363 - DNA, 2155 bp, Zea Mays
atttcgtgaattcgttgctgtgtaaattgctaatcccacgttaagtgtactcatgattcgttgcctgaggtccaggcgaaagacctggcgcttagttcttagtgcaaatgttgagtggataaggtgattttaattaagaaaaggtgtatcctttggcaacaagattggcttcagactcgttgattttggaccaaactgtggctaagggaatcctttgccaaggcccatccatgtgctagcgctagcgatctgtactgaacaagggaggaccaagagcaaaagtatacggctaaagaagctagctttgttctttgcttgcgctggtaacttagcatttctcaaaagggtggaatcattggctcaagtgcggaatcatttgattcctttgattataaagtcatatgttgttgttttcccttctaatctgacagatctgagatgaggcatgaggtgctccatgtgagagttttccctagacctcttacctggctcttgcttgtgactttatttaattgggaatgtagatcacatctaacatgctccattgatatgattatttaatgcctttggttgatccacctgcttctttctttttctgccttcccgaccagttttgtttaatgcctttggttcccataaagtctatatatgacctctctttccttgcttctattctccattcttgaatgaagttccataagcttctccaagaagagggaaaggtcctgtaggggcaaagcgtcattttgctggtaacagggtacttgctgtcttatcctttcccttgccagatttctgagaaaatggcgagaagtgcgggaactaggaggcgtgtggctcgccagctcaagtccacacatcccattccttcataccgatggaagtcaaagcccatgaaaaagccgatgaaaaaatccaaccgaaagcaagtgttgccaaccttgcaaaagatggactgggaagatgccaattgctctgtgtgcatggaatacccacataatgctgtgctcatcctttgctcatcccatgataagggttgtcgtccttatatgtgtggaactagctaccgccactctaattgcttggatcagttcaagaaagcttacaccaagggggcattgcttgaggaagttcctgcaaatagtgttggctctaatctggattcggcgccattggctgcagaaaaaactgactccattgaccttgcatgtccattgtgtcgtggcaaggtgaaagggtggacggtggtggaaccagctcgaagctacctcaatggaaaacgaagaacatgcatgcaggatggttgctcatttgtggggacctacaaggagctccgcaagcatgtcaagttggaacaccctcttgcaaagccaagggaagttgatcctgtccttgagcaaaaatggagattgctcgagattgaaagagagcggcaagatgcgctcagcacgatcacggcaacaatgggcagagccgttgtttttggtgattatgtgctagacttggaggatggaatggactccgaggatgttgacagtgatgctgataatgatggccgtgggacagaaaacactcgtaggatgctactatttattatgcgccaagttgctcaacatcaccaaaaccaaaggctccagaatgcgactggtgcatctgacaatgctgaggacaattatgtggtgagcagtggtgccaatggaaccacaccatactcttaccccttggagggggaggacgagaatggtatggttgtggccggaggcagaagcactgatgtgctgagaccagagaggaggcgccgtcgtcgccgcaggaaccgtgggagattgtttttaggtgctaattgagaggacaggtggccaggtagggtttagccgccagaggagtacatacagaaatgcttccctggtgcctggcattcatcaattcctgtctcaatttacttgatcatgatcatgtaccaagtagttatcttaacatcagctcattgtcataaatttatggtatctcacattcttcgttgaaaaaggaaaacaccgcatccatctcttgcggtttgtgtagcatctatttctgtctattgcttttgttaaagcatttgtttggagatcgtattagattttttaagtgaaacatatctcgttcgatcaggttt

SEQ ID NO: 28364 - DNA, 456 bp, Zea Mays
aaaggagccaacactttagcaagatcttgaggcaagtatccaagcatctcctcacattcagaccctgcatacaacacctacctgttctagaatgatttcagaacatttttcagtaggtactttttacagttatgttatgtactagaatgatttcggagaccatgtagatatccaaaatgaatctttttgttgtgaccgaagggagtaactttttaggttttgtggttactttttcaaaaattaactctttcgttcactataactacaaaatagtaagccaatgtactgcaagaacaatgttcttcttgaatactcaaaagaacaatgtccatcatggattctgctacgtgaccatgtggtccagcttgtttggtacacgaggccatatctttgtgttcgctttatgtatatgttccctttttattcctcagtttattcacttttatcttgtagttg

SEQ ID NO: 28365 - DNA, 1784 bp, Zea Mays
tggtaggataaatgacaagacaagtaaatttgtctcaaatttagtgattgctcctcattgcaattagttcagtcatatagatctaactcggtatgggtatcctcttgttcccagtacgtaacacttcagctatggtctgttttgacagatgcaccagcacatactcacattttactagagcgcaggcgatggtaaaactactgcagaaattgcaccggcggcaacagtttgttatttgctccgacggcacccataagcggagcagcttattagagttaggtttgggatccgaccctaccgccacttcatttcatcattgcagttctccgacaggcgcttcgttgagccacaagaaatggatgaagtcatacagcttagcactcacgcttacctgttcaggcgtcgggttcagccgcctcatatggtctggcctcattcggtccagatggtgaatacaccgagtcctaatctcatggatggatggaagctcctcccgtgaattcgcttcaccagttgacaaaacaacacatgttgacatcaatggctcccagcttaaataacttaagcaattgtcttatccgtctaacagttcaaactaaaccaggatacgtgtttaactgattcaagtgataattcctacggcaaaaaccctattctatatttggctttggtgattagcatcatacgtgcagtaacaataggtcattttaggtaaatgccaatactagcagcacatcatagtctactgcaatacgcatcagtgtattttgtaaatatgcttcatgaaagacgactagcacggtcaatggagcatgcatgcagcacaagggaaaaataaggagtgatgcagaaattactcaggtgggaggttccatacatgaatttccaggccagtagcacttcaataattcctcaacatgctgtggaacaacgtacgctctctttgattcattgaaagggtgacgacataggagcctttcaccaatctataaacgaatggtaaatcataaaacccaccatctgtttcagatttcgtaaaatagtaactatggcatacaaaatcacaactgaaaaaaataacaagcaaatgttttttttacgcaggctcagtggctcactgactgtatttataagcattgacatgaatattgtttacctttggacctggctcatcttctccggtcattatatcaaccaacggatacccttctttgccatacaatctgtagcattttttcttacatggtatcgatacctggagcagacaactaagttctaggtctgtttggatgcatagaagacagctaaagatgtttctgttatgaagtaataatggcttacataccttcatgacatcttcagaaagtttaatacgaggctgtttgttaatctcaactaatttgaatacacaaccaagtgcagcttgtgcatagcatgtaactaggtaggtgccaataccaaatgcatctacctcatggccctacacaaaaaatgccaataatcatgtataaattgcagtggcgcggtaaatgtaattaatgtgagcatacatgtatttatcacggtcttgtacatttgaacctgcttgcacagtcatgtattatgatgaattcatcataacaaagaattaaagcagaggtttccactagccagctatctgctaccaggtattaagcacaaaaaaatcatttcttcctgttagtacaaggaccatgctggtccagtctgtattagatacatgctagtcagtagccataactactaagcaagtagttcggttaatg

SEQ ID NO: 28366 - DNA, 2091 bp, Zea Mays
ctcagtaaagtgatgtttgatgcaggttcccctcgtcctgctccacataaaagtaacagtacttctgcaccaagccatggatatcctggtagtactgcacctgcacctgtacgtttgcctccgccaaaaggaaagggagaaggaaattttgctcatgctccaaaccatcccaatcaataccattcaacgtcatattctccaggccttcctccgtcaccaccggcagcaagcatgaacaatggtcttagcaatgtaaatggtccaagtttgcatccgcttgctgctgatgtgggaaattatagagaaagaaaaggcaggcacgttattataataattattctatcaagtgtgtgtgcttttattttatgtgctggagctgcactagtgctttatttcaagcttcgaaaccacatccatttaactgaagcgtcacttgtgccaacaaaacctacaggtcctgtttctgcaatggttgggaacaggctagaaagcagacctatttcggcatcaccatccttcagctcaagtttggtggcatataaaggatctgccaaaacatttaacctggttgagatggagagagctacactaggatttgatgagtccagaattattggtgagggtggttttgggcgtgtctatgaaggtattcttgaggatggagaacgggttgctatcaaggttttaaagcgggacgatcaacaaggtacccgggagtttttggctgaggtcgagatgcttagccgattgcatcataggaacttggttaagctgataggtatatgcacagaggggcatagccgatgtttggtttatgagcttgttccgaatggcagtgtggaatctcacttgcatgataagggagctgctcagtttgattggaacgctaggctcaaaattgcacttggtgcagcacgcgcacttgcatatttgcatgaggattcaagtccacgtgtcatacaccgtgatttcaagtccagtaacatcttattggaacatgacttcaccccaaaggtgtcagactttggcttagcaaggacagctttgggtgagggaaacgagcatatttcaactcgtgtcatgggaacttttgggtatcttgctcctgaatatgcaatgactggccatcttctagtaaagagtgatgtttacagctacggtgttgttcttcttgagcttcttacagggaggaaaccggtagatatgttaagacctcctggacaggaaaacttagtggcatgggctggttctcttctgacaagcagggatggtctggaatcaatcatagatcattcacttgggcgcagcattccatttgacagcatcgcaaaagtagcagccattgcttctatgtgtgttcagcctgaggtggaccagcgcccattcatgggtgaagtagttcaagctctaaagctggtatgcaatgaaggcggcgagttcaatgagtcaacctttagccaagatttgcatatccaagatgtcgaggttatgagtagagcaagtacggatgtagacgttgacccaacgctatctgctgagctgttcacttcatcagcgcgttatgatgctatagatgcccctggttctttccgaagatactcaagttcaggtcctctaagagtagggagaactggactgaacaaagagaggggcctgtcaacaggcagctcaagtgaacacgttgggctacagaggtttaggattgatggagaatagtcagcctgcaagcagctcatgatgatgtgcgcatggaagaaatacacattggattattttcttccaagccagatttcatactcatcgtgaatagtatgtggaaaattgagaaaggcgtaaaaatcagtgtgccactgttcggtgctcccgtcgccttctttggaaagctcaaacaagacttcacacgaatttttgtacagttctagagatgatagatgcttttaggaaagaaggggtgtacacgagtttttcagctgtaattccccacgaaccgtattacgtttcgccgtagcatcagtgcaaatcaattaaagggcgtgcacgcagtcaccattttgagttcaatgaaaaaaaattcatcctgattgaccgcaa

SEQ ID NO: 28367 - DNA, 1637 bp, Zea Mays
acgccccaccccgctcggcctccagtccagctccaccgctttcacccgctccgctccgtttccgtcgctcccgtcccaaggagccgcgccacgcgagagggggccacggacggtggcagttttctgtttcggtgggcggggacgtcgtcgaccgaccgaccggagcggaaggccggagatgatggaggagggggcgcccgatctgcgagagctcgtgcgcctgccggatgttctcgtggtatgctcatctactggatggacagatgaaaagcacatgctttatcttcgattattggaagaaacatttgtgcaccaattacatggaagtggttgcatttttaagggactgtttaattgctctccaagatattgtaggcaaatgaaatcatctaagcaaattgttaaatacactacgcctggtcagcaggggtgtgccatagttgagggtggcaaagtcaagtcctgcataaaggctgagcatgttgagtcaccttcctgttgtggaaatcagcaagatgaaaaagttcgttccctggaagataatgcatcaaccactaagcccatggaaaaagccacttcccatgcaagggcagcaagcccaggacaagcttccacgtgctatgttggcaaacacagacattctccttccagaagtgcaggtagggggtatccattggatgtccttttgcaaatgctgttgcatatcgatctgtagttactccaaaaaggaagaaaaactatttccaaattttgattgtcttctattagattattgcaaaacaaagcaacaaatgatttccccaaatctgctttttattaaggaaaaaaaacattttccctggctgtctgccttgttttgtttaaagtataagctgttaatattgtttgtgggctggaaaaaaggcatcatctttccagtgtcttgttttcttatctttctgagatctgaccagtagaagtacaccttgggaattatgccatgtgtttcttcatatccagattatgaacaccagatatttatagaggggtcggatcagaactttgatgaggaaacccaagggactggagaatcaaaacatgaatacaacccgaagcgactgaaatctgctgatggcacaagggatcatcaggttgtgaatgcagaagctcatcaggtgggctgccttgatgtgagtgacaaaaatagcgagaacttcagtgcatcgtcaaaagtgcttgctgcatcacttgatgttgaagctgggtctccctccggcgactgcaaggatcatggaccaaaaggataatgcaatgtccaccgagtgttttctggagttgactaacacacccacctggcgcgccgcaactgaatcagagataggaagtcaatcagtgcaagtttgtaagataagctagcttgcccgttattctggtttggaagtcaaaatagttcgttcaacttagcctaggcagttgacggttttgttgtgtttctgagggactctgatacgaaaatcaaattccctttgttctgtgtttggcgctgcaacctgtaaatggagtgctttttttttgcgtaccgtgatatctgcgttttggaatactataatatcagaatttggagcgtgtttcgccatgctcgcctcacttgattgggc

SEQ ID NO: 28368 - DNA, 1026 bp, Zea Mays
attcgtctgcctcatctcctctctacgattcgttcagatgctgcagcagaaggggatacccgagcgccccatgtactatccggagttcccactgcaggacccagagccagaagttgttcttgtagatgaagatagggacccggtggaaagagtccatgaagcactgcggtgccttcctcagtatgatccgtcagtgcgttggacaaccgaggagaaccccccttttctttattggaagatccgtgactttgcacacgcttacagctcggggatcacaactccttcagttgttgccgagtatgttattgcaggcattgaagagtggaacaacaagaagcccccaatgccaatgttgatctatttcaatgcagaagatctcaagaagcaagctgaggcttccacaaagagatttcagcgaggaaatccgatatccattttagatgggatcttcgttgccattaaggatgacatcgactgcttcccatatccaacaaagggtgctacaacattctttgaccaaatccatactgtggagagagatgcagtctgtgtggctcggttgcggaaatgtggagttatctttattgggaaagcaaacatgcatgagctaggccttggagtaactggaaacaatccaaattatgggacagcaagaaatccacattcagttgatagatatactggtggttcttcatctggtcctgctgcattagtatcatcaggattatgctcgatagcaattggaacagatggtggaggttcagttagaattccatctgcactttgtggtattgttggtttcaagacaacatatggtaggacagatatgactggggtactatgtgactctgggactgttgaagttgcttctcctcttacatcatcagttgacgatgctatactagtgtattctgcaatagcaggttcaagacctatggataagcttacacttagaccagaagttgattctactattttttgcattttaaatatcaagaatgctggtatgcatttcatgggtgtgcc

SEQ ID NO: 28369 - DNA, 1372 bp, Zea Mays
aacatacagtaggtcaggtgtaggccgtgcgatcctcaatctggtgtcccacggccgtccgatctcacattcactaccacctgtcccgtcctcccgtcccagtcaacaccaccgtcagttcagctgagcctgagcatggcgtcgccggcggccgtgctcgtcagcaatggcggtatctccccacacgctccaccttccgccgccgccttcctcgtctccactccgggcgcctacaccaccgcccccggaaccctcctctggtggacacgtcacctccgccgcctcgccgaatccgccacgctcctcgcccgttcccgccccaacctgctcggcctccccctcccccgatcgcgcgccctcgacctcgatttactatccatccattctctcgtgaacccctccgtgcgggtcgccatccgcgagatgcgcacaaggctgcccatgaccaaggacgaggatttggcgctcacggccctggtcaggggagccgatcccatttctggcggtggcggggctggcctcgacgtcttcgtccacgtggggacgtattccccgccgatctttggagaatcgggggccaggcttgccgcggccggcaggggaagggacgccgctgccgccaagtacgcgtcctgggccaggatccggaagagtttggaaaagatgaggcctcctggggtcactgagctcttgctgactaatgacggggatcacattcttgaaggcgctgttacaaacttctttgttgtctgccaacaggaggaatgcgagagcaacggaaaattctctaatcaaacaatggctactaagtttgaagtgcaaacagcaccactgagtgacggagttctccctgggattatgcgtcagatagtgatcgaggtgtgccatgatattggaatcccagtacgagaggtctctccatcgtggtccatgaatgaattctggaaggaagcctttgttacaagtagcttaaggtttatccagcatgtagagtcagttcaagtgcctttattttgggaggacatacaatctaaaacctggagtgatgtaccttgggcggtgaagaagtttcagggtgttggatgcattaccacacagattcagagggaattactgaagagagcaagaagtgataagtacggcgttaacggtctcctttgagttatgatcattgttgttgattcatttgaagggacttcttttccaggcacttaattatttcatttctgctgggacgacactgttaagactgggtttcttgtgtgtataattcagacattttttgtctgctcagtgctgtgtcggccttctacaagctgcaggtgttcgtgaatatgaatggctgaatgaatttgggttccttaaattaaat

SEQ ID NO: 28370 - DNA, 2138 bp, Zea Mays
aaaatatcagtgacaacctttacgaaacgaaggtagtagtttttgtacattttttagtaagacaaagtttaactttgatttttaaaagtcaaacattatttgaatttaaaacgtgtgtggaattgaaaaatcgatggctagctaatcaaattggtcaataaactagtcaacgtgatcaaactaaaaaaatgttgcactttattacttgagaaattttccagtagaaattttccagttgaaattttaaaagaataaatctaaataattaatgaagtgtttcttggcgcgcttaaacttctcgaaaatattgtgctttcggctttcgcgctctgtttatccgcgccaaaaaattcccccccccctaaagtgttggaaccaccctcccatgtttctcgatcacacctcctagaaatctcctccggttcttccacctccctgtagttctcgctctcctgccaccattctcttcgtgctcctgctccatatgccctcctttcagtctgctgcttgatgatccatcgcccagctgctggttgatccgtcgcccagctggtaacagatttcttcgtgggtgcagtagtaccataactgacccaccctctaatctttactccgacctacaaggtactgctgtagcctgactcaatcaatgtgattttactgaagcattcaccgattatacaatcatttgtagccacaaatgcacaacgttttttaatctgctgtcaacgattgcaacttttttatttcaatctggtaattcttaaatcaatctgctgtcaccgcatgcaatacttttaattttgatccggtaattcttagattaatctgctgtcactgaatgcaactatttgattttcatctggttattcttagattaatctgctatcaccgattgcaaatattttgattttgatctggaaattcatggattaatctgctgtcaccgaatgcaacacttttaattttgatctggtaattcttagattaatctctgtcactgaatgcaactatttgatgataattcttagattaatctgttgtcaccaattgcaactttttttaatatttgcgtcagtactggagcattgaattctattgttctgagttctgtttaccaaattgtctgtctgcagttgcaccttgtgttacatgattttaattaaactgcataagacaaatgaaattgttattcttatgctggctgtgtaatcttgatacatcctatttcaataatttttagcatctcctgtaatctgaaatgttaatcttgtagggaaagaagtaatgccaatgaaacacagaagactacaaagtctgaacttagaagctgagacacaggaaaacgtggaacaacatgaagatgtccaagatccacaaccagagctcaccattgggtttcctgagggagaagcgccaacaaggaataagtcattcaaaataatatggcaaaatggagttgttcgggaggtttttagaaatttccgaacagctgaattgtgggatctgaaaggaggaagagtactagttgaaactgacaagaatggcattcccaatcagtggtctgaatccattctctcgtcataccttggtgagcttgcacagaattcatcatttgcaccattacacattccgagatgggacaacaaattattcaaaggtccaaaggaacgcatcatcaaagatgttgagaaaaaatttatctatagtagtgagacaaaatggtctactcgagattggattcttaagacagtgaataaaaggtggagagactacaagtcagacttgaagaaacaatacttcaatccagataagaggtcttttgaccagattgaaaaggatgtccctgatggtgtgaatgaaaatcaatggagttttctgttaggcatatggtgcagtgaagcacatcagaaattatgccggacaaatgcggaatctggaaagaagcagaggcatccacacactagcggtaggaaaagccatgctagacttaagaaggagatggaagacaagaagaaaggaagcatcactaaaattgatctttgggacgagtctcataagaagaggaatgggaactatgtcaatcaaaatgtgcaaacacttatgggtaaggccttcgatgaattagagaacaggag

SEQ ID NO: 28371 - DNA, 737 bp, Zea Mays
tgtgtgtgctcttctaactatttaccttcactttactggcaacttcagtttattgtgttcatagacagtccggggttcatctccagcctgttcatgtgtactttggagttcctatgatcggtaagaactggggaaaaaatgttcatatccagtgttttcaagaaggaagaagaaagagtaccaaacttgaggccggctattccattgagctgcccagcagcgctgaagcttctgatcgagcaatgttggtcctggcaaccagaaaggaggcctgagttccagcaaatagtttcagtccttgaaaacctcaagacagttcttgaaagagatggaacactcgacaagatcccaggctcgatctgccaggccctggaacccaatgaccagaacaagaagaaggctggcaactggatccagaggctgtcatacgctcaacctgctttctccggacctccacccccaaagttactctagttacacgtcttcttgttcttagcagcttggtatctggtactccagatagcaagtgtgtaaattgaatatttctttgtttcgctgggagaccagagatttcttcatggtatatactcggatacagtactgataatcgcctagaggggggtgaatagggcgaaactgaaatttacaaatataaacacaactacaagccgggttagcgttagaaatataaacgagtccgcgagagagggcgcaaaacaaatctcaagcaaatgaag

SEQ ID NO: 28372 - DNA, 2423 bp, Zea Mays
ccgaaccagcagaggcgcagacggacaggcacttcactggcttctgctaccgtgccgctcctccgtctcccgctacaaaatatttcacgggagaccctgctctctccgattccggcgtccactcgtcgctcacggaaaccgctcggagcccgacgccgcgagatcaccggccagcctcgcgctcgacacgggagaggcgaggcggtcgagtggcccaccctacgccgctctgacagtgagcaatggcggcagcgtcgaggaaagaggaggagaggaacgagcgagtcgtgcgggggctcctcaagctgccacccaaccgcagatgcgtcaactgcgacggactcgggccgcagtacgtgtgcaccagcttctggaccttcatctgcgtctcctgcagcggcatccaccgagagttcacgcaccgtgtgaaatccgtctccatgtcaacgttcagcacgcaagaggtcgaggctctccagaagggtgggaaccagcgtgccaaggaatcattcctgaaggatttcgatacccagaaaatgaggctacctgatagcagcaactccggcagtcttagggacttcataaaagctgtctatgtggagcgaaggtatgctggcggtagattttctgaaaggcctccaagagacaaacagaaccaaaaggcccatgaagaagagcatagaaggccaaattcctaccattcattttcacagagcccaccttatgattatcagtatgaagaggggcgcaatggcaagcgatctgcatttctaagtaggaagcctggttcagataaggggcatcaggggaagatttctggattttgttacagttcacatagcttgcatcagagaatgtctcgggatggatttactgcccccctgtggtacaagatcaatcaaatgtacatagttcttgtggactcactagttcacagagagctgtatcggcaggagacctagattctatctctcttaaatcaggcaaatcaaacttatctgatttgatttttgagaatgataatgttcaccgaactgaaaaatcctcaaattccgctgctccaagtttcatagccttttctgatgctattagtgctccaaatcaagctagctttgattccaaagcttctcaggaacaccatgtcactaccatagatcaatctgtagatctattttcaaatacgcttactgaaactccatctgctgataaggtgataccaacagctcattcaatggacaatgctgggtgggccacatttgatacacctccagaacaaaagcagcctgcactcactgggctttcttatgtttctgctacaagcatcgataaacaagctcttaatcatgatttgttttcatctgaatcaaatgatgagctaacatggttccggagctctaaggatgatgcttcggttaccaatcataatcagtctactgctacatctcttgatacatgcagttctgagccttggagtattttcgatgcctccagtggtagtacccagtacactgtcaagggagatctatcattaatgacttctagattgcaagagcctaaaggaacaatgaacgaaaatagctctcagctttggcattcatttgatgatgctaatgggatcgtttgtgctcagccacgaattgatgaccacagcaatacagcaagcatttctctatcaaccagcaatccatttgtgtgctctatagttttaaaggaatcttatgacgatgattcccacaaagtattgatgggtgaattgacacctaatacattgattgctgcttcctcagagccatctctgggaggaccctctactgagcagatgccattaaatccatttgaccttccatttgacactcagtcggggactcctgatctgttcatggacgtaagttcattgcaagaggccttgcctagcccagatctgccaaccttccttgatggtttacctgaaagatggttctccagcagctcttgtgcttatgttccatcagcgtcagcgtcacatggtggactgccgtgccttgtcgagcggggccccaactgttccttgctgaatataccagttggcactttatcagctggaaatccttttgtatagagggcatcacagtgaaaataatctgcgtcttggacttggcatgttcctttggtttggtgatcttagagctaggaatcttttctgtgcgaaccgggacaccttgcaaggttaccagaggaggtggggaatatgatagcgtccccaggacccactggaggaatgtttagtaattgtgagtttctgatggaggaatgtgtgtattctttctcggttcatgtactctaggacatgattattcagcactaccgggcatcctcccggtacatttctttctgatagttacaacgatacatggcttcatccagttattcaagttgttcaggta

SEQ ID NO: 28373 - DNA, 2660 bp, Zea Mays
attagtacttggacctaggcggcgtaacttggtccaacgcccacagcccatgggctagctaacccttcgcgtgcgacgtcggcttgccagccgcaggccctcgggctctctttacccatctccagtcctccaaccccaatcctctcctttccatccacgccgctgcgcttccgatgcaaccctaaccacctcatcgccggcacgatcttccccgcccccactccccggctattgcctctgattggcggctctccgggattcacgttggtccggggtacggctcctgcgattttcacgcaatggagcaagatcagagcgtggttgtcggcagcgcggactctggtgctgcggcttttggttttgcgactggcaacccccctagcttggctgtgaccggcggaagcgccgtggcccccgacggtggagctcaggcagctgatgcctctgcgtaccaggccgagcacacggcgttgaatgggactgtcggcgatatgggtaattacccatctacaggagctgcagagaacggcgaagccgtccccaacgagacgggcgagccggttcctgagctatcgtacgaagaagccgtgctttcagcagaagaggctaggttatggagtgttgttaccgcgaattccttagattttaatgcctggaccgcacttattgaggaaacagagaaaaatgctgagaacaatattttgaagatacggaaagtgtatgattcgtttcttgcggaattccctctttgctttgggtattggaagaaatatgctgaccatgaagcgagacttgatggtgtgagtaaagttatagaggtgtatgaacgagcagttctcgcagttacttattcagtggacatttggtataactattgtcagtttgcaatttcaacatatgatgattcagatatcatacgaagactgtttgaacgtggcttggcatatgttggaacagattatcattccaatattttgtgggatgagtatattaagtatgaagagtcactggaggcttggagtcatctagctgatatatatacaagagtattggagcatcccatccagcagcttgatcggtattttaattgcctcaaggaattggcttcgaagcacagtttatcagaaatacttactgcagaagaagcctcgttgtatgttgtcacatctgagaccactgctcaagcgcctgatggtgaggcacatcctgatgatgttgataagcttggtcaaccagaaatttcgtcttcaacagacgcagaaagccttgcaaagtatgtctccatgagggaagagatgtacaggaaggctaaagagtatgaatctaagatcattggttttgagctagctattagaaggccatattttcatgtcaagcctcttgacaatccagagcttgaaaattggcataactaccttgactacatcgagaaggaagaagacattaataagtatttggacgaagcttcctttgtaatgggatattgaactgaggatagagcgtggacataatgtttggtttcgatgaggctaagtatttgcttaatgctcaccttcttaaccatctatctatcgagcaggatggtccctcctttcttatggaggggcctccgtaatcagctaatggagttataaaattgtatgaaaggtgtgtgattgcatgtgctagttattcagaattctggatccgctatgtgcaatgtatggaggataaaaggagtctagacctagcaaacaatgccctggctcgtgctactcatgtgtttgtcaagaagcagccggagatccatctgtttagtgcgcgctttaaggagcttaatggcgatatttttggagcacgtgcagaatatcagcatctgtattcagatttatgccctggctttctagaggccattgtgaagcattctaatatggaacaccgactgggagataaagaattgtcctgttcagtttatgaaaaggtcatcgctgctgagaagggaaaggaacagagccagctcttaccaacattgcttattcagtactcccgtttcttatttttggccatcagagacttggagaaggcaagggagatattaactgtgctgcatgagcagttaaatttaacaaaaccagtgcttgaggctgtcatccatctagagtcgatttttccatgcgaaaagcgtattgaatttttagactcacttgtggagaagtttgttacacctgaatcatctcagggagagttggcaagtctagttgacaaagaagaaatatcttccatatttttagagtttttggatctctttggtgatgcaaagtcaatcaggaaggcttcaactcggcatacaactcttttttcatgtaagagaagcattctgccatcaaagaaacggaaggctgatgatgctgttgtgtcagacagggacaagtttgctaaaactgggtctgttcagtcagccacaggaactgatccaaatgcttccaatcctcctgtttggcctgcgacttctgaaacatctggacatcaatggggagcttcttatgctcagcaggctgcatatcctgcatatggaacttatgactacagccatcaaatgccacagcctgctcctcaaacagctgcctatggcgcttatcctccaacatactctgttcagcacaactccaattgttcaggtg

SEQ ID NO: 28374 - DNA, 7061 bp, Zea Mays
atggaggccgccgcgcccgacggggccggcaaggcatccccggcccccgaggagcccgactggccgcccgagctccgcctcctcgcgccgccgccagctgcggggacggacgatccgcagttcctcagctcgatcatcggggacgcggccgcccctcccccgccgatgccgccgctcgcgcagaagcggaaacgggggaggccgcccaagaggaaagacggcgcgggcgcggtggtaccggcccggcccgccaggcggagggaggacgaggaggaggtcgtctgcttcatctgtttcgacgggggcaacctcgtcgtctgcgatcggaggggttgccccaaggtctaccatccggcgtgcatcaagcgtgacgaggcattcttccagtcgcggagcaagtggaactgcggctggcacatatgcagcagctgtgaaaaggcagtgcactacatgtgctacacttgtacatactccctctgcaaagtgtgcatcaagcagggtaaattcttcagtgtcagggggacaaagggcttctgcgacacatgttatgggactatacttctcatagaatccaaagatgaaagtgcaataaaggttgattttgatgacatactcagctgggagtacctgttcaagctatattggttagatctgaaagggaagctttcattaacattggaagaacttactattgccaagactagatggaatgttcctagcacttctgctaggaaagaaaaagatgagtcgtctgatgacctgtatgacgctaataatgatgatgatgctggtactgactgctcctcaggaaaacgaaggcgaactaattcaaggaaaaagggtcaaaaatgccggaaggtaaataaagattgtagtgttcctgcaaaaaaggtcgagcttccaattacaaatactgagagcgttcccacagaagtgacaaatgaacgagtgccattgccagtagacacaaaagtaccaaatggatgggtacccttgccagtagacacaaaagtaccaaatgaatcagtgcccttgccagcaaacacaaaatgggcatcaccagagctactggagtttgtaggacatatgagagatggcgatcaatctttcatttctcagtttgatgttcagactcttctgcttgattatatcaagaagaataaccttcgcgatcctcagaggaaaagccaaattatttgtgacttgagacttcatcgcttgttcaggaaagcacgggttgctcactttgagatgttaaagcttttggaaatgcattttcttatgaatgagacttcaacagtaactgatagtagacaagtgactatcgatctcaattcagcttatgtagataccaatggatacaatgacatggctgcaaaattttctcctgataagaggagaaagatccatagaaagatggaaagagatacccaagttaatcttgaggactatgcagcaattgacatgcataatataaatttgatttttatgaggcgcagcctgatggaggatttagttgatgatgccaaattctcagacaaaattcatggtggttttgtgaggattaaaatttctgatgtgtatcagaaacaagacatataccgtctagtaaaagttactggaacgcacaaggttccagaaaagtatagcattggaaagaagatgacaaattttgcactcgagatattgaatttaaacaaaaaggagattattacaatggatacaatatctaatcatgattttacagaggaagagtgcaaacgtttaaggcagagcatgaagtgtggcgtgattagcagactaaaagtgggggatatcctagagaaagcaaagatattgcaatctgtaaaagtgaatgattggtttgaaaatgaaaagcagaggcttgggcatcttcgtgaccgtgcaagtgaaactggacgcagaaaggaatttagagaatatgtagaaaagctgcagcttctcaacgattctgaggaaagaacccgcaggattaatgaagttctggaagtgcatgttgactcacatatggatcctaattatgagtctgctgaagaaacagatgagaaaagaactgttggaaagtcggtagatcggacaagaccagatacaaccatatcacgacgaatatcaagatatcttagcactatgcagaaccatcctcaaaaagtttctgattgtagccaccatccaaaaaacttgtcaacagaaagtacaatatgtggatcaggagcaagaagtttggagaacagcacagcaaacagaactatgtatgaagctggatcattttcatcttctggagtaacaatgtcaaatgacacggagccggagaaagtctggcactacaaggatccttctgggaatgttcagggtccatttactcttttgcaactatcaaagtggacaagttacttcccacgtgatctgagagtatggcttacatttgagagtgaggagagatctttgctgttgactgaagtgctttcaaaacagcagaaagatttcactcaggctgcatcacatacaagcagcaaggcaacgctggttggcactggacatacaaggaacaaccctagtgtggatcagaccaatgctttctcccctgctggtcatagtgtggttagttcttcaggaataactgttcagtataataagtattctgttccagaaagggaaagtgtgtactctccagatgatagcttgtcgctgtcaactagttcggttccgccgaaggatgcttgtactgtgaatagccaaacacactgccagaataagcattctgttttcattcaatctcctggaagtgcatatgggcacacagacttgaaccatgatggaatacagggaggatgctctggtgaatcaaaccaccatcacagcagcggagccctatggagtcctaccgtggtacaggtgagttgtggacatggtaatgtggaatctcatcagagccagcatgtttcctggtcacaaagtcaacatgaatctaaaaatagttcacaacgacctgttaaagatctgaattcaaggcgggatctatcgaaaaacctacctactcaacgtatagggaaagatgtctccagtcctttgtttgcttgtgcttggagtccggccgagtcgaggacagcttcaagtcaacatgacggctcttgcttaagttcaacaactaatccaaactttctcgatgaacttcattattctattgcttccgcaaagcctaagagctgcgctccagcaacccctattgaagacagaggttctagttcaccatcaggcatgctgagtcatgcagaaagagttccaatctgcagtccacaatcaacccctttggcatctgctttcgatatgtgcaagatggaggagatcatgaatcagcaaagaacactggagccggatacatcaaatgcttcaattaaccagtctcccgaatcaaagattttccctgtatcctctcctgataaccatgatattgaccgtgagtttcctagtccagttccaagatctgagaataaggacattgcggttgacagctcaggattaacaccagcatcacctgaaaatattactacgaatttgcctggttcagatacatgcaagatggaggtcatgagtcagcaacaagtaactgaggctgtcgtatcgaattcttcagataatcattcccctcaatctaaggtttcccctgtatcatctcctaataacgaagatatgaaacatcagtaccccagttcaacccgaaggtctgagaataagattcctgctgtggacaatttactttcaacatcagctgctcgtgaaaatctaacgacaacttctgcccatgattctgatacatgcaaaatggtggagttagtgaatcagccaaaaacacctgaagtggatgcatcaaatgctccactttgtcaatctcctcattctcacacttcccaggtaccttctgacaatcaagatattgaacgtgaatgtccaggtccaactccaagatctgacagtaaagaacctcttgtaaacaactcagcgacaacttctgcatcagcctctgatacaatcaaaatggaggagtttgtgaatcagcaaaaaacagttgaagcagatgcatcaaatgctccacttaatcaatctcattctcacatttttccagtaccttctgacagtcaagatattgagcatgaatgtccaggtccaactccaagatctgacactaaggaacctcttctgaacaactcagtgttaacattagcagcgtctgaaattctaacaacaacctctgcggcctctgatacatgcaaaatggaggactcagtgaatcagcaaaaaacgcttgaagcagatgcattgaatgctccacttaatcatcatcctcattctcacgttcttcctgtatcatttgataatcaagacattcagcatgaatatcctagcccaactccaaaatctgacagtaaggaacctcttgtggacaactcagtattaacatcagtagggcctgaaatgctagcgacaacttctgtctctgatacatgcaaaacggaggagtttgtgaatcagcaaaaagcagttgaagcagatgcatcaaacgcttcacttaatcagcctcacatttccgctgtaccttccgataaacaagatattgaatgtgaatgttctagcccaactccaaggtctgactgtaaggaacctcttatggacaactcagtattaacatcagcggtgcctgaaattctagcaacatcttctgcttctgataaatgcaaaatggaggagtttgtgaatcagcaaagaccaattgaagtggatgcatcaaatgcttcacttaatcagtattctcgttgtcacattttcaatgtatcttctgataatcaatatgttgagcgtgaatgttctagcacaactccaagatctgactgtgaggaacctcttatggacaactcaatattaacatcagcggtgcctgaaatactagcaacatcttctgcttctgcttctgataaatgcaaaatggaggagtttgtgaatcagcaaagaccaattgaagcggatgcatcaaatgcttcgcttaatcagcctcatcgttgtcacattttcactgtatcttctgataatcaagatattgagtgtgaatgtcctagcccaacttcaagatctgacagtaaggaatcccttgtggacaacttagtgttaacatcagcagtgcctgaaaatctaccgacaagttttgcagttgcctctgattcatgcaagatggagatcttgaataagaaaagaacacttgaagcagatgcatcaaatgcttcacttgatcagccttctcactctagcgttttcacttcatcttctaatgataatcaaggaaatgcgtgtgaacgtcctagtccaaatccaagacctgagggtgagcagcctctcatggataactcagggttaacatcaccagtgcctcaaaatctaacttctgcttccgacatatgcaagatgggggagatcttgaatgagaacaggacacttgaagcaaacccatcaaatggttcaattactcaatctcatcaatccaaggttttccttgtaccatctattgatatcctagagcgtgaatgttccagtgaaacgcctaggcctcagtttaaggaacctgttgtggacagctctgggttaacatcagcagcacctgaaagtttaacagctaagcaacatgtccactcaccagatgcctttataccaccaaagcatggtgctccaactggggaattaggtgatgcaaaatcagattttaaaggtgaagaaattattcaaaaagaacaatattgtgaaagagaacctattgttgctacaagagagaatttgctaattgatctttcctgtggtgccgagtcgatagatgtgtcagatgtattggaatctttaatggaagaaaggagtgtaacttcgtacgtgccagtatcaatagaggacttcctagccgcttcagcagtggaagaaccacaatactctagccctatagcgttatctccttggggtgaacctagttactaccaaggtgatgctggtgattctgcgctatggggtattcaagattcgatcaatgatatgtggtcattgctttcaccaagacctatgctccaagcttcatctggtattggaactgaggggaaggaaacttttgatatcaacgaggtggctgtgacccatgttaatagtgattttttccaaagaggatcgatgcttggggaggaaaatatgaatcaggcaaacttgagtgttgctgcagataggatgctgctgcctgagcaggtcccatcaataccaaatggtatgtcaacatcatcagtagacgagggcaccagagttataggttctcaagcatcaatcaatcagagcttagactggggtactacatggaggactagtcagaatctcagcgtgtatagcaatgaaatagcagggccctcgagtaaaagctattgggaagaatcaaggaagcaggaagccaccaattcgggcgtttctatttcaggggaagccattagaaacaagcgcttgaaccctcctgataatgctattcggggcagccatcatcaccgtggcaggtactcccaaatcagtgaatcttggctactcagttcaaatcactctaggagtagttctgctaaatttggcagcggtgggtcatcaagatcaacttcaaagggtcaaactaggggctaatgtaaattctcgggtgcaggagaaaggatgcatcttgtagctacctgcatccttgatctctgcagcaggaataggttttaaaattctctgttatatctttgcagtttgtataggctaattaaaattaagtcaacagagcgtaaatgaccatctctgctccactcaactcaactgtagcaaggagcatatgtttagcatagaggtttgactgaatggccctgcccaagaagcagattcagctcttgggcatggtctgtatcatcctgacattctgttggatggaactgcaattgtgcaaccggcatctcttgacaccgaaacgcccctgatgtgttggaatatctgatcgattggtttag

SEQ ID NO: 28375 - DNA, 1857 bp, Zea Mays
tggattgggaataactgaacaaggataacctttgatcatttcgtttgctggacattggatcaactggtgctgttatacatagaaaggatttcattttaaattctcatctatatttggtggtgccataatcatttttccactagcgtttggcaataatgtcggagagcgagttagcagtaataaaaccagaggtgttgaagacatatatctggcttcagtgctttgatggttccatacaacaagtggaggaggaggttgcaatgttctgccccatgatatgtcaggaaattgtgaaaaatggcacagggtcatcaaaaaatcatgctattgctctcccggaaagagttaatccagccaatttgagtttgattcttgactactgtcgatttcatcagatcactgggcgttcaaacatggagcggaagtcctttgatgaaaagtttgttaggatagaaacagaaagactctgcgaattgacttctgcagccgacagtctacagttaaagccacttgttgatcttactggccgagcgcttgctcgaatcattgaaggaaagacacctgaggaaattcgtgacattttccatttaccagatgatttaacagaggaagagaaattggagcccctaaaaaatataaatgatggtcctgctaggattcgcctactgaaccggttgtatgccaagaagcggaaagagctccaggagcgccataagctgaaggatgttcaagtacagaaagagcaaaaagatgagagatctttggatgagttacttagttttattaatggggatggaggttcaggaggcaggaaagctaccaagagtaagaaaaagaataaaaggaaggatcatgttgagaaccccccaaaagctgactctgagcctgtaaatgcgaatccagatatgcaagatgatgccgagtacccttttgaagatgctgacctcgatgatggacttgatcctgcaatgaaagaagagcttgataggtttgtttttaacatgcagagaagttgaggcctttgcgaagaggttggattcagtttggaaggagtcacatattggtggtaatggttctgcacggagatttcctgggtttaatcacatgtgagtgttaagctggtaggatcagaaggcagaagcagaggagatttgtggacatacagcctggaagagagtaaaaataccaaacagtcgacttgctcctgtgtgtttgataagggcatgtacaaccctgaaatcatggatcggttttgcgaagtacaaaagacatgttaagagactgtataccctgagcctttggatcataaatgtaagtaagaggcaatgtgtgtagaattgtgtagagacagtctcttcgcggaaagagagcctgtctattgtatttttttcaattaaccctcaagagacttcatattgaaagaggttatacatgtcagagccaagcatgcagacatgctattttgttggggaggaggctgcctagttgggatgaagcttagcatggttcaaggaaaaagtgtagttttttttctttggaaagggaggattagaggtctgtcttgtctgtgttgccagggaggaggctgcctagttgggatgaagcttataatgcagtatatagtgtaaaacagtgttttgaatgactatatggctgaactgttggacacagtttgtatcaatgaaatttcgttgattcactgtattgtggtggtgcacataaaaaatgtcctttttttggctgaccttacgtgggttggaatatactataagcacgtgttcttatttataattaagttaaacaacattttatcgtatatatcaataataatagaattggatagatgaatgatagaag

SEQ ID NO: 28376 - DNA, 3514 bp, Zea Mays
gcgcttttgtggacgacgccgtcgtcgccaggcagcttgcatgtggctctgcgctgcgcccttgtcttcctcttcctccccactccgcatctccagaaaattccgttattttactcccagtatttagcctcgacgattgctcgggactctctttacaggtcctatttcgcggtttcctcatcctcctaatcctaacctccttccctgttttattcttcctcgtcgagcctgattcccctgccgccaccgcggccagcgccgccctcgccgccggtcgccaccgccgccgccaccgtccactcctcgccctcacctaatctcactcggagggagaaaaaaaaaacctcgccctcgccgccgggttgagttgaatctgtggtcgctgggttgaattgaatcgatttagatccgtttatccctagttcgggtgcccgtgttctggaaggtggaagctttggttgggttttctcttccagagcattaatgtttctgagggcctaagatgctctatttgaagcagcccacgaggagctgagtctttgtgttttttttatcgttctctctcgtcgtctgttgatctgatcggatggaggctatgacgggtggcaaattccttcaaaagtttcgactctacgaaaccagatcgaaattttatcttattggaagagacaagagcaggattcactggagggtgctaaaaattgatcggttggagtccactgagctgggtgtcgatgaggatccaactatttacacggaaagtgaatgtcaagaactgctttggcggatccatgaggggaacatgttgactggtggactgaaatttgtcacaaaatgttacggaatagttggttttgtaaagtttcttggtccttattacatggttataataaccagtagaaggaaaatcggcacaatatgcggccatgaaatttattccgtcggcaagagtgaaatgattgcaatttcaagtgttacagtctggcccaacgtggcttattctagggacgagaacagatataagcgccttctttgctcagttgacctttcgaaggatttcttcttcagctactcttacaacatcatgcgcagccttcagaagaacataacccagaagaatactgggcaggctgtttatgaaccaatgtgtgtatggaatgaatttctgacacgagcaattcggaatcatctcaagaatacatgttggactgttgccttagtccatggattttttaaacagtcgaagctctccgtatctgggaaggatttttggttgacccttatagctaggcgctcacgacactttgcgggaaccagattcttgaaacgtggcgttaatgaaaagggcagggtagcgaatgatgttgagactgagcagattgtttttgaagacacatctgatggaatcccaactcagatggcttctgctgtacagcatagaggatcgatacctcttgtctggtttcaggaaacttcaagacttaatattagaccagatattatattgaaacctgatgtggactacaaggcgactcgccttcattttgagaaccttgcacttagatatgggaatccagtaatcatcttgaacttaataaagacccgtgagaagaagccccgtgaatctctgctccgtgcagaatttgcaaaggctatccattacattaacaagagcctgcctgatgacaagcgtctaaaatttttacacatggatctgagtaagctttctcgaaggaaaggcaccaatgtgcttgcactgttgaccaaggtggcatcagatgtgttggatctaactgaattcctccactgtgaaataagtacatcaacaaaacctgatgacacctcaagaagggtgtcctcaggacaaattgcatagactgcttagatcgcacaaatgttgcacaatttgcatatggtttagctgctttagggcgtcaacttcatgcattggggcttactgaagcacagaaaattgaattgcacgatcctctggctgatgatctgatggacttctatgaatggatgggtgatacattagctattcagtatggtggttctgctgctcacaacaagatcttctgcgagcaaaggggtcaatggaaggcagcaacccaatctcaggagttccttcggaccattcaacgctactataataacgcctacactgatcacgacaagcaggatgctataaacatgttcttaggtcatttccaacctcagcaagggaaacctgcactgtggaagctggactcagatcagcattacaacattgggaggcaagggactttaaaagaagagattggaagatcgttcataaagaggtcactatcagatggtaacatactgttggagaacaacttgcctgtaactagctgtaacaatgaaacaaacaacacagaattgcttccaatgcaacagctggatgatattagagaacctaccgactctgcgccagagatctccatatgtgaacctaacccgtgctccagtgtgaactacggcagagtgcctggaagacactctatttcagaagagcggcagagttatttgaaaagattaggttaccctgaattgcattcttcaaatttcctcgaccttgatttgttgtcgtcttctgggaattcctgtgacgaggaagtttttgagaggtcatcactgatcaattcacctatggatgtggtcagcgttgaatcatctacgtcgtacagtgaacaaggacacactgatgagggaagggatgacatggatctttcccgttcaagcagccaggtctcagacgttcgggactattctgaccggtttgcgcactgggtcgcggatggaggcatgctttggtaaaaggccatggacttttgtcttgcttgacaactcggtagaatctgtgaccgcaggaaatggatgcgagcagatgacatggctagatgcagagatggtgggcgtggaaaaagtctcgcatcggtatggttgtgaccactggaaggcttgaacgctgatattcatcggatggggatggagatttcggtggttgggttgagtacaagattcaatttgctgtggtgaaaaattttaccatagtttgtttagacaataaataggcaaaatatatatgattcttttattttagcttacagtgcgtcccccttctccatagaaaattctgaaaagcaaaaaaaaaaaggaaaatctagaaaaaggaggaaaaaaaacttagataaagaacacttttgctgtaaatagttagtatgttacggaagtataaatattgtgaaattttgctgacgacacgacttcgctcaaacgtgtaatatactgttggacagtgttaacaaaatatatcccgtatcagtacgaaaactgtgtaaatttactgtaacgcacagtatgcattatttatttatttgtttctcagattatggaagagataaaattgcaaaaatatcttaacctctgacttctcacggtgcggccagcctcggtcaagctccccggcggcgggacgaggccggtgtccgct

SEQ ID NO: 28377 - DNA, 8599 bp, Zea Mays
agcactcggggtaagcttgctgttggagaaggtgataaagttgctataaaggatgtgggacaaatcattggacagcctactgcagcacctattacagcagacaaaaccaatatgaagcccctttccaggaatattgtccgctttgaaattgtccatttagtttacaatccattggtggaccattaccttgctgttgctggatatgaggattgccaagtgttaacattaaatagtcgtggtgaagtaactgatcgccttgccatagaacttgctctgcaaggaccatatattcgtcgtttggaatgggttcagggttctcaggtacaactcatggtagtaacaaacctgtttgtgaagatatatgatctctcacaggataatattagccccatgcattattttaccgtagctgatgatgtgatagttgatgcaaccctcgtcccctcctcaatggggaaattggtgctacttgttctttctgaaagcggtgttttatataggctgaatgttacattggagggtgatattggtgccaagatattgactgaaacagtcttggtcgaagatgtcatatccatgcatagagggttatcattgtacttctcatcaacctacaggcttctttttgtatctcaccaagatggtacaaccttcatgggacgtttgaatgctgattcttcatcaataacggaattgtcatatataaatgaggatcatgatggtaaatctaagccagctggactctactgttggagagagctagtagctggcagtggtatccttacttgcctatcgaaatctaaatcaaatgctcctcttgtggcgttgttgagtcctcatcaattggttgcacaaaacatgaggcacaatactggtgcaaattcctcagtggttggtgttgctgcctataagcctttatccaaagataaaacacattgtcttcttttgtatgatgatggaagccttcatatttactctcatacacctagtggaggtgacggttcgatgaaccttacagcagagcaaacaaagaagctgggcagcagcatactcagcagtagagcttacactggcacaaaaccagaatttccacttgatttctttgagaagacaacttgccttacatgcgatgttaagttcaatagtgaaacaacaaagagtggcgattctgaaagcattaagcaaagattgacatcagatgatgggtatttagagagtttgacacctgctggcttcaaggtggctatttcaaatcctaaccctgatatagtcatggttggttgccggattcacgttggcaacacatctgctagcaatattccttctgagatcacaatttttcatagagtcattaagcttgatgaaggcatgagatcatggtatgatattccatttactactgctgaatcacttttggcagatgaagagttcacaattactgttggcccaacattcgatggttcatctatacctaggatagattgtattgaaatttatggccgagccaaagatgaatttggatggaaggaaaaaatggatgcagcgcttgatatggaagcattgggtggtaatgctactggtggtagatctggaaagagactccaaatcgtgaaggctgctcctatccaggagcaagttctggcagatgcccttaggattctctcacgaatatacctgctatgccaaccaagttgctttactgacatggttgatggaggcatggaacttgataatatgaaatgccgagctttactggaaaccatttttcaaagtgacagggaacctctgctacattccgccgcatgtcgtgtccttcaggctgtgttcccaaagaaggacatgtaccatcatgttaaggacaccatgcgtctccttggggtaataaaatcactcccagcaataacttcaagaattggagttggaggtgccgcatcgagttgggtgataaaagaatttattgcccagatccatacagtttcaaaagttgcattgcacaggaaatcaaacctagcctcttttcttgaaagtcacgaactagtcgatggtcttatgcaggtattctggtgtatattagatttagacaggccggacacacagacaataaatagtcttgttgtgccttgtgtggaatttatttatagctatgctgaatgcctggctttgcattccaatgaaaaaactagtgtgtcagtgggacctgcagttgctctgctgaaggagctgctctttgcaccatatgaagcagtacagacatctagcagtttggctatctcatcccgatttcttcaagtccctttccccaagcagacaatgatagctaatgatgatgctcctgaaaaccaagctaaagcaagtgcttctgctatgaattcaaccagtgcaaactctcaggttatgattgaagaagatcctgtcacatcatcagtgcaatattgttgtgatggctgttccaccgttcctatacttcggcaaaggtggcactgtagcatatgtccagattttgacctatgtgaaacttgctatgagatacttgatgcagatcgtttaccagcaccccattctaaagatcatccaatgtcagcaatacctattgaagttgatacatttggaggtgaaggcagtgaaatccatttctctgtcgatgagctaacagattcaggtgttcttcatgctgataggagtgttcagacctccccatcatcaattcatatatttgatgcaagtgagtctgcagacttacctgagactattacagaccaggcaactgtttcgatttctgcatcaaaacgtgccattaactccctggtacttaaccacctaattgaagagcttagaggctggatggggaccactgctggtactcgagccatacctttaatgcagttattctacaggctttcttctgctgttggtggtcctttcatggatagttcaaagccagaaaattttgatttggagaagtttgtgaagtggctaatggatgaagtcaacataaataaacagttccctgccaaaacacgatgcacatttggtgaagtattgatccttgttttcatgttcttcacacttatgttccgcaactggcatcaacctgggagtgataattctcattcaaagtcaagtgggagctctgatttgacagataaaggtcctgctcaggttctgggatcaacaacaataactcttccgtcatctagtgctgacctggataaaaatgagtttgcttcccagttagtccgtgcctgttctgccctcaggcagcagaaatttttgaattatcttatggatattctgcagcaacttgttcatattttcaagtcatcatccataaatggagaagctggttcttctggttcaggctgtggatccctattgacaataagaagagagctgccagctggaaatttctctccctttttttcagattcatatgctaaatctcatccaactgatctgttcatggactactacaaattattgttggagaatactttccggcttgtatatagtatggttagaccagaaaaggagaagtctgctgagaaggatagatgctacaaggttcccaacactaaggatctaaagttggatggatatcaagatgtgctttgcagctatattagcaatcctcatactgcatttgtccggagatatgcaaggaggctcttccttcatttatgtggcagcaagactcactattacagtgtgagggattcgtggcaatgttcccatgaagttaagaaacttaataagatcataaacaagtctgggggtttcagaaatcctgtgccttacgagagaagtgtcaagctcataaaatgtttatctactctttgtgatgtggctacggcaagaccaaaaaattggcaaaagttctgtttgaagcacatggatcttcttccatttctcatggacaatgtttatcatttcagtgaagagtgtgttattcagactctcaagcttctaaatctggctttctattcaggaaaagatgctaatcataatgcacaaaaagcagagactactgatctaggaggttctacgaggactagctcacagtctccagatatgaaaaagaaccggaaggctgatgatggttctgaaggttcctcagaaaagtcgtgcatggacatggaacaggttgtagagatgttcagtgataaggaaggtgacatgttgaaaaactttatcaacatattcttactagaatggaactcagcaggtgtccgtcatgaggctaaatgtgttctatttggagtgtggtaccatgcaaaaaaccgacttagggagacaatgctatcgattctgctacagaaggtaatacatcttcctttatatggacaaaacattgttgagtacactgacctcatcacctgtttacttgggaaagtgaacgacttcagtgcaaagcagaatcactctgaacttgtgaataaatgtttgacatctgaggtcataagctgcatctttgacacactccattctcagaatgagctattggcaaatcatccaaattcacgtatatacaacacattgagttgcttagtggagtttgatggctattacttagagagtgagccttgtgttacctgcagctgccctgatgttccgtattcaaggacgaagcttgaaaccctcaagtctgagacaaaatttactgacaacagaattataataaaatgcactggaagctttactatacagtcagttacaatgaacgtttatgatgctcgtaagtctaaatcggtcaaagtacttaacctgtattacaacaacaggcctgtgactgacttatcagaattgaagaataattggactctttggaagcgtgctaagagctgccatcttacatttaatcagacagaattgaaggttgaatttcccattccgattacagcatgcaatttcatgattgaacttgattcattttatgagaatcttcaagcttcttcccttgagtcactgcaatgcccacggtgtagcaggtctgtcactgataaacatggcatatgtagtaattgccatgaaaatgcatatcagtgccggcagtgtagaaatattaactatgaaaatcttgactcttttctctgcaatgagtgtggatacagcaaatatggtcgttttgaattccacttcatggcaaaacctagtttttcatttgacaacatggaaaatgatgatgacatgagaaaaggattggcagcaatagagtcagagtcagaaaatgctcataggcggtaccagcaactgatgggatttaaaaagcctctcatcaaacttgtgtcaagcataggtgaacaggaggtagactcgcagcagaaggatgctgtccagcagatgatggtgtccttgcctgggcccacatgcaaggtaaatcgcaagattgcacttcttggtgttctatatggtgaaaaatgcaaagccgcttttgattctgtgagcaaaagtgttcagacattgcaagggctccgccgtgttttaatgacatatctacaccaaaaaagttctagtgacaccaatgcattaccagcattttcaataccaaggtctccaaatagttgttatgggtgtagcaccacgtttgttacacaatgcttagagttattacaagtgctttcaaaacatgaaaactgcaggaagcagcttataagtgctggagttttgtcagagttatttgaaaacaacattcatcagggccctaggacagcacgcactcttgctagggctgtgctatcttcgttttctgaaagtgatgaagatgcagttcatgaattgaacaacttgattcagaagaaagtgatgtattgccttgagcaccatcgttccatggacattgcacaatcaacacgagaagacttactgctgctatcagagacttgtgctcttgtggatgagttttgggaggcacgattacgtgtcacctttcaactgttgttctcttctattaaggttggagcaaaacatcctgcaatttcggaacatattattcttccttgtttgaggataatttctcaggcttgcacgcctccaaaatctgattgtggggacaaagagtcaggtttgggagtatctagcttgacgttgcactctaagaatgatgatacaactggtaacacagcatctaataaccccaatactaagattcagtcagatatatctggaaaaatttatgatggaagtcgaagagaccaggatattccacttttgagctattctgaatgggagggcggtgcgtcatatttagatttcgtccggaggcagtacaaagtatcccaggcagtgaaaggatctgctcagaagacacgccatgattcatataagtctgactatctggttctcaaatatggactcagatggaagcgtcgtgcatgtttgaagtcaagtaagagtgacttctcaaaatttgccttgggctactgggtatcagacttgatcttgagttcgtgttcccagtcaataagatctgagatttgcactctcataagcttgctatgcccatctaactctcctagacaatttcagttattgaacttgctcatgtcactacttcctcgaacactctcagctggtgaaagtgcagcagagtactttgagttactagggacaatgattgattcagagtcttctcgtctattcctaactgttcgtggttgtttgacaacattatgttctttgataacaaaagaagtgtccaatgttgaatcacaggagagaagcctaagcattgatatctcacagggattcattctccataagcttgttgagctcctgaacaagtttcttgaagttcccaatatcagagcaaggtttatgagtgataggttactatctgaggtgttggaagcttttttggtgatccgtgggcttgtcgtgcaaaagacaaagttaattaatgactgcaatcatcttttgaaagaccttcttgatagcttgcttcttgagagtactgaaaacaaacgtcaatttattcgtgcttgcatctctggattgcagaggcatgtgaaggaaaaaaagagacggacgtctttgtttattttggagcaactctgcaatctgatttgcccagtgaaaccagagcctgtttatcttttgatactgaacaaggcacatactcaagaagagttcatcaggggttctatgacaaagaacccatactccagtgtggatgttggccctctaatgcgggatgtgaaaaataaaatatgtaaccagcttgatttaattggacttttggaggatgattatggtatggaattattagttggtggtagtataatctcacttgatctgagcatttcccaagtctatgagcaagtatggaggaagcaccatggtcaaactcaacattgtttgtccaatgtcagcgcaataactggtgcttcatctatcagagattgcccaccaatgacagtgacctacagactgcagggtttagatggtgaagctactgagcctatgattaaagagctggaagaggaaagggaggaatcacaagatcctgaaatcgagtttgctatagcaggtgctgttagggaatgtggaggccttgagattattttgagcatgattcagagcctgcatgatgatgagttcaggtctaatcaagaagagttgacttctgttcttaaccttctaaaatattgttgcaaaatccgtgaaaataggtgtgcactgttatgtctgggtgctttgggtttgcttcttgagacagctagacgcgcattttctgcggacgcaatggaacctgctgaaggtattctactaattgtagaaagtcttactatggaagctaatgagagtgacataagcattgcccaaagtgtttttacaactagtactgaagcgattggcgctggtgaggaggccaggaaaattgttctcatgtttttggagagaatatgtcatccttcaggtgccaaaaaatcaaacaagcaacaaaggaatgaggagatggtggcaaggatcctgccgtacttgacctatggggaaccaacagctatggaagctcttattcaacattttgagccctaccttagggactggtctgaatttgatcaattgcagaagcaacatgaagataatccaaaagatgataatataagccaaaagctgtcaacacagcgatctgctatcgacaactttgttcgtgtatcagagtcactcaagactagttcatgtggtgagaggctaaaggatattattctggagaagggcatcacaaaagctgctgttgagcatgtaaaggaaagctttgcttctgctggacagactggcttcagaacaagtgaagaatggacaacaggcttaaaactgccatctattccacccattctgtcaatgttgaaggggctggctaagggccatctgcctacacagaaatgcattgatgaagaaggcatattaccactgctccatgctctggaaggggtgcctggtgaaaatgaaattggtgcaagagcagaaaatcttttggatacactagccaataatgaaaataatggtgatggcttccttggagagaagattcaagagctgcggcacgctacaagggatgagatgcgtcgccgtgctctttgagaaagagtgatgctacttcagg

SEQ ID NO: 28378 - DNA, 1740 bp, Zea Mays
acgttgttatcccgaatcataatgtccttataaattatatagcattcaggttgggccttagaatgcttccatttggtgtagggttctgcttcttcatttggcaggctcccatatctgtcgatgttattgattgcactgaacgtcttccttattatggatattggaggatgcgacatccaaaagcaagaaatacgggaggcggttgagttacccttgactcatcatgagttgtacaagcagattggtattgatcctccaagaggggtgcttctgtatggtcctccgggtactggcaagaccatgcttgccaaagcagtcgcacatcataccaccgctgcttttatcagagtcgttggttcggagtttgtacagaagtacttgggcgagggccctagaatggtgcgtgatgtgttccgtttggctaaggagaatgctccagcaatcattttcattgatgaggttgatgctatagccactgctcgctttgatgctcagactggtgctgaccgagaagttcaacgcattcttatggagctactcaatcagatggatgggtttgatcaaacagtgaatgtgaaggttataatggcaactaatcgggcagacactctagatcctgctctgttgcgtcctggtagacttgacaggaaaattgagttccctttgccagaccggcgtcagaagaggcttgttttccaagtctgcactgccaaaatgaacctgagtgacgaggttgatttggaagactatgtttccagaccggataagatcagtgctgctgatattgctgctatctgtcaagaagctggcatgcatgctgtccgcaaaaaccgatatgtcatcctccccaaggactttgagaagggctaccgaaccaacgtgaaaaagcctgagacggacttcgatttctacaaatgaggcaacctgagtgttgagctcgtttcttgtttatcaattgaatatgttttagcataaagatgagtttcaggatagttgccaatatcaaatgtcgaagttgatggctgtaatgcttgagtcaatctttttacttgaaggtacagcggtgttatggaagttatgattatgtagggtggattaaccttttaccgacacggtggggcttggatttggcattaagccaatcttaccaatcaatcaccagatgtgatgtctcattggtgatactaatacctgcagatctggtctgtctcaaccaaattatgccgaagacaatagaaaaactacgtttgcgcagatcttgtattctaagcttgcctgttcatttattactgagagcaagtgtaatagtgatatagttgatgctaaggtagaggtgagaagagagttatgctgttgtagaggttagaagagaagagtgcaatcaacgagctcagcattttttgtgtgtgtgtagctttctgaactagataacaaagactatgtatgttttttttgtttagatttctgaactaggttcgctctaaaaatctacaatctgaaccaagtacaatggcaggatagattgtatagaaaatctatagatttttatagttcaattcagaatcactttctactcccaaggtttctagatttttgttatctatgttaccaaagtatcaatattttacagaatctatatttaacagctgtttgaacctaacatattacctaatatatattttagcttttcatcactgctaagattaaaattttaagaatctacagctgagccaagccaaa

SEQ ID NO: 28379 - DNA, 960 bp, Zea Mays
gaagggtcggaatcggatacctctgcccgcggcggttgggccaccgccccgcccgcgtgttgtatcatcgtctgcctgacggaccaacacggctgcgcatatacacgcatccgatcagctagctacccagggcaatcatacggtcgatcgatcgggggcatgcagggacacggatcggcggcgagcgtcgggacaaagtgccagccagccggtgatggacgagaatcgctgcacgtccagtccagtccagatccaacccaccatctcgtccctccctggcgacgttgggtagacgggggcggcgcggacgatactgcccctgcccctgccactgtccgtccgtatacacgggatggaaatgaaatcaatgcgtctcatcccgtatcatgtcacgtacggccgtccgtattgtatgtaccgctacaatacggtccatgcctacggttacgagtaacgtaacgagacggacatgggcataaggatgtaaatgctcggtaaaattcggtaccgtttaccggttttttccggccgttttcggttttttcggatataccaaaaacgagatatgttattacgaaaacggtagaataaacggtgagacatatttaccgtccgttttcggatttctcaggaaaatccggtattttttcggtccacaaaacaatcaaggaggcaagaactatacctgttgtggtttagggtttatggtttcagatgtcatagaagatatatcaaatgatccagacgacatgtcacatgatttctagttcatgtatcgtgtgtttaagacttatatagtatgtgattaaaacttcaatgaacatgtatgatcatttatttgtggtcatgactatatattgcgtatttgtgtggttgagacttgtatgtggatgtgaatgaacaatcgtgttttaagacttatgtgttacgtgttaaaatttaagagtggacatgtatgag

SEQ ID NO: 28380 - DNA, 3068 bp, Zea Mays
gctgcgaactccactcaaatcccaaatcaaatcaactccccagcctgaactgtcctccctggactcccctcgccattcatcaacgcccgccacagagggggatcccggcctcccggtgccgggagccaagccaagccacgcaccggccggccgcggcggatcggaaccttccccaccgctcgcccgccgcatttgaggagggcgatgtggcgcctgcggatcgcggaggggggcggggacccctggctacgcacgaagaacgcccacgtcggccgccaggtgtgggagttcgacgccgccgccgaccccgaccccgccgtcgacgccgcgcgccgcgccttcgtcgccaccaggggccacctcaagcacagcgccgacctcctcatgcgcatccagttcgccaaagaaaactcgattgagcttcaccttccaggcatcaagctcggtgagcatgaagatgtgaccgaggaagctgtgttgactacattgaaaagggcaatcagccgtttctctactctccaggcacatgatggacactggcctggggattatggtggtcctatgttccttatgccaggcttggtgcctctttcaactcttcttctatagtgatatgtttaacttgcttacttcacttggatatgcattcctacgactaaatctgtgctctgtgattaatcttgtgatatgtttaagacaaaattgtgctatcttgctttcttacatcttatgcctcatattctatatgagcacaatgttttttttttcttgcattcactgtgagtaccaatttagatgcctcatgaaataggaactagcaaattgtagcaggaatctgatttttagattacatggaagacttatgtttcatgtttcctggtttacaaaacagctactaattgtgtgtaccctttgtccagatcataacattgtatgtgactggagcactaaacactgtcttgtcattggaacaccagaaggagatccgccggtatctttataatcaccagaatgaagatggcggctggggcttgcacattgagggtccaagcaccatgttcggctcagcactgacctatgttattttgagattgcttggagagggaccagatagtggagatggagccatggagaaaggtcgaaactggatattagaccatggtggagcaacatatataacatcgtgggggaagttttggctttcggtactaggtgtatttgaatggtctggtaacaacccggtgccaccagaagtatggctactgccatatctcctcccatttcacccagggaggatgtggtgtcattgtcgaatggtgtatttgccaatgtgctacatttatgggaagaggtttgttggccgaatcacaccacttctgttggaattaaggaaggaacttttcaaagacccttacagcaagattgattgggacaaggcccgcaacctatgtgccaaggaagatctgtactacccacacccattcgttcaagatgtgttgtgggccactctccataaattcgttgaaccagttatgatgcattggcctggcagcaaattgagggagaaagctctggaaacagtcatgcaacatgttcattatgaagatgagaacactcgttatatttgcattggtcctgtaaacaaggtattgaatatgcttgcttgctggattgaagatccaaactcggaggccttcaaacttcatatcccacgagtctatgattacttgtggcttgctgaagatggcatgaagatgcagggttataatggcagccaactttgggatacagctttcacagttcaagccattgtggctaccaaccttattgaagagtttggtcctacccttaaactagcacacaactatatcaagaattcacaggttcttgatgactgccctggtgatctgaatgactggtaccgccacacatctaaaggtgcatggccattctcaactgctgatcatggttggcctatatctgattgcactgctgaaggactaaaggcttcattattgttatcaaggatctctcccaaaattgttggtgaaccgatggaagctaatagattttatgatgctgtcagttgtctgatgtcttatatgaatgataatggcggtttcgcgacatatgaactcacaagatcttatccctggttggagctgatcaatcccgctgagacctttggggatattgtgattgattacccgaaagaggtggataactgtatcagcaaagcttccaatttcatcgagagtattcagaaaagcgatggttcatggtatggctcttgggccgtctgtttcacatacggcacttggtttggtgtgaagggactaattgctgctggtagaacatttgagaacagtcctgcaattagaaaggcatgcgactttctgttgtcaaaagaacttccttccggtggttggggagaaagctatttgtcatctcaagaccaggtttacaccaatctcaaaggcaaccggcctcatgcggtgaacactagttgggccatgctggcgctgattgatgcgggccaggccgagagagatccaacgcctctacaccgagcagcaaaggttttgatcaacttacaatcagaggacggagaatttcctcagcaagagatcataggagtgttcaacaagaactgcatgataagctactcccagtacaggaacatcttcccgatttgggctctgggtgagtaccggtgtcgagtcttgggggctggcaagccttggcggtgaacgggaggtgtgtgtgtgtgtgtgtcatggatcagcttttgtgagtagccatgtggaagttggaataatgtagctacgttacgttcagggggttgcgttactagtggtcctagtaataatagtgatggtgatagtaatgtactcctcattattacaatctcaaagcggttcatgccattgccatgcacatctcagatccgagtcacgcacttgagagagttcaaggattgcaagtatagttgggagaatcaaatccaatcggcttattgtctgctcatctcaggtgtcaggtcttttcagccacacacacatacacat

SEQ ID NO: 28381 - DNA, 1769 bp, Zea Mays
ctttgctgttttggtaaaagataacattgcttggtatgaagagcttcgtaagcagagagttgctgaactgaaaagggaattggagaagtcagaaaattctattggatccctccaatctgtgattcaaagcctcagcaatagcaaacacgttgatgggagttctgaatgccgcaccagtcatactgaatcatgtccacattctgaaaatacagcagatactaattcctcaggtaaagaaacgtccagggatagatcatcagctgctagtttcacagaggaagcaagcaacagtcagaaatctcagaaagtgcagcagtgtgatactgattcaattcaagttatcaatccatcaccagacgagtcatatccccaggcccaagttgaaaaggtcggtcccaaagatggcttgctttggggttctagaaaacaaagagtaatgagagctagaaggacacttctgaaagctggtgatagtagtggggatggtgagcctacatctacagcatgcatacagggggagggtttgtccaaaggctgcatgaagaacttcaaaactcaaaacttagaatcagttgttgtgaagaagggtgtgaaaactccaaaggtagaatctgatgtgatgaataaggatttgaaaaccctaaatgtaggatctggtataatgaagaagggcttgaaagctcccaaaacagaatctgatatgatgaagaagggcgtgagaacttctaaagcagagtctgatggtatgaagaaggggatgaaaataccgaaagtagaacctgatgttatggactggaaaactcccaaagcaggatctgatgttacgaagaagggcttgagatctccaaaggcagaatgttgccagcctgtgattgagagcgttaaactaaagctggcagagattttgaatactatatcaactcaagatgactgcaaaatgttgcaacaccaacttgatacccagaggaaaagagctagatataagaagatgattcgccggcatatggacttccgaatgcttcactctaagatcaagagtggcgcaatctctggcaccaaggagcttttgagagatatacttattttcatcaataatgtaataaccttctatccgaagactacattagagcacatggctgcggttgagcttcgtgactttgcactctggggatgcaagggcaagcaaggtttcttcaagggatgctgctgccaaggaaggggatggcaagagaccttgcagtgatgagctggctaatcaaaagactacaaagagaaatgagccagccaagaagaggggtgtgggtcggcctccaaagagtgggcagaggattgctggggcacaggaaaatagccccatcaaaggcaggaaaagtagcgctggggcacaggtagatagccccagcaaaggcaggaagaggagtgtggaagcacatgatgatagctccagcaaagggggcaagaggagccggcggtgaagctaccatcagctcaatgccggtgaaactgtgtacagcttaaccatatatcataggctgttcccttccggtttgtttacctgacaaaaaaaagttattgtcccagtattcaaactgatgtaacaggaagggttagttgtttctgatgttgttttgtaaggagtaaggacaattagaagggaaccctcatttttatattgagattatccgagttaggctatacatatctgaccatgtaatgcttatagtagtttaagttgttataccatgtgaactgatgcttgaacaccgaag

SEQ ID NO: 28382 - DNA, 4124 bp, Zea Mays
ttctctcgcgtcgttctcccgtagtcccgtgccctcgcgtgcgctctatctgtttctggtggcgacgacttggcggtccccgctgccgccgtgcccaggcctctacttcgggaccttcaccggcgacgagcacccatcgggttgcttcgcaaaacttccaacatccaggatacaattaattacgattccttcaactttatctcgatttataggaggttgcacagagcccatccaacagggtgtctcagacatactgatggatggggtgcccaatatccttgagaaatcatcacatgaatgcatgtactcttggtacttcaccagggaagaactagagaaattttctccatcaaggaaagatggtattactgaaaacaaggaatcagaaattcggcatttatattgttcatttatccgggatgttggcatcaggctgaagctacctcagatgacactagcaacagcagtcatgctttgccatcgcttctatttacaccagtcccttgccaaaaatggatggcaggtgagagattatattgttgtgccagtgatggttgctgatgtctatgaaaagcgacaagagtgcagagtttcattgccaagcatttgttggaaatatgttctccaccatgtctaacttaacattacagaatatccttcaaaccatttgaagtattttatcttgtaataatattactgtattagttttctgattacatgctaattgctgattcatcttgatgctactctacctcaagagtcatgatcacttcgtgattggacatttcaaagggatcatttacctgctacaatgtgtcaagggcaccagggctcagagtagctggaccttgactactggacctcgactacatagttcgtagtcatggccgggaatggggtgaaggtttctcccctctgcaccctatgttgagggaggagattagcagtagaaagtttaatcattgcttaatcgtcaagtgttccaatacaagatgtaaataggcacgtagcctctaacgaacaatagatggaaaagctcctcaaattgaggcaccgtagtttcctaccaactaaactatgcaggcctgacactagctgcagtgatcatgcctacagcgcgtttgacacgcgctgcgtgttcttggcggcatctctggcatgggtctggtgcgtgtaccagggattaccttcccggtcggtaaccagcaaatttcggtagtttttctcgttttcgatgtctaccgagaaatgaaaaccggtgtgattttttatgtatttcgatttcaaatttgaaaatataatagtcaaattttggtcaacaaaacggtttttgaaatcacgaaacgagaatgtaatccctggcgtgtactggtggccccacatgacacatgttattggaaaacttctttttagaacttttaagtcctgattgacttctcctagtatactaaaaagttttgaggtagttaagagttattttcagtttacctaggaagtttgtgtttgtcagatatgatactattgtgattaagtacaatacttcgtcataactgggcaaatgcattcagaactttcctattgaagttacttaaccccgaccagccaactgggttgcaacttactgttacaacttaagcaagtttgacatactttgacggatcatcttgtaaattacatattcaccagtaagttttatagaaatggcttacttcactgcatttcttttcttagttttgtaagatctgtttagttcatatttacaagatcacttttccagaaatcatctcactgttatcatgcaacccctagttatgtcgaacaccagtagtaatttctgttttattctgtatgttcgtaatatttactctgtttcaagtacataatctatttgtggtatgcttattgtggaccagtagttcttctggaacttacttttatttccttttactggttttaatggttccttttgtcattaccctatttcagacagttgcaacagtatgtgtatttctggcgtcgaaagttgaagatactccttgtcccctggaccatgtagttagagtggcctatgaaacaatgtataggcgggacactgctgcggctcaaaggatccgtcagaaggatgtttttgagaagcagaaagcgctcattttgatcggagagagattgcttcttacaactattcgatttgatttcaacattcagcatccttatagaccacttcttgatgccatgcaaaatcttggcatcaatcaaaaagaagtgaaacaagtagcatggaactttgtgaatgactggcttaaaacaacattgtgtctacagtataaaccccagtacatagctgctggttccctttatctggctgcaaagcttcacaatatcaagcttcccttgcatggagcgcatgtttggtggcaccaatttgatgttgcaccaaagcctctggaagccgtcattcatcaaatgatggagcttgcggctttgaaaaagttgatgcctgctcgacccaatccggttaagctgaaggaaactttatgtgaagctaaactgagcttatctaatagcccagactctgtgttgaatcaatcaaacttgttaataagcagctcaagtcctgatattggcgagcccagtgacaaagtgcaggtggattcctgccaatacttgataagcagtcacatgggtgattgtagggtctcaggtcctgacagcagttcgttgaatacttgtgctaatagaaatgtctcttgtaaagcacatgatgaagagagcttggatcaggccttaataatcaaacatgacagtgggatgatgccttctagtaatcagacatcattatatgctactgtaggcactgagggcagtgctgaactgaagcaggatgtaagccattgtaatgacttcaatatcagagtcaatgacgaaagcttgaaccaggtgttaagaaatcagcatggtgatgctatcccattacctgacgtggtatcgctggatgccaaggtggacaaggaaaggagttggtgtgtggaaccattaattgcaaactctgattgctgtactgacagtgttaatgtggatagcttgtgcactgatcagagattggctgatgctccttcaggccccacagctgatgcaccatccatgctggccgaggaggaatcttatccttttagtgcaaagcttgaaaatattgatgttgccaggatcaaaggtttattgatgaagaggaagagccggagagagatccaagaccgagccattgcttcagatggtctaagtgaagaagactggatcgagagggagcttgaatctgggattgttacaaaccaagaagccaattgtgctgccatctcagacgagctaagtgacgaagcctggattgagagagaactcgagtcagggattgtggtcggaccaagaaatgagcaagcgatcacttttgatggtttgagtgaagatgattggatcgagagagagctggagtctgggatcatcgttgagccagcacctgctaccaagaagcggaagctggagtcaagctgttagctctgcattcgaaggccagattccaagcaggtgaataataacagatggttgcgagtaggaccacatcgaagccaagagatacatgtcgcacagatgggaggatcaatattatcctttttttatttctttataaccaaacaccttggagtactttgacacaaggggtgtgttcacagtgggatctccccagtttcttgaatgcagaaccgtatccgttgtatttgttccttcttgtcgtgagtgtaaatctagcgtgtccgaagttcggttttagattgtaggtgtaactgtagcagggattatctggtgttaagcccaacgagaaaatgattcagtgtaactgttactgtaaggaaagaagttattcagtgtagatttatggttaacacaagaagaggcaattactggtgtatgatgtttataaattgatgatgaatgttactggcagctcaaaagaaaagacagttactggtaactaaagaaaagtacgtttaacggagctgatcacattcaatcccctattgagctgcccttggtcgtcaattgtataacaactttctgcgtgaccatcaaaaaat

SEQ ID NO: 28383 - DNA, 2473 bp, Zea Mays
agagagagaaaattataccactcctctctgctgtccaaggcaggggccaggggcgggcggacagcggaggcaagaggcgcgagctcggcccaaggcgctgagggagacagccagccgctgcattgcgctactacattggccaggagggctcgccgccggggggaggctcggatctcgccgtctctggccacccgtacctgctgccgcgtgcttcacttggtgccgctttccgcgcctactggcgggcggcctcgactccagcgcggcgtgatctggcgcgcgccaccgacgccgctcgcgtggggaggcctggatcttggcgcgccgcgagaccccggggaggacggcgacggcgcgctcatcagtcgcccgcagtccgctgagctgctgccgactgcgcccggcggccgggagatctggccgacggcgcggcgctgcagatcccgtcctgcctgcgcgcgtgggcacggctcactgctgctgtggaggctgttacgcgcggtggtggtaccgatgggctacgggtacgtggaacccttcctgcccccacagcagcagcagcagcaggggggctacgggcaactgcaggcgcagctggctccgcggccgccggcttgcccgtactcgtcgtccgcctccgctccgccggtctccgcgtcctaccattcttcgcccccgccaacgtcgcctccgccgctaagcagcccacctccggcgtcccctttaccggagccatcgccgccgtcgtctccgccgccggcattgttgcctcctccgccggacgctccccctccgtcgcttcccccgtcaccgctgccacatccaaccccgtcaccgcctcaagccccgccgcccccgctgccgacggaccagccgcgcgttcagccccgcgtatacccatcaccgccaccgccgtcgcttcctcctcctcctccgccgcctcccaccgtctcgccgccatcgccgggtccatccaactctccatcgccgtcgccgtcgcctgctccagctacacaagctccagctccggctcctgcgcgtgttgctgcctattcgcctcccccgccaaaaatcgcccctcccccgccaccgcactatcgcggcaagtcgcattacacgccgcactcgcccgtgaagtcgcattcgaactcgacccatgcagctagcggcagcggcaacaacatcgagatatcgagggaagcggccaccaccatcgtagcactggccggtctcgctatgctcagctttattggcgccaccatttggttcgtcaagaaaaagcgccggcgcattgagcccccggcgacactgcctacacagcaaccagctcctccgccaccgcccaactacattccatcttcggctggatcctcactagcttcagatgggttctacttgagatcgccagggtatcctttcatgagctatcacagatgactttgcagaagagaaccttttgggggaaggtggatttgggtgcgtgttcaagggcattttgcaagatggtcgcccagttgccgtcaagaagctcaagattgggaatgggcaaggcgagcgtgagttcaaggctgaggtcgatactatcagcagagtacatcatagacatttggtttctctagtaggctattgcactgcggagggccagcgaatgcttgtttacgattttgttcccaacaacacactttattaccacctccatgtaagtgaagcatcactggattggcagacaagggttaagattgcagctggagcagctcgagggattggttacctccatgaagattgtcatccacgtattattcatagagatattaaatcatccaatattttgttggataacaacttcgaagctcaggtttctgattttggacttgcaaggaagaaaacctgttgatgcttctcagcctttgggagatgaaagtctggttgaatgggctcgtcctcttctgatgaaggcaatcgagcttcgggagtttggggaccttcctgaccccaggatgggaaacaggttcgatgaaaacgagatgttccatatgataggagctgcggctgcatgcattcggcattctgcagcaatgaggccacggatggggcaggtggttagagcactagatagtttagccgactctaatctgaacaacggcctccaacccggacgcagcgaggtgttcttagagccacagacggaggagattcgactgttccagctgagggagttcggcagccgggactgtagcgacgagctgagccaagcgagctggagaagccgaagagatttgtgaacagattcgtgaagagagttcggttcctggcattcactgacaaatattactgctagtgctagtgtctgtgtgtaaggattagggcagttcacttgtatgcttaactgaccaggcgctgcgttgggcgggcacaagtacaatgattagcggtgctaatttttattcgtggctcaattatacccaacctccgg

SEQ ID NO: 28384 - DNA, 2591 bp, Zea Mays
ctccgctgctgcagcgcacacgtgtagtaccccatccccacaggccagtaggccacagcccagaagaattgtatctcgggcggacctacttcctcgactcctttgcgcatcgccgggcgtcctggtcttctgcgagaagcacacgaagcaaccggggcacctccgcctgcgcctcccctctcagctactctgtttgtacgcggccgcatccatttcgtctgcccaggaatggaggaagaatatctgcagtgagggactgaggggatcccaagttccaaacaaaactcaccgaggaaaatcattttccgacatggtgaggacgagaaggaggttggtgctgctgctgctcctcctcggcctcacggtgctttccccgctcgcgctctacactagccgcctctccgtggcgcttaactctataccgcgggttttccctggagagatcacgaatcagggccgtggcgtcaaggcagataagctgaatgcgcttcctctgcaaacagtgagctccttgaaagaacctgtcgacattgtcttctcagaggagctgactgaatctaagagccaagaattgcgattgccaaaggtaggtgcgcacaagagccgcgtgctctctgaagtcacggttgctgatgatgatacatcatcgaaagataatgaagtgattgagcaagtaattacgctggaagcacaggatggtggcttggtgaagggagcaggtgtttcagatgagcaggagaaaaacattggatcactgcagcaatcttcttctgaggaaagttcacaggacactatgcctaaacagacacctgcaaaggttgttgcggagaactcccaatcagctagaacagacggtaaaactaaaaccactgttctacctgatatgcggatccgaaatatcaaggatcagttaatcaaggcgaaggtataccttggtcttggatccattagagcgagttctcaatatcttaaagacctacggcagaggatacgggaagttcaaaaagtgcttggtgatgcatccaaggactctgatctaccaaagaatgcacatgaaaaggttaaagcactggagcagatgctgattaagggaaaacagatgcaggatgattgttctattattgtaaaaaagcttcgagctatgcttcattcagcagaggagcagctgcatgcacacaaaaaacagactgtttttctgacacaacttgcagctaaaacccttcctaaaggtcttcactgcctccccctgagactagctaatgaatacttttcattggatcctgttcggcagcagttcccaaaccaacaaaatctcattaacccaaaactgtatcattatgcgttgttctcggataacatactagcaacagcggttgttgttaactcaacagtgttaaatgctaagcatccttctgatcatgttatccacatagtaactgacaaactgaattatgctccaatgagaatgtggttcctctctaatcctccggggaaagcaacaattgaagtacagaatattgaggagtttacatggctaaatgacagctacagtccagtactcaaacatcttgggtcccaatccatgattgattactactttggaacgaatcgtgcaaactcagattcaaacctaaaatatcgaaacccaaagtacctgtcaatcctcaatcatctccgcttttacctacctgagatttatccaaagcttgacaagatggtctttcttgatgatgacatcgtagtaaagaaggatctggctggcctttggtcaatcaacatgaaggggaaggtaaacggtgccgttgagacttgtggagagagtttccatcgctatgatcgatacctgaatttttcaaatcccattatcaccaagagttttgacccacatgcttgtgtttgggcttttggaatgaatgtgtttgacctggctgaatggaggcggcagaacataactgaaatttatcactcgtggcagaagcttatagatcactctggaaacttggtactctccctccgggtttggtcacattctggaacaagacatttcccctcagccggtcatggcatgttcttggtctaggttacaatccccatgttaacagcagagacattgagcatgctgcagtcatacattacaatggcaacatgaagccctggttggagattggtctacccaagttccggagctactggtccaagtatctggattatgaccaatctttccttcgggaatgcaacatcaatccatgaaggaacctggtgcttttagtcccttctgacataaccaatagcctgttttctgtcgatgtgcgctttagtgtagtcagcatagtactctcttgctttagatatcagttgttaacaagatttcttattgcctgtgcttcttgtcagaccctttgcataattgcaggaatatctgttatgtttttagagtacatgctttggagcagggcaaactttagatagtgcaatgctcttatgcgatatcgcctttatgtactgaacgtttgctgcaatcctgtaatttggaagcaaactttcccaacaatttaataggtattcaattgggtatcatattgcattgcacc

SEQ ID NO: 28385 - DNA, 2929 bp, Zea Mays
agagagggagggagtagaaaactcttgcaaagaaacctgcaactctgcaagcaaccccacaaggcagccgttctccactctccatctcgaggatcaaaagttcaaaacaacagagaccgaaactcgccatccaccagacagaaaaagcttccagctcccctcgccgaaactcgccgccgtctcctcgccttctgcctcgccaccggtcccgtcgcggtttcacacgcatccgtccggtggacggagcaggctaggttgccggctgcccccggtcgtccctccttcgccgtcgagctggaggacacgcgtagcaacgccgggttcttctgcggcgagctgtggtgtggcctcatggagcccaagggcgagttggctcagaagcgtatccttccttctcgtttcgctcacccctattgaagaagcaatcaacagcttggaaattgatgctagcacgaaggcaagcaatgtcaacttgcctgctaagaaagacgcaagttcttcagatgcagtatcttgcatttcctccggcgatgcagctagtactgccaaggaaagtgaaatgaaccgagaaacttcttttggggaccaagggatgtattactatgggtattattatcctggttcatacggaggatgggatgagaatggctactttgttggatataatggcgtagaggtgcacccagcagtggttcaaactgacaatggttcatatctgtgtcatcttccgggatatgaaaatggatatgcttcttatagtcaggttgttcctggaggcattgctagtgtggatggtcaatatgtcagcaaagaaccatattattccactgcacttccaattcaggatcctaggacacctggcatttttgctcagccaattgcttacagaactgaactagcatctgcatactcatgggacccttctttcgttcttctggatggggttcagggacatccagttggtgtgcatcaaacaaattatgctgcaagaccaaaatattcttttaataagcatgttattccttcttcgaaagccacccgcagtgcaaaatccgcagcagatactgtcaaaggctcatcatcagctctagaaactgtaacaaatgctgtcaatagcagcccaccatcaaagagtgcaaataagacacctggtgcttccataacaaaaggatatcttccatatagcaagtctgtgatgcacactaataaccaagaaaaaaacagtgtttatcaaagcaaaggcatcaatgtgaaagaaagtggcagaagctggaacagccgagagaagcttgggagaagtaagctaaatggacagggtgattctgaatctaatgagaacaaccataccgataacctgaaacatagtttgagccatcggtctgatgttgttggattgtcaagtgcaggggatgccaatgctagcataccttcacctgttgcaataagcaaaaatgcatgcaatctttcagatttcgttacaaagtatgaacaagctctattctttgtaattaagtcctacagtgaagatgatattcacaagagtgttaagtacaatgtctgggcaagtactcctaatggaaataaaaggcttgacaatgcctatagggttgcacaggaaaggatagcagaaaaaggaaccaaatgtcctgttttccttttcttctcagttaatgcaagtggtcagttctgtggcgtggctgagatggttggtccagtagatttcaacaggaacatgaacttctggcaacaggacaagtggaatggtttcttctcggtaaaatggcacattatcaaggatgttcccaatccacaatttcgccatataattttggagaataatgagaataaacctgtgacaaacagcagggacacacaagaggtcaatttttcacaaggtacagagatgttgaacattttcaagaacttcacatgtaaaacatcaatactggatgactttgacttctatgaaaatcggcagaaagtaatgcaggacagaagaggcaagctgcttactacatcgtttgatcacccattgccaaaagctgaaaaatctccagaaattaaaagccaaacacaattgataagtggcccagaagttggtagagccaagagtgatgaggggcagggcaacaatgttgggatggtacttgatacaaccaagaaaaatgaggagcagagcagcaatgttccagaaatactcgatgcagcctgtagtaacaaggagcaacccaacaaaattgcaatagaaggatgatgcctcggctagttggtctgggaaaacgagatagcctctggaactgacttcaacctgaaatgataagtttgatgtgtgcaatatcaagaaaccaccattggtcatgggttctcttccattatctcatggaagcggggaaagggaaaaaatgaagcaaaggagctgtcttcccacgagaattgttcgatgactgggaaaaaaggttctaggactcatttaggttgaggaccctagtgctaaggcattagagcgccctccatgtctattttttccccatcttggagggtcctttcttttgtcgtgttgtgtctttttttctcttctttttttctattatactgcggctgatgtccaaagaagccagtctgccttatgggtgggtgtgctttaagggaatgtttgttgctttgtgggttgtcctctaggatgtggtatgttttgtttgttttctttaatctgtgcacttgttctagagactgacatagaagaaaagagaaaaaaagattgtgagggattaggaattaattacagtaacattatcttatgtctctgtttcttccattatcaagaaaagggaacaaaaaggattttaaaagctgttgatgtgtacttcgccgataccatttgtcttgcagcctgctacgagccttccgttttcgcttggttctttccggc

SEQ ID NO: 28386 - DNA, 215 bp, Zea Mays
tacttgcgcagagagcggatgggggcacagctggcgacatcgaggcgagcagagaggctgacggcgttcgtacgggggcaggggtcagcgagagtgcctgctgcgcgcgcaagtttcggtggggttccacaacggtgacgacagtgagctccggcggcgagggagtgagagaggggcgagctcggctgtgggaaggagaaaagaggagctcgacg

SEQ ID NO: 28387 - DNA, 2213 bp, Zea Mays
aacacaatgaacacaatagcattaagtgggccttaactgcctgcagttcctgggctgtggaaatcacacacacggcggcatcccggaactcgccttcgactccgacagccgacacgacggcggcatcccggaccccaagccggccgccgcgtccgagagcgtcattgttgaatagatcaagtccaccccgggtcggtcggcatcctactcccacctactcccctaccaacacgcgggggaggggggacgccatgaggaagactttctgcttcgggggcagacgtgtggccaggaagatgtcggaacgggcgccgatggtcgacgggatgataaggtcgtggcgttccgcgacatcaacccgtcggcgttcaggtactcgattaggagttggtgttcatttcgtttgtacagctccctgttgcttggattgatctagatgtcgcattacgggtcatcggacgaactagggcatgggttcatttcatcgaacacctggtgagcattgcaaacaacgcattttttgttgcagggaaaggtggaagtattcgattcgagtttttttttttgtgctaggctgctacgttctttgcgtgtctcacttaattgattgccttaagcccttacaaacttgttgtttttcgaagtattactacgtgatcctaaagttattagtgggttgtcctcagcaatttacttttttatagactatgtctccattgttttcattcactttcactgacacataaaaaatatgttgttccttatcacttatcagctggcagtacttctgtcttctcgccatctatatcagtctcaccttaattgttatataagttagagtatcgtttcaaatactaactcataagtgctcctttggacatttgagggctactagtagtaatgctgaggtgatgtacacaagttcatgttcatgtatatgaaacttcttcgttcatatgagcagaagcatcacatttccttgctagaagttatcaggaaagtaatatgcgcacatgaaaatatcatacattttactacatatctgggacaagatacagtatatctttgtaaatggcatagttggtttataattgaaacataatagtttgtgagaagtacatgatgccatagtgatgcaaacagcgtggtacattgaagtcttcttgtggttcttgctggctttgtgtgtgataaccgtcagacatgctagcgcgatttttcacatgatttactcacagggctagaacatgagctcagttctattcacaaccagaagaaattatctattcattattactattttagtacctcattgtactttgttcatcctcatcttttttcttgcttagcttcatctccagcccaccccaacttgcttgggactataagcctttgttatattatttttctgagtgcttgtacttctactgtagcaattaacaaatttatttgttgaatatttgtttagtgatgtgtgcgatatttgtaggcactatcttgtcatacccattgatcatataccaactgtaaatagcctccgcaaaaccaaagatgatcaccagttagtgagccacatggtgaaggtggggaaagacttcctcaatcaagatgctccaaattctgaggaacacaggtttgggttccatcagcccccatttaatagtattgatcaccttcatcttcattgcctggcactgccatttatccccagttggaggcaagtaaaatatacccctctgggacctttaggggggtttatcgcagcagaaaagctattggaaagaataaaaccagaagcagaagcatacagttagcatcaatatttttactgatacctgctatccctgcttatttgcattattttgtactcttatttatgggtcaatcacaatcagtacatttatgtgagtatttactctcttccctcttctgtaatcagctgacgcgtattgtgtattgtattcactgtttggacttctcaaagactagatctgtaatgttgaactcaatgaaactaaccactctagaagttaaactgagctttcattccgtggatatatattcaaatttaaataagcgtccatcgccccaatatgcaagggaagttacttgatgccttcagtaggtaagaaatcatagcctatctattcttcgtgctttaactttaagaactgtgtggtagttgttaagttaggaagttaagtagtacttgg

SEQ ID NO: 28388 - DNA, 3223 bp, Zea Mays
attattcgaggccgtagttccgagagaagcgagcggaccctaaaagagaggaagaaacctgctggcttccttctcgtccccaacaggcgtccccaagactccaacttcctcgatctagccatgtcgtccgcgccgcctgcccaccagtccaagccttccccccaccgccggcagcaccacaacctcggaccgaggtcgccgccgccgccgccgccgcagtcccagcgctacgtacccaaatccgccccccgctgcggcgccaaaaccctcccccccgtcccagccatcgctcactaccgcgctccgatcatcggccgcctcgccctcctcgtccggctctggcgggagctccagcggtagcgtaggtgtccggtcggttgatgcattcgtcgcgtatctgccgcatgacgaggcggtcgcggcgggtctcggcggcctcgatgcacacgagtcgcaggtcgtcgtcgaccacctcaacgacgcacttgccgcgctccttcgggccaagcctcgcgagttctggctccgggtggcacagaacacttctttgcatgaattccttgatagttatctacaattcaggcacaggtggtatgatttgccacaccgaggcccaaagggaactgtagcaggtttggttgttggggagcttgagctttgccgtcgtgtatttatggtcctctatcgcatatcctcgaataaggatcctggagcaggtcgcggcgagtcccttagcatgaaggagcatgcagcccttctgctggagaaaaaattgcttgatctaccaaaattgttggacatatgtgctatatatgagcatgacaacggcaagttaacaagttcactggttacgaatgttattaatgtgcagccgagtgtactggatgacattaatattgtcattccccagttcctcaacattttccacacgatgcatgataggtgcatgacatctttacaggtgctcacctcaaccggatcaattgataatggatatgttcagcttcagaaagatttcatggaggtgttagattttataaatgatgcgattgttactctggattcttttgttggtgcttatcaacctgccgctttattgttctgtactaattttgaaatgagctatggagttgaggaattgctgaatgctcttgcaaggctgtatagttcattgctaccatcattgctccatgggtttaaagttatgcccaagtctcagagcaatgcagaggcatcacttgacagcacacttagtgacattcctcttgctataaggatgttgtcaaagagaacagcgagatttggttggagattgttgcactactgttatttgaatgatcaagttagggagcatgatgctcaaacttctactaagatgtttccagctaaagtcgaagatcctatgatcaggggagacatcttggttcaaacacttaaagatataaatagagaatccacttactcttctcaagtgaatcatggaaatacttttctccaagaacttgaaagtgaatttcaattaatgagccagattggtgatattcggaacaaaggatggatatacatggatgatgagcagttccagttcttatcacgattgtgtggatctactcacacttcttggaatggcatatctgatttgccagtctcttctcatggtggtgaattacagcagaaggatgaggaaacagcgatggttgagtccaaaattagtcagataagggatcttttccctgattatgggaagggtttcctttctgcttgtctggaagcctacaacctgaaccctgaggaagttatccaaaggatattagaaggaacacttcatcaagatctgctagctttggatacttcattagaagagatgccacacgaaaaacctgcaccaactgctgtgaaagataaagggaagggtatattggtggaaactgtgcctcaaattacaaagaaaccccataaagttgctgagacacattactttgttcaagatggcctatcttcagcaacttcatcagcatcacaaggtagatttacaaggaaggccaatgatgatttgccggacactgcaatcctggactcgaaaaatgctaaaaatgcagctagatctgttatccttgactcgcaatatgagtatgaagatgagtacgatgattcatttgatgatcttggcttcagtgtggtagagtcaagttatgaggaaactgatggtgtcaatgacgctgaggcttcatcacatggcccaagatggagttcacagaagaaaccacagttttatgtcaaggatgggaagaattatagctacaaggttgctggttcggttgctgtatccagtgctcgagaagcagctgtcatgaggcaaactcaaaaagagacaatctatggtctgggtcgtggtggaaatgttccttttggtgtcccgaacaggcaacatatagatgtggaggcagaggaggttggtgatgctgacaactcaggcagaggttcaaattcccgtggccggggaagaaaaggcggaagggaaggcaaccgtccggaggagaatgagagctccaatggacgaggctctggctttggtggtaaaagaggaggctggagtcagggcaatccggctgaggaaaactggaaccctaatggtcaacaaggttttggccgtggtggcagaagagggggctggaatcagggtggcccagcgaaggaagacggtaactctagtggcaggcaagaaagttttggccgtggagcaagacggggcagcatgaaccatgaccaatcagccgaggataatgaaggccataataatcccgcacaagactttactcgaggaccagctcctcgtggtggccatggaaggggaggtggccggaaccatcacaggagagatcgggcaatgaagaagcatatgcaaggattgacagggctttagctgctggtagccttatgcttttgatgtgccgtactgtaaatggcatttttggaggcactcctacttgaccatccaaatttttgtgcttgttctgtttttaaatcaaataacgccatgaagtaacccacatatgttctcgtaacatttgtgattgccctaaaaagggtaatagtgtatgtagttctaaacatgcttgtaactcgttaaatacataattaattctctagcgactgaaaagaaaaatcatgaaaccaaaccaattttgttagctttttttgtcatgtgctatccagtaaaaca

SEQ ID NO: 28389 - DNA, 1300 bp, Zea Mays
atggcggaaatgacaagacgggtgccatatcgaatggacgaatccatatgcgcggaagaacaaattggggcctacaatggcgggagggaacaatgccatttcacgagccaagttaaaccgactcacgagccaacttcagtcaagccgagctcctctttgaaaagagagccgagctcgtctatcaaccagccaccgtgcagcggcaagggtgtcaaggtcccgtaaaatctggcttttctccctccccataccccgcagtcccgcacacacactcgctttcttcggttcttcctcctcgagcagccacttccgtctctaaccctacagcgacgacgagagcgaggccatgaaggggaagaagccggtcaaggagctcaagctcaccgtgccggcgcaggagaccccggtagacaagttcctgacggcaagtggcacgttcaaggatggtgagctgaggctcaatcagagcggcttgcggcttatctctgaggaaaacggggatgaagatgaatctacaaagctgaaggtggaagatgtgcagttatcaatggatgatcttgagatgattcaagtcattggcaaaggaagcggtggtgttgtccagctagtgaggcacaaatgggtgggcacattatttgccttaaagggtattcaaatgaacattcaggagtcagttcgtaaacaaatagtacaggagctcaaaataaaccaagcaacacagagccctcatatagttatgtgccatcaatctttttaccacaatggtgtaatatatcttgttcttgagtacatggaccgtggatcgcttgcagacattgttaagcaagtgaagactattctggagccataccttgcagtactttgtaagcaggtcttggagggtttattgtatcttcatcatcaaaggcacgtgattcacagggacataaaaccatctaacttgttggtcaaccgtaaaggtgaagtcaagattaccgacttcggagtgagtgctgtgctagcaagctcaataggtcagcgagatacatttgttggaacctacaactatatggcgcctgagcggattagtggtagcacttatgactacaaaagtgacatatggagtttgggcttagttatacttgagtgtgccattggccggttcccttatataccttcggaaggtgaaggttggttaagcttttatgaacttctggaggccattgtcgatcagccaccaccttctgcacctgcagatcagttctctccagaattctgctcatttatctcctcttgtacatttttttggttataatcgttt

SEQ ID NO: 28390 - DNA, 1799 bp, Zea Mays
atggccatcacaaacttctgcaacatcaggcatctggcaggggcagcagcagatgagctacgtgatgctgtgctgcttgttttcgccaacaagcaagatcttcctaatgccatgaatgctgctgagatcactgacaagcttggattacactccctgcgccagcgacactgagcacttgtgccacaactggcgagggtctgtacgagggcctggactggctgtccagcaacattgcgagcaaggcttgaatatcaaatgcgaactgactaggagctccggatgtatcatggaaacttaggacagaatcgcctctgcaacctgttaggtgtcttctaccggcacaatatattttttgtttggaatatgtaatgatgttacggttcaacgtttattctaccctactatactgttggatgttctttgggcctgtttcattttgcacaaggattggagttccaatatcatgctacattttaaattcgtaccccatcgcaaattttaggatgtataccaaattataggatattccgacattttttggagagtccgagcatcttgagttggatcaaatttatatcataaaacatttatgatactaaaaagtatcgttatttttttattagttatatttttagtgtatctatttggtgtcatgaaactgtgtttttttgtaattttagttaaatttgaggaaagatgaatctgtgatttccacagatggtggaaatgaggagacagacactgacagcctccatgttgctagaggattgtctcatcctgggcttttgtcaagtttatccaataaggcatcagtggtcccaacccctttgcttccttctggacaatctgatctccggttcaatcgtcttcgaccctcaattgatgaaagtgattgcaaatacaaaagattatttggctactatgttgctcgtgaggctgtaatcgatgaggaatactggatcgttgcatggttgagagcagaagatcagtatgaaaatgagtcaggcaatcggtaagacatttgtttttaagggaaaattctttagtgttccttattgtctgcactgttatatacatttactgttagcatggtcctttcagctactttatcattttttcctgcagctatgttgaaagctttaaaagaaagtttgcatcaaaggtacttgcgtaaacaacttagtagtgttttctatgtgcttaaacataattgagatatgatgtacatcttatttgtagcaagtaatgttaagaaattacaataacctctattcaaaaagatttgttgacgcacgttataaaatattcacattaatttgtcacatcctaatagtttctattctggctcacatgtatgagagtctgtcatctcattgcaggaattccatgcattaaagaagagatgcaacaaacaacatagagagaagtatatctgtcttgtcgtggtaaagaacgatgacatcaggcgaactgtcctgaatagtgttgttggtaccttagatgtatgtgtaaggcatcctctatatggggagaaatttcctgaggagcttggaaaaccgtctcttcactgtcgaatttatcagcctgatcagccaaaatttgggtatgtaacaaatgtatgtgttgctaaatatgcaaggcgtcaagggattgctagcaacatgctattataatatatgtccatatgttaattaaagaaaaacccaaaagccctaacattgacaacgtggccgaaatgacttgccgagctccaaaagtatcaagcaactccaagatttatgaaatgtcggcgtttatgt

SEQ ID NO: 28391 - DNA, 3487 bp, Zea Mays
gagcgcacgggacacccgccgcccacgccttccgccccagacccactgcacgtgcacggccacgcgacccagcccacacatccactccgctttttccaaccgccgcccacgcgaaccccgacgcggccgcctcgagctccactccgtttaccctgcaaccccatcctcctcggcttcccatgtcgtgctcggcggcggcgggcgccgaggccaccgctctcctgttccgcagcgccgctccgtccacgatcgtcgggcgtcaccgcctcgctatgtctcgccggacttcgcgccgaaacctcagggctagcattcagagagatagagcatcagcttccattgatgaagaacagaaacagatgtctgaagatgaaaatggcctactagacattcaactggaagatctggtaggaatgatacagaatacccagaagaatatattgcttctgaatcaagctcgtcttcaagcattggaacgtgctgacaaaattcttaaagagaaagaaactttgcaacagaagataaacattttagagatgaaactgtcagaaacaggtaaacaatctgtgctttctagtgaagtaaagtctgatgaagagagtctggagtttgatgtcgtaaaggaagagaatatgctactgaaggatgagatgaattttctaaaaggaaagcttattgagataactgagacagaggagagtctattcaagttggagaaagagtgtgctcttctaaatgcttcccttagggagctcgagtgtacatccacttctgcccaatctgatgtgttgaaacttggccctctgcaacaagatgcctggtgggagaaagtagaaaatttggaagacttgcttgattccacagcaaaccaagtggagcatgcttctttgacgctagatggttaccgtgatttccaggataaggttgacaaactaaaagcatcattgggaacaacaaacgtatcagagttctgtctttatttggttgatattttgcagcaaagggtaaaatcagtagaagagcgctttcaagcatgtaatcatgaaatgcattcacaaattgaactttatgaacactcaatagtggagtttcatggtactctcagcaaactaataaatgaaagtgagaaaaagtcaatggagcattatgcagaaggcatgccatcagagttctggagtaggatctctcttctgattgatgggtggtcgcttgagaagaaaatatccattaatgatgcaagtatgttgagagaaatggcttggaaaagggataatcgcctccgggaagcttacttgtcatccagaggaatggaagagagggaactgatagatagttttctaaagatggcactaccaggaacaagttctggtttgcacattgtccacatagcagcagagatggctcctgtcgcaaaggttggtggtctggcagatgtgatctctggtcttgggaaggcacttcaaaaaaaggggcaccttgtagagattattcttcccaaatatgattgcatgcagcataaccaaataaataatcttaaggttctagatgttgtggtgaagtcttactttgaaggaaatatgtttgccaacaagatatggactggaactgttgaaggtcttccggtctactttattgaaccgcaacatccaggtaagttcttctggagggcacaatactacggagagcatgatgacttcaaacgtttttcgtactttagccgtgttgcactggaattgctttaccaatctgggaagaaagttgacataattcactgccatgactggcagactgcatttgttgcacctctttactgggatgtatatgcaaacctgggcttcaactcagctagaatttgttttacctgtcacaattttgaatatcaaggaatcgctccagctcaggacttagcatattgtggtcttgatgttgatcacctggatagaccagacagaatgcgggataattcacatggcagaataaatgttgttaagggtgcagttgtatattccaacattgtgacaactgtatcaccaacatatgcacaagaggttcgctcagagggtgggcgtgggctccaagatacactcaaagtgcactccaagaaatttgttggaatacttaatggcattgacacagatacttggaatccgtctacggataggtttctcaaggttcaatacagtgctaatgatctatatggaaagtcagcaaacaaagcagctcttaggaagcagttgaagcttgcttccacacaagcttctcaaccattagttggttgcattacgaggctagttcctcaaaagggtgtacatctcatcaggcatgcaatatataaaataactgagttgggtggtcaatttgttctgctgggttcaagtccagtacagcatatccagagagagttcgagggtattgcggaccaatttcagaacaacaacaatgtcaggctgcttttgaagtatgatgatgctctggcacatatgatctttgcagcatcagacatgttcattgttccttctatgtttgaaccatgtggcctcactcagatggtagctatgcgatatggttctgtgccagttgttcggagaaccggcggtttgaatgacagtgtcttcgatttggacgatgaaacgatacccatggaggtgcgaaatggcttcacctttttgaaggctgatgagcaggattttggtaatgcactggaaagagctttcaactactaccacagaaaacctgaagtttggaaacagttggtgcagaaagacatgaagatagatttcagctgggatacttcagtttctcaatacgaagaaatctatcagaaaacagccactcgagccagggcagcggcataaacagcagagacattgagacagttccctgctgtctccatgaagtctcctagatgctgtgcttaaccgtatggtaaagaaatatggtctgtatcagctcagaattaagcatctgccgaggaagcgcggtgcatccggactcgggtgtacaaggggcgacgtggcgttacgtgcagtccccaacgaagcaaagagacagaagtacagctgtacagaacggatatcttgtgaagcacacattgggatcaggacgtttggtgctgcagctactttcggtgcagaagcacatatatacgagacctgccagggcgagcaaatacccagttatacacgcgattgctcagctctatcaagctgtgaattgaaagatttctatagtgtattcacgcgacgttttcataaactagtgtgagttatgtactctgaccagtgaccagtgcgaagtctgtgttgtctcaacaatgttgcttggtataaaatgctaaaatgacgtttaagacgagaggggtttttagaaaagagagaaaataagagttttatgggtatgaaactcggttgccttcatttctagctctatatgagtcttggaattaaactccctataaaacactaaaactagactatgtattgtgaat

SEQ ID NO: 28392 - DNA, 816 bp, Zea Mays
ggtcgcactccaggccgccgcttctccccgtgcagtctcctccctcccccggccgtgctccaggccaccgccttctcccccatgcagccgcctcctcccgtgcaacctcctccctcccccttgctcagccgctcagctccgcctgtccgccccccgccagccccgcctcctttggcttgctattgctcgcttgttgtccggccgccctgtcccgcactcccgctgtccgcccgtcggcctgtcccactgtccgcttgctgttgctcgcttgttgttgccctgctgtcccgcactcccactgccccgttgttcctcgcttgctgttgcttcagcagttgctcaaacaaacagctttgcgtctgttcctgttcctgttgctcgcttgctgaagagctgctccgcccatcctagaaggcggagcgaatggttgatggcgaagccgcgtctacgaggttgaattttggtggcggtcctagggttcgactggaaggggaaaaggaggcaacgactgaaaacaatgatttgcggaagagatgtgtaccagtgaatatccgcaatgagagacaaggtctaacattttacgcaatcacatccgtgatatgctggactagtaaataatagtttttccttatacctttttgcgtatccgcagtcatgtttggagttgcttgagtcagccttaggctgtccgcggcagatcgtgtaaaatagcgaatttgtacgatagattacactgtttactccctccgttccacaatagaagtcatataagacttttaacaaattcgttcaataattaatatgtatgttttgtat

SEQ ID NO: 28393 - DNA, 1139 bp, Zea Mays
gcgtcgcgtgtggcgccaccggcaggcgcaggctgtgcacacgacacggtcagtccgcagcgcactgcagtctgcgcgtggcggtgcacccattccttctggtcccgtgacaagcagcgcgctagacacacacgcgcgcgaacacgaacagggacacgaggccgcggcggccatggcgagaggcggcggcgatcggagtcgggaggatgatcccttctccgacggcggcaccaccgaaaccgactcggacgagtcctctccgcgtggggtgggggcccgcggtcccggctccacctccaacccgatcctgacacgcctcgcggtgtcgcggaactcgagcccgctggccgcggccaccgcggccccaggggtctgcctcctccgcttcgcctgggagtccgccgcgggctccctcgtcggcgccgtcgttggctacggtaaaggtttggttatgatgaaggggattaaaggatcatttgctgatgctgcgtcatctgctaagatatttgctgttcttgctggtgttcaaagtttagtagcctgctctttgagaaaactacgtggaaaagatgatggagtcgcaggctgttgcactggccttgctctgagctttccaggtgcaccacaaactctgattcagagctgcttgacctttgggactttctcttacatcattgagaagctaaacaagcagcaacctgcgctggcgctcctgcctgcgacaggtgtgatggatccgaaggctggacaaagcgttcttccttccttcacacttcctcctctggataccatggacgaattttctaagttccaaaactttttgtcatccaaatttcggggaaactgagttatcctggtggagtgacgcctagttatctactctggaacgtgtccttgtaaatgcgtcaatggtcaatctgagttttttttccccttgtttattcttcgccaatgtatgtttccaaattccaaggtagtgttttggtagtgttgatgattctaccttgacatatcgaacacaatttgtaaataaggcgagcagcttgtcctttgttcaactgattggatcttcggagttttacccacagaccgtgccccgtaagaaggaagaacatgcaccttgattcttacgagtgtgt

SEQ ID NO: 28394 - DNA, 1764 bp, Zea Mays
cctctgctcagtttccaccgccgcactcctccacccagaccctcctccctcacggccccacccacctcgcgtcctcgccggaaccctaacggtgaccgcctgccgtgcccatcggcggcgatcgcgttgctgcgcccccgatgagttacctctgcgcgggcagttcgtcgttcgatgaccccgacgtggttgaggtgtcttcggccaccgccgcggctgcggggtgggcctccggccaccacaagaggaagcggagccaggttgtccctcaagaagtaattgaaattgatgatgatgatcctgatggagtcataattattggtgataaagcaccattggacaagaataagcaaactgttgtatgccctatggattggccaaagcatgccaagagtggttgggttcaggacatcgctggcccaagcacatatgcttcaaaatatatcgattcctgtgttgacctgaaagtgtttcaagatgaggcagtttacaactattctgatgactgtccctatgcgggatttgaagactatatgtatgatgaagatgagtttgaggttgatggttatgatgctctgcttattgaaagtgagtttaaatttggtttgtctgccaagtttgataacctccatgctccacctgttctggaggtttctttaccatggatgcagaagactgctattgatattgcaaataagaccaaacccactaaggttgtagatgataaaatcgaagaaaaatacaaggccttcaaacgatttgatactgttgatgatcatagtgatcattattattcaaagccaacgtcgagaaaggttcaggtggtaaaaaagccatcaaaagactgggtgaaacgtatacagcatgagtggaaagtcctagagagagatttgccagatactatatttgtgagggcatatgaggatagaatggacctgcttagaggtgtcattatgggaccggctgggactccttaccatgacgggctcttcttctttgacatatactttcctcctcggtatccaaatgtcccaccgatggtgaattaccgtgctggtggtttgcggcttaatccaaacctgtatgattgcgggaaggtgtgccttagcctcctcaacacctgggacggcagcggatgtgagaagtggaatccggccaattcaactatgctgcaggtcctggtctctatccaggctttggttttgaacgcaaagccctttttcaacgagcctggctacgctatgcatgctaacacggctcacggggagaagaaatcgctggcatataacgaggacacgttcctgctatcctgcaggacgatgttgtattctcttcgaaatccaccaaaggttcttgggaaggttggtttggtgttgatgaatcagttcgtatcaaagaacttcgaggatttcgttgctggccatttccgccagcatgggcgcaacatccttgtcgcttgcagagcctacctggacggtgcccaggttggatgcctatcgggcgatggagtgcaggacgttgatgaaggcgacacgagctgctcggtgaggttcaagcagtcactgaagaaactcgttgaggagctgttgacggagttcactgtgaagggcgcggactgcggcaagttcctcaccgaggagaaggcaaagaggtcgtctggagcttgctccacatggacagcggacaccacattgaggctgacatgaagcattggcccctcatagctcccctgccgtcctacgggagaggaagggacgagcctgg

SEQ ID NO: 28395 - DNA, 2637 bp, Zea Mays
ctttattcaaggcaaaatctttgggacccccactacacactgatgtctttggaggtttctatttgacatgtccaaaccatctcaaccgatattggacaagcttttcttcaattggtgctacctctatcctatcacgtcaatattctacaccgtacaacatagcaggtctaagcgctgtcctataaaacttgccttttagcttgtgtggtaccctcttgtcataaagaacgccaaatgcttgacaccacttcatccactctactttgattctagggctaacatcttcatcaatatacacgtctttgagcattgatcctaaataatgaaagcaatcttggatatcatcttgagctggaaagcaagaagaaacatgtctcttgttgttaagctacgatacatcttgaagttactatcagctgcttcttgggttgtgattttgcctgtaacttatgcatacacttggaagaatccaactggtcttgcaagagcaattaaaagttggcttggtgatggtcagaatcagccatcattatacattttggcagttgtgatttatttggcaccaaacttgctgtccgctacactatttcttttccctgtaattaggagagctcttgagagatcaaatcttaaagtcgtaacattcataatgtggtggtcgcagcctcgcttatttgttggaagaggaatgcatgagggcgcattctcccttttcaagtatacaatgttctgggtcttgcttttggccactaaattggttgtgagcttctatgtggagatcaaaccacttgtgcagccaacaaaagatataatgaaggagccaatacgaacatttaagtggcatgagtttttcccccatgcaaataacaacattggtgttgtcattgcgctttgggctcctattattcttgtctatttcatggatactcaaatttggtatgcaattttctcaacgctaattggtggtgtctatggggcttgtcgccgtcttggtgagataaggacattggggatgttgagatctcggttcgaatccctgcctaaggctttcaatcaatgcttgattccatctgacacaagcaaaaggagaggattccgggctgctttctccaaaccttctaagacatctgaggataccagagaacaagaaaaaatagccgcaagatttgctcagatttggaatttaattatcacaagcttccgtgaggaagatttgatagacgacagagagaaggacttgttacttgttccatactgcaaagatcgtgatatggatataatccaatggccaccattcctgcttgccagcaagattccaatagcattggatatggccgcagatagtggtggaaaagatcgtgatctaaagaagaggatgaaatcggatccatattttacttatgctatcaaggaatgctatgcttctttcaaaaacatcatatatgaactagtgatcgattcacgagagagaggttacatacaaaagatcttcgatgcggtggatgagcacatagcagaagagactttgataaaggagctgaacatgagtaaccttcctaccctaagcaagaagttcattgagctgcttgacttactggaaagtaacaacaaagaagatcatgatcagatcatcatattgttccaagacatgcttgaagtggttacaagggacataatggttgaccagctcagcgaactactggaattgatacatggtgcaaataataaaagatctgaaggaatgacatcacttgaccaacaagatcagttgttcacgaaagctattgattttcctgtaaagaaaacccaagcatggaatgaaaagataaaaaggcttcgacttttactcacggtgaaggaatcggctatggatgtccctacaaacctggatgctaggaggaggatatctttctttgctaattctctttttatgtcgatgccagatgctccaaaagtgcggcaaatgttgcccttctctgtcttgactccttattataaagaagatgttcttttctcttcacaagcactagcagaacagaatgaggacggagtttccatccttttttatttgcaaaaaatctacccagatgaatggaaaaattttcttgaaagggtgcattgtgagagtgaagatcaactccacgagactgagcattctgaagagcagcttcgcctttgggcatcataccggggacaaactttgacaagaactgtaagagggatgatgtactacagacaagctttagtccttcaggcttcccttgatatggccagagatgatgaccttatggagggttttagagcagctgacctgttatctgaatctgatgaatcaccactattgactcaatgcaaagctatagctgatatgaaattcacatatgttgtatcatgccagcaatacggtattcagaaacgttctggtgatccacatgcacaggatattctgagattgatgaccacttatccttcacttagggttgcgtacatcgatgaagtcgaagagcctagcaaagacaaaaataagaaaatagagaaggtttactactccgcattggtgaaggcagcagtaacgaagcctgatgatcctggccagaaacttgatcaggtgcacaacagctgtcagagctgtggcgg

SEQ ID NO: 28396 - DNA, 3861 bp, Zea Mays
cggcgcggtgcacgttctgcctccggcaacccgccccgcccgcggccgcatccctcccgcatcccgcggccgcaccatcaacggcgcaacagccgcatccagtccctcccgcatcaacagcgtcgcagccagtccctcccgattcgcgcttaatccccgcatccagtccctcccgcatccagtccctcccgcggtgcaatccagacgcaaacaactccattgaccccgattcgcgtacatgctctctcacagcaatccctgctctctcctcgccaacgcctctcgataaactccatggaaggttcacactgatgcgctctgattccttgctccacgctctctcctgctctcgcgctctacatggaaggtgaggccgacgcccaaatcgacggaatccctgctctgcgctctcccctgctcccgcgctctacatggaaggcgaggccggcgcccaaatcgacgggatcactgctcggacaggattgcggcctcgatccgcgctctccagattcgcctagattgacagcgtccgcgccgcgcttgcccagatcgatggaatctaggtctccagatgcaagtccggggctcgctacccgtggaaggcgaggagagacgacgcatcggctctcgatccgtgctctacatggaaggtgaggcagatcggggggagtgtgtagagaaatccaagcgaaaccccgcgagagcgaggcgacggcggacggaggcgagtgggtgagccgcgggcgagagacgaggtagcgggctagcgcgatgccgtcgccggttgtagtggccgcgacgctgctggtggtagcactggcggcattctgcggcacggacccgctccggacggacagcatggtggacttcccggggtttgagtcccacctcgtcgacctccccaatcccgccgagatgccgacgcacgcggatgaatgggagcggctctgtggagccgatgtgcggttctgcggcgaggtgcaggggcccgagagcatcaccttcgaccagcagggccatacacgggcgtcgccgacggccgggtcgtcttctgggacggcgagcggtgggtcccattcgcgatggccttcccgtgctggacgcaggagctccacggagggccgaaggcctcgccgctggagtatctcccagcgagcatatctgcaaccgcccgctcgggctctgtttcgataagactggggacctgtacatcgccgacgcctacttcggcttgctcaaagtccgccgcgaggccgggctggccacgctgctcgcaacggaggccgagggcgtgcgcttcaacttcaccaacgacctcgacctcgacctcgacgacgagggcaacatctacttcactgactctagcattcactaccaaagacgtctgtgatgccatgccctcgctctcttccctctgctttgcgcgcttggttggatgctcacttgattcctactgaccacggggatggtgatcgactgattgttaacatcacttgattcctctgctttatattgattcctactgaagatggacaatataaaaacctaaaatggaccaattctttctttgagggatacaaccctactctggtgtaacttatacttgttctagcacttggccctctgatctggtgaataagttatgcagaagaaaaattatgttttattttatatttaactgtactttgttgtagcttgtaggtactgatcagagggccaggtgctatccacgaatgatagtgtaatgtctaggaacgatagctgatttggaaaacctgcaaagtctattcacaacaggtacactgccttcccaattaaggaaaaactgacactcatatcccattgaatttgctggctatgcatacctgttcagttcacaatgatataaccacttactttatgtaatgtgaatacgtttattaaaatagttatgatcagcatatccttccttaatcgacatatttttttcttctatgtaccttctattcaggttacgaatactgtaaagataatttagaatttctcatacaaatccttaaccactgtaaatatatggggaatttctaaaatgtgtttagattcatacatgtacaagtttgtattatgtttttatgcatatttatgaatctaccttataatcgattttatattgttgtctcacttattcctctttaaaacacacacttgctgttttcaaatttcaagtcactaattgttactgttcttcctcaaaaaaataccactgtaattaagttgccgatgcagtgatatataatggtcacctattatgaagaaatagtgaatgggagaagggttgagttttggagccggtgcatgcaaatcatataccaggtttatgctataatgttttccttatgaagaattaaatatttgtgtgtttgcacagcgaggtcatattttcatattgattttctgtacctgggactttggagaggggaacacgttccaaaaccggagcgtttcatcaccagccccagtaactatggtctgttggtatgacctcgctgaggttgttgccctcaccgagagcatcggcaagccgctcgccgaggtgctcaaggagctcgggaagagggttccagactcccttgtgaagacccgcatcgaggatgatggcttcactatcaactcgagaagagggttccagactcccttgtgaagacccacaactagagaaataggatggagagggaaatttactaagagaggacgtgtaacaaataaggccaggaattattagaatgaatggaaaatgtcctcatacacctttggagattttatttcgcttgtgggcaagtgaaatcatatgagagggcaataatctccgtggagcaactgaatgctattcttagacaggcttctaaaaccaaggaaaaggaagatctcaggaagatagataactggcaatatattagttgtgtcaccctatgggttcggtttctgtgttgtcactataaggattacaatctccatcccttattttctcaagttcttcaattgctctttgactgcctagaattaagagaagtttctcagaaagaacaaacacaaagaacaaagatcaacttttcgtctttgttgaaggtgccaaagaacctgctgaaaccaagggattttcaagaggagtgtattctttcagcgattcagattctatcagcacattttgcccagtggagttaccatgtttccttcctagaagtagccaccattcctcttgtcctcttgaagaggctacatgagcagacaacagttgaatcacttcgccatcctattaagtgtttgatagaccaggtgacggagaacaaggattttatagaaaggaaaagagaggttgtatccttttcaccaaatgataaggcgtcagttgatagcttccttcagtcaattgcttcacatttactattcaacatctggcctgctgagtttgctgaaaaacatattactgttgaatgcaggaggagaagtccacacagaatgtcggacagggacgccgtggcccccgcgggcggcggtgaccggaaggcggccaagctcgggagctggagcagcatgagcagcaactacggcaacaagaagcggaagagcagcagcagcagcttcgggaggagatccacatccacctgcgaggaaaggcagggggtcttccgcatgctcatgagctggaaccaggagagccggttcagcaacaagatcaagacgacgacgagcaaagaaagatgaacgaaacgaagtgttcttagcttggtgtgattattcggggggttgcttgctggagggtttttgttcgtttagtgtctagccttagcttacttattacttttgttagtactctactagcag

SEQ ID NO: 28397 - DNA, 640 bp, Zea Mays
caataataaaaaggtcagacagagtatctgtacagcaaatcagcttaaaataacatactcctacgcctgtctctgttcacaactcttccgagcacgcggccgtctcctttgtcatcatcatcagctcagatctagcagcttcgccttctcagacgcgcccacttcgcaaccgccgctgtgcctatgctaccgcatgggcctctgcgcctgggaggcttgcggctgccaggcttaagtcacggggcagcaggagttcagattttttttaggcctctgaaacaaggctagcgcatattagcatcgagagtcaggagagtacgaatgggaagtaccgtcataaaattatctttgctactagcaataggaagcaccgtcataaaattaactctggtaataaaatcgattggatatatattgtttctaggaaactaggaaggatcccgtgtagaaagtgtggatagctagcctttttcatcggatcatttggttttttcttgaaatatttctttcaaaacagtctcacttttttcttaagttgtattggtgctccctaagatcgaaagcaggaatactacttttctgtaaaatcacaaaaatgcacacatttgggacctttcctaagctgtgtcttcgagcaacc

SEQ ID NO: 28398 - DNA, 2360 bp, Zea Mays
ccccctcccctgttttccttcccatctcatcacaagcagaagaaaatcgagataacgagagctagggttttgattccagtactcacgccgcatcctgtctccttctgcccctccctctcggcaccgcctccgccccctcattctctctcgcgtcatccggcggaggctcgaggaaactgaggccgggagcgccccgaagaatattctccacccagtcgccgacacccctgcgcgcgcgagagtaagtcgcctcccccgccgccagtgctcttcgtgatgatatatttccagatccggtttgtccgacgcagatggtagggctggagaggctgccgatgtggtattgaagagggatttagatgcatgaattttgtgttcgtaacgtggattggtgtggggtgggagaggctcctttgccggattggccaggttaccattgtactgttgtagcttggcagttggttgactgtgtgacaactttgagctatgtcatattacgaaagaaggggtggagacaggggtagtggccgtattcaaggaagtggtgggcgaggtggacatgtcctgcgtggaagatcaggattggctccccgaggacctcttggggttaactcccgtccatctgcacgcactattgctaaggcaaggccaaacctgtcactatgtttttgttcatggtcaggttcctgactaaagtagaaactgaatggggagagcatgcctaagcttacattatatggaggggcaggagtatctgtgatgtctgtgactaatgtgttctctgtcagtattgtttggaggcttggaggggcagatgcaactttggtagaaattttgcagtagatcataaggttgaatttattgaggggcagaagtaaatggtggtcatctctaatgggaattttgttggaacaccaccatttcttcaaacatatggaaggaaatagatgaaaaataaagctggcggactccagtttgatgtgtctaaatcatgatatgctgaagggaagactccatcaatcttcttgccatatatggaaattgcaatgtgccccttattcaacagttctggattccatactcccatggaagttcttctagtctgcttccatagcaagtgcacaagccatttgtctcctggacttttgtgatattggtggagctctttccttctcagctgttaacttaatgcagtacttcatggttttgctatttctcggttataattattgctactcttcctctaaagaccaatgataagtcaatgtggttcgtgatgattggcatgatcatatgaaaagtttgaagagatattcttttataatgacatgttccctcacatgcttggatgtttggcatttttcagtcatttagcagaaccaaagacatgacatggcgacctgatctatttagtgatagcatggcggctagtggaatagaaactggtacaaaattgtacatttcaaacttggactatggggtctctaatgaggatataaaggagctgttttcggaagttggtcatttgaaacgctttgctgttcactacgatggttatggccgcccaaatggcactgcagaggtggtgtttacacggaggagcgatgcaattgctgcactgaagcgttataataatgttctacttgatggaaaagctatgaagatagaagtcatcggaaatgacttaggattgcctatgacacctcgtataaatgttgttggggcttctaatggcagagctacaagaacagttgttatgacgcctgagtttagtcaacgtggcagaggttcaagcagtagacctctaagtaatcccagcaacaggtttaataaccgtggtggtttccaagctggtcgaggccgtggccagttccagagctgggggagaggccgtggtcagttccagagccgggggagaggccgtgcccagttccagggacgagggagaggcaggaagcctgagaagactgcagatgagctggataaagacctggaaagctatcacgcggaggcaatgaaaaccgattgattgcaaggccggtagtgccacaaggttgtggttttatccatcattttctgggagcaacgaacatgctttgtgctttggtttcaggagactagactcttgtagtaaattcgaacaaaagattgccagtttgtagtgtttgcatgaagtttgcaacctgatgtgtttatttttgtatcggttgctttggagattgtgttaatttttaggttcatgcttagaataaccgtaattggccaaaacatgcacccggccctgttccgctctgcgatgtgccttcgcagcattgtgttatttttagcatattgcagtttgtcggaggttagtccggtgc

SEQ ID NO: 28399 - DNA, 2735 bp, Zea Mays
agaaaaccaaacgaagcaagacactgttctgggctcgggcccaccatttgtcctcctccgccggcgactcgccgatgcccttgccggactgcggccgccgcggcttccccaccctaccgctcctccttctcgtccttcacgcgctccccaggcggctcccgcggtgcgcggccgagtcggcgacgtgcctcgcggtgtaccgggaggggggcgcccccgcggtgttccagtccgcgcactgcccgcgctggaccctccccccgcacgacggccaggggggtggcgggggaaagagcatccctatggggtgccacgtggcggcggatcgcggccgccgccggtcccaggaggaccgtgccgtctgtgccctcggcatccgcatccccttcagaacatgagaattaaggaggttgatgtgggagtggtggcaatatttgacggtcataatggagctgaggctagtgagatggcttctaagctttttctggattacttcttgctccatgtttattttcttctcgatggcatacactctctgcggttcagaaaatctactgggaaactgacatatagggaagttactatttttaacaatgtatttaatctgtacaagcatggccaatccgaccatgcagagaggtcatgttgggcatcaccagccattctagaccggtcatttcatacggaaattctgaaggaatcactaatgagggcagttcatgatattgatttaacattctccaaggaggcattacagaacaattttgaatctggttcaacagcgaccgtggtcttgatagctgatggacaaattatatctgccaatgttggagattcaaaagcttttctgtgctccgaaggatataatctgcaccatcgaaataggaaacgaaggagaaagagaaactcaattaatcacgaggaatttgctttggcaaattatgatggaccgttgtatcatgcaagggagttgacaaaggaccatcatcctaatagagaagacgagagaaaccgtgtggaggctgctggtggttatgttcttgagtgggctggtgtatatcgtgttaatggcgagctagcactatcaagagctattggtgatgttccttacaaaagatacggtgtaatatcaacacctgaattgacaggctggcagattctgtcagaaaatgacagttttcttattgcgtcatctgatgggatctttgagaaaatgactatgcaagatgtttgtgacctaatgctgcatgcaaaaattcgtgttaaacatgattttggatcctctgccataacacaacgtaatttggcagattacgtagttcatgttgctttacagaaaggcacaacagacaatgtggctgctgtggttgttccattgggatcacctggtagcactggtactacattaaaagattcgtcccagttcgaagaagatctcaagatatctatttctccaatgttgaatgttccatatggattgaagcctgatcatggacatagttcagctgtcattgacatggagtatttcaagcgctcatcaataaagttccagaggttcttggttgaagcaaaacctaagaaacttggttgtttctatttatccgagagtctggatgaagatatggactatatatttagggtgccggaagcataccagcgtgaagaagtccatgacttcaaccacataccagctgagactgccttatattctgatggtaatctggaaaaatacaaggacaaacacttttgcttgtaccttggtcccgaagatggcgaaatgggacagtgcaatggtcctgaagcttttgcaaacttttttggtctacttgactcccttccgcataatggaagcaaaccaaatggttcacactcctttggcaacacgatcgatttcaggtacaagctcaagagaaggtttgatcgtgggtcgtacggtgaagtctggttggcatttcattggaattgttctgaagatacagatgttcataaagagcctccacactttacaaatatatctcaatcagagatgtataattgcacaagttcaggcagaatgtcatctgatgaagatcatggttcaggcacagtaaatggtgatttattcatactgaagcgcataatggtggagaggggaaatgcagcttacttgagtggattgcgggagaaatactttggggaattattttcaaatgcttccaggactcttgaaggtttgtcgaggatagaatcatcgactatctcagtggacatgctatatgatcctgatatccatctagaaaagaacttgtcagctactgaagaaccacttaagcatgtggctaggtttatagaatcttttgaatcagaatcaagggaaatttggctggtgtatcacaatgaaggccactcattatcaaaattgatatatacagctgaagaaacgaagttagtcactggcaacaataatgagagggtcagacatatccaagttttgcacccatcgaagtggtggcattggctaaggacaacaaaagctgggctaaagcagatgcaaaacctcttatggcagctggcgtctgattgacttcggcagtgccattgatgattacacgttgaagaatctttatggtccaggacctactcgatctgaacagacatttgagtacactcctccagaggcactccttaattcaaactggtttcaaggatcaagaagtgcaaggcttaaataagtgaccgtacacgcattttaatgg

SEQ ID NO: 28400 - DNA, 3528 bp, Zea Mays
gttgctagttattttatgattgctatcggcatctccaaggggatggattatttgcaccaaaataacatcatccatcgggacttgaagactgccaatttgcttatgggctctgattatgtatgcatattgttgagtctgtatttactaattactaattcaaggttcatcaagcattgggtggtcttggaaaataggttgtgaagattgcagactttggagtctcaaggaatccatctcaaggtggagacatgactgctgaaactggtacctacagatggatggcacctgaggtaataaaccataagccgtacgatcacagggcagatatcttcagctttgctgtggttctgtgggagctggtcacttcaaagataccatacagaaatctgacacccttgcaagctgcactgggagtaaggcagggaatgcggttggagatcccgtcatgggtcaatccacaactgtctaaactgattcagcgttgctgggacgaaaatcctaacctgcgcccctctttctcagagatcactgcagagctggaaggcatgttaagggatcatcaggcctccaagggaagcaacaaacattcgaaggcaaaggcacacaaaaaatcgcagagagaggcagaataacgaggttgtcagttaccaccttgtgaaaagcttagtggagcttggctatcatcgtccaagattctgaggctactacaaagatgctgctagtgtacaattgtcaaatattgtatatgattggtgtgtgtgtgtgtttctattactcccaaaaacactatatacgggagaagcgtcgacaatacagcgggacaagcaaagacacggaatccttgtacaaaatggcttgcaagcagcataaaatgccctctagtttttgtatacaaaacatgaaaaatatatgtgcatgagccgtgcgtgcttcctgtgattctgtatctccatgaatcctgttctttgattctacatctcctgccaaagttacatttcttcttgaatctgaaagtagctctgacgttttctttctgtttcatgagccattgcattcttgggcctggtctgtttgctctataagggcagtaggagaaagggcccacataacgatcatgggccgttatcgtatttacttacgtgatttgccgtgctctcccgtcttctcgcgatggggagcaccggcgacacgacgatggccgaggcggaggcgccggcgccggtgggtgactacgagctgctggagcgcctgggggggcgtcccccgtacacgtccgtgtggcgagcggtctcccggtccaccggcacgcccgtggctgtgaagcaggtgcggctcaccggcctccccgcgcgcctccgcgacagcctcgactgcgaggtccgcttcctcgccgccgtcagccaccccaacatcatccgcctcatcgacgtcgtccaggtacgacgccgtctccttttctctggcactccccgccgatcgacttggacctcctagttcgatctccttctctatttgggtgcctggcagacccagagctgcctttacctcgtcctggagctctgcgagggcggggacctggcggccttcatccggcgcaatgggagcgtagacgagcgcgtggccagaaattttatgaaacagatcggtaatcaagttgttgatccatgattgtttgactcaattgtgtcgtccaccgtctggggatgtgatctgtgagaaatggcccctgtggcaggagctggcttacaagtgctgcaccggcaccatgtcgtccaccgggacttgaaacctcaggtcatttttttttcttcttcttctgtttgtgactggattgggtcaacaattcaagtaacggatgtgctgtgactatccatccaatgttgcagaatatcctgctctcttctccgagaagcagcgatgcgatcctcaagatatctgattttggtcttgcaaggttccctgcagggttcttggactagtcttttgaaatgaaatctaaataagaaaaaaactgaaaacatggacggattagtattttgacctagatgagattccctgcaggtttcttggacccggggagtacgcagacacatcttgtggttcttgtttgtacatggccccagaagtgatgctgtttcaaaagtacaatgacaaggtagacatgtggagcatcggcgcgatcctatttgagctcttgaatggctacccgccattctatggcagaagcaacgtgcaggtggctgcccctcttgtctatctggaattctgaattcaacaacactgatggccgtctcccttcagctgcttcagtacatcaacagaagcacgtctctcccgttctcggaaccactggcgtctaccttaggccccgattgtgtcgatatatgcaccaggctactatgcactaatccagtgaagcgtctgtccttccaagagttcttggaccaccgcttcttcagagtatgagtgcccaagccatggggaccaccgggcagcgacatgatctgaagaacatcaagaagtttcttgtccttggagtgctgactgactctgttataaagcgttcagaaattgatgcccagtgctcgtcgtcttggttttctgttcgcgtccatttccttctccaaagagccatgtggccaacgtttcaatctgttgtgatctggtctgtactgtttcaatctgctaacagtaggagttttaaagatatttagtccaaaacagaactccatcttttattcaaagcggcataaactatcccattttattgagcaaacatatgcctatcctttccttgtaccaaagaaaaaactacagggagacaaacaaaccacagaaatgcgaagtggctatcggttcagccactaaactttcaattcaacatcaacaataacccagacaccatgctctcttacgctcggctcgacttctaataaaatgcaatgaatcaagtaccagcatgcatcagttcacagcagccacttccttcagtgactccactgtcttcaagacttcctcccccatccgcttgcatccaaccagtgtctgccaattgataacatgagccactcagaacgagatgaatcaaaattcaaatacaattcatgacttcgcaaactagccactattttcttccacgagactacgaaagagttaatatacttgaggcactatgaaccagagccaacaaagatactatattacactacctgaatgtttgactaatgaggatcttcataccttgtctaggtgaggaccaagtacttgacattaaacatgtagagtataaagctaaaacgctttagccttttttttaatagaggtgggaatagaacttcattaagagaactaaacaatgcaaaagcatgaatgttggattcactccaccaaaattcatgggatggactcatgatggaccatcacaatctcaactaaggatggggtgattcctcaaaccagacacactcgtaatccattgataatggttctgcaagaaaatctatcttactgttccaggagaatatatgt

SEQ ID NO: 28401 - DNA, 1882 bp, Zea Mays
caaatatcccaaagacggatccgacacacttccgaattccgatccacccacttcatcaccaaggccgtcgtctctccccacgccggccgaacggatggcggcggcgccgactgcggatgccatggacgtcgacgcgccggctaggacgctgactacctctccggccaccaagttgcgctcccctcacgacctcctggcagagacacgcgcctccatcgagaaagtcgcagcccggatactcgccatcaagaaagacggcgcccccaagtcggagctccgcgagcttgtcactcagatgtctctgcacctcgtcacgctacgccaagtgaacagagagatactgatggaggaggacaaggtcaaggcggagacggaggccgcgaaggcgccggtggactccacgacgctgcagctgcataacctgttgtacgagaagaaccactacgtgaaggccataagagcgtgtcttgactttcagacgaagtatccggggatagagcttgtgcccgaggaggagttccagcgttccgcgcccgcagacatccttgagaagaccctcgctgccgacgcctcccacgacctcatgctcaagcgcctcaactttgagctcgtccagaggaaagagttatgcaagctacatgagaaattaggacaacagaggggcagcttgctggagacaattgctaatcagaaaaagtttctttcaagcctgccatcacatttgaaatcattgaagaaagcatcactgccagtgcagcaacagttggggatgcaacataccaagaaactaaagcagcaccatgctgctgagttacttcctactccgctttatatagcatacactcagctgctagggcagaaagaagcatttggagagaatattgaagtagagatcgcgggaagcacaaaggatgcccaaatatttgctcaacaacaagccaagaaggaaaacacaggcactctttcaagtggcgacaacagaatggatgatgatgtgattgatgatgaagaagatgctcagagaagaagatcaagatccaaaaagaatgtggtgaaggaagctaataatccagcagtggcctatcaacttcacccacttaaaattatacttcatgtatatgatactgaagattctggtagcaaacgccgtaaactcatcaccctgaggtttgaatacttggcaaagttgaatgttgtttgtgtcggaattgaagattcagagggtctggacagtaatatcttgtccaacctatttccagatgacactggtttagatctgcctcaccagatggctaagatttatgttggggaggttccaaacttcagcgacaaggattcaaggccatacaagtgggcacaacatttaggtggtatcgactttttgcctgaagtgcctccatctgttggggatgattctagcagagcattaaacactgctgatttgtcatctgggcttgctctgtaccgtcagcagaaccgtgcacagactattttgcagaggatccgcttgcggaaagttgcacagatggctcttatgtgagtcactggtctatgttttttgctgtttgggacatcgatgaaaaaaaccggatggcagattagcctgagagtgaccgtgtaatttgactgacgattttgagctaatgatgcttttgcttcattgcacatgtcattctgagttatggcaatactatgaatcatttaccaggcagaaattgtgaaacataccatttatatcttcttcatatgttctctacatattgattcaaagctaattattggcgaccttcattataatgttattcatgactgttatatacatggcctgtttgattggtagcatccctttgaagttttcgagtctctttgattacaggtggca

SEQ ID NO: 28402 - DNA, 1390 bp, Zea Mays
tccgcttctcatcatggcggctaacaagccatcatgaagacgaacccccccacatcgcatcacagactttcttttctcttgttttttcctttttactttcccactcctctcgctgaatgactagcgttcagtgtcaaccgccgcctcctgtcctgaccaccaggcaccctgcactgcacgcccaagtttcctcttgttcccctgcccagactgcacgcctcctgtcctgaccatgcctctgaggccagttcatggctttgcgtctcttcttgtcatcttcgcctgccactgccatgggggaggaagcgagcagggagcggacgtggcggcagagcggctggagcgcgacgtgacgtcgcccctggccacggtcccggtggtggacccgacggcggcggcggcggcgacgacgacgcagtcgccggccaccggcgggagctggtgcgtggcgagccccagcgcgagcgcgacggcgctgcgggtggcgctggactacgcgtgcgggcagggcggcgcggactgctccgcgatccagcagggcgggagctgcttcagcccggacaccgtccgcgaccacgcgtcctacgccttcaacagctactaccagaagaaccccgtgcagaccagctgcgactttggcggcaccgccgccctcaccaccgcagacccaagcacttcgacgtgccagtatccatcaacgagcaccggcgcttcggtcctgaacacgtcgactccgctgacgccaacgaacgggtctccgcccggccccgggtacgggagctctccgccggccggatacgccaactctcctccgctgtacgggaacatgtcgccgccggactacggcgacaacatcagcgccgcagcgagggcgctgcccggccgcaagacgacggcgacggcggccgtcgcgtcgctggcgacgacgtgcctactgaccgcggcactgtcactgacggtgagcggctgaacctgcacacgcacgcaacaatagctccaagccgccgccgccgcacgttcaggtgccgaccgtgatgtcctggaaggccatgaaggtggagacgagacaaacatgtgccggtgcagcagagactacagaggatacgtgcgtgtacagtacaggcagtggcggatctggagagcaggatggtgatggagaccagtgacgccgtgtcactgtcagtcactctgtcagtagtgttgcctgccctttgtaatgtttagcaaatgtgtacagatagactcgtatacacggcgacggttatgatctttggtatcccctcggcccctccaactctaaactctatctcttaaattaaaaaaaaacaagccatgatttgagagcttttactggtgtaaaaattgcccttttacaagatagggatggaca

SEQ ID NO: 28403 - DNA, 2263 bp, Zea Mays
aaaagcgttcgcgcccctgcgcccctcactgcgcatccgcatcactgcgtgtcctcctcctctccccctcactgcggcgcatccacatctgccaatttctccacctcctcctcctcgcccctgtgcctcgacatctcgcatccgctccatctatggaaggccaccacgcgccatggatcgccgctctctaccgccacctcaattgaaggttcaccgctctctacgcggatccgccacctcctcctcggccgccgtcaatagaaggtcccagatctcctctcccattacttctctccccattaccgcgctcgaggtctgccatttttggaggtccgccacttccgcctctgctcgccgtcaatggaaggtcctagatctcctctccctattaccgcgctcgagtcagtgggaggtccgccatttttggaaggtccgccacctcctcctcgacccgcggcaaaaatggcgtgggagatccgccacctcctcctcggcccgcggcaaaaatggtgtgggagatccgccacctcacctcctcccattctcacgcccgcgcctgatatggaaggtccgccgaagggactcggacgtcgaggccatggctgagccgcaccccttctccccctgcctcgcgcgcggcggccgagatggtgttggctgggttgttcgggatggtggtcctacctgccctccctgctatcctcgccccaaatcgacgagaatcatgcagcccaaatctgaggtggaggcgcctgcactgtcgatggaggtgtcgagtctgcggtggtgtctgtagatgggaaggcatggtgtgcagcagcagtggccaggtggtgtcgctgagcctgtcctcctacgggctcactagcacgctctccacggccatcggggacctcacgttcctacgtatgctgaacctgagctccaattggttccacggggaggtcccagcgaccatcgttcgccttgcgcatctgcaggcgctagacctgagctacaacgccttcactgaattccagagatgcaattcccgaggccatggagcagcagacaatatcaattgccaaagcagccattacaatagtactcattttagggacttcatttcttgcagctgccaatccaattacaggatgctatgacgctcttaagtgatcatgaacttatacattgaaataatggtgggcctcgagaggccaggaggtggagaggagttcaacaagtactacatcttgtctgctctcctatccgtggattgggtgcctgaaatatcctatagatgtctttagtagaggatccaaataatggcctgcaaggtttattgaatcggatcgcacaaaactccatctgcttcagaattgagctaagcgcatcctaacatcttgactcctatatcgatcaattatttttgttacacatttgattctttagtttcgtagagggaggaacatcgtgggatgcaggccccacggaacaccagatattttgaggtagaccgcggcgaggtgcccaagggcagcgcctagatcttcttctggatggtcaagttctgtaacgacaatgtggcagaggagatgccctgatcttcgtacgctgaagtcattcttgttgatgggaaattaacagaggctaaggctaaccagcttgctaaggtttaaatgcagtcaggttggagaactcccttgttcaggcttttgtctttcttctgcagaaggagagatgacgtgctgcatgacatgatggcatgtgaggcagcaacctcttctccgcaacccttgtcatggcctggagttggtgttctaggaaggagcacaattttattagggtagccaccagagttgaggtcccttttcaatggacgaacttggtgctgtggacgacatctgctattgtagctaggcgcatacatgttttcctataaatgctagctctgcaatcaccaaaggaaaacacaagagtactcttggaggaaagtttagcattcagtttaacaaaccttaccaactcatgccttgtttgaatgcaataatgcatgttatgttgccctgttgttgcttggacacatgcttggcatggctattttctggttatgtcacaactcacatctcccatgtaaatttatggctatgatatgcatcaaacaagcttatattttgctcttaagttggttcaaacagttctaattcattttaataattatctaaaattggtttgataattggtgcaataaggaactcatttgaaaggtaagagttatgtgttg

SEQ ID NO: 28404 - DNA, 2246 bp, Zea Mays
cgatcgagcgaagcagaagcgccaaggcagccgacgcgcatggggaggacggacggcaacgcaacggtgtcgccacgtgcacagccgctagcgaaaccgggcaggaaggaccgcagtagtatatagagacctctccggccggcgcgcgcgacgtcagcgacgacgtccgcgccacgcgggcggaacttcgtagtttgcgacggggcacgcacgcacgacgcaccccacgcattttcaactatataaaaagcaccccccgcgagcgcggccggccggcgaacagaggagaggagaggagagactagacccgctagctgaggccggccggcgcgctggacacgaacatgatggggagaaaggcgccgctcggctgtgctactactcttctcctcctcttggccgccgccgtcgctccggccgagctcagcgtattaggcctaggcggcggggcggcggctgcctcgggcgcggtcacccgggccgacttccccgccgggttcgtcttcggcgtcggctcctcggcgtaccaggtcgaaggtgcagttgcagaggacggaagaaagcctagcatctgggacacattcacacatgaaggctactccctcgacaacgccacaggcgacgtaactgcggatcagtatcataagtacaaggacgacgtaaagcttctgcatgagatgggtgtcgatgcctaccggatgtcgattgcctggcctcgacttatcccagatggtcggggagccgtgaatccgaaggggctggagtactacaacaatctcatagatgagctccttagctacggaatacagcctcacgtgacgatataccatttcgatttcccacaggctcttcaggacgagtacagcgggctgatcagtcccagattcatagaggacttcacggcgtacgcagacgtgtgcttcagcaacttcggcgacagggtcaagtactggagcaccgtcaacgagcccaacgtcgagacgatcggcgggtacgaccagggaatcctgccgccgcggcggtgctccttccccttcggcttcggctgcgaggaaggcaactccaccacggagccatacgtagcggcgcaccacctcctgcttgcgcacgcgtctgcggtgtccctgtacagagacaggtaccaggctgcgcaaggaggacggatcggactcaccttgcttggttggtggtacgagcctgggacgcagactcccgacgatgtcgcggcagccgcacggatgaacgacttccacatcggatggttcatgcatcctatggtgttcggggactaccctccggtgatgaggaggaacgtcgggtccaggctgccgaccttcacggacgaggaggcggcgcgagtgagggggtctttcgacttcgtcggattcaaccactacatcgtcgtctacgtcaaggctgaccttggccgcctagacgaccaagtgcgagactacatgggcgatgcagccgtgaatgccgtttctcaagtcacgcaaccagttcccgttcggcgccttgacgagcgacttcatgacgtccaccccctgggctctcaagaaaatgctgaggcatctccgggtgacatacaagaaccctgcagtcatgatccatgaaaacggagctgccggacagcctgatccatccggcgtgaacagctacgacgacgagttcaggtcacagttcctgcaggactacatcgaggccacgcttcagtccatcaggaacggatcgaacgtgcaaggctacttcgtgtggtcgttcctggacgtgttcgagtacctgttcggctaccgcctccggttcggcgtctacggcgtcgagttcaactcgacggcaaggacaaggtaccagaggcactcggccaagtggtacgccagcttcctccggggcggcgagctgaggccagtcgctctgcctgacggagcatattcacagtgaccagttacacgtgtacgctccggctccaggggaatatctggcgatcagcgctctcggtgaggtggagagaaaatagagagtttgtaagcaaggatagtcggggtggtatatatagcagtgcttagatacggttttcttgggtaaatgtggtacgagttgaataagttgtggcatgtttggttagaggttagaggattggctctacccgaaaccagctgattcagatggtcgtttctatatatttggttagggggatggagtggatccattttttgtttaggaagcaggtcttcactaccggaatccgg

SEQ ID NO: 28405 - DNA, 1098 bp, Zea Mays
ctcacaggcatgaactaataataccggggggaacaacatttcagctctctgaagcccttggaaagctatatggacaatcaaagcagggggctagtagcgacactgttgaaccatcgaaagctcgtggtggggcccatgagaattgcataacgtgtattgtacccttgagaaaaggaagcgatggtactatcaaacgattcagcacgtcaggattggatggtaaggtcgtggtatgggatttggaaaaccacgtcagcattgcaaaatagctcgagggaaggctttcgttaacaatcaaatcgagggggcttctgtcattacccatcgtgctcaggggaccaccattcgtggcagcggggtcctgcaggttttcaagatccagggccagccaggtagattttttttgggtgcctgtacacagaaacattgccttagcgtagggagaacttgcatctatcaagtagattcaatttttggcgagtaattgtcctttgaattgagtccatacgtattgtgtatccttgctcccaaacaaacccgtaccgtatagtttttagctaggtaggtaggcaattgacgtcatctcttatttctggcgccatgtgtaaaataaccacacacggaattcatccgcggatgctgtgttgggacttatggacgcctcgtttcttctgccggttcttttgcaggatcgaaaaactcgcctgatggttgaattgtgtgaccgcggaccaccatgtgtaatccaacagtagaataggatggttccatgaaagcaggccctgctgatatgtggcctgtggggagtggggacctgctctattggtggatccccatacgctaatctttgctttgcccctgttcagggacatcccaccgggtcggtcagttttggcagcatgtgcatgagcttctggttttattactagctgtatgctcgctttgcttttgttctcgagggctagttcggaaactctatttatttaagagatttatatttttctaaaaaaaaattattagaaaaatagaaatctcttgtgaaaatgggattcttaaactagctctgaaatttaaacccctttcgggattgaaggggat

SEQ ID NO: 28406 - DNA, 1864 bp, Zea Mays
cgcgctgggctggaccaatgaagcagcgccccacgcgtgaccgaccaggaacggctgccccgccgagtcaaaaggccgccgagctaggtgagcgagttccgggacgggcggacggacggtggcccacccaccaacctctgaccccgacccggcgcgtctcgccctgaagcttaaatactagtcttggctagctactatattatactagccgtctagccctcgagccgtccagggcgcggcgacgacacccacaggccacagccacaggccacacgacaccaccgctcggtctcggcgtccgcctccacgcacgcttcctcccgcaggccatccacccgatccgatccgatccgagcgtccaccatgtgggtgacgtcgatgccgcaggtttgggacgaggagggcgcggccaagggcggcgcggtgaccccggcgccggccgcggccatgctgggctcgctggcggggtggctgtcccggaccgtgcagccgcagccgccggcgccccgggtgtgcggcaccgcggggggcccgcccgtgacggcgcccaggctcaggctccgcgacggccgccacctcgcctactgcgagagcggcgtgccccgggaccaggccaggttcgccgtcgtcttctcccacggattcaccggctcccgcgaggacagcgtccgcgcctcccaggaagttgcggaggagctgggcgtgtacatggtgggtttcgaccgcgccgggtacgggcagagcgaccccaaccccaaccggtccgtcaagagcgcggcgctggacgtggaggagctcgcggacgcgctggggctcggccccaagttctacgtcatcggcatctccctcggctgccatgccgtctggggcgccctcaaatacatccccgacagggttctcgccggagctggcggcggaggtgtacgcgaagcaggaggtgggcgaccagtgggcgctgcgcgtgtcgcaccacgcgccgggcatcctccactggtggatggagcagagctggctgcccacctccacggtggtggccggcaccacgccgctgcccaacgagcgcgacgccgagatccggagcaagatgaaggcggacggcacgttccagcagaagcgggagcaggcgacgcagcaggggatccacgagtcctactaccgcgacatgaccgtcatgttcggcaagtgggagttcgaccccatggcgctgccggagccgccgtgccccgtgcacctctggcagggcgacgaggacggcctcgtccctgtcgtgctgcagaggtacctcgccggcaagatcggatggatcaactaccatgaactccctggcaccggccacttcctgtcgtcggtgcctgggctcggagacaacgtccttaggacccttttcagtgacaagcagtaaacaaacaatcctccctcacgacgtatcgaagctttcgagcatggtggtggtggtggcgcattagttcattttattattgtaaaggcccgtggttgtcgctgattagagatgataaaataatggtgatgtagatgcaagaccttaaagtgaaatactatatcagagatgtaatatacatacatagtgatgacctttctgttttcattataaaacaaattgtctagtcaagtgtgtgtgtgtgtgttttgccacgataacaaaggtgtcgctaaaaagataaacccagttaatcgcatgacagatcaaaattcgctttgtggcgaatatccatatacagactctctacatgctcgtgcaaatggatatccaggagcaggttaggctttagcttctccagatgacccaagcaagatccatagcgactgaaacatagcaatttcaattgttaaaaaaaaaaagaaa

SEQ ID NO: 28407 - DNA, 1191 bp, Zea Mays
ctgttccgctgcactgttcttctcttcattcaagggtcctgtactcctattgcaaggatggagaaattggctgcagatagaaaagaccaagtctttgataacaagttctgccagaagcttgcagaagaatttaatcgttctgttggccgtgctggaagtaaagcgttacaagctacacaggttcaaggatggtttcttaataagtttccagcatcagccactaaacctacttgtgtgcccactgcttcccaagaaaagacttcagcctcagaaataaatgtatcagtttctgaaaaaagatctgcagcttccgaagagaaacttttccctcttgatacaggtgtttcaaataatgaggatgaggtttctcctgtttttccattagaaactaaagatatgattcctgaacttgaagacctggagtttgaggccaagtctacaaaggattttgcctggtatgacattgccctattcttggcacacaggaggaacagggcgggtgaagtagaagtccgggtgagattcgagggttttggggcggatgaggatgagtgggtgaatgtcaagaagttcatccgccagcgttccattcctctggagtcctcacagtgcaaaagcgttgttgaaggtgaccttgttctctgcttcagggagggaaacgaggaggcattgcatttcgatgcacatgttcttgaggttcagcggaagcagcatgatattagggggtgcagatgtgtattccttgttgaatacgatcatgaccaaagccaggagagggttagcctgagaagattgtcccggcggccaaagtacttttgaaggctgctcctgttagcctgatgggcatatctattctggaactggaactaaccggagcgtgaaacttaggtgaagttagtttgtggcgtccttggtcatgtgtgtattagcaaccggcggcagcaagcatgggcttgcatctcaacccctttggcacaggactggctgactgaattttataaactcgttatcgtgcagaagagggaagagtacgcggcttgagcacttagggtgtcacttaggatgtgtttggttcgtgaagtcaccttatgcttcatgaggtgtatcatgaattcatcctataattttttgtggcatcaacctattcctcgtttatatattaattattagtttatgagttagtaatgaatc

SEQ ID NO: 28408 - DNA, 2186 bp, Zea Mays
gttggatcagaccgtctggtccagcttccagcctccaggcccatgtgaaacggtggatggcccgccctacgcgacccgggttctgcaccctgccgtttcttctccattattcccagcgggcgcgctcgctctctctttctccctcccctcctcgtggcgacgattgggggcagtcgctgccgccgtacgccaggtgcccagatcttcttcatgcccttctccagcgacgagtatcagaaggtacgcccatcgcttggtcttctcttcctgctgtgcgaaaacgagcacgcaaaccctaatttgctactatttatattcggatctgatctattacgagtatacatgcatgtatcatgcctgccaactttgatttttgtgtgtgcaaaagctacagggtgtgcatgtgtataccatgttctttacagggtccgtccctgggtgatatgagtaataagtccgaacctgcttcttaccaagagttaggatgtatgtgcgtatggcttgtttagtacagtagtattgaaaatttatgaggaccctttcttttgattattttgaacaatgggcgtatgaaccggtggaagaacagttcctgcttacagtgttatctccacctatctttgttgtgcttatagggtgggcgacaacatcccatatgacattgtagcttaccttcatctatttgttagctgtttgtgcttttaaggatgcataagcgtatggcggttttgatggtatccattgtttgaacgatgggaggatagaagaccattctctgcataaataggcttcataagtattattgctttattgctttaatattatcatatgattgagtgcacaatgccatcaaccttacttgatgatctccctaacgaagttgctctccagtgccttgcacgggtaccattcttgttccatccgacgcttcagttggtttgccgctcttggcgagcatcagtttgcagtggcgaacttctcaaaattcgtaaccagattggtacgacagaagagctcttgtgtgtgttggcgtttgaaccagaaaacatgtggcaactttatgatcccctacgagacaagtggataactcttcctgtcatgccatctcagattaggaacatagcccgctttggcgtggcctcagttgctggcaagctctatgtaattggtggtggcagtgatcgagttgatccgcttactggagatcacgacaggatctttgcaagcaatgaggtttggtcttatgatccgctgcaccgtgtgtggtcccagagggctcctatgcttgtggctcgagcgatgtttgcttgttgtgcactggatgggaaaataatcgttgcaggaggcttcactaactgccgcaaatcgatatcaaaggctgagatctatgaccctgaagctggcatatgggagcctcttcctgaccttcgtctggctcatagctctgcatgtactggacttgtcatcaagggtaagatgcatgtattgcataaaggtctatcgacagttcagattctggaagatggtggcagtcattgggctgttgaggatttctcttggttgcaaggcccgatggcgatggtcggtggagagctgtatgtgctgagtaacagctgtattatgaagcaacgtggtgagaacttccctgataagatggtatcgtgtgcatctgagttccagagcaggatcggtttcgggatgattggtgtgggtgacaacatatatttggttggaggagtgattggacctgggccgagaaaccaatgcatcaagctgctctctgatgttgatatcttgaacgtcacaagtgagagaccaacctggagaccagggtcgccgatgacgcattgccgagggagcatctgtggctgcgctttgttgaggatttagcgtcttcccagtgtgatagtgtgagtattccaccattgctgaactgatcggtgacgtcctaagttttattttattttcaaaagggttgttatttacgctttccttttggatcctttgtagcattgagggcatgactcaatgttggattgccaatgagatatatactatattgaccatgaacagtgttccagaacacactatatacttcatcattttcatttggcatttaaatattttggtggttttaaatgacatcttgctggtttgaatagcctttgttgtgtgatttccctcat

SEQ ID NO: 28409 - DNA, 986 bp, Zea Mays
atgacgggggcaggggaggcgctgaggacggggaggaagcgaggatgggcggcagacgttcgcggtaggggcgagcggtgggatggtgaactttggcgggcggcatgtgggggcgcgcgggtcgcgcaggtctcctcctggtgggggcgcgttgtagcagtcgcggcaactagtggagggggcaccgacgatgcgcgaggatcgatgtggggcgccgacgacgaaaagggcgcgcagatgtggatcctcatcggatgcgccgatggaaggggatcgatgcggggcgccgaggatggaggggatcgatgcaacataacatttctcacactgcaacaggattatgatgaagatggaactctttccttatcagaattctcagacttgatgaaagcttttggtaataaattagcagttgcaaagatacaaatagtgatggcatagttgacatagatgaactggcagccctactggctgctcaacaagaagaagaaccacttataagtaactgccctgtctgtggtgaagatcttggaaaatatgataacataaatgatatgatacatatgacactttgcttggatgagggaactggtaatcagattatgactggtggatttctaactgacaaacaggcatcttatgggtggatgttcaagctcagtgaatgggcacatttctccacgtatgatgttggtttgcactctggctctacagcttcacatattctggttttcgaccggcgaacaaagaggatagtcgaagaagttattgacagaaaaattgtattgtccatgagggctttataccaatcaaaagtaggactcgctcttataaatacagatacagtgcaaggcctaaaaatgagaagggagaggtcaggcgaggaggatctgggtggccttcgcgggcaagaacaaggacgacgtaggactcaaccattagattccaatagcctccaccgattgagtggtacaataagcccttaa

SEQ ID NO: 28410 - DNA, 715 bp, Zea Mays
ttggtttcaattgaagttctgaatgtgatggctcttttaggtgaacgttcctaagaccaagaagacctactgcaagaacaaggagtgcaagaagcacactctccacaaggttactcagtacaagaagggtaaggatagcctgtctgcccagggaaagcgccgttatgaccgcaagcagtcaggatatggtggccagaccaagcctgtcttccacaagaaggccaagaccaccaagaaaatcgtattgaagctgcagtgccagagctgcaagcactactcacagcacgcaattaagaggtgcaagcattttgagattggtggagacaagaagggcaagggaacatctctcttctaagtttctcatcgcccatctcgatgttggatcgaacctgtgggtctactactgttctaaaaactcgtcaaatttcaatgttactagtagttctgaaagcaggtcatgctgtgtatcaaattccaatgcctgacatttgcgctgagtgtgggttgtcttttggctaaatgaagttttgcaccctgaatcttcattgaatgtgttgtgtgtttgtttgattttgttctgcgattgccttagtctaaagcttgatcacaccgaggatggtttatgtaatgtaactggctgaatggaatcccacagttcgctcactgaattgttggagatgatattgcatatgaaataaatccatcgattttgtaa

SEQ ID NO: 28411 - DNA, 2692 bp, Zea Mays
tttgggctcggcgctgtctgaatttgagctatgaggtgcctgcctttcttgcatggagacgtcagtgagaaggatcctgtcactaagtcggcctctgtacggtccatgagcacaacatcgcgctcccgctccggttcagacttcacctccttgaatgtttccgacatgagcgccgagtcaataaggaggacacagtaccccagcttcactgactgcccgtctaacctgagggtgttctcctttgctgaattgaagagtgccacacgcaacttcagccgatctctcatgcttggcgagggtggctttggctgtgtgttcagcggcatcatcaagacctctgacaaacctaatgaacgaattgagattgctgttaagcaattgaaccgtaaaggacttcaggggcagaaggagtggttgacagagatgaatgtgcttggaattgtggaccatccaaacctagttaaactaataggctactgtgctgaagatgatgagaggggagtacaacgccttctagtgtatgaatatatgcctaatggaagtgtggatgatcacttatcaagtaggtcaactactctgtcatggccaatgagactaaaagtagctcttgattctgctcggggactgaagtatctgcatgaagaaatggaattccaggttattttccgagacctaaaaacatccaacattctgctggatgaaaactggaatgctaagttgtcagactttggtttggctaggcatgggccaacagaaggtctcacccatgtctccaccgcggtatgcacaattacaagccgactgttagtttattacattagtgtgtttagattgaatagtgttttgtatccttttggaaagtagatactagtatcctgacagtattcaagtgatgaaaggcatattacttgaacaaaaagagaattatggtgaagaaaaaatagacaattagtgagctcttttagctgtacttctataacattattgactttttatgccattgaatttggatactgagttgctaggcctccagaaacagaattatttttgtttactacttgcacaagtaacctcttaatgcatatgtttagtttcagtaccagacatgaagaacagagtcaaaaattgagaatgggaattgaagtaatggagaggtttgactacttgaaaacattgcaagtgatattcatttcctgaccagcttcagaatgtagcatgccactgtattctagccaaaatattcgaggaaaaaaaaacccagaagtcacctcttttcctgatcgcaggtgacaggaggggttgccccctactgattgtatgtttaaaaggagttgtgtgcagccaaaaaggaaaataaaagcccaagattacacaaaaacctttatccatcattttgtagcaggaaagttggatttcattgctcaatgggtgatcagagcaatagtatttctaggaagctctctgcatcgtcaaactttcaaagacatggcacacctcttaataacaaatagagaaggacactattaagtactttttttttgctaagttaccagctgccatatgaatttgccacagacagttttacatctatgtcctctccatgccatctcactagttcgttcctagagcagtctgaagttaccattccatgtaactacgaccctctttttgttatgtttcattttgaacaggtggttggaactctaggctacacagctccagaatacatgcagactggacacctcacggcgaagagcgacatatggagctacggagtcgtcctgtacgagctcatcacaggccgccgccccatcgaccagaaccgtccaaagagcgagcagaagcttctggactgggtgaagccatacatctcggacgtgaagcggttccccgtgatcatcgacccgcggctggaggggcactacaacctcaagtccgcgacgaagctggcgagcgtcgcgaaccggtgcatggtccggctgcccaagtcccgccccaagatgagcgaggtgtacggcatggtccagaggatcgtggacggcgtcgggaccggcccgccgcagcccccgctgctgcactaccaccatggctcggcctccgagccgggtgccaagcgcgccgagaaagggtcgctgaggaggaggttccgggaattcaggtccggctgccggcacgttgtcctgcggcggggcaggaagcctgaggtcgtgaaggacctctgagggagggaggcggtggtggatccggtgctgcaagtatatggtagtagtaggtgttcatagagacggtggtatcagttccaccgtgtagtgcttgggttggtatagggtgagttcatgcatgcataccagtcttgaagaagaaagaaagaaagaaaaaaagaaagaaagacaaggtgcaccgttgagcggtggcgttcgtgtagagtagtgctagctgtggttttgacctcctgtgtggtttacacaatgtgtgagctgcgataaggtgatctacagcatagggacccctttgtgtttacagtgcaacttctgctggctctttcgtcttgttgagaatcctttcagtagagttagaaattataggagtggtcttcgggaaagcctgcttccgttctgttccattgattcagattctcactcccttcttcgagtgtttatttgattttttatattaaagttgagattcttcg

SEQ ID NO: 28412 - DNA, 1983 bp, Zea Mays
ggggcagagctggcaagtggcaaggctgcgcagagggactttttgtgtaaaatgcggtgggaaggtgcgctgcacctgcaagcagaggtgtgctctactgacagagtttgaactcaagaggaggcgaggcagaaccgcaatcgcgaccgcgacccgcaggtgacatacatacggtgcgagcgccggaagccggaagcaccggtgacgaagccttccgtgtcatcactcatcaggatctcagggttttgtttcgtttcgcgggcgttgggaatccatccatggcgaggaagatgctcatcgacggggaggtggcggccgtcgcggatggtgggcactatgactacgatctcttcgtcatcggggcgggcagcggcggcgttcgcggctctcgcaccgccgcctccttcggagctaaggttgcgatttgtgagctcccattccaccccatcagctcagagtggctaggaggacatggtgggacttgcgtgatacgtggttgcgtacctaaaaagatactcgtgtatggtgcatcattccgtggagaatttgaggattcgaagaattttgggtgggagattaacggagatattaacttcaattggaaaacgctattggaaaataagactaaagaaattgttagattaaatggtgtgtatcagaggatccttaccagtgccggtgtgacaatgattgaaggggcaggcagtctagttgatgctcatactgttgaagttagccagcctgatggttcaaagcaaaggtatacagcgaagcacattttgatcgcgactggtagccgtgctcaacgtgtcaacatacctggaaaggatctggctattacttctgatgaggccttgagcttggaggagcttccaaagcgcgctgtaatcctgggtggcggatatattgctgttgaatttgcttctatctggagggggatgggtgctgaagtagatttgttttatcgaagagatcttcctctaagaggttttgatgatgagatgagagctattgttgcaagcaaccttgagggaaggggaatcaagttgcatccagggacaaatctctctgagttgagtaaaacggctgacggaataaaagttgtaactgataaaggagaagagctcattgcagatgttgtcctatttgcgacagggcgcacaccaaactcccagagactgaacttgcaagctgcaggcgttgagattgaccgggttggagccatcaaggttgacgaatattctcgtacttctgctcctagtgtatgggctgtgggtgatgtaacaaaccggattaatttaacacctgttgcattgatggaggcaacttgctttgctaaaactgtgtttggtggccagcaagttaagcctgatcacagagatgttccttgtgctgttttctccattccaccactatctgtagtgggcctcagcgaagaacaggccttggaggaagctaatggtgatattcttgttttcatctcatcattcaacccaatgaagaacagcatatccaagcgccaggagaagactatcatgaaactggtagttgatgctgaaactgacaaagtacttggtgcatccatgtgtggaccagacgcacctgaaattatccagggcatcgctattgcggttaaatgtggagccaccaaagcagacttcgacagcactgtcggaatccacccttccgctgctgaagagttcgtgaccatgcgcaccgtgacgaggcgcttgagcccgacatccaagccaaagacgaacttgtaagcaagaaattggtattctggggaaatgttacaccggacaaatactctggtttcatcacgttggtaatttttacgtcattggaactggaaccatgtatattgaaggaataagttgtttttttcatggcaacacaccgaaaataatgagaccgtggactttcttgatacaaataatgagctcaagcagagaacgtttatggttgtaaaaaaaaaaaaaa

SEQ ID NO: 28413 - DNA, 1369 bp, Zea Mays
actaacgacacgagtagtactgatcagggtcagggaccgtccgtagtttcagtcccgctcccgcagtctggttcgtcttctcttctccccacctgtctccacaattccccataggaggagggggaggtagagaagcgcgaatggagagcaggaacgtagtggtgtgcgacaatggtaccgggtatgtgaagtgtggctttgctggtgagaacttccctacatctgtgttcccttgtgttgtcggacgaccgctacttcgctatgaggagtcacttcaggaacaagaattgacggatattgttgttggagcagcttgtgctgacttgagacatcaacttgatgtatcatatcctgttaccaatggcattgttcaaaattgggatgacatgggccatatctgggatcatgccttctacagtgagctcaaggttgatccatctgagtgtaaaatcctactgacagatccaccactcaatcccgtgaaaaaccgagaaaaaatggtgcctgtagttgatggatactcttatccacatctgacaaagagaatgaatgtagctggaaggcatataacatcttatcttgttgacctactctcaaggagagggtatgctatgaataaatctgctgactttgagactgtcagagaaataaaagagaagctatgttatataagttatgattacaaacgagaataccagctaggacttgagaccacaatccttgtgaaaagttacactcttccagatggaagagttattaaagtaggcactgaacgatttcaagctcctgaagctcttttcactcctgaactgatagatgttgaaggtgatgggatggcggatatggcattccgttgcattcaggaaatggatattgacaacaggatgacgctctatcaacatattgtcttaagtggaggaagtaccatgtaccctggtctgccaagtcggttggagaaagaaattcttgaccgttatcttgatgtagttttgaagggaaacaaagatggcctaaagaaattacggctgaggatagaggatcctcctcggagaaagcacatggtgtatctgggaggtgcagtgcttgctgggatcatgaaggatgcacctgagttctggataaccaggcaggagtaccaggaagaaggtgtagcgtgcctaaggaagtgcgggcagtcataagtcttgccacatatcatccacagaagaaatggaggttgcatgtgtaaagaagagctctgttgttggtgttgtgtattgtagtgagctatagctgtcctgaacatgcttggggataaaccatgtttgtattggcctactcaatttgacctctgttattgatcatcctttttagatatggaacatgacgg

SEQ ID NO: 28414 - DNA, 1765 bp, Zea Mays
ttcgacaaaatagcctaccagtgtcgtcccagccgccgtcccgtcccgtccgccgtcaaacgtcatccgaatccgcgccgcgaccagcgaagaaggtaggaagcatccggaacggagacgcgcctcctgcctcgccttcctcccatggcgccgcccctcgccgccgtctcatcgtcgtcgcccctattctctccttcatcgtcccgccccatccgccgctgccacgcacctcctccttctatctccttccagacgcggggacgctcgcccacggcggcggcggcagctgagtcttctgtcagcacgcttctcgaggtgcgcggactcaccgcatccgtgaaggagactgggcagcagatcctcgccggcgtcgacctcaccatccgcgagggcgagattcatgcgattatggggaagaacggctccggcaagagcaccctcacaaaagttctcgttggccatcctcattatgaggtaactggtggtaccattctcttcaagggtgaggacctggttgacatggagccagaggacagatctctagcaggccttttcatgagtttccaagcacctattgagattcctggagtcagcaatttcgattttctgctcatggctgtgaatgctcgcagagaaaggagtggtctaccagcattggggccccttgagttttactcagttgtatcgcccaaagttgatgccttgaagatggacccaaagttccttgatcgcaatgtgaatgaaggttttagcggtggtgaaaggaagcgtaatgagatattgcagctttcagtcattggagcagatttagcccttcttgacgagatagattcagggttagatgttgatgcacttgaagatgttgctaatgcagtgaatgggctgttgacaccccaaaactctgttctgatgattacacattaccaacgtcttttggatctcattaagcccagttacgttcacatcatggaaaatggcaagataatcaagacgggtgacagttctattgccacacaaattaatgaaggcggcttcaaatctatcgcccttgtatagcgtgaaagcagcaggttgtgttttgttccctgcaccttcccctttttcttctgttggaatattcttggttttctgactgaaattgaactatgcacttacatggtggcaataccaatgacgcctcttaataaaagaaatacaatgattaaaagaaatatgtttaggttgatgtgtgaaaaagtaaatgaggttcttgaggactgtacacttattgcaggtcaaataacagaaatggctcgctgggcttgttcaccagccactaagcctacttgccaggacagaatgcctactgcttggggtttgcactgttgcctactgcattcagaggtgtaccacatacgaatttagtaaaaaaaaatgagttagtgctctgttcgactaggcatgttgtcttgcctcgtcgagggtggggagctggatacaccacctcctctatgtaagaatgtttggatgaaggtattgatacatgtagtcatacatagggatagcatgtcgtgcgtgcatacaaggtccaaattttgtatgtttgaattatgacttattctcccaggcttctggctatcaaggctggtgctgcgtgcaacttttgtaacatttttagcacttcacaccgatgttcagacctagaaagcaattcagttgttctctaaactgttatataccattcgaaatttgaaacgtgccattaccgtggcttgctcttccaaca

SEQ ID NO: 28415 - DNA, 2728 bp, Zea Mays
tagcgacctctcttccctctctcactttccatgccgacctcctccatccttcttcttcttcttgtttgcggtggatctttgcggggatttaatttgttggaactcggaacaaaccacgaaaggtgcaagcaagcttcgctgccttcctttctctctctctctctctctctcttggccggtgcggccgtgcaggtgcttccagtgcgacgatttgaatttgccggattcagttcagtgagctgctgttgatatactgtactcgagctggagctgtgttactctctgagatttcgcttgcgaagtttccagtccgtgtctcagtccccaatccaaacaggaacggaacggaacccatcccatcctctcagcccccaatccagacgcaatctaggttatgggtaaaggttgagaggaatctcagttgctaccgtctctagttccttcctctgctcggttgcttggcgttgggtcactgttggcaaggtgttgggtcgacgattggagctggcgtctacgtccttgttggcacagttgcgcgggagcattccgggccggcattgacgctttcatttctgatagccggaatagcagctgcgctttcagccttctgctatgcggagctggctagccgttgcccttcggcaggaagcgcctatcattattcgtacatctgcgttggcgaaggagttgcatggttgattggctgggctttgatacttgaatacacgattggtggatcagccgttgcccgtggcatttctcctaatctagccttattttttggaggacaggatagtctgccatggattttagcacgacatgagatcccatggcttgatgtcgttgtagatccttgtgcttctttcctcgttttcgtcgtcactggccttctctgtgtggggataaaagagagttcatttgtgcaaggagttgtgacggtcttaaattgctttgtgatgttatttgttatcatagccggtagctacatcggcttccaaacaggatgggttggctacaaggttgctggcggatttttcccttatggagcgaatggaatgcttgccgggtcagcaactgtcttcttcgcctacataggatttgattcagttgccagcacggctgaggaggtgaaaaatccacaacgagatctgccactgggaatcggaacagcattgtcgatttgctgttccttgtacatgttggtttcagttgttattgttggtctggtaccatactttgctatggacccagacacccctatttcatctgcttttgccaaacatgggatgcactgggcaatgtatcttgtaacaactggtgctgttcttgctctctgctcaaccttgatgggatctatattgccacagccaagaatattgatggccatggcacgagatggcctgctaccatcattcttctctgatgtccataagacgacacaagttccagtcaaaagcacagtagtgactggcatctgtgcagctgctcttgctttcttcatggatgtctctcaactggctggaatggttagtgtaggcacgctactcgcgttcactatagttgctgtgtccatcttgattcttagatacgttcctccagatgaggtacccctcccatcttccctgcaagcatcattccgcttgagccaagaaaatgacgaggaaaagctgaggggtacccttggagatgatgatcatgagcaaggctcagctgaaataagtgatgttgtagtagaaccaatcactgaccccctgatcgagaagcagctatacgcaagcaatttgagtgaggcaaaacggcgtaagaccgcggcatgcagcatcacatctgtttgcataggggttctgatcctcacgacgtcagcctcggcaacattcttgcccttcccggtgagatgctccgtttgtgttttgggtggcatgctcctcctagctggtctgggcatgctctgctggattgaccaagatgatgggaggcactcctttggccactccggaggattcatctgtccgtttgttcccttgctgccggtaatgtgtatcctcataaatacatacttgttaataaatcttggtggcggcacgtggatgcgagtgggggtgtggctagtgatgggggtgttcgtctacattttctatggccgcacccacagctcgttgacggatgtcgtgtatgtccctgtggccgaggcgaatgagatatacgggtcatcctcttcgttagggtttgtggcgtaaagagagatggaaggagatgtttgttgaagcctatcttgagccagtcatggtacttctcacaaaaacctcaaagatcctgactggagcaggtacctgcttgagctattgtgttgcaggcatgggtttgaagaattcaatttgtacgtcatatttttaaaatgtgtaaattgtaacgcacggctaagcttgtgtgtctctgttggaggaatgtaaatattagtatattgcatagaactatatataggtggtgccaatatacaggtgtttaaaaaaaagggggggggtcattctaggaatctgtatgttttactacgaacttgttctaaattcctaggaattcaaacaggcatgtctgaggcgtattatgtggttaaggcctcaaaggtccaaacacattttatttcatgttgaaatgaagattacacgagcagaaatgctcacggaaaaaacaatagtacatcaataattcagattcactgcaccaggtttcc

SEQ ID NO: 28416 - DNA, 2058 bp, Zea Mays
ctccctctttccccccgggcctcgtctgctctgttcgactgttgttgcagtgccttcgcctctccagcaagcaaagccgacccccacaccagccagtcaggaatcgccgccggcggaagccaagcatcatccccagacaccccgtccgtcatggatccggcggcgtggccgccgtggacgtcgctcctgctgcgggcgctgagccggcggcggacctgggtggcgctcttcctcgcagtgtacgccgcgctgctctcctcctcctggtccctgctggcctccgtccgcgcctggtactacgccgcctcctccgcctccgcctcggcggccgcctcggcagcgcccgcctggcccgcggcgctctacgcctccgtcacgtacggcgccgtgttcggcctactctccatggccgccgcgctcgccgtcgccgcccccgccatgctggtcacctggaccaccgtccttgtgctcctcgccttcgcggggcgccggcccaggtcgctcgtcgccgagggccgacgcgccaccagggacatcgcgggcctcgcgctccgcgtcctcctccgcgagggcaacgccgtcgccgcgctctgcgctgccgccagcttcgccgcgctcctcctcggccggcgcgacgacgatgccgcacgccgcgcttcctagttcgagctggttgtagcctgttgtagcatcgcccccctccccttttacacctcttcctcctcttctctcaagctagatctccagccctgttgttcctctccgggcgtaaccgcctgcgcaagagattatgatttgtttgttgcagctagtaggtgtaaattatcacaccagtttgtttcagttactccacaaattggacactgatggcatctgtaatgaatgtagcttgtcttacagctcttgacgatgaaaatgattccgggggctaactaaccttacatacagcgtacatttgttactgttagcacagctttctttcagatgacgtgatctttttgttaggaacaatattggtcgctgtggtggaacactggaagccatccttaatgggcatgcatctgcgaaagtccagttggagccaactattacagatgaaatctctttttatgggctcagcagtaaattgaaaatgcgtgagctctcccctttgtcatgggtgccatcatcttcacatgctgatctggtggggaaaatcatcttaagttggcttgatgcaaccatctcttgtccgtcatcctgcctccagcctgaggaaagtactaggtatcgaggacttgatgcaagtagcactggcttgttccccattgagtatggctgtaacaattttaaacagacgagcaatagaccagtgatgcccaaagatcattagtgttggctccctttcagaaatgccgcagctttgtcattgtccagtacggaaacacaaacaccgatatttttaagtacttttagtcacctgtttcaccagtggaagaaatgacagatggcacagatgattcatctgtatgaaccagatatcaagctcaacagattatttggatgataaaactgatctcaaggctaactaaccttacatacagcgtaaatttgttactgttagcacagctttctttcagatgacgtgatctttttgttaggaacaagaacaatattggtcgcctacgcaagggtactggacaatgacaaagctgcggcattagcaaatctggattgcaccaagaattatttctgttgatcataacttatacaaatcagagaagcaatccgggccggaacagtttcggtcttctattccctgtcaaccgaacgggccctaagctaggtggttattggatcaggcgtctatgctgtgagagaactggcaaagaggatcctccgtttgtccttggcttctggtgttacagaagaaactgcagaacccatgagcgaaaagggtggattagttttagcaaacaagtggttacactagttgtagctgtactatgtgtcctctgaatttccctgtgaaagcaatatgatcaaagactgtcaaatatatccttttttaaaaaaaaa

SEQ ID NO: 28417 - DNA, 2858 bp, Zea Mays
gccgtcgccgcagacgcagccggccacccaccactcgcgcctcccccaccgcgtcgcgtgtgggccacagctacagctgcctcctcgagcaacccacactcctttcttcccctgcctgtcgtctctcttccaccttccaccacaagcgccgtcgcagccggtgcctgctccttcccgatccccgaggcaaagctgcgactccgcaactgccgccatggcgttcgagaagatcaaggtctccaacccaatcatcgagatggacggcgatgagatgaccagggtattctggcagtctatcaaggacaagcttatcttcccatttctggacctggacatcaagtactatgatttggggatactgcacggtgaagcaactgatgacaaggtcacagtggaggctgcagaggctactctcaagtacaatgtggctattaagtgtgcgaccattactccaggtgaaactagaagaacgtatgaagctagacttgttgcaatttatagacatgtaagagaggatggagttgagggacaacctatttctgtttcaacagaacaatttgcagtaagtcaaatcacctcttgtactataatcttgcaattgtttctttctctctcttttctaagaataactattgcattagcatattttactaacttgtataaattgttattttcaagagattttatgtaccgtttctttacaaacaatgctaatgccacatccacaatcttgcagaactttgaatggcaaccagttatctggatctttgcctgatgagattggttaccagatgaactttaacagattagaaataaaatataacaacatatcaggcccatacctaacacttttgccaacttaacaagaattaaacatctgttagtgtcgagtatctttattttctgcccatccctgatgcttctgatttgtaaaattagtaaataattctggttccaattttaccttttagtcacatgaataataactcattacaaatcccatctgagttgtccaacttgccttaactccttcatttgtaagtagacctcaactttttctaatattttctattttgcaagttgcagatgacttgtaagttgacatgtcttgtgctgtgaacttgcagccttgttgataacaataattgatctgggcctcttccaccagaattagtagatacacgtagtcttcttgctatcttgacttcaggctgataataacaacttcagtggaagctccatcctgctgaatacaacaacatacaaacacttctaaagcttactaatattgagggggatggcggagggcattgcgctgcggggttacatcgccgtcaccttcgacatgcgcgacataggtgggtccacagggcgggtgtcgctcacgtgctccatcaagaacatcgagtgaggtggtgtgctgctgctctaaagaagggaggagaggaagtagcgacaatgtcgccaagaccacctggcgcgatgtctcctaccagatcaccaagatcaacatgtacaaggtgatccagtccgagccctctccctgcatgcttccattgattttttatttcattccaatcgatttgccgtgatatatgcaatgcaggatggtcggcatgtacaagatatgcttaaggtgaggttgtaattcaggatgtgcatatatttcttgggcttgaatttgtttaatctaaatagattattttttatccaatccaaatttccaatgacttgccatatcattagcatcagaggctccataaagcagctctgctagaattaactgattcactgtcaaggtcaaacatcactatgatattgctgagatggtccaatcagtgacaatgctggtggtattgttgagatggcaggaatgagccacaaaatctgagagaacttatgctcttggtgctgctgacaacacaactgttgctattagaaagggatttgccattggttcaggtgctcttgtgtccctggtgctgtttggtgccttcgttagcagagctggagtgaaggttgtcgatgttctctcctgaaggttttcattggtttgattgttggagacatgtttttgtactggttctctgtcatgaccatgaagagtgttggaagtgtcgccctaaagatggtggaggaggttcgcaggcagttcaacaccattcttgggttgatggagtgaacaagcaagcctgactatgcaacctatgtgaagatttgcactgatgcttcttccatcaaggagatgattccttggggtgctctggtcatgctgactccctcattgatggaacctctttggcatcgagactctctctggcgtttttgctggtgccctggtttttggagtgcagaacaaggccatctcagataaaagtagatgtagctttcataggacttaattccagcaaagcaaaggttggcagtgcaccaaacaatagcgtttatacttcattcttatggattggagaagcctatgcaacatgtcaagccagatgacatgcagatgagaaggttctgcatcaatagaaaccagagaaaaatctgtatgtgtctgtatgacatctcagataaagcctgatgatcagcatgatgaaaggtggggagttctatagctggtttaagctggagctagcttctgaagtccggtcaggtgtctgtatgtgttgcccctttttatttcatttcatgagaaaagattgttatttgttccttgaactgtacttggtcgtacttgtgaataaatattttagcatggttgttcgacttctcataatgtttattcgacatcagttcatgatattagtgttacgtgatattttatcatatgaattttgaatatcatagtgatgtttatc

SEQ ID NO: 28418 - DNA, 3003 bp, Zea Mays
atcaacaaatgctccccctctcaaagcccgcctccggtttccgtcccccatcctcctccgccccccagccgccgcatccaatggagtcctcgctcctcctctctaccccgcgcccgctcaagcccttccatccgcatcacttccccaccgctcgtcgtcgcgacgcgtccttccgcgggaagccccctccgccgccgcccctgccaccgctcggacgcggcagccgccggttgggtcgggcggtgccgcgcgcctcgagcgaggcgttcggcgacggattccgcagccaggacaggcctcccggggttagcagcgggggtgttcgccggaggacctaccgcgaggcgcagggcgaggcggccgtgccacccgtggccgcggccgcgagagcagtcgcgccctacgtcgccccggtcggggcagtactcatgctgagctttgtcatatggaaggtggttcagaatatgattccagggaagaaaaaggatcatggttctggaaaacatgcgccttctggtatcatgtggtccttcgctgctggctccaatttggcaacatctaccctcagtgctgaaaaggagtcgcggaaaaatctgaacaagttctacaaagaacttcgaactttgaaaactgttaacatggctggtcgtcagtttggagatgagggcctgttttttctagcagaaagcttagcctatgacaagagtgcagaagaggtggacttttctggcaatgggataacagctgtggggatagaagcctttgatggagttcttcagataaacacaactttgaaaactctcaatttatctggaaatgacatcggggatgaaggagctaagtgtctttcagatatattggttgaaaatgtgggtatccagaaactcctcctgaacagtatcaatattggggacgagggtgccaaggcactttcgaacatgctgaaaaagaataaatcaatacgtattctacagttcagcaataatgcaattgaatacagtggttttgcaagtattgcagaagcccttttagagaataatacgatacggagcttgtatctcaatggcaactatggtggtccccttggtgcatgcagcctagctcaaggaattctagggaataagtctttaagggtactacttaagacacttggttatatacttccagtcttccacatagttttaatgtttttttttttgtaaaattttaaatgtttgaaagtgaagcagattgaattccatctttgcttatgcatcaagttatggagaagtgtctgtttcagctttctgaaggggtagtagtattttgaaactttcaggtttggctatatgtccaaagcgtatggatcaatttgccttctcactactttatgctaaccgcacaatatggttggatttcaggatacatatctgtaaagcatggagtgtatagtaggacttgcacacaaagagcattttattaacttttcttgcttagatgataaaaacctattggtaatctgtaagtcttgctgtggcaatattggtagaatgattaccaatagaagtatagaactcttctgtaccaatgtgctacctatgaccaaatggaactatttattatttaagactgtaggttcgaaattaatgtgtttgaagttcttcgatctctgttcatagccccccccccccccccccccaaaaaaaaatgtttattactgtttggtatttttgtctatttctaactttgtatattatattcaatttacctatcatggttatgatatgtaagcatttaaccttcactaggaaattcacttgcatggtaatgggattgggaatgagggaatacgtgagttgatgtctgcattatctgctcacaaagggaagatcacagttgtggatattggcaacaacaacattagcccggaaggtttacatcctgtagccgagttcctcaaaaggacaaagtccttacagtggttcagtctctacatgaacgatattagtgatgagggagctgaaaaggttgctgaggctctgaaagataacaaaacaatttctaccatagacttgggtggcaataacattcactccaaagctgttagtgcagtagcggaaactttgaaggataatgcagtgctgacaacactggatttgagctacaatccaattggatcagacggagtaaaggctttgtgcgatgtcctcaagttccatgggaagatccaaacccttaagctcggctggtgccagataggcatggaaggtgcagagtgtattgccgactgtctcaagtacaacacaacgttatcgacattggatctgcgggcaaacgggcttggaaacgatggtgctatatgcttggcgcgaagtttcaagataatcaacgaatcgttgacgtcccttgacctgggtttcaatgagattcgagacgacggagcattcgcattggcacaggcgctcaaggctaacgaggatctggcggtcacgtcattaaatctcgcaaacaacttcttcacgaaattcggacaggtcgctctttctgaggcgcgggaccatgtgtacgagatgaccgaacgggagatagacatttatttttaggggggtaccggttcccctgtgcacacagttagcacaggacatgaccgatgcttgtttgtcgagtaggttgaagaataaggtcgcgcggtagagcgatggtttatcctttgtataggaaaattttggtgggttagttaaatatttttagttactatgtaggttagccattcgatcaggtgtctatatgcaagttttgctggaaacgtcggtgtcgttttgaaccattcgtattattggttgaaaatggaatggatatgacgggcatcacatgcaaactgattcttttttgtggaggacttcactgatgtggtggtgtgtgttcctcggaagttgaaatgtattctcatgccatccatgtgggatggtgttggtaacctcagacctgtcgtaggctgttgtgaatgtcacacaaagatttcgc

SEQ ID NO: 28419 - DNA, 201 bp, Zea Mays
ggacaatggtgcttgacagcttgagtttaactgaatagagtaactgatttgtgtactggacaattgtgcttgctgtagaatagagtaactgatctgtgatctgtgtagtagtaactgatatgtgatctgtgtagtatagtagtggacaatggtgcttgctgttgtattaccttatgtttggtaataacttgctgttgtatt

SEQ ID NO: 28420 - DNA, 1789 bp, Zea Mays
cttccctactcctaccaagcgcatgccacaatgcccagactataaaaatcgaagcccacgccgggagctccatccctaaaaaaaaacaaaagccttcgcttcgcttcaccactctatcgctccacggccggccacagctagctgcgtgctgtcctgggggagcagcagcagcttcggcgggaggggaaaggagctacgatggagaggttgggcgtcggcgtcggcgtcggcgagctgccgccggggttccgcttccacccgacggacgaggagctgatcacctactacctcctctgcaaggccgtggacggcggcttctgcggcggccgcgccatcgcggagatcgacctgaacaagtgcgagccatgggagctcccggacaaggcgaagatgggggagaaggagtggtacttctactgcctccgcgaccgcaagtacccgacgggcctgcgcaccaaccgcgccacggcggccggctactggaaggccaccggcaaggaccgcgaggtccgcagcggccgcagcggcgcgctggtgggcatgaagaagacgctcgtcttctaccggggccgcgcccccaggggccagaagacgcgctgggtcatgcacgagtaccgcctcgacggcacctacgcctaccatttccttcccggctctacgagggacgagtgggtgatcgcgagggtgttccagaagccaggcgaggtcccatgcggccgcaagcaccgcctgggcggccccagcgccgccgccggcgagtcctgcttctcggactccaccacctcggcctccatcggcggcggcggcggaggaggagcgtccgcgtcgtctcgcccgctgctcaccgtcacggacacttcctcgccgtcgctgttcgtggccaacgcgaacgccgccgccagcaacaacaacggcaacccggtcaccgggcgagagctcgtgccctgcttctccactaccgccagtcccctggaagccgcggcgctcggcgtcgtcgggcacccgtacaacgcggccccgctgcgtctgggcttggacttcgaggcgccgtccccgggcttcgtcgtcccgaacctgcgttccctgcaagtgcaggacgacggcggcctgccgctgttcctctcggcagcagcaggcggcggcatgtcgtccgcgacgctgggaataatggggtcgctgggcgggtctctccactgcccgccccacgccggcatggatgtcgtcaaggtcgagggccgcgccgcgccgccgcagatggctgtcggccccggcctcctcgatggcgccttcgcctggggcttctagtgctcactgctcaggcgctgcacgccgccgtggcatatgggcatgcatgcatcaccagcaaaccgatggatatatatatgcctctccacatgcatgtggtagttcgtggtttctctgcatgcgttgtacgttaagcttcgttagtaagtggaagtggcagagagtcgtcgtttatgtacgctattaagcttgattagtatcaggatgtggctgaccgaccctccatgcatgggcactccaaactgtagccttccagcagctttgttcgtggattagatgtgtcgtcgtgtatgcctagcgtagtacagtactcatagttcgtgctgtggaatcgacgggatgcgatgtgccctgcctgctgctgagctctgcaggttctgactgcgtgcttgtgccagctagtgcatggtggtatggctgggggtgctactgctcgagagcgctaaaaagtccacacggccgtttccctggcacggcgcctcag

SEQ ID NO: 28421 - DNA, 3327 bp, Zea Mays
ggactgtagagagagaaagagagcagtcatggcctcgccgggcgccctgcgctgcttaaaaacctcggcccttaattcgctcgcaccggttactgctgctcctgcttcctcacaccaccctacctctcctgccagagcaggaggaagaaagattggcaggaagcagcagttcctagaccaaggaccggccggggaggacggaggatagagacggcgagcgagcaagtgtaactgttgccgtggaaacgggagagggatagagagagagagagaaacgggccgggaggagagagataagcgctagccaggaaggaaacaaggtggaagcttgcgcagtgggggtgggtgtggaaatggcgtgaagcatgtctggatccccaaggtttcgcgataccctgctgcctattctgcagcgttcgtctcgagctggaactggaaggcggctaccactccggcgcagtcttgcccggcctactcatcgtcgtgtataaatcagagcagggggccaggccacagaaggcactgcagcagagcagcacagagatctctactccttcccttacagctgtggaacgagtgagcgagcaggagggacaagacaaggttggtagtagtagtagtaggtgggtggctagcctgcagccagccggcaatggatttcggcgacgaacctgagggctccgacagccagcgccagcggaagcggtaccaccggcacacgccgcgccagattcagcagctcgaggcgatgttcaaggagtgcccgcaccccgacgagaaccagcgcgccgcgctcagccgggagctcggcctggagccgcgccagatcaagttctggtttcagaaccgccgcacccagatgaaggcgcagcacgagcgcgcggacaactgcttcctgcgcgcggagaacgacaagatccggtgcgagaacatcaccatgcgcgaggcgctcaagaacgtcatctgccccagctgcggcggcccgcccgtcgacgaggacttcttcgacgagcagaagctccgcatggagaatgcccgcctcaaggaagagctggatcgggtgtcgagcatcacgtccaagtacctcggccggccgttcacgcagatgcctccggtgccgaccatgtccgtgtcgtcgctggacctgtccgtgggcgggatgggctccctcggcgggccgtcgctggacctcgacctcctcagcggctgctcgtccgggctgccgtaccaggtgccggcgcccgtgacggaaatggagcgccccatgatggtcgatatggcggcgcgcgccatggacgagctcatccggctcgcccaggccggcgagcaaatctgggtcaagggcgtgcccggggacgcgagggaggtgctcgacgtcggtacttacgacagcctcttcgccaagcccggcgccgcgttccgcccgccggacatcaacgtcgaggcgtccagggactcgggcctcgtgttcatgagcgccgtcgcgctcgtcgacgtcttcatggacacgaacaagtggatggaattcttccccggcatcgtgtccaaggcgcaaaccgtcgatgttctcgtgaacggcttgggcgggaggagcgagtccttaatcatgatgtatgaggagctgcacatcatgactccggtcgtgccgactcgcgagctgagcttcctccgctactgcaagcagatcgagcaggggctgtgggccgtcgcggacgtctccctggaggggcagcgcgacgcccattacggcgtgccgtcccgctcccgtcgcatgccgtcggggtgcctcatcgccgacatgtcgaacggctactccaaggtgacctgggtcgaacacatggagatcgagcagatgctcccgatcaacgtcctttaccgcaacctggtgctgagcggcgccgcgttcggggcgcaccgctggctggccgcgctgcagcgtgcgtgcgagcggttcgcgtccgtggccaccctcggcgtgccgcaccacgacgtcgccggagtgacgccggaggggaagcggagcatgacgaagctgtcgcagcggatggtgagcagcttctgtgccagcctgagctcgtcgccgctgcagcggtggacgctgctctctggcaccacggacgtgagcgtccgggtctccacgcaccgcagcaccgactcaggccagcccaacggcgtcgtcctcagcgccgccacctccatctggctgcccgtccccggcgaccatgtcttcgccttcgtccgcgacgagaacgcgcgctcccagtgggatgtcctgtcgcacggcaatcaggttcaggaggtgtcgcgcatccccaacggctccaaccccggcaactgcatctccctgctaagaggtctgaacgcgaaccagaacagcatgctgatccttcaggagagctgcacggacgcgtcgggggcgctggtggtgtactcgccgatcgacatcccggcggcgaacgtggtgatgagcggcgaggacccgtcgggcatcccgctgctgccgtcgggcttcgccatcctgccggggtccggcgcgggcgcgtccagcagcgccgtcgtcccgccgccgggctgcgtggtcaccgtcgcgttccagatcctcgtcagcaacctgccgtcgtccaggctgaacgccgagtccgtcgccaccgtcaacagcctcatcggcaccaccgtgcagcagatcaaggcggcgctcaactgtgccggccattgatcgcctcgtcgcccttccaccctcgctccgccgccacagtaactgacgagagttggttggcccgttgaatgctcgcattcatggagtccacctgccgctgctcccgcggaaactgctgacgccctccagcaacctatatccatgatccatccccaccatgcaccataacagcttttccttcctctagattcagcgtcgttttccttggcttaaagttctcaggattcgcccgagtcctcttcttctttcttttttttttctttcctccttaggcatcattcgctcgtgcgccaaagatctgtcgaaggctttatgagactgagggagtcaagaacgcaccatgctaccttgtccctttcctccggctgcagccgttttttcccctcgccatgcacccacccacccaccccacacacacttcttccttttcccttagtaaaaacttgcatgcatgctcacatccttgtcatgtcgccattgtcgttggtgctgccgcaacagaggatgaatggttcgggtattgacttctgtccattaatgtaaagccttcaatgaacattcatttcgattataaatggaaaggagaaaaaaaacacaagttctggtaaaaa

SEQ ID NO: 28422 - DNA, 303 bp, Zea Mays
gtcgcggcccttcgaccctcacctgccatgccccttttcccttcttccattggaccaggtctcaccgtgacaccaatgacgggcgcatgagtgagacccgccgccgccaccgtgaattcgtgaatcggtcgtcgcttcggcctcggcttgtggtcgggaatctacaccggtgtatgtcgcatggtccgggagcttcctcgtgcggcttgggtggccggaggcaatgtaattgcttgccggagttcagtgatgcctcgagtccgcatggctccatgggcagcgtgttccgttgctcgattccag

SEQ ID NO: 28423 - DNA, 5138 bp, Zea Mays
gggtaccataaataaatacctttgtttccgccaattattcgataaccaagaacaaaccattgttggacgcgttcccctcctgcacgcaacctcatctcgtcctccagatccaggatggccgtcctccttgagaccttgcctccccgagtgctctcggtgagctactttgtttcgatttatcaggaaatccgtttgcttcatgttgtgcaggctcatatctgattgctggattcggcaaacccgcgttggatcctgtatcgatctggagaaatcgcgaagtcgtcgtcgttcggttcggagcggatctgaggcgacgatagatggaggcggcgggatctctcggtctgcagtcctgctccacctcgatggatgatgtctctgcgctgataattattggatcaatttcgataattattagtagatctatgagatatgccgcctggaagaggcgaggtaagctgcagcatgtaaaaaagagaaaaaagatgtgacatcctagaggaggaggcctttgccatgatgggtgcgctcgcatggcaggccaggcaataataaaaagatgattattgcgtgccgggggaggagatcgcacgggggttgatgtttttggccccgggttctcctccctcatcttgttccgtgttcctgtatgcgttgcttccgctcctgttggtccgctacgcacgccggatttttgcatcgagcacggagatctacaacaaaaacatggagctacgacgcgattcccaagggatacttgtttcttgtaagtctgttagcatgtttgaaccatagcaattggcggacgtgtgtaaaactgcagtatgatggattccactattcatcaaccgaaattatggcgcgcttcaatcgtggctacgctgatggggaactgatccgttatggtgtgcttggatcgtggctgtgtggagatgtgtggaactcattggttataatggtgatgctgatggaactgattttgctcccgttggacggcctgattggttactttgccctgttgactgtttgagaacgtaccgcccaggtttacttatacttactgctttttgacggtactgtacatacagttcgacaatttatttattggcagttcaattcatccatttagctaggggcacgagagcatgagttcccctggagatcaatttcatgttgctttttttttgcgaagttccattttctattttcaatttgattagggctagtttgggaacttattcttccaaggtttcctaaggaaaattagttcatttttttttttgggaaaatgaagtttccaaaagggtttcaaatccatggtggtgtgggaattgattgcagtaaaggcgatgggtaagctgataccggtgggttgagaattagaccatcagtagcttactctttcccatatttaaactataatctacactacaaaatagtgcaaaaggtgttcatagtgacctatgaataatataatctacactacaaaaatagtccaaaaggtgtttgtagtgaccatatatgggtgtacattgtacctttttacattgtatttgtagtgatcatatatgggtgaactactgtacttttttatattgtagatcgtattatttatagtgtgcagtttgaatataggtaagctgatggtcttattgcctgtcaagttcatatataatagttttgggattaattttttttgcgtcatagaaattcataagcatgtgagtttatcacatatatacatcagaatattaactagaatatatttaaaattggtttcgttcatatactcggaattgtgcccagcgggattatataatttaacaaagaacatggtacagaattataagccgtgactttataccattatattaaacgtaattgggaatatttaaattgtttttcattctaattgactgcattttgtttaagtctcaagggtgccgtgcttttaatctagggcctaaaattgggtgattaaggggctgtttggttcgtggtcatactttacctaaggttagtcgtttgaactgaaaaactaatcttagtcagaaaagttaagcaaagtgtagtaagttagtcatcaaaccaaacaggctctaaaagcaagttaaaatccaccggaattgactgcattttgtttgtcttgttttcatcaatccaccggaattcagtgattaaatctcgcaagttaaaatttttcttaatttgctcaatatttttcagcgatatccgttcttttgaatgggtctattcacagaaggtttggttgtgaacacgaatattcaattgatatatgtgtactttttaaaggtattttatggttatttaaatgtagctgcgtctgctcgttgaggtgtggatctttcctcaacacggtgaggtcatccgtttgactgctagcctaggcgtgctgtcccggatggatggtggttcaaatccaccaagattctttagtagtcggaacttattgctcaccaaagaacttaccattgctttaggatgttttatttttgtatataggcttagccggttagggcctgtttggatcagtttataagaaactgttttttgaaaattgaggtggttccaaatatatcactagactttcaaacagcatcttagttaaacaggaccttagttttgatacgaggcctgcactcagcccggcggcgatcaaaatcgaacgtgtgggatctctgatatttgactaggtctggtcggtagcaaaccaaacatgtaagaatttgtacatatactcaacgtcttagaatttgcagtttagagaacagagagtttttgtttttgtttttgcttagttcacgtctctttcatcgaagtggcttctcatttttgcctagactctttattttacaagtaagaatttcttcctagatttttatgatccacgggaatttacactgaatcttttgtcagaaaaatgcaagaatttcatataatccagtttatttttattttttgataataaaatttctctagtaaaaaaatgttgtagggcctaggagttctataatttataattcataccgaattatcagcaatctcctttatagaagtgatatatgtagaaaacaaaaaaaaaagatggcattcacgttttctagaagtggtgataatttgaattttgtccaaagtcgtactgacatgttccgtgcgaaagggcgttctcaatgggaagaggaaaacactgtttccaaagctaccatctcaaaaaacactaaatctcgtatttttctttattaaattgtatattgtgttatcttatttgtttacgtgacgtattattaataaaaataaaactcttatgaaactcctattaagaatgacttcatttagagtaaaattataaaaaatttactaacatttatgatattaagtataattattataataatatttttgtttatagtaaatctacttaaagttaagatacttggaggctctttggatccaaacaagttcagccaaagtgactaaaatgacatatttttattattttagtcacttttaactagcttggaatgtgattgaactttattaatgtttgttttagcacctaaacaggctcttagatcatggctactactaatagttaactactagctaatatgtcataactactatgtaactactattacccctattaggactagtttaggaacttcattttcttaaggaatttctatttttcaagaggacttggataaatgaggttcccaaactagtccttaacaaatttcactcgactagtaaaatagtactattattagctactagaaaaatattgctaacaatcagttaaactattagcaacatgtatttggattcaagaaaataattatgagtagctaattagtaattactatctttcttgaacctaagtaggatcataattaataaaaatcctatagtttttagagagccaagataggatcataattaacataaataatgtagtttaattttttgatagacagtactagggcatgtttagtttcattgtgctaaactttagcatcacttaaagagataaagtgctaatgtatgttaaactttagcattttacttttaatatcttctagtatattttagcactcatgtttggatttacaagagctaaagtttactaaagatgtagtgctaaactttagcattatggaatcaaacatgcccttagagtgtacataataagaactgcacattaggccttagactgccttcaacaactaccttattttattctatattttaaactttactctgcaatcagtataatccatagtataaataataaatctcttattttacatgatctagtgtacataataagaactgcatattaggccttagctatcttcaacaactatctcatttcattctatatgtcaaattttactctgcaatcagtataatctatagtataaatctcttattttacatgatttgttgtggacaatctttacatggatggcacatggacctgagacaacattggacgacatgtgaaactttctttggacaatattggacaacaggagaaagctagaaggagcatacaaatttgaattctgcttcttttccaacattggataatatgaaaaacttagaagaaacatagacataggattctacttcttttccagtttttttgtgctgaaccctccaaccaactgaaggctacaaatactcctctgtttggacgagggtgaacatgagcttagacttgtcctcattcgatttgcaacgtctcgacaacccttgcacgatctgactctactgttagatcgtccgtacccatagtttatccaaaagaattattttacacggtatgtactgttatgtgttgtagattatattgttagaaaagtgaagtttgaatatataggtatagagatggataaactgtcatagatttagtcttagaggtacaacaccattccgttgcaagcctctgcctcaacaacttgtgccatttaaaatcacttgtcgtctctaccagtctgcctcgtgccatgtaaaaatcacttgccaagctgtaaattagacagttgtactatcatcttttgccaccgccttcaaaattgtatacaaggaatatatatatagtgaattcctta

SEQ ID NO: 28424 - DNA, 1756 bp, Zea Mays
cccacggcccacggcaagtctcccgcgaagtcgcaagtctcccgcacgaaccacgacaaatgtcaaccccgattcctcgccgtcgctcatctcctctctcccatctctgctagggttaggtcgtctcggcaagtcgccatgatgcagcagcccccgcagccgcagccgggtatggcgctacctcctccccctcagaccggtggcgggcagccaccgcagtggggcgcgatcccgccgccgatgacgcagcagtacggcgcaccacctccgcagcagcctccagcgatgtggggccagcctccgtcgcaggcgcactacgggcaggcgccgccccctcagccgtattatgccgcgccgccggtgccggccgcccccgctgcggcggacgaggtcaggacgctctggatcggggacctgcagtactggatggacgataactatgtcttcgggtgcttttcgaacaccggcgaggttcaaaatgtgaagctcatccgcgacaagaattcaggacagcttcagggctatggttttgttgaatttacaagccgtgcagctgcagagcgagttcttcagacatataatggacaaatgatgccaaatgttgacttgacatttcggctgaactgggccagtgctggtgaaaagcgtgatgatactcctgactatactattttcgttggtgatttggctgcagatgttacagattacttgttacaagagacattcagggttcattatccctcggtgaagggtgcaaaagttgtgactgataaattgacaatgcgtaccaagggttatggatttgtgaaatttggcgatcctacagagcaagctcgtgcaatgactgaaatgaatggaatgccttgttcttccaggcctatgcgtattggtcctgcagcaagtagaaaaaatgcaggtggtgttgttcaagagagagtaccaaattctcaaggagctcagtctgagaatgatcctaacaataccactatatttgttggtgggcttgaccccaatgtcactgaagatgtcctaaaacaagcattttctccttatggcgaagtcatccatgttaagatccctgttgggaagagatgtggttttgttcagtttgttaccaggcgctgctaatgttgcaaggggccttgattggtgcacagaatgttcggctttcgtggggtagaagcctgtcgaacaagcagactcagcctcagcaggaatccatgcaatggggtgcgggtgcgcctgctggtgttggtgattactatggtggctatggacaaggttatgaggcttatggcagtgggtatgcacaaccccaggaccctaacatgtatggttatggcgcttatgttggttatcccaattaccaacagcaaccagctgcacagcagccacagcaacaacagtgaggcctctttgctcgggtaggtcattgggttgtctgagatgggatcaattagtattatttctaggcattcatatattgatttcttgaaaatagaggtggtttcgaaaatctcctgattttgatggccccatggcatgttttcttcgagttatatcatatatatatgcactatgttatgtctatgaacaagtggtgctcaactgtgattgctatgttgaggcatgcttcgtagtttccttccagacttgtcttatatattgttctctcttttactctgtattgttatctctattagtgtgtattgcatatctactgcgatgctatatatgcgctgtgccgcctttcgtt

SEQ ID NO: 28425 - DNA, 1385 bp, Zea Mays
ttagattctcttaagtgcccggttttattcactataatatggtgaattcgttaaatgataagagcagccggaagggaagcggatggtaagctctttgtttggggcagaaactcaggtggccagcttggccttggtaaaggtaaagtagtttctaccccaacaaaggttgattgtttgactgacctcagagtaaaaacggttgctctgggatcagagcattcaattgctgttacagaggaaggtgaagtcttgagttggggagctgctggttctggtaggctcggacatggccgtcaatctagcatcctgggattttctctgacctcaactgaatatactccaagattgatcaaaaactttgatggtatcaagatagctgcaggaatgttgcactcagcttgcattgatgaaaaaggtactttgttcatatttgggcagaagactgagaagggatttggaagaccgaacgaagaattcagaccaaatattgttgaagagataccattttcagaagaagttgcttgtggaggttaccatacttgtgttgtaacagatagcggtgatctgtattcttggggttcaaatgaaaatggctgccttggtctgggaggtacggatatggtccgctctccggaaattttgaaaagttctctatttaaacttcctgtatctaaggtatcttgtggttggaagcacacagctgtagtttcaggtgatgacatctacacatggggttggggaggcgccaatgggacttttttcgaagagggccattcttccggtggacagctgggacatggaaacgacgtagactattttgagcctatgatggttccctttggcacgaatgcaagagccgtccatgtatcgtgtggcttcaatcatactggtgcaatttacgagtgctccgaggactttgactgacgtgccacctgcagacagcagatccgcatgtcttggagacttaggttagttatcaaattatactcgctagaagtgcatataaacagcataaataagctctgatgttggacctgcatttatgtgaagagaaatatagaacaagtgataacacccctgagagggggatgtaaattaaacagaataagggatgaactggatgcattttgtgatgcatcagagttacttgccagtgtatagcatttcttcatttattggctggttctgtattattttgccaggtactaagaaatccattgcctgatgtctcagcaggctgtttgtgtacattatgattgcttgactgcttggtgtcgatgcttgctgtgttttttgtgtgtaaataatacatgaatcagttaatcgtgcttgtacaattaaatatgtacatatatcagtgcatcacttattatatgtacatgatt

SEQ ID NO: 28426 - DNA, 3208 bp, Zea Mays
cgccaggaccaattccattcgctccaccccgcgaccgcgagtccctcccttcctgcctccccccgcggaatcgtgagggttcccaaatcgccggagttgatcctgccgtgcgggcgcgcggtggttagggctagtctgtctccggaaatggacgcccccgattccggcggtggcggctcggcggatgccggcgagcctatctgggactggggcaatctcctcgacttcgtcgtccaggatgacgactccctcatcctcccctgggatgacgccgccggcatagcagcatccgaccccaccgaggccgccacggcactgctccccgcctcgcccccgcttccgcagtcggtggaggaggagccggagccggagccggaaccggggccagtgcttccgccgccccctcttcgggttcaggggatcgggcgccgcgtcaggaagcgggacccgcggctggtgtgcccgaactatctcgcggggatagtcccatgcgcgtgccccgaggtggacgagatggtcgccgctgccgaggtggaggacgtggcgacggagttccttgctggcgcgcggaagaagactaagactgctggtcgccgtggcaaagcggaagctgcaggtactgccggaggaactgtccgcgcggcggtggcggagatgaagtgccaagtgcctggctgtgaggcggacatacgggagctgaaagggtaccatcgccggcaccgtgtgtgtctgcgctgcgcgcacgctgctactgtcatgctcgatggtgtccagaagcgctactgccagcagtgcggcaagttccatgtattactagatttcgatgaagataaaaggagttgtagaagaaagttggagcgtcacaacaaaagaagacgaagaaaacctgattccaaaggaacattagataaagaaattgatgaaccattggatatgccagcagatgttagtggcagcgatgaacttagagaagagaacatggaaggcataaccagtgagattcttgagactgttcttagcaacaaggtgatggacagagaaacacctgtgggatctgaagatgtgcttagttcaccaacctgtacacaaccttgtttgcaaaatgaccaaagtaaaagtgtagttacctttgcagcttctgttgaagcctgcattggtgcaaagcaggaaagcataaaacttgccaattccccaatgcatgacaccaagagtgcatattcatcctcgggcgcatctcattcaagttgtatgattggaatcctgcagaatttcctcgacgactacgacaccagatcttcgaatggttgggtagcatgcctgttgaattggagggctacattcgtccgggttgtattattttaactgtatttattgcaatgccacagcatatgtgggacaagttatcagatgatgcagcagatcttctcagaaacttggtaaattccccaaacagtcttttgttgggtaaaggggccttcttcattcatgtcaataacatgttatttcaagtactaaaagatgaaacaacattgatgagtaccagattagatatacaagctccaaggattgattatgttcatccaacatggtttgaagcagggaaacctgtcaatcttatcctttatggaagttctcttgaccaaccgaacttcaggtcacttctgtcttttggtggagactatttgaagcatgattgctaccgtttaccatctcatgatacctttgatggttttgagagtggtgattttattcctgattctcaacatgaaattttccgaattcacatcactcaatcaagaccagatatttatggacctgcatttgtggaaagttttggtctacatgttcctagacctaaaagaaactacaatgttaagagatggattgatgtgtttggcatttcgtgtggagtcagattttctccacttgtacttttggttaccacggtaccaccttcacaaagtgtgccttagactgatgcaaagaaaaggttgaaaacatgtttgggttatcaaattttgttcctatcctttttggaagcaaacagttgtgttctgaactagagaggatacatgatgctctttgtggttcttacagtgaaaataatgtacttggtgagttactcagtgcttcttctgatcctcatgagcaccggaaactttgtagttctgtgatgtctggattcctgatcgacattggatggcttatcagaaagcctactcctgacgaatttaaaagtgtgctgagttcaacaaatatacagagatggatatgcatgttgaagtttttgatacagaatgatttcatcaatgttctggagataatcgtgaagtcaatggacagcatcatgggttcagaggttctttcaaacttggaaagggggaggttggaagatcatgtaacagcatttcttggatatgtaagccatgctcggaatattgctgatcgtagagctaaccatgacgagaaaacacagattgaaacaagaggcattattgttacttctccaaatcagccaaacttaggcgcctcagtgccatttgctagtgaaaacactgactttggaggggataacaaattgaactcaactgatgaggaagaaattatgccacttgtgactagagatgtctcacaccggcactgctgccagcctgatacgactgttaggtggcttaagccctcactgattgttacttatcctggtggtgccacgagaatgcgacttgttacgactgtggcggttgcggctgttttgtgtttcacagcttgtcttgttcttttccatccgcatggggtaggggtgcttgcagctccagtgaagaggtacttgtcgagtgactccgcatcgtagttgatgttatagatcagatattctattttgccgtgccgctctgctctgtctgtatcatttgcgctttgttaaggcatagcttgtgtatctgatttttttgtaagggaaccaacacgcaggtgcttttcatctgtgcaaaactggcatcttttgtttttttcagactgtaagtataggcgccggaagctctgacctgctaatgtttgggcatgtaaacttctaatgtagtgcatcagttaatggaaaatagctgcattgctgcaaagggtggtgtgcgtctgaactgttggcatacaatacaattgtgctgttctcgctgctgcgggttttactggcatacgcatacgccgtggagaa

SEQ ID NO: 28427 - DNA, 203 bp, Zea Mays
ccaacaaacaaggaaatggaatctcagatccccagctatcctaaactgactatgccaactgcataatgtgatgacgcaagtaagtttggagtctcgaaacattttttgcttaagctgagtaaccttacttttccatttcattgtctgtgttgtttctgttcttttaggctgactcggagacagatgaggtatatgcatagatg

SEQ ID NO: 28428 - DNA, 537 bp, Zea Mays
gtttgtagctagattcacaatccacccaaagactcgtccttggaacttgacacttgaacaaaacacggggtataaagtctttgatctgcagaaatccatttatgtcatacatgaactgcagttgacaataaggtgcccagatcaggaagccaccaggaagaagtacaaggaccccaagtttgggtgcgtgtcgacaatggtttcaccacgagaaatccctacatctttccctgaagattgccataagtgaagtctggacttggagaaaggtttttgcagtaatgctgctggcgatgtagaaaatagcttgattgtaggatagttggtataatacgtgctagttcacattagaatagtaagactgaattaagcttacctgttgagtctgagatcttgaacaagccatacagtcaaggttttgctcagtaacctagttcacgattctctctttagcagtaatggatgagacatttttactattagaaagggatgttaaactaagaacacagattttaaagctcttctattaaaaaacgc

SEQ ID NO: 28429 - DNA, 215 bp, Zea Mays
cggcgggcggcgggctgcgtgcgggtggacggtggtgtgctgccgtactggcgcggggcgcatccggatggcgatggccgttgtagggtaggagggcagcaggcatcgtaccggccggcttaggcttatcgggtgaagtgcgtggccacggtgcctcctactgcaccaattgctgctctgctggctgctgcctgctgcctgcaggtggaattggg

SEQ ID NO: 28430 - DNA, 1699 bp, Zea Mays
cttcagtgcctttttaactggagaagaatgcctacagaggttacaaaaccgtatagaagttcagtatgatagtgcaaacagagagcatcaggaagcactacagtccctttggtgtgcttcttttcctggcaccgagcttcgggggctaatatcagaacaatggaaagagatgggttggcaagggaaagacccatctacagattttagaaatctttccaggaactccttcgcaagcagaatggtgaccgtgcaatctgggagtatccatttgctgtcgctggtgtaaatataaccttcatgctcattcaaatgcttgatctccaatcagttaaaccgaggtcattgttcggagcagttttcctaaagcttctttcagaaaacgatcaagcttttgacattctctactgcataaccttcaagctgatggatcagcaatggcttgacatgcatgctacttacatggacttcaacacggtcatgaagtctacacggcgtcagctagaaagggagctgttaattgaagatattcagaggattgaggacatgccatcatacaggcttctggcccggtagctagaagaaactgaaaccttaacatggctacatattgcaaggcggcttgagatgctaatggatcgcaacttatgtggacggcgacaatcttgaaatgtagatgacatgtatccttgtgtgttaggtacttgtggtctctggtaacctgatctctgaagattacaaggtagggtttttttcctggtgatagaatgccacgtagggtaactgaagtgtctgatcagctcccatggccaaaaaaaaaatttgtagggtgtgttattacaatctggtcgttgtccatcataccacgaaaggaagtattcctagggttgttgttgtaaacaggaggatttgggaaagatgatctgtgttgtctcccatttgcttgaagataagaggctagttctttttaagtgggcagctactctgctgtgccgctccccaagatctgtttgcgctgttcgtgccaagcctgcctacaccattttattcccgctggtgtgttccttttacgaatcgtgcttgcagttttctgtatttacctgatggttcatggcaaagagaatgctgcgtcatcataatatagctacagtacttttgtgagcgtcgtgaccaaggaccggcagaatggcaggtgcgcagtgcgctccatgtatgagcagcaacagcatcaataagggatgcgactggtatgtgggcacaggagggcgcaccatgagacatgagctggttccgtgttctttgttcctggtggatgacttcccgagtggtgaggttgcctgggccctgggccaagggcaaatattaatgctgctgggcttccattttagaggagatgcccaggattccaagaaggccaataggattcgccccgtgcatcaaagcgaaacaatctcatgcaatggcaatggcatttggttattcatcagtccctctgatggacaatcgacgatcatgtatgcatatcgctgcatatgcctgcatctgcatgaggggctttgctcagctgatacgctctggtggcagtgagaaagtgatgaacaacaactgttgatatgcttccattcttgtttccttggccaaggatcggaccaatggtatatatattattgcttggaagtaataaccaatgaacactcccgtc

SEQ ID NO: 28431 - DNA, 814 bp, Zea Mays
ggcggtggagcaactggaaccaagcagcacagcctggctacctccttctatgaccactgtcccatgtgctccttgattcgactcctccactgccttctgcttataggttcgcactattaaagtggaaaagaggatcaatgagattgtgaaccgcttgaataagacaaaggtggaacggaaacctgatttaaaggctgaaagagaggctattagtgctgctgaaaaggcagaaagaaaggcacagcttagagacaagaaacgtagggaagagatggagaggcttgagaaagagaagcaggctgatatcaggagctacaagggtctaatggtccaagagaagatgacttccaacaagcaaatcgcttctggcagcaagaccctgcaggaacttgaagaagactttatgtgagaggcggacattataaatgccatgctgaagatttccttgaactgcttctgtcgaagacagaaggggtaccacaggcttgtgagatactggatgactcatgggcaggccatggtctgttattatctcctcttgctgttgtggtctatgtaaaccttgtttacttgctgaaaaaacaacggtgcatgctctaactgtggttgatgtaatggtctgttgcccatcaagttgaaatggtaatggaattatggtttcctggatttttttcaaacaataaagacatggcagcagataacttacatattccattctttgcatggagaacggctcaggaacttctttgtttgtgtaagagtgttatagaaatgaaccacacttagcttacatttggagattctttaattgaag

SEQ ID NO: 28432 - DNA, 3807 bp, Zea Mays
cccactaatcagatccccgcaggctggttcactgagccggcttccgagcggcccatgggcttgcccaggaccggctcttccagtcgcctcaacgcgcaggcgccggagttcgtgccgcggggcccgccaccaccgacgccgccccggccgtttgagtactatgcgcctatggtgaacgcagcggatttgctgccaaggagcaacaggcgcgggagccggaagcggagatgctcccgcccgccgcggtgaagacggagctggtgtatctgggcaatttggtcggttggcacggggtatgcatcaataggcaccgtcatcgcagtaggacgcgtgcgtgatcaagcctggatgggacggttttgacacagcacgtcctgtgtgcgaggatctcgaactgggtcagttcgtggtgatgttcttctaggattctttcgtcatttcttttactgcatcgttgaaactgatccagggtagtgcggcggtgttgggggttgcggcgggcctcgccctcatcgtcggcttcgtccgctgcgatacctgtgaagttaacaatctacgctattatcgatagcaatccagcgctgaagtcaagaagttacctgggcaaaaacagtatacccgattctaggtgagaagctcaaagaaggggaagacatctacatctatcaggggtgacaaatccttttgctatgaagatgaccacagggttcttgtttgcgagttcatcctctagaatgtattgggttgtcgccacgaaaaaacacacgaatacataaattcaaataatttctggcaagggaggctggaagcaccttttttgcatgggagctgcatggagagaaattattggcagaaaacaaacttagaccagattcttgaatgtgccaagggaataagcttcgcttgctgcaattcatgtgctgcttggcgccacaaaaggagtagaggtgtgatttgcttgctttgcagggagcggggtcatagtctgaagaactgtcctgacaaaagcgagggaaatttgaagaaattttgctagaactgtggtgaatctggacactgtctttccaagtgccccaagctcattgagaatgggttacaaattttgcaagctgctttatctgcaatcagcaaggacatttgagcaagaactgccctgaaaacaaacatgacatcccatccaaagctccatcttggcgccaacagtggttcacataggtttgctcttgagaattaagttgttaatgaagctactttccgttgccctgatgagctaggatggaaaccacagaggacacctatcatatcatcagatggaagcatcttacacgcaagacagcaagctttctggtatggagctgaatggtactctggattatcaattgttaagtctacaggctctgaaaacaatggacttaagcaacaaccacttgcatgattcaatcccttaccagttgccatcaaaccttacctatctgaatctggcaaaaaataacttctctggtaatcttccatactctatatccaacttggtttcacttgagtacctcaatctcagccacaactcgttatttcagaaaattggtgaattttctttcagaattgtatattgtgtaaggcctactgtatatttcagaaaattggaagcctcaattcactttcagaactagacgtatctttcaacaacctcacgggaatcttcctttctcaatgggcgctctgtcgaagctttctaccctgtaagtattcatggttctgatagctctcttcttgactggtatgcagttatatgcaaaacaatcaactatcaggcacatttgatgtccttagcaacattagccttgcgacactgtaagtagcttcccatgtatcgataagattgctaattttccttttatgttgtgctatatagttgttgatatatttgttatgttgtggaatatggtgtaaaataaaaataaatagcatttgtaatgctactcaaattaacttcctagaggcttattaagccgtaggaagttagccagcaaactttctaggggctacagtaagccgtaggaagttatccagctaacttcctaaaggctacagtaagccgtaggaagttagctagctgacggcgctgacggcgtgaagctactaacttccgagaatctactaacttccgagaggcttagcaagccgtagaaagttagctaacttcctagagccctctaggaagttaagctaacttccgacaaaaaattttcgagagccaaacttccgacgggatggcttaacttccgagagtttcgctaacttcctagagtttaggcctaacttcctagggtttaggctctaggaagtttactattttggtgtagtgccagcaatctagatgtttcaactatatacctaatcattgaccatttctaaatgaatgcacttgctagaaaattatttgttcctcgtgtttttcttctcatcctgcctattggaatctcgcagctgatcactcttaaaaaactaacgggtcctggtgtgagtggcagaactattggataggatcgccctgagggcactcaacatcaccactgttgtacaaaagtaggccaattgacatatacactttgttcatttatgttggtcgattctacccagtttaaagagagactaaaatgtgggcgttgttgcttgtgtccatccatgccacaagctgtaatattttcttctaataagcttttatacattacctctcttgttgactggttgaccatttgtgcagaggcaaccctttccagtagggtcgcgcccctctggtaagagggtcgctgttaagttgcctgattaatccattctttcactgtgtctgcatgttgcagtagatgccagcagatcatgaagcgcccaaatggtgctgagctacagtactatcagaagctgaatagattgctgctggaattagagcaaaggagtggaggagtttctgaagagagcagacctgcaaaataaccgtcgtcatgtcagtgacatggccgctcaacttcttcctcttactgcattgtatctgaactgcgtcgacctaccaactacatcactgcaccgactgctatactgcatcaaccaaccgaacggctatatgaaacgacacaatgtcagccgtcagatatgaatattaacttcataaaagtaattgtaacttgtgtaggctggttatagcttgtgatttcacatttcatttgttagcggccaagatttatttctgttagtttatgaccaccactcaggaaagttgattgattctccattccaatctttgttagacctgcaagttgtttgctaacagtgatccttcagataaatggggacatgggaacttacataaccataatgactaaagaaactatggttgcttgaggatgaatcgatccaaagtactaccacattctgatatgagtacccaactttaaattaatcaatctaccgtaagtcaaaacttttggaaaaaaatttcttcctagctgataaccatttttatgtcacattccagatgaaccacctcccgagttccagttacttactcttatcgggatgggactggacaccaatgaagaattcttaatggctatgcaacaacagcttgtccatgaaattcgtgaagtatggacaacttcagttgagcatctactttatatcaaggaagaccttatcatccctcatggatgtgttcattctcttgtaatctacgaagttctgttaaagttagttgaaccattttctgattctatgttctctctactatttgacaacaacacatcttttatgaattaa

SEQ ID NO: 28433 - DNA, 2338 bp, Zea Mays
gaatcagctcccacccaacgaggcccgcgcgcttcccaccccccaaccacttgttggcgatggcttcccgaggaaatgggccggaccgccagaggtagaagctgtccgaaccaccccgtacagatgagatgagatgagatgagtttgggctgttcgcctgtggctgcctttgttccgtctgtgtctgtctatgatgggacgggacacctagggttcggataccggcaccggctcaactgacgacggactatcgccagtggcgatcaccctccctgtcccctgaccgcggcgtcccctgctcgcgccgcaccggtggcgacaaggcaccccttgcctgctcccctagacgcgagcgagcgagccaacacctgtcggcacaagaatggatgggaatgctgagacgatccaattctcatggggcaagcgtcgagggaaaggtggtgctaagatggatacacagttctttgggtccttcacattggacaatgtgaagtattcactgtttgactgtgtctatctatttaagcatggtgatcctgaaccgtacattggaaaaatagtgaagatctgggagaaagataatgataaaaaagtaaaaattctttggtttttccaccctgatgaggttcagaactatttaagtggccctgtgatgggaaaggagatttttcttgcctgtggtgaaggtgctgggcttgcagatatcaacccgctggaagctgtcgctggaaaatgcactgttatatgtacttcaaaggataagaggaatcgtcaaccatcccctcaggaactacaaattgctgattatatcttctatagggtctttgatgttaaaagtctaacactttctgatcagttaccagataaaattgctgcatttacagttgatcttcttctgaatccaaaagatgagctagtcatacctgcaaatgttctggtgaatccaaatgtggatgagggtatggttgccacagttcctacacccccttcagcagttaaattggaggatcgaagtcaggctgctgcacttccccttacgcagacaggccaggtggatgaaaatctgcctgccacagttccccttccccaatcagaggtcaaggaggaacagaaaccagtcattgccattcccatttcccagactgtggtcaagaaagaggataagaaatcactttctgacattcccctttcccattcagcagtcaaggaggatgagacaccagttgcttcaattggccctccacagtctgcagttatggagaacattcccaaacatacacagttacaggatgctcatgctggggagaggccaccaaaaaagttgaaattatcccaagaaactacagagcaggacatagatccaacgaatactgaacaaagacctttggagctacagccaaagaatattgacagaagcaaatggtttaacattgaatggaatgacagactaaagatggctgatgataaggggacacttgtctatattcaaaatctcgatattcggtttggacctgctgacatagagttcgtaaagcattacagctaaattgtactgcgaagcccattaaccaccccacatatgatgatccaaacaatggcaaagcatatgctatattcagaactaaagatgctgctgatgctgccatttcaaaaatcaattctggtttggttgttggtggaaggcccctgtactgcagcaaagggttacttgaggttccaaaaccttcagcgaatcttgttgggcacctctcctcatatgttaagattggtcaaaagcagcgcgacgagcagaagaaggctgtagcaacctcgcattgttcccagcccaacacgatcgagtacgacttggccttggactggatgcttcttcgggaaaagcaagaccagagcttcagagtacttcacaagaagcacagagaagccaggaaagggttcgcaagcctggtcggcaaaggatccaaggcagagtagcaggccggttgcccggttccaacctttcagagcttggcgcggtatgactgccgactggcaggaagagagggtcgtgcgcgcagaggttctctttttgcagtagccatcgagtagttcgttgggtcaattcgtgttaatttctgttaggaaaggaaaaatgtgttaataagtgttaggatagaaaatgcacgtcagctttgacaggtcagagcagcctaggtaggcatcaatatgttgctgcgactgcgatgttttaatttgacttggaacctcttatgttgggcgacaagtttgccctatgggggagagagacactgtttcgtctctgttaccatctcatctgatttcactttcagtaaaaaaaaaa

SEQ ID NO: 28434 - DNA, 2696 bp, Zea Mays
gcacgaccaaaggcaagtgggcggcagactgccttcactctcactcccgcccgtgtccctcgccctgtccgcgctgcggtgcgccctccctgcgccgctgttaatggaaacggcgcggcgtttccttcccaccacctcctcctcctcctcctgcacggcctcttcttcgctacgattcgccgcttctccgctcttcttctccttcccctgcagataaagcggctggttgccctggaagccttgcggtggagacggtctcggtctcggatccaggggagacacgcggatttgctgccatggtgaggtggggcgagatggtggaggaggaagaggacgacgagtacgctaagctggtcaggaggatgaatccaccgaggtatacacacaactgctcttgtatgtatactgtatatactattgctcatgccgtttaaatttctgcactgttttttattaaaaaaattgattttgtgtttgtatgattgtgacttttgaggatgatgttcttattctcgtctacggtttggtactttggtctgcaactctgcgtgttgattgatcttcctctttagtattttcctatcaatatcaaaatcattttatttattcatttattcatacttttaataatcgcagatggttttttgggttgttggatcggtgtattattatccctccacgaattctaatatatacatatcagatttacatccgcttttcccaatcgctcctaggattccgctttattatattgacaaacactcgtaggattccactggattattctcagtcagtcacttaggattgagtatactgtgtgttgctagcttacttgtggatccgacgagttcatgtacagtatttccaaacttagattacctgtgccacaaatcctttctgacacaccaattcgtatctttcacctgaggaaagaattctagttcatattgttctgcacatggccgctgtgatctcctttattctttgcccttattcctaccaccgcctctttgatgctgtccaaagaagacgaacagtccttttagattcctctctcctttcggtaaaagctatatggaatccttgattcctacatgctgcctcatcatgatgcttcactaattactatacagactcctcctcttaatcaacttctcgagttggattttttcctagtaatgataagcgttgcaaattcatcgatcttgactgttgcttgtttgccaaatgctcgtcgcctattgtgctgtttcttgcagagtggtcatcgacaacgactcgtgtggcaacgcaactgtcatccgggttgatagggtcaataagcatggcattttactggaagcagttcaggtccttgtcgatctcaacctcgtcatcaccaaggcttacatttcttcagacggcaactggttcatgcatgtgttcaatgtgaccgatcaggacgggagtaagcttcataacagggaggtcattgaccatattcagaaatgcctggaatcagacggctaccttgttcctccggcgaacggttatgcgctgccggaagaccagttcacctccattgagctgacgggcgcggaccgcccgggcctcctctcagaggtgtgcgccgtgctcgccaccctgagctgcaacatcgtgaaggccgaggtgtggacgcacgacgggcgcaccgccgccgtgatccaggtcaccgacgaggccaccgggcgcgccgtccacgacgcgggccggctgtccagggtgcaggagcttctccgcgacgtgatgcggggcgacggcacgtgcaaccgcggcggcacgggaatttccgcggagaggcgcctgcatacgctgatgctggacagcgtcggcggcggcggtgccgaggaggctggtggcggccgtgacgagagcggtggatgtggcgtggcgaggcccaaggtcgtggtgatggactgcgcggagaggcggtacacggtggtgatcctgcggtgcagggaccggccgaagctgctgttcgacacgctgtgcgcgctcgccgacctgcagtacgtcgtgttccacggcacggtcgacgccgagggagccagcaaggacaaggaggcctaccaagagtactacatccggcacgtcgacggccacccggtgcgctccgacgccgagcgggcccgcctcgtccggtgcctagaggccgccgtcgagaggcgcgcgtccaacgggctggagctagaggtgtggacggaggacagggtggggctgctgtcggagatcacgcgcgtgttccgggagaacagcctctccatcatccgggcggcgatcacgaccagggacggcaaggccgaggacacgttctacgtgtcggacgcgtacggcaaccccgtcgacggcaggaccatggacgcggtgggggagcagctcgggcacgccgtgctgagggtgaagcgcggcggccacgacgcgcccgtcaagcacgaggccgagggcggcgcggtgtccgtccttggcagcctgctcaagagctcgttccagggcctgagactcatcagatcctactcgtaaaccgtaatcgaagaacataataaagccctgggccttgtacatatataaaatctcacgtaggttaggaaatagtgaagcagcattgtaaatatcatatcagtcgcatggtaaatatcataccgttacaagtgcataaatctcattacattacagca

SEQ ID NO: 28435 - DNA, 1100 bp, Zea Mays
gaacaaaccagcccggggaagatggtcaaaatcagataccgacttgttttacgagggtcttcgacaaattggtagtgattttgcaatgatacaacaattattccctgataagactcgccatcaggtgcggcagaaatttaaatctgaggagagaaaaaatccattgctagtccatgatgctataactcatcgctcaggagataatttgtatttcaaaaaggtaattaagcagctcaacattgaagatgttgtgctgccagatattaaaagtacacaaaaacaagatggtgcatcaagtgaaagaggccctggaaatgagaatgtactggatgatttatacggggaggaaaatagttcaaattggttgaacgaagagcatgacgtacagatggctgatgtggaagaagagcatggcgaacagatggatgatgtggatctcggaaatgatggtggtgatgatgatcttggggatgtttttgattggtactagtttgatcatggctggatgatgtggaagaagagcatgatcttggaaatgatggtggtgatgatgatcttggggatgtttttgcttggtactagtttgatcatggctgggattaggactcacgatattatgattatgattctgctaatgttttgaggtacattgatggctgggccctgttgttctgattagaaataggtacctgacttgctgactgttgagttgattgctaactagaggaagtgacagtcgacgatgcccaattgtatcagcatattcttggtgattagcatcagtaccagtggttgtgacagatatgtcctgctggatgccgagttttgcaagccgatggaaggtgtctgtaacgagttatagaatttgtatttttttattaccttgcacacgaatatagtgttgatggatggtagatacgtcacgtttacctttatttatagctactttatcttagttgttgttgctctcatgctctgtgactttaaaagcagtatcggtttccgtagagcctcagttggcatcttttttttttcctggtagccttcctggagaaagaatgcaagattgaatggtgtctatgctcttttttttagctccc

SEQ ID NO: 28436 - DNA, 2398 bp, Zea Mays
ggctgaggttcaccgagccgccgcttcggttctcctctaaaaccctagaaactaactcccacctcccggttcccgccgtcctcgctcgccccccattctccggccctccccaccgccaccattttccccggcgacatgggccgcaatcttccagccgagcaagtggaagcacccaggagcagcaagatggacaagaagagaaagaaggacaagaagcggaagctggcagccgaggccgaggaggaggcggcggtgacggcgacagtggagaccgtgaagagcagcaagaagaagcgggtggagaatgaacccggcgcaggagcagtggaggcggagaacggcgctgagaagaccgtggcggtgaccgggaagggttcggaggaccctaagtacgcgccgctacggtcgttctccgctgccgagctgccgtctcaggtgctcgaatgctgcagcgcgttcgcgcggccgtcacctatccaggcacacgcctggccgttcctcctcgacggccgggacttcatcggcatcgccgccaccggatccggaaagacaatcgcctttggcgtgccggcgctgatgcacatcaggaagaaggtaggggggaaagcagggaagaaggctgtgccacggtgcctcgtgctatcaccaacgagggagctcgctcagcagattgcagatgtacttagtgaggctggtgcaccatgtgggataaaatcagtctgtctttatggtggaactaaaaaggaaccccaaatatctgcccttaaatctggagtggatatagtcataggaactcctggtcgtatgaaagaccttattgaaatgggtgtttgctgtcttaatgaggtttcgtttgtgatgaagcagataggatgctggatttgggttttgaacctgaagtcagggcaattttgagccaaacatcatctgtacgccagatggttatgttcagtgcaacatggcctcttgctgtccacaaattagcccaggagtttatggatccaaatccgataaaggttgttattggatcagaagaccttgctgctaaccatgacgtgatgcaaattgttgaagtattggatgatagaacaagggattcaagattacttgccttgcttgacaaataccatcaagcacaaagcaacagggttttggtttttgtgctgtacaagaaagaagctgcacgagtggaaacaatgcttcagagaaggggatggaaggctgtttcagtccatggcgacaaggctcagcatgatagaacaaaagctttatctttatttaaagaagggaaatgcccattaatgattgctacagatgtcgcttcacgtggacttgatattcctgatgttgaagtagtgattaactatagttatcctttgaccactgaggactacgtccacaggataggaaggactggtcgtgctggcaagaaaggtgttgcacatacctttttcactcaagcgaacaaggcacttgctggtgaacttgtgaatgttctgcgggaggctgatcaggttgttcctccagcccttatgaaatttggcacacatgtcaagaaaaaggaatctaagatatacggatctcatttcaaggaacttacagcagatgctcctaaatccacgaagatcacatttggcgattctgatgaggactgatgtgatgacagcttaggccttgttcgtttctatcggattggtaggccggaacgattcctatccggattgcttctctaatttatataaactttgattagctggaacgattccgggtgcaatccgacggaaacgaacaaggccttactgatttttcatccctgctgacggaagcttgatttctccgttggtgatgctatggatgtgatcagatcagccatttgcaagctgattgcagccacggatgagtattgtggcagtgggcaatcccaaaatatagctctcttgttataggttagtttattatgagtagcattcggcttatgtttttctggaccgtccccattatgcattagcttgggctgcttggctgtatgtaataataagcaacattctgcttattatgatttgcattctcttggaggcttagtttggaaacttaaatcgtctccggtatttccagggattgagtgggaaaataagctattttcccactcaatcttcagggaaaccggaggggatttaagttttcaaactagcccagagtgtagttaaattcagtgcgtccttagtacaagcagcccggttatggtaatgataggatagtgaaaggtgtacttctatcctggttagagtaaaaaaagaatatggttttccgtgttatagtaaaaaaaagaggatggttttgcagttggattttgattgggttccatgtgtttgaatcaactttgtgtttccacaacttg

SEQ ID NO: 28437 - DNA, 1835 bp, Zea Mays
ggacacttcgactttggacgctggaaagtggaaagcatcgccggctcgccgccaaactcgctgccacgtcgactcctggtgtatcaagcgagccaccgctgttgagttttagtgttgataatatcgatacagttaaactgttggaacttctaggcccagaaaaggttgatccagttgatgtcaaggcaattaaggaaaaactctttggttatacgacattctggttgacaaaagaagaaccttttggtgatcttggtgaaggagttcttttcattgggaacctccgtgggaagagagaggaaatctttgcaaaacttcaacggcaagtacgtgaacttaccggtgataaatacaatctttttatggtggaggaacccaattcagaaggggatgacccacgtgggggaccacgtgttagttttggtttgcttaggaaggaagttttctgagccaggacctactacgctatggcagtatgtcatttctctgttacttttccttctcactatgttctcctgcattgagctaggaattgcatcaaaggtatgcttatcttactcctcgtctattgtatgttacttcatcttaatacacatcagcttgcttatgcgcattagttttatgcagattagcagtcttccaccagaaattgtttcatatttcactgatccaaatgctaccggaccccctcctgacatgcaacttctgctcccatttgtggagtcggctttgccagtggcttacggtgtcttgtctatccaactatttcatgaaattgggcactttttggcagcatttccaaaaaatgttaaactgggaattcctttctttattccgaacttcacccttggaacttttggtgcaattactcagttcaagtccattcttccggatcgaaagacaatgtttgacatatcaatggctggtcctgtggctggagctgcactttccttttcaatgttctttgttggcttattactctcttcaaatcctgttggggcaagtgatttagtggaagtacctagtcagctgttccagggttcattgttgcttggacttattagtagagcaacgcttggatacagagctatgcatgctgctacagtttcgatccaccctcttgtgattgcaggctggtgcggtttaactactagtgcatttaatatgcttcctgttggttgtcttgatggtggaagagcattacagggtgcttttggcaaggatgctttgtttggatttggcctcacaacatattcgttgcttggactaggagtgcttggagggccactgtctcttccttggggtttgtacgtgctaatatgtcagagaacacccgagaaaccatgcttgaacgacgtgagcgatgttggaagttggaggagggcggccttgatagcttcagtatttcttgttgttttgacgctcattccgttgtgggatgaacttgcggaggaactaggtgtagggcttgtttcttcgttctgagatgcggtgcttaccgatagaattaggccgtgatgtagttcagttttgtgttgaaatgtagcttcccacggtggaattgttgtaaaggtatgtggaatttccggattaggtgagcaatgatatcgcttatgcgagtgtaatgaaattgtgccaagtatagacgctaacgattaccaattacatacatgtatgctcacttaaccatacagttttgtgttgtaaactagaatgtatggatttataaaaatgagaataggcatgtcaagtccaggacttgaaatctggctaggcaggttatgctgaatcagacgcggcacttgataaagaaatattttcacagtttactctag

SEQ ID NO: 28438 - DNA, 1736 bp, Zea Mays
ccgctcacggattagtccggatcgttcgtcagctgccagggcccaggacaactgtccctgcaggcctgcacgccggcgtccgtgtgatcgcgctcgcgcctccgaagatctgagcagctcagctagtggactcgtttcgcttcctccaggctccagcgcctgaggcagccgcaacgcaagggccccggaaccacgcgaaaacgcggccaaaacaccgcgaaaatctcgacacccaactgcgccgcgtgggcggctgcggcggacgaccaatgtggagggggacgcgcatgtacagcctcctaggcgtcctcctcctcctggccctggcctacctgaactggcatccaggccacggcccctccgccggcggccctggtgggttcaagctccccatgccgtggctgcagccgcggatgtccttcgtgggccgcgccggcacccacttcgtcgacaccctcactggcgcgccgatctacatcaacggctggaactcgtactggctcctctcggcccggtctccctcgttgtccgtcgagatgctgcgccgcggccgccgcatggggctgacgatatgccgcacatgggcattcagcgacggtggccccggcgcgctgcagatctccccaggccggtttagcgagcctgttttccagtcttggatagaagaaatggcagcatatattaagagtttggacagaaagcatcttattacagtgggtactgaaggattttatggccctgggagaggtgagagactgggcgtaaatcctggagactgggcagcttcagtctgctctgactttatacagaactcagctgtcaaagatattgattttgcctcggttcacgcctatcctgatagctggtctgtatcattacattttcattactgaacaattttaattgtaccatgtcattgatgcatctttgctacaggctaccaaaggcaagtatggaagaaaaagtcaagtacctttctgtctgggttgattcacacttgaatgatagtgaatacgtcttgagaaagcctgtcttgtttacagaagtaggttacctccaacatgcagaagctaacagcacagttgatggagacattcttctaaaagttgtctatgataaactatacgattcggcaaaaaagctgcaagcaggaagtggcgctcttatttggcagttgatggtcgaaggcacgcagatgtaccatgatgacttctccatggtggcacgggatcgtccgtccacatataagctgatgaaggagcagtcatgccgactgcagagtctatatggaaaagagggagaccctacttggaaatgctcaccctaagggctagtttggcaacccaatttttctatggaattttcaattttctaaggaaaaataaactaatttcccttaaaaaaatgaaaaacctgtagaaaaatggggttcccaaattagccctaagttttttcttcttcctattggtttcgaaaccttccacttcatccaacaaactggattgttggaatcattcagaaagaggatgattagggaaatgatgaacaaacatctgtgtggtaaatagcttgttcatagatttgtagctgaagagctagactgctagtggaaaatccacttcttacaacaaacatgcattctgtcatatcacatcatgctgtacgttgtacaattaatatgacctattagtggtcaaagtgaaaagagcaccgatacaagttatgatatctactgc

SEQ ID NO: 28439 - DNA, 1361 bp, Zea Mays
atgtaccagtggcgcaagttcgagttctttgaggagaagtctgccggccgcggcggcggcgggggttcagccgccgccgtgccggccgagatcgcgggccgagtcacctgctgctcgggcggccggggccgcgtcgcggtggggtgcgacgacggcaccgtgggccttctcgaccgcgggttccgcctctcctatggcttccaggcctacgcctcctcggtcctcttcctccagcagctcaagcaaagaaatgttcttgtcacggttggagacgatgaccagtcatcttctcaggcatcagcaatctgtctaaaggtttttgacctcgataaagtacaagaagaaggatcaagcacaacaactcctttctgtgttcaaattttgcggatcttcactgatcaatttcctcaagcaaagattacatcatttatggttctagaagaagcaccacccatactgatgattgccattggactggacaatggtttcatttattgcatcaaaggtgacattgcacgtgagcgtattacacgtttcaagttgcaagttgaggctgcttcagatggcagcactagtttgcctattactggtcttggttttcgagttgaggggcaagcacaccagctcttttctgtaactcctggttctgtaaccttgttcagcttgcatattcaaccaccaaggaggcaaacacttgatcagattggttgtcagacgaatgctgtagcaatgagtgaccgtatggcagagacagagttgatgaaaagggaaatacaagatctcaagacgaacgcgaaggttttccaactgagcaagtgtagcgcgtgcactttcacccttgatctacctgctgtccatttcctgtgcatgcactcgttccaccttcgctgccttggtgacaacgaaaaagaatgcccagaatgcgcgcctgaatacagatccgtcatggaggcaaagcagaagctagagcaaaacgccagggaccatgatctctttttcaggcagttgaggggttccaaggacggcttctctgtcattgcagactattttagcaagggcatagtgagcaagacaaccttacctcctgagaatggacggtagtgaaggaccactggtactccgttgccttgtacgacattatatggtgttatttccctttcatgcaccgggttatgcaatctggcctgtttcagccatgcagtgagggtttttttttctttttctttttggtttgacattgtagatactcattttccggcagtttctttctgaacccaagtgcatttgctttgacattgctgtgcagttttccagcattgggtttcgatgtttggctcgtgccctcctacttttgaaagaag

SEQ ID NO: 28440 - DNA, 4084 bp, Zea Mays
cggttcaggcgaaacgggggctcacacgtcggatccgacggcgaatcgcagccagccaggcacggatgccccccgcttccgggtgcggtcacggacaccgacggcgggcccacccgacatcccctccggcctcctccccgtccctgtcctccggtcctccccttccctccttcacctcgcagtctcgcacacgctggcgcgggcaggcccccaccctgcgctcctaccacccaccagtccaccactataaaatccccgatcgcctcacgcacacgcaccgacccaccgtccgccgaggcgcaaccgccgcaacgcaaacccacaaaccctccgccgccgccgccgccgccgtaccacgtaccgtcccgcttctcctccgcccttgtgcgagcaggcaacggcagcagagcccgcacaggttgctcccggacggagggagaacgcgcggggctgggctagccgggggcggccggaggagattgacgagaatgtgtacagggagatcatcaaccaccgctccctgcgccatcctaacattattcgcttcaaggaggtgatacttacaccaacacatcttatgattgtgatggagttcgcagcaggtggagagcttttcgatcagatctgtgatcgtgggcggtttagtgaggatgaggcccggtatttctttcagcagttgatctgtggcgtgagctactgccattacatgcaaatatgccatagagatctgaagctggagaatgttctcttggatggcagtccagctccacggcttaagatatgcgattttggctattccaagtcatcagtgttgcattcaagacccaaatcagctgtgggaacaccagcatatattgcacccgaggtgctatcccgtcacgaatacgatggaaagcttgcagacgtatggtcctgtggggtgactctttacgtcatgcttgtgggagcatacccatttgaagacccagatgaccccaagaatatacgcaagaccattcagcaaataatgcaagtgcagtacaagataccagattatgtccacatatctacggaatgccagcaacttattgcccgtatctttgttgccaatccagtgaggagaatcacaatgaaggaaataaagagccatccatggtttttgaagaacctaccacgggaactcacggagactgcacaaggcatgtactacaggagggataacaaggtgccttcttattcagaccaaacgtcggaagaaatcatgaagatagttcgtgatgcaaggaccatgccgaaatcatccagatcaggctatgggtggagcgctgagtattcggatgaagaagagaaggaagaggaacacagactagaggaagatgaatacgataggagggtgaaggaggtccatgcaagcggagaactccgtatggacactcttcacatatgaaagctagtggaagaaagttacatgtagataacttgttgttgttgatctgaaggatccagtgggatgtatgcagttttggcttctgaattgcttgtgctcggtcaattttcatgtaacataattcaatacactgaggcagactaccatgtccttgtgttgacgtccaccacggagcgccgcacggccgtagccctagccgccaggcaccagcggccagccagaggcccggacgactggactgccaaagccgtcgtcgccacagggaagcgccggtacgccgctcggcccttctacaggtgttcatgtggcaaatggaatttaggatttggtagcaccatggtccatgtatgtaaatcacatcactgagatggaggatggtttaaatgatgatggaatggaatatccatttgagggtgatgctaataccagtaacaatgatcagatagtagaggaccatgctgatgatgcccctattgctagtggtgataatgccatcgtccaacagcaagttggtctgagaaagaagaaatacatgtatgtgaattaccatcgtgttgagcaacctgatggttccagtgttaagcaaaagtgggcaaaatgtcttcgatgttcacataaagctaagtctgatgcttcaaatggtacaaaggcttttagtaaccacttaaaattgaaacattgtcttgtgaagggtcaacaacagctaattcagagtggaaatgacatagcaacatataaatatgatgagaaagctagtgtgagacttctatattatgccatcattatgcatgaatatccattcactgttgccgaacacaagtattttgtgaaatttatcaaatcactacggccatcatttcctttcaagtctcgtatcactgttcgtaaagagatcatgcaactttataaagaggaaaagaatatgttgtatgcacagttcaaaaagctgacatgtcgtgttagttttactatggatgcatggacatctatacaaaacaaatcgtacttatgtgtcacagcacattggattgatgataattggaacatgcaaaaaaggattatcaattttatgcatgtagaagacagccatggtgggataaaattgagtgatattttttttgtaaatgtgctcaattggaaccttgataagaaaatgtttgctctttctttggataatgctgcggcaaacaaggttgcagttgatatagtgatagataatgctaaagacttgctcatatgtggtggaaagttctttcatgttagatgtgcaaatcatatattgaaccttgttgctaaagatggcttagcagtaatgggaaatgctattgcaaacattagaatgttcataacagctatcaagaggtcacctttgcaatttgaggcatttcaaaaatgtgctaaagaatgtgatctagacactaagaaagtcctttccttagatgttgctacaagatggaattctacatatattatggttagagatgctatttactataaggatgcttttgatcgtcttgctaaaaaagataaggatagatttggtcatatggctccttcaagtgatgattggttgaatgcaataaatatcaacaagtgtttgaaaaagttctatgatgtcacattacttttttctggcacttcatatcccactgcaaatcatttctttcgcaagttttctgagattaagatggctattgcaagatggtgtgagagcagtgatgtcataatttgtacaatggcattctctatgaaagagaagttcaataaatattgggacatgaacaatatggctttagcagtgggggcatttcttgatcctaggtacaaacacaaaatggtggagttgtacatgtctaagatgtatgatagtgagagggctgagctagagaagttgtctttcattaatgtcatcaatgagttatttgctttgtattcatcaaacatcaatgcaaaaacaaccaatatggcttctacctccaaggagagtgaacttgttccacacaaaaatggttctttcatggatgatgaggatgaggatgaggttgatcttgatgagttgtatgcagcagcaaacaatgtgaagaaggtttcagaattggatgtgtatatgagtgagggtttggtgaaggtcaatgaaggtgatgctccatttgatatcctatcttggtggagggggcaagtgacaaatcttcctatcctttcgacccttgctcgtgatgtgttatctatgcaagtttctactgttgcttcggagtcagcatttagctctagtggacgtattgttgatgcctttcgttcaaaacttaaacctgaaattattgaggccttggtttgtaccaaggattggaagattgcttcagagaaagatttagaaactgaaattagaaccataagtgaagatatgaatgcaatggacttggacgaagatgctattgcggcgacttgatacattgaaattagactcttcgctatgttgtttgcgcttttgtaataaactatgtagcatgttgtgtatctcttttaatgttgcggtgaacttgtgtgaaatatctactatctattatatatttgtggacttgtgaacttgtggattatacataaaagaggggatatgctgctgatttatttttaaaactgtgttgtttcttctataatgaa

SEQ ID NO: 28441 - DNA, 1538 bp, Zea Mays
ggaaaaaaaagcgacgagtcctcctctgtccattctctctcttctcttccttcgtcgtctcgtcgtcggcttctcgcatccgcctccgcctccgcctccgcctccgctccccgctgcgcgtcaccggaggagaggagagaaagtgagagaggggatccctccgacccgatccaccgacataacctccgccccctggatctcctccgtccccgcgcgacgccaggacagggttgatggataatctctctccagccactctgctcaacagtatctcctgtcttggcgccctaacatctgatgtctctactgcgagacccaagcctattcacaagtattgcaaaaatgtatatgatatctcaagcatcgtgaccccccttcttgaagatctttgcaagtctcccgaagagcaactcgatgaggtcttaagagaccttgacaccgctgtcaatgaagcttcaggccttattggaaactggcaccagacaaccagcaaaatgtatttcggttggcgaattgaatcagtaatatcagatattcagggatgttcccttcagttgtgccagctggttaattcgctattaccttctctgactgctcgtgcctgcatgtgtattgagaaggataccctggctgcgggacatccttagaaataaagctgttgcatttatgagttgaaactacatgttcttgcatcagttctggtaaaataattgggcaaggtaatgaaagaacccaataaaaaaagattgttaaaccgaattataagatgatggaacagcaaaacaaatagcattatatggatgtcttgcaccttctggctgcggcacttccttagaaataaagctgttgcgtttatgatttgaacctacgtgttcttgcattggttctggtaaaaaaatgggcaaggtaatgaaagaacccaataaaaaactaatagaatatattaaacgaattataagatgatggaacagcaaaacaaatagcattatatggatgtcttgcattttttatatattgaaagtagtaattgcagttagtggggatggcttcaatagcttgcatgtagagattgagagttagtcggtggtgatgtggcatctagtgaggatgacgtgcatgttgagattggaagctattggagggatgatttggcaattggcattagtggggggatgatctggatagtttgcagttgggtttgaaagctagtggtgctaagatatagatatagatttttgtttgtgaccctaatttttctataacattctatcggaaactggaacacaatacctattgcattgaggaaagttatatatatagactcaggggaaaccctaaccctaatggcccggcaacccaacagtggtgccgacccacacacacagtctaacatccccccgcattcgcaacgggggcaccgcacacgatgagactggagtagaagccgacgggttgaaattcctctgcagtcgcaacgtcgtgagggtgcgaatgttgcggttggagtagagaccggtgtagactccgagaaggacgaa

SEQ ID NO: 28442 - DNA, 2425 bp, Zea Mays
tcactatccaccaaattagtccggctggactagtggacccgagtccacatctgacctccgcctgctcgccctctctctctcgatggtcgtcttctccacgagaccacgaccgatcaaccccaatcgtagggaactgggaacccggacccagatctcccctagatcctcaatcccaatctgccctccgccgtatcgatcatacctcccgatgcgaccccaagtctggtcgatgcgagtagcggcggcgatttagcgaactgcgcgttcgctagggttagggtttcgagggtttgcgctagggtttgggcgcacgatggggcggtcgcgaggggtgcagaattccggcgacgacgacaccgtacacaggtcgaagcggaggagggtcgcatcgggcggggatgcgacggactccgtttccgctggcatcgggggagctggagaaggagggggcaagaaagcgctctaccactgcaattactgcaacaaggacatctctgggaagatacggatcaaatgctccaagtgccctgacttcgacctttgcgtggagtgcttctctgttggcgctgaagtcaccccacatcgcagcaaccatccttacaaagtcatggacaacctgtctttcccacttatttgcccagattggaatgcagacgaagaaattctcctccttgagttgcagagcatgttggtaccaagtctaagttacagtgtattgatcattacacaacagcatacatgaactcaccttgttatcccctaccggatatgtctcatgttaatggcaagaacaggaaggagcttctagctatggctaaagtgcagggtgaaagtaaaaaagggacttcactgttgcctggagagctgactcctaaggctgaatctccattttctccctccagggtcaaggtggaagatgcacttggagaaggtctagcaggtcgatcaccttcgcacatagctgttggtgcaaataaaaaagcttcaaatgtgggacatattaaagatgggtctaatgtatcaaaagttgaagatggtcatgtcgatagaagtgttggtgtgaagaagcccagatattctgcagatgaaggcccttcgttgactgaactgagtggatacaatgcaaagagacacgagtttgacccagagtatgataatgatgccgaacaagcgcttgctgagatggaatttaaagaaactgattcagaaactgatcgtgaactgaaactccgtgtgctgcgtatttatctgtccaggcttgatgaaagaaaaaggagaaaagagttcatattggaaaggaatttattgtttcctaatcccttggagaaggatcttacaaatgaagacagggaagtttaccatcggtataaggtcttcatgcgttttctttccaaggaggaacatgaagcccttgttaggagtgtcattgaagagcgaaaaattcggaggagaattcaagaactccaggaatgtcgttctgctggatgccgcacacttgctgaagcaaagatacacatagagcaaaagaggaaaaaagaatacgagctgaatgcccaaaaagctaaggaaagtaaccaccttattgcaaatactaaattggtgcagaagatgaatcgacctatgaagattgagtctgatgggaatttggatccaaagaaaggtggtgttggcttagattctcctaaaactacaggacttacaagtgttaagcagtgggatgactgggatatagttggtcttcctggggcggagctattaagtgctagcgaaaagcttctatgttgccagaacagactgctacccagtcattacctgagaatgcaggaggtgctgatgcaggagatattcaagggtagtgtcctaaagaaggaagacgcacacgtcttgtttaaggttgatcctaccaaagtagatagtgtttatgatatggtaacaaaaaagctgggcaaccatgtggagttgcctacggtctagcttatgcctttgggcttgcctgctgtgacatgccgaagaaaacaagtcttggtttcgccccttgcagcgtgtctgaaccatagctgaaggtggaactgtactagatcaaatcggccatagttaactgaaattcgtatcagttgtcagaagcacaataaggcattccagccaagttgtaaaattattgcccttagcagaatgtgtagcgtgagttgtcatttcctttctgccattgttgtgcactgtttcagctgtggtagtgccttgtagtaggtataggtgcctgagtttatatgtatcatcgtgtatgtaccattgggagctcaattatatgccattgtaccaaccccagacattgattattacaattcatctagcagccagattcttgtctctaatggaatgcatggcgtcaatatatttttttttctgttggtttggttgatgagca

SEQ ID NO: 28443 - DNA, 1260 bp, Zea Mays
aacagatggaggccggcctgcgcgcgctaggccaccgctacttcggcggcggcggcggtggcctcggtgggttcgcggccgcgcgtgccacccggctccggcgccagcgccagcgccgcatggccgccttctgctccctcgctgttaatggagatgggaatggcgccgcgggtggccccgtggggagcggcgtcgaggtggcgcgcgccaggaggatgctccatgtcgtgctcgtctcgccgctgataccaggaaatacagggtccattgcaaggacatgtgcagcatctgcagttggcctgcatcttgtcgggccattaggctataaggtagacgacacgaagttgaagcgcgcgggattggattattggccatacgttgttgtcaagattcatgactcttgggaccacttctgtgattatttcatgaaacaggaaggagataaaaggctgttggcgttcaccaaaagaggcacacacatccattcagtaagtagccgctgcttcttcaagtaggactgtagtatatcctcgccgtcgccacaatgaaaactgtcgctgatttctcctacaggccaggggactggctagtcttcggttccgaaacaaaagggttgcctcagcaagccctcgaggattgctgcagagaaggcctaggcggcgggaccctccggattcccatggtggagacctacgtccggtgcctgaacctctccgtcagcgtcggagtcgcgctgtacgaagccgctagacagctgaactatgaacagcttcagtaccagcctgatgagctcccagaggaggcgcaggagcttttcccggcagaggacatttatgcgtgaaaacctctgcccgagaacaattacacgttacacgcattgatcacctcatttttgtgtgtgtgtgtgtgtactgtttgccgtgacacatgattgagctggagggaccacgcactgcacgattctgttgcgaattcaattccaggccgagtccttgtccagacggtgttgacatgctcattcaaaatggtgtacctgatctgcttggaagaatcgttttagtgccatgtataatttcgcagtcagaactcagaaggtgattagagtatgctgcgatggggtctcgttctgacttcttttttgtgtgtgtactggttactgaaccataagctttgttaactgcaactggacgctgcgtcctgttgcttctctgtcagtgtgtgtggtgaggaaggaaggttggtgcgggagctttactgcca

SEQ ID NO: 28444 - DNA, 1011 bp, Zea Mays
caggtgcacgacaagacggtaggtagggaaatgtagcatctcgttatgtatgtatcattccgctacaagatgggggctttataggtcggtccggggtagccggataggtggcccaaagtacattactgcccccagtcagcgaccacatttttacaacatgtactgtacaacgaggtaattacagtgccgcagcccccactagttacgtgtacacacaattatacccactgattacattgacaggtgggccccacatagcatcattgcgtgtccacgaccaagataggtacgtcttctgcattcgctgccttcgtccagacgagccttcgcatctcctaccggcccttatcgagatggctcatttagaaggcttcagttccggacatctcgtcccttgtagtggtcgaggactcccgagccctcgtcttcactgaccgatggccgatgtcaatgaagtcattgtcaagtgaattctctggtcagctacagtgctacagttagttgaggtggttggcgaagacttcatgtttctgtccaaaggcctgttcgacattcatcccaacaatacccctcgagggaccgattcatcctgatgggccaatcctaaagtattttcctaaaaaagggacgaatgtcacaattgtacatctagtgaaccgccttaacggggccactggatgtgactgttggaaaatcgaggctacaatgcttgtgtggtagagtggataaattgctgctagcaacaacacttttctttgctgcacgcctttttcaatgtagtcgttgctcctccaccgtcgttgctcgatcgccaccatcctattgatgcgctaccgacgacgagactagcgttgagctccgcactggcctgtgtcaagactaatgttcaccgtcggcactaatatgccgccgtgcacccgttcccaatggtgatagctaggcaatggcatcaccgcaatcggcatagagtagtgggggtgctgacgccactcgatggccgggtggatatcg

SEQ ID NO: 28445 - DNA, 1563 bp, Zea Mays
gatgcaagcaatccgttttggtactcattggtgaaagatgatgtctcggggcgggcttatgggcgacacagctctagtgcttgtgagatcaagctagtggcagctctgtgcttttagtcctttgatcttgtagagttaggtcagccacaacaaatgaagaggttgctccaactcgaggtggacgatttgaggttatttttgtttccccaactggtgaggaagttaagagcaagagacagctaacccagtacctgaaagctcatcctggaggccctgcatcctcagagttcgattggggaaccagtgatactcccagacgctcagcacgcttgagcgagaaggtcaaggcaactgagagcccagagggtgagaagacccctaaacggggaagatcaagttctaagagaggcaaaaaggaggaaaaagaagacacagaggctgcaaatgaggctggagaagatggtgcttcggaggaaggtaaaggtacagatgtggagatgaaagatgctgaaaacgctgaagacgagaagaaagaggtcccaaatgcagatgctgcagagaagactgaggaaggtgaagataagaaagaggaggcccctgctgtagatgcagcagagaagactgaggaaggtgaagataagagagaggaggaggcccctgctgtagatgcagcagagaagactggtgagaaagaggtggcccctgctgtagatgcaacagaggagacagaaaaaagcaccgaaggccaagcacagcctaattatgttgctgccccagaatctgagtataaaggagacggaaagccaggtgaatccgaagcagctccccttgcatttgttgatgaaacagctccccatgtaattattggtgaagagaagaaagaggaaaatactgagaatgagaacagtcaggcagccgaatctgccgtgccttccctggcatctttagagggagagaagaaagagaatggtggtgcccctgaacaaccagccctgcctgtagctgagacgaaggcagatgctcctccggcagaggcagaaaagggggctgaaaattcaggccagccgaataccggctctcaagaaccgaaggcagcaaactgcgacgaggggcagattcaacctggtgcctctgctgtgaggtgcacataagggagcttgatctcagatgggactctgttgcgttatgtctttaggacgatacctcgcatttgctttgagaattgtaatcgtggttaacctgacagcgctgtgtagcactaggctgcccagcacgtagttatcctttcgtttcttttataacggtggtgttgcagcatgggtaatgggccggcctgtgctgcctcagccaccactgcatacccagtgtaagtgtaactcgttattagcgtggtcgacattgatctgtggagaggactgcaggacagtactgtcctcgacagctgtaacgttacgttttgtgtgttcccttgtgttattgaacttatattatgatccataaataaagccataagcgtggcagggtcattccctgaccaccttcaggcatcaccatttgttggcc

SEQ ID NO: 28446 - DNA, 303 bp, Zea Mays
aggttgtccccactatattcaatgctcaggaggagatgctggcaacatggagaactttgaggagtttcaggactacgacgagttctagttatcttagtggcaaacccctaatcagctgcctatgaaggtcttatctactacgttttgtagtccgcactttgctaatgttaaatgactatgttatagactctgtggatgtcttggacatcttgatgtaataaagtacctttccgctatttactttgagcaatgtgtgatgatgtcatattgtgtaattgttgtgtatgtgagtttctaatcttg

SEQ ID NO: 28447 - DNA, 3039 bp, Zea Mays
cgcagaaaagatagctgtagacatccccggaagaaatggtcccgtgcgtgcgctcactcctttgctgtttttcttctctccgttcaccttgcgtgcgcgacatctagggcgaccgccgccgccgccgccgccctacgcccagcagcccaggtcttcgtcgcgccctttgccggctacgagcacccaccacaccagatcactgtaatccaggctgaattgtggctggtattggcgatataagcattcgttagctgtttaaattgtgtcttttgtctttgattaagcgtcattggaaaggctgtcatgagaaaactcttttgttcaaacgtttctctcctgtaatatgaatcattcatgcaaattcgtggatattaattcagaacctggtggcatattaatcttggatacttggtcaactgcaaacttgaagattcattttcatgcaatcaatggagagcctagcgcaattagaggtgttgtgtgaaaagctttataattctagagactcggctgagcgagcgcatgcagaaagcaccctcaagtgcttctcagagaacagcgagtacatttcgcagtgccaatacatattggacaatgcctcaactccatatgccctgatgctggcgagttcaagcttgctgaagcaagtttctgaccgcagtctttctttgatgctccgtctcgatatacggaattatgtcataaactatcttggcacaagggggcctaaattgcagaactttgtcattgtgtccttaattcagctggtctgtcgaattacaaaatttggatggtttgatgatgacagattcagagagactgtcaaggaagcgactgattttttaggtcttgcttcccaggatcattatttcataggcttgaagatactaaacaatctcgttacagaaatgaatcagccaaaccccgcgatgcctttgacgcttcataggaaaattgcgggttcattcaaggatcagtttcttctgcagatcttccaaatttcgttaacctcactaaaccaactgaagagtgaagctccggatgactttggacatattcctcttgaccttgccttgaagtgcttatcttttgactttgttggttctccggtggacgaaagctctgaagaatttggaacagtgcagcttcctgcatcttggaggcctcttcttcaagatccttccacactccaaatcttttttgattactacaaagtcaatgacatacgggtttcaaaagaggccttggagtgtctggttcgacttgcttctgtcaggcgcagtatttttgtggaggatcctgcaaggtcccagtttctttctcatctgatgctaggcaccaaggagatacttctaactggccaaggacttgctgatcatgacaattaccatgagttctgccgtcttttgggacgtttcaaagtgaattaccagctggcagagcttttgaatgttgagttttatggtgagtggattggtctagtagctgaatttacaactagatccttgttgtcatggcagtgggccagcaacagtgtctactaccttctaagtctttggtcaaggctggtgacatccgtgccttacttgaaaggtgaaacaccaagtcttcttgatgaaactgttcccaagatcacagaaggttttatcacttccagaattaattctgttcaggccatccttgctgacaactcactggaaaatcctttggatagtgtggaagttctccaggaccagctggagtttcttcctttcctttgcagattccagtaccaaagtagtagtctgtacatcataaacatcatggaacctcttctgcaagcttatacggaaaggtccagattacccgctcctggtgatgctgatgagctgtctgtcattgaaggccaaattgcatggatggttcacataattgcggccattgtcaaagttaggcaggtaacaggtgttagtcaagaaacacaagagttgattgacgcagaactctctgcccgtgtactacagttgataagtgtgactgatacaggagcgcacacacagagatatcaagaattaagtaagcaaaggcttgaccgagctattctcatttttgtacaaagtttcagaaggtcatatgtaggagaccaagctatgcattcttcaaagttgtatggaagattgtctgagcttctaggacttaatgaccatttaattctactcaatgtgattgttggcaaaattgctacaaatatgaagtgctatgctgagagtgaggatgttattgatcatactctgtccctgttccttgacttggcaactgggtaaagttgtgactatgtttttccagttttttttctcatttatgcgtgatgactgttcatattttttttcttgccaagtcagctatatgactggaaagctgctgcttaagctggagagtgtaaaattcatcattgcaaatcattctccagagaatttcccatttcttgcagaatacaaatgttcacgtagtagaactacgttctattacatccttggctccttagtcttcatggaagatagccctgtgaaattcaggactttcatggaaccacttcaacaggttgcattaaacctggaggcaactcctgatgctgcttttcggactgatgtcgctaagcgtgcatttgttggttggatgagagatctacgtggcatagctatggcaaccaacagccgcaagacatatggcctcctatttgactggttgtatccatctcgcatgccacttctgctgagagccatctcactttgcactgatgaaccagaggtcaccacacccttgctcaagttcacgtatgaatttgttttgaacaaagctcaaagactgacatttgattcatcatcaccaaatgggatccttttattccgagaggttagcaagataatcgtggcttacgggtcacgaattctattgcttcctaatggcacagacatttatggaagtaaatacaaaggcatatggatctcactgactgttctttcaaggggatagtggatagctggctgcattcaccagtac

SEQ ID NO: 28448 - DNA, 90 bp, Zea Mays
agggattcttgagacgggctcaaaatgagttcggattgagaataaaaaaagataagaagcgacaatgggacggagttcaagaactcacaa

SEQ ID NO: 28449 - DNA, 1840 bp, Zea Mays
ggattgttcacatcttatggtgctccgctggtgggtaggcaactaggcatatataaggcctgtttagtttagcttttttctgactattttttctaagaatctggatgtggagaaaatctgactgtgggaagaatctgaatatcgtggggattacacgcggaggaagatgaagtggtccaaagggtcaatgatctagaaagcgatgtatttctaatatcgtgacgactcgaccgattatgcgttcatgttgattttggacggtttttaccaaaacaattcttatagaagcggactgaaaagctggggcgtttggcagtccgcaacagattttggtggccggaagttgaaaaaagcccaaacaaacagggccacagtatggaaatcagtagctctgtggactgtggtcaggaaaaagaacagccaacaaataaacgtccaaggtcagaaagtactacagaatcaagcacaaaagcatccagggagaaaattagaagggacaagctgaacgagaggtatgttccctggtgagacaagacaatgattgcattttagtttgcagtttaatctttttttctcttcatattatcgtattcgtcaactaccactgtacttatgatattctttttgttagattcttggaattgggtgccattttggagccagggaaaactcctaaaatggacaaaacagctatattgagtgatgctattcgtgtagtaggtgaattgcgtagtgaagcaaaaaagctcaaggattcaaatgagaatctccaagagaagattaaagagctgaaggtctatactatttcatgtggccaagttataaatggtgctgttcagatgggaggtggcacgtgatgtgttgtttaggcacttcatactgttccattttcttgatttatgatcccctttttccatttggtcatttttttttcttatctagatttaattcatccagtcaaataacatgggaataattattagtacacctgtcattctccctccagtttgtggtttagtttattttgggttgcttgcattagcaactttatatccacataatgcgtttttttttcttaaatggttaaaccctgcagctgtataacagtatggacatttgtcaattcttttctctactgtatacacttctttgctacgtgttccataaaatatatagaggtttatgattcagcatctcatgtgctgcaaaaggctttggccttcgattttgctggttgttcatcagaaaaacaatctcaccctgaaatactttccttttgcaggccgagaagaatgagctgcgagacgagaagcaaaggctgaaggccgagaaggagagcctggagcagcagatcaagttcctgaatgcccggccaagcctcgtaccacaccacccagtgatcccagcctctgcgttccctgctccccaggggccagcagccgccgccaggcacaagctgatgatgcctgtgattggctaccctggattcccgatgtggcagttcatgccgccttcagatgttgacacctctgatgaccctaggtcttgtcctcctgtggcgtagaagccgtgcgaaatcctgttggaaagaggcgatgctgccttccattgattcaaatcttgatcggtccgcagtgttgttggtgtagttgattccagaactgaaggggatgttacatgtgtcggacggtgacatggggtgatctgatgacccctttgtatattatatatggtatggtataaataaattccgcgaccagaagctaatgtggatcggtggattagcttatgtctattcttgcctgtttggttatgttcctcctcgcatgtgaaaactgac

SEQ ID NO: 28450 - DNA, 391 bp, Zea Mays
cctctttcagtttcaggcgttcaatcactagcgcggttatgctctgagctaaacccttgtagcagagcgaacgaggaaaagttctccgtttccactttcctcctttctccacgccccgaacctgcagaaatcaccctttccaccccaccccccgccgctcggatccccaggccagcacggcctcccctcctccccggcccggtccagcgggttgcatggtccgcggccgccgcttgtgagcccgatcgatggccacgacggaggcgcgccgcctcgcggtcgtgccgcagctagggtcaaggtggggttacgataactttctgtttctccaaactggatatccatttctgtcaaagtttctgttcctgccttgtgttgagcgtgtctgaag

SEQ ID NO: 28451 - DNA, 656 bp, Zea Mays
tcgactccacagaaaaataagatcttactcgaaaaagtcccattttttatccaagtcacagctttcaaaaaaaacaaaggaactcgttcgtgccctcgcatatggatgcatgcgttgatatgccaagtttccaagttgattattaaacgctcaagaaacaacgaagcacctgtcgtaagaaaactggaaaaaaaaaatcaaaatactaatccaacggcacggacggatctggtggcgtggatggatcccgtattgtgccttctcgtccaacggcgcagacggttctggcggctacggcttcttcgagcaaggcgacgacggtagtgttggtgcccagatcgcggacggtcttgcttgcgcgtcgcccagcaatcgcaggttctgctcaacgggcgactcctccaccgcacggacccggcggcggatcgtgtcccatgtcctcggcgatctccggcgtcgagttctgcccggttgtggcgccggccggtgttgccatctgttgcggtagcgaagaaggaagggaaaaggtgtatcgcctaccgagaggaaaaagaatgaaccccttttttttgtaattggtggtaatggttggtaattatctctcagttaaaaattagtgtttgtgaagcacccttttaccccacatcataaaaaag

SEQ ID NO: 28452 - DNA, 1893 bp, Zea Mays
aaaaaccatgtaaaaatatatctaaataaaatataaaataaaaggctcgacgtcgtcgtcacctctctcgccgtccacgagtcacggcgggcgggcggcggcggcggccgggggtcccggttgcacacggctcgccaccatgcctgaccccaccaccaaactcccctctccacgcccccgccggcgccgcaggctcttcagcctctgcctcggcacagcgctcctcgcgctcatcgtctccgcgctcgtccacgtcgtcgcccagccgccgggtcccgctcccgcctccgcgcgcttctccgtcatcatagacggaggcagcacgggcacccgggcccacgtcttcgcggcggggcccgacggccgcccggatctggcgcgctccaccgtgatgcgcgtctccccgggcctctcgtccttcgccgccgacccggcgcgggccggggagtccctgaagcctctgttagattttgcgagggataagattggcggcgccgttagggaggcggaggtgcggctcatggccaccgcagggctgcgcctgctcgaggagcgcgcccaggaggcgatcttagcgtcttgtagggacgttctacgagcctctgggttccggttcgaggacgcgtgggccaaggctcggatgaaggtgtctatgcttgggttgcggcaaattatgctcttggaagacttggaggggatcctaacaaaaccgttggaataattgaacttgggggcgcttcagctcagcttacctttgtttctgatgaagtacttccacccaaactgtcatataattatacttttggtgaaacaacatacactctctataccaacagctttttaaactttggtcaaaatgcagctcaagactcattccatgaaatgctgaggtcaagaggctctttcaaaaatggtacacttgctgatccttgtgctcccagaggatattcacgcaatgaaggtgcttcaaggtcaacattagagaaccagtatgttaataatgggactggaaactttacagagtgcatatcttcttcacaacttttactgcaaaaaggaaaggattagtgccacatgtatctcatataaatgcagaaaagtgccagtatcaacaatgtcacctgggatctacttttgtacctgagctgcgtggatacttcttgggaactgaaaatttatattttacttcaaagttctttggacttaagaagtcttcatcactatctgatttcatgtttgctggagaacaattttgcaaccagcatttgtcgagtcttagaaaaaggcatcctaataggtcagatgaggatttttcacggtattgcttctcgatggcatacattgtggctctactgcatgacagtcttggtgtaccactggatgacaagaggattgagtattcaaaccaggttggagacattcaggttgaatgggctctaggagctttcatcacactgatgcaaaatacgagtttaaagccattacacaccaccgcagaatcaacccatagcaatagaccattgtttgctgtgctgggaatgtttcttttatgtggagtactctttgtatcaagatggaggaagcccaagacgaaaatcatatacgacttagagaaaggccgatacatcataacacgcatcagctgacgctaaatcttgtgcagaagaactatatttatacgacatgaatagatgctgtgttgtgcaacaatgtacgagttcaattctttgtgtttttacctttaggtagcagagctgggtgggtggagcaggaagatagcgcatttgtgcgtatagaagaatgatgtgtagaacaaattgccatgtgttaattgaattatttgatgaataattatagttgctttgttcatctaatgaggtcgatatttctcac

SEQ ID NO: 28453 - DNA, 4091 bp, Zea Mays
atagttatcttttgaagcatattgcacaagaatatgtgtgcagcaggagtcatcagatggggctgagagaaatagattccttattaattatgttgattttgcttttgatgacttcggcggtcggcaagcacctgtgtatcctggtctgtctactgtttggggaagtcttgctaggagtaaggcgaaaggttatagagttggtcctgtgtatgatgatgtgttggcaatggcttggttttttctggagcttattgtaaaatcaatgggattggaacaaagtcgtctcttctaccacaaccttccattaggtgaagatgtcccaccgctacaattgaaagaaggtgtcttcaggtgcatcatgcagctctttgattgccttctaactgaggttcatgaacgctgtaaaaagggtttaagcttggcaaaacgcttgaacagcacgcttgctttcttttgctatgatcttttatcaataattgagcctcgccaagtttttgagctggtaagttaggaaatcatttaaagtttgtgctctctccctggttctttattatttatatttatgtttatttattctcagagtgtccctgaattgcaaaagcactaatgctttgccacaagaaagtttctgtgcgcatcgatgttttatatggtgctgaaaacaaatgtatctattcttcaggtttcgttgtacatggacaagtttgcaggagtttgtcaagcagtccttcatgactgcaaattgacattcctgcagataatatgcgaccatgatctattcgttgagatgcctgggcgggatccctctgatagaaactatctctcgtcagttcttattcaagagatctttctgaccttagaccatgatgatttgtctcaacgagcgaaggctgctcggattctggttgtccttatatgcaaacatgaatttgatgcacgctatcaaaaaagtgaagacaagctgtacattgctcagctgtacttctctcttatagggcagatccttgatgagatgcctgttttctataatctgaatgccatcgaaaagcgtgaagtgctagttgtcattttgcaaattgtaaggaacttggatgatgcaactcttatcaaagcatggcaacaaagcattgctagaaccagattgttcttcaagcttcttgaagaatgtataacccattttgagcacaacaaaacaggaggcagcatgctacttggtgctagttctcggagcccagatgttgagcgccctgcacccccaaagtactctgagcgattatccccatcagtcaatgcatatttgtcggaggcttcaaggcatgaaataaggctaaatatacttgatggtggaatgcctcagggaacaccagaaaatgggtacatgtggaacagggttagccctcaattaagttcccctaatcaaccctattcattgagggaagcacttgctcaagcacaatcttcaagaattgggtcaaccgccagggcattgagagagtctctgcatccagtactgagacaaaaattggaactttgggaagaaaatctcagtactgctgtgagcctcgaagtgttgagaataaccgagaagttttcagctgctgcaggcactagaagcatcactactgattatgcgaagctagattgtgtaacatctatcgtaatgggtcttttatctaggagccaacccttggcattttggaaggctttccttcctgtggtctacaacatatttaatcttcatggtgcaacactaatggcaagggagaatgaccgcttcttgaagcaaattgcttttcatcttttgcggcttgctgtttttcgaaatgattctattaggaaaagagctgttgttgggttgcagattctcgttaggaacgcattcaactatttcaagaacactacaaggttgagagtcatgttgacaattactttgtcagagttgttgtctgatgtgcaagtgactcaaatgaaatccgatggttctcttgaagaaagtggtgaagctcggcgccttagaaaatcactggaggaaatggctgatgtaagaagcaaggatctgttgaaagattgtggcctccctgttactgcattggaggcggcccctgatggttcctctgataatatgtggtcttgggcagaggtgaaacatctctctaaatgtctagtccaggcccttgatgctggtctggaacacgccctcttggattctgtagtgactgtagacaggtatgcagctgctgagggtttctataaactagctatggcctatgcgcccgttccagatcttcacattatgtggttgcagcatttgtgtgatgcacaccaggagatgcaatcatgggctgaagcagcacaatgtgcagttgctgcagctggcgtgatcatgcaggcacttgttggaaggaatgatgctgtgtggagcaaggagcatgttacttcgctacacaagatttgccctatcgtcaacactgatgtgagtgcagaagcatctgcagctgaagttgagggatatggtgcatccaaattaacagtggactcagcggttaaatatcttcaacttgccaataaactcttcacacaagctgaactttatcatttttgtgcaagcattcaggaactcataattcctgtgtataaaagcagaagggcttatggacagctggccaaatgtcatacatcactcacaaacatctatgagtcaattcttgaacaggaggcaagtcctataccattcattgatgccacatactaccgagttggtttctatggtgagcgtttcggcaagctcaataaaaaggagtatgtatttagagaaccacgagatgtacgtcttggtgatattatggagaagcttagtcatatatatgaggttaaaatggatgggagtcacactttacatataattccagattctagacaagtcaatgctgatgagttgcagcctggcgtctgctatttacagatcactgctgttgatcctgtaatggaggatgaggacttgggtagcaggagggaaaggattttttctttatctactggtactgtacgtgcacgtgtttttgaccgttttcttttcgatacaccattcacaaaaaatggaaaaacacaaggtggtctagaagaccagtggaagaggcgtactgtgctccagacagagggttcctttcctgctttggtgaaccgtctgccagtcaccaaatctgaatctctggagttctctcctgtcgagaatgcgattggaatgatcgaaacaagaacagctgcattgagaaatgaactagaagaaccacggagttctgaaggtgatcaactcccaaggcttcaaagcttgcaaaggatactccaaggaagtgtggctgtgcaggtcaacagtggggtattaagtgtgtgcactgcattcttatctggcgagccagcaactaggctcagatcccaagaactgcagcagctcatcgccgcattgcttgaattcatggctgtctgcaagcgtgcaatccgtgtgcatttcagattgataggggaagaagaccaggaattccacacccaacttgtcaatgggttccagtcactcaccgctgagctatctcattatatccctgctatactctccgagctatgatagaactgtaacaagccagaaattaggtagcatgtgaatgattcattctttcagttgcaggttcccaccaaatgtccatatttccattagttttggttgtatagttgcaccgattcctgattttggagtgtaaagtttgtataacctagtgttatctgttatgcaccagttatatgctgagtgccatgttttttgcggtttgctactgtatcacagcgagccgacattttacaacagttatatgtaatgttctgtagtgatacaatagtgcctattctgggtgatatgtatttttttccctgtaggaaatttgctgctgtcgagggcatcctcgcaatttgtttatgcacgatttgaagccttgtgttattgaagtcgttcccataactgtagtttgtttattgttcctagtgtataatgacgccttaaattgctcatgttccatggttgaacaagatttggaacatttcaa

SEQ ID NO: 28454 - DNA, 1360 bp, Zea Mays
ggaagaacagtgactcaatggcagctctcgaacgtcttgttgataattatatgttgacatgtgaggaagaatctgagttattatcctctctgcaatttggggaagaagatgggtggctatcatcattctactcgtgtttgatcacgaagcatgaaaaagaatatttagttgaagcaaaattcaagaaacttgaagaagaggcctgcaatattttgtcctcgagttctggtgaaacaatgaaaaacaacattgatgttttggtttgcaaagctgaatactaccaccagagtggagagtaccaaaagtgttttaaactcacatcctcgttacttgagagagaccctttccatctaaagtgcacattagttcatttggcaactgcaatggagcttggtcattccaatgatctttatcttttagcatgcaacttagtgaaggattatcctgaaaaagctctttcatggtttgctgtcggttgctattactactgtattaagaagtatgatcaagcgcgaagatacttcggcaaagctacaggtttagatgggacgtttcctcctgcttggattggtacaggcattgcctatgctgctcaagaggaaggtgaccaagcaatggctgcatttcggacggcagctcggttatttcctggatgtcatctgccaactttatacatgggcatgcaatatgtgcgaatgcacaatttcaaacttgcagagcagttcttcacacaagcaaaatccatctgcccatctgatccacttatttacaatgagttgggggttgttgcgtataatatgaaggagtaccgaaaagcagttcagttgtttgagttaacattggaccatacttcatcctctctgaatgaaatgtgggaaccaacattggtgaatcttgggcatgcacttcggaaactcaaggaatatcagaaagcagtatcatgttatgaaaaggcactcacttttccaaccaaaagtttgagtgcatttgctggtcttgcttatagttaccatcttatggataattttgaggctgccataaattattaccacaaggctctatggttgaaaccagacgaccagttttgcacagagatgctaacatatgctcttgagtccatctgtcaaagcactgctcgtagaaggcctagttgaggtttgctaatcgcaacatgctaggatattctttaccttacaagactagtagccaaattatatgtaaatttgttgttgtacaatatgtaattgctcaagttcatttcagccacttgaggctgatcgcattgtaaagccaaagttttcgatcttttaatttttatacaccccctccgttgtcatataataattaagttcgtcccgat

SEQ ID NO: 28455 - DNA, 3236 bp, Zea Mays
tgtttccacatttgaccgatcctcttcgattcgatttctacacccccagagcttgccaaacccctcgtctcccaaccctagagagcagcagcagcagcagcagctaccgcatcccttgccatggcgccaagctccccgtcatccgctaggcccacgcgcgcctccggccggaagcgctccgccatggccgaggagatccaccagaaccaggaggaggaggaggaggttgtggctgcgtccaccgccaagcgcagacgcaaggcggcgtcttccgggaagaagcccaagccgacgcccaagcaggccaaaccggccgtggcggggatgaagaagaagggggagaccgagaagacggagcccgttgtggacgacgtgtgcgccgaggagcccgacgaggaggagttggccatgggcgaggaggaggcggaggccgaggagcaggccatgcaggaggtggtggccgcggtcgcggccgggtcgcccggtaagaagagggtggggagaaggagcgccgccgcctcgggcgaccacgtgcccgagttcatcggcagccccgttgctgcggccgaggcgcacagcaactggcccaagcgctacgagcgcagcactgccgcaaataaaccggaggaggacgatgagctcaaggccaggtgccactaccggagcgctaaggtggacaacattgtctactgcctcggggatgacgtttatgtcaaggctggagaaaatgaggctgattacattggtcgcattactgaattttttgagggcactgatcgatgccactattttacttgccgttggtttttccgtgcagaggacacggtcatcaattcgttggtgtcgattaatgttgatggccacaagcatgaccctagacgtgtttttctttccgaggaaaagaatgacaatgtgcttgattgcatcatctccaaggtcaagatagtccatgttgatccaaatatggatccaaaagctaaggcccaactgatagaacattgtgacctatactatgacatgtcttactctgttgcatattctacatttgctaatatctcatcagaaaatgggcagtcaggcagtgaaaccgcttcgggtatttcttctgatgatgcgggtttggagacgtcatctaatatgccagagaggacagcaacccttcttgacttgtattcgggctgtgggggcatgtccactggtctttgcttggcgatgggctgttgatcttaacagttttgcgtgccaaagtttaaaatacaatcatccacagactgaggtgcgaaatgagaaagctgatgagtttcttgctctccttaaggaatgggcagtcttatgtgaaaaatatgttcatcaagacgtggattcgaatttagcaggttcagaggatcaagaggatgctgacactcttgacaaggatgaatttgttgtacagaagcttattggaatacgctatgatggcactggaaggaaaaaaggcgtatattttaaggtccaatgggaaggatatggtcctgaagaggatacatgggaacctattgataacctgagtgactgtccgctgaaaattagagaatttgtacaagaagggcgcaaaagaaaaattctcccgcttcctggtgatgttgatgtcatttgtggaggcccaccatgtcaaggtataagtgggtttaatcggttcaggaaccgtgatgagccacttaaagatgagaaaaacaagcaaatggtgactttcatggatattgtggcatacttgaagcccaagtatgttctcatggaaaatgtcgtggacatactgaaatttgctgatggctacctaggaaaatatgctttgagctgcctagttgctatgaagtaccaagcacgccttggaatgatggtggcaggctgctatggtctgccacagttcaggatgcgtgtgttcctctggggtgctctttcttccatggtgctccctaagtatcctctgcctacatatgacgttgtagtacgtggaggagcacctaatgccttttcgcaatgtatggttgcatatgatgagacacaaaggccatccctgaagaaagctttgcttcttggtgatgcattttcagatttaccaaaggtcgaaaaccatcaacctaacgatgtaatggagtatggtggttcccccaagacagagttccagcgctacattcgacttggtcgtaaagacatgttggattggtcgtttggtgaggaggctggtccagatgaaggcaagctcttggatcaccagcccttacggcttaacaatgatgattatgagcgggttaagcaaattcctgtcaagaagggagccaacttccgtgacctaaagggtgtcaaggttggagcaaataatgttgttgagtgggatccagaagtcgaacgtgtgtacctttcgtctgggaaaccactggttcctgactatgcgatgtcattcatcaagggcaaatcactcaagccattcgggcgcctgtggtgggacgagacggttcctacagttgtgaccagagcagagcctcataaccaggttatattgcatccgactcaagcaagagtcttgactatccgggagaacgcaaggttacagggcttccccgattactaccgattgtttggaccgatcaaggagaagtatattcaagtcgggaacgcagtggcagtccctgttgcacgggcactgggctactgtctgggtcaagcctacctgggtgaatctgacgggagtcagcctctgtaccagctgcctgcaagttttacctctgtggggcgaaccgcggttcaggcgaatgccgtttctgttggcactcctgcgggggaggtagtcgagcagtaaaaggatagcggagcaaccctggttggtattttgattcgagcccatccagtagcatgtttaccaataaataatcattggtcgtgctgattcttatggttggagatgaatgtatgtagggtgtactcgagctcgagtgcttgttgtactgtaggttgaggtttctcatccattggcctgcctatttgtggatgacgtttcatttcagattagcaatgtgcttatttaaggtttcgtcatgtacctgtattctacaatccactattgtttccaaagacagcatttgatccttgttcaacgcgagcagattttcgtccaccaaagctgtgtagggatcgaaatgtcaacaatgaattgagtcattcaatcatttgtctaatgttaatgtgtcctttgcatttat

SEQ ID NO: 28456 - DNA, 2329 bp, Zea Mays
cctcctgccgattactgcggccgaaacagaagcacacaaagacattcgacgcggggacgacagagcgcacgcgcgaaccgccgccggaccacggcgacgagctcggatcccggcgatctagtcgccggaggtggtcccgatggctcggcggtcgtcttcctcgtcgtcgggggcctggcggtacctgaacccggcgtactacctcaagcggcccaagcgcctcgcgctcctcttcttcatcttcgtcgcggccaccttcgccttctgggaccgccagtcgctcgtcagcgagtacgagtctgagatttctcgattagaagatgatataaatcggttgcatgaccagctaagaagggctggagttcatctggatgaaaatccagtaataagcaacaagaattccagaaaaaatcctgtagaaattgatcatgtcaataatgaaaggcgggaaaaagttaaagaggcaatgctccatgcttggaattcttatgtgaagtacgcctggggaatggatgagcttcagccacaatcgaaggatggcatcaatagttttggtggtcttggagcaacccttgttgactcacttgatacactgtatataatgggcctgaaagatgaatttcagaaagctagagactgggtggcagagtcattagactttgacaaggattatgatgcgagtgtttttgaaacgaccataaggttgcattataagggttgttggaggtttgcttagtgcatatgatctatctggtgataaagtatttcttgataaggctaaagatattacagatcgtctattacctgcttgggatacaacatctggcatcccctataatagaataaacctagctcatggacgagcccataatcctggatggaccaacggtgacagtatccttgcagattctggtacggagcaacttgaattcatagctctgtcacagaggactggggatcccaaataccagcagaaggcagagaacgtcatcacacagcttcagaagatatatcccagtgatggtttgcttcctatttacataaatcctcattctgggacagcatcgtactccactatcacgtttggtgctatgggagatagcttctatgaatatttgctcaaggtctggatccaggggaataaaactgagcatgtaaaacactacagacaaatgtgggagacatcaatggaaggtctattaagtttaacaaagaaaactacaccatctaattactactacatttgtgaaaagaatggtggctcattgtctgacaagatggatgaacttgcttgctttgcccctggtatgctggcattaggagcctctggttatgggccagaaaaatcagagcaaattatgaatatggcaaaagagcttgctaggacctgctataatttctaccaaaccactcccacgaagttggctggcgaaaattattttttccatgctggacaggacatgagtgtgggcacatcgtggaacatcttgagaccggagactgttgaatcacttatgtacctatggcgcttgacggggaatacaacataccaagattgggggtgggacatattccaggcatttgagaagaactcccgtgtagaatctggatatgtgggactgagagatgtgaacactggtgaaaaggataacatgatgcagagcttcttcctggcagagacgctcaagtacctctacctacttttctcccctccatcagtcatatcctttgacgagtgggttttcaatactgaagctcacccattgagaattgctccagtaaattataacaaaagcattggaacaccggtccgtccattcgggagaaaacagggaaagcctgagtaaccttggatatagagcagtggattttttttttaatccgacgtctgactctggcctccctgatgaagatgtgttctgacacgagggaactttctgcctgaagcagcaagggttagaaatcacggcaatagattgtttagagagaaaaatcataggtagatcatgatgctatatgcgaggcagtgacctccatgggtggtatggtcggagctcaagagcccccatagaagcttttatctttggacttgcttacgccccctgatgtgcgttgttgatgtgtagcatacatctaactcactgttcatatgttgttgctttcctgggacctctgcggagctgtattgtcattatttggcccatagttattactttttttcagatatgatttatatatatataagttgtttatggctttcgttaagtacttcgttctcctctggagtcatttactgcttccagtcgctgatacttgacccattaacatt

SEQ ID NO: 28457 - DNA, 2278 bp, Zea Mays
gccggatcatgctgtccccttgctagcagcaacttggcgtctccaatgtgctgcaatcgcctttgatgcccaattctcaattggggattagctacctaatcaagttaaaaatgtgactggctgagtatgaaaaatcctaggcgtcaatcatgtttcgtagtcactgttgcttagtgtgccaacacaccataattacaacgacacgtgtctgtgtgcttttaatcggatgagtgtagaactgagcttttcagtgaagagaggatttagtactggatccatctagcctacaaccagctgtttacagtactggataaaacctgcgattaggctcttagcagctcaaatgccaacctgcaaagtgcttaatcctgcctcagaattcaggtttcctcaaaacagcatgggcagttggcaaagtgtttaagcttaaccctctctttcaaatctgcccaactaatttctcatggtgccatgggttgtattatcgcctcgttaattatttaataatgggattcacagctaattaaatcatggataaaagtcctgtcatgtgttagtcttgtggattgtaacctttcactatcccttagttcaattcatggataaatttttgttttaggctactcttttgctgtgttacattattaaaaaacaatttggttttggttcatttctgatatgaaagtagcctcttgctgttcttatgcttcccctaatataacttttttttgaataatttcctagctctttcaaatcaattcgcgatatgtccaggtggtaatattttgtgcataatggaagatgagatatccagcataatagcttatgctcttgccatatctgatgagcgccaccatttgatagatttaaaatttgagaacggaatggattattccaagggagagtatgctaaagcaatagagaaatcttttagttttctgtctgaaagttctttcagctcatcaccatggtcatctacaagttctgaagcaagcttatcatctctgtcttcattttcatctgatgacttttctggttatgatagctcatctttattgtccccaatgcatccagaaatgactgtgaatgggaaagtaactctcaaagacaaatattcagttactgttgtatatgacaatcaattctttgcactccgaaaaaagtgttgcccatccgagcttgcatatattacttctttaagccgctgcaagaagtggaatgctcaaggtggaaagagcaaggcctattttgtaaagacaacagatgacaggttcatcattaagcaaatcaataaaacagagtttgagtcatttattaaatttgcacctgattactttaagcatgtttaccattctctggacactggaagccaaacttgtctcgccaaaatattaggaatctatcaggttaagcaaattaagcatggcaaagaggtaaagattgacttgatggttatggaaaatcttctctttggccacaatatttcacgaatttatgacctcaaaggtgctattttttcgcgacgcatcactgactcaaacgatcatgatactgtttacctagatcaaaattatgttgaggacatgagcttttctccaatctatattggtggaagaacaaagcatcttttgcagcgtgcaatctggaatgacacgtctttcctcacttcggtgaatgttatggactattctctacttgtgggagtggacaaagagaagcatgaacttgtgtttggcatcattgattatctgaggcaatatacttaggacaaacaactggagacatgggtgaagacttctctggtagtacccaaaaatgttttaccaactgtaatttcccccaaggaatacaaaaaaaggtttaggaagttcatggcgaagtactttctgtcagttccagacacatggagtcttgataatccgtctaagccatgcaaatcccttggtcagagcaatcgcaagttggcggaagtccagattggtgataacctgtcagagcacccaaatgaagttgaggggtgtgcctaatcatgtgcaagatttcctggcaattttgttgaaccctatcatgttgttgtttggctatatttcactttgtaaaatggtgtacataggaggaccttgcggtttttaggcaaattgttgggcaagtgaggtccacatgacgtgtacctatacaaatgttcattgttgatttcacaattattatagtgaaattaagaattcatatgatcatttttttggacctaccacttgtgagactgaagcagtctattctt

SEQ ID NO: 28458 - DNA, 2436 bp, Zea Mays
gttgcggtggtacaaagcgacaggcgcctcacgctcgcgtccctcctccccttccccacctcttcccattgccaagcaagagagaaacgcacgcgagccgcgagcagaacagagcagcgcggcgccatcccgatctcgctatttcccttctcccccgatgcgatctcgccgaaccctaatccccacgcccgacgcccggccgtcgccggagccctagccccgaatgcggcggtgacgcgcggcgtgccaccaccaccacctcagcgcccgcgcccgcgcccgcgcccgccaccgaccgtcctgcccggccgacaccagctgccatgggcgccgccgacaagtggctgctcccgctcgtctccgtctccttcgtctcgctcctgctcttcctctccgcgctctcgggcttctccgcctcctccgcactcttcgcgcgcctcccgccaccctcctacgtgcgccgaggcgccgccgcaccgccctccttcgcctacctgctcgcgggcggccggggggacggcaggaagctcctgcggctgctcctcgccgtctaccaccccaggaaccgctacctgctccacctctccgccgacgcgccggcctccgagcgcgccgagctcgccgcggccgtcgcgcgcgccgctcccgccgtgcgcgccttctcgaacgtcgatgtcgtgggcaggcccaccgcgggcaccccaatgggatcctccggcctcgccgccacgctccgtgcggccgccgcgatgctccggctggatgcggagtgggactggttcatcacgctcaacgccgccgactacccccttctcacccaggacgacttgatccatgttttctcctctgttccaaggcacctcaactttattgatcacaccagtgacattggatggaaagagtctcagagagtgcagccgattatagtagatgctggagtgtatttggcagggaggaatcagttcttccaagccacagagaaacgggacactcctgatagtttcaaatttttcacaggttctccatgggtcattttaaacagacgctttgttgagtattgtatttttggctgggagaatctccctagaacactcctcatgtacttgacaaacgtgatgctacctctcgaggggtatttccattcggttgcatgcaactcggacttccgcaatttcacagtgaacaacgacttgcggtatatgatttgggacaatccacctcagatggagccccatttcctaaatgttacacattacgatgagctagtagggactggggttccttttgcccggaagtttaaggagaatgaacccttgttggacaagattgatgatcaagtgcttcgacgatggcatcagagacctgttcctggtgcgtggtgcacaggcaggaggaggtggttcagtgatccttgctcccagtggagcaacgtcaacattgtaagacctggtcctcaagctgagaagttccgaacatatataaaccagattatggaagaatcaaagtcaggcaacaactcttgcaagcaatagcggttgaagcattgagattgtctcattttgcacagaggagaggagcgaactccccatgtctcgagaacttcctggcatctggttcgggagcaagcatttttgcacctgttatatgaacacacggccaaggtgagagatgggtctattctttccggaatttttttggtgtcatggcttcaagggcttagtgcacactagcattactggaagccaagagagcttactgtgggaatacggaagctaataggcattgtaattagtagcggtgagttgaatgaccggtgcctttgtttatagaactggtggaattgttggcgcttccatacagaattgagaaaatgaagaactggggatgttattgattggttggtcatggctgtggctgttgtggacacgtgtggttaatacaatgctttactgattttcccaccttgacatgaagtttattctcatagtctcatgtctcctattctgcattttcatctcgtctgtgcatgtgcatgtacactacactaacaactctggtctcttgcagtgacgcagtgccccttaactgcaggagtttagtgagctaatgagctgtggatgtgaacaatggcaaattggcagtacagcatccctacacttcgtaggatctgtttgcatgaattgtgtggccttcaatggtatccctgctccagtgtagtccagtgtggaaggctactgtatccatgtcgaaacatgctaggttacaatggattaaaatgtgcagtaccagtagcgtttgatgcagcaatctatatatgaattgcaatggattctgcaaaagctcgatcgttggttatacttatgtggcgtgcttaataggatagtagacggacctgacaggattctggtgctggcggccgctggtggtggaagccgg

SEQ ID NO: 28459 - DNA, 152 bp, Zea Mays
ttgagttattttattacagaccagactaaaagtgagtgcagagtagtaacattatacaaaccaagggaggcacaaactcctcccgataagctataagcaaaaaatcctaagtggaggaccgagtcctcccgcacttcagtcttgtctttctt

SEQ ID NO: 28460 - DNA, 195 bp, Zea Mays
tggcgagctagcacacctcggcaaagatggctagcgacgaggacaactcgcgacattgagcaggtcgccatcgcgatgcaaacgggacagctcgcggcattgagcaggccgccctcgcgatgcagcgtacaaggagtggaagggggaagaggggaagagtgtggatatggcggccaccggatcctccacctcgac

SEQ ID NO: 28461 - DNA, 3754 bp, Zea Mays
ggaaacacgaacacggtcacgcactccgccgatcccgccaccgcggcgcggggacgcgcacatgctgccacgaatactcctccagtcctcccccgtggtgccggcccccacctgacccccgatccccgcaaccttctatccagaggggaaaaaaagaagacaaaaaccgccggcgagcatgggcacgcaacccggctcggcggttcgtgtcgctgcggatgagagctcgctccctggactttacttaactctactctgagtctcggatgctccagagtccagacttccgggattagaaatccacgcacatcgccgtgcacgcacgcgacggcggagatgtccgtggccgtggggaagcgggtgctcgatacgggctggctcgccgcgcgctccaccgaggtcgcgctcaccggcgtccagctcaccaccacgcacccgccggcagctgaccccgccccagccgcgccctggatgagcgccgccgtccccggcaccgtgctggggacgctgctcaagaacaagctgatccccgaccccttctacgggctgaacaaccaggccatcatcgacatcgccgacgccgggagggagtactacaccttttggttcttcaccacgttccagtgtgccctgtcaggaaatcagcatgcgactttaaacttccggggaataaactactcagctgaaatgtatttaaatgggcacaaggaggtactaccaaaaggaatgttccgaaggcacaacattgatattactgatatcctccatcctgatggtaacaatctgcttgctgtccttgttcatcctcctgatcaccctggcaaaattcctcctcaggggggccagggtggtgatcatgagattggaaaagatgttgctacacaatatgttgaaggatgggattggatgtgcccaataagggatcgaaatactggtatctgggatgaggtatcaatttccatatctgggcctgtgaatataacagacccccatctggtttcaacttttcatgatgattttaagaggtcatacctacattgtacacttcagttggagaacaaaagttcttggattgcagattgtaccttgaaaatacaagtttcaactgaacttgaagggaacatttgtttggtggaacaccttcaaagttatgcaataacagttcctcctcaatcagatatagagtacaccattccttctttattcttctataagcccaacttgtggtggccaaatggcatgggaaagcaatccttatacaacattgagattagtgtggatgtaaaagggtttggagaatctgattcctggagccattattttggattccgcaagattgagagtacaattgatgattctacgggtgggaggatcttcaaggtaaatggtgaacctatttttatccgaggagggaactggatattgtcagatggccttcttagattaacaaagaagcgatatatgaccgacatcaagttccatgctgacatgaacttcaatatgcttagatgttggggtggtgggctagcagagaggcctgacttttatcatttttgcgatgtctatggtctgatgggttggtggagaggtagaaacactgatattctcatagtagacgagggtgctctagaactacgcatgatggagtttctagagaagctgacgcaaccaggatgcttcggcaataccattagcgatggcgcgatactccacctcagcactcgagtgggagacgacgttctgacacttggaggaccaggttacaaggtatggcaagaattttggataactggagatgttgatggccgaggaattcctgtatctaaccctaatggccctttggatcatgatctctttcttttgtgtgctagagataccgtgaaattactcaggaatcatgctagtctagctttatgggttggtggtaatgagcaagttccaccggttgacattaacaaagcactgaagaatgatttgaagctacatccaatgtttgtaagttaccagacatcaaaaagtgaagtaatatatttatctgaagaatcaactgaccctagtaaataccttgatggtactcgggtgtatgtgcaaggatcaatgtgggatggttttgcgaatggtaaaggggacttcactgatggtccatatgagattcagtatccagagagttttttcaaggacagcttctacaaatatgggttcaaccctgaagttgggtctgtaggggttccagttgccgcaacaattagggccacaatgcctccagtaggatggagcattccgattttaaagaaaagaattgatgggtacatcgaagaagtaccaaatccaatatgggactaccacaagtatattccatactcaaaaccagggaaggtccatgatcagattgaactatatggagccccaaaagacctggatgatttttgtgaaaaggcacagctggtgaactatgttcagtacagagcacttttggaaggatggacttccttcatgtggacaaagtttacaggtgtcctaatttggaagacgcagaatccttggactggactaaggggccaattctatgatcacctccaagaccaaacggctgggttttatggttgccggtgtgctgctcaacctattcatgtccaactgaatttggttacctattttgtagaggtggtaaacactacagctgatgaactcaaagacatggctgtcgagatttcagtgtgggatctagatggtgcatgcccctattacaaagttaccgagaaaatagttataccgccaaagaaagtgaagcaaattatcgagatgaaatacccaaagatgaaagatgccaagcctgtgtattttctgctcctcaagctcttcaggctgtcagacaatggaacaatctccagaaacttctactggttacaccttcctgggcaggactacaaatcgctggagcagtatcagcagaaaaagattccattaaaaattgattctgatgtttcagtctcaggcacgaggcacaaagtaagaatgacagtagagaacatctcaaagaagtccgtagtagacagcacacgttcagtatcagcaatggatctaggtgatgcaagtggttcccacagcactcgcaaagaaactactcggaagggaaacgggagcgacggactgtggaggaaaatacgcagtggcctcggggtcgcaagaccaagcgacaaccgaagaacactggaggtcagcgggaccgattcaggggttgccttcttcctccatttctcagtgcacacctccgaatcatccacggacggggaggaatacaatgacacaagaatcctcccggtccactactcggacaactacttttcgctgacgccgggggagaacatggccgtcgacatctcgttcgaggctccccagggatccagtcccagagttgtcctcagaggctggaaccatcatctggaccacgccgtgatgatctgagatccgtgtaataaaataagcacgtaccgaataaagtgcagacatcagatcgtgttcgtgcctgttgttggattataattaggcttgtcctaattttattttattttattaaataaatcgtacgacctaaattgaattctaggttaaatggcttcaaggtactctatatccttcgtaattgttttagatgtcagtgttatttaaagcttatatatacatccttataaaagtataattattgtatttagagaagagaaagtaaaaaaagaaaatataaaaaacagattgc

SEQ ID NO: 28462 - DNA, 271 bp, Zea Mays
atgccatacgctgggcccggctctattgagattgagggagagagagagagagttgaattctgtcgtggccgtgaaagagggagattgttgccaacatcgctcctcgtctccgccattgtttggagcccacagtgtggacgagggtgttcgcacgaaagcatcgatcgagtacaaggaaccgtcgggcgcatggtcaatcagagtgcccagaattcctcaccggcgtgaatcaccgccaccgaatccgccttgcgccgcggctgggcatctc

SEQ ID NO: 28463 - DNA, 191 bp, Zea Mays
atcgcaatgcatgagcattgtactagtttgtattgatggtttagttaagagaaccatcaacgtaaattggttcacaatgagtatgttattacacctgtaaaagttatttttaaaatttcaaacaaacacatcatataactaataaaccttatcttagcctaatcaactatagtaacctattcaaatatata

SEQ ID NO: 28464 - DNA, 1973 bp, Zea Mays
gctaccagtggcatcctacgcggcagaggaatagccacgccaccacgtcccccgcgcccgccgacccacccgcaaacgcaacgcaataataataggctaggcagccagcagccaccatccccaccagcccagcaccaggaaggaaatagcggcgagcaagagctggcggaaagaagaggaaagccaggcacgccgctcacccaccgcgccaccaaccgcagatcctaaatccgatctctctctccctccctccctccctcccgctcgaggttttcggtttcgatccggcaagcgggcgagatcttcatggcgacgtcgttcgaccgctgggagaaggaccccttcttcctcgccgccgaggaggtccaggaatccgccgatcggatggaatcggtttatcgggtatgggtgcaggagaggagcgggggcgattccgaggcggcaagcgtcactggaggccctacagctgcgcagcttcgccgcgagctgcacacggcgcttggtaccgccaagtggcagcttgatgaactggcgcgggcagtcagatcgaacgatctggttatgtcagcaggaaaagacacaagggctaggcatgatgattttgttacagcaatcggctatcgcatattagaggtcgagaactacttgaaagaatccaatcttgcggacgggagggggccattgagctgggttcacttggatgaggatgaaagggacgaccttgcagcttttctatctgccagtccttttcaacagaaagacaaagtggtcacaattccttcagcaggtgacattgaagtgggcagcaatgcagcaaggatgaaaaatgatatatcaactgacagctccaaggattcagctggttccacggatttgatttcaggcacagcaaagcaagatttgcatcgtgggcacagaagagcagctagtgccagtgctgatataggctcatggagcatgtcaatccctaatgaatgtgaaggaactacagaacagttatctgatggctcagacaaattgcctttgcataagatagtgaaaacatgtgctttgacaagtaccttgcaatctaagactagaacgaagtggaaaaatggagctgttaggtgggcaggcagtaaccaacaggatgttgaagaggctatccctctgaatacttctcagttgagtcagggcttagaggaatgctttgaaaggaacaagagttgcttaagtacatgtgatgagcatacatacaataagaaacttcatggttggctcggagcccttcgtagacaacttcaaaggtctcagtaccaaattcaatatgggcatcatattcaattgattgttttggcacttgctgcccttgtaatcattgtatgcatagtgaggacaatctggtgactatatttatttgctcatgattggatttctagcctcacaagatcagcagcttgtatggtaaattcactggcagttaagttactcttggtcaacttgatcctgaagcatgcatatgaggcaactatggtagaccattttggtagtcaaggttcaaaatcacgtataatgatctggttggggccacttatcttgccacatgttcagggcaggctgcctcgtccttggaagaacatctacaggacaatccttgcagcacggttgcttcgccacacttggatatgctcccgaatggtgccttgaacaattgatgcacctcgagaactcaatcctccgtggtgagttggtgactgggtggcacctatgcaatggcccagtataaattagtggtgcagtgggctggcgatcatgctgctagcaaccgaaattgcaagacttgtatcatacatcaacgctattgcttttaccgcctgacacggaagggtggtgatcatgcatcaatgctattgcttttactgcctgacacagaagggtgtcatttttttttttaacaactgaaattcagacatcagaacattatcattagtagt

SEQ ID NO: 28465 - DNA, 1933 bp, Zea Mays
ggctgctctaggatggcccatggccatgtggcaagatcatatgtctttctgggccaccaggagttgggaaaactagtattggtcgttcaattgcacgtgcactgaaccgccagttctacaggttttctgttggaggtttggctgatgtggctgaaatcaagggccatcggcgcacgtatgttggtgcgatgccagggaagatggtgcagtgtcttaaatcagttggaacagcaaatcctctagtattgatagatgagattgacaagcttgggaagggtcattctggggatccagctagtgcattgttggaactccttgatcctgagcagaatgttaatttcttagatcactaccttgatgttcctattgacctatccaaggttctattcgtttgcacagcaaatgtaatagagacgataccaaatccgttattggataggatggagatcattgctatagctgggtatataactgatgagaagatgcatattgctcgggactatttagagaagaatacaagacaagcctgtggcattaagcctgaacagattgctctccagcttgttcgccaaggagtatcgaatgagccagaccaggagtctctcggtgtcactgtaaatgaggaatctaatagtggtgatagcatcacagcaaaagatgagattgtgaaggatcctgctgtagaagatgcttcagtcgccaacaatgttacaaatcctgcctctgaggaagctaatgaagtaaatttgacaactgaagcaccaaaagaagacagcacatctaagggcaacaagaaaacagatggagtagcagaagatgcagcagacaaggcaactgagaaggttgtggtagattcatcaaaccttggtgattttgttgggaaacctgtgttccaggctgagcgtatatatgagcagactcctgttggagtggtcatgggtttagcttggactgctatgggtggttctactttgtacatcgaaacaacaaaagtggaggaaagggaagggaaaggtgaccttgtgctgacaggacagcttggagatgtaatgaaagagagtgctcagattgcgcacacagttggcagaactgtattactggagaaagagccagataatcatttttttgcaaactcgaaggtgcacttgcatgttccagcagggtccaccccaaaggatggccctagtgctggatgcaccatgataacgtctatgctgtcgttagctatgggaaagcctgtcaagaaggacctcgcaatgacgggtgaagtaacattaactggaagaatcctcccaattggcggggtgaaagagaagacgattgcggcaaggagaagtgcgataaagacgctcatatttccggcagcgaataaaagggactttgacgagcttgcttctaatgtgaaggaaggactggaagttcattttgttgacacatacagtgaaatatatgatttggctttccagagtgacgccgggactgagatgatttagctttacattacaggattgagattttttccccttctctagatctggttacaggctaaataccaaagaagtttgtcagcagaggcagaccattgtaaccaagatgagtggagttaattgatatttacgagaaagaaaaataatatttctttttttggccccaatataacatcattgaatctaagagatttatttggctaggctgtacgtaactagtgtgctaggtggtggtattggccttttatattgttgggacttgggagtgtgggaaaaacagtactggtgcaccatctgttatttattttaagtgttttccaaaggcagcaaggtcatatacctcatatcataatttagccacaaatggcctgaatattttgtattttggtcatttttttttcgaaaaaatcacatttagacccctaaaccacttaattctgtttttg

SEQ ID NO: 28466 - DNA, 2381 bp, Zea Mays
ggaccaagaaacagttttacacaaagacccctcctcctcggtgctctcgagtctcgagagtcgagactcaggggacctgatttcctcgtccggccatggcgaccggtggcaagtccgctgcccctcagccacctcccgccgcgtcctcctcctccgaacgcgcgctggagtcagtccacttctcttccggaaaccctcgcatcgaggagacccgcggcgtcgtcgtcctccaccccgacccgcccgcggccgcctcctggtctcatgtcccgttggggaggaagccgcgggtgtgcgtgctcgccgtgcccaaccacatgacctacgccgacttctgccgtttctgcggcgccttcgtccctcacacactcgagatgcgcatcgtcagaactgatggagcagaggaccagtacagcgttcttataaattttgacactcagagctccacagacagcttctataagcacttcaacgggaagcagttctcttcgctggaggggggtgtctgccatgtccgttttgtggaagaggtgcactacactgaattgattgagcatgcacatacctcagttacaaacttggctgagcaacctacatgcccagtatgtcttgaacgacttgaccaagatcctggaggtattctcacaacaatctgcaaccattctttccactgctcgtgcatatcaaaatggacagactcctcatgcccggtctgtagatattgtcagcagcaaccagagaaatccatgtgttctatttgcggaacttcggagaatctttggatatgtctaatctgtggccatgttggctgtggaaggtacaagggtggacatgctattgaacactggaaggaaactcaacattgttattcacttgagttagagacacaaaaagtgtgggactatgctggggacaactatgtacatcggcttattcagtcaaaaacagatggaaagctagttgagtacaatttccatggtgatcacacagcagagagcacgtgttcactatgcagtggtgatgccgcaatggatgaagctctactgaacagtaaatttgaagctattgttgaagagtacaatgatctcgtcacatttcaacttgaaaagcaaagaaattactatgagtcacttctactagaagtcaaggaggaaactgagaaagaaatttctgctgctactgagaaagccatgagcacaaaactccaaaagttggaagtaaagtttgacaagtgtatggaagagaaaaaatttcttgatgaagtaaatggcaatcttgtcaagaatcaggagatgtggattgaaactatacgaaaagcacaagcaagggagcaagctgcgctcagattaaaagatgagaagatcgaaaaacttcaggaagagctaagaggtttgatagcccatttcgactgccaaagtgacactgcacaagcttcaaatgcgatctcgagcgatataccagggggcatgattcttccggtagcatcagaatcgtcctcgagcggcggcgttgttggtggcactggaaacggggagcaaaattgagtaaactgcgccctgtataaagcacgtttggatcttagggacctaggtgtggagcacagggacgatagttgatgactgaggtgaaggtcatgcgggctcatgctgatggactgtgaccgatgaaggatgagtgttgggtcttagctgatggaccagatcagtcgggtgactagccgtggtggctgacatctaggacacactcacgcgaggacggggcagagcgagccgcgttgccatcgcggccgaggactggcggaacacatgtccaagacctgggagacacgcatgcggtgcgatactcacgatggtttggtggttgagcctcaaaaccatctagcgttgcggacgatgagtttttgactgggtttcgcctcaaaactcggcattggcagtttcggtggaaattggaggcggcacgtggcgtgatcacggaaggtgcgtcaaggcgaagcaactccatgtgaagggtatggtcgtcagatgaaagctaagagttggtccattttgctcgtggtggagtagatatgttctatgtaaatatgggtagtttagaaaatggaaataaccctatataaatagaggtgagggttgttgttatagctatgtcttggtcgccattttgtttagagcacttgtttagtactcctagttttctctctaggtagtcaccagttgggctgagggatccacaacgattttgtaagtgtcgactgtgttattgctctgcaaagtttaatcagaggaaggatcgctggttcggcccatatgttctggttgacttcaatctcaatttgtccctttgctgtatttttaaagtattgtgttattgagttcttc

SEQ ID NO: 28467 - DNA, 215 bp, Zea Mays
acgagaaggaccttggggtatacaggggtccggtgctgacacgtgcgcaggccttgctctctgccccccgcgcaggcgaaggcccgctgcttgtggcccatgacataagccatcgggccaagcctgacgtaaggccgtgtaacccctgcatttattaaggagaggacgcgccacctgccactgcgctgacaggcgacgggcgacatgccctctca

SEQ ID NO: 28468 - DNA, 234 bp, Zea Mays
tacttagtaacaacaagcaggaaggaagcagaagtaaagatattttcatacttcgtcaagaagagctcgagcttcgtttccagccatttcctggccgcctttcgtccaaatctgggtaacgaatctgttacccaaactttgggcttcactaggaatattatcatggtcagtcggggaaatgttgaaggtaggtttattaacagttttcaagtgactgcatccggctttagcgaa

SEQ ID NO: 28469 - DNA, 2004 bp, Zea Mays
agcattttgtttttttcagaataatgatgattcatgccttgcctatgtattaggagccatttctaatctattatcaaagataggcatctcaaacacagttggaataatcagttctccatattcacttgggaccaatattggactaggcacaccattatccattcagcaacagttacttgttcttttaaagcgatcactcaagagagctgatgcattgaaacttccaagtttactatcctttgatcacctttcgcttgcaaaatttgatctgaagcatgtccaaaggccactagtctctttcggccctaatgcatctacaaagcttagaacatgtcctgcagatgtctgtaagaatctaaggttaggttcccgtgtgttgactgactttggagcagatgttctatctacttcaaatgataatggtagttttagcacttcttggcttaggaatctatccgccacttctgattcatggcgtagcagttcaaagaacaccaaaaaaatacatattaatgacttcgacaatttccattatcatgcacaaccaagtccagtacctgcatcaatattgcaattagctggctcagcatatttgctgagagctaccgcttgggagcactatgggagtgctccaatggtacgaatgaatgttctagtttatgcaacctgctttgcggatgctgcaagttcatcagagttatcactagcatatgttaagctaattcaacaactggcggtgttcaaaggatattcagctgcattctgtgctctaaagcttgctgaaaagaagttcccatcctcaacaagtttacacatccagcttctaggaatgcagattctacatgagcgcgcacttcatcgagggcatctaaaagtcgcgcaacaaatctgtgatgagtttggggtgttatcatcttctgtttctggagtagacattgagctaaagacagaatttagtgtacggcgtgctcgcactctccttgccgcaaaacagtttagccaggccgcagctgtggccaattctcttttctctacgtgctacaagtacaacatccaatcattctgcaaatcattcaacttggatctgcttgaagcctcagctacacttactctcgctgagttgtggctggatcttggatcaagccatgcaaagaaggcactgagtcttgtctaccagagccttcccatgattcttggtcatggtgggcttgagctgcgtgctcgagctcacgttgttttagcaaagtgccatttatccgatctgaaattctcagttctcgaagatcctgaagctgttttggatcctctgaaccaagccactgaagacctgcaagcattggagtaccacgagatggcagcagaggcgtactatctgaaggcaatggcatacaaccatctcggcaagcttgatgagagggaggaagccgcggctcgtttcaaggatcacgtcactgcccttgagaccccgcataacgaagaggactcgcttaagtactgagacccaagaccatttgttattggcaagcatgccccactgccagagactaaagagggcgtggtggccttctggacccgcatggtggcactggcaggctacaatgctacactgaggcgaatggcgtttgctgccatgcggaggcactgccactgactgtgggcggaccggcggacggcggtgactgaaggagacgggcagccggtgaggtcaatgtgctagttgggtcagcgtggtatggtctcatccatggaccatggtgttcattagagcgagacgaagacatcagattgagacttgatgttcttactctgttcttatcgacttctctgctctgttactggggagttccgaattgctaactcagacagacagtgctgacaatgtgtttgtgtttgaatgtaaacagaacaagaacagaaaaatagaagattgatctgtattttcccttgactgatgctggatatttatagatggtgaatacacactaagaacgaacacgtttgttg

SEQ ID NO: 28470 - DNA, 1216 bp, Zea Mays
cttcgggttcacaccactcaccctcgaccccaccaggagcatttgcgcaagttctgtcggatggggatgacccggttgagacacagaatgtgctgcatgactggagtgacaaggattgcgtgatcatcctaaagcgatgcaaggaggcgattgccgccagtggaaaagtgatcgtcatagatattgtacttgggtcatcttcccttgcaatttgcaacgagacccagctctggcttgatcttttcatgtccacggtaacgacgggcaaggagcggagggaggaagaatggtatcggctattcaaggaagctggattcagtgcgtacaagatcagcccagttctagggcttctctcgatcattgaggtttttctgtagccaccctgttcatctgggagactgggactggggctgctcatcacattttacggcattgtacgtctgttttgtaccaaaccttcttctaattagattccctcgcgtgtagcgctcctacggactacagtgtagtatgcttcgtccatgaaaccaatgtgtattgaaaacatcctacaaactacctttctaatagcaagtttaataatatagccaccagcaggcggtaagaaatccttgcaacctactttttagcttatatgcataatggttagttcttcattattaatgtatgacccacttatctctcttacaatattttcttggttcttctcatcttctctctcatccacatcagcatttagactgcttagagcaagtataataaaaggttatagtaagctaaatgctaaaatgaatgagagagcgagcaaaaatagaatgtaaatttaaaactggcttcgacacaagaaccaataaatattgtgacagaggtaagtgggtcattcattaatagtgaagagctaaccattatatacatgagttaaaaactaggttgtaaagaccgtcagctgttgactatattattaaacttgttcttataggctcttattatatttgctctaactgtgttgttatggtcatcatgtcaagggcgaacatgtgagggacaactatgtagcatgtgtgttataaactggacaaacatgtgttatatttattttcttttgtactcaaactttgcaaaagtttcttaaggtgttaagaggaattcaacccatagaatcaaccacgatcgtgaaatccatcacacatggagtaatagcccaaataagtagaag

SEQ ID NO: 28471 - DNA, 1670 bp, Zea Mays
cctaatcaacattgaagtttctcgagggtgctggtcctgcccttcgtcctcatctgccagaacttgttagttgtatgcttgaatgtttgtcaagtctggaagatcaaaggttgaattatgttgagggaatgctggcatcaaaacagataagcttgaaactttgcgcatagctgttgctaaagattctccaatgtgggaaactcttgatatctgtataaaagttgttgacaagaattcacttgatctattggttcctcgcctggctcaaatgattagatcagctgttggcttaaatacaagggttggtgttgctagtttcataactctattggtgcagaaggtcatggttgacatcaaaccattcgcagcagtcttaatgaagttattgcatagtgcagttctggaggaaaggagttctgccgctaaaaaggccttcgcgtcctcttgtgctactgttttgaaatacgctagtcctccccaggctcagaagcttatcgaagatactacgtctctgcattcaggtgggaaaaacgatcagttgtctggtgcaattcttattaaagcctacttgagcaatgcatcggatattcttggtggatataatgcggtggttatccctgtaatttttgtgtcgagatttgatgatgataaagacaccagtgctttatatgaagaactttgggaggatattcctagtagtgaaagagtaaccctaacactatatttaccagaaattgtatctcttttatgtgatggcatgtcattgtcatcatgggctggtaaaagaaagtcagccaaggctataaagaagctatgtgatgttctaggagaacccctttcagcacactaccagaatattctcaaatcacttctgaaagaattgccaggtcgattttgggagggaaaagatgctattctggatgcattggcttcattgtgtgcttgctgtcatgttgctataactgcagaagactcctgcttgccaagtgttatactaaattgtgtttgtgctgcatgcagtaggaaatcaaaattgtaccgtgaagcagctttcttgtgtttacacaaagtgattacggcattcagagatccaggatttttcaatagtgtgtttccaatgctgttcgaggtttctaaccaatctgccatctcgaagacaaagggctctgctgaactagatgaaagtgaaggtgcttctgtttctctggataaagtgctcaattgtgcaacatcttgcatcagtgttgcttttccacaggatattatcaaccaaaagaagaatgttgtagaattaatattgaattctctcttgcctgaggagagttggcaaggagttgtgcctcaaatttgacaattctggtgatagtaacacatggcctcaagacacagcttacttggttgaggagctatttcatttggtatcaccgaaattagtagactccataagattagtaaagattgctcaggttcacgttgctgcatcggagtgccttcttgatttgagcaaactgtacagagacttcccgctgtcgaacagaacagaggccaagttcgaggatgaactcacagagctctgcgagtctgaaaaaagcgaacaagcaaaggcgattctgaaggaatgcctggccattcttaaagctctccctggagtaaccatgacgacggattag

SEQ ID NO: 28472 - DNA, 1268 bp, Zea Mays
tctatattctttgattgaacatgactttgtcaaaggaagcaagatagctattgcactttcaagcaaaggaatgatggtttcatttgcaaaaaatgttgctgatttcataaatagcatcgggaagaaccatattgtcattatatcaagtttagattctggaaagaggagagtgattgatgcatccaggtaactgaaacgtctaactgctgcagttctcttataggattgattctctgtcaatgtcgatatcattaactaacaatgtttaataatgtagtgacatgcaggtgtattacctttcaagttgcaatgaagatggttctgatccagaatatgagaaattggggtggaaaaagcttgaggattatgatccatctcagaaacggtggaattgtcttgctagcctagttgagggtggtggtctttcagaagatctggatgatgatactgatgagatgacaataaatgattactatgcaagcctgccatttgcagcactattctctgcctgcaaggctaaaggcttgaaagtttcttgtgtactgtgctactgctcggaaggcgacaacatgccagaatctttccagttagctgaagcaatatgcaaacttctaggtcatggccctgagaaattccatggaaatgggtcaaatggatggatcgttcccttgtcatggaaatcagtatatggaccaccacctgatatgtctatcttttagtgttgaattatgatcagttttataggtgaagttgccatcacggaaaatgctgagtagaatcgaggatgttgaactcttaatttagacagtgtaccagaagtatccaggagggcaccatgatacttaacccttaaatgcatgaatcagaatatttttgtaactggtactgtggctactaagagtcagatctttgtcaactcaggtctgctaggtgcttacgcatgttgcttaccatcataccatgtgccgtttccattctaaccatggaattccaagcttctcgtctgccgttttggcagttttgcccatttggtttggttgattttgatgtggtggaagaatctttgctagtgcgtacccctttatgaaaagttgctactgaatggtggaactgttcggtgaggcaattccgtcggcgatgcctggttgtctgtgttaagtaaccctagttagggttatgtgggcaaataccgactttgcccctgaggggtctcatatctctatataaggaacctgtacaccccttcataagatagagaacagaaagag

SEQ ID NO: 28473 - DNA, 4805 bp, Zea Mays
cggccccgtccctcctccgcacggacctgacgcggggcacggtcgaggacggcggcgcagggcggggtggaggtctccaggacgcaaggcactagcgggctcctccctcccgcgcgggcaccaacggcgagcggaggactggcgctggcaatggctaatggcgcgaagcaacagctggtacgttctgcacttctgctccacctccctaaaatcttggccgagctccgccactgaccatccccacttgtttccccagatacgctgccgcctcctatcgctccccttcctccgccgcggcatccactcctccgtgccaacttcggtcggcgccgctacagatgctacactcctgggtcgcctcacccgcctcctcctcctccaccgtttctctgccgtcgctcgcctcctctcctcctcggcccccctcacccctgcactcctccacgcggcgctgcgccgggtccgcctcgacgccgacgccgcggtgcacctcttccgcctcgcccctttccccccttccctcctcgcgcacgcccagctgctccacatcctcgtccgcgcccggcgctccgccgacgcccgcgcgatcctggcatccctcctctccgcacggcccccggctccgcctctctttccgcacctcgtcgaggtatataaggagttctccttctccgcagcctcattcgacctgctcctccgtgcacttgccaacgccggccaactcgacggcgccctccaggtgttcgacgaaatgcgaacgctcgggtgccgccttagcatgcggtcctgcaacagtatactcaacaggttagcacagactggggacctgggcgccacagtggcagtgtttgagcagatgcagcgtgcaggggctctgccagacaagttcacggtggcgattatggcaaaggcttactgcaaggttaagggggtggtgcatgcattggagttcgtggaggagatgacaaagatgggtgtggaggtgaacctagtggcgtaccatgcggtgatgaatggctattgtgaggtggggcagaccaacgatgcaagaaggatgttggactcgctgcctgggagaggtttttcaccgaatatagttacatatacattgcttgtgaagggatattgtaatgagaagaacatggaggaggctgagggggttgttcaggagattaggaagaataagcagcttgtggttgatgaggctgtttttggtgcagtgatcaatggctattgccaaatgggaagaatggaggatgcagctcgattattgaatgagatggtggattctaggctccaggttaatttgtttgtgtataacataatgattaatggatattgcaagttggggagaatggtggaagcacataacattttgcatgaaatgacaggtgttggtgtgaggcctgacacatacagttacaatagcctagttgatgggtattgcaaaaagggtttgatgaacaaggctttcgaaacatataatacaatgttaaggaatggattcgcggcgacgacattaacatataatgccctcctaaaaggtttttgctcgcttggctcaatcgatgatgcgctcagactttggttcctgatgttgaagaaaggtattgcacctaatgaaatcagttgtagcaccttgcttgatggtttcttcaagtcaggtaaaactgagaaggccttaaatctttggaaagaaaccttagcaaggggtttagcaaaaaatacaaccacatttaacacagttatcaatgggttgtgtaagattgagaggatgcctgaagcagaagagcttgttgacaaaatgaagcaatggagatgtcctcctgatattataacttacagaacattatttagtggttattgtaagataggtgacatggatagagctagccgcattctgaatgaactggaaaatttaggttttgctcctacaattgaatttttcaattctttgataactggacacttcatagctaagcaacatggaaaggtgaatgatatactctttgaaatgagtaataggggactttctcctaacacggtcgcatatggagctctgattgctggatggtgtaaagagggagatttgcatacagcctataacttatatcttgaaatgattgagaaaggtctggtaccaaatctttttatttgcagttctttagtgagttgtttctacaggaagggaaagtttgatgaggcaaatttagtgttgcaaaatcttgtgggtactgacatgattccagatatcagtgcgcccagacttgagatagggaaagtagcaaatttcattgataccgttgctggtggaaatcatcattctgcaaaaatcatgtggaacattgttatttttggtctatgcaaattgggaaggattgaagatgctaaaaacttgttggcagatctaaaagacaaggggtttgttgctgataatttcacttattctagcctcatccatggttgttctgcttcaggatttgttgatgtagcttttgatttgagggatacaatgttgagtgttggtctcactccaaatatagtaacctacaattctcttatatatggtctctgcaagtctggggagttatccagggctgtcagtctttttaagaagttgtggacaaagggtatatcccctaatgctatcacatataatacattaattgataagcattgcaaggatggttacataaccgaggcctttaaactaaagcaaaggatgatagaggaaggtattcatcctactgtgttcacctattctatactgattaatggtctctgtactcaaggctatatggaagaagcaatcaagcttcttgatcaaatgattgagaataatgtggatccaaattatgtcacatattggacactgattcaaggttatgttagatgtggtaacatgatagagatttcaaagatttatgataagatgcatatccatggacttctgcccaccaatgtttctggggatgtaaaacaatcatgtcctgctatacacaacccgaatagagaaacatgtcagatgaagatgcacagccagtgctagctgctatcacattctttgcatgtctacttcttttgaaagatggcagtgacttatgtttgtatgaggagcaaatcatgggacccatttctatcttgggatgatatcactatgtgctcaacatgcaagtctcaatcactttccagcaatataattgtctaattgtcttctgcgaaggggcctggtcatatcatgagaaatgtttccaacctccctcacatgtcagccaagtggtatcttctaactacaggctggattggctttctaagtgcagagacttgttgctggtgactttgccccttttatctggacttaggaatggcaatactcagcttctgctgggaatttgctgggtatatcggctacaaactgtcaagccatcttaagtcttatcaagtgatagcatgcatatcggtcttctcgctgcagctgttcatgccgtttaaacaattagtcggcttacaattttctacagcccaaggcaagcccttcagattttgtcataccgcttgcaaagtctgttaagactgtatactataccagtgtatctgtggggatgtgtttcaagatgctttttgagacaggagagtctagcgtgaggagataagttcaaatctgtttgcaacatcacctcgttattgaagtgggagaaacgaaagacgactagtctttttcgtggtctcgatccacattctattccagcagaagaactgtcggcatctttgaggtacacgctacattccatcaatattgcagtccgtatcctatccacgattgttcttcatggatcaggctttaagtatggttcatgctcaaatatatggcagcagagttcctactgaagtatatgacagtcccagagcaaggtttaccctctttttatacctaggaaaaatgtttgcacaggtggtgaagaaaccccattgacagaaagtggttcgagttactttggagctgactctggattctgtcaagaaacagtcttttggttccaagagaagcaatagttttagtttctctggtgcatcttctcactccatggagaggcatcgatatttgcagagaggaatgttgtcgtcatcaaaggcccttcgaactgcttttgaatcgaacattgcttcaaggtcagaaaagcaagcgcagccgctaaacagattgatttgaagtgaagttcagccgtatcatcagacatcatgcacacaaccatcatggtaaattcctgttcagcacgcacagtaggtctccgtgtgctctgtacggcctagtgctgctgcgctagctggttgggtgcgtccgtgcgtggacgcgctgtagcaaccagggcacccctgtccatggtcgcgatcgcggcctccgctggcctggcccttggcgtgtgcggggcgtagagacggaggagaatgttgtactatgtgcgggcgcggcgagcgaagccggctggaccagaccagaccacaccagggccagagccagggccacgtggcattggctcggcgtagagaacgtcctcccaatatctatgaatttactacaatatacgtctcattatttttagattcatatatgtatccatcacgggggcctccggcctcgttatagcaagtatgggctgactgtaatataatatccaactccgattcaaaactgtaatgtttattacaaaatttgacttagaagtagtgtctaaaaagtggcatggcaattggcatttggcaagtacaatatgcttgcatttttacgaaggcaaggcagagaattc

SEQ ID NO: 28474 - DNA, 849 bp, Zea Mays
tctgctttctctattcgatggaaaacgcatagggtggtggcgcttgcacgccctggcgactgcttgcggcggcggtgtcctgcgcgcccgcgccaaccatcctccggggcaacggcgacgtctgctcgcctacgtgcctagacggtgaggcagcgacatcaggacgcccgtgcgcacgcgtgcctgcacggcggctgtgcgccctcacgccggcttgccgaacggcgtggcggtggtgccatcctgcggggcggcgtggtggtcgcatgcctattcgccgggcggcgtggcggtcgtgcccatgagtcggatccacgtggctgcgcgcacgcgctacggagctgcaaggcgatggcgcccgcacgcaactctggcttggtagtggctgccagcccacaacaccagagaggcggtggtctattcctgcttcgtcgtgcctagctcaagaccggctgcttgcctgctttctcttcatgcttgctttctctattatgcagagggacaactcctttacgcatgcacagtgtactacacaccacgtgtgggagagaggagcatggaggtgagtgctcatgttcatccgctcttcttttctctctttctttcggatgttaaatgtcttgtttacatttgattgatcgttgatcggtatataccgacaacaatcatggtaacaagattttcagatgcaataactaacaatagtagttagattcttaccttttcgtgttacttccgtgaactcctgcgtcgcgagagcattcgtgctgataacttgttaagaaccctttgctaccgaatgtagtccgaatgcttcttaactcataaacacatgagacacaaagatat

SEQ ID NO: 28475 - DNA, 1810 bp, Zea Mays
cctagcccggactaggcggcctcccagtctccaccgggccggggctgcccacccccaagtccccaactgcatccgcgccgccgccatccgtcgcagtcgcagtcgcactgctggctgcccgccgtaccgtaccaacaagcttcttctacttctcttcctcgcccagtctcccctccttccctaccatccccgcatttcgaaaggagctagctaagctagcgcaccggcctgcttcccttccctcccgccgtccgcgcttcttccatttcccttcgcaacggcctctcggtcacacccgagcccgtagctgcgccgtactccgtccgtccgtccgtgccacaccgccacccaccaggccagagccaaccgggagtggccacgcagagtggttttggcggcttgctggctagctctgcctctgcccgccacctcggaccagccagtgtccatgccgcggatggccaagctgctgctccagctgaaggcggcggcggacaggaggcacggccccggccccggccggcgccacccgctcgcgccccgccacgcggccgcgtccgccaccagattcgtgcccgcctgcctcgccctcgccgccgccgccaccacgctcgtcgcgctggcgctcacgctgcagaatcgcggcctcggccccgccgacccctctccctcctccgtctcgccacgcggcggcggcttcgcggtggttgtcaacacgtggaggcggcccgcgctgctgcggaggtccgtggcgcactacgcggcctgcgggggcgtggacgccgtccacgtggtgtggagcgagccgcggccgccgccggaacccctgcgccggggcgtcctcgggctcggcggcgcccggcggcgcgtgcggttcgagatcaacgcgggcgacagcctcaacaacaggttcaggcccatccgggcgctcgagtcggacgccgtcttctccgtcgacgacgacctcatcgtcccctgctccgcgctgcgcttcgccttctccgtctggcggaccgcgccctccgccatggtcggcttcgtgccgcggatgcactggcctaccgacccgagaagcactgaagatgcataccgatacggaagctggtggtcagtttggtggacagggacatacagcatggttctttccaaagcggggttcttccacaagaagtacctggaaatgtacaccaaccagatgccaccgtccattcgcagatatgtggatgagaacaggaactgtgaggacatcgccatggcttttcttgttgcaaatgctactggagccccgcctatatgggtgcaaggaaggatatttgagattggatcgagcggcatcagcagcctgaaaggccatggcttgcagagatcaaggtgcctcaacgcgttcgccgccatgtacggccacatgccgctcgtagccaccacagtcaaggccgtggacagccgcgggagctggttctggtgataaagatatgtgcctcttttttctgtacatcctagccttgcctctagtctacattgtttatatagcagagtttgaaaccagagataagaatgagtaggctagtgtgtctgtgcataattcatccgcaccttagaacacaggctatatagattttacagatggaactgagacgcagtgattatatccatattgctgttggagccttagtccaacatcaggatcagctaaggccctgtttggttcctttagttagtaggtaactatgtgcaaggagattgtttatgtatgtgagacagtaattattaattcaatgaatgaaatttatggtggtggtctaaaaaagaa

SEQ ID NO: 28476 - DNA, 347 bp, Zea Mays
tcaggacctttcaaggtcaatggagtcccaatccgccgtgtgaattagacttacgtcattgcaacctccatgaaggttgatatctctggtgttaatgtagagaagtttgatgacaagtactttgtaagggagaagaaggcaacgaagactgagggtgaactttttatacataggaggcaaccaaggacctgccacaactcaagaaggacgaccagaaggcggtggacgctgagctgatcaaagctattgaggaaggagataatgcgtataatgtgtgggatgatatattgcttgagccctcatgctgtttatataagagtacatggcttggaggacccaacaggtac

SEQ ID NO: 28477 - DNA, 2746 bp, Zea Mays
gtccgctgttcggtgcccgctgcccacctccctctcctccttccgacctcgccgcctccctccctaaactctaaaccctccaccagccgaagctactgccgcggccgcagcagaggtcgcgacgacgaacgctgaagaagcgccggcgagggagagtcctttactttttcctatgctgtagcaaaacaagcctataccatcttccaaatatactcgttccgtgccggcggcctcccctcctacgcccctgtcgattcttcaatcttcaccaacgtctgcgcgtagcaggctagcagtcggcacggcttcctcagatctgccggacgacttgttgttcgtcaccgactcaccagcaaccaatgtcggccatcagccggcagcaggggaagctgggcggagggtcattgcggcacggcgtccaggcgtacagcaggcaccagcaacagcccatggcaaacgccgcagatgaccctatggtagatgaagccggagtagaagatgccttcacacatgagatcaccgattatttgtacgtccctagataccatgtgttgagttggatggaaactgtggaggggatggtggccggtgtggcggcgcttccgccggtgtatttgatactgaacagagatcttcttgagacgggatggggatggaagaggctggtgccctacagacctggttatgttgagtggcatgtgttcaagaaataccttggggactatttcgaccataatcgtgaagcttttctttgtgccgagcagaagcctgatccatttggatggattattgctgaaaagagtgccctgattgctgcagccaaattgtgcctcaagatggagaaggcacttctcaggtactgtgctagctttctcactcctgacgacaaaaggctgatcctcgggatcaaggaccaggcaaagcaaatgatccaatcagaggtagtgcagagaaacctgtgaagcagcgtgcttcaagcaatggttcaaatgggtgtccttgttcctactggagatatgactgttgtcagaagaaccgctcaatttttccttaatagctttcaagagtgcctaacagcacaaaggaaggagagagaaatggcaaccgcagaactgggtttcaaaaagcaattaactaaggaggagaagtttgaaaagaggaagcagagacttgctacaatcggagaggatcttttggcgattgctgctgatcaaccatttcgcttccctgccacatttacatttgtggtcagagcattctcaggtgtgtggagagacatgtgtattcctcctatgacgaattcctcaggctccatgaaggtaagcctgtcttaatgggcttgattgttgaacctgacttagtacttttatccatgtcacgacattgaaccagacagtcactcatgtccttaggatattaacggtatacatcaacaattcattctattttaattgcttgcaaaacttttttggcccttcaaatgagttccacgcatcaagaagtcaagattccaggaggcctaaaataggagaggagggcgcagcttgattcaatccatgtcaagtcaaaggctgctgcgaagtttgcacatgcaagtagaatttagatggtgaggttttgtctctgttcccatttttataacgactaggtgtttgaattcctaagattaaagtttatgtagattcttatttgtaattagatctctgttaggcatctaactgaataaatgatctcctaaagaattgacagattccatcactgagcagcccttcgccccggtggctgcggtgtcgcactggctgacacctgctcgcagttgcattacaagttttactgactatgtattttcaggtttattcaatttcggttctaatgcttctgacagcagttgtatcagtcctcttgttcagcttacatgtatccctcgcatccttccttggatccacataagtgttaataataattttgttgcatctcctctgctgatcagagctttcaaactcatgacagaataatgtactaaacttcagtttggtgtctatctcagtgtacctacactcagttggaaaacttcaaccacactgcaacaaggtttataaaaggtttgctatcaggaaaaacaaatttatgggctcaaacaaagtgtgatagtgaaagtcattttgcttccagcttaagaaccaagccaagaaaacagatatcaactgtgacgccacactcaaaagcttgtttggtgggagggacaaggttgggatgctggagatctccaagcttttgagtcgtggcttcccgaaaatctccaagcttttgtggtccatggagccagggatggctctttggtaaaagacttcgttgtggatggcctcttttatggtccatgttaagtcccaagtcccactaggtggttaagcagaaaaatcttgtgatggcattaagactttcagactttgtttttgggtctgatgcatgtaaaaaggattcccagtgtttctgttgctcttgcgatcctgtgaggacacatatgagagaaatatttagtttgttgatggcaaatcttgtcttatgttcatgtctgtgcctatctgatcaagcgttatgatatgatcccatgcgtggtactgtgttctttagagatgtacttaattatgtttctcttgcatttcatattgctttgtctaattgttaccgcaaattaagattttattataattccaatttgatatgcctcatcataaccatggttact

SEQ ID NO: 28478 - DNA, 3135 bp, Zea Mays
gaaagaagagagagagagagaaaattcaagcaggcaacccaaaaagaagaggaaaggattggaaaagctagggttttcgccatggccgtcgcccacctcgaactcccctccctcgaatccacccatcccacgctctcctagctcccgcatctcgcatctccacaaaaagccgccgccttcgattcccctccccgctgcctcgcccccattcgagggtttcccctccccccccccctaaatcgaaacgcagcattaccgaccgagcaagcaacccccgccacccgtcttcaagggtccgagccgagcgacggcgctggcgatccagcagggcgtgagggcggcggagggcggataatcaatgtgtacgctgtgcgccgtgcagcgctggtcgcggcgcgtcgccaccatgctcccgtggctcgtcgtcccgctcatcgtcatctgggccgccacccagctgctcctcccggccgcctaccgcttcgaggtcacctccccgcgcctcgcctgcgtctccgtcctcctcctcaccctcttctggtacgagatcctcctcccgcgcctctccctctggcgcgcccgccgctctgcgcgcctccgcgaggagcgccgcgcccacgccctcgagctgcacaagctccgcaagaccgcaacgcggcgctgccgcaactgcagcaacccgtacagggaccagaaccctggcggtggtaagttcatgtgctcttactgcggtcatgtctccaagcgccccgtgcttgacctcaattcagccgggaaggcccccaccggatggccttgtgctcaggattgtggatattggctcgacttgcgctgctcctccggcaataacagctccttcttgggattctcctggcgcttgctttcgtccttttgctcgacagcaatgaggtggttattgaggaatatattcagacttacgtcctcaggagatggtgagggcttgagcatagatggtaaaaggttggcaaagagaggggagaatggaggaaaaaccgaggagagcaagaccgagaaggcgagaaggaaggcggaggagaagagactggcaaggctggagagagaaatgctggaggaagaggaaaggaagcagcgagaggagatggctaagctagtggaggaacgcaggaagctgagggatgaaaaagcagaggccgaggagcggtcaaaaagtgctacacctgtcggggagaaggatgctaagagggaggcagagaagcggcgccaggagaggaagaagaaagaggacaaggggtcaagcaagagcaattcagattgtgaggacattgataggagattggtccgagaaggcgataggaagagagactttgacagaaagagtgacttggataggcgtgagggttacaagcctcattactttgattctaacaatcacagtaataaaacaggtgagagcagatcgaaatactttggccgtatgacaggtggttttttatcttcttcaagagggtttggcagcagttcattctttggcagaagtgctcaggcccctgcccctcaagttagcaaggttagtagacctgtagttcctgcaactgaccagggtaatacagtcaaaagagatgtccctcatgcagccacacaagctacaggcaaatctgctacagctggagaaactagaaatgcatggactaattttaatcgacctgtgagtaacaaggttagtccaaatgtgcatccataccctactggccttaaaaagtcatggcatcagttatttagtcgttcagcatcagtgtctccttgtcctgacgttacaacttcagctcatgatatggttcggaaggcagaaccaaatggagctcaaatatacaatgctcatacatttctctctcagtatccgcctctggactacaagccaagttcaagccagtctatgcaatttccaggttttccaccgcttaatggagcacctcccagtaacccactacctcattttcctgctggacatatgcctttctatgatgatgcagaatcaacactacttgaagaaccagagcaatttgaggacccatgctatgatccagatgcaattgcattacttgggccagtttcagaatctctagataacttcccgttggacttagattgtgggtttttctcgagtgatgttgctaaagagtcacatgggaggccttcaccaattgagtctcctctctcaagatctcgtacggttgaagaaaagcctatcgagcccccacactcctcagttgcaagaggccctggtggttccattctacccgagtctagcagtgaacaaggcacatggcaaatgtggagcacaccattggttcaggaaagtttaggtctgcaaggtcctcagagccagtggcttcgacaaaacacaaatcaattcaaccatagtgccaaccttttcagcagcggaggcggagcaataagtccccttggtactggtttgaatgacagtgatccatggctgcagaaagcacctttccagcaattgccacctgatacaccaagcctgttcctttcacatgaaatgccaggaaaattacacaatgacttggtttttgggtctccaaacaaatcagcccgtgaacgcccatttggaccgcctggttatttgtggcccaaggaggaactggcgctgaatggagctcaggacggtggcggtgggcatatcctgtcgccgtctggtggcgcacgagttggcggcggcgttggcttattttcttcagcaagtccagatgtacagtcactgtggtcattccatgaaacattcaatgaaaaagagagcatagaatgaacaaacttttataatagaaggaagggaaaaagtgtggagccaaggcttccttgcctcctctctcttgtagggttttaccgtctttaccgaggtgataagctggactgtgttccttaatgatgcaaaaaaagaagaagatatggggtcattttgtttcctagcactcaccctcacctgttaacatgcgtcgatgcactgcattaggccttgtttcacctgatgtcattttttaccccggttccgcattgtttttgtcgcgcacaggtgatccatccgtccacggctgtagttatcaactgtgtttctgggacgattttggttttatatat

SEQ ID NO: 28479 - DNA, 4300 bp, Zea Mays
acgttctacaaacagccctgggagtagacgcggctacggatcctaaacgatacggaggatattttggttgcgcataacaagttggatagttctgggttttcgctctgaacaaaatggacaatgctcagagtgagaaccgaattgataccaagcaagatgatgatgtgcgccagatcaaacatgatgatgaggaggctcgccttgaagaatataaaaagatcattgatcaaaagacttccctccgccggagcaacctaaaccctgaaaggcctgatgcaaactacctgagaaccctggactccagtatcaagcgaaatacaacagttataaagaagttgaagacaataaatgatgagcagaaggatgggctaatggatgagttaaaaagtgtgaatttgagcaaatttgtcagcgaagcagtttcttatatttgtgaggccaaacttcgctctgctgatatacaagctgctgttcaggtttgctcactccttcatcaaagatacaaggacttctctccttgtcttatacaaggtctactgaaggtcttctttccgggaaaatctgtagatgacttggatgcagataaaaattcgagagccatgaagaagagaagcacactgaaacttttgattgaactgtattttgttggaattgtcgaagatgctagcatatttgtaaatattataaaagatcttacatcagcggaacatttgaaggaccgtgaaggaactcaaaccaacttgtctcttctatctacctttgctcgtcaagggaagttttttttagggctacaacctcatggtcaagaagcttatgatgagttctttaaggagctaaatgttaccgctgagcagaagaagttctttaagaaagccttgaactcttattatgatactgtagctgaactactgcaatcagaacatgtgtctcttcgtctaatggaggcagagaatgcaaaagttttaagtgccaaaggtgaactaagtgatgagaacacagcctcatatgagaaactcaggaagtcttttgatcagttactacgtggtgtatcctcgttggctgaatctcttgatatgcagcctccagtgatgccagatgatggaaatacaacaagagttactacaagaactgatgccttgccttcttctggaaaagattcatctgcattggaacctatctgggatgatgaagataccaaagctttttatgaatctttacctgatctcagagcatttgtgccggctgtattactgggagaggttgagccaaagtcgaatgagcaacatgctaagggccgtgagcaatctagtgagtccacttcagaacaagagactgaactacatgacgattttcaaacttctgcaactgaacatcaactagaagttaaattagatggtggagtgaaagagagtgatgacaaagataaagagaagggaaaggatggagaaaaggaaaaatctaaggagaaggatctggataagaaaaatgacagagagaaggagaaaggaagagccatggacggtgcaagtctggataacatcttgcagaggctaccgggatgtgtcagtcgtgatctcattgatcagttgacggttgagttttgctacctaaattctaaagcaaatcgaaagaaacttgcgcgtgccttattcaatgttaataggacttcactggaactgttgccttactattctcgtttggttgcgacactatcaacttgtatgaaagatgttccaagtatgcttctgtctatgcttgaagaggagttcaactttttaataaataagaaggatcagatcaacattgaaacaaaaataaaaaatatacggtttattggggagttgtgcaagttcaagatggctcctccagctcttgtttttagctgtttgaagtcctgccttgatgatttcagtcatcataatattgatgtggcttgcaaccttctcgagacttgtggccgatttttgtaccgctcacctgaaactacgattcgcatggctaacatgctggagatactgatgagattgaaaaatgttaagaatttggatccacgtcacagtacacttgtagaaaacgcttactacctttgtaaaccacccgaaagatctgcacggatatcaaaagttcggccacctttgcatcaatacataagaaagttgcttttctcagatcttgacaaatcaagtgttgaacatgttttgcgccaactacgcaaagttaccttgggcagaatgtcaacaataccttctgaagtgctttctaaaggttcacaaaggaaagtacagccaagttcatctgattgctcttctcactgctagtctcagccgctatcatgatgactttgctgtcgcagtggtagatgaggttttagaagagataagggttggattggagttgaatgactatgggatgcaacaaaggcggcttgcccacatgcggttccttggagagctatacagctacaagcatatagattcatcagttgtttttgatacactgtaccttatcattgtgtttggtcatggaacacctgaacaagatgtgttggatccaccagaagattgcttcagaatcaggttgatcattacacttttacagacctgtggtcactatttcagtaagggatcttcaaaaaggaagctggacaaattcttgctacactttcaaagatacattattagtaaagggcccttaccactcgacatagaatttgacattcaggatttatttggagagctacgaccaaacatgtctaggtatttatcaatcgaggaacttgttgctgcgttagttgagcttgaagaaaatgagcgctcagccccagtagaaaaggttgaaaatgaaagacactcggacaatgaatctcataaaagacaggcacgagatgctggtccatctgtgaatggtggaagcgctgcaaatggaattgaggaaaatggcaaggatcatgaaatagcagatagtgagagctattcagatagtggcagcattgatggacgggaagatgaggatatattatctgaggataaatcaaatgatggctcagataatgaaggcgacgatgaagatgatggcattcctgttggttctgatgaagatgaaaatgttgaggttagacagaaagttatgaaggttgatcctaaggagcaagaagactttgatcgagagctcaaagcccttcttcaggagagcttggagtcccgcaaatcagaggcccgttcaaggctccctctgaatatgatggtaccgatgaatgtccttgaaggttcatcaaaagactcgagggccacagaatctgagagtggagaagaaacagtagatgaagagggtggcaatgctgggggtagcagcaaggtgcgcgttaaggtgctaatgaagaaagggcacaaacaacagacgaggcaaatgttaattcccgctgatagttcaatcgttcgaagcacgaagcagcaagaagctgccgagcttgaggagaagcagagcattaagcggaggatccttgaatacaatgaaagggaggaggaagaactgaatggagcatcacaaatggggaactggggtcaaggagctaccaacaccagcagtatcagatcaggtggccggggcagctgggatggttcagcacggggaggtggtcgacaacgacaccacatcgccggttctggtggtttctatcacagttatggcaggagaagatgagtttgtcctgatgggaggtggttggcagaggcgccacactgtgggttcttgtggtttctatcagttgttgcaggagaacagttagctgtgtgagctattttgtcctgagcttttttttggcagggccatgcttctctctatttaaccgcctaacgatcagattaacagggaagaaatttcggggaggttaacacagcttgatggacaattgcttccaccaccctaatctgaaagataagataattctaccactgatgggagatagcaatgccttgaaggagctatttttctggtggcccgaatggcttgagttgcttggtagttatgggcttatggctgtacctggagagcatagataccccggttgctcatgtacatataataataacataatttggcaacgagtgtgagtcgtttggagattgtgtgcgcacttgtatctgagtatggatctgatggtggtacttgcatagtttagatgtgcatactgtttcgacgccatgtgtgtgtatggggcacctgataaaaaaattactgtttgattcccatttagttatgcgtgcaggagttattatgattaggggtggtaatagatgacgat

SEQ ID NO: 28480 - DNA, 1081 bp, Zea Mays
agtttagacaaagcgcaagaccaaccagtaaccactccgtggcctcccgggaaaggggcttaactcgagtcgctaatccttttccttgtatctccccgtctccatcctcgctcgccgccatggaaggttcgaaggggagtggaggtggtggggccggtgccgggtccgaaaagccaagcgccgagtcgaaccctagtctgaatctgccgccacctaccgcagcggatgtcgaagccacggatgacggtggcgccacggccgcggccgcggcagctgccgaggcggccaggcggccgttcactgccctcagccaggaggaggctgacctcgccctagcccgcgtcctgcaggagcaggagcgggcgtacatgttgctccggatgaacgggagcggtggcgagggcagcgactacgggagctctgatgcagggagctacgagtacgacgaagagggagatgactacgaagaggaactggagcaccacctccgcgtccaccaccacgaacacccctcgggcgatggtgatggagagggagagggcgagggcgccgaggggagcgattacgacgaagagtacgaggaggacgaagaaggggagccggaagtagatcccgcggagtttgagaacgatgaggcttatgcgcgtgcgctgcaggatgctgaggagcttgaggtcgccgcgcggcttatggctctcgctggtctcagcgattggcgaactgtggatgtggagcatgaggaggatcatgtgaatgacccacaggaggcatggcaagaggttgatccagacgagtactcctatgaggagctagttgcattgggtgaagtagttggcacagaaaacagaggtctctctgctgatgcacttgcttctttaccttcagtaacatacaagatgcaaagtgttcaggatggcaacacagagcaatgtgtaatttgccgtgtggaattggaggagggtgaatctttgattgcacttccctgcaagcacttataccatcctgaatgcataaaccagtggctgcaaataaataaggtgctgggcgtggggagggtggagccgtggagcgcaagtgccca

SEQ ID NO: 28481 - DNA, 2538 bp, Zea Mays
ccgtcgtccacacggcccaccccacgttactctccccaaatctgatcctcccgcacgaggtctcacctcttccgacgccacgcgagacgcaccacacgcgagcccaagccggaccccgtctagggttagcgatccacggcggcggccatggacgaggtagcgacagcggccctggcggcggcgaggggacggtggacgcagtgggaggaggtggtggtgtccaacgaccgcggcagtcgtcttgtgcactactacctccgcggcaacggcgaagcgaaggagctagctgtggtggggcgggagcggagcccacgtcacatgtcgtacgctgtgcaggggcggttcctccgcgcgctcgcagctgccgcgggagcggtcgccgtcgcgtcgtcgccgtcacggtcgcccctggcggctgctgtggcggacggcggcgctccgaggaggtggcggtccaggcgggaggtcgtggagtggctgtcctccctcgtttccggttatagttatggttcctcaatggctaacaggtgcaatggggattcatatgatgacagtgttattaactgcagtcaagttaccgtttcgaaggatgtttcttctagggaagcttcgaatgacttcacatggttgggagcttcatggaaatgccaacgaagtttgaagcactacaaatctttctgccgtagaggaattactatctcggtgcatagttttgtatacattatgggtgaagagatgaagagacttattgcttatgtggaagatctctatgaggatacaaattcctgcaacatggtcaaggtacaatggtttggcaaagctgatgaggttggtgttctgttgcccatggattttgatgacagggagattttcttttctctgggtcgtcaagatctcaatgtagtatgtattgatggattggctgcagtcctgagtgcccagcactacgagaagttcaagagtgatactagatacagcttgtggcaaccttatttttgctatcggcagattgataatggtgaagccaagccttttgatgtcacacagctacaaggctactggagccaggaagtacttaggaccatgttcaatgcaacttcctgtctgaaggttttatggtgagaacatcgaacacttgtgtcctggttgccatgtggaagtactatctcaagacagtggcataaagataaaatcaagggtgcgctacctagaacttcaggatgctgatgagactggaaacttggaggagtgggttttgctaacacgaattgcgaaacctgatcaactgggtgtacgtttccttggaaggccaatggttcgtccacagcatgtggaagaaagcaaggcctcgtgctttgatgttggagccattgttgatgcgtggtggcatggtggctggtgggagggaattgtgttgtgccagggaggcagggggcgcctacaagtttattttccaggagaaaagcgaatcactgaatttggtgaagatgaattgaggtattcccttgagtgggttggtaacaaatggaatcctttgaagggaagaaaagatatcgcacacaagctgacctccactgcagatcgtggaagtgaatatttgattgggaaacaagatcatctgaattttgatgtgcttctaaaaccagaacctcaactagagggacttcaatatgacaaacggggtattgagaaatcttcagtcaccaccatctcacgagatcagaaacgtgtcctggccgacctgactaatgatttgaagttagatagcttgaggtggaggccaagaaagaggagtagaagatctggctcaagaaagcagtcggatacaagcagtggaagcagcagcggggacatggacttgtccagccctggccctagtgggttttgtcaacttaatttagtgcccgacgatgagacatgcaagagcagtggagagcagccttttatgggcgtgcctgtgcaggcccctaaatccgactgcctccctcttcatgcccctaaattccgggcgtacgctatccagccgacggatcagccatccatgcgcggtgaaacctctgcgttctctgttgtccgagcgttagcgactgcgtctctcgtggcggagccctcgagccgccgtgcttcgtcgtcgttggcgaccaagttgggagagaagaggtcgtgggtgggcgggtcaggcggtggcccgcttcgagcacttcgaagcgaggaggagggtcgcgtcaagagggcgaccgaggttgccgcagtcgaggcggttcctcggaggagaatcgccattgcgaaatgcctacgttgtccaccgccgtcgttcaaggttgttggcgacaaaaggaagcggagctcgtcgccaccgtcttcatcatcctcgattcgctcctccgcactagatctgagcagagaaaggtacgatcttcgatttcgtttgcggatctgttcgattcaatttgcactctattttgtgcgctttttctagagaaaggttatgaaagtatacgaccactttatatttctatgcttgttcatttcgagttg

SEQ ID NO: 28482 - DNA, 2860 bp, Zea Mays
gctgccccggtgctagctctagtgatggaaggccaatccagttgagtttgattctgtattcaatcagagtcggcacactatctcatttggaagtccagatattgttcctatattctgcagtaacctacctcacagtacctgggacacttatccccatgaatatgaagactttgcaacaggtcttttgacgatattaaattgaggcagttactcctacaagataagttggttatatttttgcatttactgggttgtgataccaatggccatgcacaccgaccctattcaagcatatacctgaacaatgtcaaggttgttgaccaaatagctgaaagtgtgtacaatcttatggagaactacttcaatgacaatcaaacagcatacgtgtttactgcagatcatggaatgagtgacaaaggaagccatggagacggacacccttcaaacacagatactcctcttgtggcatggggtgctggaattagaagcccaaagttcctggcttatacagagaaacctgatgacggctttcggtttgtagataaccacaaacatgatacacccactccaaaagactgggcccttgaaggatttgaaagagtagatgtcaaccaggctgacatagctcccctaatggctacacttgtgggtttgccatgcccgatgaattctgtggggagcttacctactccttatttgaaactaaggaaggctgatgaagttgaagccgttctggccaatacaaagcaaattcttaaccagtttctccgaaagtcacagctgaaggaatccagttcactctacttcaaaccttttaagccactggcgaacttttctttagtgctcagtcagattgaggatcttatatctggaagggactatgaaactgccatggagcaatctgaggagctccgaaggctggctcttgctgggcttcattatttccaaacatatgattggttcatgttaatgactacaattacccttggatatattggatggatggtgaacctcattatacatgtgctacagtcttatacatcatatcctgtaattcttctcaagagggctcaattgtatcctaacaatacctccatgaaagtttacatttgtggatgcttctttatgggtttgtcatccattttgctacttctagagaaatcaccacttctttaccatgcttatgtattgtgcacaatattcctttggacaagaattgtacaaaaaattgattttttgaagtccgtatggagagaactagctaatatgcccttcaagtatatttttaatctcctgaccagttcagttgttgcactgcttgtattggagtttctggttatgagcttctttgataggaaaatttatacgtggtgcttcttggtccttgggatactcggttcaacatatgtagcattgtttattcaagctagtgctgcacttgcgatatacatatggcttgcttgctggttcctgtctgtatttactttgatgccagctgaaattccagaaaacaacaacttggtaatttttagtggagggctcataatacttattggattagcttcaagatggattaaatcaaatagttccagcttttggctatatctcactcgagcaaataaacgggatcctcaatcttttaaactctattttgttcaggttattttagtcgcaatatcttcgataatggtgtggctatctacctcacaccggtcccagaacagagaattgctctcactacaccagtttatcaattggtctgtagctggtgttgctatggtgctacctcttttctcaccacctagtgttctatcccgtcttacatctatattcttgggttttgctcctccatttctgctgctttccattggctatgaagcagttttctatagcgcttttgcaatggtactcattggatggatatttgtggaatctgccaacctgtattgctcagaagaaagtggttctgcacgtcgcagaagccttgcggataactcagtttttggctatgaagaaagacacctgcgactatctgatttaagaatccctttgttatttgtgatattatttaatgtcgccttctttggtactggtaattttgcaagtattgcaagctttgagatctcgtctgtgtacagattcattacagtttttagtccatttcttatggcaggacttcttatctttaagttgtttattccgtttatgcttgtcatatgtacgtttagtgcgatcaccaaggtcgtccgtatcccacggctgggctgttattttcttgtaatactgctttcagatgtaatgactattcatttctttttcctggtacggaataccggtagttggatggaaatcggcaacagcattagccatttcggaatagtgagcgcccaagtggtcttcgttttgctgctctttgccctcacgaatatatacactagagatattttggtctcgtctcggcaactaaccgcacggaaagttatgtaaatcgttcagtttatttagaaatccaaatacatccatccttttatttattcatttttgggtcgactttcattttgggatcaagtttgtagcttagcttttggctaaagttttgtagcttagcttttttgttttctgtgaatggaccttggtgtcaaatttttgtgctaatttcattcgcttacttacagcctgaacagattttacgtacaccattataactatattagctttcctctcgggctatgataaactgaagttgtcttgatctagttcttctcagagttgaagttgatgaagcaatcactggaggcggagcttaaaattacactgcatgctcagctcaaccaggcatagtaattagtaagcaagcaac

SEQ ID NO: 28483 - DNA, 659 bp, Zea Mays
gtagatgctggtggaagcgttttctttcctatactggccttctcgaaacctgtaggagttgctctaacagtgtttgcgagccgacatccagatgccctgtgcagtattttcacgtcaagctaagaatttgtaacagtgtgacgagtctgtgccatcgcttaggctgctttggtataaaagaccaaggctacttctgaatcggaggctgggttcgcagcggagcatgacaatttctggtccaaatgaagctgaacaagttaatacgactatagctacgaatggtttcagtgaggagcatagcacaagacaacactggtacaagagactataagcatgaatacgaagatggctacgtacggcaatggtggtgaaggctacgacgaaaggattgcggcgatattacggttgatgaatggcatgatgtataattttcttgatggacaaaaggatatatacacctccgatctgttttgtccattgagcagcaatctatgtaatcttatgcctaatgaacaggctaaggatgttttagacacaactactctagttggcacaatgttggattcggaagggaaacattgtaaaacgttggttgcttccttgtgtacatgttgcgcgcagcattatattatatgtctattgtttgtcatggtggcata

SEQ ID NO: 28484 - DNA, 3978 bp, Zea Mays
gcatttcttaggtttccacattttccccaaggaaaatgatagctaaaatccttttcaagatcaacaacagagacttttccttctaggaccctaatcaaaccaacacattcatgcttaggttttttgacatgggtcttagcacactgcgaggaaaagaatcctagctcatctgtagctatccccaccaccagcatcaacagcttgctttgcctaggccagacgcatctggtagtcacatgggtatccttgcgacatatctcacaccatagagacttagagcagtctctagcgtgatgcccttcttccccacacttctgacaaaaaaccttctccccatgtcatgatctaccactggaggggagatctgagagttagggttaccttgcatcaacatctctccggatgaagacgatccaacgaagtcgcccttgactggcatccttcctataggtggcttcaatctccagctcaagttcctgttccttccccattgttgctgctcttgaggactctccttattgttgccccgctcccacttctgagtccagtctttcgcctccctcctctcggccttcagcaacgaccgagaaatcctgaatctgagacgaggccactcctcacggcctgagggaggttgacgctggatccaccgccaacccccatggaagccaatgcgaaaagtggaagggccacccacagcaaggaggagaaagcggcgaggtgggggagagataacctaccaattaggtcattcgtatccacaaccttcaacgatctcgatccatccatggaggatgtggcgcaatctgttgaaaccgagctcacgggctaggccaactggactcccgacaccgccgacgcaacccaaggatcacccaaaacttccacctcagaccccaaccccctccatggccccataactagagaaacaacaacactacgtccctacgaaacgcaagcaagccatagaaaggatggaacttgcttttctctttttttgaaacatgggattcctgcagtctgctctttaccgtgtccacggcaccatcctccgccgtcgggtgtagccgtctagcctatgcttacctttcagctgagtgaccaaacactgcaccctttcgatcatgcttccttccaaggcacagcccgactgtcagctgtccgctgcccaccgcgtgcgctgcgctcccgtgcggcactgccggcggcgcgaccccgcgcccattggacgagcttccgccccgccccgatcgatcccgccgccatgtcgtcggcggccgtgtcgtcctcttcctccaccttcttcctcgcgctcgcctccgcctcccccgggggccgcaggcgggctagggtcggctcctcgccgttccacaccggcgccagcctgagtttcgcgttctgggcgccaccgtcgccgccgcgcgcgccccgggacgcagcgctggtgcgcgctgaggctgaggccgggggcaaggacgcgccgccggagaggagcggcgacgccgccaggttgccccgcgctcggcgcaatgcggtctccaaacggagggatcctcttcagccggtcggccggtacggctccgcgacgggaaacacggccaggaccggcgccgcgtcctgccagaacgccgcattggcggacgttgagatcaagtccatcgtcgccgcgccgccgacgagcatagtgaagttcccagcgccgggctacaggatgatccttccctctggggacatagcgccggagactgtcctcccagccccgaagccactgcatgaatcgcctgcggtaaactccgtgccgccggtttccattcccaatcctgacaccgatggtattgctgcgcttgctgaaaagaaatatgcacaggttgacggagattcaaatggaattgcacctcctacagttgagccattagtacaggaggccacttgggatttcaagaaatacatcggttttgacgagcctgacgaagcgaaggatgattccagggttggtgcagatgatgctggttcttttgaacattatggggacaatgattctgggcctttggccggggagaatgttatgaacgtgatcgtggtggctgctgaatgttctccatggtgcaaaacaggtggtcttggagatgttgtgggagctttacccaaggctttagcgagaagaggacatcgtgttatggttgtggtaccaaggtatggggactatgtggaagcctttgatatgggaatccggaaatactacaaagctgcaggacaggacctagaagtgaactatttccatgcatttattgatggagtcgactttgtgttcattgatgcccctcttttccggcaccgtcaagatgacatatatgggggaagtaggcaggaaatcatgaagcgcatgattttgttttgcaaggttgctgttgaggttccttggcacgttccatgcggtggtgtgtgctacggagatggaaatttggtgttcattgccaatgattggcacactgcactcctgcctgtttatctgaaggcatattacagagaccatgggttaatgcagtacactcgctccgtcctcgtcatacataacatcgcccaccagggccgtggtcctgtagatgaattcccgtacatggacttgcctgaacactaccttcaacatttcgagctgtacgatcccgtcggtggcgagcacgccaacatctttgccgcgggtctgaagatggcagaccgggtggtgactgtcagccgcggctacctgtgggagctgaagacagtggaaggcggctggggcctccacgacatcatccgttctaacgactggaagatcaatggcatcgtgaacggcatcgaccaccaggagtggaaccccaaggtggacgtgcacctgcggtcggacggctacaccaactactccctcgagacactcgacgctggaaagcggcagtgcaaggcggccctgcagcgggagctgggcctggaagtgcgcgacgacgtgccgctgctcggcttcatcgggcgtctggatggacagaagggcgtggacatcatcggggacgcgatgccgtggatcgcggggcaggacgtgcagctggtgatgctgggcaccgggcgcgccgacctggaacgaatgctgcagcacttggagcgggagcatcccaacaaggtgcgcgggtgggtcgggttctcggtgcctatggcgcatcgcatcacggcgggcgccgacgtgctggtgatgccctcccgcttcgagccctgcgggctgaaccagctctacgcgatggcatacggcaccgtccctgtggtgcacgccgtgggcgggctcagggacaccgtggcgccgttcgacccgttcagcgacgccgggctcgggtggacttttgaccgcgccgaggccaacaagctgatcgaggcgctcaggcactgcctcgacacgtaccggaactacgaggagagctggaagagtctccaggcgcgcggcatgtcgcaggacctcagctgggaccacgcggctgagctctacgaggacgtccttgtcaaggccaagtaccagtggtgaaccctccgccctccgcatcaatatcttcggtttgatcccattgtacatcgcgcgtttgacggtctcggtgaagaacttcatatgcagtgacgcgccgctggggtcggtagcagtactatgggattgcattgagctgtgtcactatgtgctttcgacaggacagtagtgaaggttgtatgcaagtttattttttttttcattactgatatttggaatgtcaacacaataaatgaagctactatgtgtttcgtaagtataatgttacttatttaggtgatacttcattcaagttcagagatttttttattgttagatcaaattacagcagtgaaggttgtatgcaagtttagttttttttttcattactgatatttggaatgtcaacacaataaatgaagttactatgtcttttgtaagtataatgttacttattt

SEQ ID NO: 28485 - DNA, 1676 bp, Zea Mays
ctcggcctcgccttggcccgactcgcgggagctgtacgccgccgctccactcccaggctcccagctgcccttggcgaccgtcgccgccggccgccctactccgagctgttcaggacgctttgctggcgagcacccaccacaccagttgctaggactacatgaatggatcatatactagctcgttaagcctccatgatgtcagtgtcgacgatggacaatcagctcttgataacagcagtagaacctctagtccttttgatatcctgactcctcaagatgttatccctatcgaaacggcaagctctgactgcagccaggtggatggcaaatcaagcaagagaaagcagcaggaggtctagctcttgaagcttcaggtggcttgtacaggaaactgatccagaggttcccaaagagaggccactgcagcttcaagaggagggagttagcgacttctcatgcaaccaggacaaagtttcctgaacttgtggtacaagaagaaaaacgagttcgttttgttgttattaacggattggcgattgtagagaggccagaaaatatgagaatggaagatgcggaatggttcaaaaggttgactggtcgaagtgaagttgctatttgttcaagagattacaaattctattcaccccggcataagatcaggcgttccccacaggcagcatttgacatccctgatacaagtgctttggcagaggatgagaactcttcattggtttgttcttcaggatttcgctcaccaaacgagatacaaaatcagcatcagtcaacatcaaagagacctatcgaacatctagaaaatcaaccctttttacaccttttccatcaagcagaagatgatagcatgcagcaagttcaacattgtgctcagttcccacccattcatcaatgtacgagcactccacatctatcagataacccccaacaccagcaacaggcttatttatctcaacatatatcttgcttgcaagttgggcaaggtcatcttggaggacgcatgcatattattccaaccagccctgcgaagttctgtgatgagtgtggctccccatatttgagggcgacatcgaagttctgctcagagtgtggtaccaagaggctaggaatgtgaggtgacttgatcaatgtgtatatgaatctgatgatgtagcaattgtagtcttatgtttgtaaaagggtctctagcgtaatggttaaggcagcccggcgaagttctgtgatgagtgtggctccccatatttgagggcaacatcaaagttctgctcagagtgaggtaccaagaggctaggaatgcgcggtgacttgatcaatgtgtatatgaatctgatgatgtagcaattgtagtcttatttgtaaaagggttatttgtaaaagggtctctagcgtaatggttaagttttcttttaagttttctgagtagcaactctggttgggccgttttagagtgggcggtgatatcttactagtgatgggggccagggtttggaaattttctcgagaccatgttttggtctcctttttaatataatactggaatgacggtcttttggaatgacggtctttctcttcccgaggagttttttttatgcctttaaagttgtgtgagaagtgtattcttgagatgatgactcagcagagagtatgcagccacctttactaga

SEQ ID NO: 28486 - DNA, 1425 bp, Zea Mays
gtgcgggaaatagtttctctctctcttcttcttgtaagatatttcggagtaggaagtgcgtgccttcctcgcagctcattcgccgaggtaacatcccctgcccttcctcacatttcctccctgttcgtccgtaatagtcgtttccgaaccttgcgtttcgtgggatttgtcgaggcgagggcttcgatttgacccaggaatcgcccaaatccgcttgtcttcgacttcagttcatccccacgaatttctagggttttagtgtcgattttgtcccccttcattacatttgattggcggtgaattgggccccgttttgatgattccttgggttcgttggacggcaggaaacgagatcctctagaggtttgtgctgtttagcgtgagtttttttggggccgatttgctttgctcgcatgggggatcatgtcgcggtggatgttggggagctcgtagcgtcccgagtcggtgaggcagcggggctagtgtccggcgccaaggaggaaacagaggcgctgattgggatggtggagtgccgcatttgccaggaggaggacctcaggaagaacctcgagagcccctgcgcttgcaacggcagcctcaagtatgctcacagagaatgtgtgcaacgatggtgcaatgagaaaggggatacaatctgtgaaatctgccatgagtggtggagattggaccatctctggcaaccgtttggatttacatgatcctagaatattggcaatggctgctgctcaacaccgtctacttgaagacgactatgatgaatatactgcaacaaacaacaacgctgctgcattttgccgctctatatttctgattttgatggcccttttgctcctgaggcatacactgaccattactaacagcgatgatgaagatgatgcatctgctattttctcgctatttcttttgagagcggctggatttttgctgccatgctatattatggcttgggctattagtatcatgcagcgtcaaagacaaagacaggaagaagcaatgctattaccaacggaagtggcgatcattctgcatcggaacggaagaacaatgcaatttgcggtggcaccaccagaaacccctatctcacctcaccccgagctaaaccaatagaatacatcatcgacagggtcacagtcctcgcctcgggagtgcataacaggtggaaactcgaggacattgtgcaaagcatgtgttgcatcggccacctcgaacggccatgttgcagcaaaaatgttgtgccttcgaattgagttaactttctagcttcagattcaatgcttgttttatggcctctcagcatcttctgtacataaagagatttctctaataaatgaatataagttaaatcaacacaaatttcgattttgaacagtggcacctcagaaaaacatcgctgtatttctaacc

SEQ ID NO: 28487 - DNA, 199 bp, Zea Mays
tgttagaccaaaacttccaccacgaacctttttcgtatggcttaacagcttctggggactctgaagcttcatccaggatctggagatccttaacttttttatcatgccatccacgaggaacccatcctctattcacaatagatatcctgagagggcaatccagtagcacctaaataagcatacaaaaattacagcacaa

SEQ ID NO: 28488 - DNA, 2792 bp, Zea Mays
cccagtttggaaacgcgtagcttccatctccactcccacagtcccgctcccccgccatggccttggccatgacctcctcgtccacgcagccaccgtcccctcaccaccgccgccgtcgccgctcgcaacctaccaccgccacccccaatgccaactccaaacctaaacccaaacccagggccaaggcgctccccctactctccgacgtcggcgtcggccgcgaccccgccgccatcaagtactacgcccgcgtcgcatctaacctcgcgggcgccggccgcctacgagacttcctcctagccgccgagggcctccgcgcagccgcgtgcaacgaccccagcttcgcggcccgcatcagcgcccgtctcctgtcgcgcggcgtcgccgccgctgtccgcgagcgcggactgcccttcatgctcgagttcttccgagacgccgagcgcgtgcgcgtgccggtagtcgagatgctcgacgccgacgcgtccaacgctgtcgccggcgcctgccggatgttgctggaggagcgacgaatggtggagttcgtggaggtcgtcgaggcgctagctcgatatggattctatgttcaagacatcgtgaaccccatggatgtactgaaaatatttgtcaagcagcgtgacccagatatagctataaggtatgcacgcatatttcctagttcccaacttttactctgcaataccatggaagcttttggaaaaagaaaggagttgaaaaatgctttattgatctttggagcccttaagaatcagcttggaggcatcaatatgtttgcatgccgaagtataatagatatatgtggccattgtggctcttctgtacaggctcgaattatatttgaggggctgcttgctgataagattactccaaatacctatgtcttcaacagcctaatgaatgttaatgcccatagcttgagctacaacttttcagtctacaagcatatgcaaaatcttggtgtccctcctgatttgacttcatataatattcttctcaagacatgctgcagtgtcagagaattcaacttggctcaagaaatttatgaggaaatgaagaaaaaggaacgtgatggccttttaaagctagatgttttcacatatagtacaatgatgaagatgcaaaaatgtggaagatggcttccaacatcaaagaggatatgcaagcaaacggggttcgtcttaacctagtaacatggtcatcgttaatcaatgcttatgcaaattctggtctggttgatcgtgcaatagagatcctcaaagaaatgataagggatggctgccaacctactgccccatgcttcaatattatccttactgcatgtgtcaagtcatgccaatatgatagagctttccgcttgttctacagttggaaggagtctggtatcaagatctctctatcctctgaacagaagagagttattgatggtggctttacattctgtaaagagtatcctaataatgacagtactatattggtggttccattcaggccaacagtcacaacctataacatcttaatgaaggcttgtggtactaatgcagaacgtgcaaagtctaccatgaacgaaatgaggcggaatggcctttgtcctgatcttattagctggtctatactcatagatatttatggatcttctcaaaatagggatggagctgttcaggcactaaggagaatgcagcgagttgggatgagacttaatgtctctgcatatactgttgctattaaggcgtgtgttgaaaacaaagatttgaagttagcactgcacttatttgaagaaatgaaaacacaccaactgaagcccaatttggtgacgtacaaaactctcctggcagcacgcatcaattatggatcactacaggaggtccaacagtgtttagcgatatatcaggagatgaggaaagcagggtttcaggcaaatgattattatctcaaggaattaatagtggaatggtgtgaaggagttctgtctagtcgcagtgataatcaagatttttacaatttggatctacaacctgagactgagaggaaagaatcgttcaacctgtttcttgagaaagtcgtaacagtcttgcaaaaagatactgatcagaaccaaattgtcgatgttcgtggcctttcaaaggttgaagctcgaattgttgttctctctgtccttcggaagatcaaagagcaatacctcctaggaagagtggtccaggatgatgtggttatcatcacgggtcatgagaagacatcaacaactgaagctgaaaccacaactagtgcagttgacgtcgtgcaggcaatagttactgttttgacggatgatctgggtcttgaagttttgattggacctggaagctgccctcccgtttcatcaaaacccaaagcaccgactaaatctagaagtaatttagagcaaatatccaaagaatttactaggagaccacagggaatgataaaaatccctatcaactcacttaaccattggttaaggaagaaagccgtgaggattgcagagtgacatttccttaaaggcttaaactacctttttggtccatttagtataccagtaaatcagcacagctattccaggattgggtgtacatatgaaaacaggttactgctcctggtattccaggcacactgacacgacttgaaaagggacttgttggcaggcaataaactgtgcttctgtgttgatttaatggtcgtgtttctaaaggcatcaagcattcatactgttatatatcaatgtccagttcatttccattcaaaccgggttatcccat

SEQ ID NO: 28489 - DNA, 5976 bp, Zea Mays
ggtgtatcttttttcttctctgtgctctagaagattagtattgtagggcttctgtgcagcacccaagcaggaattcagaaagaatgcctggaagcatccacatctcagccactcaaccaccagtcatcacccctctgtttctgcaagtcactgtgggcaacagagaatacagtggaaacatagaacaagatgctttatctttccccgttacatcacttcgggagagtatggtaataatgctgtacagtgcagacggggcattgatatcaaaatcagagctgaagacaaaagagattgtggagtcaggaactatggacacagtatttgctcttgatagcgggggagaaatagttcttcagattcagttcttgctcaacgatgatgaccgcaagcgaatccaagaaatgagaaattctgcgatgaagatgaagcagcaagggctgcttggggatggcaatgaactcaatttttcagacagcgcattgtctaaacggctgacggagaagatttccaacatccgaagcaaagcagctgaacgatctgagcttcagaagagcatgtcactggatgatttgcaagagcgggccgtgttccctggaatcgatgcggatccacgggtgaaggcctcaagggactcgttgctgcaagggggtgtaaggttggaagatcccggtggctccaagcagcggctgagccaggccgaagtcgaagccttggcatcgccggtggaaggggagaggcggcgcctaggcctggacgtagcatccggcggcgggcgaggggtcgtgggagaggcggagcaggaagtcagcgacggggcaggggcagtggatgcgatcagcacgtggccgccggacaggccgggccctggctccaagaaaggggacagcataccagagagcagcaaatcaagtagtgcagtgaagacgatgataagtagctttgaaggcaccaccaccccacagggtatcgtttcagaaaccgactcaggcagccgcagcacgcaggcaggcaaaacagccatcatccctgttgatgatcaccacaaagcttcaaatcacaggtctcagcatatactagtagaaacgatcgcacctgcacaactacaaactattaggacgccaaaagcagccgaaagcagaagccgacgcagagcaagcaagcagcacaacgagctgcatccaagaactaggaggaggtcacaggcaaagcagatgcagatgcagatgcagccaagggactacgtggagcgtcccttgaactatctggttgcgacgtcgagcacctggatacacccgcacatctgcgtcacgggcgcgaccaagcaactgaaagacctccttgagcttgagcacctcaacttccaacgcaccgctactaagggacagcaaggtacccgagagagaaaaagcgacgaatccattgccgccgccgctgctcgggctcgcagcggtggtttcctgatgataaacgggtggctgatagttcagggggtgcgtgctgcagttgtgctcacggtttgctgcggggccatgttcttcagcagcagcagcagatgaagaaatctagcagtgcctacccctaatttttgcatacacaagccacagccacaatgtaattgtcaagttttactgatggatctggctagcactgtaacttacttcaccgaccgacatattatgggtcccacatgcagaatacgacgacctctcctgctcctccgaatcctgaaaccaaccagatcacacgaaccaaaccaccgcctcctcccccgaccggagaggagcctcaccgccggcgcccatggcgacacgctacttgatcgtgtcgctgcccgtgcagtcgcccggcgccaccgccagctccctgtggtcgcgcctccaggactccatctcccgccactccttcgacaccccgctctaccgcttcaacgtcccggatctccgcgtcggcaccctcgactcgctcctcgcgctcagtgacgacctcgtcaagtccaatgtcttcgtggagggcgtgtcacacaagatccggaggcagatcgaggacctcgagcgcgccggaggggtcgagaccgggaccctcaccgtcgacggcgtccccgtcgacacctacctcactaggttcgtgtgggatgagggcaagtaccccacaatgtcccctctcaaggagatcgtcggcagcatacagtcacaggttgccaagatcgaggatgacatgaaggttcgagcatcggaatataataatgtaaggagccagcttagtgcgatcaacaggaagcaaagtgggaggtaaattgcgctgacatactttgtgtgttcagactctagaggaagtgcttgattccaggactttttccttgtttattgtaaaaggaacaggagagcagaaatgaatggcttactcattttatctgttgcctttcctatactaattagtttggccttttattgtgtgaaagcttagcggttcgtgatctttccaatctggtaaaaccggaggatatgatcacctcggaacatctcgtgacacttcttgcaattgttcccaagtactcccaaaaagactggttgtcaagctatgagaaaattgacacattcgtggtcatctaaaaagctctatgaagacaatgaatatgctctctacactgtaacactgtttgctaaggttgttgacaattttaaggtccgtgctcgcgagaagggttttcaggtccgtgattttgagtacagtcctgaagcacaggaaagtcggaagcaggagatggagaagctactgcaagaccaagaagccatgaggaccactcttcttcaatggtgctatgccagctacagcgaggtattcagttcctggatgcacttctgtgctgtgcgtgtctttgtagagagcatccttagatatggtctccctccatcattcctgtctgctgttcttgcaccatctacaaagagcgagaagaaagtaaggagcatcttagaggagctctgcggcaatgcccatagtatttattggaaatccgaagacgacgtaggcgtcgccggtctgggaggtgaaacagaggcgcacccttacgtctccttcaccataaattttgtctgagaccggcatgttcctggccgtctgcggcccaggcaatatttcgagcagaactgccataaattctttgttgatttgtcggttcatgtgctcctgtaattcacatcacagagagaccagccgatcaataatgtagtttctgaggacatgtttccctgcagtattgtaccttgggagcgcattgtaaatggcctggaacagttgtctactggatttgtttatttatttacaataaaagccatgtgaaaataagtaactaaaatttggattgtcagttgatgaaaaatggaatgtggagctagctaggctctgggtttgtggcgcagacgatttttttccagtggaatgtgtacgttctggttctggagagcttcctatcctaccggccaggccatctctaccttgagccccttgcaattgaacatcacgaaactgggtgaaccagaatagattggcgtgtttggaacgcatggctgacaaattaaacccaagtcttatggaattttctcagttcccgaattctcgagccaagaggagcgagcagtactggatgccgagaactgccagccgtcgtccccgcgccgccgcggcgtccgggcgtttacaccacccatgcacgcacggacgaggtacccttcatcgtcgtcgtcgccgccgccgccgcccgctccaaaaccagaaagcggatgccactccaaggaagggcagctcctttccacactagtctcgctcgggccgacagcgatgtctccgtgcgcctgctcctcctcctgctgctgctcttcctcctcgcgcgcgctcacacccacctaacctataacccgctccgcctagctccttcctacccgttacctgctgcggagcggagacgacgaccacttccacctcctcccccccttccgcacccaatcccatccccctttccaaattccaatttccagcaggccgcccgcgatgcccaagccggcgacggcgaaccggcgccggaagcgcggcggcggcggcggcgaggggggcgccgccgatgaacaggccagcagcaagaggaggcccgccaccagcgtgctcacctccctggacgtcaacgacgccccgcgcccggagctccccctcttccagctgagccgacctcgccagcaggcggaacaggacgacgaagaggaggaggtgaccggtgggggcggaggaggaggagcggggtcgtcgttgtcatccgtggtcaacggccacgggcagagcccgcaccagcagcggcggctgtgggtcaaggaccggtcgcgcgcgtggtgggagcagtgcagcagcgccgactacccggaggcggacttccggtccgccttccggatggggcgcgccaccttcgcgatgctgtgcgacgcgctgggcgcggccgtggccaaggaggacaccgcgctccgcgccgccatccccgtccggcagcgcgtggcggtgtgcgtgtggcggctcgccacgggggagccgctccgcctcgtgtccaagcgcttcggcctcggcatctccacctgccacaagctggtcctggaggtctgcgccgccatccggggcctcctgatgccgcgcttcctccgctggcccgatgacgccgccgccgaggcgttcaagtcccggttccaggcggagtccgggatccccagcgtggtgggcgccatctacaccacccacatccccatcatcgcgcccaaggtgtcggtgaccgcctacttcaaccgccggcacacggagcgcaaccacaagacgtcctactccatcacgctgcagggggtggtggaccccgacggcgccttcaccgacgtctgcatcggctggcccgggtccatgcccgacgaccaggtgctggagcggtcggcgctgcagcagcgcgcggcggccgggatgatggcggggtcctgggtggtgggcggcgtcagcttcccgctcacggagtgggtgctggccccctacgcgcaggccaacctgacgtgggcgcagcacgccttcaacgagaaggtggcggaggtccggcgcgtcgccgtggacgccttcgcgcgcctcaagggccggtgggcgtgcctgcagaagcgcacggaggtgaagctgcaggacctcccggtggtgctgggcgcctgctgcgtgctgcacaacatctgcgagtcgcgcggggagggcatggaccccgcgctccgatgcgacatcgacgacgacgagacggtgccggagaaccccgtgcggtcggacggcgccaccaaggctagggacgacatcgcgcacaacctgctccacagcggacgagccggcaccaaattcttctgaattctctcagtcggttcgttcgttccatcagattcttctactatgctgctgctgctactctgtctcccgactccctctcctttcattggattggaaccgtccatggaattgatcattcgttgggttgtttgaactgtactgggaagtgggaagatcacccgcaatccgtcatcctcatcctcgtagaacgctgaacacacggagagaaaggtagatcaaagacaaagagtgggttgggtttgcttttgatcataggatttttagtctagtagcacgtggtacagttgttgaacaaacctacgtatccaagagccaagtcaaagaaacagcaacaagaagcagtagcacatctcaatccgtgcgttttccttgtgttttacctatggcattggcatgatcatgtaaaacaatattttgggatgaccgtatggccaaaatgctgaacgtgttgccgatcgggccgatccgatcgatatccactggtcgttaacaataacatgtttggatgagctggtcgaaccggacgttaatgactgactttcgatttttatttatgaattatttattttt

SEQ ID NO: 28490 - DNA, 2233 bp, Zea Mays
ggacagggggccgacctggcccaccgatcgatagggctaaggcatatgattgtgtgcatgagcggcgacgcccgtgggccgtggctgcacctgcacgtcttccgtccgccatgaccaccatatgctgtgagtctgcgacgctggccgcgctgcatctgcatgtgcacgacaaaggaccacagacaggtctcctctgtcagtcggatcgtcgtggtgtcttcgtcgatagacatttgaccacgtccgtataatgttggcgacgaggcggattatgccggggctgatcggtagctggaccgacgagaactcaaagaatccgcactggcgcgcgatcgggtacagcccgcccccggcggacgacgagccggcgccggcggaatcagaacgtcccgagaagcgtcccctggacgacggcatcgttgagacgaacaaggagaacgacgcgtccctgcccgcgttgctagccgagaagggcctcagggtggccgatgacgcggcgcggaacgtgtgcagggtcgagtgcgacgtcgtcatcgtcgggtccggctgcggcgggggcgtggcggcagcggtgctcgcggcggcggggcacaaggtggtcgtcatcgagaaggggaactacttcacggcgcgggattacacggccatcgaggcgccgtcgatggagcacctctacgagggcggagggttcgtcagcacgctcagcgccagcgcgctgctcctggcaggctcgacggtcggcggcggcacggcggtcaactggtcggcctgcatcaagacccccgacgacgttcgcggggagtgggcgcgcgaccgggggctcccgctgttcgccaccggcgagtacgccgccgccatggacaaggtgttcgagcggctcggcgtgacggccggttgtgcggaggaggggctccagaacaaggtcctccgcaaggggtgcgagaggctcgggtacaaggtggagtcggtgtcgaggaactcgtcggaggggcactactgcggcagctgcggctacggctgccgcaccggcgacaagcgcggcacggacagcacgtggctcgtcgacgcggtgagccgcggcgcggtgatcctgacggggtgcaaggccgagaagctgctgctggagcctggcagtgccgcggacggcagggcgaagcgatgcgtcggcgtggtggcgaggagcaccaacccggcgatcacgaggacgctggaggtgaccgccagggtgacagtctcggcgtgcgggtctctcctgacgccggtgctgctgcgcgggagcgggctccgcaaccggcatatcgggaagaacctccacctccacccgacggccctggtgtggggctacttcccggacaccgtgccggacctcaggggcaggatgtacgagggcggcatcatcacgtccctgcacaaggtggaaggcggcggtccgggcgcgccggcccgcgccatcctcgaggcgccggcgatgggcctggccggcgcggggacgcagttcccctgggtgtccgggcgcgacatgaaggagcggatgctcaggtacgggcgcacggtgcacctcttctccatggtgagggaccgcgggtccggcaccgtgcacggcgagcggcgggtggcgtaccacctggacgccacggaccgggagaacatgcgcgacggcatgcggcgcgcgctgcgcgtcctggccgcggcgggcgcggcggagatcggcacccaccgcagcgacgggcagcggttcgcgtgcgggggcgccacggaggccgcgctggaggagttcctggacggcgtggacgtggtgcgcgggccccagtcgaaggccgaggcgtggaccctgtgctgcaccgcgcaccagatgggcagctgccggatgggcgccacggcccgggacggcgccgtggacgcgcgcggcgagagctgggaggccgggagcctgtacgtgtgcgacggcagcgtcctgcccggcgccgtgggcgtcaaccctatggtcaccatccagtccgtggcctactgcctcgccacgggcatcgccgagtcgctcaggcgcggcccggtttcacgaaaggattgagactctatttggatatgcacgtatatatccacatcaatttatttcaatttacgtgtgttaaagtggatttcacgaaaggaattgctgcagaataggtctgcagcggttcactgttcgtgtgctggagaataataagaaatggaagtgagacaaatctatcttttc

SEQ ID NO: 28491 - DNA, 1138 bp, Zea Mays
cactaaacactttaaatcagattttattttaattttgaggactcaaattctaacagcagtaacatcggcagctgagattaaatcgcctggctacgagataaaagccatttccccatgtccactatccctccttatcaccaaccatccagtcataactcacggcaggcagagacgcgcaccaccagaccagcagcagaacgaaagggatctccggtccccaggccccggctcctccccttccgattccaatctggtctcgccgggcctggcggcgagggagagatggggaagaaccaggcgtacaaggcgatgcagcgggcgcggttggggtcctcgtccggcgcgccgggcgccgccgacgcccccgaagacggcatgacggacggttcattccattctccagagtggcatgcggcgcgcctggccagccttaacaagacgcacaccctcacctgggaggagttcaagaagaagcagaaggaagaggaactgaaaaggggcgagctggaggctgacaaagacaaaatgatgagagagtatagagctcaactggatgctgaaagagctcaaaagctagcaaacggaagaaatcactcaaggtcaaactcaaaatcatcatcttccaagaaagagaggaaggataaggacgcaaagaaaagaagtaaaaagaggagaaagcacaaaagttcatcagagtcaagttccagctcatcttcagaatcttcaagcagcgacgatgaggataggggttcaaggaagtccagatcacggtcgagatcaaagagaacaaggaaggaaaagaagagccggtcaaggtccaagcgcagaggcagtgaaagcgaggaggaaggcccggtacgcctctctaaattcttcgggaagtaaggagtagacgccgctgtacccaagacgcctttttcattttgaaacgtagattgctgttaagagggtctggtcaagttgtgtggcttctaaaaactttgtaagcaactggtaagtcattgttaaatcgctgtaccttggaggatttgatgccatatatttgagacattgaactgctatatttatgttaagactttacatatgcagtcagttgtttcagttatatgctcttttgctatatttatgttaagacttt

SEQ ID NO: 28492 - DNA, 1825 bp, Zea Mays
gccggggacggacggttggtgcaactggaaagcgaggcgttttgttttctcccgtgctccccctcccggggaaggggcaacgagaaatcgaacccacacgcaacgcgacgcctccacccgctcgcctagtccagaatccagatccagcgcccgcatctctctctctcgcgcgcgcgcgcgagcgcgatgagctgccgcgacgggcgatcgtgctagcggtaacagcgagcggtgcgcgagggcggagtgggagtgtggatccgaggggcggcaaatctggcaggcgccgcggtggggctgcgggcgcgggggagggcggggggctgggcggacggcggggagggaggggaggactgcggtaggctcaggccctggcgcaggaggctgctcgcgtccatggcgctctcgtggtcctcggccctccgcctcgccgtcgccgccgtcctgctcgtcgccgtcgtcgtcgcgctcttcactctccccatcgagaaggaactacttgcatccagctcacggcattacctgccctggtagctttcatcttgactgagagaatttttctctgtatacaatgtgctatgggagcatgggtctatgggaaatataagaaactattcagagtcaggagagtttgatctgatccaagttgagtgccatgtttgtaagatttttttgtcaattagtttattctttctacctagtttaggtcataatgttgtgacgtttcaatttactaagataattcagtgtttgagaagttcctttctcctcactttcttgttgcctaaatctcaactttatggagcttaaaatgtagattagtttaccttccacatcagatacttattggtttaggtttccattgacagattttgaaggactttctggtttggatcaaggagaatttgggtccatggggtcctttggtgttggccctcgcttacatccctctgacagtcttagctgttccagcatcaattcttacacttggagggggctatctatttggcttgccagtggggtttgttgctgattccattggagcagcaattggtgcgactgctgcatttctgcttggcaggacgattgggaggtcttatgttctctccaaatgcaaagattaccctaagtttcaagcagtagctattgccatccaaagatctggcttcaagatcgtgttgctactaaggcttgtacctttacttccgttcaacatgttgaactacctgttatctgtcactcctgttggtgttggagaatacatgctggcttcttggttgggaatgatgccaatcactcttgctctggtgtacgttggaacaacactaaaagatctatcagatgtgacacatgggtggagtgagatctcgactactcgacggattctgataatatctggttttgtattatctgtggtcttgattatctgcgtcacaaaaattgcaaaatcatctctggagaaggcattggctgagaatggagagctccatgtaggaacatcgcagcttccaggtgtaacctctcccttggatctgcaacaacctcttgtaatcaagattgacacatcaaatgaagaccacgagaagtaaaagtgttgtgtttacaatctcagatgtaaattctttggttgttgagtcggtagactgtatatacacccatactctggtgaggcccgtaaatgggtaaaaaagacatcatccccccttccaaaaaagggaatgaagtttagtttactgataggttatagtaatacgatatgcgctttgtttcactccacgtgctaccttatctttggtgaaaatactcgcacttaactgggttgaga

SEQ ID NO: 28493 - DNA, 1667 bp, Zea Mays
cggcgcccgatccgaatgctgccgatggcttgtcgcgttctcgtcgggggcgtcgggtctcggggattctgtgttgtcatggtccttgtggattcctagggttggggtggttattcggctgtgggcgggaggcgccccttcgcttgcaaattttttggaatccatgcttgcagggaggagggctgaggagcgtagggccgagggggcatcgggtaggcaaattgagtagctatggattgtcaagaggattgcgcttgcgcgatcggactatcggagtatgctttgtttaacatgttcctttagctgatccttccggtcttggggaaggatatcgatttaggtatatggacaaggtgtctgaaggtactaagtgagatggataagaagaaagggaccgatggcaccgaaccaggaccagctccatctcgtgccgtcgacagatttggttttataaagccagaacaaggcaattcacctgatggaattccaaaaggcaagtctatacatgagcgtgaaagggaggaaagaaggataagaaaatggaggaagatgataggtgttggtggtaatgactggaagcattatgttagaaggaaccctcatgtggttaaaaggcgaataaggaaaggaattcctgattgtctcagaggacttgtttggcagttgatttcaggcagtcgggacctcttactaatgaacccaggggtttacgagacactggtgatatatgagacatcggcctctgaattggaaattattcgtgacatatcacgcacatttccatctcatatattctttcaacaaaggcatggtccaggccaaagatcattgtataacattttgaaagcatattctgtctatgacagggatgttggatatgtgcagggaatgggatttttagctgggctgctgcttctttatatgagtgaggaggatgcattctggttattagtcgcgttgctaaagggagctgtccatgcaccaatggaaggcttgtatcaggctggtttgccgcttgtgcagcaatatttgtctcagtttgagaaattagttattgagctcatgccaaaattgggacaacactttgttgaagaaatgataaacccaagcatgtatgcaagtcaatggtttatcacagttttctcatattccttcccatttcatctaactcttagagtttgggatgtgtttctttatgagggtattaaggttgtattccaagttggattggctctattgagactctgtcacgatgatttagtcaaattaccttttgagaaactgctctatgccttgagaaatttccctgaggaagcgacagatccagatgtattattgccgcttgccttttcatttaaggtatcgagtcgtctcgaggagcttcagaaggagtatcagaagcgacaggagggcaccagtgaaacttcaagcggcgagcggctacagcccctcgtatcgaagacgatgagcagggtcggtagccgtgttgtgtcgaacttaacgaccgctgacagaaaatgacagacacgttctcttgtttgtttgtaactcgcatgtacactgtacagaaagaacggccttataatccatccatctaacagtatttgttttgcgtttctgtcaccattgcatttgcttttataatcctggatcgcaggaacaaaaaa

SEQ ID NO: 28494 - DNA, 2729 bp, Zea Mays
caaacgctcacatatggcccgccacagcccgctgctgcttctccgccgacggcgcggcatccccaccccgtcgtccctcctcgtcctccgccaccggcccttcgcctcctctccctccccacccgcaccctcaaccccctcgtccgcctcctctaagccccccgccctttccgcccgcctctccttcgtcttcgatcagctcgatgccctcgaccgctcccgctcctccgagctctcggcccgcgatgccgccctccgccgcatccagtcctggcgccgccccgtgccgccgcctgaggcaccgccgctggatgccgatccaggcccggagccggagcaggatggtcagaaggaagctgctctggcgtcggcatctgccgatgaggtggggatgagcatgaaggaggtattgcggagggaggtggagctggtgcacccctggcgcgaatggatcgaactgatggagcggcttgctcagcagaggtacttcgaccttgggcgggcctgtggtgccgatgagagctccatggccgccgctgtgcccttggacctctcagaggtcagtgaggaggtggggttggacttctccagagactggactactgtcaagaacgcctgcatgaacttcggccgagaccggtttgacatcctcaagtcattgcctaggaaggatcttcagatattggttggccatgggtgccctagcatggatgcaaaagtggtgttttctgcaaaactgataagaaaacatgtccatcttgatgagggcgatcctcctattaaagtgaagcaaccacctcccccaccaaagaagcgagtgggacgtgatgatgttgagatgaagaaaggagattggctctgccctaagtgtgattttatgaattttgcaaaaaacactgtttgcttgcagtgtgatgctaagcgtcccaaaaggcaactcctccctggagagtgggaatgccctcggtgcaatttcttgaactataggcggaatatgtcatgtttccattgtgaacatgaccgtccttcagatgagtatgccaacagacaaatggaagcaaagcaatctgcactgcggaatagattagaaagacctccacgcaaatctgatatttctagtgcatggaactttgattttgaagataacgagtcagatggtgcagatgttgcggcgtttgaatatgctgattcatctaaggtgaggagggagagctcatcagcaggcagcatgtcgtatagaggtgtttccaagggctctgatgatgaggaatatagaatggctgaaacaatgactacaggacgggggaataagttctcagaaagagatagcttgccatcttcaagagatggttttaatgattttgatgatgaagatgatgacattgacagttatgaacttgacttgtcaaaaggtagtcacacaggtggagtgtcaaggatgagttattcggatcttgagagtgcttctgattcagaaggttttagtgaaattgataatagtagagagtccagatatggtaatagtaaagagtccagatatgataatggtagagagtccagaaatgataataatagagagtccaaatacgcagccaaggttgaggatgaatttgaggatcatcattccctgagatcgactcatcttgctgattcctggcaaaaaaccagaggtcggagtggttcgaatgactacagaagggcatcttttggatcagagagtgatgatgagatcaattcttatccggacgaggacattgacaaaggtcctagaaataatggaagccgtagtcagggaagtaccaacagagcttctgttaggcacaatgcacttgcctacagtgatgatgaaccattttctgatgatgtggattctggtatggctgatcggttcgggcctaggcagactaagtcttccacgaacatcaaggataacttccgtgacacaaggcgtaacttgaatggaagacgttctagtggggaccgttatggtagaacagaacggaatgagcgggaccgttatggtagaacagaacaacggaatgagcgggaccgctatggtagaacagaacggaatgagcggttcaacaattttgacatgcaccgtggcggttcagtcttggataagggccgtggggctaggggtaaccagttagatagtggttcaagaggtttacaaagaaacgcaagaagaaattgggatagaagtggtggctttgacggcaggcacaagggtgtttaaataataatagcaagagtggtatcttaagtaccaaatggcaaccagtgatatccttcatgtgaccttatccaatgccgagggtatttcaatccagctgagcatggctcttatgattccaccatgtgtccatgaccactcttccataatgctacttcaccctgcgacagaggctatggcgattcctctccatctgcacttccatttcaagcattgcacctctctgtctgcttgtttgttacatgtcattgcatcagtcagagcggtcgaacctgaagagctctggaactgggttcgttatttggttcactcatgccgcacaggtacaattttagactactagttagtctccatattgttttgcagagatgcatcaacaggattgtacctcgaattatgagagcaataaaactatacacttcaaacttaatgtgataccaaatgtaacgatgttgaagcgttttggtcgagttatagattctcgttgcaatat

SEQ ID NO: 28495 - DNA, 2425 bp, Zea Mays
acacctaccggcccgccccaacccaatcatacatccatacggctacgagcgacggagcgagcgagggaagttgatgttgtagatgccatccttcctctcctccttccggatcgtagtcgtggcttgactcagcgtagcggccagggcagcggccatgtcgtcgtcggtccggcacggctcgtcgaggggccaggcatggttctgcaccacgggcctgcccagcgacgtcgtcttcgaggtgcacgacatgaccttccacctccacaagttcccgctcatgtccaagagcctcaagatccaccgcatgctcagcgagcaggaggaccagcgtccgacgcggggacggcggcagcggaggagacaggtgaggagcagtgacggagacgatgacggtgctgcggaaacagagatcgaggaggaagaagccgagcctgagcagcagcaggttaggacggagggggagggcgacgggcagccgtactgcattgcgttccccgacttcccgggcgggccgggcacgttcgaggcggccgccaagttctgctacggcgtccgcgtggacctcaccccctggaacgtcgcgccgctgcggtgcgcggccgagtacctggagatgacggaggaccacgccgaggacaacctcgcggcgcgcgcggaggcgtacctggaccaggccgtgctgcggcaccccggcgacgccaccaaggcgctcaagtcctgcgaggagctgctgccgctcgccgaggacctcggcattgtgtcccgctgcgtggaggccatcgccgcgcgctcgtcgtccgcgtcgcggtcctggttcgacgacctggccgtgctcggcctgcgcatgtacaagcgggtgatggcggccatggccgcgcgcggcgacgtcagggcggaggccagggagagctgcctcgtgtcctacgccaggggcaccatcccggggctgtcgaggtccatgcggcgccgcctcgcgtccgcgcccgtgtcctccgaggtggagcagaaggagctcctcgaggcggtggtcgccagcctccccgcggacaagtgctcggggcgcgtcgtcaccgccaagttcctcttcgcgctgctgcggacggcgcacatcttgcgcgcgtcggacgccgcgcgcgcggcgctcgagcggaaggccgccacgcagctgcagcaggccgcgctggaggacgtgctcatcccgagctactccggcaccgcggagacgctctacgacgtggactgcgtccagcggatcgtcaggtatttcctcgcggaggaggagctcggcggggaggcgtcgtcttcggccgcgatcgaggaggaggaagcggtggccgtggcgcggccgtccgccgtggtcatggtgcaggtgggcaagctggtggacaattacctcgccgaggtcgcgtcagacgccaacctcaagcccgccaagttctgcgacctcgcgctttcgttgcccgaccatgcccgtatctacgacgatggcgtctaccgcgccgtcgacatctacctcaagcggaggagcgggaccgggtggtgggcgtggtggactgccggaagctgacggtggaggcgtgcacgcacgcggcgcagaacgagcggctcccgctgcgggcggtcctgcaggtgctcttcttcgagcagctgcagctccggcgcgccatcgcgggcacgctcctggcgccctccgccggcgccgctccgcgcgaggctgcggcgtggcgaggcgcgacggcgctggcgcaggacagccaggtgctgcggctggacatggacagcatggcgagccgggtgcaggatctggagcgcgagtgctccagcatgcgcagggccatcaagaagatcgacgggcgcggcggcagcggcagcggcagccggtcccccggcggccgcagcgcggacgggtccaggcccgcggcgggcgggtggagggcgcggcacgggtgcaaattcagcacgcaggtgtgcgactcgcacgcgcgcaacgtggtggcgtccagggcgtccaggatggggatgagcccgtagccaccgctcgtgcagtgcggccgtcctctccgtccggcgctctcggtccagacatgggatttctcacgcgatcgcgattcacagtgacacacgaccagagagatcagcacgggaagagaatggctgagaagttccagatcttttaccgctccaagtctcagcaccagcctctcaggtctcgcacgtttttacatctctcgttcgtggacgtgagaggtgtgatggccatttgttcgtttgttgtgcgtgtcgtgtcgccccaaatgggcgtggatccgtgtgagttgtcttgtctgtgccggagggagggcggtctgtaactcgccagcaagccgtttccattcagcttgtttctactactcgattgcgccgtgcatatccggttggatttttt

SEQ ID NO: 28496 - DNA, 2822 bp, Zea Mays
cactcctccaaccaagcgttctgcttccgtcctccaatgcccacagtttctgagagaaaagaaaccgacagctcgacccggatcatctctgactccctgcagaatcaatcatcggttccacactatctcttccaaaatttcgttgataacacctgattgatccctatctatatttgattttggaagcataaaagtgcaatgcagttgggaaatgcttctcaaagtacctcagcaatattaaatttctcctgtaccatgtttgcaatgtatgcaaattcatccctctctatctgattttaaagcattaaagtgcaatgcagctgggaaatgcttctcaaagcgccttacattatttttcatccagtaaagcagggtttggataatttcagaatctttaagaataaagtgaaagagaacagcacagttcaaacctttatttcgaaatttcttttgaagcaccagtgctcattgttattaaacccgtgcttcatcttcctgtatgaactgtctatgccagttgcccaccctacttagttcacatgaaatttattgtcggtagagaaaagataatacacaggaggaactgtgcatatttgattttgatgagcgtgtgtatagttatacccttgaattcagccactagaaaattgtcataagagtccatccatggattgcagccattgctgaatgctaaatgaaattggttgtggtctaagtcttaacacacttttgaagtagcataaaaaagtatcagttcattcagagtatttttgttgcacctatattaccactgtagaaactatcacaattcacaaaaaaacattttttaatcacccatttccaaaaactacatacttgttcatattcttttcacaaaatgacacatccataacatgaaatggaactgaaatgatagacttgtctgagttactggatctagatgaatttgacattctagatgtgattgcccttccagggtgatatatttccctgttcctcgtgtcacacataaaaacaggtggaataaacacatggatcaaaacaataagcatgatggtgctcttacagaagtgcagttttgtaaaattatgcataattatacataatgctttgaaacatgtgcttaaatgtgtggttgtgatatttcttttagaatgacagtagtggtttgctatgaaatttactctctctctttctctctctctctctctctctctctctctctctctctctctctcataaaatggatgactattcaggtaaacttctcatgtagtttcaggactcacagccctataaaattttcatgctgggggtttggggctgtattgcaaagttatgtatttcacatatccatgcctgtttgcagatattatgtggtcataataatgaagtttggtttgtaaggttctcaaataatggaagctacctggtgtcatcttcaagtgattgcactgccataatttggaaggtggaaaatgatgatacattgaccaagaagcactgcctccagggtcacgaaaaaccaatttcctttgcttcctggagcccaaatgacagaatgctgctcacttgtggtactggtgaatcattaaaactgtggaatgttgatactggtgaatgtaaccttaaattcagaggctcagcagactgcatcatcagttcatgtgcatggtttcctaattcggagaaaatagtatgtgccagctcggagcctgcaagtgctccaaataggatcttcacttgtgatctagaaggccaaaatctggaagtatgggctggagatagaataccaaaagtcagtgatctcgctgtgacacctgatggccgacacctaatctttgtatcttgcaacgatatctggattagggaacttccaagggggcgggaatggagatttcgtgagaagcagacgatttcatctctttctctctcaggtgatgggcagtcactcattgtgaaccttaacagtcaggagattcatctgtggaaaattaatgaaagttgtactgtgcctgaaaagttcatggggcacaagcaagacaagtttgtgattaggtcttgctttggtggttcaaactcttcgttcattgctagtggcagtgaggattcacaggtctacatttggaagaggcacgtggagatgccgattaaggttctacatggccacacgatgattgtgaactgtgtaagctggaatcctgcaaggccccacatgctggcttctgctagcgacgaccgcacggttcgaatatgggtagggcgcaaaaatgcaacaaagtaaacgctgttgaagtgtgaagttttgtatgtctgtgtaaatagttgtacatctggactgcatccacaaacctgtttgggacaatgctctgttcttcacccctgatgaatatgtcgtcgtagctatttgttcagaaataaacctgcaacagccataggtagccggtgctgctgtgtccagatgtgtgcctggctaaccggtgagttttgacatgtgtacaggacaaagatgcatcagaactttgtacatcttgttagtatatgccttggacactcgaagtgctgaaatatgccttctgttgctgtggatctagtgtgactttgcaacctttggcatggtcaacaaatatgtataagatttgtaacagcattataattggctagaatcgtgcactagcaaactgtccagcacctcttagcacattttatgtacttgtagttttgctagacagttttggggtgatatcttttcacccttgagagaggggatgaatagatgatattgtaaattttgctcaaaacaacacaaacttggtttataa

SEQ ID NO: 28497 - DNA, 1012 bp, Zea Mays
gcttctcagtcttccactgagggaccaccttctactcctactccaggtggatcaacttgagggtaccgttccaggaagtgtacggggacgtccgctgcaacctgaaggaggcagtccagctggccgggctcacatgggaggggcgcgctcactgcgggctcgacgacgcccgcaacaccgctcgcctcctggcacttctgatgcaccggggcttcaagttctccatcaccaactcactggtgtggcaacctgccgccgctccgcagtcaaccgccgccacctgccacttctccccggaccgctctccggacccagtcgtcgtccagctccagcaccagcagcagcagcacaagccgaaggaggcgctggggtctcccgcgtcgctggtgaacccatcgtacgccacccccgcgggagggaaggacagagccatgtactgctactgcggggtgctgagccggtggagcgtcgtgcgcaagccgggacccatgcaggggcgctacttcttcgggtgcgggaactggaccgccacccggcgcgccatctgcccgtacttcgcatgggcctcgtgaatagcaaagcaagcagagatctgggctggtgctttaaccgagggaggcgcgccatgttgctgcggctggctgctgcgcctcccagttccgtatatattattattgttattattatggtataataactttgctcgcgagacaatggaggttatctaggtagtgtctctaacctgtcgtactgacttctgtcgatagaagagaatggggccagatgctgcttaggtgtgatctatcctatccatccatggataataaagaagtttgtggattgctgttttattaacttgatggaactcctccgtaggtgtggtttgtgcaacttggattttgaaggcttgtgcgtctgtgagtgtttgatcaaatcgaaggtggtgtttgtttgctgaatgaaatggttatggaaggtgcctattattcctgacaagctctgttcagtgaga

SEQ ID NO: 28498 - DNA, 228 bp, Zea Mays
gtgcacacagagcgaactattctttcgccttttactaaagaataccgtgtgtgcgccgcaaatagcagcatacgcctatttttgaagggtttctctctgcgaggaccccacaattcaaagataattgtttaaatttaattaatgttttaatttgtaattggtgataaatttaagaaaattgtaattaaacattatttgaaacaacttcattttttagctgttctgatc

SEQ ID NO: 28499 - DNA, 3285 bp, Zea Mays
caagcgcgcacggcacgaacacggatccttccactgccactgccactgccactgccacgcgggacccaaccagccagcgaacgcctcctaggccacgtccgcgcggccgaacaaccactccggcacgcatccaccggcacgcggggccacattgacgggcacgcacgcgcaggccaggcaggcagaggccacaggcggtggccttgtggcgcggcgcaggagcaggccttgccgcgccggcgctgccttgctcgcgaagacgccagttcccaactatttgcggagccgagagccggaggcggaggcgttaagcgtaaggcagcgagcataaagcgccctggcgcccgcccgcccgccgcagccgcaccaaagcctagccaccctcctctgccctcgagtccacgtctcgtctcctcgctccactcgccagtcgccacccaagccggagcgaacccgctgcccgaatagagtaatccgaggagccagccaaatggtggtggccgcgtgagtgtagggtccgggggatatagagagagagagactaggggccggccgcgatgcgggcgtgggagatgcacccgctctgctgcctcgccggtgagtggccggcctcgggcggcgggctcgcgcccggcgaccgctccccgccggcggaggacgcgggggcggcgccggcggtggcgggggtcctgtacaagtggaccaacatcggcaaggggtggcgcccgcgctggttcgcgatccgcggcggcgtgctcgcctactccaagatccggcgccgcgtcgcggcggagccgcgtcccgaggccgcgggcggcgtccggctgatcggggtggcgcgcggcgccgcgggcgccgctgagcgccccatcggattcgtgcctctcaagatatcatcatttagtgaaagtaaatcagatgataaacggttttatataattactccgaccaaaacacttcaactgaggactggttgtgctaatgaccgggcgacttggattgaagcgcttgtcactgcaagaagcgaatattcttttaatggggatttatcaggtgatcagaatgatgcatcattttccacagaaaagctcagaaatcgcttgaatgctgaaggcgttggcgaggccgttattaaagactgtgagcagattattcattcagaattttcgcagtaccaaacacagatgaagcaacgttgtgaagagtatttaagctttattggcactcttccacaggatgttgaggtagttaattcagtagattcaactgtccctgagaagccacggctagagctgttcaagcatgactgctccagctctggaaaatgtagtgaatatagcaacacagaatcttctgatgatgttggcaagcaagagattagtgaactatcagacggagatgaatttcatttctatgacacaaggcaaagtttcagtgaatttgcttctagtcctgctgacccgagaaagggatgtttaaacaacggaaatgaagatcataaatctgttgaatcattgacggttgacaaggctgagaaatatatgctatcacattcaaaaaggcgcttacagttgcctgaaccaatagaaaaggagaaaggagttagcctttggtcaatgatcaaagacaatgttggaaaggatctaacaagagtttgtcttcctgtttactttaatgagcctttatcttctctccagaagtgctttgaagagttggagtattcttatttgttggatcgtgcatatgaatgtggtttaagggggaatggtctgatgagaattctttatgttgctgcatttgcggtctctggatatgcatccacagattcccggccttgcaaacctttcaatccattgcttggggaaacctatgaagctgattaccctgaaaaggggatccgttttttctctgaaaaggtcagtcatcatcctatggtcatggcatgtcactgtgaggggaaaggttggaaattttggggagacagcaatctgaagagcaaattctggggacaatccattcaattggatcctaatggtgtgctaactttagagtttgatgatggagaaattttccaatggagcaaggttacaacaacaattaacaaccttatccttggtcgagtatattgccatcaccatggcacaatgaacataagtgggaatagacgatattcatgcaagctgacttttaaggagcagtctttccttgatcggaatcctcgccaggttcaaggagtcgtcaaggatgctggtggaagcaaggttgcaacattgacggggaagtgggatgaaagtgtgcattgtgtcatcaacaatgatgcctctaaggtgaactctcatggtccacatcagagttctggttccactttgctatgggagaaaaatgagcctccagtcaatcctacccgctacaacttgtccgcatttgcaataacactaaatgagttaacaccagagctcgagctgccaccgacggattcaaggctgagaccagatcaacggcacctggagaatggggagtacgagaaggccaatgctgaaaaactgcgcctcgagacacagcaacggatggttgtacacattttacattgctatactttttttttctcatgaaagctacatcatgatcactgatcgactccatttctacattgtttgggcactgcttgcaccttgagatcttgcatgtacatggtggactgatttcccatcatgggatgtttaatgcatttttttattttgccttaactgaagtcttgtatgtcttggtctgcaggcaaggaagatgcaggagagtggctggaaaccaagatggttccaaagggacagcgaggatggaacgtaccgctacgtcggaggttactgggaggcaagggagcagagaacatgggtcggctgcaatgacatatttggtaacttgtctagcagccagaagctcccaccatccgctctctacacgagctgaagtatataggggtgggtaaggccggaagggcatgttcagtagttgttgacatcgcattaaccagagggtttttctctcgtttctgttgtgttaagctgtgagctaacatgtttttcttgtcaattgtcacattgaagccaaggacatccaagcataacccaaccttttgtcgatactaggatacttatgagagatcttgtggacattattgcgaaaagaattgtcgatgatactattttcttctttgcattccgcaaggacgtgtctgcatttggcccttatgttgtcgtgcttttgtgtgtttatctcgcattggtgatg

SEQ ID NO: 28500 - DNA, 2372 bp, Zea Mays
ggtacgtcgccggcggcgatgacgacgcgcttcaagaagaaccgcaagaagcgcggccacgtgtccgccgggcacggccgcatcggcaagcaccggaagcatcccggaggtcgcggtaacgccggtggcatgcaccaccaccgcatcctcttcgacaagtaccatcccggctacttcggtaaggtcggcatgcgctacttccacaagctccgcaacaagttctactgccccgcggtcaacatcgagcgcctctggtcgatggtgcccgccgaaaaggcggcggaagccgtcggcgacaaggccccgcagatcgacgtcacgcagttcggctacttcaaggtgctcgggaagggggtgctgccgcccaagcccatcgtcgtcaaggccaagctcatctccaaggtggccgtcggatttttcgtggacgctccctagcggctcggcgtctccatgtgccgtgaaggttccagaacccacggggggtcgtcttcctccacaagattctgccaaaagatcctctcggatgcccccgcccacccatttcgccagtcgccatcgagctctcgcttccgccgcccgctgccgttgtatcaccccagtgctgagccctaggatgtgactggcggacgtctctatggccgagccgtaggtggaggcggcacctcggcaccgtgggagatggaggacgatgacaccgagggtgtaggcgagagcacctgtccccccgccgccgaccgaggaggctcctcctcggccggcggcggcggcggcgactcacacggttacactgacatcgagaaggaggtattcgaccgtctcatggagaagagaatcccggaggtcgtcgcggacccggtggccttccgcgaagagctccaccgccacttcgagcgcctgccgctgagctacgccatcgatgtgaacgtcgacaaggcggaggacgtgctgctgcaccggagcattctcaacgagtgcactgaccctgaaaatcgccccatcttccatgtgggcttcctgaactgcatcccgccctcgttggatccacagtataacactcaatccatctctataacactcaatccatctctacgagcgaaaacggtaattgtgggggttctcaggattccactttgaggtacaggctatgacccacgcactttgcaacaccatggtgaagaattttacctttggtgcaactttaaatcaacctcttgtcatctgtagtttcgattagcctttttgaaaaaaaagctgtgccttgtatgagtatttttgtggtgttatgtcttgcttgctaaaaacatatgcttatatatatgctgcacagaaaatttgagccatgtgaagggatcgaggacctcagtttaactggacaaaaggttgtgggtgactatgtggccggttcttcgaggtctgtgtctacctcagttgaatggaagctgcatcaatgaaacctttgtgtatcaggctgccattcagccatatgacttgatctaaacaaccaccactgccatgatttcaatcgcaaaagctcatgccttaattttgatttataaaagcctgaataatatatccacggaccatggcataactcatgcttctggtttagattagaaataataatatcgcttatgcctgattggtgtaaattgatgagtgtttctaccatgcttccatttgttgtgaatggcactttccgcaactgtaggtcaatggaagagttattgcagcaagcttctttgacgtgaaaggagtacttttatttgtaaaatttggttgatcatgagcataaacttataagttagactttagaaattcagcatatttctatgaaatgattggccttgtcttcctcgtctgcttttatattttacgttttcccaaccaattttctgtatgtggaccttctttgtgggaaatcattctattaaattgcttgacttatgagttttggctggttcatggaacttctgaaactgacactcaaatattcacaggggagatgtagaaatcctccatgttcatgaaattattttttctaccattgacaaaccaaagctcctcgctcagctatctgctttgttgtctgaagttggactgaacatccgtgaagctcatgtcttctcaacgactgatggcttttgtttggatgtatttgttgttgatggctgggatacaaaggtgatttaccatagtatgattgtgtagtgctagcttgcttatctatgtatacttggagcatgttctgtaatctgtaggaaccatttttttccctgaaagaaactacagcaaccatttaggtcgcttgaacgttattgtcaaaaacataattaccagctggataatgtcatcattttgtccaattagccttt

SEQ ID NO: 28501 - DNA, 250 bp, Zea Mays
gaaagatgcaagcatttaaaagataagacttacaaactgctctatgctactttcctcctttgttttgacgccacgatactccacaacataattgggcgttttgcagaatgggcaccttcagtgatcaagtttttttcataagaaggcttgtataaatcaccaaacagtatgaaattacgacaagatgaaataaaggatactcactgtgtaggccgagcagtatgagtcggtttcatttgaagaaaacact

SEQ ID NO: 28502 - DNA, 3137 bp, Zea Mays
ccaacagaagatacatgaattttgttttatgatctatacttgctagtgactataggacttttgcaatttttgccgcaagttaaggcctttgtctgagggtttgaaaaccgaaaaataaaaactcgaaatagcctaataccagaaccagtatgggctggatcagctcacacagacaatctcgtagtggcatgggcctaacttaccacacggtggttagcccactgctctaataagtcggtaagttcgaacgaaggactcgaagccacgtgtaacaacagcccaacacatcctgattccaccaaccccttgttcatttcctttcctccagttcctcgtcttctacgcagacccccgttgaagcctagggtttagcggctacacttctcttctagctagttggcgaccaccgtttacgctaaaccacccgcgcggccgatggacgtcgactcggacccggccgcctcgagcaagcccacgcagatggacctcgaggaccagacggacacaaaggggaagggaaaggcggaggaggggaacgggaagggcgaggagctcgcggactccatcggtagcctctctatcggcccggggcgcaccaatttcaagaagaagcctgtgattatcatcgtcatcggcatggccgggacggggaagacgaccttgatgcaccggctggtatgcgatacacaagcatcaaataagaggggctacgtcgtcaacctggaccctgcagtgatgaccctgccattcggtgccaacattgatattcgtgacactgtgcggtataaggatgtgatgaaggagtacagccttggtcccaatggcggcatcctcacctcgcttaacttgtttgccaccaagttcgatgaggttgattgctataattttttcatcactctactgccaattcctgctgttttggtagcttttcatagtactgctggccagttagtcttttcatcactctactgccaattcctgctgttttgatagcttttcatagtactgctggccagttagtctgtttattagttctatctgttatctctccacctctaagttaacaagcattcgaagtggaaacttgtaccccattcatcttcaggtatgcctgttgtttagcccttgtgcttacctgtctttgtttgattgaagtattgaactgtatttccagtcaaatctaatggaaaaagggtcatctggtttaaaattttgaacaacagttaggtgaaaagtagtgtgtaattcaaacatggtgaccattgcgagaagtatttctttgttttgctaacagcactgtaatgcccagtacgctgtgtataggcatcaactgcttctttgagaacgctaataatactttttgtctgtgtcctatgagttaaataataatttgctagccctgcagcttggcaaaatagtatttagaattttaggtagctttacaggtgcacttctacacatggcgatatttcaatttgctgatccaatgcattaacattggtaacaagaatgttgtgcactgttacgattttactaacataacatgatttgggatcaaagactgaactgatgtgctttgtgaatgatgactttggttaaatgtgctaataaagcactctggatgtcatgtcaactcttaccattccattcaagctttcatggagattgtgctcaattcagtccacaaaggaacaccgggggatttatctgttgccacactgaataatttaactttgctgcaaattatattgtacttatggtggtatatgggaaatggacatttctgttacctttattttgttcaggtatatgacatttaatattcattcttaggttgtatctgtcattgaaagacgtgcagaacaattggattatgtactggtggacactcctggtcagattgagatcttcacttggtcagcttcaggagctatcattacggaagcttttgcatcgacgtttccaacagttgtagcatatgttgttgacactccgagatcaacaaaccctgttacttttatgagcaacatgctttatgcctgtagtattctctacaaaactcgccttcctctagtcctgacattcaacaaggttgatgttgccaagcatgagtttgccattgaatggatgcaggactttgaggcatttcagacagctgtggaatctgacaaatcatactccgctacatatacccgaagcctctctctggttcttgacgaattctacaataatttgcgctctgttggagtatctgcgatttctggttctggagtcaatacattttttgaagctatagaagccagcgccaaggaatacatggaaacctacagggctgatcttgacaagaggattgctgaaaaggaaagattggaggaagagcgcaggaaggagaatatggaaaaattgcagaaagatatgatgaaatccaaaggacaaactgtggtgctcaccactggtttgaaggaaaaaaattctgtttcagacatgatggatggtgctgatgaggaggaagaagaggaagcattggaagattttgggttttctgaggatgatgaagacgaagacgaaggagaagatgaggaggtggctcattttggcttttgaggggatccaatagttacttgttggtgtgtcttactgagagtccatatggggctacttgctgaagtggaatgaagaactgtcaatatcagtaggttgttgactttgctattagtctactcttttaaattctggtgccccactgctggctatttatgctatatatttgggacctcatgtcaaagtttatctcgtcgctgagctgtactaatcatattaattgtacgtgcgagtaagaagttgatgggtcaagttgtgtgtgtaatcggttgtgccacaacctgtacctaatccttcgcttcgcttaccacttaccaacatcccaccagtctttttgctgatgaactcggaaggaaagagtcacgaggatatgagtatggtagaaattctagagtacgaataatactatgtttaaggggaagcgaatatgtttggtataaatgtaatctacaatcgaactggctatcactcgactttttatgtggtggcggcatcactgtcacttcaatgaaatgcatgagttaacacatcaagcc

SEQ ID NO: 28503 - DNA, 1927 bp, Zea Mays
ctggtggtgacgtcgtgtgccccagcgcggcgtctagtcatcagatcattatccgcaccgacttgcgtgcacgagcttcgcggcgagggcagcaccggggctgggaatgggaagacactgcagcccagctccagcagcactacagcagtagcgccaccgaacctgaaaactccgaccccccacgaaatcgcggaacctacccacgagccgagccatgctcagccgactcgccgcggcgaggcgacagctactgctatccccggccgtcgcgtaccgctcctcctcggcagcggcgacggcgtcggcggtccacgagagagcagcgcccgcctcggcctccgtgctcccggacaccctcgaaaggggctccgacgcgtaccagcgcaacacggccgccgtcggcgggttgctctccgacctgcgcgcccgcgtctcccaggtgctgcgcgggggaggcgccgaggcggtgaggcggaacgcggcgcgggggaagctgctcccgcgggaccgcatcgaccgactgctcgaccccggcgcgtccttcctcgagctctcgcagcttgcaggctcagatgtttatgatgaagcattaccatcagcaggaaatagcttcggagtgcaaactgccttgcatatatctcgttgacagcggaggtgctaatctccccagattgcagtagtcttgggttcttgcactgctggtggggcatatattcctgcaatggcggatgagagtgtaatagttaagggaaatgggactatatttctagcgggtccaccacttgtaaaggctgctacaggagaggagatatctgctgaggaccttggtggagcatcagtacattgcaaggtatcaggagtctcagatcattttgcacaagatgaaattcatggacttgagttggggcgaaacattgtgaagaacctgcacttagctgctaaaggaacaaatattcagagttctgcttgtggttaccaagagccattgtacgatgtagaggaacttcgctccattgcaccagctgatgtgaaacagtccttcgacattcgttcaataatagcccgtattgttgatggaagtgaatttgatgagttcaaaaaattacactagtgactggttttgcaaggatatgtgggcaaccagttggaattattggaaacaatggcattttgtttacagagtcagcgttgaagggctcccacttcattgaattgtgcgctcagcggcatattcctttgattttccttcaaaacattactgggttcatggtcggatcaaagtctgaagctagtggaattgccaaagctggagcaaagatggtcatggcagtttcctgtgctaaggttcctaaaattacaataattgttggtggaagttttggggctgggaattatggaatgtgcggacgtgcatatagcccaaactttttatttctttggccaactgctaggatatctgttatgggtggcatccaggcagctggagttctcgctcaaatagaaaagaacaacaaaaggagacaaggagtggagtggagcaaggacgaggaagaagccttcaaagccaaagtcgtggaggcttacgacagagaaggaagcccgtactactccactgctaggctatgggacgacggggtcatcgaccctgctgacaccaggcgggttctgagcctctgcctctccgcttcggccaagccggttccggaagacacaagatacggtgtattccggatgtgaataaatgtgtgtgagtaataacgcagacgtgtttaataaaaagctgcctgcacgcacccaatgtgtgtgcacaaataaaaatttcgccctggtttctgtcgtcgaaatatgttgaagagtgttgttcatttcatatattactatctgatgaatgggaagtgttcttcatttgatacgtcaataaaaaaaa

SEQ ID NO: 28504 - DNA, 1333 bp, Zea Mays
gaaacttcttttcccctttcaccatttgccaaatgttttgcggcgggccaaacaggaccagaattacacggaaggagcatgtgcggacaagctcggtttgatgggcttgatccaaaagcccgcataggctgagcaccgtctagtcgtcgccagtttcgttccgctgcagcagcggcagcgctcccctcctcgacgccgcggcttctcctcatcctcgcccgctccgtccgctgactggaagtggtctacacagaaggttaccatattgttaagttaaagttggatcattggaacaatgccgccccataagattgagactgggcatcaagatgtggtccatgatattgccatggattactacgggaagcgcctagctacagcctcctctgataacacaataaagatcattggcctacgacggccgggtgatcatctggaaggaaggaagcaagcctgatgaatgggcactagcacacacctttgctgagcacaagtcctccgtgaactccattgcatgggcgcctcatgagctgggtctatgcttggcttgtggttcatcagacgggaacatttcagtcttcgctgctcgttctgatggaggttgggacaccacacgtatcgaccaggcacatccagttggtgtgacctcagtttcctgggctccagcaatggcaccaggagctctaatcagcgcaggatcttctggccagtttgagtatgttcagaaactcgcttctggtggctgcgacaacacggttaaggtgtggaagctcaacaatgggagttggcggatggactgtttccctgccctacagatgcacaaggactgggtgagagatgtcgcgtgggccccaaacctgggccttccaaagtccaccatcgccagcgcctctcaggacggaacggtcgtcatctggacagcagcaaaagaaggtgagcagtgggacggccgggtgctgtatgatttcagaacccccgtttggaggctgtcgtggtcactgactgggaacatactggcggtttccgacggcaacaacaatgtgaccctgtggaaggaagctgtggatggcgaatggcagcaagtgacgactgttgagccataggtcctctcgagttattcctcgcctgtattttctaaataataattgtagttttcgtgtaaggtaaagttatgcccctgtgggtagcatgtgggactgtttgtggttcacagctgttggcgaggcacagtgcacgagacatggtttcaggctcgggcaaaagtgaacaattaacttgttatacagtccattctgtttattcagtgccttttcgttcccatgtttaattcgtt

SEQ ID NO: 28505 - DNA, 2053 bp, Zea Mays
cccggcttctgcgccagccagtggccactctctccgtctctcgactgaaaaaaaggacccttcttcttggcactccaagcggaaggaacggtggcgtttctccgttctacgaagtggcgcgccatctgcaccggtcggctgcggcggattgagcggtggctttcctcgtcagttgctcttcccgaacgccgccagcaccgctcgtggcatctgcgtctctgccttctccaaccgccagcaccgctcccgatccaggaccaagaagcgtgtgaggagctttcagctgccacccggtgccaccatgctccggcatctccagcgatccctccgtgccattcactactcacccatcatcggccgtgatgccgcctgcaaccccattcccctccaccggttctgggattcacatatagagcatgccacccgagatttctctacttccacaagacttacaggacatccaatatatcagcagaatgagttagaaccaactacgcctgtgaaggatactgacataataattgaccgcatacgaaagagcacacggaaattggaggaaggccctgttggaaaaaatctgtcttcagcggagaaaaggaaatttcttgtcaacactctccttagccttgaagattcaagagaagctgtttatggcacccttgatgcctgggttgcctttgagcaggattttcctttggcttcactaaagcaagcactttcagttcttgagaaggaggaacagtggcatagaattgtccaggtgatcaaatggatgctgagcaaagggcaaggaaatacaatgagaacatatgagctattggcatgtgcactcgagaaggataatagagctgaggaagcacatagaatctggcagaataaagtgggccacgatctgcattcggttccttggcgtttctgccgtcttatgttggctatctactaccgaaacaataggctagacaggctcgtgaagctcttcaaagaactcgaagcttgtggccgtaaacctccaagcaaagacattgtgcggaaagtcgaagatgcgtacgaaacgcttggattactagaagataaaaaggtgttgcttgataaatacaaggatttatacaacaaaccgtctcgggacgatcggaagaaaggctccaaatccaaaaagatcgagtctgataaaccatctgatggtgacagtaaggaaagcaagatggaaacatctgagaaccttgaagaccgctgtttccctgtggatgcaaaaccagatgcctctgcttaggctcatcactgaaccaccgacgtcgccataagatttggccaaaacccggtgctgtcagcattagcgattggcgtgctctcagtacacgtttgctcccctaaccagttagtgttttttctttctctctagacatgttacaagggcatttgtatttgctgttttgcactgacatcatttttgccaagaccctaagcggtataatactgtgcgacggctatgtataatactgtgcgacgttcattactggcagcaatatacacaccccttgttcgatataatgtgcgcagggaaccgagttacaatatttcaccatcttttctgcaactctgaatacttttttgtggaggttgtgggggggggagtattcatgtgtcaaaggaaaatgtgggtactagctatggcttatgatgacaggtgagaagtgggaagctactaaagcgggttgcccatatctttggtgcttttaccttgcattttccctcttgtgtgctttggaaactttgaagacggaattttctcctgggcccaggccggcctggcgaagagctttggatactgtgacatgatgcttcttttctttttccccctctgtatctctcttactctctcaaaggaaggcctattgatgtatgtagtatggttccctcctgtatatggctagttttggcacttggatggatgatggtggttgaagtggaaccctagtggtcatgcctcatgcatgcattgtgtagtgcgtccctgcttgccagctatatacatactcctatgcctgcgtttgcg

SEQ ID NO: 28506 - DNA, 2942 bp, Zea Mays
caaaagcatgctggacagctgatagattagcaaaaataggttgttaggacatttagggagaaagacattccttgtgatgttgtctggatggatattgactatatggatggttttaggtgcttcacgtttgatagtatccgattccctgatccaatatcaatggtagatgatctccattccattggttgcaaagcaatctggatgcttgacccagggatcaagaaggaggagggttactttgtttatgatagtggctcaaaaagcgatgtttggattcaaaaggcagatggcagtccattcgttggggaggtgtggcctggtgattgtgttttccctgactatacatctgaaaaaacacgagcttggtgggctagtttggtaaaggacttcatctctattggtgttgatggaatatggaatgatatgaatgaacctgctgttttcaaaactaccacgaagacaatgcctgaaagcaatattcataggggagatgctgatattggtggtgttcaaaatcattcatactatcacaatgtctacggaatgctaatggcaagatctacttataaaggaatggaaatgggcaatgcagctaaacgaccatttgttcttacacgagctggttttattggaagtcagcgttatgctgcaacatggactggtgataatctttcaaattgggagcatctgcacatgagtctaccaatggttcttcagttgggtctcagtggtcaaccattgtcaggtcctgatattggtggttttgctggaaatgctactccaaaactttttggaagatggatgggtgtgggtgcattgtttccattttcacgtggccatacagaaactggaagcattgaccacgaaccatggtcctttggtaaagagtgtgaggaagtctgtcgccttgcgctactaagacggtaccggctactgccacatatctacactcttttttaccactcacatacaaagggtattccagttgctactccagttttctttgctgatacacaagaccctgaactgaggaaagttgagacttcctttctccttggaccactcttagtttgtgcaagcactttacctaataaaggagctcatgaatatgcacataagttaccgaagggcatatggttgtcttttgattttgcggattcacaccctgatctgccggtgctgtatctacaaggtggagcaattcttcctgtaggtcttcctattaagcatgttagtgaagcaagtttggaggatgacctgtcactaattatcgcattgaatgaaaatgttctccaaacctggggctaagtgctgcagtccaactattgttagcactgaaaacaacacactccttgcgaacacacaagtgagcgaaccacacgcttctgctacgatctacataacaaggagagatgccgaagcaccactcagcatggcttctgtcgccacaacaagctgtgacctgctggtaaagctgaaggtgttctctttgaagatgcaggagatggatatgcattcacacagggagactatcttttgacatattatattgctgaactccactcatcagtggttactgtcaaaatcttaaaatctgaagggtcatggaagagaccaaaacgaaatctgaaaataaatatattgcttggtggaggtgctatgataagtacagatggtgttgatggtgaagtaatacaccttacaatgccttctgaatctgtagtgtcaagcttagttgcaaccagcgaatttgagcacaagaaacgaatggagatgattcagcctatacctgatatagaagagccatcggggcaggaaggtgctgagctatcaaaaatacctgttgatttgaaaagtggagactggttccttaagattgtaccatggattggaggccgtattatatcgatggcccatattccttctgattcccagtggcttcacagcagaattgagataaatggttatgaagaatacagtggggctgaatataggtctgctggttgcacagaagagtacaaagtcatcaggaggcaccttgaacaatctggagaggaggaatctatttgtatggaaggagacattggtggtggtctggttctccagcgccagatatccattttgaaggacaacccaaagattgttcagatcgactccagcattcaggcaagaagtgtaggagctggttctggtgggttttcaaggttggtctgtttacgagttcatcctacattcaccctgctgcacccaactgaggtagtagttgctttcacggccatcaatggttcaaagcaagagatctccccggaggcaggagaaataacattcgagggagacctcaaacccaacggagaatggatgctagtggacaagtgtgtcgggctgagcttggtgaaccggtttaatcccagggaggttagcaaatgctttgtgcactggggaactggtgatgtgaacatggagctctggtcagaggaaagaccggtgtctaatgagacgccgttgaggatttgccaccagtatgaggtgcagcaaacaacctaaacacctgcccgaagagcagaaataaaaataccaatttggaggatacttcagttgcttgcacttgttttacggtctctgtattgacggtcgcgcaccataacttccatggtattttggagtcgtgtcgttagtcattaccctcttggaggactttgggtctgctgaaaacatggttactcagcaatatctgctactgttcacgactgacattcaaagggttactcagcaatatatggataaaatttgtgttaaagataagttgtgtcgtgtgggttgagttatgtgtgttgtgttgtgctgtaccttcttctatctattaatggaaagatacgtagatctcctgcgtattcgagaaaaaaaactatatggataaaattttatgaaacatcgtaagtgtg

SEQ ID NO: 28507 - DNA, 616 bp, Zea Mays
ctccaaccccgacgaggcctccctggacctctccttcttaggacatccaaatggtgaactgttgttggggcccaccttgctgccttattatgcgcagtttggcaatgtgacctggtatagagagctgtagcggtgacagaagacaaactcaaatggaggtgcttctttctgggtagcacaggggactaatgacagtatgggcgccaggtgattggtgtggcgtgattacagtactacacgcaactggttacaacattgaactgtcaagattacatagctgaaaaaggtaaccgctgagcagtctcggagggaacatcggataaaggctggccagcttcgtgttgtaggacgactggacgagatagcattgtcggccaggccgagatggaagtgtccagcgataatcagtggatcatgagttcacgagagaagacccttgatgatgtcttagatcttgttccgttgcgtctggatcaaagagtccatgcagttatctcatgcaactattcttgaagagtccatgcgggctattcttgaagagtccatgcgggcacgtgatttactaatggagcagaatgttgccctggatttagctcgaagagaggctgagatggct

SEQ ID NO: 28508 - DNA, 2824 bp, Zea Mays
ctatgcacccggctctgccccttggaaacgggtgtgacactctcccacgacgtgcaactgcggatgtcgttccctcacaccttccttcagaatggccgagccgagcgcatgattcacaccaccaccaaggcaccaacatgctgcgttgcctccttttctaggcttcgatccgattccctgatccaatatcaatggtagatgatctccattccattggttgcaaagcaatctggatgcttgacccagggatcaagaaggaggagggttactttgtttatgatagtggctcaaaaagcgatgtttggattcaaaaggcagatggcagtccattcgttggagaatatgcctcacatagtctacattcaggggaggtgtggcctggtgattgtgttttccctgactatacatctgaaaaaacacgagcttggtgggctagtttggtaaaggacttcatctctattggtgttgatggaatatggaatgatatgaatgaacctgctgttttcaaaactaccacgaagacaatgcctgaaagcaatattcataggggagatgctgatattggtggtgttcaaaatcattcatactatcacaatgtctacggaatgctaatggcaagatctacttataaaggaatggaaatgggcaatgcagctaaacgaccatttgttcttacacgagctggttttattggaagtcagcgttatgctgcaacatggactggtgataatctttcaaattgggagcatctgcacatgagtctaccaatggttcttcagttgggtctcagtggtcaaccattgtcaggtcctgatattggtggttttgctggaaatgctactccaaaactttttggaagatggatgggtgtgggtgcattgtttccattttcacgtggccatacagaaactggaagcattgaccacgaaccatggtcctttggtaaagagtgtgaggaagtctgtcgccttgcgctactaagacggtaccggctactgccacatatctacactcttttttaccactcacatacaaagggtattccagttgctactccagttttctttgctgatacacaagaccctgaactgaggaaagttgagacttcctttctccttggaccactcttagtttgtgcaagcactttacctaataaaggagctcatgaatatgcacataagttaccgaagggcatatggttgtcttttgattttgcggattcacaccctgatctgccggtgctgtatctacaaggtggagcaattcttcctgtaggtcttcctattaagcatgttagtgaagcaagtttggaggatgacctgtcactaattatcgcattgaatgaaaatggtaaagctgaaggtgttctctttgaagatgcaggagatggatatgcattcacacagggagactatcttttgacatattatattgctgaactccactcatcagtggttactgtcaaaatcttaaaatctgaagggtcatggaagagaccaaaacgaaatctgaaaataaatatattgcttggtggaggtgctatgataagtacagatggtgttgatggtgaagtaatacaccttacaatgccttctgaatctgtagtgtcaagcttagttgcaaccagcgaatttgagcacaagaaacgaatggagatgattcagcctatacctgatatagaagagccatcggggcaggaaggtgctgagctatcaaaaatacctgttgatttgaaaagtggagactggttccttaagattgtaccatggattggaggccgtattatatcgatggcccatattccttctgattcccagtggcttcacagcagaattgagataaatggttatgaagaatacagtggggctgaatataggtctgctggttgcacagaagagtacaaagtcatcaggaggcaccttgaacaatctggagaggaggaatctatttgtatggaaggagacattggtggtggtctggttctccagcgccagatatccattttgaaggacaacccaaagattgttcagatcgactccagcattcaggcaagaagtgtaggagctggttctggtgggttttcaaggttggtctgtttacgagttcatcctacattcaccctgctgcacccaactgaggtagtagttgctttcacggccatcaatggttcaaagcaagagatctccccggaggcaggagaaataacattcgagggagacctcaaacccaacggagaatggatgctagtggacaagtgtgtcgggctgagcttggtgaaccggtttaatcccagggaggttagcaaatgctttgtgcactggggaactggtgatgtgaacatggagctctggtcagaggaaagaccggtgtctaatgagacgccgttgaggatttgccaccagtatgaggtgcagcaaacaacctaaacacctgcccgaagagcagaaataaaaataccaatttggaggatacttcagttgcttgcacttgttttacggtctctgtattgacggtcgcgcaccataacttccatggtattttggagtcgtgtcgttagtcattaccctcttggaggactttgggtctgctgaaaacatggttactcagcaatatctgctactgttcacgactgacattcaaagggttactcagcaatatatggataaaatttgtgttaaagataagttgtgtcgtgtgggttgagttatgtgtgttgtgttgtgctgtaccttcttctatctattaatggaaagatacgtagatctcctgcgtattcgagaaaaaaaactatatggataaaattttatgaaacatcgtaagtgtg

SEQ ID NO: 28509 - DNA, 325 bp, Zea Mays
cagttttcccacttcgaacgatgctacacgaagtacaggaaaaatataattctaggagaagcaatctcaccgtgaatctcgtgacggtaagccctaccaaaggcgaagcgtggattgaccaaggcccctgatctccagcgagaaattggcgtgctcatagtgacccattatgcccggaacgacttgagccacacgcgggtaaccccgatgagcctccccgaccaacgctgagggaagccaatagtccaccgcgatgttgacgtccagctccgtgatccctcccttgcggtggtgtcacaacggtagaatccaaggtttgctggcc

SEQ ID NO: 28510 - DNA, 657 bp, Zea Mays
gtccgctgctccggcgagcccgctccacgaccgttcgtctattctgtcgcgacgtctgtccatgcccatcagttgtgtggaggagctctgccgttcgatgtcgttcttccccgatcttgctctctgcgcagcggctaccgcgcttcctccatctcgccatggcaggtgcccgcgagctcccctgcgtacctggaagcgcgcgagccccggcggctcggctgcatgtgcccgcgacgcgtggccggcgtcgcccacagtctacgcagcgcgcggccagcccaccgtttcgaccagctgcgcgtggccggcgtgcccgcgactcgctcgtgcgtccccggtgcagccttgcgcgcatcctgcataaccccaacgtgacgtcgttgccattgtcgtccgtgcccgcagcagccccggcgtagtctgcgtggcgtaacggcagcctcgccgtgctttgcgtcgtgcgcgcaacacgtcgtcgtgcctcgccacttgctcgtctggccgtccgccgtcgttgcgagatgagcatcatctacgcattggtaaccttgtttcactgtgtcgtgcgttttaaataattaattatatttttgtttaactaacgttaattaattagacttttcaattaaactaatttatattagttaacttacgctt

SEQ ID NO: 28511 - DNA, 2207 bp, Zea Mays
gctcgcgccgccattaccttccgttcttcattgggagattgaattttgcggcaaccactagtttagggactgcatgcgaacgcctgagtcaggcctgacccgcgctgattttaggctgccggctgccaagatataaaaaagatcgcttatcgccggcgccaagtgcagttaccaatacatcatgtcaagggacgcgtggtccgtgctggcggtttcggtctgcctcttggcttgccccgtgacgatcggcgggttctcgtggaacatcttctcctccccgtccccgtcgacggccgccacgggcggcgaccgcggtccggcgatggcgctcgacggcgcggtggccgacttcgccatggacggggccggtgggcccagagggctcaagctgctggagaacgcgcggggcaagctcgccgggccgcggaactgctggcaggatgcgtacggaaagctgttcgccagctgcggcgagatcatggccgacaaggagaggcagtcgcgcctggcgtggcacctcagcagctgcttccaggaggactcggggcgctcgcccttcccgtcctgcgccgagggatccgagatggtgcactgccgcaagcggctcggtgagtcccaagacaaggtcttcctcgagttcttcttggagaccaacaccctgtgccaccaattgcaggctgaagctttcaagcacaacaccgagagactcgtcaacgacctcacaaggacatccaagtatgccgaggagaagctcgaggtgatcgaggagagggctgaccacatcatcaaagagtcgagcaaagtccaggacacactgtcgtcgatcgagatgcagaccgacaacctggcagaggcgtcgaagcacgtcggggtgcagatcaacgacgtgctgctccactccaagtccatcttcgagcagtccaaggagatcgccaccgctcaggctgaactgggcagagggcaggcggagatgagggagaagatcgaggccggcatggcgcgcgttgaggagtcgtaccaaacgctaggaaacgggatggataagctgaaacaggagactggatatatccacaaggaaatccaaagtgtcggtgcgtcgatgtcttcgaagatgcagcatttgcagagcaccgctgatgacattgggagtgctgctggaaagtcgttggagaaccagatgcagctactgaatggacaggcccaggccatggatggactgaatgaactccacagctttcaagcacaagctcttgaagaaagcagggaaacagttcagagacttgcacagtttggccagcgtcagcaggaggagctgctgtcccgacaagaagagatccggcaagcccatgagcatctcatccagaattctcactccatactggaagcacaggaagagtttagagcaaagcaggctaacattttcgctgctctggacaagctgtacattctgcacaacgccattctagccgagtctcgcttcatcaaggcctttttcttctactgctgcattgtgttcctcgtctacatgctcaccagcgcaaagcagacgttcagcatcaggggccacctctactttggcctgtgcttcacgcttctgttggagatagggctgatcaaactcggtgctgacgacttcgacaggcagttctgggtcatgtccaaggtgttcttggtcagaatggcgttcctcggcgctgccactgttcagatcctgcactccatattcacctacagggactacgaagtgctgaactacgggctgctccagacgctggtggagaaggtccgggcgctggaggaaaacgccggtgggagggcaccgtcgtacgcctcggagtcggaggagagcctgagggactactcgtgggtcttcgacgagctggcagacgacgtggacagcaagatggacccaacctatgtcgtgccgccggagaggtcacctccaactcgacggcgcgaccaaatcgtcgtggcagaggagactggcgagaactccgtcaccacgtttgtctcccggaaatacaatctgcgggcacgaaaataggcagcggtctggtttttttttagttccgaaagagctattttgagtgccgcatcagatgttggtgaaattttaatttacacgttggtctaccgcattgtaaagaagctaccattcggaaataaaatcacgctggagaaatctcgtgtgctattcagcattttgc

SEQ ID NO: 28512 - DNA, 930 bp, Zea Mays
atggcaggagctttgcctttcattaagaggggaaaagaaatgtacaatagaagggagtttgacaagctcccgaggccttgccaaggttttgagtcatccgtccaatcctaccaaagccagcggagcctgagcgcacgtccaaacttctcaaggtcgaggaccccaagttcgcccaagtctttaggtctactcaccgttgtccaattgaccagtttttataagtttttttttgaaactgcagatatcagacgagtgcttttcctgaaaatacctgaagcacgcaaacagttgctaatgtctgagctggatagagtggctcaggactacaagatccatcgcgatgagattcacagtaaacttgtccagatcatgagagagaggctgcttgcaaatcttagaaaattaccccaaattgtggaaggctggaatgccccacaggataatgatgtgcagccgagtcaatttgctaaagctgttacaaaggaagttacctatttgcaccgtatcctttctcaaacactgcttgaggttgaggtgcaaacaatattcaggcaagtggttcaaatatttcattcacatattacagaagcatttacaaaattggaagtcagtactcctcaggcaaaggatagattatgccgagatgttcagcatattcttgcatgcatccggaagttgccagctgacaacttcagttcagaaactattccaaattatggtcttcttgacgaattcttggctgagaactttgggacgaaagttggtgaatgattgactgtacattaggaactgactcatgtctataaatgttcaatggtggaaactggaaactatgttgattgggacgtggtccaagatgttgccgtttttggcgtgaattctgtgcagcatcaacaacatcaatatggccttttagtcccaaacaagttg

SEQ ID NO: 28513 - DNA, 931 bp, Zea Mays
gtacatgtcaatcccactgcttgccctccaagccatgcacttatgatgtgggctctcgaatatgatcctggcatttgctccacttatgaagaggataatactggggctgtggtccacaaaattgaaggaaaggtaaaatcaatacgtcagtttggtaagtacgagagggagaatatgaagaagagggcaaacgatggtgatggacctgtccctatttcggtcttcctggttgctagtgtcctaaaagagaacagtacaaagcttctgcaagaggctcgagggattgatgacattattaggatattgaataatgttaatggaaatctggacgccaaaagagcttgcgttgttgcactaaagcttcataggaagtatcacaaaaaggaaaagaaatcctaacatcatatggcgagattgcacgcaacacaacactgggacttatatattgcttgtttctgttcctttcattttcccactcactgtatcggaggaagaaggtggtttacatatacagtcgcgggcgagacctcataaatataagtgacttattgtatctacaatatcaatgatccacgtccacagcctactcaattgtgaacatcaacctagtacatgataatttattcacgatcacaatggacttggcaaatattatcccatcagtatttgtcatgaacctcagtctactctcgtatcatcttaggtttttggatcccttcgttttgaaggaactgaaatttacttaatggagtaggttacttggtttacattctaccacttttcaaaatttaaatacaagtatatctcaaatttataggatgatgaatgaaaattgattttatatatcgatagtctatgtttctaatttgtaacttatagcatgctcttcggcttgcttcgctacagtagaaatgtaacaaataaatgtctg

SEQ ID NO: 28514 - DNA, 7583 bp, Zea Mays
atggagggccgcgacgacgacgacacgggaggggccggcgacggcgcgggtgtcgggaagggcggggagaagaaggggaggaagtcgccggagtccaaggccgtcatcgacaaggccggggagggcaaccggatggtcttcttcgatggcccggcgctggcgttcgacctggaggacctgctccgcgcctccgccgaggttctcggcaagggcgcattcgggacggcgtaccgggccgtgctggaggacgtcaccacggtcgtcgtcaagcggctcagcaaggaggtcagcgccgggcgccgtgacttcgagcagcagatggagctggtcggccggattcgccatcgcaacgtcgtcgagctccgcgcctactactactccaaggacgagaagctgcttgtgtacgattactacaccagcggaagtgtatccaacatgcttcatggttttgggtacccgttgccatctctagccctgtcgtcctgtccacgccctcagccaaaccctagcactcggtcgcgcacaggcacaacgcagcgcagtcgcgccgtcggcattcagccgtcgcggactcgccgcccacccaggtcccaggctgggagagtggcagacacccactccgccactcgtcctcagccaccgaccaccgtccgtggttcccccaccatgccaggactgccatccgagaaggagtcgatacccaacctcatcttgcgaggctttggcaccatcgaccgtgtgaaggcgaagctggagcaggcctgccctgaagtggtgtcatgtgccgatatcttggctctggtagcaagggacgtcgttgtactgaccaaagggcctcacggggatgttccaatctggcggagagatggtagaagatcggtgaagcaagatgcactggacaacctccacgcgcccttcttcgatgttggtcggaacatgtgccagttcttcatgcccaagggcctcaacgccaaggaccagattgttctgctaggcgtgggcgtctgccgtgtgccgactactgtctggtggctggtgtccagcggggtggaatccggtgggggcgtcaggtcggactccggtggacggagggacgcagtccggtggccgacgggctggcaggtggagctcgacgcgtcgcgcgggacagggacggggcgaacgacggaacaggcagatgacactcgacgccgacagaagcttggcggccgtggctcgggggtcgggactcggggctcgggcagaccgcagatggcctcacggccagccgaccaggcacagcggcgtcgcggcttaacgtgggtgagcaggtgaggcttcaggcggcgactgtgttctggagacctgagggagtgagggttagcgatggattggctgggacttggagccgcttaggctgggccggcggacctgctaattttttttggtatggcttgggccataatgggccctccgcccctgcttgtatgcaaatgtaatatttttgattgtctgctggttatatatatatatctgtctgtgctgaaaaatggaagcaaaacgtctcattttttttttgcaatttggctcttttttcgaaacaatttcatgtttggacccctgaataacttaatgtcatttttggaccctttactcggcgtcatggctcatggcgctgaggtaacacatctcggcgccatggcctatggtgccgaggtatctagtgcgctggcgactcagatggtggcctagcacgctgatgtggcctagctcggcgccacagatcgtggcgtcgagctaagagatggcttccgccgtgtaagcataactggcattggcaggtacaagattattgattctcgtgctgaaaacatccatttgagactttgggtcacatcaaatggaacgggaaaaaatatcacgttaacaaatgcatagaagttaaggctttgtttgggagtaagtggaatgaagagaattgaggtgactagaatccctcactatttaaaattgaatagtaggggattctagctccctcaatcccctccattactcttgcttccaaacaagccctaagagaaacgaaagcatacatggtcctatctccctcattaaaataagcattcacaacttcatttagatcgtgaccatgttcctgagtaaaaaaaatcggctatccgttgtagctgatgagtcgaaaaggcaatcatatttgtagtaaacaatgattatgtgtaatatctgcttcttcagtcatactacttgacgaagaataacttattatttaatgaagttaaaaccactacgggttaatatgccacacactgaatagtaagtatttccttattttaaataacattctttccgtataactggcttgaacaactgacggatagaaaacatttaatattcaacaataaaataccattgtgtcattgtgtggctggattggattgctctgcggctgcgacaaaaagtggaaccaaccatcattgcatgcatgcagatgcttgatgcttttggtcatgactcatgagagagaatggtcaatggtgtgtgtatggctgtgcacatgcagatgcacttagtctgttggacgcggggacctgaattaaccggttggctgttgtgtgtgtgcgagtcaagcgtttgaagtgttggcagggagctcggcgccatgatctacggcgccgagctcggacatgtaggcgccagcaaagcataaggggtccagggcattcagtatcttggcgccataagtcatggtgtcgtgacgtgttacctcgacgccatgacctatggcgccggcaaatggtctaaaaacgacattaagtcgttcaggggtccaaacgtgaatttgtttcagaaaagggccaacttgtaaaaagttcggcaaaatgtccaggtctgtggccctgtcgtgtttcgggtctcctcgggttcgagtctgggtctagggctttcccagtaatataattcatgttttcgtcgggtctttaattcgagttttgggggcgggtctgcggacgctgcacctgactcgaacccacaccattgccaactctagaaagtgactaaggcttctgccaaaagtcacgatatgccgtttgaccaaggccgtgaggcgaaggaaaccataaaaaaaaccaagcaaactagaaaatgcgtgaatcaacgaacacgtaaactaccccataacatcagaagggatttgccaaaaaaaagtttaagaaacgtttgaaatcatttcgaatttatgtctcaagaactcacggttgtcttaaatcttatgcttgttcaaatattgtagacttcaatgtacttaaaggaagcgcaaaattctagtaacaagctgacgtgcccttactaaatttggttggagaaggatccttaatggcctctaggtaagggttgacttttggggcaacacctcacttttgattgaggtagtcttggctctcaaagataagagaatgtcttttgtggcatcttttgcgccaatgaaacaacattcataacatccatagagctccggattctctgaacattcaactgatctttcatcttctcaataaacttcttaaacttcatcgtgtgcatgtgctccatccgcatcatcctcgtcaccatctacttcctctttggcctctttctccactgggtctgcttctttttctttattatctgttcgctccttgatttcttcatcttcttcgatttctctgtcttctttatctacttcaggatatcaatcctctgataggtaagtaaaaaaagatgagagccttcatctcctcccctctctgcaaattcatgcaatttcttacattgctcccttctcccttatcgttttctcgaccgcttgctgcctgctttaagcctttcagagaatttcattctattataacagtcgtctgaatcctcaatcattggaggattctcctcatctacacctttagtacaagcatctcgtagaataatcctgatctctctgaaaactgctattgatgttcttacgttaacaccttcaagatcttctatccatggagtagctaacccagcaagtatgtttttatatttttcatgctctttttttcaataatacccatattctcggacccagaatgagttttttctatttagaactgacccggatgagttttcgactatgacatccaatgtaggctggtcagaagtcaaaaatgatctgcaaactgcattgtagacacattggatacgtgctgtctcagaaatatgaactacgaagattccaatagcacgtttgatatccctggacttttttcttggcaattgtatagactctcaaacgaatctcttagagcatcagggcccatcctagtttgcccaacgtccgtatctggattgagaaacctatagttctctgcaatatatatatatatatatatatatatataacaatgacatcttatagcatttaactttctatttcaaatgttccatacattccacccctccaacccttaaaatacaggtttcttcccgccagtaacaaagtaatatatcgctgcttatactcaatggtaagaaaaaatgttccacccgctggagtggtatagatcatgcgatcaggatcacaaatttttgatatgtcaaaatgtaagccatattttagccatcatgcacggatgacctcaatcccacacccaacattttttagagaatgattttcagttccatcatcagatttatctaagtatatggtggcttttttactcacttctatatccttgatgatctgaatcgatcgcacctcaaacaaaagaccatctaacagatcagttattttccaggttttctaaaagatgaatatagtcaatatgtcttttgcttagaaaacctgaaaaatatttgatctgttagatggtcttttgtttcaggtgcgaccgattaagataaagaatatggaagcgagtaataaaaccatcatatgcttagataaatctgatgatgaaactaaaaatcagtctctaaaaaatgttgagtgtgagattggaccatctgtgcatggcgcctgaaatatggcttacgttttgatatatcatgaatttgtggttctgatcgcatgatatataccactctatccggtggtacattttatcttaccattgagtataagcaacaatatattactttgttactggcgggaagaaacctgtattttaagggttaaaggagtggaatgtatggaacatttgaaatagcagtgtcaaatgaaaggtacatgctacgagatgtcactgttatatattgcagaggactatatgtttctcagtccagatacgaacgttgggcaaactaggatgagacctgatgctctaagagattcgttcgagagtctatacaagtgctaaggaaaaaagtacagggatatcaaacgtgctattggaatcttcacagttcatatttctgaggcagtacgtatccaatgtgtctacaaggccgtgtgcagatcatttttgacttctgaccagcctacattagttgccacaatcgaaaactcattcgggaatatgagtattgtggtaaaaagaatatgaaagatataaaaaacagacttgtaaggttagcttcttcatgtgtagaagatcttgaaggtgctaacgtaagaacatcaatattagtttttagagagatcaagatcattctacgagatgtttgtactaaagatgttgatgaggagaagcctccaatggttgagaatctagacgactattataatagaatgaaattctctgaagtgtttaaagcaggaagcaagcgataaaaaaaaagacaagggagaatgggtcaatgtaacaaattatatgaatttgcagagaggggaggagatgaagaccctcatctttttttacttacctatcagatgattgatatcctgaagtagataaagaaggcaaagaaatcgaaaaagatgaaaaaattaaggagcaaacagataataaagaagaaaaagaagcagacccagtggaggaagagactaaagaggaagtagagggtgacgaggatgatgcggatagagcacatgcacacgatgaagtttcagaaagtttactgagaagatgaaagatcagttgagtgttcagagaatccggagctctatgaatgttgtttcattggagcgaaagatggtcacaaaagatattctcttatctatgagagtcagaactaactcaatcaaaagtgaggtgctgccccaaaagtcaacacttacccagaggccattaagggtccttcctcaaccaaatttagtaagggcaagcgagtttgttactagaattttgcgcttcgtttaagtatattgaagtctacaatatctggacaagtctaagatttgagacaaccgtgagttcttgaaaaataaattcgaaatgatttttattttactactgtatacgatggttagattgatgttggtaactgactaactgttatgaatactgcgatatatatttctatgtgctactgatcttatgatatgttttgtgtttatctttcggctgtgcatgagctataggtacccctccttggagaacatagggcttttgctgatggtgatgctgtattctgggataaggaatatgctcatgcattgaaatgttacactctagtaacgttcatcctgaatcagcgattgtctaagcctgcagaagtgttagtaggaaccgtgctggggctgtatgaggacatcagatacaagtctgagtaaaaaaaagtgcacctgaaacaggttgatattattggactgggttctgggggttgatattattggactgggttctggtaccgaggtggaccagaaacttaagtatgctaatgatctttcctcgggtgtgatactcggaagagagcttgtgaaataagtgcatgcaccgctggtgcccaggtaaggggtcagcgccttttgttttctgccacctcacatacgtttcagtagttttgattgggtaatcatctgtatagacttcaccttgtgattcatcctgatatgtaataacgaattttgcacgtaaagacacataggtttgtcaggatgcatgcttgttagctgtttgcttatatgatcctgaaagcccttaagaggctttatttatggttaaaagctcgaacaattaaggatgtcagtgctggttctgatctcttcgaggtagaaccaacaaagtggtttcctgatagagctgcctcttgtatgctttgcacaatactttttcgtctaaaatttttgcacttgccatcattgctaattttgtggttattttcaaagggtagaagtttgatgcctactggtaagatactttacatctactgatttatgagccgtagaccggacaggagatgaagatgatgccttacatgaatgccaaggcaccgaacggtgaagcctgggtggccatcattactcacctattgatgcatttgttctcactaagacgtaggaattctttggactatgtatttagctcagaaatttctgtttctgtatgttgtacctcttatactaactcataattctttaccttacaatattcagatgactatatataacatttgatacaaaaacataa

SEQ ID NO: 28515 - DNA, 4264 bp, Zea Mays
ccaactgcagtgcgggtctaatctagccccgcgaattccccaattttcgccgctccaattcgctcatccgtccgcgcgcccctcgccgaccggccggcgcggcgccggccgacgtcctctctccggggtagtcagtcgcgcactgcgcatcgctgttgttccttccggttcctttcgcgtccccccttcggagcagggcaacgtccaagagatattatcgctgccgctgccccgcgcgggccgctcgctgtcccactcgtgcgccacgcctcggactcggaggtgtattccctcttctccccccgtgcttatccgcgacggaatccaatcccttcgctcaagtccttctcctaagcaaagccccctcgcttttggcgtatgcccccgctggcgcgcccatgattcccgccgattcctccgcccgttcagtccagcaacccttgctgctgcagtgctgcggctagttcggtggcggggaaggaggaggaggcgagatcttggagtggggcgaagcggagatgtcgttgccgtcgaacaaccggaggacgtgctcccggagcagctctgcgcggtccaagcacagcgcgcgggtggtggcacagacgcccgtggacgcgcagctgcacgccgagttcgagggctcccagcgccacttcgactactcctcgtcggtgggcgccgccaaccgcccgtcggcaagcaccagcaccgtctccacctacctccagaacatgcagcggggccgctacatccagcccttcggctgcctgctcgccgtccacccggacaccttcgcgctgctcgcctacagcgagaacgcgcccgagatgctcgacctcacgccacacgccgtccccaccatcgaccagcgggatgcgctcggcatcggcgtcgatgtgcgcacgctcttccgctcgcagagctccgtcgcgcttcacaaggccgccgccttcggggaggtcaacctactcaaccccatcctcgtgcacgccaggacgtcggggaagcccttctacgccatattgcaccggatcgacgtcggccttgtcatcgaccttgagccggtcaatccagccgacgtgccagtcaccgccgcgggcgcgctcaagtcgtacaagctcgctgccaaggccatctccaggctgcagtcgctgcccagcgggaacctgtcgttgctgtgcgatgtgcttgtccgtgaggtgagcgaactcacgggctatgaccgggtcatggcctacaagttctatgaggatgagcatggcgaggtcatttccgaatgcaggaggtccgatctggagccgtatcttggactgcactacccagccaccgacatcccgcaggcgtccaggttcctgtttatgaagaacaaagtgcggatgatatgtgattgctgtgccactccagtgaaggtcattcaggatgatagcctagcacaacctctcagcctctgtggttccacactcagggcttcccatggttgccatgcacagtacatggcaaacatgggttctgttgcatcacttgcgatgtcagtcactataaacgaggatgaggaggaagatggggataccgggagtgaccaacaaccgaaaggcaggaagctgtgggggcttgtcgtctgccatcatacaagcccgaggttcgtccctttcccactaaggtatgcttgtgagtttctcttgcaagtatttggcatacagctcaacaaggaggtggaattggctgctcaggcaaaggagaggcacatcctcagaacgcaaacccttctttgtgatatgctcctgcgggatgctcctgttgggatatttactcggtcacctaatgtgatggatctagtaaagtgcgatggagctgcattgtattaccagaaccagcttttggtgcttggatcaacaccctctgagtcagagataaagagcattgcaacatggctgcaggataatcatgatggttcaactgggctgagtactgacagcttagtggaagcgggttatcctggtgctgttgcacttcgtgaagttgtgtgtggcatggcggccataaagatctcttccaaagattttatcttctggttccgatcgcacacaacaaaggagatcaagtggggtggggctaagcatgaaccggttgatgcagatgacgatggcaggaggatgcatccacgatcttcattcaaggccttcttggaggtggttaaatggagaagtgttccctgggaagatgttgaaatggatgctatccattctttgcagttaatattacgtggctccctgccagatgaagatgccaacagaaacaatgtaaggtccattgtaaaagctccatctgatgatatgaagaagatacaggggctacttgaactgagaacagttacaaatgagatggtccgcttaattgagacagcaactgcccctgtcttggctgtcgacattgccggtaacataaatggatggaacaataaagctgcagaactaacaggtttacctgtaatggaagccatagggaggcccctgatagatcttgttgttactgattctatagaagtggttaagcagattttggactcagctttacaaggaattgaagagcaaaatatggaaatcaagcttaaaacattccatgaacatgaatgcaatggtccagtaatcttgaaggttaactcctgctgtagtcgggacctttcagagaaagtcattggagtttgctttgtagcacaagatttgaccaggcagaagatgattatggataagtatactaggatacaaggagactatgttgccatagtaaagaaccccactgagctcatccctcccatatttatgatcaatgatcttggttcctgcttagagtggaataaagctatgcagaagattaccggtataaagagggaagatgcgataaacaaattgttaattggggaggtcttcacgcttcatgattatggctgtagggtgaaagatcatgcaactctaacgaaacttagcatactgatgaatgcagtgatttctggtcaggatcctgagaagctcttttttggtttcttcgacacagatgggaagtatattgaatccttgctgacagtgaacaagaggacagatgctgagggtaagatcactggtgctctttgctttctgcatgtggccagtccagagcttcagcatgctctccaggtgcagaaaatgtcggaacaagctgcgacaaacagctttaaggaattaacttacattcgtcaagaattaaggaacccactcaatggaccagctgaaaaagattttacatgacactgatcttgaaagcattgaacagtgctatatggagatgaacacagtagagttcaaccttgagcaagctctgaatacggttctgatgcaaggcattcctttgggcaaggaaaaacagatttcaattgaacgtaattggcctgtggaagtatcatgcatgtacctttatggggacaatttaaggcttcagcagatcctagcagactatctagcatgcgcccttcaattcacacaaactgctgaaggacctatcgtgctccaggtcatgtctaagaaggaaaacattggatctggcatgcagattgctcatttggagttcaggattgtccatccagctccaggcgttccagaggccctgatacaggagatgttccagcacaacccaggggtgtccagggagggcctcggcctgtacataagccagaagctggtgaaaacgatgagcggcacggtacagtaccttcgagaagccgacacctcgtcgttcatcatcctgatggagttcccggtcgcccagctcagcagcaagcggtccaagccttcgacgagtaaattctgaccctcatgctgctggaactgcagcgagtgttctgccgtgtcgaagtctcggttgtagctagccaagtggctgctactgaaacatcggttggtcggttctggtatctagcacggcctgtgtagtgcggatagatttggttgtttggctttggagagataagctagctggctaggtgtaacgtaacgtcgaccgataactgtatgtgaatgatgatgagctgtgaggacgaataaaggcttcacttgtgttctctattgctcttcttagagtatgatggccaacagctgtacaggaaagcatccacctaaatctgggctcgctgaatgacggctaaaagttgtttggtggctttaaactcttttatgctttgtaatcccttacagtcggatgttggtctttaaactgtcaaaaaaaaaaacaacag

SEQ ID NO: 28516 - DNA, 93 bp, Zea Mays
aggcggcgtgtgcgagcgcggagagtggcggatgcaggcgtggcggcgagggagaccgcgaggagaagaattttgggagggggaagaagcacc

SEQ ID NO: 28517 - DNA, 7049 bp, Zea Mays
ttgggggtggggtaccgcttcctcctgtgttgaagcagcctttccctgtcttctctgcactacgctacgcccgcagtccccgcacccagcagcagagtacaatgtccacaggcaaatgcgataaggtgaggaagagagagcacgggatgggttgagaaacaagatggagggagaaagtgggcagcctgctggatcttggcatctcgccgccgctcatttccgctccacctgttactgagggaagtgctatctttttcttggctcctgtttggtgcagtgtgggctagttatctactagtagtatcttcgggccagttcaagacttagccgctgttctaagcgctgaggaagtaaaatatcatttatcggctagagtagtctctgttgctatccggcaccaatggcgactttggtccgtcatgattcaaggcagtactcgtggtggattagccatatcagccccaagaactcgaaatggctccaggaaaatgtcagcgacatggactcaaaggttaaagcaatgatcaaacttatcaatgaagatgctgattcttttgcaaagagagcagagatgtactacaagaaacgtccagagctaatgaatttggtggaggaattctatcgagcgtaccgtgcactggcagaaagatacgatcagtccactggggcacttcgccaggctcacagaacaatttctgaagcatttccaaatcagatgccatcaatgtcagacgagtcaccctctgctttcagccaagagatggagcctcatactccagatacgtctactctcacacgtgtggcatttgattacgatgatcttcagaaggatggagttggtgtgtcaccacaaagtttcacctccaagaggaatggtacacaccctgaggaaaccagtgcgctgtcatcgagtgttgaaaatgctcctcgtgctggttttgatggaaaggtatggaaaggactaacttttgaaggcccaaatgtcaaagggaaagatgatattagcaacgagatggcaaatttgcaacaagaagttgcaagactattagctgagagccaggatctgaaacagcagatgttttcagaatccgagcgggcaaacaaagctgaaaatgagatgcaaatgctcaaggcaacagtattgcaattaaatgctgaaaaagacacatcacttatgcaatataataattcctctgagcgaatatctacattggagtctgagctatcgaaggctcagtctgaccttgagaagttaactgatgaaatggctgcagatgtccagaagctaattaatgctgaaacactcaatattgctatacagtctgaggctgagggtttggatcagaagatgaagatgcagcaacaagcactagaacaaaagcttaaggaattggagagtttccgctcaagcttccaggaggagcatgaaaagcgcatgcaggctgaaagtgctctactttcccagaggaaggaacttgctcaatctcatgaagaagtgcagaggttggctatagaaataaagacagcgaatgaaaagttgaatgagttcaagcagaccaaggaggtccttgagtacactgtttgtgagctgaagaaggatgttgagcgccttacagaacaaaaccagtcctctgaggtgcttgtacagaaacttggtgaccagattaatacactcaaggattcaaataatgaacttcaaagtgaaatacaaagccttaagagcatcatttcacagctaaacactgagaagaatgcagctgtgcttcaacaccagcagtttgtggaactggtttcggtacttgaatctcagttgtcgaagctacagtcagagctagatgagactgagcagaaagtacagatgctgacacatgatcttgaaaagaagaaagaagaagcggacaatgtccatctcaagctgcaagatgaatgccataggcgtatgcaaattgaggcaactcttctcatgacagagggtctgcattcccagttgcaagaagaaatgcaaatgttgacacaagattttgacgggtcaacaaagaagctcagtgagttggaaaaaaataagttagacctggagagcatactgaaagaactgaataacaccattttaggtttgaactcggagaaggatgcagcactccttcaacaacagcagtctttacagaaagtatctaatttggagttagaactctcaatgatgcagttggaaatggacaagtctgaacaaaaaattctcttactggaacaagaaattgcacggaagaatggaagtgtcgacagcctggagataagtttgaaagatgaatgtgagaagaggctacaagcccaaaaaatgtattcccagtcacaggaagacgttagtaggttgtacatagagatagagaagcagaatggcaagttgaatgagttggagaacttgatatccgaacttaacaacaccatcctacttataaacactgagaaagatgccaccctccatgagaaccagcagtcctcagtgagaatatcagatcttgaatctgaactcatggccttgaaaaccgaactggaaaatgttgaagggaaagttcatgcggtagagcaagaactcatatataagaaagaagaagcagataacctccaaattagcctacaagatgaaattcaaaaacgagttgaaggtgaagaatctcttcttatgatgacaaatcttcactctgggtcacaaaatgaagtgagagggttggcattggaacttgagaagctgaatggtaatttaagacaggtggagaacagtaaggttgatcttgagaacattgtaaccaagcataccgaggaaattcatatccttcgtgaacggaatctttctactgaccttatgataaaggaccttcatcttgaattggacgcactgaaggatttgaacgtgaaacttcagacagaaatggggttacacataggtgaaaaagaagcacttcagagagaatttacttctcaaagggaagagaagaaaaatctagaggggatacaccacactctggttgatgagatgagtaccctaaaaaccactgcaacaatgaaccagaagctgattgaggaactgcaaattacaaactcaaaactgaaggaggtgtgtgcaaagagtgaggttgagaaggcacttctctcagaaaaactccaagaggtggagaagctatctgaagaatgttcactcttggagaactcactttcagatgcaaatgctgaaatggatgcattgagggataaaataaaggcacttgaggctttagaaagctctctcaaggatataatttcctgtcatgtttctgagaaggctgttcttgtatcagagctagagatccttggtaaaagattatctgatgcttcagagaagaattctatcatggatagctcattgtttgatatgaaaatggacctagaagacttgagaacaaagttgaaagattctgaagaatcctgtcaggctctccttgcaaataattcagctctttctggtgaagtggatgcattaagagagaagataaaagcactacaggactcagaaagctctctgaaggatgcaatttcctgttatgtttctgaaaaggctgttcttgcatcagagctagagatccttggtaaaagtttatctgaggtttcagagaagaactctattttggatatctcattatgtgatatgaaaactgagctagatgaattgagaacaaagctgaaagattctgaagaatcctgccaggctcacctaacaaataattcagctctttctgctgaaaagaacaatctgttctctcagttggagagcattacattggctatgaaagccctagaaggtatgcatgccaatctggaacagaagcactcctctgtatcaagagagaaggattttgcatatgatcaagtaagggaactgcaggatcaattgagaattaagaacgaggaatttgaagtgtcagcaaagtcacatcaacttcaagcaaacagctatgagaaacaaattttttctctacaagagaaaaaccattatatggaggaggtgcttcaacaggaacaacagaaaaacataaatgcttctattagtacagttattttggagaactgtttggtcgatgagcaagacaagaaggttgctcttttcactgaatgccaaaagtatgctgtggaaaatcattcagccaatatgttagtttcagagttaatggaggaagctagatatcatggggaggagagaaaaaaattgctagcgcacaatgaaaaactgagggaagggatttcaaatcaaatgaagtttctgaatatctgcaaagatctaggacctgctgatttagctgaggacgaagttctgttgcagactgtttcagatgaaactattaacattatgagacttaaggatgaaactgaagatgtgaataggctcatggacaccgagctctcagttctctcagtagttttgttgcaagtagggatggagcttagagacttgcatttacagaagtgtgcccttgagaaagaagtggagagtggagaaaaagagacgctttctttgcaaaatcaaaaccagcagatgttggaacagaatgaacaactaaggagtggattacaggaaagcagtgaaggggtggaggtgctgaaaactgaagtatttgtgatacaagagaaactatcttgcttgagagagtcctaccagacctcacaagatgaaatttccaacctgactaaaaaaaatgagtccttgtctaaggaataccagtccttgagtgagaagtacaatgccttggaagatgagaatgatactatttttgaagaatgcatgatgctcaagaacttgtgcctgttctttaggggacataataatgagattgcatctgcattggcttctcttaccgatgagatggctttgttgagtttggctaagggcgacctcgatctccaagttaatgagctgaacagaaggtcagtaatgcttgaatcagaaaattatcacttaaaggactatatcatctacttggtagagattctcaggactagattagtcctttcagagtttgatttggacaccaatcgaagtgtcttccaggagttagttgtggaacttgagaattgcatgacacagttggtgcagaaggatgatgagctaatggaagcagaagagaaggttcaactcttgcaagaaaagaaccgggaactctgtggagttgttgggtctcttcaggttgcaatggaaggtgctaaagtggtgaaaggagaactggagaagaaaatcacaatactgattgaacagtgttctagcaaggacgacaaaattttacttcttcaccaagacaatgaggcattgcaatcagagattgagcaatgtgagagggaatttgttgagctgatggatgatgccattactttttcagtgaattctgcggtctatgaagaaaaagcattcgagcttatgatgaatggtaaagctacagagaatagagcaatatcccaaaaggagttgctaatgaaggagatctcttctcgagatgctaatattgaggagttgcagaaaaggctggctggtattcaggatgaacatgcagaactaaaagctgagttgaacacacatctagctctcatagcatcattggttgatcatgtcagtgtgctggaagaagatgttcgttctctgtcaaaaccatgtagtacagaaggcaaagaggaaactgcaagggtacatcatgtgcaagagggcgacgatgggctggaatctcattgcttagtcaatggaactccaaagttacaagggttgattgcaagaatagaagcacttcaagtggttgtattaaatgctaaagatcgtcaagatcgtaaatcagccgagtctgcagctaaactggcggcagcaagtgcagaaattcaagagcttaaaacaagaggcggctcacgcatggaggcaaaagaaatatgttctgacaatgagaaacaagatgttgaggtctccaaagggaagcaagtccagatcatgaaggatattgagctggaccaaatatctacttgccctccatatggcgctggagctgccctctacccccatggaactggtgcaaatgctgaactagatgacgatatgcttcagctgtgggaggctgcggagaggagctgcaagaaccaaacggccaagtcctcgtcatctgagcacgacatacaggcggtcgaggatctggagagcgagtgcccttcgtctgagctagcgaggggaagagaccttggaaccaataagctagaagtgccaaagggagctgtagagcctcacgaggcgtggagcaagaacgtgcttgagaggctcacttctgatgcccagaggctgttgagcatccaagcgagcatcgaggaactgaagaagaaaatggaggggtcctcgaagggtacgaattctgagtacggcagtgtgagcgctcaggtgcatgagacggagggtcttgtcttggaacagatcaattccaacaacaagttgagcaggaaggctgagaactaccccgcattgtcagataatacgagcaccgagcgaggagggtattccagcaggaggaagatctcggagcaggtgcagagagggtcggaaaacgtggcaaggttggaactggagctccagaagatccagtacgtcttgctgaagcttgaggaggagcacgagtacacaaggctcaaagtctctgataagcgcactcgtgtgcttttgagggactacctgtatggaaggaaggaccgtggaggcgggcagaagggaaagaagaagcgggtcccgttctgtggttgtgttcgttcgaaatcaagaacagagccgtagcctttttgttctcgcacccctgcgcgttggaagaggtggtggtgtcctttaggatgaatcccctttgtaactgagtttagtatcctgatgaagaagcctatgtactagatttttggtttcctgtctagatgaggccgttcttctagccagtttaatctcaggtattactgtgatgtatcaaggactgctctttctatatatataataatagcttcatgtttgtatagcctat

SEQ ID NO: 28518 - DNA, 2852 bp, Zea Mays
gtatgccctccctttgttcttcccttcctgcggcgcgaagccgtgcgcccaaaccctaacttctattcgtagtcaccatgtcatcttatcctgtgctaaacaaccgaccaattgatcagtggagggttactgatttgaaggatgagctccgtaaaaggaagcttcctgttaaaggtttgaaggaggaactcgtaaggcgactctttgactccattcagagtgaaatagaagctgatgaagctgacgaagctgatgaggatgtgggagtgaatgtggatgatcagttgcctgatgccaatgctagcgaggaaaatacagttaccgttacggaagttcatcaggaaactgtggttcatgtcactcagcaagttgaagttcctaccaccaaagctggtcaggaatccacaatttctcccactagaagggcccccagtgtcgatgttgaagaggcctcagcagacgaagaagtacccgaatcagttgctgaaggaaatatgtcatttgaagaagtgcaagtgcatactgaaattactaatgagcctgttcatgagaagaccacagacgttgacaccaatgatacagttgttgttaatgatgcaatcgatgtgaattcagacttggcgcctgctgaagtcaagtttggtgctacggaagcaagcaaaattgaagaacatgatttcccccctgcacctgtagatgccttaaattcagatgctgctggtcctatggatactgatgtcgtcacagctgcaacttcagacgttggttctatggatactgatgttgtcacacgtgcaccagttagcgatgatgaggagaaactggaactgaaggttgatttgggtaacaaggtgtcaatgtatgatgaagataacaatagttctgataccatgaatgaggactgcaagcccatcgtatcaaaaccaaacaatcagaattagaggttcagccgaagatggtccaaccatcatccggcattacttcattaggtggagatttgcagccattggatgatgacaaagagctggttaagaaccagacatctttggaagacatagattccacagctaatgtggactcatacaagaaggatagtcctgaaggtgggtctccagagaaattaaatctagacaggagttcaggtgatgagtcaatggaggaggatgttgtggaaattaaacaagatgaggccaatatgaaatctgatgatctcggacaaaagaatgagcttaactcagaagatgtgaaagaggtgatcctccctgattctgttgttgaggcttccaaggaggttacggctgaagaaaagtcagcagcttcaacagaaaagagaaaacttgaagatgaagatattgcaaacactgaaccaatcaagcgacaacgtcggtggactgcagacgttgccaaagttccagagagacaagcattgagtcaaactggtcctgaaactcctaaggatatttttcagcctgctttcaaacgatcttttgggaggtctgattcaacagcaagtgtagattctcctaaggaacggattgtaccacctgcagagaaacctgccacaacttctttgagaattgaccgatttgtacgcccatttaccctgaaagctgtgcaggagcttcttggtaaaactggatctgtacaagacttctggatggaccatatcaagactcattgctatgtgacattttcttcggtggatgaagcaatggctactagggatgctgtttacaacctacagtggcccccaaataacggcaataagttggtcgccgaatttgttgatcctcaggaagtgaagctcaaggttgacccccctcccccgccagctgctcctgttagcccagctgctatcacaagggcacctcctcttcaacagactcaaagtgtgccacgccaggctgctacaccaaaagagcaactgccacctccaccaccgcctccccttgctaagccacctatggctgacccggcggctatagcgagagagaggcttccacccactccgaagaagccagagcctcctgttgtgacacttgatgatctcttcaggaagacacagtcctctccaaggatctactatctgcctttatcagaagaggaggtggcagccaagctcgccgcacagggcaaaggaaaaaaggagtaggaggtgttggcttccattttcggctatctcggagtttgttgtggaacatggcgtgcggtggtcacagcatcagacaggtgctactgctgcagaccatttgaaataaccggcggccgtgactgccgcggcggaagagtagtcgtagggctagtgtaggagcagcagcagcggcttgtatttcttaaagagattattagttttggttgggtctccgactgcagtgtgtgctaaagttatttgagctgcatgaggttttgtttgggtactctagtattgatcccaatctatatgtgttgaggtgtaaattagtttaagttacatcctaatccaccttaatagatgtgggttgagttaaatattagagtacccaaactaggcctgaagcgtctgaagaacttggtttaatctatgctgtcaggtactgttaaaaggcaccagttttagtgttgagtctatgaagaatattgttgggattccttgtcttagggggtgtttgtttgggattataatccacctagattatataatccagcaatttttgaactaactattagttcaaaagttgttagattatataatccagatagattataatctcaaacaaacacccccttattctagtctttgccttgctcaccgtgagtctcggcaagagcaggttggtgctgccggtttaaactgcacgctggttgataaaaaa

SEQ ID NO: 28519 - DNA, 2840 bp, Zea Mays
tttgtaacgccgccgtttccttctctttccgcttccgccgaggccactctctttctctctctgcgcctgcgcctttctcttctccttctccttctccctcctctcaaccccaacaatctctgtctccccatctcctctcaacaaggcggcctcaacaaagtcccaccgcacctttctttaatggagcgagggtgagcctaacaaacactcgacacacaggaggaggtgctgcccgcttctcccctccctcagtctcactcgctccgctctcctccccgagaccaggaggccaagccaagaaccgcaaaccctcaggccgtggccatggcgcaaggagcaggacgggacccggaggagctcttcgaggagctgtggcgcgcctgcgcggggccgctcgtggagttgccccagaccaacgaaagggtcttctacttcctccagggtcacctagaacagctgcaagagccgacggacccggcgctgctggctgagcagatcaagatgttccaggtgcccaacaagatcctctgcaaggtcgtcaacgtcgagctcaaggccgagacagaaacggacgagatgtacgcccagatcactctgcagccggaaccagatcaagtggatctaccccaattacctgaaccgcccctgcaggagacgtcaaggcccgtggtgcactccttctgcaagatcctcacaccatccgacaccagtactcatggcggtttctccgttcttcggcgtcatgcaaacgaatgcctcccagcactggatatgtcgatgccgaccccgacccaagagctcatcacaaaggacctacatggatctgaatggaggttcaagcacatatacaggggccaaccccgtcggcaccttctgactactggatggagcacgtttgtcacatcaaagaagctgattgctggtgacgcgtttgtctacctgaggagcgagaccggacagcagcgtgtgggagtgaggcgcctcgtgcagaagcaaagcacaatgccagcatctgttatatcaagccaaagcatgcatcttggggtgcttgcaagtgcatcacacgctattaggactcattccattttcctagtgtattatagaccaaggttaagccaaagccaatacatcgtcaggctgaacaagtacctggaatctagtaaaattggattcgatgtgggcatgaggtttaagatgagttttgaaggggatgacgtccctataaagaagttttctggaacagttgtcgataaaggagatctttctccacaatggcaaggttctgaatggaagacattgaaggtcaaatgggacgaagccacaaacttaaatggccctgagagggtttcctcctgggaaattgaaccattcgatgcatccgcacctgccatcaccatgcccgtgcaaccatcaatgaaaaacaaaaggcctagggagacagctgaaggcctggatattcatgcactggaacctgctcaagaattctggctctctggaaggcctgaacagcatgagaagacaagcgtaagctccagcgaacccaaacatcaagtcgcttggacaagtgaacgcgcaggatacagtgccatgagcagttcaatctgtcagaattctgcagtaactgggagctggttcaagggcttcaattcctccggctcacacccttccctgccagagatctcccagaaactgtttcaggtcaccagcaacgacgcgagggttcctccttggcctgggctctccgcttatcatgctgacgagccctcttccaagctgtcctgcaacactgctctgtgcagctaccagaccgaggaggtggctccaagattttccaatgccgtcgaagaggaaaagaaggagcccggggaaacatcggcgcgagctgctggttcttttgaagactctgctcagctatcaagagtgacgaaggatcatacgcacatggtgaacggaagcccccgagaaatccaaagccaccagagttgcagtggaaggagtcgtatcaaggttcaaatgcatggaaatgacgtgtgcagagctgtggatttgggaaatctggatgggtacgagcagctgatgggtgaggttggagagatgtttgagatcaaagaccttggctccaaagagaaagaggaatggaaggttactttcattaacgacgagaatgagacaatggaagtcggagctgttccttggcaggagttttgccagatggtgaggaagatcgtgatccattccattggagacaggggccatatggaggcttgcccttgcctggggcaggatgggaagagggactattagaagaagggatttttttttttggctggggcagtcaggagatgggtgctgctgaaacatgatggcgtagcttgtcgatgacaaagaaggcaacagattggttgctggcgtcagttcttccttgagaaaaaaattcagtggaaggaagaagtgatgtaacataggatttgcagaaaagatttgataatgcgtcttttagaagtttggtttggtttaaagatgacaagttaatgtgtgtctagtgatctgcctaaagccttagcgacgggcaacaagcaataacaaggatggatgatgaccttaccttgggtatgttagctgtgtaaatattatgtatgtatgtatgggacattaaattggttggcatacttgactcctgatttatattgtacgtagtgtgttgcagtgctctggattcagttgtgatgtgctactattacaagtagtagaaggaatctggtttttagtccaagaatcaacatcaatatgtcaatcacaggcacactagtgtgtaattttagatctttttctgacatcca

SEQ ID NO: 28520 - DNA, 1578 bp, Zea Mays
tccggtaaggcgacgaaatgtacggcgacacaatgaagggtcaccaacccaaaggggacaagggcaatagggacgactacaccttcaattcagaaggctcgcggatgtctggccgacatactttcccgaggaggccgaggtcgggctgtcagaatccgaccagaaggtccgcctcaccaccgccctggctgatttcttctccacgcccgagatggcggaagtccttcgctcacgggttgaagatgatggcaacgacatcttgtgtcttccaattgatttccagcagcttcaggagttacgcatgtttattgaagataaactcaatgagtccccaaaagaagccttgctttgcatgggagttgcagctcatctggctctgtgctcggacaaggacaacaaaaggaacaagataaatatcaggctttacaacacgggagcagctattgcattaaagaaactaaaagcagcctttattaagaaacttgtcacagtgcgtggtactgtgctcaaagtcagcactgtaaaacctcttgttttgtggttgaaattccgatgcatgaagtgccgtaaagaaataccccgtgtgttttgtgatggaaaattttctcctccaatgtcctgtaccatccagggatgcaagagcagaagctttatcccagatagatctagtgcacagctgatggattttcaaaaaataagaatacaggagcttgcaagcgctgacaaccatgaagaaggccgagtgccacgcacagtggagtgtgagcttacagaagatctcgttgattgttgcatccctggagaaattgtaacggtaactgcaattgtgaaagtgctcaacaaccatatggatgttggtggagggaagtccagaatcagcagtcaaggtttatactacctgtatctggaggcagtttcagtgagaaagttgaagtcccatgctgtttctgacaaagaaattcaagctagtggaatttgtcattctcagtcttctactgtaaatgatgattttgctgtcaaatataaagaaaaatatggcaccgatgtttttcgcagaatacttcaatccttttgtccctctatctatgggcatgaacttgtaaaagctggtatcacacttgctctttttggcggtgtgcagaagaactcaatggatcaaaacatggtccctgttcgaggagatattcatgttattgtagttggtgatccagggctaggcaaaagccaactcctccaagctgcagcagctgtttccccacgaggaatatatgtatgtgggaatacgacaacaaaggctggcctaactgttgctgtggttaaagattctatgacaaatgattatgcatttgaggctggtgccatggtccttgctgatcgtggaatatgctgtattgatgagtttgataaaatgtttacagagcatcaggctttacttgaagccatggagcagcaatgtgtttctattgcaaaggctggtcttgtagcaagtttgtcagctcgaacttcagtgttggcagctgcaaatcctattggtggccattatgagtgcttggctggttaaggccgggccgacggcgg

SEQ ID NO: 28521 - DNA, 324 bp, Zea Mays
agaatgggtgccgctagaggaacatgaaggatgaagcggtgagtttggagaggtttaggtcgtcgtctcccagtcaactataatggtggaggatcattgtcgtcatatgatatattttatttagttattttgtacataacttttattatataataaagatgcgacatcgatttttgtatcatgagtcattatatgtgtgagacttgatcctagcatacatttaagatgcgctcggttgttaccttaaatccgggtgtgacatgagatgagaggccaacttgccgaggtccaagcattaatgaaatatgcaaaggaaaagatcaa

SEQ ID NO: 28522 - DNA, 1555 bp, Zea Mays
gagagaagagagagaggaagggaaaaaaaaatatctgctgcctccttgcggcgctttgccattaatttagtcagcatcacatcgcaatcacaagactcctatacccaaacccacgccccccaccccctattattctatatatataatacacacactagtgtagtagtgtggagtacttcaattggcgttggccgaagaagaggagaagcgaagcaagcaggcttcgagaacaagggggagggggaggaccaagcgaaagggggaactagagcaagatgggcggcgaactgctgcttgcgctcctcctcgtctctgctgctgccgcccctcaggtacttggagttggcaatggagacaatcacatgagaatcatccaggtcacgtaatccttacttttcaaactataccattgcgcaatttaagcacatacttggagtgaaaccagcaccacagaatgcactaagcaatgttcctgtcaaaacttattcaagatcactggaacttccaaaagagtttgacgctagatctgcatggtcccgttgcagcacaattgggaacatacttgaacagggtcactgtggctcttgttgggcttttggtgctgtggagtgcctccaggaccgtttttgcattcacctcaacatgagcattttactttcagtcaatgacctactggcatgctgcggttttatgtgcggcgatgggtgtgatggaggctatcctatagaggcatggcgctactttgttcaaaatggtgttgttacggatgagtgtgatccatacttcgacccggtcggttgcaagcatcctggatgcgaacctgcttatcctacaccaaagtgtgaaaagaaatgcaaggagcagaaccaagtttggcaggaaaagaagcatttcagcattgatgcgtacagaataaattcagatccacatgacataatggcagaggtctacaaaaatggtcctgtagaagttgctttcacagtttacgaggatttcgcacactacaaatctggagtgtacaagcacatcaccggtggcattatgggtggccatgccgtcaagttgattggatggggaaccagtgatgctggagaggattactggcttctggcaaatcagtggaatagaggctggggcgatgatggatacttcaagatcataaggggcaaaaatgaatgtggcatcgaggagggcgttgttgctggaatgccatcgacaaagaatatggttccaaacttcggcggtgccgttggaagagctatagtttaattggttacgtttgcatggcctcaaatgctgttggaattaactaaagtaattttaaaatgcaattgttaaatggccacgatggtgtatgtattttgtacactagctcattccaaaggtcgttatgttgctgatgccacatcactttggtcaagtggaataatattaataagaactagaatttcgattcgaatgttacggtttcaagtccgaccagatttgtgctctgatgatctccggccaccaagcctggttaaaatatctgttgtaaaatgaaatcaagttgagg

SEQ ID NO: 28523 - DNA, 281 bp, Zea Mays
agttgattcttgctaaagcctctccttgattcccaaatccagcatacccttgagagtcttttctttagtcgggtaagtcttgctgagtaattccatactcggggttttattccctgttgtttttcaggttttaactttgtgctattgttgatggtgttaagtgccggtgggctcggccttcttataagtctaagtaactcttctatacttcttattgaggatggtcacttgagctagcatatatttcaaaactataaataatttataacaattcaaagttt

SEQ ID NO: 28524 - DNA, 4135 bp, Zea Mays
aaaggagatggtgacttgcgatgtctggagctggaattttgaggagattgttgttggtggaaggaacaaataccttatcaatggccatcttgcacaaccttcccgggtgcagacccttttccactcagtgcagcttaatgtaaacaatcctcattttctaattatgcaagggcgcataacaaaagtgctgaacatgaagcctccagaaattttgtcaatgttagaagaggcagcaggtacaagaatgtacgaaatgaagaaagaatctgctcttaagacacttgaaaagaagcagaataaagttgatgagattaataaactccttgatgttgaaatcctccctgcactagagaaacttagaaaagagcggtgtcaatacatgaaatgggccaatggcaatgctgaactggataggctcaaaagattttgtattgcctatgactttgttcaggctgagagagtgcgagatggcgcactgaatgatgtcaaacaaattaaaacaaagattgttgagctggatgaaactacagaaaacataaaagcagctatacaagaaatggacaataacatttctaccttggctgctgaaaaagaagctaaagtaggtggtgaaatgaaggttctgtcagacaaagtggataaactatcacatgtacttatcaaggaaacttctgtgatgaataatcaagaggaaaccctgaagtctgaggaaaagggtgctgagaagattctcacaaacattgaggacataaaaaggtctatactcgagagagatgctgctgtaaaaaatgtagagaatgaggcttctgacatgaaaagaagagcagaggatctcacaaaggagttggacgagaaggagaaagaataccagggtgtgctagcaggaaaaagcagtgcaaatgagaagaaatgccttgaagatcaactgagagatgcaaaagctgcagttggagatgcagaatctggactaaagcagctagctacaaaaataaagcattctgaaaaggagttgaaggagaagaaaactctattagtatccaagcgtgatgaggctattgctgctgagaatgagctgaaaacaaggacaaaagacttagaaggtatcaaggcatccatgggatctattaattatgacgagggtcagatggaagctttgcaaaaggaccgttctgcagagttagaaattattcaaaaattaaaggatcgtgttcgtaacctttctggtgagcttgctaatgttcacttcagttatcgagaccctgaaagaaattttgacagatcaaaagtcaaaggggttgttgcacgtcttattaggattaaggacagctcaacagcaacagcactggaggttgctgcaggtgggaggttattcaatgtggttgttgacactgaagaaactggaaagcaacttttaaaaaatggggatctacgaagtagagtaaccatcatacctttgaacaaaatccaaacttacatgatacctgacagagttcagcagacagctcgtagactggttggtcctgacaatgtaacattagctctagaattggttggatatggtgaggaagtaaagaatgccgtggcttttgtctttggctcaacatttgtgtgtcgtaatatggatgcggcaaaagaggttgcgtttaataggcaaattagcagtactagtgtgactcttgagggtgacacttatcagccaagtggtcttttgactggaggtagtaaagggggtagagggaacttgctaaggaaactcgacgaactagctaaagctgaggctgatctatctgatcatgagaaaaagctctttgtcattgaacagcagattggagcccttttaccattgcagaaaaggcacactgagttgaaatctcagtttgaactgaagtcatatgatctctcgctgtttcagaacagagttgagcaaaatgaacatcacaagttaggtgagctcgtaaagaaaattgaacaagagcttcaagaatctaaacaagagttgacagaaaagcaagtgcagcatgaaaaatgtgtgtccacagtttctgagttagagaaaactatcaaaacttatggcacggaacgagagggcaaactcaaagcgctggaaaaaagaatcaaatcaattaaatcagagatgcagtcgatgtcgaagcaactaaagttgcggaagaattctggatgttgaccctggacctagttggtatgacttaggagtcatgattgactacggcactggctatgcaggcataaaagaaactggggcaaatggtcaatctgattgcttaaatgcaaaatactgctagtctccccctacattgagttagtctggcagtaaataactcaatcggatggggctcaagccccctactgtctctgcaaccatggaacgcccccttgcaacttgcaagcttatgaaagtgacagggagaggctgatcatggagaaagatgcggttgttggtgagcttgctacactggaagagcagctaacgacttcaaaagctcagattacttctctgtctgaaaccttggaaaaacagaaggacaaggttacatccataaagcaagattatgatcaagctgaaagtgagctcaacgttgggcgttctaaactgaaggaatgtgactcacagataaaccgtatggccaaggaacagcagaaacttcaacagaagttaagtgattcaaatgttgagaggaagaaaatggaaaatgaggttaagaggatggagatagagcagaaggattgctcttcaatagttgataagctagtcgagaaatataattggattgcaactgagaaacaattgtttgggaaaagtggtacagattatgattttgaatcttgtgaaccacataaagcccgagaggaacttgaaaatcttcaagctcaacaatccagtcttgagaagagggtcaataagaaagtaatggcaatgtttgagaaggcggaggatgagtacaatgatttgatgtcaaagaaaaacatcatcgagaatgacaaggcaaaaatcaagaaagtgatagaggagttggatgagaagaagaaggaaacattgaaggtcacttggctcaaagtaaacaaggatttcgggtctatattcagtactcttttacctggtacaatggcaaaacttgatcctccagaaggtggtacttttttggatggtcttgaagttcgtgtggcatttgggacagtttggaagcagtctctgtctgaacttagtggaggacaacgatcccttcttgctcttagtcttatcctggctctgcttctttttaaacctgcaccactttacatattggacgaggttgatgctgctcttgatctgagccacactcaaaacattggtagaatgatcaaggctcattttccgcactctcagttcatagttgtctctttaaaagagggtatgttcaacaacgccaatgtgatatttcgaacaaaatttgttgatggtgtgtccaccgtgacacgaacagtgccttcgaaacagagatgaccagtttacacatcatgcatcttctgaaccaaaactaggcatacaattccaaaactgtcattttaaggagctgctataatcaaacattttcgctgtttattcagccatgtttattcagccaggaaaattattccatgaaagctgaaccccacaattacttgacgctgatgcctcaagcccctcgcttgtcaggcaatgacatcaaaataggtgctgtaactgtaatctcatggcgtgacgttcatgatgacctcgactggcttctacattatgcgctttcttctgacctgatgtgtaattagcggttgaactattttgtgttgaaggtcgaccgtgtagcatgtatgtaacagccatttataaccaaggtcatgtataattctgacttgcaaatttaccctatgttgatttaccttttattacttagaacaaaaatctcatcatagttttagaaagtcaatgctctaaacacttcataatattattgactatcgtgtgcattgccgagaatgatttggtcattgttagtttctacgtcactgctcatggattttgtggcgttttttttttctgaaagcattgaagataagtttaagggtggatttgttctacatatctatcgattgaagtaaa

SEQ ID NO: 28525 - DNA, 892 bp, Zea Mays
  misc_feature (891)..(892): n is a, c, g, or t
actcgagccaaaccccctcaactcaactgctgaacgcagagttcgatctagcacgcgcagcggcggccgccgcccacaatggcgtcccttttcaaggacccgagcaagctctcagcgtacagggaccgccgattcaagggcacacaggaggagtatgaggcaacgctgcatgcgtcgacaacgctgtacattgggaatatgtccttctacaccacggaggagcaggcctacgagctcttctcccgcgctggcgagatcaagaagatcatcatggggctcgacaagaactctaagaccccatgcggtttctgcttcgtactgtactactccagggaggatgctgaagatgctgtcaaatacatcagtggaacgatgcttgacgatcgtccaatccgtgttgatttcgattggggctttgaagaaggcaggcaatggggccgtggacgaagtggtggacaagtgagagatgagtaccgtacagattatgatcctgatatccttcgatgctattctattacagtttactccattccgatttggtgttatagaatatagaaagccatatgatgtttccataaatgccccacacctcctggagttaccaagtttccttaatgaatcaaacgtagaggtggttacggtaagatggttcagagggaactagaagcacaaagagaactagttgactatggtggatctttccaaccaaatgcaccacctccctatgagagaggtgagcggaagagaggatacggggactctcataggaatgacagaggagattaccagcggaaacgctaccggagcagcgatgaccggtcagcaccagaggagtccaagagagcgcccgactctgatccagcggagaagaatcctagatttcgcgagaann

SEQ ID NO: 28526 - DNA, 267 bp, Zea Mays
gggacgaatccgtgcgacgcggggctggatctcagtggatcgtggcagcaaggccactctgccacttacaatgccccgtcgcgttttaagtcgtctgcaaaggattcagcacaccgcccgttgggaagggagcttcgaggcggcccgccgcggcgcgtcggccgggcgggctgagccaatggcacgggacccttggggcgcgaacgccctaacgtgggtcggggcgggcggcgagcagaggcgccggttgctagcttggattctgac

SEQ ID NO: 28527 - DNA, 1419 bp, Zea Mays
ctcggtctcttattacaagatttccgttgtcaagaagcactgcaatagcagagatagaagtggtcctagtgtcaagcgtgaacggaatattatcgaaacctgtggtataattagaacgccgttctctgagagtgagaggttaaatggtgttgttccataaaagttctcatcaggttgccaaagggggaaatactcacggatgcaatatgatggtttagcaaaccagatacccaaaccgcaataataatattgagagcagtcgtaaccgttacccaaaccacaagagtgatattgagatttagagcagtcgtaacccaacttgaaggcaccattttttgagatgaggctgcgatttacattcagaacttgaccgggaaagagggtgtctaatgcatatgttaatttgcagcaaggaaatacaaggctgatcagggagggaagtagtaacacaaaggaagatgagtataagaacctcaaactgcctgtgcccaccattttaagggatactcttcttcttgtccaccccaatgaagtggagtacgtgcttgtgcttagtctcctaaccgagctgatatatggaaaacaaggaaaagatctgctcatcggtcaaggctcaagagcgctagtcgcaatgccctattgtccaggtccaagtccaacaaggttggccgggcatatggaccctactatgacacggtaccaagttcggttattggatggtggactgaggtcgatgtttataataagtaaacagataaacagaataatcaaaatcctgtttgcagtcaacatgacgccgatctgttgtgcatccgttttctagtaacttttgtcaaaaccaagtctctatccagctaaaccacaaggacgcaactgacatgtgacatgaggagtccggcattacctgttacctcgtcgacgacgacagggttctcacagagccaagaggatcaggtacacagcgcgctctcggggagaggcatttcgccgaacgccttcggctcgtccagtgtgcccgacgcgcccgacgtcagtcacgccgggtgcagcgtgcccggcatcgcccacggcaccagatccaccggcttcaaccatcgatagacctcgaactaagcatctcgctcgcctcgtcttcctctccctcctgcttgcttccacggtatactagttccattccatccgtgatcgggtggaggcagccagagggcgagaggaagcgacgaagcgtgcagctaaaccaaccgaccgacgtctctctggcgcgcgggaccggtcgtcccggctcggtgggccggcccagtgtgttagcgcctgccgcctgcctcacgaaatctccctccctaatttttttttcgtacgagaggaagacgcctctcactgtctcgcagttgccgaaggggaaagcaaagaatagaaagg

SEQ ID NO: 28528 - DNA, 672 bp, Zea Mays
gccatgttctgcatagtattctgtgcagttatttgattgattcacattttcaaatgatcggttgaaactctgttatgcttgactagactgaatctagattgtttactaaaattgggcatgggttttaattgtagtggtttgtagctatctgtcattgtacactgattcaagtgacaacgatttcttttctgtggatgcattttagtaggattggccaccaaggtcgtggagtatatgttgcccaattttaatgaggtctggtgggatatcattaccttagatatcttgatatgcaaatagtttggtgtttggactggaatgcgcacagtctgttactttgatggcaaaacgcaacgaagtaccatgggtaaggatgtgctggagaatgaaagcttctgtcttaaaacaataggatacaagaagcttgcaagtggttttgtgaaggcttttgtgaatcacttgaatcattagttcttttaagaatggttttgtaaagcgttagcaaatatgtgtaaaacacaataagatgtgtggcaaagtcagtgatctagttgtacagttttttatgtttatgtgatatgtggatatttcattgtgcaatgttaatgaactgtgtatgtctatgtgattatgtgtataaaatatatgttttgtggtgcttttgtgataata

SEQ ID NO: 28529 - DNA, 674 bp, Zea Mays
ccctggtctacgttctgtcgttctgtggctgagctccaaagtccaaagattagtgaatccaaaaggcgaccaaacagatcccccgctcctgtgctccgctcatgttagagaaccccctgggaaaacgcagcggagaaactctggagatcgaaaccccggcacgcagctaggcgaactgcacgcaactgcaggtcgacgtctgatccatttcttgtcgcttcagcttctggtgctggtcttcttccagttgcatcctggttacctgtgtcaaggggcggttggtgtctggtgtagttggagggcagagcttcgcgggcggcgaagaagaagagcagcagagagactctgctgacactgaccgagggagatatggcgaggaagctgagagagttgctgcagaagagcggcaaccgcgtatgtgccgactgcggcgcacctgatcccaaatgggcgtaagagtactctgctcttgactccaacatgttatcatttcgatatgaagcatgggtgggcagatatctggacatattagggttcttgtaattgtcaagtgtttttttttcttctcctttttaatcccaatgtcatgcatagtctatgctcaatcttacatcaatgtcccgttggctacttcactccttgcgaataacaaactctgttcctgcagatcggct

SEQ ID NO: 28530 - DNA, 4868 bp, Zea Mays
ccaaggtgaaaccctagctgctgcttccgccactcacgccgctcgccgccgacgccgactatcgccggaaacaggtcaacaggagagcccgttcaagtccgggacccctcaattgtccttttctctctctccccgcccaacttcccctgctctgccgccgcctccccagtccggcgtgcatcagcagcgacatcagagtcggcgatgggaggcgtcaccgacgttctcgtccccttatgttgatgaagtggcgtgccgtggagattcctttttgaccgatttcttgccggttttttccttttctccgtcgtgcaagatcagtcctttctttttttctccgtccacggttcgatcaggttttaccttctcttcgtcgtgcaagatcaatccttcattttctccgtcgtgcaagggggtcagttgaatcagatgctccacgttacgtccacccttgagctcgatggcagaaggaagcagtagccataggaggagtgcattctcccctgggctggctgtgttattatctggcgatgaagctaagattagctcccagaagtcgcacctggtgtcctatcatgacgaaattgggcaccaggctgttgagaggacgatagagcacatctttgatctccctcacaagtcagtggtccggcctcctggaccagttgacacaggcttcgtgcactcagtggtgaggaatcaagctagaaaatttgatcttgactgggaaaactgcattcggggataccatcgcagcgtcttcattgtggacaaaggtgctgggcagaggaaggtggttcttgatgattcgagcatttgtggtagcttcaggaatgtccggggaccttcacttgttgagagttccgcccctttcagcagtgccagggctaatgcttgtgtgtggaaaggcaaatggatgtatgaggtgacccttgagacgtctggagttcagcagcttggatgggctactctctcttgtcctttcactgatcagaaaggtgttggtgatgctgatgattcatattcctttgatggccggagggtgactaagtggaacaatgacccaaagccatatggccagccatgggcagtaggtgatgtcatcggttgctgcatcaacttggatgcaggagaaatttccttttacaggaacgggacttctcttggtgttgcatttgatggaattcgcagcgtggaacctaagaagggatattatgctgcagtatccctctcggaaggagagcgttgtcatcttaatttcggctcacatccattcaggtatcctgttgatgggtttgatccattagaggcgccaccacgctcttggtcgtttgtcacataccttcttagatgcctgttccggttgctagaagttcacaacctggagaaatctgaatcagcatacttcgagaaactgaggagggtgaaaaaatttgcaccactacaagaactctttggacccatttcagaagggatctgtgcagaaattttcagtgctattgaagcaagccaggggtgccttgagtatattgcctggggctcgttgatcactctactcttagatgttttcagaactcgtgagccgcatgatttctcatgccttgatcaggttcttgaccttttcctccggttcccaggttgcacttcattatttcaggagctcattgtggccctttcttgcatgtgcaaagttgcaccacttgtgttgacagaatgcccatattctgggtcatatccatttttagcgctggtttgccaccttcttaggcataaggatgtaatgtgtttatggtggaaagcagaagatttcgttttctcgtttgaaggcttccttacaaggaagattccaaataagcaggatctacagtgccttgtgccatctgtttggtggcctggttcttctgaggatgaagttagcatgacactgacgatgacaacactctcagatgcaataaaaaagattgaggagatgcatcgtgaactttgcagcttggtaatatgctttattccaccaatgtctacgcctcagcctccaggctctgtatttaggtcctttgtacaaagtttggtgctcaaagctagaggtggagatcataggatggttgtcaatgggactttcaacaacactgtgcttgtttcattgtacacagtaatcctgcatttgttgtctgaaggattttctatggattctgctggatctgcatcatcctctaaagcgaactttgggaatggtgttggatttcttcacaaaggtggaaaacgcaagtttccgacacaattatttttcaggaatgatgcctatcacagtgtaattcctagaatcggtggaccaccaagtattttgatgcatcaccaatttgatgctgtggaaaatgaagtgcagtgggatgaaggctgcatgaatgatgaagagacacgtgttacacacactacagcacagaagccttgttgctgctcagtgacagatgttgctgttggcctaagatacaaagaaactgctaagtatgtgccatcaacttcaaaaggctcatgtaagcctatgcctgaaagatctcctcatgttgctgctgagtgcaatggtagaggtctgagtgatgagatcgaagacaaacctagcacaagtgctcaatcagaaattgaatatggataccaatcactgcatagtcttgaaaacatgccaatggcaactcaatcttcgtcggaaacacttaaagaagaagagctgcttgatgttatgttgttgttatatcatctcggcatctcaccaaattttaggcaggcattttatttcatgtctcagcagtcgcagtccatttctttactagaagaaactgacaggcagatacgagaaaaatcatgctcagagcaagtaaggcgtttgaaagaagcccggaatagctatcacgaggatttggtagattgtgtacggcattgtgtttggtaccgggccacccttttctcccagtggaagcaaaggggaatgtacgcaacttgcatgtgggtcgtggagcttcttttggtccttagtaactcaaatagcatgttccactatgttcctgagttctatgtggaatcactggtggattgtttccatgcactgcgaaggagcgatcctccttttgtttcccctgcattatttctcatgcaagggtcactttggttgtcaagcacttcgatgatacaaggatagtgaaccctgacttgaaagatcttcttcttcaatcaatatcagttctcgtacagtataaagaattcatgcttgttttcgagaacaatcgggaggctataaataaaatgcctagatcactgttatcagcttttgacaacagatcatggattcctgttacaaacatactttcccggttctgcaaaggctcaggatttgcttcctataagaatggtgaatccgcatcatctgcaacttttcaggttctactgagggagacatgtattcatgaacaagagctgttcttttcctttcttaatcgacttttcaatacactcagctggacaatgaccgagttctctatgtccatccgggagatgcaagataaaaaccaggttgctgatttgcagcagaggaagtgcagtgtaatttttgatatctcatgtagccttgcgagaatcttggaattctgtacccgagagattccttgtgcttttctcatgggaccagatatgaatttgcggaggttgactgaattggttgtctttattctcaaccacatcatatcagtagctgatgcagagttctttgacatgacactaagacggccagggcagcatcaagagaaaacaaatcgtactatgatcttggctcctcttgtgggcattatcctcagtcttatggaatgtagcagcacatcagaacgaagggagctaaatgatgtgattgcagtgttcgccagcatggattgccctgccacaatccattttgggctgcagtacctactgagctacaactggagcaatgttcttcgaggggattcatcccttgcaaagctagcgcagcttaaagagttctcccattacttccgacgcattacagcgtccgtggatggtgaagaagaagaccatagcctaaacgcgggcgatgaagacgacgaccacacttgttgcatttgctacaactgtgattccgatgcaacattccagccatgccatcaccggtcctgctttggctgcataagcaggcatctcctgaacaaccagaggtgtttcttctgcaatgcagtggtaacatcggttactagatagccgattcgcgagcgatgcgctgctctactcattgcctctttcggtatcgtgatccgaaggaagatggtgccactgatttgtcttatctattttgcttgacctgagggctggggcgctggcgtcccagagatctttccattgcttttccaggaagaacgcgttacctttgtgcacgagggtcagaagcggttcttcgttttccttgctgtatatgtaaaggccaggtaatagtagaaaggattcaataacattgccgcagaaggaggtttctgtacacggtgggaagccagtaccaccgaaaggaatttcatggaatcgcaatttttgtagggtgtagggggagattccacgactgtaaatatgatgagatatgaaacagaaaagggggtggcagatcaacatcgaccttctgtaattagccagaataaaagaactagatgctttatattgagcagagctctcgtctttttgatcctccccacggtgtagtatcaagaatgaataaatcttctgtttcttgtctggttgtagcatgccagcatctgtaagttgtaacaattcagtgaatttatttaccttcagcaaaaagggtaaaaaggttgcctcttcaa

SEQ ID NO: 28531 - DNA, 1334 bp, Zea Mays
ctgcgtttttcttctcaaatcatacaatgcttccagcaagagctctctctacaagtaaacacaaggtaagataatgaggactatgggcatcttacggcaccgagaaccaaattatattattcaggtcgaatttttttttgaacgtcgcaggagagctgctagtcatttcattaagaggagaaaacaaaaacaaacggcgcgactggaaagataacgccgtgtacaaggcagcttctacagctaaggatctgcgatcagcatgctcgtgctttatgtggccattctgccgaaatcctgtttcaggagcatgaggtctcaaatgcaattgatgaactcttgtcaaagattcccgctggtctaactgaggatgggcttcaacttgtgaaaactagggtgctggagagtgccgggggcttcttcgatacaacatttacttccagcaaagtcaaagtatataaatgccctgagctggttgcggagcttcatatgccaatgggttgtcgagttcgccaatggatctttagaaataccacatctgtggcaatcttttgtatcctgtttgcagcactgctttggatactgtggatcatttacaagaggcggacattatctaatagagctgagcaaatatacgagcaggtatgtgaaatccttgaagataatgctgtaaacgccgagattgacaactccaattctgaggtttgggtggttacctcctggctcagggatcacctgttggttcctcaagagagaaagaatgctttcctgtggaagaaggtcgaagaactcatacgagaagattctcgaatagatcaatatccaaaggtgattaaaggggagtcgaaagttgtttacgagtggcaagcaagtggctcgcttagtgcaaagattaaaaaggtgcaaggtgcaagggccaagtcaaggactggtgtaggtgtcataaaatttggggaagaaatgagtgcttcctccttgggtgaggtgagggagcagggctcgtgtgatttaacacgcgaagaaagaagtaaggacaaggtcacgtgcagtgattaggttatcaatcaatctatctacatgtatgcctctggtctttagaggaaccagcacgtgagcttggcaagagttactgatcttttgtaaattttgatgataggagccgagccgtcacagtgtgttgttgctgttacagttgagtttgttggcatgtcatgagattgtctggtacagtttcaacaactgatgaatgaacatggtcactggaagatgctgctgacggagcagtcgtcgtgcacacgccagatggtctcaccgaggaggttagcgacggagagcac

SEQ ID NO: 28532 - DNA, 1389 bp, Zea Mays
tcaacattcgcctcgtgctctcggccttttggattcgggattcctcctcctccttctcctcctgatcacctcccactcccactcggccagccccacccaccgccggccccccacgcaacggggagcacaggagcagatcgatccagcctcgcggccgcgccacgcgaccgaccgagctgcttgcctgcctgcgtgcctgcgtggtgatcacgtcgcgcctggcggtggtgtgggtccggcgggcaacaaaggcgccagcatggcgagcaacaacggcggcgcgatgcaggagccgctgctgccgaaggcgcccaagagcggggggtggctctggaaggggacgcgcccgtccgcgtccggcgacctcccgtcgtccaaggccgtgctgcggccgccccgccacgtgcccgcgctgctctgcacgctcatcgtcgcgctcggccccgtccagttcggcttcaccagcgggtactcgtccccgacgcaggacgccgtcatccgggacctcaacctctccatctcagagttctcggcgttcggctcgctgtccaacgtgggcgctatggtcggggcgatcgccagcgggcagatggccaagtacgttgggcgcagagggtcgctgatgattgccgcggtcccgaacatcatgggctggcttgcaatctctttcgcaaaggacactacgtttctgtacgtggggagattactggaaggatttggtgttggcgtcatttcctatgtggtgccagtatacattgcagagatatctcctcataacatgagaggagcccttggcgctgtgaacccgttgtctgcaacctttggtgtcctgctttcctatgtgcttggcttgtttttcccttggaggcttcttgcattaataggaaccctgccctgcttactgttggtggctggtctattcttcattccggaatctccaagatggctggcgaggatgaatatgatggatgattgcgagacttctctacaagttctgaggggatttgatgctgacatcactgaagaagtgaatgatataaagatagctgtagcatcagcaaacaaaagtggtacaataagctttcgagagttgaaccaaaagaaataccgcacgcctctaattctaggaattggcctacttgtgttgcaacagctaagtggaataaattgtataatcttttattcaggtagcatcttcaaagctgcaggttcttgccactggtgtcacaaccacgatcttggacagagctggccggagaatcctcctcattatttcttcttctgggatgaccctaagccttctggcagttgctgttgtattttgcatcaagggtctgtcatcccaatccactgaatattctactctcttgtcatcggctattcgtttca

SEQ ID NO: 28533 - DNA, 2437 bp, Zea Mays
cggcaacgaacttaggtggagaatattcaagtgccgaactgataagattgtcttcaagcttttcgataaagttcccagtgacttacctccagttttgcggtcgcagattcttggttggttgtcgagtagcccatctgatatagaaagccatattagtcctggctgtattattctaactgtatatgttcggttagttgagtctgcatggcaagagctttctgagaatatgagcctgctcctgggtaagcttttgaatagctccactgacgacttttgggcatctggcttggtatttgtgatggttcggcaccacttagcttttatgctcaatggtcaaattatgttggacaggcctctggcacccagttctcatcattactgcaagattttatgtgtcagacctgttgctgcaccttattctgcaacaataaatttcagggtagaaggttttaacctactcagtacttcctcaaggacactgcatattccatgaagacacggattctggagcagagaatgttgagtacaaggatagggacatcgaatgcctcagtttttgttgttctgttcctggtccaagaggaagaggatttatagaggtcgaagatagtggttttagcaatggcttcttccccttcataattgctgagaaggatgtatgcgctgaggtttctgagctggagagcatatttgagtcatccagtaatgaacatgcaaatgccagggaccaagctctggagtttctaaatgagctgggttggcttcttcatagagcgaacagaatgtctaaagaggatgaaactgacacatctctagctccctttaacatgtggagattcagaaatctcggtgtatttgccatggagcgggagtggtgtgccgtgatcaaaatgctgttagatttcttatttattggccttgttgatgtgggatctcggtctgcagaagagatggtgctttcagaaaatctgttgcatgctgctgtacggaggaagtctgttaacatggttagatttctgctgagatacaaaccaaataaaaactcgaagggaactgcacaggcatacttatttagacctgatgctctgggcccttcaaagattacccccctccatatagcagctgccactagtgatgcagaggatgtgttggacgcgcttacccatgatcctggactgattggaattagtgcttggagcaatgcacgggacgaaacaggttttaccccagaagactatgctcggcagagaggcaatggcgcttacctgaatctggtccaaaagaagattgataagcatcttggcgaaggccacgttgtcctcggtgttccgagcagtatatgccctgtaataaccgatggcgttaagcctggcgatgttagcctcgagatatgcagggcaatgtctgcatcagtgccaggttgcctcctctgcagccgtcaggcacggatgcatccaagttctacggcaaggaccttcctttataggccagcaatgttaactgtgatgggagtcgctgtggtttgtgtctgcgtgggcatactcctccacacctttcccagggtttatgccgcgcccacattcagatgggagctgctggagcgtggacccatgtaaattttaggatgaaataaacctagcagttttgtaacttgagagctctagcgcaaaggaacataattaccgtgtgaagaagttcctttgcatttgcagcaagatccggttgctgttgtaagcttatatatcgtcaatatcaactatatttacagcctaacatgcttcgattccattcatcatttttattgtagaatttgtttcttccttgcggagattttgtgagccgtcagaataaaacatgtccttgtttatgtaatcgttgagacataacatatcttggaatgacactgaaaaactcaagattttattagttgaaagtatcttatacaatccaagctcctgcaaatttgcagggctgaaatgcgtgcacttgcttttcagcctataatcaagatgtacattttgcgataagcagacggttttctggtgaaatgctggatggaacatagcttacaagatcagcaaccagacccttctgcccaagccatagtagcctccccgtatcaatgatatctttacacatggatcccagagtggccctctcccctgctggtatacttcggattactctctcaattccgacggcctcctgatcaagcttctctggtcctctagtccatcacaaaatggcataaaacaaatatcaagctttcagtggcatgacacaataaaattggaagtccagaaagtgagttgtgagagttctttgaaccacaaacatcgaaaaataaataacctagagatgacaagcatgatgcacagatgacactagagagcagagattcgaacagagtatttaaccacaacagaaatgattgata

SEQ ID NO: 28534 - DNA, 4458 bp, Zea Mays
gcagcagcgctagtagattttgctcgtgcgtactcgtacgacgagctacagtgcagatagagttccccaagatcgaagtgaggtatgaggatgtgacagtggacgcttacgtgcatgttgggagcagggctctaccgaccatcccgaacttcatatgcaacatgacagaggcttttctgaggcatctgaggatctatcgaggaggaagagttaaactgccgattttggacaacatcagtggggtaattcgcccatcaagaatgacactgcttttgggccctccaagttccgggaagaccaccttgcttcttgctcttgctggacggctcggtcctggactaaagatgtctgggaacattacttacaatggccaccatttgaacgaattcgtgcctcagcgaacatctgcttatgtcagtcagcaagactggcatgcttcagaaatgacggtcagagaaacgctggagtttgccgggcgctgtcagggtgttggaataaagtatgacatgcttgttgaactgttgaggagagaaaagaatgcggggataaaacctgacgaggacctagatgtgttcatgaaggcgttggctcttgagggtaagcagacaagcctcgtagcagagtatataatgaagccaagattttaggactggacgtctgtgctgatactattgttggagatgaaatgatcaaagggatctccggagggcaaaagaagcgcctgacaacaggtgaattgctagttggttctgcccgcgtgctgttcatggatgagatatcgacaggccttgacagtgcaactacatatcagattatcaaatacctaaggaattcaacacatgctcttgacggaactacaatcatatccttgcttcagccagctccggaaacatatgagctatttgatgatgtcattcttatagccgaaggtcaaatcgtataccaaggtccacgtgaatatgcagttgacttttttggtgctatgggattcaggtgtccagaaagaaaaaacgtggctgattttttgcaagaagttttgtccaagaaagatcaacagcagtattggtgccactatgattatccataccaatttgtttctgtatcaaaatttgctgaagccttcaaaacatttattattggtaagagattgcatcaggaattaactgttccatacaaccgacatcacaatcatcctgcagctctttgtacatcaagttacggtgtcaagaggcttgagcttctcaagtccaactaccagtggcagcgtctgctcatgaaaaggaactcattcatatatgtcttcaaattcattcagcttctacttgttgcccttatcacaatgacagtgtttttcagatcaacaatgcaccatgactcagttgatgatggaatcatttatctcggtgccctttactttgcaatagttatgattctgttcaatggcttcactgaagtctcaatgctggttacaaagcttcctgttctttacaagcacagggacctgcacttctacccaccttgggcgtacacacttccttcttggctcttgagcatccccacctcactttacgaatccggaatgtgggtgcttgtaacatattatgtggttggttatgatccccaatttacaagatttttgggacaatttttgttgcttttctttctgcaccaaacatctttggctcttttccgagtcatggcctctttgggccgcaatatgatagtcgctaacacctttggatcattcgctttgttggttgttatgatccttggaggattcatcataaccaaagaaagcataccagtatggtggatatggggttattgggtatctcctatgatgtatgcacaaaatgctatttctgtcaacgaattccatggtcattcttggaacaagcaatttgcaaaccagaacatcacaatgggtgaagcgatactcactggatatgggttattcaaggaaaaatactggttttggatcggtgttggagcattgtttggttatgcaattattttgaacatcttgttcacaatgttcttgacacttctcaaccctattggtaatctgcaagctgttgtggccaaagatcaagtacggcacagggattctaggaggaagaatgacagggtagccctagagctaagatcatatctgcattcaaattcactaagtgtacttccacctgcaggtaatctcaaggaacagaaggggatggtgttaccttttcaacccctttctatgtgcttcaggaatatcaactactatgttgatgtaccagtggaattaaaaaagcaaggtgtagcagaagaccgcctgcagctgcttgttgatgtcactggagcttttaggccagggatactaacagctcttgttggagtcagtggagctggcaaaaccaccctcatggatgttttagctggcaggaagactggaggtctcatagaaggaagcatcactatatccgggtatcctaagaaccaagagactttcactaggatatccggatattgtgaacagaatgatgttcactcaccttgcttgactgtgatcgagtctttgttatactcagcatgccttcggttgccttctcatgttgatgcagacactcaaagggtaagccttgattggttatacatcacacgcgctttttgtcctccttatcttttgtgttccctttcataggcttttgttgaagaggtgatggaacttgttgagttgaatcccttaagcggtgctcttgttggtctgcctggggtaaatggtttatcgactgaacaacgtaaaaggttgacaatcgctgtggaacttgttgcaaatccttctattgtgttcatggatgaacccacgtcaggattggatgctagatctgcagccattgtaatgaggacagtgcgtaatattgttaatacaggacggaccattgtctgcacaatccatcagccaagtattgacatatttgaatcttttgatgagcttttattcatgaagcgtggaggacagcttatatacgctggtcccttaggtgccaaatcgcgtaatctggttgacttttttgaggcaattccaggagtgcctaaaatcagggacggctataatcctgctgcatggatgttggaagttacaagcacccaaatggagcagattcttggagtggattttgctgaatactatcggcaatcaaaattatttcaacagaccagagaaatcgtcgaggccctaagcagaccgagcagtgaatcaaaagaacttactttcgccacgaagtatgctcaaccattttgtgctcagtatatggcttgcctatggaagcacaacctatcgtactggaggaaccctcagtacaccgcagttagattcttctacacagttattatttccttgatgtttgggacaatttgctggaaattcggttctagaagggggacccaacatgatatattcaatgcgatgggtgccatgtatgcagcggtgctgttcataggaattaccaacgccacttctgttcagcctgtgatctccatcgaaagatttgtatcttatagagagcgagctgctgggatgtattcagcgttgccttttgcattttctctggtcactgtggagttcccttacatccttgtgcagtcactcatatacggttcaatcttctacagtttgggatcatttgagtggacagcagccaagtttctgtggtacctgttcttcatgtacttcacgttgctgtacttcactttctatggcatgatgacgacggcgatcactccaaaccataccattgcgcctattattgcggctccattctacacgctgtggaatctcttctgtggattcatgatcccaagaaagcgcatcccagtttggtggaggtggtactactgggccaacccggtgtcgtggacgctctacgggctcctgacctctcagttcggcgacctggaccagcccctgcttatggccgacggcgtcacctccaccaccgtggtggctttcctggaggagcacttcgggtttcgccacgacttcctcggcgccgttgcggccatggtggccggcttctgcgtcctcttcgccgtcgtcttcgccctggccatcaagtacctcaacttccagcggcgatgagagagcaagtggttcagctagctagctagtatagtagccaccgccgacacagacccaccaaacggatcgcagcctactgtacatgcatacaccgatcagtgcaggagggcagcagcacaatgaattatgaatgcgatgtacctaccagcgcgtcgtattggcacagttaatttgcccattacccccagaacatttcgccggggtaaataatcttccggtcggtcacgggagcgagagtgagaaaaagtaaagggtactgtatagccagctattccatgtacttgctgccttggcctcccctccatcgttatacggtggcgtcgcttcatgcagggttt

SEQ ID NO: 28535 - DNA, 4159 bp, Zea Mays
tcttctcgttctccccctctatagtcctccgccgcctccattgccttctcttgggctcctccccgtatcccgggactactagtccaacctcccaattctgcggcactcaccattcgacaagcactgaaccctaccccacccaccagtccccgcagccgcgctccgcaatggcgagcggggcggctagaaagcgccgccgcaagtcgtcgccccctgccgccgccgcggctgcacgggacgggaggaagctcctcgtcggcgaagtcgtcgaggtgctgagttgtgatcaaggactacgtggctcctggcataaggctattgttattggtattctggaaaatgctcgcgcagtcagatatactgatttcattgatgaaaatgggtcacctcttgttgagaatgttcaagtgtcagatgccattgatggtaagtcaagtatgcctgaggaactcattcgtggcaacattaggccaatgtgtccacatcaagcactgcaggtgtctcatgcaagctatggactttgtgttgacgcactcatagaaagttcctactgggaaggtgttattgctgatcatgctgaaggctctatggaaaggaaagtccttttccctgatgaaggtgatgaatgcattatagaagttgatcagctacgtcttactcaagactgggatgaagctacaggggaatggaaaccacgtggaatctggtcatttctgcagatacttttgtcacatgaagagagagatggtttacctgtgtcaatcaggcagatatggtttgacttaagatccaaaccttcttttaagactgatgccaaaatgtggatgtgtggaacagaagatttttgggagagatcacttgcagatgtcattgctgaattgtggtctctatgtgacaagcctaccctagatggatatcaagtggaagcagttcagaaggatacagttgagaccactgtcttggataggctggatccattccaagcattatcagaatacatctcatgctatcggaataataggaaaaatgctcttatcaaaaaagagtgggcaaagcaacaccttaaatcttcaggatggacctttctggatgacagacctaagaacaagttttacatctcacctgatggtaagcggtttccatcttttctaggagcatgccaggcgtgtttggctgcaaaagaagcaaatggttaccaatatgatcatacagaaaatttgcatctagacagtatgagtctggtgcacaagaatgcatgctacaaccagacacacatggatcttgccttggtaaagaacaagtccaatgataaatggatcacgagcccatcaagatcttgggaattggttcaactggatgctgaattttccccacagatagtttcccttcttgctagttatcaagatggcacaactgtccttcagaggacaattgatagaactctgagtgtgaagctgaagaagcatctattggcactgggttggagtattaagttcaaaaaggacgaaattcaagaaaatggccatcataaacacactacaagataccggtacgagtcaccttatgggaagacttatgtttctatcattcaggtaatatgcagtttgatagttggaggcgttaaacaagatgacaggcccagctatcggacagcagcaaaaggtgctcatttgacagtgtcaactggcctggcaaggctcaataaacgtaaacgaagggataaaactgatgctcttgaaaaatacatagactatatgaaaactgataagcaaaattccaggaggaggaaactgttgagatcaaatgctcagaagtttctcaaatctgctgggtggaatttttggttaaagaaaaagtctagaaacaaattggagttgaggtatggtgctccacatggcaagtcttacagctctttagtggcagcatgtaaaggttacttggaaaatggatatcaggaggacagtgatgcagacattaaaatcgccaaccatggttctgctgatggttctatgcgtccatcaaaattgatagcactcagcggtggattaaaggattcaagtaaaatacagggtatgcctgttgtagacagatgtagcaacatgtttaccttgtctgcacatcatggaaaatgtaggaaaagaaaaccatcttcagtttctttgaacagtgcacgagttctttgttcacatggacagatctttccctgtcggcatcacgtgaagacagttttgtctttgttggtagagaaaaatattgtggtaccaagggataaggttacatataagcgaagtgatggacctggtataaaggaaggttccatcagcagagatggaataaaatgcatgtgttgtaatgaattattcactgtggagaattttgaggttcatgctgggagcagtacaccattaccttcggctcatatgtttttaaaggatggaaggtccctatcacagtgtttagttgaattcatgggtggaaacaagcccagagatccactgcatgtgcgcttgaaggggagtagttctgatctggaaagtgattcgatatgctctgtgtgccatgatggtggggatttattactttgtgacaattgcccatcatcttatcattatgattgtgtcggcttggaggtagaggccattccagaaggaagctggtattgtccatcctgcagatgcggtatttgtaacttgagtgattatgatcctgatatcagccaattcactgagaagaccatagtgtactgtgatcagtgtgaacgggaatatcatgtcggttgcactagaaatagtgaccatcagcttatctgccgaccagaaggttgttggttttgcagcaggggatgctcaaatagcgaacggcagtgaccatggcgattatgatgatgagataatggcagagcattatggcaagttgtgcattgcagttgatattcttcatgaatgctttgttactattatcgagcctcgcacacagagtgatatttctgaggatattgtcttcaatagagagatttgcggccagaagtttgctgagctgcctctgatcggtacaagatctctataccgtcgtcaaggaatgtgtcgacttctaattaatgaactggaaaagttgcttttagacttgggggtggaaagacttctattaccggcagttcctgaacttttgcaaacatggacatgctcatttggtttcacagttatgtcaaattctgagaggcttgagttggcagggaatagcattctcagtttccagggaaccaccatgtgtcagaagattttaaatgttgcacacaacatttcacaagatagaagtattccatcaatgtccaattctgagagaatggggttagcagagaacatggtggtgaagaaggcatttattccattgacagtggagccagaccatcatgttgatttgattgtggagcctgagctagtaatgaaaattgagaataacagcagtgaggagggtatttcttcaattgatccgctgactagtatgccagaccctcaagttggtttggcagtggggccagagatggtaccggtaagtcgggaaaacaaagataaagagggtatttgtttcattgatgctccaacttgtccgccagatcctcaagttgatttaacaacgggcattcatgagcaatcatttgtcagatcagtgcaacgagaattgcactttgaatataacacctaacacagcttcaggattggaatacaagttctcaggaaaatgctatgagcgggtaaaaaagggcgctcgcccaaggaatgtctggcttagaatctcgaccaaataataaccaaaggtagatctagtagagctacggatgaaggatgcttaactttcatgcaataagctttcagccatcgccttggcattgtccaagttcaagtcgaaactaacctaacctggttacggaagcgtgtgattgtgtatttcccacggtgtaaattaaggactatccaactgataacatactgtccagctacgaggaaaataagattatgttggagcaatttctggtgatggttttaccctgatgtgtcatattattatcagttctgtcgccatactgttcattggctcctttgttcatggtgaatcttctgagtttactttcgatgagctctatcctggtgttcctttgtcg

SEQ ID NO: 28536 - DNA, 2101 bp, Zea Mays
cttctctctactctagatctcactgctgcgccgtagcgctagtgccgccgcccgctcaccctcatcccctaggcctccacttctctgattggggcgacttcatggcgagcgggcacaaatccgacatgggcgcctctgctccgacgaccgctctctcctctgcgcctccactgcccctctccctgttaggcggcgacagcaaggaggaggaggaggaagggttggctgggccaccgtcggcaccacgcgaggcacgagcgcaaccgcgcctatgagttccatagctccgagccgtcgacgctaggcggcagtgccctcgtctggacctgcccgcgcccaggcggagccgccgccgacccgagatctgcctaggtcgcccgcctgctctggatgaccaaggtcacctccgcggacgctgagcagctgagctcctcccgcgaaggcgtgaacccgcccccagccgaggcactgagctccgccctgccccgctcgggcgtgcccctgcacaggcccagccgcctcgctcctgtttgccgccacggttccagtaacgacgaggctgagcgacaactccagtgtcccgatgttgaataagtgaagtggatgagtcagatggtggaggagacagtgtgtaggagcagcctgtttatgtggccgtagtggatctcgcatgttccgaagagttcctggaactcatcaagagtgcacttcttacagccctagaagcctgtttgtgagcttggtattcctcctgaaaacatcactgcaaaccaattgttatttggcacattgagggagtacgccggatttgatcccacagagcccacttcacgcagtgggggaccatggctacaagacaattgttacaattggtgatggcgcaactgatctggaggctcggcaacctggcggagcagactgtgtgccgccagagctagtggagggaggcgggtcattcgattcgccatgcttaggattggagaatcaatagagtaatagtatatacatggtggggagtgaaaccaacagaggaagaatccgttcttgatcaaaattagtcgactgcttggttcgtcgtctgcgtgttcgatcggaggttggcgacgccttggcgtgggcgctttccgcaagaaagcaaggaaattggtcggcttctacgctaccagtccggtccacttcgttcacctttccctttcggtgccaccaacatctaactgtacatgcatgcttgcttagtgctgaccgccgctaatgcgctggatatttctgggagtggaaacgaaagtgtactctgaatttcaagttcctgtcaaaagtaagatcctctgacgaaggtgtgtactctgaatttcaagtgccaacaatctatgttttccagtcaaaaagtattacatggtgcccggctgttagcttctccttttcagttgttgcccttgccggcctggcatttgttcaacctttcctctctctctctctctctctctctctctctctctttctgctacagccattttactgatgataacagtgctaattggtcaatttcacatatatttaaatatatatatatatatggagctaatactggtgaagtagtaggtgtggttgtgatcatgcataaactaactgttgctgccacatggattggagagggagatcgatccacagaaaatggtatcatttgtcaagtgcatgttaggacttgatgctgttgtttgggacattattgggtcgtcattgttggagaaagttgtgtatctacttacagaattggatgttaatataacatgggaagatattcttcaagatgaacacaacaaaggtatatttgacatggagcttgaggatttggctgaggatgaacataaccttggccgcacaagtgtagagacttgaattcatatatacttagttaggctcaatgttagcataaacagttgatgagcaagttttcccattagtattttagtttgaatttagagtacaattatgtatgagttatttgataatgcttatttatgagatattgaatggtgtttatctatattgtattaattatagtgttattaaatatatgtgtttgtatttttctcttttaaat

SEQ ID NO: 28537 - DNA, 534 bp, Zea Mays
taagttggaacacacacaatatctggagaatgcagagacggagaacagagtagttgagatagtacttggaaaggaagaagaactagagtctagagttctgttacagcataaaaaaccctacgcgccgccaaacccttatttaataatcggctggattactctgtgctgtttacccacgccggcccaaagacctttgggttgcgcttcctcagccttttggcccgacacggcccatctcctgctgttgcagccaaaccttctttgtcatttgccgcaccgatgactgcttcctccgcttcgctgacattccccctgctaaatccgctggttgtccccaaacagctgcatgcggaaactgctgttgcaagtcctgcgcaaactcccaagtagccaactccacgggcatgtgtgaccactggacaagaatttgttcactggactgccccccacgagccaccgtccgacgctgcaagatcttgacaggcacactgaactgaaattgctcattaggcagcactggagaagacaccaaac

SEQ ID NO: 28538 - DNA, 1072 bp, Zea Mays
gagtggccgaaccgaacgggtggataacaaagggatagagaagcggcagctgcagaggcagagcgtcagagccatcgtcctcgcctcaccccgtagtcccgtacctagcgcagcgaagccggcacaatgccagccgccgccgtagtctcccctctcctcctctcgctctcctcgtcctcctcccccttcctctcttcctcatccacctcctttttcccaccctcctccgctgccgtcactccacacgccgccgtcaggacgagggcggctgtctccgtcctccgcgcgctgcgcgccgaggcggccaccctccccgtgctctcattcaccggagagaaggtcggggaggtaaccctcgacctcaaatccgcgccaccctccaccgcgcgcgctgtcgtgcaccgcgctatcatcaccgaccgccagaacgcgcgccgaggcacggcctccacgctcacccgcggcgaggtcagaggcggagggaggaagccctatcagcagaagaagacggggaaggcgcggcgggggtcgcagcgtaccccgcttcgtcccggcggtggcgtcgtgttcggccccaagccccgcgactggtccatcaagatcaaccgcaaggagaagcgccttgccatctccactgccatcgtgagcgccgccaaggacgccttcgttgtcgaggagttcgaggaggccttcgcgtcggggcccaagaccagggatttcgtggccgctttgcagcggtgggggcttgacccgaagcagaaagccatgttctttgccacggacttcgacgacaatgtgcggctcagcggcaggaacattggttccctcaaaatgctcacacccaggacgctgaacctgtacgacatactcgacgcacgcaagctcttctttactcctgctgctgtagactacctcaactccaggtacggagccagtgtttccgatgactactatactgatgacgaggatgatggcgaggaggaactggtcgagcaagaagcagaagaaggcaccacagcagatgctgctccaggttgaaggagaatagcaaatggtagtgctacgaagcagt

SEQ ID NO: 28539 - DNA, 766 bp, Zea Mays
gtcggcccaatcacacggcgggcggcccagcccaccagacccgcttccccaccagcccacccgtgggttcggaagcttcttcgtccgtcccctcctctcccgtgctcaccacctcccccattttcgccgccccctccgatctcgccgttctcgtctccttccgttggattagggctcttcatctgttcgccgcacttcgtcagtcgcccatggcggatgaggaggtcactgatccaaaggcgctcctagaggatcgttcaaaggctaagtgtgtgtcgcagtggtatgattatcagaaatgtgttaaaaggattgaggacgatgagactgggcacaagcactgtaccggtcagtactttgattactggaaatgtgttgacaagaatgttgcagagaaactctttgagatgttaaaatgacaatttttccctccatttatccacttaaagttggacttacaaacttggagcatgattgccaggcgcaatagcacatgtggtctctacccattcttcccaccggttagcatcactgcactttccaccatcgtgtcctcctcctccctctagcatcgttgccttggtacatcttggtcatgatgccctatgcaagctcattaggtccaatgctattttttttgtaataagcgcacagatgatcttatatgtcatgcttgtcaattaggtcatcacacatgtattccttttagcatgtaaaattctcgtgtgctacaccattttgatttaatatattgtgatctttgaac

SEQ ID NO: 28540 - DNA, 2539 bp, Zea Mays
gtccgctcctgctgctagttctagctttctcgcgccgcatgcccgcatgcaccgtctgggttatgtgaagtgaagctgaagtgtcacgtgcgtgagatgaatacgcttgtttcccctctctcgttcgtgacatggagtagtatataaagacaagaggcggaggagattcaggattcagaacgcactagcagttccacgcggcgttccacttccacccgaaaccccaatcaagcgtgcactgcatctgcgtagcccgttcaccacgcacgcgcttccctccctaccgggcgatctatggacggcgacggcgcgacgtgggggcagccgatgctggagaagcggccgagccaccgggagcggcatttcacggcgggggaagtggtgcgggacgtcatcatgggggtgtccgacggcctcaccgtgcccttcgccctcgccgcggggctctccggcgccagcgcgccctcctcgctcgtcctcaccgccggcctcgccgaggtcgccgccggcgccatctccatgggactcggagggtaactgctcgatcaaactcttgtccacaatcgtcgcgactgatgtaagcggtagctaccagcgacttccgtttgtccttttacgctatctctggcaatgagattttacgatttcataaactcatctgtgtggcaaacagtgagttagttattgttagcagaaacggcaagaaaaaacgaagtagatcagccaacaaatcatagagcacgacacataaatttacgtggaaaaccttcaacgtgaagggaaaaatcacgggcaccagtcaaacgaaaacttcactatatgtggagtatttacggaacgtcgtccgtagacggcgactcacaagaggagtaaatgatgacgcgctgcaaactctaattaggatcactaacttcggcctaagcctcccgacgacgggcctccactgtactcgccaacacggtctccatatgcagaattttggatcatgttcatgagaaaaaaaaactcaattcatgtagtttattcgggtagtcagttcggtagttcatgttcgatgacagagatagctcttttgtaaacttaattagtttgagatcgttcttcagtgaagcgttcaaatccagtggcacctcacagccatagcgatcactaaggccttgttcagttattgctatgccacatggattcgatgagattgaaaaatagtagatattttgacttgcaatagaaccacccaattatcttcaatttaggacttttcggttattcctaaaccttatggatttgaaggctttagataaaattatgaaggatttaaacttgtggtatgaattaaaaccaactcaatctcctacaattcataagggtttttgataaaaatcgaacaaaccctcacatagaatgagataaaaacgaacaaaccctaaggtgaaaaaaaacatgagcctgtaagtttgcactgtatgttcagcagattgctgaaccaaaccccccaaaaagcaagtcgttagaacaaaagccagctcgtgatagacaagtgtgtggcccctctttcacgtgctcttccagcacgcttgggtgttagctatcacaactttttagggccgagcaaagtgggaaacaatgatttacatctttgaatctgagcacaagacaaagcaccacatcgttttcagatagaaaagggtgtccacagtccactaacggcgccatgcgtgcatggcgtgctagctaggtaccttgcggcccagagcgaggcggaccactacaagcgggagatgagaagggagcaggaggagatcatcaccgtcccagacaccgaggccgctgagattggagagatcatgtcacggtatgggctcgagccgcaggagtacggccctgtcgtcgccgggctcaggcggaaccctcaagcttggctagacttcatgatgaggttcgagctgggactggagagaccggatcccagaagggctctgcagagcgccttcacgatcgcactgtcctacgtggtcggcgggctggtccctctcctgccctacgtgctcgtctccgccgcgcaggatgccatgctcacatccgtcggagtcacgctggccgcgctgcttttcttcggctacgtcaagggccgcttcacggggaaccggccgttcgccagtgccgtccagaccgctgtcattggagcgctcgcttcggcggcggcgtacgggatggcgaaggctgttcaggcgaggtagttgtttgttggtgaggcggcgtcaggcgttttgggaaccagggctgcggtaaaactgaagaaagctgcatacttctgatcctttggggacttctcgttacagtgttaatcgcgggatctaatgctagtctactcttttgaataaatctagggaaggagataatcatagataaaatatatcttcgcctcactttggttaatgtaaagactctgaactacatattcaatcattattacaagccaattgagactgctagtctactgtttaatcatttgctgctgtaggaacaaattaaacacgtc

SEQ ID NO: 28541 - DNA, 1345 bp, Zea Mays
atttttcagaaaagtttgaaaatttcttggacttcccatctatccttcggttgactgtccttattgaagaaagattttgcgtagaataggattctccatagcggtaaggattgccaattactagccagataaaacattcaaattaagttcagaagagattcaggtaaatggcaggggaactatgcccaatagggttgccattgtcaatccttgctgagaagtgaagaatttattatcagttagtgctgatgatgaggttcctataaaaagtgtaactatccgcaaaattcctcgtgttctagaagaaatgcccctctatgacatcctaaacgaatttcagaaaggtcacagccacatggctgtagtcataaggaaaaacaatccaagttaccaaccagctgaacaagctgctaatgatggtggaacttttgaggtgtccattgctattgatgataagaacaacgaaaaggtcgtgaaaaaccttccgccaccactgcaaagatggaagagctaccctaacactcagaacacatcaaatagaggaaataggcctaaaaaatggtccaaagatcaagcagacgttctgcaggtccataaagagcccttgcccacactgagcgaagatgaagaggctgttggtatcataaccatggaggatgtcatagaggagctcctgcaggaggagatatacgacgagacagacgtacatgaggaacaatgacgctggccttgcgccctccctccagctgttagaaagtgcgcttttatgcaaaacttatgtatagataggcagatacactgagagatattttagccgtagcccgtagccgttcattgtagtactataggtggctggctgtctcgagtattggtaaagactgttcggagtgcgtcgttcgttctcgtccagaacagctgggttctgggcatccggggaagaaacggaggcgttgacgcgtgtgtgtaggttcagaagaaaccccaataagataattgcgttgttatatgatgccgctcgcattattaggacgaatctgttgacatatagtcttataaattaaaaacaatgttttgaaaacatagtagagttgaaatttaaaataggagatgggatggaagctgctgaagatagacttagtgccaacttttaccgagatcgtggcacgcagtctggtgtttgttgtatgtagtttggaggtgattgagacatatatggtgtgtttggtttgtagagtcactctatgcttaatgaggtgatgcattataagtttatttaattaatttttgtgtaatcaacccattctttatgtatatactaattattagtttatgagaaatgaggtgg

SEQ ID NO: 28542 - DNA, 1743 bp, Zea Mays
gaactagtatgatgcatgccctctctttatgaagatggaaattttatagatgtgattcgatcattcctaacttacagaagcatatctgtatctgatatgggatgatatgtcccctgcctggagtatcgagggtagtgcacctgccaaatctcctttttggaaaggagacaccgacaaatccgaatccctgagagttcagaaaccgagccactgcggggcaagaataacagtggcaggagtgatgctcctgagcatgaagcgaggccaccacgacctaagagccgaactttttcgtccaaatgaaagaaaaagggcatattaggaggtatatggtagacgctgagacgcgcaatgtgggaagcaggaaatctcagcttcgatacatgacgacacagattgatggattttttttcgttcttggatgtgatgcttgacaatacatttttgtgttccttgacacatgtacagtggcgtgtggtagttgaagggtgtatagttgtattacttagttcctagttcgtaaaaaaaaacttcaaaagaagaatgcattcctaccaaaaaagggaaagggaaaaaagatgggcgtctgtggtggtcggttgcagcaactgttgtctggttgctatgaactccaaagtgcatgaagagatcaatgtaaccttggatgatgtttgtgtttgtttcgtttactcgtagaatataaaggggagatagaagaattggcttcactttctgggctcagtgttgatgatgatgactgtcacgttgatgaatatgggagggcatgttgatgagccaacattgctccaccccatgccaagagcccagtttcagtggcatcttaaacctctctgattcctacaggcttctgggcctgctgctcattaggcaaggttagttccttgctatcctggaaagagctttggaactcaagccacctgcaaacaagttttcctcagttctcctttaccgggaaacacaaactgctgcttagtaagaaactatcttggacagccctcctataaggtcgtgttcggttgcatacggatcggagaggattgaaggcagattaaatccctttctattcatttttgactagctagtgatttaatctcctccaatctacatctaaccgaacaagtcctgaaaagaaacttccatttgcatccctcctcttaaaactctgaaacatctagctgaggttcaagccctatttcatgacagggaacaggatccctcctcagaagacaagtgggaaaatatggggttatggcactttcagttccaagaaactacacacacatgcagttgcacacagctaacatgctctttgctggcatcatgtctcttcaagtggctttggaattcttgtgttttttgggaacataggctcttgtagcttctaaccagagatagattatacaccaggagcttgcttagaggaaagaataaacgcctggatgactataattgtgttctctggagctccaggtgtggagagaccagctgttcttgaatgttcagtcagctgtcctgggcctccgtccacattgtctggaaattaaaatcttcaatcccttgatatgattatggaagccagaaatagctttggaagccgtatcttcagagaactggttataactacctgcttggccatttgggagctccgaaatagcactgttttttttacaatggtctactcttcatgtttggaaacattatttcagagaggatttgtcatgg

SEQ ID NO: 28543 - DNA, 3910 bp, Zea Mays
acaattcttattaaaacaagctaaacctgagagccgagaaaaagccaaaacaattacccctaactagtgaaacggtaatctctcagcttctcgttgcgcaacctccccggtttcccagtcccgctcaccgccgccatcgccggcgcccatggcggcctcaccaggggcagacgaaccgctggagagctcaacagtggagcatcctgaggcggtccagccgccttcactgccgattgttgaggcggaaccgcctccgcctcttataggggcggcggctgcacatgaagcgatctctccgaagaagtcctcttccccttcgccgcatccggcgaacttggcggtcgaagtttctccagaggtggaggcctcttcctcgtctccgtccccgtcgtcttctccctctccatatccccaaatcatggaggtgttgccgggtgcgccgcaaccactgtctcctccacgtgcttctccgtctgttgcggcgcgtgcttcgacggacctctccattacagaggcgatgtcaatggcgtcccaggaagcagctcgcccacccccgtcccccgagtctacggacgcgcacttgcacaccgcgtccgcgctgccgacgtcgctgatggagattgggcctggagtgttggtgccacagcagcagccgcgaccaccatctccggaaatggcccctccactatgtgattattcagagtccgcacagccatcgccgctgtgtcatccggatggatgcacaggcgcctcgccagacgcaccgatggacgagcgggcaagatatcagcagtgacttcagaagaaggtactcagcctgcgatggcgtcaattgatggtgaggggccattagagattggggcgcagagatcattgcaggagctagaggagacaacaacatccttcaagatggaagctgagccttgttcgccggagatggctcctccagggtttgaagattgtaagtctcaatggttgccactgtcacatcctaatcctctggttgaatccacacacactgtggtacaagtgactactaccaatgccatgggaacgactccagatgcagcaactgggtcactgtcttcacctcgcctacttccactgttgaagagagatacagaggggcaaacacttccaagatcatgctctccaacaacagaagctgcaccatgttcaccagatatgccacctccaggctttgagaattgtaagtcatcgtggctaccactaccaactcttcaacccatagctgaaaccacgcatgtgttgcacgacgtggctcccaccaagtcaatggtagtgggacttatggaaaaggcatgctcagtgctggcattggagcggacagatgtgaagatagactcggagcagagcctattgccgccattggagagtgaaactgagagttcattgcaagggccactgccaaggtcaccttcttccatgatgaaagccattccctgttcaccagatactgcacctccagggtttgaaaatttaaagttcacacagttacagcctccctgtccacctctggtgcagactgcacatgttttgcaaaattcagccaataatgaggccatgcctgtgatatcaaaggaagctcctcagccattgcctgcattggatgcaacggatttagacattgatgccaaacctgtcctggcaccaccatcagagagtaaaccagggcaattgtcaccggaacctccccttctgctacctcatgtagcacagcatacaacgtgttcgccagggatgacacttttagggtctgagaatatcgagtcctcgcagctgctgccacgagctctggttcttcctcttgatcagacttcagacatcttggctgatgcagggaccaagaagacagtcacaatggaagaagtgtgtcatccgctgcctgtagcaggagtggcggaagaagccaataggtctgttcttctaccagtaacggaaaatggctgtgagggccaatcaccacacctagagctacagacttcttcccctgcagtgaatgctgcagctacatcactggagatagctcccggaagttttgagaattcagagtcctctcagttgatctctccttgtctagctcagacaatagaccccactactcatgcatcaggtattatgcctactattgttaagtcagagaaaacgaatctgccactatcttcattacaggctacatgcacagacatggaaagtgcaatcctgtgtcagtcgccatcgaagagtgaagagagatcactgccacaggcagagcaacacccgtcttctccatctgttaaggacactacttgttcaccagaggttgcacccccaggttatgaaaattttgactctttggatcagctgccaccatcaccacctctttgctcaaaatttgaaattggtcaaatggtatgcggatcttgtcgtcagcttgttgcatatcctacgggtgctgttcatgttcagtgttttggttgcttgacaataaatcttgtactggaagaacatcaagttggtaaggtatattgtggacaatgtgatacactcttgatgtatccttttggggctcctgctgtgaaatgttccaactgtctttttgtcactgaaatcggagaacgcaatgttcggccacggatattgatggaacagagtgtctcacctgcggcacaagaggaggttcactagagagctaggtcaggctttaacaacggctggtagtggaacctagatgatatcgctcgtagtaactccagacgctgccatggaaaactcgcaagtcatccggcatgatcctgtagctgtaacctcaaatggcctgtggtctgtggaagtgtggagtggcaccttcagatgcagcctgtagtttagggatgaaaaaggcggatgcagtatggccaggatcaactgctaagcgaaaagattatatccagccgtagccttatcatagggaagataaactgcttaagctcggctgtaactggagcaggttaatcatggttgacggtacggtggtctcagatgatcctcaagttaagtatttgttggggacgagcagagtgcttcagtgcttgggtttgtctacgaaccatggaacaacccacttgtatctttagcgtcacagcacaatcacaagcgctgttgtggcccttcgagggcaacaggaggtaaaaaagtactttatgaaggtaggaatatttggtagcatctcctctctttttttgacaaaagggaaattcattcatttgtcatgagcacaacaaactccattctaagttttgaagccaattggatgttacaacgttgagattgtgctaaagcttgacaagaataaagacaatctcctgtaattgatgccctgccttgcctgttttgttaaactgtctgcaactttgttcatctctctttggatcttgagcacttagtagttccttcctggtgtggcatcaatcagtgccgcaagggttggtccgaggcactaatggctgggttgcggagcacgaagccggaggtagcagcattagccaagtagccaacaccttattatctgttagaatgttggtcacctgcaaatatagagttgacggctagtttggcacctagcagtagaacatgtcctgcctccaatgggtccatgagttgagttatggcaactagaaagaattaaagaactggagcacaagctacgtgtaagattagtaagtgaagatgcgaatgcatgtttgatgttgggttggagtatggtgtaaggagatagaaacgtcacaaaagatatttgtttcgacgtgtatctgcaaagaagcactagaagtgtggttataggacacacaacagggttattagcttcttcagattctctgatgttgaactagccatttattgatcttatatttgttgaacttgatttttt

SEQ ID NO: 28544 - DNA, 1333 bp, Zea Mays
ctggctgtgcgcttgttcctacaacctgatgtttttttggatttgcaaccttaacaaaaagaggtagtaactactattagcaccaattggtattcatgatcctattctttccaccgtagactgcatttttatcagattctatgctgacaagatcaccttccaggcactcatttcatcttatgccaggccacttctcttatgctatcttttgccatcagttatccataccatgttcttgcaagcaagttaactgacagatgacattgtaactgcagataaataaagaagttcaggagcttttaaggcttacgttaagcaaggcccgagtcaagctgaccgaaaataccatttttaaacgaatcattatggacactaacagcacagatccatttaatggtctctatgtgggagcatttagtccatatggaccagaaattgtgcagcttcgtcggaagttcggccactggaacagtactgatgacgttgagtttttcgagtatgtcgaagcagtaaagttgactggtgatctgagtgttcctgctggccagataacgttccgtgctaagattgggaagggcaagcgacttgagaatcgaggagcatatccagaggaatttggtgtgattgccagttacaaaggtcagggtagaatagctcagcctggattcaaaaatcctcgatgggtggatggtgagctgttggtactcaatggcaagagtacaattccacaccttggaggcgcagagctcggtttcctgtatagtgtacctgagcagagttttctggttctcttcgatcggcttaatcttcccgagtgatgagactcctaaagggagcagactcctcacatgtagattgcatgaacgcgcagaggccggccacagctccaagtgaccgaaacaggtctggggggccgtttccccatcgtcttctgccctctgggcttcctgccaatcctttctccgcacctactttttaggagctcatgtgcttaactcgtttcagagtgtgagggaaagtcgacaccattgctggtctaaactaacggaggagtcttaatactaataatatatatgttatagcatggtagtttgctctccaatgccacagttgtagctgtattgggtatgggcatgacagttttgcgagttttacccgtcatcgttgatttcagtaattaccgaattgaataaaaatcgttctggtgtatcgtgatgttacaattataataatataaaacaaggcaaataaagtctcatgatttatgatcgtttttctcttgtaatatggtcgagatacttttattcctgtcctattagattttgatattgac

SEQ ID NO: 28545 - DNA, 4850 bp, Zea Mays
tcatcctcccccgctcccgtcgtcgtctcctttccaccccctttcccccgccccctgcatcctgcattacccccctcgcgcgtccctctccgatccctcaccccccagattcctcctgcctacgctcgcgggtctctcctgcccgcccgatttcgcctcggacctcgtcgtccatggtgtgctttttcttcgtggcgatttgctgcgcctcgtcgccggcgaccttggcgcttgcaggcggccgactgcagtagggcaggtctgcttccacagacgtcttcgccgtttgagaggtggcgcccacctccaccgtctcgtctgctgcctgctctagtggtgccggacctggggtggagcggagatccacaagggcttggattgctttcgttgtcttgctggctttgaggtggagatgacactaagttgaaatttttatcacacgaggaagcaagaacaggaaaaaaaatcacatttcagtgttgcactctgtggagggttcattgttggtccaccaaactactgcagtgctggagggtttttgttgaagtcctcttcatgttcaccatttctaaattgtcataggctcatagcattgtagctgatcagtcttcaagatcttcctatgagtacatagataaatcatcatcgtatctgtgttaagtatgccaccatggtggggaaaatcttcatccaaagaagtgaaaaagtctgccaaagaaaacctcatcgacacatttcagcgtctcataagttcaaatgagcaaaagggaagcagaaaatcacgaagtagtcgtagacatggtaaagacacagctggtgacaaaggttgctggtccactgcccaatcccgctcaacatccccttcaaaagaggtctctcgatgtcagagctttgcagcagatagaccacatgcacagccacttcctcttcccaaatcacgtgctaaggtgacacgtacttcttctgatattaccaactcaaagtccactttggaaaagcatggcaaaggacaactgcttccactccctccaattcagcctaaaaaaagacctgaagctactgaacctgttactgaagtagctactgcttcggtctccagcaactgttctattgacagtgatgatcctggtgattctcagcttcagagtcctgtgggaaatgaggctgaaaatgcgactagaattactgcaacaagtagttcaagtgttgtgcgcaaagaatgttctagtgctattaccagaaagaacacaaaggaagttgcaaagccaaacagtgcttttctcagtaaccaaatcctgtcaacatctccaagaggtacctttgctgatggttatcaatccaatttacaaagcccccgacagattgccctggagagtgctccgaatagtttgatgtcaagtccttctcgaagcccaagaaatatatgtcctgttcagattccaacttcagctttttgggcaataaaacctcatactgatgtaactttccttgggtctggtcagtgctccagtccaggttctggtcagacatctgggcataattcagtgggaggtgatatgctaggcccaatcttttggcagcctagccgaggtagtccagagtgttcaccaattccaagcccaagaatgacgagtcctggtccaagttctcgggtgcatagtggaagtgtctctcctttgcatccaagagctggtggggtcactcctgaatccccaacaaatcgacatgctgaagggaacaagaagcaaacccacagattgccgcttccgccattaagcattgctaatagttctacctttttgccaaacagctctaacccaactagtcctatatctcgtagtcctggtagaacagagaatccaccgagtcctggttcacggtggaagaagggaaaattgattggccgtgggacatttggccatgtatatgctggttttaacagtgacagaggtgaaatgtgtgcgatgaaggaggttacccttttctcagatgatcctaaatcaaaagaaagtgcaaaacagctctgccaggaaatatcacttctgagccgactgcagcacccaaacattgtgcgatactatggatctgaaactgttgatgataagctttacatatacctggagtatgtttctggtggatctatacataagcttctccaagagtatggacagtttggtgaacaagccatttgcagttatactaagcaaatacttttgggcctagcttatttgcatgcaaagaatacagtacacagagacatcaaaggcgcaaacatattggtagaccctaatggccgcgtgaagctcgctgactttgggatggcaaaacatatcaatgggcagcagtgccctttctcatttaagggtagcccgtactggatggctcctgaggttataaaaaatgctagcggatgtaaccttgcagttgatatatggagtttaggatgcacagtcctagagatggctacttcaaaaccaccatggagccaatatgaagggattgccgcaatgtttaagataggaaacagtaaggagcttccaccaataccggatcacctctcagaagaagggaaagacttcataagacagtgcttgcaacgtgatccatccagccgtccaacagcagtggatcttctgcagcatccattcgtacaaaatgcaccgccacttgaaaaatcatctgcctctcatccactggaacagttgacggctatatcatgcagaacaaattcgaaggtggttgagcatgccagaaatatgtcctcgcttggtttggaaggccaatcaattttgcagagaagagctgccaaattttctttgccaaatagtgatatccatatacggagtaatatatcttgtcctgtatctccatgtggaagtcctcttctaagatcaagatctccacagcatcaaaatggtagaatgtcaccttctccaatttgcagccccaggactacttcgggtgcttcaactcctctgactggtggtagtggagctgttcctttaaaccatgtgaggcaaccagcttacagaaatgagggcttcacggtcacatcaagaggttttgatgaccacatgcctagccggcctgttgatccagtacatggacgttttattcgagtgcagcaattttccgtgggtcggcaggagagggtagtctctgaagttgacattctgagctctcaatatggaaagatgagacatgcaaatgtgtgggatccgcatgataggccattaccttctgagcgttcctctcaacagtgctttgggaatcatgcgaagctaaaaccttcactggacttgagatctgatgctgacagttggcagtggataaagattctcaaatgtcaatctcatattcccattactctaaagaagatgagacatgccctatcaggaaggggatgttgtatactcaaggacccaaaacagtgactctgaacctgtatactcttactctcgtatctacaacaatttagttttcgttttcttctatgggtttggaggccattgtacagaagggaactctcaacaagaaatccagattacatggcacaggcgaaagcaatggtccggtggtgagggagcctataccttatcgttttgcgcccttcaccttcgaaaacgccttggcggcttgcgagttgcgagccaaaacaatcaagggaacaacccatgtgccatggcgtagagtacgcaggcagcaagccagcaatgcattagccattagctcccagggtcccccatccagcagtcttttacacctgtcatccatcatgttcgtcctcactccaatcatggcgctgccagaaggccacccacacacaccaggtccaccatcgctgtagattcaaatgaagcactggagctgttttgaaccactagtggtcacgctacgttctatgttgcttttaagatcgtttcaaattactattagtttccaggaggcatatccgatgtgaatgcgaatccagccagtgccgatttctgttgaaactgaaaccaagaaaaccctgaatcgatttcacttaacttaaattctcacatgacatctgccctttcttgccaacatcccaacgcataaaatgagacggcaaaccttgcagcaaacggataataacttaaattctccacgatggaaagaaaaaaacatgcacagctcggtacaggaatacacagagttcttgtttcggttaacagaacggcgcagcagtgagcaccagccctgaagagacgacgaataggaatcgacagagaaactaggcgtgggcagacaagaagacatcacaggaagacgcccgttcttcggactggcatgtctcggcacggccacggcagcttaagacctgctcttgaacgggatggctctgatgatcacctggtggtagatggcagccagagcagcgccaatgaaggggccgacccagaagatccactgcaaaacaatcataggttataacacgactcctcggtaccaatagaggattaaacatgcatgcattaacaaaggatcattagttaatacatgccatctatatgtataaacctataattatataggtcatgattgtcaatagcatgccactgtgtcttcatcatttgaagtttggtgagttaatgataagtcgtagttagaatcaggccagactttctagagcatgccactatgattgctgcacaatggaaagttggatgtctgatatttggatggagacattacactgcgagtggtaccaaactgtaggaaatggaaagttggttagaggggaatcgagagtagttccactcacatggtcgttccaggcgtgatccctgttgtagatgatggcagcgccaaggctcctagctggg

SEQ ID NO: 28546 - DNA, 5280 bp, Zea Mays
gtcgcacactcagaccagaccgccgccgccgcgccggtgatcgagtctcgtcggcgctaccttcacgccacaagacaataagcatcgacagccaggttcggctccaccaaacgtccttgctgcaaaaacatcatcttttatacagtcattgtgcgcactggcccctttccactggcaagaagaccctgaagtcatcgatgtgcggtattgcccttgtcctcgccagtgaccgccttgtcatcgttccctgtgccactgcaactactgccgcattggagacccagcactcctgcaagaggaagggcgtgccagatgagctgaaggaggccctgcgccggcggggccctgatagcctaggctacagaagtcgctgccttcttgctgatggcacggttgttgttggtgatggttgcaatgatggagtagagggtaaaatcggtgtgagtgactctagtgttgctgatttgttcttcatcggagcaacactgcatcttaggggagctaagctggtttcgcagccgctggtggcccccagtggaagtgtctttctgtataatggtgagatatatggaggaattcaggttgcggatgatgaaaatgacacccaagctcttttcaactctctggaatcttgttgttcatgtgattgccatgctcttggtagagataaaacatgtacttgttgtggtactgggagtggtgccaaatcagttttgcaagttctttccacaatcaaaggtccatgggctttgatatactggcagatgaagtcaaatacgatttggtttggccgggatgcatttgggagaagaagcctcttggtacattggcccacagctgatgattctcacttcatattatcatcagtatcacccccttcatttgcaaagattcactctgatcaaacagtgtcagatcgtgacatgtctaaccatactaaagctagctactgggaagagcttccttgtgggatatacagcatgcatatgaaagacattggaaagcatggtgcatgcatgaaggaagggtggattgtggaagttaacacacataaatggatggcttcttcattgaatggattgatcaaatgggagaggaaactcacagttcctaccatggagaacattcctgttgacagagggaaccatcagttgtctcagagcttcataagctcaagagaacctgaagaaaatacgaataatgggatcacaaaggcagattttctgtcagattctagtttatgtgatgcaaattgcataacacagtcagcacatagagtattggttgcattaagggaatctgtaatgctgcggactaaaatgaacacactctttcagggtactctggatagatctgaggacggagagtcagccccaatagcagtcctcttctccggtggcttagactccatgctacttgcagcactgctagaccagtgcattgattccaaatttttgatgggcaacttgcccctgataggatttctgcaatagctggactgaaggagcttcagaggatatctccgtgccggagatggcgtcttattgagattgacactgctttgacagacttgaacggggaaagtgaacatgtgatgtcactcatacacccttcaaatacctttatggatttgaacattggtattgcactctggttggctgctggtggtgatggttgggtggatggaagtatatgtcgtatgcaagatggttctcgctataagtacaggtcgagatctagagtccttatagtgggttctggggctgatgagcagtgtgctggttatggtagacatcggactaaatataggcttggagggtggaacgcattggatcaggagatgagactagatgtgcagagaatatggaaaaggaatatgggaagagatgataggtgcatctctgatcatggcaaggaggcccgtttcccatttcttgacgagaacgtgataaaaactttgttggaaattccgttatgggaaattgctaagcttgatgaacctgttggaaggggtgacaagaagatcttgagagaggttgcaaggctgctgggcctacaagaagctgctcttcagccaaagcgcgcgatccagttcggttcaaggatagcgagggagtcgaaccgcaagaacttcggcagcaacagagccgcgaaccaggcatcagcaggcagcgtgcagattcaccagagtccagcttctccagtggcgtcggccacacgccagccatttcttaccaacaatcagccatgaacacgcttagctgtgacaagtgccgcatggtttggttgatggagcatcattatcagttgttacggttcatcacaaattttcaaacgattcattgtcagctggatggagcatccatcatttgttatgtatactagccctgaatcctgatcatgtaacagcaacttggacgtggttgaaacctaaaagtggccggctgctttgtgtcaggctgatgtggcgcctgcgttgggccggtttagacgagtaggtccaacctggatctgaccccacatgtcagtgactcaactgcaggggatctttctccggtctggacctgaccaaacaatgctggatgtaaagcagtcgtcggtgtcaatattttttaaaaaatcctatatttctttagaatcagctcgtacttctataatctcttatctactactataataaaaatatttatataaaaaataagtatataaaaataagtatttaaacattgatggttggctccatatttatacacttaatcaatagaaaatatatattttgtgttaatgttataccccggagtcgagtggcgagtccaatctcagactagccacgtgtacggcgtgcagtccttgctacgcgcacccctcctaccgcacacgcgaatccagccagcccacccaccgccgccgcctgctcgtccgcctctataagatgagacctgcccaccgccatggcgccatcccctccgtctctgacccgcctacccatccccaccatttgccgcccaatccgccccgccgcgctccgccttgcctcgactcgaattcttaccaaccgtttgtggcttgaatttgaattccagctcgaatcactcaggcggccagccgggagcgagagcgagctggaggagctcgattcgatgcgttgctgagcgtgggtcaatcgattcgggtcgggcggtggcgcagtccgagagatctgaaccctagcggccgtctgcccgtccggatctgtgaccagccctgctcggtgcttcggcggcatgagtgcctggaaggcgtggggaggagaagcggcggagatatgagcggaggaggcagcggcagcggggacgagttcgggcgggcggtggcacgcgccgcggttgcgcaggcgctggaggccgcggggttcgactgcgcgcaccgctccgcggtggacgcggtcgtcgacgtcctcttgcgctacatcacccacctgggccggtccgccgccttcaacgccaacctcgccggccgcgcgctcgccaacgaactcgacgtcatccaggtgctcgaggaggtcggcgccgacacggacggcttcgcgggcgcggcggacacgggccgctgcctcgttggttccggcgtcgtcagggacctcatggcgttcgtcgactccaaggacgaggtgccgttcgcgcggccgctgcctaggttccccgtccagcgcgtgcagccgcagccctctgccagcccggctgcggcggcggcggggagggagactgggttgaagcacgtgccggagtggctgcctgcgttcccggatccgcacacctatgtgagcacggaggtgtgggatgagccttcggcgaccaaggacagggtggacaaggtggagcaggtgcggcaacggaggaaggccgagaaatccctgctcagcttgcagcgaaggctggctatggcaggcgcggatgggtttcatccagcggttgcattggcggaggatagcgcagagaaggggaaggagatacaggcagctgggacaaagagaaacccgtttcttgagccagcattgccgcctggggagaaggatgtatctgaggttggtatgcctccggaaaagaagaaactatctgtcctcgaggcatttgcgccagctatgcaatctagaaccatcgtcagggatgttgatgctggggcaggattggatgaaaaccaaaggagcattgttcccaaagagagggctccggtgcaccttaagattggatttggaaagaagccgttggcagcagctctgaattcaagaaccctggacctgagagaagatccatccttcttgaaagaggaagcaaaggatgacaagaagcggagagcaggcatgatattaagggcatcaatggagaacccacaagagcttcctcagctctaaagttgtttgcggaggaagtgccgtacccagagtggagttgcatcatggtgtaattgtggaacttcagtttccagaatcttgaggccatgttccctgatacaaccttctcaggatcaccatgccctgatacaacctgcaccggactctcctgcctccacctaccgttttcctaaaacaccatgcgctgatagattctgcagcactgtaactgaagttggaagttccaccatctcactgcgttgaagttggtggttgtgctggtatttcacctttaactgtaaggactaatttgggaacccaatttttccactggattttcattttcctaaggaaaattagttcattttcccttgagaaaataggaatcccttagaaaaatatagtttccaaactagccctaaaattaaaagtgggttgtggttcaaacggagctgatttttgtgaggccatgttcctcatccccagacatggcatccaaaagaaagtttagttcttgtagctgtactccctggtagaatgagagaggtttgtacaaaaggtaacctgattgttcttaccaagacttgtcatagaaaggattgatgtatctagtggctactcaagggacagcttcataatgccgtatgtgttggcacgcgcacgcaccccgccgttgtgtttgggacgaaaacacttcctagaattcctagataactgttgaaggacttttatgaggatttattgattgattcgagttcatgtccttaatgacttgatgtagtgcttcatagttggaggctggggttgtataacagtgtaccatatggttctttcgacttttgcccccatctaacttgagtatttaagattgaacttgtaaagattttattttaaaaggaagcatgttgaaa

SEQ ID NO: 28547 - DNA, 1205 bp, Zea Mays
cttacattcaagggttattttatgttcaatttgtttgaggttgtccagttaacaggttaagtagtccacgaatggaattatggtgtttcatgaaaaagataggttaaacttgtggacgtcccagaaatgaattatacttcggaggatcaaccgtatcctcgtggagagatttgtgttaggggacctataatattctgtggttactataaagatgaagtccaaacaagagaggtcattgatgaggatggttggttacatactggagacataggtttgtggctgcctggagggcgtctaaaaattatagataggaaaaagaacattttcaagttagctcaaggagaatacatagctccagagaagattgagaatgtctatgctaagtgcaagttcattgctcaatgctttatatatggtgatagtttcaactcttccctagttgccattgtagcagtcgaaccggatgtgttgaaggcttgggctgcatcagaaggaatccagtacgaggacttgagacagctctgtgctgatcctagagcaacagctgctgtcctggctgatatggattccattgcgaaggaagcacagctgagaggtttcgagtttgctaaagcggttactcttgttgctgagccgttcacattggataatggccttctcaccccaacattcaaggtcaagaggccgcaagccaaagcatactttgcaaaagagatctcagacatgtatgcacggttgctagagacagagttagctaggtcgaagttgtaacttgtgcggtatcaggagaagggccatcaatacagccgtacaggagattggattctgcatttttttattccacctcacgaaataagtagtaaaatctttttactgatacgggaaataacggatcatgccatgctccggagtcgatagtttttttcaccagacggggcagtgcttggcgcatgctgaatatatggttctagttataaagaaatgtttttacagagtgtatattgggtctgaacagctgccctggaaggtagttcacagaaaatatattggtattacaaatgcaatactaaaaaaattgtgtcttccgattgtattgtcagtcttttatcaacactagtggaagtgtacgcgctcggtacacgataaaaatattacatacaaaatgtttataaatacctatataatattaaatttattgatatgtt

SEQ ID NO: 28548 - DNA, 3697 bp, Zea Mays
agcgctgcccccgtcgtcctctccatttccttctgtctgcttgccctcaaaccctagcccgtaccggcgtccaccttcgcgcaccctcgcctcaccaaacacccacggcgcattggcgcttccacctcttatcgtacgaaggcgagcggctttcacggtgtctctctgtcgcatgcaatggcaccgctgtttgaggggcgcccaacagctgcctgcccacggcatgctcaggggcgctggggtcccttgccgctgtccctgaagtctagcctgggttgttgatcttgccgcagatgcggtactccattacttctccgcccgcgccatcatttcggccacacctcagtctgttgtgttcaggactgtcagggttgtgctacctggatgtcggttgcctcattgataggaatcatcgtgcagattgtcgtgttttggacaatgccaacctttgtttccgctgtgcctgccaaggttgtggcttccttgggtgatgcttatttgagaacatagctgttgtgctctgagcatgtcctgtgtgcctgtcatggcggcttcttttggcgacatcataccaacatattcaatgtcaggctttaaaggagtgagctggtttctatattttaactgatgcaccttgatgctttattgagcggtgtctatgaaatgatttggatggaaggtaaatttcccaccaatttaattttagatattttaaataattccttgccatatctgcattcagcctgttattgtgtttatgttcacccttttttagtagggaaatcaaaacatagttaatccagtactactgggttttattatgcctgattttgtttctgcttttgagtctatcatgattatagggctgttaatgacacatgacattgtcaattggaaataccatgtcaacggactgattaagaaatacaaaatctttgcttagatgggacatatttggaaaataccccttatattaaaaaacacatggtgtgtcaagcattttttttacaaactgtagcaaactgaaaactagttgcattggtcatgcggaaatgtctcatctatctcatgtatgttgcttatattttgtctcttgaagatcacaagcgaatgcacttttctcttgtctctcttgtttgttgtttctctccagatgagctgtcctattcttgttgcattttgtccgcaactcctatcacccctatcttaatccttcctgtaggatggtaggtgtactgaaacagatgatgacaaactttctgaattgcatgaaagtgaaccaggatatgctaattggattttccaaaagattggatcttttgagtggaatatcacaaattctcttactacaaaaaataggtcccactgggactcgaacccaggttgccagattcaaagtctggagtgataaccactacaccatggaaccatttatgtgtgttctccctagataatatatttatggtaacatgtttccatagcattattttgtttttttgtgtgcttttgctagccattccaaaaaatcatgttaggagtgagctagtgtcacacctggttttggaaaaagtaacctagtgcataccatatacgtgccaaggtcaaatttcacgtacacagtcacataagtgaattacatagcataacgctcgaaatacacataaacgtaactgttatattacagactcagtcttcaccataacagttaaactcatactatatttttttgacatagtaaataactaagtgacaatggaaagcgatagatgacatccatgggcaaataactgaagacaacaccaacgtagaacttatcatagttttggaacttctgcgggtactcctttggaacatcatgacttgagaaacggttgcatctcagcaagtgtcccatttaggttaaagtggattgaccatttaggttaaagtggattgactcatacatttccaatatgtgttgctgcctgctgtcccttcatgtttgtgatttcaaaaggctatcctatgctgctgatcagtacttaatggatgggagaagggtcagacctcagataagtacctaacttgctatttcctatttttttatcacttttattgatgcccaattgcatctaaagtgttgtccacttctattgcagcagtgcttgaggattcagtgatcagcagatctgcaaggacaaaaggaccaaaggagtgagctggtttttatattttaactgatgcacctggatgctttattgagcggtgtctatgaaatgagttggatggaagggagacttcaacttgtcaactctgtcctctcgtctctgccaacatacgccatgtgcaccttacaagttccagcagcggtcttggagtacattgacacagccagacgacactgtttgtggcgtaattctgatagcaatgcaaaatttaagcctctggtggcttggaataaatgcacacgaccgaagaaaaaaggtggtctgggggtcatcaacctaagaagccagaactcgtatctccgaatgaaatttcttgacaagctctacaacaggaaacaaatcccttgggttaacctggtttggaatacatactactctgacggcaagacccctcatgcatccaagttcatgggctcgttttggtggagagacgcccttaaactttgtgatctcttcagaggaatctccaactgtaaggttggagatggtaaaactgttctattttggcatgatttatggaatgacaacatccgcagaaacaaatttccaaggcttttcaccttcgcaaaaaatcaaagcatttcggttgcttcctttttgactcaggagaacttgacagacaatttccacttaccccttactgagcaagcaaacactgagctgcaacaactcccggatgaagtgcaacaaattcgagaatcagtgattgaacctgaagagaaagactcttggagttatatttgggggaatagcacctactcgtcaactaaactttaccactacactttcaaaaatgtgaatcctccaaaaccatttctctggatcttggagtccagatgttcaaacaagcttaaagtcttcgcctggctgctgttgatggacaggctgaacaccagaaacatcctaaagagaaagaactttaaggttcaaggcgacaactacagctgtgctctttgtcaacttcaaagagaagaaactgccttccatttgttcttcaattgccctttcagccaagactgttggagacatctgaatattcagtggaaccaccaaattgacttctttgcgacctttcaacaagccagggacttgcacggttcaccattctttatggaggtctttatcatagcagcttggcaaatctggaagcaaagaaacaattttatctttgacaggggacgaccatctttcattggctagaaaaaagaattccgcgccgaagctcttctgcaagctaaccgcttttctgaagagaaatcaactcttttctcctcgcttgtgaattcctatagatagcagatagttttttccctgtgctttagttagtttccttctggtttatgtcttgggagcgactgctaatgctctttgtccgtcttcttctttatattaatatatatctaccacagcacagcaggggcttcccttgctgtacattttcaaaaaaaaaagtactggaacagatgataactttctgaatggtattaaag

SEQ ID NO: 28549 - DNA, 293 bp, Zea Mays
aagccaggaacagaacttaggcgttggcgattggcatctccctcccctaagccatggccaccgggcagcccgtacgactcgtgttggatgcctccctcctcctcgacccctcctccaccagggaggcggcggtggtggctctgcgtcccggggtagaggagctgttgcggcggttgcgctactccaacctgactgtggcaatctgctatgcagagggcatgccaactaatgagaatggcatcatgttaacaaaaatgaatgagaaatcagtcatttctaatggaaaggcagtt

SEQ ID NO: 28550 - DNA, 2152 bp, Zea Mays
atgaattgatgattaggttttggaattcaagggatgagaaatgtatagacagtgtaatcactttgtcagaaatgccttctgcatccaagtccaaggcaaaagaaagatcagctgcaaaagttgcaaaagagcaacccaaggttgctgcaaagccaatgggaaatgctacacttgcaagttcttataacaacctgtctggaaagttccatgttctggaaccatcaagctctttgttgggtagccaaggcatcgataaattcaggaatacagatgaaatagatgagcattctcgcagctcccatggtacaggggatttcgattgtgcctccaacaatggtagctgttctggtgactcagaggatacaaaggaaaaatcaaccagcactgcgtcccgagtagactctgttcctggatgtgatattgataaacgtgagaagattagacagaaaaatgagaagaagcatcaaagacagaaggagaggcgtgcccaagagttacacgagcgttgtaagggatacattatgtccagaaagttggaagcacttgcgcagaagcttgttgcgatgggtttctcagcagatcaagcaacgatggctcttatacaaaatgagggttgcgttgaggagtctgttacctggctctgcaactttgatgccagtgaggaagctaaacaacaacttgtagctgatcaacagtctggagttaacttgaagattgatatagctgatgagctttcaaagattgtgagcttggaggcaaaatataagtgtacaaagcaagaagttgaaagggcagttgtttcctgtgaaggtgatctagaaagggccgaggaggccttgaagacacacaagcaagaatcaactgcaatcccaccaaagcctgaggggtctggctattcaagtggcttgcctaataagccgcaagttgtacttgcacagaaccctgcaaggcctcaaacaaatggattatcatcagtaggatctcatcagatgagaagagaggagaaggacataaactataagcttttgatgaatggtagtggtccaaaggaacctgcaattaaaggttttcagccactggcaacaccgattaagccagatttggtccgtcagcaatttgttcaacctgagaagagacgtctcaatcccaactcgaatccatcagttccttctgtggcatcgtctcctttgcctgttgcagtgccacaagtgaagccagacatgcggcatgtggcagggaccaatgaggtgaaaagtttgatgcccaatggaagcttgcgagagtctgtgattgtaatgcagcgtcctcaatctgcaggtaccaaacagagcctaccatccactagccatagtatgtttgtgtcagaaccatctgcaagggattggtacttaaatggcgtgtcaggtgtggatatgatgttgaatgggggcttaggtcatggactaaggaatatgagtttggacagtgctagttctgccaggtcgtttgggcatgcaaaccatcaacaaaatttggtttctaatcctatagagctggctgccaatggttggggtggcacctggagttctggaggtacatcatcttcccgttctgtggtgtcatcactcggggcatttagagggtggaatgcatccgagtcctctgcattgcctcattctgattggagaaccaacggggcagcaccttatgactacacctcagtagactggagcgtcgacacaacactattgaacccagcagcaaagagcgagctgctgtcggacacatggtcaaccatgttcatgggtggcagatcaacaaggacacctgggaacctcagtggtgcaggcatcgctgggttgtatgacagtaaccgtccaatggatcctgctccttcggctcgtccatatgagtggcctactttctgcaggggaggatcttcctagtttccccaaccctgtaggcaagaggccattgaataaaaaaagtaaaagctgtcatttgtttcttttcttgttttggtctcagttgcagttggttgaaaaagttttactttgtctatcgaaccgagcttgtgtacccttgactgttggccgagataagtcatctttctgtgaaatcgttgtgcatgaaaaatgaaggaagagaactgaatctatcttggctgaaatgc

SEQ ID NO: 28551 - DNA, 2820 bp, Zea Mays
cactgccaagcgcagttgtctctgatgtctggtcacgcctgacgacgccgctatcacgcgccaccctcctgccgacgaacgcggcctcctcctcattgctgagcgcagcccctcacttctctcctggctgcgccaccatgatgccgccacggaatgcgcagagccgccgaagagagcagagtcccagcgagaaacgcaggagctcttccttccacctctggcgaacctccaaggaaactcgacgcccagacctgctcgcgcacagggagcatctttgctccggcggctgctcgccggcctccctgtctcctccccagttcttcctctcacagccgtgcagcgccctcttctctacagtggccgctgctcctctctgaagctatgcgcaggagctctccaggacgccgcgcctcctccctgctacacgccccggtcgacgacgaacttcccgtggtctgggaggccgcgcccgcccagatccgccggaaggagcgaaaggagccccgccgccgctgtcatcacaggccgcacgggcttccggtggcctgctcaggcggcggctagggttttgaggggcgctcgggtcgcccagcgcggggacgaccgagcgccgtctgcttcaaacatttggagctcatcccctcgaaatacagaaggtgcatccacaaaggattaatctcttcgtctaattttcttgggcatacacagattcagagcatatggcgatcaagtagctatgcgttcagctgaggacattgcatatgctgtgttacggttttttgcaaagggtgggtcattggttaactactacatgtatcacggaggaacaaattttggaaggactggggcttcttatgtgctgactgggtactatgatgaagctcccatggatgaatatggtatgtacaaggagcccaaatttgggcatctcagggacttgcacaatgtaataaggtcatatcagaaagcattcctcttggggaagcattcgtctgagatattgggtcatgggcacacatctttgagttgcctgaagaaaatctttgcctctctttcctttccaacaataacacgggcgaagatggaacagtaatcttccgaggggagaagcactacgtgcctagccgttcagtctccattcttgcagggtgcaagaacgtggtttacaataccaagagggtgtttgtacaacacaatgaaaggtcataccatacctcagaggtaacaagcaagaataaccaatgggagatgtactcagaaaaaatcccgaagtaccgtgatactaaagtcaggatgaaggaacccctggagcaatttaaccaaaccaaggacgctagtgattacttatggtacaccacaagctttcgcttggagtcagacgatttgccttttagaaatgacatccggcctgtgcttcaggtcaaaagtagtgcacactcaatgatgggatttgccaatgatgctttcgtaggatgcgcacgcggaagcaagcaggtgaagggtttcatgtttgaaaaacccgttgatctgaaagtaggtgtgaaccatgttgtattgttgtcgtcaactatgggaatgaaggacagtggtggtgaacttgctgaagtaaagagtggcattcaggagtgcctaatccagggtctgaacactgggacgttggatttacaagtcaatggctggggccataaggctgcactggaaggtgaggacaaggagatctactcagaaaaaggtgtgggcaaagttcagtggaaacctgccgagaacggccgggcagccacttggtataagagatacttcgatgagccagatggagatgatcccgttgtacttgacatgagctcaatggacaaaggaatgatttttgtgaatggtgaaggcgtgggtagatactgggtctcataccgaactcttgctggaactccttctcaagcactataccatattccgcgtcctttcttgaaatccaaggacaaccttttggttgtcttcgaggaggagatgggcaagccggatggcatcctcgtgcagacggtgacgagagacgacatatgtctgttcatctcggagcacaacccgggacagataaagacgtgggatacggatggtgacaaaatcaaactcattgcagaggatcacagcaggcggggcaccttgatgtgcccccctgagaagacaatccaagaagtcgtctttgccagcttcggcaacccagagggcatgtgcggcaacttcactgaatgcctcggcaagccatcctgcatgctgccggtggatcacacggtgtacggcgcggacatcaactgccaatcaacgactgctacactgggggtgcaggtgagatgcggaggcggcaagaagggtgcctgagaataacaagatggatgctgctaattaatggacgtttcagcttgtttgtttgttcatcccttcggtttggcactgatgcttacattgttctgacattgcaattgaaatgtgattggaacattcttgatcgggaactaacatgaaatgagtggagggtagatgctgatcagaccaaagatgtgtatttcccccctctttccttctgtctcgtgttgtttcatgtaaccatcacaatatatatagatgttgaataatcatgaccagtagtatagatcttagagcatccctaacttttgaataaaagactcttggagattggagctggactaactgattgcttcttgcaacatgtatatgaacatttcattaaaaaacgagcgatgagcaaaacaatataccctactaattaagatgttgcaaatgagtttaatcctacagctttgatactgc

SEQ ID NO: 28552 - DNA, 2498 bp, Zea Mays
tatggcggacccacttatcaatcgatttatgggccccgcgtggcagagtcaaaagactcggaagggagttggttggtttttgtttcctccccgcacccgcaacaacggaaacaacggccccgtggtagcgaggagatcaggaattcaggagagcaaaaggggagagagaatgaattgaaacgaaggcccgcgacgcgaggagcgagggaactaccaccggtgaccggtctcggcgcctccgcgacgatagcctctccgacctcgagcgcggtccggttcctccctgcgtcagcacgcgagcccttggagcttcgagtcagatcccggcgggcgcccatggtggctctggtgccgttgagccgcgcgatgtagggttttcgcgcgccgcagagtaggagcgatggggcgccggaagatgtccgcggcggcaccgccgtctcggagctggtccaacgttggcggaagcgtcatcccgggtaagatctgtggctttgttccatgtgtggcgttaaggcgctgtgaggtgttgtggatcggattgatttcatgtcgagctaatttaagggtgtttgttttaccattctaaatgaggtggtgcaatcagtccatttctcaaatttggtggagtgattctattcctgaacttcgagctaaacacaaaacagacttgcagaatttgacgctgaccaaacagccactcagaacattgcattttttcctgttagccatgttacaatacttgaaaagattagcaacatatatcctgagtaagggtggtttcttctttctcctaattgttttattggtagcttctggaatcttgctcgtcgtttcggatggtctgcataagaaggtttgttgcatgttcttctcttgtctttgtcttaatcagcgggatatggatagtcattttcataactcataagaacccatgttgcagtattttgtatagcatcttggcattgtttttgagcactaatgttgtttggatgtcatgtatgcagcatgtgcaggaattccttaattatgctaaatttgtgtcgtggtgggtttcattaggtgtggcttcatcaattggactaggttctggtttgcatacatttgtgctgtatctgggtcctcatattgctctgttcactattaaggctgttcaatgtggtcgaattgatctaaaaattgctccatatgataccatacagctaaaggttgggccatcatggcttgacaagaaatgttcagaatttggaccacctgtgtatccagcatcagctcattcagttaggatcccagtcttcgacctactacctcagatacagctggaggcagttctttggggaattgggactgcgcttggtgagctccctccttattttatatcacgagcagctcgcttatcaggaagcgagtcaaaagctgttcaggagcttgatgcagctacttccaaagaagatgggccagtagcatcatcccttaatcgaaccaagcgttggcttctctctcactcccaacatctcaacttcttctctatcttgattcttgcttcggttccaaatccactctttgaccttgctggtattatgtgtgggcaatttggtgtgcctttctgggagttcttgtttgctactttgattgggaaagccatcatcaagactcatattcagacactatttatcgtgtccctgtgcaacaatcagctcttgtatcttattgaaaaggagttaatctggatatttggtcacgttcctgggttttctgccacccttccgtctgtgattgccagactccatgctgccaaggacaagtatctatcaccaccagccccagtctcaccgtcatcacaaatgggggagaaacagtggaatttctcttttacatctgtctggaactctatagtgtggcttgtgcttttgaacttcttcattaagatagtcacgtcaacagcacaggattatctcaaaaagcagcaggatacggagatggaacttatttcggattccccgatccaggaccattctaaaactaactagtggcgcagctagtggtgtttatacacagctgctagcagcaaagattctcctctgtagcttaagcccctgcagatgatttcaagttccaacaattagtattagtagttattcatctgcgcagtggacaaaaacatggacacatggtcttggttaacttgtcagttgacgaccttttgtcattgagcctgtacctgtactggcagctcctgttggagtcattctgtttattttcggacatctacacggataaacagtaggaattgtttatggagcacggttggctttttttgaagtgaagagcacggttggctttgtgagatgtatcattcatacctgttcctatgtattctgggaacttgaaatgcaatagaaacctgggaggatttaacaaggatacatcattgtgtcattactatgtgcatgtggtttgcaatttgcacctcttccggaacaggtggtgaatagtctctg

SEQ ID NO: 28553 - DNA, 2289 bp, Zea Mays
ggagagaaaaaagaacagttgtaggaatcagttgacagtcagtctaattttacttttcatcgccgaatgaacgagaaaataattaaagcatcgatgtgcttcccctggaactccatacacttgatagctccagcaatttgtatggttagagcttttaccagtacgaccgaatgcacacgcttccgaatttaatacctttgccggcccttcgtatttacgtgctgaaatacgaaactagttactcactccatcccagatttaggtcttgtttgtttatcctccagattatataatccggcttaaataagttaaagagccaaacagacaacacagattattaggtggattatattatctagatacctagattatgataatccataagcaggtgcaggtcattaggtgtttatgtaattcataagatggattatataatcttggaaagaaacaaacatggccttataagtcgtcttggcttttcagcatggcttgtgctacgcagctagacgttcgctgtgtcttggttggtgcccggtaaagaaaaaaaaataactattctctcccttcttttttatttgtcgctgtttagatcaaaattgaactagcgggcgataaatatttgagaacggagggaggtagtgtgtagtatgtaggagtatataaaaaagagaataaaaaatgatctataataatttcataatttggagcagagcaggggcggagggcccagtatggcccagtattgcctgggcaataccttgggccggcccactaatagaatagagattagggttcgtcacggcgttccgcacagccgcactgccagcgtcccgcacagctgcctgctcggccgcaggccgctcctgccggtgctccagcctccaggcctccagccgctcggagcctcggactcgtcacgctccagccgccagctccggtgctccgctgatctgcttgtccggttgaccggttgtcttgtcccgccggcggccggctgcgggctgcttgccgcttggtcccgccgaggcgccgacccgcatggccgcacggctgccgcctgccgctgcttcctgcttggccgcacgtctgcttgtctagttgtctgcttggctgattgcttaatgcttagtgcttctagttgtctgcttgcttcgtgcttctatgcttctagttgtttgattgtgacttgtgagacttgtgagcagagcatagaaaggtcaaaggtagctcatgagtatttatttgattacccgcgtgagtattttattatgcgtgtctaatctagtagatttttcaatgtgcagattttccaatttctaaatagcagtcttggatacaaacaaaaacaagacaaagaatatggcccaaaaaagtatctctctatattatgtgaacactccctgttggctgttgtaatgtcttctaattatctaatacatgctatatgcttcgtaaaatgacagatttaaagagctatttcagtcaagcttctagtggaagtagactaagcactcgcgctgatggagtttgcaatgaacccagaatacaagttggagtccaagagaataatagtgaagatgccaatggtgaaaatgttaatggtcaagtcgaaggtataaatcagttcaacccggatcacattatttctgatccgggactttgtattccaatggattcttttgctcctaatattagagatgatgttagaagggctttcatagctaaagattttattcgccatatgacatttggttgtaaatggattgtaatcaagatgactattaaataaggtatttttcaacatctattacttattttatagctacaagttgttttaaactgtgtcataaatttttagtcttagtcgcgttagcaacacctaaattttctagcgtcctccgccactggagcagagataacacatccgcatcccatataatcgtgtagcataccagacgggagatggatccaccgcatcaattaaaaagtatgattgtcgacgagcatatattacaaaaaaaaaattaagaggatttaggtcatccttcgagagacggatgcataaagcagcggagacccaaaactgtcgagagcatccatggagggagatgatcgacgcaacgcaagggtaggcggcaggcccaaaggacccctttacagtggatctacgcgcacggcgaaaccattaaccggcatcatcccgtgaacgaaaggggaccggcgagtcgagtacctacctactccaaaaagatctactaccaatcgttcccgacgagatcggaaggggag

SEQ ID NO: 28554 - DNA, 226 bp, Zea Mays
ctcacccttgttgtctcacacccccataggagaagaacatgtggttcaagtggagccacacaacgaggagtttgattcgatctaggtggcatctcccagttgactttgtggcgccaaggatggactttagttcgattcatatttataatttattttgcaagacttccgctatgtaataagtactctgatgttattatgacatttatctctatacactatgttatta

SEQ ID NO: 28555 - DNA, 3005 bp, Zea Mays
gggatggtccaaggagagcttggggctcgctgccacctcgcgcgccagcgcctaaataaatcactcccacgcacacccaccaccgcgccgagcacctcctccttcccttccttctctctcccaccctcctcactagctctatctagctgagtgaactgaacagcccactggctcgtcttagctaagctcagctgtaaagctaaggttcggagtagctagcgtggtggccggagagtgtagcgagcggcgttcagctcaccgggggctgctgggtgagtgagggagccagcgtcgtgagagcgctccaagatgattacggggacggacttctaccacgtcatgacggccgtggtgccgctgtacgtggcgatgatcctggcctacgggtcggtgcggtggtggcgcatcttctcgccggaccagtgctccgggatcaaccgcttcgtggcgctcttcgcggtgccgctgctgtccttccacttcatctccaccaacaacccctacaccatgaacctgcgcttcatcgccgccgacacgctgcagaagctcatggtgctggccatgctcaccgcgtggagccacctcagccgccggggcagcctggagtggaccatcacgctcttctccctctccacgctgcccaacacgctcgtcatgggcatccccctgctcaagggcatgtacggcgacttctccggcagcctcatggtgcagatcgtcgtgctccagtgcatcatctggtacacgctcatgctcttcatgttcgagtaccgcggcgcgcggatgctcatcaccgagcagttcccggacaacgccggggccatcgcctccatcgtcgtcgacccggacgtggtctccctcgacggccgcagggacgccatcgagacggaggccgaggtcaaggaggacggcaggatacacgtcaccgtgcgccgctccaacgcctcgcgctccgacatctactcgcgccgctccatgggcttctccagcaccacgccgcgccccagcaacctgaccaacgccgagatctactcgctgcagtcgtcgcgcaacccgaccccgcggggctccagcttcaaccacaacgacttctactccatggtcggccgcagctccaacttcggcgcggccgacgcgttcggcatccgcaccggcgccacgccgcgcccgtccaactacgaggacgacgcgtccaagcccaagtaccctctccccgtggtgaatgcgacgtccggggcgggggcggctcactaccccgcgccgaacccggccgtggccgcggcgcccaagggcgccaggaaggcggcgacgaacgggcaggccaagggcgaggacctccacatgttcgtctggagctccagcgcgtcgcccgtgtcggacgtcttcggcggtggcgccccggactacaacgaggccgcggccgccaagtccccccgcaaaagtagcaatctttcccgccgcttgctcgctccgcccttgggggagtgtttctcgggctaatttgtattctttctttccttggataaacaagtggatggaggcaaggacagggacgactacgtggagcgcgacgagttcagcttcgggaacaggggcgcgatggacagggacgcggaggcgggggacgggaaagccgcggcggcgggcggggaccccagcacggtggccgcgccgacggcgatgccgccgacgagcgtcatgacccggctgatcctgatcatggtgtggcgcaagctcatccgcaacccaaacacctactccagcctcatcggcgtcatctggtcgctcgtctgcttcaggtggaacttccagatgccggccatcgtcctgcagtccatctccatcctgtcggacgcggggctcgggatggccatgttcagtctcgggctgttcatggcgctgcagccgcggatcatcgcgtgcgggaacaaggtggcgacgttcgccatggcggtgcgcttcctgaccggtccggcggttatggcggccgcgtccttcgccgtgggcctccgcggcacgcttctgcacgtcgccatcgtccaggtacttctgacttctgagggtggggaggggaagacggatagatttcacaatataccccgccggcacgcccgcctgcaacagcaagaatcatcgctgcgctgtttcctttctcggtccccctcctccctcgtgctcgcctctctctcccacctctctcgccgtggccttttgcgctcggcggacagcacaaaagttaccctttttttctcactgtgcttttggttttttgcttcgccaaacggcggaacgagcaggcagctctgcctcagggcattgtccccttcgtcttcgcaaaggagtacaacgtgcaccctgacattctcagcaccgcagtcatttttggcatgctcatcgccctgccgatcacgctcgtctactacatcctgctcggcctgtgaccgacccgtgggtgatggcaatggcatgccccgcattgctgtaactgtaaagaccgctgctgccactttccgttcaagggaggcaagtgaggagactgtctgctacgacatttgcttggcgcttcaaaaatgagtggcttgtttctctctctcttctatctattttttattttttctctagaagtaggtgtgaggattgtatggatggaaagtgtgggaggtggacaagtcgcggtagctaggtaggacgacaatggtgaggcaaaacggaccaaaaggagatccagtttaagcacgtcacgggatgggttggatatttcaacgggttcagggtattttggttggctgcgctgaccgatgtaaaatcagcgcgccattgtgacaggagatcgatcttgcttgagataaacagctcacctccggagtttgatggcttgagataagggctcaactcaaaatagacagaaatatataccgtatttgtcactgaaacaaatcagtcttttatacacttggtattttaaaaaaaattgaactttcttattcgacttggaattttcttga

SEQ ID NO: 28556 - DNA, 823 bp, Zea Mays
atggagtggccaccgccgtcgacgtcaccatcgccgtcgctggtggtgcgcagccccaggcagacagtcagcctgatccgcaaccggcgaccccatcgtgactgggccccctcatcgaggtctccctctttcgccgcccgtgaccatggccccaagccgtcggaggtgtacggattcgttggatccatcaccaccgtcattgccaccgccgtgtacctcgcctgggcatacacgcccgagcccgtcctccggtcactcggcatcacctactaccctagtactgggcactggcggtgccatcgttcgtggttgtgaccgtggtgccgtccatgggcatctacatgggcctcaacttcgctgccactcctcctccgacttccttcagcactatcttcgatgaaaagagtagggagcacacagccttttctcctgcaactgaggatgagaggcccatcgaacccatctcagacatcggtattgatcggatcaacagtcttatgtatggtgatagatgatttcccccggtggaatatgagtttaccatggatcgtcggattggaaacagatgcaaacgcgaaggaagatttccatgtcagttgaactttgtttggcagtccagctaagagttatcggtactcgctatgtcgcgcgcgttcgacgactactatattaaggattatgctgtcatctcgcgccggatgtgacgtagaggaggatcgacatcaatgaccacttgtcatcgtcgggtagcttttatgtcggtctgtctttaattctcttcgcaaacacacacttgtctttttgtttaagcaaacatgtatgg

SEQ ID NO: 28557 - DNA, 1254 bp, Zea Mays
gctgtcctctgttttgcgtctgttcccgttgctacagactacatactacagagactacagagtacagaaactgtcccactgttctactgtccgctggcgtatgctccactgccattaactcgagcaagggtcccaatagtgaagcttatggatccaaaaacagggctttcctgtgatatatgcgtcaataatcttttagcagttgttaacacaaaacttttgcgagattatggacaaatagataaaaggttacagcagttggcattcattgtgaagcattgggctaaaactcgacgtgtaaatgaaacttatcaaggaacactttctagttatgcctatgtgattatgtgcattcacctcctacagctgcgaagaatactcccatgtctacaggaaatggaggccacttattatgtcaaggtggaagaaatcaactgtgcatactttgaccaagtggacaagctaaataattatggtgctcacaacagagatacagtatcaaggctgctctggtcctttttccattactgggcatatgagcacgattacacaagagatgtcatatcaattcgtactggaaggattatcagtaaggaacggaaggactggactagacgagttggaaatgacaggcatctcatatgcatcgaagatccgtttgagatctcccatgatctcggtcgcgtagttgacaagttcaccatcaaaatactcagggaggaattcgagcgagcagctaatatattacagttcgatccaaaccccagcgtaacactctttgagccctacgtgccccctccatcgccgagcctgttgcaagaagaaactgcgaatgctgcagaaattgaactatgatagcgtttggttcgtccccaggtattgtaataggaaatagaatcaactcaaggattttgatccttgcatcactggttgcagcctttggttggatgtgtaaatggtattgtttaccgttacagctgtttggtttctatctcagggatcacaagtcagttcccgaacttaaaaatcattcgtggtatgttctatttcaactcaagggatcacaagtcagctaccatatcacatgtcctattttatttctatttcaaacttcattcggcaaatagtggtgcgaattctctatttggacagccaaaagtcagcaccatacgtataattttggttcacatatgaaagaggtcaaccaattattgtatgtcgtacaacaaatgggatgaataggatgacatcaag

SEQ ID NO: 28558 - DNA, 1846 bp, Zea Mays
gaaagagaagggcctctcgagggaagggcaagagcggcggctggtaaataaagatcgcgtcgacgcctcttcccctcccccagacctccccgtctaggcttcgattccgccctcctcgaacccgccttccttcccgtcgttttctccccagctccatcgtcctcgggctccggagaaggaagagccgctctggcaccaggtctgttgcaggtatgggtgttctcggtggagcacctcctgcaagctgcccagcgacccggcactgcgcagaatgggcccgaatctacttgaggtactgcttgtgcagccagaaggaaggtgctgccctggcacttgggctaatcagtgtcataagctggggcttcgccgaggtgccacagataatgacaaattacagacagaagtcaacagaaggactctctgtcgcttttcttatgacctggattgttggggatttgtttaaccttgttggctgcttcctcgaacctgctactctgccaactcagatgtacatggcactgctatataccatcacaactctaattcttaccgtacagacgatatactatagccacatctaccatcgtcttgaagcaaaaaaatccagggcagctagcaaggctcaaaagcatcaacgtgcggatgcatcattacgtgaaaggcttttgggtgccaaggacggtgtgttatccagaaacaacgggtcagatgctacagtccttattccaagctcacctattcctgttaatgtgaaattggtcgaccaataccatggaagcagccccaacaccgactactactacatgtcagcaagatctttgtccaggagtccagtgccaactgctggtacatggttgggcagtaatcgtcaatcgttaatgactcctccacaaacgaatgatcaaaggggatctttaattggtgaaatcgctccagcacattctgcaccatctactgttacaaaaaatgccctctcagtggcaccatggatgggtcttctattgggtacgtgtctcttgcacattttgattggaaacacacatagggagatgccaagtggaactgtcataccagttggaagaaggcttttagtgtttgtggagggtcatggaaattcatcgctcagccatggcaatggaagtgaaattggacgctatcttggttgggctatggcaataatttatatgggtgggcgccttccccagattttgttaaacatgcaaagaggccacgctgaggggttgaatccattaatgtttacctttgctttactgggaaattcaacatatgtaggaagcatacttgtaaatagcttggactggtcgaaagttggaccaaatctcccgtggctcgtagacgctggaggatgtgttttgctggattcttttatcattcttcagttcctttatttccattatcggaagcaaagggagctttcagatgagcacgacaaagcagataaagcctgacagaaatggtttcttcttcagtacaaagaactgaagctgaaatgagtacctcatacaactggctctgggtagcagcatcattcttacgtgaagagcaccactcatactcaggagtcgggacagatttggagcgtcatttcactggttgctgcttggggagggtagttctcacggcgtcatctcttgtggagaggcttgtgcacttaatttgtcttgtagtatcaaaacgtcttgtataatattatcactgttctcgaatattggttcattatctctgttctcgaatatttgttctcaaatatttgttacctgttagtttatttttgaaacgacggagggaatatttatttatatgagagattagatgtaactggtct

SEQ ID NO: 28559 - DNA, 2591 bp, Zea Mays
actgcactgcaccgcaagccgtcgtcaccaagagggaggaatgcggtaagcggcaagcctattccgtcttctactgtcctgttccgccgaacacgtcgccaggtctccttccgccagagcacgccacctcgaatccccctccctgctcaagtgctcggcgactcggcacctccgccccacgtctttctccaccgaccacctgccccgacccctcctcgaccggcgtcgagtggggatccatcaggactggttgggaaggatcggcatgctctacagagaagtgttgcagagcgttaaaagcagtttgggaagactacagaaatacccaaaaagatcgccccctagcttctgaatccttcaattctctagcctgtaaaagaacaagccagggttgtctggctcgattagggaacatgttctctcctggcttcgtttcagcatcaaagccattgccaagctggccaattttgagtgcaggaacatctgtaactgtggctcttgttttgtcattgtttctaacctttgagcatctgtgtgcataccatcaacctgaggagcaaaaattcatgattggtctgattctgatggttccagtatatgctgttcaatcattcttttcattactgaattcaaatgttgcattcatctgtgaactgatgcgtgactgttacgaggcatttgccatgtattgtttcgagagatatttgatagcatgcttaggtggagaagaaagtaccattaggtttatggagggtcggcttcaaatcagtgagagctcacctctgctagatattgattatgattatggcattgtgaaacatcctttcccattgagctgctttatgagaaattggtacctcggtcctgacttctaccatgctgtgaagattggtattgtgcaatatatgatcctcaagcctatctgtgctgttttggcaattttctttgaacttcttggaatctatggagaaggaaagtttgcgtggaaatacgggtatccatatttggctgttgtcctaaatttcagccagacgtgggcattatattgtcttatacagttttatactgctaccaaggagaagctgcaacctataaagcccctgtccaagtttcttactttcaaatctattgtatttttgacctggtggcagggtgttgctgttgcgtttcttttctcaactgggctttttaatggacatttggcacaaaggtttcaaacacgtatccaggattacattatatgccttgagatgggggttgcggcagtggtccatttaaaagtgtttccagctaaaccttaccgacgtggggaaagaaatgttcccaatgttgctgtcatgtctgattatgcatcactgggagctccagaccctgaagaaattggagggatcgacagcttaacaatcttgcaaactcctgtcactaaagacaggcagctgagtttttctcagagtgttcgtgatgttgtgttgggcagcggtgaaatcatggttgatgatgttaaatatacagtttcacatgtcgtggagcctatggagcggagttttacaaagataaataagacaattcatcaaatctcagaaaacgtcaagcagcttgagaagcaaaagaggaaggcaaaggacgacagtcatcttattcccctagaaccatggtcagaggaattttcagaagctcatgaccatgttgcgggcggtagtgccagtgacagcggattagctaagacaaggtacaacaggatcttaaataggccccggaggtcattcgagtccagattgcgcagatggttctagcagccagccggtgctagtgggttaattgattttgatcaaaagaggcggttaaccttttcgctccggttgtttgacaaaatgatagcaattctgacaaactagttctccctccgttcttttcttctttatttgctggtgacaaatattcgagaacggagtttggagtttggcacggggtggaggcagtagccagcagctcttcattattttgtgggtgacaaatattcatgaacggagtttggagtttggcacggggtggaggcagtagccagcagctgcttcctgttgtttatagcttgaccctgggctctttcccattttggaggctgtagctacacgagtttttgatgttagcgtccttgtttagaacttacctcttaggatcggcaaataccgatgtaacctgttgcttcctagagttagtataaagtaccatgctttgaactggggttctagtttagaattcatctttgaggacggcgaagtaaaaggtttctctggaactgtttcagctggaatgatatgtttatttgtattaatattgattaggcagcgttcgttttgtacggaatggggctggaactattctaggttgatcaatattaatacaaaataagcttatcaatttttagggcaaacgaacgaggacaatagtttctagcctcaatccgagataaatgagggtcctaatatggatgcaatccgtttcttcttctagaatgagtaggaagtaacatgcatggaacagagagatttgtaatctgggggtaaacatggttttaaagtgaaataaaagaa

SEQ ID NO: 28560 - DNA, 2323 bp, Zea Mays
cttcgcctcacctcgccacgcttgggattcccgcagggatccaatttctggtgaatcttccgtacttctaattcctgaaatatgagaagattctttttctttgggtcctccgctgcaaatgctggcgacgaaaacgggacaccgggcagtgatagcgggactacgcataaaaagacactggtggcagatgtgggcaacgaaagttctggttcctgcagcacaaggttgtcaagatccagaagccgtggtcaaaagcggaataaggaggaaccagccaatccgaagcagctcaggaggtccatgtcattctcgtctccggccacaaacacttgcttagacgaacgatgctttagtttctctggtgatgttccatgcactttgtatgatggatttgatgcacctcagaatgtcaaagatgttgcccccaacatatggtcaccagaaggaaatccagttttgagagaatatgcaataaatatcccaaaagatcattcttccatggaaaacgattctcctcgttcaagatgttgttcatgctcggcagggcactctcctgttagctctcccattgctcttcgatgcaggtcaacaagactaagcaatctattaagcaagaatgaagtactagatcgatacattgatagagggcatgaagatgcaatggtaaatgagaaacagaggcagtatccctccgccgcatctatggtttctactttgggaaggccacctcgaccccaatcaacagtaccatccataccaaaatcaatgaaagggaatacagagtgctacccagatgtagacataaaagaagactgcctttggcaagttgctcaagagggtacaagagataactgcaagattacaactatgtgcgatgcaggtagaaaccacgtaagcatgccagatgcttttgagagagacagtgctacatctgttgtagatatttgtgaagatttgcaagaagtgagacctccaaatgttatttgcccctccgcttgggagcaagaaaccaatgacatgttgctgcaaagagctaaagaagttgagtcaaggttcattgttcattgtggagatgaatatgaattcaacattatcagagataagcgaatgagctcaaatgacatgtttcagttgatccagcagttgacagaagataggaaacagttaacgcatgaactgtcttcacatataagagcacacgttgcagaaagatctgctgccaaacagcaatacaaacaatcaaagaaagaactagataccagaactaggaggttggagaaggagaagagtgaaagacaaactacactggagagagagatggacagaaggtcacatgattggtctgtcaaactatcaagatttcaatctgaagaagagagactacatgaacgggtgagagaacttgcagagcagaatgtgtcatttcaaagagaagttgcctttcttgaagcaaataaggctgaagcttcaaccaaagttgctagtttggaattgcaaaacaacaaattaaatgacgatctagagaaacttagaaacgagcatgagaagctccataattcctcagtagataaggatgctcgttttgctgaggttgttgaggaaagggaccacaccagggaatacttgaaggacaaggagggagagaacaaagcattgcacaaagtgattgccagactacaaacaacatgtaatgaacaggaaagagcaatcacaagtctaagacagggatgcaaagctcaattagacaagaaatttgttgagtgtgacagtgataaaatgaggaaattgcgaatggaactgattagactgacaggggtggagcaaaagttgagatgtgaaattcgttcttgtcatcttgaagttgggtccctcagacaagagaacattgcactcttaaatcgtttacaagttgttggaaatggagcacccttctcaattcgccttgaccaagagcttcaggctagagtggacaacctgcaggtgcaaggcttgtcattgcttaataagaccagccaactttgcaccaaattgttggatttgatgaaacacaagaaacttgaaaatgagtctttcagtggcaatgatgtgttgatagtcagtaattacacttttgagtaccaaagcatcaaaggaggaattgaaagtttgaagcgaagtttgaagacaataaattctgtactgaatgaaaagcaaagtgtaaaagaaaaatctggtgagactgcagctagaggtagttcttccagggagcaaacggtggcagagccagccatatttgcttccgagaggcagagcactcctacagatgaagccttgtgatcccggg

SEQ ID NO: 28561 - DNA, 2890 bp, Zea Mays
catggcgtatgtggtcactctcttcgagcttcaccagagtgctcaggatcccaaatccccaatccgggtcattgaacatctctaatgctccgtttggatgttggaattggagatggtggaattgaattggatccaataccaaatcagcctggctttggaaatcggatccaataccaaatccagttcaattccgagcaaatcagagggtggagggtcggaattggagagtggaggcgtgtgtagagttgaataccggctggaatttggtggatttccaattccaaatactgtgaccatccaaacaccagaattcgggtttgtcaattccaattctgaattccgagtctaaattccaacatccaaacgcactgtaagaattccgtgtatgacgccaaagaagtgcatcaaagacgatacgcttgcgcctatccacagggcctgaacagattggagcaatgatggcgaagaacatacccagatcaacacgaccagaaccaggagcataaggacagagagaattctttcgttgattgccttgatggcaccctgaaaggtgtctggcttgagaaaagagaggagcctgcggagaataacctcaagagctgctttgcgtattgacttctcagggatgccagtgcctgagtaagatacggggacatcagtctcattcatctcttttctaagaagctccacatcgcagtggcctagcttcgtcatcctctcgaaggcccttatatctagagcattggccaaatcctgccgcaaggtttgatcaatgtgccatttctccactgtcactgaaagccatcaaagatgctggatatgagaggatgactcgggtgcaggaggctactctgccaataattcttcaaggaaaggatgttcttgcaaaagcgaagacaggaacagggaaaacagttgcctttttggtactccttgcctaaagcccaactgatcaatttgactgtcgtagcagttttctcagcgatataactactggattaacccatgtgactgagttctaatttcttttagcttccagccatcgaagttctctctgcattacctcgttcaacttctataaatttgctggtgatgtgccctaccagggagcttgcaaaccaattggctgctgaggccaggaagcttctcaagtatcatcgctcactgggtgtgcaggttgtaataggtggcacacggttacctcaagagcaacggagcatgcaagctaacccatgtcagattcttgttgctactcctggaaggctaaaggatcatcttgagaacacgcctggattctccacccgaattagaggtgtcaaggttcttgttctagatgaggctgaccgcctgttggatatgggatttagaagagacattgagaaaataattactttcatccctaaagataggcaaacactgctgttttctgctactgtttcagaagagatccaccaaatttctcacctcgcaatgagaaaggattatgatttcattaacgctgttcaagagggtgatgaggagacacatgcccaggtaaaccaaacgtacatggttgcacctctaggtctgcacctccccatattgtatgatgtgttgaagaagcatgttgcagaagatgcagaatacaaagttatagtattctgtactactgcaatggttacaagacttgttgctgaggtactctcccagctaaaactgaatataagagagattcattccagaaagacacaatctgcaagaactaaggtctcagatgaattcaggaagtcaaagggtctcatattagtcagctccgacgtatctgcccgtggtgtagattatcctgatgtcacccttgtcatgcaagtgagtcatataattgtgtaccttgccaaaagaaaggaaaataaaagaaaaatgtgtggattcatcaagaaatttatttgcacatgtaggttggtctgccagctgatagagaacagtatatacatagactcggaaggactggacggaaaggcaaggaagggcaaggcatcttactactggctccctgggaaatgcattttcttagtacagttaacgatttgtcaatatcagaggctgcaacaccttcggttgattcaagcattcaggcagcagtcaaagacgcagtcagaagagtggagatgaagagcaaggaatcagcctaccaggcatggctggggtactacaactcgcacaaggctaccaaccgtgacaaggccagactcgtgatgctggctgaagagttcagtcagagcattgggctcgcagtcccgccagccattcccaaacaaattctacggaagatgggcctcagcaacgttcctgggctccggtcttcgtaactaaccgtggtgatccagatccagcagaacttgaccagtgcttgtaccagcttgctaaacgctggctcttccaccaccatcgctgcacgtaagtagtttcttacgaagaaccagattctgtagtcatgtcttcaagcatgacggccgcattttatctgagaccgtatcttgacctgttcagtgtccacaacggacaggttcaaacaggccctacgattagtattcaactatgtcatgttttcattcaaaagggcacgggctcgtatcaatcagttccggggaggaaaagaaaatgtatgtatttgctggcactggcagcaccacatgtgagacatgccagttgatatattcattgtgatagtagacttgtcctgctacatttatttccgaagttattggcattgcaattctcgcatgcgtgcatcattcatccatatccatggcaagctgtaggcaaccgttctggcgtcggtttctgtagctacactgttcatgagaaccgtccattatgaacgagcgaatctgtaaattttgactcttcc

SEQ ID NO: 28562 - DNA, 173 bp, Zea Mays
tacttagacttataagaaggccgtgcccaccggcgcttaacaccatccacagcagcacaactctagtacctgcaacaacatgggttcgaaaaccctgagtatgaagtgtacttttgcaagtcttacccgtctaaggaaaaagactctcaaggatatgctggcttttgggaatc

SEQ ID NO: 28563 - DNA, 2693 bp, Zea Mays
ggacagagccgcccggtcgccctttcttcatctcccatcttaatttcctcgcagcgccggcgctcatcttccgctttctcccttactcgcgctcagcacgcaggcgacggcgtcggcgctcaggtcgggctctgggcgacggcgtcatcggcttctcctcccgcctctctccagtcgcctcgcgccctcgcctccggtcctccgcacaccggccggtgaccctgcgtgcgtgcctctctctctctctcccccttcccgcctccggtggatcgtcaacgccgcccggcccgggtggcagcaccgcgcgcgacctgaggggtgagggcagcgggagccagcagccgctgctccaccaaggcggtcgcgccgcttttggagcgcttatgccccccggtccgctgagcgcttagtgcagtttttttggaacatgagacctcctagcagtggcaaaaagactgaggtctcccatagcgtggggaaatgtggggtttctgatcaagcttgtcatggcaaatgccaaagctgtggcattgatgcaaaacctttttgtgctggagtgaacgaagtctccttgttgactggcagtcacactgatgtggaggcctcaaaagagaaccgtggagcatgcagtttgaacaatgatcgtgctgatgctctagaagaagaggccaatgtttccacagctaggataggtcatgttgagagtgctgaccctggtggctctgtgggtgtagaaaaggaaattttcatggctgttaatgaggagtctgagggggagcaagctggggcaacactggaggatctgtttttctttaatggtgaagaggatgatgacagtgattgggaacctgctagtcgccttgttgtgaatagatggttttgcttgaactgcacaatgccaaatgtggacaagattacatattgcatgaattgccgtgagcttccaggatctgttgtagatggatatgatgtcttcaaaaagcaaattgcacaaacagctttgttatctgctgacacagggttgctgccagtgtctacggcgattggttttgatgaaagaatgctgctccacagtgagcagctagaagttaaaccaaatccacatccagaaagaccggatcgccttcgcgccattgctgcaagtcttgctgctgcagggatctttccctcaaaatgtgctttggtacctcctcgagaaatcacgaaggaggaacttcttatggttcatagtccagaccacattgaaagtgtcgagcagacaaagaacatgctttacagttacttcacttcggatacttacgcaaatggacattcagcatgtgctgccaaacttgcagctggattatgtgctgatcttgctagtttgatagtatctgggcgtgttcgcaatggctttgcgctggtaagacctcctgggcatcatgcaggggtgaagcaagcaatggggttttgtcttcacaacaatgcagcagtagctgcgttagctgcaaaaagagcaggtgccaagaaagtcctcatagttgactgggatgtgcaccatggaaatggcacacaagagatattcgacggggacaaaacagtcttgtacatatcattacatcgtcatgaggatggaaacttttaccctggaactggagctgctcatgaggtgggagttcttgatggtcaaggattctcagttaatataccttggagccgtggtggtgttggagatgatgactacatctttgcttttcagactgtggtgcttccaatagcttcagagtttgccgcagacatcactataatatctgcaggattcgatgcagctagaggtgaccctctgggttgttgtgacgtcactccaactggatactcttggatgacatccctgctagctggttcctcaaatggaagattgttggtgatacttgagggaggatacaatctccggtcgatatcctcatcagctactgaagttgttaaggtcctacttggggagggtcccaatcgtgcttcatttgtagtttcaccatcaaaagaggccttgagtactgtttctcaagtcctgaagattcaacaacagttttggccagttttaggtccaacatacgcatcactacaggcgcagcaggggtcggtttcttccaatcatagtaatgagctgaagaaaaggaagcgtccaggaggaggaccagggcccttctggtggaagatgggaagcaaaaggcttctatacgaagcgcttattgagcctcgcagccgtccgaggaaactcaaggggtcaactggttcagcagcgccttagacttagatgggcagtttgctggccgttgatcttctagacatgaacagggtagctcgctgaccgcgtttcctcaagcagagtaggctgcgtttacctagaaaacctagttttggctggttacttgcatgatggtcgaccgtttcagatggagtttgacagcaaacccgttgtgttaaccatgcgtggcgtatcagccgatgtttcatgcatgctactgtctttttctttggttggtttcgtaccatagatagacgtgtgtagcgaccatcgatggaaaaaaaccttgcacatctggaacggcatgcatctcagttattagcccctgctgttgcacatgcattttttttttgcggattttctgtgcgacttgactgcgacgtctgatgtgcatttgttacacatcaga

SEQ ID NO: 28564 - DNA, 1711 bp, Zea Mays
gctagagatacacgcagaaggaaccttctcacatggaaaaaaaacatcgcaagttcgcgacagaatagtgacatcctgaagcagtcaagcactcaacctctccttcagtccttcccatctcatcctccatctcgatctcttcgctccgtcgaactttcacctagtcagcctgccgcgctacccctccaccgccgtctccacgcccgtggccaagccagcggaaccctagcatggcgaagctagcgcgatcgccaacgacctccccgccggcggcggccgcggataagcaccgctccgcggccgggtcggggctccggtccctcgccagtgccgcctccggatggtgggaccggtggacggtcattggttccggactctccaagctcgaaagggccttcggcgaccagttccccgagggcgagcgctacttcgggctcgagaacttcggcaacacctgctactgcaacagcgtcctccaggcattgtattattgtgctccattccgggaacagttgctggaatactatagaagaaacagaaatctcgaagatgctgaagaaaatttgttgacctgcctagcagatcttttttcacagataagtgcatcaaagaaaaagactggtgttattgctccaaaacgtttcattcaaatggttaggaaactaaatgaatattttcgtggctacatgcatcagagtctagttctgcaaaggattctcctgggaccacatcttctgaaaatgtctcaaatggcgcagctgttgatggagttagaaaagaaccactggttacatgggtacataagaattttcagggtattttgaccaatgaaaccagatgcctaatgtgtgagacaatcaccgcaaaggatgagacattttttgacttgagcgtcgacattgaacagaatagttcactcacaagctgtctgaagaatttcttttctactgagactttaaatgcggatgacaagttcttctgtgataaatgctgcagtttgcaagaagcagagaagagaatgaagataaaaaaggcgccacaaatattagtgatccacctaaagcgcttcaagttcatcgagcagcttaaccggcacaagaagctgtcgtaccgagtggtgtaccccttggagcttaagctcagcagcaactccgctgatgccgactgtgagtactccctctttgccgtggtggtccacctggggagcggccccaaccaggggcactacgtagccatgatcaagagccatgaccattggttgtccttcgatgatgacaatgtcgagatgatcccggagtctaccctacagaccttctatggctcttatcatgaatattcgggcaacactgatcatggctacatcttgttctacgggcgcattggtgggagtggaaatgagaagaccgactcttccgatggagtgtgaccgttgacatgggatcctgggtggttcgatgtacatgggctttcctggccttcgtatacttcggttggataggatatatttacattttcaacaagaaagtgttttttttgcggaagaccgtggggggaaaacataaaagtttagtttgttgttagttgcagttccttgtaaaggattagttggcaggttagtatatcattttattttgttttcataattctaacttgtcatcgggaccacattgcgcacgtttttttttttttgtgaaaaagtcctgttcggaag

SEQ ID NO: 28565 - DNA, 2981 bp, Zea Mays
gcttgttccctggaacacggggcccagatgggccagatgtcagtgtgctggtccttctaaagagctgcatcggctctcttcatcctcttggagcgtaggtagaggcgtagagcgccgcacactcatttgccacttcggttcggcgacggtggaggctgccaacatcctcggcgtcctccttccggaggccacgccagaaaaagaaaaagaaacggaagcaacggcataattgttttttcagaaaaaaagttccggaggagaattcagggtcccttcttcttttagagtagtattttgttttctaccagagctgttcgatgacgagaggaacggaagttgttgtgagagcgctgctcgttgcggcggcggtagctgggctgttgctgtcggcggcggcggaggacggcgttgttatccagcggaggtcgcttcaccagccgtttttccccgtcgatcccacgccgccgccggggttcgacgactcgatcgtgccgccgccgccgccgccggcggcggcggctggggccgcggcggcgtcggccgcgtcgaagggcggcgggcggtccgtcaccaacgccgtcgcgatcgcgctcgccacgggcctcgtcgtgctcgcggtggcgttctactcgtgcttcctcctgtggcgccgacgctccgacggaggaggcgggggcgtgggcggcgacggcctccgcgccgtcaagtcgtcgcggccaggcgccgtcgccgtgagggtcgccagcgacgtggggagcagcgcgcggcaccagcggtcgccgccgccgagctcgacggcgtccgacgcgatatacctcgacccgctcacgacgatggtggaggtgagccggcaccggccgcagagcccggacctccgcccgctcgcgctcgtcaagcagccgagccccgacctccgcccgctgccgccgctgaagcggccggcgccacagccgccccctccgccggcgtccacgccgccgatgaccaccaccacgggggactcctccgacgaggaggaccaggccacgtactacaccgcgcccaagaccgccaagtcctcgttcagccgcagcacgagccagcgcagcaccgtggagccgacagtggctcaaccacccgcgcctgctcccgcgtccacgcccacgccgctgccgccgcaagctaacgccccccgacctggtcgtccgccgccgcccccgccgccgccgaggcaaaggctgctgcggccgatgcccgaggagtccccacccccggccgtcctcgccagtttggcgctaaccaatccccctgaaccctctggtcaggacaggggaggtgagaacccggatggccacggcgggagagcgcggccgccgaagccaccgagcctgaaaccgctgcactgggacaagctccgcgccatctccggccgcaccaccgtctgggaccaggtcaacaattccgactcgttccgcgtcgacgaggcggcaattgagagcttgttcctgaacaactccggcggcgtgggtaattcggatcaggcggcgaggaggggaggcgccgggaagcaggagagccggctgctcgacccgaagcggctgcagaatgtcgcgatcatgctcaaggtgctgaatgtgacatcgagtgacgtgattggagcactcatgcacggaaatggagatctggggtctgagttctacgaaacactagctaagatggcaccaaccaaagaagaagaactgaaattaaaaggttataatggcgatatatcaaaacttgatccagcagaacgctttctgaaagatgtacttgatgttccttttgccttcaaaagagtagacgcaatgttgtacagagcaaactttggcgctgaagtgaattatttaaagaaatcttttggaacgctagagaaaattttcaggcagcttgtacagatttaaggagcagcaagctattcctgaagttgctagacgcagtgctcaagactgggaaccgcatgaacgacggaactaaccgaggcgaggcgagggccttcaaactcgacacccttctaaagcttgcagacatcaagtcgacggatggaaaaacgacagtgctccatttcgtggttcaagagatcatccgatccgaaggcttgggttccgatcaagcagcagcagcagcagcgaatcctggaagcaccagcaaggaacagttcaagaaggacggccttcaagtgcttgcagggctcagcagcgagctctccaacgtgaagagcgcggccgccttggagatggacacgctggtcggcagcgtctcgaggctcgaaaccgacctcgagaaggtgacgctcgtctcccggctcaggcagacgtgtcccggtgacgatcaggtctcaagcgagaagttcttcgaggcgaacgacgcgttcctcggacgtgctcacgcggagatcgaggcagtgaaggcggccggggagcgcgcgctgcagcgcgtcaaggagaccacggagtacttccacggggacgccgtcaaggaggagcctcacccgctgaggatcttcatggtggtgcgcgacttcctcgcgacgctggaccgcgtgtgccgggccgtcggcaggacgccggagagggtgatgatggggtccggcaagtcgttccgcgtctcggcgggcacaacctccctgccgcagcgccggaacgaccagcggagggagctgagctcctctgacgaggacagctcctcgtcatagggtaacactactaggaaaccttttttttttctttctttttctttctctggcgcgtagagtagttcgggatcgaggcctgtgattcttgcagatttgttgagcatgtgtagccaacgtcagaactcaataggtgaaagttactgtgtagtttctacaaagtacaaaggttaaaagatatgtatagctgtacaaagacgggggcttcttattatggtatgttttctctgttacatttgtaattgtgattagtttaaagtttgtagatggcgca

SEQ ID NO: 28566 - DNA, 1238 bp, Zea Mays
atctgaagcctgtaacatctccgccatccgcctgaaggctcgaagcacgacgccaatggcctcccccaacgccgacccggctcagcaccacgcctcgacgccgccgctcctcctcgccgtacgccacctgccgttccccggcgtccaccggacgcgcgcgctccccggccccgacgtcctgacccctctcgcccgccgcctcgaggagctcgcgtccgcggcgacctcccacccgctcctgaagccgctcttcgccgcccactcacacctctcttccttctcccagggcaggaggcggctggtggcggcgcggcgtgcgacggtgctgtccggggggcactgcttcgcggcggtgctagggaactcggtggccgggttggtggtgtccaacggcatcaacaacttcctcaacctctacaacacggtgctcgtcgtcaggctcgtgctcacgtggttccccaacacgccgcccgccatcgtcgcgcctctcaggtaggcgccatcgcagctctgcacgatatgtgacccgtacctgaacatcttccggggcatcatcccgccgctcgggggaacgctggacctgtcgccgatcctcgctttcctcgtcctcaacgccttcaccagcacggcggccgcgcttccggcggagctcccgagctcggcagcggcgcagcaccaccagaggactgctgcttcatccagctcggcgactcccagtcccaaccagaggaaatggatgcggagaatgcgatcaaagacatcacagggagaagatggtggtcactaggcatgtgagcttgtggctgggttcgtcaaatgccttattgttaccagctggggatcatgcttcgcatcagacgctcgagatctgcacagcaatgtgttggacatgcatgctcctcgctctctagccatcgaatgcaaactctgtcaatgccgcatgcagagttcgcccctttggttcaccacgttgcttcagagcttcaaatggtttttgtgcgttgtaatgcgttggcgttgcggagctttcttcaaatggtttttgtgctttgtaatgctttggcggtgagggctgtgctttctgctgcatgtatgtgtagcactttcggtcagctttcttgaattccgatagtgtgatcgcgatgcgtagccaaattcagtcttgagagagtaccaatcgaactttcatctgttgttggttaacaaattcagacaattcgtgaataggcatgctgcat

SEQ ID NO: 28567 - DNA, 2959 bp, Zea Mays
aaactgctggaatatacttacaccgggaagaaggcgaaggccgtcgcgctctcggcggcggcggcggcggcggcagcggcgatgcttgcgttcgagcagcaggtgttggcggatctggtggaagatccgaacggaggtctggtggtgctctcctcgggtctccctctcgcttccctagccgctaccctcctcctccatctccaccagacccccggcaacgcggctggaggaggatgtctcctcgtcctctccgccaccgataccctcaaggcccggatccggcgccgcctccaagacaagctgcaggttcacgacgtgccccctgacctcgccgcgcagcagcgcgccaccctttacgcctctggcgctgctctcttcctctctccccgcgccctcgccgccgacctcctcacctcccgcctcctcccctcccgcgtccaagccctactcctcctctccgcccaccgctccaccgatacctcctccgatgccttcatctgccgcctcctccgtcaacgcaatcttctccccgtttacgccttctccgattgcccccatgccatggtcgccggtttctccaaggccgagcgtaccatgaagagcctctacgtccgccgtctccacctctggccccgcttccacgttctcgccgcagccgacctggaacgcgccccgcctgacgtcgtagacgtgcgcgttcccatgacgccgcccatgaggggtatccaggctgctgtcctcgctaccatggacgcttgtctcaaggaacttaggcgcaccaacaaggtggatgttgaggacctcaccgtcgacaagggcctcttcaagtccttcgatgagatcgtccggaggcagctcgaccccatctggcacactcttgggaagaagacaaagcagcttgtggctgacctcaggacgctacgcaagctgcttgattacctcgtcaggtatgacgccgttacatacttgaagtaccttgacacattgagagtatcagaaggtgtcagatcagtttggatacttgctgactcaagccataggatatttgagcttgcaaaaaggcgcgtttaccaggcagtgagaacagatggtgttaatgttagcatagataataagggcacaccaacaaagaagaggaaagtggcacataattctaccaagaaaggaaaagtaactgaaaatgaagattccactgtaggtcccaacactcagaaggctaatactgatgtgggcattgtattggaagaggttttggaggaggcaccgaaatggaaagtgttatgggaattgttgcaagagatagcagaacaacggatgaagagcagtgccgggaatgtgcatgatgaggacaaaaatgatgaaagtggcatagttttggtatcatgtaaagatgaacgcacatgcttgcagctgcaggaatgcatattaaaaggcccctgtcaggttatgcgagaagagtgggagaagtatctgattggaaaagctgagctgcatggattgaataaggacaagagaaaatctgagcaaccaaaaggtgttggtgtcctggatggtgaagttcaaatgggatctagtgagagtgtgtgtccagttagcattagcaaactcgaaactaatgccttacttgccgctgcctctgaattaagaaatatatcaaatgaagcagatgtcaagagtagctcaaatagcagctgcagcaaggctgggggagcaaaggggaaaccaaagaaaaccacttcaaagagacaaggcagcaatcgaaaaaataaaagtaaggagggaaatgacaatagccaaggtactggtctggattctgaaggtcaatcaggaaaagcagatgtacaggctgagattgttgcttctaagatgtccgcatatgatgcttccatgtcagcctctacttctaatgttaaatttaaccattcatctgctttcggaaacttggcaaacgccaagccactacctcctgtgcagtttcatgctctagacagtgaccaccaggttcttgatgtatggaagccatctgtcattattgtttatcatccagatattacctttgtaagagaaattgaagtatacaaggcagaaaactcatcaaggaagttaaaagtttacttccttttttatgaagattccactgaggtgcaaaaatatgagtccagcattcgacgggaaaatgaagcatttgaatctttgatcagacagaagtccctgatgatgatacctgttgatcaggatggccgttgcattggaccaactgttgcaaatgaaccagagcctcctttatgtcagaactcaattacaagaaaggcaggtggtaaaaaggcgcccgagaaggagatgcaggttattgtagacatgagagagttcatgagcagccttccgaatgtattacatcaaaaaggttgagacaatggcacgttactacaagatcccggttctcctcatcgagttctcacaagataagagcttttcctttcagtctgcaaatgagattggtgatgatgtctctccgaccaacattatctcgaagctttctctgctagtgctgcattttcctcggcttcgcataatctggtcacgcagcttgcatgctacagcagaaatatttatgtcactgaaaacaaaccaggatgaacctgatgagaaaaaagcaacaagagttggcgtgccatccgaggatggtatcgtggaggatgatgtgaggtctgaaaattacaacacatcagccattgagttcttaagaaggcttcctggggtgacggattctaactaccgagcaatcatggatggatgcaatagcttggccgagctggccctgcttccagtggaaaggttggcggagctaatgggtggtcagaaagctgcgcggacgctcaaggagtttctcgatgccaagtgcccaaccatgttgtagccagagtgacgctctagcaggagtcaagggtctctcctattt

SEQ ID NO: 28568 - DNA, 1332 bp, Zea Mays
caggggcttgaggccctaatcagggcgatacgccatgattttgatcgtcagccttcctgatgatgtgaagaaacaactggaggacccagatagcagataccactttggttggagtcgtgtagaagagaaattcgagtctgaaagatgggacacagccaaaggctcctacttcgccaacccagtttttgatgtcccaacaactgatgatgagcttgtaactagatacccatcatactgccgaccaaacatatggccaaaggatcatcttcctgagcttgaaatagcattcaaaggtcttggaaaactgatgttggaagttggcttgatgttggctcatcattgtgatcgctatgtaatacagcgaggggtgggacagtacattggtgaaagccttgagaagacacttgctaggtcaaggtgtcccaagggtcgtctgctgtactacttccccaaatcgtttagcaaacaggacgaagtttcgtcatggtgtggatggcatactgactatggatttttgacaggacttacatgtggcttgttcacgagaaaatcagaggaggtcccctgtcctgatattggaactgggctgtatgttcggactcgtgataatcaagtcgtcaaggtcacacttgtggatgatgagttggtctaccaaattggggagactgctgaaatactatcaagagggcatctatgtgcaaccccacactgtgtgaaggctcccagcagcgaagatgcttctgacgttggtcgctcaactttcgttctgtttattcagccaaactgggatgagccgctgaagcttcctagtgaaatacgctatcaccaggagtgcattccaccaaccaggacacttgcgtacggcgagtactccgaaagagtcttggcgagttttagcggcaagagcgtggaacaaaccttgatgccacagtaagaggctccagccagatgaatactccctctgtttctttttatttgtcgctggatagttcaattttatactatccagcgacaattaaaacgaaacggagggagtatatcatatgtatgataccataccattcaagctacagataagtggacagaagcatatgctgttgtgggatggatgaatcgcacgcagcttaaaataatgcaacaataagactttgtttgcatacctaccatcgtagtgacacatgtgaattgagacgaataacaaagtgtttacacgagaccttttttaaaacgggtatttacacgagacctagaggtacgtaatgtgcaccccgtcctgtttgggattataatctatatagattatataatccaatgtaaataagctagtgagga

SEQ ID NO: 28569 - DNA, 1455 bp, Zea Mays
catatgttcattcttaatgaatttagacctcactttcacaacttcaatatgatatcgaagcctcttctggaggacccagcatatatgctccagcagacttgaacaagaacatcaccaaaatttttggaaggcttatcgatatatatagggccctgggagatgacagaagatcatttagttattacaaggccataccggtgattgagaaattgccattcaaaatcgaaagtgctgatcaagttaaaggtctccctactatcgggaaatctttgaaagaccatataaatgaaatagtcaccactggaaaactttccaagctggaacactttgagaatgatgaaaaggtacgaacgatcagtttattcggtgaagtttggggagttggtcctgcaactgcgctcaagttatatgagaagggacaccgtactcttgatgatctacagagagatgagtcacttacaaatgcacagaggattggattaaagttttttgatgatatcaagcaaagaataccccgacatgacgttagcgagatggagaaacttttacaagatgttgggactgatatcttgcctggggtaacaattgtttgtggaggatcatatagacgcggtaaagcatcttgtggtgacatggatattattataactcatcctgatggagaaagccatgtaggatttttatccaagtttgttcaacggctgaaggaaattaactttttgagggaggatcttatctttagcatacacagtgttgatgggactgatagcggggttgacacatactttggtctttgcacataccctgggcgtgagctgcggcaccgcatcgacttaaaggtgtacccgaggaacagatatgcatgtggtctgcttgcatggactggaaatgatgtactaaatcggcgatttaggctactagcagaatccaaaggatatgtacttgacgatactggattatacctagctacacgcggcagtggtggaaagcatgctggcagatcagacgccatagttaactgtcacaccgagaaggatgtgtttgagacgcttggattcccttggctggaaccacatgagcgcaacctttagggcttgtttggaaactcaaacccctagggatcccaacctttactaggtaagcaatccatggggatgtcatttggataagccatttagttctccttataggacttctcattcctagggttgcctccctcttgcttccaaattaggccctagctgtttttgaacgttcatctagagaatgtgttttgtacagttagttatatatgttacctgtatctttaacctacctcgactttctgggtactaacagccttttgtactgattgttgttcatacttcccctttttgtgctgtcactagtaggcagtttttgttcagcttcgctttctatgcttctcccaagtcccaaccttgttgaaagcatgct

SEQ ID NO: 28570 - DNA, 1392 bp, Zea Mays
atggaacatgatatgaatgaagttccgggaatctatagggttgttcacacactcagccataacttccggaatgctacaaggcttgagcgtgtgcgcctgagattacccattgaaccgcacaacactctagttaaaattatatatgctggtgtaaatgctagtgatgtaaatttcagttctggtcgttatttcagtgttaattctaaagaagctgcttcacaccttccatttgacgctggttttgaggccgtgggaattgttgcttctgttggagattcggtgaaacatatcaaagttggcacttctgttgcccttatgacttttggaagctatgctgaattcgtgctgatttcagccaaaagtcttattccagtgccaagaccagacccagaggtggttgctatgctaacatcaggattgactgcatccatcgctcttgaaaaggctggtcaaatgatatctggacaggttgttttagtcactgcagctgctggtggaacaggacaatttgctgttcagcttgcaaaattagcaggcaacaaggttgtagccacatgtggaggtgaaagtaaatctatgtttctgacttccttgggagttgatcgagttatcaactaccaaagtgaaaagatcaaagatgttctgaagaaagagtttccaagaggtgtagatatcatatacgaatcagtaggaggagaaacgtttgatgtgtgtctgaatgccctagcagtctatgggcgtctcattgtaattggtatgatctctcagtatcaaggagagggaggatggaagccacagaattacactggattatgcgagaagattcttgggaaaagtcagactgtggctggctttttcctggtccaatatgcgcacctgtggcaagaccatcttgaaaaactgtttaacctgtattcctctggaaagctaaaggtcttcgttgaccccaagaaattcgtgggtgttgcttccgtggcagatgcagtagaatatctccattctggcaggagtgttggcaaggtcgttgtttgcatggatctatcctatggccagacccttgctaagctataattggtacttcggtgcatgtgggctgcagtttcagcagaagattattcttcagatttttattctgtctggaagaacccttgctatttgctaataagctatatactgtgtactgatgagcagagttacgccgtatgttcggacttggcggcacatagctcgcttttccgagtctgaaaggcacgttattagtgggaccgtgggacgggcgaaaattggaaggaaatcgaataagtcagatgagttttaaataaactaagccctctgctcaattgtgaactctttttgggtaaacaataaatgaaacttgagtgaatatttttt

SEQ ID NO: 28571 - DNA, 3075 bp, Zea Mays
gtttaaacggtggaataaaaacttaagctcacacttgtggtttatgctgaattcaatccagtgaatccgaagctgaccatgaagaactaaaataagctatatgtttcagtaccttctgatatcatcttgaggtcttcataagtcagcaacctagagcagaaaatgtcagctccggaattcaggacttcttaccagcaatcccctgagaatgtcggtcaactcaaggtctgccaatgtgggtcgggcgactccaattttcagatcacaaataaatccgacggtggcgaaaattcaccaacaacttgtccaaactgtcaggtccttaagagtggaaatttactgctttcatctaaagggattggctggacagtatggaaaaagcgttggtttattcttacaaggacatcattagtgttcttcaggagcgatcctaatgttccccctcccagaggaagtgaaccaattgttacacttggtggaattgacttgaataacactgcaagtatgatagtcaaagaagaaaggaaacttataacagtcgtgtttcctgatggccgtgacggacgcactttcacccttaaggcagaaactacagaagacctaaatgagtggagaagtgcattggagaatgctctggctcaggcacccagtgttgtgaatacagcgggacaacttccagtagtcagcactgacataacagaacctgttgaagctgctgttgaacaatcagagaataagtctgtaattggcagaccagcagaatttgcacttgtcgatgctgatggcactacagcattcctgcagaaggccttaaagttcatcgaagattatggtgttaaggtcgaaggaattcttcgtcagtctgctgatgttgaagaagtcaaacgcagggttcaggattacgaaaagggaaagaatgagttctccccagaagaggatgcacatgttatcggtgactgtattaagtgcattcttcgagagatgccatcttctccaattccggcaccatgttgcactgccctggttagagcttaccgaactgacaagacaaaaagactcgatgctatgaatagagtgatatatgaagtattcccagaaccaaatcgtcaattgttgcagaggattctcaaaatgatgcagattgttggatcacacaaagctgtaaataggatgtcttcatctgctttggcagcttgcatggcaccgcttcttctccgtcctcttcttcttggtgaatgtgaaattgatagtgaattcagtatggctggggatggttcattccagttgcttcaagctgctgctgctgccaaccatgcccaagctattgttattattatgcttgaggaatatgatcagatatttgatgtacctgcttttccctggacgtgcttttctttgcaagcttgttctatttgaacccatactgtattgttatggattttaatccaacaattacctgtttaggatattgaagacggttcgtactcttcagatgcttataccgagtctgacattgacaaggaatattctacagacaatgacatccctgaagattatgatggctcctctggttctggtgaagatgttgaagaagatttgaatgatgatactgaacactcttatggcatgaaggtcgaatgtgatagtaacattaggattgataatgcaaatgataaggcaagaaaaggcttgccaacagaggaggatggctgttccagtgataacgacaaggctcatattacgaagcttgaaaacaagaagactcatctccaatctaaacttacggaggaggagaaagaaaatacagtcctccaggcaaatttagaaaaacgaaaagaagcattacacaagcgccgtgtagcacttgaaaaagaagtggaaaatttacgagaccagctactgaaggagagaagtttgagggcttctctggagtctgggctaatgaatatgcgaagaggacaagtgtccttcccctcaacgatagacaccaagactaaggctgatcttgaggaagttgctgccgttgaagctgatattatgaacttgaagcaaaaggtttctgatcttcggggacaactcaacaaccaagttcagttgagttccacctcgttatgtgaatcatgcaacaacaagcgatccataaatgcagacaagcttgtcgaaggtgaacaaaacgctgccctttctccacagattgcctcagtcgaagcaccacctattgtagggtcttattctgtacctgacatgttctgggctacaaaccaaatggttcagaagatgttgtattcaaagggtgagattgcgaaggatggccaagacggatcacttacatcaagatggaactttgcacagagaccacactcaaatagtccagtcatgagcagggttcaaggttccgatgcctattcaagtactaaaaccgaggaatctggaggcgcaccttcctctgcattagcgaagctgactacccgactcaactttttgaaagaaagaagggccttgcttgccagtgagatgcaaaacttagatctgggccgctcccaggcccagaggcatacagctcctccgaaagctgagactccaactgagaagtagaatcgttttactgcatcgttgttaggccacaagctcaggtaggattgcaggcagtaacagaaaacttcgattcgacaatgcacagagactatctagctatagagtaacttgatttgtacatcgcacaggcattcatgtcttcaccctgatgattcatatgtcaagttttttagcgacaccgacgaacaacctggtttgtactattttatctccaaataaacaatactcctactctgggacaaagccaaagtgcgtttgcaaattatttgtcggtctgtctggtactctggtttgtacatcaacttcacttacgatcaagctaagtaaaaataccgtaccatgtgtatctatgccttcagtgtaacctaatagcaattccagtaaaacttggcagtcccagtgccaaaaagagcgaccagtatacctgcttgaacatcgtgctccgttaagttggcagttccagtgccaaaaagagcgacc

SEQ ID NO: 28572 - DNA, 1965 bp, Zea Mays
ttttttttcaataaaaaaaagaaaaaagaagaagtgcatgtgcataaacctctgctccctccgactccgacctctctcgtccgtccctcgctctcgcaaaagctccgctctgcttgtcgcagtgtcccttgtctgtttcccctcgccggctcgccgccaccgccgcatccacttctgcgccgcggccgcccatattcctccgagcgcatcttctcctcgcattacagcaccgtaaagccgcatcatttccggatccctacctaggccgaagccgcagctcccaatggcggccgcctcgtcgttgcgtgtcacgtctttcgccgccacatgccctagagcgcgggtgggatctgccggcctcggatctgcctgatgcacggctggagctttgaagctttgctgacattggcggtggttttccctttcttcagcgcccgggggccttgctcgttgctgcggcggggcggacagatttcagtatgtctttcaagattcagctattgtcctccattgccatttttgcttttgccttgcatcttcacccttgtgtgtccactgagtttcgccgtgagctctccagctggaccactggcatagctacgtggtatggcgatgctaatggcgccggaagtgaaggtggtgcatgtgggtaccaatatgctgttgaccaaccaccgttctcgtccttgattgctgccggcagccccttcatctatgactctggcaatggatgtggctcttgctatcaggtggtatgctctagcaatcaagcttgctctggttacccggtgactgttgtcatcaccgaccagggccctggtggtggcccatgcctgagccaagcaagcgatggcatgtgcatgaatgagggagcccactttgacatgagtggaactgcatttggcgccatggcaaagcccggaatggccgatcaactccgtgctgctggcctgctacaaatccaatacactcgtgtgcagtgtgaatggcctggagttgatgtaaccttctctgttgactccggctcgaacccgaactatctggctgtgctcatcgagtacgaggactgcgagagcgatctttcagccgtcgacatcatgcagagctcagcagggcaatgggtgccgatgcagcattcgtggggtgcaatctggaggctcgactctggctctgctcttcagggcccgttccacctccgcttgacgttcagctcaggccgggtactcatagccagcaatgccatacctgcaggatggaatgcgggtgtggcgtaccgggcaggcggagtggcggtgactagggccaggcccaggagtggtggcagccaggccggtgaggctgctgctggaacatttagaggtttggtgtatcaccttctgatgtttgtggtattggcgttgtgaattatgatgcaaatgcatctttggtagtttagaggtgtaaatttaacaaatttaggactacccagggattttagatgtgcattttgatgttttcttgtagctgaggtctgagaggggggagtgatgttaacgtttttgttgtggttgagttatcagcatgcaactgatcaggttggatggtagtccttgcatgtaaatacacatttggtgaaactgtttaggttaagtctttagttcctttatggaagagatgtcttctttctagctttttatttgatttcgaggtgtttttcatggatcgaataccactagtcattgagttagtaaacaaattgtttttctgacagtattgagttgaaatttgttgtttcgagttaaaagattgagtttgtaaattacatgagtctttaaacaaatgctttgaagtacaaagtgagaatcctacttttcaatttttcatctggagagtcttaatctcaggtttcgtagtagttttttgttactgtactgtagcgcagtgcagtgagaagcgtaactacatatctgatctctgtagtctaat

SEQ ID NO: 28573 - DNA, 981 bp, Zea Mays
ctgaagtcgaatcccctcacactataaagctcctccattgcgccgccgccactctcctttcggaggaggcggaccaggtaagcagcagcaggaaccctagcaccgccgcatccgcagccatgggtatcgacctcgttgccggtgggaggaacaagaagaccaagcgaccgtttcttggtcaggaggaccaagagcaacttcaatgctgtcattctcaagaggctcttcatgagcaaaaccaatcgcccaccaatctccatgcgccgccttgtcaagttcatggaaggaaaggagaagaacattgctgtgattgttggcacagtcacagatgacaagaggatccaagaggttccagcaatgaaggttactgccctgaggttcaccgagacggcaagggccaggattgtcaatgctggtggggagtgcctcacatttgaccagcttgctctccgtgctccacttggcgagaacacagtcctcttgaggggccccaagaatgcccgtgaggcggtgaggcacttcggcaaggctcctggagtgccgcacagccacaccaagccatatgtgcgctccaagggaaggaagttcgagaaggctcgtggcaggaggaacagccgtgggttcaaggtttaagaaagttgtgggccatcagcatagtaatcacttcctaccgagtagtagcacattttgttgccttggcttggattttgaaagatatttaaggattttcgtgccttgtctactggttactggttgagcaagaagacaatgttcttttgcacctctttttattggtcggcatattttgcgctgtgattggaactgtgttgtgttatctgctggatgtacttactgcatcacctagaaaggtggcttgggccatttggaatcataaaacgaaagttgctcgcttcaagctagaatacacgattcctcgaacccttgttttgagttacaaagtgaaaccacttttgttttgag

SEQ ID NO: 28574 - DNA, 780 bp, Zea Mays
ttacatgatctcttttctgatgattagttgatggatgatgaaggcactaacctttctttgaccggaggctactgaacatttcaagtgggaaaggcacccgccaagtaaggagatatccaactggcttggccttttttatgctcaatagttcagacaaaagaagggccccaataagtgaagaatcatgctcatctgctgcagatcagataaagaacgagaatgatgagtttctgtaagatcgaacaagctggatatactccaaacatggaggcacatctcaacgggacggcactatttaacaacccagaaagtttttttttattgaaaggaacccggaaaagtttgctaaaactgaaagaaacctgagaaccctgttcttgaaaatgaagttcacatgcattagccggttcaagctcagactgttattggtacgagcattttctttcgacagaaggtgggcaagaagcaagacggcgaatttccaggtttaagcagtccaagctcagactgttaataggtttcagcagaacaagctctcatatagcgtctgtttcaaaatattaatgtctccttcacctgttagtttttatttattcatgtttccttcacctattagtttctttagtgttggttttcgtcataatctcgcctcactgtatagctgtgggaatctggatttgtgagttgttggttgttagcgattctaggagggtcatgaaatgttaatacaaatatgatgctaatccatttgactcctgactattgtgagtaaagttcgtc

SEQ ID NO: 28575 - DNA, 3459 bp, Zea Mays
cagagcttcggaccaaaaaaacaccaaaaaggcggcacccgggcgcctaggaggaagacgacgacgaccctccaaagcaagcacacgagcttccctccctcctcccccacgagctcgtgcttgcttccttccccaaaaccctagtaccccgccccaagtccggctgtgctccccgtctccaccgccgcggcgcggcaatgtcgtcgtcgaggccgacgcgttccagtatatccccattccgatcccgccgctcggctccggcggtgtcggcagcgggacctcctccgccggcgaggacctcatctgggggtcgcccgtccaccccctcttctactgcctctgggcgacccaccaccccctcgtcctccggtggtcgccccgctaccccgtccgccgcgttcgcgcgtcccgccaccccttcgtcgtcatcggcgcggcccgccacgccgtcctctaccgcctccgcgcggcccaccacgccctcgtcgatctcctcgcgcgttgcggtgagggcgccgctcgtggacgcggccaatgccaaggagaacatcatggtcaccgtccgcttccggcccctcagtcctagagagatcaacaagggggacgaggtggcgtggtacgcggatggtgacaacatggtgcgcaacgagtataacctcagcatcgcctatgctttcgataaagtgtttggccctgctactacaactcgccatgtatatgatattgctgctcagcatattgtgagtggtgccatgcaaggaatcaatggaactgtttttgcatatggagtaactagcagtgggaaaactcacaccatgcatggagaacaaaagtcacctggaatcattccattggcagtaaaggatgtattcagcattattcaagatacacctggacgagagtttcttctgcgggtttcgtatcttgaaatttacaatgaggttatcaatgatttactagatccaacagggcagaatctcagaattcgagaagatgcacagggaacttatgtggaagggatcaaagaagaggttgttttatcacctgcacatgcgctctctctaatagcatctggagaagagcacaggcatgttggatcaaacaacttcaatcttgtcagcagtaggagtcacactatcttcacgttgacaatcgagagcagcccctctggtgaaaatgaagcagaagaagtcaagttgtctcagttgaacttgattgatcttgctgggtctgagagttccaaaactgaaacaactggtttacggcgcaaagaaggttcatacataaacaagagtttgctcacccttggaactgttattgctaaacttacagatggtaaggccactcatattccttatagagactcaaagctcacacgcttacttcagtcttctttgagtggacacggacgcatatcactcatttgcacagttacacctgcatccagcaacagtgaggagacacataacacattaaaatttgcccacaggagcaagcatattgagataaaagcttcccaaaacaagataatagatgagaagtccttaataaagaagtatcaaaaggagatatccagcctgaaagaagagctacagcaactcaggcgtggtatgatgggaaatggtggtattctccctacggatcaagaggatcttgttaatttaaaacttcaggagcaaattgtgaggttgaaagatgaaatcgcagaaaagaaatcacatatacatatgctagagcagcggatggtacaatcactggaaactacagaaggcccagcaattaagacagagttatcccagaccttttcaaagttgagcacgcagctgagtgagaagacatttgaactggagattatgtctgcggataataggattcttcaagaccagctacaagcaaaggtaacagaaaatgcagaactccaagaaacagttgcacacttgaggcaagaaatcagtaatttatcgaaggctgcaaaaagcgaggatagttttgctagcgtgcagtctagtgaaccatcaacagcaagcactgatactagggatcaaacaaatgaaatctcaaaccgtgcaaatatgtcctctagaacaacggacttaaatgagtcaggatttatatctcaagtgctcaaacaggcttcagaaattgaaagtttgaaacaagaaaatctgaggttggtggaagagaaggatggactggaaattcatagtcaaaagttggcggaggaatcatcctatgctaaagaattggcttctgctgctgcaattgaacttaagaatttggcagaagaagtcactaggctttcttatgaaaacgcaaagctgaatgcagacttagctgcggcaagagagctaaatgcatcgatgtcaagaagtaacatccaccctgacccaaagcgtcgtgatcatgagagcggaattttagttgaggagttgcagaaagagttggttgctagttgtcaaagggaggccgtattagaggacacactatctcaaaaggaccgaagagagagtgagcttctaaagattattgatgatgcaaaatgccgtgagcatgagttgaaaaatgaactggcaagcatgggggcccttctttcgaagataaagaaagaaaactctcaacaggatgtatttgaatttaaagcaaagcaaaacggctttcactcatccaagactgatagtggtagactggtaagtgaaatgcaagcatcggataatgggtgctgggatggcctcagtacttttgaagaagcaagagctgcatacaattttgaaagaatgcgctgcaaggaattggaaagcatcgtgtccaaactaaagggtgaggacctcaggggcctagatgttaaagttcttgaagaactacaaaacttccatgtagaagcactgtcaaggatctgccaagaaaagatggcaagtcaggcgctatagcaaaaacctttcctgagacgagtagccgctttcatgcaggccagagcttatttctcagatgtcccttcaacttcatgcccatctctctgaagttccactcacaatttcacatagttgctgctactgcaaccgggacaaccttgattagtccgcctttggacactgattcctgcgtttaaccgacagaaaacgaagcaaaatgcggttagatagcaggcgctaatggtcactgagtagttagcatgcagatactcccctcctgtacagctttttattaaagatagtagcagtggtattgtaggagtacccggattgtatttatactggtaatatatgagccggtaaaacccgaaggtggtgtttctgttatacctggaccgtgctctgcccttcaaaaactgtagtaaacccgaacggacgctgatgtagctttggcaaacttgctgttgatgtgatgcatgactgccgtgcacctggtgccgtgcccgacgatggttgactccacccaatcagccaagagcacggcacggca

SEQ ID NO: 28576 - DNA, 2519 bp, Zea Mays
ttctttcattcagctctgatggcttcgttccattgcaaaccacctcccgttctgatttctgcgggcggaattccataaggccctcccccctcccctatcctcctccccttgccactccaattcctctgcaaaattttctcatggcagccgacgtttccatccgcactcgatccgcctcaaccacccgctaattcctcctagttctagacttctagtctcctctctctctctctctctctctctctcctgcgccgactcatcttcatcctcgtctcacctccctgctgctgctgacgctgctgccggcaagatcaaatcgttcaaaagaccctggatttcggcgaattctagatggatcatgtgttttaggtgattggtgctttcgacctcattagtgccttttgttcaattgctggacccaaggagcagagttctgtcgacatggcatctccaagaggaaggatgtcatttccccttcgttcctttctgatgatctgcctcatggctcagctgggagcttccaatgttgtactcatggcgaacaacactaccctgtcgttcgacgacgtcgaggcaatttttactccagcagtgaaaggttcaggtgtaaatggtgtcctttatgctgtggaacctatggatgcatgcagtccattgaaaacaaaagcgataggaggctctgtctcaccatttgcgttggttataagaggcggttgccatttcgatgacaaagttagaaatgctcagaatgctggattcaaggctgctgtagtatatgatactgaagacaacggtgtccttgtttcaatggctggaagctcgtctggagtccacatatatgccgtgtttgtctctaaagcgtcaggggaggagctgaagaaatattcaggccaaactgacgcagagttgtggataataccaacatacgcgaactcggcttggtcaatcatggcaatttcatttatatcactgcttgttatgtctgctgtcctagccgcgtgtttctttgcgaggagacaccagataagacgggacagggctcgacttccccaaactcgggagttccatggaatgaacagccggttagttaaagcaatgccaagtcttattttcacgaaagtgcaagaagacgactgcacatcagcaacatgcgccatttgcttggaagactacagtgctggagaaaagctaagggttctaccttgtcgacacaagttccacgcagcctgtgtggacctatggctcacctcctggagaacattctgccccgtatgcaagcgggacgcgaatgctggaacaccagacccccctgtatcagagtcgacgcctttgctctcatcatccgccattcgcttaccagaaccaaccgcttcggcttccttccggtctacagtggcagcagcagcgtctccccccaggccaatcagccggcatccgtcaccatcacggtccatatcccgcaagcactccgtttcgggttccagcatccctggcacccctatccccaggtttcatgcaagctcatcatctcctacctgcacaagtggaagcagtttggacctcgcaaacatgccgtcgtctccatggcctcgcgcttcgcaccttgcatctgctcactcttcgtgcggtggccgcctgtccccgccgatccacatcaggaatacctctgcagcgcacgtctcgcgctctgcctatggatctcccagccgttacgtaggctcgtcgcacatgtcccgtggatctccgagttgctactaccttggatcttcttcagggcagcagcatccttacctgaggcactgcaccttgtcaggcacgagcctgttcaccatggtgccccaatcaccgcaacagaaccagctgcagcacggtggagactcggaaaaagatctgtcagctgctgcaccattccgtcagctctactacctgcagcattgtccagattctggcacgtcgtctcagtcgcttccagggtgctgattcttcattcttgctgcaaaattcaccattttaacattgatggtggctccagtaaagctcccggccgtgaggaatcttacatggcaccgaattgacatgtggatttgagctcctcagttcaccatgatgatgagagaaaaaaggtgcgacagaattgcttgtaagaagagagaattgcaccccccagaatgtgtggcttcatcttgaagaagcaaatgcccatgtcgggtttcaccagcgtttagcgtgtactgatacagctctgtagtaattctagttgctgtttgtctatcgagagaggtatgttgaactcaggatctttgccttgcctcgatgggatggttttttaccactgtgttgtttatggtcagtgaaatgtgcatgaagcctcgatggcacttgttctcccgttcagtatgaactacttagtaagtcgctagcagactagcaaattcactataggaaatttaaatttatgggggagttgctctgatgaggcggaaagattgttggtgccaagaaacgcagcagcagatcga

SEQ ID NO: 28577 - DNA, 1214 bp, Zea Mays
caaaggcgttctccccttcatcatcatatccgtcatccgggcgcctcgctggcttgttccattccgtcttcgggtccggaggtcggaggtcctccctggccgtactccgaaatctacccactccctccggcgccgctgcagtgccacccctccatcggtccatccccaatccgctatgcaaccgctactcctactgctactcgcttcctccctcctccggccgcctgcggcggccagcgcggcagactcgtcatcaggctgctggcccaagacatgcgggcacctcaacgtcacctacccgttctgggtggaggagcccgggcgggccccgtgcggaccgccgtccttccagctcaagtgcaacggcagcggcgcgttcctgagcatatccgtctaccaggcctaccaggtgctcgacatcttccccgagaacagctccttccacgtggtggaccacaacctcccgctcgccaccggctgcccggcgccgacgatgaacatctcgctcttctcgcccgggacattcgtcttcagcgggctcaacagggagctgctcttcctggggaagtgcacggggttcccgccggcggagtcggccgggtttcgcagcctgccttgcgacaacagctcctttgtccggctcggcgacggccggaatttctcgagccagggcatccagggcggcgtcccgcacggctgtctcttcacagtggtgccggttctcggggctcctgatggaaatggggacgacgacgactacgtcgccagcatgaggaatgggttcctcgtggattggaaagcggtgccaggggattgtcccaagtgcatggcacgcggcggggaatgcacgtacggcggtcccgacgccgagttcgcctgtgattgctccggtggcaagtgcggaggaaacagcaacaaaaataggatactcggaattgtttgtggagtagcaggaggcggtctattggtagtgtcagtgtgcttcttttttgtctggcgcaagcacaaaagaaggaaacaagcaagagcaccgaatggctgcatgcgtagcgaatcttcgatgcaatcgtatagcaaagaccttgagttgggtggctctccacacattttcacttacgaggagcttgaagaagctactgatggatttaatgactcgagggagcttggtgatggtggtttcggaactgtttacaaagttgacaagaggtgaccct

SEQ ID NO: 28578 - DNA, 6843 bp, Zea Mays
ttgggggtggggtaccgcttcctcctgtgttgaagcagcctttccctgtcttctctgcactacgctacgcccgcagtccccgcacccagcagcagagtacaatgtccacaggcaaatgcgataaggtgaggaagagagagcacgggatgggttgagaaacaagatggagggagaaagtgggcagcctgctggatcttggcatctcgccgccgctcatttccgctccacctgtgtgggctagttatctactagtagtatcttcgggccagttcaagacttagccgctgttctaagcgctgaggaagtaaaatatcatttatcggctagagtagtctctgttgctatccggcaccaatggcgactttggtccgtcatgattcaaggcagtactcgtggtggattagccatatcagccccaagaactcgaaatggctccaggaaaatgtcagcgacatggactcaaaggttaaagcaatgatcaaacttatcaatgaagatgctgattcttttgcaaagagagcagagatgtactacaagaaacgtccagagctaatgaatttggtggaggaattctatcgagcgtaccgtgcactggcagaaagatacgatcagtccactggggcacttcgccaggctcacagaacaatttctgaagcatttccaaatcagatgccatcaatgtcagacgagtcaccctctgctttcagccaagagatggagcctcatactccagatacgtctactctcacacgtgtggcatttgattacgatgatcttcagaaggatggagttggtgtgtcaccacaaagtttcacctccaagaggaatggtacacaccctgaggaaaccagtgcgctgtcatcgagtgttgaaaatgctcctcgtgctggttttgatggaaaggtatggaaaggactaacttttgaaggcccaaatgtcaaagggaaagatgatattagcaacgagatggcaaatttgcaacaagaagttgcaagactattagctgagagccaggatctgaaacagcagatgttttcagaatccgagcgggcaaacaaagctgaaaatgagatgcaaatgctcaaggcaacagtattgcaattaaatgctgaaaaagacacatcacttatgcaatataataattcctctgagcgaatatctacattggagtctgagctatcgaaggctcagtctgaccttgagaagttaactgatgaaatggctgcagatgtccagaagctaattaatgctgaaacactcaatattgctatacagtctgaggctgagggtttggatcagaagatgaagatgcagcaacaagcactagaacaaaagcttaaggaattggagagtttccgctcaagcttccaggaggagcatgaaaagcgcatgcaggctgaaagtgctctactttcccagaggaaggaacttgctcaatctcatgaagaagtgcagaggttggctatagaaataaagacagcgaatgaaaagttgaatgagttcaagcagaccaaggaggtccttgagtacactgtttgtgagctgaagaaggatgttgagcgccttacagaacaaaaccagtcctctgaggtgcttgtacagaaacttggtgaccagattaatacactcaaggattcaaataatgaacttcaaagtgaaatacaaagccttaagagcatcatttcacagctaaacactgagaagaatgcagctgtgcttcaacaccagcagtttgtggaactggtttcggtacttgaatctcagttgtcgaagctacagtcagagctagatgagactgagcagaaagtacagatgctgacacatgatcttgaaaagaagaaagaagaagcggacaatgtccatctcaagctgcaagatgaatgccataggcgtatgcaaattgaggcaactcttctcatgacagagggtctgcattcccagttgcaagaagaaatgcaaatgttgacacaagattttgacgggtcaacaaagaagctcagtgagttggaaaaaaataagttagacctggagagcatactgaaagaactgaataacaccattttaggtttgaactcggagaaggatgcagcactccttcaacaacagcagtctttacagaaagtatctaatttggagttagaactctcaatgatgcagttggaaatggacaagtctgaacaaaaaattctcttactggaacaagaaattgcacggaagaatggaagtgtcgacagcctggagataagtttgaaagatgaatgtgagaagaggctacaagcccaaaaaatgtattcccagtcacaggaagacgttagtaggttgtacatagagatagagaagcagaatggcaagttgaatgagttggagaacttgatatccgaacttaacaacaccatcctacttataaacactgagaaagatgccaccctccatgagaaccagcagtcctcagtgagaatatcagatcttgaatctgaactcatggccttgaaaaccgaactggaaaatgttgaagggaaagttcatgcggtagagcaagaactcatatataagaaagaagaagcagataacctccaaattagcctacaagatgaaattcaaaaacgagttgaaggtgaagaatctcttcttatgatgacaaatcttcactctgggtcacaaaatgaagtgagagggttggcattggaacttgagaagctgaatggtaatttaagacaggtggagaacagtaaggttgatcttgagaacattgtaaccaagcataccgaggaaattcatatccttcgtgaacggaatctttctactgaccttatgataaaggaccttcatcttgaattggacgcactgaaggatttgaacgtgaaacttcagacagaaatggggttacacataggtgaaaaagaagcacttcagagagaatttacttctcaaagggaagagaagaaaaatctagaggggatacaccacactctggttgatgagatgagtaccctaaaaaccactgcaacaatgaaccagaagctgattgaggaactgcaaattacaaactcaaaactgaaggaggtgtgtgcaaagagtgaggttgagaaggcacttctctcagaaaaactccaagaggtggagaagctatctgaagaatgttcactcttggagaactcactttcagatgcaaatgctgaaatggatgcattgagggataaaataaaggcacttgaggctttagaaagctctctcaaggatataatttcctgtcatgtttctgagaaggctgttcttgtatcagagctagagatccttggtaaaagattatctgatgcttcagagaagaattctatcatggatagctcattgtttgatatgaaaatggacctagaagacttgagaacaaagttgaaagattctgaagaatcctgtcaggctctccttgcaaataattcagctctttctggtgaagtggatgcattaagagagaagataaaagcactacaggactcagaaagctctctgaaggatgcaatttcctgttatgtttctgaaaaggctgttcttgcatcagagctagagatccttggtaaaagtttatctgaggtttcagagaagaactctattttggatatctcattatgtgatatgaaaactgagctagatgaattgagaacaaagctgaaagattctgaagaatcctgccaggctcacctaacaaataattcagctctttctgctgaaaagaacaatctgttctctcagttggagagcattacattggctatgaaagccctagaaggtatgcatgccaatctggaacagaagcactcctctgtatcaagagagaaggattttgcatatgatcaagtaagggaactgcaggatcaattgagaattaagaacgaggaatttgaagtgtcagcaaagtcacatcaacttcaagcaaacagctatgagaaacaaattttttctctacaagagaaaaaccattatatggaggaggtgcttcaacaggaacaacagaaaaacataaatgcttctattagtacagttattttggagaactgtttggtcgatgagcaagacaagaaggttgctcttttcactgaatgccaaaagtatgctgtggaaaatcattcagccaatatgttagtttcagagttaatggaggaagctagatatcatggggaggagagaaaaaaattgctagcgcacaatgaaaaactgagggaagggatttcaaatcaaatgaagtttctgaatatctgcaaagatctaggacctgctgatttagctgaggacgaagttctgttgcagactgtttcagatgaaactattaacattatgagacttaaggatgaaactgaagatgtgaataggctcatggacaccgagctctcagttctctcagtagttttgttgcaagtagggatggagcttagagacttgcatttacagaagtgtgcccttgagaaagaagtggagagtggagaaaaagagacgctttctttgcaaaatcaaaaccagcagatgttggaacagaatgaacaactaaggagtggattacaggaaagcagtgaaggggtggaggtgctgaaaactgaagtatttgtgatacaagagaaactatcttgcttgagagagtcctaccagacctcacaagatgaaatttccaacctgactaaaaaaaatgagtccttgtctaaggaataccagtccttgagtgagaagtacaatgccttggaagatgagaatgatactatttttgaagaatgcatgatgctcaagaacttgtgcctgttctttaggggacataataatgagattgcatctgcattggcttctcttaccgatgagatggctttgttgagtttggctaagggcgacctcgatctccaagttaatgagctgaacagaagttggtgcagaaggatgatgagctaatggaagcagaagagaaggttcaactcttgcaagaaaagaaccgggaactctgtggagttgttgggtctcttcaggttgcaatggaaggtgctaaagtggtgaaaggagaactggagaagaaaatcacaatactgattgaacagtgttctagcaaggacgacaaaattttacttcttcaccaagacaatgaggcattgcaatcagagattgagcaatgtgagagggaatttgttgagctgatggatgatgccattactttttcagtgaattctgcggtctatgaagaaaaagcattcgagcttatgatgaatggtaaagctacagagaatagagcaatatcccaaaaggagttgctaatgaaggagatctcttctcgagatgctaatattgaggagttgcagaaaaggctggctggtattcaggatgaacatgcagaactaaaagctgagttgaacacacatctagctctcatagcatcattggttgatcatgtcagtgtgctggaagaagatgttcgttctctgtcaaaaccatgtagtacagaaggcaaagaggaaactgcaagggtacatcatgtgcaagagggcgacgatgggctggaatctcattgcttagtcaatggaactccaaagttacaagggttgattgcaagaatagaagcacttcaagtggttgtattaaatgctaaagatcgtcaagatcgtaaatcagccgagtctgcagctaaactggcggcagcaagtgcagaaattcaagagcttaaaacaagaggcggctcacgcatggaggcaaaagaaatatgttctgacaatgagaaacaagatgttgaggtctccaaagggaagcaagtccagatcatgaaggatattgagctggaccaaatatctacttgccctccatatggcgctggagctgccctctacccccatggaactggtgcaaatgctgaactagatgacgatatgcttcagctgtgggaggctgcggagaggagctgcaagaaccaaacggccaagtcctcgtcatctgagcacgacatacaggcggtcgaggatctggagagcgagtgcccttcgtctgagctagcgaggggaagagaccttggaaccaataagctagaagtgccaaagggagctgtagagcctcacgaggcgtggagcaagaacgtgcttgagaggctcacttctgatgcccagaggctgttgagcatccaagcgagcatcgaggaactgaagaagaaaatggaggggtcctcgaagggtacgaattctgagtacggcagtgtgagcgctcaggtgcatgagacggagggtcttgtcttggaacagatcaattccaacaacaagttgagcaggaaggctgagaactaccccgcattgtcagataatacgagcaccgagcgaggagggtattccagcaggaggaagatctcggagcaggtgcagagagggtcggaaaacgtggcaaggttggaactggagctccagaagatccagtacgtcttgctgaagcttgaggaggagcacgagtacacaaggctcaaagtctctgataagcgcactcgtgtgcttttgagggactacctgtatggaaggaaggaccgtggaggcgggcagaagggaaagaagaagcgggtcccgttctgtggttgtgttcgttcgaaatcaagaacagagccgtagcctttttgttctcgcacccctgcgcgttggaagaggtggtggtgtcctttaggatgaatcccctttgtaactgagtttagtatcctgatgaagaagcctatgtactagatttttggtttcctgtctagatgaggccgttcttctagccagtttaatctcaggtattactgtgatgtatcaaggactgctctttctatatatataataatagcttcatgtttgtatagcctat

SEQ ID NO: 28579 - DNA, 775 bp, Zea Mays
gtgcgggtgcgcccagcatcggccgaactggtctatcggcgccgcccttcacgccgagagttccctctttctcgcttgctcactcgcgtcgacgactgggctaccggcgcctccaccctccgcctggtgtccttcgccgtcgacgagcgcacaccagtacgtattgctcgtgatttgtgtaactacggagcaagctgcatacagcacaagatagaagatgggtatccttgagaggatcaaggagattgaggccgagatggctcggactcagaaaaataaagcaacagaatatcatcttggacaactgaaggcaaaactagcaaagttgaggacacaactattagagcctccaaaggtaccaatggggttgtgaaaccacatcagcaattcagaatcttgaaattcatttgcttattcccatgggttccagcggaggtggagatggttttgaagtcacaaagtttgggcatggtcgtgttgcacttattggatttcccagtgttggaaagtcaactcttttaacgatgttgactgggacacattctgaagctgcatcatatgagttcacaacgcttacttgcattcctggaattgttcattacaatgataccaaaatccagcttcttgatcttcctggtatcattgaaggagcttctgaaggcaaggggcgtggtaggcaggttattgctgttgcaaagtcatcagatcttgtgctgatggttctggatgcctcaaagatgaggaaatcttcttttattatcaacaaatcggagaa

SEQ ID NO: 28580 - DNA, 1076 bp, Zea Mays
catctgatgaatcagcttgattcgtttagtgataagcttgtaaagagaattcttaaagctcatgaaccttataaccataatgacaatactaaatgttctgttgtttctgagagggtatcatatgaatttgttcctgaaaggaaagcttgctcctcattaaacaaatcagtggtacagaatgcaagtggttgtgatagcaataggaacaaatgtttggcatctgggaaagctgtgtccaagaaaaaagatcagagtaccaataatagcttggataaagaaaatatgtcatcttgtggttctggtggcacaaaggtgtcatctccaggctccttgggtttagctagggaggttgattctggaaattgtctctccctcttggataaccggaattgtcctatgactaggacctcaaaggcaaatcacaacaattgtaggcaaactgcggacatcttggattttaatctcagagaatgtagttccttcaagaaaggtcatagcaagggtttatctgaagcccagaagcatgaaaagtcgcttcctggctcttcaattgcatgcagtgatattgaagatgccggtgattgcaatgataaccttgtgaaagcacctttcatcaaacaacgtaacagccaactttaagaaaaagggtaagagaacactggagttggtgaatttgcagaatagctcagatttaactgatgttgtcacaaaagataacgttcgacagattagagcaaggaaggtgccagtgtaaacagctactcacatatgatcttggtatttatgtaatttccgtccgatgtaaataaatacttagttctgaaatcatttatacatgcatatccacttgagagtactgttataatggtaggaatcttggtcccggttcaccatgtaacattataatttaaatagggatgggcatgagcctcttaggctatttctagtagatcctctaccttgtatcctatttcaaatttttctgcaaacactgtcagtgtcatctacaattttgtgctccctattttccatggtctacttgagacagttttatgagtttgtgaaggcttatctaa

SEQ ID NO: 28581 - DNA, 436 bp, Zea Mays
cctccctccctccctctgctgctgtagctgagccctacgggcacctctccgttcaggagcaaagccaaaaacatcatccccctcgccaagaaagaaggcagacgaaggcaaaccctagccaacgcgtacgcctcgccccccgcgcctcctcccccagatccggccgatccgtcgttgccatggcgctgcgagctctcgccggcaagctgagggtcctcccttcacgagcggcggcctctcgctccttcgcctcccagatggagaagaaatgcagcaagtgtgctcttgaagagcaggctggatccttctctcaatggttggatgaaaggaagaggcgtgatatggaagagcttgcaaggttcagaaggaagagctacgtgcacaatgtgctagttcttgctggtaatgaaacacaactgagatgagaacagctagt

SEQ ID NO: 28582 - DNA, 1589 bp, Zea Mays
gttctcccatagctagagcctggttgggagggcaaaatgtacgagggagcggtgaaggaggacggcagagggaaaaccatctgggacaagttcgcgcacacgtttgggaaggttgcagacctgagtaacgccgatgtcgcggtcgatcagtaccaccggttcgaggaggatatacagctcatggcggacatggggatggacgcgtaccgcttttcgattgcctggtcgaggattctgcccaatggtaccggccaagtcaaccaggccggcgtcgaccactacaacaggtttatcgatgcactgctatcgaaaggccctggaagacaggtacaacggatggctggacaggcagatagtgtacgacttcgccgagtacgccgagacatgcttcgaggccttcggagaccgcgtgaggcactgggtcacgctcaacgagccgcacacggtcgccgtccagggctacgacgccgggctccaggcgccgggccgctgctccctgctgctccacctctactgcaggtcgggggactcggccaccgagccctacgtcgtcgcccacaacttcatcctggcacacgccaaggtctccgacgtgtacaggaaaaagtacaaggcggctcagaacggagagcttgggatagcgttcgacgtcatgtggttcgagccgatgaccaacactaccgccgacatcgaggctgccaagagagggcaggagttccagctcggatggttcgcggaccccttcttcttcggcgactacccggcgtcgatgaggtcgcgggtcggcgacaggctgcccaggttcacggcggccgaggccgcgctcgtcaagggggcgctcgacttcgtcggcataaaccactacaccacctactacaccaagcacaacagcaccgacctcgtgggccgactgctgcacaacaccctggcggacaccggaaccatcagcctcccgttcaggaacgggaaagccatcggtgacagggccaactcgatctggctgtacatcgtgcccagcgggatgaggagcctgatgaactacgtcaaggaaaggtacaacagcccgccgatttacgtcaccgaaaacgggatggacgacggcaacagccccttcacctccatcaaggacgccctcaaggacagcaagagggtcaagtaccacaacgactacctcaccaacctggctgcctctataaaggatgacgcctgcgacgtgcgtggctacttcgcctggtcgctgctggacaactgggagtggacggccggctactcctccaggttcgggctctacttcgtcgactacaaggacaaccttaagagataccccaagagctcggtgcagtggttcaagaacctgctggcctctagctgaagcctcgatggatatatatatactgcattgtcatttccttctttaatcttcatggcctgcccaagtggccatctgaaaccatgcatgcatgtacgctgtggcgtccccttctggatgccttctcctttcatctatatagccacgatacaatacaagttgcctggaagaaaactatcgaggcgaaataaagtcaaggcaatacttaaaatcgatgcac

SEQ ID NO: 28583 - DNA, 4225 bp, Zea Mays
ttgttcgagtggcgaggcctgaaaccgcagggacgaacattcagcagctccaacgcccggtccatctgaacttcccctggcaacatagagtgactccaactaagttttcgcttgacaaatacagggtttaactatgctttcagtatgagatggagagaccttttttcttgaaaggaaaacaaacagactttgataaggaacaacagtacaatttggaactgtcagcacatcgtaaatggttttagctacattatatacagttgcatacatgtagaagcagatgatgccatcgtaaatgtgtaactcctgcactattaagacattaattaatggatcattctgtcaaaagtaagaaggcacaatgaagtctaaggcatcataaggtgaaactacaatataggagttcaacaagaatgtttattgattgcataaacaacattaaaataccaaagcaatatcaaactaatcacgttcacttgacacaacattaaacttgaagtcatcatcagcacccttagctagattataaggcgaaactatcatctaggagttttgcactattgctaaattgccaaagcaatattaaactaaccatgctcgaaaaagttgaagtcattatcaatactcttggctagattataaacgtgaagctatcatataggaattccaaactatagcttattgattgcagaacaaaatcaaaataccaaagtaaaatcaaattaatcgctttcactccacagagcattgccatgagctacaattacctgtgagcagcagcaggaatgaaccttcaggccgtgcgaggaaagatactgttttggcaaccttttccaagcactccttactctgcatcatcaaccaacgaataatagccatttctcctcgatatttcctctcatctcaaatgttaagaactgatcaaacactttttaataggcaatctctggtagggtagaaacagtaccagatagggagggtcggcaacgatgactcggtaggcgtgcttcatcgccgccggcagctcctccggtcggttgtagtcgtagaaggtgaagtcgccgccgtactgcccgaaccgctcgtcgtactccagcagctgcgcgggcactccggggtccgtcttcttcaggtaggcgtagagcgtcgggcatgcgatgcaggccacggcaccggcggcggagcctgatccagaaggggagacaaggcggacgacctcctccacgagctcccgcgcgaactgtgaggagttcttgatacaaaagaataccctgaagcgtccgagatctccagatggtgacaacatgcttgctcttggaaattttgagggttcggtaaatgaggcagcaaagattttaggcgtcacagatacaaaaccttccttggacaattcaagtaggaaaaaacaaggccgtggaaggggtcgtgctggtacaggccgagggcgtggctcaagggctgctgatcaaacacgattgacttcaacttcctcagcagctgtaacaaatggccaactagataaattaaccaacaaggaaccccgatcgagtgttcaactgggccatgacgacagagctgctttacagcaaatgaaaatcctgtccgatctgctgatagctgtgtcaaaagcagagaggcaagaagcgagaatgagaataaggcaggaatctttcagacttggaaatgttgctgttatgagagctgggactatcatatctgaaacttgggaagacggtcaggcaataaaagatcttaatgctcacctgaaatctttgctggaaactaaggagactattgaaaggcatcgtaaatcacttaagaaaagacaatctggtgactttatttctgaagttcatttttccctttattgcattctgttgacttgaatccttcataagcttctgtaggtactatctgacatatgttttgcagttgcagacctcaatgcttgtcaatattgtttcataaatagcactagaaaaaattaaagttgatgttggatttattcttgtgatattccagtttgtttgtttatacagagcaaaccctcctccattattgcaagtgcaatacaaaggtcatagcagcttaacaaaataagaaaaacatccactagcctaattgtatatttttctggctatatattcctacgttctttctttgttattcttttttaaatgattttctgtttagacaagggtgatggcagtgatgctgagactggcatgtctgaggaggacatcctcttacaagatgaaatatgtaaatctcggttaatgagtataaaacgggaggaagaacagtatatgagagagagagatcggtatgagttggaaaaggggaggcttatacgagagatgaagcgtctcagagatgaagatggctcacgctttaacaacttccaaattcttcaccatcgttatgctctcttaaatcttcttggaaagggagggtttagtgaggtttacagggcttttgatttggtggagtacaaatatgtggcatgcaagcttcatggattgaatgctcaatggagtgaggagaaaaaacagagctacatacggcatgcgattcgtgaatataacattcacaaaactttggttcatccaaacattgtcaggctatgggatatatttgagattgatcacaatacattctgcactgtcctagaatattgcagtggcaaggatcttgatgcagtccttaaagctacaccaattcttccagaaaaagaaggaaggatcataattgttcaaatatttcagggcctggtttatctaaacaagaggggccaaaagatcattcactatgatctaaagccgggcaatgttctctttgatgaggttggtgttgcaaaagttaccgactttggcctcagcaagatagtggagaatgatgttgggtctcaggggatggagctcacttctcagggagctggaacctattggtatcttcctccagaatgctttgacctgagcaaaacaccatttatttcatctaaggtggatgtttggtcagctggtgtaatgttttaccagatgctcttcggaaagcgtccttttggtcatgaccagacccaggagagaatacttcgggaagatacgattatcaatgcacggagagtggagttcccttcaaagccagctgtatcaaatgaggcaaaggatctgatacgccggtgcttgacatacaaccaatcagagagaccagatgtactaaccatagctcaagatccttatctctcatacgcaaagagatagccgctatgccggagaacactaaggcaagggtagctgatcatttatgagattatttatgtatggggatggataatcttgcgaaggagcaaagtgttccacaagctcaagaagaccacaaagggtgtaactgtatatgttgtaaattttagtctttcccatcgcagcaatgacctgaaatccagaagccatcagttcaacggacagcttctttgtagcgtagagaaagcaggcattggtttgaacggggcatgcgtaacgtgatggtttcttggctggtgggctgtgggcagtggtcctgttgatggttggtttttgtttgctcatactgtcggtaaggtctgccaaatcagaaaccaccggtgacaggcgagagctcacatgctcacctccgaaaaaaatctcggccttgcactggcaggatggactggattttgcgtattgccaaaacagatttaaggtagcatgcatcaatacaggttactttggataacctatagactcaccacagccacaagcacagaagctcttcgtacaatttcagagagtaccgatgtgccagatttctgctggtgccaatttgtttgtgatcgctgtcacccttgtacaacactgggatcgctcattgagcatacacaagttatgcaatttgcttttttattatagtcatctttagggcgtcgttttgttcggaacggattctttggaactttaatgttagttttatttgtgttaaaactgaacgtggaatagttccaggttatataatcccagctaacctaacttgcacttaggagatgtttggtttgagaaatcactctatctaaaataagttagtgtatcatgagttcattttctaaatttggtgggatgatctcattccatatactaagtaactaggaagaatgaggtgatgatatattaactcattttattttacaaaccaaaaaaaaatgaggagtaagaag

SEQ ID NO: 28584 - DNA, 573 bp, Zea Mays
ggcgcctcgaggtcgtggaacaccatgggcgctgggtacaccgggtgtgggagatggggctcgcgcaggagctgttcgacgaaatggagctgggagacatgttctcttgggggccttgatggacgggtatggtgtgaagcaagctggtgctggtgtggaccgtgcgcacgagttgtttgattaaatgatcgagagggatttgatgtgctggaactcgatgttcaacggtgatgccaggcatgtcaggatgaatcaggcgaggtcactgtttgaggaaacgatggagcggaatgtgatcttgtggaccattttcattgatgggcatgttaggtgctcgggggccaaggaggctttggagtattttcagagtatgctgcggtgtggcgtaaggcctgatagggtcgctgtcgtgggggttgttagtgttcgtgctcagctgagcaatttggagcaaggaagatagcttcacttttgtttagaaaggtgtttgttcttaacctcttggattggatggtagtgcgctgatcttaatataaaatcttgccaaaaataccgctaataagaacatcttgc

SEQ ID NO: 28585 - DNA, 507 bp, Zea Mays
cagcagcccagcccatttggcccatctcaaccgaaggaggcaaagacgcaacgcgaggtctcatgggcgaccgggccattcgtcgtctccgttgtctttgttgcagatcggtgctcctctcaccaccaggccgccacagctcgccggctttcccctccctgccatcgagcaccacctgagcaaacagagcaaggaaatagtttaagaatggctgcgcggagcagttctatggttgccgaggatgactacgagacggatcagaagaagcaagctgctgcagatgttctttttcactattcacaatttgttatggtttgcattggtgaggatgttcgccctactgatctcaggttacatcttatgaaggaagtttcaggaatgtccacttctctgaaggagcctcaacaggctgctgcctcaccggcttccagtggggaaccgtcttcctctggaacgatgaaaggagtacaggactatagatgacaacaggtacacgaaacattgcgg

SEQ ID NO: 28586 - DNA, 2218 bp, Zea Mays
agcggtttctatacttaacacatcgagtgaatgaatgaagccacgcgctcacagtatagatgctctgaaattaccaatgccatggatagaaagagcagtgtatatcaattttgtcagtaggaagcatgtgcattttgcacatgtcgctgcctataaatacccgccggaacacctgagatgcgctgcagcctgcaggtgacatgacagtgagctagctagtgtgagtagaagcaagcagcaagatgggagaaatggcgcatgcttgctctgcccctcgcccgtctcccgctcaccatttgtgtgtgcgcatcctactagcgtacctgcttgcggcgcggtggctcgtgccatcctgctcggcggcttctttcttccgcttcccttggcccgccgagcggcacgactaccgtgacgcgctggccaagtccatcctcttcttcgagggccagaggtcggggcggctgccgcctggccagcgcgcgtcgtggcgcggggactccggcgtgtcggacggcgccgcggccggggtcgacctggagggcgggtactacgacgccggcgacaacgtcaagttcggcttccccatggcgttcaccaccaccatgctggcctggagcgtcatcgagttcggcgactccatgccgcgcgacgagcgccgccacgccgccgccgccgtccgctgggccaccgactacctcctcaagacgctcgcccaccccggcgtcatcttcctgcaggtgggcgatccgtggaaggatcacgactgctgggagaggccggaggacatggacacggaccgcacggtgtacaacgtcagcgcggggcgcccgggctcggacatcgcgggggagacggcggcggcactggcggccgcgtccatggtgttccgagatgacgacccggagtacgccgagacgctgctcacgagcgcaaggaaggcgttcgagttcgcggacacgtacaagggcgcgtacagcgacgacccggacctcagggcagggggctgccccttctactgcgacttcaatggctaccaggacgagctgctgtggggggcagcatggctgaggagagcctccaaggatgacacgttcctccagtacattcagaacaacggcaagaccctgggtgcagaggacagcagcaacgagttcgggtgggacaacaagcatgccggcctcaacgtcctcgtctccaaggagttcatagaaggcgccgcgctgcctttgcagtcgtacaaggagttcgcggacagcttcgtatgcacgctcatcccggagtcgtcttcttccccgcacatcacgtacacccccgggggcatgatctacaagcctggaggcagcaacatgcagcacgtcacctccatctctttcctgctcctgacctacgccaagtacctctccaagtcctctcataccgtcgactgcggagacgtttcagttggccctgaaactcttcagctgcaagccaaaagacaggtcgattacctgctaggagacaacccgatgaagatgtcgtacatgatcgggtacggcgaccggtacccgcagcggatccaccaccgggcctcgtcgttgccctcgatcagggaccatcctcagccgatggcgtgcaaggaaggcacgccgtacttcaactcatccggtgcgaatcctaacccgctggtcggcgcggtggtcggcgggccgggggaggacgacgcttacgaggatgaccgtgcggatttcagaaaatctgagcccaccacctacatcaacgctcccttggtaggggtccttgcgtacttcgttggcaacccgaatcctggtcataacaccagacattgagcatcgcagcctctgaatctttcttggtgtgtgtgtatatatttttatatatgagatcgagtggatggagctatagataagatacttgtaggtgagagagacaaagagagtttgtcttgcatgattttttttttttggccttttgttgttgggtttgcactgaacttgtttggacatgtgcaagtgccattttcactggactagtatagtcatcagtgagaaatattgtactttggtttttggtttggaaggttctaaaggaactcatagcttgaaaaaaaaactaatgccatatggaagactgttttgactatcatggtgtcctgaaaattgtggcagaataaatgctgaaagtttgtagagggctatttgctgaggttaaaggacatcac

SEQ ID NO: 28587 - DNA, 918 bp, Zea Mays
tccttcactaccgtaaccgtaacaaacaaccagcgcaggattatcaccgccatcgtcagggttgttatcggcctccctcttcccccaaccgagatcctaggagataaatcagagccccagcgaccttttccccctctattaccctctcgcgagccctgaccagcaaatcatctaccgtcgggtgctatcaccaccgcgaaatcgagatttagagaggggagatccgccgctagtgagctcgcaaatcgcggttacccaggtcttggcatggtgttctggtgtggtggcacggtgcctaggagccatggctgccatcccgccgctggaccattggcgcttgggcgattgctcgccgggcttgggaattaccgttgtgccatgctatgtcggggaccaagctcacctcaatcaaatcaccggtgaagagcaggtggcccaggaggaggactactatgaggagtgttgggggtcttcttccctgccaaaggtcctcaaggaaaaaacaccttcggacaagacaatacaaaggcatacacgacatgatgacacggatggaagccgaagctatggctgaaggagcttcggcttagtaatatgacgaagccaaaggtcgtcaccgactcaagggaaaaagactgtttagtccttgatcactcacattatgattgcatgtaaatgttggggacataaatgtaattatttcccgggctgtgtcccgcgcttataaatagatgaatagtacccccgtactgttcacgctggattgtaatctctctcatgcaccatctttgcattctcatcttctagcgaaccgaaggtacaattgtattaaataccattaatgtcaattcttacatgtgaatatgaatatgaataaattgtgaggatctgatcattatctttcattctgaagtgttc

SEQ ID NO: 28588 - DNA, 1118 bp, Zea Mays
gtagcactcacttcaccaggcgatccgaactctgaagtccagcaacaactattgatggctggccagacaaaaaaaatcaatttgctggtgcccaattcttccaaatccgtttccaaggagagaatggtatggaactaacaacatagtattataagccgatttactgctgtagcatctagaagaggagagctatcaggaatattgatctgggatttctggctgcagcacaatgccttcaaccatatcacaaatgcggaggaatttgtggaggcaagacgaacagctgcacttaataatgttccttcttgtatgtggtctccggtaccacctcttgagttaaaaggagtatctgctgatgcactaaatgcaaatgctggctttgttactttcgttgtttaccctcggcatgttgagggtaaaaagctagatagaacagtttggaatttgttgacatttcatgcttatgtaagctatcatgtaaagtgttctgaaggattcatgcataccaggatgaggcgcagggttgagtcgctgatccaggcgttggaccgggcgaagtctgatgctgagaagttgaagaagttggtacacggtggatctttcaaaagactgagcctgaagaacgagggggactcgcgtttctgaagggaattggcaaatgttgttgttttccatttggctaatgacttctgttgtgggaagcttacttccgttcagttttgggagcgaaggctcggaaccggttaaatccatgccattgaattttaatgtaaattcgcgttgcttttacatatttactagcctgaaatctctcggcgtatcagttccatgacacatcgcctttgcaaccggagagcctgctgcctgcatcttggtgcaagtagtttgtttttgccatgagatgtctgagtctgatcttttttggcattaataaatgtgttgttcttggatcacatgatgtagtagggagttgaggcttggttgaatcacatgaccactcacggtcacggtacagcatcggctgagttatgtcgagcagccgcattcatttttttataagcttgatggtgtattgttttataagcttcggctgagttacgctcgaaccacggtcctcc

SEQ ID NO: 28589 - DNA, 4143 bp, Zea Mays
ccgccgtccccgtcccctccaatcacaattcacaactgcctcgcactctgcccgctgacaaggtcgggacgtgcggtagattggtggtggcttcgtggcgctatcaatgctggtggatttgagcaggggcggtgggtgcgcggatagacgcctgagaaatccgggtgcccggggcagtgctgctccggaaatctgacctgccggcggagaagaattacactaacggccatgctgatggcccggtgaagcgcaaggtagccgcgatgccagcagcggcacctactactccaaggaggcacccgtcaccgaatgccggcggtcgggcgtcgtccccgacgccagctgggtcacaggcgaagaggtcccagtccaccgaacggcggccggtgactccgtcaaggccgtcttccggcggctcgcggccgagtactccgtccaggatctctgccccggcatcgccatcgtctgcgacttccagcccgtcctcattctctagctcgtcgacgccagtgggtgatgccgttccagaaacgcaaatcgctctgaggaggttgcctggtggccgggctcctgatgggctgtggccttcaatgcggagtctgtcttcttctttccagctcgaatcaaaggggaaaaagatttctagtagctcctctgcagatcaggccaagacgagggatgcagcacccgctgataggaagaggagcccattgagaggtagagctacccctgagcaatcggagaatccacatgccaaggtgattgatcatcatcgctggcctgctatgatggggggcagggtgtctgcaagcacaatgtccaagagcatggatctcactgataagatcagtaggtctgctcttccatcagttccgtcacgtggtgtttcaccgaagcgaacaacagtgtcctctgctgcaaataccttgtcaagaagtattgatcttgctgataaaattgatcggctggtctcttcgtcaatgtcatcacaaggggaatcaccaagaaagtcaccttgtaatggtgcagatgatgtgtccaaaaaggttggtgttcgtaaagatctcaaactctcatccttggcaatatcaagaagggtgtcaccagtaacaacagatgataaaattgatcggctggtctcttcgtcaatgtcatcacaagggggatcaccaagaaagtcaccttgtaacggtgcagatgatgtgtccaaaaaggtcggtgttcgtaaagatctcaaactctcatccttggcaatatcaagaagggtgtcaccaataacaacagctgcatcagatggcactagaaccttatcaggaagcatggatcttactgaaaaagataacagtacactctcgccagtttcatcacccagcatttcaccaagtgcatcattatcaagtgtgtctaatgccgcatcacagactactacaaagtcatccgagagattaattggacctgtttccaacctgtcctcatcgagaggactttcacctagaagaacaacttctggtggcattgttgatttaatgaaaagcattgatttccctgaaaaagataggagaccagcttcatcaagagggttttcgccaaggaggagactcgtgtctgatggtgttaatgatattgggaaaaatatggattttgctgaaaaggatagcagagtagtcagctcatcaattccatctcgaggggtttctccaaggagaagacttgcctctgatggtgttgatactatgtgcaggagctcggagttttctggaaaggataacaggccatccacctcatcttccacatcacgtggaatgtctccccgaagaaggcttgcttctgatggcataagtgctgtaaccaaaggcatggactttggtgataatgctaacagaccatcaacctctaaaggagtgtcacgagggatttcaccaagacttcaattagcctctgatggtgttggcaatgtatcaaaaggcacagatcttgctgatggactggacaggccatcaacctcatatgcaacaccgcgaggtatgtcaccacgacgcagggttgcatctgatgccagcaatgccacttcagaaaggatcaagttcaccaaagaggattctggaactgtgtcctcttcagttgcacctagaggggtctcaacattaagacaacttgcttctgatggtgttgaatctgtctcaaaaagtatggatcttgttgagaaagatactagacctactacctcatcagcttcatcacgagggctttcaccaagaaggcgactttcctcagatggtgtcaatgtgatttcaaagagcatggatcttgttgaaaacaataacaaacttgtcaccatgtcagctgcagctcgaggggtttcaccaagaagacggctcgcctcagatggtgtcaaagtgacatcaaagagcattgatcttgttgaaaacagtaacaaacccttaacagtgtcagctgcaacacgaggggcttcaccaagaagacggctcacctctgatggtctagcatttatatcaaagagcacaaatattactgaaaaaagtatcagaccttcaacaccgtcaatgtcatcacgagggatgtcaccaagaagacggctggcctctgatggtatcaatgctgtattggacacagaatttgctgacaaaaattgtagaccatcttcctcatcagctgctttacgaggggtttctcccagaagcaggtctgcctctaatgccatatcaacaggcatgactaatgctgaaaatgacagcagaccatccacaacatcaagtccgtcatgtcagactctgcagagcagcaggcttgaatctaatggtgttaacatcctatcaaaagatatggaaatctcatcaactgtatctggttgcacttcagacagtagacttgatggcgctggtgctctagtaaaaagcatagatgtcactgagaaacttactgtgtcaactgaagatggtggtggtgaagacgatcctggaagaatagattctagtgacgtagttactagtgcagtttcatcatcccttgcatctcaagaggtatcatcaagacatgttactgatgacgttaagaatgcgtcagagagtgttggtgcaacgcaaaaaggtaacagaccattatcagtgaaggttccatctcgagtagcttctccaagaagacgacttgcatccgatggcattgatactatatctaaaagcatggattttgctgagaaagataagaaacccatgacagtgtcagttccatcacgtggaatgtcaccaagaagaacagcaagatctgacagtgctgatataatgtcaaaaagtatggattttcctttacaagtgttttctacaagaagagtactaggacctgatggtgctaatgccatgtcaagaagcatggatctaactgataaaattagacagaaaatatcttcaactatgcaatcatccagagtctcaccaaggaaaatgcctcttgcttataacagaataaaaggccctgaaattttatcaggtgatgctgagagccctggttctgctgatggaaatgaaagtcaagaggagaatgccagttcaagtccagatgcaccttcaaatagttcagaaaaatctacacctccaaagcagctagctaggagatcaccttcgccatcacatattttaatatgcccttcatcatcatccaatgcttcatcgacaccatcatttgtctccaggagattaccaagcccatcaaggactagaccttcaacacctgtctcaccatgtagttctgccagatctgattcagcctcttcaattcttagctacattggtgatgctacaagagggaagaagagcccaactcacacggaagatgcccatcagttgcgcctcctgcataataggaacttacaatggtgttttaccacttcttatgttgatgaactgctgtcaattcagaagataagtgctgagactatgttgtatagtgtatgggatgctaactcaaggatgtgtgactctatggttataaaaaggaactatgtacaacagctaaggcaagaggtcaaattgggaattgtcttgaaggagcaagtgccatacacaagggttacccccatgagacatctagcttgaggacaaattgttcgaagaggcagtggaagttgtt

SEQ ID NO: 28590 - DNA, 401 bp, Zea Mays
agcctactagagccgagctccgagttcaaaccaggctcgttcgagttcggctcgttgacagcccagcggctcagccctatcccagttccgtccgtccgttctgacctcggctcgtcgggcagcggcgcccggcgcaccacacaggctttctccaactctccgccctcgccatggccatgaccgtggcagccgcctggcttccgtcgaccgcctctcgccggagaatcttatcctctccgctccctccgttcgcggcccctatctccatccacatgccacggcgggcgccgcctcccagtcccatccatccaaagccgcgcctcttcgtcgcctacgcgcagctcgatttctccagaggtcacttatatttctatggatgcctctgtagtttttttattatc

SEQ ID NO: 28591 - DNA, 3120 bp, Zea Mays
ccgagaccccgacccaccccgcctcccccgccgccgcgctcgcgctcccccgcgacagccgccatacgccctatctccgccgtgcctgcgcctcctcccccgcccgcccgagacccgccaagtttcccttccttgcacggcgagatccaccatcggcgcccccttccctggcgagccacagccgtccatgttcctggccaccggcgacctcccttctctagcccttggcggcgagccaacacctcctcccatggctgccccccagaccccagtcccgtccgcgcatccgctcttccgtcagcgacgcacctattctcccctctctccccgacgtcgcccatggcgtggacggcgacctccctcaccctgcaactctgcacgtgtaagggccgtgttgcccgcctcctttccccacaccggcgcagccccctgtcgccgcggccccttccccaaacagcacggcaccacatgctccccctgccgcgcccgcactctccttccccaaataacacggccccacatcgctggttgcctcgcctcgccggggacccagcacgatggtcagggagctggtgggtgggggagacagggaggagcggaggaggaggtcaagctcaacatggacattgtgttcgtgacgctgccttccccaccgacaccaacgactcactccagaacccggatctggggcccttcctcctcaagccatggtattgggcgagggtggcgccgcctcgcgtgcttgagttcgccgagcgcgccgccagggtgctcgagcgaagaggtgagggcaccgagctcgagctcgccatgaatctccacatcgctgctggcatccactgcggactcagccaccaagccctgacattgtagccagtttcttgcaatcagaacgaatgccagttggtaaccatttaacatttcttttgctgtgtcaacttattggagttggagagaggctatcactatactgacctttatatcatcagaattgacataaatgtgatttacacgtagatacaagtttgtggcagagatttctctgacacgccaatcagtcttcgatgcgaatgcttgttgctcatatggacttgtggttgtgataatgagttcatctccgtgcacatttgtcgtccttgtggttacagcagttaactgagtagtctctcttgactgcaaaacaagcaatctgttgcctctgctgtgatggtggagcaatttcagcgccaagaatgatatctcgcattttagattgtgtcagtgcagaagtattaacattgtttttctttgcataatcagaaaggatgaggtcccttagtgcacactcaaccttcaaccactgttcatcattcagagatggccatatatgatgtgtttcagtaataattgttttgtcaggtatggttcatatattcaaatatccaaacctcatttggagttgtgataccagcaacctttgacatcgattcaagatgctactggagtgttattcatgtgagtgtaatttagtacatgatccaactggtaacaaactttatgatactagcatatcacataatagatgagattactagaaacagctcatgttattgaatatagaaatttcagttctattgtttttacacaaatttgtttgtgatgcttcaaaccgctaatgattttttttaaaaaagttgtgcaatgagcatatcacataatatatgagaatcttaggaataaaccaagttgctaatgagtaaaattttggctttgctttttaaaaaatatgggttcaagttgttcctgacagatgccactgcacaaatggacgttgacacgttgtagtgatcacactgtcacgagagctgagcaaactacagcctgcaagagctacacgtggtagcctatactcctgccttgctataattttcttaattttcttttgttaatgagtgcagtttctctggctaatggtaaaaataatttgttctacaggcatgcttgaccacatcatggtggagaatgcaagtgttaaagttgcattgaatcgcattgccgttgtttctgtcctggatgcacataccctgtcagtgatgtcttatgaagcttggaggctcatacatctgtttctgttggctctctctagctatatgcagtggagctgctaatatgcatgaagtttgggctaggtgagcttcctctttcacttttcaaaccagtataggtattggccgatgtcaagaagacaaggccggcgacgagaggacgacagcgtgcaagaagagaaggcccatgttaggcgcaactatagggctcaaggtcaatcagttgtggtcacacttttccatttttacgttcagctaaactgaccccctgtctcatggtgcaactgtgcaaggataggcaacaagtgttcaacaatatgtctgtggatcaattgacctgcatttcagcttttagttgaggatcaaaatctcgtgtcgttcagggccctcggtagagagacattaatgtgtcggcaccgtggatcgtcgcagttgtgggtcactgtaacggcactggtcacaggcaccatctgcctctgttcgtcctcctctattggcctcctcagcacctacagggtccagatggaaaagtttctataatacatatgtaacaaatacatactccttgttcaagagatcgtaagcaagattgtaaacggtatccaacgcagaagcacctaatatggttacagagtattactgatgggcttacctgcagactgcatgctactactcaaggatgttgttgcaaatgagttgtggagaaccgtagatgcaaatggttggagagcatcttctgcaccacacatctattggcctcacataccagctgaatctgagagcaatgggtacttgtgtgtccggtgcaacggcggcttgaccttacaaatcagtgttgtatgactaatataaaactctctctctctaaagtagcatagttcaccatgcaagttttgtgtattcatggcaacatatctgaaagatttaagattacttctaccttgattttgtagatatgaaatgttgttgtcattgcacgaatcattaatgacttgattttgctctctatatgctatcttagaagtttcagagttca

SEQ ID NO: 28592 - DNA, 2530 bp, Zea Mays
gatagtgcacattactattaaaacagaagagtatgaacaaaggttcctagggtgctccacaaaaagggcaaacaaaaggacaaagggagcaaaaaaaaacgaacaccttcctgagcttaagacagcatggatcagtacgaggtgctggagcagatcggcaaaggagcatttggctctgccctgctggtcaggcacaagctggagaggaagaagtatgtgttgaaaaagatccgtcttgcgcgtcagacagaccgcactcgccggtccgcccaccaagagatgcagctcattgctaatgtgaggaatccattcattgtggagcacaaggattcatgggtggataagggttgctacgtctgcattgttatagggtactgcgagggaggagacatggctgaagctattaaaagggctaatgatacccacttttctgaggagaagctttgccagtggctagtgcagcttctcatggcccttgactatttgcatgcacatcacattcttcaccgtgatgtgaagtgctcgaatatatttctcactagggaccaaaacataagactcggtgactttggtctcgcaaaaatattgaccgccgatgatttggcattctcgattgtaggaacaccaagttacatgtgcccagaactcctcgccgatataccttatggtaccaaatctgacatttggtcactaggatgctgcatgtatgaaatggctgcgctcaaacctgcttttagagcttttgatatgcaaaaccttatcaacaagattaccaagtcgatagtatcacctttgccaacaagatattctggtgcatttcgaagacttgttaggagcatgctacggagaagtccagagcataggccaagtgcagccgaactacttaagcatccacatctgcagccgtacgtcctgcaactccatctgaagtcacacctttctcgcagcatagttcctgttcaccagtctccaagcgagaagaggatgacattcgccgcagagcccgtttgcagaagcaagggcaggaggaactctttaggcagcgaaaggatgatagcagcctttagcaaaccttctcctgatagaagttctgtcagctctattcggagtgtcaaggacgactacaccgccacacagagtgtcagagagctatcggttgatgaaagcatggtcgaggttgctagtaaacccgtggcatcaaggacctcagatgtcatgaggactccgaaggcgactccgtggaagatgatgacgactctgaggaatcggctagaagctccacaagcatcatatgacagaacgagtcatacagagttttcaagaacaccggttgacaagaggaacagccgcgtggcccgcagagcatcgcttcctctgcccgtatttgagaccccgaagcagcgcagcagcatgagcgtcctggagcggctggagtcccccgacgtctccgtgaactcgcctcgcatcgacagaatcgccgagtttccgctagcttcgtgcgaggaccccttgttctcgaccgtgaagccaccgacacccgccagcgccagcgccagcgccacgcctccgttcgtggaccggtccatcaccaaggacaagtgcacggcccagacgctccggtccgcggcccacgacggtggcaacggcagaagcgaggacggcggcggtttgtcctcgggtcgcaccaccaccacggcagcgtcaagcggtgggacgtcggggtcgttgcagccgaaggggcggttcgacacgacgtcgtaccagcagcgcgcggaggcgctggagggcctgctggagttcagcgcgcagctgctgcagcaggagcggtacgaggagctcggggtcctgctgaggccgttcggccccgacgagatggtgtcccccagggagacggccatctggctcaccaagagcttcaaggaggcgatggccacgggcttgtagcggtggcctcctttcaccggcatggacggatcaggaattcaggatcgcccatcagccttgcaggctgtagacggccggatggcatcgccggtgctggcgtgtgtaggtcaggtaggtaggctatgagaattgagaagagagaggcgttagcgttgacggatcagttgttagttgctgggagtggacacaacaccatctcagtgttggccccccggtttattttgttactatgctagcagttcttagttagttaatggcgctctggctagctagctagtgatgtaccaatgcaacccccccccccccccccccccccccccagcagaattagtagcatcagggagtagcagtagaggtagagctggaggagtcttgagctaggaaggagaaggggattagtgagatataattcctatactgtgatgtagcccaagtatgtaccagtagcttcatatgcatcagtgctgactgctgaagaacattcagacatctatggattcagccattcaggccgattgctacgcttatctgcagttatttgctcctgcaatccaggagtgtggaatgggcgctgacactgttttgg

SEQ ID NO: 28593 - DNA, 776 bp, Zea Mays
gggacccactggaattaattaaaagggaaacaataacctgctggctctataaacataagcagcatactgaccggcaaatgcttggcaaaaataaaccctggaaattcgtgcaagcaaaaggatccatgcaagcagaagaaagcatggaggttccagaatacagtctcggaggccctggaggacatcacagctctatactatgacgaagatcgtgacgagatctacactggcaaccggcatggccttgtccatgtgtggtcgaactgaaagccgaaatagtggcggctttcacccacagcatggtgatcttcacctgtatgtgtattaacagcttgtacctcacatggcaggggggcacgaagacggaccccccagccaccaggtacggacgtgatgcttcattgttgaggcaattcttatttatcccaccagcgtggcaagagctctcaccacataggcacccattcagaaatcagaacaccccctccccgatttgttgtaggattgacaatcgttgtgcgttttaaatatagcatgtgtgttaattttttgttgttgttgggaatgtcgattatgtcccacaactcagtcagtgagttcaagtgttacggatgtaccttgcaagtaatgagattcattcgttgagttgtgatttcgttcaacttggctccagcccgcatctcgtttcaacttggctagcatgaggccgacgtgtggtggtgggttcatcctctgtagcctgctgcatccatcaagcctcagcagtctatgttcaa

SEQ ID NO: 28594 - DNA, 2371 bp, Zea Mays
cccgactcttccccagtgattctcttctacgcttactaggctatacttgacttcgtgtgtttccattccacagaggaagggatggccgggagcagcgtccgcggcggcagcaactgcccaccgctgttcgtgacggagaaaccaacgcggatggcgaggtacgcttaccggctgttcgcgagcacggtcctcgcgggggttcttctggtatggctgtacagagcaacgcacgtgccaccgatgagcagcggcgcccggtggtgggcgtggcttgggctctccgcggcggagctctggttcggcttctactgggtgctgacgctgtccgtgcggtggagccccgtcttccgccgcgccttcccggaccagctcttgcgaaggtacaaggaagagcagcttcctggggtggacatatttgtgtgtacagcagaccccactgttgagccgccaatgcttgtcatctccactgtcctatctgttatggcttatgactacccgaaggagaagttgaacatatatttgtctgatgatgctggttccatcataacattgtatgctctatatgaagcatcagagtttgcaaagcactggcttccattttgcaataagtaccaagtggagcccaggtcaccagctgcctactttggtacagaagctagccctccagatgcatgtgaccgtaaagagtggttttctttgaaggagatgcacaaagatttggcagctcgagtgaattcagttgttaattcagggaagatccctgaagtttcaaaatgcaagcttatgggcttctccaggtggagcgagaatgcaagttttagagatcacccttcaatagttcagattttaattgatggaaacaaaaggaaagcaactgatgttgatggaaaagtgttgcccacactggtttatatggctcgtgagaagagacctcaagaacatcatcacttcaaagctggatcactgaatgctttgataagggtatcatcagtgataagcaacagcccagtcattatgaatgtggactgtgatatgtactccaacaattcagggtctatcagagatgcattgtgcttcttccaagacgaacagctaggtcaagatattgcttttgttcagtatcctcagaactttgaaaatgtggtgcaaaatgacatctatggcaatcccatcaacaccgtcaatgagttggaccatccttgcttggatggatggggtggaatgtgttactatggcacaggatgcttccatcggagagaggctctatgtgggcgaatatacagtccagactacaaggaagattggactagggtggcgaggaaaactgaagatgtcattgacttggaaggaatggctgagtcacttgtgacttgcacatatgagcacaacaccctttggggagtcgagaagggagttatatatggttgcccactggaggatgtcattacaggattgcagatccagtgccgtgggtggagatcagtttaccacaacccgccaagaaaggggtttttaggcatggcccctacctcactaggacagattctggttcagcacaagagatggacagaagggttcctccagatctccctctcaaagtacagcccgtttctgctaggtcacaggaagatcagcctgggccttcaaatgggttactccgtatgtgggttttgggctgctaacagcttccccaccctttactatgtcactatcccttcactttgcttcctcaatggcatctcattgttccctgagcttggtggagtccctgcaatgtggcgacactgctgtcgagtggtggaacgcgcaaaggatgtggcttttcagaagaatcacctcatacctcttggcagccatcgacacaatccgcagaatgcttggcgtcaccgagtcggggttcaccctgacggcgaaggtgaccgatccgcgggccctagagaggtacaagaaggggatgatggagtttgggtccttctccgtgatgtttgcgatcattacaaccgttgcactgcttaacctggcgtgcatgatgctcggggtggcaaaggttctgttgcgtaaaggagcggtgagtctgggagctatgtttgtgcaggccgttctatgtgcgctgatagtagcgatcaattttccagtgtatgaagcaatgttcgtccgcaaggacagtggcagattaccagcttctgtcagtgtcgtttcgctctgcattgtattaccattctgtatacttccaaccaagttgtagatgtggagctggtgaaagatgatatatatatttgaaacccgatggtgaaagttataagaactgtactgatataatatatttccaagagaattaaaaaaatatataacatgttcatttacagatctg

SEQ ID NO: 28595 - DNA, 196 bp, Zea Mays
gtcaaaattcatctcaatatattccaatacactctaatccacatgaaattggaataaccgaacaaggccttaggattgtgatttgttggagtgcacgatatccatttctgtactttcaacagttgagcagacagtggacttctcccgtaataaattgggttgttcttactaggccttgggccaacagggtccaggc

SEQ ID NO: 28596 - DNA, 265 bp, Zea Mays
cgcgccgtcactttgctagagccttcacaagttgccattcgaccacaagttaatctgggctcgcaatatcgtcagtgaaaagttcccgggagtgtgagggaagttggtaggtaggcttggagggttcttttgcttgaaccacatcgaacaatgaattatgatctatgtgtacctagcagtgtgagggcagttagtagatatacttggacggttcttttgcttgaaccacatcaaacaatgaaatgtggtctaagtacgtcagcgg

SEQ ID NO: 28597 - DNA, 1392 bp, Zea Mays
  misc_feature (1)..(1): n is a, c, g, or t
ntctcctccgaaacataaggttcctggagatgttcttttagttcaaaggggaaagtgcaaattcacaaagaaagcaaagtttgctgaagctgctggtgcttctgctatagtaatcataaaccatgtccacgaattgtacaagatggtctgcgaaaagaatgaaaccgaccttgacataaatatacctgcagttctcctaccaaaagatgcaggttctgctttacatacacttcttacaaatggtaacacagtttctgtgcagctttactctccagatcgacctgtagttgacactgcagaggtgtttctatggcttatggctgttggcacagtacttggtgcttcctactggtcagcatggagtgctagagaagcagttattgaacaagagaagctcctcaaggatggccatgaagacctactgaatgttgaggccagaggttctagtggcatggtagatatcaatgtggcatcagcgataatgtttgtggtggttgcgtcatgcttcttaataatgctttacaaactgatgtcttactggtttgtggagctactggtggtaatcttctgcattggcggtgtagagggtctacaaacatgcttggtggctctgttatcaagatggtttaaacctgctgcagaatcttttgtgaaagtaccgttccttggagccgtttcgcatcttactctggcagtttgcccattttgcgttgcatttgctgttgtgtgggctgtttttcgccagctcccctttgcttggattgggcaagacattctgggtattgcattgatagttacagtcatccaaattgtgagagtacctaacctcaaggtgggttcggttcttctcggctgtgccttcctgtatgatatcttctgggtgtttatctccaagagatggtttcatgagagcgtgatgattgtggttgcgcgtggcgacaagaccgacgaggatggtgtgcccatgctgctaaaaatcccgcgaatgtttgatccatggggtggatacagcatcattggctttggtgatatccttcttcctggtcttttagttgctttctcgctaagatacgatttttctgcaaagaagggcttacggtctggttactttttgtgggcaatggtggcctatggctctggacttctaatcacatatgttgcgctgaacctgatggatgggcatggacaacctgcccttttgtacatcgtgcccttcactcttggcaccttgatcgcgcttggatggaagagaggggagctgcagaacctgtgggcgaggggagagccagagagagtgtgcacgcatatgcatatgccgctgctgccgacgaccccaaactaaccacaggtttaaaaggaggcactgcttcttggagacagcaaagtctgatt

SEQ ID NO: 28598 - DNA, 2472 bp, Zea Mays
aagactcgttttggaccaaaatctgatcatggaatggccacttcatctgcgggaagtatgactcctaggtctccaataacaactccaagatcaaatcatatagacatgcttttagccggtaaaaatgcaattaatgagagtgatgatcttccacagattgtcgaacttgctgatattgcacgatgcatagcaaatactcctctggatgaagaaagtgcattatctcaaatggttacctgcatagaagatctccaagaaattgtcaactgcaggaagcatgagtctctcacagtgcagacatttggaacacgaatagaaaaactacacagggagaagtatctgcagctctgtgactcggttgatatggacaaggttgattcagcaagcaccataatggatgaggaagacaacgttgttcgtagcttgcgcgcaagtcctgtccatccaatcaaggatcgcacttcaattgatgactttgaaatcatcaaacctattagccgtggagcatttggacgtgttttcttggccaagaaaagaactacgggagacctttttgctataaaggttcttaggaaggcagatatgattcggaaaaatgctgtcgagagtatattggctgaacgtgatatattgattacagtcaggaacccttttgtggtacggtttttctattcgtttacctcacgggacaatttgtatctggtcatggagtacctgaatggaggggacctttactcattactgaggaatttagggtgcctggatgaagacgttgttcgtgtatatcttgcagaagttgtactagctttggaatatttgcactctatgcacatagtccatagggatctaaagcctgacaacttgttgatagcccatgatggacatattaagtggggcttcactgtatggagatgatgagcctcagatgaatgaattcgagcaaatggatcaccgagcacggagacaaaatcgttctgctgttggaactcctgattatttagcaccagaaatcattttggggacaggacatggttgcagtgcagattggtggtccgttggtgtcattctatttgagctcattgttggcatacctccgttcaatgcagaacacccccagacaatttttgacaatattctgaattacaaaataccttggccgcatgtcccggaagagatgagttttgatgcacaagatttaattgacaaattattgaccgaagatcctcatcaacgactaggagcaaatggcgcctcagaggttaaacaacatccatttttcaaagacattagctgggatacccttgctaggcagaaggctgcctttgttccctcctcagataatgcatttgatactagctacttcaccagtcgctattcctggaatccatcagatggaaacatatatgaagcatacgagtttgaggattccagtgataatggaagccttagtggaagcagtagttgtctgagcaaccgccaagatgacatgacggaggacagcgatggcctcaatgagtttgaatctagtgcaaatgtcaattattctttcagcaacttctcgttcaagaatcatgcttccatcaattatgatatgttcaccaaaggattgaaggatgatccaccgccaagaactgaaacgtagcaatcaatccaaatttggactctcatccgagtaatcaaacagtctacaaggtgctcgcgcgatgtaggtcttgtacatgtaactaggcattttcactcttatatcacctcttctattggcacctggttatctataacaatgttatagttgttactgtcacttgtgcagatcaaagtgtgaggcatggtctgttccaattgaggctgttcctacatctcccggagccgagtacagttttgctgttaccttgttttcatgaccaattgacatgccatcatcagtgaatcacccttgaccgaattgggcagagcgctgtctttttgttcccctttgcttttttttttaaaaaaatcagtccattatgagccttgggtttgcggagattggcccaggttactgtattcagaatacaacccctgaagatgtaggtgggttttaggaaattgccattctggcatttatagttgacgatggtttgttaagctggtagcccgctggatttcctgcggccagaaatgttcacagcattttttatggccatgggatacatcattttgctaaatgtgtccagtgtcccacagaatctgggacattataagaataggaaccgattgaggctggtgctgtttgtttcaacagagagtacgggaacggtaaatgcaactagcaaacggtgataattgttgcaaaggaataaaaacgctctctgtttggttcagctttgggagcgcagcgtccaaatagttgccgctgagactgaaagtttggctactgtatttcaaaatactctttttagtccatttagagtagggatttagaatagaatgagc

SEQ ID NO: 28599 - DNA, 1811 bp, Zea Mays
gtgaatgagctttgtaggagggggaatgagaaagacacgtgatagccgggaatggaaatgtgaatgagctttgcagggagggggaatgagaaagacatttgatagtcgggaatggaaatgtgaatgagctttgcagggagggggaatgagaaagacagacaactgagtctaccccttaccgtcttaataggtagtacagattatttttgataatatagagtgtcatgaaaatcaactagtttctataaattagagtcgcatatttctattcaacttttttttaccacaatcgggtgaggggcgtccattgcgagttgcgactgcgtcgccgattcccctgccggcatgtccagtccgcgccctcccctcggccggatcctccgcctcgccgtcgccgtcgcggcctgcgcctgctttcctagccccgtctccggcatccgcagttgaaggttccttgtacataacgccgagtacttgcaccactgaggattcacttggtcacgggttgggacctcatgcttgattctagtattgacgtgtgctgtgagggcagaaggaagggcattgactttattcaaccaattgtgtgcagaagcactgttcaggggcggcatctgatctctgatgataatggttatgtatgttctgcactttcaatcaatccatggtctcactgctgcccaacaacaggggaccgcttttcctgccagggctgcgaacttgatttacagtgctgcaattcatatgaatattgtgtttcttgctgtttgaatccttctaagatcaagaaagaagacgtgctgaagctgaaggtagctaagccagttactgctggaacatacacaaatgttttcgatttctgcatgggacgatgccgccatagctctgcaagtgtggttcatgaaaatgcctatgccagtgatttccatcactgtttttcagtgcaacaaaattcatcaggatcaactgagtctagttctgtatcaaagttgttgggcattaacgttgtagtaggaagttaggcccagggaatcttgcagcttggtgtgcaaagtaagaggacagtcctgtgttccaagcaggctctctgtgttgaacaaatgtgagattttgcagaaatatatgagatgcaagagtggctgctttcccagccttggaccagatcaacctgctgaagttgttgacgaagctccaaccagcttgaatccaggagcatgcttatacatgcagatggatgagcggctcacatgtgatggttcgcaccatcatacccggcggctctgtccatgcgcctgagaaggggaaatgaatgtgacactcataagacagcagaggggtagttttctctgaaaaactttctaccatgttttaggttcatttaattgccaactgccaagatgtggacaacgttggtttgcagcttgctcactcgacaggaaacaagtggaggcgataagctgataaccgatggttctccatcacacccccatgacgaacaacctctccacgcaccggttgcgggtttcctcaacaagaacgccctactctcctcctgtttctgggaaggattatggatgcaaaatgaaatggagtgcctgcaaagatctgctccggttcttgagaagcgtcgtggatgcagaaggagatgcaatacctttcaaatccttgcatggtatctgatataagacatgtggcgtgagaagtgataaaatggttttttatggagatatatactcgaacgtgtcttgtaaggacggcaggacgcaccgtctctcctgagttataggtacctaattatgactgtggtaaac

SEQ ID NO: 28600 - DNA, 1412 bp, Zea Mays
tgggcgagattctgtagctgcaaggttttgctctgccgtcgacgacgatcatgccatgtgctgctcgggtaggcgggctattactcagtctctgcttctgctcctccgtctgctgatgctctccatactccaggacagaactccaggtctgtcatgaggagaggcagttctcatttacggcttgcgtggcccgtcatcctttctggggctgcttttactgctttatcgaaaaggctggagtttttgttgcccttcctttgcaaagacagagtaggactctagctactagtgtcggctatcaatgcctggttgttggtgagttgcgaatgggtttttatttggcttccaggcgcatctgtggtttaactttggttatgttttttaatgggttccttttcagaacctgaatattcggtgcagtcacaatgtctgaaaacaacatacaagaggtgcgtataatgagtgcgggtttcgacaagcagatattggctcagaagctttcgaagcttaatagctcacagcagaccatagagactttatcacattggtgtgtctttcatcatcgttgctgccaacaagttgtagaaacatgggattctgagttccatgcagctcctgtagagaggagggtatctttgctgtaccttgcgaatgatattatgcagaatagcagaaaagaaggtaatggatatatagctgaattcatgagggtcatccctgctgccttgaatggagtgttgactgtaagagatgattttgggcggaatgtcccaaaaagactggccgactacagtatcaagcatgcttgttgttttgcttcaaaccaacacagaagcatggaagctgaaaactcattgacaacgaatgtatgaggcacttagggagtcaggcatcttctgcagtggggtgtctgcgccgacggggctataggctaccgtcggcacacatcaagatcgtgaagcattccatgggggagatcgtggacaacaacaacaagatgatctcaagtgaggtacccttggtgttctccaaggcatcgtcgagtttatgtcgtcatagcagacaacactggtttagacatgctgtctagactgtgcacgacaccgacctcttcaacttactcatccatgtcgtcatagcggacaacgcgtgacaagctaagtgaggtgagaaaaacttcgatgttgatagtgtgcaaattgtcgtgaagtttgcaaagtaccagcggttccatgcgtatttgtcaccaatctctcaaggattctagcggcttgtgtggacagccgtggatgagcctgtcgacaatgcaattgttcggtgagatccaattgaggtgtgtcgtttctctataagaagcttcgtcattgattgatgtcacaattggggctgtctacacacaacgattgtctcgc

SEQ ID NO: 28601 - DNA, 2317 bp, Zea Mays
cccatgttcgcatggtcacgcccacggccgcaccaaccaccagccccgatttcctcctcaatcacacccccaaaccaaaacccaaacagcacttctcctgcaatcgccgacgtcgacggaggcttcgccggccggagcagcgccgacggttgttttgcccctccctcgtccggcccagcagcccaggcgagcatgccttcgattgcgccaccgtcttcctccgtcgctgccctcacccgccaaccggtgcaattcttcaaagggtgcagtgtatccaaggagacaaagggaccggtccgcagtttcttcactgcaaattcaaagagcaccacggtgaaatcagcggacttgaaagtagcatcatccttcaaaaatgatggtggttatccagctggcggtgtctcttggaaggacgacactctattgccaaaaagcacaaccattcgtggccaggaccatccggttgctgaccctgtactcccaatggattccatgattacgccagaaatcctctctgctaatgtggaacgtgttatagacatgtttgcagacgatgacactgatactgaacttgatttggatagcccgacagaggacttcacatcaattgcagaagccattgaggacatacagcaaggaaaacttgtgattgttgttgatgatgaatcaagggaaaatgaaggagatctgataatggctgcctccttggttaccccagaggctatggcttttatagtaaggcatgagacaggaattgtttgtgtcagcatgaaagaagatgatctggaaagactgagccttcctttgatggttaccacaaaagaaaatgagaagctatgcactgctttcactgttacagtggatgcaaaagagggcacaactactggggtatctgccaaggacagggcaaaaacagtcatgactcttgcatctcctgactctaagcctgaggacctcaaccgccctggtcatattttccctttgaaatacagagaagggggtgttcttaaacgggctggacacaccgaggcatctgttgaccttgccatgttggctggattacctcctgttgctgtcctttgtgaaattgtggatgatgcagatggttctatggctcgcctaccaaagttgcatgtctttgctgaaaaggagaacttaaagattatatctattgctgacttgattagatgagttgaattaccaaaacttcagcttctggtataggaggaaaagagacaggctaattgaacgcgcttctgttgcacgcttgcctttgaaatggggcaatgtccatgcctattgctacaaatctgttattgatggcattgagcatattggcatgatgaaaggtgatattggtgacagccaagacattttggtgagggtgcactctgagtgcctcacaggcgacatttttggatccgcaagatgtgattgtggcgaccaacttgcgatggcaatggagatgattgagaaggctggaaggggcgtattagtctatctccgtggacatgaaggaaggggtattggtctgggccacaagcttcgtgcttataacttacaggatgatgggcgtgatactgtggaagctaatgaggaacttggtcttcctgtggactcacaggaatacgggattggcgcacaggaaagttgtatcatatatctttctagagcttcaacatgaatttacttggaggcactgaagaatttcatgcctgttgcagcctgaaactgtgatgtacatagaatgaagtaaccctatcatgcagtgagtaggccactgacatttcagtactctgcagatattgcgggatctaggagtccgttcaatgaagctgatgactaataaccctgcgaaatatagtggtattaagggctacggattgagcattgcgggcagggtgcccttgattacgccaattaccagtgagaaccgtaagtacctagagactaaaagaacaaagatgggacatgtatatggattggccaatgcgcaggccaaccaagcaaataaatggcagccagagcacagaagagaatcattaggcccccaagcatgtttccattattattccagcaatccagcttcgtggcacaaaagagtgatatgattcttcgtttggggagttcctgaaatcttctccccctatatttccgtagattctttcgcaaaaaagccgatatttcggtagatcgatttcttcaattgtaacggtaggttttaaggtggctaatctctactacttattaagttagcaatagtagcctgcctttttgtgttctgccgtgtagtctctgacaggaaataaaaaaacta

SEQ ID NO: 28602 - DNA, 6727 bp, Zea Mays
tttgtctctgcccacggtccaaccgaaggaaaaaaaagtttgaaaatcaaacacctttcattccccccatccctcctcctgctcatcactgctgctctctggctgctccctctccctccatccccactgctgctctcttgccaaatctgatctagggtttcgttccatctccacgcgccgtcccagtacctatctactctagactactacagtatccaaaaggcaagcttatctgcggagggagtgagctgacgcattcccgtgctggcgagggacagccagacccagacggggagatccgatccgattccgtgctagctgctgcggagtgagtgaggtgacgcgggagcgggatggcggcgccggggcggaggacggcggacgtgtcctcgtcctcgcccgccccctcgccgtccccttccaccggtaggcgcctcctgcgcacgcagaccgtcggcaacctcggcgagtccatcttcgacagcgaggtcgtgccgtcctcgctcgtcgagatcgcacccatcctccgcgtcgccaacgaggtcgaggccaccaacccgcgcgtcgcctacctctgtcgcttctacgctttcgagaaggctcaccgcctcgacccgacatccagtggccgtggtgttcgtcagtttaagaccgcacttctgcagaggcttgagagggaaaatgatcccacgctcaagggaagggtccaccagagcgatgctcgggagatgcagcgcttctaccgcgaatactacaagaagtacatccaggcactgcagcatgctgctgataaggctgaccgagcactgctcactaaagcgtaccagacagctgctgtcttgtttgaggtcttgagggccgttaatgtctcgcagtccgttgaagtcgatcaagcgattttggatacacacaataaggttgaagaaaagaaaaagttgtacgtaccttataacattctcccgcttgatcctgaaagtactggtcaagccattatgcgatatccagagattcaagctgctgtttatgctcttcgcaatactagaggtctgccatggccaaaggaccaagacaagaagcctggcgagaagaatactgggaaagaccttctcgattggcttcaggctatgtttgggtttcagaaagacaacgtgtccaaccaaagggaacatttggtactgttgcttgcaaatgttcatataatgaaagtacccaaggttgaccaacaaccgaagttggatgacaaagctctggatgctgtaatgaagaagctgtttaagaattataagaagtggtgcaagtaccttggccgcaaaagcagcttatggttgccaaccatccagcaggaagtgcagcagcgtaagcttctttatatgggcctctacctgctgatttggggtgaggcggctaacttgagattcatgccagagtgtatttgttacatctaccatcatatggcttttgaactctacggcatgctggctggaaatgtgagcccaatgacgggtgaaaatgttaaaccagcatatggtggtgatgaagaagcctttttgattaaagttgtgactccaatatacaaagttatagagaaggaagctgaaaggagcaagaccatgaaatcaaagcactcccattggagaaactatgatgatctgaatgagtacttttggtcagttgattgtttccggctaggatggcctatgagagctgatgctgactttttcaaaactccaaaagatgcttatctgaatcttttgaatggagagaacagatctgcaggtaatacccattggatgggaaaagttaattttgtggagatacgttcattttggcacatattccgtagtttcgacagaatgtggatcttcttaatattgtccttacaggccatgataattattgcttggaatggtggaacaccaagtgatatttttgatgctggagtatttaagaaggttttgagcatatttattactgctgcaattttgaagttgggtcaagcaatcctagacctcatatttggttggaaagcaagaagaaacatgtcatttgcagtcaagctgcgatatatcttgaagttaatatgtgctgctgcatgggttgtgattttacctgtgacttacgcgtacacttgggagaatcctactggacttgcaagaacaataaaaagttggcttggtgatggtcagaatcagccatctttgtacatattggccatagtgatatatatggcaccaaacatagttgcttctatgctatttcttttcccatttatgagaagattcttagagagttcaaatgttaaggtcataacgatcataatgtggtggtctcagccccggttatttgttggcagagggatgcatgaaggtgcattctccctcttcaagtataccatgttctgggttcttcttttagcaacgaagctgactgtaagcttctatattgagatcaaacctctggtacagccaaccatagatataatgagggaacctatcaggactttccagtggcacgaatttttccctcatggaactaacaatattggtgttgttatatcactgtgggctccaataattctagtatatttcatggacacccaaatttggtatgcactgttctcgacattaattggtggtatctatggggcttatcgtcgtcttggtgagatacggacattaggaatgttgagatctcgctttgaatctttgcccgaggccttcaatgaacgcttgattccttctgatgcaaataagagtaaaggtcttcgtgctgccttttcaagtagacccaagttttttaggcttctggtgacgaaagacagaaagagaaaagagctgcaaggtttgctcaaatgtggaatgtcattattacaagtttccgtgaagaagacctcatagacaatagggagatggatctgctactggttccatactgtaaagaccgtgagctcgatatatttcaatggccacctttcttacttgctagcaagatcccaatagcactggatatggcagcagacagtggcggaaaagaccgtgatctgacgaagaggataaaatcagatccatacttttcctttgctatcagagaatgctatgcttcattcaagaacatcatcaatactttagtgtttggtcagcgggagaaagatgtcctagcacagattttcgcagttgtggatcagcatatagaagatgaaactctgataaaggatctcaatatgaggaaccttcctgcactgagcaagaagtttgttgaattacttgaattactgcaaaaaaacaaggaggaagacttgggtcaggtagtcattttgttccaagatatgcttgaggtggtcacaagggatataatggaggaacaggaccagctcggcacactgttggaatctgcacatggtgcaaatagtagaaaacatgaaggaattacaccgctagatcagcaagaccagttgtttgctaaagctattaagttccctgtggatgaatcaattgcatggactgaaaagataaagaggcttcatcttctgttaactgtgaaggagtctgctatggatgttcctactaatcttgatgctaggcggcggatatcattctttgcaaattctttatttatggatatgcccaatgctccaaaagttcggaacatgttggccttctctatcttgactccttattacaaggaagatgttctgttctcattacaaaatctagaagagccaaatgaggatggagtttccattcttttctacttacaaaaaatttacccagatgaatggaaaaatttcctcgaaagggttggctgcaagaatgaagagggactccgtgaagatgaagaactagaagagaagcttcgtctttgggcgtcgtatagggggcagacattaacaagaactgtaagagggatgatgtactatcgaaaagctttggagcttcaggcttttcttgatatggcggaagatgatgatcttatggaaggttacagagcaacagaagtaatgcccgaggactcgcaattaatgactcaatgcaaggctatagctgacatgaagtttacatatgttgtctcatgccaacaatatggaattcagaagcgttctaatgagccttgcgcacatgatattttgagactaatgacggaatatccatcacttcgggtcgcctatattgatgaagttgaagcgcctagccaagatagaaacaagaagattgaaaaggtttactactcagtgttggtgaaggcttctgttacaaaacctgatgagcctggtcagagccttgatcaggtcatctacaagataaagctaccaggtaatgccattttaggtgaaggaaagccagaaaatcagaaccatgcaataatattcaccagaggcgaatgcctccaaactatagatatgaatcaggagcactatatggaggaggctttgaaaatgagaaatctgctgcaagagtttgagaagaaacatggagtgagatatccatcgatacttggagtcagagaacacatatttacgggcagtgtgtcatcccttgcatggttcatgtcaaatcaggaaactagtttcgtaacaattggacaacgagtgcttgccaatccgttgagggttcgttttcattatggtcatcctgatatcttcgatcgccttttccacattacgaggggtggtgtgagtaaagcatccaaaattatcaatctcagtgaggacatatttgcaggattcaattccacattgcgtgaaggcaatgttactcaccacgagtacatgcaagttggcaagggaagggatgtgggtctcaatcaaatatctctgtttgaggcaaagatagcaaatggcaatggcgaacagacgctgagccgtgacatctaccggctgggtcatcgctttgatttcttcagaatgctatcttgctactatacaacaattggtttctacttcagtacaatgattacagtgtggactgtatatgttttcctctatgggcggttatatcttgtacttagtggacttgatgaagcgctggctactggaaggaggtttgtgcacaatgcacctctccaggttgcgcttgcatcggagtcttttgtgcagcttgggtttttgatggcgctacccatgatgatggaaatcggtttggagagaggattcagaacagcattgagtgacttcatactgatgcagcttcagttggcctcagttttcttcacgttctcattgggaacaaaaactcattactacggaaggacattactccatggaggagctgaatacagagccactggacgtgggtttgtggtgttccatgcgaaatttgctgacaactatcgactctattcccgtagccattttgtcaagggcattgagctgatgattctactagttgtgtatgaaatatttagccagccatatagaggggctgtaacttacatcttcatcaccgtgtccatgtggttcatggtgggcacttggctctttgcaccattcctgttcaatccttctggatttgagtggcagaagattgtggacgactggaccgattggcacaagtggatcagcaatcgtggaggtatcggtgtagcaccagagaaaagctgggagtcatggtgggaaaaggagcaagagccccttcgatactccgggaagcgcggtactgttgttgaaatactgcttgcgctgcgtttctttatctaccagtacggacttgtgtatcatctgaatataacgaagaagataactaaggacaaccagagtgtgctggtttattgcttctcatgggttgtaatttttgtgattttgctcgttatgaagaccgtatcagtgggcaggagaaggttcagtgcagagttccagctagtgttccggttgatcaagggtctgatatttataacatttacagccatcgtggtaatcctaatagcgatccctggcatgacggtgctggacatatttgtttgcatccttgctttcatgcccactggatggggtttgctgctgattgcccaagcgatccggcctgtgatccacaagactgggctctggggctcgatcaaggctcttgcccggggctacgagatcctgatgggacttctcctgttcacgcccatcgccttcctcgcctggttcccgttcgtgtcggaattccagaccaggatgctgttcaaccaggcgttcagcagaggtctgcagatctcccgtatcctgggaggacacaagaaagaccgagggacccggaacaaagaatagggctgggctgctgctgattcaaggtttgtgtgcgccactagtatttatgtgtgaatgggtgggtagcatatggctcgagagtatctcctgaatggagattgattgatcctgaagagtagaagagactcgagtgatgtaagatgctgcaggcttgttgctttgttacctaggcgttaggcagaacagatgttttcaggatctctggcctgttaaccacatcttcccctgttcagagtgaattaattcctaatggaaactgatttgtgaattacttcctaatagaggagtgcttccaaactgatttcatgtgtgtgctgtgatattgtttagcatatagtattttaaatgtagctttgaattttcattctttcgcaacaaaaaatgaataggacaagctggtcaaacttgaaaaaaaaagttaaacgggttataatttgggacggagggagtatgatttgagaacctcatcaaatagtcttgcca

SEQ ID NO: 28603 - DNA, 220 bp, Zea Mays
gttgtcagcaaacatttttcaaagaaccttctaaagaggtgtatcctatttatgtggtgaaataaatccacacaccttacctgccatatgtcattgttgagctgatcagcaattggagtcatgtgataagcttaattgaccttctatttgtcatgatcttcacaatgaacaaggtaatcagctcggctacattatatttgcagcatggtctagccaaagg

SEQ ID NO: 28604 - DNA, 534 bp, Zea Mays
gccctagtttccaatggtttgccttatgagtgggattataccgttatgacatgagcttagaagtgctcaccctgaccgtcctccaaaactagttccttgctgattttaatgcttcaagcctcctccatgctagatctctcatgtatcaagttaaactcattagttgacatagttctgtgtgtattcggttgtgcccgttggctgtgaattgtagctaaagcaaagttactaagcctagagtttaggatgttgatagtctgatgctcaacatgtccatggtttcttttcaatttagtcggcatagaatgtactgtttgtagcaatgtagtatgtagcttgttcccagtatttaagctccggaacatggagagcggtagagattcattgtatgtaactgttgctggtgcattgcaattgctattcaacttgtattgtcaaacaatctgaaactctatggcctccttgtaccctgccttcgtattgtgtgactttgtgtttccgtactagctgaaagaggaagataaatgactgcca

SEQ ID NO: 28605 - DNA, 1987 bp, Zea Mays
aaaaaaagcaccgagaaatctagtggtgcagcgaccgagcgaaccctccccttcctccgcctcccattcccaaaattttcaccgcacgccctctcgctctcctcggctaaccgcgacgacgacccccgaagcttcgcgaagcttcctgggcctccccccgcggccgcccctccctagatcgccgcctctggcagcggcgaggctgcatcgcgagggcggtggaggctggaggagccgggccacggggtcgacgaaggcgagactagggtttgggtttggtgtccagctgcatcggtcggcgccctgtgagggagaaggatgcatatgatgcggcggctcaagagcatcgcctccggccgctcgtccgtctccgatccgggtggtgactctggctccaaaaggccaaaatttgagcaggatggagcaggggatattgttattgagccacacttaactgaggccaagcctgtccggatagaccaagaatcatcatcatcatctaatagggatgctgaggcaagcacatctactagcatgaagcctgttaaaactgaagaaccagtagcagatcttcttcccaaagaattgaatgatatgacaattagtgacgataaagctgatgaccataatgataaggaaggtgaaggtgttactcttgatgggaatggagccgagacaggacagataattgtgacaacaataggaggtcataatgggaagccaaagcagaaggtctcatacatggcggaacgggttgttggtactggttcgtttggtatagttttccaggcaaaatgcttggaaactggtgagacggtggcgataaaaaaggtgttacaagataagcgctacaagaatagagagctccagactatgcagttgcttgaccacccaaatgtagttcagctgaagcatcacttcttttcaacaactcaaaggggagaagtttacctcaacctagtacttgaattcgtatctgagacagtttatcgtgttgccaaatactacaaccggatgaaccagcgtgtacccatattatatgttaagttatatgcatatcagatgtgccgtgcccttgcttacatccatcgtgttgtcggtgtgtgtcaccgtgatattaaacctcaaaatctactggtcaatcctcatacacatcaacttaagatttgcgattttgggagcgctaaaaaattggtccctggtgagcctaacatatcgtacatttgctcgcggtattatagggctcctgaactaatatttggagctacggagtataccactgcaatcgatatctggtctgttggctgtgtagtggctgagcttctgattggtcagcctttgtttcctggtgaaagtggtgttgatcaactggtggaaatcataaagattttgggtactccaacaagagaggaaatcaggtgcatgaatccaaattattctgaattcaagttccctcagataaaagcccatccatggcacaagctttttggtaagcgcatgccacctgaagctgttgatctcgtgtcaaggctacttcagtactcaccaaacctgcgctgcactgctgttgatgcttgtgcccatccattctttgatgagctgcgggaccccaaggtctgcttgccaagtggacgaccgctgccagcgctgttcgacttcacagcagccgaactcgaagggctcccaatcgagcttgtccatcggatcgttcctgaacacatgaggaagtgaaccggtggtggacgtgctggagagatccctgtttcgtgagggcatgctatggaggagcgatgtagctagcgaacgccttgctagatgtaaagagggctgaaagttccttgattgggcgtgtcaccaaggttcatgctgaacaagagaattcagagtgctgtgctgtgcttgcttcgttagctggagatcaacaggatgtcagttttgatctgcttgcgcgtggtttcttttttttttttacgtcatcaacgacact

SEQ ID NO: 28606 - DNA, 5225 bp, Zea Mays
atttaatctgggccttcagtttactcaatttgtcttttaccacatcaatgaaaaagttcaacgagaaattaaataagccatcaggcttctgaggaacaggagcagtttgtggaggtataaacaaaatcaacctccatgattaaacaaaagttcaacgagtaattaaataagcgcccgctgggtcgttcgttgccagatcatgtttttcaggtctgtctacctccatgattattaaattttttttcgagcgatcccgattccaacaggggacacgagaacggctttcgaggctaggcatgtggtttggaggaataatctcacgtggtaccacgctttggaggggcacacgagatgcggtcgtgcgtgcagatgggtttcacatggcagcggtttcctggtctgggccagctcgatcaccgagttaagaagctgactgaagccacaagccactgaggcaccaaagaatacgcaaagctctctgcagacctgcagtctgagctacactcattcaaagtttcggctaacaaaaacatttggaggttgcacagaacaacacatcatttggtcagatcccaaggtttctactatcatgaaagctagaacagatgcgttttcttttttgcttttgtcatgcttatcaatttcttccttggcatctggtattttctttgctggataaatttactttccctgcctcttcttaggggaactctatttacaggaggctggaaactagtctgtacaagaacgaagcagttaatctattcttctctgataccagcgcttggggtacgagcaaggaagggacttcaagaaatacgggtgggatggaagttgccttggtatcaactgtattgaaggttttggggacgaagttagctcctcttgcactcaaagagttgagctctaaagcaggtgtggccaaagatcttcaggaactccaggacctagttgaggagatcaacaattggttgcaaacagttggtgataaagaccgatcatctaaatggctcaaaaaattgaaagaagttgcttatgatgctgaagatttagtccatgagttccacatcgaggctgaaaaacaagacagagaaattactggtggcaagaataccttggtcaaatacttcatcacaaaacctaaagcaactgtgactgaatttaagatagctcacaagatcaagaaaataaaaaacagatttgatgcaattgtgaaaggaaggagtgactatagcacaatagcaaatagcatgccagtggattatcctgttgagcatacaagaaagacaattggagaggtgccattgtatactattgtggatgagacatcaatatttggcagggatcaagcaaagaatcagataatatctaagctgatagagactgatagccaacaaagaataaagatagtttcagtaattgggctaggtggctctggtaaaactactctcgcgaaacaagtatttaatgatggtaacattataaagcattttgaagttatattgtgggttcatgtgtcaagagaatttgctgttgaaaagcttgtggcgaagttgtttgaagccattgctggtgacatgtctgaccacctcctattgcagcatgtgagcagaactatctcagacaagttagttggaaagaggttcctagctgtcttggatgacgtttggacagaggatcgtgttgagtgggagcgattcatggtacatttaaagtgcggtgcacctggaagtagtattttactcactactcgtagtagaaaagttgcagaagcagtggattctagttatgcatacgacctaccactcttgtctatggaagatagctggaaagtgttccaacaatgttttggaattgccatgaaagctctagaccctgaattcctacagtccgggatagagattgtggagaaatgcggaggtgtgccccttgcaattaaagttattgcaggcatcctccatggaatgaaaggaattgaagaatggcagtccatatgcaatagtaatttattagatgtccaggatgacgaacatagagtatttgcatgcttgtggttgagttttgttcatttaccggaccatctaaagccttgttttctacactgctctatatttccaagaggctatgtaatcaacaggtgtcatttgatttctcaatggatagctcatggcttcgtcccgacaaaccaagctcgacaagcagaagatgttggaattggctactttgattcccttcttaaagtggggttccttcaagaccatgatcgagaccaaatttggtccacaaggggtgaagtaacatgcaaaatgcatgacctggttcatgatctcgctagacaaattctacgggatgaatttgagtctgagatagaaacaaacaagcaaataaagagatgcagatacctatctttgacttcatgcactgggaagcttgataacaaattatgtggcaaggtccgtgcactctatgtttgtggccgtgcactcgaatttgacaagacaatgagcaagcagtgttgtgtccgtaccattatattgaagtatataactgctgactcattgcctctgtttgtgtcaaaatttgaatacctggggtatcttgaaatatccgatgttaactgtgaagcactaccagaagctctctcgcgttgttggaacttgcaggcccttcatatattaaattgctcaagacttgcagttgtacctgaaagtatcggcaagcttaagaagcttagaactctggaactgaatggtgtttctagtatcaagagtttaccacagtctattggcgattgtgataatcttcgaagattatacctagaaggttgtcatagattcgaagatataccaaattccttgggaaaattggaaaatttaaggatacttagtattgttcattgctttagttttgaaaaactttcgccatcagcatcatttgggaagcttttgaacttacaaactatcacctttaactgttgcttcaatctccgaaacctacctcagtgcatgacttctttgagtcatctagagatggtggatcttggatattgttacgagcttgttgaattgcctgaaggcatagggaatttaagaaaccttaaagttttgaatctgaagcaatgcacacaattgcgtggactaccagctggttgtgggcagctaactcgtttacaacagttgagcttgtttgttattggagacagtgccaaacacgcaaggatctctgagcttggtaatcttgataagttggatggtgagctgcagattaaaaacattagatatgtgaaagatccaagtgacacagacaaagttcgtttgaagaaaaagattggcatccggaaattgtcgttggattggtattcaagattggaggttcagcctgatgatgtggaagaagagttatcattaaatatggagaaggaattgcatttgctcgacagtcttgaaccaccatcaaaaattgagaagctgagaattcgtggctaccggggttcacaattgccacgttggatggcaaagcaaagtgactcttgtggtccagcggatgatacacacatagtaatgcaaagaaatccatctgaattctcccatctgactgaattagtactggacaacttaccaaacttggagcaccttggggaacttgtggaactgccactggtaaagatccttaagctcaaaagactgccaaagttggtagagctgcttacgaccacaacgggggaggaaggagtggaagtgctatgtcgtttccatcacgtttccactctagtaataattgattgccggaaacttgttgtgaagccgtactttcctccgtccttgcagagattgacactagaaggaaacaatatgcagttggtttcttcaggatgcttcttccatccacgtcatcatcatgcatctcatgctcatggtgacgagtcttcatcttcctcctattttgcggatgagacgggtactcacctcgagagacttgaacttcgtcggttgacaggatcatcatctggttgggaggtgctgcagcatctcactgggcttcataccctagaaatatacatgtgcacagaccttacacatttacctgagagcatccactgccccaccactctctgtagactgatgataagaagttgtgataatcttcgtgtgctgcctgactggcttgtggaactgaaatctctacagagtctggacatagactcatgtgatgctctccagcagcttcctgaacaaataggagaactctgctcactccagcacctccaaataatttctatgcctttcctgacttgccttcccgagagcatgcagcacctcacctcgcttcgaattctcaacttgtgtgaatgtaacgcgctgacccatcttccggagtggctaggcgaactctctgcgcttaaaaaactcttgatccagagctgccgtggccttacatctttgccccgctccatacaatgccttactgctctcgaggaattatatataagcggcaaccccaaactgcttcagatcagtgcatcatattctaaggaagacaaggatggccaggctccgacgacattcagatcacatggcttgacaggtcgacatacaaatccccgttccatgtagtatttctgcagggacaagagtcttctctcttgaactctacagctgcaaccgttccgatgttgcaggcctgacgaccagcattgcagtgaggcccaagagttcgatctggtccggaacatgctcatcgtcgcagtagaagaacgctacaaggatgctgctcaatacagaggccaacattccatgttgcggtcaaagaaaaagaacgcgatatagcaggcccaggccgttattatgtacatccacatgtgtgccaagttcaacttgttaggtaaacgtctaagaaaacaccatgtaaatatggaggccttttttttgctgaagcgcatgaagcttcggcaaacatctaaagaacaccatgcaaatggctgtggtgtcctgcgattggtctacgcgatgtacatgtgcgcaagctgctttgaagagaatttaaccaccttgaattttaggtacccatacagttcgctcatgtattgatctggcgcaagcttcgatgaacattttttggtttcatgtggttgatatgttgcttgagccttgtcagcttgacgattttttggtttaatgtggttgatatactgctagctacatcaccgctgtttgtcttcaaatcgg

SEQ ID NO: 28607 - DNA, 3607 bp, Zea Mays
aatttaacaaattcctctcccgtcccctttcccttcggggatggtattcgtcgtcttggcttcatcctctcgcccgccgtctcgactgtagcaagcggggctgctgtccgccgcattcaggagccatgcgtgaggggatgagggagagggacagaggcgggagcccggatgcgtcaggtcctccgcccttccgcggcccggcgtacaagacgaagctgtgcgcgctttggaggggcaggggcggctgcccccgccccaactgcggtttcgcccacggcgaggctgagctccgaaggccgccccctcgcgcctccttccagcctcgcccacgacctgggctttgcatcaccttatcatcttcttctgggttttaccgtacccaaaatgttgtcgattccatgccaatttgtcggattaggttatttggatggtttcccgagcaagagacaccagtgcgctcttcttcaaagagatgcatattcggcctgtttattcatcgagttattgggatgattggttgatgactggagacacagcccaatgtttgaatgctagtggtgcagcaaacactgacagatagcaatgtgatctgaatcatatgatctcaggaggagagttagcgaacagggaagatagttgcaactgcaagaattatataatgttaacaatttgcaagtgcatcctttgaggatgtacaaatggggttgcagatgttaatggctgacaattctgggaggttttatagtttctacccgttgctgagaagactctacccttcaattgcataacagtatgatggtttggcacctgaatcttttctcagtttgtgttatatcttctcatcttatggtgcatatacaccatgattcctgtgtagtggtacttgaactgagtgcttgctgccgcagaacacaaaaatcatcaacaagcctgatttcattgcagataatcttggcattgctggttattattttgattttacaatagatatctcatggacagatttgttgagattgactgcttccagaggatggcacatcttatttccatcctggcctttgtttcagttggcaatcggtcatttatgatacttgaatgcttaacctgcctcagaagaactgaacatggaagatattatacattttatcttctcgatgggattcatgctatggtcagtgagctttaacaatgctattagaagcttttgcaactaattgaaacatgccgtttgaatacactgcatcaagctatatctgtggctttattgttacctgcacttcaagtatcatcttggaacaagatttttggcagtcatatggataacatctgatcaaatgaaattaaatttatttggtgctattcgagttttggaagattttacgtcatggtgattggaacatgacatctaattaattttggtgattccatccaaatttacttcaggtgattcgtattagaagtactggatcaattctaagtggttaatcatgataatcatgtattggcatctactctttcattagttgtattggctcgtctgtgtttgtggtctatggtgtattggtgttattgtgggccctctaatttttgagctaattgaataaccatatggctcaaggttgtggtaaggttaatgggtttctgtgttgccttgtatctatgcagccccatctaactcttgttctttgatggcataatgtttttttgggtaaatcttccaccttcctgatttgtagggagaagggattacagagatcatgagtttagactcaggcctgatagaagacactcaccccatgggaggtattcccctgaaagagatatcaggcgtcgttcatttcatgataagagaccaagttctgaagataggggatctagtcattcaagatcacctattaggaagaggtatgtaggaacgaataacaattattagggattcaagatctagtcattagaagtacttaaatttgtttattacatcgggctagtttatcttcatgtaccatcatgacttaatccctgctaatttattggtttcctaattttttatatgtgcgagctgcaatgttaagtttgtggtttatgagaccttttattctattgttcaaccatgatctaccatggagtctcattaccatccatttataactttggggtggggttgtagccgtgtagggtcatgaatgttggtatcaccaaggagggttttgatcttatgttaggcatgtgatctgtatacatgctttttttgcaagtttatggcttgcttgtgaaattgcctatctttatgtttatgttctatggctgctcagtgagagaaaacatagtaaaagtcctgatggtggagaaaccgattcatccgtaagtgttcgaagtcctgataacgaagacagaggaaaagatgaaaggtacttaagcagtgatgagaaaaatggtcatgaagatcaactgaaacaaatgcatctggacatggaagcattgcgtgaagacaaatcaaagctggagatgatattagagaagaagactgatgaagagcacaaactttgtagcagagtagaagatcttgaattgcaattgaacaaagagaaagaagattgccaaaggatgtcctccaaaaccaaaaagctaatcaaagcacatgggcgttatataaaagcacaggaggatttaaagaggtctcaggctcgctttgagaggctagcagatttgcttgcttcagatattttgaagccttgtaccaaggagcagggttccatagggattactgccaatgaagatccatataatgctaatgaaatgagcccaagtgaccaaagacaaaaccatgtttcagcatcgagaaaaagacttatttccctcccaacaagtgaagaagcaaaaactggaaagagacagagagagaatggtgatgatatgatcccaacatcagagaactatagacctgaagatgccctagaacatctccaagatagcaagggaactgatctaccagaatcatttacagtgaagaagttaagggagggtgacaacgatgatgtaggaaacattgtctcttcaagcaatatttttgcggataggtacacgggcgatgatgaggaagttgatgttgattagtgagcggatgctgtcggtggttgataatgatttgagctgtaggaagctatctcaacagacgacatggatgccagcttctaaaactacttttatgccttttgcattgggtaataggggctggtatatctggtagagctatttatgtgcttagacttgagttgtgatgctgtcaaacatatctatacttctttttcttttgtgtctcctggggctcgaagaggatactaatctgtgctcgcctcatgtattattcttagccagtatgagtattatttgagacttttggattggttgtgttattccgcctcagcctcaggttacaaaccatgcatccatatccatctacctatcaggaaatgcatgcgtgatccttaaacttaccgaaggtcttctaagtctgtattctgatactagaggttcatagagtttgtggacttatgttcaaagtgcacaaaaaatgtttacaagtttgacttgtcaacatggaatctca

SEQ ID NO: 28608 - DNA, 1364 bp, Zea Mays
gagtatcgaggtggaattggaatggcgaatttgaatgtgtcggcgttgggcgatgacccgatcagggaatggattcttacagaagggaaggccacgcagataaaagggatcaggtccattggtggtggctgcattaactccgctcagcgctatgataccgacgcgggccccttctttgtgaagaccaacagccgcattggtccagaaatgtttgaaggggaggctcttggtttgaaggcaatgtatgacacaaagtcgatccgtgttccgttgccatacaaggttggttctttacctacaggtggttcttttatcatcatggagtttattgaatttggtcgttcaaggggagaccagtcagatttgggaaggaagcttgctgaaatgcataaggctgctaaatctgataaaggatatggtttcccggttgacaatactattggaagcactccacaaattaacacttggactgatgactggattgagttttactccaagcatagattgggttaccagttggagttggcatcgagacgatatggagattcggccatactcgaaaaaggtcagcggttgatcaagaatatccgcccactttttgatggagcggttattgagccatgcttgcttcatggtgatctgtggagcggaaacataagctctgatagcaatggggatcctgtaatattggatcctgcttgctactgtaagtaaaactgactgattttagtatccgaattcaggatcatgggtagtggttgcaaaaggatgaatttacatgtctctttccagtaattttcatcgaggtattctgttctaaatattctgctgctgaagtacccacactgtgttgcatttagcaagttacaaaacaacaatcaattttgcaaagacatgattaccggttcttcaactgcagatggacacaacgaggcagagtttgggatgtcctggtgtgctggatttggtggggacttctacaacgcctattttcaggtgatgccgaaacagccagggtttgagaagaggagggacctctatctcctctaccactacctgaatcactacaatctctttggctctggctaccgttcatcagctatgtccataatcgaagactacctatatgtgctggcgatttagtctcttctgtctattcccacatggccacatggaaacgaaaaagatcttcatttgtgtaaataaatatctcactgcccatccatttggacacggttcggtggctcaaagaagaataatgtaatagtatagtggactctgattgaatttggcccgtcctactaaactaacaccaggaggcgcccgggggggctatattgttaacaacgttagtgaaaagccca

SEQ ID NO: 28609 - DNA, 1829 bp, Zea Mays
tgggcatgcatctcatgcctaccaaacgggccgtaattaaccacaatctaagccgtacccgacccgtgaccgtgagacagtgacgcgagcctgtgtgcggcccgctttcgttcgccgagtcaacaacaagaagccacgcgacgataacgcccagttcgtggaagattggaagaacactagagcgagaagcgatcagagcgaggcacggcgagggcgacgacagagccatgagttaccagaaggtcccggagtcctatccgccaccagggtactcgcagccgtacccaccgccccaggctccaccgcaggggccttactacccgccgccgcagcaaccacctccggggtaccagggctactttaacgacggccagcaaccctacggctatccgccgccgcagggtgggtattaccatcacggtcaccaccaccataacgaccaccatcaccatcatcatggtcaccaccaccaccaccacgaagatgatgactgctgccttggcttcttgaaaggatggctggccgctctttgctgctgctgcatgatggacgagtgctgctgctgctgcttctgacatacatgcacctgaagctcgctgtgtctgggcatcgtggcacggcaacatttgagtgattatggttgctggatagtgtttacttgaattttctctttgttattgttcgtaaataatctgaatagtacatcgtgttaataaaagggtatttgcagtgtttctttctgtgtgttctgagctgattggtcgtccatggaaaagacccggaatcctttcgtagatccctgtatcgttgaataacatatttgttttttttttcaataataccagttgtttccatcggatcatgagcgaggaatctaattcattcatagagcagattttctctaaaaaataagaagtaaaaagctgtgcagagatttttttttcttcggttgttatataatcacaaggtgcagcagcaagcagttccctgcattttatgagccttacctttttctccctcctgaatggaaggtaacagtgtcactcactgcatttcataacgtgctatctatcttgacaactctgcctactgcaggctgcagctgaaagaaatgaacagaacaaggggaaatagttgtccttggacaagaaacctcagccccattgcaccggatggtatggtcgaccgatcgaaagcgcgggatacactgctagctgcatctcgtcaggtccatccgtccatcctagggatcggtttcagataaggggcccgcccggactagccaaggagactgcctgtgatcgaggccacgaggcgagcaataaaacgtgcacaaggttttgcccgagccaagccaagccaagaagccacaggtgtagtaggtgacggagaggacttggtgtgggtaatggagccgtggttcatgctgattgttggggaccttcggcttccgaaggtcctcaaaaacataatttaacaatgtttctggagtaaaatacatgaacagatatcttcggactaggatcagaaccacagtatgaagcacaaagaacacgaaggttggtgcagagccgaagctatgagcaggagagcttcggcacgatagcagaaaaggaaaccgacttaaaaaggaaaaggctattcagacctcgatgggttactatagagtcattagcaaatgtaaagggcatgggtgtaattttacatgggctgagtcccgtgcctataaatagatgaataatgctcccgtactgttcacgctgacttgacatttgcttttgcgtcacgcttgtacttttatcttctttcaagccgaaggtacacttgta

SEQ ID NO: 28610 - DNA, 2288 bp, Zea Mays
cgtccgtccatctccccactcgtgcgagatagcgatgctcctgagcagaagctccaaagcctcatgatggcagcaccggccagagccggcattcgcagcagctgatcgaccgagatcggacaggcacgccaggcagctcatcaatggtgaccgaccggtgacactgagcactgacggcactcgcattgctctctgctccttcctggttggtggtgttggtgagcaggacgagcaggaggaggaagcaagaagaatcctgggagctcgcgatgccgaggtggggggacgcggaggaaggagcagctgctgacgaggctatcgcggcggcagcggcagtgaggctggccaacaagatccggaagcgccgcgcggtgtcgtcgtcggggggctcggacccggcggccgggaggcggctacggtccaggaggcccgcggtgctgctgccgcggcgccggaccagcgcgggcggggacatgtcggagtcgtcccgtggccggcattgccgcggaggcggtacccgcctcgccgacgggacatggccgtccgcgtcggcgaggaggctcgtcgacgcgttctggcaggatatggacagcgacctgcttgaaggggatgcggcggcggcggcggcgcgccggagcttggttcagtggagcggcgcctccacggagttgtcccagagatcgagaagcaagagcaagatcttggaggctgatggcaagggaagtcggcgcaacggccatgcccggtggctttcggcagatatgacgagcaacggccatgcccggtggctttcggcagatatgacgagcaacggcagcggaatggaggttggtaaattctcccaagacgatgtttcaagatgtcctgagaaaacagtgaacctacaggatcttcagaacagcttgattgcatctaaggagcttgtaaaagtacttgcccacatatggggacctggagaactgaatccgtctagtgtatcactcatctctgctctacgttcagagcttgatgttgcccgttctcatgttagaaagctaataaaagaaaagaagtctaatccctatgaaattgaggacttaaagaagcaacttgcagaagaaatggaatcgtggaaggtcaaacaaaaggagaaggttgcaaatgctctccaatttatagtttcagagctagacactgagaagaagtcaaggaaaagagcagagaagacaaataagaagttgagtgttgccttagccaacactgaagcctcactgcaggcagtgacgaaagaacttgaaagggagaggaaatctaaaggaagagttgagaagatctgcaacgagctcatcaaaggcattgacgaggacaaagctgaggtggaggcactgaagagagaaaccgagaaggcacaagaagagctccagaaagagcgtgaaatgcttcaacttgcagacgagtggcgtgaacaaagggttcagatgaagctgctagaagcacggcttcagtttgaggagaaaaatgcagctgttaatcagctgcgcgatgaactccaagcttatctggatactaggaaagagcaggaaccaatgaacgatccaatgcaactgtcccatgcgtctgaaaatggcgccaccgcagctgatgatgtagtccctgacagaaatggtggaaacttcagcgaagacgacgcatcggaaggcagtgacatacactcgattgagctgaacgtcgatggcgtcaacaggacctacacctggagctacactccttcctcgaaaggcaggcagaggagcgcatcgaggcatgaatcgttttcggatagagggatggacggcgtgaactcgtggcgtttagagcaaagctttcggggcatggatgaggagctggagggagactgggcagaagggtgtagcaacggaatactgaccatggatcacgacgaggagaggtatctggcaatcaagaatctcagagagcagatgctggccgggtcagggttcatcctatcacaaggtagagaaaatgctgaaagagagtgttgtggcttgtaagataaactgcatatgaagagaattttaaagtaatgtgtcatatgggtcgctgtttgatgctaagatccagctgttcgagaattttaaagttatgttccatgattctgaggttttgtatgtgtgttgttgtccatttaagtggccggaaatagtttataaaaaaagcgaccggaaatataaaaacaaaaggaaaacgttcatctaatgtcctttaaccattgtgtgagtccaccaacttaacctgtctgatttagcttc

SEQ ID NO: 28611 - DNA, 5652 bp, Zea Mays
cagccgccggccttcccctgccagccgccggccacctccggacgccggttcttcctcctgccggcccattcttccctcccctccatggatcctcccgcgtcctctgcaggggccgccaccaccaccgccgtcagcacaggcaccggcctgcctcccctgctcgactccctcaccggcgtgggtgcggcctttgcggccgctgcctccacaggcgcgggctcggccccccacgcggaagcaggccgcgcggccgtcgccccccacctcgccggcgtgagcgccagctccctgcctggcccacaggccgccggcgcagccacacagatcaccggcgctgctctagccagttccctgccaggcctctccgccggctttctgcccagccacctcgccggcgtgggcaccagccctatgctcggctcgccggccctcggcgccgctcccgccgcctccctgcccggcctccccgccgcctccctgcccggcctccccgcctggcttggcctcacttccacgcaggccaccgctgctctctctgcgcagcagcgcattcgtcgcccgccgtcaggcttctcagatccagcgtgggctgacaccgtcgtgtcttcgactgctactccacccacatcctccgcgcttgtcgcagccatcgccaccatccaggcagccgttgccgcttcccaggagcacgaacgcgccgcgtctcttgccttggagcaagaacgtgccatgggtgccgccctcaccgcccagatggccaccgcgcaacgtctcctcctcggtcgcagccccaccatgctggtcgcccatgacgatctcccgatcacttccgaggctccccatgtctctgggctcgacgccaccaccatcgtcgccctccacgcccaggccgtcgaggttcacaacattcggtccctttgtgtctgcggtgttggatccgacgtcctcccactaccctcgctggcgcgctcaggtgctcctcacgcttcggcggttcgccctcgccgaccacgttctctacgacctcgtcaccccgctgtcaccatcgtgggcccagatggacagtgtggtcctcttttggctcaacaacaccatcaccgtcgagctacaggacatcgtccgcgaccaggcggacaccgctcgccagttgtggctagctcttgaggaccagttcttcaggaaccgggaggcctgggcgctccacctcgacgaccagttccacctgttctctcagggggatctctccgtgggggagtactgccgccagatgaagggcatggcggactccctccgggacctcggcgagccggtcgccgaccgtaccgtggtgttaaaccttttgcgtggccttagcccccgctacagtcacctgaaggctttgattaagaggaccgtgccctttcccaccttccatgtcgtgtggaacaagcttcttctcgaggagctcatcatggagactgaggcacccgctccggccccgcccctctacagctctcctcccggcggtcaggcgccttcgagggagcaggcccctcgctctctgtcgatcggggctcctacccgccctccacccgcagtccctgcggctcctcgttcggcttccaccgccaacggaggtcgtcgctcccgcaagggcggtcgcgggggtggcggctccacccgaggtggtcccttcggccaaggtggcggccaggcgtggccatcattctacaacccctggaccaggaccatctccatgtggtcgggccaggcctctagtgcctcctatcctccggtgctggcgctcctgacagcgcctccctacggcgtgcctcccacgcctccctatggcgtgccaccaacgactctggcaccattccagctctcgccctcgtggaccaccacatcgacgccttggtccccgctggctggaggatggaactctgcctccctcgtcgccgccttcagcaccatggcgatgaccccacccccctccgactgggtggtcgactcaggtgcttcctaccacaccactcccactgcaggcacgctctctcggtcccatcccatccattcctcccacccctcctcgatcgttgttggaaacagtgccactttgctagtcacctcagtaggtgcctcggttctccctgggccgttcggcgttctcgtagcccctcacatcactcataatcttattttgtttgtcggttcaccaccgacaactcttgttccatttttgacccctctgttttttctgtgaaggatctgaccaccaggacccctctcgcccgctgtgacaactcaggggccctctacaggctctgccctaaccccaccggtgcgtctccacctcccgtcctggtctccaccacttggcatcgtcgtctcgaccatcaaggatcatgatcaagctcaccaatagtttagatctttcatgtagtgggggacattttgatggtctctgccatgcttgttagctagatcgatatacttgtctcccattcactacttctagggctaagcaggcttttgatctgggtcattatgatctctggacctcccctgtactcagtttgtctggatataaatactatctggtgatttaagatgattttcccaaaatctttggactattcctcttcggttgaagtccgacaagttcatcaccctcacacacttcgcctaggcatccacccagtttcgtcgtcccgctgtgtgataatggtcgcgagttcgacaatcacgcctcccgtgtttttttctcactcatggcgtccagttgcgtctctcgtgcccctacacctctccctaggatggtcgggccaaacatatgattcacaccaccaatatgatccgctgccttctcttacaagtgtccttgctagctactgggcagaggccctgcacaccaccacacctgctcaaccgccttccctcaaaggcggtgagccaccctactccccactccgtcctgtacagcacaacctcctcttacggccaccttcgtgtgttcgactgtgtctactatcccaacactaccatttccgctccctataagctatctcctcgctccactcgctgcctcttccttgactactcccctgaccgcagggggtatcgctgtcttgacctcgtctcacactgcatcctcatctctcgtcacgaagatgtgtttccccttgctagctcctccccacccactaatctcaactccttcctcgagtctgatctggttccccctccaccccgtcgctctcgaccactcttacccaggttcagacgccaccgctcccgcctctacccgcaccacgtgcaactcagacgccccgccttgcgccattgcccgcgccacgcgtgaccccatcgatgatgtggcctgctttgccgatctcgccctcgtctaccaccgccgtgggcgtgccactacctcgactcccactgactcggggcccgtcaacgagcgcggcttgcttcgctgatccgccgtcgtctatcaccaccatgagcaagccatacccgcggctcccgacgccccagcagcctgcaccgagcctcttgtgtaccacctggtcgccatccaccgcgactacaggcacgtccacccgatggtgactcggcgcgccgccagcgttctccaccctgtcgaggggctgatcctagcagctgatacgactgccactcctccggacgcctccccgatcccctcctctatttgcaccgccctcgtcgacccccactggcgtcgcgctatggaggagtacgcgaccctgctggccaaccacacctgagacctgatgccgtgtccaccaagcaccaacgtggttaccggcaagtggctttttcgccacaagctcacctcagacggctccctcgaccgctacaaggcccattgggtccttcggggattcacccagcgccccggagtggactacgacgagaccttcagccctgtcgtcaagttcgccaccgttcgcgtcgtcctcgccctctcttgggactgggcgatccatcagctcgatgtcaagaatgccttcctccatgacactctaatggggtttgtctactgcagccagcccatcggcttcgtcgacgccgctcgtccggatctagtctgtcggctgaaccgctccctatacgacctcaagcaggcgccgcgggcatggtacagtcgcttcgcctcctacttagcctccatcagcttcgtcgaggccaagtcggacacatcccttttcatctagtttcccactgttatgtccaatactccctctggtcataaaacatatagtttaggacaatttagttaaatctttaaaactacaaacatcaataatgtttaattgttgatttaaaaacatgcaagttatatatagatttgtattaaaaaaatcggttgaatctcataaattttaagtaattcaagaatatattgtagaagaaattagtggtcaatgatttgcatcaaagaccatgcgaagtcaaatgtgacaactacttctgaccatatgagagtatttttgtagaaaaaatcatttcaccgaaataatagtgactttcataccttaacacatcactctttttctccattttccttgtgtagatttttttctctcgaatatacaggagagttgtgtatcattgcattaagaacaaacatatagattacaattatgttttgtttgcttaaacatcacttattgttacctaaacaaccattctaggatgctttctctgctccactgctttcccttgataatgaaagaaccaataaacttctttgcatgttatgattcgtctcatggcataatcatgtgtcaacctcttattattctatggctctacacttctacctcactaggatcttttcgtactgaaattattctattcagttatgtcatttagctattgaataacatagtgcttcttttctgaaagcatcagccagcatattcctgtcatgcaaattaagttggatacaccatatctccatgaatctcggcatcgtcatgcaatgaagcgagtccgtggaccagggggcgtttcctcaacaaaaaggagctccaggagcagcagctgaaggcactgccttcacttcagactccaacaggtggggtcagcaaaatggcctttggcaggaacctatgccctgaaagcagcacatctcactcgccttcgacgagctctacaatctcgagtgcttcaaactggagtggcacgctagctcatcaagagcacgttagcttcgcatctgctaataaattcctccccagcatgaacttccacgcggagaatggaggtgaaaagatggccatcaatggcgtccgccaccacacccctgtcctgaggtgaacaacctcaactgtgggggtgctgtgctggtaccatcactggcgcgctccggtgtgcccgtggcaattcatccttggcttatgatgtatcttatagtaatttgctttcactttcatatggaacttgtctcagattaaactcggtgatatttattgcaactggatgactgaaataatctcatgtttcttacaagtgtgtgagccaagacccgtttatcttgtaaaagtttacataggtcaatgcccatttatgttgctagaaggctatctccagtagcttactcatccacatacttatattcaaacctcactctatgaatgatgc

SEQ ID NO: 28612 - DNA, 718 bp, Zea Mays
gaacaatgaataggggagaccgagctcttagccagccaatgcaactggagcaagtgttctcggaccgtgatagtgaagatgaagttgatgatgatattgctgacttcgaggatagaagaatgcttgatgattttgttgatgttacgaaagatgaaaaacttattatgcatatgtggaattcatttgttcgaaaacaaagagtgttagctgatggtcatataccttgggcctgcgaggcattctcccagttgcatggacgacaacttatacaaaatcctgctctgctgtggggttggcgtttcttcatgattaaactttggaaccataacattttagatgcccgcactatgaacacatgcaatacagtccttcaaattttacaagaagaaagcacaggactaaagtaattttgatgcttctgatgaaaattcaagggaagaagatttctttaccatttccaagaagaaagcatagaattggagtaactttttattgataatttcattcatatctattgtcaattgtattaatggtttttaaaagagacaaatcatgtctaactctcacgctgtaatattctaagtcgtacgtgaatttgatgaatattcattgttgttttacttaagagttatcgtattgagatccttaacatattattttatttttcatctaggttcttaaattataaaataatggattgagattagaaaatatttca

SEQ ID NO: 28613 - DNA, 5339 bp, Zea Mays
ctcaccccaaggagagtcgcagcgacccagccttctccctccctctctctcctctctctctcttcttgcgccgcttttccttcgctgctccgcgcggctccggcgggcggtgcgggaggaagaggagggggcggaggggccggaagttttccggccgaggagcccagcgggaggatcgaagaggaggcactggtccggggctgtccactgcatcgggttcttcgaagttggggggaccacgggactcgaagggagcgcccgatctgctccgccggcgaggtgaagtcagctgatatgatgtacctcatttggataacaatttgactggcaccagattttacagaaatatgcaggaggggctagggcaaaggatgcatgtacctcatggtatcaatctgtgtatcgcaacttcttccatgccctttcaggcgcaatctttcattgagcccagtaccggacaagtgaaccctcctgtaacatctgaaaacttatctgctaactcacaagctgttaatgatgctggagcagttgaaggtactgacatgaacgaaaaatcggttcaaaaacctaagaggaaaaaacataggccaaaggtcattaaagaaggacaatcagcaaagctgcagaagcctaaaactcccaagcctcccaaggaaaatgggaatcagcctactggaaaaagaaagtatgtcaggaggaagggactaagtgcaccagctgaacaaattccactatgtgctgatacacacactagagctaaaccaggagtagtccaaagatgtttggactttgatgtggaggaccagcatggacatttggatctggtaccgcaaacccaggaaacagagatacagactggtcctgcggacacacaaccatcaatatctggagttgaaagaagtaatgttcaaatatcataccattggggtggtacaagcagttctattagttcagttgacccaatagctggtatacacggattacaggcagactgcaattctaaaagagtcagttttgatctgaacaattctatagtaagtcagctgccaaccaattattctagtccaatggacagctctgaacaatttttcaattttgatttaagagaagaagttcgaacaaaccagttattgcctcatctaaccagctcggtagatcacacacgacacccctcggtcaattttgaccaatacataagcacatctcaagattgtccagaaaaatcacccagacattatcagatggtcagtagttatagaattctagaaaatatgacaacagcttctcagtataccgaaagggtgtctatggggggcaatttcaaccctgaagcttgtatgggcgaagatgcaataatcaaacaaatggcccaaagctatagacctctagaaagtccatttgtacctcccaatcataatgaaagggatatgatgaacggaaatctgaacgagtttcctgtgaagaatgattacttgaagttttctaccaatagtaactaccaaactggagcaggttttgatcattgttctccagactattcagatgttcttgcaatgggtacaaaaagagaacatgatgctatcagtggccatcagatttctcttggcattgactttattaactcaaatagaacaaggaagttctgtagtgatgaccccctttccactagctctcaaacatcttactgtcctcaatcatgcaaaaggatgaggccagaggatcatagcaatcagctccatggaactatgggggataggcgtttctctcgatggaaaggatcagtcgtggattcagtcgtgggtgtatttcttacccagaatgtttcagatcatctttctagttctgctttcatggcggttgctgccaaatttcctgttaagatagaggtccctaaaaaacctgtggctgagatgtctcatactcctgaacagaaggatagttgttctggactgtttggtgattctatcaaattgcagggcaatatatacattgaagagataagtgacattaaatcgttaattactacagaagataatgaagaaagtaataataacgaattgattggaaactctgctgggaatggagtaaactgtgcaactggaggatgccatgtctcttatagtaagtcactaactggatcccatggaaatgggctatcaggatctgtttttccaactaccggcttttcaggtgtggtagaaactgaagatggatcactggaggatgttatttcttctcaaaattctgctgtttcttcccagaattccccagattatgttgttcgtagaaccgatccaataggttctagttcgttacaaaatttcactgaagagggctgtattatgagaaatatgtccaatgggactggcatctctactgactatacattgtttctgccaattcaagatccaaaaggcatgctcggattatcagaatattgtggacttaatcctcttccagtttcaggtgtgaacaaggacatgttgcttgatctaaacagatcatatcagccattacatacttatatgccctatgatcagaatagtgagtctgatttcacaggtgtgtcatgtttgaaccatatgggtaaatcattccacacaggccctgataaagtgaatctttccagtgttacacagtctgaggctagtctttaccctattgatcctttagaacaaggcgacttttcaccactaattaaacaaaacttccaaccattacatagttcagacgaagtgccatttttcaaggagcactcttcatgtaatgattttttgaggaacaaaactgaagctcattttctggaaccacttgtctgttcaaatcctcaagaggtgtacacaacctcaacagatcaaatgggtgctgaacaatctcaatcaggatgtggccaaaagtacaatgatgccagagttcagacagcatcacatgaaaggcatcagtcttcaaccttgtgtgataaccagaactcttgttcggtggtgttgcaaggagttgcttcagactcaacacagaagttcgttgatactcaaaaggggccgtcaaaagctcgacaaaatggatcaaaagctaaggtacggggccgacctaaaaagaaaactgatgactgggacagtttacggaaaaaagtgctttctaatggtggggacaaacaaagaagtcatgatgcaagggatactgttgattgggaggcagttaggcaagcagaagtacgggaaatatctgaaaccatcagagagagaggaatgaataatatgctagcagaacggataaaggaattcttgaaccgattggtgacagaccatggaagcattgatcttgaatggctaagagatgttcaaccagacaaagcaaaggacttccttctaagcattagagggcttggactcaaaagtgttgagtgtgttcgcctcttgacactacatcatatggcttttccagtggacacaaatgttggtcggatatgtgtgaggcttggatgggtgccacttcaaccactgccagagtctcttcagttgcacctcttggaaatgtatcccatgctggagcacatacagaagtacctctggcctcgactatgcaaactagatcaacgtacattgtaagattagttcaatcgatacttttcgcactatatttagatggctagattcaatgacgccttccaatatgcaggttttctgcacaaaaagtaagcctaattgcaattcatgtccaatgagagctgaatgtaagcactttgctagtgcatttgcaagtgctaggcttgctcttcctgcacctgaagaaaaatgtttggttacattggaagatccaaatgttgtagagttttctcaccaaacatacataaactcagggagtgttggccaacttgagtggagtgcaaattatcctaaacatgctgtttctggtaatcatcagccaatcatcgaggaaccactgagcccagaatgtgaaactgaaaatatagaggcacatgagggtgcaattgaggatttcttttgtgaagaatctgatgaaattcctaccattaatcttaatatcgaggagttcacacaaaacttgaaggactatatgcaagcaaacaatgttgagattgaatatgctgacatgtcaaaggcattggttgccatcacgcctgatgctgcttccattccaactccaaagctcaagaatgtcaatcgtctgaggacagaacaccaagtttatgaactgccagattcacaccctcttctggaaggattcgaacagagagaaccagatgatccctgtccatatcttctttccatatggaccccaggtgaaactgcacaatcgatcgatgcccccaagacattctgtgattcaggggagacgggtagactatgtggaagttcaacatgctttagttgcaacaatatacgagaaatgcaggctcagaaagtcagaggaacacttttgataccatgccgaacagcaatgagaggaagcttcccacttaatgggacgtattttcaagttaatgaggtatttgctgaccattgctcaagtcaaaatccaattgatgtcccacgaagttggatttgggacctcccaagacgaactgtttactttggaacctcagttcctacaatattcagaggtttaacgactgaagagatacaacgatgcttttggagaggatttgtttgcgtgaggggctttgataggacagtgagggcaccaaggcccctttatgcaaggttgcattttcctgtcagcaaggttgttagaggcaaaaagcctggagcagcaagagcagaagaataatagtacattgaagaaatataggggtgctaaccagacgaggatggatagcccgaaatgagatgctgacccaataggtcgccaaatcacctccaaattctaacccaatgacttccatctgtaatgaatggcaataccttgaaaacctgtgatggagatgttttgtggcgacatgatctcttaaattagattccgtctttggtaacagcctagctgttcttgttgagtcgcatattctttattctgaagatcaatatagcaaatgggagaaaaaacatagtgcacagtcgagctgttctaattgtacctcttgtgagtggaatcagttgttgtacaacaggaagatggacctatctgtacaatggtcgtacatgttctttgatcatagtataaacaatgtaagcctcatcagccgttatttgattgtttcaaaacaaaggaaaagcattttcaattcatctgttcaaagactatttccttttccccccttctatcttgagatggaaactgactaattttttacttgtggggatctgacagtgaatatatcaaaa

SEQ ID NO: 28614 - DNA, 3222 bp, Zea Mays
cggcgccgtgtctcaaatcccgtgaagtgcctcgccgcgcagacaaaaaaaaaaaatccccaaatccccttgagaggcctgcaatttttagcctcctgaaccctgcgattggagccggcggtggcggcgccagcgcccgcggtcggatcgtcgcatggccgagattcgcaagtacgccatgtccaaccagcccccagatattcctcagatactactggaagctcagagtaggtggctgcggcccactgaaatctgccaaatattgtcaaactacaagaagttttccattgcgccagagccaccaaacagacctcaaagtggttcgctgtttctgtttgaccggaaaatattgagatacttccggaaggatggacacaactggagaaagaaaaaggacggaaagacagttaaagaagcacatgagaagctcaaagttggcagtgttgatgtacttcattgctattatgcccatggtgaagagaatgagaacttccaaagacgaacatattggctgcttgaagagggtttcatgaatattgttcttgttcactaccttgaaatcaagggtgccaaacaaagtttcaatcatgctaaagaagctgaagagactgcaggattatctaatgccgatagtcctgcatgctcaaactctttcgctagtcagagccaggtagcctcccgatctatggatgctgaaagcccaattagtggacagatttcggaatatgaagatgctgaaacagataattctcgagcaagctccagataccaccctttcactgagatgcagcagcctgtggatggtaccgtgatggaatatccaggcggcttcatggagtcgacactctattcttctgttgcaacattgggtaacagtctggaagatggtttgcagacatttatgtctgaggctctctacaccaacaatctcactcaaaaggaagttgatgcacttggtgcagcaggcataacatcctcgaagacagagaatgatggttatacagatcaaagtgtcaggtatccacttttaaagcagtcatcatcagacctctttaagatggagccagatggtttgaaaaaattcgacagcttttcaaggtggatgagcaatgagcttccagaggttgttgatttggatatcaagtccagctctgatgctttctggagtactactgaaaccgtgaatgttgctgatggatctagtatacctattaatgagccattggatgtatttgtagtcagcccctcactttcccaagaccagctcttcagtattattgatgtatctccaagctgggcatacaatggcacaaaaaccaaggtcttaattactggtacattcttggcaaaaaaagaagatgtggaaaattgcagctggtcttgtatgtttggagactctgaagtctctgctgaagttttagtggatggctccctgcgttgctatacaccagtacaccattctggacgagtcccattttatgtgacatgttcaaatagagtagcttgtagtgaagtgcgagaatttgagttccgtgattctgagacccattatatggatatctcagataagcatactacaggcataaatgaaatgcatttacgtatccgccttgataagttactttccctggaaccagaagactatgaaaagtatgtcttgagtaatggaaataagtctgagctgatcaacactatcagttcattaatgcttgacaataatttgtctaatctggcattaccatctgatgagaaggaattgtgcactgtacaggatcagaatcttgagaaacaggtgaaagaaaagctatattactggcttatccataagatacatgatgatggaaaaggtccaaatgtcctaggcaaggaaggacaaggtgccattcatttagtagccgcacttggttatgattgggctatcaaaccaatagttgcggcaggagtaaatataaacttcagggatattcgtggatggactgcgcttcactgggctgcatgttgtggaagggagcggacagttggtgccctgatagcaagcggagctgcatctggtgctttaacagatccaacgcagcagtatccatctggaagaactcctgctgatttagcatcagaaaatggtcacaaaggcattgctggttttcttgcagagtctgctttgacaagtcacctctcagctcttacattaaaagagtcgccaagtggcaatgtggaagaaatatgtggattaacagcagctgaaggttttgcagcatcaagttcttcccagcttgcttgtgttaattctcaggaagagtccttaaaagattcacttggtgcagttcgtaaatcaactcaagcagcagccagaatatttcaagcttttagggtggaatcattccacagaaagaaggttattgaatatggagatgatgattgtggattgtctgatgaacgcacactttcacttgtttcccttagaaacccgaaatctggacacggtgattcacattctgctgctgttcgtattcaaaacaagttcagaggatggaaaggaagaaaagagtttatgcttatccggcagaaaattgtgaagatacaggcccatgtacgtggacatcaggtaaggaaaaactatcggaaggtagtctggtctgttggcatcgtggagaaagtcatactgaggtggaggagaaagggaaggggtctgcgaggtttccaacctgagaaacaacttgaaggtccatcatggcagatccaacctgcaaaggctgaggctgaggatgaatatgacttcttgaaggatggcaggaaacaggctacaggcaggttggatagagcactggctcgtgtgcgttccatgaatcagtatcctgaagcaagagaccagtaccgcaggctgcaagcctgtgttaacagcctacgagagtcccaggcgatgcaggacaggatgctggctgattcagctggcaccgatgggggtgatttcatgactgaattggaggagctatgccgggatgatggcgatgccccgatgtcgactatttcttgacatggagcttactatagatcagttaggcagtgacatgttctttaccagactagatgtaaattgttgttactaaatggtctctactcaccgttgaacaccataatataatgatatataccagctaatacatggacttctacagattatgataattgatcagtataatttgtggaattattatattttaaagc

SEQ ID NO: 28615 - DNA, 3250 bp, Zea Mays
aagaaaccgcgtctacagcacagaggcggcggtgcctagggcacagagaaggcggcggcgacatctatactggctgaccggcgccattccatcggtgtccgcttctcgcaggtcatgtgtgacctgcttggtgtggttgctcgacactctcctcaattggtgatattttcttttggagcccaagttcttcgtctaaggcatgactggacatggcattttggcgacatcagaatagcacatgctgctagtgttgtttgatattagagacactttttgatttgcttgcatgttttattttcagtttgaggggcacgagtggtcggacttgtttcagtttcagaaaactagggacacttcttttagtttcagaattgagagaagtgtattttagtttcaggattcataatgatagggacacttcactcagcatatgttcggttgtgattaaaaccatggttgtggacgttctccatagcatctttctactttattttagtttcatgattcaaaatgctagtgacacttctttctatttttattttatagaaagcaacattgtacatggcaggtctatgtaagcccactaggcaacgttttacagtgttgccaggtctatgtacagccggtctctagtgggcttacagtgttgcttccttgttgaattatgttgcatatatggcggggattaaccgaacaaacattttgagacaggtatttaaaccataaagatattaaatcccaaagggattaagtgaaaaggagggatccactcaatccctccctggattagatccacttggggaattaatccattgcaaccgaacaagcccttaaggggaaccaaaatttcagaagataggtatgagagttataaactattcttggaagaaaaggtgaggctacctgcacttgtttggatctcacagcaggaaacgagttgatgttgctaatccttcactaaaataggaaaactaggcagttttctagttaaattccatcttagggataggccctttgtagttagtacttacgaatgagatggacatgcaccctttctcttgatgcacacaagatttaatggtacaatatgaatacaatatgataacttccatgacatttcaaaatatatagttccactttagtaaaatagttttggatgcatttgctacaatttactgcatattcaaattgaggctaaccttgtggcgtcgataaccttgaggctagtcttttgtatgcatttgctacaatttagtgcattttctacacaaaggacgaggaggggtgggtgctgattcacttagtggcaagcttcgactactctcaaatcatcgacatcctgcttgagcgaagcatatcttatggtgagcgtgctgaacacgaaggacgaggagtggtgggcgctgattcactcagtggcaagcttcgactactctcaaatcatcgacatcctgcttgagcgaagcatatcttatggtgagcgtgctgaacacgaaggacgcgtaggggtgggcgctgattcactcagtggcaagcttcgactactctcaaatcatcgacatcctgcttgagcgaagcatatcttatggtgagcgtgctgaacacgaaggacgcgtaggggtgggcgctgattcaaccagtggcaagcttcgactactctcaaatcatcgacatcctgcttgagcgaagcatatcttatggtgagcgtgctgagcacgaaggacgtggaggggtgggcgccgattcactccatggcgtgctccgacaactctcaaatcatcgacatccaccttgagcgatctgtattcggttcaagcggctttgatgcagctccagctgaccatcctcttgtcagtgggaatggttacgagcatacctcatgcactatttgctgagttaattggataagaggtttgcttatgcttgtatccttgatgtatgttcatatacattcgatatgtcacaaactaaactttagtgaggaaaaccaaacaccctctaaaaatgttgcaccacaagagatggttcctgcactcaatacattggaaccaatcaaatgtactaccagctgcggcaaagaagccatttgccttgctgtcgcgctagttccccctgtaaggtacaaggggatgttctccttttggagccaaaacaaactggcttcatgataatctgctatacagaaatctcacatgcaagacttggttgctaattaaattacactgtattagtgattgtttggaatcgttctatttgttagagcatctccaacaaaagtcctaaacatggtcctattttgaaatgtaggtctccaacactaaaaaaccgctccaacgaaagtcctatttcacaaaaatccatcaaacaattttaggacccggtgtcaggtcctaaatataggaccccatatgatagagccatatcctcgttttatacactatttctaacattttattttataaataacatgatctatttttttaataacatgatataggactcaactattggaactacaaatgttttttatgaccctaaatattttaaattaggtcctattttaatttttaatactcaaatgtataactccttgttggagatgctcttaccatgtttgttttgcctgtatctgaaattttagagatcgtgttttcaaattttgatcagcaaagtgtttgtatatttgagtttctgttattattttctcactaaatcgtgtaattttcttatcaatttcattatgtgtttggcattattaattccatttgagatcatttacacacctacactgtagagactggtttggtcttctgtacttcatatatgttggaattgcagcgattatagtaacgacaaggcatccatcaccagggcatgtttggaattctggaaaatatgcatggaacaacatgacaacatatttgtaatttgttcaaaccttacatcttaagaaatatgtcggtcgcggagaaggtgaggaagacaacaagagttcaattagtcgaacatgaaaatagtctaaatgcttgcgcttaagcggggaaaaacaataattcttcctattgtgatggcaaaaggtgtcctcgaaaagaacagaaccaaaaaatgttcctattgtcacggctcaacctcatagaaaatcttgagttggcgtttttaagttctatggcaacgcacgtgcacatatctagtagtctaattataaaattaattatacatatgagaactaaaaggtaagacgaacctatta

SEQ ID NO: 28616 - DNA, 1187 bp, Zea Mays
gatttaacagaacatcccatttctcgtgcggccaaggcccagtccgatgactctggccaaggcccagtccgatgactctggccctataactctgagccccatcggagactcggagtcgggggcgccagcgtctcgcctcgccgtcagcagcagcagcagctgcacctccattccacggcttccgtcgtgcgcttcgtctgcacccacaaaggcgacggcgacggcagggggaggagatgaagctgaagcagctggagggcctcttgggtggcctgacccagttctccgaccccaagctggagctggagcagtatgcgacgggccctcacatcgcgtcgcggatgctctacatgagaatagtttcaatgacataactggcaaagtggtagctgacttcggctgtggctgtggcactctggctgtggcgagtgctttactggatgctgaacatgttcttggtattgatattgacccgactatcacttgaacttgctcaagaaaatgctgctgatctggagctggacatcgatttagtttggtctgacataaagaacttaaatctgaaaggcgtccatgttgatactgttgtcatgaatcctccctttggtacacgaaggaatggagcagacatggagttcctctctatggccttgcaggttgcttctcaagctgtctattctctacacaagacttccactagagaacatatcaagaaggcagccttgcgtggcttcaatgccatcagtgcggaggttctatgcgagctgcgttacaatctaccgcggacgtacaagttgcacaagaaaaaagagatcgacattgcagtcgatctgtggcgctttgttcctaacgcccaacgccgcagctagcgcgctcgctatgggccgaggggcacaggtgatggaatggaactgaacatgaatggaaaatgatcaaatggatatgtgtctcaaaaggctggacttgatcgaagagatcccaagcgtcacgcttgctgtgcttatcgtcttcttggtgccagtaagggtagctcagaatttgacgaactgtgtagagttttgtgggcacagatgatgctcccagtagtgtgcacaatgaatgctttgtatgtattgtgctctattgcctgtgctaacgctacagaataatatttacaattaatttggtgatcagtcagtggcgccgca

SEQ ID NO: 28617 - DNA, 1671 bp, Zea Mays
cctatgcctttctcgccttctttcgccatcacttcctctctccttcgtccttgtccctgtcgtttctctctcttggccagcatcgacgacgactccatcctgcacctcccatctctggcccttttcttcgcctctccgtcccactccagcgagctgctttctcctcccaaaatataatccgatccacatgaacaataagcaccaccatcagcaagcaagcaagcagcaggataaattaacttaggagtacgtacgtgagagagaaattaaaagaaaccccaagcgcagagagagagagcgcgcgcgcgcggcagcttcagccttcagctatagctgcccttttcgtctctcctccccacatcccagaaaccattctttactcccctccaagaaaacaagcaccacacaaaccctaaagaaattcagcgcacgcagcaagcgcgcctctcatcctctccttcctcgccgtctactattttcatcatcaccgccaccacttcctctctcgcgccgccaattattaatattatcgaaagatggcaggcctggatttgggcacaagctcctacctgcaccaccaccaccaccagtccctgcacctccaccacgaagacggcggccgcccgccgggctccaagaacaagcccaagccgcccgtgatcatcacccgggagagcgccaacgcgctccgggcgcacatcctcgaggtcgccgccggctgcgacgtcttcgaggcgctcaccgcatacgcgcgccgcaggcagcgcggcgtctgcgtgctctcggcggccgggaccgtcgccaacgtcacgctgcgccagccgcagtcgtcccaggccggcccggcctcgccggcggtcgccacgctccacggcaggttcgagatactctccctcgccggctccttcctcccgccccccgcgccgccgggggccaccagcctcgcggccttcctggcaggggggcaggggcaggtcgtcggcggtagcgtggccggcgcgctcatcgccgcgggcccggtcgtcgtcgtggccgcgtcgttcagcaacgtcgcctacgagaggctgccgctcgaggacggcgacgaggtggcccctccgccgcctgcaggggccgaccagcagcagcccggtggcgtgccgtttgaccccgcggccgcggcggcctctgccgggcttcccttcttcaacctgccgttggggatgcctccaatgccgatggtcggccacggcggctggcctgctggctcccctggcggcgccggtgtcgggaggccgcccttctcttgacggatcccatagatctatcggcgaagtgcacgcgcgcgaggacgtggactacagactactacgtgtacaacacccaagtagcatctctttctctgccttccgcttcattcccttgcttgttctctcgctcttgtgccattgctgtgatctctgtctctctcatgttttttatgttaacctgtatgggacttgattgtgttaattcttgataagttgagtgtctctgttaatttgaactatgttttgtgaggacatgcattcataaattgatcaaaattcgttttagtttatgtcccggagtcaaatgctcaaggtaatttattaccataaactcttgtgctggtgggaagaaacctcagcttcgttaagttgtctgtcggtt

SEQ ID NO: 28618 - DNA, 4864 bp, Zea Mays
atgatccagtacttcaagattgctggctggtcggtggaagactcccaaattgagggtaaattccctagaaacagcaaccccaaggagattattgtaaaaattccaaacagcatgtttcttttctgcttgatcaacgattacaagatggctgttcaattctcaatggcttcgtcgcgaaaagtgaggaatgcaaataaacgctacaccaaaatcaacgaagattggcaggataaagatgagacaaatgtacataaaagtaaagtgcgaaagaaaaagttatctgacatgcttgggtctcaatggagcaaagatgagctcgagcgcttctatggagcctacagaaaatatggaaaagattggagaaagttttttttatgcccttctagacagaaccgagacataaaaatacatttagttgctggtgcaatacgtgataggacatctgaaatggtggaggctctttacaacattaataaggcatatttatctcttccagagggaacagctactgctgcggggttaatagcaatgatgaccgatcactacaatattctggatggaagtaacagtgatcatgaaagcaatgattcaccaaaagcttcaaggaagccacagaagcgtggtcgtgctaggtttcaatctgtttctaagacatctgatgcacgttatgctgatctagggcaatctcagccttcttcatcaagctatggctgcctttcgttgttgacgaaaaaatgtgctggagatctgcttgtagggaacaggcctcgtgctgttggaaaaaggactccaagagtacctggtgcaagtatatactatcgagatgacaggggtgtaacagataggcgtgcaaaaacagttgctaacaatggtgatgatgaaggagctcatgtagctgcgcttgctctggcagaggtatttcaaagaggaggctcacctcaggtttctgaaacatccaaatggtgatcacatgttcctgtctcctgttaaaagtagtgacagaaaaaatgctgattcagagatgggaagctcaaagttgcatgggtttcatttggatgctgattaccccgaaggtagcttaggaagcagggaggccgagactggtgaatattgcaaaggttcatcatttttgacgaaaaatgaaggttctggtaagcctctgaagaagggaaaaaagtctcagaagaggaggaaaaaagctgcacataaaacaggtgatcagttcgaggatgacagagaggcttgtagtggaactgatgaagggcataggtcgataaagattaaagaagactcagagctggagtcattgggatggccgtctagcacgtcaaataaaagaagtcgtcaattgttttttggtggattgctaacaaaagaacagtagcggaggcccttgagggtatggcgtggattagtgatatcagggggaccatctcttgggcagttattttcgatctcctgatcctgtgcgaagctgtcacagaagttcatctacaggctgggaccaccgacaagcacttttggagattttccacttctggccagtattctgcgaaggcagcttatgagctgttcttccttggctccactgccttcgggcctttgaaaggatttggaaaacttgggctcctgccaaatgcaagttctttttgtggttggtcatgcataacagatgctggacagcagatcgtttggcaaaaagggatctccctcaccctgcggtctgtcctctctgtgatcagcaagcggaaacaatccaacaccttctcatttcttgtgtttttgcaagacaattctggttcacgctgctgcaaaagatgggggctgccgaacctctccccagacttggatgccaccaatctggacagttggtggaatagtgctgctgagaagctgcctggagaccttcaagccggctttaattctatcgtgatccttggcgcttggagtatctggcgtccccgcaatgactgtgtcttcaatggcatgtcacctagtgtgaccacggctatcacccttgctagtgatgagctgaggatgtggagcctcgctggtgctaaaggtctcaacctgctgtcagccctggtttttgtgttcgatccagggtgggggttttttcttgagtttttgggtttttgggtttgtgtgtgagttgtgctgtgttttgtgggttgtgttctggtgaccttgtggtcgctgggctgtttgggtgtgtgtttgtgtgtgtgtgtcgtggtgttttgtactccctttttatctttaatggaaagatacgcagctctcctgcgtgttcgagaaaaaatatgtccttgttttgcatacattggctgatctatctgtgaatatcctaccaccttcatcagtaatggaatctgaatcttcagcccaaattaaggatgaaaacaaagatgttgattctgatgacaggcctggcatgcctgcggcagtatcagtgtatgagcagaaagttaactccaaaagcactgcaaggaaagttaaaaggcagcctgaaatttcaaattcagagatggtcactaggaaaaaagctaaagttactaaagatcctcatcacgatgggagcaccacttctgatgtaaagcagcaagcttgtacatgtggtgtcaaaacagagaaaaagaagaggaaatcatccacgacaaaggtaattcccaaattattatttgttgatcatttctgtaaggaaaagtatgtttctgctgaagaagggaaggtgtcgtctaatatcgggacaaccacacaaggtgatacaacacaagctgacttatcatcaaagggtaaaagctgccgtaaaataggcattcagcaagcactaattgaagaatgcaaatcaaccaaggttgccaatgatactggaagtgataaattttctcactcagtgaataatgttattgatcttaaggacaaactctctcactgcttgtcctcacgtttgcttcggaggtggtgtatgtttgaatggttctatagtgcaattgattatccatggtttgcaaaaagtgaatttgtggagtacttgaatcatgtcaagctgggtcatgttccaaggctgactcgtgttgagtggggtgtcataaggagttctcttgggaagccccgccgattgtctaaacaatttttgcatgaggagagagagaagctttctcaatatcgcgattcagtcaggcaacactatgctgaacttcgatctggtgttagagaaggactacccacggatcttgcacgacctcttgcagttggacagcgtgttatagcctgtcatcctagaacaagggaacttcatgatgggaatattctgacagttgacaataatcgttgtcgggttcagtttgatcggcctgagctgggtgttgagtttgtgatggatattgattgtatgcccctccatcccatggaaaatgagtccctcaggcaaaaaaacatcgtgaataaatacttatccgaggtgaaacttgaggatcagatgaatgacttgggtagtgggggtgcagcaaggttcgcatcaaatgtgaatgtgaattgtggcgatgcagcgttccaaataccttctagccacccggttggcacagttgattcaattgtacaggccaaagctacagttaatgaggttgcaattgcagcacaacaagcaatgtacaatcagccatgcagtctctcacagatacaggaaagagaagctgatataagagctcttgctgaactatcacgtgcccttgataaaaaggaagctttattggtagagttgaggcacatgaatgaagaagtgtccagaaagcaaaaggatggtgagactgttagagttgaagcatttcaggacgcaatatgctatggtgcttgtgcagctaagagattctaatgatcaagtagcctcagctttgctttctctgcggcaacgtaacacgtatcatggaaatcaattaccgtcatatcctatttccatggaaaatggtggaaccattactggagcaccagatccatataaccgttttggttatattaatccagaatccggttcccaagtaatggaagttattgagacttcaaggtgcaaagcaaaaatgatggttgatgttgctgttcaggcgatgtgcaaagtgagggaaggagagaacgcctttgctaaaatcggtgaagcactagatgatctcgatagtcgtggcacaggctctggttcaagcatactaggaataagacggatacctcccgattcagggaaggcaaatacatcctttcaagataacggaacgcctgcccctgcagcaatcaactcttcaggtccaagattgcccaacgggtatgattctgaagctcaggttcctactgatttgatttcgtcctgcgtagccacgatacttatgattcagaactgcacggaaaagcagtatcatcctgccgaagttgcacacatccttgattcggccctgtcacgcctacaaccgtgcagctcccagaacatcccgatcttcagggagattgagatgtgcatgggcattataaagaatcaaatgttggcgttgatacccacaccaagcggctagttccttgctttcctgtgagctggccggaagaggggtaaatttcggaaagaaaccggaatactgtatgtggcgtgtattgttttttttttcccattttttactgatttgttgtgttgtacaagctgtatgtttttttactgtcgtacaagctgtatgttattgctttatacatgtataatagtaatcatgaaagttcattgttctggcaagcgcatgtacattcagcttgaaatactgaaccctttttccaaacggaaattttttcctgttcctttacttttttgaaattcttgcgttccaaacggggc

SEQ ID NO: 28619 - DNA, 3145 bp, Zea Mays
ggggcggggcggggaaggaatcgggtccccgggcgccccgattcgggccgcgattgggcgttcggccagctgcgaggacctgtctgtgagtgtgtgaggggtctcgttcgaacgccctcgggcgcgtcgcgtttggttggggcattcctgctgcagaccgcgcccgtcgcgggaagctgcaggaaggaagggattttgcttgtcccgtcggtgcacggtttttgtttttgtttttgtcccacaaggattctgtgctgcaactgcgtgcttcggctcggttcgatacgcagcgagccaagctaacttcatggttcagggatgtactgtggtgtggagctcggagtcaacattgttggtgatgcatgcagcagcggactcggacttgcggtgtcgacgtatatcgtttaaaatttgtgcggcgtagtattttttttcttcttcttcttcgattgggatggttgtacagattgagactctactaaccacggtcagcatacagcttgttcgctgcggcttgctgcggctgcaatccggctgcggctgcggcttctacagtatttttctctctatggattgcagctgcagcagtccaaacagctgcaacagtgtcggcttgtagccagccgaacacgcccataggctttaggtagtccccggataacttcacgtgggaatggcagacccttagtgctaatttgggagccacaaaacaaaaccggaggggattagaggggctaaaatccccttcttattgaaaattgaatatttatcccctccggtttttgtacttccaaactagcccttagttgaatgtggacaggagatagctgtgccgccctgctgtcgtgttcattgctgcttagcaatgatacttggttttaatgatcagggaatggtttggactttgaatgttgtatctgagcttaggtttggtttgaagaatttagttagagcacgttctttgtttcaattttagaatcaagtgttttcagttatttgctacttgggtatgaagtttttcagttgctagtgttgtggatcttggtagttttttgttgggcctttttagggtctgttgagggggaaagggtttttcctacctgctatattgcactggaagacaatgcattctgcaaatgagtttacaacactagccaacaagagtttgatttatgagtctcgacaacttaactttgcaatataagctccgtaacaagggcacggatgggcacagaggaacagaaacgccaaactccaagaaaggcgcagactcgggagaggtgatgataaaggatatttgctgaccaaacttgcagtagttcttctttaaggaaatagaacttggcgtcatgacacatagaaatatgctctggacacatcagtctgttaatcctgaatgggagcaaagacatgcccaagttcaaccaggaagttcctattatgcaggcactgcaagtgattcatccaacctgggtgtgcaagttgctgtgggagttccaggaaatactgctaatgttggtatatgtgatttgcggaatcatgagtgcccgcatgttcataattcatacccacatgccggtgttacatcaagatttgtcttcccaactactatgtacaaccctagcatgtcagcagcagctgtcaacatatatattcctcagactcaaagctttggactaggcagtgtgctaccaccatctttacataatcaagttcccacaggaactattgatgagagtagcagcagtgtcaattttggtgatagtgctattggattcatgaaaaggaaaaatgcagtagttgctggaagccatcattttcttcatggatttgctgggtcaagttcatctgttcatgtgcctcagaatcctgtgcatgggccatggaatccttcatctcaatcaaattgtttacccagttctgcagcttcaaacctaccagaataccacaatagtaatgggtggccatacttagaagaatcttctgcagatgcttcaaacagtttcagttctgtggctgcttgccaggagctggcacctcatgcctgcaggttatggagtaccacagtggggatatagtaatgcagtggtcaatcctccaggaactgcagacatgtcaaatgggccactgcctcatttctgccagaatagtatgcaggcacctcaaatacaagtgtcccatcaacagttcatcggtaacaatgcggtgcatggtttaaatccttctgccacaggccttcctttacatccaagaatgctggctctcccattcaatgctgagcacacttttgggcatccaatgcacccacctctgataaaccaagttaacaatggggctttaagaattctgccataccagaatgctacagtgatggaccattcaaggatttatgaagcaggacatgttatcgatgaacatagcgatatgcgtttagatgtggataacatgacttatgaggaacttgtagcattgcaagagcagataggcgatgtcaatactggtttgacagaaagctatatccaggaaaacttgaggtccagttttcatgttccaggagcagctagcatgtctgatcagttttctgagctttctttggagaatgatgcttgcataatatgccaggaggagtataaagctaaagaacttataggaacccttgaatgcggtcacaagtaccatgtgaattgcataaagcaatggttgatgatgaaaaacctgtgccccatatgcaagacgacagctttgtcatcagatagaaggaacggatgaccgtcgccaataatgttgttggttgtttaccgcgtggcaaattagcgtggattttgtatatagacatggttgcctttatttgcccgtcccctttgctgtggacataaactgagcttcgaaacactgtacagatattttgtaggatgttttagacgttaaatggcacaatggtgtgtaaagctcccatgactgccttggtagatgccctcttcctttacattgtacattgtatttatctttactcttcaaaaaaagaagcttgaaaaccgtaagttctgtacattctggaattgaaagaaccggaaattttcttcacctgtagagctttttgctagagctttatgagattcagtggtgaatcttgaagtcgtgaaat

SEQ ID NO: 28620 - DNA, 1874 bp, Zea Mays
ccatttcacgttttcacttctatctcacttttattttaatcttcaccttttatgagtgtccgactgctagagatggctaagaaacaaacgattggagctcctgccgctcacggattagtccggatcgttcgtcagctgccagggcccaggacaactgtccctgcaggcctgcacgccggcgtccgtgtgatcgcgctcgcgcctccgaagatctgagcagctcagctagtggactcgtttcgcttcctccaggctccagcgcctgaggcagccgcaacgcaagggccccggaaccacgcgaaaacgcggccaaaacaccgcgaaaatctcgacacccaactgcgccgcgtgggcggctgcggcggacgaccaatgtggagggggacgcgcatgtacagcctcctaggcgtcctcctcctcctggccctggcctacctgaactggcatccaggccacggcccctccgccggcggccctggtgggttcaagctccccatgccgtggctgcagccgcggatgtccttcgtgggccgcgccggcacccacttcgtcgacaccctcactggcgcgccgatctacatcaacggctggaactcgtactggctcctctcggcccggtctccctcgttgtccgtcgagatgctgcgccgcggccgccgcatggggctgacgatatgccgcacatgggcattcagcgacggtggccccggcgcgctgcagatctccccaggccggtttagcgagcctgttttccagatgctggattatgtgatatacgagtcccgaagaaatcatgttagattgatcctatgccttgtcaacaatcttgataactttggagggaaggcccagtatgttcaatgggcacaagcagctggtgttaatgtcacaaattctacggattcctttttctttcacccaactattaaaggttactacatggagtatgtaaaggcaatattaaccagaagaaacacttacagtggaatcaaatattgtgatgaacctgctatatttgcttgggaactcatgaatgagcctagatgtgtgtccaattcatcgggtccgtatattcagtcttggatagaagaaatggcagcatatattaagagtttggacagaaagcatcttattacagtgggtactgaaggattttatggccctgggagaggtgagagactgggcgtaaatcctggagactgggcagcttcagtctgctctgactttatacagaactcagctgtcaaagatattgattttgcctcggttcacgcctatcctgatagctggctaccaaaggcaagtatggaagaaaaagtcaagtacctttctgtctgggttgattcacacttgaatgatagtgaatacgtcttgagaaagcctgtcttgtttacagaactgcaagcaggaagtggcgctcttatttggcagttgatggtcgaaggcacgcagatgtaccatgatgacttctccatggtggcacgggatcgtccgtccacatataagctgatgaaggagcagtcatgccgactgcagagtctatatggaaaagagggagaccctacttggaaatgctcaccctaaggttttttcttcttcctattggtttcgaaaccttccacttcatccaacaaactggattgttggaatcattcagaaagaggatgattagggaaatgatgaacaaacatctgtgtggtaaatagcttgttcatagatttgtagctgaagagctagactgctagtggaaaatccacttcttacaacaaacatgcattctgtcatatcacatcatgctgtacgttgtacaattaatatgacctattagtggtcaaagtgaaaagagcaccgatacaagttatgatatctactgc

SEQ ID NO: 28621 - DNA, 143 bp, Zea Mays
tagaaaacgaagaagaagtagtggttgaagaaggagctgcaccaccaccactagaagatccacctgccgggaactgcttttatttcgatatttgtggagcaaatcttgactctcctataacacaaggcaagccccgatgcatt

SEQ ID NO: 28622 - DNA, 1267 bp, Zea Mays
agcacattctcaatggctgtagcaagctcaagaggctgcacaattcacatgcaagatcatggacccctaccttgcttcctatggtgtggaggatccaatctatgctgtcctacaacttgcacaaacaaccatgagaagtgaacttgggaagataaccttagacaagacttttgaggagagagatgcattaaatgagaaaattgtgagtgccatcaatgaagcagccacagattggggcttgaagtgtattcgctatgagatcagtgtgtcggtttttcctgtttaatcatttgagttgtaatacatggtttgtttcagatgtcaatgtttccattgtttttaaatttgacaatgcaggggacataactcctccaacagggattaggcaggctatggagatgcaggctgaagcaaaaaggagaaaacgcgcccaaatccttgaatcagaagggaagaaacaggcccaaatccttgaatcagaagggaagaaaactgcccaggtccttgaatctgaaggagctatgttagatctagcaaaccgtgcgaagggtgcggccgaagcaattcttgccaagtcagaagctactgctcgtggaatgagattggtttcagatgcgatgacaactgaaggcagtgccaaggctgctagcctaaaacttgcagagcaatatatcgaagcattctcaaatctagcacaaaagacaaatacaatgctgctcccaggcgacagtgccagcccagcatctttcgtggcccaggcgatgaagacgtatcagcaaatccattcccatagtcaggcattgaagtaccaccctcagatagaagggctggaggaatcaggagagaccagccctgctgctccatcttctgaggcaagcaagacaccaccatttgtcggggaagcagattctaaccataccttctcgctgcaacgcccaagaataagaagtgagcttccctcaagtgcttgaagcccttttcttgtctactgttctgcaacataggagtgtcactgataaacaccagtaggtttagttttctttagtcagagaagctgatgtgcgtcgaaggggatagacccgtaggcatttccatttggtttcgggaagctaaatgcgaccggagagagtttttgattctggtgaagtttatacgttggttccttcatatattttaaaatgaagtttgtaaaaaggcaagacgttggtgaaacaaatcgcacacgatggcaaatgcttagttcatggccactgttgctcttgttttg

SEQ ID NO: 28623 - DNA, 2183 bp, Zea Mays
cgcgattcccctcttccatcccgattcctccgcccgtgactccccgcgcccgcagcccccgccgccgtcctcgcgacctgcctaggacagctgtcacgcccgcaaatcacgtgaccatgcccttccatgtcctcgcgtcctccactccgcccgcgattcccctccccgcacccgcagcccccgccgtcgtcctcgcggccagccgaggacagccaccgcgcccgcaaatcacacgaccatgcccttccatgcccgcaaatcacgtcaccccttccatccatggcagtcgcgctccctctgcgcccttccatccatggtcgcggatccctacgcgccgcgattcttcccatacgctccctctgcgcccttccatccatggccgcggatccccgatgttgagatctgggagctgaagctggagatctcgcggatgcgggtgcggctgacggcggacgacggacggcgcaagaattgcggcggccggagctcccagtgctccgacggcaaggcccgcaggcggtagaaggcatccttcgcctatgactgatgcttcgctgctggcgtcgacagtggaggcgcgacaggcggtgatcgtggatggatgcggtctcagcgtctggaggatcggtcggagctaagcagggacggtggctgctgacagctgagtgatacgtgtatttctaggaagatcaagcccagagctgtcgcagagccagaagtgcatctacttccacggcaccgtcagcaaggacctcctcacacacaagttggtcatccagctctctaggaagatcaaggacgacatatgaagactggagtactttgaagtttgatgaacaacaaggacatcctcacgcacaagtttgatgaacagtcaacaaaattcttgagccagttcactccaacccaatgggacaaggatcagtggcatcctttcatggggccactgcggtccatccaagtgttgttcatttgtgttgtcttcatgatcgtggagatcaacacattcttccttaagcttgtgtcctgttgccgagttcctcaaaaggacaaagtcgttactgtggttcagtctctacttgaatgatattagtgacaagcatgctcggactaaccaacgaaaaaggtgaagtgggatggtataccatttgcaattgacatttatggtttttgctacgctggcactcagtgtttccaaatatctattagtcaatgtgcgatcgtaccaaattcaacagggctctctacatatggtatgtataactatctcaatttgaactgcattctggtgggagtcgctcttattgtttagtaatcatttttctcaatgttatgtctaaccgtgttattcaattttgcaatatgcacggcaatttatggtgctatatctattataggctacctcatgtttggagacaagatgctctcataaataactttcaatcttctgaaagattcatttgcagcaaaagttgcacgatggaccacgataactattattgtcggtttctctgattcaattaagtgggaacccttggtagtgattcaattaagtgagaagtgagaaccctcattgtgctatttttttgtttcagggttgttatctatctttgtagccgaagaaacaatcctgagaaagaatggaaagctccttggctaggaataatgtttctaagtggaatcacctgggttatgcgagaagcacatcaatggattccactggtcctctgttagctggtaggagaagtagcagacatggctcaagtgagatgggggactgcatattcagctcaatgagacattttcttcagttggcgaatcaattactaggagaatttgttagatattaagattaatagtaacatgtattaattcaattttatataatcgttgtgcaccaacattttatttgaaagggagaaataaatcctagcaaaattgactatgggagaagggatataggaacaaaaatggaatatgggagagggaacaaactcatcggcctatgcgccttgattagaatgtctcctaaaagttttaggtattgaaaatatgataggacatttattgtaatatgtttattttctgaaatactaattttgatgtatagaatattgacaaaatcttcatgtcagtttcccttcccaagtaagaatagagcaatgcacttgttctgcccgtaa

SEQ ID NO: 28624 - DNA, 1862 bp, Zea Mays
atattttctatgttttgttagcgattgatcttttttacatggtcaagttaagatgacattcatcagcgaattttcccaccgctcagcagtgacctcgttcccgtcctcctcgcatccctctcgtccgccgccgcctggctcgcgccgccgacagtttctcggcccagatcgagacacgcccgccatcctacaccaggtgccgaggccttcgccgatcaaagagatcccagacagcagctatctagtcagtggatcatttgaccaggcggtgttgactgctttatccgtcgccgatgaaatacacatggcttctttggagagcgctagcgaccaggatgagctcctggagatgcttgaatcggctgggatggtgcttgtgcaggcactaaaagaactcaggagggcctctgagatgtttgctcagcttaagatgatgtttggttcagtgccatcagtgcctgctagagttttccttacaggaaggatctatatctgacctcagaccaatctttgaggagtaccttgccaattggagatatacggatgatgaggtttatgtttttgatggaggaaatgacagcacttcaaatggttttgtcgttaaatctattatgtcaactggccagtattttgaggtggcagaattgtatacagtaacattcctctgtattgtctctcaagatagtgaaactgctatctcatgggcagaaaaggctcatctaactgagcaaagccggcaggttttttttttttgtaaacgctacttaataattctactacagcataagaatctgagtgttccattatgctaacataggtcttccagcgtgggatcttataggtccagataattttcatgctaaagtaggattcttatgttcccaaaactatttcttgtatgaattaattcccactacagtatgcttctcatttccgaataacttctatagttccatgctaaactagggctcttcatatttccaaagcaatttgttttgaattcccgtcattctttattttctttagaggttttactgttgcattcttttttcatcaagacattttttttctttctttctacaggacctactaaaaaagcttcatgcagtgcaattagctgcaaataaaaaactgtccactgttgaaggggtaaaacaaacagcagagaggaacctttctacttctacaaatgactcaacaccatcgccacatgaggatcctccaaagatagttcctgcgtgcgatgggctcaaaaaggtcctgctgaagtctgctcaacaagctcagcatgttgcaaatcattttgatccgtttttctggtggtttcattcaattcgcctgaagtttgggaaaatacatattgttctacccagtggtaagttagtgtttctgttctctctgctgttctcagccatgtacgtgctgcgaaggaaaactgctggcttgaagagggctgtgttccagcaagctgcttccctgcgacgagcattttttgatgcacttcagcttgcgttctctgtccagatgaaccctctagctgctgttcaacaagtgccacaagcccctcgaggaagctggtgattggtgatgttctttatgccttgatctatgtaacattataactcaactgaaattcaacaggcaaccagatttcatgtcgcggaaaatgtggctgtgtaaatactagtgtgcttaatgcagcatgaatgtgatgatgacctgggtttttttgtgtccattctcacctgaagcatattggactggggattatttacaagagctatggcttttgaattggggaaacggattaagtgcaaccaaaccaattagtgtaaccgatgaaaccaagacataaggatgga

SEQ ID NO: 28625 - DNA, 1409 bp, Zea Mays
gaaagtcatgtacggcttcacaatgtatctaagattctttcatattgcaacaccaaacgattggctgtggttccacaaggtggcaacacaggtcttgtaggtggaagtgtgcctgttttcgatgaggtgattgttggccttgcaggcatgaataaaattatttcctttgataacgtaaatggaattcttacttgtgaagctggttgtgtgttggagaatttaagtaccttcgtggaaaatgaagggtttattatgccacttgacttgggagcgaaaggtagttgccacatcggtggaaacatttcaactaatgctggcggcctgcgttttatacgctatggttcacttcatggaaatgttcttggtcttgaagttgtcctggctgatgggactatccttgatatgcttactactttaaggaaagacaatactgggtatgatctgaagcacttatttataggaagtgaaggctcgctaggagtagtcaccaaaatatcagtacttacacctgcaaagctatcttcaaccaatgttgcatttctttcctgcaatgattacacaagctgccagaaattactactggcagctaggaggagcttgggtgagatcttgtctgcatttgaattcatggatcatcactgtattgatctggctatgcaacatttggaaggagttcaaaatcctttacctgcatcaccgtacaaattttacgttctagttgaaacaacaggaagtgatgaatcatctgacaagacaaaactggaagcttttttgttgcgttcaatggaagatggtttagtagctgatggagttatcgcacaggatatcagccaagcatcaaacttttggaggatccgtgagggtatatcagaagcatccgtcaaagttggagctgtgtacaaatatgacttgtccataactgtagagaagctctatgatattgttgaagaaatgcgctgccgtcttggtgataatgcagaggtattgggctatggccaccttggagatgggaatctgcatttgaacattgtatcaagcaaatatgacgacaatattctcgcacaaattgaaccattcgtctatgagtggacatcagcacaaagaggaagcatcagcgcagagcatggtttggggctaatgaaagctgagaagattcactacagtaaatcacctgaagcagtgagtgtttccatactgccctgccaacacttggaagtatgttgtacataatgattaagaaaatgaccaatcatcctgagttgtagacttgttttcttttgcatttgagctgtctgtttccttagcaagccttagtagacaggtcacatatgaaaaagattgaatataccaagacttgcatacaccaccttttatgcattgttttgaaatgacacaaaacaagaacgatg

SEQ ID NO: 28626 - DNA, 1694 bp, Zea Mays
cagttcgtgagaatagttcaagtctgtctggtgtatgtgtatcatcgcattcactttatggaggcttgttctacctaatacctatggtcccgtgaatgctactgttctgatttggatcctgtacagatggagttcaacttcaagttgatgggatcattcgttagatcttattcattgccgagtagaggaacttacggttgaagattttctttatgatgatgattacaagatagacctttccgggtctaatctggatgtccttaataacctggaagggatcgttcagctggaatatccacagttaaatttgccgcaagagttagcccctaatgtgtacattgacatgagttactgtggacagaatgctgggggtgttttactgcacatgacagatttgttcacaacaatgacttcggcaccttctgcattcctgaagccaaaatgcgctctctgggactgccccaggcctgctgttggatcagaaagatggcatgattattgcagcatgtatcatgctgatttggctgtgcaggaagagggccctccaggcacaatgcctgtgatccgtccaagaggcattgatctgaaagatggccccctgtttgctgctcttagtgcaaaaatccaaggaaaaaatgttgggatccctatctgtgaaggagctgccactgcaaagtctccgtggaatgcacctgaactgttcgatctttacatctttgaaggtgagtctatcagagaatggttgttttttgacaaaccaaggagggcatttgttagtggaaatcggaagcagcggtccttgccagattacggcggccgtggttggcatgaatctaggaagcaggcgatgaaggactttgggggtctgaagaggtcctattacatggatccacagccatccaacagctacgaatggcacctctacgaatatgagatcaatgagtgcgatgcttttgccttatatcggcttgagttcaagtcttcagatgcaaagaagattgtgaaatccaaattagcctgtaatccactgaatgaaattcagcagcaaatggttagactcagtgcagacagtcctgtagacaacaaacggacggcccggggcaggcaacatgctaacccgacagatgtcgatactaacatctattcagttccaaacaccacagctcaagccaatgttccaaatgcttatcagccagggtcacaagtggaccagatgacatatttgaatggtagtgtcgtttatgggcctcatctgccgtatggttactccactgaaagaagtgacttttattggaactcagctgatgggacatgagaagatgaacacatattcgatttatggcatatttggccttcaaattctaacagttccagttatggttattgggtctactctattagcatgaccctcccatcttcttttaattggaactggtccaatctacaggaaacatctctgaaacaaaggatgtcaatactgcagttctattttctgtggtaacttttgttgttgtaatataggtgtatcttgaaaatagcaagcaagcatctccccgatgtgcatgcagctgtatcatatgcaagataaatctctggtttggtggactggtaacctgtcacgctggtggttccatttatctgtcacgttgtacgtgcatcaatacatcctgttctgaatctggtgggtgcaatct

SEQ ID NO: 28627 - DNA, 2781 bp, Zea Mays
cggagagcagcgaggagagcgagcgcaccaacgggatctgagcatctgaccagccgcttgctagggtttcgtcccccctctccctcggccagcaccacctcgcatccctagctctagccttgctcgccccgggatcctgtagcggccatggcggcggaagcgccaccgtcggcttcggcgtcttcttcctcggccccgcggccgcctgccgcggcggcctctgcctccggcggcggggcggccgggtccgcggagtcgtacatcgggagcctcattagcctgacttcgaagagcgagatcaggtacgagggcgtcctttacaaaatcaacaccgaggagtccagcatcggcctgcgcaatgtgcggtcctttgggaccgaaggtcggaagaaagatggaatgcagattcctgctagcgacaaagtatacgagtatatcctctttcggggaactgatatcaaggatttgcaagttaagtcatcaccaccgccgccgccacctcaagcagcttccctgcacaatgaccctgccataatccagtcacattattctcaaccagcatcaacatcgtcaaatttgccttccgctgggggtgcagttttaccagacctcagctcccaggcagttcaatatgggcttcagaggccaacttttcagagtaaccttcctctataccaaccagggaatgctccacggggctcttcagcggcacctccagcaggaaatgctccgtggggctcttcagcagaacctccagcaggaacgacactttcggttccctcaatgtactggcatggatactatgcgccttcaagtgggctgccacctcatttgcagcaacctctgctgcttcagccaacaccaggattgtcagttccccagaatcttcaatatccaggactaaatccttctttgccatctgggatgcaaaagctgtcagaactccaaccttcattgatgccacctattaatagtcaaggttcttcaggtatcctgcctactacaacagctcctgcttctgctaccttattagctccagaaagctcaaagcctcaggtgccaaacatgggatctttgtttactcctgcaacatctcttggtgcaacttttccttatccaagccagccaacaccggtggctgaaactagtgcaacagtgtcacagaacataacttcatttagtagcaacaaggctactgctcttccaggctcaacactgtcataccaaactgcatctcagtctgtttcttcgactattgccccatctagctcagcacaagtggagatggctgtgcctttgttggcatcatcaggtcaactattgcagaacacatcatccatgctttcatcatcacactcgatgcaggcaccattacaggtagctagcaaagaagtcaagccggttgagccaaaggctaaggttgcagaaccattactgcctgaccctttgctaccagacccaccatcacagtctctgcctgaaaataaggagcctatattgccattgcccaaacagacacctcagaagtacaatggatctggtttgcacaaccatcacaactttaggggccgtggaaggggtagagggagtgcgtcagtaacaacattcactgaagaatttgatttcacggccatgaatgagaagtttaacaaagatgaagtctggggtcatcttggaaagaaatcgcagtcaagggacaaggatggtgaggtgggagatgatgtgtttgatgaagacctggaggttgaggaaactgataacccagagctatctgttaagcctgtttatgtcaaggatgatttttttgattccctctctagtggaacatttggacgtggaggaccaaatggaaggggtagaccttctgaacggcgcagagtagatacagagacttttggcgaatttccacggcacaggcaaccctaccgtggtggcgcccgaggttaccgtggcggtggacgttcccgaggttcatattatggtggcagaggctatggaaacacagggaccggaggctatggaaacacagggacaggtggccctggaaattcttattctcaccggggctatgggagagattgattatagcagaaatgtgcaggcaaccatacttgtgggtgttgtagtcttttaccacatgtatgatgtatcccttactactggtgcagcggtgagaagtcgttttcccactgagccgagccaaaggtttaatgggctctaaattttacactataagatttaaggattggattaggatcggactctatttctattcatttttaactaaaatttatttagggccctaccattctgtgaagaatcatttggatcctaatcaattaccacccctaggttttagattcaacgcagcaaaagaatgtagatgtaagacttaccttgttattcccttggagagtgcactcgtgggagtcgccagcactaggtctgcgagtctgtccattatgcatcccttaatattcaacaaataaatggagcttaccagcatgtcacttgggtgtgccttgtccagacaaggcgtgtagcgtttggtcattgacgtggtacacccgtgttctgtaggagagttaccagtagatgagcggatgatgctggataggtataagcttgtggcccttgatgtgtataccttacgcttgggatttagttgtataggccgatctcgatgcaggcatgcaacgcctggcctagctcagtaactttttcctttaacaaagttctgccatgttgtcttttgtattggtgatagtgtaacttaaaaat

SEQ ID NO: 28628 - DNA, 840 bp, Zea Mays
cctgtatccggccgccgcgctgcccatgaacggcggcgagtatggtcgtatggaggagatggcgaggcagctcgtcgctcgccttgccgccaccccggactctgctctgcggggcctccccttcctccaccgcgttctcaccctccccctcctctccgccgcgtccgccgtgctccgcctgtccctgctcctttcgcggctccgctcgcgccgcgcgctgcccgtgcccgtcgttagcgtcggcaacctcacttggggtggcaatggcaagacacccatggtagacttcttggcccgcagcttccaccgcctcggcgtctcgccactactactgacaaggggttatgcaggtggagatgagccaaagatgctccggaggcgcctttccgatacttcggccaagatcggggtcggtgcaaatagaacggcagtggcttcttccatgcttcaagaatatggcttcatccatcattttcagaacacatttgccgagaagaagctttcttcagtctgcaaactggaatctggtaataggattggagtagccatattagatgacggtatgcagcactggagcttgctccgagatgtggagattgtgatggttaatgggttggctccgtggggaaactcacatttcattccgcgaggacccatgagagaacctctgagtgcactcggtcgagctgatattgtggtcattcataatgctgacatggcttctgaaatgcaacttaaagcaataaggtccgcaatagaggataataatgcaacatgttcagtgttctacagcagattggctccatcacatttttttgaaaactctgttcttaaggcgtc

SEQ ID NO: 28629 - DNA, 3768 bp, Zea Mays
ccccgtccagattcatccaccctccccctttcccttcgtctccgtccgctcccggcatcgtcccctcttccccgtctcgcgttcgtcgcccacgggcttcgattgatcttcttccggtgctggtggcaggtggacggatcgtgtccttgcttggccgcccacagcagcaatggacgacggggacctggacttctccaacccggacacgtacctgtgcccggcgctcggcactgacccgcccagcagctgctccatggacagctacttcgacgagatcctcaaggacacggagcaccacgcctgcacgcacacccacacctgcaacccgccggtgcacgacctatcgcacacccacacctgcgtccacgtccacaccaagatcgtcgcggcctcgcccggcgacgacactgccgactcgccgtccgagaacaacaccaacggcagcggcggcaacggcagcaacgccgcctccaagaagcgcccctcggggaaccgcgccgccgtcaggaagtaccgggagaagaagaaggcccacaccgcgtcgctggaggaggaggtggtccatctcagggcgctcaaccagcagctcgtgaagaagctccagagccacgccgcgctcgaggcggaggtggccaggctccgatgcctgctcgtcgacatcaggggcaggatcgagggggagattggcgcgtttccgtaccagaggccgccgccagcggccaagaacgtcgacctcgtgtccggtgttgaccagggagggttccttgccggggctgctgcccaggttaccagttcctgtgatttcagatgcaacgatcagatgtactgcagccctggaatgcagggcgctgttagcggccaggtgttgggacaaggtgcctgcgatgtctcgagtatccaatgcgttggaagcaccaggtctgcgtccactaagctacctgtctgcggggggatggatgcagtacctgctgcctgcttgccaaatgttcaaaacaagtgacggtacataactttcgtttccctgctatgcttttaagaacttctgtctagtggctagatgtattagtttcagtcattgttttgttagcaatccgtaaatgcatttaagctcgtgattgtatatatcgctcagtagccttctgttatgtgtaggattatataactgaagaagaatataactcggctctcttgtcgccgagccattgttttgtggttccattggtttccttctgtctggctgaatgcaattttgagtgaattgccatctaattgtcaacgatgaagatcagatttgcttctgtcccatcctgtcaatccagagctagacttgctcttgtctattttcagccggatgtcttgtgccccttttaaaggcattgctagtcttgttgacacaccagaaactaagatgctctgtatgaatcaactggctgtttattctctgagatttgagaaaaattcttattagccttcttaagtctatttatcatgattattgtgtaatcatggtgtatgttgttgtttattcattttgctgtggcctattcaatttgttgtggcctgattgaatgtatttttagtgaatcggcatcttatcatggaagggcaggcctgatgcacgggatttgtcttactgagtcaccaggtcgcgggttctaagcagggaggcttgcctcggtttatcccttccctagacctcactcatgtgggagcctccgacactgggtttgtcccctttagcaccttatcattactgaagatgagattcctggcgattctgattttttcaaatccatagctagagttttattttcaattggatgatttctaccttttcagacctcctaggtcatctatgtctgcttgaaaaaaacagcattattcattttatcgtgcttttgtatacatttattagtttcaagcaccaaaactattttaaacatggaaataacttagcctgggtttcagctgttagtattcaaggctcaagccatggtactgttttgacctaatagagtagcacttgttttcgacatagtcctatactcccatatgtagctgctgccggtagttgagcaaaagcaggaagtaaaaaaaaattcctacatgctaccaacgcctgcagtgcacctcgcctgcagttccatgctttgaaagaggtcaatgcattcagtttatgggttagttagatttatagtcagggagagccacatttagttgtttcatgtttggtcaattgagcaattctgaagtacattggatttttccccttgacaatccagatgtgagctgtgacggagccattttttggtgaattatgataccagaaattagtaaattaggacactacattgtgcttgtttcacgaaaaaaaaagaaaacatatttcataaaataataattaggacattgtaccatgctaccatatagcagtattatagacatcaataacctccaaattttgctacttctgaagagtattttgttttacagtgattttgtattagctattggagactgtaatacttgggttggtgtctaatctttttttgtgtggaaatatatattttttgaaagtgttaagaacagtacatcaagaagatacaaaggtttagctcagaaaacttctggcctctactaacacgcacacagccaaaaaggcgaaaaaggggagcaaataccaagcacatctctaatgaccttcaatctgtagattagatcgccacctatgtgccagggagaagaaaaccttggccgtttgcaccaaaagttgtgatcctgccacaacccgctcctacaaatccgactgtcccagtatagtgtgtgttcccagttttaaaggcagttctttaggtcgtgccatttgtttatcatgcagagcatctgtttttgttacgaaacttaatacaattatttttggtatgtccatttgtttttcagttactggactgctgtgagtcgttggtagaatttgttaatgaatgttcgtactgctcagatcttgcaatggaacttattcaagaaaaaaaaacaggatatgatgtcttattcttcaaatagtcctaaggtgtagccatctggataagttcatatatgtacctaaacactcgatacccccctgtctgcataatttacagcaaataaacctgatacatgttcccgctgctaggaactttccaagttctaaacgcacaagtaacactaacacatgttctattgctcttttttcaggactcccggcagtgtttatggtcccttccttttcagagactgctgggacttcccgttctgcctcgaaggaacgctgtataaaccgctagcttttctatgtagggccgaatctggttcaaactgctacgtgtgtgagttcgtcgtcgccgatgatgcttctatagtgcctgaggcgattcaagtttgttagctctagagctgataggatatcctcgtttactttgcttagttctcagatgctctccgtctccgatgaagtgcagcaactgaaccggatccgaaggagttggacatgaacaggttaaaatttggcatatgtggtctaagaagacgctgagatgtttgtagcgaatctcaagttcaatgcgaaccctgttgcctatgtatattcacatcctttgtgtaggtgtcatgtctctcttctgttacgtgcgtggatctgagggaacccccaaaagtttaattgccggctggttcaattgtgtctgtctagacccaattgtggatctgatgaacagaatatgtgccggatagcgc

SEQ ID NO: 28630 - DNA, 1150 bp, Zea Mays
tggaatttgagattgagaagctcaaaaaggccattgctgtcttaacttccatggttgaggatacaagttccaaggttaatcccatgcaatttacacaactcatgcaaatgggagtagaacctgtcagggatgcaaaccttggagacccaccagttttcccatagtcacaagcagaacaaccaagtggaaatcaaccttcaaggtgtaaccagagggggaagcaataccacttcagtattgaggagtacaaaatcttggtttcttgctggcttaatgtcagccttgatcctatatttggtgctggacaatggaaggcgtcattttggaggactatagaataaaactacaactctcagaaatcaacaggacatccagtccgcacacttaggagtttggaatggaggtaactacagctataaacctttacaatagcatcgaatgcaagcctataatcaccacccattgctgggagattcttagaaatgaggcaaaatggttggatttgtagaggaaggctactcaggtcatggaagagttggtaaagagaaagtagtatatgttccagactccataaatggcgatgacgaaactgatgacactagtcgaggaacttagaggcccatgggaatggacgctgcaaaggctacaaaaagaaacgtttccaatgaaaccttcatccaatctagctcagagtacacgagtttgatgttaaacttgcatctggagcggatttgagcatataaagaagtgcaaggtgttatggctgtgaacgttgaccaacttattacagttcaagagaaatctttcacccaaaaacaggagattgtcaagcaggtggttgaattgaaaaaggaaatgggaggtcgaagcagctgagaaggcaactctcgaagaagatagaatcatgaatcttgatcgaaacaccctaagtggtccgcaaagggcctactatgaggctcaacaatgtcgtattttgcaatgtgtttacatactttgtgagcgttatttatgttcttacatactttgttttgaattcatgcattgcaaacatttatagctggcttcgtccaactataagcttgtatttgtgagactcagttttgtgacaaattaagtatttcgaacgatggcaactatattgcatttgaat

SEQ ID NO: 28631 - DNA, 529 bp, Zea Mays
ctctagtacattcaaacacccatatactcttataatggattctaataggcacttaaaaatttaagagaaccgttttcgaatggggaagcaaatggaccatggcggaaagcacggaggtcaaaattcaaatgaagtttctttttctttgaaggcggacggcggtcgcaaacacccggcggtgcggccccgtgcctctgccgtctgtgccccctaccaccctcgtgcagagcgcgtgctccggccccctcccgctagaaatgaaaacaatttcggtttttttcggtttttcgaaaaccgtttttgattttttcgactgaaaccagcagtaccggtatttttcgcagccggcatcggttatcggaattttgtttcaaaatcggtatcgaaaacaatataagatttttccgaccgttttaatcggttcccgttttcaaacgaaatttaccgaatttaggtatcggaatttttccaaaaacaaaaaattaagtaggctatttaaaagcccacactcaataatggacgctcaggc

SEQ ID NO: 28632 - DNA, 1259 bp, Zea Mays
cgcccgccgcaaagctatgaattaagggcaggtaacgtcatctccttcatgaccttcctggccccgataccgacgttctaccgcatctacaagagcaagtcgacggaaggcttccagtcggttccctacgtggttgccctgttcagcgccatgctgtggatcttctacgcactgatcaagtccaacgagaccttcctcatcaccatcaacgccgccggctgcgtcatcgagaccatctacgtcgtcatgtacttcgtctacgcgcccaagaaagccaagctgttcacggccaagatcatggtcctcctcaatggcggcgtctttggggtcatcctcctgctcacccttctcctcttcaagggcagtaagcgcgttgtgctgcttggctggatctgcgtcggcttctccgtcagtgtcttcgtcgcgccactcagcatcatgagacgagtgatccagacgaagagcgtggagtacatgcccttctccctctccctctcgctcaccctcagcgccgtcgtctggttcctctacggcctcctcatcaaggacaaatacgtcgcgcttccaaacatcctggggttcaccttcggcgtggtccagatggtgctctacgtgttgtacatgaacaagacgccggtggcggcgactgccgagggcaaggatgccggcaagctttcctcagctgcagacgagcacgtcctcgtcaacatcgccaagctcagcccagccctcccggagaggagctccggggtgcacccagtcacccagatggcgggcgttcctgtcaggagctgcgctgctgaagcaaccgcgccggcgatgctgcccaacagggacgtggtcgacgtcttcgtcagccgacacagccccgccgtccacgtggcatagattctcgatcgatcgcgtgcatggcccatgcatgcgcccgccacacgtacgctagcttttatatattcgaaggacgacttgctgctggtcgtgagcatatatatgatggagaaaatgattaagtagtatatatataagtaattaactgccatgcatggaagctagctaatggatggaggcagaggccagaacgatgaagggggaagctatacatatatgtgtgtaattaatatagatatatgggctttgtgttcatctttgcagctatgtattaatttgcatggatatctgttattcctttttatgtgtaacgtcttctaataaaatgtaattgaacccacactactgttgttagctaccacaagtttccc

SEQ ID NO: 28633 - DNA, 3055 bp, Zea Mays
gcgaaagtaacgcaaaggagccgctgtcggtagcagccgccgccgctggtagagcttaaacagcctcaaggatccagagtttgctaggggtcggagtgccggagccagagccacgcgggagtttgagctggattggttcttcaattgagcgtggcggccggcgtcaggtagaagtttccatggttcttggtttgttgttggagtgtaggagataacacggggaaggagattgcgggagggtaacggaggtcggggagctggcggcgggccacgggatgatggagccccaagtggtggacctcgaggatgacagcatcaacttctgggcctccctcggcgtcagcccccacgtggaccagatgccgctgcacagcgtccatattgtcgaccaccaagctcagtcagcgctggcagctgcggctgcggcgatacagccgcagtccgtctgcagggacctcttcccggtggagtccgacgcctgcctggagcctcggctggggatggagtttgagtccggtgaggctgccaagaccttctacattgcctatgctggccgtgttggtttctctgttcgcattgcccggtcacgcaagtctaagtgcagtgagtccataatcatgctaagatttgtgtgctcaagggaagggttcagtaaggagaaacgtgtggtcacagctgggaagaagacgaggaagcgccctgcctccatcagggagggttgcaatgccatgctcgaagtgctccgcagaggtgatagcaagtggattgtcaccaagcttgtcaaggagcacaatcatgaggtcgggttgcccagtcgagtgcagtatattgccatcgagagtgatactgtggttgacccttacattggtatggaattcgagtcccttgagtctgccaagacattctactactcgtatgccagccgtgtgggatttgaagctcgtgtacgccagtcccgcaagtcacaggatgagtcactcaagatgctgaagcttgtgtgctcaaggcatcggtaccattctggacgggagagcaatggagaggataccaagagagtacgtgcgatggacccctcgagggatggttgtgatgcattgtttgagataattcggaagggaaaagacacctggacagtctccaaactcatcctagagcatacccatgagctgaaaccagcaccagcaagtagagttcactgtgttcgctcgcaaggtgaggtacttgtcattgcaaataacttttctgacactcgtaatctccttctgaatggccaagattctcagcatccaagagaggtgaggtataatgatttagggccagaggatgctcaaagcttatttgaataccttaagaagagacaggaagaggacccttcatttttctatgctgtgcagtatgaaaagaatgggcactccaccaatatcttctgggctgatgctaaggctaggatggcttactaccattttggtgatgctgttaggtttgagacaacgtatcggaaaaacaaggagactatccctattgtcatattctcaggtgttaatcatcatgtgcagcctgttgtttttggctgcgcactacttcttgacgagtcagaagcatcatttacatggttgtttgagaaatggcttgaagcaatgcacatgggtccacctgtttctttgctaacagagttgaaccgaggaatggcagctgctgttgccaaggtattgcccaatacccaccatattttctgtgaaaggcatatcttagacacaatgaaggaggatctacatggtacgtttccggatccagtggctttagtaactgatctaaggaagtgcattgatgggtccagaatagaagaactgtttgactcaggttggaactcggtcatcataaagcatgaactcagcaacaatgagcttttacagtctctctatgatattcgccaacgatgggccccagcatacacgaaaaatgtattttatcccagaaatctgatgccaacaacctttggaagtattgagaaggctattcagaagtacttttcgtccaagactgaattgcgggtggctgtttgtcaacttggacaagtaatttctagttcatttgaagctgaagttcaggcagattatttcacaatgtttcaaatgccagcgttgagtacagcctcaccagtagaaaaacaagggagttcaatattcactagcacaatttttggcttatttcaggggcaatttgttgattcttttgggtaccacgcagagagacttgaggatgacacagtacacaagtatcgtgttaacagatatgaaggtgatgaggagatacatactgtctatttcaatcctgatcaaggtacggtgaattgtagttgctgcctgtttgagagctgtggtatcttgtgcagacacgctcttcggattttcattatcgaaggagtacatgaccttccaaaggcttatattctgaaacgttggacaaagcatgcaaaaaatattgacacctctgataattacattgatctgaggggggaccgtgatgatccttcaactgcaaggttcaatgatctcttctgtcatgtggtaaaatttgcaaaagaaggttcaaaatctgctgaaatctatgcagtcgctaaagattcactgtccaaggcttttgatgaggtagttcagtcatcgaagaacttcagagggcagcaaaatctgcaaagctatacaatgtcactgaaaaggtcaatcaagaagtttggtaagggcagagattcctccgataaaagctcaaagaggtcagcatctaaacatcccctaatggagtgtgatgatgtagatgaccaaatatattgaatttgggaacaatatgattttacctgtcataccttgtgtgtagcatcatgcaatctaatagtaccaattagattgtagctgactgcagaatttggttattaacagatctagtaactgtaagggttctagtgaacccctaacattcagagattaacgctcaaaagagttgtagaaagatgccttttttgaaacatttataaatactactgcagatagaccatttcttt

SEQ ID NO: 28634 - DNA, 2650 bp, Zea Mays
ctcagcatacggaggcagccgccggtaagccgcgcgcgcgtgcagtcacccatccgtccgtccgtccgtccgtcgtccgccgtccaccgccagcgcgcgctcgccaccgcacccagctagcagcacaagaaaagtctggtggcgtcggcggcggcggcggcggccggcttgccacagtccaatccttgtaccggaccaaaaagcagttgaagggcgcgagcgagcaagctagcgcgcccctacgcctacgcgcgatcgagccgcgcattgctgacctcgagttattaagttgggcgaggagaggtggttcattccagcagggatccttctcgtgagcccagtcgatctgaccgtccttggtatctggggggggttgttctgtactctctctttaatttggacctccaaagtagtgctgggatgtatcgcctttgggattttctgggtgatggccgtcttccccaccgtcccgttcatgcctgttgggcggacggctgggtccctccttggtgctatgctaatggtcctgttccgcgtcatctccccggaggacgcgtacgccgcgattgacctcccgatcatcggcctgctcttcgggacaatggtcgtcagcatcttccttgagagggctgacatgtttaagtacctcgggaacctgctctcgtggaagagcagaggcagcaaggacctgctcttccgagtctgcatcgtgtccgcgtttgccagcgcgcttttcaccaatgacacatgctgtgttgtcctcaccgagttcatcctcaaggttgctaggcaaaacaacctgccaccacagcctttccttctggcccttgccactagttcgaacatcggctctgctgccacgccgatcggcaaccctcagaaccttgtcatagctgtcgagagtgggatctcatttggccagttcttgctgggagttttcccagctatgatcgttggggttctcacaaacgctgctatcctccttttgtacttctggaaatacttgtcggtggagaaggatcaggagggtgggcagcccacaggaccagaggtggttgccgacgatgaggttacttcccatcggttcacaccggctagaatgtcacatgtttcttctctgaatccagatgacatggattgcgtaagcgaaccgatcatcaggagcaacagtgtcagtactactgggaatgagaacctgagaagcagaagcatcaattctgaggctgacattcagcttgcgatcaagtctctgcgggcatcaagcatgtcgcatgagatggtagaggtctcgacggttcctgatcggagagatgaaggtgcatcctcaaggaagttcacaaggactgctagccagcaaaggagcgtgataatagaggatttagcaccctccccagagattaatggggaaaaggagaaagaaactgaagttgcagagaagagatggaaagtacttgtgtggaagactgctgtttatcttatcactctcggtatgctcattgcacttctaatgggactgaacatgtcctggactgcaatcactgcagctcttgttcttctggcactcgattttacggacgcacaagcttgtcttgagaaggtgtcatattcactgctgatctttttctgcgggatgtttatcactgttgatggcttcaacaaaacgggcataccgaacacactatgggagttagtggaaccatattcacgaatcgatagtgcgaaaggtgttgcacttcttgccgtggtgattcttatcctttcaaacgtggcctctaatgttcctacagtcctattgctcggtacaagagtggctgcatcagcggcttcgatttctcatggttcagagaggaaagcctggctcatccttgcatgggtcagcaccgtggctgggaacctcaccctcctaggctctgcggcgaatctgattgtctgcgagcaggccaggcgggcccagttcttcggctacaacctcaccttctggagccacctccgattcggggtcccgtcgaccatcatcgtcacggcgattggtttgctcatcgtcatcagttactgaaacagctgaaggcagaagagcgtagtgtaagagaagcagaatggataaaaatccttccaataagaagtacatgtaaattaggcttgccctataactcaagtgtgtatcggtacgttatgtctccgtctgtgctcttgctcgtgagcaagcagcacatggctgaccgtgtagcttgcatttccattgcataataggcttatgaagaatgctttggtaatatgattttacagtctgacaaggattgtgaagcagaggcagtgtaccatcaagataatacttctggaagcatataaaaaaatttcgtatatttggatttcaaatccagtctgcttcagactggaaattcatattatcttctggaatcgtgctttattgtcagaaacatgggctaaaattggaaagtccgtcatttattgggcttgcaatgggacaaccttttgggtctgttatatatcactataaccagtgacaactttggttcgcaaactcaaaccagtttctaatctttattttatgatttttatataaagttcttaataggtcctcttgctattttcaatctaaattctaaatactaaaaaaagtttctgtgaa

SEQ ID NO: 28635 - DNA, 3907 bp, Zea Mays
ctcggcctcccagctcccaggcggtcaggcgccctcccagctccagccaggctccacgaccagaccgccgtctccgcccctgctccagccaggccgccgtctcctgcgcgcgaccggactaccggagccgcccctgtgcgtgacctccgaccggagccgcccctgcgcgcgaccggagcatcccctgcgcggctgtgcgcgaccggagtccggagcttcccctgcgcgcgaccagagccgcccctgcgcgcgaccggagcctcccctgcgcgcgaccgccgaccggagctgcccctgcgcgcgactggagcctccctgtgcgagcacgaccgctcgattttgttttttgggcccaaatgtgtatttcgggccaattttgtatttcgggcctttactattttcgggccgcccgtttaaagcccggcacgtttagctgaatatgggccgggccgtgggccgaggggtcggcccgtgggccggcacggcacggtccgaatttaatattgggccgggccggcccgaaattaaacgggccaggccttttcgggcttgggccaggccgggccgggtggcccgaatgtacacctatactccggagacgagacgtgtttgttgggccaaaggactgagccatggggttgtccgttgacgttgactcttcgtcattttgtagaccaaacgcatgggagactacgcgtgattgcattttcagaaacggctgcttggattccagacccccataggctgccaatgctcatcccggcaagcagaggtagcaaagaggaggatcagatcttgatagctgacgagtggcgaccatgcatctggtggctggggctatcggcaacctggcccccaagctcctccggcttctgcgagacgagtacagcctgcagaagggtgtgaggaagcaagtccagttcctttcagaggagctggagagcatccacgccgccctccgcaaggtggctgctgtgccgccggaccagttggacgagcaggtcaagatctgggcgcgccaggtcagggatgcgtcctacgacatggaggacgccctcgacaccttcctggttcgcgtggagggccgccccgagcccaattgcggccatggcaggctcaagggcgccgcgaagaggatgggcaggctgttcaaaaaggctaatgcccaccgccacgtcgcaagcgtcattgccggcatcaagatgcagctgcaagaggtggccgagcggcgcgcacggtacagagtggacgaggtcgtggcgaccaggcctgctgcagcttcggcgatcgatcctcgtcttgaggccatgtacaaacaggcgacacagcttgttggcgtcgacggggccatgggtgacctggtgctattgctgtccctggaggcagaggaggcctccaactgcaagttgaaggcagtttcgattcttggagttggaggattgggcaagactactcttgccaaagcggtgtacgataacctgaaatcacagtttgattgcggggcttttgtttcggttggtcgaaatcctgacctgaagaaggtctttagggacatccttatagatcttgacaagcacaaatacacggccgaggtaaacctgtcgatattcggcgaaacacaactcatcgacgaaatccgagagctcctggagagcaagagatatttcattgttatcgatgacgtatgggaaaaacaaccctgggaaataatacaactggctttggttgagaataatagaggaagtagaataatgtcaactactcgtaactctgaggtcaccagtggtgaggtttacaggccacgaccactttcagacaagaactccaaaaggttattttacacaagaatatttggtagagacggcaaattccctggcaatcaagttgatgaggtgtctgatagaattgtacagaaatgtggtggtataccattatctatcatcacaatggctagtttattggtggacaagccaagggcagaatggtctgagttatgcagctccactggctttcgcgataaagatattgaacagtggatagctgaagatttcgttcataagaagccaggaacttggttatttgaggttggggaggggtacttcaatgaccttgtcaacagaagcatgatccaagcagtggtgtcaaaacgtgacggcatcatagatggttgtcgtatccatgacatggaaaactttgtcactgtactagacagcgagagtgatgaaggcacatcatcgatgagcagggctcgaagattggcccaccaaaggagctcgatggacgctcattgggacaatcgtcacaagggtatgcagaagatcagatcattcattgcctataggtgccacgatggtacctcaggttaaaaggcacaaatatgcccgagctcccaaaggaaataggagctctgaggtttctgcagacactagacttggtggagaatttcttcaaggaagaactgccatcgaccataggcatgctaacacagctggtatgcctacgtgtttgtgggtggactcaatgggggacgagcgtgccgagtggagtgatcgagaagctaacgtccctagaggagctgcagctgctggtacaatgcgacgtggacgagcttgacgacagcctgtttgatatgaatgaactgggcagcttgagtgaactcagggcgctcacgatcagggccattgagataaaccagagcatgttgtcagatcttctacagtccgtagcgaagctccacaaggtccagagcctaaaactcgagaaccagagccatctttggaacggcctgtacgacgcaacgttcgacgcagcggcgctaccgcgacatctcgagcacctgctcgtgtccgagaactgtttccgtttctctgagctcccctcgtgcatcgacccctcgcgccttatcagactgtcccacttggaactgtacgtgatcgacatggacgagcagggcatgcggacccttggccggttgccagagctccgtcaccttgtgctggcaacggagtccacggtaacagtgactaacattgccaccgatggctgcttccagaagttgaggtcatgcaggttcatgcactcgatggtcctgctcgcgctcaatgccgacgactgcagcgtttccttcaccctatggaacggaagggatgacgtaccgtttggctctagaggggaggaggacgagcgcagaagagcgccgccgccgcccgtcatgccgaccctcgaagagatctcgttccaggtccacgcggagtggtgcctgacgaaacgcgaagacggcagctacggcagcctcggcttggagcacatcgcttcgcttcagagagtcgttgtgaccatcgtctgtgaggggtatgtctttgagctggacctgacggagacggaggcggagctgattcacgcaatcaatgttcatcccaacaaccctactctcacttggacggttcttaacgaaggcatcattagaagctatacgttgggcgatactgatgatgatttagccatagaagagcaagaaagcaaggcccctttctccagtccatgatgatatatatgtcaccacgtcaagaagcttttgtgcaagatacccagacagacacccagagctagctagcgactgaatgcgcacagtgctgtcttttcacactcttctgcattttttttattattttttggtgttacagaagtgtatttttctgctcccaattcttccgttggctcggcactctgttcacatgcctgactataagcccttgggcgcgcttgacctagtttgcaagtgtttttgataatagtagatgtgtttattgtaataaattgtattattaacttgcactcaaaataatagaaacgtcatttgtctttgaattatttaaagatggatgtatagtccgttttgaatcagcaa

SEQ ID NO: 28636 - DNA, 1069 bp, Zea Mays
tagagattagagaaacgtgtggaaaaaaaagatcggtacagaagaaggcctgggccgaataacccatactaggccggccgggcgccggattcctcattccttccattttacccctccgtccgtctctcacactgtctctctccaccctctcgctctccgacaaggcgacgacgggtaggccaccgccgccggcgccgtcccactacgacaactgctgaggccttcatcgctttcttcgccggcgacgagcacccaccaattcattacgaaggtacacttgctgagactggtgaagttttcgataccacccatgaagataactctattttctcatttgaaattggacaaggcgctgtcatcaaagcatgggatatagccttaagaactatgaaggttggcgaggttgcaaaaattacatgcaaatcagaatatgcatatggagctgcaggctcaccaccagagatacctcctaatgcaacccttatttttgaggtggagctagtagcttgcaggccgaggaaaggttcaagcttagagaacttaagaagcaacgggagctagctgctgctaccaaagaagaggagaaaaagaagagggaggaagcgaaggccgcggcagcagcccgggtgcaagcaaagcttgatgccaagaaggggaaggggaagggaaagggaaaatagatcgtgacgttgctgctgactattgttgtaaccaagaaaataattgtgggagcgtcctcaaactgctccgtcacttgctggttactgtgcttgatgttgtagcgtggactaatgtatcgaaaagacctaagtataaataatgtctggtatctacgtagatcactaaccgtatcgtatgcatcacagattggcgtggctgctgatatgagatagcatgtctgatttgggatgacatgttggtcagttcgtgttcgacaagctgcatgttttgtacatgaatgtcaaatactcaaatattggaactgcggagtttgttaaaatagtctacatatctatggacgagtcctatctttcatttataatgtatttagtttgaggaataaagtgat

SEQ ID NO: 28637 - DNA, 2998 bp, Zea Mays
agcaagcccttccggtcctgcattttgttgtcccctctccgtagcggagacgttcgttcacttcctctctctcgcctcccgtttgccccgcgtgcgctctgtgtcgctccctctcttgtgaggagtgaggacgactggggcgaccgccgccgccgccgccgccctacgccagatgcccaggtaggggccattcgctagctcttcttcgtgcccttcgccggcgacgagcattcaccaggatcattgatatgatcatgtttctcgtgttttatctttcagttgctgatgcaaggctttcaaaagtttaacagtctcacttgatgcaaaagcaacacaatcactctaaaggtttggatcagtcatttcagagcatgggttcgcggtttccatcccatcagctaagcaatggcttgtatgtctctggccgacctgagcaacctaaagagaaggccccagtcatttgctcctcggctatgccgtacactggcggggacataaagaaatctggagaacttggaaagatgtttgatctccatagaaaatctggtccattgggtaatccgccttcaaggaatacttcctttggtggtgctgccgccaactctggaccagtttccaatgctgtcggtcgctccaactactctggttctatttcgtctgcagttcctggcactggaggatcttctaggacaaaatctaactctggacctctcaacaagcatggagaaccaacaaagaggctatctggcccccaatcttctggagtaaacccgatggcccgtcagaactctggccctctacctcctgtacttcctacaactgggctaattacatcaggtcctatcacatctggtcagttgaattcgtctggtgctcaaaggaaagtatcaggccctcttgattctagtgtatcaatgaagatgcgtgttacctcttttgcacacaacccagccgtcacaaatatcaatgtgggagatggttactcgattaggggcagcattccgaccacaataatctggttggtcgcgttgctctttttggttgggtttgtagctggtggcttcattctcgctgccattcataatccgatcttgcttatagttgtggtggtgatatttggctttgttgctacactggtgatctggaacatctgctggggaagaagaggtgtgattggttttatcagtcgctatcctgatgcagaccttagaaccacaaaagatggggagtatgtgaaggttactggggttgttacttgtggaaatttgccccttgagtcctcgttccaacgggtgccgcgatgtgtgtacacttcaacttgcttgtatgagtacaggggttgggattcgaaagctgctaactccacacatcaccgatttacctggggtctcaggtcaatggagcgtcatgcagtggacttctacatctccgatttccagtctgggctgagagcgttggtcaggacagggtccggtgcacgagtatccccatatgtggacgagtctgttgttatcgacataaacccagacaacaaggacatgtcgcctgagttcctgaggtggctccgcggaaggaatctctcgagcgatgaccggattatgcgcctcaaagaagggtatatcaaggagggcagcaccgtgagcgtgatgggtgttgttcaaaggaatgagaacgtgctgatgatcgttcctccggctgaacccatctccactggctgccaatgggccaaatgcatcctcccgaccagcctcgacggtctggtcctgagatgcgaggacacgtctgacctggatgtggtaccagtctagttggttccggcgcggaggaggagaaaaagatgccttgactcgatttgagttggtttctgtgggttgttagtgttggagggaaaaaaatgtgcaaatgcagggtgtgattatgggctaagtaaagttacaatgtcagtggtcggtcagctacctggagattggtcgtacagtatgtcatgtgtaatttttgtcgtctcgttttggttgagccatgggtggtgcttgtaacaaaaggatggcttggtgtcagtactacctaccctaccatggagcctgtttggagattcagtggtctggtttcccattcatattttgttcttttttcttttggcgtagggttccgacaatgccctggaagcctgcagtttccttctgtacccagatctacatggaaatcgcttacctaaacttgagaggcatatttccggtggtgagaaaccaatgtaaaaaaaagttgattccaattcgtgttgacgcgtttccgaagcttaccggaggacaaaatctattgccgtgggtcgttgagatgctcagagtcacatgatattccaagttttacagcgtacatgcatgcacgaccatcaatcacatccataccgaccggccggtgtgccgcactgtcaacgttaggtcagtggttagcaacacacaagcaggctgcattgcatttgcattaccgttggacttggacaggaattagggaacaaccgggggttgccgcccaggaaccttattagctggtagcatggtcctgtctgtcacaatcttgtgccttcgtagcatcactcatctaccaaccacaacttagaagacaagtctggatggatctagcaaacgacacggatatgacacaactgctgctagcggagcgtgccaagttgctgaaatgaaaatcttgcaccaacatcaacaagctacgcgatcttcaaaactttgtcgcatgtatcatgaaagcaacaacgagagttgaggaatcatttaggtcaggtccgcgcttcttgtttttctatggtttcttggataaacccctaccaaatgcaagcacgtaaagaagccgtttttcttagggcatgttgggtatatctctgttgtacactatagcagctctaaaactttagattggagcaactatgttgttgagttttagtgacatttaggtaaaataaatggttcgtagcttttagaacaaa

SEQ ID NO: 28638 - DNA, 1698 bp, Zea Mays
gttggaagggctccacacgattctcctccttatccaatactagttttttttttccttctccatgtccttgctggatgatcttatctgcttcaagccccatcctgcccttttctaatgcttcacttgattaccaatttggctgcatgcccattgagtgacacataacttctgttcaagagatgataccatcttttgtggtgtgtttgacggccatggaccttatggccatttggttgccaagagagtaagagatctgctgcctctaaagttaggagaaggtttgacgacggaagatggtagagtaacatccactggcaacattaagctcaacacacatgatgtagcttcaccagaacacatagacaaaggaagtactgccatttcctctgaagctcagcagaatggagagtatccagagaccttcccagcattgagaacttcattcttgaaggcattccgtgtaatggatagggatctcaaattacataaaagcattgactgctttttcagtgggactacagcggtggcagtgatcaagcaggaacacaatcttataattggcaatttgggggattcaagagctgtcttaggcaccagagatgaaaataaccagcttattgctgttcaattgacagttgatctcaaacctaacattccaagcgaagcacagagaatcaggcaacgcaggggcagaatattcgcgcttcccgaggagccggaggttgctcgtgtttggcttccaaagtacaactctcctggactggccatggctagggcatttggagacttctgtctgaaggaccatggtgtaatttctacgcctgacgtctcctatcaccacatcacggagaaagacgaatttgtggtgctggctactgacggggtgagcagattgtcaacctacgcaccgtttattccgagtgtttttaggtccttctgacctcctctctttgcaactaggtctgggacgtgctatcaaacgatgaggttgttagcactgtctgccgagccacatctcaggcctctgcagcccggtttctcgtcgagtcggctcaccgcgcttggcggactcggttccccacttctaagatcgatgactgcgctgttgtctgcctgttcctgaacacagacaaagcgagcgaatcgtcgagttctttggccaagaacttggcagatgctgtagaagctagcagtgctgggcgcgccacaactgtccaggtgagcgctggtgcatctacagatgttgccgccctggtaccagtaccagatgggaacgaggtgtctattgctgaaaccatcacaaagctggtcacgctcatggatttgcccaaggatggttgaggctcctgtgattgggacctgaacgaagatataccacatcggtgggtttctgcttgcagttttttttcctgaacgcaagtgtggctagaatttgcagttttgcttcgtgtaaagtaccgcgtcagtttagcgtgatttgttccagtttttgtaatatttcaattcatgttagtattgatgcgtccgtgcgtcgtcgagatcgtagtattctgtaggaaggaggctactgagtttttgtgcttcctgtaaatatattcatcattctatctctggtgtctgatctatatcatcattgctttgggggtcggtcttattaatataaataaggattatataatcatatcggacgaagtgact

SEQ ID NO: 28639 - DNA, 3338 bp, Zea Mays
aacgattcaaaccaaactatcgtggcctcttggggcccactgtctcctctacctcctccgtcctccggatcccaaaatctcaaaccgtcaaacgggacctgatacctgagatacgcgcatggcgtcgccgcgccgcattccctctgtgcctgccagatccggcaacaaagagaatatatctcaagatggagaagctcccttggattttgcaaccttgcctaaagaagggcctgccactacaaggcggaagaagaagcttgcaggtttcaacttgaggaaaagcattgcctggaatcctgcttttttaactgaagaaggtgttttggataactcggagctttctgtgcttactggctcccaaccgatggcaaataggagccctggatcaggggtcagtagtataatgtccccatcctgtcagtcagggagatatggtaacacatatgtacggaaggaagccgcagggaattcacatggaaaattgcctgcaagatatcacagggcagaaagccagggaaggaaattgttttcttcagcaaaaactcctcagggggacaatcagaaagaatctgctggaacacaaaacagaagctctgcaagaatcatccaaatatgtacaccaagagtaccagctggatctatacagaagaaagtacaaaactcatctgcttctacatctcagatgtcaagaataccaaaacaattacgaccttctcttcctaaggtcccaagaagtacttcatctgtgacaaacaatttggaatcacacaaaaaaatagctccagttaaagctgaactagttcacagagtaactggattccctgctagattgaagatcaatcctgtatcttctggacctagcatagagaaggctgtggtgcctgctgttactgccatacatgaagaagccactgtgaaatgcaaaaaaaacccagcacacccacaaattagcccatccaccccctttgatagcactgtgtcaaaacttgctaagccatcagcacttcgattgccttcaccttcacttggttttttcactcaggaaaaagcgcatgtgccacatggtgatgctgctaaaagaaacgtggggaggtgtttctcttcaaatacttcagcgcttgatagacctcccagatacaggcagtctgaggaaagcagactccacctagcaaagcagctgtcaaccaatggcactgttgcttccaatcttgtgctacctgtgactagagagggccatctcaaatctttggtggttccagaaaatgaatcatcgtcaaaagttatcattacatacttagaaaaatctggaaatgtaaataatcaagcaatgccaaaggctgatttcttattggcaggaactggagctactgatactacacaaccaatgaatttagaaaagaaagatgacgctggaaatagtgagacattgcttgtagaaggaatggatgatatcaaagagattgaacctcttgataatttctacgctcctgaagctatttgttcctcaaccattcgacctgttgaggattctttctcgcttgaagccagttattcctcaactaaacctattgtagagagtaaattgtcactctcttgcatttcttctaaagtacactcctctagtgagcttagttgtcaaggcaagtcagtcagtgatcccagtgcagcgatggacatggaaaactctaatgttggagatactgcacttagcgcttctttgtcgaaaggcaggagttgcactccagctcttgatttgttgcaaggattttattcatttgatcgccagaatattgaatgtcctatgctgatggaatcagtatctacaatatgtgcagaccagctgccacattgtgacagtttaagcgatgaaacgccagccctagctggcagtcattcagatttgaatgattctttgtgtgatgaagctaaacctgctttgtcaaaagaaccaaatactgaaggtgaaatggagcttcaaacaaacagtaccatagctgtaaaggaaactccgttgttagatgtggggtgtgggcatattcacaattataggaccacagattgttctacgagattggaagcacctacaccttgtgtggaaagacgtcatgctttattagtagaaccaaatatggaagaaaaaatggtgcttgacacaaacagattgtcagctatacagtacacaccacatatagaaaagaacaaggcactggaaagatcaccggcaaatacaatccgtaaagatcatctgaagaacttgataccatttacagaagaatggcttgctgtcatggagtcttgtgggcaggaagttttggaacaaaagaccggtgctgtgcaaaattctcctcctgacaaaacacctccagaaccgagtccttggtcaccggttaaacggaaggcgcaagatgttggaccatttgactgtacgaagtactccaaaagcatccgaacctctggtacctaactgcagacgtttgagttcacattctatcacggtatagccacggtgataaggtcagggcatccgagcttttggtaccctaactgcagaccttgaccttcacgctctgtcaactgacatggtacagtcactgtgataaggtcagggactcccagccgaacacggcgtaaatacctgctaccgattgtcatttttgaccaaactaactgcgatgtagttcagcagccttgttgacctgcatttttttgcttccccccccccccccccccccccccctttcccccctttttttgttattgtgaaatactgttgagatcacgccccaagcaaacgcttggtaattaagaagggaaaaaagagagagagagaggagaaaggatctattattatgtttgtctcgattgtccttttttggccattagtaggtgactattgatgtctgaaattccgaacgggatacctgatcgaattccttgagagttggtcaggccaatgcagaattgaggtttcacggcggcaagccggcaatcctgctgccccagccaccagagaagagagtcagattttctggtgaacacgagagagcatcttgatgtgcatcttccattcttcctacctcgtcctgttccccttctctagtgtcgtgtagcgctcagcgttgttatgtgtttggttgcagggcaactgaaacagttggagacagaacagctggaacagccacgtcctgttgccctattttgtccgtctaattctgacgaatagctagagatggttctgtcccaatttatgactctgtactaaacaatcttatttaaaaatcgttctatcgttgcaactaaacacatactggttttctggacggaatgtgtgttccatt

SEQ ID NO: 28640 - DNA, 1015 bp, Zea Mays
cgaccatggtggcagccattcctctgtgtccgcacctcccccgtttgctttgtcgtcgtctctccgattgccatagggagctaagaaattatgaagaaacatttggatcgcgatccattaccacccctttatacactccattgtaagcatacctgtccatgccttatttacattacttgtttacgcacagcagttagttttctattatttgcacccctcctcagcctacatgccacaaatctcatttgtttcttactgttttcgcatggtcacttactaacaagctgatttgcacaacatataacttctatctggaacaggtatgctttctccggtaagcaaaatataacatgccttttccatattcacaacaaaaatacacaggttcattttttttccatcgtgtcccctaactgggaaaaaataagaaaagatatgtgaacaccaaaaggggatgcaactgcgaactgtgagaaattttccacatactacgctcacattgtctggggcaatgggatatcatactcatacagtaatactgctgcctgtcgatcttaacaaatttcattcaagaactagggcatgctaatgttcaaaagagttgtcagcgattcatgacacctggtagcactacaaccagcaatgtatggatgaattgaaggaagtaaagaaggcagacaatcttacagaaactttacagaaactctgcatcttgaaactgccatgattgacaaagaagctggatgcatcatgtgcattggtgtcttcttatcaccatgcattaatgtgaagcaagttcatttgttgactaagaatggatgaacacaaatcagtggagttcgttgcactagagatggaggttggagaggtgtggtaggtgtcaatatggctttgatacaattttgccctacaatctttgtacggaacaagaaaaatgacattgtacgtggatactatattgtaattcaataattttttctaaataataaatatatttgtttatagtttgtgtatg

SEQ ID NO: 28641 - DNA, 2347 bp, Zea Mays
cccgctgctttaaatctcggcgttttcgtggcgcgtgcaggcggagaggaagaggacgccaatccaaatccttatccccacgtgtgttatccttccattttgtgggcgggggtgagctcctgcctcctgccgccctgcttcgcaatcctcctccacctcgacaacgacgccgtcgcacctcgctgctcgccgccacagcggtctcacctcatcagcttgtgtcggccacgggacgcgaccgaggcgagggcgggcagtctttgtccggtcggcgatgcagaccctccgtcccgcgcccgcctccttcctcgtgccgcccgctccccagctcctccgcacagcgccgccaccagccccgagagcaaacgctgctgctcttgccgcggcgtcgcacggctggttcccctcgccgcaccgtgcctgccggcgccgtcgacgcgtgacaaggtctgcgtcgtccggtgcagctagcgccaccgtggcctccgtggatgatgccaagaaggacgtgctcatagcgctctcccaaatcatcgatcctgatttcggcacggacatcgtgtcctgtgggtttatcaaggatttggaggtcagtgaggccttggaagaggtctcatttcgtctggagctgacgactcccgcttgcccaatcaaagacgagttcgaacagaaggcgaacgaggtcgtcgcagcacttccatgggtcaagaaggtagacgtcacaatgtctgcgcaacctgcacagccggtatatggaggggagcttccagaagggctacagaagatctccaacatcatagcagtttcaagctgcaagggaggggtagggaaatcaactgttgctgtaaatcttgcgtacacactagctgggatgggagctcgggttggaatctttgatgctgacgtctttggcccaagcttaccgactatggtttctcctgaaaaccggttgctagtgatgacttacctttagaacccagaaagcaaatatattcttccgaccgagtatttgggcgtcaaaatggtgtccttcgggtttgctggacaaggaagggcgatcatgcggggtccaatggtttcaggagtcatcaatcagctgctgaccactactgactggggtgaacttgactaccttgtcatcgatatgcctcctggaacaggcgacatacacttaacactctgtcaggtggctccattgactgcagcagtgattgttaccacccctcaaaagctggctttcattgatgttgccaagggagtaaggatgttctctaaactgaaggttccttgtgttgcggttgtagagaacatgtgctattttgatgctgatggaaaacgttattacccatttggacaaggttctggaactcaggttgtgcagcagtttggaatacctcacctctttgatttgccaatacggccaactggatccaatccaaatactccgattaacagtggtccacccctatagaataatctagggattcaaatggactaatgattaaaatctacaatccagattactgtaatccgattgggatctgaacaagcccctaaataagagagcaaaaatcacagtttgaatcttggggcatgtgttgttcaacagtgtgctaaaatcaggcaacaagtttctacagcggtgtcctacgatagatccattaaagcaatcagagtgaaagtgccagattcagacgaagagttcttgctgcatccagcaacagttagacggaatgaccgatccgctcaaagcgtggatgaatggacaggggagcagaaggttcagtacagtgacataccagatgacatcgagccagaagagattaggccgatgggaaactatgcagtttctataacttggcctgatggatttagtcagatagcaccttatgaccaattggaaatgctggagcggttggtggaggctccgagtccagcagcagcgtctgcagtggcctcgtcatgatacagcagaaagaatgttcagttagcaaggggcaagaaggccgacttttagctcccagaaaatttatagctctgctacaaattttgaaagaattttacagtactgtagaaccatgctcattgaattttaaaaaaaggcagcagctttcgttcctcttaaaccattgtgcagacccccgttctcactaaaccacaggctagccttgacaataccaaaccataaaagaaaacggttactgttataaagatagttttttttcccagttatatagaaaattgatataaaactagtgacaaacagaaggtgcatgggtggatctaatatgtttgttacatatgaatatagtgaatacaagtattattgataaccattgcacatgag

SEQ ID NO: 28642 - DNA, 408 bp, Zea Mays
tcttcccaaaataatattcctgctgtacaacgaggtatattggaaatcattcctatgctacgcccaacagttgtattgtctcccatgtggacacatctgcttcttgagctgctatgctatcttaatgggcacgaaggccccctccagaaaaataatgaacaaacgcccgatcataattctcaagcactggtagacggtgcaaagcatgctcttgttgaaagaagcaatctcaatggcgggggtacaaaactggatatggtgggatctggttggggcattctatttgtagaaaaacttgtaccaatcattgccaaccttttcttggaggctccaccaaatgaaaggtttagtgtctctcctgaagtcattcaaggtcttggaaggtatttgctttttatgatttatatc

SEQ ID NO: 28643 - DNA, 1123 bp, Zea Mays
ctgtaagccctgctcgactccgctggacactcatggcaaggtccgccgacgccagccctccgatggttgatccgaccagctatcagagtcttgccggggctctgcaatacctcgtcttcacccgccctgacatcacctatgccgtctagcaggtgtgctttcatatgcacgctccgcgggagccacatctcaccgccatgaagcggatccttaggtacctccaaggcaccaccgacttcggccttcttcgccgatctgcaaccaccaatgtcgccgtctacaacaacgctgattggggtggttgtcccgacacccgttggtccactttcagtttcgccgttttccttggagacaatatcatctcctagtcttcgaagtggcagtccgtcgtctccggctccagcgccgaggccgagtaccgcgccgtggccaatggcgtcgctgaggcggtgtggcttcgttagctgctccaggagctgcacagtccgctgacgcggagcacccttgtctattgtgacaacgtcagcgccatgtacctctccaccaacctcgtctagcatcagcgcacgaagcatgtcgagctcgacctccactttgttcgcgagcgggttgcactcggagatgtcttggaaagacaactgaactctcaaggcgtgaaagggaggagcttgagaaacaaaaagctcatgaacgttatatgaaacttcaggagcaaggaaaaacagaacaagcacggaaagatttggaacgtcttgctttaataagacagcaaagggctgatgctgcaaagaaacgcgatgaggagaaagctgccaaggagcagaggaagtcggaagcacggaagtaactgcaatatcatggacgatgagaccacgaaagcatgatctgcgttagttggatatttatttctaatgcatcagttatcttgttataaacctggtccctattctgtatccccataaaatatgcattgacaaaattagtaacagtcttgtgggcgtgtcttcctgtaaacttgagcttgacaaaattagaaagtagtattaaggtcagcttatgcgaaactggctcttttgtctgctgtccggttgatgctggtgaaattgatgggtattattgggac

SEQ ID NO: 28644 - DNA, 3087 bp, Zea Mays
gatgccgtggcccgtgtggatcagatgacttggcggctacgaagggttctctctttccattcctccgcgccgccactagctgtcctaaaccctaccaccacttgagcctccaccttctccgcgtctcaccttcttctccgttctccttccgctcccctcttcacaacgaagccctagtgtcccgcgacatggcatctggtctggaggagaaactcgcggggctctcaacgggcggcgacgggcaaaatcctccgccggcgggtgagggcggagaggagccgcagctctcgaagaatgcgaagaagagagaggagaagaggaagaagctggaagaggagcggaggctcaaggaggaagagaagaagaacaaggctgcggctgccagtggaaaacctcagaaggcatctgctgctgacgatgatgacatggatcccactcaatactatgagaataggctcaaggctcttgattcactgaaggccacaggtgtaaacccctatccccataagttcccggttggcatttctgtacccgaatacattgagaagtacaggaccttgagcgagggggagaagcttacagatgtggcagagtgtttagctgggaggatcatgaacaagagaacatcgtcgtcgaagctattcttttatgatctttatggtggtggcatgaaggttcaagtgatggctgatgccaggacctcagagttggatgaagctgaattttctaagtaccactcaggtgtgaagcgaggtgatattgttggcatatgtggatatccaggaaaaagcaaccgaggggagcttagtgtatttccaaagagatttgtcgtcctctctccatgtcttcatatgatgcctcgacagaagggtgaaggaagtgcagtgcctgtaccgtggactccaggaatgggtaggaacatcgaaaattatgttttgagggaccaggaaactcggtatcgtcaaaggtatcttgatcttatggtaaaccatgaagtgaggcacatcttcaagacacgatctaaaattgtctcatttatccgaaagtttcttgatgaccgtgaatttttggaggtggagactccgatgatgaacatgattgctggtggagcagctgcaaggccttttgttacacatcacaatgaattaaacatgcggctttttatgcgcattgctcctgaattatatctgaaggaactggttgttggtggattggaccgtgtttatgaaattggaaagcaattcaggaatgaaggaattgatttaacacacaatcctgaattcacaacttgtgaattttatatggcgtatgcagattataatgatttgatggagcttactgaaaccatgttgtcaggcatggttaaggacctgacaggtggctataagataaaatatcatgcaaatggagttactaaccccccaatagaaattgatttcacgcctcccttcagaaggatagatatgattaaagatttggaggctatggccaatctcagtataccaaaagatctatcaagtgatgaagcgaatcgttatttgatagaagcatgtgtgaagtatgatgtgaaatgtccacctccccaaacgacatcgcggttgcttgacaagttggttggccatttcttggaggagacatgtgtgaatccaacatttatcatcaatcatccagagataatgagtccattagcaaagtggcataggtcccgacctggattgactgagaggttcgagttgtttgttaacaaacatgaggtgtgcaacgcatacacagagttgaacgatcctgttgtgcagaggcaacggtttgaggaacaactaaaggaccgtcaatctggtgatgacgaagctatggctttggacgaaacattctgtactgcccttgagtatggtttggcaccaacaggtggttggggcttgggaattgatcgcctcacgatgttgctaacagattctcagaacattaaggaagtacttctattcccggctatgaagcctcaagagtagtaatccacagccaaaagccacaaaagggtatgcttacgagtctgtaacttttaagactctttgtttgctcggttgaaaacattaaagcatgtaaggcattttttctatgcatttttcaagttgaaagaacatttaaataatgcacctttctgaggtatggtttagagttagggtgtctataattcaatacacatttttaggccaagtgacctcttaacgtttttctgcatttagactgtgctcaggatcgttcaactctgtgtatgtgtataggtgttctcacagactttttaaggttgtataaaattatgacttccaccacagaaattataaacaagattatattttgttataatgtatgtgatcagaaaataactgctagcaacccacaattaggtgggtccaattgagatagaacattaaaagctacattaccattttcatcgtgactaatgagtaatgacattgacatcccatattttacccccatgccttggcaccagcaaagaacgatgattgcctattaccctgtgctgggcttgaggtggatgagggaacatacaccctacactatggtgatatttcaagatatctgtatgattctagattcactgggcgtgctgtgtccattgttctactttattggaagttctgtttgagatgctgcatcttcagttgtctactgccccgctcaaagcaaacatgatgctacataggctggaggatacatcaaagttggacctgttgtgaattatacttatttttgctcttgtgcgtgcgaggtttccatttttcattatttgtatttcccagcagacagttattaactaaatactgtaacgtcacagtaagttcagtttaacttcaaacattgtagttttgaggagattgcaaatatttcgggtcaatgcaattggtgcttttgatagccatgcaaaatgcctcttctcgtcatgatcgtgtttgctttatgctgatgttcagccatcattcaggttaaactggcatgtaaatgtaaaccgtgcaatcagctgggtttgatattataaattttaattggcaatacatgagtaacactttt

SEQ ID NO: 28645 - DNA, 913 bp, Zea Mays
cgcagtcctaggagttcggccgctttcctccgctttccgtttcgccgccaccgtcttccgccgccctacctcgccgtcgccgacgacatgcccgaaaccgcggcggaggccaacctccgtaggcaactggagcaaaccctcgccgctgaaccctccagcccgctccaccactacaaccttggcgtcttcctatgggaccgcgccgaggcagagcaggagggtgatggggaagaggcgcggaagctccgcgcggaagcgtcggagcattttctcgcggcggccaagctgaatcccaacgatggcgtccccttccgcttccttggccaccactatgcgcgcggcggtgacaatcaacgagcggtcaagtgctatcaccgtgccgtgaccctcaaccctgacgactctgaggctggtgacacactctgtggcttgctagatgttgaagggaaggagagcttggagcttgctgtctgcaaggaggcagctggcaagtcaccgcgtgcgttctgggcttttcggagacttggctatttacaggttcatcagaggaaatggtcagagggtatacaaagccttcagcatggaatacgaggttacccaacatgtgcagatttatgggaggcacttggtctggcataccaccgtttgggcatgttcaccgcagcagtaaaggtttgctgttttcagttgtgagcatccttaataactgttgcagtgcgctgtattgagccttctcaatgtgcttaattcagtttttgccggcagtcatatggacgagctattgaacttgatagttccagggtctttgcattgatagaaagtggaaacatccagttaatgcttggttactatagaaagcactgatctctttcattgttaaaactatttaatttctctcgaaatacacaacgcc

SEQ ID NO: 28646 - DNA, 1594 bp, Zea Mays
gaccacagccataaaaagtgctcccatgtacttgttggcatcaagtacagaatcgtgactcatttttgttctcaggaaaagtgtggagatcaccaaagccataacagttatctgaatggtcttgaatatatggactggagagtttcttttcagcagcagtacttcccttgaaaagcatgctttgaaaatattccatctggatattcggcgacttgcattcacttttaccacctttttctttccagtattgtttgaactgcactgtttgtcttctactagaagagggagataggacgtcctgaaggattgtgcaaaattttcaattgtatggtactgatacttgttttgatcaccagcccagtattgcttttggtccatcttagaggttacctggtcagtggccaattgagaaaacttgttacattgtttttgcaaaaggacatggaaaacttgttacattattttgcaaaagcacatgtattgcagaatagcgacattttacgctcctgcacataattatattcctctcctcatctcgtctcctactagggtatcagcacactcagacaggccaagtatctgcatacaatcaactgttactattgtatcatcaagcacattccaatgaccttcaaaatggaaagctcactatatgcaagacatgatggagatcatactggctaacataagcacgcaggatgctgggatccaagtctgtgcgcatgaggagacatgtaccttgacggccggatgaccccgcttacttcgtttatgattctcataggtcttttcctggtaacacacatatggacagacgtcgctaattcctgaaagcaaaataaactcatcatcagaaatctctctctctctctctctctttttccccgaatatgacctaccaactttgcattgtaaaacaaacacatgcatgccatacacttgtattttagctctcgctaaagcacgcagcagcgtaaccgtaacgaggcgcggtatcctttcgattctggactgaactccatgtgttcaattcgaactggcctaaggttgtctgcagatttacaaacccgcttacagtcgtgattttgtaatttttatttatgtttttcttacagcatagaacctgctgatgcatcaatgtcccactatctatttgggcacaagatgagcctcattaatcatgaggaatctagcagacgtgttgggttctcttggttcactcccagcgcgcagggggacgccaagaagcactactgatgatgcggcaggctgggggatcggacaggcccacattaaaggcggtctcgtcaacgtcatggtctgcgctgcttcctaccacgagtaaatgaggaactcgaagcttggcaagactgaggagagagagaagaaaagcaggctatactgctatagccagtttagtcacaagttgatcataaattaataatagaaagctaactacaaagatccgccagcaatccactatacattactctaattgcttctttcaacgtcctaaatctcaggaaatactataagatccatgcatagtgccataactctgaatgatgcaagtgttgttttaatatggtccaac

SEQ ID NO: 28647 - DNA, 1488 bp, Zea Mays
atgccgcgtggcttcctccccaccaacgacaccctacccaaaaccctcgacgcgctgctctcgcccagatcccgcacgtacgcgcggcttccttcccccggctgccgagatgcatccctcttccccagctgctctcccccaccaaaccctcgatgcgcggcttcaacagagccccagcccgagcccatcccaccttcaatgccggatcacgccccatcgccaccaacggtgccccaaaccctcgacgcgcggcttcaacggagtcccagcccgagcccatcccgccttcaacgccggatcttgccccatcaccaccaacgacgctgtcaagcctctggatcctccgcagacgacgtcaagtggtccaacatcgatgtccaagagttcatcgccttcgatccggtctacgggccccagaccatctattctgaactggaacacaggacgctgcgcaagctgttcaaggtggatgccgctgactatatgttatcactatgtggaaatgaggctctcatggaactttcatctcctggtaagaatggaagctttttctacctaactaacgatgatcggtacatgataaagacgatgaagaaatccgaagtgaagaggattgcaatagcctatctcctggctgcagtatgtgaaatctggctcaagggagacgacgatgtagattctgggtatggtttgctgaggagataccgctaccaattgtttgtaggattggtcctctctatagcgtactctattcttctatatggcatatacgttccagactgggagtaccagatagcaggccctggttccagttccacaaagaagtcgttctttgtgaaatgcggagtgagaggagacaccagaccagcttgcaacgcagtcggaatggtcgaccgtacgatcctagggatcgaccacctctatagacgaccagtttatgtgcgcacgaaggaatgcagtatagattatctagagaatgggcctcttccacctgatgctccatcgtggtgccaggcgccatttgatcctgaaggcctcctcagcttcgttatggcgattgtcacttgcttgatcgggctccagtttagacatgtaattatacatttcgagaagcaccggggaagaatcgccagttggttggtcccttccttcagcatgctagctctagccttcgtaatggacttcgtcggaatgcgaatgaataaaccactatacacgatgagctacactctggctgctggcgctgcgggtcttctcttccctggaatctatgttcttgttggcccctcttgaacctgagaacatgcatacgaagttctgttaaagttagtcgaaccattttctgattctatgttctctctactgtttgacaacaacacatcttttatgaattaattattaaacaaaacgaggcgcaagaatggattggtaattcatatgttcttttgtgatgcgaatatattctggtaaagacatgttatcgtggag

SEQ ID NO: 28648 - DNA, 2536 bp, Zea Mays
acttttgcccttcgaactaaaagcgcctgcatctcaaacccgacggcgctctcttctctatcctctgtgtcccctccaccaaaaccgacgacgacgtcgctctcctccaccggtgctcggcgctctccctccaccagcggtggtccacagacgctcggcgagctccaccggcgggcgctggcggctggtcagatccgctcggcagtcatccatctggcacatcgggtagctcgcgcctccgttggcagtcccaccgccgcccggccctcccccagcgcccccggtgatccggaccgcacccgcttactcggcctaacgaccggctcctgccccgacgcagccgaagctcccagcgtcctcctgcaggccgagctgaaggttcagcgcgccggtggagttagacgacgaaactccgtcacgtcatacctctccgcctcccgtcttccagacgtctctaatcggggtcccagcgtctcggagaagaggagcagcacggcacggcagctgtggcgaggaaggctcctgtcccatcccaacccagttagcagccgcccaaggaggaggagatccaatcggcgtgcgggcgtccgcggtccatccatcgatccaattccaatctgcagcatccttctggtacaggtacacccttccctcccggctgtgcgaagcaactccaccctaatttattttgcagaaaaagttatcggtccgcccttggttactgaaactggtcaggtgtatgtaattttgaagtaacaaaggatttggaacccagccctctgttctccaccaccgcttcgaagatgccgcaggtaatggtggtggcacggaacttcatggatatggtggctgctcttcctgcgggcaagcttgatatgctctatgactcagcctttatctgtgaggcagtactcaggtcacttcccccactggcaaagaagtatgcactgcagatgttgtatgtgctggcaccagtgaccgctgcagcaatggaagagtgggtgcttgatgaatatgctgccaagcataaggttgccattgataagcttctacagctcagggtctttgttgaagtgcgcgacagacgacgggacgtgagctacaagatgaatcagaagttccagggaaacatgcagaagtatttggttgatggtggaagtttaccaagggaacctttaccattaagtgtcactggtcgattgcccacaccagcagatctggaagcctatgctcttgatcaatgggagtgcttcttgttgcaattgatcaattcatctcaagtcgaaaaagggtcaagttttagctcctccatgatgaagacgtttcagcgtggtcttctgagttcaagggatggtgaagcttcaaagttgactgaaaatggcttccaatttcttctgatggaaacaaatgcacaactttggtacataatgagagaatacatttcatctgctgaggaacgtggagtggaccctacggagctgatatcatttctcttggaacttagctttcataaattgggagcggcttatagcttgaacactctgactgatgtccagaggattgccatcagggatcttgcagaattaggactagtcaaacagcagcagggtcgaaaggatagctggttcattcctacccaattggctactaatctttcagcaagcttgtcagattcgtcatctaacaaagagggatttgtggttgtggagacaaactttcgaatgtatgcatactctacttccaagttgcactgtgaaattctacgcctttttgcaagggtggagtatcaacttccaaacctcatcgtaggagctgttacaaaagaaagtatctatggtgcttttgaaaatgggataactgctgagcagataatttcatttcttaggcaaaatgctcaccctcgtgttgctgacaagatacccgctgtcccggagaatgtcacagatcagattaggttgtgggaaactgacctcaacagggttgagatgattccatcgcatttgtacgaagattttcctagcaaggaatggtttgaacaatgctgtgattatgcaagggataatgggtacttgctgtgggaggaccccaagagaatgagactaattgtacgaggggagttccaccccgaaatgagggagttccttcgcaggcaaagatgaggaacgaccttgtacttgacggaccatgctatgcttctttgtagtgcatagaaacactgtatcgggtaatagttctcctttaaatatcaggaaagggtctagaaaagggctcagtttttgaattattttggtgacctgtgagctgtggaagcatatgaataatgtggtgttcaatggagcaaggcccaacatccttgatctgcttctaaatgttactagtgactgtaccctatgctggtgtatggctggtggccaggtcctgttggaactcttaggtaggtagtatggtgggatggagttggtatgctcttaatttgttgttatttggattgattctatataggacggagtgattttaaaaatgaaaaaaactcaaa

SEQ ID NO: 28649 - DNA, 1476 bp, Zea Mays
cgcaggcacagatatccatgcatatatgcatgcataatgatgagagagagagagagagagagagagcacagcagcagagcagagggccggactggactgtgagtctgtgacccacgcccaccaccacagcaagaatatttgaaggtggcgcgctatgtgcgtgcatgtgtgcgctccagtctgaagctaattagctttagggagagggccggggccttcttctcttctgtcgtctccttcatctctctcgcactatagcaatctagcatagagcgcctttgctcctagcttgcctcctctcgtcccagtcgatgatggcggcattcctcgtggagaggagaggtgcggcgcgcggcggtggctgtggtgatacgacgacggggcgcggtggtgtccgatccatggacgccgacatgggcatgagctcgcacgctgcagctaataagccggcgccggggccggcccccttcctcaccaagaccttccagctcgtggaggaccaccgcaccgaccacgtcgtgtcgtggggggaggacggcgccaccttcgtggtgtggcggccgccggagttcgcccgggacctcctccccagctacttcaagcacaacaacttctccagcttcgtcaggcagctcaacacctacgaagatcgtggcagacaggtgggagttcgccaacgagttcttcaggaagggcgctaagcacctcctctcggagatccaccggaggaagtcctcgtcgtgctcgcaaccgccgcagaagctgcagccaccgccgctccctcagcaccagcggccttacgacctcagcctcttctttccgccgccgcagccgcctcggcatcctacgtcgggctaccacgtcgtccaggaggaagaccacggccacggcgggaataaggacttcctggcgaccctgtcggaggacaaccgggagctccggcggcgcaactcgctgctgctgtcggagctggcccacatgaggcggctctacaacgacatcatatacttcctgcagaaccacgtggagccggtgccgccgccaccgccggggacgacgacgaccgccgccagctgcaggctggtggagctcggctctgccgacgacgcctcggcggcacagacgtggaggccacgccgcggcgacgacgatgaggcgccggtgaagctgtttggcgtgcgcctgaacgacggcaagaagaggagggcacaacaggtcgtgccgctggaagaaaaaggtggtggtaatgatcaaggtgaaggccttgccgatggtgaccgcaaatggccatggcgttggtgacgagatgatcagcgaggtgagagtgagacgtaggtgattgttgcgtgtagcgcgtagactaattaattttctagatagagaagcagaggtacgtacacgctgcagggagctagctcggtagtctacggtttatgtaataagtttattagaatgcatgattttgatttgttttcc

SEQ ID NO: 28650 - DNA, 2975 bp, Zea Mays
tttcggaaaaaggtgaggcccaacacctctgcctcgcaccagtaccacaacgccacgacacgccggcgaggtggacgagcggcggcgatggcgggcggcgaccgggagcgagacgcggacgaggagacgaggaatcagatgatgcagaaccttttcggggaccagtcggaggacgaggacgatgcggacgacgacgacgtcgccgagatggtcgatgaggacgacggccaccagccgcagtcgcccccgcagtcgcccccgcagcgccaccaggagctggacgacgatgcctacgacgatgaggaggaggacgcccgcagccacgcgcccgcccgcgcaagcggataccactccgaggaagtggatggtgaggcagagaatggaggggaaggggaaggcgaaagtgaagggcaagttgtaatcgaagaggaaagtgaaggtgaagctcatggtgccgatcttgatcaaggagaaagtgatggggacaaagtccagagctccccagaaagagaactcgatgaccagaggatggaacctgatgcaagaggaatggacagtgaagatgaaggctaccagcagaggacagtatctggcagaagaaggggagttattgcctccgaatcggagggatctgaagatagttactatgctgctggagctcaagaagacgaggaacctcgccaaacaaggaaacaaagctctccgttggaggaagaaagagatcatgaagtagttcgtgatgtgtttggtgatagcgatgaagatgaaccagctccatatcgtgttcgccatgaaatcgatgaagattctcataggtctcacatggaggatgaaggccattatgagaaggacatgcaaccagatgacgttgtggctgacgaagatatgcgatatgaatctgatgataatcgtgaactgaaaccaaaagagaaaccagtcggtccaccactagacttggtggttccatttaagcaaccaccagctcgacctgacaaaatgaatgtgatcaaggtatcaaacattatggggattgaccctaaaccctttgatccaaaaacatatgtggaagaagatgtttttgttacagatgaatctgggactaagaaaaggatacggctagaggacaatattgtgcggtggagaaccattaggaatgcagatggcactacatcttgtgaaagcaatgcacgctttgtaaaatggaaggatgggactatgcagcttctgattggcaatgaggttcttgatatatctgtacatgaggcgcatcatgaccagtcccatctgtttttgaggcatgggaagggaattctacaatcacaaggaaggcttttgcacaaaatgcgatttatgccatcctccctgtcttcaaagtcgcatcgcttattaactgctctggttgattctcagaataagaaaactgttaagatgcaaaaatggtttgagactaaggatcctgagaaagcgaaaatggaaaaagaaagggttagcaaatcactattacttcattatctggtgtatgtaacacaggatgtgcatgtcttgcttttgtccaatatagctgcttgaactaagatccctagttcaggtgtgcattacttgtgttgtgcttttcctgttcatctgtttctcctgttggttgtcctatacatagttccttacatgtgtagtatttccttgagaaggtttgaactaccccgatgtataaacttattgtttttagttacaaaatcatttcctgaagttcatcttgtatagttttctaaatcagtttaggtctcatcagcttaaagcagtatgagggatctgaaagtaatattggcggtcactttgttgctagtgttattatgatttagtgtgcatgttcaaattagcaaccccaaggtaaagttacattatgtttgtccattcaaatagtagcactcatgtcatgtttcttgctgatctgattttcctttttgttaaggactgatttcatattcatctggacagattttatacttcctactgatacggaaacatgcaggttttgggccaaaatattcgagcccattcaatccttcaacgcaaaagagaaaaagtgaaccgcaagtacacacagcctgcccgtccaaggcggcagctttctccagggttcttggaagacgctctagatgaggatgatgagcctggctatgattctcggcgaatgccaggccgtaggcgttttgaggatgaattggaggctgaagcactagctgagaggcgtatcattaacgcgaagaagtcaaatatgagcagaaatgttccccacaaaccaccgtaccctcctgcccgtccaccgagacgtcaagcggatgaatactcggggagtgagagggaggagtcagagtacgaaacggatggcgaggatattgaacattcactgcctcgtggaagaagggaggacgagctggatgaggaggaagaatacgaggaagatgttgaagaagaagaagcgcctctgtcggatgaagaaatggaggcaccgaaacgtaagagagaatcagggggtggtgggcaaaggcgcgaggagctggtgtctgaggaggacgacgaggaccacgacgattctccgccaaggaagcagccggctgtttcgcatcgtagaaaggctgtcgtgtttgatgacagcgacgaggactaaaatttgtaaaaccgtatgacgacctgacatgatacgcttgctttttctccccatttgtttaagagaatgattagttatttttcgtcatgctggtgtaatatggttgcaattctacctacagaggtgagattgtacatgctttaatgatgcgtgggctacagtgaaaggaaacgcaagcatgaaacgatttttttttctttttggttagaaaggaacagcgaaacatgaagaaatcgataattggattggagcacgttcataatagaaccacaataacgtactggaaataaaaaaaaaaactgaatgctgg

SEQ ID NO: 28651 - DNA, 4730 bp, Zea Mays
tgcatccatccccacgatccgccgcagggcgccgcaacgccctcgccgcctccggtggccactgacgtgtcaccccactcccttcttcgtcaccccatctccctttcccgccacttctccgcgccatttcccttgcccactcgcctcctacctactaataatcccctccagccagcaattctcccgcaaaaaaagacaaaaccctaaacccgcggagccggggtggagagcagccattccttcgctcccctccgcaatggcgtcgcgccgagccagcaacggccgctctcccctcgtgcggaaacagagtcagatcaccgcctttttctcctcccctaccccctctccgtccccctcgggcccgagccccggcgcatccaagccctctccatcgccgctgaaccctagtgcgaggacgaggtccccacttgccgcggtatccccctcctctcccaagctgccacagccgcagcagaaacagaaggaggtaaagaaggttaaggaggagcatgatgccgccttggtgcctgcgcccgcggccgcggaggtggtggggaggtgtttgcgggtgtactggccgctggacgacgcgtggtacaagggcaaggtggaggcctacgacgcggcctcccgcaggcaccgcgtgaagtatgacgacggcgacgaggaggaggtcgatctcaggaaggagaagttcgagtgggccgccgtcgttgaggagtcgaccttgctgccggcgaggaagctgcggcgtctccggcggatgtctgatatctcggtggcaaaatcaccggctgaggcagaggatggcgcaggggattccactgaggacgaggactggaagagggatactgttgtggaggatgcttctgaggaggtggagctggatgaggaagacgaggaggaagttgttgcagtgcgatcacgaaagagaaatccaaagaattccttgatgtcaggttcaacaccatcgacattgggttctggtttgacatcagaatcggagccaagaatttcgaagaggaggaaaaacgtggatgtggcctcattggattttgctaaaaggttcaccttcgaagcagttaataccaatagaaaagttgacccagaagtgccaatgagctgtggccagaaggggcaaactacggggaatgactacactgctcctactggggatgcagctgagcgctttgggcagcgggatgctgagaagtttaaattccttggagaagggcgcaaagacgcaaaaggcagacgtcctggaaacccgggctttgatccgagaacacttttattgccacctcagttcttgaagaatttgacaggagggcagaggcaatggtgggaattcaaatcacagcacatggataaggttctgtttttcaagatgggcaaattctacgaactatttgagatggatgcacatgttggagcaaaggatcttgatcttcagtacatgaagggtgaacagccccactgtggattcccagagaagaatttatcagtgaatttggagaagttagctgagaagggttatcgagttctggttgtcgagcaaactgaaacacctgaccagcttgaacttcggcgtaaggagatgggtataaaggacaaggttgtcagacgtgaaatatgtgcagtagtcacaaaaggaacactaatagaaggagagcacctactggcaaacccagatccttcatacctcctgtccgtgactgaaagttaccaacgaagtccaaataagagccaagacacatgtaccattggtgttagcatagttgatgtttctacaagcaaatttattgtaggacagttccaagatgatccagagcgccatggattgtgttcaattttgtctgaaatgaggcctgtggaaattataaagcctagtaaaatgctgagtccagaaactgagaaggcattaaacaacaacacaaggaagcctttaataaatgagctggttccgtccacagaattctgggacgcagaaaagactattgatgagataaaacagtactacagctcagccaataaacagaaaaaagccgatgatatacaagactgtgtggactgtctgcctaacttattacgcgagttaattggagcaggtgataaaacatatgcactttcagctctaggaggttccttattttatttaaggcaaacccttctggatgagaaaatacttccatgtgctgagtttgagccacttgcatgctcggggttcatcaacaatatccgaaaacatatgatacttgatacagcagcattggagaatctagaacttttggaaaatacaagaactggtggcctctcagggaccctgtatgcacaactgaatcattgtgttactggatttggaaagagattgctcaaacggtggatcgcaaagccattgtatgatcgcagagaaatacttcggcgtcaaagtgctgttgctactttcaagggagttggccaagattgtgctgcacagttccgtaaggatttgtctaggctccctgacatggaacgcctgcttgcacgtctttttctcaagctgtgatgaaaacaagagaagttcatcagttgttctttatgaagatgcatcaaagaaaactgcttcaacagtttacttctgcgctttgtggatgccagcagatgttccatgcatgttcttctattagtacattgatatgctcagagggatctcaacttattgatttgctgtcaccaggcaaaggcctatcaaatatttcatctattttagaccgattcagagatgcatttgattggtcagaagcagaccgcaatggtcggatcattccttctgaaggttgtgatcctgaatatgatgccacttgcaatgcaatagaagagatcaaatccagtctaaaagagtacttgaaggagcaacgaaagcttttgagacctgcatcggttaattatgttaatgttggaaaagatatgtacctaattgaagtgcctgagagtttgggaggttcagttcccagaaactatgagttgcagtctacaaaaaagagcttgatgtattgacaagtcttgctattgcaagtggttattttgagggaccaagttgctgtccaactataaaagaatcaaatggcacagacgatactcctactttccatgctagaaatcttggacatcccattctacgaagtgattccttaggcaagggttcatttgtaccgaatgacgttaagataggtggtccagggaatgccagttttattgttcttactggtccaaatatgggtggtaaatcaactctcttgcgccaagtttgtcttaccattatactggctcagattggagcagatgttcctgcagaaaaacttgagctttctcttgttgaccgtatcttcgttcgaatgggagcaagggatcatattatggctggccaaagtacattcttggtggagctcgaggagactgcctcagtgctttcatcagctaccaagaattctcttgtggtgttagatgagcttggacggggtacatcaacttctgatggacaagctatcgcggcttcagttctggaatatctagttcatcaggtgcagtgtctaggcttgttttctacacactatcataggttagcaatggaacacaacgataccaaggtatcgctgtgccatatggcgtgcgaggtggtcgagggagtaggaggtctggaagaagtgactttcctttatagattaacacctggtgcttgccctaaaagttatggtgtaaatgttgctcgattggcaggaattcctactaaattgcttcaaagagcgaatgaaaagtcgagtgaatttgaggccaattacgggaagcgacacaagatgaccaacgataagcacgtcagtgcacagagcgatgataagttttctgccataagggatctgtttcgaattgtgaagacatggcctcgtcctgaagatcaggaagcgagtataagcatgctccgtaaattgcagaagcgtgccaaggtataggctgtggaaggctaggtaggcgattgttacatagcatgctcgcctggtagagatggcctcgttttgctaccttggtggcattttttttgttggattggcgtcataccgagaggggagaaaattacgtggacacgggttccaatcgaggacagcattgccctaggtttagtgtggaagcagaaaaaggctcagtcccatcggatgtgtcaggattcattgatgggacgtggattgagaattctgcgtctacagctttactatcccttccaacaattttgtgccctcactaattctcctaccaggccaggagccccaaggtattggtctgtcctggtttgttcgagctcggtagggtgttggatcagtgctgacctgagacgtggagaaacatcccggactgtaactttcctgaagggttaattatgattactatatgtaaatcagaactactctctcgaagttgcaaggcaacttaggattaattttagtgcctttttgtattctgaaaagttcgagcttgtatttagtcgagatttgagctgtaatccaaaacaaaataggccccactccaacgttttatagccttatcgtagaacgatacaggacacgtggacatgaatcttactacggttattcccatctgggttagtttgtgaacttaaatcctttgggatctcctggggtgaggaattttaggagatactatttaaataagatatttaattatttatgataggttttttc

SEQ ID NO: 28652 - DNA, 880 bp, Zea Mays
atgaagggatgcggactcccatgcgaagtcgagcctgggctcctatgagccctccgagggataattgggaagatggaaatcctgctacttggggtagcagtccagcttaccaggaaccccacaagctcggccatacgaagcccccacacctggatcagggtgggcaaacactccaggagttagtttcaatgatgctcctactcccagggataactatgcaaatgccccaagtccatacgtgccttccacgcctgttggccaaccaatgacgccaaactcagcctcatatcttccaggcacacctggtggtcaaccaatgaccccaggcaatgctggaatggatatgatgtcgccgataataggtggtgagggtgaagctacatggctgctgccggatgttttggtcaatgtgttgagcggaggtgatgacggtcctggtgtggttagggaggtactcggggatggatcttgccgagttgcacttgggtcttcgggcaacggtgacatggtgacggttcttccgaacgaggtcgaggtcatcaggccgaagaagagtgacaagatcaagatactgaatggtagtttccgtgggcacacaggaaaacttataggtatagatggttctgacggaatagtgaggcttgacgacacatacgaagttaagatattagatatggtgattttggccaaactggcgacttgaaatggatgtatattttgttttgtaacgtgtccaccatagaacatattttgtaacaatgccctcgtttgcaataaagctttttgttgcttacgactacaatagttttgcacacttgtgcttttgcccaagggccgctcgtttttagaccttcagttgctgactggtcgtatatatcat

SEQ ID NO: 28653 - DNA, 529 bp, Zea Mays
cttttatttatttttatttttttctttctgagagggcagggagggacctaaaaatcaagcccaaaggcccaagcttcttttcttccccgcaaagaaagaagggaagagttctcggcttctcgcgagtcgcgacagagagaggcggagttgcggagaatatgcagagcagcagcatgaagagggagatcagcgaggcccacgacaccattcgcttcggcatcaacgccggcgtcaaagccgacctcgccccgccgcacccgctccagtctaccatccaatcggagaccaagttctgggcggacaagaagaagttcgggacagatgccatatatggatccgccctcaacatccgcaaggatctcgatgcccaaatcctctccaggttccaaaggccccctggtgctttgccgtcatctctgcttggatacgaggcactgacaggttccctggatgattttggatttgaagattatcttaacagaagaccctttgaagtaaaactaatttatctggcttaattggaagttag

SEQ ID NO: 28654 - DNA, 1464 bp, Zea Mays
cccgcattcaaagtggcctagaataacccgcgatcctatcctgtctgctgtctctcccgagtgacctcaaagtcagcgagcgccacatccgactccgagggccaccggtggccggttgcccgttgacgccgcggcacgcgattccgatcctgggttttacctaagaaataaacaactctgaatttcccaagacctgaagaccagccagcgcaagcctgtggctgccacggtgccaccatgtcccgcggcagtgccgcctccgtattcctcggcgtcgacgttggtactggcagcgctcgtgcaggactcttcgatgaaaacggcaaattgctggggtcagcaagcagccctatacagatatggaaagagaaagactgtatcgagcaatcatcaaccgatatctggcatgcggtctgtgctgcggtgaaatctgcgtgctcactggcaaatgttgctcctgaggacgttgctggccttggctttgccgccacttgctcccttgttgctgtcgatgctgatggttcccctgtttcggtttctttgagtggtgatacaaggaggaatatcattgtgtggatggaccatagagctgtgaatcaggcagagcgaatcaatgctaccaattcgccagtactgcaatactgcggtgggggtgtttccccagaaatgcaggctccaaaggtttgggtctcctatggatgaaggaaaatcttctagattcgtggtctatggtatgtaggtggatggacctaagtgactggttagcatatagagcaacaggtgacgacactcgcagcttatgcacaactgtctgcaaatggacatatcttggacatgcacacatgaaacagtggaaggaatctgattcacgtgatatggaggcatgcggatgggacaatgttttttgggaagaaatagggttgggagacctcctcgaaggaaattgtgcaaaaataggacgcagtgtcgcttttcctggtcatgctcttggttctggtttgacgcctactgctgcaaaggagttaggcttacttcctggtactcctgttggaacctcacttattgatgctcatgctggtggagttggagtcatggaaagcattcctgatgcaggatctaaagctggtttgtctgatgaacatgcaatatgtcaccgtatggtattggtatgtgggacatcaacctgccacatggctgtttcaaaggacagattgtttatacctggtgtctgggggccgttttggtctgcgatgatccctgagttttggctcacagaaggtggccaaagtgcaactggcgctctgctcgattacattattgaaaaccatgttgcttctcctcttctttctaaccatgctgcttctcaaagtatatccatatttgagctactgaacaagatgttgctttctatgtcacaagagcagaatagtccgtttctttctgcattaactcaagacacccaga

SEQ ID NO: 28655 - DNA, 1488 bp, Zea Mays
ccactaccgttaccgcgggccttcttgagcggctccaagggatccaagtagcattatcgccaatcagtaagtaggctccaagagcaccgtccgtcaccacacaacaaagttagcaagtagcagtgaccacctgatccaaaagcaacaagtaggatcatggacgtggggaggcgcctttcgctggcccgcgtgccagcagtggccgcgctgatggttatgctgtcgctgagttcgtccttctgcgtgtcgtcgtcggcggcgagggcggtcgccaggcctggcgccgcggagcagctgcagcggcaccccgtggtgctgatcccgggagcgggcggcaaccagctggaggcgcggctgacggagggctacgagccgtccagcctggtgtgccgggtgtggccactcgtgcgcggccgcggtggctggttccgcctctggttcgacccctccgtgcttgtcgcgccgctcaccaggtgcttcgccgagcggatgacgctctcctatgacgccgacgccgacgactaccgcaacgcgcccggcgtcgagaccagggtctccgacttcggctccacctccaccctccgcggaggacctcgaccccaatctcaagctcctcacggggtacatgaacactctggcgagcacgctggaggaggccggctacgaggaaggccgcgacctgttcggcgcgccgtacgacttccggtacgggctggccgggccggggcacccgtcgcagcggaccgccgagagcaacctctggctgctgccgacgcccagcgtgttcggcaacaccacgctggtgctgtcgcgggcccacaaccgctcctactccgccaagaacatgacgcagttcctccgggacatcggcttcgaggaaggcgtggagccgtaccgcgcgcggatacggccgctcgtcgaggccctgccggagcccggcgtgcccctgacgtgcctcgtgggcaccggcgtcgacacggtggagagcctcgtgtacggcgaccgcggcttcgacgaggcccccgagaaggtggtctatggcgacggcgacgggacggtgaacctggccagcctcataggcccgatcaaggcgtggtcggactcgccggcgcaggtcgtcgaggtggtggagctgcccaaggtgtcgcattccggcatgctcagcgacaagagcgcgctggagcagatcataaggatcatcgattctatcaacctgaacgccacgagctatcatcattcctcttagaatgttttgctttagtagacaactaacgatgatttcttttcacttaaatcggcgacagcagctagttttttttatttggaaaaaagtttattgttttttctgtaaggattatcgggatttgctttagctggtgcctattagagttctctatgtatttcttaatcgttatgaataaatttttttgggaaaaagtacatttaaccagggttttaaagtagttatccaaatatactattctagat

SEQ ID NO: 28656 - DNA, 2085 bp, Zea Mays
atctcctggtgcttctctcaagccaccgacgctcaggctctctacatcctttagcaggcgccaactccctggagctcgccttcctgctggccgcccccagcaccgacgccccttctttttccccatctccttccttggcgcgctcgcccaggtcacgcgtgtccctgctcgcccaggccgcgacctcgccaaaccgcgcagtccctgctctccttccccagccgcgctcagcccagcccttcctccttcgcccttgtcgagctccctcagctcgcccccaaccacaactgcacgccaacctcgccctaggccatggagcagcaacaaccatggaaccctttcgtgtcgcgccctcgatgtgctcgacgaaagttggttcgatgaacgggttggctaatcgcgatgtgtggaggagacaaatttctaggatctgagggtaagagaagccaagacctagagcgatgatcactaggtgttcggtgaaaaggatgaaccggtgatcgtggttggtcttgcaaaatccgagttctattttatgttggtgttgtgcggtgtgatctccaattccatgttgctgatgtcttgctccatcatgaccttagggaaggatgttttcctctaaattatcgtaataattatgctgggtttatgtgttgttttagcatacattgtgaaagcatttcttgctcagcaggacaaggaggggctttcatgaaataacttttgaccacttatgttccttttccaaatataaatcagttagaagtgggtcttggcaataattagctcatgactatttgttgttggccctttggctgcaatttctgaatagtttgatgtgaagggaccttgctgagctttgtgtacttgatatttgaatagtttggagaaaggattaaaatctaccctcactaattttttagatgccccttaaaactgattttgaggagttattttctagggagctcttggagatgctcttattcctattggtacggagtaatatgtatattgtgcaattaaaatggcctttatatggtattgaacatttcccacaataatctgtaatctttccatgaattgttttcctatatgtggtattattaattggcagtgctcctagacactgcacatccatttcctgtgaaattactaaaagattgccgggaagtggcaatgggactgttactgatgaaattttatgagaattattgatttcgaagtaacttctttctggacttttttgccagccaacattgttttccatagaaaatggtttttgaatattcatggcaaaattttatggtttacaaaattccttcatttcatctacagaaaatcgggcaggctctactacctttacctggcgatgctaaaagccaaccagcactagcaacagcgactcaatttgctgccacaaacatctgcaccagcagaggccgctaccgcagaagccaccacggaatcagatcctgcaacgtccactcctctttcaccttatacaaattacccagattgtggtgcccgacgaggtggggcgtcgtttgagagggccgatgaggcgtcggagaagaagcagtcgaacccgatgcgggagatgaaggtccagaagctcgtgctcaacatcttcgttggcgagagcggtgatcgcctcacccgcgccgccaaggtactggagcagctgagcggccagtcaccggtattctccaaggcaaggtacactgtgagatcgcatgctatgtgacggtgcggggtgagaaggcaatgcagctgctggagagtggcttgaaggtgaaggagaacgagctgctgaggaggaacttcagtgacactggttgctttggatttggtatccaagagcacattgatcttggcatcaagtaagatgatctcatgtcttatcgtaaataatttgaatgaggcctgtttgtttctgtgaacgggtgttttatgatgggcattgttgcttgcctgtaagcaggggaaaagatatgtaactttgtattcatgtagcctgtacccactatggtcactacgtactgggatagcttaaggctaagttcttaacacagtttataaccatgc

SEQ ID NO: 28657 - DNA, 1116 bp, Zea Mays
accatatatacagcaatgtggcagaaatgatacatcagcctacattccagacgtctcactgccatgtaaatcagagtggcgctcttatatataaaaaggcagtattccccccatagtccattcaactccaccgcgaccatttaagcaacacagcagcggcatctcagctctgttcccagctagttagccgcggcgccatgcccgagcctggagcggcacccggcgccccgcccacacaaggccagcgccggcgccagccccctggctcccgttcctgctgccgagcccaggaccaggacgcaccggcttgacggcaagaaaggacagcagccgcagcacaaggctgccgtcgtccccgcgaacgccggtggtggcctcgtcagccccgccggctcgtccaggtacctgctgctgagcggccgcttcgccgccgtcgccgaggagatccaggaggtgctggagcctgccccggccgtcgacgccatcgccaagcgggaggaagctagtgacgctgctgatgccaagaccgcgcaggcgcaggagcaggtggtggttgtgctcaaggtatccctgcactgcaaagcgtgcgccgggaaagtgaagaagcacctctccaagatggaaggcgtgacgtcgttcaacatcgatttcgcggcgaagaaggtgacggtggtcggcgacgtgacgccgctgggcgtgctcagcagcgtgtccaaggtgaagaacgcccagctctgggcggcgccaccggcgatagccgccgcctgaatgaagggagccgtatcccggttggccgtgggccgtggctgctgctagggatagggagtcgtcgaccagcatgcgtccaccgtgtcccggctggcagctggcacttgaatgcagcagctttggttctttcctgtgcggtcgtctcgtgagttgttgtggccctctctcctctcttgtttcgctgtggttggcgccatgcgaggtgaatgcgatctcttgcctggtgctgctccagtgcttccatctgcttctgctgtggatgggtcactctgctttctcctctgtgatgtaagactgtaattaacataagaatgggatttcattgctaaagaaaaaaaagcaaataaa

SEQ ID NO: 28658 - DNA, 197 bp, Zea Mays
caggagatgacaccaagttgtcgttttctgcttcgggtgaaggaaacaacatgcttctctttccgttgatgggtctgcactggattggccaccgctttcgatccaattgctcaccggagcatggaacctgccatctggccgcaagaactcgtgagcggggccactgctaccaccatgtctggtaagggatccctcgc

SEQ ID NO: 28659 - DNA, 1448 bp, Zea Mays
ttaaaatcctcgtccccttttgccgtccctctgttcacggccctcgccaaatccccaaaatccaagcgcgtcgccgacggcattgcgtcgccattgcctccaaatccgtgtgcgactcgcgtgatcccagatcccgctcgccgtatcccccgcagtgacctctgaccagagcattttccgcgcggaaaatgccgccgtttcggccggctcttggaagggcgcttcttctgtaggaccgcggcgcgaggctgcgatggcgttcgccgccagcgagggaaatctttccccggcgctgcccctggccactctgatcggccgcgagctccgcggcgacggtaccgagcgcccgcacgtgcgctacggccactctggcttcgccaagcgcggcgaggactacttcctcgtcaagcccgactgcctccgcgtccccggagacccttcctcctctttctccgtcttcgctgtattcgacggccacaatggcgtgtcggcggcggtgttcagcaaggagaaattgctggagcacgtgatgagcgcggtgcccgagggcatcagtcgcgaggactggctacaggcgctgccgcgcgcgctcgtcgcaggattcgtcaagacagacattgacttccagcgcaagggtgagacgtcaggaacgacggcgacacttgttgtggttgatgggttcacggtcactgtggcgtcggtgggagattctaggtgcattctggatacacagggaggcgaggtctcattgctgactgtggatcaccggctagaggagaatgcagaggagcgtgagcgcgtcacagcgagtggaggagaggtcagccggcttaatctctgtggtggacaggaggtgggtcctctccgatgctggccaggtggattgtgcctttcaaggtcaattggggatactgatgtcggcgagttcattgtaccgattccacatgtcaagcaagtgaagctcccaaatactggtggaagactaataattgcatcagatggaatatgggacgctctgtcctcagagagtgctgctcaggcgtgccggggattacgtgcagaactggctgcaaaacttgttgttaagcaagctctgaagacaagtgggctgaaagatgacaccacatgtgtggttgtcgacatcatcccatctgatcattgttcaacaccaccagcattgtctccaaagaaaaatcagaacaagttgaagcatcttatttttggtaaaaggtctcatagttctgttggaaagctcagcaaatctgcttcattgggttcagtggaagaaatattcgaggagggatctgcaatgttggaagaaagaagtttgaggttccttgatgcagtttgcgctagaatggaaggtctttctaactactaggagcagttcatttatcctatttggctgttggagatctattaccagttgatgttctgtttgctttttg

SEQ ID NO: 28660 - DNA, 2432 bp, Zea Mays
ttttaactacagcctccaatctcatgcgttcgaggacaagccgaaaaggagaaagtaccccgttccgtcggccgcacctgcacccaccgcacgccgagtcacgccccccccccccccccccccccccccccccccccctggaccagccaacgtgacactccaccgccgccggcgccgcggcagcccgtagcaaccgccaccgcctgcccatctcctctctatcccgcgccgcatggccgcgtacttcaaccactcctcgtcctacccgccgccgcctcccccgccgggcacttccccgtacggcgcgtaccgccacgcctacccgccggcgccggcacccccggccgcttacggcgcctactacgaccgcgcagagcaggccctcccggcgcgggacgaggtccgcaccctcttcatcgctggcctccccgccgacgccaagccgcgcgaagtctacaacctcttccgcgatttccccggatacgtctcctcccacctccgcacgggcaaatcctctcaggcgtatgcgtttgctgtgtttgcagatcaacagtctgcactagctgccttgagtgccacaaatggaatggtatttgatcttgagaaaaattgttctcttcatgtagatctcgcaaaatccaattccagatcaaagcgcttgagatcagatgatacttcaccttattctcctgaaaaaagaaataggaaaccaaggggatttcctgattcaggtatgactcaagtagctttttgggcagaatggcatgaaagaaaccatctgtattttcacaccacgaagatcttggtgcttacagcttatgggaggtccactacaatcacttgaacaatataagatgttccaaatccacagttctccctcctagcaatcacaattgatttctaactttcaggggaattagtttatattgtccctataatatatattctactatttcctttgtgttaataccctactaaatgttatatcagtaacttcatatcctcaatgaagtgcctctttactcacatagctgaaaattcttacaaagcactcatcttgcacatctttggcacactttgcgccctatcaggtgctggaagcaatatttacatatctggaatgggtagtacttcacacagcttgagtggttatccttctgcacaaaggttatggcacactactcgagcacagttttatcatgtattcatgtgatgttggagggaccagcttaagctaccctctagctcctacttgaatgtagattaccgatctagattgaagctatgcttttaggaaattatagttgacattgttccgtcttgcagttacacaagccttgagtctagtgcttctctcagcaaggacccatccacatttgcccctcaaaataatcctccatgccctactctttttgttgcgaacctggctccagcttgttcagagcaacagctgatagatgttttctcaagttgtgcgggatttgtgaaactcaagatgcaaaacaagcttggagctccagttgcatttgttgatttcaaggatgcaatcagttcaactgaagccataaatcgtctccaaggagttatcctgtactcatcatctggcgagggaatgcgtttagagtatcctacaattaagaaacttctaaaccattatattttgctgcaatttttagggttgtttgatttcaaattatatctgaaatatctagtctgaggttggttcatgtctgttcacttttgtcccaattcttagaggttggcgttgcaagttgcagtgttgcacattacctttgacaatcattgtgaaagtaactgttgtgtcagattaaactaacatgaactttgaatagtgatgatgcatatcttttaacaggaaccatgtatgattgcaattgcaataatttccattaatctttctttacttgtgatctagtttcttaacatgttttagatatgcaaaatcacggatgggccttcggaagcgtgataagcacccctaagtgcagctgaaagacgacacggcagttgtattttcattcagcacaagcggcagctgagcatgctcaatgatgtctaatagcagacgacctgtcctgacacctgagtccaatgtcatcttcatgcagcgaacgttttgctcatgagttaggctatgaggtccttcagctgcgtagcattatgttacttggtctggttgtatcacttattattacatgtgcacctctttttttcctccttcggaccttgcctcctagtcatcttcagattttaagctaggattatcccttatttacagttggagttattattagaatctattgtgcctgaaaggatcaatctgaactatcaatctgaacgagagggtgaattagttttttctaaaaaatctatataaattaaaatctattaatgaccctattttattcctg

SEQ ID NO: 28661 - DNA, 8398 bp, Zea Mays
cgtggatacccgttggcatctctatccagaagagacccaattgcccagggccgccgccgcgccgacctcgccgtcgcgcgctttgcttctcttgcccccctgcccgtggcctccgccccaattccagcgggacagcctcgatgagccgccaggatcgtcaccagtggcctcgccctaaccacggatacgaccctcgcgccgccgccgccgccgcgcaatgaactccgctgccctagctgcctaccaactgcagcagcagcaggctcatcacttcgcctcccatgcctaccaccaagcccctaccggtaacaccatgcaccgctctaccaaacccgccgccgctgccaaacctgcgccgccaccgggcaaccagcaggccgtgctggaccgggctcaagaggcggcgaggaaggctcgggaggagctcgtgaagggtggggacggcgtcacggcgtggaaggtggcgcaggcggtgctggtggcgctcaaggctgattcgtgggactccctcggcgtccagccccaggatgtgcctctcctgcgggatctcttcctaatcgagggcaaggttgcatatttccttactacgacaggccaagcaaacagaagtgtctgctgcgaagcttcgagcaaatatgagtggatctggtaatagtagtcaggagaaggatttgttgaaaaatgcaagtttccatactcacaagaaggctttggacaagaggttcatttctttaactaatcgtataaaagagttaccaggcatcaataagcatatccattttgattcgaccgatgatgaaactaatagttgtactggttctgaggatggtaaatctgatggcaatgagaatgagaatgaatgttctattcttgacaaaaaggatggtgataagcgtgtgaatagctgcccatatccgtcaaaaactgaagaactggaaaggcttggtttgaaatctgaaattaataaaaggcaatctttagagaatagcaagccaagagacagtgggaaaaaggggaaagttttggaaatgttagcaaattactatgggagaacgatatcagggaagaggagaattagaaatttcttctcacagtacccaggcattggccttctcaatgttgctgttaaatcaatgggatgtggtctgctggatagcatttacgatgtgatacagcttgctgatgagaatgatgtagcttcaagccctcctcctaacaccaccactgaagttatggaaattgagcctccaagtgttgctattgatgatgtcatcaggaggatttcagaatatattgaatccaacagtaaaatctctggtgatgtggctttgcaagtgagggcacttaatgattgtgaaacatgggtaactactcaattttcagcaaatcaattcagtgctcttggccatgggacattccttgagtttttggacaaacattgtcaccagttccgaactgctttgagtagtttctttaaggagggtccttctaattcttcatctctggaagtttctgtactgcagcagcaaattgaatttttactctgtcaagctgagagtaattggctggaagatagtgacttttcagaggatagttttgttatgcttcttaaaaagcaatttccaacaataagctttaatattgtgcaagacaaatctgatggtggagtttctggctttattgaggggcagaagaaagacatacggacatatagtttaaaattttccatctctttgttggagaaacgatggtctggaactttgccaagtagacatgggaatgttgatgaactggggaacattgtcgctgaacaatcttgttaccataccacagtttgctcacgagaggcaattaattgtttactgagggctcctatgctgtctgatctgcatctttggtcccattgggattcgctatttgctcctacactgggctcctttgtacattggttgctgaatactggtccaattcaagagctcgcatgcattgcgaccacagatgtgtcaagaaagctctcaggcgtctcctggaaggttgatcaggtctgatagcttgccaaacattaataacactgttcatttgatcacaaaatttgtacttgattgtcttgatcatctaccttcagaattccgtagtcttgcagcagacatactattggcaggatttcgggttgttactaagaactggcatgcagttatgttgcatgaagccactgaaaacgggcagctttgcatgcttcatgatattggtttgtcacttggagttgtagaatgggttgaagattgccataggttgtgtttaactgatgaagttcatgtgcagacagaaatgcattcttctgccaagcttgcaacacctgcctctgtgggagccacccatgaagattctaacatgcatatttctagtgatgttaatatgatggataagagaaaacaattgtttcctgtcataaatgatcgggctggtatagataaggaagacaataagatgttaaatcctgctggaactgaggcagatgttgcagaactacatactaccagcagatcttctatgatggaagaaacaagtcttgaggaagcatctcttgttattgagactatacgccgtgaagagtttggtctggatcaggcactaagtgacactgagaatagcttgttaaagaagcagcatgctcgacttggcagagcattgcattgcctttcacaagaattatattcccaggattctcatctacttcttgagctggtacagaatgctgacgacaatacatatcctgaggatgttgaagcaacattagcattcattctccaagaggatggtattgctgttctaaacaatgagaggggcttctctgctgagaacattagagcactctgtgatattggtaactcgacaaagaaaggatcaaaccagggttatattggaaataaaggcattggatttaaatcagttttccgggtaactgatgctccggagatccattcaaatggtttccatgtgaaatttgatatcacagatggccagattggttttgtgttgccaactgcagttccaccttacagtaccacttcttttagtagaatgttatccgttgaagatgacaaggatgcccattcattgtggaacacttgcattttacttcccttcagatcaaaatttagggagtgcactggtatgtgctccattgtgtctttgttttcagatctgcacccatctctactgctgttccttcatcgactaaaatgtatcaagtttaagaatttgtttgatgacacacttctgattatgagaagggagattcttggtgatggtattgtgagaatctcgcatgggattgagacaatgagttggttggtggtcagtaagaggctacaaggtaccattgtgcggcatgatgtgtgcaccacagagatagctgtggcgtttactttgcagcagactgaggaaggagattatgaaccttatttgaagcagcaacctgtgtttgcttttcttcctctaaggaattacggtcttaaattcattcttcaaggagattttgttttaccatcttccagagaggaagtggatgcggatagtgcatggaatcagtggttgttgtctgaattcccttctttgtttgtaagtgcccaagaatctttttgtgctcttccctgttttcagaggtgccctggaaaagctgtcacagccttcttgagttttattcctctagcaggagaggttcatggattcttcagccagcttccacacttgatcctttccaagttgcgtctgacccgctgcatgtttttggatggctctactgtgcaatgggtctatccatgcaacacacttaggggttgggatgaacaaactaaaatgttattttcagaaggcttacttcatgaacatcttggtcttggttacctctcaaaaaatattgttatatctgataagttatcaagagccctaggtattcatgactatggaccaaacattttgctagatgccatctcatctatttgccgaattgatggttgtattgagtcattgggcctggaatggctttgtgcttggtttgttaacctttatctgacattgctgtctcattcttctcaaaatgtttcctcagcaagaaacctcgaagacattcttttggataaagttaggaaaataccatgcatcccactttcagatggttcatttacctctatttcagatggtcgtatatggttgccatatgatgttgccagttccattcctgaatgcagtagcattccgaattttccagctctatatggtaatcttcgaactgtaagtccaaaccttctctctgcatgctgcaaaaataaatacctcatggaggaagtcagaataaatgatctggcagacatgctccaaaggatcggggtgcggaagttgtctgggcatgacattgttaaaaatcacatcatggtgtccttgcgtaacggtttagatgctaatgtggctgatatagtgattagagagtatgtgagctttattatggttcatcttcagtcttcttgcaccagctgtaactttgaaagaggagagatagtgtcagaactacggaagagtcctatcttccttacaaaccatggatacaagagcccagctgatgaaccaattcacttcagtaaagattatggaaattccgtggatgttactagactgcttcagaatgtagaaataagttggattgaacttgatagtagctatttgcagcatcatggttcacagtcgtcatcatttgcacgggaaaaatggaggcaattttttgaagaaatgggtgtgactgattttgtgcaggtagtgaaagttgaaaaaactttatcccaagttgattctattctagcaggaggactttctctagctgatgtatctacaaaacaatgtacagtgtatgactgggagtcaccagaattatctagaattttatcaatattttcttcaaaaagatgcaaggaaaattgtgtatatcttctggaagttcttgatagattctgggatgatcattatagtgcaaaatctaggatcttcacagatgctacacattgtggtgaaaacagagcagttgaatcatcatttatgaagtgcattcaaagcttcaaatggatagcatcaagaatggatgaggatcttcattatgcaacagatttattctatgattgtgaaaatgtccgctctctttttggtagtgtggctccatatgctgtaccgcaggtatctagcagttcacttaagaaggccattggattcaaaacagaggtatcttactgtgatgcattgatggtcctgaagtcttggataacgtcaaaggttccctttagagcaagtatgagccagatgtgcaaattctataccttcttgtctgaaggcgtggcagacgcaaagattgacattaaacgggagttcatgtcgtctccttctatatttacaccactacagcgtcctcgggcaagtgaggttattcctggaaggtttttggcgccagaagacctctattggcatgacccaacaggatgttctgaaataacagaggatttcgttgcaacgaaaaacagaagtatgttcccaagaaaaatgctgtctgcagcctatccaaacctttatgaattatttactctgacatgcggtgtaccaaaggccccaacaacatcaaattatgttgagatgctgctacggttgtcaaccattgcattgccttcacaggcaggaaaccatgtcttttgtgtatttgtgagatgggccaagtgtatgcattctgaaagtgacaagatgaatgatatattgtacttgaaagaatcccttcagaaattagaaacaacaatattgcccacctcagccgataaatgggtctctctacatccttcttttggccttgtttgctgggtagatgatgatgagctaaagcaacagtttgttaactctaatgatgtttacttcatacaatttggcgacctttcttctgaggataagcaaatgttgtatggaagagttgctgctttaatgaaaagcttaggcatccaagcactttcaaaggttgtgtatcgtgaagcaatattttatggtacatcagagaacagagaaaaggtttccttgatttgttggctgttgccatacatgcaacgttacatctataagatgcatagagatacttatatcaacttccagaaaaacgacatcatgaagattagcaacctgcaagtagtagttgttgacaagttattccacaagtatgtactgaggggactcgagagttcttctaagaaaagattccaatgtcattgtcttttgcagggagatactctatatgcaacacaagaggctgactcacattcagtatttttggagctttctagaattttctttgatggatcccatgatcttcattttgcaaattttctacacatgatcaaaaccatggccgaatctggcactcatgctgagcaaatagagacttttatcgttaataatcagaatgtgcctgagttacctgagcatgaagctatctggtccttctcttccttgtctgcagccaaacatggttcagcgaaccaaggtggtgctgatacccagggggttgatttccaacctgtccatgaatttagtattcccaatcatcagaaggcacaggtgatggtttctagttggcctctaaactattggagaacagcacccgtcttcagaacacctctcataaaccagcatgcaagcatgcaagaggcaaaggtgaatgatgctggaccttcatcaaacttaaacatgcctgctatgtatggacacaccgaagatagtttgctttctgctgatcttgaaagggattggattatagaagagaatccaagaactgaaactacattgtttggagatagttcatcggaaatccttgatgagcctcagatggtgatgtctgctgaacctttccatgcacctgcttatttgaacttggaggctggaaattcaagcccaacggttcatgtcgagctaacaaattccgatgagaaactggccaatcttgcagaagacaagaatcggcgactttcagatgcaagccagttaagaacaggttcaaacccaatggttgatgttgagctaacaaatttcgatgagaaactggccaatcttgcagaaggcaagaatcagcgactttcagatgcaagccagttaagaacaggttcaaacccaatggttgatgttgagctaacaaatttcgatgagaaactggccattcttgcagaagacaagaatcagcgactttcagatgcaaaccagttaagaacagggaggcttggtgaagaactggtcgagaaatatttggccaaacagctaggttccaacaatgttaggtgggtgaacaacagaattgaaaccggactgccttatgatattgttataacacacccagagggtttcacagagtatgtggaggttaaaacaactgtatcttcaagaaaagattggtttgacgtctcagcaagggaatggcagtttgccttggagaaaggggattcatttagcattgctcgtgtcatcttaggtacaaagaaagcaagtatagaaatgttgaaaaacccacacaagctttgtaagcagaaagcattgcggcttgctctcctgatatccagatcggcagcaacctagactaaaatgtcggttttgttgaggctagcaccgatcatccttctgcagattgttatgattactctgactaataatcaacatgaactggagtgagcatctgcatcttgataggtatttgctgatccaagttagcagattcttctttttggagagagatggggtaccgggtacggcatgagtgcaagacaacatacagttgagccgctctatagtaggctcctctttctattattctaactcgggtaatcttctccaatggcggctctctaccatgtctcttgttacatacaacttacgctctgcctttgtaacccattctggtattttgttgcataatgtatgtgattttgtcattagatttgtttttcaatttctgccctagacatcgtcccataggttgattgtgtaactaaacatgaaactgtacataaatggatggaatttgattttaccatgtacatgaaatttgattttgcgtgcggcggctgcctggtctgtgcgttctggtctctgtgcgcagggcgcggcatctgcccggcagcctgctcgccggctgctcggtgagaaaattggctagttgggtactggttttttttttcaattgataaaaaaacaggatctgatggagccttttcatttttgttttactttccgtctcttttatcagcagttgaaaggcgatcacttattctcaatttggtggaatctcctttatcagtaattgatagttgaaaggtggtgacttgttttcaat

SEQ ID NO: 28662 - DNA, 4248 bp, Zea Mays
ccaccgaaaaaagggaaaaatggaggcaggcaggcggcactgcggcagtcacacatgcgcacgggcacggtaaaagtacgagccaccttttccctctcgatcgagcggccgaggaggaggagagcctctctgtctctggcgaggggcgactgggcgagcgcttcgtctagacagcccagctgcgcatttggatgcaaattacgtgtggaggatggagtaaaatactgagcaagggagagggaagaggagacggtcttttcttttcttgagccgaggagggggatcaggtggagtgagcgagggggaggttttgccgccggcaatggagatgaatctccgggcggagagcccactctgctcccggggccgccccgccctcgtcgtgcgcccggccgctgcagccactggcctcgcgctgtctgtcgtaaggtgcagcagatttacgagaggcgggctcgttcgatgcatggtatcaagttcagattatcccaagaggaatccgaggagggcatcgacttctaagagcaagggcgttgcctctggagggtatgcttcgagacctactgctgaatccagtacgaagaagatagaacagagcaggaacaatgaaggtgatttcagcagagccaatgggtcactctatggcgaggcagcagagcaggcaagtactgctgaagaatcgtctcaggtttacatgacaggagacattttaagtggcgcagaaagggacggagctggtaccgaagaagaggctgaccaaaatcaatcttcagcgttgccttccgcgtccatggatgatgactcaatcgaccggcaacttgatgagtaccgtggtaaaataagtgctctagtaagttccaaacctgaaccttcgtcacttgcaagtgttgctggacaaaacgaatcagttggcggttttcacggccagcacgaaccaataactggttctgaggaacatggcagttcaattgttgatgcaccaacaaaaggcaggctatttgctgaggccgttgtgggtcataaggattttactgaatcagcagcaggaaaggcaagcagcgagaatgaggaagggcaagctgtctcgttagaagatgatgtcgggataagtacagacgcagatgaagagcttccggtatctgaagatgatccagaagtgctactgaggaggcttcaagagcttgctgatgagaattattcgactgggaacaactgttttgttttccctgaagtagtgaaggctgattcgatgattgatctttacttaaaccgcagcatgtcggccttagctagtgagtccgacgtttttgtaaaaggagcattcaatggttggagatggaaccgtttcactgaaacaatgcatagaagcgaattaagaggggattggtggtgctgcaagctctacattcccaagcaggcatacagactagactttgtattctttaacggtgacactgtctatgaaaataacaatcacaacgattttttcctggaaatagaaagtgacatagatgaacactcatttgaggacttcttggttgaagaaaagcgaaaggaactcgagaggcttgctgcagaagaagctgaaaggaaaagacaagctgaggagcggcacaggagagaggaagaaagggccgcgatggaagctgacagggcacaagcaaggtctgaggtcgagatgaagaaagagaaattgcgccagatgttgagttcggctagcagatatgctgagaacttatggtacatagaacctaacacctacagaggaggagacagagttagattgtactataatagaagctcgagatcactaatgcataacactgagatttggatgcatggaggttataacaactggattgatggactctcaatagctgaaagacttgtcaaatctcatgaaaaggaaggcgattggtggtatgtagaagttacattacctgaaagggcattggtgttggattgggtttttgctgatggaccacctgggaatgcatggaattatgataacaatggaaggcaggattttcatgccatcgttcctaataacatatcggatgatatcttttgggtggaagaagaacataggatctttacaaggcttcaacaagagagaagagaaagggagagtgccgaaagaataaaggctgagagatctgcaaaaatgaaggctgagatgaaggaaaagactatgagagcgtttctgctctcacaaaaacatattgtgtatactgagccactcgaagtacgtgcaggaaccactgtggacgttctttataatccttctaacacagtgctgaatggaaagtcagaggtttggttcagaggttcctttaaccgttggactcatccaagtggtcccttaccaccacagaagatggtaaaggctgagaatagttcacacttacgaacaacagtcagtgttcccctggatgcatatatgatggactttgttttctctgagtcggaagaaggtggaagatatgacaataggaatgggatggattatcatattcctgtgtctgattcggttgcaagggaacctccaatgcatattgtgcacattgcagtggaaatggctcctatcgcaaaggttggaggccttggtgatgttgttacaagcctttcacgagctgttcaggatttaggccataaagttgaggttattctgccgaagtatgattgtttaatcctaagcagtgtgaaggatttacactaccaacaaagttttgcttcgggtggcacagaggtaaaagtatggtttggaaaggttgaagatctgccagtttacttcttggaaccacaaaatggcatgttttgggttggatgtgtctatgggaagaatgatgagagtagatttggcttcttctgtcattctgctctggagtttctgctccaaaaaggatcttctcctgatatcatacattgtcatgactggtcaagtgctcccgttgcttggctatacaaggaacagtatgctcttaatgggatgggaaatggtcggattgtatttaccatccacaatcttgagtttggagcgcatcacattggcaaggcaatggcacattgtgacaaggctacaactgtctctgatacatattcaaaggaagtggctggacacggagctattgcacctcactactataaattccatggaattcgaaatggaattgatcctgacatttgggatccatatactgacagatttattccggttcattatacatcagagaatgttcttgagggcaagagtgctgcaaaaaaggcattgcagcagatgcttggattacagcaaactgatagccctgttgttggaatcatcactcgtctaacagtgcagaagggaatccaccttatcaaacatgcaatgcatcgagctcttgaacgcaatgggcaggtggttttactgggttctgcaccagatcatcgcatacaaggtgactttacaaatttagccagtaagctgcatggtgaataccatggccgggtgaagctatgtttaacctatgacgagccactgtcacatttgatatatgctggcgcagacttcattcttgttccttccatcttcgaaccttgtggtttaacacagcttattgctatgcgctacggatccatcccgattgttcggaaaactggaggcctgtacgacaccgtctttgacgtcgacgatgataaggatcgggctcaagcacaaggcctcgagccaaatggattcagtttcgaaggagctgatagcagtggcgtagattatgctctcgacaggctataaccgcgttttatgatgcccgcgactggttcaactcccttagcaagagggtaatggagcaagattggtcatggaatagacctgcactagactacatggagttgtaccattctgctcgcaaaaactgatacatattatcacaagagaaaacaggctcagtttgcccagtttatgagcatctcagcctctcaggcctctgtgcaaattcaatttgcacactgggaagaaaaagagtactgattggccttgtggttgtgcatgaccgccgtccaaggtccaacgatgcaacacagagtgtatagttagagaatgtcacccgttgtacgttactgccgttacatgcatgtgtatacacatcaggtagtttgcaaaacaacattacgcgtatcccggccggctaccctgccataggctctgtctctttcaatttcaattaagaagaatgtaattgacctagttttagaaaaattggctccaaa

SEQ ID NO: 28663 - DNA, 1120 bp, Zea Mays
ttcctcatccctcatctctcctcccgtgacgtcgcgccacatcgtcctcttcctccgcgtgccgctgctaccgtggcccccttgcctgctcgcctccacggccacacgaaggccccctgtgttgctctcggttctcactcctcctctctatttcctgtgttgtcgccccgccccatgatcttcttcctcgcgctagcactggccctatgccccctccttgctcacctccatggcctcgcggaagcggaccttgccgcgagtggttcccagttctcctcacctcctcctctctcctttcaggatatgcgctgccatcgccggcgtagccggagctggccgtccacgcaaccctgccacgggagggcgacgcgttgatgctggagctcacaaggtgtcgctgctggagcagcttcatgcacgaagacttgccgttctgaaggcccttacttcctgttccactagtagttctgagatgatggaaaagctaaacgaaatcgtgtttgacatcttggaaaagtctattatacgtggtaatttgcaatatgcttctttaagtgcactcagaaggcatccacttgatctcggtaatcaagcattcctccaccgagctgtggaagggaacatgacccctgaagcagctttggatcatgtacgatccattaggcctcgagtgcttttggcaccctcgcagtgctaaaagtttgcagaaatggcaccatcaagatcgatctggagaccaacaagatcatggacttcatcaagtttgacgtcggcaatgtggtcatggtgaccggcgggaggaacaccgggcgtgtaggagtgatcaagaacagggagaagcacaagggcagcttcgagaccatccacgtgctgcttggagctttttgctatgtctagttttctcctatttgttgtacaggaaaacatagaatggaattcaaatttggtggccacaaaagtgtggagacttgaattcatataaagttagccttaacattagtgcaaacagttgtatcttagtttagatttagagtacacttatgtatgcgttgtttgacaatgcttatttatgatatattgaatggtacttatttatattatattaattataatgttgttc

SEQ ID NO: 28664 - DNA, 3347 bp, Zea Mays
acctcctgtcaccaccaccacacccctcctcctcccctgtctttctccctctccctcttgacaaaatttcctccacccattctcttcctcctcttcttccccaccgactccaccgatccacctctttctatctgaatttcctctcgtcttgcccaccgctccatctgtctgttgcctctctctctcgcaaccaatcggttcttgtttcctccgtctgctgggttgattctctctctcttcctctccgtggagaggagaggatcgagaaacaggagacaggaaagaagagaaatcagaacggagcctgttcttttgcctggattgcggttctcgcgagttgttcagaaactctgggccagtttctggtcctttaaaatactggaacgaggaaccatcagagatgctaaggcaacagaccaattgatgttatctcgctaccctagtttggatcatcacaatgcaaggacagaggaattctgtggagcattttgctgatgtttttggattcgacattgcatctagttcaggcaaccctgtgatggatcagcagtcatattggaacaatgttcttggatcagtagaatcgcagaatcttcaaggttatcagatgaatcacagtgatgctgccatgccatatgggaatgagacacagcaagatggtacatttcttggtttctgggaatcaggcgaagcaagtgcaagtggcagctctaacaatgccaaaacagagcatcttagtattggcggtggtctgaggattggtgaaaggcgactggtagctgacaatggcatttctctggatgtggatatcaaccttaacgccaacgttaacgatctatgtggtcaaagttcaaatgttaactgtacatctcagggccctgagcactatggtggcggtgatcgtagtgttgtaaattctcagccaactgacctgagattacacccatacaggactttcctactagatgcagagcaagcagattcttttactttgaaccctagtgaaaaccctttgtgtgatttttcactgatgcaagaaagcattgaccaaagacccggtagttccctggatggacgccggctagcctgcaagagaaaaaatgttgaaggacccaatggccagagttcagcaggtgctagcactagtttttcccacaggaacgacaatgctttccataacattgcttcttcaagttacaatcctgcacctatcagaaatccgtcctcacccaattgcttgccggttccaagttctatcgatgatcaactcccacgatatggaactaatgcagggctctcagccggtacctatgaccttaatggaggggtcaacaatgctgggaattcgcagagaagtttccgggcaagaattactacgtctcaacagattgctccctgtagtgtatggccctcttcaaatgctatcagacttcctaattcatggaatcatcagccacctcattttcaaagtgcatttgatgatacccaggaggttattcctgtggtcagcagcctcaacttgcaataccagcatccagtgaatgtttctagtgtgccaccggctgcaaaccgtttcactggccatggagcttcatcatcgagagctggcagtttggagaacagaattcttggtagtcaagaggctcctacaaggaatgtggtgcctgccaactactctgatttagttcccccgtctgtagtagacccgagacgtttgctgccagaaccatctaattggagttctgatgtccgaggcactgcaatatcaggaagtattcctcctgtatcaagagctaataacagtgcaactgttaatccgccagcaggattcagtcaccaaaacctcacccggcgccatcctcgaaatttatcagaggagattggtcggctatctggagcacttcgcggccatcaacccccacgcttaaggccggggtttctgttggagcgccagggcgatggtgtttggggtgttcctttatcaacaaggggtagagaaggaagaaggttaatggaggtaagatgatcggttctgttcaaaaaaatggtttttagcatccacttggaaacataaaagtccatcattattaggtgttttttgtgtggcagcaaagattacactaaatcatcctctaatttatgaatttatgcttgcaaaggccccccttgttttcagttatccttgtcatctttgtgtttgcctatctaagcaaattaccctattctattcccacaccaaattggtagaactgctctactcgaaatgctttatttcattttgtttgtgcacttcataatccctaatttgatctagcatgcttcttcatgcccctgcaactcttgaaatactgaaatttttttatcatttatttccacatattatcacactgccggttgttgtatcttttactttttttctaagatattttcactagtattgttatagagaaacttgaaccttaatgatatgtttcaccttatgtttttatgcaaaatactgcactattttatcctttttgttccctagccttgcttgttcttgcttgcgttaactactgtgaccatcatgtaaaggtgcatggttccttgtcttatgacaatccaagtttacttgtcaacagattcggaatgcacttgaaatgatccatagaggggagaatgtaaggcttgagtctatcttctatggcggtgttgacattcacgatagacacagggacatgcgccttgacattgacaatatgtcctatgaggagctattagcactcgaggaaagaataggaaatgtcggcactggcctcagcgaggaagctgtgataaggttgctcaaacaaaggaaattttcatcttggacactaaaagcatctttggaccctgaaccatgttgtatctgccaggaggagtacgctgatggagacgacctcgggaagctggactgcgggcacgacttccacgctggctgcatcaagcaatggctggtggtgaagaacgtgtgccccatctgcaagagcaccgcattgaagaagacctgaaacccgaacaaaggctcgtgtcagagacatcccccatgtttctatgttcactcgatggttcgcgagatcatttgccgattcgtattgctacgcttttttttttttggtcgggaaaattttgccagccaccttttggttaatgtctttcctgcttgatgtagtgaatttggactatgcctgatagttgtccttgacctgaatcaggttggtgtgtgggtgtttcatgtttggttgctgtgatagctggtacgaacaatgtatttctgttatgcaagtaatagaaatgaagtttctccggtcaaaaaaaaaaggtggagg

SEQ ID NO: 28665 - DNA, 929 bp, Zea Mays
tttttcccaattcccaccacttgagcagaagctgcacaaccaagagccaacagagcaacgcccaggcacacacgacacgaaccaggcagctgcggagggaggaaccctagcggaacaggtgacggcggcgcgctaccggtgacgggggatacggcggcatcgtcccctcctccatccccggcgcggcggcgccagcagccggcctgcaggctgtttgaagagctcgccatttaatctcaatggaagccaagtttttccgtttcctgaagctcgttggggtcggcttcaaagcgaggtcagagagccaaggccgtgagttgttccttaaactgggcttcagccatgagttcgccggcgccatccggagctctaaggctccagaggtgtacaaggggaaggggatcctgtacattgacgaggttatcaagctgaagcccggaaagaagcgaaaaaataagtgacgatccgaaggcgttacaactttgtctctgtcttttaaccccatgcttcgcatttgtagtgatctggatctggggtctgctgtgttgtgttgtgtacttgcgttgtgctacacagatcaccattatcttacctttacctcagctgcatgtaggaccatgagtgggaataagttaccagtttgttgatatgagctggaacgttgctttgcgaattggattggattaccgagtgggatgttttgtttcaaacttgaagtctttcaatagattgttgcaaatcaagtgtgaactgtgaacatgacccgagaactgaagctaggactgcttgggcacccaatacccaaatttaaaccattatccatcttattagatcgtatagataatttctatgtatatatctggccaaactatcctgtacggctgtacaaagtagccgctcatgaaaattgtactccagctgtttcaaaa

SEQ ID NO: 28666 - DNA, 1766 bp, Zea Mays
cgaaagggtaagcaaagcgttatccatcccgtccggacacgccaaccgctcgctcccttgcgcgcgactgcgctaccgccggcgccgccgcgtcggcattagcttgccgcgcgatggacatgtgtgccccacgccgcctgctcctcttctcactccccaccccgaagctctctccggagcatcctttgttcaggcaacggcgcaggggcaggacctggcccggcatcgctcgctgcgccactgaggttggcactggatggggaggcatcgtcgaggacgacctttctgagctcctgcagattctcccgagagatttgcgagataatctacagaatgagcctagaaaggaccaacttctggaggtcattctggatttgggaagacgaccagaggcacgattccttggtgactccggtggccaatatctacgggacagtgagatctcacaaaaagagttggaggatgctcagaaggctgtaggagagtttggaggtgacaaccgtgcaggaattgaaggtactttacataggatatctgctataaggagtaggaaaggaatggttgttggtttgacctgtcgagtcggccgagctgttactgggcatgttgacatggtccgtgatctcctaaattacaaagaaagtatcctatttttgggaaggcctggggtcggcaagactactgttatgcgtgagattgcgcgtgttttagcagatgaatttcagaaaagagtgggcaggtaattgtggacacaagtaatgagattggtggggatggggatgttcctcatgctgcgattggtggagcaagaaggatgcaagtacctgaaccatcaatgcagcatagggtgatgattgaagcagttgaaaaccatatgcctgaggtggttattgtagatgagatcggaactgaagcagaagcacaagcttgtcgatcaattgcagaaaggggtgttatgcttattggcactgcccatggagaacgacttgcaaacatcattaagaacccaaccttatctgacttgattggaggtgtagaaactgttacccttggagacgatgaggctcgtgctcgacggagtcagaaaagtattctggagaggaaagctcctccaacattccctttccttatcgagatgagggagcggcattactgggtaacacatcggacagaaaggagcgtagatatgctactgcatggtaagaagccgctggttgaggttaggaaaagggatagcgagtttcaggttgtaattgaaagatgggcaacatatgatggcgatggactctgaacttgaaaccctgtcgtcataattgcttctatcaaagttcttaatttagtacttgatgtttctgtggacaagtgtgatctacactaccaagcctcttgttctgagtggattgcatgggcgaacattcgactgacaagtgacaactatccgaagcctgttcttacactgaaggcagcccacgaagcaattttgacatttcagctactttttagcggtcgaaaattgatgtcaattctaatgtatatatattttcctgtaagagaaggaacctaatgtatgtcagtgcttctaaattgtatgagatgtgtacatatgcatatgcatatccttattgttgttaatatactcattcccccttttctttcttttttattttcccctttgatttttaaacattggtgaactgaggtcctctattttactatgtatgtgagtattcaatgttttctctaagtgttaatggtgcatgcaatat

SEQ ID NO: 28667 - DNA, 185 bp, Zea Mays
aggtgaagagcaggtggtccaagaggagccaccctacaatgaagaatacaagttgatctaggtggtgtctccaagtcagctttgtagcgccaaggaataatacttagttcgctttattattatcatttatttttgtaatactttcactatgtaataatgacatttatgatatttgtgacatttat

SEQ ID NO: 28668 - DNA, 4275 bp, Zea Mays
cgagggcaaaggggcaacgcgtccaaccggccggacctcaccggctcatccctcatcgccctagtccccaagggccaagtccccaaccccggctgacgactgtgcccgtctccttccctgattcatccgcaagcccacccgtcggcgatcgtccatgacggaggatcgagcgcacaaggtcgccgacgagcccgccgcctcaggcaggcaaagacctgaaaggaagaagaggaagtgggatcaacccgcggaggacttggtctccgcggcggtgacggctgctgccgtgtcggggatgcctgtgatgaatttcggtgctcttcctggcgttgtactgcctggcgtcaccgcatatggagctgctacattgccaagtgtagtccctgttccgtattcattgccgccccatattgcaccatcggtgctccagaatgctgctgcagcagcccagaaattgagtcaggcaaaaataccagatgaggtcattgcacgggaaattgttataaacgatgcagatccatctgtgcgatataagcttacaaaacgacaaacacaagaagagattcagaaatgcacaaacactgtcatcattaccaggggaaaatatcaccctccaaatttacttcctgatggtgagaagcccctctatctacatatctctgctggatctcagttgaaagatactgctgagcgcattaaggcagttgatcgtgcagcttcaatgattgaggaaatattgaaacaaggaacaacctcagagtccatatcggtccctttctcctctagcactggacaaatccatcattgaatatcacagctcgaatccgtggtccaaatgtatgactatgtgatcctggttttatttgatcattttgttactagcacatctcagttaattttgttaattactcaatttatgtgctgttgtctttcaattttttgaaagatctaatcataaagctttctctggcatcccaatttggatgggagaaactgcttttctgctgttggtgcttgtgctcttttgttattatataggatcagtacataaatcatatcatgaaagaaacaggggttactgttgtactaagaggaaaagattcggagaatcttggcagttgtcatagtgaaggttggtgattattttgatagcttctaggaactcctgatttgtaggcttacattttattctataacatccattgtagcctcacaacaacctctacacctatacctcacaagtatgcatttaaagaacctagaagctgcaaaagttttggcagagaacctcctggatacagtagcagcagaattcggtgcttccagaatttcttcttcaaaagtatatggtgctgttccacctcctcagcagttgttagctggtgtcgacacctcaggaacgaaatcagatgttcactatattgtagggcccaatgtgttatcgggagctacacattcctttgcatctactggagttattgctcctgttgttgctcctgcagtgacagtgcaatcaggggctccaacatattctggggttccactacccagtaacatggcctatcctattccaccagcaaacggtggggcattttacagtggttatggggacatttatccccaagcaactccgttgcagcagctggcattcacactcaagcatgcctcatcgtcggcaactcaggctgttccagtgacgtccacaccaacaagcatggctacaaaggggaactcaatcttggatgcggagatggataaacgatcccgaaggaaattccaggaactaccggtttcgaagggcccagcaacagaaagtcaggtacagtttttttttctggtatagcctcgactagttcttaactacaggagctacagcagcctcttcttttgtacttgttctgctgtctcctctattcacctagttttctctgtattacctctcaggcgattaatctaaattccatggcaaccccttccttccctgtgctgttcactagatgcctatcctgatttgatgagatcttccatatactcacatccttgtttgttctctcctttcttagcttagcttgtgccatctttttataccccatcaattcttaccaacacaacttccaaggcgatttcaatatcaggatttggaatttctggcatatttgcttttgtttgtaaattagatgtacactgttgctgtcaactatactaaaaactttgtatgccattgtgagtttgtgacatctattaacattaaaatattctgcataaaaacatttgcccttttgtttatgatggcaccatcaaacatgggaagcacttctaattatccaggagttttgatacaacacagcacatattccacatgcaattcatgatcttatgttttatacgtgtacctgaaagaatataatcatcttattgtttagtccttgtttagcactttggaaattaataactactgtataaatctactttctttgaaggaactttgcttgctcttgtagttcttgcagttccctcaacggagactacaattcaaatttgacattactattaaaaacaatagttggattgtcagattggcatcatcatgtttgttgtattcttatacctgcttctaacatctcatttcattccaggtattttctctgaccttgtctgaagctcacaggtggcaatagatatacatgtgggtttttcacaggcttgtaacaaatcggagtttgcattggctgtggagtgtaactgacaagatgcagagctcttcaaatatcttgttacttttttcagcaaatagaaatttaacctttgtgttttatctgtttctgtttgcttacagagttcactgatgttgattaacattgctagcatgccttaagttttgaaattggttggttggtatagtcttgttattagttgttgttagtaggttttgatacattttatttctttccactctttagagaaagttttgcatttgcaaaatcttcacattcagtggaagctccaagcaatataaatatacaaattacacaaggtccttccatatgaaacttcacttagttaagcagactcgactcatctttgttatgttattatagactctcccaatatgaaaattatatttacagcgcatctgcttctatattaagataacattctgaacttgtcaagggtcatgctaactagtattgtgcttccatgtgagatatgcttatatttgttctgtgtgcaaaattgtttctgatttcattcttatgcatgccattgcgttacctactctataacacaagaatttgatggatgaatcttcttgttttctttcatctttccagaactcacaacaggggtccaaatttgttaagacaggtttagatagttcaggtaacattgggagctcatcaattgcacctccgaagaaagttcaccctggatcaaatggaatgcttccgcaagaagaagcggatatgccatcacatctctctatatccactaagatgctaccaccacccctgaagagcatgctgccactgccacccagaagcatgcccccaccaccacctaagagcatgcctccaccgccaccaaaatttccttcagatgagtttttgtcaagaaacgagaacaagttttttcctttaaaggagccaacagcacctccaaggtcctttgatgcaatatcagtcttgccatctgaacgacgaccaagggagcctaaggaggaaaaaacaaaaggcacacctgtgtctgatactttgctgaaacttattgattatggagatgacgacgatgacggcgatattgatgtgacagacaacacacctaagggcaatccaactcctggttcagagcagaaaccattttgggctgtttaaaactgggtctgctaacgtagtctagtgtgaattcttgttgataaggatgcttgctgccttggtgcatcttctgaattgaagaggcaatcgagctccttgttcgtgtactgtagtaattctaacaggcaatgagatttctttgaacttgtattcattctggcctagtcaaaatgaaccgtttgttgttttggttcagatacgatgatgtttcgtttttagattcgacgttggttgctgaactcgtagcattttaatgtcggtattatataattgttagagcctatgtcaattttgtatccactgtcgtgcaaatttaatttttgtaatcagcctaaggtcacgacattgcttggaaacactttttttaatgaaggaaaatggcaggacatatggtatggtaatt

SEQ ID NO: 28669 - DNA, 3103 bp, Zea Mays
gatcgatcgagctccaagaaagaatcgtagatagatagagtgcgccagcaggcactagcactagagtccagagcagacgaggcgactagcaaagaaacagaggggagggagagggacagcggcgggcgtgcgcatgtgagcggggagacaccggtggtgccgatgagctgtgcgtgggagggcaagcagtagcagtacaggcggctcgtcctcctcctcctccgtgctactaccatacaccatcccagtcgctccccgggcctcgccaggcaggcgcctgccccacacggccacgcccacccaccaggagccaaagccccacacgggacgggcggggacacgggcagcgaagcgcgccgcgcaggcgcaacgcaacaaagggaaaccccagccggaggagcaaaagctagcaagcgtgtccctccccctccctcactcccgtttcattccattcccccccagacgccgctaccgccgccgccgcacgcacgcttgccccgggatctggagatctggtagcgccagggggatggaggccagcgccgggctggtcgccggctcgcacaaccggaacgagctcgtcgtcatccgccgcgatggcgagccagggccgaagcccatggaccagcggaacggccaggtgtgccagatttgcggcgacgacctcggcggcgacagcgggcacatccccctcatgccctaggtggagcaacgaaccccctgacttcccgacgccaccctcgcacaagatcccgatgtggcaatggcgaccagcgacgggcgctcaacgccaccgcgccgcctgcgaacccatggtgagaagtgtggtatcgatctagagccgaaggacttccccaacaccccttcctccatcggcgtgacatcggccagctcatctgcgacgacgaggcatcttcgaccgacttctcgacaccccatcctccatcaatgcggctccagtaccccttcctccatcggcgcagcagcatccaattcatctacgatgacaaggcatcttcgaccaaccacgccctactacaagtggtgtcagtccatctcagataagtggagtaatttgtttgtatctgtatcttctattttatttcttccctaatcctgattaatagcctaatcacgcgacaactaatacatgttgatttctttccttagtcggtgtcgtgcgcatgtgagatctagggagaggaagaggaggaagggttgtggggaccgggggtgcaagatggcggattcacctgcaactacaagaaaagaaagagcgagagatttacagaaaccttcagagccgcggaggaggagaaggagattaggaggatctctacggcgctgacggattagttaaggaacgaaatatcacatcgtgtccggtaaccagattcagatgtgggcaccatgcgtgggtgcagggccaggccgaggtgaaagagattcgacgattgagaatacatcaaagaataaaaatgtggaactcggattttcagatgaagagcgtgaccaagaatttcccgattttccatcatttattccattcttacctcctctgagtgcagctaacctaaaggtctactatgccacacgtttcaccatcatagttgggataatggtgttcggtggttttcttgcaccaatcttaaacttggtctaggggcacatcttatgaagactccatctgcagcgttcatctgtcgacgtagttgagaagtgcactcaggttatacatccagtaaagagcaagacatttgaaagcttatgggccaactgtgttgctattgatgcaagcgaaagttggctgatgaattctctatgcctacttctagagtgatgttcaaagaggttgacgctccttcaccatccccagctttgtggaatgggccacaggtagccatttaggatgacaaagccacaagggtgtccttcatcaaggctatgctagaagcctcagacttgtgtctgaggaaaattcataaaaatggtacacagaagaaagtggaagaggaatttagcacttgccctctgtcagtcctaatgatgagcgttaagaacaacaccaagatactgaaagcaaacatggcttgttcagtcgggcagcggcagcagaggggatggggccaatgacggaggcggagaggagaacccatcgatttggtggcgtaagtgggagctcatcgaggccggtgcgtttgggcaggtctaccgcatgatttatttgcccttatagggatcagcagatcccacacctattacatgatctgtccttctagaatagaatccgctctctatcttctgaaccggtactgccttcttcaatatcagccaccggccggtccacctcttcaataatcgtccttcatcgcccttcagttgacctgagatctagaaggacacaacaggcaagaggggcgagggttgttcagtgctttgacatgtgtgcaactattcaagcacaatggttagatgatatccccattcattttagattattacattgtggtgttcggcttcttcagtcaagcagcaatcatgcaacatgccttactgtagttttttatcactgcacatgttgctggacaaatttatggactggaggattatagaggactaacaagtgctactgggagattctcgagcaccattgaactaagagattccaaatagttctttggagtctattgttgatgttggcggggataatctagcagagatttgtcagattttttgtgcaacacggaggctacatgaggcagcaacgatcccattcttctcgcatgccactttacacaagctaaggatagcttctggtctcactcatggttgtggcagggaaagccgagtcagtagggtttgtcatgtagctggagttatctcagaccacatattagatgcagtgatgatgttaatggaggatgtttacatttaccgtgcaagcaagatgacttatattatgccttaggacaataagtattgttttcactctaatgaaatacttggtaaaaagttgtctctgtagttgtatatttgactgtgaatatttgaacccactgttacaattgttgctaattgaggtcagatttcagaggccaaataa

SEQ ID NO: 28670 - DNA, 3064 bp, Zea Mays
atgtgggctcgggacatgcggggtctacgtgtcagcgtcccggtcacagaatcacatcttcctggccgccatccgccggacggagcaccggacccgccgtacgcctccgtgctctcgctcgccgaggcctctccgcgggccgcagcgcggttccgcctcggtggccgccggagctgctgcctggccacaagaagccgtcgctctcccagctttgaaccggttccgatccgcaccacggagaagcccccgcctcgggagtctcgcgtcgccccgatgaaggtggagctcgccgcgcagacctcccagacgagcacgcccctgccgccgtcccctgaagccgcttctgcgtcgcccccggcggaggatgcgccgctcctccccgacgcgggcgtgcggcgccgggcggcgtgcgggcggttcgcgcagcgcagcggctccttccgccgcgaagtcggccgggccgccgccgagaccttcctcctcacgaggctcaccctgatcctcctccgctacctcgggataggctacagatggattcggcagttcctagccctctgctgttataccctcttgctgatgccaggttttattcaagttgtatattattatttcttctctagccaagttcatagaagtgttgtatatggagatcagccaagaaacagattggacctgtatatgcccactagtacaacagggttaaagccggtcgttgcgtttgtgactggtggagcgtggatcataggttacaaagggtggggagcccttttaggcagacgcttagcagaaaggggcatcatagttgcatgcattgattacagaaactttcctcaagggactattggtgacatggtagaagatgcttctcaaggaatagcttttgtctgcaagaatataacaagttatggaggtgatcctagcaggatatatcttgttggacaatcagctggtgcacatattgctgcttgtgctctcttaaatcaggccattagagaatccggtgaaggagatacttcctcttggagtgtatcacagctaaaagcttactttggtatttctggcgggtacaacctccttaacttggttgatcattttcatagacgtggcctttaccggtctatctttctcagtatcatggaaggtgaagtatcactccagaaattctctccacaaatgatgattatggagtcatctgctaggtctgcagtttctttattgcctcgcatcatccttttccacggaacaagtgattattcaatacctccagctgaaagccaagcatttgctgatgctttacaacagcaaggcgcaagggcagatctatttctgtacgaagggaagacgcatactgatttgttccttcaggatcctcttcggggcggcagagataaaatgctggaagagatcgcccgtgtgatacacagtgaggatccagacgctgctgcccagcacctcgtcgttgtgcctgttgcaaggcgccttgtacccgagttcatgctgaagcttgctgggagagtaagccctttctgaaggtgcttctaagtttgattgcgaccacgactgactagtatttgtgaattttctttttttatcttaagacaaacatggatgtacatgtacttgtgatcggagaaagtactcataattttctagacaggcaaaatgtgtactgacaacgatatcctcctcctcgtacactgctgacacttcgtacggcacaagccgttgtagaactcaaacataccctagactccattggaagaaaacacctcatggtcgacaggctgaccacacttcatcgtccattctgcttcctccatggacgaactagtgctacatcttagttgaactagctgtgggtgtacacaagatccaaacagtgtgtcgtcggcattacagtgcaccagacagaaatcttgtgtcgagattgctgtcgccatggacagtcctgccttaggagtgcatcctggagaccttttcagacaatccatcgacggtgccttccatctcctcaggtattccatcatcctagcagagaaaccaaacatgagtgacagatgcactacctaatctctaaataaggtgaacaaaggaaaaggtacaacttgcatgcaacagatcaatcttagatgtcctttggcacatcctttttcttgatgttgacagtgtgcatgccatcaaaaaaaaacaagaagacaacgacgacgacattggtagtgcacaagttgtgccaccctgcctacttgccacgagttgaattcaggcagttcagcattacctctggctctgggtgtttatttctgacaacgacgcacttggaagcgcttatgcttgcactcttcaggtagctccgagagcttaagcttgtgggtttcacatcatccatgtcagcatcctctgaccttggagggctcacggtagtgcgggcaacagaatctgcgcttctctcctggtcattaatttgttgttcagtattgccatccttggatacaaccactctttcccttggtaaggaagcatgctttctttgcagtggggaacctctttctcctttgctgtaatgctcctcaagatgagcgaactgcagtttgaagcggtcgactccgcttggatagaggaagctaatctgttctccgcctttcatgtactcctccagcatctgtggatgatactccaaaatctgctcgcgtattatagacaaataataataattctcaagcacggtgactacacttgtttacacaaacaggaaaatagattagaagctattgctcattacctctcgatagatcagttctctaacatcatctttggccagcttctttctttcaaattcaaactcaagtttagaaatcgggtgtcttgatggctcacgttccacattagcaagggatgcaaagtatggatcagctagagcctgaagccggtctttaggatcaaatgcaagcaaacgctctagaagacgaagagccaaaggatcagcatgtcgaaatttatgagtaaagggcacgggatattttttccgcatgcagctcaaatatctcctggccttctcatttcgaat

SEQ ID NO: 28671 - DNA, 1572 bp, Zea Mays
ggcgagggtggccttctcctcccatgcaagctcagcagtacgctcatgggcacgaaatgtgttggcttatcttctgccacaaagggaacttggtgttgccgatattgtgagaatagacaacagagggaaagttgtttggcatataacaacaatgcaatagctgctgggagagttgaaggagttgatgccttggaacaaatattcacgcggtcgatacgtattgctacaacacttgagactggatttggtggttgcgcactgtgcaatgtggtagagaatatcatgttggttgcctcaaggaacataatatggctgatctgacggcattgcccgagggagcctggtattgttctacggactgtgtgaggattaaccagacactgcaagatttacttaacagtggtggagaacctgttcttgccatggatttagatgtcattaagaagaaacgagaagtgaaaggttttaatgatgatgatgctgaccttgatgttagatggagagttttaaaggacaagagctcagacgacagcaaactagtgctctccaaagcagttgccattttccatgaaacttttgatcccattatccaggtttcaactggacgggacctcattccagccatggtttatgggaggagtgcaagggaccaagattacacaggaatgtattgtactgtgttaactgtgaacaatattgtagtttctgcgggtcttttccgcatcatgggtagtgaaattgctgagctgccgttggttgctacaagtagggatagacaaggcttggggtatttccaagcacttttttcctgcatagaacgtctgttgtcatctttggaggtgaaacattttgtgctaccagctgcagaggaagcggagtctatctggactgagcgttttgggttcgcaaagataagccaggatgagctgcgcgaatacctcaagggtgggcgaacaactgtgtttcaggggacgtcaaacctgcacaagctggttgcgaaacttgaatgctagttatgtgagaattgtatggcaagagcaaggacatgaagctaagaagcagctcattgtttgtgtgcctctgggattgatgcagacaggaaagaggcaccctgatccctttcttgtaaatgttggtgagcatgttggcattggcatcttgatctgtttccataggtaaggtgaagaggattgtgtaagataaaagggacaagctgtatgtaaagacaagccaaagctgagtgaatttcaggcaccttattgtgtggagggtcctgtgtttgttgagtaggcaacgctcgggctggtgtgagatgatgactgcatttgtgttgtgttggtggtattttcactgctgacatgactgttgtatcggatgacatcttttctgttttatgacagtggcagtgtgatactaggctgttaggaggggacgggggaggtcaaacccaacgtacatcatgagtggagctgctgtaatgtaacagaagtattgcaccccccccccccccccccccaataatatataacatgcttaatttggtgcgaattccttgccgcttgtggagcttag

SEQ ID NO: 28672 - DNA, 2075 bp, Zea Mays
ccgagtttcgccacaccaacggcacactctcgcgtccgaactccgaactcgccaacaccccggcccgcgccgctccccccgcgcttgaggccgtcaagcccagcggcagggcaacgccaatttccaaatcccaaaacctccagcctcccacctccagcattccaaacctcagatcccccgcacgccgcgcctccgaaattccgaaacccaaatcagagcgccgcccccggcccccgctgcacgcaccgggcgggggcccatgcggccgcgcggctccgcgcccgcgccacaccgttggaaccgagcgggcgcgctagatgcctgagcccggcggccgctgcctcggcgacctcggcggtcagcgccaggtgctcaagggctggcctgacctgtggctggtgggggacaagcccggcctccgcgcgctctccaccgcggccatggccgccgcgccccagccgccgccgctcgaggccgaccaaaccctagcgctcccggacgtgcttctcctccgcgtcctcgcctgcctccctgagccccagctcacgggcgccgcctcgctcgtctgcaggcggtggacgcgcctcgcggggcgcctgcgccgccgcctcgccgtgcgggactgggccttcgtcgcgcaccgactgccataccgcttcccggacctggccgacctcgacctgttcccggcctctatcgccgcgcccaccacggcggtgccccacggcgccgctgcctccccgcttctcacctgcggcgtggtctcgctaaccctagacaccagcgcagacccgccgctcggcgcctgccggttcatcgacgacgacgcgctcgaccggggactcgccgccgtcgccgctagcttccccaacctcagccgcctctcggccaccgccgcctctgagtccggcgggctcatggccatcgctgtcggatgcccgacgcttcaggagctcgagctccaccgctgcaccgacctcgccctccgcccggtttccgccttcgcgcacctccagatcctccgcattgtcgccgcgtcccccgcgctctacggcaccgccgagggcggcggcgtcactgacatcggcctcaccatcctggcccatggatgcaagcggctggtcaagctggagcttcagggttgcgaggggagctacgacggcatcgcggctgtggggcgctgctgtgcgatgcttgaggagctcaccatcgctgaccacaggatggacggtgggtggcttgccgcgctagccttctgtgggaatctcaagaccctgcggctgcagagttgcagtaggatcgacgacgaccctggcccagcggaacaccttggtgcttgtctcacgctcgagagcctgcagctgcatcggtgccagctgcgtgaccgtagcgccctccacgccctctttttggtctgtgagggagcccgtgagatacagttccagaattgctgggggcttgaagatgatatgtttgccttggctggcctatgcagagcttttctccaatctcaaagagctgaagtggcggcccgacaacaagtcacttcttgctgcaagcctcgttggcactgggatgggaaagaagggcagggtatttttcaaaaggcttatcttacctgcccatcaacgaatcaaagggaaggtgctcaacaattcagcaggtgttgctgcttagttggattgctagtcgaaactaggctaccgcacaaagttcctagttcttgacttgatcaaagtcaaccacgtttcttgatactcaaaagccgtacacaatgtggcatctgttcttccacttaagaccaaggacagtcataactagtcagaacctggtagtttgatgatgcacagtttcgggtaccaggcgcctgatttgtgtttgtacctgtgttcatgtgttgtaactgacaagctgaggtttgctcagaggagcctgaccgtagtatttctgtatgaggaaaagcattgcttcataaattatggcagagttaaattatggatagaaccagtagaaccacatgtttacagcacatggtctaactgtcgaatgaaagtgtgcctgacgtctgacctgca

SEQ ID NO: 28673 - DNA, 3279 bp, Zea Mays
actgaatttgcttatttccggctcttgttgaaaccgccacccgattcctccgctcgccaaatcctcgccgtgccctcgtagcaattccttgcgtcggcgcatcatcgcggcctcctctccctctctctctctatctctctcaatctctccgttggcaaatcgttgaatcgacgtgcttggccccggccgctctgagcccgccgccagcctcctcgtctgaagaagaacgacagccgtcgggctccggtggtcccgccgaagaacggcaggtagccagccgcgctcatcacgccggcgactcgattggcattgtattggcctttccgtttgttgagttctcgaagcaaaacgacctgatgagattcctcaaggggagcaaggtggaggtattgcaggaggcagatgtgccgtttggttcttggaggcctggtgagatcgtctccggcaatggacacgcctactttgtgagatatgatgaaagtcccgttgactccagcgtggctgttgaaagggtgccaagaaggttgatgaggcctcgccctcctgcggatgatcctgtacgctggagtttgggtagtatcattgaggcctttgacagctactcgtggaaggttgccgaggtggtgagagtgcttggaaagaatcaatatctagtcaggctccttgggtcctcgctggagttgagtgcacatgcatcggttcttcgaatgaggaagctttggctagatgacatatggattgtgactcagaagtattctgcaagatgcttggatggtggtgcattccgaggtcaatcaaaagataaaaatttagaccataacttcagaatggacagtcgtcaacttgagaaccagaatgcctttgagggtgatacatctagaggcatcaagagaaaatcgtctgctatatcaacacatcctcaatgcagtgaaatcactaagagattgcggacaccaaatagagatggaaggtactcaaagctggttgatagaagtttttcccctttggctgaaaaggtagatgatgttgattccccatgcattattctacgcgggaaatgcatccatgctggtcataaatggcatactggaacaactgaagaatttagtgatacagagagtatatcatcttctgttggcagttctagtcctaacagtacccctcatagatcacaacattataatttggtctaccaaagtggagatagctgtagtagaactgatgatgatgaagcttctacatctgaaagagaaacatcagaacatgataacaatgggtcgagggaagaaacccatgtgctggaattacatgcttatcgcgcaacaatgttagccttgcatgcttgtgggtcaattagctgggagcaagaggctttgttgactaacctaaggttaacactgaacatctcaattgatgaacatctagctgaattgaggagtttggttacccgtgctgttacttccagatagcttttgttgttactttcctggtggcatttcatatctttcaaattattggccaaggttggaggcttgtaaagcatccttccataggttcttgtaaatggaggagtctgccacatgttttgcagtgcgataaatgtggcaacatttccaatgaacttccattggtcaagctgggtcaagactggttccagattaatactggttgctggataaaatggtcaaattagattggtttatcatccaaagacaaaaaggtgatctgcttgttgtgtgatttttcacagaacaagcatatttcttctatgatggcatgcacccgtttgactgtccagaagagcacttgagggaacatctgtatcagcaccggagtgtttcctctttccagcaccggagtgtttccaccatcgtcattagaggtaggaccctcccacaacctagaagcaagaccctcgcacgcccgatctgaggatgacttcgagggatatgacgattgacttctcgagtcagacgatgaacttacatttgatgcgcaacctgaaggcccggctaactggaactgggtggctgagctacaataggaggttcaaactgagctgcctgctgaactaagtatgattcaagacgaaaaccactctaagtatgacctctcggatgaggacgtctccgtggaagggacggacgcgtccgatgatgatattttggcagataatcaggacccggctgatgaggatattgaagatatcgagccgaaagaagatgagaaagattcagaggagctcattgttatcgatgatgagccatgggcgccagatccatttattcctgttgttcctaatccgaagactcgagcaccggagattcctgtaccagaagcccctgcgccagtagctcttgcttcagagggtcccccacaaggaaatacaatgcctgagctcgtcccgcaaccggattgggtaaggacaaaatctcacaatcatcaactcaggtgtggctgaagacaatattcgtatggagactactcaaatataccgctgccctgaacactgactgagcatgacgctgccttgattgaactcgaggaattaaagaagcagaatgcccaactgtgactcatctggagaatgaaggacaacctcaggctgccgtgaaacttagattttcctgacttgcagccgacttctatgtagacacaaaattgttgggattacatagtttggccttgcatcaaggaaaagttgcaggttatctgtacagtaatttgccagtcgtcttatgcatatgatgcatacctttttactgttctagtgttttgtaatccagatattgtagccggtgttcttggtgaaatatgcgccaggagagactgagacttattttgccaccttactttgtgcaaagccagctgcccttcaactttgctggacaggcaatcacatattttcagaagtgaagcggtaggccccggtagttctgatgagcaagcaagtgaaaagtttgtatgtggtgtatgacgatgtaccttggatctctttacttccaattgaacctgcacatgttcctggcttcgtgtcatcacaatgaccttgtattgtttcagtgttcacctacagttcatgtaccttaggttccttttctgtttttgccttacacgtaattggttgcagcagagcaccaaggatcggggatgtacaaatcaatatcagtttgcaactttgcatggaaggcatgcccttgcaaggcctcttggacagactccttcctcagtgctgaccgcatttgcagttgcagtgcgttagaggtggctgctgatgct

SEQ ID NO: 28674 - DNA, 1726 bp, Zea Mays
aaagcccaaccccgaacaggtagatttccctcaaagaaacaaaaaaaataaaacaaagataaatcattggggttgggggattgcaattgcaagttgccgctgtgcggttgcggtcgctcccctcccgactctggccagcagcagcgacggtgccggcagtcgattactccacgcggcggaggcggcggtagcccatcctttcccgttttctgatccagtcctactgataccgcgcacagcacgcctgctctattaaagattaaaggtctgtctaatgtaaaggaggaagtttatggggcacttgactcatttgttgcatgggaactggagtttcccttgatagtagtaaagaaggcactgaagaaacttgaggacgaaaaggaatggaaacgaataattcaggtcattaaatggatgttcaacaaaggtcaagggaagacaatgggaagctattacaccttgttgaatgctttgatcgaggatggacggattgaggaagcagaagagttatttggaatggtgttctcacgatatatggagggtttgcctcgtacatttttcatgagaatgatttctttctattacagcgtggaagcgtatgataagatgtttgagatttttgctgatatggaggaactaggcgtaagacctgatggttctattatcaggatgctaggtgatgtatttcagaagttagagatgatggacaaatatgaaaagttaaaaaagaaatacccaccaccgaaatgggattatcgacacatcaaaggcaagcgcataagaatcagagtttatcctgatagcaaccctgaagtggcggcaaaaggagaccctgacactgatgagctcgaagagttagaaagcacacaccttaataacgaattggatgaagcagcaagctcaggcctcgacaggagtgtattggacgatgcagcttctggagaccttgaatatatgtaggtcagagcttccctttggtattttttttgtgcctgcttaaccaaagcggtctagagcaaattgaaccggtaacatactctctgttttggtttgacatcccagaacccatgtcgtcatacttccaagacatctctgttttggtttgacatcccagaacccatgtcgtcatacttccaagacatgggcatcgctatcttctgaagtattttactacctagaatgagtagaaactacatgccaggctttgccatcagcagtcttttcaagacatcatggtggtttcaccgcgatatgtgttcttcagagtttggttacctgattcacttgcataaggctcatgcctttttgaatgcttccagccaggttaaaaacatagcgatggcattaggacctgtagtatctgagtgctttcgtgaacatatatggttgattgttgaaggcaatgtcctggacatcagacagggcagtagccattactatggtcctgtttggcacagctactgcttgttgaaaaagcagcttatctgagaagctgatgaaaagcagcttctgcttgttggctgcttttagtgtattctgagaagcagctgaactaataagctgctgtagaagctggctgtttggcaggacttctgcttaaatttgcgaagaagctgaaaataagctgaaaataagctgtgccaaacagggcctatatcatccggtatggtcctttgttcggcatggaaaggcgccatattttcaggcatgaaagactctattgtgt

SEQ ID NO: 28675 - DNA, 1758 bp, Zea Mays
tcggcctattccaccggtcgtcgcctttttgctgctgcgcgacgccgacgcggccgtgcgagtgcggcgcagcgacggtcgagccaagctcactactccaaattcgtgtcgtagtcgtaggaggaatgtgggagagaatacaggggagaagccgagagccgaacgaagagaccgagcccccgccgcccgcggcgtctgttcctttcgtgccgcttcgtggtggcgccgtggcgcccaccaccacctcacctctcagtctctcaccacctatagcaataccacgagtccacgatccatggaatagactagactacaccgctcggccggtgacgacgacggcgacagccgacagtctatccccaactacgctctgcaccagcgccttatccgccgcctggggtttgttctggcgcggtggcagttgataaaggcgggagggattagagcaaggagagggatcggcgatgagcttcgcggatctggaggcgggggctctcagggcgcccctcgggaggaaagcgagaggggggccaaacgacgcgagagcgctcgtcttccagataaccaccgcggtggcctcgtaccgccgcctcctcaactcgctcggcacgcccaaggacaccatcacgcttcgtgataacctgcataagactagtcagaacatccttcaattagcaaaggatgcgaaagataagctccaaaaggctgctgaagcagacaagagcactgatacaagtgcagacaagaggatagctgatatgaagcttgccaaagattttgctgccacaatggaggagttcaggaaacttcagagtcttgcgattcagagggagacggcatataagccagttgttccacagaatacgcagtcaaagtaaccctgttcacgattaaaccaatccatagtgaaattcttcttatgtattccattttttctgtaccatggaaatgctttagtttgtcacttatgtttacagattacattagatacacaagatactcataacatgtgaagttgagctatatgaattgctgctaatataaaactttgcacacaattgttcaaaacggtaaggttaaagtgcagttatgtaagtgaaccatgatgactaagctagtccacacaggatactaaacactattcatccatgacttggatatgttagaatgtaaaacaacttgatgtatggagaaagtcatcagtagtcagtgtatggttttttgcagatagctataaacagatgcatagtctttgacatgtttttattctgtacgtatcatggccctatttttgaccgaataccttggtcctactgttaacttgtaatttgcttggcctttacttagtgtaatataaacttaagggttttaattgtgctgttttgactttgactgggctgtcttctaatcttctggatgttattgtggttgttgtgatgcagctattctacagatgagcgaagttccgaatctggtaatatgcctgagcagcgtgcattactcgctgaatcaatgagacaagaggtgctgcaattggacaatgaaattgtttacaatgaagctataattgaggaaagggagcaagccattcaagatatccaacagcagattggtgaagtacatgaagtgttcaaagatcttgctacccttgtgcattcccaaggaatcataatcgaggaaatcgacatgaacattgaaaaataagcagcagtgaccaaagaggcaaagacacacctagctttaaaaaggcacgactca

SEQ ID NO: 28676 - DNA, 870 bp, Zea Mays
tacagctgaccggttgacgtggggctggctccacgcgtcagcccccgaagtgactactttcttccatgctgtgctgtgtctaaccccggccgagctttcttcattgattctctccatgccgagctgacattgttgggccctgcgacatcatctttttcctaccactgctggttgttccctggttcaaaggacgacactggtggccgcgctctacccaagttcggcgagtgggacgtgaacaacccggcgtccgcggacgggttcacggtcatcttcagcaaggccagggacgagaagaaagctcccccgacccaaggccacatcaggaacaacaggtcggtgtcggctgacagcaaggactccagggccgagaagatgacctcctacaacgccaggaccaacgcgtcgaagaaatggttctgctgtgtctcgcccagccccacacaatcttgaggaagctaacgacagagaaatggtccattgcatcgctgcggctggcagaccggccgcgagtgaactctccggatacttgccagtgacagtgtatagccgccgttgcaaatgacagtgtatagcgttcttagctgcctgtgcataccgtcagttcaggttgatgtctgcttgtaatttttcttttctcgcctcttctctacggtgtgtaacccttcctcagcgttaatcctcctgctgcattttgctgtaacttgggcgagggtggatttgtttcggctctgaccaaaaccaggtcacagcgaattctcagattgctgcagtgaccgccaccaacctgacaaacaaaaatgctgcgacgttttcagagctgtagaggatgttctcatggaaatacgttatatattcatataattctta

SEQ ID NO: 28677 - DNA, 1839 bp, Zea Mays
ccgggatgctcccactccagcccgtctccagccacgccgccccccgcaccaacccacccccaccacacggaaggcggaaatcccccacgcgcaagcgtttgccttgttgcttggcgtccgtctgccgaaacaaaagtcgccgtcctcccccctcgtcgcttcatcacctcacctccgccgtcgcctcccctcatccctccaccggcccgtttgaccctctccctggctcgctcgttctcctcctcctccgtacccgtcctagtaggtttagcgctcaacagaaccccaatcaccaccccggcgccccccgagagcagttgccttgccgcttgctgcggttccatatggtgccccccgcgtcggcgtgagggctgcgcgcgctcgtgctgtttatcgggaggagatagatggggcccgccgtccgcagtagcgtcgtgatcagggccactgtggtagggctcgtgctggttggcatcgccctggccctgccgctggccgcggcgctgcggccgctccgggagcacgtcgcgtccatcggagccgcagcctccgctggttcgtggggcgatgagcatgccttctacaaaagggatgagaacgatataggcccatattcatggaatattactggaacatataaagggagctggacttttgctggtgccacaaatggttcgtctagatttcttgagtttgtggaatctaaaggtgattcagttttggaattgttgagcactccaacaaagataagcggggtgcattatgttcagggttcagttacattccatgatgtcattgacaatgcccacaatggtggagtggctcaaataaggttagaaggagtttacatatggccttttagacaacttcgcatggtagcaaacagtggtgcagatggtgaaccactccaggaagaggattatttcttgtcaaatccataccatttattgcggattttctcctctcaagtgtttcaagaatcttctgaagagaagaaccgaaggaagaattctctcacatatgacatggagaaacattgcaacacagaaatagctgctaaggtggttcgtgtgtcatctaacccaaatgatggagaacacgagaagtaccgtttggagggtttgatggagagtccagccgtcgatgatgatggggaatgcttctctcctatcttattgaatgcaacttctttgaatgttgaagtttattacaacaaagcagtcaactacacactgatggtcacttttatctctttccttcaagttttgctgctgattagacaaatggagcatagcaacacacaatctggagctgctaaggtttctattttaatgattggccaacaagctatcatggatgcatatctctgtctacttcacctgactgctgggatattggttgagtcactcttcaatgccttcgcaacggctgcattcttcaaatttgttgtattttctatttttgaaatgaggtaccttctcgccatatggaaagcaagtaggcctttaaacagtggagaaggttgggagataatgaggcgagagctgtctgttctttacagccgcttttatggcatccatgagatccaggtggctgcacacgtgcaagtccaatgtgcggaaggtgtccgccttatcttatagggtcaaaaaaaaattcggattcggaataataagataagccgagatgtaaaaggcttgtcttctaggtgtctggttttgggtcaagtagactcggtctttgagcatccgtcatgctgcagctcgaggacgagctgcttgtccaggaggggtgtagtgtcagggcctaaggaggcccacggaggggctgcggcagcag

SEQ ID NO: 28678 - DNA, 2340 bp, Zea Mays
tctactcttaggaactgcttacattttttggtctataattgcaccatttagagctttcttttgttagattaatgctatgttatctaagtttctacagattgtgcagaagatctgattcgggtgggatattttaagttacatgcatgtgtgttttcagctctattttaaccatgggaacgggactatttggtttcaataaatgtctggatttgaaatgtgggggtgaaaatttctctgatatattcactttattttggcactggctcctgactcctgatttctgaccatgtaaccacacagaggtttagtactaaacatgactaaaccttgattcctacagtcagactgctaatctgctgtattgggctgagactctaagcctgaaaaagcttcacttgcatgggtatttgtgttatctttatagctaatatatctttaatctgttttcaaatttatgtatgcccatagttgattagttagttggtgatttggatggttctggagtatttggcttgtagcatatctgtttttttaatgaaagagaaggtatggtggtgtgtttgggacaattacctgcctttcatgggtgaggattagtttgattcgcaaaattgggtctcttacaaccctatgcaagtgggggtctacattagtgattaaattggacaaaggtgagctgcaaaagtgaaattaaggttaagtaggtggattaatgcaggttaaattctaatgtcataaccttgtaaagcacacatcatggaaaccagacggcatcttgtattcttagttcatcctgcattcctgcatcacacacagctgaccaaacagaacactgacttgtatcttctcttgttcaaaccagtttgggttgaggctgtattttactggagtcactgctacaagtagaaattgaaagatagctattttatatagaagaacaggataggaaaccagaggtgcttgtaccaaataggaaatactactgatattaccgaagttacaattcacttgagtaatacataaattatccatgaagttatatcccaaaacctgatctagcccttcaaatgcatatatggttcaacatgagcattgcacacctaatctgagtcctcacatataaaagaaaaagatttgtcatgggacttgcaggccgggagcacactgccaaacaacttctacattgatttgtgaagaagaaaaaaaaaccaagactgagatatgaagatcttaatcctttttctctgatattacaggcatcaccatattgaatgaaattgccaccatgaagcgctttctagaaaatgattttgcttttatttatgttggcacttgtagtggatcagaaccatatattctttgctgtagctgtatttaatgctctttcatagagggttaacaactattcaatcgcctagtcggtagggatcccctgtatcacttcctggattagggagcacaagatcctatattttaactgacacagtgttctaaaaaagggctaagtgggctcctggtgctgtctaccaccagattgtgtttctgttatccttttttggtcttttgctgtgaagcctacatgtataatcggatagctccacttttctattttctttaatgtttcaggtaaaggtttggttatgatgaaggggattaaaggatcatttgctgatgctgcgtcatctgctaagatatttgctgttcttgctggtgttcaaagtttagtagcctgctctttgagaaaactacgtggaaaagatgatggaatcaatgcaggagtcgcaggctgttgcactggccttgctctgagctttccaggtgcaccacaaactctgattcagagctgcttgacctttgggactttctcttacatcattgagaagctaaacaagcagcaacctgcgctggcgctcctgcctgcgacaggtgtgatggatccgaaggctggacaaagcgttcttccttccttcacacttcctcctctggataccatggacgaattttctaagttccaaaactttttgtcatccaaatttcggggaaactgagttatcctggtggagtgacgcctagttatctactctggaacgtgtccttgtaaatgcgtcaatggtcaatctgagttttttttccccttgtttattcttcgccaatgtatgtttccaaattccaaggtagtgttttggtagtgttgatgattctaccttgacatatcgaacacaatttgtaaataaggcgagcagcttgtcctttgttcaactgattggatcttcggagttttacccacagaccgtgccccgtaagaaggaagaacatgcaccttgattcttacgagtgtgt

SEQ ID NO: 28679 - DNA, 6476 bp, Zea Mays
ctagggcgcactcgcaccctccgccggtcctgaactcatcgatcgcagaagcgagagagagagagagaggaggccgtacccacgccgccgcttcgccgccgccgacctccgtctctcgcttccaccatctctctccttttcaccctctctcgcggccaccctcggtcccctccctgagccttacccttgactgagtggtttccaatttcagttccactccctcttccaccactattcacggggaggcgcggcgaatcctgcgagattcctcccggcccacgcgtgcgcacgttggcgatacagggctagagtttcgtctccggcgctttgcggagttaattaggagaaggaactggagaatgtgtaggtggtgggcgctgaaaccctagctgttcgggacgggcgtgcgtgcggggatggcaggggagctggggcagcagacggtggagctgggcgcggtggtgcggcgtgcggcggaggagtcttatctcgctctgcgggagctcgtggagaagtcgcaggcggaggccgaggggaagggcatcggcgccggagccaatggcagctggcagcggtccgacaccgagaagaagattgacttgctcaagttcatcacacgcacacgccagcgcatgcttcgtctccacgtccttgccaagtggtgtcagcaggttcctttggtccattattgtcaacagctcggatcaactctccacagccatgaaacatgcttcacccaaacagctgactcgctgttttatatgcacgagtgcttgcagcaggctcgggctcctatgttcgatgttccttctgctattgaagtcatgcttacagggggttatcagaggcttccaagatgcatagaagagataggaagtcaacataaactttccccagatgaagaaaagcgcgctctgcgaaaattagatgctagcgtgcggtacagagtacttgtgacaccaagacctaaagaagtatctaatgtttcagtaactgatgggatagctgttttccgtgtggatggagaatttaaaattcttcttacattaggttaccgtggtaatgtagacttatggaggatattgcatatggagttactggttggtgagaagaagggtcctattaaactggatgaaagtaggagatttgctcttggtgatgatatagaaagaagaatggcagcttctgagaatccctttgcagtgctatatgctatacttcatgaattctgcatctctcttgctatggacactattattaagcaagctaatgttcttcgacagggaaggtggaaagatgccataagatctgaactcatctctgacagtgccactgtacaaacgggaaatactcctctaatgcagcttgttcaagatgcggagttcgattcaagtggttttaagatacctggcctgaaagttaattactggctagatgagaaaagcactagcacagcagaacctgattcatctccatttattaaaattgaggcagggctggacatgcagataaagtgtcagcatagttcatttatacttgatccatttacagataaagaggcgagcctttctcttgatctaagttgcattgatgttgagcaacttattttgagagcagtttcttgcaataggcacacacgccttcttaatattcagagacaactgtgcaaaaatgtccaaatttttcagtccccaaaagatgttgtcttgacacgagatgttgcagcagcgaaggacccaatgatgaatgcggagaagggtttctcagattgttttgggaatgaagtgcttcaagtaagggcatgtggtcaggcatatgttagtcttggaataaatatcaggagtggccgctttctcctccaatcaccagaaaatatattaccccgtgctgcacttatggactgtgaggaagctctaaacaaagggagtacatcagctaccgaggttttttcaagccttaggaccaggagcattctccacctacttgctgcaactggaagtttttttggccttaaggtttaccagcagtctcagggcactctgaagattcccaagaccttattacatggctcagatttgatggtcatggggtttccacattgtgcaaatgcctattatctgttgatgcaacttgataaggacttcaggcctgtttttcatttgcttgagacacagtgtgatgcaaatggtaatactaatgcaagtggagatgtgaaagaagctattagatataacaaaatcaatataggacagatgcaaatacttaaaaatgagatgaatgagaacccttttgatgtgaagctgcaggccctacaaagtttagtggactctgctgacatgatggagagtgatcttcctgtccaaaatgcaattgaacctcttccactacttcctgcttgttcaccatcattttcatctattgttgatgaggttttcgaatatgaacgtggttctactgctgcgcagaatcgttgtcttccagttgatattcaaggaataaatgctagggttgtctcaccaatgcatgatggatgcttatcttatacccaagctaataataacatgaatgttcatcctaatgtcagtttgaatagctatttcccaagtaactttagacatttacaaggtgcaaataaatcacttcagcttgtgccttcaagcaacgataacagcaatcaaatccctgctcaaagctcacattcagggaatcttgggaatgctacgcctggccatttgattggatcttcaactacaaccggaggattagggaagctcatcactgctggttctgatggtgcatctaggaaacactatctttcagatttcttatcaagtatcccttcattacgaggactgcaacctagtgagccaagaaagcggagaaaaaaaacagaatcagtgcagagtctcctgcctttgcaggcacactcttctaatttgcaatcaagaggcagtctcacctatggagatgttcttgctgaaagaaataattgtgttccggcaactatatatgcttctgtgctactacatgtcataagacactgttcattatgcatcaaacatgcccaactcactgctcagatggattcccttgcgattccatatgttgaagaagttggtctgcggagaccatcgtctaatctttggttgagattaccttttgcacaggatgattcttggaaccatatatgcttgcgccttggtaaggctggaagcatgtcttgggatgttaggataaatgatccacatttcagggaactttgggaacttaatggaggaagcaccaaaacacaatggggtgttggcattcgcattgcgaatagctcagaaatggattcacatatctcatttgattccagtggtgttgttttaacttacaacactgttgaggcagatagtgtccagaagcttgtgtcagatttacgccgactttcaaatgctcgttcttttgctcttggaatgaggagactgattggtgtgaaatttcaagacaagctagatgacaaccagttaaccatggaggtgaaatcacaatctgttaataaaggtaacagtgatgctgctgacaagctatctgagcaaatgagaaagacattcaggattgaagctgtcggtctaatgagcttatggtttagctacggcaccatgcctatggtacacatagttgttgaatgggagattgctaaggctggttgcacaatgcacgtttctccagatcagctttggccacacacaaagtttctggaggatttcgtgaatggtggagaggtagcatccttcttggattgcattcggcttacagcaggaccattacttgcccttggaggtgcaattcgtcctgcaaggatgcctgttgctgtctcatctggatatagctctatgccaaaacagccgaacatccccacacaagggcctttagtaaatggttcatcttcaactatacatcacgcacctggcccctcaaatgctgcatctgcccatttaggcagtcataaccttcatgctgctgccatgctttcagctgttggacgcggtggacctgggcttgttcccagttcattactgccttttgatgtttcggttgtacttcgtgggccatactggatacgcattatatatcgcaagaaattttctgttgacatgcgctgctttgctggggatcaggtttggctccagccagctactcctcctaaaggtggaccttcagttggtggatcgttgccatgcccacagttccggcctttcataatggaacatgttgctcagggtctaaatgctcttgaacccaacttcatgaatgctacacaggctagtggacacttaaataacaatgcaggagttccacaaactgctcctagtgcaaatcgtttaaatgctacccctggtgtttctatggtcaggccaacatctggtgttgctaaccatgtagcagccagtttgagtcgagcaggaaatgccatgttggcttcttcggctcttgcttctggtattagtggaacttctgtgcgacttactgctggagctggtctccctgttcacatgaaaggtgaactaaacacagctttcataggactgggggatgacggtggatatggtggtggctgggttcctttggcagctcttaaaaaggtgctgagagggatcctaaagtacctaggagttctatggttgtttgcacaattgcctgaacttttgaaagaaatactaggatcaatcttaaaggacaatgaaggtgctctcttgaatttggatcaagagcagcctgcactccggttctatgtcggtaagtgtacatcgggttcaactgcttctacaagttttgagtgtgaaaagatttcaccaccagcaacagcagcagcaggctcaaagcaatgctcaggaagagctagcagcagttgaaatcaatgaaatatgtgactactttagcagacgtgttgcctccgaaccatatgatgcttctagagttgcttcttttatcactttgcttacattaccaattttggttctgcgcgagtttttaaagctgattacatggaagaaaggtctttccccggttcatggggacattgctactgcacagagggctcgcatcgagctttgtttggagaatcactcaggatcagcttcgtctgataacaccgagaacagcagtttagccaagagtaatattcatcatgatagagcccacagttcagtagaatttgccctgacatttgtacttgaccatgctcttattcctcacatgaatgtagctggaggagctgcctggcttccatattgtgtatctgtgaaacttcgctattcttttggggacaacaatcatatagctttccttgctatgaatgggagccatggtgggagagcctgctggttgcagtttgaggagtgggaaagatgtaagcagaaggtttcaagagctgtggaaactgtgaatgggtctggtgtagctggagaggtaggccaaggaaggctgcgaatggttgcagagatgatccaaaagcagcttcaactctgtctacaacagctaagagatgacccactttctgcaggctcgactgcatcatgaacttgcttggaatgagctctatcaaggccattgatgtctgtcatattcagcatggcctttggctttgttaacgtgtagatgtgaaggaatacacatttggtagcagtgacagtttcgcctgaggcttgctcagatgacaattttgtacagtataaatggtggcggttgactctgatggacctttagttagcccatttgaacgtggcctgtaacatagctagggtgggtaataatgtgccaaggtggaattgctcagggatgcaaaatgatcttcgggaattggttgtctgtatcatctactgtaatcgtgtcctttttctccctttctgatggatagttcatttttggattcgttatcatctttcttctgtctgtactatgttaatctagacattggtggatctggtatatgtgttgttgtacatgatatattggcactggacttgagactgacgcatttgacgtcttagtattagcaggacatctctagttgtgttcagagtgattggacacaaaaaatattgcttggagcttttctttagggctagtttgggaacttaaatctcgaccccatagattcctggagaagatttgagttcccaaactagttcttaatgtttcttttttttttctattgcatcttcttagtaaatgatgtttttgtaactgtaaaaaccgtgccggtcaagattgatacctggatggataagatgatgttgggtcagatttcttgctcatggttaggaaattgatgtgagcactctggccagtttgtttgaaactgatattcgtgagttgtgattggaagcgtatggataggctttttaatcgtgttaaccgtcatacgggtaggcctttttagttctcgtgcttctacgtttgggacacaggtgtcagtttttgtgctttaa

SEQ ID NO: 28680 - DNA, 979 bp, Zea Mays
gtccaccacccttaccgtgcccccgctccagccccgcccgcgccgtcttcctccctgcaatcccgccaccgcccgcgcgtcgtcctttcccttcaatctcgccctcgcccgcgccgtcccttccctgcatcccgtccccgtccgtgagccccctccacacgctcccgtccgcgaccccagatcccgtgactgccgccgtgtcttcgcccctagctccatcatcccgtcgtgtcccgccgtgccatcctccgctccgcgaccaccgcctctgctcccctcgtgcccagcgccgcgtccgcgaaccagcacccctcactctctctcccgcccggctctcctcgcccaactctctctcccgcaatcccacggcctcgccccaaatcgccgccccggctctcggtcctcgcccaagctctccatggaaggagatcgaggaatccgcgtccgctgcgcccggctctctctgcgtccgtagtctccctggaaggcgattcctcgatccgcgtctgctcgcttcggctcctccgttcccaaacctcctcaaccagcatctctagggttttcgcagccaccgcccatggctgccactccggaccgcgtcaatgccgaccttcatcgtcgcctcgccgtcgacactccaccgccgccccagggaggaatcgtccaggcactaagcacaaggaacagatggaatgggtactccatggattaccaaggaaaaaacaagctggtttttagcctaactgatccgaaatcatgcacagcacaagatgggtaagaaagagctgatgggaggcaaggacttctaccatgtggaagtacagtcaggatatgaccaagctttcatcattggggtgatggcaattcttgacagcatacatggagaaagacatgggacaaatagaagacatctaaagctttccaaggcagatgcctccagaggatatctactctctggtcatatgatcgatgcatagat

SEQ ID NO: 28681 - DNA, 1925 bp, Zea Mays
gccattttgccgtatacgtacagcatacaggttccgtcgtcccgcaccgcacagccgctcaaaaaccctagttctcgccgccacctccgccgctcggcgcccgccgccagtccaccacttgcccacctcgtcgcgacgtcgcgcagatatcttcaccgcccgtcgcagcaggtgagttccctggcccgttgcgtcactgcgtgttgtgacttgtgaggctaatacaccatactgcatacatcctgtgagggcgtgaggccaatacagcattcaatcttgtggatccgtggcccgtagcccgtggcgtcgctgcgtggagatcggagcggtcaagtttagtaaatggcgcgacaggccaactgtcccaacaaatggctcttcctcggacaactcagagcgcatggcacgagagcccgcccgcccttggtcaagtccagtaaatggcgcgacagagtgctgcttcgattcccattaagtgtgtgttgcttcgattttcagttagtcaattctataaaaccgaccctctctttgttaggctgccagagactttgatttggtgatccctgtgagtagatatggtgagaagacgtcctgtcatggcgtcgaagtccagagccagggctagtgaagccaaccgtaatcctagtagtagtagcgttggtgaaccagcacaaactgccgctaatgtgggtgtggctgctggtgaactaggtgtggatgctggtgaactgggtgtgggtgtgggttgtggggctgctggtgaatcagcaacaataccatttgtcgtctatgggggtgaattgggagatgcggttgctgctgaatgtgcaccaccgttggcatcatcaagcagtgcaaagtgtagttcgagggcagactgttggaaacatatggtgaagaaggaagtcattgaggatggtgtagtacatttttttgctgtaaagtttctaaaatactttgaacaaatatcacatgtatactgttttgcaactatttttgatccacgcaagaaactggatggtttgcaaattgcattggagggaataggtgatgcattggacatggatttttcagatgcttttaatcatgcaaaagatgacttgtttcgtgtctttggttactattacaaaaaatatggtgaaagtgagatagactcacctgctgttgagtttggtgcagaaatttcagatacctctcttacagctcacttatggaagagagcgaaggggaaagaaaatgtcgcctcatctcaaaggtggaatcctaatgctgaattaaatcactatctgtccactaactttgtaggtactgatcgcgcactaaggggtgagaaggtaaagttacttgagtggtggagggaccacaagtatagttttcctgtcttgtctcagtttgctagagatatacttgttattcctgtctcaactgtttcctctgaagctacctttagcactgttgggagaataattgaggaacgaaggtcttctctagcacctaagacggtggaggcaatcacttgccttaaagattggaacagagccgaagagcggaagcaacatcaacttgaggatcctgagattgaatttgccgctgcagatttggacattgattagacaataatgtttagttgctgctacagattgaatttgctactatgaactttatgtggttgtaatatttagactttatttggacattgccggtctgtactcttttccttatagaggggccctgtaatggggtataaggtttttaatgagacaggccgaggaatatatttttgtttccctcaaaatgtgtgttgattcattagttcacatgtttgtaacatatagtctggtgctactgttttagtttgtaatgaaatactatcatgtatatctctgcaattgtgctaatagtttagcttctatgttcttgaacac

SEQ ID NO: 28682 - DNA, 1259 bp, Zea Mays
caaactgcgcagcaggttgaagcagcaacagcaagccaagcctagtggtgctcatctagagagagagcagcagcaagatatatacaatacatggggtccttgggcttgctggttgttgtggcggtcgccgcggtggtgctggagctcaccgcagccgactcctggaacggcggccgcgccacgttctacggcggcggcgatgcctccggcactatgggaggagcgtgcgggtatggcaacctgtacagcgcggggtacgggaagaacaccgcggcgctgagcaccgcgctgttcaacaacgggcagagctgcggcgcgtgctttgagatccgctgcaccggcagcggcagctgcctgcctggtggttccgccgtcgtcacggccaccaacttctgcccgcccaactatgcgctccccaacaacgacggcgggtggtgcaacccgccgcagccgcacttcgacctcgccgagccggccttcacgcagatcgccgtcgccggcgccggcgtcgtgcctgtccaatacaggagggtggcgtgcaccaagcagggtggcatccggttcaccgtcaacggccactcctacttcgtcctgctgctcatcacgaacgtgggcggcgccggcgaactgacggcggtatcggtgaagggctcgcggacgggatggcagaccatgagccacaactggggcgccaactggcagaacggcgcgctgctggacggccaggcgctgtcgttccaggtcaccggcagcgacggccgcaccctcacgtcggagaacgccgcgccggctggatggagctacggccagacctacaccggcaagcaattctaacgggccggtcgcctgtgagctgtgcagccggcgtcgccgccggaggaggggctctgttttgaagcagctcgctcgagagcgcgcggcaaggccgatagaggctatgttgcgactagtagcaaggcgcatgtgctgcgtcgtcgccggccaccgaagatggtgggcgggggcgctctggccgcttttactttcagcggggacgcttaattagttagatggtcagggaaattaatcaatggatggctgtggtgatgaggagcagaaattagcagcggctcgtcacccgcgccgtgtaccacgtagtaactattgcagctagctttgctcgcttcaatcaatggaatgtggctgttcatcgttgcaacatctcctctgtctcaactcaattgaatgtgccaatgtgttgtactcagctaagaagccag

SEQ ID NO: 28683 - DNA, 6985 bp, Zea Mays
ccggaggaggggtcaaggaaggcgagcgacgctcccacaccaatccacaacaccgccgcgccgcccgccgccgctggggacgagcgtggggcgagcaaccaaatctaagacaccgatccccgacgcgcaggccgcgaagctagcggcggagaaaagatcggagccacaacgcggtcgtgagcccgcagccaccggttccgcgaggctagacggagacagagatagcgaggcttgctgttcagccatgtcgacggcgcaagggacagcgttgaagtcggcgccgataggcgcaggtcatcgggcccggcgcggccgccccgtggtgccgccgtaccgttctggctggcaagcatacggcggcgtttccctcgagggcagcgggttcctcggcggcctgcagcgcaccgaggagcgcgtcgctacgctggcgccccgcgcggcggcgcgcgacgcggaggtggtgaggccgctctcgaagctcccgaacagcagcattgggctctatgatccctcgttcgagcgtgacgcgtgcggcgttgggtttgtcgctgagctttctggcgattacaaacgcgagactgttaatgatgctattgaaatgcttgagagaatggcgcaccgtggtgcctgtggctgcgaaaagaacacaggagacggtgccggcattatggtcgctctaccacatgacttcttcaaagaggtcacaaaggatgctgggtttgagctacccccgccaggcgactatgctgttggaatgtttttcatgccaaccgatgaaaagcgtcgcgagaagggcaaagctgagtttaagaaggtcgcggaatcactgggacatgtaatactcgggtggcgtcctgttcctactgacaactcagacttgggtgaatctgcactcgagactgagccagtcattgagcaggttttcgttaccaagagttcaagatcagaggctgagtttgagcaacagctatatatccttaggagactctcaatcatctctgtccgagcctctctgaacattaagcgtggaggagagagggatttctacatgtgctctctatcttcaaggactattgtttacaagggccagcttaaaccgtgccagcttaaggggtactactatgctgacctaggtcaagaaaacttcatgagttatatggctctggttcactcaaggttctccacaaacacctttcccagctgggaccgtgcgcaaccaatgcgtgttttaggtcataatggagagatcaatacccttagaggaaacaagaattggatgacagcacgtgagggtctcttagaggcggagaagcttggattatcaaaggagcagcttgcaagaattctgccaattgttgatgctacctcttctgattctggcgcattcgataatgttcttgagcttcttgtccgtggtgggcgaagcctgctagaagccgtgatgatgatgatccctgaggcatggcagaacgatggaaacatggatcctgagaagaaagctctctacgagttcttgtcagcacttatggagccttgggatggacctgctctaatatcttttactgatggtcgttaccttggagctaccctggaccgtaacggtttgaggcctggtcggttttatgtgacgcacagtgggcgtgtgatcatgggtagtgaggtcggtgttgttgatgttcctcctgaagacgtgctgagaaaaggcaggttaaaccctggaatgatgctattggttgattttgagaatcacactgtagtggatgatgaagctctgaaagcacaatactctaaagctcacccgtatggggaatggctcaagagacaaaagatatatctcaaggatattgtagaatcagtaccagaaaccgatagggttgctccaagcatttctagctcacttcctgcaaagaatgagaacaaggaccatgttggtatcaatgggattttgaccccactgaaggcttttgggtacacggtggaagccctggacatgttgctactgccaatggctaaggatggagtggaagctctcggttccatgggaaatgatacaccacttgcggtgatgtcaaacagggagaagttgacttttgagtacttcaagcagatgtttgcacaagttacaaaccctccgattgaccctattagagagaaaattgttacatctatggagtgtatgattggccccgaaggcgacttgttggaaacaactgaaaaacaatgcaaccgtctttcacttaaaggtcccttggtttctattgatgaaatggaggctattaaaaagatgaattatcgaggttggcgaagcaaagtgcttgacataacatacccaaaaaagtctgggaggaagggcttggaagaaactttgaacagaatgtgtgctgaagctcgtgaagccatacgcgagggatatactattttggttctctcagatagaggattttcctcagaccgtgttgctgccagttctctcttagcagtgggagcagtgcatcagcaccttgttgcaaatcttgagaggacacgcataggattgttggttgagtcagctgaacctcgtgaagtgcatcatttctgcaccctgcttggatttggtgctgatgctatatgcccttatttggctattgaagcaatttggtgcttgcagaatgatgggaagattcctcctaatggtgatggacaacccaactcaaaggaagagctggtgaagaagtatttctatgcttctaactatggaatgatgaaagttcttgcgaagatgggaatatccacccttgcatcctacaaaggtgcacagatttttgaagctcttggtctttcttccgaagtgattggcaagtgtttcgaaggcacacctagcaggattgagggtgcaacatttgaaatgcttgcacgagatgcacttcgtcttcatgagttagctttcccatcaagaacccctccagctggcagtgcagatgcaaaggcccttcccaacccaggggattaccactggaggaaaaatggtgaagttcatctcaacgacccacttgcaatgggaaaactacaagaagcagctagagtcaacagccgggcagcatacaaggaatattcgaaacgaattcaggagctcaacaaggcgtgcaatttacgtggcatgctgaaatttaaagatatttctgacaagatatctttggatgatgttgaacctgcaagtgagatagtgaaacgcttttgtactggagcaatgagttatggttctatttcattagaagcacatactgcccttgctattgccatgaacaaacttggaggaaaatctaatacaggtgagggaggggaacagccctctcggatggaaccacttcctgatggctcaatgaacccaagacgaagtgcgattaagcaagttgctagtggacggtttggagtttccagctattacctgactaatgcagatgagctgcagataaaaatggcccagggtgccaagcctggtgaaggtggtgagcttccaggccacaaggttattggtgacattgctgtcacaagacattccacagctggtgtaggactgatcagtccacctccgcatcatgatatttattcgattgaggatcttgcacagcttatacatgatcttaagaattcaaatcctggagcccgtatcagtgtcaaactagtttctgaggctggtgtgggagttgttgctagtggtgttgtaaaaggacatgcagaccatgttcttatatctggccatgatggtggcacgggagcttcaagatggacaggtatcaagaacgctggacttccatgggaacttgggttggctgagacacatcaaactctagtagcaaatgggcttcgtggtcgagctgttctgcaaacagatggacagttgaagactggtagagatgttgctgttgcttgcttgcttggtgcagaggaatttggttttagcactgcaccactgatcacactcggttgtattatgatgcgaaaatgccacatgaacacttgtcctgttggtatagctactcaagacccagtgcttcgagaaaagtttgctggagaaccagagcatgtcattaacttttttttcatgcttgctgaggagctaagagaaatcatggcaaaccttgggttccgcaccattactgaaatggttggacgttctgatatgcttgaggttgatccagaagtagtgaagactaatgagaaacttgagaacattgatctctcactaatcttgaaaccagcttcagagattcgtccaggtgttgctcagtactgtgttgagaagcaagaccatggcctagacatggcattagataacaaactaatagatctgtcaagaactgctattgaaaagcaagttcgtgttttcatcgagactccaattcagaacacgaaccgagcagttggaactatgctcagtcatgaagtcacaaaacgttatcacatcaatggattgcctgctggtacaattcatgtgaagtttactggaagtgctggtcaaagctttggtgcttttctttgtcctggagtcactcttgaactggaaggagacagcaatgattatcttggtaagggattatctggtgggaaaattgttgtgtacccaccaaggaacagttcatttagtccagaggacaatattgtcattggtaatgtggctttatatggtgctaccatgggagaggcatatttcaatggtatggcagcagaaaggttttgtgtccgcaactcaggtgctcaagcagtggttgaaggaattggagatcatggatgtgagtacatgactggaggcactgtggttatccttgggaaaactgggcggaactttgctgctggcatgagtggaggcattgcctatgtttatgatgttgatgggaaattcagtgctcgctgcaacaatgagttagttgatctatatcatgtggaggaagaggatgacatcatcacattgaaaatgatgattgagcaacatcgtcgcaacactgagagtgttttggctagagacatactctccgattttgataatcttcttccaaaatttgtaaaagtatatccaagggactataagagggttttagaaaacatgaagttggaaaagagtgttgctaatcatgcaaaggagcctaagatggtaaatggaatatctgtgacgactaagaaagtacaacctgatcagtcagcaagccggccaacacgtgttgccaatgccaaaaagtaccgaggttttattacatatgagcgagagagtatttcttacagagatccaaaagagcgtgttaaagattggaaggaagttgcaatcgaatcaacacctggtccactattaaatacacaatctgctcgttgcatggactgtggtactcctttctgtcatcaggaaagctcaggtgctggctgtcctcttggaaataagatcccagaattcaatgaattagttcaccagaacagatggcgcgaagcattggatcgactacttgagacaaacaacttccctgaatttactggacgagtatgccctgctccttgtgaggggtcatgtgttcttgggattattgagaatccggtgtctatcaaaagtatagaatgtgcaatcatagacaaaggtttcgaagagggatggatgattccacgacctccacttcaaagaacaggaaggaaggtggccattgttggcagtggaccagctggtttggctgctgcggatcaactaaacaaaatggggcattttgtaactgtgttcgaacgtgcagaccgaattggaggtttaatgatgtacggcgttccaaacatgaagactgacaagattggcattgtccagcgccgtgttaacctaatggcagaagagggtgtcacatttgtggtgaatgccaatgttggtagtgatcctctgtactcaattgaacgtctacgttctgagaatgatgcagttattttggcttgcggagcaacaaaaccaagagatctcaccatccctggacgcgagctatctggagttcattttgcaatggaatttctccatgcaaataccaaaagtttactcgacagcaacctggaggatggtaaatatatatccgcccgcgggaaaaaggtggtggttattggtggaggtgatacaggaacagattgcattggcacatctattaggcatggttgcaccagccttgtaaatcttgaactcctgacaaaaccaccaagcaatagagctgctgataacccatggccccagtggccaagaattttccgtgttgactatgggcatcaagaagctgctaccaagtttggaaaggatccaagaacttatgaagtcttgacaaagcgttttattggcgatgaaaatggcaaggtgaaggctcttgagttagtgcgtgtgaagtgggagaaagtagatggaagatttcaactcaaggagatccaaggatcagaagagattattgaagctgatctcgtcctcctagctatgggattcttgggtcctgaagcgtctatcgctgagaaactgggtttggagaaggacaacagatcaaacttcaaagcgcagtttggagacttcgctaccagtgttgatggtgtgttcgcagccggggactgcaggcgtggacaatcactggtggtatgggccatcacggaggggcggcaggctgctgcagcggtagacaagtacatatcaaggcatgatcagaatgtcgcaggcgacatcactccctttggggcagggctcgttcagccggttggagcataaaaaaaacatagaccgaggcatgttttaggttctcgtcagtggttcctcacagcaaattttgttcttgtatattttgacgatagataaacagttgaaagttttggtgtctattgtttctttttcttctccggttattatgttttgcgtgtctgcatgtggttttctagtccaaaatgtacagttttccttttattaaatagatgtaaatttggtgggtgatatggcgatcattttgtgtgtatatgaaag

SEQ ID NO: 28684 - DNA, 2083 bp, Zea Mays
aataaatgctctctctctctctctctctctctccacacttcaccccagttcgccgtctacgcgctccgtctcccccaaaccccacctcctcgccggaaccctagcccccgccgacgcggcgccatgagggagatcctccacattcagggcggacagtgcggtaaccagatcggtgcgaagttctgggaggtgatctgcgacgagcacggcatcgaccacaccggcaagtatgccggcgactccgacctccagctcgagcgcatcaacgtctactacaacgaggccagcggcggccgcttcgtcccgcgcgccgtcctcatggaccttgagcccggcaccatggactccgtgcgctcggggcccttcggccagatcttccgccccgacaacttcgtcttcggccagtccggcgccggcaacaactgggccaagggccactacaccgagggcgccgagctaatcgactccgtgctggacgtcgtgcgcaaggaggccgagaattgcgactgcctccaaggtatgtcttgtctgtctatctatcccaccggatctgatgttttcccacaatttcccctccggggttatggcgacacccgcccttttggatctagggattatgcgccattgccattgttctgagcttgtagatctgaacagtctcgcctagatctaagttgttcatcattttgccgtatgattcctgtacctctcagtgattgtcgagttagacgcctgaccgtcatagtgatggattactatgcatctcctctcttaccgcagggttccaggtctgccactcgctgggaggaggtactggttcaggaatgggcaccctgctcatctctaagatcagggaggagtacccggatcggatgatgttaacattctctgttttcccgtcgcccaaggtgtctgatactgtagtggagccctacaacgcaacgctctctgttcaccagctcgttgagaacgcagacgagtgcatggtgctcgacaacgaggctctctatgacatctgcttccgcacgctcaagctttccacaccaacctttggtgatctcaaccacctcatctctgcaacaatgagtggtgttacatgctgccttcgtttccctggtcagctgaattctgaccttcggaaacttgcagtgaacctgatccccttcccgcgcctgcacttttttatggttggattcgctccactgacctcacggggctcccagcagtaccgtgccctcactgtgccagagctgacccagcagatgtgggactccaagaacatgatgtgtgctgctgaccctcgccacggtcgctacctcacggcatctgctatgttccgtgggaagatgagcaccaaggaagtggatgagcaaatgctgaacgtgcagaacaagaactcttcctactttgtggagtggatccctaacaatgtgaagtcgagtgtgtgcgacatcccacccatcggcctgaagatgtcctccacattcatcggcaactcgacctccatccaggagatgttccgccgcgtcagcgagcagttcactgccatgttcaggaggaaggccttcttgcattggtacacgggtgagggcatggatgagatggagttcactgaggcagagagtaacatgaatgacctggtggccgagtaccagcagtaccaagacgccacagctgaggatgaggagtacgaggaggaagaagaggaagatcctgctgcctaagccatcatcccaagtgcttgcactgagtcgtttgaggtgctcgtggtgatgttaggtactagatgggtgtcattacttatgaatgcgatgttgctgtgacagaactgcatttccttttgtactatggttgtccaagttgtcattaccatgatgtgaggtagcttaactggttgttgctataccttatgcagcattttgctgaagttatcaccatgaggtgaggtagtttgagtgatttatgtggtattagagaattcaactgtgtcaagttcgtgcaacgtcagtttgttcagagttttatttttttattggcgtgttatcttggtatgttttgatcttcttcgattgcttttatgtat

SEQ ID NO: 28685 - DNA, 177 bp, Zea Mays
ctgtcctccccgaccccgcatattctattctattctattctattcagccggttctcgcttgtcacttggcatgaagagaacgaagcacgcagacttgttcgctgccagagactttttcttcacccccccgaaccaattcttcaccaccgggcgttatttgttcgctgcagcttgcac

SEQ ID NO: 28686 - DNA, 2226 bp, Zea Mays
atgccggagccccaggccatcctcccgctgcgcgctctcccgccggacgcgccgctgcccttccccgtccccgcgccgttccacccccaagcccccggccccggtgggaccgccccggccacgcccccgaacccgacccctccgcaaccgttaacccccgccgcgccgccttcctcctcttcgacgcggccgccgcacccatgggagatctccgcgcgagcatggctagagtccttccccgacggacggccgcccaccgagcccgaggtcgacgcctacatcgacgtgcaccgccccgagctcccttccctcccccgctcccagctacaccagcgcctcctcgccctccgcggcgaccaggttctggatgcagaccagagcgcattcccgtacaggttccagcgtactgatctatggaagcctgtgtaccagtggttggaatctcttgagctggactcactagttgctacacagcagatatcagactggcttacatcgaacccaaagataatggacagaatggttgagaaacattcaaaataccatttgattcactacacccagaggatgcacttgaagatgctaaaaaagaagggaaagttgccaaagactctgcaactttctgcggctagagccacagttcgaccaattgctgctccgttcactccagaagaaaacattgtgccgttacagaaaactataactccagtgacagggagacaacagagcggtaccacaggcagattttccagtgccagttcagggagacaacagagctgtaccccaggcagatttcaaggtggaaatgcaactcttagggacaagaagacgtcattgtccaaaaagaaagaagctttgctcaaatacgaacttttgacagacttacagaaccaattgactgctgtgctgttaaagcaatgccgtactgttgccattaaagaaacagattcatcatatgtggaatctccaaatccagagactaacatgagtatacaagggaccactactgcaaatgcttcagccccttcagaggcaaagaatgtgtttatcaatgaacagtcagttccagcaggagccacagaaagtgaacctgggcataagaggaagagaaaccctatcatcgttacacctgcatggtgttatagtgaagcatcagcaggaaccttgcagaatgaaataaatcctagctcaaatagtgatgtttcaagaaatttcaatatttggagaggacatgctaatccactagtttcacatagagatactaagaaaaatatattattctgtcttgagggacgcgaaactggtgtcagctgctctcaagctgcttcttatggaggttatgctggacgaaattgtgaaagatggactccatttcttgaaggatggaattcacctgcattccagtttgaagggcctgctgtacatgttgttagaaaaagttacctatcttggtgtccaacatcatgtgcttatacgtcaagtgcaccttctgctcagcctcatggcaggcaaggtatccgcaaagttcttgatgtaaaatttcatccagaagggttgcctcagcttgtttctagctctaatgaggcacccaatgaattactgctattcaatctgctttctggaagggcaattcagcttagaggccacaatactaagtcaaaggagcaagtgtagtgtcttgtgcttctaatttattaaaggtatgggactgcattactgggtcttgcctctatacgctgggtggcgatgatcaaaattcagtggggcatactcagaaaataaatgctatggcagtgaataaatggcaatcctgtcttgttgtcaccagtggagcaaaaggtgatgggaagcttctactatggaatgctttaagaggtgaacttgcttctgatctaaattcgaacttgaggtctcaggatatgatctatccctcagttgatacaatggagttctatagtgagaatcatctggcatgtggaagtgattgtgactatggtggctcagctgtggtacaattatgggatattgattctccagagtcttatttatctttctctgcaagtgactcttacattacttcccttaaagtcaaccctgctggcaacactctcattactggttctggcgatgggactattggcttatttgacatccgtacttgttctgcaattagccacttgtcagtgggatctagttgtgaggttacatctgtttcatttagcaaaa

SEQ ID NO: 28687 - DNA, 1428 bp, Zea Mays
aaagcctgtctagaaccaaacacccctctccaccgactgcaaataatccgactcccactgctgggtgccctgtcccctacctcgggttccgcgcagaggaaggtggagttgctgagtaggctccgatcaccgtatttattgggcctgattggccattgttcggaaggtgaacactgtctacttgtatatgagttcatggccaatgggggtctccaggagcatctctatccaaacagagacttacctggctgataatgcccaaaagcatgtgtgtgctttaaccgactgatagaagatgagcaatagaaggttatgtacttttattgtgttgatgtgctgctttttgctaatatacgaagtaaataacctttttttaggttcacatgtaaacatgaagttggctgaagtgtcttcctaccacttaacacagcggataacttgggtattgacactttttaagacattgcttttgccaactgatagttctaagacattgttctaggttcatgtggtggaatctcaaaattggactgggacacaagaatgagaattgcacttgaagcagccaaaggtttggaatatcttcatgaacatgttaatccacctgttatacatagagacttcaagagtagcaatattctcctggacaaggacttccatgcaagaatttcagactttggtctagccaaacttggatctgatagagctggtggtcatgtctcaactcgagttttgggcacacaaggctatgttgcaccagagtatgcattggctgggcatttgactaccaaatcagatgtgtacagttatggtgttgtgcttttggaattgcttactggcagagtaccagttgatatgaagaggtctcctggagaaggtgttttagttaactgggcattgcctatgctcactgaccgagataaagttgtgcggatcttggatccagcatcggaaggtcaatattccttgaaagatgctgtccaagtggctgctattgctgccatgtgtgttcaaccagaggctgactataggccattaatggctgatgttgtccaatcgctggttccacttgtcaagaaccgttataatcagaaatcttgcaatcccaatgtgcaaccatcgaagccacttgactaggagaaaagctagtgtttgatctgcagtttgtgctcgtccttctggaacccttctcgagttctcgtctataacgaactactgttgagacagattcacacgcttcctaacaatgatttcgtctgctggtgccctcctgattttgttgttttttgtaggggtgtgttgtgtgcaggtaggttgcaaatttaaaggggatatagttgaacggtcctgagaacttatttgagtctgaaggcaagtttctgtcacctaaaattaggtgcatgttgatggtgggctgttgggattaat

SEQ ID NO: 28688 - DNA, 3665 bp, Zea Mays
tcctcctccccaaattcctctcctcgtgtcctccctcgctaccacgcttgggtgaaatgccctcgccgcctctccctgtgctcgcccaaatcgtcgcctctccctccctgtcgcccctgcgccacggtgcttcacgccgttgaagtcacttcactcatcccgccgatgcagtcgcccacaccgcctcctcccctcctccgctcaagccgcaccgcgacagctacacgccgcgatgtcagctgccagcagcgcccccctcttaacaacgtcgcgacgtcctcgtgggctaaaccccctccatcacttcttcccgtcgagatgcacaacaccgcgagatccatccaccttctccagcacccccacccccgctcaaatggtgtcgcgatgtccgccaccaacagcgccccttcccccctctcaaacaacgtcgcgacgtctgcgagttctagtaccggctgacagcggctgcggcgaagctatctgagcggtagcggagtactaaggggtggagagagggagcactgtctcatgcatgaaataaagtctccaaaacaaaagatttggtccagagcgcggccacacgggcccaacaatagcaacgtcacatggtggttgccattgtcacgtcgagctctccctctccaccaactaacagttcctgacggtggagcagaaattcattaagagcatatagggattcacaagtgattttgagcccaacaatcttgctgccatcgatactcctggttcgtatatttggttactcaaaacatgagatgatcctctgaagtagaaagggaaacaccgaatatgctcttgctgaaatattctatagaaagacacaattccattttggcagatgcaagtgtatggttattctactcatggaagatctacagggaagaaattgaggtagcatataactgccgcaagggaaaatatggtgtagcagatgaggatataatcttatatggtcaatgtgtttgaattggtccaaccattgatatttcttcgcggttgctagacttgagagtcgcagttttgcatagtcctatattctatctgcactaagagtaatatatacagccaagcggacgtttggtttaacatttacaaggtatgtttggtccttttgttttttggaattaatggttgtccgatgcttgtcattcatatgagttctaatatcatgcccccttaaagtactcatcatcaaaagtttccatgtgaatgttttaaatgtagatttaaagggttgaaagacatcaaacagttattcaaacatgatcttaagtgtcgtgaaagactacaagtgaggttcaacttggcaaattgtttttctagtaactaaggagcaacaatgctatgtattttagcttgacttatatatctaagtacttacatttttggaatcgggcaaacagtgatagtttgaatcacatgttttgccaaaaggaattattagaactgttcaaaagttaggaaaaaatacatatttatgctttcttatgcacgggtaaattgctctgttcatatataaaaaaaataattgtagtattattgcttatattgattttaaatgatgaccttattagatgtgccatcgagaccacatatattagcattttgtaactaaatacaatgcatgaatatatatagatagcctttacatcgtgctacatgcttcctagaaataaggaaccattacaacatatatatttttgatgatgtacaacttcgtcatcggatataccgttccttcttttttacatacattttgataagaatgtcaaaatgttaaaaaaatagcgcgcgcatggcgcgcgttagacactagtagatttcagaactatcatgaagcgcgtgctcgctggttgttagttgttacagagcaacagcccagggaggccaagatgctacttagctactaaaaccaactgacaacaagtgcacagcccagtgggccgctaagctgcaagaaaaccctcgcccctcgttctggattgagattctctgcagaggctgcgatgttgggccgtcctgccctgcccggtgggtatatgtaagctcagaccgccaccggaaccttctcgagcccgcggccgcacacctccgcccgaagccgccagtcggactacgaacggcggcggcgcctcggctcccctgatctccctcaccggaatggacggccaggctccgccgcttctcgacgccgtcgtgctcgagccccttgcagttggcgacgagctccatccgcggcgtcctgtcgaggtggaggacgctccggccgccgctccgccctccggtatggacggccaggttccacctctctacaacgtcacgcgggatcctctgaccgtatccgacgagctgcagcccacgggcgaggtggtggatgacgccctactcgtcgcgcccgatatcgtcaagggcgaggtgatggaggacgacatcctacccgtcgcaaccgacatcatcaacgacgccgcctcggagtgccccgaggctggcagtgatggcgtcgtgctcaccgacgagctccgcaatcgcatcgtcaagcaggtggagtactatttcagcgatgagaaccttcctacggacgagttcctgctgaattatgtgaagaagaacaataagggctttgttcctattgagatcatcgcatcatttaggagaatgaagaaactcgttcaagacctctcagtaattgaagctgcactcaggacatcatcaaagctggttgtaagttcaaatgggaaacgggtcaggaggttacatccattgccacacaaagaattgaaagattcaaagaaaagcactgttttggtcgaaaatctacctccagatttctcaatggagagtattcaggaaaaattcgcaacagtgggcaaagttgtgaacataacaattaatgatccagaatcagtgaaagaattttcaactgctaagaagcctgacttcaatttaagttttaaggctcatgtacttgttgaatatgaagcagtggaggctgctgagaaggctgttactgccctaagtgatgagagcaactggagaactgggatgaaagtcaggcttctgtctaaacaaagtgtaatgggaccaggaaagtataaaaaaccttctaaagaaaatcaagatgcagtttccaaaatgattgatcagaatcaacattcaaaagaagaccagcttaaaaccttggaaaagatctccggtgctgatgcagtggggattaccaaggacagagataatttgaaacctgtttttatcactgagactgagcaccaagatcagaagccaaatgctagaggacgaaaaggatggtacaaaggtcaaggtcagatgcagcaaaatgcaaacaaacaaggcagttgtggttccgagtcattaaacaagcctatttctggaccgaggatgccagatggaacaaggggcttcacactgggacgtggtagatctcttccactacagaagtctgagaaggctgaagagtagagctaccaaaaaaggcctgttaagaaccttatccaaagaagctgggaatgagatcctacgtcgttaagctggggtcaccggcgcactgagatcaacgtcaagcacagtaactgcatggaccacaataactgcacaacatggacatagtcggcataatttatcgtctcggt

SEQ ID NO: 28689 - DNA, 3232 bp, Zea Mays
gtcctcctctgtccattctctctcttctcttccttcgtcgtctcgtcgtcggcttctcgcatccgcctccgcctccgcctccgcctccgctccccgctgcgcgtcaccggaggagaggagagaaagtgagagaggggatccctccgacccgatccaccgacataacctccgccccctggatctcctccgtccccgcgcgacgccaggacagggttgatggataatctctctccagccactctgctcaacagtatctcctgtcttggcgccctaacatctgatgtctctactgcgagacccaagcctattcacaagtattgcaaaaatgtatatgatatctcaagcatcgtgaccccccttcttgaagatctttgcaagtctcccgaagagcaactcgatgaggtcttaagagaccttgacaccgctgtcaatgaagcttcaggccttattggaaactggcaccagacaaccagcaaaatgtatttcggttggcgaattgaatcagtaatatcagatattcagggatgttcccttcagttgtgccagctggttaattcgctattaccttctctgactgctcgtgcctgcatgtgtattgagaaactccaggacataaatcatgagcacgtgtttgatctggttaaggaggttgccatggagcttgcagcgacaagcgcagtgagttctgtgaatctgctgaaactatcaagtttgttgagtctgtcaacgaacatggaattgtacacggaagctgtttcccttgagaatctcaaaacaagggcactacgatgcgagagtcgtgaagaactggatctagctgagcagatgattccactggtcaactatatgcatgaccatcttctcaaggaaaaacaacaacttagcatcaacggggtgcctattcctgctgatttttgctgtcccctttccttggagctgatgtccgatcctgttattgtagcgtctggacagacctatgagcgggtttatatcaagttgtggcttgatgagggttttactatctgcccgaaaacactccaaagacttggacactccaatttaatacctaattatactgtgaaggctctgatagctaactggtgtgaatcacatgacattaggcttcctgatcctatgaaatcattgaagttgaactttccttctgctgcctccttccttgaggatttgagtgctgcagatggcagccctctacatcctattgtcgtgtcaagggctaatattcctgggtccccagaagttgatgtgtatttgagaaacttgaatggagcatctcctccccatagtttggtcaatcagaattctcatgcgcatgcaaaccgtcatggtcatgaggtctcgacgagtcaaacttcagaaaaaacaaatggttctgtaccagatgtttcaagattatctcttgcaagttctgaagcaagagagtctagtttggaaggaaggcgtggtggttcgattgggcaaatatcagaacattctacggaggaagcattccaatcttctaatttggatagggatctgcaggacaacttagctaattcttctttgaatggtagccttccaaatagtggtcaacttgatggggaatgtgacaatggggtgacaagggttccaagcgataggacaaattacagtagcgatgcatctggcgaagttacaaatggtggtggtgcgcctgtagcctcctctgttcctcaaagggagcatttgatccctccaagactgggtatgggtactaaacaatttatcaggcgacaaccatcagacaggggtttcccaagaattatttcttcctcaacaatggatgcacgtagtgatctctctgccatcgagaatcaggttcggaagctgattgacgatttgaaaagtgattctatagatgttcagagatcagcagcatcagatcttcgtcttctgtctaagcacaacatggagaataggattgccattgcaaactgtggggctgtaaacttgctggttggtcgtcttcattcaccagatgccaaaacccaagaacatgctgtgacagctcttttgaatttgtcgatcaatgacaacaataaaattgctattgcaaatgctgacgctgttgatcctctcattcatgtcctcgagactgggaaccctgaagctaaagagaattcagcagcaactctattcagcctctcggttatcgaagaaaataaagtgaagattgggcgatctggtgccatcaagcctctagtagacttgctaggaaatggcacccctcgaggaaagagggatgcagctactgctttgtttaacttgtccatccttcatgagaataaagctcgtatcgtgcaagctgatgctgtgaatcacctagttgagcttatggatcctgctgctggaatggtcgacaaagctgtggctgtgttggcaaaccttgctacgattccagaaggaaggaatgcgattgggcaggcacgtggcattccagcccttgttgaagtcgttgagttgggttctgcaagagggaaggagaatgctgcggctgcgttgcttcagctctgtacaaacagcaacaggttttgcagtatagttcttcaagagggtgcagtgccccctctagtcgccctttcacagtcaggaacaccgcgggcaagagagaaggcacaagcgcttctgagctacttccgcagccaaagacatgggaattcagcaaggagatagccttctgttttttcccgttttttgttgtagtgtacattaagcgttgcattttatgcccatcatcgcgactgggctcctgtttactgttgttgattggcactggcagatgcgttggctggaattatgcagtgccctgtgctctgtttatagatggagattgttatgctcatctcatgtaagttttgtctgttgagatggtatctttccttttctcgtttttgaggtttttttttgtatagcttaaccattgataggaacttcgaacttacataatcaccgattttgccctgtatataagtatatttgattgtctgtgacctttggaattattatggttcgatggttgtacaaattatttgatccgcagtacaaataaggccatgtttggataaatactgcttcctcatttcaaattagaaagcgttttgacttttttagctatatagcttttatgatatatatttgtttctagatatgtatggtaaagcaatatagaaaatgtcaaaaatgtgttataatttag

SEQ ID NO: 28690 - DNA, 1842 bp, Zea Mays
ggtctgcatgcttcataaggtggtgcactggtgctggtgcatgttggggaggcttgacatatttcagaagtcccattgtgtaaaggtcaatcctgacacacctcagaagcaagttcggttcttaacattgtcaggagagtgcgagccatttattgaacaggaaagagtatccaagtgtacaacaccactcacacaagacagtaggtcctagaaaaggtttcaaatgtccctatagccctgactccctgagtgcgcactgtaaggctccctcctctgctgttcacaccagcaagcttgtgctcagagaaaaattaccaaagagttaagtcttcctctatgctgtttgtccaccatcttgattgcatggcaccaccatcatggaagctaactctgtcagtttgaaaatctagtgcttttaagaccaatttttgcagaataagtaaccacacctgcacctcccttgaagttgcgccaggttactgtagttgcttttctggtgtaaggtcgtatgatcaagcgtgctctgaattagtcagtggagcatgatatactaggtcgattcatgcttattgctgcatagttaatttctcgttgtaatgcaccagtatgtaattgtatcattctgtttcctgattaacttcataagttaatagcacttgatctctcaatgaatttcatgctgcaaaccaaagcatatactggttggttagtgtttcaggttttctgtacattttttctagctttcgatcagatgtacccattctattaaggacaaacactgcaatcatgctaaacttcttgcctgagaatttgaaaatgatttgtttgcttctccttttgattcggtgctactttttgtcatctaggtgataaaaagctgttgactccgcaacctcggctaaggacaggatttttctcagttatggactctcagatgatacctgttgggtgcattcctgaagcatgcacttctgttggtgcagctaaatatgggaggccaattggtttagatgaaagccttaaggtggatttgattgtgattgggtcagtggcagttgatccaagttcaggagcacggttagggaagggagagggatttgcagagctggaatatggaatgcttcgctatatgggagctatagatgattcaaccatgatagtaactactgtgcatgacaagcagttagttgatgacattccagtggagaagctgctagttcatgatgtgccagttgacattatctgcacccctactcaggtcatcttcacgaagactacgatcccaaagccacaagggatttactgggaaaagttatctccagaaaaattgggccaaatccgaattctaagagagctgaagcaacgtatagagcaagagacaggaactatgcttccttgtggaccttcggagaagctaccgccaacagctcagagaaagcagaggtggcagcggcgacgatgagacttttaaatgactgccccgtgcgttgcgacggcttacaacaatacccatgtaaactatccaccaaaaaaatttcaatattttttgtttattgtctccgctctccgtgtaatatttttttttgatttggctaactggtgttattatttactctatccaatatatcttgttacaacacaaccaatgaaatgagcgattagaagagagttcacaacgactgactgaacgaacaaatattataaaatgatataattccaccatacaaagaccaaataagaaaaaatttgtaagctcaagtttctaaaataagtcacatgaactcaaacttataaaaaagataaatcaaaatatggagtgattactaaagtcagacatcaata

SEQ ID NO: 28691 - DNA, 2674 bp, Zea Mays
tttggtggattaagatatttcactataagttggtggatgcagctacgaaataaagaaatagatatcgagaagggagtcaatagaaggccgttatatgaaagtcatcctctatcatcattttcatggacccgaactgacagtatggatatgggggattggtcaaagaaatgcaaggaagcattaagcaagtttgagctgctgaaggaagggaagagtaaagaggacattgtttatgaaaaggctgttcagatattacacggtacaaaggatgaggtgcatgacattgttcaaagtgctcttaagtccagtgatttgaagggtctccatgcccaatgtcttacagatatatggataggcagagagaggtttgcttttgttgatctgagtgcagggccatttgcctgggggccttctgttggtggtgatggtgtccgtacagaacttagtctgccaaatgttgcaaagactgtcggggctgttgcagttacagaagaagaagctgaagaaaaattgcaagacacaataagggagaggttttcgtcctttggtgaggattaccatgctgttgatattctattagcagagattgatgtgtatgaactttttgctttcaagcattgtgtgggaagaaggatacagcttgccctttgtaaagaacttgatgagaggatgcatgacctgaaaaaggaactggagggttacaatactggagattttgatgaaactaacaagaagaaagctcttgatgcactgaagagaatggaaagctggaacttattcagagatacttcagtggaacatcatagttacacagtggctcatgattcatttcttgcacaacttggatctatgttatggggctctatgaggcatgtaattgctccttctgcctctcatagagtgtaccattactatgagaagttatcgtttcagttgtattttgtgacacgagagaaagtcaggagtataaagcagttacctgttaatgtaaaatccatcagggagagcctgaattctgtgctattacatcatcaaaactccatgtttagccaaaacatgctgtcattgtcagaggatccatcattgatgatggcattttcaatggcacgtcgtgcagctgcggtgccgcttctattagtcaatggcacctataagtcaactgttagcacataccttgattctgctattctccaacatcagctacagaagctaaatgagcacaattcactgaaaggaaggcattcaaatcacaggtcaacattagaggtcccaatattctggttcatacataatgaacccatattattggacaaacattatcaagccaaggctctctcaaatatggtcgtagtagttcagtcagatgatgattcctgggaaagccatttgcagtgcaatggaagacccatcttatgggatttgaggaaaccggttaaagctgctattgctgcaactgctgagtatgtatctggtctacttcctccacatctggtttatagccatgctcatgaaactgcaattgaggactggacctggtctgtgggttgtaatccctcagctgtgacttctgaaggttcacaactttcagagttccagcaagatgtgattgctcgtaactatattattacttcagtggaggaatccattcaagtaatcaattcagcaattcagcaattggtaatagagcggactactgaaaaaggcttcaaaattttcaaggctcacgaaagtaagatggttgagaagtacaatgccgttgttagcttgtggagaagagtatcggctatgtccaagggattgcgatatggtgatgcagtaaaacttatgtcaatgcttgaggatgcttcaaatgggttttctagtgctgtgaactccaccatttcaagtctgcaccctgtccaatgcacccgcgaaaggaaggtcgacgtgcagctagacttgacaacacttcctgcttttctagctgtatttttgttgctttggtttcttctacgtccaaggagaccgaagcctaagatcaactgaacaccgagccaatgagcagcataggccatagagtttttgtgaatacgcgcatggattacagatggcgctggagcatggcccgggaattccaaaggtccaaaacaccgggtggcagggaacaaggtttcagaagattgcaatcctgacacatccccaagttgtagcagagttggaatgtcatgaaaactttaattcattcagtcctgtcctcgttccgggtttagccaattcttcctcgttccgggtaaggccttgttcgtttgtgtcggattggtgggtcggaacaattcccggccggattgcttctctaatttatataaactttgattagccggaacgattccgggtgcaatccgacgcaaacgaacaagccctaactgagattaatttgtccttgctgtaatgtttagccagtcctgccccgatccggggaactgagagattgtctttatcgcaacattaacggctagcggttagtatcatcttccagtcacctggaatgttactagtacaatccaattgtctgtttcctgccgcttacatgtaaaagtccatactcaagttttacagaaagaaacatgttctgtcatttattacaaaataaagccaaatagtaaaatgttatgtgtacgtagggacagtatgatta

SEQ ID NO: 28692 - DNA, 6459 bp, Zea Mays
cgcaactgccatcgtcctctgctcgtcgcgtcgttctcctctcgaccgcatcgcgcccgtggcggggaacgagccatcgacgccgcgtcgcgtgcctttcttcttcgtcccccccctgcctgcctagctgtctcaggctgccgcccgcccagccccaaaacattcggcagccgagtcaaccgagaacacgagccatccacccaccctgtcccttccccggctttcccccgtcctcggctccaccaattgctctcgcgtcagtggaaggaaaaaccaagggcgagggagggaggagcgcatctccgccccgcccgcgttcccgtaccccgatccgccacatgatctgacaccgcattgccgccgaggtgacccctcccgcccccagaatggaggcgctcaacgagctctgcgacctggtggccgcgcacccggatctcctcctcgccgacaagcttgcatggctctcctcccgctgcgccgccgccccgggtgccgccgccccgcagcgtgcgtcgagggcgcaccttcattcgctcctcgcgttggcgcgcctcctcccggcgggtggcgccggtgccggtgccgaaggcgatgcggcgcccccggccccactcctattcttcctcgcgtcccacgccttcctctcgccggccttctggccccagtctttcgccccggcgccgtttctcgctaggctcctcccgctcctcgccgcggccccatcctcccccgccctttcttccgcgctctccgccgccctcctcgcggcgctcgacgtcgccgacccgacctccgcgccgctcgcccgcgcgtttctctccgccgccgctgccgcggcgcccctgccgctcctccccgcggatgccgcgcccatcgctgcccggctgctcctcgagtttcttggctccgaggaggagccgatcagggccaaggggaagggagaggacaccttgggcgaggaaaacggtggggcaaaggaggtagtgcggaggttcgaggaggaggaggtcgatgagctggagcggaaggaagtcgcattcagactgaccgtgcatatgcttgggggcgagggtgggctagagaccgagcagattgggaaggtcaggaatgctgctgcgcgacaggtccgatcactcacggattttctcaagattagaaagcgggactggagggagcagggtacacagctcagggcaaggataaacaccaaattgatgtgttgtcaagctgcagtgggggtgctggtgcgaagcgtttccaccatggatactgatatcaaatcttcgaaggatatgctccagcagactctagcttggttcatcgaggccaccaagtcgtgcatcctgtcatcctggcggaaactgaagatatgcgaggagctattttgcacactgctcaatgggatcagccagataactgtctcacgtgggggccaacttctgccggtgcttttgattcccttaaaaccgcttgttgtgagcacatgttcgcaggctgacatggcaggcagtagtcctggggctctatttgaagcagttgtgaagttgagctgtgagatcatagagtttggctggacaaaggatagggcccttgttgacacatttgttatgcgtctagctgcttatgttcgtgagcggaatgattacgaggaggaggatggcaaaggaaaagaggcagttccagttattcgacttaatgtcatacgccttttggctgagttatgtgtttgcttgaaaaaatgggaagttgtggacatgattttaccccttttcattgaacatctagaagagggtgatgcttcatctccaagttcattgcgtttacgattattagatgcaatatctcgtgttgcgtgcttgggttttgaaaaatcatatcgtgagagtattgtcttgatgacaagaagctatcttgacaaagttaaagctctaggggcttcagaaaacaatacagttccatcagaagcaacaactgagcgaacagaaactcttcctgcaggctttctgcttgttgcttccaaccttacaagcacaaaactcaggtctgattatcgtcataggttactgtctctgtgctcagatgtggggctagttgctgaatctaaaagtgggaggagtggtgctgatttgatgggtccgttacttcctgcagttgctgatatatgttctgattttgatccagtgtccactgttgagccatcattattgaaactattccgaaacctttggttctacgttgtattgtttgggctagctccacccatacagaataatgaggcacctacaaaaccggtttccacttcattaggtacagcagaaagcagcagtgctatagcccttcaagctgtagctggaccatacatgtggaacagccaatggtctgtagcagtgcaacgtattgcgcaaggaacacctcctctggttgttagttctgtaaaatggcttgaagatgagctagagttaaacactctacacaacccaggtagtcgtggtggtaatggtaatgaaaattctgctgttgggcagagagctgcactttctgctgctttgggaggtcgagttgaggtagcagcaatgaacactatttcaggggtaaaagctacgtacctacttgcagttgctttcctggagatactacgttttagttgcaatggtggcatactctcggctacatctacattgaatagatcaaacagtgctttcagttgtgtatttgaatacctgctcactccaaatttgacaccagcagtaactcagtgtttgacggcagttgcacatagagcttttgaaacagtgctgtcgtggctggatgatcgcatatctgacataggtgaaggagctgatgttagagaatcggttctttctgttcatgcttgctttctgataaaaagcatgtcccagagagacgagcatgttcgtgatgtgagtgttaagcttttaacgcagctgaaggaaaagttcccacaggtcctctggaactcttcatgcttggatttacttcttatttctgttcacaatgagttgacttctggtccagtcagtgatcctgcttgggttgcaactgtacgctcactgtatcaaaagatcgctagggaatggttaacaagtgctctttcatatgctccatgtaccacacaaggccttatacaggaaaatttttgcaagccaagtggagtacaaagaacacaacatacagcagatgttgtttcacttttatctgagatacgtatttgtagtggaaagaatgattggaacggtattaggacggccaatgttcctgcagttatggactcagcagcagcagcatcgggagccaaaaaagaagcacctgacttcactttggaagtactctctactgcagtagtgagtgcaactgtgaagtgcaatcatgctggtgagattgctggtatgagaaggctgtttagtactatgggaggcataaacatgggcatgtctcctcctgggacacaatctttgcacccccatcagtcatttgatgaagtttttgtctccaagtttgtcagtcttcttcagaactttgttgttgcagctgagaaacaaccaatagataattcacaatttcgtgaaacatgttctcaagctacagcattacttcttgatcatatggtgtctgattctagagcaaacctggaagggttttctcagcttatacggcttctatgttggtgtcctgcttatatttctacccctgatgcaatggaaactggaatctacatctggacatggctagtatcggctgcgccttctttaggtcctcttgtgcttgcggaacttgttgatgcatggctgtggaccatagatacaaagcgtggattgtttgcatcagatatgaattactgtggcccagatgcaaaattgaggccgcatcttatcgctggtgagcctgaggcaccaccagaaaaggacccagtagaagcaataatagcccatagactctggcttggcttcttcattgatcggtttgaggtggttcggcatgacagcattgaacaacttctacttctaggtcgaatgttacaaggaacaatgaagtctccagctcatttttctcaccatcctgctgctactggcactttctttactgcgatgctccttggattgaagttttgctcatgccagtctcaatctaacttgcagaagtgtaatatggggcttcagttgttagaggacagggtataccgtgctgctttgggatggttttcttatgcgcctgagtggtatgaatctccaaacaaaacttatgctcagagagaagctcaatctgtgtcagtatttgttcattttctacaaaatgagcgcaccagtggtcctgtcgattcggtttcaaagttacagggacgtgaaggtgaacctagcatggcagatcacattcatcctgtttggggctgtgttgacaactacacaaatgcaagggaaaagcgtaaacagttacttctgacactttctcagaatgaggcagacagacttgaagtctgggcacaaccaatacatacaaaagatacaacgacttttcgcggtaaaatcagctcggataaatggattgatcatgtcagaactgcttttgctgttgatcctcgaattgctctttctatgcctttgaggtttccaacgaatgctacaatgcaatctgagattactcagttggtacagacacgattactggagcttcgtacaattcctgaagcattaccctttttcattactccaaaagcagtagatgaaaattcagtgctgttacagcaactaccacactgggctccatgttctgttacacaggcattggagtttcttactcctccttataaaggacatccacgtgttatggcctatgtccttcgtgtcttggagacttacccccctgagactgttaccttttttatgccacaattggtacaatctctcagatatgatgaagggaaactggttgaagggtacttgcttggagctactcgaagaagtaatatatttgctcatatcttgatatggcatctgcagggagaatatgttgatgaatctgagaaagatgcagctgctctgaagggcagtgcattccagtccttgctcccagctgttaaggacaaaattatagagagttttactccagaggctcgtgacatgtttgaaagagaatttgatttctttgacaaagtcacatctatttctggtgttcttttccctctccccaaggacgagcggagagcgggtataagaagggaactggagaagatttctattccaggtgatgacctctacctacctactgcaacaaacaagctagtacggggtatacagttggacagcggtattcctctccagtctgctgcaaaagttccaataatgattacttttaacgttgttgaccgtgacggggacccaaatgatgtaaaaccacaggcttgtatttttaaggttggtgatgactgtagacaagatgtgctggcgctgcaagtgattgctctattaagggatgtatttcaagctgtcggattaaacctgtatctttttccatatggtgttttgcctactggaccaggccgaggcataattgagatactcgaagtagaaatcaaatgggtgaaacaactgatggtggtttattagagatatttcagcaagattatggtcctgtaggttcaccttcttttgaaactgctcgagaaatgtttatgatcagtagtgctggatatgctgttgctagcttactccttcaaccgaaggatcggcataatggcaatcttctctttgatagccatgggagattagttcacattgattttggttttattttggagatttcacctggaggtaacatggggtttgagagtgcacatttcaagctaagccacgagatgactcaattgctggatccatctggaactatgaagagtgatacatggaaccaatttctcaggttgtgtgtcaaaggatacctagcagcaaggaggcatatgaatgggattttaagtacagtcaacctaatggtggacagtggccttccttgctttagcaggggagatcctatcaataatcttcggaagcggtttcatccagagatgaatgaacgtgaggccgctaacttcatggtacgaacatgtgctgatgcttacaacaagtggactaccgcagggtatgacttgattcagtacttgcagcagggtattgagaaatagtttgtttctcgttttttaagtggcgttcgtgtacatcaattgtatgtagccactatctttttatgtagaatttattttttgagttgtatcatcgggcaaggatggaattcatgtgattaacgtaggatgcttggtgcaaagaggcaattctttttttttcttgcactgtaaaactgccaagaaagtagctagtaagttgatcaagattctgtattgctgtcgcagaatgcattttcgtttactagacatgtatgattcgcatttttatc

SEQ ID NO: 28693 - DNA, 1352 bp, Zea Mays
accaactggtccacccaggacggtttgtggaggttaaccacagcaacctggtgaagctggaagggttctgcatcgactcggcgacgggcgactgctacctggtgtacgaatacgtggagaacggatcgcttgacctgtggctgctggaccgcgaccacgcgcggcgcctgaactggcgcgcgcgcctccacatcgcgctggacctcgcccacggcctgcagtacatccacgagcacacctggccgcgcgtggtgcacaaggacatgaagagcagcaacgtcctcctggacgcccgcatgcgcgccaagatcgccaacttcggcctcgccaagacgggccacaacgccatcaccacgcacatcgtcggcacccaggggtacatcgcccccgagtacctcgccgacggcctcgtcaccaccaagatcgacgtgttcgcctacggggtcgtcctgctggagctggtgtccgggcgcgaggccgcggacgagagcggggagccgctgtgggcggacgccgaggacagggtgttccggggccgcgacgagaggctggaggcccgcgtcgcggcgtggatggacccggcgctcgcggagcagacgtgcccgctgggaagcgtggcgaccgtggtgagcgtggcgagggcgtgcctgcacaaggacccgtccaagcgacccagcatggtggacgtagcctacacgctgtccaaggcggacgagcacttcgccgactactccggtgagagcgtgtcggttgacggcagcggcgagatcgctgctcggtgaaccaccatccttcgtttcgtcgtgtactcggtcctactcagtagtaatatggtttttagccatcagttcgcgttgtaaaggtctagcgagcggaggatgagtcagcagcagtgagtatatatagtggtattgaataataacaccggcattccgcgaggctgtgacctgtgagtgtgaggtgcatgaaatgaaatacctacaacgaggtgcctgaaagaaaaggaggttggagtttgaatggaaagtatgaatagggaggatttgggaaggggaacggttggatagcctcatagactggcgcgtgacttgacacggcctgcctgtgaggctgtgacggcgggcgtacgtcgtcctggtatctgttcctaggtcagccccagcacggacggtcacgcacaaaatccatcggatgtaatctgaccccaaacgctcctgatctttcttgctcaccagcctgatcgctgacgggtgccatccagatgaccactcaagcctttcattgagctttgagccgtcatccctttcttatgtacttcgactagtcagctagtgtagcatggggatgaaaat

SEQ ID NO: 28694 - DNA, 2023 bp, Zea Mays
ccaccgcgctcgccctcttcgtcgttgccgtccgtctccacagtccccacccatattccattttggttatcctcttgcgtcacacctcctccctcctggcctcctcctgcggcccacttatatataccaccacgtcgatgcgctgctccgccggcatctccatcgccgtcgcgccgccgtagatggcctgacatttttcacttcatttgtcatcccaattccacaaacctcgcgcgcggcggcggagggaaacaaaaaaaaaaaggaaggatggcgttggagccggtggcgcgggcggtggcggaggaggtggcgcgctggggcgcgatgcgccagaccggggtcagcttgcgctacatgatggagttcggggtgcgccccacggagcggaccctcctgctcgccgcacagttcctgcacaaggagctccccatccgcatcgcgcgacgggcgctcgacctcgactcgctccccttcggcctctccaccaagcccgccatcctcaaggtgagagattggtatgtggagtcattccgtgacatccggtccttcccagaggtgaagaaccaggaagatgaactcgccttcacccagatgatcaaaatgatcaaggtgcggcacaccaatgtggtgcctgcggttgcattgggtgtgcagcagctgaagaaggacttgggtggtccaaaggcgttcccacctggaatccatgagatccatcagttccttgatcgcttctacatgtcaaggattgggatccggatgctgatagagcctggtgtgatagggcttataaacacaaaaatgtcacccatgacagtagctcgaattgctagtgaagatgcacgtgctatttgcatgcgggagtatggatcatctcctaatgtcgacatatatggtgatccggggtttacattcccatatgttacaccacatctacatctcatgatttttgagctggtgaagaactcccttcgcgcagtacaggaacggtatatggattctgataagcttgcacctccggttcgaatcatagttgctgatggagcagaggacgtgactattaagccaaaggagtaaaagagatttaagggaagttcactctatttatttcttgctggcctgaggagacaagacccgtattaatagtcatccagcaatgtcagctgactttttttttcttctggttacagccaaatgcaactagcagaaatgtaaataaacgccctttatgatgctaacagatagccaatccaactaactggctaacgccttttgttagaattttctcattaattgtgatattcaaccgacaaacttgtatcttctgcacctatgttagcaaaaatcaatagcttcgattattcatgatctggtatgaagtatgaactgtttgactaaaccatacttttgcagattactgatgaaggtggtggaataccaaggagtggtctctcaagaatttttacgtatctctatagtacagcagaaaaccctcctgatcttgatgtacataatgaaggagtaactatggctggatatggttatgggattcctattagtcgtctttatgctcgatatttcggcggggacttgcagatcatctctatggaaggatatggaactgatgcatacctccacttatcacggctgggagattcggaggaacccttgacttaatcgattcataagaagccattcctcattcctgtagttaggactctattgctttctcaattaccgtgctggtatgcaaatattgttctgaaggccagtcacctattagttcagctgtccatgccctatttgttatctttgttgttcattcatcatctcgatggaatgtgatcataattcagaatagttttgcttctggtttgtactgtcattataattgttcaacctccaataatggtatctgtcgagcacccgaggcattgaatttgagtaatggaattcaccataattgttcaacctccaataaagtctgtaactccaattcttcaaagcatgttttttagttcga

SEQ ID NO: 28695 - DNA, 8654 bp, Zea Mays
ttctttcacgagaagcaaaagatcatttaaaccccaccactctgatcacctatgcggctttccactgagcatcagtcgcactgccttcacttcacttgcagcaactcctcgagttcgacgcccctccatcccttccctgctactgtgaatatatgcggcctgctcgtccttgcgcgagcgggtgaacagtcttcgagcgcgatgagggaggagatggatttgggtgacatcgtgctctcctggtcggtgcaggagatcacgaacgacgacctctacaagacgaaggtggagaggatccctttcagctttggttctcttgatgactacttgcgatcatatatgacacctctgatcgaagaaacaagatcatgcctaaactcgtgccttgagctcattgcagaagcaccgtcttcgaaaatactttcctttaaagttgcagggaaatcaggattgcattctatggatgttgacttttgggacaatggtgctggtttttctaccgagacctacaccgctaggaacggtgacatatttgttttgtctaacatgaagcctgaagctgcagatgacttcaaccgctatggtttaacatattgcttggcaatggttactgaagtttctatgaatgatgaatatcagaagggcttcaaagtgaaagtttcaaatagtactggtttagaaggagactttagtaaacttgtgcatgcaacatttcttgataatataatggctaacatgcgtatatggaaagcactttgctttgactcaagcatgaataataattttacaataatcaagtcacttttagcccccagaaatatgggtgaagatgtctgttctgtctgtgctaaaaaggatgactgtttaatgtcttctgcagagctaccaccagttaatctaaatcagtcacaattggatgccattgaatctatcatctctgctgtaagatgtagacatttgaacctcacaaaacttatatggggcccaccaggtactggaaagaccaagactgttagtgctctattgtgggctttggcttgtttgaaatgccgaactcttacatgcactcccacaaatgttgctgttgttggtgtctgtactcgattccttcaaaatttgaaggaattcagcaagcagattgacatatgtggtctacctctttctcttggagatgttttgttattagggaacagggacaatatggacatttctgaggagatccaggaagttttcttggattatcgtgtggatgagcttacagagtgcttttcattattgtcaggatggaggcacataattgtttcaatgatatcattttttgaggaatgtggttctcgatacgatatgcttcttgaatgtgatggcggcagtgattctgtatgctttttggatttcctgaaaaagcagtttgatgttgcagcaaaagctgtaaagaaatgcatgatgactttgtgggttcaccttccaaagaagtgcttttcacatgaaaatgtcagcaatatatctatggtgttacgtttactagaaaaaattaatgccttcttatgtgatggagatttaactgatgagagtgcgaaaaggggatttgattttcgatcaactgagaactctatttatgagccaatatcttacattgagaaggaattaggtgatgcaaggtctctatgccttaaattgctgaaagatcttcagagttcacttaatttacctgttgcctctagttcttatcggttgcataatgcagagattgctccgcttgatatgttgattgttgatgaagctgctcaagtgaaagaatgtgaattggtgattccactacgtttgtgttggttgaaacatgttgttttggtgggggatgactgccagttgaggccactggttagaagccaagtatgcaaggaagctggatttggaatcagtctttttgagagattagtcatactgaattttgaaaagcatttgctgaatatacagtatcgcatgagcccttgtatcagcttatttccaaatgctaaattttatgacaaaaagattttagatggtcccaatgtccattcttcctacaacaaggattgcactggccttctttttggtagctatgctttcataaatatcactgacgggagggaacaaaaggaaggtgcaggaaacagttggcagaacttggttgaagttgctgttgttatgcacttgatccgaaccatctttaaatcttggagaaagagagaccaagggattagcattggtgtagtttcaccttacagttctcaagttgccgctatcaaagatagacttgggaaaaagtatgatacatctgacaactttcatgtcagggtcaagtcaattgatggtttccaaggagaagaggatgacattatcatactatcaacagttagatccaacgagaggggcaatgttggatttcttgctgacatccaacgaacaaatgttgctcttacaagagcaaggcattgtctctggattcttgggaatgctaatacactgtataaaagtgggacagtctggacagaccttgtttctgatgcgcagagacgtaaatgtatttccaatgccactactgaccctgaattgtgtaagttgattttgcatgtaaagaatgaacttgatgaactcgatgatctactttgttccagctcagcagttttcagcaataccagatggaaggttgttctgagcgacaactttagaaggtctttcatgaaactaaaatctccactcctaaagaaggaggtactccaaaagcttgttaaacttggtggtggttggcggataccaataaagaatcttgatgtgactgatgctttccagcttgcaaaagcatacaggatcagagatctgtatcttgtttggagtattgatctagaaaaaaacgaaagatacttccagatgataagagtatgggaccttttgtcacagcagcatgtcgctagaactgttcaacatctggaaaatctcttctccatgtatacagatgaataccttgaccactgcagaagtgtgcagacagaagggaagctggagtttcctatagtttgggatgctgaacatgatattgttcggtataagaaggactgcaaagttgatgatcaagtagatcatgatcacttggacttctcatgtgccttggagaacacaaaagttagtgaaagcttcttgctgatgaaattttactctttatcatctggtgtagcacatcatttgctgacagctactgatgggactgaaattgagatcccctttgaactaactgatgaagaggaggcgataattcgatttccactcactagtttcattcttgggaggtcaggcactgggaaaaccactgttttgacaatgaaactgtatcaaattgagcaacactcctttattgcatctcaagggatagagttggaagttgatttatctgtggttgatccaaaagataggttggcaatggatacaagaaaaggagaaagttttgtaaaacaagtccttatcaccgtaagccctaagctttgttcagctataaaaaatcacatttgcagacttaaaaggttttgctctggtgatgtttctgaccagcccaaccctcttcatatgtatgatgtaattgacgaccccgaagagtttacagatgtacctgataattttagtgatctacagcatgagcactatcctcttacaataacataccgtaaattcttgatgatgcttgatggaacaatgaagagttcattttttgatatgttctatggagatttcaatcctagcattgagagaggtcattccaaaactcgagctatgcaagcttttattgaatcaaaagaagttacatttgagaagtttgctgctttctattggccccatttcaatggagaactaacgaagaaacttgatgcatccactgtcttcactgaaataatttctcacataaagggtggatacagagctaacatgccgtgcagtggcaagcttgaaaggcttgattatgtgatgctctctgataaaagattttcatctctaaacagtaaaatgagagagaaaatttatgatgttttccttgattatgagagtatgaagcgcactgctagggaatttgatttgtcggattttgtcaacagtcttcacagaagtctagtttctgagggctacaatggggctttagtggatttcatttacatagacgaggtgcaggatcttaccatgtcacaaatagcacttctcaagtatgtctgcagaaactttaaggagggctttgtttttgctggtgacacggcacaaactatagcaaggggtgttgatttcaggtttgaagatgttcgctcactgttttatacctcatttatatcagaaagtgaagcatgcaaccaagtgattaaacatggaaatcatgctcatctcacggatatgttccaactaagtcagaattttcgcacacattgtggtgttcttcgtatggctcagagtataatgagccttctgtactactttttcccatcatgtgttgacaagcttaatccagaaactgggcttgtatacggtgaagcgcctgttctcttggagtctggtaacgatgagaatgcaattatgactatttttggagaaagtagaggtgaacatgctgaccagcatggttttggtgctgagcaagtcatattggttcgtgatgttgcaacgaagaaacaaattgttaacctcgttggtaaacaagctcttgtcttgactattgtcgaatgcaagggccttgaattccaggacgtgctactctacaacttttttagttcatcgccattacggaataaatggagggtagtatatgactacatgaaaacaagagatgttacgtcatcatctgaagttatatctcatcctggtttcgatagaaacaagcattatctactatgttcagaactgaagcagctgtatgtcgctatcacacgaactaggcaaagactctggatatgtgaaaatgctgatgactactgtcaaccaatgtttgactattggaagaaattgtgcattgtagaggttaggctacttgattcctcactgattcaagcaatgcagacagggagcagtactgatgattggaggttaagaggtaccaagttgtttaatgaggggcaatttgagatggcaacaatgtgctttgaaaaggctggtgatgcatatagagagaactgggcaagagcagctggactacttgcaactgctgaccgtgtcatctccacaaatttagaaaggggccaagctaacttgcagaaagcatcagagatttatgagtctattggcatgcatgagaaagctgccacttgctacatcaaactaggtgactacaaaagagcaggaatgatatatatggaaaaatttggaactaaaaggcttgaagatgctggagactgttttgctattactgaatgctggtcactggcagcagaagtttacttcagagctaggtgttatacaaagtgtttctcctgctgctcaaaaggtaaagcattgagtctgggccttcaattcctgcgacagttagaaaaggaacagtgtgagaattttagttcggactttgttgctgttagaaagacatatctcgaaagctgtgctctgcattattttaaatgtggagacataaagcacatgatgccatatgtcaaggctttcaacaatgtggatcacattcgtgcattcttgagttctaggaatcttttggatgaattgttgagtatagagatggaaatgggtaattttcttgaagctgcaggtatagcacagcgtaaaggtgatgtcttattggaggtaaacatactagagaaagcagagtcatttgtaaatgctacacaccttctcctcctctatgtcacagcgaattccttgtggtctccacacagtagaggatggcctccagaaagttttgaaaagaaggaacaattgcttacaaaagttaaagaaatggcgaagaaagtatctgaagactttttctgccttgcttgctttgaagcagacttgttgtcagattcccatagatctcttgccagcttgacctgtagcttgcttgagggtagaaaatgtggaaacatgttagttgaacttatttctgctcgttacattattgatgttcatcttcagtctcaaacctctagatataaccttgagttagagccagtatctgatcagctgtgctataatatgatggcttgtgatcagatgtcgttggaaacactgtcctgtatttggaaccagtggaaattgattttagtcaaagtgcttgctcatcttaatccttctgaggatattaaatctaatgattctgcagctgtgtgtgaagacctttgtgctaaattattcgggttgagaaaagacagtgacaaccgatatgtggtacttaatgtggactctggttggcttactaacacaggcagaagttctttggaacaagatggcaacagatgttggctgcatactgtgcattgtcagtcatgtgctcggacttttatggtaaatgagctttcttctgttggccttagtgtccttcgtaagttggaatctattattgaaacttctagggagatagcatcatctccatatgcccagtggagaagtattgttatcttatatgaaattgcaatgtttctaaaagagttctgtttggcaaattctttaagaaaaacggtcaatttctgtgaacagaaattttttgaattactttttcgggcctggggggatgaaacagcagagtgcttttccgacatacttgactcatctcctgcatatggtttgattgtggattctgttggctcatatactatggcagggaatcagaatttgactcatggtcatcttggaagaatagccatgtttcttctttacacagcaaaatatggtgatatgctgaatttaacacttgaacaatacctgaatcgtgacgctgagtgggcacaattttttcaatctttgaagagttttcttgacactggtgttggaagatgctcattggtccagacctttaaagtggctcttgaatttactaccaatgtaaaatggtggattgagaaggattatatgtctccaatatgctatatgaatttaatggaatgtcttggtttttttgcaatgtcctgttttatggttaatggctgtgcgctttgcacaaaatctctgttggttaagatgctaaagtgccgtacaagcaaggctttcttaggtaattgcctggtttctggtctgggtgaccaggatatggatctggactgtatgacattctcaccaggggtattcatatgccagtcaattaggtctattttgacaaacaagcatgctattcaagagtggattcgggaaatagctccagcaattagatacgttccagtccttctgagactagtaatcatgctttatctgctgactttaactcttcagttgggggactgctatgaggtcacagattttcttgctaagcacagaatttttgaggatttacctcctgatttctccaagaagattgtacctactctgaaatttagaaatggtacagtagcacacttcacaagagtatttggtgatgcacttgctgcaattggagacaccatggtcattcttggtttgcccaaaggcccgctaattagctcaggcttaaaagcttatagatttagctatactgatttgagtgatattagcaaagtaatggcattactttgtccagaagagcagaaattttccatgcaaaaagatacaaaagcttggaatgatacttgtggaaatttgtctattgctagaatacaagataatgagatggtcagtagaattgaaacgcatttgagtgatgagagtattaccttttgggagaagtttgagtcgtttcaagtctttatgcatgaccagaaggactcaagggttattattctattccttgaaagtcttctttcttggcttgagcgtcgagaccttccagaaaatatggatgttcaattattcgtagagatcaggcacatatgcagtcaatttcaagagaagtatcttagggataagaaagtttatctaactgtcgaagacctttactcgacgtgggatgatggggagaacaagctgcagaagatcatcagtttcctgcggtatgagaaaacttcgggaaaagaatctgtcaaaaggaaggacaaagcacctgctgcccagttccccacgcacatggctgatgaatggagtggatgctctgataatgatgaacctgacacagcagggatggacgcggtggaaccagccaaggaagaagatgtaacgtcttgttcgactgcgactgcaactgcaacaaagagaacgcagaacaagaagggcaagaagaaatcaaggaagcggggcggcaagaagtgagcttgcttttagcccgtagccctgctcagctctagaagcatttgatatgagactttttttaatgtactgaagaactactttggcttgaactattactgcttgttctagtctgttttgtactactttggcttgaacagcggtttttagtttcaagtaaccgtgccaggtattcgttgcctcagctactagattttgtaggataaatggttaaccaacatatcttttagtgagcagtttctaaacctttttaatattgtgcgtaataagtcggcttgttgcacaagtttttc

SEQ ID NO: 28696 - DNA, 4264 bp, Zea Mays
tggcctctttgcttgcttctttctttctccctcttccctttggaccctttccagttgtccacgctcccatctttttcaccaccccttctccttctctctctcccccccaccctcgcccttctcccaccgcgcgcttgccctccggccgggcgcccgtcccgtccttccctacttgtaccagcccctcttttccaatttcatcctctccctccaattccaccatccctctctctctctctcgctcgccacccgcaccactctcgctcggtgtgtgggagagagaggaggggagggagctaggctggcatggccggccgcttgagctgcgcatgcctacaattcagtaccagtactagcaaagcaagctaggtaggagtaacacctccccaattgctacttctactgagttagccatcccgtcgtcccggcagtcacttctacaagtacgcacgcagctacccagcagggcggctatactaatccctccctgcctctgccttccttccgaggaccgccgcggcgggccggggtgcgcgcacccgccatgcagcagcagcaccagggtggcggcggcggcggtggcggaggctcacagttcggggccccgccgccggacatgggccccttctcgccgacgccggctgctaccggtcccatgccgctgagcagcaggcctccgtcggcgcagccgcagcagcaaccgaggaccagctacgaagaattggcgcccatggtgcctggggccgccgctgccagtggcttcgacgacgagacgatgggtagtggcggcggcggcggcgggtcgtcgggcgcgtccagcaaccggtggccgcgggaggagacgcaggcgctcatcaggatccggtcggagatggacgcaaccttccgcgacgcgacgctcaaaggccccctatgggaggacgtctccaggtaaaggagcgagagagagagagacaggggaactcgtcgtcgtcctcgtccagacgcatttgcagtctggttcaagaagcctgtctccggcatgattttttttccctgcggaaagcggctaacggtttcgtggaatttagcagccgcgcccacatgaaatgatggataattatcctgcgtcgctcgctgcgcccaattcccctcgaatttcgttttgttttcccgtttccgtcccagtctaatcaaatgcgtctcgatttcagcgagacggcaggggagagacagagagagagagagagagagctggaaggcagtactcctaggtgcagtagccagtagggtgaaccggtgaaggaatctgggcgcctgcgcgcctggggatcgtaccacggtggtgagtgcgggagtgcaggcagctgctgccgtcgctgcaggctgcaggctgccactgtctcctgctttcatggctccagtttttgggaaaagaaggaaggcagccttcctctcccatcccaatgcggcctccttgctttcatgactcaccagtgcatcatcagcttcacatcccctctgatccctaaaaatacgagatggtttgtgattaactataattccattctgctgcagtacctccacctccttcggctcgcactcttctctcctcgctctcgcctgtccttccaaaattccaattcttcccatcttcttgtctctttcctccagaggccttgatgtgttatgccactacattagatgcttcctccagaagcttgccgacctgggctacaagaggagcgccaagaagtgcaaggagaagtttgagaacgtgcacaagtactacaagcgcacaaaggaaggccgcgccggcaggcaggacggcaagagctaccgcttcttcgaggagctggaggcgttgcacgcagccgcgccgcagccgccaccacagcacttgccggcagccagcaccgccccgcagttgcacgccctcgccgcgccagtatccccgacgccccagcagcagttgccggcatccagcgccgccccgccgttgcacgccttccccgcgccagtatccgcgccgccgccgttgagttcaatgccactgctgacagggccgatgcagccagcgcccatatcatcggcggccccagccccggcaccggtggatctgctcgtggcccaccagcccctcaacctgcaaggcttcagcttctcttccatgtcggactcggagtccgacgacgagtccgaggacgacgacatgacggcggagacaggcggaaaccaggaccgcctcggcaagcggaagcgcggcgacggcggcggcagcagcagcaacaagatgatgtctttcttcgaggggctcatgcagcaggtcgtcgacaggcaggaggaaatgcagcggcggttcctggagaccatggagaagcgggaggccgagcgcacggctcgggaggaggcgtggcgcaggcaggaggtcgcccgcctcaaccgcgagcaggagcagctcgctcaggagcgcgccgccgcggcctccagggacgccgccatcatcgccttcctccagcgcatcggcgggcagtccgtgcagccccctgctaccgccgttgttgtcccaatgccagcaccggtgtcagtccataccacgccgccgaaacaaccttctcgccagcagcagcaaccgccgccgccgtcgccccaggccggccaggcgacaccgcagtcgaagccaatctcagccgcgccgctccagcagcaaccgccacagcagcaaccgaaggatacgtcgcagcaggacgccggcacgccgcgcagcttgcccccggcgtctagccagtcactcgagctggtgcccgtcgccgccacggagcaccacgtcgattccgggctaggaggaggggatggaggtgcggcgtcgtcatcgcggtggcccaagaccgaggtgcacgcgctcatccagctgcgcatggacctggacatgcgctaccaggagacaggtcccaagggtcctctctgggaggatatttcgtccgggatgcggcggctgggatacaaccggagctccaagcggtgcaaggagaagtgggagaacatcaacaagtactacaagaaggtgaaggagagcaacaagaagcggcccgaggactccaagacctgcccatacttccaccagctcgaggccatctacaacagaaagcacctccgcagcctcacaaccgcggccacatcgtccgccgccgccgctcctcgtcccgcctacccagatcagctgaacccgagcaggcaagagatagaggggaagaacatcaacgatgacaagaggaacaacggtggatcaggtggaggcacgcaggtgccgaccagcaatggcgagacagcgacgacgacgacgacgacgacgctcgtcgcgttcgacgccgacaccggcatgaagaagaagacatcgtcagggagttgaacgagcacccgcgtcgggagttcacgacggaggacgagacggacagcgacgacatgggcgacgagtacaccgacgacggcgaggaaggcgaagacgacggcaaaatgcagtacaggatacagttccagaggccgaacccgggcggcaccaacaccgcgccagcaccggcagcagcgacgacggctgcgccagcggtgccgacttcggctccgaccagcaccttcctcgccatggttcaataggggcgcgggcggcacccctctcaaaccgtacgtacgtatatgcgtccaaaccaaaaacctgcgcgcatcaccgtcaccgtcacctcctcctttactttaccagtccaccaagcatgcaccatcagtccatcacactgttctcttgttcatcctgtaatcccccgtgccattccattatttattgatttgtttcgtgtataataagatccccaccgttgcggaggatgcagagtgaggctgtggtggtagagcaaaaaggaagagtccagtccctcagtaataacttatttataggtcatcgtcgatcgcgttaaacgagaactgtacatcgatgtaacagtcagtccatgatgtttttcctccctttttttttagttactcccttcccgggacggcagtatacaagtttgtataagagtatacaagaattacagacagttcaagcaacctggagcttgcggaggtgagaaggtgtttttgccgttgggaatctacattttttttgtcgatcctttttcttttaacagtggatataattaaatcctgttacttgttacagtgtacattaatcgtgttgttattccagtactctgccctttgtggcaaatatacatgagcagttttaccgttgcca

SEQ ID NO: 28697 - DNA, 2017 bp, Zea Mays
ccacaaaccctcgtcggctcggcctcgttcctcgcgcgtactgccgcttgccggctaccagaaaaatggccgcggcggcggcggcggctaggcgtgccgctggccttctccctctcctcctatcctcgcggtccggtgctcgcatacccctccaccgggctgtatcccagatccctccgccttgctcctatcgcctactctcgcagcaagccaagcccttctccgcctctgcctctgcctctgcctcagcctccgcgtcgaatggcgcgaccgcggaaagaacccgtgagctgcatctgtacaacacgaagtcgcggaagaaggagcagtttcggccgcgcgatccaggcggggaggtcggcatgtacgtctgcggcatcactccctacgacgacagtcacatcggccatgcccgcgcatacgtagcctttgacgtcgtctacagataatcgcaagagcaaatcagctgggggaagatccttttaacttaagtaaaaggttctctgatgacttcttgttagacatggccaatcttcaatgtttaccaccatctgtggagccccgtgtttcagatcatattgatgagattataaatatgattaaacagatccttgataatagttgcgcatatgtagtgggtggggatgtttatttctctgtagacagttttcctgactacggagaattatctggtcgaaaattagatgataatagagctggtgaaagggtttctgttgatgagaggaagagaaatccagctgattttgctctatggaaggccgcaaaagatggggagccatggtgggatagcccatggggcccaggaaggccaggatggcacatagaatgcagtgccatgagtgcacattatttgggtcattcttttgacatacatggtggtggggaggatctcatctttccacaccatgagaatgagattgctcagagccgtgcggcatgttgtgacagtaccataaattactggatacacaatggttttgtcaatgtaaatagccaaaaaatgtctaaatcgcttggtaattttgtcaccatacgaaaggttatagagatgtaccatccgctggctttgagaatgttcttacttggcacacactacaggtccccaattaactacacaatagaacaactcaatgtcacatcagacagattgtactacacatatcagaccttgcttgattgtgaagagatttgtcagcagcaacaaagcaacactggaaattcattgcctgctaataccttaaattacatccaaaaacttcatgaggaatttgagacctcaatgtcagatgatcttcacacttcagtggcattggctgctatttctgagccattgaaagttatgaatgatctgttgcacactcgtaagggaaagaagcaggacaaaaggctggaatctctttctgccttagaagagaaaataagagtagttctctctgttctaggattgctaccttcaagttatcatgaggctttgcaacagctgcgggataaggcactgagacgagcttccatcaccgaggagcttgtggtgcagaagattgaagagaggactgcagcaaggaaggcaaagcagtatgaaaaatccgacgagatccggaaagaactggctgccataggaattgccctcatggatggccccgacggaaccacttggagaccatctttgccaattttagaggaagcggtggttgcgaaaacatgatctgtgcaagggattccaatacgacccatggacaccagttctagtcggtaatcatggatttgctatatgtgacgaacttgttcgtttgactttcattcataccggcttgtaatgcttctataatgttttttcataattctctgctcccattagatctatagtagttactagctgaatgcacgtgtgttgtaatgaaaatatataatatgagtatactatgataacttatatacaaaatgtatgttataccgttatgagaaaatgtttcataatcaatttatgattcgggccata

SEQ ID NO: 28698 - DNA, 847 bp, Zea Mays
aaaagtcatatcaatacaagagtgatgggaacatatggtttcggagtggtgctgttagaatgtgcgaccgctagggatccagtcgattactctaagcctgcagatgaggtgaatctcatagagtggcttaaaatgatggtcaccagtaagagggcagaggaggtagtggatccaaacctcaatgttaagccaccaaaacgtgccctcaagcggacaatcctggttggtttcaagtgtgtcgatcctgacgctgacaagaggccaaagatgagtcacgttgtccagatgcttgaagcagttcagaatgcatatcatgaagatcaaagcaagctcagccaggtgggatcacagcagtcgctagaggagacctcaaacagcgctgatgcctgaacctcctattctgaacaagcacatcaaataggaccctgaatcatctgatagcaacattgatttgatcattgctcggcacttaatagagtgagcggtgatcggatttacagtttgggtttgcatatactggaggtggtggttaaatcaattagtagcaagttgtttctaaaaggttcatgtcttttacccttaggatatgtatagttttcctgtaggggagcatagaagcaccttcatctttatttgttgttcgagttacaaggagggactaacctcaggcatataactacagtcactggatttcgttacccatgtgtagtgactttttggaaagtcgttattaccctgagatatgaaaacatgaattcctgcaacgaagtactaccccgttctcgaatatttgtcaccggctagttcatttttgaactaaaatgcgacaaataaaaaacatagggag

SEQ ID NO: 28699 - DNA, 2297 bp, Zea Mays
tttcagtgtccggctgccggcagtcaccgcaaaacgaaatctctctcctccacctcgtagtcgtagccgtttcatccactttctagtttcctttctcctcctccagccctccttaaaaaatcggccacggttatttatttctctcgccccgctccgctttcctaatctgcgagctggggggagatcgagaccctagaacggagggcgggtgtgcggcgctgagggccttagacgaatggcggtggaggagaccgcggagagctgcggcagccacgccgcgaccgctgcgtccggcggcggcgcggcggggcccgcgacgtcctcgtcatcggccgccgcggcggcgcaggcgcggaagcagcaacagcagcagcgccataagctcgaggtgtacacggaggttcttcggcgcctccacgacgccggcctgcccgacgcgcgggcgcccgggttcgacgacgagctctggaatcacttcaaccgcctccctgcccgctacgccatggatgtgaacgtggagagggcggaggacgtgctcacgcacaagcggctcctggagcaggccaaggatccggctcatcgcccggctttcgcggtgcggtccgtgcaggtatctccaattcttgatgggaatcagactgattctgattcgaacactgcaggggaggaagtcgcttcaagactgttgaacaggcagcaaagcatatatcctcctcctgccttcggttcttctacaaatcttgaggcccttgctcttgaagctagcaagtctcatgatcacgatagcacttctgataatggccgatctctatacaggcccatgcatgaaatcaccttttcaaccattgacaagccaaaacttctcagtgagctgacatctctgcttggtgagcttggtctaaacattcaagaagcacatgcattttcaacaaatgatggctactcacttgatgtcttcgttgttgtcggttggcatgatgaggaaacagaggatttagtagaagcagtgcagaaggaaattggcaggattgaagagacacaagcatggtcttcatctcattcatggtctactccagttgaaaaaatgcagattgctgagaattcagcagctgaccgtgttgagataccaacagatggtgctagtgaatgggaaattgatgtaaagcttctcaagtttgggaataaagtagcatcaggatcatatggtgacctttaccggggtacatattgcagtcaagatgttgctattaaagtgctgaaacctgagagaataaatgcagacatgcaacgagaatttgctcaggaagtatatattatgaggaaggtccgtcacaagaatgttgtgcaatttattggggcttgcactaaacccccaaacctatgtatagtcacagaatttatgtccggtggaagtgtgtatgattacctccataaacataaaggtgttttcaaacttcctgctttagttggagttgcaacggatgtgtcaaaaggcatgagctacttacaccagaataatattattcatcgtgatttgaaaactgcaaaccttctgatggatgaaaatgggactgttaaagttgctgattttggtgttgcacgtgttaaagctcaatctggagttatgactgcagaaactggtacttaccgttggatggccccagaggtcattgagcacaaaccctatgatcacaaggctgatgtttttagttttggaattttgatgtgggaactactcacagggaagattccttatgagtacctgactccactacaagccgctgttggtgtggtgcagaagggattacggcctacaattccaaagcatactcacgcaaagctttccgagcttcttcagaaatgctggcagcaggaccctacccaaagaccagacttctccgaaatattagaaactcttcagagaatagcagaggaggtcggagaggagcacgatgggaagcacaaggacagaacactgggtggtttcttttcggctttgagggggcggagccattgagacacagtcgaagacttttaataataaaaatgtacatggcctcggtccgtcctttgaaggacctgagctacaaccagtgcagtgcctgttcctcgcacgtcagcaccagtacacagaaatacagacctgctgtgcagctgcagttgactgaagcggcaatttttatttagctgcagccatcgctttccgcatatccgcttgttattcctgagttccattacgcaatgtataacataggtgaggaagcttgggaactgtatcatcagtctgatttcccaat

SEQ ID NO: 28700 - DNA, 3578 bp, Zea Mays
gagacggctgtactgtactgatcactcctggcctctgcgaaggaaagaagaggtgggggaggctggtttggtggcctgtaccgatttgcagcagctgatggcggcgcctctgctcccctcttccgtctccgtgctcctctcgctccacatcgcgctgctgctggtcctctgctccagccaggtaggagattcctgctcctcagtgcgggactgcggcacgggcctctactgcggcaactgccccgccgcaggcaggaccaagctctcctgcatcagggacctagccatccagcccacctccattgtgaaggggctacctttcaacaggtactcatggctcgtcacccacaattccttttccatcctcggggagccgtcgcgcactggggttgagagggtcacgttctacaaccaggaggactccgtcaccaaccaattgaggaatggtgtcaggggattgatgcttgatatgtatgacttcaacgatgatgtatggctctgccactccctgcaagggcaatgctataacttcactgctttcgtaccagcagttgacacactaaaagaggtggaagcatttctctccgagaatcccacagagatcataacaatatttattgaggattatgttcattcaccgatgggactgagcaaggtctttactgctgctgacttgatgaagtattggtatccaatctcggaaatgccaactagtggcaaggactggccaagtgtcacagatatggttgcaaaaaaccgcaggttgctggtgtttacttctgatgcttcaaaggaggctagtgaaggaatagcttaccaatggagctacttgctagagaatgaacctggagatccagggattgtgcctggttcttgtccaaacaggaaggaatcgcagccactgaactcaaggccggcatctctatttctgcaaaattacttccccacgatccccgtgcagaacgaagcatgtaaagagaattctgggctaccacaaatggcccaggcttgttatgccgcagctgggaataggatcccgaacttcatagctgtgaatttctacatgcgacggtggtggtgttttcgatgttcaagacagaatcaatggccgcaccttatgtgggtgtgacaccattgctgcttgccaggctggagcaccaatgggtgcatgcaaggacacgggggcaccaaatcagactacatcgccctctgtaaatggaaatgtctattcaggaactatagaattcaagacgcattccactagtgctgctagcaataacaacatccggagtagatctgtttttctgctaaggctgcagttgactttgctgctctttttctctttcaggctctagttttcatatatctggacctttttcccacctactgtatagctgaaagtaacatcagcttttgttgtgagcttgctttctctattgggatgacgatatatgcatgcgtgttgcacctagaccgaaattttgttcacatcaatggaaaccgcgtcttctctgtgccctctactgacgggtgggtcaccacgggtcccggactcggttggacacagggtccagcactccagcagccagccgtccaggcaccaggctcatccagtgttcgagtcctcgtcgacttcgctttcccgattcctaaccccgcaggccgcaggctcgcatcgccaagcatcttccgcgtctcttcggagacatctagtaaaagcatcttccgctactccgccctccgcctcccccgtctgcttcgcaatccgatccggcgaccggcggccatggatcctgcgccgcagacgcacccgatcctctcttacgtgctctcccgcatccccaacctctccatgaccaagacccccaccgccgagttcgacatcgagcagccgcctgtgcacaccccgtccccgcggacgccgtcctccgcgggagagttcgagctcgtcgagcgcatgccggggctgcgccacccgtccgtgctccgcgccatgacccgcgccgtcgccgacgtctccgccgcgcgctccgcgctgcaggtgctcggcccgcgccccgaccacgagctcgtcgactcctcccgcgccatagtggccgccgccgaggccggggattcgcggatccccgcgggcgacgtcgaggcgtgccgcgcggtggtgcgcctcgatgagacccacgacgcctacgaggccctgctgcacgaggccgagtccaggctcgagagggtgtaccgctccgcgatggaggggacggacctggatgacgaggcggcggagagcgtcaaggatcaagggccggtcgcggggcctgagggcggggacgcggcggtgggggaggaggtggtggcggtgctcaagcaggccgaggagggcaagccggtggacagcgtgcgcctcgtggatcgccagcttcgccatctgcccgaggcgttcgggaggatcctggggctccgtgtgctcgacgtctcccgcaaccagcttgaggttattccagatgctataggaggacttggtcatcttgaagagctttttcttactgccaatgatttggtatctctacctgataccattggactgctatccaatctgaagattttgaatgtatcaagtaataggcttagggcactgccagatagcatctccaagtgcaggtcgctagttgagcttaatgtgagctataatggtcttacttatctgccaaccaacattggttatgacttggtaaatctgcgaaaactctggattcatatgaacaaattgcgttctcttccatcatctgtctgtgagatgagatcgttgtatctcctggatgcccattttaatgaactatgcggtctaccatctctcttcgggaaacttagcggccttgaaattctcaaccttagcagcaacttcagtgatttgaaagagcttcctccctcgtttggtgacttgctaaatctgcgtgagcttgacctaagcaacaaccagattcatgctctccctgacacttttggtcggctggataaactggagaagcttaacctagagcagaaccctctagtcatgccaccagaggacattgtgaacaagggcgtggatgcagtaaaagagtacatgtcaaagaggtggctggacatattgctcgaggaagaacaaaggcgcattgcggcagagaccccagaaatgtcatcgactcctaaagcttggctgactcgcagcgtctcctgggtcacggacgtttctgagagtttggcagggtacctaggtgggaacaagtcagagaaagatgcatatctggaccagcagttttgatactttatgtttcttttgcctaatgtgcattcgccccatgtatacacaaataacgtttaccaaaaatcttcattacagatgtgttcctggtgagtataccgtacggttttgcttaggaaatggatgtgttcctaatgggtctgtcgtacggttttaccgtggtccattgaataatagtatctcacagcacttgagagtacactcaagataaacattgttcagagatcgacctgtcttctggtatttggctttcgcccttcgctgtgaatttttgttccatgta

SEQ ID NO: 28701 - DNA, 1959 bp, Zea Mays
ggatcgtacaactcaaagactagcaaagaggtcaggtgaccggctcaccgctcggagtcgcggcttcagaaatcagaatcagagcacctgcctctcttcagtttgttgccgtctctctctctcctcttgacgcaactcctctcctatcttctctctctccatcgctccctcctccgcgccgcgttggcaccgaaccctcctgtcatggcaaggccgccgaaggaggcgattgataccttcatcagcatcacgggggcggacgaggccgtcgccgtacgcaaactcgaggaacatggtggtgatcttaatcgagcaataaattcacatttcaatgatggagacagcatattgaacggaatcagtcaaaacgccatgcctgctagtcgtgatgatatgatggacctggatggaccacttgataatacatttcaaagatctttgttgccagagagtttccgtgccccttttgctctaatggatccaaatttccaggaccaattttttgacagagttggctccactgatggtgtcattcgtgaaccgctagtttcacatccaagagaggtgagggagatacctatcgaagttaaggatggtgatcctcaaacaggttcatctggccaggatgttactggaaatgagtcttcaaatggccctgaagtccctgaaactatcataattgatgatgtggacggtggattgttatctgcaccatctgttccacatcctattattcctagcaatacatctactgtgccaactgctcctccattggttcatgttaatgactatgatgaggacatagaagaggaaatgattcgggcagcaattgaagcttcaaagaaggattctgaaggactggcaaatatagtcgagcaaggaggccagcatcaagaggaagtgaatttgagggaccattcttctgataaagcaggcatggaaaccgcaaatggaatagttgagaggtgaatgttaactttactacccacctcttcactcaggctaccctactacagtatcatttgattccttatacatgcaatttccttttggaggcaaggactagcttcagaaaaggctggaacatctaggcaaccaatagatgacgagagcttccaggaggaggctgaagatgtagaagaacagccgttagttaggcgtcgttctcggcgtgccccttctgaggacaatgaattaccaaaaatagtgcacccaggtgctagccctgttctgaacaatcaccagtataatggagatgatttcccatctgaggtattatataatctgtggttccaatgtgcgctaagacattagatggatttgtttaatttctgacgtctttttacaataaagtggggtggcatttcttctgaggaacatgatgaagctgttatgcttgaggctgcaatgtttggtggagttcctgaaggaccaacatatcctttctctatgccttctcacagaacctctacttattatcccccaatatctcattctccatcaccagcattaactgaacagcggttattacgagagcagcaggacgatgagtaccttgcatcgctacaagctgatcaagaaaaggagttaaaggccctacaggaggctgagctccgtcgccttgaagaaacagctgcgagagaagctgttcttgagaaacagaagcaagaggaggaggaaaggcgtaaaaaacaacttgaggaagaggaactagagtccagtctcacttcgaagcaagcatcattaccaccggaaccgtctccagacgcagagggtgctgtgacagttgtagtccgaatgcctgatggtagtcgacaggggcgccgctttctcaaaactgataaacttcagttcctatttgatttcttagacattgggaggacttgcaagccagggacctacagattgggagtatatatttggctggatggtgtttttttattattgtactcatgcatc

SEQ ID NO: 28702 - DNA, 3891 bp, Zea Mays
ccctctcccccaatcctctcttgtagccacggccgcatgctcgcgcgcccgcgccgcctttctacttccaagtgcagctcgcctcggcttgccagcgccatcttttcttcctcccactccctcacctgaccggtctgattctgggtcgatgtcggtcgccatggtccgacccatggtcggaggatagcggagaccagtgaaggccttgcgcagaagagtggcggggaggagaagcgacggagaagcgcgctgccgcgctcacatggccgaccaaggcatgtgcgtgcagacatttgaattcatgaaccagatctcgacaatttggattctaagtaaaaatgggcagggtcgctctctcccaacaatagtcctgccattcgttgccatgtacccaacgagcgtccagcaccaagaaaacaagagagagaaagagtgggtgtgagcaccgaactgtcgaactgagcatggagctcgccttgggggccatggccagcttggcccccaagctgggcgacctgctcatgaaggagtatgtcgtgcacaagggcctcaagcttgacatcgagtccctctccagggagcttgtgatgatgaacaccgccctcgtccacgcatcccgggttccacctgaccagctcactgaggtggaaaagctctgggcacgccacatccgggagctgtcgtatgacatggaggacgccatcgacgatttcatcctgcgtgtggttggtggtggcaactctgctaccgaagacaccaaagtcttcaaggagatccttggcaaggtcagcgccgtgatgtcaatgaagaagttcaaggatcggcgtcagatctccgacaaggtcaaagacataaaaaaactctctaacgagttggctgaactttatgccaagtacacagtaagaggtgcgggtgctgatctcgccgcgagcaccggcattgacccccgtgtcatcaatctgtacaagaaagagtcggatctcgttggcatccaggagtcaagggacaaagttatcaagatgctatctatagggaccaaagatgacgatgtgcaggcgtctgatcagaatctaaagatagtgtctatagtcggagttggaggattaggtaagactactctagccaaaacagtacatgatatgctagagaagcaattcggttgttctgctttcatttctgttggtaggactcctaatctgaataagtcatttaagaagatgctagtggaactcgatcgcaattataagcaagttgacatggccagatgggatctagaccaatttgtaaacgaactgcatgaattcttacagaacaagaggtacttgatcgttgttgatgacatatgggatgatgactcatgggaagcgatcagatatgccttgaaggacaataattgtgggagtagaatagtcatgactactcgtaattccggggttgtcacgaaagaagaagaggtttacagattaaaacctctttctgatgaaaactccaaaaaattgttctacaaaagaatagagagtcaggaaggagaaagccttgacggtgaactatctagtaaaatcatacacaaatgtggcggcctgccattggctatcattgcaatagctagtttgttggctgaaagaccatgtgaggagtggtcaagagtgtatgactcgattggtcttgggaataatggtgacaatacgacaaagatactgtcatacagctactatgatctgccttcttatctcaagccatgtctgttgcaactaagtattttttccagaagactatctcattgatacaaagcgtctgatatggatgtggataagtgaaggcctagtccatcttgagaaagagggtagcctatttgaggttggagaaaggtacttcaaggaacttgtgaatagaagcatgatccagccgatacagggaaaaaatagctggtttgaagaagagttccgtattcacgacgttgtgtttgatctcatccgtaagttgtcgaaagatgaagacttcgtaacccttttggacagcaacagacaacattcatgtccggatagtttaagaagagagaagaaaacaggagtgcctcgttctgattggaagcaacgtcgactggttatcctaaatcaacgtgtgcattccagaggtgttgaggtcagcatggacatgccagaggtgttgaggacacttaacattgtacactgtaacgttacaattatggccccacttcataacttcagagtttgtcgtgtgctatgtctagtaggcagctatgtacccatcagcctaaagcatctagggaagctgttgcatctcaagttcctacagatatctgacacgactgttgatgagcttcctaaggaaattgggcacctgaggtctcttcaggcactgatattaggctatactggactagacgagctaccatcgactgtttcctcgcttactcagttgatgtgcctgacagctagcgggttcaaaaggttgccagctgacaggatggggaacttaacgtccctggaggagctacggttagagagcatagttggtcagtgtgccgcccaatccctagtggcagagcttggcaagctaacaaggttgagggtggtcagcatcaccttttcagaggagctagaagagagtttgcaagaagcactggtcaaatctctgttcaacctgcggggactccaggaactatcgctttcttctaaaatgtggcagcagggaagcactatgtggggagactgggagccaccaaggcagcttcggggcctgatcgttcaaggcattgtcttctcacgacagcctcgatggatcaaccgctcctgcctgccacacctctgcttcttatgtctgatggtgcacgctgttgaagcacaggacctagataacctagggaggttgccagagctccggtacctcaagctagagggtgtcatctggcctccaaggtatgctgttagcctggacaacttcaagaatctaagattttgcgatgtgggtacaacgctcgagtttcatatgggcgccatgccgaggcttgaagagctgcaatttgaagtttatgcagggtactggagttgggaacacaatggtgtgctgttggagcagttcccaacgaaggatgtgatcgaagatcttgacttgggcctggataacttgctttcacttgagcaagtaatagtcaaagtcaactgcttaggtgctactgctgcacaagtgcaggagctggaggctgtggccatgcgtgccgtggaaaatcatgccaaccgtccaaccataaaaatggatcgattatatgaagaaaatatcttatctgatgaaaagctggaggctctgcttcagcagcacattcaactagaaggcggcgtgctccagctgaaggataaacctgacgctttcttcatcagccagctacggttgtatcgacatcttcagaaagccgttatttcctacgactgtgcgggtgccagcatgtgtgaggtgctgaaagtggaagcagcttgtagacatgcagccgaggttcatcctaaccatccaagtattgaactgatcagaacaaataccgatgaaatggcctcctcatctgaccatcctagcacagagcccaggaattgatgactcggtttgtccaatccttccaacccaacagtaggtaaacgtgagttgtttaagtacggaagagacaggtcctgttcagccagatgattacaagcattcgcagggcttgttagatttgtggttcttagtctaaaatcacattgaacagggagatgaacacaagtgatgtagtttatgtgttatctacatttgtctctatttttttaagatggtcatatatttcctcgaaagtgaccttgattgattatgtgtgaagtgtatttttttaatgacatgggtcat

SEQ ID NO: 28703 - DNA, 817 bp, Zea Mays
atgatgaaaagctccgtgacgcatgggtcgtcgcaacctgtcatcttcccagatgatacgagcacctctgagcttcgatcttttttttttttgctttctttttttctccggccttgcagacaattttggtccgttgatttattttaagtagtccaaaatgccaatccaccgcagtcgcaggctcgcagctgcccttgcccgccatgatgcctccaccgccgctgcgccttcacctcctcttccgctccgaaaccctaatccctctactccggcaacgacccagctgcgacgcgccccattgccggaccaggagggttggaggcagcggcggcgggcttcgtcaccggtaagaggaaggccaccgaggtagcccacgcgttctggagaaatattgttcagaaaggggatacggtggtggatgccacatgcgggaatggcaatgacacgctcgctctgctgaagatggtggctgatgaaacaggccgtggacgtgtttatgggatggacattcaagattctgcgatagagaatacttcctcttttctgaaaatggccgtggatgatgaacatcagcggggactggtaaaactgtttcctatatgtcatagtagaatggaagagattgttcccaaagatgctcctgtcaggcttgttgctttcaacttgggctaccttccaggaggagataaaactgtaatcacagtgcctaggacaactgagttagcattgcgagctgccagcagaattctcagttctgggggactcataagtgttcttgtatacattggacatccaggtggaaggtaaacaccagttg

SEQ ID NO: 28704 - DNA, 1718 bp, Zea Mays
aaccttaaacccacccgctccccgggcttctataagcagctccgctcgcgctccaccgcagcgaccgatagaacacgaccctgggaccggggctcagatcggatcgcatcagatcgaaggcgtccagaagtttccatcgggcgtcgccggtatggtgatccgcaggggttcttcgtacgccgtcgcggcacttctcgcgctcgcctctgtcgccgccgtcgccggcgaggtattcttccaggagaagttcgaagatggctgggaaagtcggtgggtcaagtccgagtggaaaaaggacgataacatggctggtgaatggaaccacacctcggggaaatggaatggagatgcagaggacaaaggtattcaaacctccgaggactacaggttctatgccatttcagctgaataccctgaattcagcaacaaggataagaccctggtgctgcagttctctgtgaagcacgagcagaagcttgactgtggtggtggttacgtcaagttgctgggtggtgatgtagaccagaaaaaattcggtggggacacaacttacagcattatgtttggaccagatatctgtgggtacagcaccaagaaggttcacactatcctgacaaaggatggcaagaaccacttgatcaagaaggatgtgccttgtgagactgatcagttgactcatgtttacactttgatcatccgtcccgatgcaacatacagcattctcatcgataatgaagagaagcaaactggcagcatctatgagcactgggatattcttccccctaagcaaatcaaggacccagaggctaagaagcctgaggactgggatgacaaggaatacattcctgaccctgaggacaagaagccagggctatgatgatattcccaaggaaattcctgaccctgatgctaagaagcctgaggactgggatgacgaggaagatggtgaatggactgcccctaccattcccaacccagaatacaaaggaccatggaaacaaaagaaaatcaagaaccctaactaccagggtaaatggaaggcacctatgattgacaacccagatttcaaggatgatccgtacatttatgcatttgacagcctgaaatacattggcattgagctgtggcaggttaaatcaggcactttgtttgacaacatcatcatcactgatgatcctgcgttggccaagacttttgcagaggagacatggggcaagcacaaggaggcagagaagactgctttcgatgaggctgagaaaaagaaggaagaagaggaagccgccaagggtggcgatgatgacgatgatgacctagaggatgaggcagacgatgacaaggcagacgatgacaaggccgactctgatgccgaggatgacaaggactctgaggagcacgacgagctctagatgatgagtatgatagaggtggccactgacattggtgccgttggcctggatttatcagctcttccattttgttctccttttctgttatcagaaactttaggacattgttaagaagctgagggacagtatgggtcgtagcgcttagtcatttttcccattaaaatcgatagcactgcaggaagatcttttcccacaattgttatatttcatcctgatgttagatgtcagctgtgttagtttattgagaactgtttaattagtcaaaaaagaagaataatacaagcatttggttctattttctcctaaaaaatt

SEQ ID NO: 28705 - DNA, 1994 bp, Zea Mays
ggttttgcaatcggcgtccgcagacgcacggccctttccttgccactgctggtccccgtcatcggcgtggcgcctatctctactactattatgtgagcactgtaggcgtccacttcgcacggtgcacgttctgcctctcccctcatgcccacggacgaacgctccgcgaagccacagccgccattcccgccgccccgccgcgcattccatcctcagcccgcggcagagtcctctgttcccagcagcgcctcgccccgccccgcatcactcccggccgcgcatcactcccgcagcgccccgccccgccggcgcatcactcccggccgccaagcccgcttcccgaggccgccaaggtttccatcccgccgctcgctcaagggttccatcccgcggccgcatccagcgcattccatcgcgcaatcaccgctcgctcaaggcactcgctcgcactaaatcctttcgctctcagatcctgcccctcgctcgccgcccaatcaatagctcagacgttgcctcggttgtcctgcaagtttgtggaccccgacaacgtcgtttcctccgctctagtggcgcgtcgcgtgcggtcagacacgatgagttgcggcagcgatgtgtgccgggacagctgcagtagtagcggcagcgaggagttcaggcggtcgtggcccagcaaagtcaccgctgatgattcagtggcgcctgcccggagctcggatgtcgcagcgccggcatcgtggattgataggaagctgcttgttgatccaaagatgatgttcgtttgggacaagattggggagggagctcatggcaaggtctacaaggggaagtaaagatgtatttgagacgtgcatacccgtgcttattttttcacatgtctttgctccaagccacagctactttatcaactgggctgattttgaagtatctgctttagttgtctcgaattaaatgtgtgttatgcaccagacccttgcaaaaaatggctattagtatgctttaaattaattagtttctcagggtgcccaaatcctccatctgttatagtatcaagcagattcatgcctggtactcacttcaagcttccaaagttccaatattttgttgagattttagcaggcaggaggatgttttttgtcaaaacattagctatgagctgtgcgatccttgagaaccttggaggaaatgttagtcgtgatggcagtacagagtatacctccaataatctcctctctagagaaatattaatatgtcatagatgactgttggtaacatcacaagttcagatgtcattgtcttcacatgaggaagcttgtgccataatactttgtatttttttctattcttattcaccagtttctatcatttgccctttagaacatttaagtcatatctgtaatcctgtttttcttgtatgcttcaaataggtacggtgatcaaattgtagcgataaaggttcttaaccgtggcagtatccctgaagaaaaacaacacttgaaggctgtttcatccgaagtaaatatgatgtgtaaagtgaaacatgagaatcttgtcaagatacttccggtttattggagcttgcaaagaaccattgatggtgatcgttagtgagctactgccaggaatgtcactgaaaagttacctgcatagcatccggtctagccaactaaatacacacactgcaataagctatgtagtggacatagctcatgcactggactatttacatgccaatggcataatacatagcgacctgaaacctggtaaggatgcttaagctaattgacttttggcattctacgctttgatcctttagcacgagcaccttaagtatgagtttacaatctgaacagttagtgtttacatgtattttatttttatgcaatatttatacttgttttgtatgtgtttattccgataaacatccgagggacgcaatatcttgtcgtttgatcaaattgtagcgataaatgttttcctcacggttccgttgcaac

SEQ ID NO: 28706 - DNA, 1069 bp, Zea Mays
tagcattatgccttgtgctcgtgctcatgtacagttgcctcaaattgtaaccccatggggcctagaccttcagatttatttgggcggtatacttggaaaatcgaaaacttttcaaaggagaagaagagagaaatgaaaagtgaaccgtttgaagctggtggctacaagtggtatattctagtttaccctcaaggatgcgatgtctccaatcacttgtcattgtttctttgcgttgctaatcatgaggaacttctcccaggatggggccattttgcccagtttactatagctgtgggcaatcttgatccaaagaaagttaaatattcagacacgctgcacaaattttggaagaaggaacatgattggggatggaaaaagtttatggagctatcaaagattcaagatggttttcttgttgatgatgttcttgaaatcatagctcaagttcaagttatcagagagaaagcagacagaccatttcgctgccttgatcgcccttatcgtcgagaacttctccgtgtctacatgacaaacatagagcaaatttaccgacgttttgttgaagaacgcagaaggaaacttatcaggcttattgaagacaaaatgaggtggtccagtttccgtgctttctggcttgcgattgacccaacaaccaaacatcgcatgtccagagagaagagtgacatcatattgaaaatggtggtgaagaatttttttgtcgagaaagacgtgacctcaacattagttatggatgctctatatacaggtttgaaggctcttgaggcctgtagcaatggcaagaaaggaatggtaacttcaattgacttggaggagctatcagcttctatggtccatgtcgatatggacatgtttgttttggctggtgacttcataactttgattgagagggcagctttagagcccttgtcttgtcaatctctgtcaccaaaaggtgacaaatgttcccaaacccgtgctaaggatggtggtactggagaaattaacaaagttcctattgagcttcaagaaaggcgtcttacggagcttggtcagaagatactgaaatatt

SEQ ID NO: 28707 - DNA, 2749 bp, Zea Mays
cggctcccgcacgctataaactgtagctgccgcggcgcctgcttctccccgatgcgtcaaacacttgacctgcacacggacagcggcggtggcgtcccgatcctgtccacccacccatctaatgcggccgcgaggaggatccacctgattctgctgctcctgctcctccttctagtgagttctattcccgtccccctccctacccgctgcgcgctgctaggatcttcgcctgcgaaaattttcggttcagtcgtcaggaggtgagcttccaggaggtcattgcttgttttgcctgctattgggtttccgtttagtgcattattgttactgctaccgcaaatccgttgccgtcgcttaaagagaacagtgttgccgtcgcgtgaagagaagcaacatgtgacagagtctgcaaacgaagttggtgtgtagtttgcacgattgtttactgtgttataatctggtgtgcttagttgcaagatgttctcgtgagagattcttcggaagtttagatgacacacacacacacacaaagtacactgtacacacccaaaaatatccgatcctgtttgcgtgtgtaaccgaccagtaggaaagcgatgggctatggcgctggacttcagagtagaaatgaatgcagaatgcccaatggctcggtggaaatggcatgcgaaagcagatcaaatcagtctgaaactctgaaaccatggctactgcctttaagtgaagaaacacttacctgataattggtttttttatatatatcaggataatggggcataagcttatgctgctgcttgtaacacctgaatattccatttttttttctcacatgtgcgttactcttaataaacctttgaattccaggcgtggacttcgtttatgctatacgcttgtctcttctcagtttctttgtcatttggttagtaacaaaccggtagcattgttatggcagtgagttactgagaagtaatagagttaccccctctatagccgggggcatgaatatcagcatgacaaaaggcaaatcaaatgctaggtgtcgtcccactcccattactgcttctctttatacttctagtcagcgtttgacatttttgctgacttgtccttgtcataacgatatccgaagatttgctgctacctttcttcaatcatatactgtcatcttcttttttttaaaagaaaggccatgccgttgtgttcatagagctgcgaaagcgccatatattatgtgggcatcatttgtaatgttttttttctgtcttattagagtagaatgttcaatgatcacgcaaattaatgtgcatagcttgagtggggcttgatacttttcaggtcgagagaccatgacacggaagtcagcagtagcggattatgtttagtggcacaaggatcattcgtgtagctgaaaggatttgccttcaatggagcttgaagctgctcctgacgataaagtattctgttcagatgatgagatgcagacgctgtggcctctgggacaagtagacccaaagagcgtgaggttcccttgctgcatcgtgtggactcctctcccagtagtttcatggctggctccctacatagggcacgtggggattgctcgggaggatggaaccgtcttggactttgcaggttcgaatttagtgagtgtggatgatctggcttatggttctgtcgccagatgcctgcagcttgacagggcaaagtgctgcttccctgccaacccggcgtcgcacgtgtgcttgaggtcccacgagcactcggatgccgggacggcgatctcgtgggacgacgcgctgcggtcggggagccggcgcttcgagcacaagtgctacaacctcttcacctgcaacagccactcgttcgtggccgactgcctcaaccggctggcttacggcggctccgttgggtggaacgtgctgaacctggccgcgctcgtctggctgcgcggccggtggctggaccccatggccgccgtccggtccttcctcccgttcgccgtcgtctcctgcgtcggcgtcctgatggccggctggtccttcctcctgggcatgaccgcgttcacgctgctcttgctcggctggttcgtgctcggcgtctactgcatgaagggcctcgtcgtctgacgcacgctggctcggagccgaacgtgtgcccagcttcttcactgagcatcggggtcatgtagtagatgaatgaaggatcgaaatcttgaaaggggtgtgagtcggaggggagagacaacgggaaaacaaaatttgagcccgtttttaatagcggaaacccaaatccagatatttataaaatcgaagtttctatttgaaacaaagtagaagtacaagataaaaggaaggagggggaaatagcacaaaaacaaaattgggctagagtcttagaaccgttggaggccgaaactcacgccctccttgctgcgaagctgtcgatctgcagaatgcagctctgttaactgacagtctcctgttacgaggcaatcagaggctttttctagactggacctcgccatatccaccatatagatataggaggtaccagaagggggtgttctatatagcaagctgtagctgaactcattggattagacatatcagggcgatcaatccaatagcatctcagtgtcctgtcatttcataaaaaaacagcttcaacgatatacaattttacatttctatcaaaaaactataaagatatatcataaaatgatctaaatatacgtacacctgaataagag

SEQ ID NO: 28708 - DNA, 1938 bp, Zea Mays
gcctaaacttcctgccagaaccgagcggagatcatctggagccgggtcccggcgattaccctgcgcggcgccaatggagcccgaggcggcggtgttggcacagctgcagctgcagctcctcgtcctcgtctctgagttccgccatctccgcgagcgggagcgcggcgcccgcgaggagctccgagacgccggccagaggtgggaggcggcggcggcggaacaacgtagggaggcccgggagctgcgcgtggaggtggcctcgcgggacgactcgctacggaggctcgaggccaggataaaatgccttgagaatgagaatgagcagctggagaaaaacgaaaacaacttgaaagaaagcatggatgtgctgcttcaatccagggaggctttcataaaacactatgaggcaggggttttagcttaggttctgaatcaaccttcaacctgtgcatggaagcaaactgacatttggctcacataccatgttcgtaggcaggactctacttgttctatgcagtggacaatccagctgaaggataaacagattgctgtaatgtcagagaaattgaattcacatcttgttttgtttagttcggtagaaaaggaagttgctgctgtgaaacaagtactaggtgatgtgcattgtctagttggtgagaaggaaaatgtagttgctgacttgaaggataaagtccaaaggatttctgtgcttgagaaagattttgtagagaatcttaatttcttggaaagcaaaatcagtgcataccagcttgaactccgtagtagggcgaggatcatatatgagttaaaaaatcgccttcaggatgagaagcttaacagcagttttcagccccatctggaagaacttaataaaactttgttggtgaaggattacgctattgatagattaacttcagagaatcaggtgattctgttgccaatgtttctgatttcaggttgccttgaagatcccaattgaatgcctatttttttgcaggcaatgcgtttggaacttcataacatggaaattgctttacagaaatttcaagatttattcagtagtattgggcatgagggaatgaatagtttttcagcaatttctgaaaatcaggacgtacaggatgtgaataatgaacaacatgaaagggttccaggtacacaatgtggtctagcaaatgagcataccttggtaactgcagttgtcaaagaagccaccacacaaaatgtagatcaccagttggaaactgatccaggcagcatgcaagtacaaagcccagtgcacttcaagtctggtgcaatgccatctccggagctagtagctgcaaatacagaaaaagctgacagccttcttgaacccaatgtagacattggcatgtttatctcctgcacgaccaacagattgtttgaatatggatcttgacacggagagtcagtcctgacaatgcaatttatatcccttcacacctggtattcggatacgtatatttaacaatctcgtagttggttgtggagcatattttattattttcttgtagttgatcaactgtcttgtgtgcgtagcctgtttagttagccactaaagagatagatcaggtagtgtaaagagcatcttggctcatctctctaccgccacaatgtccgagattcggatggcagctcagctgatgagaccgaggagaaagaaatgatagctgtcattgtctcttgggataaatctgagggctcttattggaggagatgaaaaaaacagactcttaaaaataggaggggctctcaaaagaaaaatagagagctatatttcgagggctgttgctagactggagatgctctaaggtgtatttgttttttggcttttgttctaagactgtctccaacaacgttctttatattcatcctctatatctgtcttttacagtcttctaaaagattcttttctct

SEQ ID NO: 28709 - DNA, 1226 bp, Zea Mays
ggaagatggtgaacagatagtaatatatatatataccggactgagaggtgagagccatgatttagcctggactatatacttatcagattgtgtatgggatactgatactcccaggagagagagaaaaggcatgggaaacaagcaagagaacaaaagcgatgggcacgcaggtgttaggaaagtgagaaaccatcagcagggcagcaatagttacaggcgtgtctgataaaagtcatgtgatggaccagcagcgcgcggcagcttgttcatgctgcagcgctggtagctagctgcttaaagtgagaaatactgacgacgacaacaaaagtgagtgtcccggggaacagcatgctcagcatggtgacagttcggtgtgggcactgcacaaatctactgtcagtgaatctgagagcactcatgcactcagtcccagaacaagatcagctccaggagaacatcagggtccatggcacgttgcgtgagcatcatcagtgcggcggcggccaccatctggagctgggctcttcgtcgtcctcaaggttccggctgccgatgatgatgtcgtacgcgccgcagaacgagcacttgctgcaggaacagacactgaacaacgctcgtccggctcctgagaagaggcagcgggttccgtcggcgtataacagattcatcaaggaagagattcgcaggatcaaggcgaacaaccccgacattagccacagggaagccttcagcacagcagccaagaactgggcacattatccgaacatccatttcggcttaaactccggccgagagggtggcaagaataagctcgtggacgaggctgtcgcggcggtggcggtggctccgaagaagatccaaggtttctactgatcgatgccggtcgatcgagggatcagcgctcgtcgtcatcaactggccggccgggtgtggaagaattaataataccacacaaattataaatgtactgtgatgagtaaattaaagagttatagtggggaatgaagggagagagagatatatagcaatacgtatattaccttaccttattaatgagtgcaaaaaaaacacttgtgaaggtttctactgatgcatgagtgggaagtgaagcatcatacaatcacatgaattatattactactggcatggtgggcgccatgcatggtttaaattaaccgagaagacgacttaataaatcattatttgacctaccatgttattgcaca

SEQ ID NO: 28710 - DNA, 2326 bp, Zea Mays
atgccccataaactgagtctgcactgagctactcctggctaccgcaccacgcttcacccggcgtgcactccatctctctgggacgactacggccgccgccgccgccgcccccacctacgccaggtgccgaggccttcgttggcctcttcgccggtgacgagaacctaccagacttggagcaagcctctcaacatgtcgtgggccgcaatcgagaatgatcctggtgtttttacggaactgttgcagcagatgcaactgaagggtcttcaagtaagcaatcaactatcttcactctatgagtctatgttcttgctaaaggtagatggttagctaacagtcaccccaccttttaacttatatatacagtaagatcacgagtttgttgaatttgatatatgtttacaccttaccgaagtgagcatacgatgcacctttttttgttagtggaatgaattgtaagcaattatccatacactcattagaaccatctggaaatgttttgcttgtttaatactttcattactttgtgtcagatgttgcctgatatagctcatgatgattatatgataaaacaaccttagtgagttgttaaggtccatttaaacatataaatgaccatcattttagtttagcctagctctttagggtgcctgaagccctgaaccatgtagctgcctttttacaagaccacaacagcctttatttaaaacatgctgtaatctattctaagcatactcggatagtaaaacagtggcaggtgtttccccttcatctgttgatccatgtagcttgttcttgtgcttttgaagcttttagttgtttctaataataaaactatagatagtatgcggcaacatagaacataaatttactttttccaaaacaagagtgaggctctcctattttgctatttcttcctttttgtgaaacttgacatttcttttacataataaaaaatcgggcagatatactctgttatctttttcattatcaggttgatgaactctactcacttgacctggatgctctcaatgatcttcagccaatatatgggctaatattgctatacaaatggcgacctccagaaaaggatgagggtcctgtcatcaaggatgcaatcccaaaccttttctttgccaaccagataattaacaaagcctgcgcaacccaagctatcgtttcggttctcttgaactctcctggcattacccttagtgatgagcttaaaaagctcaaggaatttgcaaaggatttgccacctgagctcaaaggactggctatagtaaactgcgcaagcattcgtatgttaaacaattcgtttgcaaggtcagaggcctctgaggagcagaaaccacctagcggggatgatgatgtataccatttcataaactacgttccagtggatggtgtcctgtacgagcttgatgggctaaaggaaggaccaataagtctagggaaatgcccaggtggtgttggtgatgcagggtggtggcttaggctagcgcagcctgtgatcaaagagcacatcgacctgttctctcagaacgagataagattcagcgtgatggcgatcttgaagaaccggaaggagatgttcacggtggagatcaaagaactccagaggaagagggagggcctcttgcagcagatgggcgatcccaacgcaagcaggcatgttgagcagtcactcgcggaggtggcagctcagatcgagtctgtgacggagaagatcataatggaggaggagaaggtgaagaagtggaaagcggagaacctgaggaggaagcataactacgtgcccttcctattcaatttcctcaagattctcgaggagaagcagcagctgaagcccctgatagagaaggcgaaggcgaagcagaagtcccacggccccagctaggtgaaaagccgcaatgcacctacgtactgtctcttttagttggggttccttgtaagattggagttcgcgtatatgctttctgtttttagtttaggacaattgcaccaatagggtgcaactgcagatttatccctgttttttagactttgcgtgtgtgcctttagattttttgaaatgaaactgctgtatgtctctattccgttaaaccgttgtatgtctctacttcggttagtcgtatttagtatttaacggtgtcaagtcttgataatacgacaagggataattatgttagtgtccctgttttagggtagaactgtatatctatccttgttttttagactttgcgtgtttgcctgtacaattattatgcttaacatgatgaggatgttatgctcttattatgttaaaaacatagttaaattgttg

SEQ ID NO: 28711 - DNA, 1052 bp, Zea Mays
ccagatcctgacatgtgggcatgagagcagttttccacctctcacacgctgcatgtgtggactagagatcgcgcgggagctgcgcatgcaatgggccccacaaggttgtttcactggtgcagatcgctcacaggtagagaacatgcagtgcggtttttctcttccttctccattttctccttgctgcaaccacacggatgcctcaacggccaaggcggcgcacggcacgccagagccgaggccacggcgggcagcgccggcgcggcaggcatgcacgggcaggcaggtgcggtagcgctcgacagtttcttccattgacgagaagcaaggggaagagaagagaaatggtgcagtcatgggggatggctcacggtggggcgagtccatcggccggggtaggcatggccgctcgccagagctagggatggggctcgttggatagcagccaaggcgtggcaaggctcgccggccaagacatgcagcggccatggcgggcctatggtgctcgcggcacggcagtgtggctcgtcatggagggcagcacatgacagcagggacggcacggcgaggctacgcagcgggacacgtacgcgggatcacgaccaagcagcacaacgctgaggaaaatgaaaatgaagaacagaggagggaactcaatggagacgaagggctcgccgaagaagaagggctcgccgacgtcgacgttacgacgtggatgcatagtgccatacaggaggcgggggcgtgtaaatatatagatgaggtggtgttgcaagcggttgtcaattttgttgtggctcgtgtcacgtcagacacgtgcgtgaaacgagcgaccatttgagaagatgaaactgacactcaggcgtgggctatagcgcatggcataagggcgcatgcggcgaggatgacacgacatgcatgaacatgtgaacagaacgcgattgttagtagacgtgcgcgcaaaagggggtagactacgggggagagagagtagacgtcgaggttagacggagctgacacgtgggtctagaatgtccgcaagaggaatgggg

SEQ ID NO: 28712 - DNA, 4032 bp, Zea Mays
tctacgcatcacgttggtcgttgggctcggtctcgtccgctcctgctcttttctccgcacccagcgccgccgcgggcgattctagggtttcgtcgccggcggcaacaacctgcctgtagcgattcgacgtaggcatccctgttcctctcctccggaggcctgtctcctcgccatctcgtcggtgtagcctgagtgtgggtccacgccctgcagacccacgacgacggcctgcagatccagtccacctccgacgacctcgacctatctgcaacttgtggacagcctgcagaaacagctcgtattggaggctacacagaaaaacctgcacccaaaagttgtaaagctcaccaagaaccttgcaggataacacaagtgctgaattttggaaatggatcatgggcgttatgctccacaacatggatgggagaacaacagtgtaattgcagttttttcctttactaactactgaagatgatgaatagcagaattttggccttgcggttggcctgtgtatccagcgttagttgtaaaggagttcaagaagaggctgttgcttaaatggattggatttacctgcctgttctgtagaatttgttgctgactcgacttattctgttgaatctacaggcaccaaatgggtatggtgtaattaatgagccagattttaggtctggtggatcctacaatgctaggagatctgtggatgaaggctttcctagagattcatatggaaggggtgcattctatcatgatacacatgatagaaatatgtatgcatcaccaccctctgccggtggaatgtggtctcagcctcgaaggaatcatgatgaggactatgcaactgcaagagaccatagaaggcatgacactgattatcgcaatgatggaaagcatcatgagtttgattcatacagaggagttgatagactccatgataattatcgtgctactgacaactattatgaatctggcagtcaccgtgattttggtgctgataggagcaaaaggattggaagcagagaacgggcggagtttcatggtgagtttgaagaccggtaccgcagttctcaccaaagcagggaggacagctatgagagagatcatgaatatggtcgttatggttatgattcggattatgaaagaggcaagagagatagtagctggagaagacgtgattcatgtgacagcgaacgtgaaaggagtggattaagtcgtgaaagagaggaaagcccgtacacgcgccatagccgttctcgatcacatgggcgcgatgaccgatcaagatcacggtctagatcaagatctcctcgtccgagaagtcatggtcggaaccaaagagatggcctgtattatgataatcgatttgacagaagaagggaatatgattgggatgatagggggcatggtgattcagtggctccatctgccactgttgttgtcaagggactgtccctgaagactaatgatgatgacctatataagattcttgctcagtggggacctctacgcagtgtgcgtgtgatcagggaacggaattctggcatgtctcgtggatttgcttttattgacttccccactgtggaagcagcccgtagaatgatggaagctacaggagagaatggtctcgaaattgatggcaggaatgtgttctttcagtacagtaaaccaaccggggggatgggtgggccttctcttggacaagaaaattttacgaggcctacttatgggcacaggactgctgctgcaccgtgtgactggatttgtactatatgcggatgtatgaattttgcccgcaggacctcctgctttcagtgcaatgaacctcgtactgaggatgctcttccagctgatgcgacaggttccgcttcacactttgggagaaggggatctgaactaggtccaactcatgttttagttgttcgtggcttggatgaaaatgctgatgaggaaatgcttcggtacgaatttgctaagcacgcaccaataaaggacatccgccttgttcgggataagtttactcatgtgtctagaggttttgccttcgttcatttccattcggtggaagatgctacgaaagctctggaagctacaaacgggattacacttgagaaaaacggtcaggttttgcgtgtagcatatgctaaaagtacacatggacctgcatcagggggttctcagtcaaacagccttgctgcagctgccattgaggctgcatcatttgctcagcagtatgatgccataggttgggctccaaaagagtacaatcctgatgacaaacagaacaacaactctgaatctcaaaaagatggcagcacagcacagtcgggatttgtttgggatgaaaaatctggttactactatgattctgcatctggattctattatgatggaactactggcctttactatgacagcaactctggagtttggtattcatatgatcaacagactcaacaatatgtcccttgtaatgaccagagcaacactaaggcagccggggaggcggccagcgaaaacacgaaaacctcagatagtaatagtggcaaaaaggttgtgatctctgcgcctgctgccacaattaaacaaagtgagaaaacttcacttcctgacgctgttcaagctgctgcaaatgctgcactggctgcagaaaagagagaaaaggagaaggcaaaagagattaaattggcctcaaaaaatagtctcatagctaataagaagatgagcaatgtcctagctatgtggaagcaaaggaatcaagaagggcaggccgcacgaattgtccttgatgacaaagaaccagcaaattctgatgataaatttagtcattcacgtagtggaactggattctctttgaaaagcaagccaaattctgaccttgaaaatgctatgggcaattctcttggccaaggaatgacatcgactcaaacattggattctgttgtaaagcctagacctgtcagtaacagcttagggactacagttatgggtgtcataagaggttctgctagaggagtgatcaagtcagatactacgtttcacgcattatctgatgctggtagcactgattcccgcaccactataaccacaagagcaagtgggttaatgacaagttctgaggcacttataactcctgcacccttcaaaactgatgtgtctgccttagtctctaatactccatcgggagtttctgggagtggtaaacgtcggttttctgaggcaccgggacaatcccagtacagggatcgagctgcagaaagacgaaatctgtatggatcatctcatggcactgatactgttggattggattcaatgagatagggtcgatgccgtttcctcctggtgtgggtgaacgttccagtggtgaaattggcaacagcgaaaactatgaagttattaccgctgatagagcaatcgatgaaagcaatgtgggcaaccgcattctacgcaacatggggtggcaggagggactgggtctcggaaaggatgccagcggtatcaaggaaccagtcctggcaaaatccgtcgacgccagggctggactgggaagtcagcagcggaagcctgatccatcccttgaagcccaagccggggacagctacaaaaccatcatccagaagaaggccatggcaagattcaaggagatgtcttagctacactgttttatctattttattgctgcattttgtagtccgtttttaacagcatgcatttttttgtttgctcgtgtgttttttaaataaactgagccgctgaattgtgatttattatcctgaaaggggcactacatagttcgagacctggatgctttggttcccttgtgtgttagttttcatttgcacgacctatgtgcccgggtgttcataagttgatttgccacaatgtggtcgtagagtctcaacatcaggtcatatcacatatcgtttttttaaacggtgagcatgttttctccattattactggatgaagagaaaggttcttcttggtttgagggaagggtgatttaagggattaagattctttttagaaaaatac

SEQ ID NO: 28713 - DNA, 6278 bp, Zea Mays
cacaggagtgctggaagcatttcaccctgcctccgcgaatcaacaccccaccggccaccctctcgactcgcttcaggggccaagccagtgtcgcttttgaatccgcctccgttcggttttccccaaaacgccttccttccactactgcttggcatccttggattcgtaggcagtcagatcacgcggcgcgcctcccctggtgactgacctagggctcgccgcgagcgcgcggcgatggcgtcgtccacgtccaggcgccggaggggtgggggcctcgagcgggtggcggacaactgggagcgcctcgtgcgggccgcgctcaagcgggaccgggaccacctccgcgtggggggagccccggctgccgtgggagggcagaggcttgccgacgccgtgccggcctcgctgggtcggaccaccaacatagagcagatcctgcaggccgccgacgacatcgaggtcgaggaccccaacgtcgcgcggatcctttgtgaacaagcgtacacgatggcccagaatctggatcccagcagtgaaggtagaggggttcttcagttcaagacaggtttggcatctgtaattaagcaaaaacttgctaagaaggatggggctccgatagaccgacagaatgacgttcaagtcctgtggaacttttatcttgaatacaagagtcgttgtcgggttgatgatatgcaacgtgagcaggagagactgagagagtcaggaacctttagtacagagatgggaaatagggcaatgaaaatgaagaaagtttttgctacattgagggctttgcttgatgttctggaaaatcttgttggtcagtcaccaactgatagacttcatagacaaattctggaggagataaagagaataaaaagatctgatgcagccttgagaggtgaacttatgccatacaacattgtaccccttgatacatcatcgtcagtggcaaatatttttgggtttttccctgaggtcattgctgcaacagcagcaattcagaactgtgaggacctgccacgattcccttttgatacaccccagctaagacaaaaagacattttcgaccttttgcaatatgtttttggcttccaggaagataatattcggaaccagcgtgaaaatgttgtacttatgttagccaatgctcagtcccggttaagcctgcaaattgggtcagaacccaaaattgatgagatggctgttactgatgttttttgcaaagtcctggacaactacataaaatggtgtaggtacttgggcaggcgtgttgcatggaccagccttgaagcagtaaataagaaccggaaaatcatattggttgccctctactttctgatttggggtgaagcagcgaatattcgttttctcccagaatgcatatgctatattttccacaatatggcaaaggaactcgatgggattcttgattcatctgttgctgagactgcaaagagttgcactactgagggttccacttcatttcttgagaaaataattacaccaatttatgataccatggcagcggaggctgaaaataataaagatggaaaagctgcacattctgcttggaggaattatgatgacttcaatgaatatttctggtcacgctcatgctttgagcttggttggccacctgcagagggttccaaatttttgcgcaagcctgctaagaggaaacgtacaggaaagaccaattttgttgaacatcgcacttttctgcatttgtaccgcagtttccaccgcttgtggatttttctgctattaatgttccagctcttagctattattgcctttcaccatgggaagatggacattgacaccattagaatactacttagcgctgggccagccttttttgtactaaacttcattgaatgctgcttggatgtcatactcatgtttggtgcatataagacggcaagaggttttgctatctcaagattagttattcgatttctttggttaactgcagtttcaacatttgtaacctatctctatgtgaaagtcctggaagagagagacacaaggaattcagattcgacttatttccgaatttatggtcttgttcttggtggttatgctgctgttcgaatcatgtttgcactgatggctaagatcccagcttgtcataggctctcaagtttttctgatcggtctcagtttttccaatttttcaagtggatataccaggagcgatattatgttgggcggggactttatgagagtattagtgattatgccagatacgtgatattttgggtcgtcatactggcatgcaaatttacttttgcatattttctccagattaggcctttagttgaaccaaccaatattattgtgcaactccatgatttgaagtattcctggcatgatcttgtatcaagggggaataaaaatgctttgaccattctgagcctatgggcaccagtcttagctatatacctgatggacatccacatttggtacactcttttatcagcacttgttggtggcgttatgggtgccagagatcgccttggagagattcggtcaattgaaatgcttcataaacgttttgagagctttccagaagcgtttgctaaaaacctttccgcttcaaggatacctagcagacgcattgatcgtgtaaatgaatcagaaattacaactaagacgtatgcctcaatattttccccattttggaatgaaattatcaagagcttgcgtgaagaggactatatcagcaacagggaaatggatctgcttatgatgccaagtaactgtggaaatttaatgcttgtacagtggccactgtttctattgactagcaagatcatgttggcaaatgactatgcttctgactgtaaagactcgcagtatgagctatgggatagaatatcaaaagatgaatacatggcttatgccgtcaaagaatgttactacagcactgaaaaaattcttcactctttagttgatgctgaagggcagcactgggttgtaaggcttttccgagatcttaatgacagtatagcacagggttcacttttagtgactataaatctgaagaagttgcagttagtccagtctagattgacgggcttgaccggtcttctgatacgcgatgagactgctggccgtgcagctggtgttactaaagctcttcttgagctttatgaggttgttacccatgaatttctttcacagaatctgagggaacagtttgacacgtggcaactgttgttaagagccagaaatgatggacgcctattctctaagattttgtggccaaaggatccagaaatgaaagagcaacttaagcgattacacttacttcttactgtcaaggacagtgccaccaacataccaaaaaatcttgaagctcggagaagattacaatttttcactaattctctattcatggacattccacaagcaaagcctgtatctgagatgatcccttttagtgtctttaccccatactacagtgaaacagttctttatagcatgtctgagctttgtgttgagaatgaagatggcatttctatacttttctaccttcagaaaatataccctgatgagtgggctaacttcttagaacgaattggctgtggtgaatcatcagaagatgattttaaagaaagtccaagtgacaccatggaactccggttttgggtatcttatcgtggccaaactttggccaggacagtgcgtggaatgatgtactatagaagagctttgatgttacaaagttacctggagaggagatgccttgggggtattgaagatggaaattctgcagcagaatatattgacactcaaggctatgagttatctcctgatgcacgggcccaagcagatataaaatttacttatgttgtttcttgccaaatatatggactacagaagcaaacaaaaaaacaagaggctgcagatattgctctcctactgcaaagaaatgaggctcttcgggttgctttcatacacgaagaggaaatcatatcaagggatggtaaggctacaacaagagagtattattccaagcttgtgaaggctgatgttcatggcaaagaccaagaaatatactgcattaaattgcctgggaaccccaagcttggtgaaggcaaacctgagaaccaaaaccatgccataatcttcactcgaggagatgcagttcagacgatcgatatgaatcaggataactacttggaggaagcaatgaaaatgagaaatttacttgaagaatttcataatgctcatggaaaacatggcatacggaagcccacaatcctaggtgtgagggagcatgtattcacggggagtgtctcttcgctggcgtcatttatgtcgaaacaggagactagttttgttactttggggcaacgtgttcttgcttacctcaaagttcgaatgcactatggacatcctgatgtttttgatcggatatttcacataacccgaggtggcattagcaaggcgtctcgagtgattaatataagcgaagatatatatgccgggttcaattcgactttgcgccaagggaacatcacacaccatgaatatatccaggtggggaaagggcgtgatgttggcttgaaccaaattgcactatttgaggggaaagttgctggaggcaatggtgagcaagttctcagccgagatgtgtaccgtctgggccagttatttgatttcttcaggatgctaaccttctttttcaccactgttggttattatgtctgcacgatgatgactgttctaactgtgtatatcttcttgtatggaagggtttatctggcactctctggccttgactactcaatatctcgccaagctaggtttttggggaacactgcactagatgcagctttgaatgctcaatttttggtccagattggtatttttacagcagtgccgatgataatgggtttcattctggagctggggctgatgaaggctgtttttagttttattacaatgcagctccagttctgttcggtgtttttcaccttttcgcttggaacaaggacacattactttggtagaacaatccttcatggcggtgcaaagtatcgtgctactggaagaggttttgttgttcggcacataaagtttgctgaaaattataggctctattctcgaagtcactttgtcaaagcgcttgaggttgctctcctcctgatcgtttacattgcatatggatacacaaaaggcggttcatcttcatttattctgattactatcagtagttggttcctcgttatgtcctggcttttcgcgccttacattttcaacccttctggtttcgagtggcaaaagactgttgaggactttgatgactggacaaactggttactttataaaggtggagttggtgtaaagggcgacaacagttgggaatcttggtgggatgaggagcaggcgcatatccagacattcagaggacgtattcttgagacaatcctcagccttagatttctcatgtttcagtatggcattgtgtacaagcttaaaattacagatcataatacttctcttgcagtttacggcttctcatggattgtactctttgttatggttcttcttttcaagctttttactgcaactcctaggaagtcgacagccttgccgacttttgttaggtttctgcagggcgtccttgctattgggataattgcaggaattgcccttcttatcgtgctcacatcattcactgttgctgatttatttgcaagtgcacttgcttttatagcaaccggctgctggccgtaacatggaagagggtagtgaaagtccttgggctatgggattcagtccgtgagattgcaaggatgtacgatgcaggaatgggagccatcatctttgtgcccatcgtcgtcttctcatggttccccttcgtgtcaacattccagtcacgtttcctcttcaatcaagcgtttagtcgaggtctggagatctccctcatccttgcagggaacaaggcgaatcagcagatttgaaaggccctgccgcatccatcgtatttttctgttgtatattctgggaattactgagagctgcttagttagtttgaacaatttaatgagctcgatttgaatgacaaccttctacataattgcccctgtaatttgtacactaattatgcggagaggcagctacggcagtagagatgagctgatgtatgtcgatttgatcttaaccaaacctctctttaaggctacgacggttcagtaggcctgcactagtatgttgcacccatccacagatataaaaagaaaaatattcttaatataaaataa

SEQ ID NO: 28714 - DNA, 2222 bp, Zea Mays
gttctaccactgtctcctctccgtgacgcacgcccgagatcctctccgcgacacacgcctccctctcctctgccccaccctcctccccacgccatcggcgccgccatcatcggatccggcccaagatgcctccgccccacgcgcccgagtcgtcgaggcacactccttcccgcctccgtcgtccacgcatatctccgcctcacctcggcgcccgagtcgtcgcacgcgttcgcggtggtgtccatcccggcaccggcctcacgcaccgtctacagctcccaactctgctcctctcagttctccctccgcatttcgccttctctcccttcctctccaagcagcgtcctcctcgcctagatccgtacaagcggcaaataacctctccggcggcgagacagatggagtcgacctccggcgaggatgctccgaagcacaacccgattccgtccgcgctcgtctccaacctacagtccgtgctcaccgcccgccgcttgtccgcagccgaggtcagcaccgccgccacagctagcgaggttgaggccttggcttaggaagcagaggcgttcgctgcccccacgggagatgggacgctggcgaggcccatcgtgctactgacctatgccggggggatccggtcggcgggtctcgcggcgctcgtcgacgccctcgttgccgccgaccgctgcgacgtccacgtgtgtgcccccgaatcgtacgtgctgcgacttagaaaaccaaaccacagcgggaccagtgctcggatagggtccgacgacgatgcaagcaaggagtggcgcgcggccgacggggcgcagatcggctcctgcacgtgcagcgcagccgcgtgacagtgaagcagggaggccgcgataggtggcgcagggagggtgcgacggaggcaaagtgcaagcacctggggacttcaggtaagtagaaaaccaacactgaatttgtcggttctctgttttgtgattgaccgattggtttgttgatctcagaaaattgtttcaccgttaagcaccaatttttgggtaggtcagtgttttgggatgattctcctatgcatcaatagtaaccttgtgcttggcaaagttatttgccctgataatgttgtaggtttagtgaaaagaaatatactgacatatccacctatccatcgatgcccaatggagattgacctctatcaagatttagttatgtgtctcagtagggcaatatttctgtgagttgtatactgtggattcctcatctgcatcatgaattgatcgcactatttatgccctatttttcaaaccatggtttctgtaattctttgcaccatggtatttttctcaaatgattttatctttcacaacccggactgaactcactgaagcagaaagaaagagtacaagtctactactgcagaaagcaaggagaatgccaatagaagcagatttcatgtatggatcggataaaatcttgagcaaaatgggagaaggtttgggttttctgcaatctgtcgtctcctcttctgctgggtatctccattattattctaatgaagagggctacgagttggattttcgtaggtacatttgagcgtgttttggaatgctgggatcgtgaaacacgtgaatatgttgccataaaagttgtacacagtatccacaagtactgtgatgctgcaatgattgagatagatgtgctcaatcgccttgtagaaaatgaaaaatatagatttctgctacacttggggaatcaaagaaaagtgaaagtgccatgtcaaagttgatgaccagaagcttgctattggaaccctctctattgaaaaatacccctagatagaaattgatttggttttcaataaagagtgtgagctgtcacacacatcgaaaactacacgtgtatttttctttggttacaaggttgagcaaccaatcgaggaagatgaataatggatcttgattctgaagatgaagagaaggagctaaacattccagtaatcaaggaaaatggcaaaggtgatgggaaggaggaccagagaagtgaagagaaggcagttgctgcagcttcaaaatcaagtcttgggcttgaaaaaaagcaaggatgagtatgagtctgatgattctaatgagggagaaggtgaaaccggagaatgagcagatgcggctgttcatggacaacagcatcaagaaacctgcaacatgcaacctgattttaagaaatttgccacctgcaac

SEQ ID NO: 28715 - DNA, 1370 bp, Zea Mays
gggccttaaactttgtgcagcccacgtcactttgacatagctattcgttggatcaacagcggatggggtagattagctgactgctctgttgcgtcatcgaggtggaagttagagatctgattccgccccacagcatacctctcacggtctccgttcccctgccgacgagtgggcggccgctgccgccggcttacggaagggtagcaaatcaagagctaagaatggcagattcaatggtagcaagcttctgggggcctgtgacatcaacgactgagttgtgcgaggagaattatgcacactcgtcatatatcgcagaattctacaataccatctctaatgtcccatgcgttcttttggcacttattggattagtgaatgctttctgccaaggttttgagaaacgatttagtgtcctgcacatatccaatatgatacttgctattgggagtatgattttccatgccaccttgcaacttctcctacaacagagtgatgagactcctatggtttgggagatccttctctacatgtatgtcctctattcaccggactggcactacaggagcacaatgccaactttcctgttcctgtatggtgctgcctttgccgtagtacatttctttgcccggttccaagtcgtattcaagctgcattacgttggcctctgcttgctctgcatcccccggatgtacaagtactacatacagacgaaagacgtgggtgcgaagcggctcgcaaaactgtgggtccttacactgacccttgggaccctctgctggctggttgatcgcgtcttctgcaagaagctttcgcattggtacgtcaacccgcaggggcacgcgtggtggcacgtgcttatgggcctcaactcgtactatgcaaacacgttcctgatgttctgccgggctcagcagcgcgggtgggagccgcggatcacgcacctccttggattcttgccgtatgtcaaggtccagaaaccagagaagagggaatgatttctgtctctgcttgaaaactgatgatattcagtcggccaccagtaagctaatgcccccaatgtgtgctcagacaagtccgtggcactcttgtatatgggcgcccaaatgattacggacttcaaatgttctgatgtcgcattagattttgtatcatacttaaatcatcgaacagagattgtcctagttttggccacctttcttttggtttcttcgcaattaccgtttggtggtaaattaggactgagttatttatttatttgtttgtcgttgaatggagtccagttgtactagttaccactgcacaagaagatacattcatccacatgatgacatgttaattatttggcttgtgttgctgccaatagacaactc

SEQ ID NO: 28716 - DNA, 2381 bp, Zea Mays
ctccacgaaccacatcaaaactgatcaactctctccctctgcttcccgctagagcaaacgccacgagagtcgcgattcttccaccacttccacgggaccggtcggatccaatctgctgccgcccagccaccgccaccgccgccaccgccggctcctctataggggtcttccctcctcttcgcccttcgcaacccgcaagttccgagcgattgatgagtatttttctccccgtcccttggagcgactcggtggatgcgagggacctgtccgcgctcgacccgccttcgcccctatctcgccgcccggcgggcaggctcctgctctcgccttccgttcccggagctagccgcaggcccatgggctagtgggtcgtcgttcgccctcctgcgatcgcgagcggagaggcggcctgcgggatccgcccgtctccaatccaaataactcctctccttggacgatttcggagttactggcctgcctgaaaatcgattcctgctaacgccagtattgtgcttttcagtaacaagagtgtacagttgttgcttcttgggatgtgaatcctgtcttgggtggggatccagctcacgctagatttccccccttttgcctttcactttttcactcgggagggaaaggttgggttcctgggtaattaacatccaatcgctctgcttgattctaccttatcttctaatcactatttccgtgctcttaatgcaagtggtgggaaggcaaagtaaatattgtattgccggttttggggacatattcttggggatattccggtctgtgcaaacatatctcttgcccttagtttagtttgatgctcatatcagtattcagtactggtggggagtgcacatatcacaaatcctgattatcctcggccgttggggagatgagttcctcacaagaatccaccttcacctcggcctcagcggctgcacaagttaatgcttccgctttggacttgctcccggtctatgccaaggagcttatcgccggcggcgctgctggtgcatttgcaaagactgcggtagcaccactggagagggtcaagatcttattgcagacaagaactgaaggtttccagtccctcgggatcctccagtccttgaggaagctgtggcaatacgagggaattcgaggcttctacaaagggaacggtgcaagcgtgcttcggattgttccatatgcagcattgcattacatgacatatgagcagtataggtgctggatattgaataattctgcttcatcaataggtacagggcctgtcgttgatcttttagctggctctgctgctggtggtactgcagttttgtgtacatacccattagacttggctaggaccaagctggcataccaggtactgtctacaatgatcagtgaggcatattttttttattttgtttctttgattgtagtgaagagtctcgatcaatagatgtattgctgaaacaactctctgagcaaatatatgttgtttacatcatgtcggcttttgatatatggaattaccaatgattggctcacgactgttaacactaattttatcatggttgctccaaggtttcaaatgttggccaaactggtaatgctttgggaaattctggtcaacaacaaacgtataatggcataaaagatgttttcaagactgtttacaaggaaggaggtgcacgatctttgtatcgtggagtaggcccaactcttattggtattcttccatatgctggcttgaagttttacatatatgaagatctgaaatctcaagttccagacgattacaaggattctgttatactgaagctctcttgtggagctttagctggtctatttggacaaaccctcacttatccactggatgttgtccggagacaaatgcaggttcagagcaagcagtctcaaaattcgagcgatggcttccgtataagaggaacttttcagggtctcttgctcatcattcggtgccaagggtggagacaactctttgctggcttgagccttaactatgtcaaggttgtcccttcagtagctatcggtttcacaacatacgacatgatgaaggcattgcttggagttcctccccgagagagagtccatgcgtcaggtggtaacaagtgaagcaatgttggccatccttgtgttatgactgatgaactaaagaaattctaggttgtgagttgtgacattgttattcttgttatgaatcccattgcatagggtggagagtgttgtatattggtcaaatagctatattcatgtaacattaagttgagatgcttgtatcatccattatgctgcttgtaatgtaaccatgaatacaatgacgcccctaaagatcactttaaattaactataaaagattagtattaccctta

SEQ ID NO: 28717 - DNA, 2175 bp, Zea Mays
cgtacaaattctcagtatactcaaagtattggacgcccagcccagcccaccagaagaggacaaaccagattcgattcctcctcctgtcctccatctccccaattcgcacggccatcggaccatggattccggcgtgcctgcctctgcgcctgcccctcccaaacacaagacatgccggaagtgcaaggcgagctatgacccctcggccaacacgcgcctctcctgcaggttccacccttccttcttcgtctgccgccgccacgacgaccagaagaggtactacgagctccgcgacggcgatcctccctacgccgccaagttctacgactgctgcggcgccgaggaccccgacgctccgggctgcaccactgacttgcaccgttcctacgacgacgcccaagactagcaaacctttgctgcttccacaggcctcatcttaatctcaagtctcatctaccgtttcgcttttgcatcccctccttatcctctctagtcagctatcaaattaaaccatctatgtacacttaaataaattttgcttcagatatgttacctactggagctttttttttcctttttttttgcaattgatcaaacatatctctcttcatctatacaccgtctgtttggttggcttgcctctcaggatgctttaagtatcatacgagtctgactccacatctgcacgtaggtaaccaaacacacacctcgcacacgtaaagcctggaaccaaacacatgaatactaaactggaacataaggcgccccctatctgaactcccaaaaaaagccagcaattcataaaagtttatgtcatacaaactttgattcagtaattctgattcattgtaataacatcgatcttgtttggaataaacatttcactgggatatagaatatccaaatgtaaatagtttctgtccatgcatatcccacacctgtttttataaaaaaaaaatcaggccgtcagtattctctttcagttcttcattcaaatgataattcagggacttcaagggaaggtggtgcatcacttttaacagcaagggcacgtgggtatagatctgatcggcgcgatttttttctttctttctttccggacagcggcaccgcaccgggagggcgtcctcgccgacgtgccgccgtccaacaagctggtcttcatcctggcggggcagtccaacatggccggccgcggcggggtggtggcgaaccgctgggacggcgtggtgccgggcgactgcgcgccgtcccccgcggtgctgcgtctctcgcccgacctgcgctgggaggaggcgcgggagccgctgcacgccggcatcgacgccgccaaccacgccgtcggggtgggccccgggatggcgttcgccaacgcgctgctgcgctcgggccgcgcggggggcgccgtggtagggctcgtcccctgcgccgtgggaggcacgcggatggcagagtggggcaggggcaccgagctctacgccgagatgctgcgccgggccagggtcgccgtcgagacggggggccgcatcggtgcgctgttgtggtaccagggggagagtgacaccgtccgctggtccgacgccaccgagtacggccgccggatggggatgctcgtccgtgatctccgcgccgatcttggcatcccgcacctcctcgtcatccaggtcgggttagcatcgggcctaggacagtatactcaagtcgtgagagacgctcagaaagggatcaaacttcgcaacgtcagattcgttgatgcgatggggttgccattgcaagacggccatctgcatctaagcacccaagctcaagtccagcttgggcgtatgttggctcagtcctatctaaattatggacatgcacactctccaacccctaaaccatggtggctgcaaatcgttttggtattttgcttcatttttgtttgaaacggagcatgcaaatcgttcaggtgagcagaagaagaagaagaaacccaaatgagtttaacataggcatccaggacttattctgtcaatcaataagtctcattgtctgactagttgtaatgtaaaaggagaacacagagagtagtcgacagtcttgataagcatttgaaatttgcctaactttggagttggtcagaattcaatcagatagatatacatatggaatctcttttagaggggcattgctacc

SEQ ID NO: 28718 - DNA, 3744 bp, Zea Mays
atcacacctgctgtttttcttctccagttcacctcgcgcgcgtgacaactagggagcccgccgccgcccaggtcttcgtcgaaccctttgccggcaacgagaacccgccacgccagtttcagcagctccgtaattgtggcgatggttgctcctacgggatcttgaattcttgacacacacacacaccgatggtaatggtgatggagggaggaaggacggaaggcgacgagctgattgctgattatgtggattgccttatgtctctggacaccaacacccggcctgtccacagcgatggtctcatcctcggtgctccaggcgggggaggagggacggtcgatgccggaactgagccagatgccatgagagatatcccctcatccgaggaccccaatgagcccgtgctcggcatgacgtttgagtccgatgaggccgccaaggcattctacaacgactatgccaggcggcttggcttccccttccgcgtcggcaggtctcggcggtcgaagggcacagaggaggttgtcgtcatgaagaggttcgtttgctccagggaaggggtgtacaagaagaaacagacctcgccggatgaggcggcaaggaagcgtgagaggatgtctatgcgagagggttgcaatgctatgatggaggtggttagggaggcggaccattgggttgtctccaaacttgagaaggctcacaaccatgagctcggcacttgtagcgccaaggttgggtaccttcgtgcgagaagttctcttggtggctctgataaggccacaatggtggggcctgacgagatggcgtttcttaggcagaatgtcctgggggaaggaggagacgcccagggccttcttgattatctcaagaagatgcaagccaatgacccggcgttctgccatgctatacaggttgacaagaatggctgtgtggtgaatgttttctgggctgatgctagggccaaagcagcttatcggcatttcggggatgctataacgttcgacacgacgtacaagaagaacaagcatatgatgccctttgttactttctcgggagtcaaccatcatctgcagactgttatttttggatgtgcattgcttatggaagagactgagttctcgtttatatggctatttgaaacatggttagcggcaatgggaggtaaggcaccatgctcattggtcactgaccaaaacagggccatgaaggctgcaattgggaaggtttttccgaattcctgtcaccgtttctgtaagtggagtattctgagtagaaccaagcaaaagctgacccatacatactcagagcatccaaccctaagagatgagcttgagagctgtgtgcttgagactgaaaccatctcgacattcgaaaccacttggatgtcaatcattgatagatatgacttgagaaagaattcatggcttcaagcaatatacaatatccgccaaaaatgggttcctttgtacctgatggatacattctttgcagaaacgttccccacatggaaattggaaaccatgaatgatttctataagaaatatttcaatacaaaaacaacgcttgaagtttttcttaatcagttcgatttgagcttggcaggccgatatgaggatgaggcaaaagcagatatggatgcctacttaaataaggcaactacaaaaactgcatcgctaatagaaaaacaggcagcagggacctataccaaagcagtcttcagtaggtttcaggaggaatttacagagtctctagggtttatcattcagaaaaccgaagacggctgcataagtaaatacagcatcacaaaatatgaagatccatcagacacattctgcgtgacttataatgcttccaataagatggcaaactgtagttgcaagtactttgaattctccggtattctgtgccgccatattcttggagtatacataatagttgatccacgaacacttccaactgaatattttatgaaacgttggacaaggaaggcaagagatgatgatgctttgttagaagataataacaacaatactcatgatgaggatgcttctcagtccaccacaagccgctacaataccctatgtgctgatgccatcagatgtgctgagaaaggagctggatcggaggcagtatataaggcagcaaaagatatcttacagaaggcatatgaagagattattgcttatgaaagaaatactggccagggatctcaaagggatgttataaacatcaacgaggatgtcacgattgatgatgcaatgaatgataaatctatgccagattctggacgaaaggtgactaatctactaggccaatttgttaattccacttggtctccggtctaatccacgtttttgtcatctctttggagatgaaaatgtgatttagcagcattagcagctgtcatgatcgtcatgcaatatctattttggattgggtagcagcgaacaactcaacaacacttggacatttcaacatgaaatgatctccatgagaagaatgtccgcctgacttcagtagaccaggacaatttagtttgaagatgctggatcatttctgtgatgattaagtctttgtcacttcaataagcgtcctgtatggtgttgcctgtagccctgtatggccgaagctactaaaggtaattagggtttgataaagttaaagcaaccgagtcccaaacttttgatcttgattcgtgcaaacggggacgatgcaacacattttcaaggtattctggacctttatgaagcatgctctgggcaggtcatcaacaaagacaagtcttctgttcactaaaaatacgagaagtgagacgaagatggcggtcatgcaagctctaaatttaacacaagggactttcaacgacagatatctgggcttaccagttcgctttgggcagtccaggacaaaaacttcttagtacttaaatgataatgtgacaacgtattcaaggttggaaagaaaagctgctgtcaaaagccagtaaataagtgctgataaaggccgtagcacaaggaattccaacatatgctatgggatgctttgacttaaggaagacttgtctgctcaaatcagcaatgccatattcagatattggtggagtcaacaggacatgggaaacaaagtgcattgggtgaattgggctaaaatgaaaacgctaagggcttgttcgtttcacggttagtccatgtggattggttagtccatgtggattgggtggtattgagtcggtttaaatccataacaaatcaaaatccattccaatacacttcagtccacatgaaactggaataatcgaacaaggtctaaagagttgtgatggaatggagtttagagatatcgtagtatgttcttttataaacttagtcaaaactaaacaagttcaacttcaacttataatgaaattaaatagacgaataagtacattgctaatgctggtcttcagagagtgcgatggtttgtttcatatgattcactatgatgcttgtatcatatataattaattcatgttccgcattcagtgacagattattgggatgatgccacaaactcctaatttctgttacaccggatacttctgttcccatttgtttgctgaaagacagcttgccccggttgcaattaagttcattgctttaaatctgcagaactgagggtactgtacaaaacgaggacgatgtagctgcccagttcttcgaggacgctgatttcttgtttaacgccgatgcctccattaatccgcat

SEQ ID NO: 28719 - DNA, 2857 bp, Zea Mays
aaaccctaacaccgtccactcccgtcggccaccagccacctccatttcaaatacagtttccaccttcctcctccgcctcccacccctcgctgtctccggcgagacccggaaatggatctcgtcgcctccccctccaggtcaaaatccaagcccagatcctcgccagcgaagcccgtcgccgcccccgctgagtccaggatggacctctgcaccccgtccaagcccacgcccaggcggaagtccaaaacgacggcctcgccggcgccgatgtctccggcgacgccatccaccgtccgacgctcgcgtcgccttcttgaaacccccaccaaagcctccccggaggtgcaagtgaaggctacgcccatctccagggctaagcgcaccgcgccgtcaccgaaaacccctgttcagcgcgagaccaagaggcagaggcgacacccgaggaagagggcatactaccggaaggtggtgtatgatggcggggagttcgaggtcggcgatgacgtgtacgtgaagaggcgggagacggcggagtctgacgcggaggaccccgaggaggaggagtgccgcgtatgcttccgcactggcggcggggttatggtggagtgcgacgcgtgcctcggcggattccacctgcgatgcgtgcgaccgccgcttcggagggtgcctgaaggtgattgggcgtgcccttactgcgaggccgagcgcgccggtaaggtggtcgagcggcccaggccgcctgaggggaagcgcgtcgtgaggaccgccaaggaaaaactcctttccagcgacctgtgggctgcacgcatcgagagtttatggagggagcctgatgggacgttctgggcaaaggtcaggtggtacattatccctgaagagactgcagcaggaaggcagctgcataacttgagaagagagctgtatcgtaccaatgatcttgcagacattgagatggaaacaatccttagacattgttctataatgtgccccaaagactttagggatgctaacaacggaggggatgatgtattttattgtgaatatgagtatgatatacattggcataattttaagcgtttggcagatattgatgatgagccagagacaaaggaagatctcagtgacgagccctacaatgctggtgatgattataacagtgacactgatgaagattcagactatgacgaggaggaagaatccacatcatctttctctgtcagaaggaatcaatcacatgaatctgcggcgaattcaaggaaaggtagaatatatggcctgcaaaaaattgggatacaaaaaattcctgagcatgctcggtgccaccaaaagactgagctggagaaggctaaagcaaccctgttattggcaactcttcctaagtcattgccttgcagagataaagaaatggatgagatatcaatatttgtaaaggatgcaatctgcaacaaccaatgcctaggacgctgcctttatatacatggtgtacctggcactggcaagactatgagtgtacttgctgttatgaggaggctgagatctgaatttgattctggaactctgaggccatattgttttatcgaaattaatggtcttaaattagcatctccagagaatatctacaaggtggtactaaaattggaaagcaagcaaaccagccaattgttttgctgatcgatgaacttgatcttcttatgacaagaaaccaatcggtgttgtataacattcttgactggcctaccaaaccaaattcaaatctagttgttataggtatagcaaacacaatggatcttccagaaaagttattgcctcgtatatcaagtcggatgggtatccaacgactgtgttttggtccatacaattatagacaactgcaggaaattataacaagccgtttaaagggtattgatgcctttgaggaacaggctattgaatttgcttctagaaaggtagctgctatgtcaggtgatgctaggcgagctttagagatttgtagacgggcagcagagtttgcagactaccgtgtcaaacagtctcgacagtctgcacagactactgtttctgcaaagaaaggtgatgctgttgtttccatgggtgacatagaagctgctattcaggaagtcttccaggcacctcatattcaagtgatgaagaattgcccaaagtttggaaaagttatactggttgccatggttcatgagctgtacaaaagtggactaggtgaaataatgtttgataagttagcaacaacagttttctcctggtgccatgccaacagagaactattgcctggatacgacactctcttgaaaatttgttgcaagcttggtgaaagcaagatcatcctctgtgaagagggtagtaagcacaagttgcagaaggttcagcttaactatccaagtgacgatgtgacatttgccctcaaggaatccccagatcttccttggctatccaagtacttgtgaggttcatattacattaaccattaattcctggcgttctgttgcatttctgttctctttggaagcaacgattcactttacctgcagaccttgcatacacacgtcccatggtcgatctgcaaaggaaccatcgaaggatgtcggcatggcgctgcacccaagggatcacgcatatttaatcgcacaacaggaacataaaacgttaagaaatatgtacgtctgcaatttcgtctccttcaaactatggtgttgtttgtgttgtattgaactgccgcgtgtgagctgatccaattgttttctattgccatctttcagtaactatatacgaattgttcgttaaacattgacagttttgaataagaaacattgagatatcaaatttgtactttgccggcccc

SEQ ID NO: 28720 - DNA, 1514 bp, Zea Mays
ggcgccgtcaagaaaaaaaaaacagaggaaagaaaaaaccgtcagagcgacgttagtcggctcagctgtagtgtagttgcaggtgttcgccggcacacgcgcgtggccgcgaaccctagatgacaccggcgaacggcgccccagcgcgggcagcggaggcgggcccccacgaggtggagtcggaggccgacgcgttccggcgccaggtcgacgacctcgtctcgaagaccgacgtgctggagcggcgggtgaaagaggtggcggacttctacgatggcaaaaagcacggaagcggcgggaggaagggtggtggtggtggcaggtatggggcatcctcgaggggaatgccggaccttatgcgccagttcggcgtgcttttgaaagagatcacctctcataaagatgcatggccatttctggagccggtggatgttgtaactctacagcttcctgactatcacaacattattacccaacctatggacttctctaccatccaaaagaaaatggaaaggaaggatggtacttgttacaccaatgttagagaaatatgttctgatgttcgattaatttttgccaatgcgatgaagtacaatgatgatcaaaatgtcatccacttgatggctaaatcattgcttgagaaatttgaagagaagtggctccattttcttcctaaagttgagagtgaggaaaaaagacaaaaggaggaggaatcaaagggtgttgcagccacaaatacttctcgagaagttgcaatcgtaaaattagcaaaagacactgatgatgagatcaacaagaagctggaggagctccggaaaatggtggttcacagatgcaggaaaatgacgacagacgagaagaggaagctgggtgcaggtatctgtcacttgtctccagatgatcttagcaaggcgctagagattgtcgcacaagacaatcctagcttccagactaaagcagaagaagtggatcttgatatggatgcccagagcgagacaactctatggaggctgaaattctttgtgagggaagcgctggaacgacaggccaacgttgcctctgggaagatggacgaaaacgccaagagaaagagggagatatgcaatgctctggccaaaaccacctcgagacggatcaagaagcagccctagccatcttccatatctttcactcgcgtcctctgattgtttagaagttctttttttgatactagccaccagctttgtgaaacgttttcctgcattttttttgtgatgtgtatatagtagtatagtgaactgtccagtccagtaacaagtgatttcgtgtgtaaccatgagctggtcgcattcgcgtcccctctgatccaacaacaaacattgtctcacaatgtgattgattgtagaagcaagcttttgtcacagggcgatgttgctcacttgtggaatcagatgatgcatacatttcgtaactgttcattcattctccaccttggcttgaaaattaaggtgagaaggcctgcggatttacatgtt

SEQ ID NO: 28721 - DNA, 2241 bp, Zea Mays
ttctaactcagtgcctaaatgttaccaccaaaacatcgccaatggatttatgaaaggtccagaaatacgtggaaggtctttgttgggttatgagatactactatcaaggtgtttgttcatggcagtggttttatccctatcattatgcgcctttcgcatctgatctaaaaggcttggctgaattggaaataaccttttttttgggtcaacctttcaagccatttgatcaactaatgggaaccctaccagctgcaagctccaatgcactgccaaaatactatggggatttgatgagtgatccagattcaccgttgaagtctttctacccaaaagattttgagatagacatgaatgggaaacgttttgcatggcagggtgttgcaaaattgccttttattgatgaaaggcgtctgcttgcggaaacaagaaaacttgaagatactttgacagaagaagagaaattcaggaataggactatgcttgacataatttacgttagagatactcatccattgatcactcagattatcttcctgtatcagaactattaccatctatcaagaacagacccttatgttattcccattgagcctgctgctagtggtggaatgaatggattcctatgtttatctgaaaggaactggtatagtgtcactgtcacttctccagttaaggggttcaatggcattgctcagaacagagttttgaatgctgcctatctcaatcctcagtatcacaaacacatcccagagcctccagcgggggtcatcatacctgcgaagatactgaagcctagtgatttcaaaccctttcctgtgttgtggcatcaagataatagtcgtcgacaagtaagagaaaggcctcaggtttctggagccctgtccggttctctcttaggagaagctgcacaccgactggtgaaaaactccctccagatcagatctggcaatgctgctgggttactttatatgccatacagaggtgcaccctatggccctggaaacagaccaaggcctgctgggccattggggtatgagaggggttttgtggataatccataccatgcacacatgtctagaagtgttccaaaccctcacgctcaattctttggtgattctcaagctaacagacagcccatgcggatactagaacggccagactcccgaagtcatgatgctggtatccgtgcatcaatgtctaaactgacaatccaagaagggccaaggcctcatcaaaataacaggatgcagaattccgggtactggcccaatcaaccacatcctactcactttactggacccccagcccagcggcctatgcagaacatcagttttacacctcagcgacctttccaaaccgggggatttccgcagcagagacctgtaaatggggctccaccaccattacctcccagtaactggattggtaagcaaccaagtggatgccacatgagtgtatcacctgcaaaactcgatccaaggacagctccagacagacagcccaagcaggataacccaagatctcaacaggataagaggcagcaggcgaccaaggtataccgtgtcaaaactcaagctactaatgttaatggtttgtcagagccaggtaaacaggaagaacctgaagggtaactgggttgctgcaaatccacacgccaagtttaatgtgcgtggagagaatacgctggctcttggtgatagcagcagagggtttccatgtatccctcccacaatttacctttcgatgttgaattgtttgttgtattacccggaaaggagtcggctaaattttaggtcaggggatttagacacagcttttgtttagttgataggacatggtatgggcattcactgcttgttgtaaagctgttagttggatagctgaaactgttttgtgctggctgactgctgcatattcaacatagacccgtgcggaggctggctcaactgccctgctcctgctctatctcatggaagttgggggcagatgtgcttgtggtcttcaaactgagcagtttgtgtctctgagaaaggaggaagcattccgaatttttcattgtaccgttgaaccaagttgagtctttaacactgaaaagaacatgttcctctcgagcttaacgagtgccataattaggacatggaataatatatatatttttcttttctgggatgcaaacatggtgttcaaattcccattacgcactgtttgaattcgattttaataataataatttaggcaaag

SEQ ID NO: 28722 - DNA, 5875 bp, Zea Mays
ctcacatcctatatcctctccagtctccaccctcgcggcgcgccccctcaagttctcattccttctcctcgctcgctcgcctcctcctctcctctcctctcctctgcggtgggaactgcggcggcggcttaaaccctcgcgccggcggcttccggcgctccatcagcgccgcgctcgaaggccgcccgtcgctggtcgagcgcgcgaggcagcaggcaccggctaggcaggcagccaataatggcccccaaggccgggcgtggcaagggcaggggcggcggcggcagaggcggcgacaggaggaagaaggaagagaaagtggtgcccagcgtggtggacgtcacggtcgtcaccccctacgaatcccaggtgacactcaaggggatatcgacggaccgtgtgctggacgtgcggaggctgctggggtcgaacgtggaaacgtgccacctgacaaactattcactctcccatgtggcgcgcgggcaccggctggaggacggcgtggaggtcgtggcgctcaagccctgcgctctccggatcgtcgaagaggagtacgcgacggcggagcaggcggaggcgcacgtgcgccgcctgctggacatcctcgcctgcaccaccgcgttcgccaagccccgggacggcgccgccaagcacaggccgtccaagcacggccgtcccgcgtcgcccggggcccatggcgccgtcagcggcgaggccgccgcgccgccgccgatatcggaggcgcacgacatggccgccatccggccgccgccgaagctgggggagttctacgacttcctctccttcgcgcatctcaccccgcccgtccaccttatcaggaggaaggaggcgagcggcgcttctcgggaaggcgtctacttcgaaatcgaggtgaaggtttgcaacgggaagcttctgcacgtagttgcttcacgaaagggtttctacttggcagggaagccacaaaacgcatatgaggcgttgatgaaagcttttgtggaccacaataagtttgggaatttgccatatgggttccgtgcaaacacgtggcttattcctccaatatatgttgatcccgccacaaagtgcccagcactgccagttgaggatgagaattggggtggaaatgggggtggctgtggtcgtgatggaagatatgatcgcagatgctggtcaaaagagttctctgttctgtctagaatgccatgcaaatctgacgaagaacgggtgatcagagaccggaaagcttttcttttacacaatctgtttgtagatacagcaatttttagagctgcatcaacaatacggcgactcattgatcagtctatgaactcaattggttcccgtggtactactcatggttcaaacgtatttgaggaacatatcggcgacatgaatataactgtgaagaaagatgaggctgatgctagttcaaaggtggacgacaaggttgatggtgttgccttctgtaaaacaggtgctatggatattgcacaaaagaatcttctgaaaggtttaacttctgatgaaaatgttcttattaaggattcttccacactcggagtggtgattgtcaagcattgtggatatacagcaactgtgaaggtttctggacgtgcaaaggacagtaatgatgttaaacaaacacatgacgtctctgataattttgatggaatgctgaacattgatgtgcctgaccatccagatggaggttctaatgccttgaatgtcaacagtctaaggataccactccaaagtgttacgcatccagaaactgttgttggtaagcagaaccctagcccaaagtctcatgcttataaccccgcaaggaaactggcatgcaaaatacttgaggacagcttggtaaagcttgatagcatgcctagcataaattctagaattatcagatgggaacttgggtcctcctggctacaacagttacagaaaaaggattctccggcatctgagaatgttaagcggaatgcaacaaaggctgataaagaatcagctgtcaaaggtcttggaaagcattttgaacaattaaagaaaattaaaaagaaagaatgcaacattgacggttccagttctgagaaggaagaatgtaacagtaactgctcgtcaatgaatggtatgcaagtatcagataagatatctgttgatgaaacgaataagggagctgatgtaagcaagttaatgtcagaggatgctttctttcgcttgaagagtttgggagctggccttcatgaaaagtccctcgaagagctcacaaagatggcccataatttctatgatgagactgcactcccaaagctggtggctgatttcgcgtcccttgagctttctcctgtggatggaagaaccatgaccgatttcatgcatacaaggggacttaatatgtcctctttaggtcgtgtggtagagctagcagagaagctcccacacatccagtctatatgcattcatgaaatggttattagatcctttaagcacatcgtccgagctgttattgctgctgttgatgacatgcaaaatatttctgcagctatagctgaaactctaaacatattacttggatctcccagacttgaaaatggtgctgacacagatgcccatattgacaataatttgcgtttgaaatgggtagagagcttcctttcaaaaaagattctgctggaaactgaaagatgaatttgcacacttacggaaatttatcattctgagaggtctctgcagtaaggttggactggagctagttgcaagagattatgatatgaatagccctaacccatttgacaaatctgacattgtcagcattgttcctgtatgcaagcatgtggtctactcatctattgatggtcgaaacttactggaatcatcgaagatggcattggataaaggaaaattagatgatgctgtgagctatggaacaaaggcattgtccaaaattatagctgtttgtggtccataccatcgactgacggctaatgcatacagccttcttgctgtggtgctttatcatactggagattttaatcaggcaactgtatatcaacagaaggcacttgatatcaatgaaagggagcttggtcttgatcatccggaaactatgaagagttatggggatttatctgtcttctattatcgccttcaacacattgaaatggctctaaagtatgtcaaccgtgcactatatctgcttcagttctcgtgtgggctttcacacccgaattcagctgccacctacataaatgtggctatgatggaagaaggcatgggaaatgttcatgttgctcttcgatacttgcatgaagccctgaagtgcaacaagaggttgctaggagctgatcacatccagactgctgcaagctaccatgccatagccatagccctttcaatgatggacgcgtactccctaagcgtgcaacatgaacaaacaaccttgcagatacttcaggagaaactagggcaagatgacctccgaactcaggatgctgctgcatggctagaatattttgagtcaaaagcattagaacaacaagaggcggctcgaagaggcatgccaaaacctgattcatctattgcaagtaaaggacatcttagtgtatcagatcttcttgacttcataagcccagaccaggaaagaaaagaaagggatatgcaaaggaaatgcaggcgtgcaaagaataatatcagagctcatcatggtgaatcagttgaagagaaggagaattttcagcttgtttcaggatctcctcttgaagcaagcaaagacagttttcaagaagaaaaactggatgtgcatcctcctgctgtattagaagaaaattatgctgcccatgatgagcataagcaatgtgatgttttatcaccagaagaatattctgatgaagggtggcaagcagctagtatgagaggaagatctgcaaatgtaaggaagaaaagcagtcgcaggaaaccggctcttatgaaattaatggttgatcattttgaaggtagtcatacaggttctgtgtataggactggtttacaacctcaaacaaaaggagacaaagaagattctgtaagtgctcctagccagctttcatttggaagttttttgaaaaccgacaagttgaatggggattccagcattgctgaagataagacgtgcaatggtagcgctaaccaagaacaacggacaaagctaacaggaattaacaggccaaccagtatcgcttccaaattcatatcatacaaagatgtggctgtttcgccccctggcacagtattgaaacccattttggagaagaaggaagcaaaggagaaagatagtggacgtgatattgacctagcactgtcatccgaggaagaagataaaaagtttacagaaaaagagaaagaaaagccaagtgaggacagtagcaaagagattctttcaattcagcgagatttagagagtcatgcagaaatacctcctgacagcaacagtgatgaaggcccatctgcagctagtaaagcgtctggaagcaaactgtcagcttcagctcctccattcaatccaggatcagtgttatcaatgtcccagccatacagcacggtggcagtatatgatgccagtgctatccttcaggcaataccaagtcaagcaatggagattctcccttctgccattgacactagagtgcctcgtggtcctcggtccaccttgtactatcgtactgggcattccttccaaaggaaacaaggttacacgcacagccagagcactattgtaaggggtagctactcccccacaaccatgaatccacatgctgctgaatttgtgcctggaaaaacttcgcaacaatctgatgtggctgacagagaacccagtcctgctaatcctgtggccaattctgatctggatgttgtatcgcagaccacagatgaagcgagggccgaaacgcctgccacagaaaaggcaggtcaggttgagaaagtcgtttcaggtaaaggaaaggaaaacagggggaaagacatcgtgagaaactcatacaaaacagaacttgcaaggcaaattttactcagtttcattgtgaagtcggtgcacgacagtttaggtccctcccgggctgaaccagagaggaagccaagtggatcagatgaagctagtaatgaacagaccagcgtcttaggcaagaacgcttctggttctggtcgcaaagatccagataaacaagagaaagcgacggaggttactaagggcctgaaggatacagagggattcactgtcgtttcaaaacgccgaaggcgtccccagccgttcatgaaccccataaatggcctatattctcagccgtctatttgcacctctgtcagttaaggtcattgcgttttcgaagacctgcaatattttgagagatggacctttgccttcgcctttgcctttgcttagaggattggtagcagagattttccctatccaagtgagctgtgagcagcgagcatttagttaaactgtacaaaaggtttccgggataccctttttgtaataaaagaaactgatgtattccgcagtagctgtagcgctggatataatgttcctttgtatgttatatatgacagaatcataggaaatagcagatgttaagttaatccgatattcagtggagcgcccttgtgctttatgatgttcctcatgttgtgagccccagttaatcattgcaatttgcaaatatgctgccagactgccagagcagaagaaactgaatcttctaggcgccaagagttcgaaatcttattcatggaggcatgtctttggataccttgccagcgggtgagcagcacttcactgagaagcaattgcagctgcagacccaccagatcaccagaccaccggggcccggacaggcgtgaa

SEQ ID NO: 28723 - DNA, 3855 bp, Zea Mays
ctcgtgctgctgctagcctagcctagcctgctactcgaacttctcgtctcgtctcctcctcgctcaggcaggggaacccaacggaactcctcctccccagcagacagccgagagtacataggagacgagaagatcccatccactaccgcccggtcgcggtcctccgccctccgccctccccgccgctcgttcggtgcagggtgctgctccgcttgctccgtcccgtgcaggtcgccctcgcgtggatcggaatgggcgcctgcgtgtccaaggccgcctgctgctgccgccagccgcacaacggggttaccaacgagaggactgatactgtgacggaggacgaggaggcatacgacctgcctgcgttccaggagttcaccttcgagcagttgcggctagctacatcggggtttgcggtggagaacatcgtgtccgagcaaggtgagaaggcgcccaatgtggtatacaaggggaagctcgatgcccagcgccgcattgctgtcaagcgctttaaccgctctgcctggcccgacccgcgccagttcctggaagaagctagatcagttggcctgctccgaagcaaaaggttggcaaatttgcttggttgttgctgtgaaggcgatgagagattgcttgttgcagaatacatgcccaatgatacgctagcgaagcaccttttccattgggagtcacaatcaatgaaatggaccatgagattaagggttgttctctgtctcgctgaggctttagaatattgcactaacaggggccgtgctctctaccatgatctcaatgcctatagagctctgtttgatgatgactgtaaccctagactttcctgtttcggtctcatgaagaacagccgggatggaaaaagttacagtaccaatttggcatttacgcctccagaatacatgaggactggacgtattactcctgaaagtgtcatatacagctttggaaccttgctgattgatgttcttagtgggaagcatattcctccgagccatgcccttgacctgattcgggaccgaaacttcaatatgctcttagactcatgtttagagggtcaattttcaaatgaggaaggaacagaaatggtccgattagcttcaagatgccttcactatgaaccccgtgagcgacctaatgtcagatcacttgtgcaagtattgactcctctacagagggatgtcgagactccatcttatgtgctcatgggcattccgcgtggtggggcatcttctaccgaaccactgaatctttcccctcttgccgaagcttgttccagaaaggatctgacagcaatacatgaaattctagaaaagacaggctacaaggatgatgagggaactgcaaatgagctctcttttcagatgtggacgaatcagatgcaagatacgttgaactcaaaaaagaagggtgacaatgcttttcgacagaaggattttactgctgccattgattgctattcccagtttattgaagttggtacaatggtttccccaaccatttatgctcgacgttgcctgtcatatctgatgaatggcatgccacaggaggcattgaatgatgcaatgaatgctttggtaatatctcccacatggtcaacagcattctatcttcaggcagcagcactattatcacaaggcatggagaatgaagcacaagaagcactcaaggatggttgtaacttagagcaaagtagcagcggtggacattgattgtgaacatatttgtagtccccaaaatgcacataatgtcaggtgcttgtttgaagagagagtaatattggctttggctatggaagcagcaggcgttggtaatttgtcaatttggctaggggtttgttaaccttattcagattttgtgcttgtggaacgtcgtccctcgtccatatcttcatgtaggaatgtacatatggaagaaagcgacaacagaggctctgaaagagaggacaaagacatccaagaggcagccaaatagacatttggacgaaatcaatgtattggcatgtaaatgggataatggtttacaggtacaccctaatctgactgacggaccctataaatgtcctcttccttctctcaaacgcaagcgcaaggcaggcaagctcctctctcaagtctcggcacctccaactacgcagcaaccaaccatgagcaccagcgatgccgccgcgaccgtgatccccatcgacgacgtgccccgccagcacggcaaggccccggccgtggacacggtcacggcggcgcctcctcctctcgctgcagcagcaccccccgctgcgacgacggcgcctcggaagacgcgggtcccgttcttccggcgcgccgaccgcggcagccggtgcgtggcgctccttgacttggtgctgagggtggcggccttcgggcccgccctcgccgccgccatcgccacgggcacctccgacgagacgctctccgtcttcacccagttcttccagttccacgcccgattcgacgacttcccggcgctcctgttcttcatggtggccaacgcgatcgcggcggggtacctggtgctgtccctccccttctccgccgtcgtcgtcctccgcccccaggccatcggcttgcgccacctcctgctcatctgcgacctgatcatagcggcgctgctgacggccgcggcggcggcggcggcggcgatcgtggacctggcgcactcggggaaccagcgcgctaactgggtgcccatctgcatgcagttccacggcttctgccagcgcaccagcggcgccgtcgtggcatccttcctcgccgtgctcgtcctcctgtttctcgtcatcttggccgccttcaccatcaggaaacgctgctgaactggatagtatgtgatgttgctgtttttgcgtcgtgcaattaataatgcaatgtggtttcagtttgtggtcactcgtgtgtaattgtaaagcgtggagtggaattgcctttgtattattcgtggacacctgcttgcggaattttaaattgggcttaacttctcggcctggtttcatgtccattaagcgctgcgggccaaacagggccttgggcctaagatagtgatgtctacccaccactaccgtcaccgattgaccggctttctctgcagaatgtatccgttggcttcgatctccgagatttgaaaaccgcttgacccgccgcactccagcgtcggaaatgtccggtgcgacgccgtcatggtttctccccgtgcagaagacgcccagcagtggcgatagcaatagtccattctcgcttactgtcaagagggcatcacagtcctctgccagatttcgagctttatgtacccaacagggactgggcagcagctaccgatatgattcgacactaatttctggtgggtcatggcctgaatgtgtcagcaatggcacacgatcagggttgacaaggataggcaatcctcctctgaagatgatgcatccagtgcttgaatgtcttgagattatgagtttgtccccaaggcccggggacgatgactatgatggaaatggcatgtctgcgccattgcctgagcttagcttctagtttgcaggacctccgatgcctttggaatccatagattttgacctcttttaagatgtctcctcgtgacatagaattgaaggcaaaggagacaagtttccaaaaatcggtcattgcagacactcggatctcttggtgagaggggctcgtcagcagaatgtttgatatcgatgatttggattgctgcaaatggctatctgatgacaaagattcgccagtgctttcgctcattgaagaggctttgacagatgataccaattctcagccaggtcattgttcttatctgcgtgagggtggtgaccaa

SEQ ID NO: 28724 - DNA, 1920 bp, Zea Mays
ccattttcatctcgtttcgccgccttttacttatcccatcttccctcgactgcgctctctctcccccttctctcgcgcggcaactgggccatcgccgccacccctacccaggtcttcgtcggtcgcttcgccagccgccaggtcttcgtcggcccatcccccggtcttcgtccttcaatcctccggcgacgagcacccaccagaggctgggaactccaaagaggaacagggtccatggctggaggcgcaggaaatggttcgaacgaggcggtgcaggcaaaggggagtgggggtgatagctccgccgccaagccgctgcccccttgctgcgtcaaggcgagagcggcggcgcccgagtctgaggccaagtgccatgccaccgtggtttcgggatggttcaccgagccacgatcacactgcggtaaagccagcaaggttcagtattacaataacccaatgtggccaggagaggcccattccttgaaagtggagaacatattgtaccaggggaaatcaccataccaggaagtcctggtctttgagtcgtcaacctatgggaaagtccttgtgcttgatggtattgttcaattgactgataaggatgaatgtgcgtaccaggaaatgattactcacctcccactctgttcaattccatcccctaaaaaggttttggttattggtggtggtgatggaggtgtacttcgagagatttccagacacagttcagtggagtctattgacatatgtgaaattgatcagctggttattgatatctgcaaggaattcttcccacatttgtctgttggatttgaagatcctcgtgttcaacttcatgttggtgacgctgtggagttcttgagaaatgctcctgaagggacatatgatgctatcattgttgattcatctgacccaatagggcctgctcaggaacttgtggagaagcctttttttgagaccatcgctagagctttgaggcctggtggtgttctttgtaatcaagctgagagtatgtggttgcatacacatttgattcaggacatgctttcaatttgccgtgagactttcaagggttctgtccgctatgcatgggctagtgtcccaacatacccgagtgaactggtggcagcgctggttcatttgccagtcataggatatttcaggctttagctcaactcatgcgaggaaccagtcatagcctgacaaaccattatggggtgattgggtttctgttatgcgccaaggatggcccaccggtcaactttctgactcctgtaaatccaattgaagaagtggaaggagctactaaagcgggaagggagatcaggttttataattcagagatgcatatggcagcgtttgttcttccgacatttgccaagagggagctagaagcatactgtgcttccacggaaacggagcaggcggaggaagtagcggccacggcaccacaaaagctaactgcggcgcccaagcgtggaattaccaccgcatcctagctgttggatacacacatagccatgtactattattatcacgcacgtaatctaagcatcgaagtcgagtgcgtgcgtgttgggtgggggtacgcgcatcgcggtttgacgcgcgatgtatttgataataattcgtgctccgaggtaccaacaagcaacgatgagagaagcattccacctttacactccccttttaggtctggatactcattattgatctcaatccacatgagttgaggtggattgggggtgtttaacagggctttttggtttgaaagagattagagaggattaaatttctttctatacaaatttgtatatgagatttaatttttctcaatacacccttaatcgaacaaacccttagtagatcagccagatgatctatgctatgatatatatataacatgctcaagtgttttgtgat

SEQ ID NO: 28725 - DNA, 2695 bp, Zea Mays
gttctttagaggcatgttgtgttgtactcttccacccactctctgccaggttgtggtggaaaacactcgtgtgggatctagctggctcttgtgcaattggtatgccacagctgctcttctcaccgtgtgaggacgagcacagtaaaagctaagcatttcttgattcatcctcccagcttcgttaattactatcaatgatgttgctgcatatttctttggcatcttctttgggaaaacaccgctgatcaagctctctccaaagaaaacgtgggaaggctttatagttaactatcttctgaagcatttccctatgtttagctactcctgctgaaaatgtactaaccacaccttccatggtggagtgcagggcctccctgttggggcacgagatcgcccacccgtcgtctacaccagattatttctatcataccatcagatagtggatggacaaccaagcgtgcaccgtttcatcatttctgattctttcttagatgactaagataagtgtgaggtctgtactcatattctttccttttcttttcaatgcaggtatgatcttatacgagtggagattggcaacaaagatataaagcttgaatacttagtggaggcatttacaacttcaaatgagtaacattccttgatctgaaatgtgtacaataatcctgatgaactactaaaacacttgccttaatctgaaatgagtacaataaaacatatataaggaaactcaaataagtaaagtcttgcttgtccctcacaccataacatgactgatgaactactaaaacacctgcgaggtctgtcagcgtagcctcctcgacaccttctgcttctgctaactccggtgcaaggaggaaagggagcaacaagaaggaaaatatggggaggaagatgtggatggttcatgtatatcagaagaagaagatggtgactgggatgtagatgagccagatgaggaggacatcatttacgtaaaatagcccattgtcttctaggaacttggtcatcattcatccagaacacagcaggttgcgttctgcatacataatattgcctatcaaggtagatttgccagagcagacttcgatcttcttaatctacctgacagtttcttaccatcatttgattttattgatggacatgttaagcctgttctagggagaaagattaactggatgaagacagggatcgttgagagtgatctggttctaacagttagtccacattatgttaaggaactcacttatggcccagataaaggtgttgagttggatggtgtccttcgcacaaagcctcttgaaattggaattgtaaatggcatggatgtttatgaatgggatccttcaacagataagtacaccagcgtgaaatatgatgcaacaacggtaactgaagcaaaggctctcaataaagagaggttgcaagctgaagttggattgcctgtggactcgagcatccctgttatagtttttgtcgggcgtcttgaagaacagaaagggtctgacatactcattgcagccattccagagttcgtgggcgagaatgttcagataatcgttcttggcacgggaaagaagaaaatggaggaggaattaatgcagctggaagtgaaatatccaaacattgctagaggcatagcgaaattcaatgttccattggcacatatgatgtttgctgggtctgacttcattattgtcccaagtaggtttgagccatgtggtctcattcagttgcaagggatgagagtttctagctcgctttgttacagttcagatttgagtgcgcgtaagataaacattagcagccatcttttcttatcatgttacatcttgattcctgtaaaacaaaaggtgttagaaaataccgcatagttaattagagaaagtgcaaaaaaaaaaaagaatgaccatctatttttgcagattcccatctgttcatcacctggaggacttgttgacacggttgaggaggggtgtcaccggattccacatgggttctttcaatgtcgagtgtgaaactgtagacctagctgacgtgacggcagtagcgtcaaccatcacacgggcctagaacagtacggcaccccggcgttccaagaaatggttcagaactgcatggcgcaaaacctatcctggaaggggcctgcgaagaagtgggaggaggtgcttctgggccttggagtcgaggggagtcaagctggcatcgacgacgcagaggagatcgctccacttgccaaggaaaacgtagctactccatgacgcttggtgcctcggaaacacgcgttggtgataggaagcatcttctaggatcctcctggccttgtggctggagtgagttgttcagtcagacacagtttcgcctctacaacatcttcctcctcctggtggtggtccgaactccgaagcaaattccagtgataaaggatgaactaagaggtccatgtttctattgctagaccttttgcctcctaaatagacgatgtactgcgcttgtaacaagaacctcactttcgtgtcaagtaatatcaacaggtttcataatggtagtgaactgcactggaaaaacctgtaaacaatgcaaacaggattcaaaactaaaacaaatctgctattaaaagctgttattcaaaattgaaaaaaacaaaacctgttaattcagtattataactcagcaaacataaataaaaaaaaca

SEQ ID NO: 28726 - DNA, 1743 bp, Zea Mays
acaaagttcaccaaatccctgacttttatgtgtcgaagaaaggtaggctgtagtgcgacatctgctctgccacgtttctgctatggtggtgccgtggtggtgtgactaatcatcagagataagtagcaaaccgtcaaccaccagggagacgagccaggcaagtttattttcatctcgctatctccctgatattggtgtctagattgaagattatgcatcagcgacaagtaacgaccgcccggaaagagagccagaaaaaagggcaggaaatcgccaccgcccgcccctatttgagcagccgcttgttccttccgcgtcctcgctgctcctcaattcgattggctccgtgccgacctccaggttgagaaggaaagcatcgcgagttcgccatacggatgggttccaaagcgcctttctgtctcacgctcctcttgctgctcgctgcggcctgtggacctgcagcacatgcccacgatgctgtcgagctcccgcatcatggcttagccttgaaggaacaaatttcttcaaccaagattcctgcccgtctcaagagtggcagcggactatgctcggcctgtgaaaacttcacgagcgaagccgtcacttatctcggcaaggaacagacacaggacaggatcatggagttccttcatgatgcttgctcccaatcattctcctttgaacagaagtgtgtcgagctgatggactcttatgcgactctcctgtttgccaagatcacggagatcagaccggaagcgttctgcaaacggtatggcctgtgcagggacacagctcttctctccggtgtgggaagtgacagcacgtgtgtgttctgccaccatctgctcgatgaaatcatgtccaaactgaaagatccagatgcggagtttgagataattcagattcttgtcaaggagtgcaataagatcgaaggtcacgtccagcagagggttaagttttagaagcaactaccctgcactggttaataatatctgtgaggacccaagttggtcccagtcctcttcgattggtgctctgttcctgtgatttgaggaaagtttcagtacaacacattgtattttgattagtgaatgaagcatttagacgatattgttgcaggttgagcagatagtggttgaaaggtctgaaggttggcattgtggatatttttgctatcatgcatggattcccagacaatgtgaggacgaaccagaagggcgagttctgggtggcgatccactgtcggagaagtatgtatcctcggctaatgagctgccatgtcaagctgaggaagtttttgctcagcttcccaatccctgccaagtaccactacctgatgcatatcgatagcaagctctacgcgttgatcatcagggacagcccgatggccagatgcttcacatcatggaggacgacaagggagaggtggtgagagttatcatcgaagtggagggtctgtctgatgccattcatcgctgtctttgacctcgtgaaggcgtcttagccacttcaatttgattggaaatattgttgttttaagatacgggtccatggttaatgttgtacgcttctctgagaagacctgtcattccaataatttggttctggagcaacctggagctgtatactgatctagcttcttttagtaacaaatgtaagttgctcacattttctttagattgtctatagaactttgaacaaccagctcgtcccttctaatttttatttggccagcaaacaaat

SEQ ID NO: 28727 - DNA, 2929 bp, Zea Mays
actgtgcacttgccaaactacatgatagattcatcctcccagcttcgttaattactatcaatgatgttgctgcatatttctttggcatcttctttgggaaaacaccgctgatcaagctctctccaaagaaaacgtgggaaggctttatagttaactatcttctgaagcatttccctatgtttagctactcctgctgaaaatgtactaaccacaccttccatggtggagtgcagggcctccctgttggggcacgagatcgcccacccgtcgtctacaccagattatttctatcataccatcagatagtggatggacaaccaagcgtgcaccgtttcatcatttctgattctttcttagatgactaagataagtgtgaggtctgtactcatattctttccttttcttttcaatgcaggtatgatcttatacgagtggagattggcaacaaagatataaagcttgaatacttagtggaggcatttacaacttcaaatgagtaacattccttgatctgaaatgtgtacaataatcctgatgaactactaaaacacttgccttaatctgaaatgagtacaataaaacatatataaggaaactcaaataagtaaagtcttgcttgtccctcacaccataacatgactgatgaactactaaaacacctgcgaggtctgtcagcgtagcctcctcgacaccttctgcttctgctaactccggtgcaaggtacgccgctgccatcccaatccctacccccaggcaagctttgttgattgctttctggttgttgatttctgagctagctatttagaagtcaaaaattgggtgaaatctgattaaccaaactacctggttagaaatcaaattggatgaaatctaattaattttgatatgtgtctcctgagttcaaggatgtcttctacaataattcagccaagaacaagaagcgctaattggaatccaaattgtttgatgtggtgatatgatctggaacttggaccatctttatgctttatggggctaagaagcataagacctgtccgaggcaattgtatctcaacataatcagtttgatgggctccaggaatccttgctatacttgacaaactaaaggaggaaagggagcaacaagaaggaaaatatggggaggaagatgtggatggttcatgtatatcagaagaagaagatggtgactgggatgtagatgagccagatgaggaggacatcatttacgtaaaatagcccattgtcttctaggaacttggtcatcattcatccagaacacagcaggtgtgcttctactgatcgaaaatacatcttccaaataactatgaggacttaaccaagcaccattcaatcttcatttgcttctatagtttggaaatgatcagtggaagatgttgtcttcgtagccaatgattggcacactgctattttgccatgttatctaaagagcatgtataagtcaaatggaatttataaaaatgctaaggttgcgttctgcatacataatattgcctatcaaggtagatttgccagagcagacttcgatcttcttaatctacctgacagtttcttaccatcatttgattttattgatggacatgttaagcctgttctagggagaaagattaactggatgaagacagggatcgttgagagtgatctggttctaacagttagtccacattatgttaaggaactcacttatggcccagataaaggtgttgagttggatggtgtccttcgcacaaagcctcttgaaattggaattgtaaatggcatggatgtttatgaatgggatccttcaacagataagtacaccagcgtgaaatatgatgcaacaacggtaactgaagcaaaggctctcaataaagagaggttgcaagctgaagttggattgcctgtggactcgagcatccctgttatagtttttgtcgggcgtcttgaagaacagaaagggtctgacatactcattgcagccattccagagttcgtgggcgagaatgttcagataatcgttcttggcacgggaaagaagaaaatggaggaggaattaatgcagctggaagtgaaatatccaaacattgctagaggcatagcgaaattcaatgttccattggcacatatgatgtttgctgggtctgacttcattattgtcccaaattcccatctgttcatcacctggaggacttgttgacacggttgaggaggggtgtcaccggattccacatgggttctttcaatgtcgagtgtgaaactgtagacctagctgacgtgacggcagtagcgtcaaccatcacacgggcctagaacagtacggcaccccggcgttccaagaaatggttcagaactgcatggcgcaaaacctatcctggaaggggcctgcgaagaagtgggaggaggtgcttctgggccttggagtcgaggggagtcaagctggcatcgacgacgcagaggagatcgctccacttgccaaggaaaacgtagctactccatgacgcttggtgcctcggaaacacgcgttggtgataggaagcatcttctaggatcctcctggccttgtggctggagtgagttgttcagtcagacacagtttcgcctctacaacatcttcctcctcctggtggtggtccgaactccgaagcaaattccagtgataaaggatgaactaagaggtccatgtttctattgctagaccttttgcctcctaaatagacgatgtactgcgcttgtaacaagaacctcactttcgtgtcaagtaatatcaacaggtttcataatggtagtgaactgcactggaaaaacctgtaaacaatgcaaacaggattcaaaactaaaacaaatctgctattaaaagctgttattcaaaattgaaaaaaacaaaacctgttaattcagtattataactcagcaaacataaataaaaaaaaca

SEQ ID NO: 28728 - DNA, 3584 bp, Zea Mays
ctaaaggaggcctggtttccctgctcccgtaagccgcgtgcgctctctcgctctcccagagtcccagcgcgacgactggcgaccgccgcccccaccctgcgccacgtgccgagggcttcgccgggcccttcgccgctcgccggcgacgagcacacaccagatccaccaatctcgggcctgttccctttcaatacacgtgggttgttgtcgaaaatgaaccaatgcccccctcaatctctcccaacataaatggattgtggaaatttatattgtttctgagcgaggactacaatatacatgtattacatccactaccttcgttcgttatccggtatcctatactgatcgccccctgcctcaagtggatccacaatggttctgcctcgtcgaaccccagaactgctggaggccgatgaagcccaaagctttgtgcataagcttcagctcagtgtctcggggggccttcctcatgctgtgccagtgccaggcttgagaacagaagaacatgagctggttaaagctgttttccaggtgctgcaaggcttcgagacgtcctggttctattgggacagtgatgtgccttggtaccgtgagaaagcggggatatatgtggctcacttgtcactgacgggtcttaggtctttgttgagtccattcctgttcacggcaacatgcttaaagcaagtagagctttttgttgggaaggttaggatgcaacatcacaagattccgacgttggatgcgttcgctagctcggttgattcttggcttaagtttacgttctggagcagaacatttgtctcaagttttgcatggagctgtgccagatggcttttgggattctggtgcacatatggcatctagtgaagttgcagttcatattcttgaccatctcttcaagaagttaaatgaagtatgtcttctggaagatggcgagggtgaaccatttcatatgctgctagtgatatttactggaagtttattaccttatcttcaatgtcttgattcctggctatatgatggtatccttgatgacccttatgaagagatgttcttttatgcaaataatgcggttacaatagatcagccgtcattctgggaaatgagctatatgcttagagtaagaggttcaagagttgacagttcaacaactttaactgagagcgaatctatcaagaaaaaaggatcaagcaataaggaatctactactgcaggagcttgcttgaaagtgaacaatcaaggttgtgtgtatatattatgcccaacatttttgaaggatgttgcgagggccattgtatctgcgggaaaatcctttcaacttgtcgaacatgttcaagacgtacatcagattcaaactcacaaaagtacacatcggtccaatttgtatcaagatactaattgcagtggtcaacagaaattttggccagatatgtcaaatttaagaatccatgatggtcctccaagaaataaagatgctcttgaagtatccacaagtcagtttgggaatgattctcgtgaaatgggactcctaaccttgtctgagatcttcttgatatgcatatctggtctgttagaaaatggtgaccatgtatatgagtacttaagaacactgcatgctgataatgttccaaataacaatgcttttatggaaaatgagagcaacttgaaagaaacagagggtacatgcacagggaacatcattgagaagacttgggtaaagctcctaaaggatgctacatcaggaaggaaatgtaatggcatggaggagaccatacatgctgttatagataaggcaggatttgcctctggttgccccaaagatgcatcttccaatgtcgtagaaggggttttcactttatcttgttacgaaaacccagctatcactgcttgcagagaagtgctaatgaggaacccagcttcttggagtgaactgaatatatctgaaagttttcatctccctccactgaatgatgggaacatgcgaagagctatatttgctgatgggcattctgcaggaactagcactgattataagtttggtttccagtttgatgatctggaacatgtccgccaagaagatgacagaaggaccttggaggacctttacgcatttccaacccttcttccttgcgcaaaagaaaatgcgctgctgtcagaaattttacctatgcagaaagatagtacactagcatcgagagttttgaagtttattcagaatatgagcatgaaagatccccttcagccagtgggtatcatccaagaatgcctttccaaatgtataaagagacaggtcgatctcataggcaatcaaatcctgtgcaagctaatgggtgaatggagattaatggatgaactgtttgtgttacgtgctatttatttgctaggatcaggtgacatgttgcagcagtttctgataacaatttttgataagcttgatagagggaattcctgggatgacgactttgagttgaataatttattgcaggaatccataagaaactcagctgacaaaatgctcctgacagcaccagattctttggttgtttcattagcaaaatatgacacacacaatggtgaggaaggtatatcaacttccaaaaaaggtcgtgcacttggttttggcattgatgcccttgacatgctgaattttacatataaggtgtcttggcctcttgatctaattattaatacagaggcactgaagaagtataatcaggtaatgggattcttactgaaggtcaaacgagcaaagttcgttttggatgaaacacgaaagtggatgtggaaggccagaggcaggaccgcgcacaatttcaaacaacacctaatagtggcacagaagctcctccattttgtcgatgcatttcatcagtatgtcatggaccgagtttatcatagtgcatggactgagctttgtgatggcatgacggctgctaccacactggatgaagtcatggaagttcacgaggcatatctctcttctattcaacgacaatgctttgtggcctctgataagctgtgggccctcattgccagtcgagttaagactattcttggattggcactggacttccacaatgtagaacaaactctcagtaccggtgggacggcttcagctgtgaggacacgatgcgagatggaaatcgaccggattgagaagcaatttgatgagtgtgtcatatttctcctgaggatcctatctttcaagctcaatgtgggtcatttcccccatcttgccgatctagttacaaggatcaattacaatcactatttcatgtctgatagtgggagcttctctgctattcctgggtcccggccacggtagtagactagtagagcaagcagtggacagaattgttggtgttgcacctgggtgatttttcctacccttttttgagaagaaccagaggcgtggtttgtttactttcgaaatagaaagctccagaacagtgctaatgcttctctctccaaattggaacaaaaaatcatgcctcgggcttgttacaatatctatatgtagattgttttcaaaaggatgacactaaaaaaggtggcataaaatgcggctgaacctgttacatttt

SEQ ID NO: 28729 - DNA, 5098 bp, Zea Mays
gaccatgcgcggccctcgccgcgccgggcgccgacgtcggcctcctcagaaggctactaccgacagggcggcggcgcgtacgaccgctcctaccctgacgacccgccgcctgtctacacgccgtcgcgctcggaccgatactggccggaggacgacggcgggcaatacaagggtttcggtcggtatggcggcggtggccgcagggacggccgtgacatgaggggttcgtaccggaggtccccatacaggggtggctacggaagcgacttctcccgaaaccatccagagcagccccctcccccaccacccagaaggtctccgttgaggtcagtcgctgttccgatctgctatgactcaccgggcaatagagttgacaggggggatagggacaacctcccacgggtgacaccatggcggagaagggaaagcagatctgagccagcagacgctgttggacttctctctgttggccaaaccacccggctctctgcctcagggaaggaggcttcagctcagcctctgtccgtgtctggtcctcatgggaccgaggacgaggcaccaaggaagaaggcacgccttggatgggggcaaggtttggccaagtatgagaagcagaaggtccaagggcctgtggatcctgctgaagctgttgctgatggaagtccagctgatggcgaactgaagaccacctctcctgtgcctgtgcctgtgcaccctgtgcctgtgcctgtgccttatgttgcacctgcacctcctgctgcaccagtgcttgcgcctgcgccagcaccttctgctgctcctgcacttttgtctgcccctatgcaatgctcatctccagttaccgggccaccatattgttcctcagcacctgaagataaatcttgtgaaatgatgccaaatgcggtcactaactctactaaagatgtcttggaggctgatgacacaactttcaataatgaatttctgatcaagttagatcagctcggtgatgatcctgttatttcccttggaaacatgcttgttgaacttatccagcacgaggattcttgttctggggattcaaatggcccgaccagtacatataagctgctcctactgaaggaaagcatttccaaggagattgaaaagactgaactcgagattgattcattggaaggcgaacttaaatctgtgaatactgaggctgcaactactcttgaaggttctcccacaggggtgacacatacagaaaatctttcaccctctagtgggacatccaaggttcctggaagtgtggagatctgtgatacatctgatatgataaaagaaccaggggagctcattggttctcctaaggtacctgtggtgcagtatgatgatgtcaaaagtgctgatatgatggaaattgaaacagctccagttcataatgcaaaaacagttccttcagaagctggtgctatatctcctgtagtcgctgagggtaaggcctgtgcagctgctgatcttagctcattgaaagcttctgaagaagctgggtctcaaaatgatattgacaatggcaggctggaaacttcttcacgccaagctaatgctgattccatgaaaatagaaattagtgatgacctaccagtgaagaaatggacataccatgatcataagtctgatttgctcagttctgtcacatctgcaaatagtgctatagccaaagaaattaatgaagtgctatttaaatcattgcctgctgatacacctcgccttgatttgtttgcatcaagtcatcttctgagccaaaggaagagcgatttgattgtcaaagaaaggcttggagtatgtaaaaccaggctgaggttgaaagagcagatgcttacaatgaagttcaaggcatattgtcacttgtggaaagatgtccaactattttctgcaaataaacagcgttcaaagtctaataagcgcactgatcagagcaaccgaacatcacaaattggatctcagaggcaacgctcctctaaccgctcgcgattaaccatgcctgctggtaatttaagtacattctcaactccagaaatgtcagatgttgcaatgaggttgttttcagagttcaaaattaagcggtgcagaaattacttgaaaatgcctgcactgattattgatgagaaagagaaggagtggttgaagcttatgaacaagaatggtctagttgaggatcctgttttagttgagaaggaacgggtgatgataaatccgtggactcaagaagaaaagaaaatttttatggagttgcttgctaaatttggcaaggatttctccaaaatcgccagtttcattacacataaatctactgcagactgtgtggagttctactataagcatcataaatcagatagcttccgagaagtgaagaaactattggaccttcgtcaacagcaacccaccagcaattttcttggagcgaaatctggacataaatggaatcctgagtcaaatgctgcttctcttgatatgcttggggtagcatcagtagtagcagcccatggccttgaatatgcaaaacaagtggagaaaatttctgcgaaatccctcatccggactgcatatgggcccaatgtgacttccgtggctaataaatcttctgataaggagtgcattgaccatgtgcctttgcacgagagagaatctgtagcagctgatgtactagcaggcatatgtggcactctctctcctgatggaatgggctcatgcattactagttctgctgatcctggacagaagattagcatgaaaagagtggagcatgtcttgtcccaagaaaatgacaaaaccgttgaggaggaagacacactctctgatcaagagtgtgaagttgacccagttgattggaatgacgacgagaagtcaattttcattgaggctatgaataactacggaaaggattttgctcggatctcgtcatgtgtgaagagcaagtcatatgaacaatgcaaagtgttctttagtaaggctcggaaatcactcggtttggatttgatccatcaaggggcagccgatgttagtatgccagctagtgataccaatggagggaagagtgatactgatgaggcctgcgctgtggaaatggattcagctatctgtagcacacagtcatgttcaaagattgcgatggatgtttgtcctactgaaggagccattggagggcctaactctgttataatctctaagcaggcagaagcatatatatcaaatgggtgcaatgctgatgttaaaattgaggaagatgagaaggtagctgataaaaattgcagcattgttgatgctaagaggtccagtgatgctactcacgaagctggtcctattgacatcaattgcccaggaagcacagataagctgcaaggaactgatgatgtcgttgacctagtaaacatgcatagtaatagtggcatcagctcttcagctaagcatgcagtggccattcactcggaaatgagatccactttacattctgtagaggtccttcaaacagacaaaggtgaaggtactggtactgatttgtcctgggtggaagaatgttcacaccatgctctggataacacaccaatgaaaaatggaaattctggtgccccggctttcttggcttcagatagtggtatcaaggacaatgttcgcatctcaaacataactgctgcttccaccgttagtcctgcattcacttcaagttatcagcattctgtacctggagatatgcccctgccaaaaccaaagccacttgttaccccgcttaccccaaaggatttaatgcctgtgcagttcagttcagtgcttcctgaccccactgcaattcgtttcgagggcatagcctcaataactacgcccaacttcgaggacactggcaacagagtcagtggtgctctaggggctaaagagatgagcaagtacccagcttttagagacccatctggcggatcggttgacccaaacaaaattgcagaatggcaggtccagcagcttgtgccttcaaaacaattccgatggcattcaatggcccagagaccacgaaggaggactggaaggctctttgaggccttgctctcgcaatacaagctccgagggtgatgagcaacaaaagcggcctggtgatgtcaagttgtttggacagattctcagccatcagtcaaccctgcagagttctggcttgtcttgcaatggtaacaagagcaagcctccctcaccaaagatcgacacatctgtgagatccatgaacaatccaatggaccgtgtggtttgttcttccaggcctggcaccactccacatctgggtctggaggaaagattggcaaggtgctatggtcatctggatggtagcacggcacagcccgagccactgctcgtgatggcaaagcgccagcggtccttggccggcgtacagttttactcggctaagaacggcacgcttggtgtgttaccagattaccaacaaccttcgacgcagccacagcaatcagatcccaagcgtgtggaaaggttgtctgatccgcagaagaggaacgtgctggaactcatctcgggtttccagcagcccggcagagtcgcccgtttcgggggtgctggcatcctcgtaagcggcaacgtctcggaccctgtggctgctgctctcaaggctcagtatggtcccggttctaagattatgggcagcgacgtggatccttggacggacataggaagcaggtagcgccgtagcagctctactgcttctgttgctccttgtaccatatatttagttttggtgtaacttgaatgaaatcatcagaatatgagatgtggggggtggggagtgaatggctttcctgcccatactatctgtaggcttttggccagtagcagtcgggtttcgctgtttactggcattaacatttttactctttcttctgcagctccatacccttttggtatagcttgacatgccagcagtggcacagtgccgtaggttccctagaggtgaactagatgtttgtcagcatggtttgattttgccagcctatgcagaaaacctcacttggtctttgtaatgtggtaatgccatgtatcagtatcctagtctgatggagttttggttgagacaaaaaat

SEQ ID NO: 28730 - DNA, 1093 bp, Zea Mays
aataaatacgtgcccgagctacaagcggaataatcgtcgtgacatacgtacctagcaatctatccattaaaccaattattggaagtggcgaattagcttaccataattaaattcgacttgaaatcatgaaatggacaacgcctttcagctctagcctttccccgaatacatggtgagtgccacatccccgaatacatggtgagtgccacatcgaattacacttcttcgtccacatcgagaattctctggccacgtactgatttattttcttatgcgcctaattttcttagatttttggcgtaggcgaggatgacgacccacgacttgttcgagctttttgtcgagcacttgaagcatcgaccagtggcttgtttctctacatcttattgagattcttttgtcggcgcgaacactaagtcgaagatatcacgcagggggtggcattgagacgagactacggaacaacgacgaactagcgagctgaaccacagcaagtgaggtcttagcgcggatgagcaacggcaactagcggactcggaacagccgagtgaggtgcacggccatcaaagcgtaagcgccggcgagctgaacatccacgacggacgacagcaggatcgaccgagtgcgcacagacgacagcaggatcgaccgagtgcgcacagaggtggatggcacggcgagcaagtccatggacgaacgccgagcaggaacgagatccgggctgggagatgggcagggatggagctcgaccgaacggctgccagcagggggagctgctcggctgcagcatcacggcgtcggcctgcagcatctccaacacggcggccgcagctggaacaaggagaagcgccagcgagcagagaggggcgaccggtgctgctagagctggagcaggaacgcgccatgggagagacgcggacctggggccgggcgcgcacagggagcttcgaccagggcgcggctggggagctcagggagagaaagccgagcgccagccagggagacggaggaatgagcgctcgcaagaaaatctggcgacgggatgaggctaagagagaagagataagaataccgaagaaatatcacgcggttg

SEQ ID NO: 28731 - DNA, 2114 bp, Zea Mays
ttatttgctccctacaacccaaaaagttgaaaaaattaccgaatttgtttccgaatccataccgaagtttatatctattatttgaaaaaatgtaggatgaatttgaggtttaccttttatgaatcttaacaagctggatgttaaaaacaagaatacaaatttgtattatatattctatattctatttattcataatcaaagaaaaaactgattaccgaataaataccgtttccgaccgttttcatccctatccaccgtccccagccgtgaagaaaaaaaaaagctccaacagcacaccctcacggcactaacagcacgaagatgaatggcaaccaggagccatcctcgcctctcctttttcacgagcctcgcctgaagcctttttctagacagctttcgtcgtgaacttccaggccagtggtcagaattcagaatctccaaccatacaggcaccatctgtgagactgtgatctgtcttgaacctcctgggagttgtcaatttttcgagctcaccctagaaaacctctttaataatttgaatgccgagaaccgatgcaccgctgactgtgctacagctttcctgattgctctgctctgatgtcctgcgcaggatgtcgaagagtgaaacgcctgaactgaacttggccttcgtgggttgggaggagttggcttggtcctgcaggatggaaataaaaaaatagccaagcacattctgggagacaagaaatgaatgccatgatagagcagattcaaactcatggataaagcagagtagagcttcaaaacaagcttaccgtatctgaattactctctgcagtagagttgcagctcctactgctgctgttgctgtcatcactaccaaatacgtaggatctatagacttatctgtgagaagatgccagtgaaccactggcagtttgtccaagaaacgatgactgcaaggaatacacatgatgccattgtggatagaaccatccaaaatctctccgtttcatctgtactctcagtagggcttgaagaaagggcagttgagtttgatctaccgaatagttatggttatcacttggctgggtgttgtcatgattctcttgcaaccgatcagaaatttcctcatctgaagctttggtgccgcaactatggagatccttcttgcaactcaaaccatcctgcaagccagaggactctagaaatatgtgatcactgtcttcaacagaggtatgtgatctgaaatccagagtacacaaaaagcaaatgtcgttggatcgaatcgtggaaacctcaacgaaacaactcagcacttacttcttcagaacctccatcttacaaaggcggatctacaattaacaaaaatgagaacaaagataaaaaatctcagcatctaaattctactcccatgtgcagttgacgtgtgtatatgtacacctcgcagcagcctctgtgactcagcatggatcgaatgaagctgcgccctcctctcctaacacacgaacccagactcccagagcaccagacatcatcaaaaaccggctagcaattcaactaaccaacggccagacccagaacgcaagagacagcggctggttaccttctcagagagcttcttctcccggaccaactccatgggcggcgcctcctcctccatcttcgtgttcctcctcttccccccttggcctgcgctcccgcccccgcccccgaagccacctccacgtcaacttcgtccagatcgagctgcttcctcaccgtccccttcggccggcgcgcctagcgggtcctgccccacagcgggtcgatcttgtcctccacgtcgctgccgtcgcccgtcgtcgggggtgtcgatcggcggcaacggtgacgacgcatctggtggcgtgatcgggcgcgtggaagggccgcggagatggaacggactcggcgctaggctttctcacccggcgtcgcctaatactagcggtggcggaggcaaggcggggagcaagagggcaagtggtagctgtgacttaggaagaggatctcctgaaaatggaagcgctgaatcacacaggaaggagataattggatttttgccactcacaatgttgtcttctttttataattaccactgtgtctatgaattg

SEQ ID NO: 28732 - DNA, 921 bp, Zea Mays
aactctttactcgctcactcccccgcgccactgatctctccttccgggaccctaattccgcaggaggccgcgccgggggagtgacgccgatgcagcgccgggtgggcatggcggacggcgaggctaggtgtcggacgctcggcgccgtcatcaaggagaaggatgaggagttcgcgctcttcctcgagatgcgccgacgcgagaaggagcgcggcgctgcggccgccgcggcggaccagcttctgctctccggggacgtcgcggcggagaacgggatgctgctcctcgacccgccgccacccgctggtgggagcttcatttcggcctcttcttcgggtttcctgcagccgtgagccgttcctttgcattttactcatgtgcttatgaagccctagcttatcgtggtttgaatttttggttctttgtggtcgtagagcccaaaccggcggcgtacaaggtggctggcggcggatttaggagggcgcctgggggagtggacgacttcctcaatgcagacgccagcgacaagaacgattacgactgttagaattcagctggtgttgctgggaaggatgggtcatggacatggtggttgttggaggcttctgacaccaccaggaactccattattctcatctctaaaagttgagccaaaaaggtccctggtgagtcaagctggaacgccaaaggctcgtccaactgccttgaaatcaaggcaacttgatgttgtgatggaggaggggcaaggggaggaattggaggttatgttgtcggaatcagatgacagtgagtttgatcatgatgatgagtttccaccgtcaactgatggagatgagttgtcaaaaactgaaaagacaaagagaggaggaaagaggtcaagagctggtattcagttgtccccctccaagtgcaaggcgaata

SEQ ID NO: 28733 - DNA, 2673 bp, Zea Mays
ctcccagtggccaagtacactcacccgctcgcgcgcgtgagcgatgaaagctctcgcctcgcccgccgcctccttcctcccgggtatcccgagccctagccatctcgcgcgcgcgcttccccgatccgcggcggccgcgctctcgcggcccccttccgggcgctccatcgccgccgcggccgcggccgccacaggggaccactggggcgccgaccaccagcactaccacggaggacgcgcgggcgcgtcggaggccgggcctaccgcgtcggcgcgcggcgtcaagtgcgacgtggacgtggtgtcgtggcgggagcggcgggtgctcgcgtccgtgcctgtggccgccgacgtcgacacgctgtggcaggtcatcaccgactacgagcgcctcgctgacttcatccccaacctcgtccagagtgtgacgattccgtgtccgcatgaagggcggatatggctggagcagagaggcctgcagcgcgcgttgtactggcacattgaggcgcgcgtcgtgttggatctccaggaaatccctgactccgataagtgggatgggaggtcctctagtgcagttttgctgtatgaagttaatgtgataccaagatttaacttcccggctatatttcttgaaaggattataaggtcagatcttcctgtaaatcttcgtgccttggcttgtagagctgaaaagatttatctggaaaatcaaggatgtggttcaagaaaattttttgttgaggacttgaagccatcatatacttctcagcttaataacttccatagtacgacagttgagacttctaagtttaaacaagcacctcccaggtctggtgttagcagtgtgcttccttcaccttcttctgaattgattagcaaatggggtgtatatggaaacatatgcagaattgataagccttgtgtggtagatgagatccatcttcgaagatttgatggcatgttggaacatgagggggctcataggtgtgtttttgctagtatcactgtgaaagcaccggttcgagaggtatggaatgttctcacagcatatgagaatttgcctgaattcgtaccaaacctggctatcagtaggattgttcttcgtgataataacaaggttcggataatgcaggagggttgcaaaggcctgctttatatggtccttcacgcccgtgttgttatggatcttcgcgaaaaacatgagcaagagatcagctttgaacaagtcgagggtgatttttacacatttaaagggaaatggcgcttagaacaacttggggatcagcacaccctgttgaagtacatggttgaaactaagatgcatagggacacctttctctctgaatctatccttgaagagatcttccatcaaacttgtgtgcaatccgtgattatattgaaaaggctggagccaagagtagcaattccacaggtcattctaatgtgcccacagatccagatccagatgttgatcatgatgaaagcaggcaatctgagcaaacgtgtgtgtcttgctcatccagtaccatgaagcagagaccaaaagtcccaggattgcaaaaggacatcgaggtcctaaaatcagagcttgataatttcattgcagagtatggtcagtatggtttcatgcctaagagaaagcatctccggtctcatggaagagtggatattgagaaggctataacaagaatgggtgggttccggaagattgccagcataatgaacctttctctttcttacaaaaatcgaaaaccaagaggctattgggataatctggagaacttgcaagaagagatcagccggttccagaaaatttgggggttggatccttcttatatgcccagtagaaaatcttttgagagggcaggtcgttatgacattgctcgggcattggaaaaatggggtggggtgcaggaggtttcacgccttctttctcttgaactaagatatcctagaagacaagcagacccggacgatgagagacagtctgaatccccgtctgggatgatgaagaagcacggagtgaaacctgatgaaggcaatgtttccccaaatgcgcagaaatggctcctgaagctgaaggacttggatgtcaattgggtggaatactaggtttagctttggaaaaagatatggtctctcatcatgaactcagctctttcctttcttcggaggtgttctggatgcattccgacaaagacgccgcagattgtgtacagaacagcgcggtgcacgggccaaccccattctgaaggcgagctaccagcaggcaacatgttttcttgccagtaatcacgactcttggctactactgcgtatctagaactgctgacaatactactcagcttcttttgcggtcaaaccgatccatggttttgacaaagtcaggccataaaatgcagaaaagggtgtcgatttcgtgcgcctgttcaaagctgttttgagtcagccacgcctttgaaaaatctgaggtgttcacaggttggtcgcctactttgttattactggtgatataagttgacctggtccttttgaaagagaaggtttacccgtctagtaatagtttcagtcggcacgtttgcattacattggtctcgatcaggaggcacagctacatactttacgtctttacctattgctgcttcaattcttcatgggatgaatgaaaccgac

SEQ ID NO: 28734 - DNA, 1117 bp, Zea Mays
gcgcgcgagattgaccaaaaattcacccatctgtagctgctccccgaaccccgacccacaccgctgccgacgtagtcgcacggccgctccccgacccacacctcacacaatgtgcgcccccccattgccgcctcccctctagatccttaatgcaccgctaggtcccgtccacagccgctcactgccgccacctctaacgcgcctaggaccatcgccacctccacatctagcttctggagtcgagatccatggtcgactccactggaggagcccggatctggcctaccgggcacggtctcgagctttaggcatctcagcaggcagcggtgtactccgtcatcgcccaatggagcagccgaccaagcaagaactctatccatgctcgtgccgaggcgctgtctctactctctactccatccgttctgttcccgcgcctgcgcgtcgtcctctacggatccgtccactgccgcgccagcacgatgtgaaccgagacacgcctccgcctatgcgtccaagacacgcctctgcatttgcgtccgtgcactggctacgcggcatcgattacggagtggaggcatgggattattatctgttgcatccaaatttttatacactttattatgttcagatttggagccttgactcctgaacctgaatatcatctacctgagacgaattttaagtctacctactcgcaattctctacatatgaggacttgaggatttagagcaagacctaaaggtgttctggacaaagaaagcttgtaccttaaaacaggaggatacaagaagctggagtggtagtctgaaagcttttgaactgcttgaagcattagtgtagctttggtgcttttgtgactgatcagctctggagcagctagagtgatgtagttgtgggcttttgaacaatagctagagtgatatgaaacattagtgatgtagttgtgggcttttgaactgcttcacgctggagtgatgttgttgtggtgcttttgtgactgatcatttctggagcttttgtgaatgatctagctagctaactgtaaatgatctagttgtgaatgatattataattgtgatacttttgtgatatataattgtggtgcttttgtgttta

SEQ ID NO: 28735 - DNA, 235 bp, Zea Mays
gctacttctgcaaaagtataagttgatttttgctaaagcctctccttgactcctatttatccagcatacccttgagaatcttttccttagtcgggtaagacttgctgagtaattccatactcagggtttatccctttgttgcttttaggtgaggaagcgacaaatttttgttgcttttgctccaaggtggtaccaaatgaggaaaaacaagactgaagtgcgggaggacttggtc

SEQ ID NO: 28736 - DNA, 582 bp, Zea Mays
ggggggggcacgattcggttcggaccgtggtgtgtggccgttatcttcgtcgtccgcgctgaccttgtttccctcttgcctttatattaacccccatgaacctccccacgtccatccgaagaacaagaccggcggcagctgagaacttggggagccgccacagactttatcatgccacaaccaaattggcgttcgggttgccattttgcgtgacctctgatgcacaccactcatacctgtggcctcgctacgacgggacgacaatctggggcggtgaatttccggtcggatcacgggaagtcgtctggaatctcgctctaccacaggcgtgcggatatgcgctccaaatctcgtgcggtcacgaggatccgaagaatcaccctggtaactggaatctcaagtgcgaggcaagttgtgcccttgatcactttcatttacccaataatattctttattgtcacttattcatgcataggtttaattttgatgggatccaataggctaccctagtctgtttatcctgtttaccttgtttacccctgattcacttgggtagttatggtattgcattatgtggtttcg

SEQ ID NO: 28737 - DNA, 462 bp, Zea Mays
cggcaatgatccttccgcaggttcacctacggaaaccttgttacgacttctccttcctctaaatgataaggttcaatggacttctcgcgacgtcgggggcggcgaaccgcccccgtcgccgcgatccgaacacttcaccggaccattcaatcggtaggagcgacgggcggtgtgtacaaagggcagggacgtagtcaacgcgagctgatgactcgcgcttactaggcattcctcgttgaagaccaacaattgcaatgatctatccccatcacgatgaaatttcccaagattacccgggcctgtcggccaaggctatatactcgttggatacatcagtgtagcgcgagtgcggcccagaacatctaagggcatcacagacctgttattgcctcaaactccgagtgaatacaagctgataatccctctaagaagctaactacggagggacggctccgcatagct

SEQ ID NO: 28738 - DNA, 2357 bp, Zea Mays
agttgataatataatttgtattggattttgtgtagtgtgcaacttttcaaaatctatggagaaccaaaaccacctatgcaagaagacataacttacatgtctacattggggccatttccgaaatgggcctcgacagagaatagaatagcctaatcaattcagttggttatttcttatctagaagcaaaagagaaattgctaatgctatttttacccgttttgtctttatcctttccgcgtccgacgagtgcgcggcggccggtgatgactggtcgcgacaggtgtgccgcgggccccgcggtgccgtgccgtgtggatcagtcccgatccttctcccgccttcggccttccccgcgcgcgcgcgcacgcaccagcaccaccgcgatataaagcccgccaccaatccgctcgtggtcgtcgtcatcatcccgattcccgacacgcttgtgttgtcgcgattggcaagctcggcggctcgtggcagcgggaacttacgaggcgaaggagagcgagggcgaccgcgcggatcgcatcgcagctctgggcggaggtggggccttgcgcggagatgctagcggtgttcgatcgggcggtggcgccgagcccggaggggctgcggcagccgggcgccgcggggggcggctgcgcggcgggcctcgcggaccggttcagagaggcgcggcccgacgcggtcaccgtcaaccttggcgggtccggcgccctggcgtactcctcgagcaaccagaaccccctcctccccaggttgtttggcgcggtggacggcgtattctgcatgttccagggaacaattgcgaacgttgctgtgctgaagcagcagtatgggttgagcaaaggcgctaatgaggtcagcatcatcatcgaggcttacaggaccttgagggacaggggcccttatcctgcagatcaggttgtgagggacataagtgggaaatttgcatttgtcctgtatgattgctccactaagtcggtcttcatggctgctgtaagtgaactactcctatgttgtaccaaattgtttttttttggctattctcattattaacatcttatgagcagacattttgtcaataaattagtcagtgactcagtggtgttgtccttttaaaaaggattgtgcatagtggtgttctggttgctctatgtggatgagaactcaaatcatcttgggatgcacatagaatcggcatcatatatagtagacaactaaaggttttgcttaaggtcgaagtggcaatgccattttttcagcagactattggatcatagtggtgctagtgcagaactggcagcataaaatcgaatcaaattcccgctaattgggattatgacacctatctagtgagtagtgatgtcacttttttttcaagtaaaaaaaaatgagaccttcacttctagactagtctagagaccccagcctattctgttcgtgtgatcagcatcatctatgtgacatttatcaatgttttgagtttccaccttcaacaagaacagcaacatcactatctacctgcatttcactaaattggctggttcttgacgatgcttctgcctaacattttcatgtcatcgtcctacatttacaaagaacagatgcagctgttcagttattcccgaagacatatatctgatcacaggctactgctacgacgtacaatggtaccactggtattgaccggcaactgataggtagctcagctcgtgttcgtaacctcataacaggacaccgatggaaatgttccgttctactggggcgtggacaccgacgggcgtcttgtggtctctgacgacgccgaactcgtgaagagtgcctgtgggaaatcctgtgccccgttccccaaaggcttcttcttcacgacgtccggagggctgaggagctacgagcaccccatgcacgaggtgaagccggtgccgagggtggacagcaagggcgaggtgtgcggcacgacgtacacggtcgacgcaagcgccaggaaggagaccaccatcccaagggtcggcagcgccgccgactggtcttcgcagtactaaaattcgttatctttctctgtgtgtgttgaacgggttcgagcgcaggtagcagggcgtcgcacgggcgtggcccgtgtttgttcgcatggaaaccctagctgtctggtgtttatctgaatgaatagactgttctctatgaatcaacacggatttctctctaagttcacatgatttccgttgctgctttgctgcacgcctgtactgtaacaagaattactgcctttgttatcaggaaataagttcacatgatttcctgtctgcagatgcgctgccagtcgagcatccttgaggaaggatagggataaggc

SEQ ID NO: 28739 - DNA, 6257 bp, Zea Mays
cgtctgtcactctcctctctcgcgtcttggtcctcctcctccccttcatcgaacgaatccatccaaggcaaaagggaacgagggaagcaagcaaaaaatccccaattcctcctagatcgatccaccgccgacgggacgaatccaatccaggagctatcggctggaattggattcacgcgcacccgcccgctgccgctggccgccgcctagtctcggccggccggccgaccggccgccctccccgcgcgcgcgccttgccttgtatggaaacacgcagcagcagtcgcaagcgcgcagcggccgccgcctcctcgtccgcctccaagcgcccccgccgcaactcctcttcctcctcctctgcgccgccgcgccagcagccaccgatggaaccctcgccctcctcccgccgccgctcccgcgccgccgccgccgacaagggcaaggaccccgaccccgcctcctccgaccacccttccccacccgcccctgacgatgacgccgacgtcaccttcccccagcccttcacctccgccagcaccgccctccagggcctcctccgcaggctcggcgccggcctcgacgacctcctcccatcctcctcctcagcgccctcctccgccacgtccggtcacctcaagaggatcctcgccggcctgcaggcgcacggcgacgagtcgcgccagctccagtccctcatgcagctctgcgagatgctctccatcggcaccgaggactcgctcgccgccttcccggtcgatgcttttgtcccaatcctcgtcgggatgctcggccgcgaggacgagcctgccaccgctggtgccagccccgacgtcatgctgctcgcggcgcgggcactctccaacctcgttgatgtgctcccctcctcctgctccgcggtcgtgcactacggggccatacagtgcttctgtgctcgactgctcaccatcgagtacatggacctcgctgagcagtctctacaagcccttaagaagatctctctggagcacccaactgcctgtttgcgagctggtgccctaatggctgttctatcgtatctcgacttcttctccactggggttcagagggtagccttgtctaccgctgcaaatatttgcaggaagctgccgtccgatgcttccgagtttgtcatggaagctgtccccttgctcacgaatcttctaaatcaccatgattccaaggtactagagcatgcttctgtttgtttgacacgcattgctgaagcttttgcctattaccccgacaaacttgatgaactctgcaatcatggattagttgctcaagctgctagcttgatagctgttggcaactcatctggccagacatcactgagcacatccacatatacattaaaacactacttcttcttgggatcagcggcactcttaaagatatcctttctggctctgctttgatttctggaacatcagtctcccctgctgtaacaaggcctgcagatcagatgtttgagattgtgagccttgccgatgatttgcttccgcatatccctgcgagaatcattaagttaccaacatattaccatacatataaaggctcttcaacaaagaaatctgcttccatcaaacaagaggggggtggttcaacaggaaatgaaaggtctggccgtgagaggctattgcgtgagcaacctgagcttttacaacagtttggtatggatttgttacccacaatgacacaggtgtatggttctagtgtaaatgcaccaatacgtcacaagtgtttatctatcattggaaaattaatgtactacagctccgccgaaacaatccagtctctccttggcacaacaaacatatccagcttccttgcgggcattcttgcatggaaagatcctcaagtgttgattcctgctcttcagatagcagaaataatgatggaaaagcttccagagacattttccaagttatttgtgagggaaggtgtcgttcatgctgtggagtcactcatatgttcagaatcttccaacaaaatgccttctcaggtgccacctcaggataaagataaagattctgccatgccatcacgttctagacgtcaacgccggcgtgcgggtgctgttgcagcagaaaatagttcattggatgaatcaaatagttccaaccttggtgttatgtgctcaacagcaaccgcttcagaagctccaaacaccagccttcgtttcacagttagtgaccatgcaaagtctttcaaagataaatactttccggcggatactgattcaagtgatatcgggtttactgatgaccttcttaaactgagggcactctgtgcaaagttgaatactgtctctgagaacgtcaaaacaaaagcaaaagggaaatcaaaagctataagcactaattttttggacatctcaattgatgttgaagaacaattagacaaaataatatctgaaatgctctctgagcttagcaaagttaatggtgtttccacatttgaattcattagaagtggtgttgtcatagcattgcttgactatttgtcctgtgggacatttgggaaggaaaaggtatctgaaggaaacctatctcagcttcgtcagcaggcccttagacgatacaaaaccttcatatctgttgccctttctattgatcatggacgagatgaaactcccatggcactgttggttcagaaactgcaaagtgcattgtcttcgctggaacgtttccctgttgtgctcagccagtctagtaggattggtattggagggtctcgtctgacttcaggtcttagtgctctggctcaacccttcaagcttcgtctttcccgagctcaaggcgaaaaatcacttcgggattattcatcaaatattgtgcttatcgacccatttgctagtcttgcatctgttgaagaattcctttggcctagagttcaacgcagtgaggttgcatcgaagcctataattccatctggtaataattctgaatctggggttcctggcaccacggctggtgcatcattaacagctgcaatggctcaatctggtcggcgcccaacaacaagatcaaagtcatctgctgcaggtggtcttacatctaagaaggattctcatgatgaaagcactagtactgccaaaggaaaaggaaaagctattgtaaagccaaactcagatgaatcaaaaggacctaatacaaggaatgctgcccaccaaaaatctgcttcagagaaagatttggaaatgaagcaggcacatggccacagtagctctgaggatgaagagctcgacacatctcctgttgagatcgatgatgctttgatgattgatgatgatgacatttcagatgatgatgatgatgacgacgatgatcatgaggttctccaagaagggtctcttccaatctgttctcaagatggtgtgcatgacgtgaaactgggtgatgccgatgaatctaacattggatcagctacttttagccatgcacagccatcatctggttctggggctagaaacacttctagcaggggaccggattctactgaatttcgaagtatgggcacattcggttcacgaggtgcaatgtcatttgttgctgcgacgatggctggtctggcttctgttggtggtcgcagtgttagaggtgtccgagatcggcgtggtctgtcacttggaggtagcatgaatgatcacaataaacttatattcactgctggtggcaagcagcttaacaaacatttgactgtatatcaagctatccaacgtcaacttatgctcgacgaggatgatgaagaaaggtttaatggatctgatataccaaatgatggaaaccgcttctggggtgatgtgttcacaataacgtaccagaaggctgataaccaagttgagaagggttgccaagggacttccacctcattaaacataaaatcagattcttacaggtccatttctgaagcacaaggggtttctcttcttgatagcatcttacaaggagaacttccttgtgatcttgagaggacaaactcaacgtacaacattttagcattattgcgtatacttgaggggcttaatcagttatcccctcgtttaagagtacagggagcatctgatgattttgctgagggaaaaatcaataccctggatgagttatatagaactggagccaaggtaccttctgaagtgtttgtcaatagcaagttaacaccaaagcttgctcggcaaatgcaggacgttctcgcactatgtagtggcagtttaccttcttggtgttatcaaatgaccaaggcctgcccattcctgtttccttttgagacaaggaggcagtacttctattccacagcctttgggttgtcacgagcattgaatcgactccagcaacagcagagtgataatcacagctctggtggtgaaagagaggtcaggtttggcaggttacaacgccagaaagttcgtgtttcccgtaaccgtattctagattctgctgctaaagttatggagatgttctccagtcagagggctgttcttgaggtggaatactttggcgaagttggaactgggctggggcctactctagagttttatactctcttaagccatgaactacaatgtgctcaactgggattatggagagctacttcttcatatgattcaggattgcacactgatatgaaggatgtgatccgtttagatcctgaagatgggtcgtcaggaaaagaactcaacacagatctaccaggtgatggcatgtatttgatacaagctcctcttggattgttccctcgaccttggccacctaaagttgatacttcagaaggtagcagattcttcaaagttttggagtatttccgcttaataggtcaagtgatcgcaaaagtcctgcaagatggcagacttttagatttgcctttatcaacagcgttttataagcttatacttggacaggaacttgatttgtttgacatagtgtcatttgattctgagtttgggaagacattgcaagaactgcaagttcttgttgaacgaaagcagttccttgaatccacttctggcaagaaccagctacaagttgcagatttgtgtttccatggcgcttctattgaagatttgtgtttagattttactcttccaggttatcctgattatgtgcttaaagagggtgaaggaggcacaattgttaatatttataatttagaagagtatattactttggtggtggatgctacagttaagtcagggataaagcgacaggttgaggcatttagatcagggtttaatcaggtgtttgacatgtcatccctccacatattttcacctcaagaacttgactatctaatatgtggtcgacaagaaatttgggagtcggaatccctggtggataacataaaatttgatcatggatatactgctaaaagtcctgcgatcgtgaatctactcgagattttgtcagaattcacccctgagcagcagcatgcgttctgccagtttgtaaccggtgctcctcggcttccacatggtggattggctgcccttagccccaagcttactatagttaggaagcatccttcaagtgctgtgaatacttcaaattcaactggggcagtagagtccgctgatgatgatttgcctagtgtgatgacgtgcgccaattatctgaagctgcccccctactccacaaaagaaatcatgcgcaagaagttgctttatgcgatcctggaaggccgaggatcatttgatctttcataagaaatatacaatatccgaactaacatacaggggtcagttttattctggagatttagtttcttggtccatgtataacactgagttgaggttaccagctcactcagcaaacggcttcaagggcgagagccccagtcctcactcggatgcaggctaagctatagtaattgaggatgtgcgccttgagtgaggatgtgcgccaacaagaacccccgtttgtttcagtacatgtaaataaaagggattttttgttccagaattgttatctgtaacaagaacatctacatctgtgatgactgaccattaataaatgtgtcccggtgtaccatttgttttttttctttgagcactggcagtagcaggatacacaaaagggagtgtatgctatatactactagtcgcggatagctcatctggtcatggccacagttttttcttatggagagaataacaaaatttggccctataaacagaaaaaaataaagtgcaagaatcggcagcatgagaattgtttgtacccaagactatctttagtagcttaccc

SEQ ID NO: 28740 - DNA, 1844 bp, Zea Mays
tattgaacaaccgtggtttactatttctaaccaccaggcagcccaacaagaaagatcaattttcttatcttctttgcttcctcttctgtccgaatatgatgatctccagccttcagttcttgatgctcagtcaattgttagtaatttaaaggttttgtttaaacatttgcaggaacgacttattgttactgaggacagattaagggagtctcgataccagattactccatggcatactgaattgtcgaataataccagcaatcctgtgtctactaatcctcctgctggaaaagcattggtgactacaagcaaaagcagccttgatattgtctcccagatggtgtatcctcacgtacaatccccaatgtcttcccctgttcaagctagaggtgattggggtgcatttggtaacaaaaaccatcaagatatttcaaatgaggttcctataagaaatgctggacatgatgacaagggagggacctctctttcaagcagaagccaatataggactgatgttcctcctcaagtatctcaaggtgattccagtgctgtccattttgactttgagactcagagtcaaaacccaccattcaagggtcttagcagaaatgatgtactggatggttcagatagtgctgaagcccaaaacacacaagaaccttctactcgatggggtctaggggactcatctaatttggcatctggccttgaggatgcaaacccttcatatccttatcttcctacagttcttgaggaacctggttcttctttctccgaagctgcagaggatgatccattgccaggcatagaagggcttcgaatcacaggtgaaccttttcctggacaagaacttcaagcagtgggtgcgccatttagaagacggctcagtaaatttcatagaaggagcaaagcagcctagctatgttgttactgccgatgatgtggacactttactcgccattgaagtccagcccctagatgataggaaaaggaagggagactttatcaaggtttatgctaacgggcagaggaaaatttcatgtgatcctgaaacaaaggagcttattaagagaacccttgacattgggcatgtgacctatgaagtccaagtccaactgcctcaggtcagatttttagacatatgggaaccagctgttctagcaataaagagggaaggttacagcattaaatgtaatgggcagcgtggtgttctaatcacagagaagtttcagcaaggaactgctattcatattccatatgggcgtccaacagagttctcgattacatctgctgcgtctgctgatggtgtcagttataatctgaagccagtagaaaatacactattgcgggataccattgttctagtactaaggttgttcaaaaatatggctcttgagagaagaggaagaagaaagaagggtcttttcttcaagtagtttcagctatattacacttgtttctacgctgcttctaatgtatgtatgtagcattttggttgatcggcgtggtgcacaagtgttctgtttctgtaaaatactagacgattgtgttgtaaaactaaccaaaatgccaagtacacatgttaatattttctgccccactcagaagagctagagttttgccataacgagtgcagctccgcgtttggcttccaggcacagctagatatagttcaataatgtaatcgggtgaaaaagaattgggcggccccagaagatgctctttgagattttatctttgccaggagtcgtccgccctacacctggtgggcggtgtctgcctgcctggcttgtgacttcaaaattggcagcgtggagatgatgaggtcacggttcacgcccgag

SEQ ID NO: 28741 - DNA, 1852 bp, Zea Mays
tgccaggccacggttgggatgttaaaactgtcgattggcatcctacaaagtctttactggtttcaggtggcaaagactatcttgtgaaactttgggatgcaaaaagtggcagagagctgagctcattccatggtcataaaaatattgtgcattgcgtgaagtggaatcagaatgggaactgggtactgactgcctcgaaggatcagattattaagctgtatgatattagatccatgaaagagctgcaatccttccgtgggcacaccaaggacgtcactgcattggcgtggcacccatttcatgaagaatattttgttagtgggagctttgatggagctatatttcattggttagtcgggtaagccatgaagctccacagattgaaataagtaatgcacatgacagtagtgtctgggatctttcgtggcatcctgtaggctatctactttgcagtggaggcaatgatcacgctacaaagttctggtgtagaaacaggcctggtgatcttacccgtgatagatacaacagtggccaaatgcaaggttttggtgaccaacatgctgcttttggtgctcgtggtatgggtggattccagatgcctgaacctccaataacgcctggaccatttgctcctggattgtcacgcaatgaaggtaccatccctggcattggggttgcaatgaccttggcaggccagtcttttgatggatctgatggagagcagaggccatctattccgggtcttccacctgggcaacccccgctgccaccaggtcctcatccatcacttcttgggcagcaacaacagtatcaacagatacctcagcagcaacatccccagttttcgcagccaccacctccgaacatgccccaactgcaggcaccagctcacatgctttcacattcacaaggatctcggcctactcttccccagcttccaccaatgggtggaccatcagtgccatcacaagtgaacccaccgcttccgcctatgcctcacccaacggcaatgcatggttcacagagtcagatgatgccccaaatgccacagcacatgatgggcctaaatcagatgcatgctggttctgtgcctcctggtactgtacccccaatgggtgggttcccaagtgggatgggaaacatccaaggagcatcaggttcgtctggcgtacaaaattttcctatgggtggcatgtataatcggcctcagggacaaatggctccacaagggcaaatgacatccattcctggtctaagctcttaccagggaatgggtaatgttggccttacaccgccaccgccacagcacccgccgcctcgaggaggctcggcaacacagtgaccatccctggagcaaaacaaggattgtactgaacctaaactttctcgtgacactaaatttgtagcatgtaaatccatctcgagcaatatcagcgtgtctagactcccgcaaatcacgagggatttcttcacgattattgctcaggcagctaggatttttgctatctcgtgctgtggtttacaactgggggccttctgtcatgtgcctcatttgtactgtaattcgaatcgtgcctttacttgccggctgcttagatgttgaacatagagaattctttccctcagttttgagaagcgtgaacttcacttgtgccagttattgcatgtgtactttacgagttgttgacagacgatggcagtcaatacgtgtgatatcctgaccccggttgacagtagaattgattggcctaaggcttaatagaattgatagtgtattcatatcaacaagatgtattttctttttttaagtctgtcttgaaaaaatcttcaaattaagggtgcttgacgagca

SEQ ID NO: 28742 - DNA, 2369 bp, Zea Mays
gtggacccgagtggctgagtccacctctgatgctctgacctccgcctcctcctttctctcgtcgtcgtctccacgacacctcaaccccaatcagaacccggacccagatctctaaaaaatccccaatcccaatctgccgtacgccgttgcgatcatacctccaaatccgcccccaagtctgttcgatgcgaatagcacctgcgatttagcgaaccgtgcgctcgctaggtttagggtttcgagggtttgcgttagggtttgggcgcacgatggggcggtcgcgaggggtgctgagttccggcgacgacgacaccgggcacaggtcgaagcggaggagagtctcgtcgggcggggatgcgacggactccatttcagcctccatcgggggagctggagagggagggggcaagaaggcgctctatcactgcaactactgcaacaaggacatctccgggaagatacggatcaagtgctccaagtgccctgacttcgacctttgcgtggagtgtttctctgtcggcgctgaagtcaccccgcaccgcagcaaccatccttacaaagtcatggacaacttgtctttcccacttatttgcccggattggaatgcagatgaagaaattctcctccttgagggaattgaaatgtatggtctgggaaactggcttgaagttgcagagcatgttggtaccaagtctaagttacagtgtattgatcattacacatcagcatacatgaactcaccttgttatcccctcccggatatgtctcatgttaatggcaagaataggaaggaacttctagctatggctaaagtacagggtgagagtaaaaaagggactttgctgttacctggagaactcactcctaaggttgaatctcaattttctccctccagggtcaaggtggaagatgcacttggagaaggtccagcaggtcgatcaccttcacacatggctgttggtgcaaataaaaaagcttcaaatgtgggacatattaaggatggcgctactgtatcaaaagtcgaagatgttcatgtagatagaagtgttggtgtgaagaagcccagatattctgcagatgaaggcccttcgttgactgaactgagtggatacaatgcaaagagacatgagtttgacccagaatacgataatgatgccgaacaagctcttgctgagatggaatttaaagaaactgattcggaaactgatcgtgaactgaaactccgtgtgctgcgtatttacctctccaggcttgatgaaagaaaaagaagaaaggagttcatattggaaagaaatttgttgttccctaatcccttggagaaggatcttacgagtgaagacagggaactttaccatcgctataaagtcttcatgcgttttctttctaaggaggaacatgaagccctcgttaggagtgttattgaggagcgaaaaattcggaggagaattcaagaactccaggaatgccgttctgctggatgccgcacactggctgaagcaaagatacacatagagcaaaagaggaaaaaagaatacgagctgaatgcgcaaaaagctaaggatagcagtcaacttaatgcaaataataaatcagtacaaaagatgaatcgacctatgaaaattgagtccgatgggaatttggatccaaagaaaggtggtgctggcttggattctcctaagacaacaggacctacaagtgttaagcagtgggatgactgggatatagttggtcttcctggggcagagctattaagtgctagcgaaaagcttctatgctgtcagaacagattgctacccagccattacctgagaatgcaggaggtgctgatgcaggagatattcaagggtagcgtcctaaagaaggaagacgcccacgtcttatttaaggtcgatcctaccaaagtagatagtgtttatgatatggtatctaaaaaactgggcaaccatgaggaggccccaaccgtctagcttacgcttttgagcttgcctgctgtgacatgccgaaggaaacaaatcttggtctggcccttcgcagcgtgtctgaatcagggctgaaggtggtggaaccatactaaatcgaatcggccatagttagctgaaattcatatcagctgtcagtagcacagtaaggcattcccgccaagctgtaaaattattgccccgacgagaatgtgtagcatgaatttgaatttcttttctgctattgctgtgtactgttgcagggtagtgccttattgtagtatatgtataggtgcctgagttttatgtatcatcgtgtatgtaccatttgggcgctctatttatgccattgtaccaaccccaaacatcgattattataattcatctcgcagccaaattcttgtcaagaaa

SEQ ID NO: 28743 - DNA, 1974 bp, Zea Mays
ggcatttctagacataagtgaacaaatatttttgcaaccttttgccctagctgaaactctttgtggttcgccactttacatggctccagaagtcatgcaagctcagaagtatgatgcaaaggcagatctgtggagtgtcggtgtcattctatatcaacttgttactggaagaccaccttttaatgggggcaatcagatccagttgcttaaaaatatactcaggacatgtgaaatacgcttcccatctgattgtgacttgagccatggctgcattgacttgtgcagaaagttgctgcggctcaattcagtggagcggcttacagttgaagaatttgtgcaccacccatttctttctgaacatgctccagagaagactttgagccttacacaatctgacataagagatggctttccaagaaataatagcagtccaacaaggcattcaaaccatagttcacaagaagattgtatgccttttcctttagatgatgagtcaagtggacaggacgagggtccagttcctgacagtaagagtctgatgaaatcttatggatttcccatgggtaaaagattggataaaacttcaggccagaagagtccaccgaaacataacagtttgttctccaggtatgtcttgggcaataatcatgcacctagtagccaacaccatggccattctggtaaagtgaccaaggaaagcaagattcatgaagtacaaggtcaaaaggttgtttatccagaagatcaggaatacgtcttcgtgtctggaccacacctggagggatcatcatcttcaacaaatgcctctcagcagcttaatgtaccagcaaaatatgataattcgtctgtttcaccaccaaagttaactttcatgagtgcaccaatgccgataaatggtttgccgattaatagacaacaacttgctgggactggtagctttgacagccactgttctcctgcatctggcacttcacagggatctgcagatataagtgatgccatggatcagcccccatctgattatctgacgaggattagattgttggagcaatatgcatcagccatagcagggttggtcagagatgagatcaaaggtggcagacacttggaagcgttctctattcagctaattgttcttgcaacctggaagcaagcaattcatataggaaatacctttgtagcttcacctgcaagggagagtccctcacaggatatccctatgaaggggcatattgctggtgcttcccatttgcctgcgaactcaaagctagctgatgatgcctgcatgcagatagagaaacagtttctctctgaagttgaatatgctgaagaactagccagcattgtgggacagatagctgatggtacagagatgccagatgcaattgaaatgatatttcagtcggctttactcataggaaggcgaggcggtgttgatgaaatgtttgggaaagccgcggatgccatgactgggtatatgagggcggtatccatgctgcggtttctcctggtcgaggcaccatcactcgccctcaacccccctttgactctaacgagatccgatcggaatcgactgcgcacatacattgacgctctcaacaccaggctctgtcagatgcagagccagaggcattgactgctgccatgcgccctcaaatcttgtccaggtgttgtacaatattctttcatttgtaaatatatttgttggcccaaactagggcatatgtaacatgtcagaactgtggaactaggcagagcagcgaaaatctattgtaaatatatttgtagtgtggaattaggcagagtgtacgtggtaggttcattctgtgtcgattcaggcagaagcttgaaaaccgaataaccaataatagtcacgtgtggaaatgtaaacagctcggcctctacttcgtagattctttattatatattagtaaattagctcgataaaaaaaattatgcacctaatatcatctc

SEQ ID NO: 28744 - DNA, 2064 bp, Zea Mays
ttttttttttttattataaaacttctgcccgagcaaagcggccgaccaagttaccacagagcaagtcagcgaggcgaaataggcgaccaagtcccaaccgagtaagaaagggagacgaaactgccgaccaagtctctaggcccacaaggttccgcgcataccctgacggcaagccatgtaccgggtgaagagccaggcggagggcgagggcgagggcaaggacgagatgatgtcgcaggaccagatggactcgccggtggacaacgatgtcagcagcagccgcaggtcgcctcgcaggggcgtcggggcgcccctgaagaaagggccctggacggacgcggaggacgccatcctgatagactacgttaagaagcacggcgtgggcaactggaacgcggtgcggaagaacaccgagctattgcgctgcggcaagagctgccgcctcaggtgggcgaaccacctcaggcccaacctcaagaaggaggccttcaccccggaggaggagcgcctcatcatccagctccacgccaagctggggaacaagtggtcgaggatggctattcatttgccagggcgtactgacaacgaaataaaaaactactggaacacacgaaaaaagagatgtgaacgagctagccttcctatctatcctgctggtgtacgtaatcaatcttcaaatgaagaccagcaattgtctggtgatttgaacggtggcgagaacatgtccaatgatcttctatccggaaacagcctttgtctaccagattttaacaatgacagtttccgtgcgaaactgaaggctttaccaccacagctgccagctgtttcaataagcaatttgctcggccaaagctttgcatcaaaaggttgtagcttcatggatcaggtagaccaagcagggatgctgaaacaatctggcagtgcgcttcctacattgagcgatgccattgacgatgtgatttcctcggttgatcaattttcaaatgactctgagaagctcatgcagactttaggttttggttatctcaatgaagccaacgctaccagcaagagtattgcgccttttggggttgcacttactggcagccatgcccctttaaatggtattttctctgcatctaggctcacaaatggtccttcgaagatggagcccccttcagtccaaaatagcaggctcaagtatactgtggatcctgcaatgcagcctactgagttagtagatccttacatgcagtctctatcagcgaccccttcagtgaaatcagagtgtgcatcgccgagaaacagtggtcttttcgaagagctgcttcatgaacctcatgcactaagatctgggaagagccaacaaccatcggtccgaagttcaagttcttctgctggcacaccttatgggactatggttagctcagaatttgatatgggtcaggaatattgggaagaacagcccggttctctcctcagcgaatatgctcacttcagtgggaattatttggctgaatgcgctcctcctgttagcgctgcatcaactgatatctttccgctccccaagatttctcctgcagaaagcccttcaatgggctctggcgagcaggcgttagagcctaaacatgagtcagcagcttcacgtacgtcatcttggaaacttgaggcatgatgcattattctctgggaacacagcccattcatccagtttcaacgataccatagcaatgctcatcggcgatgtacctgttcttggtgatggaattgtgctcgattcttcctcatgggacaacatgccacatgcttttcaaatggcggaattcaaatgagttccatataatttctttgtgatgctgaagggcttcttcctgcttagatccttgtgatcttcatgcggatagtccttttgtctaattaagtgcatggaagataacctggatattatttttaattttttgctttgtattagagaaccgtttttgccatccctgacagcatttctgttggaaacgtgtcatgacttttgtttgaacaatttaaatatcggttatagataatgtgatgtgtgccatcccttgatgc

SEQ ID NO: 28745 - DNA, 934 bp, Zea Mays
ccgcgcctcctgctccccttaacctagccgccactttgatggagccagacgcaccctcgcttcccctgcacagccatcgccgccgccattccttctccctcctccctgctctagccaccaggattcgaagccgaggacccgcgacaccaggccgagcacccctgcccgaatgtgccgagcgcgcgaccccgccaggaagccccagccgcgaccctgcgagacgacccgccgcccttcgccctgacgcgctccaacccgcgcccctgcagcgaccgagccgccccatgcgcctagtgacaccgtcgcgccgctcgccctgccgcactcggccggcccctgcatcgcgcacgcgctgttccgcgtcaggccgaccgcgaccgaaccacagcccgcgccgtgacaacaccgacgcttcggctggacccgaaatcgaagctgtcattcctcttccctccccattcctctccccgttaatggccgcccccgcatcgtcaaacgtcgtcacaagagcttgtgcccatcgcgccggagctcgtccgcgcagcacctcggcacccgcagcaacgccacgtgcccgtcgtcgagcccctgctcacgtcgtgcccagctcgccgtcgtgaagctcgtcgtgggaccattcgcatccgtacgccgttcgccatccctggagcctcaccggaattcgcgtccaacgccgagcctcgtccgcaccgcgaccgaatccctccattcaccacaaggttgaagacaacccgaatatttttataactccaaaatcatgttttaaattaattcatgaatttggtaattattcgttgtgatttggaattcatgcgtaaacgattgattttgagtatttgtgcgatgaattagtgaatgtttttagacgtgatattggtttacgatttctttagaatttgggattggaaagagg

SEQ ID NO: 28746 - DNA, 2742 bp, Zea Mays
gccacagggtgccggctgcgcacgcgcgagaggctggctaggggccgccgccagggagtgcctgaaaggccgcgtgatgggccgattgaggcaatggccttggctcaatccggtccagaccaataactcaagtttgcatcgacgcttcgacgagggctcggatggaactcgtccgtgcttcgggcggcgatggtcagcacagcactcggtagtcggttcggaggtcaggccctgtcgactttgtggccttgagttctggatgaggagatctcttgtatttgtggtctcgttactacagcccatgttatctcgggtccgtcctggacgaggcaacggccgccgcgaacggagaacggccgtcgagaggccacgtgtccacagccgtggcctcactcgcactactcgccctgctcgtcgtctccccagtccccaccagttgccttcgcatcgccggacgccgctcgccctccgcttctgcgactacgtccgagatggccgcctcggcattggcctcccgcgcgctgcggcctccgcacggccgccaccctcccgccccttcgccgcgtccgcgtccgcgctcggcaaccgccgccgctccaaggacgcgctgccgcgcggtggctgcggacgagcgccccgccgaccccgcgttccccgagcgccagaaccgcgggatttccggggcggtggagaggccggaggcggacgtggttgtgataggcagcgggctcggcgggctgtgctgcgccggcctcctggcgaggtacggccaggacgtgctggtgctcgagagccatgaccgcccgggaggcgccgcgcactcgttcgatatcaagggattcaacttcgattcagggccatccttgttctccggattccagtccagaggcccccaggcaaatccacttgctcaggtccttgatgcattaggcgaatcagtcccttgtgcgtcttatgactcttggatggtttatgtacctgaaggacaattcctctcacggataggaccaactgaattcctcaaggaccttgagatgtttgttggtgttgacgctgtccaggagtggaaaaaacttcttgatgcagttattcctatgtctgcagctgcaatggctttgcctccgctttccattcgaggtgatctgggcattatatctacagctgttggtagatacactccttcgttgttgaaatcattcatacaaatgggaccgcaaggagctctgggcgctacgaaacttctacgtccattcaaagaaattgttgattcgctggagctgaaaaatccatttgttcgtaactggatcgatcttctgtgctttctacttgctggagttaaatctgatggtgctctttctgcagaaatggtttatatgtttgcagaatggtacaaaccaggatgcttgcttgagtaccctctgggtggaactggagcaataatagatgcccttgtgagcggtattgaaaaatttggtggcagacttgctcttcgttctcatgttgaaaagatcttaatagagaatggtcgagcagttggtgtcaagctacaaagtggacaagttatccgtgcaaagaaagcggttgttagcaatgcatctatgtgggacactttggatctgttaccacccgatgctgtcccaaaatcatatgaagatagagtgaaagcaactccacaatgtgaatcgtttatgcatctccaccttggttttgatgcagagaatgctagagaggaccttgggatccatcacattgtggttgatgattggaacaaaggagttgatggtgaacaaaatgttgttttgatatccgttcccagtgttcttagcaaggacctggcaccgcccggaaagcacattcttcatgcatatactccagggacagaacctttcagtttgtgggagggactggacaggaaaagtgcagaatatcgaagactgaaggaagaacgttctgaggtgatgtggaaagctgtggagcttgctctcggcccaaaatttagccgcgaaaaatgcgacgtgaaattggtcgggacaccgctaacgcacaggagatttctccgaaggaacaggggaacctatggtccagccataaaagccggagaagccactttccctgggcaagcaacaccgatcccccagctcttttgctgcggtgactcgacctttccagggatcggagtgccggcagttgcggccagcggcgcgattgtggcgaacacgctggttccggtgtcgcagcattcagagctccttgacgctgttggaatctgagtggcagatacgtccgtcggtcctgaacgataatcaaagattttcccactgctgttggaaaaagatcgtatggctgaatggagaagaagacgacgacgacgaccgatacagtagagttttctagtcagaacggagactgggaaaatatgttgtacagtatattatttactacgactgcatgaagcttgtgctgcttctgacaaattggtcgcctcgttcgcctgcatgctccttgtattgttctaccgaaagctctgtggcgcatgcaggccttttgtcggacattttttttttctggtatacggaggaaggaccatgtgcttgtttgtacaactctagtcgcagtttgctgaagtccttgaacgacggcaacaaatgccagctgcgctgtcttttcattggagggcagcactggcctggttgttgtttattattattattattattattattattattattattattatta

SEQ ID NO: 28747 - DNA, 1457 bp, Zea Mays
ttaaggaccttcatgcaaaaccccaaccatttccccttctgcactccacggagcagtgaaaccgacctttctcccctcccccgcgttccacttcgcggagatctagcccttgggtttcgccagcggcgaggcctaagtcatcggcggcgagccaaactccacgagcggaggaagaggaggggaagctgagacgaggaggcagctatggggcagcagtcgctgatctatgcgttcgtggcccgtggcacggtcgtactggccgagtacacggagttcaccggcaaaagcaacaacaagttcacctacaactgcgacggccacaccttcaactacctcgtggaagacggattcacatactgtgttgttgctgttgaatcagtggggcaacaaattcccattgctttcatggatagggttaaggaggatttcacaaaaaggtatggtggcgggaaagctgctaccgctgcggctaacagcctcaaccgagagttcagattaaaacttaaagagcacatgcagtattgtgtggatcaccctgaagaggttagcaagctggccaaagtgaaggcacaggtttctgaagtcaagggtgttatgatggaaaacattgaaaaggtccttgatcgtggagagaagatcgagctgcttgttgacaagactgagaatctgcgctcacaggcacaagatttcagacagcaaggaacaaatgtgaggagaaagatgtggttgcagaacatgaaaatcaagctcatcgtcctgggaataatcatcgcacttattctgatcattatcctctctgtctgccatggtttcaaatgccattaagcacagccagaacactggtacattcaactgcgccctattatactgctgcttggaggcacaacaaaaaaaagtactatttttctgttcttttgctagtgtgctcttggccgggtcattgtgcacaggtgttttacattgtcctagtaattgatacatgttggatggtgaatagattagttgtcagccatccaattggtacacgctatgtatgtatagcctggatatgagtaaatttactgaatttctccggaatgttgtgcctcggcgtttgctcctccggacaataatctggggcatcttgcattggccccatttaggacatgtttggtctgtcgcctaatttgacatagtttgtcatgtctaatgctccgctcgatttagggcaactaagctttaatcacttgtagtccctaaagaagtaaatatggtgactaaagtggggtgactaaactttagtcaccccacttttgaaagcgtggcaatatttctttagtcatgtcaatatttctttggtgaatagattagtttcagccatcctaattggtacacgctatgtatgtatagcctggatatgagtaaatttactgaatttctccggaatgttgtgcctcagcatctgctcctccggacaa

SEQ ID NO: 28748 - DNA, 2341 bp, Zea Mays
cgctgatctgctctctaggcggctcgctcgttactcgttcgtcttaccgcctcccaacaaacagcgagcggcgcgacctaagccgctctgcgcccaccggccagccggggcggagagggaccgaccgctcctccgttcgaagtgccggtcctgagtcaccggcgtcgcccgcatccgctgctcagctcgcccgccagcctggtggcgatcggcatcctcttttactccagaaaaataaagatcttctcgcaaaagaaaaaaaggaaaaaaaagagaaaatgtcaatgcactgcaatggttgattctgaaacttggatcagatagacactgatactcattctactcatcaaataagcgttgtcagatcacggtgctacacacactggttcagtgaatctgcaggtgctgctcatatggaaacatacactactgatgacgctcttacgctcatggggtttggaaagttccaagcacttgtccttgcatatgcaggaatgggctgggttgcagaagccatggaggtcatgctattgtcattccttggaccagtggtgcgggaagagtggaatgtctctccccaagacgagagtctgctatccagtgttgtgtttgctggcatgctaatcggagcttgtgcttggggctttatttccgacagatacggaagaaagactgttttattgctttcgactctgcttactagtggattgggtcttctaagtgctctatctattaactacttgtgcttgctggttcttcggttttttgtcggcataggagtgggcagtgggcatgtattttcatcttggttcttggagttcgttcctgcaggaaatcgtggcacttggatggttattttttcctttttttggactattggcacagtcttggaggcttcacttgcatgggctgtactatcagcattgagttggaggtggttgctggcattgtcttcccttccatgcttcctcttgcttcttttcttcagaatcacacctgagtcaccacgctatctttgcgcacaaaatagaatgactgatgcaaggtttgtcctggagagaatggccattgcaaaccaagcagctcttcctatgggagttctcacataccaccaagaaacaaaaactgaatgcattactcatgtttctgaggatgaacatcttattccagtcagagagaaggaacatacagataggaatgctattagttccaaatctggtgctgttgctgtattgcacaagctattatcacataacttgctcaaatcaactctacttctttggtttgtttactatgccagttccttcgcttattatgggataacattgctgacatcacaactaagtgatgtgaatagaagctgtaaatctgatctggtctttgaagtgcaccaaaataatggcaatctttataaagatacttttatcactagtttagcagagatcccaggcttgattttatccgctttgcttgttgatcggtttggccggaaagctactatgtcgtgcctgatgtttgcatgttgtgctttccttgggccactcgtacttcatcagaatgagttgctgacaactactcttttattcggagctcgtgcttgtggcaccggtgccactacaactttatgtctatatgcccccgaggtgtatccgacatatgttcgctcaacaggggtcgggatcgcaaccgccatcggtaagatcggcggggttatttgccccctcgtcgccgtgggcatgctgcggagctgccatcagatggaagcggtgctggtgtttgagctggtgctgttcctcgctggggtctcctgcatcctcttccctgtggagaccaagggccgagaaatggactgagcacgcacggtggtggtagctcagcacatttgggcatccagatgggcttgtggttcatcttgattctgtataaacacaactctactacatccgcgacaagcttagcggatatgcaaaggggtgtaaacaggagctatagtaattacgagaaagaactggcaatgagcaatatttgtaacaggattattgttatagaacttcctcatcatcagtcaggaggtaaataaatatgtgaagttaaatagtaaccatgtggtggacagtgattataaacgaggatattctcgtggtgctggatatgcccaacgtcaattcgttgcgggcaacacacaacctaacgcgtgcctccaaacagctatcaattaattatcattacttgtacatggtaataaggttgtacgcgtgtccccccaatctctatcagcatcatacaatacaaggttgtcgtcttcctgaattcgctttcagttgcgtgagccgctttgctc

SEQ ID NO: 28749 - DNA, 2791 bp, Zea Mays
ccccagcaaacccggcccgcatcgactggcatacttgatgcccatgtttagtacacaaaagtccattattcgtgtagctagtacagtatcacacacaggctgcttgcaacaacaatggtccaagactgctgcttgttgctatatatacgcatgggagcagaaggacatgtgcactatcactcgtgcataacactagcagagagagaacataaatccaaagatgggctggagaccacacgttgtctctgtgtcatcttctgcactactagtgctgcttcagctcctcgtgctactgatgctgcccgctgatgcgtcgtcatcaagccaaacgacgacgacgacgatctacgtcgtgtacatgggcgagaagaagcacgacgacccttccctcgtcgtggcgtcgcaccacgccacgctggcctccgttcttgggagcaaggatgaagcactcagctccatagtctacagctacaagcacggattctccggtttcgcggcgaagctcacccagccccaagcggaggagcttaaaaaataccctggagttgtgagcgtgaagccaaacacgtaccaccacgtccacacgactcggagctgggattttcttggcatgagctacggccaacagcagtcgtcgtcgtggtcgtcgtcgtcgcggctccttaggaaggccaagtacggcgaagatgtcatcgtcggcgtcatagactcaggcatctggccggaatcccggagcttcgacgacagcgggtacggctacggccccgtgccgaaacggtggaaaggcgtgtgccagacaggccaggcgttcaacgcgagcaactgcaaccggaaggtcatcggcgcgcggtggtacgccgccgacgtcagcgaggaggacctcaagaacgaatacaggtcgccacgggacgccaacggccacggcacgcacaccgcctccacgatcgccggctcgcccgtgcggaacgcgagccaccacggcggcggcctggccgccggcatagcgcgcggcggggcgccgcgcgcgcggctggcaatatacaaggcctgccacgctgtcggcggcagcgcgagctgcggcgacgcctcgatcctcgcggccctcgatgccgccattggggacggcgtcgacctagtgtccctgtcgctgggaggcttaggcgagatctaccagtcgttgcacgccgtggcggccgggatcaccgtggtgctcgctgcagggaacgatggccccgtggagcagtccctcaacaatgccctgccgtggggcatcacggtggccgccgccaccatggaccgcaccttcccgacagtggtcacgctgggcgacggagagaagctggtggggcaatcactgtattaccacaaccgctcagcggcggcatcgacgagcgacgacgacgacttcgcttggcgccatttgatattattccctagctgcgacgagaagaatctggggtcggaaaacatcaccgggaaaatcgtcatatgccgtgcgccggtgttctggtccgactatcctcctccgcggcagcttagcagggccagccgagccgccatcgccggcggggccaagggcatcatcttcgagcagtacagtaccaacagccttgacacccaggtcgtctgccaaggccacctgccatgcgtcgtggtggacagagaatccatattcacgatccaaagtagcgacagtaccttgccgactgtgtatcctctgccagcaatgtggccaagatttcgccggcggcgaccatggtcggatcccaggtcgcctcgccgagaatcgcgacgttctcgtcgaggggccccagtgctgagtttccctccgtactcaagcccgacatagcagcccctggagtgagcatcttggcagccatgcgtgactcgtacgtgctcctgtccgggacatccatggcatgccctcacgtctccgccgtcgtcgccttgctcaagtcggtccacccggactggtcgcctgccatgatcaagtctgccattgtcaccacagcatcggtgaccgaccgattcggcctgccgatccaagccaactcggtgcagaggaagccggccgacgccttcgacatgggcggcggcctcatagcgccggacagggccatggaccccggcctggtgtacgacatccagccggaggagtacacaagattggacgaccgcgccgaccgcctcaacctcccgtccatcgccgtgtccgacctcaagaactccgtcacggtctcgcgcaccgtcaccaacgtcgggccggcggaggtggcgacgtaccgggccgtggtcgaggcgccggccggcgtcacgatggacgtggagcctccggtgatcgccttcgagagaggcggcgccaggaacgccacgttcagggtgacgttcgtggcgaagcagcgggtgcagggcggctacgcgttcgggagcctgacgtggctggacgacgccaagcggcactcggtgaggatccccgtcgccgttcggaccgtcgtccgggacctcgtcgccgatgtagcttgatggtcgagttcggtttctgggcacgcacatacatgtgttccgcgttgtttacgtgctgtgtttgtctcgcggcgccgattcgatcgggttcttgtaataagaaagatggcgtggaaggaaaaaaatttggtgcagcactgctgcaaactagagtggtttgcagctcctcacaaaaaagaggatagaccccacccgcagcaacaataatacaactaaaacgttatctgctggacctacaggtggggtctatcctcctttttgtgagggg

SEQ ID NO: 28750 - DNA, 1884 bp, Zea Mays
accaaaattaaagacggcaactctgcctgcacagcattgaccgccgccttcgctcctccacctccccgctcgctctcctgcctccgcgcgggccgcggatcccttcactcgccacagcaagcgctagaagagggaatggagcccggcctcgcatcccgcgtcgcccgttcagccgctcagccgctttccggctgcctgtcgcggcactcgctctcgccgtggctcaagatccagaaccacatttatcctatgccaagtctctgtcacaaggttcctagcacgggaaaatgccacgcttctatgacaacaagttacatcagggaaacatcagatgtcactgatttggactgggaaaaccttggctttggcctcatcgagactgactttatgtatgttgcaaaatgtggaactgatggaatcttttccaaaggtgaagtcctaccatttggtcctatagcactgagtccttcagctggagtcttaaattatgggcagggattgtttgaaggcctaaaagcatataggaaaactgatgggtccatccttctatttcgtccagaggagaatgctataaggatgctaagcggtgcagagaggatgtgtatgcctgctccaactgttgagcaattcgttgatgctgttaaacaaactgttttggcaaataaaagatgggtgcctcctactggtaaaggttccctatatatcaggccactcctaataggaagcggtgcagttcttggtcttgcgcctgctcctgagtatagctttatcatttttgtatcccctgttgggaattatttcaaggtccgtattgcgtttccttttacttcaaattccaccaaaatttgtaggcactagtcactcatccaaaatgtaaactggagtactgggcttagagcaaatcgttacaacctgtgttctttcctgctcagtggacagtgatacaggatagcttaatggtaatagtgtataatatgaactcgtccttacacgcatctaaaatagtttgtttcaacaatgccggtatatatgttgtttgccactttgcctttgttcattttattctacaggaaggtttatctcctattaatttgatcgttgaggataaatttcaccgtgccagccctggtggaactggaggtgtgaaaaccattggaaactatgcctcggtactgaaagcacaaaagattgcaaaggggaaaggatattctgatgtcctttatttggatgctgttcatgacaaatatctcgaagaagtctcttcctgcaatatttttgttgtgaaagacaatgttatttctacgcctgccattaaaggaacaatacttcctggtataacgaggaaaagtatcattgaagttgctcagagcaaaggtttcaaggttgaggagcgtctggtgtgtgtagatgagttgattaacgctgatgaagttttctgcacggggactgctgttgtggtgtcacctgtggggagtgttacatatatggggaaaagggtggaatatggcaaccaaggagtcggtgtcgtgtctcagcaactatacaagtcacttacaagcctccagatgggcaatgtggaggactggatgggttggaccatgcaacttaatcagtagcggatcacagatattgccttggcagatcccagattattacagctactgggtgcgatagggttttttttggcagatccatcttgagcatatttgactgtacctgtttcccttgagactaagacgaaagtgatcttactgatcttttgtttcaaatctgtaacgataaaataaaatgtggtttgcaccttgccatgtactgtaagaatggacccaaaaaaaaattcatgctgctgttgcttgatatctgaaactgtttatttgctgcagc

SEQ ID NO: 28751 - DNA, 1747 bp, Zea Mays
gagccgccagccaccattcctggctgggctgcttcttccttctacatcttttctgctttctttctttcacccgcaaccgcaaccgcaacggccgcgcgccaaaccagagtttttttttcagcatcttccgctccgctttccgctgatgtttacagctcaaccctaccagtatatataccgacatgtttgtgttgatttgctgctggtttcccaattccaatccgccccccgctggaggaagaagacggggcggagtcaagaattggtacaaacggaacgtgttgcctgcagaatggattcggcatttgaccccgctgtcgtgctcgcacgtacatgatgcctctaaaccagagccatctgctgcaggtttcagatatctgcagatttcatcaccacagctacaaagattactgcgctactctgaaggaggatatccaatactagatgtcaggacttcttgcagaagctcttggagctgctgcaggaggatgtgcactactacttattgtcataattataatagtactttgcctacagcatcgcaaaagaacctcagactcttcagaaagtggtttttcagatcaagctctaccagagtcgcaggaagcaagatgtcttagtttagaggaattgaattttgctacaaggaatttcagcaatggcaaccttattggacaagggacgttcggagaggtatataagggtttgctccaggatggcacaatagtagctgttaaaagacggcattctcctcctagccaggaattcattcaagaggttaattatctagcatctctctgtcattggaaccttgtaaaacttttggggtactgtcaggaggatggcatgcagatgcttgtttatgagtatatctccaatggcagcgtatcaacacatttacatggtaacagccatgctctaggttcaaggctagaattcaagaagagactttctattgctcatggcacagctaaaggcctgagtcacctgcattcgctgacaccccctgcggtccatatgaatttcaaaacttctaatgtacttgtggacgaggacttcgcaccaaaagttgcagatactgggattccaggcatgcttgatcgacttggtgttacaggactgtcttccagaacatttaatgatcctttcgtggaacctcggtaacaatggacacacatgtttctgatagttcttacattcattgcttacatcagatagatacagtagaatcatctgccttgaatctgctttgcattatttaagatcgatggaacttctgttgcatgatcagaatgaaggaagctatgaacttgaacttttccatacaaagcgatgtgtacagctttggcgtattccttctggagctaattagcggacggaaagctgtctctgatcaatgcatcattcagtgggcacagagcttccaggaatcaagtgacatctccgtgatcgcagacagcagaatggccggtggctttacctcacaaagcatgaaggaattgctgagcctgacagcacggtgcgtaaatccgacgagcgagcagcgcccgtcgatgagctcggtggaggctgagatacaacggatccgcgagcaggagatcagcctcacagcagtcatggcggaaggtaccccaaccgtgactctaggcagtcagctcttcagaacatccagaaagttgaagcaacagtctgcagaacatgtcgtgtattatatggcacgaggatagaacagattttcaggctctcc

SEQ ID NO: 28752 - DNA, 1131 bp, Zea Mays
cttgaggtatatccctcttgacggcctcagctccaggagggactatatcctggatatatcatattctttgttcaatcagcattgatgataaatggttcacgagttatatacagatggcagcaagcagcgagcagttcattactaagcggtatcctggcctttctaaattttgcttatacattgctggtgcttaactactcctgcatcgggttccaggtactgagcttcaaagaaaccttggcatcctaccggagcgtatattatgttggcacaattgttcccattgtgtgtcttctgctgggcaatgttatcaagccagcaaggaaggcgaaggctcggaagaccgagtgaggaaatactcactcaagtgacctttacatagaagaaagatggtgaagcttcaacgaagataaggacattctagttttcaatttatttattctgtctttttgtacggtatcaaatttagcataaggataatgtggtgaccccggttctcctacctcggaactcgattgcgattgatcaatcattaaaacgtgacataaccactggattttcctttacttaatgactactcatacgtgtgtgcgaatgattttttgtcctgacgggcctttttctattgtgttcccatctgcctgctgaatgtcttccggacgccttcccacctggagcttttatttttgactggcaagatctattcaccgtaagtgatatccatggatgcatacatcaggagtgatgaggataccaaatcatcaacttgctcatcaggagtgaggataccaaatcatcaacttgctcatcaggagtgaggataccaaatcatcaacttgctcaggcacgtcgcacatgctgtgtatttcgtctacgaattgaccatgcggaaagtcaaattttgcccgtaatctcagttttcactccacggtccacgcggcatcttgttcttttaatatgcatccttttgcggcgtggtttatgagcgtcaaaatttaaattcagattgctgttagagcttgatggaggggtaaatgcacatgatcctctaccacctcactttccatcgttgttgtagactactagaactgagcttccgtgttttgactcagccatcgcaccgcagctcgc

SEQ ID NO: 28753 - DNA, 3785 bp, Zea Mays
gctatttgcaattttgccgtgggggtaacccatggagatcacggaggagcagcggcgtcgcgccgaggccaaccgcctcgccgccctcgagaagcgcaagcgctacgcagaggccgcggctgccaccgcctttcccacctccggtgcctccacattccctgcctacgacactgccgccgccgccgagtggaggctcgccaaatgcccaagaatcgccccgcccgcgcgccagttaccgtttgtaccgctgccccctcgtccttccccaccgccgctgccgccgactccgcctcagccgccggtggggttccaggttgtgctggaggtatgcggccccgacgagttctgggtggcggtggtgccggtagaaggcagggcctaccctggggaggccgagtgcctcggcgccgtccaggactgcctcgctgcggcttcggttgtacaatactctgcaacacagtcgctaagtcaaagcacacatcttcgtcctgtatttaagcttgtggactatggtgtggtgttgaaatgccttaagaaattacctggagcttctgtgcaagaaataccttctagcacaaagagaattattcagaatatacctaggtatcacgtccaaaagtgggcttctgatgaagaagtacatgagcttctcaagaaactgccacagcaaataaaagatgcgcttttacccttccaacttgaaggagtgatgtttgggcttcgaaggcgtggacgttgcctaattgcagatgagatggggctcggcaagactctccaggcgattgcaatagcatgctgtttcaaggacgagggctctatattaatagtatgtccagctgtattgcgttattcttgggcagaggaattggaacgctgggatccttcatttatgccaaaagatattcatattgtatttggtcgtcaagacagtcttgaacatctaaatgctactccaagggcagtgattatatcttaccagatgctaagtcgccttagagaaagtatggtgaatagaacatgggcactgatgattgttgatgaatcacataacatacgctgcacgaagaaactagaagaaaaatatgagttggcacttactatttattttctcctaggcgataatagaccttttgatatctaccaccagataaatatgctatggccccacatgcttggtactgataaatttgattatgcgaaaaaatattgcttgctgcatgttgcacgaagttatcaggggaaaatgtttaaggacttctctaagggcaattaggcgactgaaggagcatttgttgaatgaactgccccccaagcggcgacaaattattaggttgaagctaaaggcaccagatatcagggcagccacatcttcatgcggcaaaagggtgaaccctaacagttgtaatggaactcttacaattgaattgcccagtaaaagcaatgatgatgaaaatacaaaagaggaagaagaagatgattgcaagaaatctccaaggagtctcaccccacaagagattggtatcgcaaagttatctggatttagtgaatggttctcaaatcatttcatcatgaatggatttgatgctaaccataacctggatccccagtctagctgtcagaaaacaataatatttgcacatcacttaaaggttctagatggaatacaggtgtttatctctgagaatgagatcagatttgttcgcattgatggaagcacacttcaaagggaaaggaaagaagctgttgattctttccgtttggatccagaggtgaaggttgcaataattggaattactgctggtggtgttggcttagacttctcatctgctcagaatgttatttttgtggagctcccaaaatcagcttcagaattgcttcaggctgaggatagagctcatagacgtggccaaagaaatgcggtcaacatatatatattctgtggaaagaacacattggatgaatcacactggctccagttaaaccagagtctgttccgtgtctcgtctttgatgaatggaaaaaaggatgctgtaagggagattgaggttgatcaagtgtgccaacttgaagaaatcaaggacaccgaggaaacacaacgcaaactgcatcctttggagaatcataatgcagatttgacccacgtaccaaaaaaacttctggaaagtgatgatttgtccattgatggttttcttggcatcgaagatttggaatttgacttggatttcaccattaggacaattcctcttgaatttgaggatgaaaaccccggcacatccttgaaaaataatccaactccaacagtacttgaagacagatcttgtattgatgtttctctttcaccagctgcagtcttttgctctgtactatctagttgtaaatcaataaagtctcgtaagaggctttctggaaattctgggtccttgagtcaagctgcatctgttccagattttccaattcaagtggagtctctgcgttttgaggttagccggcacacaggacgaatccacttgtacagttgtgttcctggacatgattcaagacccaaaccactttgtgaaaattttctgccagaagaattgaattcacctttatgttctcccagtgatgttaaaacaagaactcttctcttgaaaaagattccttcattttgcaatgtgttcaatgcattcatcaaagagtggttggcactaagaccaattgatcaaaataaattgcttggaaagccattacaacttccgttgaaccttgagttgtgttttctgaaagatagcatcaatcatagcacagaagggatacttaaagggggaagtaagaggcgtgctgcatcattgaatgatgtcagtaatcctttgccagaaaatgctgaatggagacaggtggtgttgcgtaatggcacctgtaaagagagacagtacactcagggctggaccattgatgatgaacctctctgcaaactttgtcaaggactttgcaatggaaggcttgcaaagtcaccagaatattttgaagatctattctgtagtttagcttgtttccaggaatacagattaagaaccagtggcagggccctccggcaggcactgtttcaaatagaacgtggcaagtgctcccaatgcaagctcgattgttgcaagcttgtcaaacacattaaactcttacctttgggaaagcgagaagaatacatcagaaaggttgctccaaacattgcaagtagaaagaaactcctagataaacttgtccgtgaaccaattgatggaaatgcttggcatgcagatcacataatacctgtttataaaggaggaggggaatgtaaactcgagaacatgagaacactgtgtgtggcttgtcattatgaggtcaccagaactcagcacaaggaactaaaagaaataagaaagaaggctaaagagcacttgaaaaacgccttgaataaacaaaaggataaaccaagtgaagcaacagaagaactagatgacgaatcgttgctgatagctgtcccgggtagtgcctactccttaggatttcctggcaacggatctgatgaaaaggctgctgaatagggcatgtttcatttaccttgattattgttcaaaaagggcgctggtattttttagctcgcgtcctttttttgtacatgttaaatgctaccaagcgtttgtaagctgttcggctgctcttataagcagcactgataagcaacactattgcagctgcagagctagaattatctcacatttttgggcttgttcgttttgatgctaaaccatgtggattgagttggattg

SEQ ID NO: 28754 - DNA, 4567 bp, Zea Mays
cgctccctccccatgaaacccccttcccccaatctacccctctctgtgcccccgacatccacgctgcctcagcccgccgtccagcgccctctctgcgcctccctccccacaccgcctcagcccgccgttcgccacgctccccacgctgcctccccccgtcgcccctccctcccgcgcggaactccgccatgctccccacgtcgcctccccccatcgcccaccagccgtcgcccaccagcccacactatctcacgccatggatggtggcaacagtccccgcccccgtacctcacacgcatcaggctgggctggccgatcccgccgccgcaaacgccgcgcccagccccgatgtcagcgcggcccgcccgccaacgcactttcggcctccccccgcccctcccttcgcccgcccacccgcaacctccgcgccatccgcaacctccgcccgcttctcacgccaccgacccgacctccgcgccatccgcaaccgtcgtgcgtcttatcccttctctaccgcgcactccgtgtggaacaacctccgcgtaggaagcctcctcccttccccatccccattccccaccacgcgcttcggggacggcgagctccgggcgggagcgaccgccgggcgcttctgctgctggtgcggaggaggaggagcggcgagggtggttcggcgcaggctccacggcggcggtgcccgagccgagttcgactggctggcgctctactgcaacctcacacgcggcgatgggccggacggtaacaatggcaagctggtcctggaggagctgctgtcgtgcgccgccacccaattttgttttccccaaatcctgagctgtgaagagaagaagaagacaaggacgcggcgagtacgatgacgagcgccgcacagcaagtcagcgaggagcacgatgacgcgatgaggaccacgagctgccgaggaagtcaaggacgacgacggcgcagagacccgcgagttgagacatcttcttcgccggcgtgaaccgcaaggctgagacatcttcttcgccgggttcggccacgccgacaccaccgacccgatccgtgtttgcaggcctctcaaattgaaccgattgcttcaagggtgccatacatgattgtgttaaccatgagagggattggcctggcactggttcattctacgggaacctcgacttcggtggagaatgtggtgtccctgtccaaactgtgttctacactccaactgaaaaccgtgcaaagttctggtacgcaacagattacgacatgtttagccttctgcattgctcacatggaagaggacttgagacccgggaccgagcagtacagattcatcgagcaatgccacattggcctcatgaagtttcacaatcacagtggtttttacaaggatttcagttcatgggttgggcagaggctttaccttttgcgtcagacagtgctctctcacagcaattgtccttttgcctacctgtatcattctgtcatactatctgcaattcagctatgcacagaactatcaaaagcaagcaaagatgctctagagtacctgaggaagttgcaaatacattgatcccttaggggttgagatggaaactgccacaagggagggaggacgtgagtcagctgcacgtgccgacatacacatcacttcctgcctcgctgtccttgatcgagacaaaatcagaagagctgtatctatatgtactccataccttgacgtatgcaggggctagatccataccccggcctatctgccctgtgaggaatgtatacttctgcaagtttgaatactttgacaccttgtgaggagcactctttgaaggtggagaaggtgttgttccaagggaagccagactaccaaaatgttatggttttttagcttctcaatagccggcgacagtgcatacgacctgccccgcgctggggctgtgtctgccttctcctccttcgatgccatgacactgtaaagtgaagccttcgagctaggcgcggaggccagggagatgctatgcgcccacatctaccacgccgccttcatattgctcaagctcgcgctccgcaactcctgccccatctgccgccatgagatgcccaccgatgctgccctgcgggctgccgccagcgtcggcgttgccgaacgcgccgccggggaggaacaagcgtgggatgcgccccacgcgcgcgactttcacctgcctcccaatttgatccgtgagttcaccaggaccagaacttcttcgatgatttgttggaccatccctgctgatacaaacacaatcattttgtggcaggaaatcaccatattagagcttacaaccttcgcatcaactgaagagtttgacactcatgatccaaaggagaacactttgctactcccttacttgaggaaaaggtcaaaaatcattgagatagttgcagcgcgtgatatagtctttgctctatcacagttaggagtatgtgctgcttttagtagcggtacgttcgccgaggacaagacaaaaccggatgctggtttccctctttttgactcaccatgtcaacatggcaatttcaggacccaacgtctctgcgagagaccttgggttcccttatccgaaggcaggcaccgctaagcctacagacgtggtggtgaagttctacgtcctctacgagaagtggcggaggggcgagctcctgggttcttcgtcagttgcgcggtacttgaaaagcatcactcattcgaacggtacgattattcatccttctggatcggagcgttctcttcatgcgtctgttgacgctctaagttcttgctacgtggacaaacagggcaacaagaatttccgggtgtgggtggacagactggtcacatcgccgatcggtacaagcaactggttggtgaggtttgataactgggagatggaaggtggcgttcggtactgctgccgcactactcttctgctgaataacaaggttccaaaagaactagaagtacagattggttgaacttcaaacaaatacaaagagctatgcatacaagtggtggaggcctggtggtaaattgtttatcaagatcgctagagcagttaaatttactcctattatcttctgggatagatttgggtaacttcatgcaaaaatttactcatccaggaaaatttttctaccattttgaacttctggtagtcttgacttcatcacttcttatgaaccacatcattatattaatttgtatagagtccatgtcatgcttcccagcaggatcaaggtcgttgtcgtctccaggtccatcaaatgcgacaaggtcgagcgcacgcaattcagctccgaagtcatctcctttcaacagaaagatgcaagtaacaccaagtcacttgcctttgatggttgatacatttcactgtatatcattgcacgacagatccatttagtacctttttctgagttaaactacttcaaacattgctgaagactacaaccagttgttgtaattgaagcgggtcaagacatagcatttgcaaagatttagttcattctcatcactctgcaatattcgggttctctactatgtgtaatctcatatcaagattaatgagtatcgtgatcgtataattttgaatcctatcaacccatatggcaaggcaaagaaaaatgacagtggacatcattctagattttacaaaatcaaaggagcaaccagacatggctgtcatgatctaagatacttcaacgtgattggatcgaacccaaacatatgactaggagaagctccaaggccactttgtcaagggtctctgcaatgcacctactggtgcatgatttactggaggttgtgcgcatgaatgtgccacacattggtatgggggttggagttgaagcaggtgattttcaccaacattggtttgcgaactggagttgaagcaggttattcatttgatgaaagtgtgcgtataatattatctcaaatcccagtcgctgcttgaactgttttgttgtccctatggcaggagacatgattgttattcctatcatgtgcacactgcctcctcgctgtcatttgtcgtcactctcgtagtcctgataccggagcatggttgccaggggagagcagtccaaggcaaatttgccatgttggagcagtcacaggagccaaggggctgcagtcacaggtcctgctagccaggatggagcaatcataggacctcctagcagtccaaggaaaatttgcgaggtggagtagttgcaacttttgaaacccacgtgataacatgctcaagcgttcgtatgataaaaaagatggcacataatcaaaagaagatctcatgttctgcgtttgtgaacctgtttgtattttttgaacttgttttgtgaacctctatttgtaaacctgtaaaatctgaggttgtgaatagatttgggtaacttcatacaagtggtggaggcctggtggtaatcctggatgcatataaagcgaggcatgcaatatccatagcactcgtttgacagaaggcaacaccatcaaccttgtcctccacctttaaactagcatgagcaccatccttcttcacatttatattcatgtccc

SEQ ID NO: 28755 - DNA, 1526 bp, Zea Mays
ttatactgacggtcaagtttaaaagttatgccatccaaaagctgcaaaagtattttctgtaagccacaattcatcaggatttttcattcgaatctctcggaaaagatgatgttgcctgctaggtttgtgaaagattacgtcagtgaagagtgcctaaacagccggatagccatcattttcagccccattgccaaattttggcgtgttgagcttaagaacgatcaatcaggcatcttcttcacaggtggctggtcacagtttctagacttccatggaataaagaatggtgaagttttgctcttgaaatacgaagggaacatggttttcaaattcaaagcatttggacttagtggatgccagaaagatttcaagaaccagaatgctgggattcaactaaatactaaaaaacaacaggaaacacctcccatcaggaaacgtaaaagcaatgatgagaagtcaagcagtgaagaaaacaagaggctaaaaactccagtgacttctccatcaccttctgatccgtcactggaaaaaccctatcagattgggacatcatcttggataaagaaaaggatcaacacctatgcacttgagcaatttcttgcgttatcagtgaagttctgcaactcgattgggttccggatggcttgcacaatcacccttaagacagcaacgaacagcaccagatcatggcaggtgcgtggtactgcatacaagtggcatcgctacatcatcggagtgggctggaagagcttctgccaggataacagactcaaggcaggcgacctgtgcaccttcaacatcatcgagaccacgctgtggcatgttactatcacgcgctcagcattagcagcagatacttttaataagcaaaaaaagccaccttgttcatccagtagggacaagaagggcagttcaagcagagaaggagcaaagaggccgaaaccttccatggcacatttcagcaaggttcaggttccgccatcgtacgcaagacgatgtgcctacgacgttggaccgccgccctggatacggaagcagatgaatgccagcacaataagaaatcgtctttgtctggcaccggccttctgcaatcagattgagttgcggcgacgctgcgagatcgtgctcaagacctcgatcaacagcaatcattcttggcgggttggtggtctctcgcagaagaagggtagttacattattgggcccggttggaaaaaattctgcacggagaacagagttaaggttggtgatgtctgcaccttcaatgtcatcgaaacccagctgtggcatgtcgtcatcacacgccgttgctaagctatggctgttgcaaccagcatagcttgggtttgttgtaactagtatgttcgtttgactttaatccgtaccagcttttactggttctacggtgtttttacctcttcttagggaattggctgcacttgcatgtttcgaaacactagtttgacactatgcgtgaaattaaactagctcacgttaacaaatctcctttttttattgtgttcata

SEQ ID NO: 28756 - DNA, 645 bp, Zea Mays
aagttactcaatcagagtctagggtgccacaagtttctccattgtcatcggacagttgatcagatatagaggtgacaaaccatgaacgatgattgatgatttgaatattattgtctttttggtgtttatatggcaacagctctacctatcacgtgctgctaaaaagtctgaatggaactggtgtagttttccaagcaagacaagatctcgctgctggaatcgctggatgaaaaggattgcctttacaattccatgtgcgcgctgctgtggtggtgtggttcgaccacaaaacatgtggctgggttcatagagccacagaaatacacgcgcggcgcatccgcacccctctcacgacttcttgggtttaaaacagctgtatggctgtataatcttgtggattgaggagtcattgtctcttgacgcccatgattggacatttggatcagttccacgcctgatccttcgttaaattattctcgctttgacgccacagccttttgcactggcatgtgcttaccctctgagggaacgtgccatgtctacccttcctgcagtgacatctttattatctctacacccctttcctgttatgagtgtatttactgttcctctacttggcctggtctcgatctgatcgaactcttg

SEQ ID NO: 28757 - DNA, 2891 bp, Zea Mays
ctaacattccgccactcgtccgtgcgcgactgcgtgccactcggcccaatcccctccgtccggccgtcccctgcctccctcccggccgcttccaaatccacccgccatccgttccgccgtcgccgcgatggacgccgcggaggcctcggaggtgcaggcgcggctggccgcggccgtgcacgcgctcaaccacgacgcgcgtcccgaggcgcgcctcgccgctaaccaatggctcctcgcgctgcagcggtccccgcaggcgtgggcagtcgccacctccctcctggccaccccagacccgctcccgcccgccgatctcctcttcttcgccgcgcagatgctccgccggaagatccagtctccgggccccgcgctcctcgggctcggcctggcgtcgcagctcctcgatgcgctgctcctggccgcgcggcggttctgcgccgccccggcaccgcgccagctgctcacgcagatctgcctggcgctcgccgcgttggcgctccgcgccgagggcggcgtcgacggcctcttcgcgcgtatgccgcacctgccgccccccgccgtgctggagctgctcaccgtgctccccgaggaggctgcgcaggaccagggcggcgacacgggggttgacgccgccgcgcggtgccggtttacgcgcgagctgctcgcgcacgcgccatcggtgcttgagttcctccaccggcaatccgagaaggcacccgccgatgacgacggggttcccctcgacgagcgcaaccgcagaatcctccggtgcctactgagctgggtccgcgtgaggtgcttctcagagacgccggcagcctcgcttgccaggcacccacttctcacttttgcgttcaactcgctgcaggtgtccttctcgtttgaggtggccatagaggttatgactgagcttgtcagccagcaccaagaattacctgaggcctttctgagtaagacaccttatataagggaggctcttcttctaccagctttagccaacagaaatgagaaaattattgctggtcttgcctgtttgatgtgtgaagttggccaggcggcacctgctttggttgcagaagggggtagccaagcacttgctctcaccgatggacttttgagatgtgtagcttttaccagtgaagattgggaaattgcagagtcaaccctgcaattttggtgtagtttggcacatttcattcttggtattgatgtgaagtcagccaaaagaaatgtggtacaagagttgtttgtgcctgtgttttcttcgctgctggatgctcttttatttcgtgctcagatggacactgatgagcatggttctgatggagcaccttgtatacctgagagactaacacagttcaggatgaatttggaggagctcctcgttgatatttgtttgcttctgggtgcccctgcatatataaacaggctcttttctggtggatgggacttttcaagccaaacaattccttggaaggaggtagaagttagaatgtatgcactcagcatggttgctgacacgattttacaagatgaaggctcctttgatttttcaatcataatgcattttgtgaacattttgtccagtagaacacctgttgaactgaatggaaatttgtttttggtgtataaatcgttcggtgatgtcgttggctcgtactcaaagtggttatcgtcttctcaatgtaacattaagcccttactcctattttgcgcgtcaggaatttcaaaatccgtatcatcaaatgcttgctccttagcattgcgcaaactttgtgaggatgctccttcattcatccatgaaccacagaaccttgaaattcttttctggattggtgagggcatgaataaagggaacctgcagctagaggatgaggaagagataattagtgcaatcacacatgctttaagttctataagtgaaaaagagttgaagaaaagttcactggccaggttactttgttccagttactctgcagtggaaaagattattgacattgatagagatcaattgctaaggcaaaatccagctgcttatacgcaatcattggatcttgctgtccgtggtctctacaggatgagtgctttgtttcatcatttggcaacatcagtcacatctggtctggtcgatgatgatataattatagttcttcttggaatattctggccacttcttgaaagtcttttccgatcatctcatatggagaatgtgcatttatctgcagctatatgccgttctctttcttctgctatacattcttgcggacaccactttcatattttattacctaaagttatggagtgcttatctgcaaatttcttgctatttcaaaggcacgactgcttcttgaggacagctgccaatgttattgaagagtttggccacaaagaagaatatggggctttatgtgttaggacttttgaaattcttagctctgcatcttcaatatcagctctgaattcttcttatacctgtgatcaagaacctgacctagttgaagcatatacctactttacatctatgtttattcgctgctgtccaaaggaagccattgtggcatctagctccctgattgagttatcatttcaaaaggcagctatatgctctacagcaatgcaccgaggagctgcacttgcagcaatgtcatatatgtcgtgttttcttgagactgcccttgctgctgtgctagaatctcctgagtgcatccctaacgggtcacctggtgtggccctaatccaaatcttggcacgctgtggtgaaggtctattatctaatgtgctttatgctttacttggtgtatcagccttgtcaaggtctgaaccttatctgggttttcaaacttctcttctgacataagctactatattaatgattatgctgggatgag

SEQ ID NO: 28758 - DNA, 4755 bp, Zea Mays
cgggtcccctcttcctcacctttcggtctttcctacccgcacaccagaagcgaaggaaagcccacaactgactgaggcgcacaccatccccaccgccggcgcccgccccgcctcttcgccggcgacgagccgccgccgaggagctcagcgtggaggggcttcctcgcgtgtgggagaagctgccgttttttttcctgagcgggtcgtcgttgccgtgtgccgccgagattagagtttttcaaagggtgtctccttcgcggcactggcctcctcgagttagtttatttggagacagctcgaggctcgcttcggaagcgacccggtcgccgccgccgccgccgccatcggccgtctctccccgtagtcgccgtctcggggctggctgtggtgatgagctccgtcggatcctagggtttttgaattctgagtttctgacggcttcgtcgagctgcgcaaggcgtcaagaaggagatggtgccgggtgggttgttcgggtgggcgtcgccccatgtacagccgctcacacccgtatcggaggtctccgagccgccggagtcgccctcgccgtacggggacgggccggcgggggatgccggcgtgggggcaagggagggggaaggcgctggcgccggagaggaggaggtggaggacgacgaggtcgagccgccgcccgcggcggtgtccttctggaggcttttcgagttcgccgatggggtcgactgggcccttatggctgctggggcgcttgctgctgctgcgcatggcgcggcgctcgttgtgtaccttcactatttcgggagggccctgaatttgctcgactctgagcgggttgggtcgtctctctatggacgcagcgatgagctgctcagccggtttaaggagcatgccttgtatattgtctttatagctgctggtgttttcgtcgcaggatggatagaggtatcatgctggattctcactggggaacgccagactgctgtcatcagatcaaaatacgttcatgttttgctaaatcaagacatgagtttttttgatacatatggtaacaacggagatattgttagtcaagtgctcagtgatgtattgctcattcagtcagctataagcgagaaagtggggaactacatacataatatggctacatttgttggtggtctcattgttggccttctgaattgttggcaaatagcacttctaactcttgccactggacccttgattgttgcagctggaggaatatctaacatattccttcatagactggctgaaaacattcaagatgcatattccgaagcggctagtattggtgaacaggccatctcatacatccggacactgtatgcttttacaaatgaaactcttgcaaagtactcctatgctacctcacttcaagccacacttagatatggaattttgattagccttgtccaaggaattggtcttggctttacatatggactcgccatttgctcttgtgctttgcaactttgggttggaagacatctgatccatcgtggaaaagctgatggtggtgaagttgtggtagctttattctctgtaattctgagcggccttggtttgaatcaagcagctacaaacttctattcattcgaccaagggcgcattgctgcttatagactatatgagatgattagtcgttcaacttccagcaccaatcaagaagggacaaccttaccccaggtgcaagggaatattgagtttcgaaatgtgtactttagctacctgtctcgtcctgaaatcccaatattaagtggtttcttcctcactgtaccggcgagaaaaactgtggcacttgttggtagaaatggctcggggaaaagcagtataattcctctgatggagagattctatgacccaacattaggtgaagttcttttggatggggaaaacataaaaaatttgaaagtagaatggttaagaagccaaattggtctggtgacacaagaaccagccttattgagtttgagcattcgggaaaatattgcttatggaagatctgctacctttgatcagatagaagaggcagcaaaaacagcccatgcccatgggttcatcagttcacttgaaaaggggtacgaaacccaggttggtcgagctggtctagcactcactgatgaacagaaaatcaaaatttctattgctcgtgctgtgctttcgaatccatccattcttttgcttgatgaggtcaccggaggacttgattttgaagctgagaaggctgtacaagaagcattagatgttctgatgttgggaaggtcaaccattataattgctagacgtctttgcctcattaaaaatgctgattatatagctgtaatggaggagggccatcttgttgaaatggggacacatgatgaacttctaaacttggatggcctttatgctgaacttttaaggtgtgaggaagcaacaaaacttcccaaaaggatgcctaccaagaacagcagggaacataagtcgctccaatctgaggatgcattggtgagccaatactttcaagaatcctcctctcctaagatggcaaaatcaccatcactacaaaggacacatggtacaattggtgctgctatatttggctcatttaatccactgcttgcttacacaatagcacttatagtgtcagcatactatcagatagaaatccgtgatatgcgccatgaagtgaacagatggtgtttattcatagtgggcatgggtgttattacagtgctagtcaactggctgcaacatttctattttggaataatgggggagaaaatgactgagcgcataagaaggatgatgttctcagcaatgctacgcaatgaagttggatggtttgacaaagatgaaaacaatgctgatacactgtccatgcgcctcgcaaatgatgctacatttgtccgtgctgcgttcagtaaccggctttccatatttatacaagatactgctgcagtatctgtggctctccttattggaatgttgttgggatggcgggtggcacttgttgcacttgcaactttgccagtccttgtcatatctgctattgcacagaaattgtggcttgctggtttctcaaaaggaatccaggaaatgcatagaaaggcttcgttagtacttgaagatgcagtccggaacatatacactgtagtagcattctgtgctggcgataagatcatggaactctacagactacatcttgggaagatactaaaacaaagtcttgtgcaaggattggctataggctttggttttggtctctcccagttcctcctttttgcctgcaatgccttgcttctttggtacactgcaatttcagttgaccgacaacgtctgacaatagccacaggactaaaagagtacattctgttttcgtttgcatcattcgcgttggtggagccatttggactggcaccttacattcttaaaaggagaaaatctcttacgtcagtctttgaaattattgaccgggagccaaaaattgatcctgatgataccaccggcttgaaaccacccaatgtctacggaagcattgaattcaagagtgttgatttttcttatcctgttcgccctgacattcttgtcttgagtaattttaatcttaaagtgagtggtgggcaaacacttgcggtggttggggtctcaggatcagggaaaagcaccattatttctttgattgagagattctatgaccctgtttctggccaagttctgctggatggtcgagatctgaaatcatttaaccttagatggttgcgtagccacatgggcctgattcagcaagatccagttattttctcaacgacgataagagaaaacattatttacgcaaggcacatcgcaacagaggctgagataaaggaagctgcaaggatagcaaatgctcaccatttcatcagcagcttgccacatggatatgacacccatgtgggaatgagaggggtcgatctaacacctgggcaaaagcaacggattgccattgctagggtggttttgaagaatgcacctatactgttgttggatgaggccagctctgcaatcgagtctgaatcaagtagagtggtacaagaagctctcgacactctggttatgggtaacaagacaacgattctcattgcgcacagggcagcaatgatgaagcatgtggataacattgttgtcctaaatggtggtaggatagttgagcagggcacacatgactctctgatggatcagaacggtctatatgttaggttgatgcaaccccattttggcaagggccttcgccagcatcggctagtgtaattattattgagcttgttaggtgtaaattatcctagggcatgatcaggtttacttccgctcttggtgcagccactcagggcccgttttggcacatgaaaaatgctgggaagttgccgccttgctggtgttgttctgagtaagcggaatgcagacctgatcttgacaaaaaaaacctagcttggagattcaggtaagtaactgttggaactgtagggcacaactcattctggaaatagttagcaagtttggatggcattgtaattgttgtaatatgagttgaaacattctttcagaggctcgtgcttgtgatctctcgcatctgtaatgttagtgttttgatcatttaatgtgtgtatattgttcgattcttggtcggtccgagtcttgtagccgtgatgaaaagctttttacatggaaattctgagcttggcgttattttcgtccacgagaccattcagactacgagttgca

SEQ ID NO: 28759 - DNA, 1183 bp, Zea Mays
acgcacccgccgacgcccgcgcggccacgcactaggcggcaccgcagcgacggtcgacgatcgccacacccggacaccccacacaggcacccagccacgcgagcggcgaaactgcgggagccaatcagaacctacagcgatgcaatgatcgccgtcgcatcgtccttcccctcgcgcgcccacgcggctccgttcggctcggggacactgccaccgccgtctacgcggcgcagcacgtccctccgccacccgcgcgtctcggcgctcggtggaggcctcgaaggagagccggggaagatactggatccgcgcgccacgccgttccagatcctcggcctcgacgccgccgccggctactccgccgccgaactcaaggccgcctttcgcgcccgggttaaggaattccatcctgatgtttgcaaggacccagaaaatgcagatttaataatgaggcgagtgatcgaggcctatcaggaacaatgttgacccatttgatgaacctgagtgtgaagctcgtgacatatttgtcaatgaacttctatgcattggcactggatgtccatattcttgtgttaaaagggcacctcatgtattttcattttcagatgatactggtacagctcgtgcaatatctcaaggtaatggagaagatgatcttgttcagctcgctgttgggcagtgtccaagaaagtgcatatactatgtgacgccttgccaacgcactattttggaggatgttcttgctagtgtgttgatggtgccttacgatcttgctgaagcagcagttctggattccctcctttcaaaagcgaagttcgagaataacaggtataagaagccccaaagaggagcaaaatcatcctccgattatgttgattggatgtgatctgatcccgagacacaaagaggatgccagattcagccgaaggcagttcggtagatttatgctggtttgcctattctccttggtcagttgcccgatagtttataaaatggaatacgtttacgtggacagactgctttgtttgtggtatacggttatgatttctataatatttctttctgccagaattttactccgtcttttcttggcataagaaactcctaggattgactgggagcttaataatgttttggtctaaaaactcacaagtataataatgtatagctattccgtgcaata

SEQ ID NO: 28760 - DNA, 243 bp, Zea Mays
atagtggatttcagggcatccagtcacttggcaatggcaatggaccctgtggggttgctgtcaggggctggtcaaatgcaaatgctggtctgcctgtgatcatgtcatggaaatgaagtgagtgtttgggggataaggcatcttgtttggatccttttgtcctttcagtttgttttttcggttttgccatcatgtattgtcagtgagcaaacatgcattgtcagtttcagcagtttttttttt

SEQ ID NO: 28761 - DNA, 2049 bp, Zea Mays
caaccatttccctctgctgcaacgttctaagaacatcaatgctctgtgggtgtcatagactggatggtgatgtttactgcatgctaattggccagtgtttcttttagtttgattattgttggagctgatttctagccatgcacattgattttagtaaactgtggcatactggtttcattttcattataatgcttatttatgatattggatgactaaataaacaataaattttccattcacacaagcttttgagctatgctgctggcacaaacgattcaaaatccatttctatgtgaattattctggttggtaagtgaacttatctagatgatcgagtaccaggaccttcgtatcaaataatgaaacaccatctcaccatgcatctctgtgccctgtgtacattctacaatgacgactctttcactcactgcattcggttactgacatttgcttgagtacaaatcttttcctatcctttttaccattttttatggatatatggcctgctatgttatttctgcaaataaataatatctcatgtttgacttcttttagttcattataaatccataaaactaaagattcatgttggacttgttttaattcgtttttcataaatcccaggaagcttctctatcattaaccagtttattttagtttttaggattgtcacactgcatttaaatcacatattcggtactggtagtatgttaattaatcttggcttgaatctcttgacagttatataatatattcctggttcgtgtcttcaattgaagcgaaaccttccttgagcatacacaaccatccaggtacccactcatggatgagtgggtaatatgacctattccctctgttgcttaacttttcttatctagtgctgcatttgtcaataacctgctttaggattggagtcagcttgtacaaatatatgatacactcacgacccttacgcatcccaccacacagacaccctctcccacaaaaatgggtggcacatatataatagtgcacaaccagtgtaacatataaagaagtgcaaaaatccacttttatacctgtgtcttatggcattttgagcaacagaaatttagttggtactgtttccaattgctgtccatgtgctgctgctgtgcaaattacatgacacttggcagtggtcatggtagagcctagggatcttagggcgcgatcatgtgtgatggtgggtcggcgcttccacgagtgacgtcgggcaggtgccgtcggaacgggaaagagggagagcatgaactcagggggcaacggctgatgttgtcctgtttaactgttccctggttgctgaacgcgctttgttcttgtggaacaatgatcacattgtaagcttgatagcgcaaaatcgtggtgttatatttccaattatatttgaagcgctcgagaggaatatacatagccactggaatcaagcagttcatggtctcactgcaaatgtgcgcaagatgtttctggacatggacagtgaactatttgaagagtgccagcagcagtatatggataaacaagcaaaagccaaagagatgcaggagcaacgagaatcagcatggagacaattggaagctgttgttgctgccaaggctgctggggatgacatggttttggtcaactagttggcacgacagtttgcaatctgagacttggcactcgtgagtcgtgagagaaacaagtcgatgtctaggcactcacgtgaaagctttccggtcggcggtgaaatagcggagtactcgttagacatcatgctcacgtgcatggcagtgtgtccctgccaaaaaagaatggcggagcatcctgcttttctatgaaacactcggtaaaatttcatactgggatgcagatggaccacgcgttatcgtcttataagtgcctgctaaaaaaatgttgaagataagtatggtgtcaccgctcgccagctgccgccgcatgctgacttgcatcatgtacgtgtccctggacagctagagttattttttacaaaaaaaatcttttaatcaatattttaatattaacctggga

SEQ ID NO: 28762 - DNA, 4790 bp, Zea Mays
ctccaatcacaattcacaactgcctcgcactctgcccgctgacaaggtcgggacgtgcggtagattggtggtggcttcgtggcgctatcaatgctggtggatttgagcaggggcggtgggtgcgcggatagacgcctgagaaatccgggtgcccggggcagtgctgctccggaaatctgacctgccggcggagaagaattacactaacggccatgctgatggcccggtgaagcgcaaggtagccgcgatgccagcagcggcacctactactccaaggaggcacccgtcaccgaatgccggcggtcgggcgtcgtccccgacgccagctgggtcacaggcgaagaggtcccagtccaccgaacggcggccggtgactccgtcaaggccgtcttccggcggctcgcggccgagtactccgtccaggatctctgccccggcatcgccatcgtctgcgacttccagcccgtcctcattctctagctcgtcgacgccagtgggtgatgccgttccagaaacgcaaatcgctctgaggaggttgcctggtggccgggctcctgatgggctgtggccttcaatgcggagtctgtcttcttctttccagctcgaatcaaaggggaaaaagatttctagtagctcctctgcagatcaggccaagacgagggatgcagcacccgctgataggaagaggagcccattgagaggtagagctacccctgagcaatcggagaatccacatgccaaggtgattgatcatcatcgctggcctgctatgatggggggcagggtgtctgcaagcacaatgtccaagagcatggatctcactgataagatcagtaggtctgctcttccatcagttccgtcacgtggtgtttcaccgaagcgaacaacagtgtcctctgctgcaaataccttgtcaagaagtattgatcttgctgataaaattgatcggctggtctcttcgtcaatgtcatcacaaggggaatcaccaagaaagtcaccttgtaatggtgcagatgatgtgtccaaaaaggttggtgttcgtaaagatctcaaactctcatccttggcaatatcaagaagggtgtcaccagtaacaacagatgataaaattgatcggctggtctcttcgtcaatgtcatcacaagggggatcaccaagaaagtcaccttgtaacggtgcagatgatgtgtccaaaaaggtcggtgttcgtaaagatctcaaactctcatccttggcaatatcaagaagggtgtcaccaataacaacagctgcatcagatggcactagaaccttatcaggaagcatggatcttactgaaaaagataacagtacactctcgccagtttcatcacccagcatttcaccaagtgcatcattatcaagtgtgtctaatgccgcatcacagactactacaaagtcatccgagagattaattggacctgtttccaacctgtcctcatcgagaggactttcacctagaagaacaacttctggtggcattgttgatttaatgaaaagcattgatttccctgaaaaagataggagaccagcttcatcaagagggttttcgccaaggaggagactcgtgtctgatggtgttaatgatattgggaaaaatatggattttgctgaaaaggatagcagagtagtcagctcatcaattccatctcgaggggtttctccaaggagaagacttgcctctgatggtgttgatactatgtgcaggagctcggagttttctggaaaggataacaggccatccacctcatcttccacatcacgtggaatgtctccccgaagaaggcttgcttctgatggcataagtgctgtaaccaaaggcatggactttggtgataatgctaacagaccatcaacctctaaaggagtgtcacgagggatttcaccaagacttcaattagcctctgatggtgttggcaatgtatcaaaaggcacagatcttgctgatggactggacaggccatcaacctcatatgcaacaccgcgaggtatgtcaccacgacgcagggttgcatctgatgccagcaatgccacttcagaaaggatcaagttcaccaaagaggattctggaactgtgtcctcttcagttgcacctagaggggtctcaacattaagacaacttgcttctgatggtgttgaatctgtctcaaaaagtatggatcttgttgagaaagatactagacctactacctcatcagcttcatcacgagggctttcaccaagaaggcgactttcctcagatggtgtcaatgtgatttcaaagagcatggatcttgttgaaaacaataacaaacttgtcaccatgtcagctgcagctcgaggggtttcaccaagaagacggctcgcctcagatggtgtcaaagtgacatcaaagagcattgatcttgttgaaaacagtaacaaacccttaacagtgtcagctgcaacacgaggggcttcaccaagaagacggctcacctctgatggtctagcatttatatcaaagagcacaaatattactgaaaaaagtatcagaccttcaacaccgtcaatgtcatcacgagggatgtcaccaagaagacggctggcctctgatggtatcaatgctgtattggacacagaatttgctgacaaaaattgtagaccatcttcctcatcagctgctttacgaggggtttctcccagaagcaggtctgcctctaatgccatatcaacaggcatgactaatgctgaaaatgacagcagaccatccacaacatcaagtccgtcatgtcagactctgcagagcagcaggcttgaatctaatggtgttaacatcctatcaaaagatatggaaatctcatcaactgtatctggttgcacttcagacagtagacttgatggcgctggtgctctagtaaaaagcatagatgtcactgagaaacttactgtgtcaactgaagatggtggtggtgaagacgatcctggaagaatagattctagtgacgtagttactagtgcagtttcatcatcccttgcatctcaagaggtatcatcaagacatgttactgatgacgttaagaatgcgtcagagagtgttggtgcaacgcaaaaaggtaacagaccattatcagtgaaggttccatctcgagtagcttctccaagaagacgacttgcatccgatggcattgatactatatctaaaagcatggattttgctgagaaagataagaaacccatgacagtgtcagttccatcacgtggaatgtcaccaagaagaacagcaagatctgacagtgctgatataatgtcaaaaagtatggattttcctttacaagtgttttctacaagaagagtactaggacctgatggtgctaatgccatgtcaagaagcatggatctaactgataaaattagacagaaaatatcttcaactatgcaatcatccagagtctcaccaaggaaaatgcctcttgcttataacagaataaaaggccctgaaattttatcaggtgatgctgagagccctggttctgctgatggaaatgaaagtcaagaggagaatgccagttcaagtccagatgcaccttcaaatagttcagaaaaatctacacctccaaagcagctagctaggagatcaccttcgccatcacatattttaatatgcccttcatcatcatccaatgcttcatcgacaccatcatttgtctccaggagattaccaagcccatcaaggactagaccttcaacacctgtctcaccatgtagttctgccagatctgattcagcctcttcaattcttagctacattggtgatgctacaagagggaagaagagcccaactcacacggaagatgcccatcagttgcgcctcctgcataataggaacttacaatggtgttttaccacttcttatgttgatgaactgctgtcaattcagaagataagtgctgagactatgttgtatagtgtatgggatgctaactcaaggatgtgtgactctatggttataaaaaggaactatgtacaacagctaaggcaagaggtcaaattgggaattgtcttgaaggagcaaatggattaccttgatcactgggcagcgctgcaaacagagcattcttcttctttatccagcgcaactgaagctcttaaagcaagcacattgcgtcttccagtttcaggaggagctaaggccgatgtacttactgttaagaatgctgtcagttcagcagttgacattatgcaagcaatggggtcatccgtttgccatttgctatcaaagttacaggcttcacactctctggttacagaactttcagctgttgctgctaaagaaagtaccttactcaacgagtacagagaactcttggcaacagcagcagcactacaggtccaagagtcgagcctaaggacacagctcatacaagaaacagagtgaacaggttaaggtcctgtatttctaactaggaagatagaagtaaacaccattcgttagtttcagtgactgctgcatatgtgtacctttgatgtcgttttgtttttcctttgctcttccttttcccccccacttattagctagctcatatttctttacatttctactcccccccccccccctgttcttttctgttcgaacaacttacatggaagataagggaagcaacatggaaatggaatcatggatttactccatgacaaagctgccaatgtggtcttttattgcatcctagaccaatgagccaaaaactgaaagctttgttgtaagctgtaaatctgagcagttatgtgtccttcagtgtaatgcctttggatgt

SEQ ID NO: 28763 - DNA, 736 bp, Zea Mays
agggccaccattctcttgattagatgtgatcggtgggcctatgtcaggaatgtggacacctggagcatggaaagattgctctctcagggtcaaggagaagaacataatgcacttactttcgttgtcggtatcaacgactaccaatggagctgtgcaaacaccatcctggctaagttgtctgtggcagtggcacctccaccatttatgggggtttactggtttattttgtggctgcaactagtggattctcagacaaccaaaagcaagaaaacaggtcctggaggcttggggggctctcgatgctcctgattccatgctgtgccacatccattaagctgtaatgagagggcaagctgattgttgttggggattctcactgtctgaagacagcctctcttgcagaaacactgatgtgtgtttgtgtccccatcagtaggtaacagacttaagctttatgggcaatgaaggatccccagtcttttgttcagagataatatctccgaagttaagagacatgggcctgttgttgtatgttgaaacggaccaattcattggtcctactcacaactgttagaaatgtattagggtttatggggtatttaccatttcacccctctgtctgtaatgggccaggcccaactcagtctactattaatatacaggcccaccctagtatagggttagggtttcattctacatggtatcagagggcttcctccctcagcctccagtccag

SEQ ID NO: 28764 - DNA, 1968 bp, Zea Mays
cgatcctcgccattccgacgccgcactcgcagatcttcccttcgtcctccacgccccacccctcgcgtcgccgctatggccgacgaggccctggaccagccgccagacgcggccccgtctccgtctctggccccagcgacgccgccggcccccgccacctcgtcccccgcggcgctgctccgcccgcgtcgggaggcgttcgagcatgggctcctgcccatccccaagctcatcttcccggagggcatgctagcgcagaccctcgcccagctcaaggagaagctcgccgcctcagtccccgacgggcgcgtgcgcgctgcggccctggctgaggcgctgcagatcccgcaggagcaggcggcgctcgccctcggcacgctcgcggcggtgctcccggccgaggaccccgtgcttggggacggcgccatggatggtgctgccgccgacatccgcgacgtgctgctcttcctctatatccagtcttacaagcgcctcgttccgcggagcgcgcacaaggactcgcccgccgtggcggacgtctggccgtccacctccgcgttcgatgggtacctctccgcgctctccccgatccagcttgttcgcagcaacagccgccgttttatgccttctcaagctgatgaagaaattcatcagttgtcctttctgcaaaagcatatggcgaatattcttactctcttggcagattctgttgagggtgagggtgacgattcactggtattgacaatggagacttttgagcaccttggatttctagttcagttctcagaaggaacttccttaagccaggctgctacattttttgcaaactcagacccagacatgcctgctgtgcctgtccctgctgctcaggttcttgattggatgtcacagaacatagctttttcgctggaatattcttctgagaggtccgtagctaaggaaagcaaccagcaaaccatgtctgatcttgatgtgaccatggctgaggccaatacaagtcactcacggaacagcacaccaagtgctaatcctgcatactacagaaatgtaacgtttgtggagggcttttccaaaacctctgttgtcaagcatgcatctgatgtcaaagggaattcaataaaggttttgaactgtcatgattctgttatctacatattagcaccactgaagtatgctactgtgtatggttgttctgatgctacggttgttcttggtgctgttggtaaggtagtaaaagtggagcattgtgaaagagtgcatatcattgcagctgcaaaacggatttgtattgccaactgccgggagtgcatcttctacctaggagtaaatcaccaacctcttgtattgggggacaaccataaattacaagttgctccattcaatacatgctacccacaactgcaggatcatatgatgcaagtgggtgttgatcccagtgtcaacaaatgggaccaaccttttgtattgggagttgtggatccacatgattcattatcccatcctgctggggttgcagatgttaaagctgaatcagcaacatgtctggatcctgatctattcaccagttttttgattcctagttggtttggggatgaagggcaagagcctataaactgcaatcctttcccactgcctgaaatttatgaggcattccaaagcaaaaagcgttctgctctggaagatatccaaaagatgattcgggagctacagcttgacgagaatcggaaaagggaattggcagctgcccttcatgctcagttcaaggattggttatacgcttcgggcaatatccgccagctctactgtctacaaggtgattaatggtgcaatttacaagactgattatcctctgccgactcctcaaaaacattcgacgattgtcgaagctgacctcttccttccatggaaaggactcccaccctgctcacctgcggtatttacacaatgttgcaggagctttggcgatga

SEQ ID NO: 28765 - DNA, 3352 bp, Zea Mays
gtttgaggaggaagaatgtgatgaagaagacatgaacatggatgcatacagtgattcatccctcgagccatatgatctatcagacgatgacacagatttgcaaaaaaaaattagccacctgagtgatcttgcagcagcactaagaaaacctgatgatccagatggtgtcgaaaatgctcttaattatgcggaaaagcttgtgagagcatcacctgatgaattacgctacaactctggtgaccttgttagagcactggtgcatgttcgctgttctgacgtggcaatggaaggagaggaagattctgctgaagaaaagagacagaaggcattggtttccttgttggtaacctgcccatttgaatctctagatgttctgacaaaattgctatattcatctagtgtggatattggtcagcgcattttgattattgatgctatgactgaggcggcacaggagcttgctgaaactaaaactgtgaagatagaacagcgacgtggtaacttgataactgacacttctccttcttggctggttccgagtaatataggacctcctggggcaggcccttggagagaggtatctgaaccaggcacacttctaagttggtcacaccgttatgaaagagaggttccatctaaatcgggtcaattgaaatcaggaaaatctcgtaaatggggtcttggaaaagcgaaagacttgcaggttgagtggtctaaaaatagatttcctttgtatgccgctgcttttatgctccctgtgatgcaaggatatgataaaaggtcacatggtgttgacttgcttaatcgggactttgttgtcctcggtaaattgatatatatgcttggtgtctgtatgaagtctatggccatgcacccagaagcatcagctctagctcctgctctccttgacatgataagatctagagatatttcacgacatgctgaagcatatgtcagaaggtccgtattgtttgcagcgtcttgcatattgatatctttgcatccgtcatatgtggcgtcatctcttattgaaggcaaccaggacatttctactggattagagtggatacgcacatgggctcttcaaattgctgaagctgatcctgatacagaatgctcatcgatggccatgacctgcctgcggctccattctgagatggctcttcagacatcgcgcgcactggaatctgcaaatcactccaagactggcagagccataccttctaagctcgacagcattattctaccattcggcaacatgatgtgataggtaaactatatataagttgtgcagggatgtgtcctgctgttgtacagaacttacgtagcaaattctggtgataccacgaattgttgcacccagactggagtatttgactaatcaacttgtgtatcttaaagattcaaagggaaaatgtttaaaggtcctggtatcgaaggtggttgattcccttgcttttgatcagggatgggatgtttttgtctcaaaccatttgattaaatggggtgaatttctgttgtttgagtatattgctgagcgtacattttctgtgcgggtttttggtacggattcttgtgaaagactcgacttcaatcctgagagcacaaataaaggtgaaactaagaaacaggcatggagtaatatgccacctgatgatttggtcgtcacagatggtatttcagaaaacagtggctactatgtttctggcgaatgtcctaggaccaaagtgcctcaaacatgtcatgtaacttgcaatacaaaaaaagaccctaaacgagttgaacgtgtggttggatctggaccagtggcacaagatatcagtggtaatttgattggtccacagtgcaaaacaaagggtactccactgtgcagcaaaggaaaaacagtaattatgattatagattctgaagattctgaaccttccgcgcatgaaaaagaggatacaatgaagctagccacatcaggaccagattcagatataagtcttgtggctgttaataccaatgaggaccctataagagctcaaagtggcattgggaatggaccctcagctgtactagctgacgagaaggggaatttccctgaaattgagtgtggaaccaagtgcatttcagcaacatgcagtgaagtaaaaacagtatctcaaattataagtgctacagctctcttagatttacatgattcagatgaaaatttaggcagaaaacaaagaacaaatgccattcctttagattctaggacaaccgcggaagattatcataattatagcaagatgatcattatccaaaactttaatagaaaatatgaagctcctggaggtttccgatgcttggagaagtggaggaaggatgttgtgaacaatcaaacagctcttgattgcactgcaccgattaaacatgaaaacccacaaaaaactgacggcatgttggttgatggttacggtttgattgaactgaacccagtagatgagtacatttgttccgagggaaatcatgaatgtgtccaaccagtattcacaatgcccatcaaagaaccatcaagtgctgacagagtaatcgattgcggacgtgatgggacagagatcaactatagcatcaatgagaaagatggagggtccattgagaaaacctcaagtcctgacgaaatatctaaatgcaagaatagcatgatggagactgcacataatgtcaatggaaaaggtggtggaactactgctcaatttgaaaccaaaatggatcaagcggagccagcgaggagcggtgtacgcagcaaaatttgcaacagtgttgtacctgccaacgagtcagaacaccgttccaccaaacaggaaggcagaatgtctagtaaccgtgaggtcccagagtctttgttgcctacaaaggacgaaattccggagccggatcatcattctccaccagagatcaacttccaactgtgcattcctgatactactcagaaatggcttgacctatccaagtcgctttccaatgcagttagacgacagagaaggcatgactatgatgtcataatgctgaaggaccccaagaagagactatggcctgtcgtttaccacgacagcctgttatttgtgggattcaccgcgggctggaaacatttcgtggcatcaaacgaccttcgggctggggatgtttgcgaacttgttaaggagccagacgatggtgagccggtgtactctgtccggatgtctgatcacaaaatttaaagccgccccggctttatctgtgcgcttctcttctgttagacctccaagaagcatggtgcagccgacttgcggaccttgtgaaaagcatgtgggtctgcccccccttttttttgctggaagtcatggag

SEQ ID NO: 28766 - DNA, 3462 bp, Zea Mays
ctcaaatctgattcaaagacttcgtacgcttgctacttattggatgagctgggacgacatgttcattgaattcatacatgtaggagatgatgaactatatggatggatatcttgaccagttcaatgaatatacaattcaaggctcatttcctaccttacatgcctgccaactaatatgacctactgcacttctgccaaagcttcttgccttcgaaggaggaagaagaagatgatgagcagctaagaagaattcggcaacatctccatgaactctccaaaaatggagctttctccatggcttgtgttctccttgggtttccttgcgcaggctctcgtcatcttggctgacacgaatgcacaagacgcttctgggctgaatgggattcaagattcctggaacaagaagccatcaaactggagggtgggcactgacccatgtggagataaatggaacgggataagctgcaccacaagccgggtcacggctatactctcgagtttaggattgtcaggatccctttcaggcgacatccagtccctgtccgaattgcagaccttggatttctcctacaacaaggacttgggcggtcctcttcctgcgtccatcggaagcctgagtaacctcgaaaacctgattcttgtcggttgcagcttttctggagaaataccgaaagaactcggacagctcaccaagcttagatttttatctttgaactcaaacaagttcagcggttccattccggcatcactcggaaggctctcgaatctatactggtttgatctggctgacaataagctctccggaggactcccggtgttcgacggcacgaatcccgggctggataacctgacaaatacaaagcacttccacttcggggtcaatcagctctcaggaacaataccgagccagattttcaactcaaatatgacgctgatacatgtgcttcttgacaacaacaacttcaccggacgcattcctcctactctgggccttctcaatacactagaagtcatgcgttttgataacaactaccagctgactgggccggttcctagcaacatcaacaacctcacaaaacttgcagagctccatctggaaaacaaccagctgactggtccactgccagacctcacagggatgatcgcgctcagttttgtggacatgagcaacaacagcttcaatgcatctggtgttccttcctggttcaccactctgccatctttgacctcactgtaccttgaaaacctgcgtgtcacagggcagctgccccaagccctgttcagccttcctgcagttcagacactgaggctccggggaaaccgtttcaacggcacgctaactatcggatcagactacagcactcagctccagctaatcgatctgcgagacaaccaaatcagccagataactgtcggcggatcacagtacaacaagcagctcatactagtcgggaaccccatctgcagcccggggacggggagcagcgagaaatactgcgcgtcgccggggcagtccaaccaggcggcgccgccgccgtacagcaccccgatgaactgctcggggctgccgccgccgtgcctctcggaccagctcgtgagcccaggctgcgtctgcgccgtgccctacaggggcaccctgttcttcaggtcgccgtccttctctgacctcagcaacggctcgtactggggccagctggagaccggcatcagagccaagttccggagtctcagcgtccccgtcgactcggttgcgctccacgatccgtccgtcaactcggtcaacaacctgcagctcgcgctggaggtgttccccagcggcaagacccagtttagtgagcaggacatctctgacatcgggttcatactcagcaaccagacgtataagccaccctcagtattcggtccgtactattttcttggccagccgtacagctttgccaatgtggtgctaataccttccaaatcgaaggcgaacaaccgcttacctctgatcgtcggagcctcggtgggtggagcggttcttgttgcaatagttcttgctcttgttaccatcgtcgcaaggaggaagaagagaccaaagcagaacgaagagaggagccagtcttttgtttcttgggacatgaagagcacgagcggcagcagcgtcccccagctgcgcggcgcgcgcacgttcaacttcgacgagctgaggaagatcaccagcaacttctcggaggcgaacgacatcggcaacggcggctacgggaaggtgtacagagggaccctgcctagcgggcagctggtggccgtgaagaggtgccagcaggggtccctgcaggggagcctcgaattcaggacggagatcgagctgctctcccgggtgcaccacaagaacgtggtcagcctagtgggcttctgcctggaccaggcggagcagatcctcgtctacgagtacgtccccaacggcacgctcaaggagagcctcacgggcaagtccggcgtgcgtctggactggcggcggcgcctccgggtgctgctcggcgccgccaagggcatcgcctacctccacgagctagccgacccgcctatcgtgcaccgcgacatcaagtccagcaacgtcctccttgacgagcgcctcaacgccaaggtctccgacttcggcctctccaagcccctcggagaggacggcaggggacaagtcaccacgcaagtcaagggcacgatgggctaccttgatcctgagtactacatgacgcagcagcttacggacaagagcgacgtgtacagcttcggcgtgctgatgctggagatggccacggcgaggaagccgctggagcgcggccggtacattgtcagggagatgaaggtggcgctggaccgtaccaaggacctgtacggcctgcacgacctgctggacccggtgctgggctcgtcgccgtccgcgctggccgggctggagcagtacgtggatctggcgctgcgctgcgtcgaggaggccggcgccgaccggccatcgatgggcgaggtggtcggcgagatcgagcgggtgctcaagatggccggcggcccggggcccgagtccgcgtccaactccatgagctacgccagccggacgccgcgtcacccctacggcggcgacagccccttcgaccacagcaacagcgggttgccgtccgcgagggttgagcccaagtgaatctacagcgcgcgccgcgagtacatgcggaaaagcttcactcttcaacaaaagctagctctgaatgtacagggtattgtaattattagtgttataattttggttactatgataggtgtgcgattggattaagaactgatttcttgataacgattgtttacatgataattttggttgctatgtatttaagatagatatgcaattggattgttgacatgctaatatatttcatgtatgtcatcaaatacacaaatgattatttatgttcaaatattagacaatttcac

SEQ ID NO: 28767 - DNA, 1520 bp, Zea Mays
cttggttatctctttccagttttcagacctcactcatgacttattgacttcatgagtgagccaacggcgctagtgtgtttccttggtcgctagtgagctcaaggtggtgcgaagtggatgctcctggtggtgtctagtggagagcttctccatacatggcatgcacactatcgtgctgttaggtgcctcgggctgtatgactatttgcttgtctcagggtcagaggatgggactatcaaagtttgggatctcatcacggtgcttgatgagcaatcaaggctggaggtccagacaccatatttgtatagtttcagtcagcatgcactgcctgtaactgatattgcttgttttcttggagcaatcgctatatcttcttctgaggatcgaacctgcaaaatttggagtttatctgagggtaggatgctgagaagcatttcatttcctactagcattgattctatagcactagacccaagaagtcatattttctatgctggtggtagagatggaaaaatatatgttactgctatgggtgttgatctcagttttcatggtagggatgagtcatctattctgggtgcattggatgaccacagcaaggcagtaacaagcttagcatcaagcagagatggacttctacttgtctctggatctgaggatggtaatgttcgggtgtgggataccagatgtcagcaagttacccgaaaattcaaacactcccaaggtccagtaaccaatgttcttattgtaacgccacaacgagtaaatctgccaccgctacaaccattacgcaaagttcggtctgcaaatggggaggctgaacggcaggcagtacttcttcatcggcctgaaaatgatgtcccaattcctggaaataagaccttcatttttatggagcgctacttggatgagcttcagaagcatggtggttcatccaggttatttgattttgggccgaatgctcagaatggcactccaaaccaacagggaacagaatggagagatagatacttggagttgcaggatctctttgtacatgaggtcctccatcagatgccatcctcgaggaacccatgatgcacatgctttggatatcgatcatttgtggtgtcgaaacagtgatggttgccattcgggctacaaacgatgtagatgagttctttggagtaattcaactgatggtgctttcggctgcgaggaacttatcagattctgaactaaaaccactagaatcggtgccagcagtcacttggaactggttctcgtttgtgtactagtctagagaaacgctaaaaatcaggtttctcttgattctagttctaattttaaggatacagtgagcttgctacataaagttattttgatttcatagagaaaatgttttgttctcaggggaatctgaattttgaaagttttctactagaatctaagatttgatacgttcagggttaaccataccaattaaggactaaaaagtgctagttagcggtatcggattttcgctggaaaaccgctgtttt

SEQ ID NO: 28768 - DNA, 2110 bp, Zea Mays
cttgattgtttggaatatcttaacacaatattcaatgatattttgttcatgtcctgccttgatgaaaataaggcttttctatcgaccgcagattctgctgtgcaattactcacagaagccaccaaaccagtttcaggatggaaggggattgagtatcgagcagcatttcctctacataagcctcccggtgctaacttctatcctcctgacatggacaaagcggagtttgaactttggaagagtaaactgacagataaagaacaaaatgatgccactgggtttttcaccgtcataaaacgacatgactctctgtcttcatcgtcattaacacaatcagatggatcggatcagaccaagactaaagatgatctttttattgttccatactccaaggagtatagaccattcctagagaaagcagctgagcttcttgagaaagcatcagcgtgctctgattctccaagcctcaagaatttgctgagaaccaaggcgaatgctttcctttcaaatgattactatgaatccgatatagcttggatggaattggactccaacttagatctcacaattggcccatatgaaacatatgaagatagcctttttagttataaggcaacttttgaagcatttgtcggaatacgtgatgacacagcaacttctcaagttaaactctttggtgatcagctccaggatttggagaaaaaccttccaatggacaatattttcaaatcagatagtatatctgctgctcctattcgtgtgatcaatcttctctacaatgctggggatgtgaagggtccacaaaccattgctttcaatttgcccaatgatgaaaggattgtgaatgaacgaggaacttccatggttatgctcaaaaacatttcagaagccaagttcaagcatatcttaaagcctatagctgatgcctgcatcagagaggaacaaaaggaatatgttgatttcgagccatattatacacatatagtctgtcatgaatgctgccatggaattggacctcattctatcacccttccaagtggtaaaaaaacaacagttagaagggaacttcaagaattccattcagcattggaggaggcaaaagctgatatagttggtctctgggcactgaatttccttattaagaagggattgcttcctaagagcctgtcacaatctatgtatgtctctttcctggctggctgcttccggtcaatccgctttgggctggaagaagctcacggaaaaggacaagctctgcagtttaactggttgtatgagaaaggggcttttgtgttgcagtctgacggaaaattctcagttgattttacaatggttgaggatgctgtagaaagcctgagcagggagatactgacaatacaggcaaagggcgataagccttctgcccaatctcttctccagtcccgtgcaacattgacacaaccattgagaatggcattggagaggatagagcacatgcaggtacctgttgacatagccccggtattcagcacggcaaacaagctatttgcagacatttaactatttgggctcagaatcgttgtgctttagtaccgcccacaatacctggacgaaaccaggaattgctcaagaataaggcggcactaggaattgctcaagaataaggaagcgccccatgttaagcaaagctgataaaaccatggcgatatgtgagtgacctttttatcggaaggaaaattgtttgcatgcttatgtattgacctcaatttttacgtattggagtgatttgatgtgaaatttaaccaaattccacgtccagtacatggccatccaaacatggcctaaagtggtgtttgatcagtgagaattggaataaacccagctttgcctgaacagttgcgaagtactgagttacatcaatgcatattttgtaacaccaaaaaaagatgtattatcctaatggatgattgaacgaaggcattgtatatcgatccccaatggcccaatctttatgcacattctggcttgatcagatctagtttattagttaggcatatgacatctttaactcttaattttctaatgaacttgtcgaagttccatactagttttacattgactaacagataaa

SEQ ID NO: 28769 - DNA, 614 bp, Zea Mays
cttcgctaaagtgcggcccatcgggcccttcatcgaacatttggatgagccagcacaattgcttccttgcttgtggcagctagccagcttccctgccctaatcaactaatcgagatttcctcttagcggcgtgagggattgacagactgctgactacgggagccgggagggggcatcgtgcgccgtgcgcggtggcgaaggaagagcgaagcggcggaggccgagctgctacggcgctgactggccgggtcgcacggctacgccgctactcgacgcttgctgcggcttgtgggaagctggagaagaaagtttgtcgcctgtacagctgtcggagaagaaagctcgtgcttggcggcttgctatgggccgcgattgagaggagatctgaaaatggagaaaaggtgaacatttttagcaagagctattggaaaaagaaacaaattgtataagtgcgagctgcaatcaaagttaaggcattagtcatcatttgcttcacctcttctggacaggctgcaaggttgctctgacataacgaggaagtccctcttcatggtcggagaaattgggggcaatgactacaacctacctcttcaatcgagtgccatttgaaaagg

SEQ ID NO: 28770 - DNA, 876 bp, Zea Mays
agaaaatgttcactccccttcctcggcattggcgtcacattcgcagccgtctcactcctctcgcacagcatccgcttctcctgccaaaccctagcacctccgtcctccgaccccctcagctccggcgatggcctccaccccgcaccctccgccgctcatcggcaagtcgggaaacctcacggtgttcttcacgccatcggcggagcacgagagcccggggtccgagttctctacgcccccgacgagccctcgcgccgaggactcccctgaatcaccaccggcgcagacagcccctccgcccgcgcctgtttactcagtatccacgccgcagcttgtcaagatggtctccccgccgcttcccgccgagaagctctcccgaccctcgctggtccaggtgccgccattgcagttcgggaaggcttcggcaggatcagatggatcgctgcttgcgttcttctgggacgcggttgcacgcatgcaagaagcacacgcgagcttggacgagcacatctcgagatggttcgggctggaccagtccaagtaccagtgggcgctcaacgactattatgagaggaccgggcagaagcggactgagaagaagcgtttggcacccagaagttgatctaacggcaagagtctagccacaagccgaaacaaacaggcctattgatgtctaggatcttgtttcgagtgtgcagttgcaacctgacttagcactgcctctgaatagtactaatccaagtctgcctatagttctttggctcagtgcaatttgaaccttggaaactcatttggaatacttggacgccgaagaagtgtcaatttttcctctggcttgcttttccataatagatgctggttccttgtcttccgtcg

SEQ ID NO: 28771 - DNA, 2460 bp, Zea Mays
cgtcgatcgatcgctgcggttcgtcggcggcggtgtcgagatgtcgatggacttcggtgccccggcggatgaccccaaggctttccgcaacatctgccgcgaccggatactgaaggacctgcttaagcctgacaaggataaggagaccaaaagctcatggaaggttcttataatggacaaattcacggtgaagatcatggcttatgcttgtaagatggcggaaattaccgatgcagggatttcgcttgtagaagatctgttcaagagaagggagccaatgccttcaatggatgcaatctactttcttcagccactgaaagaaaatgtcataatgcttctatctgacatgtctgggagatgcccactttacaggaaggcatacatcttcttcagctcaccgattcctaaagacttggttacttacataaagaatgacagtagtatgaatttggaattcttcactattgacatgcagggctttgtaactgaccatgatactgccctgattgatttatacggtccaagtgaacaaaattccaaaaagttcaacgatactataagcacaatggctactcgcattgcgactacatttgcatcattgaaggaatttccatgtgtgcggtatcgggcgccaaaaggagatgcttccacaacaactaaattcgatatggttccaaagtggcttgctactgctgtttgggaaattgtgtcaaaatataaatcaactattcctgaatttccccagaaggagacatgtgaactgctaattgtcgacaggcccatagatcagatagcacctgttattcatgaatggacctatgatgcaatgtgccatgatctactcgaaatggatggcaacaaatacatttatgaggtatcaaagatgggttcggaacctgaaaagaaggaatctttattagaggatcatgatcctctttggcttgaacttcgccatgctcacatagctgatgctagtgagaggttgtacgaaaagatgaacaattttgttgccaagaataaagcagcacaactttcaagagatggtggtgaagtctcaacacgggatctgcagaaaatcgttcaagcattaccccaatacagtgatcaagttgagaaattgacgctacatatagagattgctggaaaaatgaacaggtgtatcagggagtatgggctccgtgatattgggcaattggagcaggatttggtttttggagatgcgggagcgaaggaagtcatcagtatcctcaggtcaaagcaggatatgagcccagaaaacaaaatgaggttgctgattatatatgcaattgtatatccagagaagtttgaaggtgacaaaggggaaaagttgatgcagttagcgaagcttccacatgatgatatggatataataaattgtttaggatacttggatggttcaaatacaaaaaaatcatcaaggacgggtactttctctctcaaatttgatgcccaaaagaagaaaaatgctgccagaacagacaaacaagatggtgaggaaacatgggctttatcacgttttttcccacttattgaggagctgattgagaaactgagcaagggtgaattacctctaaaagagtacccatctatgagtgaaccaagttctgcttctgcttctcaagatgccacacaaactgcatcatcaactgcacgaccagcacaaaatccacaaccgatgtctatgagatcaaggaggacaccaacatgggcaaaatctcgtaattcggatgattcttcaagtgattcttcagtcctgagacacgcatcaggtgacttcaagaggctaggcaaccggatttttgtcttcatgattggtggagccactagatctgaactgcgcacggtgcacaagcttacaatgaaaatgaagcgcgaaatcgtcttgggctcttctagcatcgatgatcctccgcagtttatttcggtaaaaactcaattcctgttttttaggttctactactatatgttcatgcaacaactctgcaagtgcagaagctgaagtcgataggtagtgctaccaagacctagcttgtatgccgagcgataaaatgaattctcaccttatagtactcagtataagcttacacattatacatacttcaccaatgaacagctctacattttactaggatgttgtcggctgtcaccagcgacccattgattatcgtcgaactgatcacagttattattctcttaatttttttttaattgaggaagtgagctggcttgtctggatgtaaaataagaaatacgtacacaacgttttgtttgttatttgatgttcttgttgacaaacagataaagagagaagtcattaggaggttttgtaaaaaaggcctaaaattgatggttatatgatatagaaactgtattgcacggatctataacagaatatggataaaattgattatggagggacacaacttcctttgcttgctc

SEQ ID NO: 28772 - DNA, 3247 bp, Zea Mays
ttctaccactgtctcctctccgtgacgcacgcccgagatcctctccgcgacacacgcctccctctcctctgccccaccctcctccccacgccatcggcgccgccatcatcggatccggcccaagatgcctccgccccacgcgcccgagtcgtcgaggcacactccttcccgcctccgtcgtccacgcatatctccgcctcacctcggcgcccgagtcgtcgcacgcgttcgcggtggtgtccatcccggcaccggcctcacgcaccgtctacagctcccaactctgctcctctcagttctccctccgcatttcgccttctctcccttcctctccaagcagcgtcctcctcgcctagatccgtacaagcggcaaataacctctccggcggcgagacagatggagtcgacctccggcgaggatgctccgaagcacaacccgattccgtccgcgctcgtctccaacctacagtccgtgctcaccgcccgccgcttgtccgcagccgaggtcagcaccgccgccacagctagcgaggttgaggccttggcttaggaagcagaggcgttcgctgcccccacgggagatgggacgctggcgaggcccatcgtgctactgacctatgccggggggatccggtcggcgggtctcgcggcgctcgtcgacgccctcgttgccgccgaccgctgcgacgtccacgtgtgtgcccccgaatcgtacgtgctgcgacttagaaaaccaaaccacagcgggaccagtgctcggatagggtccgacgacgatgcaagcaaggagtggcgcgcggccgacggggcgcagatcggctcctgcacgtgcagcgcagccgcgtgacagtgaagcagggaggccgcgataggtggcgcagggagggtgcgacggaggcaaagtgcaagcacctggggacttcaggtaagtagaaaaccaacactgaatttgtcggttctctgttttgtgattgaccgattggtttgttgatctcagaaaattgtttcaccgttaagcaccaatttttgggtaggtcagtgttttgggatgattctcctatgcatcaatagtaaccttgtgcttggcaaagttatttgccctgataatgttgtaggtttagtgaaaagaaatatactgacatatccacctatccatcgatgcccaatggagattgacctctatcaagatttagttatgtgtctcagtagggcaatatttctgtgagttgtatactgtggattcctcatctgcatcatgaattgatcgcactatttatgccctatttttcaaaccatggtttctgtaattctttgcaccatggtatttttctcaaatgattttatctttcacaacccggactgaactcactgaagcagaaagaaagagtacaagtctactactgcagaaagcaaggagaatgccaatagaagcagatttcatgtatggatcgggcgcccaacaatgaatgatgtggtgaaggaacttgagatcatcagatagaatgaaggggcacaattgttaaactcagcgtctttatcagttgaacaatttggaaacaaaaagagaagagatccttatgcatttgtctatggatgatggaagcaacaacaacacttttgactacaacagtgggagttcaattaagttgttcacccaagtagataattgtctccactctttcaacaagttattggagttattatatatgtctgctccatatgaatgccttttcattttagtatcacatctgaaattaccaaccttttatactggcagtgtgataagcattgaataaaagtttttttatatgttgaatattcaacaatatatgtataattttatatatacataaatataatattctcatacgcgtggttgctccgttggtatattgttgaaaggttgttttttacggtacatgtgctgaaatggccatgctttgatctgcctataggttgaaccatataagctttctctcagactcgattatgctgcttacatgatccatttagctgtctttggatttttggggtaactctccaatatctcacatgaggttctttgtgatagctgttacttaatctgtggtgatctatgtaaatgtggcaacacttgcagttcctcgagcccttgtgcatggatatatcgtttagttgtgtctaataatttgtaattagtggcaacatctttttgttattttggttttatctgatttttattgttataagatctcgattgcaaactggcagttagtacacctttaggttttcctttgtcgtatcaagctaataatgtgtgaagcagggttcccattctgatctttagttttttgtgattttaatagcaataacctttttcgcaaaaaagtaacaaactttatgcagtatgcggttcgtatagttcccagtatccttttggacttagatttagttcgatatatggttatgtttattgacagaatgcttttagctttgcagataaaatcttgagcaaaatgggagaaggtttgggttttctgcaatctgtcgtctcctcttctgctgggtatctccattattattctaatgaagagggctacgagttggattttcgtaggtacatttgagcgtgttttggaatgctgggatcgtgaaacacgtgaatatgttgccataaaagttgtacacagtatccacaagtactgtgatgctgcaatgattgagatagatgtgctcaatcgccttgtagaaaatgaaaaatatagatttctgctacacttggggaatcaaagaaaagtgaaagtgccatgtcaaagttgatgaccagaagcttgctattggaaccctctctattgaaaaatacccctagatagaaattgatttggttttcaataaagagtgtgagctgtcacacacatcgaaaactacacgtgtatttttctttggttacaaggttgagcaaccaatcgaggaagatgaataatggatcttgattctgaagatgaagagaaggagctaaacattccagtaatcaaggaaaatggcaaaggtgatgggaaggaggaccagagaagtgaagagaaggcagttgctgcagcttcaaaatcaagtcttgggcttgaaaaaaagcaaggatgagtatgagtctgatgattctaatgagggagaaggtgaaaccggagaatgagcagatgcggctgttcatggacaacagcatcaagaaacctgcaacatgcaacctgattttaagaaatttgccacctgcaac

SEQ ID NO: 28773 - DNA, 1641 bp, Zea Mays
atgtctttctttgactccacacctagtgggcgaatcttgaacagaattctaggaacagttattctgatgtcacatgttgcatggcaagtcttcatagtttttgtccccattattactgcatcgctgtggtatcagcaatactacatagatgcagctagagagttgcaaaggttggttggagtttgcagatcccccgtgcttcaacatttttctgaatcaatggctggctcaaatataattagatgctttcaaaaggaaagacaatttatccgttatattggatatttggtggataatttatctcgaccaagtttgtataatgcagccgcaatggaatggttgtgctttcgcttggatatgctttcatcctttgttttttccttcacattgatacttctggtctcttcaccatctgctttaattgacccaaagactgctggtcttgcggtcacttatggactaagcctcaatatgctacaagggtgggctattgctgtcctctgcagtttagaaaatagaatgatatcagtggaaagaatgttgcagtatacgactattccttcagaaccaccacttacaatatcagaacgccaaccaaatagacagtggccaacaaagggcgaaattgagtttcttaacctccatgttcgatatgcaccgcagctgccttttgttttaaaaggcctgacgtgcaccttactcggaggaaagaagacaggtattgttggtagaacaggtggtggcaaatcaaccttgattcaggcactatttcgcattgtggacccatgtattggccaagtgtttatagatggcactgacatctgcaccattggactacatgacctccggacaagattgagcatcattccacaagatcctgttatgtttgaggggaccttgcgaaccaatattgacccccttggggagtacagtgacgagaaaatctgggaggcattggattcatgtcatcttggggatgaagttagaaagaacgagcttaagcttgactctacagtgacagaaaagggcaaaaactggagcacaggtcagcgtcaacttgtgtgtctgggaagggtgattctgaaacggaggaagatcttggttttggatgaggcaacttcatccgtggatccaattacagacagcttgattcaaaaaaccttaaaacaacaatttctcaaatgcacaatgattacaatagctcaccgtatcacatcagttcttgatagcgacaaagtcttgcttctggataatggtgaaattgcagagcatgacgccccagcaaaactgctagaggacagttcatccctattctccaaacttgtatctgagtataccatgggatctgataagtggcgaatgcaagaaagcagctaaatcaatactctacagataatacaggacaaacgccctaggaagtgtgagtatctacgtgtcaccaattttatagcttaataaaaagcaaatttttaaaaaacaaaaaaaaaactatgaatatccatattccccaaggcccttggaagtgtgatatatttgtttcattgtatactagttaggggcctgtgcgttgctacagtttctatatatcacattgataaacttgctttattgagataacttttgaaacatgttcaattgagc

SEQ ID NO: 28774 - DNA, 1244 bp, Zea Mays
gacgcacccaagagagaggaggcgaccatgagggccaaggtatactccacccatctcccttcctacttctcgcgcctactacctcatctcttagatccatgtggcatatcgccctgctggtgctcccggcgttggcccaggtcccgaagcgggagggttggtgggggaggaggaactaacgatagccatcgccatggccaccgacgacgactgataggactgcctcttcttcatcgatgtggtaacgacagaaatcaagtaatggggacggggctctccaggccatgcgggtcaaacgactggaacacgtccccttagcctccgaacgggaaccccgggctggagctctacagcgagaagaccaagcttgctgaagggccgcaggcttggaacatctagattttgttttgctaaggggagcgctatgtgagggtgggcaggttgctcaggtcaagtgggttcacggctgcgagcttcatggagagactattgatagcaggtttctttattttcatgggaaaattgtgtcctgcatcattctttgatcaagattgatgagggaaagatcagtatgccgaggatgggaccgggttgtagcttgcgatgctagatctgctcatcatgaaacccatcatgactaatgcatttatctgccatttaagtgtacaccagattatttgtatgtttgctgcttactatgcaaaatggcagctaaaagaagccctaaagcatgcgagctgcacctctaccggtttagtggccaaactggctgttactacgtttcaggtgttttatctgtaacttttattttgttctttttcttgttactcacttatttctgaataattaagtatatatgtcacttaatttagtgctagaatgcagatctggcatgtttgggaactaacctgcactattggttgttttttgcttcttggtggaccattttatctatagggtttggaatgttttccagcatgcattaaattactgttaacatatgattttagaatacaagtttttagacatgtgttgtgtatttggctgtatgttaaattgtaaacaaaaaactcttagtcgttgtactctaaccttgaatttatttgatagatttttcatagtttgtttcattaatgcaataggggggggggggggggctatgtagcaaggatgtgatgtaattatgcgcagctattacaacaatttcttgttctcaatggctttgaattgcagagtgctagcca

SEQ ID NO: 28775 - DNA, 1801 bp, Zea Mays
ccaaaacagaaaaagctcggaaacggcaaaagccacggcgagtagcgcagaggcggcagggtgggcgaccagtctcctccgcacgcttcccaccgagctcacacactgcacactcccacactcccactcccacctgtaggttcacgggaggcgagcggagcggggcgtttctgcgggggagaagcgcgtccctgcaatttctgagagaggggaggcggcgagtggaaaagagcaggcgttgctatcctatcttgctgacacagcggcggtgtggcgaggcgcatggcgagggcgcgcggtggcgccgcgtggtgggtgctggcagcggcgtgggtgctgtgggcggctgcggctgcggcggaggcggaggccaggtcgccgtcggcgaggagggtgcaccggcacctcaagcgcctcaacaagccggccgtcaagagcatcgagagtccagatggagacatcatcgactgcgtgcatatctcccaccagccagcgtttgatcatcctctcctcaagaaccacacaatacagtttaggccggcgtaccaccctgaaggtctatacgatgataccaagagcagcataggctcaaacaatgctggcgagaggccgatgctccagatgtggcatcgaaatggcaggtgccccgagggcacggttccaatcaggagaaccaagaaggacgacctgcttcgagctagctccgtgaggcggtatggcaggaagcggcacactgctccgaacccactgtctgttgatcccaacatgctcagtgagggtggccaccaacacgccattgcgtacgtccagggcgacaagtactatggtgcaaaggctaccattaatgtgtgggagcccaagattcagcaggctaacgaatttagcctgtcccagctctggatcttggggggttcatttggggaggatctcaacagcatagaggctggctggcaggttagccctgacctctatggagacaacaacaccaggctgttcacatattggactagtgatgcataccaagccacaggttgctacaacatgttgtgctctggtttcattcagataaacagcgaggttgccatgggggctagtatcttccccatctcgaactacgcgggctcccaatatgatattagcatcctgatctggaaggaccccaaggaaggaaactggtggatgcagtttggcaaggaatacgtcctgggctactggccgtccttcctcttctcctacctcgcggacagcgcgtcgatgatcgaatggggcggggaggtggtgaactcggagcccgacggcacgcacacatcgacccagatgggcagcgggcacttcccggaggaagggttcagcaaggcgagctacttcaagaacgttcaggtggtggacagcagcaaccagctcagcgcccccaagggcgtgggcaccttcacagagcagtccaactgctacgacgtgcagaacggtaacaatggggactggggcacctacttctactacggcggccctggcaagaactcgaactgcccgtgactggtgcttctaatgtgtagtgtgaagtgccgtcaccattagcaaaatgtaacccaagcgttcagtttctgaagagaaggagcatggcttgaggctgcggtgggtggttgggctggtcggtggtgacctctactgatttttgcgaagtctgcttattggtcaccttcgccagttattttgaaagtgtgctatagcttgtttgatgatgaatgatagtaatgctgtaatggtattgagcttagtggttattattgcatccagttaaacc

SEQ ID NO: 28776 - DNA, 3975 bp, Zea Mays
catgccggcttagtaaacaaacatggttgaaagctcgagcgcgtcggtgttacgaattgagctgcctccaaacaaaaggcaaagataaaaggcaaaagctggagagagagagggacgagggagggaggccattgatagagaccacgagctgttctagaagtcaccgcgctgcagcctgcagctcaggggggcctgttccctggatctcgccatcgccattgccgctgccccccacctactactcctgctcctagtcctacacccctcctactccaatccaagaggtgctttggatcgcattgcttcgtgctagagttcggtggtcagcctgcgtgtgggacagtgaatttgaaattggcggggctgttgttcaaagaattggagatggacaggaagaattgtcctccatcgccatcgccaagatcgaccgagaagtctggaagagaattgagatctggggaggccaatgtcagcacaaataccaatagcaacctcatcgcaaaaggtgacaaggagaaaggagtcaatgtgcaagtcattctaagatgcaggccgttgagtgatgaagaaacaaagtcgaatactcctgtggttatttcgtgcaatgaccgtcgccgggaagttgccgccactcaaattattgccaataagcagattgatcgcacatttgccttcgacaaggtttttggcccatcgtccaagcagaaagatttgtttgaacaatccatctcgccgatagtaaatgaggtccttgaaggttacaattgcactattttcgcttatgggcaaactggtaccgggaagacttacacaatggagggaggtgggactagaaagaccaagaatggtgaactcccaactgatgctggtgttatcccaagggctgtaaggcaaatctttgacattctcgagtctcagtgcgcagagtatagcatgaaagtcacctttcttgagctttacaatgaagaaatcactgatctgttggcacctgaagaaccaaaattccctgttcttgaagacaagacgaaaaaacctattgcccttatggaagatggaaagggatttgtttttgtgagaggtcttgaagaagaagttgtgtactcagctggcgaaatctacaagattcttgacaagggttctgcaaagaggcgtactgcagaaacattgctgaacaagcaaagtagtaggtcacactctatattctcaatcacaattcacattaaggaactcactcatgagggtgaggagatgatcaagattggaaagctcaatcttgtcgatctagctggttcagaaaatatatcacgctcaggtgctagagatggcagagcgagagaggctggagagatcaacaagagtttgctcacgcttggtcgtgttattaatgctctagtagagcactctggacatgtaccatacagagatagtaaactgacaaggttgctgagggattcattgggagggaaaacaaagacttgcattattgctacaatatcaccttcagtatattgtttggaagagacattgagcacacttgattatgcacaccgtgcaaaaaatatcaagaacaaaccagaggtaaatcaaaggatgatgaagtctgctgtgatcaaggacttgtactatgaaattgaccgcctcaaacaagaggtgtttgctgcaagagagaagaacggtatctatattccaagagagcgctacctccaagaagaagctgagaaaaaggccatgacagagaaaattgaacgactaggagctgatatggaggctagggataagcaattggttgaattaaaagagctttatgatgctgaacaacgtctgagtgcagagttgggtgaagaacttggaaagactcggaaagatctggaggacaccaagagagctctgcatgatctagaagaacaatacaaagaagcaaagtctactattaaagaaaaggaatatgtcatatttaatcttctgaaatcagaaaaatcattagtggactgtgcatataaccttcgtgcggagctagaaaatgcagcagcagatgtttctgggctattctccaaaatagagcgcaaagacaggatagaagatgggaacaggtcgatggtgcagagatttaggtctcaactgacccatcagctggatgcattgcataaaactgtatccagttctgtcatgcaacaggaggaccaccttaatgaaatggaacatgatatgcaatcctttgtttcttcaaaagatgaggctgcacaagggctaagagagggtgtgcaaaagctcaaagtcttgcatggttccggtatcactgctctggatgaattagcaggtgaaatcgacatgaactcgcggacaacatttgagagattaaattcacagatacagtcacacacatcagcccttgagaactgtttcggaggaatcgcttcggaagcagataacttgttagatgagcttcagcgcagcctatcgaaacaagaagagaggctagcccatttcgcagtgaagcagagggagggacacctgagagctgtggaagcgtcacgttccatctcaaagatcactgctgggttcttccactcgctagatgtccatgcatctaggctcaccagtattctggaagacacacacagcgtgcaagaccaacaacttcttgaccttgaaaagaaattcgaggagtgcgcagctaatgaagaaaaacagcttctagagaaggtggcggagatgctggcaagttccaacgcacggaagaagaagctggtccaaacagcagtgggcagcctccgggagagcgccgtgaacagaacgagccacctgcagaaagaaatctcgacggcccaggacttgacctcgtccgtgcgcgagaagtggggcttttacatggaagagaccgagaagaattacgctgaggataccaaagcagtcgacagcggaaggtcttgcctggccgaagtgcttgtagaatgcaaggcgaaggccaccgtgggtgcacagcaatggaagaacgcggaggattctctgttcagcctcggcaaaggaaacgtggagtcagtggattctatagtcaggaccgggacagaggccaacgaattgctgcgttccaaactgtcgtctgcggcatcggcaactcttgaagatatcgacgttgcaaacgaggctctcctttcttcaattgacagctcgctgaagcttgaccgcgacgcgtgcgcgaacatcggggcggtcctcacgccgtgccacggggagatgagggagctgaagggggagcatcaccacaaggtcgtggagatcagcgaaagcgccgggaagtgcctggaggaagagtatctggtggacgagccgtcgtgttcgacgcccaggagaaggcggatcgacctgccgggcgtggagtcgatagaggagctgcggaccccgggctacgccgagcttctcaagtcgttccgggaggcgagggggagctggaagctggcgaatggagacgtcacagggcatttgccagaggcggctcaggatccggcatcatcgccgccgccggccgtgggttcaagaacccctctcgtaggaagaaactagatttaccgaaaccatgtagaaagaaaaaggaaaaaaaaaggaggaagaagaggaaggcatgtgtctactagagtacctttttcgtattggtgttgatagtggtgttggttaactactgctgctgcttggttgattgtttgttcgttcttaggtggtctccttgtatagtgattagtgagtcatatatacttgccgtcacacatatgccggtgtacatcaggtgtgctcagcatgtctattctaaagcactagtgtttgtctctctctaggacccatcagttatttatccaactcttagagctcatttggtgacatgagaattagaggggattttaaaatttttaaaaaatcttctctaattttgttgtcaccaaaatagtcttttgggattgtttgtactaaagctaatagtta

SEQ ID NO: 28777 - DNA, 2047 bp, Zea Mays
ttttattgcaattaaggttcaatatcctggattggagcagcgaatgaagatagacattatgacaatgtcattcttgtcaaaaatggtctcttgggtatgaacaccaacattttgtttcctttttattgtgcaatgcaaagaagagcacgacttggtgcagtggtgagtgcatggtttttaaagcggtaaggcggtccaaggcgttggagcaccgcctggacgcctaggcgaggtaggcgggcaaggcgcctaggcgttagaccaccacccggacgcctaggcgacgccttaagaacagaggttgagtggtcttactgagtcaggccgtgggttcgaagcagcctctccgcatttacgggggaaggcttaccttggtttcctttctccagaccccactcatgtaggagcctccggcactaggtctgcccttcttttattgtgaaatgctaataatttgccagtcagtacatctaattcatcatagactgtatatgtagcagaatggaagtcaccataagtcgactgctttgagcaagcaggacttggtgtgatggtacccactgtaccatcatgttgtctattgtgttattgttgtaatttgtagggcatgctttcatgattgttgtactaattaatttttttaccaatcaaaacatttacgtgaatcacctcctgttctagcatagtttcataatgttcttttggctggcacaatgctttatctttttctgtgcaggtttttcctgattataaatttgacagaatactaattgaatttgagaaatccatgacaatggagcttgattttacgcgggaggctaagaattctgagagaacagccagctgcttcaggaaaaatagtgttgttaaagtgccttatgtgttctggcaacttacaaccagggaggttttgacgatggagttttgttatggacacaaggttaacgacttggacttcctgcggaaaacagatattagccctacaaaggtagctaaggctttgattgaactctttggtgaaatgatatttgtacatggttttgttcacggtgatccacatcctggaaatatattagtttctcctgaaggccatgggaaattttcactagttctgttggatcatggaatttatagagaattggaccaaaagttcagattggactattgtcggctatggaaagcactgatattgttggattcaaacaaaattctggaattaggcgaacagtttggcgttggcaaatatgcgaagtactttcctgtaatattcacagggagaactatagaaagcaagtcagctcttggcacacaaatgtctggtgaagagcagaggcgtctgaaggaggacttaaactctcttgggatggatgatatatcttcatttatggaatccttgccaccggacttctatgtcatactacgaacagacggactattgaggtccattttagggaatcttggggcaccacgccatgttcggcttctcacttatgcaagatgtgctatacacggtcttgagaagcagcacaaaatggagtctggtgcaatcagacgtatgttcttgaatgtcaaaacaaatgtcagctatctccgtctgagagtgattattgcggtattattagctaaagcaaatggtgccaagcagaaagtcgtgaacaaactcagacagatgttacaggagaccagtcaaggttttcaccgccgtatgtgatgcccagaagtcagcgacgtggtgaaattaaggctacgagaaaggtgggggaagttggaagtacgtcaggactccggagtagaatcataactgtgattgttctgtttcaacttgtaaattggaggttgtattgtgtcaaggagtccaatcataactgtgagtgctctgttgtaacttgtaaattctacttctacgtcgagtctgcgctcgagagtccaggtgttttttttttgttggaccaagtacgcatcccaaaataagtctacatcccaaaattcgaggagtcaaacaaatcttaatttgaagtttgcctaaatttataaaattggtattaac

SEQ ID NO: 28778 - DNA, 2774 bp, Zea Mays
gccgtaaccattacgctaaagacccttttgcgtttgttaggatatggggtgatcaaggccaaactgcactggagaaggccagcatatgcttgcttaactgtggtcctaccggaacagaagcattgaagaatctcgtgcttggaggaataggaagtgtgactgctgttgatggctccaaagttgaagcatctgatctggggaacaattttatgttggatgaaggatgtttggggcaaccaagagctaaatctatatgttcattcctacaagagcttaatgacgctgttaaagccaagtttgttgaggagtttccaacgcatttgatagacactaatccttcattcttttcccagtttactgttgtcattgctactcagcttccagagagttctttactgaagctagatgatatttgcaggaaagcagacatcgttttggttgctgcacgttcatatggtctaactggtttggtcagggttagcgtcaaggtacttttttctctcgaacacgcaggagaactgcgcgtcattatattaagaggaaaaaaggtcccaagtggaccaagaaaacaaagtgcccgagaaggcagcagacgagaagagggggacaaaaagaaaaaagagaagaacaaaaataaaagaaactagaaacaagagggaaaaagggggaggggggacaacccccaccaccccatctaaattaatgccacaactgtctaatatcttttgctcctgccattccccaaagcttaacatcctcatgaatctcttgcaaaatgttgcggatactcggaggtaccccatcaaacacgcaagcattcctttgtttccacaaccgccaagacaccaagataagtagggaattaaacgaaaatgttgcgtcaaggagcactgtgttatagaatcaaaaccagatcacttcttggatgatttgcgacttcacaatccatggactgaactaaagcaatttgcaaaatcaattgatataaatgataaagatcctgttgtccacaaacatactccatacattgttgtccttgtgagacttgctgaaaaatgggcagatgcccatgatggtaacatgccttcaactaggcaagaaaagaaggaatttaaggacctaattcgagcccacatgcttaatgtagatgaagaaaattacaaagaagctgtggactcatcatataaagtctcagtcactccaggaatcagtaatgagatccatcagataattgatgatgactctgcggaagtcaattcatcatcagaagatttctggattttagtagctgctttaaaggagtttatttccaaggagggtaatggtgagctacctctggagggaacaatacctgatatgacttcccttactgagtattatgtaagcttacaaaagatttaccaagctaaggcagaatttgactgtcttgccctggagcatcatgtaaaggaaatcttgaaacagattggtagagatccggattctatttcaagagcatatatcaaaacattttgtaaaaattctaggaaactaaggatttgtagatatcgtagtttcaaggaggaatttagctccccgattgtctctgagattcagaggtatttcagcgatgaagactgcagttacgcaatgaacttctacattctactacgggctgtcgatcgattggctgccaattatagccgattacctggaatcttcgacagtgagattgacgaggatatccctaggctgaagacagttgcggcttcagtgctaagcgagatgggtttgaacggagcatccttatcccaagacctggtaaccgagatgtgccggttcgggggtgcggagattcatccagtggctgctttcatcggtggagtcgcttcacaagaagtgattaagctggtcaccaagcagtttgtgcctttggggggaacattcatttttaatggaatcgatctcaaatctcaagttttggtgctataacatggatgtggagcgttggatttgagctggtccagattttgtgccagggcaccgcgctgcccaacgagtacccaagtctcgcagaaaatatcaatacttgcttcgtatgattttttgccaaatgactagcaaattcctagctcacgcggctgttatgcgtaaaaccagaagagctgctgcttttagactacgcctgttatatattagtaggcgaagtaatatgtcagtggggctgatgtgataagatggatggtgttaaagactagcgtgtgcgcgatttgacgaagacgactacgagacgggatgagcaatgagcatgtcggccgagctatggacgcttccatcatatcatggaccgacatcaatgtgcatatgatctcaggtgtccatcgacagaccgaatcttccgtggccagtattccttcggcgacgcggttgccgttagacgaaggaaactgtcgtgtgacagcgaaatgtggttgctacatgctggtagcgcacatagcacactttgggcgtgtttggttcggcttttttctaaatagcttttctgaaaagctggctgtggagaaaagctggctgttgggaaaaactggtggttagaatttaggtgtttggttcgccagctgtgcaaaaaagttgttcgttagaatataggtgtttggatacacagattctcagactgcagattctgtttgaaaaaactatacacattaacaccgaaccaacaaaaggtcattacatataattagtagagttcattacaacataactaccgttacatttacatatttaactatgac

SEQ ID NO: 28779 - DNA, 2638 bp, Zea Mays
ccgcgtccacgctatgacgtcgccctcgtaatcaatctccgcctccctgcctgcttaccccgaccccgtcggcatctcggagaatcgcggcggtcaaagcccagcctaccccacctcgcgccgcgtcgccgcggtttccgcgggccagtgctctcgggagtcgggagctcagatcaggagggacgggctaggtagggttcgcgagcgagcgagggtgctgccgtccggcgccggtgtccgagtagcaagaggagagatggacgcgttcctgcagaggctcaagcggttggacgcgtaccccaaggtgaacgaggacttctacaagcggacgctctccggcggcatcgtcacgctcgtcgccgccgtcgtcatgctgcttctcttcatctccgagaccaggtcatatttttattcagcaacagagactaagttagttgtggacacatcaagaggagaaaggctacgagtaaattttgatattacttttctgagcattccttgcaccctcctcagcgttgatacaatggatattagtggagaacagcaccaggacattaggcatgacatcgaaaagatacgattagatgcacatggtaatgttattgaagcaagaaaagttagcattggtggagcaaagatcgagagaccattgcaaaaacatggaggaaggctcgacaaaggtgaacaatattgtggtacgtgttatggtgctgaggagtcggatgaacaatgttgtaattcttgcgaagaagtccgggaggcatataagaagaaaggatgggctctgacaaatcctgacctaattgaccaggtatatcagctattttacctggattttttcatcaggaaggtttacatttaacctttttttgggagaatcttacttcttaacttatggtgcacaattaattcgctgcttttgagaaatcacaatcgtttggaggtggttccttgatccatcgtgtgccttgattaacagaaattgccgtctgcaatgtagtggcagtttttgtacttgaagtatttttttatgtcatttgcctgacattagatctgattcagaatgtgctcttagagttatatacttcatgtgttggtttctaattagcaaacaactttttctggtgaactttttaaaagtttcctgcacactttctttattcctgagatccactggtgtttgttgactgttttagtgcgcaagagaggattttgttgagagagttaaaactcagcaagatgaaggctgcaatgtccatggttttttagatgtcagtaaagttgctggaaattttcactttgccccaggcaaaggtttttatgaatcgaacatagatgtgcctgagctgtcattacttgaaggtggtttcaatattacccacaaaataaacaaactgtcctttgggacagaattccctggtgttgtcaatccacttgatgggtaactatatatgtttcactcagtgagcataaaattgcgctaattgtttttcaggcactcctattaacataaatatgtattttcttactctaaaacacacagtgctcagtggacacagccagcttcagatgggacataccagtatttcataaaagtgcagtctttcttcgtacatgaatgtttcagttctatggtttaacgctgcataaagaacttaccgagttttctgtccaggttgtccctacaatatacactgatataagaggacacaatattcattcgaaccagttctcggtaacggaacattttagggatggaaatgttcgtccgaaaccccaacctggagtttttttcttctatgatttctcacctataaaggtgatattcacagaagaaagtagatccctactccactacctgacaaacctttgtgctatagtgggaggtgtgttcactgtctcgggtatcatcgactcgtttatataccacggacagaaggcactcaagaagaaaatggagctaggtaaatacagatgatcaacatcgaccttgtactggccccatcgtttccaagttttgtggcatgtaaggaggggatatgcctgctaaatacgacaagatgccacttacattgctgaggttgcaatttgcaaggccatcagactgatgttattgcacgtgagctgatcagataacatgtaaaaagacaatgaatagcctggtctggggggagtgctttgatgtccatcattgttcactgacattgaaatggcccgaaccggtgcggtggagtaatttgagttcggaggtggatatatcatagatcatagaatgtttcttatgaaagtttcttcaaggaaacagcttcactcatggtgtcacccatactttgttcatttggtagtgctgctcttcaggaagaactggaacgattcgattgattatgttgcttttttcctaatgaccttggaggattcccttttctcgttttattttcagcagagctatccagtaaatatatattaactgtaatagtgattttttagttctacctacaattcattaggggtgggccaatgcaaaggtatactacaaattagaagatagcttattatgattgatttcattagattaatataagcctagctgtttggtaacctatattattggaggtgttgaaaagaaaaattaaaataa

SEQ ID NO: 28780 - DNA, 4948 bp, Zea Mays
caaaaaaaaagtccacacctccccagtccccacacgctagtctgtgctgtgcgggtgcccctcccgcgtcgcctccctccgcttcggcatttagcgctgccgcgagatatcgaggacgaaccggagacaggatggtcaccgtcgggcgccggcgcgggtttgtcaccttcgccgctgcggcgatcgctctgatgcagatcagttatctactgttcccgatcagtgcgcagcaatccaatggctcaagggttgtaccagcagaaggttactgttccatgtacggcatttgtgcacaacgaagtgacgggaaggtcttaaactgtgcaaatgcaaccaaagctgttaagccagacacattgttttcttcaaggatccaaagtttgtgcccaacaatcactggcgatgtctgttgtactgtagatcagtttgacacattacaccaacaagtccaacaggccgttccgtttcttgttggatgcccagcatgcttgaggaatttcttgaatctcttctgtgagatgtcttgttctccaaaccaaagcctcttcattaatgtgacttcagtaaagcagattaatagcactatgactgttgatggcatagattactatgtaactactaactacggtgaagagctatataactcatgcaaggatgttaagtttggcactctgaacacccgtgcaatggattttatcggtgctggtgctaaaacttacaaagattggttggcatttattgggcgacaagcaaaccttaatgagccagggtcaccttatttgataacatttggatcggattttagtgattcatctggtgtgaagcctctaaattctacaatttattcttgcggcgacccttctttgggttgttcatgtggtgattgcccttcttcttctgtttgcgcgggatccttgctgcctcagctgaatacagaaaccgcctgttcagttaaaatgggatctttaaaggccaaatgcttggacttctcactagtggttatttaccttgcactattatgcgcttttctgctatggggtttgttatacagaacacgaggaagaactgcttcccccttgcaagcaaagccattgaggaattcagataataagtcgaacatgaacaaaaatggcaagagccctcatgactcggttcaggtgcctgaagctgcatcctctactgccaaaccatccaatccttctatcgttcaaacttacatgtcaattttctttaggaagcatggaatttttgttgctagacaccctctccgtgtgttatgtgtgtcattgcttgtccctgtcctcttatgcattggtctctttcgcctcaaggttgaaacccgaccagaaaagctttgggttagccctggaagtgaagctgctaatgagaagaattattttgacagccatcttgcaccattttataggattgagcagcttgtgttggccacttctgcatctggtgggtccgaagctccttcaatagtaaatgacaacaatatgaaattactatttgagattcagaaaaaggttgatgatctacgtgcaaattattctgggtctaaagtagccctcgctgacatttgcttaaagccactcagtacagactgtgctactcaaagtgtcttgcagtatttccagctggatcctaaaaagtttgatgattctggaatagaccatgctaaattctgttttcagcattacacttctgaagagacatgtttgagcacttttcagtcacctgttgatccaagtacaattttaggtggttttccaggaagcaattttaccgaggcttcggcatttgtaataacttatcctgtgaacaacaaggttcaaacaacaggaaaagagaacgggaaggccatggcttgggaaagggcttttattaatcttgttaaggaagaaatacgtccaatggtattagcacagaatctaacgttgtccttttcgtccgagagctctatccaagatgaattaaacagagaaagtacagctgatgcaattacaataatgattagctatattgtgatgtttgcatatatatcattcacacttggagaccgtccttctcgttggctgttactatttgtttcatcaaaggtcctgcttggtttgtctggtgttgttctggtgatgctttcagttttaggatcaatgggattctttagtgctattggagtgaagtccacccttattattatggaagtgattccttttcttgtgcttgctgtcggtgtcgataacatgtgtatccttgtgcatgctgtcaaacgccaaccagatcagtcaaatttggaagagcggataagtgatgcactggtggaagttgggccatctattacattagccagttttgctgaagtactagcttttgctgtgagtgcaatcaatccaatgcctgcaaccagagtgttttccatgtttgctgcactggcggtcttcatggatttccttctgcaagtgacagcctttgtagcccttattgtatttgacattaggagggcacaggatggcagaattgattgtgttccttgtgcgagaatcacaccaagtacaggtgctggtgatggtggcgatgggcagaggcttcacttgcttgctagatatatgagggacgttcatggacgaattctcaggaaccgagcggtgaagttcgttgtaatcactgtatttgtaggattgacatttgcaagcatagcattatctactagactgcaaccaggattggagcagcaaattgttctgccacgaaattcctatttacaggattattttgatgaccttgcaaagtacatgaaagtaggtccaccattatactttgttgtgaaggacttcaattacagctctgcgtcggtggatacaaatcaaatatgttcaatcagccagtgtaattcaaattctcttttgaatgagatatcacgacaatcattatcccctgagactagttacattgctaaacctgctgcttcatggcttgatgacttcctaatttggatgtcccctgaagcatttggatgctgtagaaaatttgtgaatggaagttactgccctccagacgatcagcctccatgctgccaactcgatcaggtttcaggctcttgcatgacaagcaaaacctgcagtaactgtacaacgtgcttcctacactcagacttggataatgggcgtccatccacaacccaattcagagataaacttccatggtttcttgacgcacttccatcgagtgattgttctaaagggggaaaaggagcttattcaacaagtttagacctcagtggttatgaaagtggcattatacaagcttcggcattccgaacataccatactccccttaacaagcagagtgactatgttaactcaatgagagctgcccgggacttcagttctaaaatgtccagagatttgcagatgaaaattttcccatattccgtgttctatatattttttgagcaatacctgagcgtgtggaagacagctatcatgaacatatgtgtttgccttggtaccatttttgttgtttgcttcatagttaccagcagtttatgggcttcagcaataattttaactgtgctagcaatgatagtcttggatatgatgggggtgatggccatccttggtattcagctcaatgcaatttctgttgtaaaccttgttatgtcgataggaattgctgtcgagttctgtgttcatatcacgcatgcctttatgattggcactggggacaaagaaactcgtgcaaggcaggctctatccacgatgggtgcgtctgtattcagtggaatcaccttgaccaaacttgtgggagttattgtcctacgttttgcgaaatctgaagttttcgtggtttattacttccaaatgtatttggcacttgtcatcattggattcctgcatgggcttatcttcctaccggtccttttgagtttatgtggccctcctacaaaatgggcgaagccaaaagaacaaagtcagccaccttcagcttcaagtgagcggacttgacaggattttatttgagttggacggttacatactaaaaaatcgaaataggctagtttggtcggtgtgcgtccatgtgctgtcccagtggagcagcagcagtgaggcgtacagcatttgctgaaggtgaaagcagtcttacagatctgtagaaaatgttgtgcatatccatgttagcagccgaactaggttatttggtgttacagtgctacacatggcggggaaggaaactaagaggcgaattggggctcggtgttaactagttgactgcagtccgctggttgtttaatttgtgtcacccaagccgagagtcgagactcgaatagttttgtactgctgttgttttggtatttgctgtgggcattgagcttgtgtctaagttccatatgcttgcgaggcttgtttttatgagaacatatctggtgtatatgggagtttggtgtacatattaaatcaatgtcatttattagatctaacatctctagttacttgttatattttataaataacatctttcaccactacatttaccacttgagatgatgttctttgcaaaatatgaccttccactactaaaaccagagaatttggttggctttgttaatttttatcggctttaggacaacaaatgcaaattaactagttttattgacggctgcttagccgataaaaattaagcctaactttcattggccatgacaatagatgatggtagttcatcggctttttactaactttcatcggttactgatattggatgatagaagccaatgaaatatatcactggcctgcacccacccttaatggagggatatctaccaatggtaaaagcatccttagcagatttaacattatctacttcatttttgcaagttttaagttaggcatttaaatgagcaatttcatcatttaattttgcaatggtagaagcatgattactacaa

SEQ ID NO: 28781 - DNA, 2323 bp, Zea Mays
cggcccgcgagaggggatggcgtccacggctcgcccgctccgctcttataacagccgcttcctacgtctctcgcgcatcccttccgagcggaagcggcagcccgtcaggttatagctcactcttgatcgcttcctggtttgctaagcgatttgcctctcgtggttcggtgacggatcggaggcgctgcgaattcgaagctggtttctctgggctaagtcgattcggacttacttgttcagtaggtgtagtgtaggcgtgtagctcgatagacgagaagaatatttggcgtcgaagtttcagctaagcaacgagatcaggaagtttcagcaaagctcctggattaaatatttggcatcatagaggattcaaatctgccggaaacctgtatcttcatccagtatcaaggggaagttctgttgttgtgtgttcggtgatggatacatccaaaagcaagcaaggaccagaacatctccttgttcttgtccatggtatcatggctagccccaaagactggacatatggggaagcagtgctgaagaggcggttgggtgatgattttttcatatatggtaaagcatgctagcatttgaattcttcattcactaggttcaatactagtcattatctaaccatttgttctagcttctacagtgccggtttatgaactaaatggatgttaaaaaaagtgtatgcaaacatctttgtctacagctagttcaacgaacagctacaccaaaacctttgatgggattgatgttgctggaagaaggtcttggaagtggttaacaagatgcccagcttgagaaagatttccttcctagcgcattctctgggtggtttgtttgctagatatgttattgcaatactccactcagtctcagtggaaacaaagaatgcaggacagagtagtgcacttattgttcctacaacaagagggccagcaaaatcgagatgtgcttcaggattaggttctattgctggattgcggccaattaattttattaccttagcaaccccacaccttggggttagagggagaaatcaggtgcatcaccaaaatgtttcggattacgtttacaaaatatactgcacattatccagcaaaggctcgattcctgggaaaacgaactctctatttgttattttgttcattcatgtagattttgaagttgcatggtatgatttttacaagcttggattatatcattgctgaagtggtcaataccaactagcatctataacttttgaggaaaaaacgacgaacttattgggacctgttcctgttagtgctgatcaatttctttgacacatgcttatatgtttttcccccgaattaccagcttccgtttcttcaaggcctatcaatcctagaaaagcttgctgcgcctttggctcctttaattgttgggcgcaccggtgctcaactcttcctcactgatggtgatcctagcaaggcacctctcctgttacagatggcatccgactgtgatgacaaaaactacatatcagccttggcagcttttaagaaccgtgtcctgtatgccaacgtctcgtacgaccacatggtcggctggcgaacgtcttcactaaggagagagaagaatcttataaagccctcacatcgttcactggatggctataagcacattgtgaatgtggaatactgttcgcccgtgtcatcggagggcccacatttcccttccaaggctgccagagctaaagaagctgcacagcgatcgccaaaccgagaaaataccgaggagtaccaccaaatgatggaggaggagatgctccatggcttgcagaaggttggctggaagaaggtggacgtcaacttccattcgtcattctggccttactctgctcacaacaacatacacgtcaagaacgagtggcttcacaatgctggcgctggtgttatcgcgcacgttgcggacagcatcaagcagcaggagtcacggccatgtcttcctgccaatctatagcagtagcattcagcaatccatttgttcaaattatctgtcgctagcaaataaacccatgaccaaactctgttcgtcagcatccactgagcggcgaaatatttgggactgggacacacaataagctgtgtatcattatcggccgcctaggttttacattgtttgatgtcaattgtcaaatggcatgtgtttcctcatggaacagacgaagcattcgaagttgatataaagacaacctaaattgtcatatatgctaccgatggttcgtacccaatccagcgacgacgtcgatgagatttgggttagattgtttgggagccacaagccccttgcaaatcgc

SEQ ID NO: 28782 - DNA, 5386 bp, Zea Mays
ctttgtttcatcgtcagtgaggaggaacatgagagaggagagaacgggtggcgcgatgcgacgtcggctgtcgtgctcgtgaccgcaacctcctaccgcgatcccgatctgccgctccgtccgtccggccggcaagtccccgcctccgcctccgcgcctgactgtcccctccccaccatttcattccaattgagagccgtggggaccaatcaaccctagatccacctcgtccctccacgcgacaggagaggtatctccctgatccaactccgcatggcctcctcctccttcgcccccgacgaccagaccgacgccgacttcttcgacaagctcgtcgacgacgacgacccggccaccgacttgcctcgggccgtctccgccaccagcgtcgccgacgacccaccacccgtcctggagccgcaggttccggcgccggcgccttcggaggggtcaggcaagggcggcgccggcgtccacaccgcggtcaagcaggtgcagtgggcctccttcggaggtggcgtggacgacggccctgatccgttcgctgatctctcgggaggcgccggtgacgacgacggcttcctcgggaacacggcggggacccaggcggccttggatcacgccgccgaggtgacggatcaggacttcttcgctgggagcagctcctccgatcagcagaatgtccatggtcagcacgaccagggcagaggcagcgccgcggtggattccgcagatcccaaatctctggaggccatgtaccctgggtggaagtacgacgaggcctcacagcaatggtaccagcttgatggcagtgtaaattcaactgggaatgcagctcaggcgctggacgatagcgctcagaatgcacatcatcatcagcagcagctcgacgcggcttacctgcacaattcagcgcacgcggggcttgggacaattgccgaggagagcactaccgcagctggtgctgccaatagttggggccaaggggctgccccggagtacccacccagcatgctcttctatgcagagtatcctggttggtactttgacaccaacactcagcagtggcactcccttgagtcgtaccagcaggccgccgtgcaggctggaacatctagcacgggtcagactgttgttgcaagcgatgatgttgttgcgacttcctctctgacaggccataatgccgggcaaactgaggaccttgttgcccacaatcaggtgacacaacgcaactcatcctcgaatagtttcacccatcagaaccaatggcagaccaccgatgcacttggtaacaatgtacaatctgaaagcctggctagtagcttctatggttttgaacaacacatgaatgctgagactaccagttcctctacgagccaacagactggttttcacacagctgaaacaattacagatcactatggtggacgcaaagccttcgaatcatcaagtcttcagagtggttatagctcctctgacagtcaacaatccagtcacaaggcattcgaaccttccacgggttatcaggctggttacaacgggtttgaacctgcttcaggtcaccacacggcgtttgaacctgccatgcataaccagagtggatacaaggcatttgacccttctacgggtcaccatagtgcttcgtggggattcatgccttccacgggtcagcagactgatttcaagggttccagagcttccacagttcaccaggccggttatgaagagtttgaaatttctagaggttacaatacaaatttcaaggcatttgaatcatcttcatctcaaaatgctggttacaatggttcccagccttcttcaggtcaccaacctaactacatgggatttgacacctctgcaaaccaccatggttatactgatgtcaatggtgttgcgagtactcaaggctttgtcccaatgcaaaccacgtaccagggccagaaacaagcaaatgcaacctcacaagggcacctgtcaaatagctatttgggtactgacaactccatgaactttaatcagcaacaatttctgggtgcaaatgcctcaaatttgcaattcggtcactccccgcatgaaggtaggtcatcggctggacgaccaccacatgccctcgttgcttttgggtttggagggaagctcatagttatgaaagaaactacctccatgcctgcaagttttaacagtggaaatcagggtaactctagtagcacagtgtcggttcttaatctgttggaggtagtctttgataaagttgatccttcaagtgtcactaatggtagtgcacttagttatttccatgctctatgccgtcaacctgttcctggccctctggttggtggaagtgctgcatcaaaggatgtaaataagtggcttgatgaaatgattgcacggtacgagtcttcctctagtgaattccatagaggtgatactcgcaagttgcttatttcattgctgaagatactgtctcagcactatggaaaactgcgttcaccttttgcgtctgacccatcgcaagaggagacagatggtccagaaatggcagtaactaagctattttcatcgtgtaagagaagcactgttcatatgggagattatggatccctagttccctgcatgaaaagtattccttcagaaagtcagatgcaggctgttgcacaagaggtccaaagtcttctagtttctgggagaagaaaagaggcccttcactgtgcacaggcaggtcaactttggggacctgcaatcatactggcattgcagcttggtgataagttttatgtggatacagtgaagaaaatggcccacttccattttgtatctgggtcccctctgcgaacgctatgccttctcatcgctggacaacctgcagatgtttttaatgtagagaacaatgtcaacagtgactatggtgcatcccatcaacctgtggagcctggtcctaatatgttggatgattgggaggagaatttggctattattactgcaaacagaacagaaggtgacgttctagtaatcacccatcttggtgattgcctctggaaagaaaaaaatgaggttgcagctgcccattcatgctatttagttgctgaactaaacattgattcatactcggaaagtgcaaggttatgcctcattggtgcagaccatttgaagtgtcctcgaacatttgccagccctgaagccattcagaggacagaggtttatgaatatgcgaaggtgcttggtaattctcaatatatcctactatcctttcagccatataagctgatatatgcatacatgcttgtggaagtggggaaagtttctgattctttgaggtactgaaagcctctggtcgtgcccctgaattggaggtgtggaaacaattattttcttcgctggaggagaggatacgcactcaccagcagggtggatatggcacaaatcttgccccaggaaaaatagttgggaagatttttacctcgcttgataaatctatatcccgcatgatgggtacaccatctgcaccacttccaccgttgccacatggatcttttagtgataaagagagccactctatacctgcggcagcaaaatttgttaatagccaatcggtaatggtcatgccatcgttaataccatctgcttcaatgcagtcaatgactgagatagcagaggatagtggtggcactggcaggaaaattgcacacaacagaagtgtttctgagccggactttggtagatcatccaaacagggtgctggtggatcagatggtacacagagcagtgcatcaggatccagcagttctcgatttggttggctagtgcagaagactatgggattagtgtcaaaatcccaccgccaggcaaaattaggggatcagaacaaattttactatgatgaaaaattgaagcggtgggtggaggaaggtgctgctgttcctgccgaagagcctcctcttcctccacctccaacaaaaccatctttccagaatggtatgctagacaataagttgaatggccccatgagcgtaagccatgctcccaatggagtcacagaatggaaatcctcaaattcttcagagcaaggtctgggtatgccgccaattccacctagccaaaaccagttttctgctcgtggacggatgggtgtccggtccagatatgttgacacattcaatagatcaggtgcatctggtgcaatgccatcatataacaaaccagctgctccatctatgacaccaccagctggtgccaagttcttcatgccaactgcagcacctgttgccgcggatcagatgataccacaccaagcagcagagatacacagtgaaaccatccatcaggatgagcggtcagcctcaccgccagcagaaacatcattttcttcaaccccaccacccacgcaatttccatcaccagtgcaatcaacaatttatcggcaatctagtatggagaacatctccaccccttaccagggttccggggtatcgtcattaagcaacgacagctcattctcaaaatctcgagccgcgtcctggagtgggacatactctgagcagtttaatgcttttgcgggcactatatcgcctgacagacagacgacgcattcaccactgatgcctggcaaaccaccacacagccgttccaacagcaactcatcagggcatctcaatggattggcagaggatcttcatgaggtcgagctgtaactggcgactggtcagcatgaccgtcgcaactcgtgtcttaaaggcagcgatgacaacccctccccaagcaggtgacagaaaagaaggtgcccttaaaatgctgaccacggggatgccgcagctggaatgggcttggtgtgactttgcacgagattctggggcgcgctctaaaccaccgaggtgcgtcaggcctgtactaatagagatgcagggtttttttttgtagccatatatacatatatgttggttttgtgttttagagagaagggaaagggttgggtgggcctttgtttacaggtgggaagggaagagaagcagcatgcagatgcccttgtacagataatctgcccctacccagtttgtttaaaacgcaaacaacgccattttggttttagttccctggagaaggatagaggagaaggtgtgtgtctttgtagtgtgagaagcatggctctgtagtgttgttgttatagtgtactactactgtgctagccagccgcatacacagactgtttattctttggagacgaatcaattctttcatcttgactagggcattattatttgttaacataatgctgcatcttgttatgtacgtaaaagtcaagagaaggtacaaattaagccatatgttatgtactagtaaacaatgatacaggatgcagatgcttatcgattgatacgttgatgtagcaaga

SEQ ID NO: 28783 - DNA, 3417 bp, Zea Mays
cgccactcgaacccgcccgtccgcaatctgatgcccaggggtcggagaaggttgctgaggagaagcaacttgatgagaaagagttagaaaggaagctgaaaaaagatcaaaaggcaaaagagaaagaagagaaaaaacttaaggcaaagcaaaaggaggcggctaggctccaggcacaagcaacctcagacggaacaaagaaggctgagagaaaacaaaggaagaaagctgtggaggatgaaaatccacaggatttcatagacccaaacactcctaatgggcggaagaaattgctcgcgcctcagatggccaaacaatacagtccaagtgcagttgagagatcatggtatgcttggtgggaatcatcaggatattttggggcagattctgcaagcacaaaaccaccatttgtcatagttctgccacctccaaatgtgactggagctcttcacatcggccatgcacttacagtggctatagaggatgctatgatacgctggcgtaggatgtcaggctacaatgctctgtgggtccctggagtggaccatgctggcattgctacacaggttgttgtagaaaagaagcttatgcgtgaaaggaagctcacaaggcatgacatagggcgtgaaaattttgtttctgaagtactcaaatggaaagatcaatatggtggtacaatattgaatcaattgcgccggcttggggcttcacttgattggtcccgtgaggcttttacaatggatgagcaaagatcaaaagctgtaactgaagcttttgtcaggttacacaaggaaagcctgatatatagagattatcgccttgtgaattgggattgcacacttcgaactgcaatttctgacattgaggttgatcatattgatcttaaagaagacactatgttaaaggtccctggttatgccaatcctgtacagtttggtgtattgatatcttttgcctatcctcttgaggaaggactcggtgagattgttgtagcaaccaccagaatagaaacaatgctgggcgatacagcaatagctgttcaccctgaggatgaaaggtataagcatctgcatggaagatatgcagtccaccccttcaatggacgaaaactcaaaataatctgtgacgcggagttagttgatcccactttcggtactggggctgtcaagattactcctgctcatgatccaaatgactttgaggttggaaagcgtcataatcttgaattcatcaacatattcacagatgatggaaaaataaatagcaatggaggtgcacaattcgatggaatgccaagattcaccgctagagttgctgttatcgaggcactgaaggaaaaggggttgtataaggacacaaagaagaatgaaatgagcttgggtgtttgttcaagaactaatgatgtagtggaacctatgataaaaccacagtggtttgttaattgcagcaccatggccaaggcaggccttgacgctgtaaggtcaaaaaagattgaaattatcccccagcagtatgagcaagactggtacagatggcttgaaaatatacgtgattggtgtgtctcaaggcaactttggtggggtcatcgtatacctgcatggtatgtgacactagaagatgacctggataaaaaccttggttctaacaatgaccgctggatagttgcaagaaatgaaagcgatgcaaaacttgaggcacagaaaaatacttgcaaggatggtgatgatgggaatgcaacttggtggtgacgtgccatttcagaaggtttatttacatcctatgattcgggatgcacatggccgaaagatgtcaaaatcacttggtaacgttgttgaccctcttgaggtgataaatggcatgtcactggatggtcttctgaaacgtttggaagaaggcaatctggatccaaatgaattaaacattgcaagagatgggaagacgaaggattttcctgatggcatagcagaatgtggtaccgatgcgctccgcttcgcactgatatcgtacacctcccagtctgacaggataaatcttgatatcaagagggtggttggatatagacaatggtgcaacaaattatggaatgccattcgttttgcgatgggcaaactgggtgatgattacattccgccggcaactgttgatgtgtctcttatgccaccaatatgcaagtggatactctcagtgcttaacaaggctgttggaaaaactgttacttctttagaagcatacaaattgtctgatgcaacatctgctatatactcgtggtggcagtatgagctatgcgatgtatttatagaagctatcaaaccttacttcagcgattctcaagagtttgaatcagcaagagctgcctccagagataccctgtggatttgcctggagacaggtctgcgtctgctccatccgttcatgccctatgtaacagaagagctctggcaacgtcttccacagcccaaagattctagtaggaggaaagattcgattatgatttcagagtatccatctcttgttgaggaatggagtaatggcggggttgaaaatgaaatggacattgtcttggatgctgtcaacaaaataaggtctctgaagcctccaacagattcaaatgaaagacggcctgcttttgcactttgccgaggccaagaggtcgctgctactatccaatgctatcaatctctaatcgtgtgtctttcttccatatcacatctcaagatcctgacagagagtgatgaaactccagccgattgtgcaactgctgttgtcaacaaagacttgtctgtgtaccttcagctccaaggagatttaaatgaagatgctgagcgtgaaaagctaaggaagaaaaaagatgaaattcaaaagctacaaaatgcactggcacagaaaatggacgcctctgggtatcgcgagaaggctccacagagcgtgcaggaggaggacatgagaaagctcaccgctttgttggaacaactagaggtcatcagtgaagctgagaagaaattagactcaaactgagcctgtaccgaagttggtccccacatttttcttgtttgcaaaaagctcctgtttgctcaggttttcaattgatggttcagatggaagccacacttttgcagcgtgtaagaatattcactggctgtacagaaccatatttttgggtgttcgattttttcaagttagaaacttctgatgatgcatatgggaagtctgtcagaatatgcagcagccgaaatctgttaatcaaatttattagaatggtctcaattgtctcattcctcatgctacacaatttagcttgcttattctttctacgaaaaaaactagagtcagatgacgatggtccactttatatcacaaaccaaacaccctatctcttctattaaaacctaaaacctgaagtgaattcaggcgttgtcc

SEQ ID NO: 28784 - DNA, 325 bp, Zea Mays
acttgcccgacgatgctcgacggatgcggacgacgtgcgaagggcggaccctagtcgtggacacgcgggcgatcacgcggagccgacgacgttagaggcacgtagacgttgaggccttgagggcgttgacggcatgcggacgagggcagcgtggacacgggaaacaacgtcggtgtgcaattcatgggcggcgggcataggcgtggtagggcatcggaggcgggtgcgggcgcaacagacgcgtgcaactgcgagcgcagtggcgtgggacgagcgagaggagagagagagtatgtgcggggcggcgagaggaagtgagggtggc

SEQ ID NO: 28785 - DNA, 2542 bp, Zea Mays
ggcacagccgtggcacaaagtgtcgatacacccataacaattgagcatggtggttcaacgctgaatctgtccttcaatgccttcacaggctctacccctgaagaagttgcagagttagaagctattgccgcattttttgttgaagggaacatttttttgggtcatatccagattgaatacgaaacatgctcgtccttttgggactttaagagaataagaggcaaaaggaacataaggatagaggagagaaataaacaatggggaagggagatgtggctaccaggtcaaaatctcaaaaatcaccagcaatacagaatgagcagagtacacctgctaacccgcccacagcatatcctgattggtctcagttccaggcatactataatgctgctgggacagctccagtgaccccacctttttttcatccatctgtagctccaagccatcaggggcacccatatatgtggggtccacaggtatattctctctcttcaaccattttgcaagaataagtctagcagctagtgtaagtctgcaacatgaggtttaatgagttgatgttaggatgaacctgtcttctgctacttgtagtacgaggtacgattctggcagattttttaacatttgttcatatggtttgctagccatttatttattttaaggatactatcagctaccacaaccattgtaaaaaaactcggccggggagggtaagaccaccctcacggtattatattaatagaaggccgcgacaacggtcccgaccgagaaatccccgaaccccgtcctcccatcactaacgggcagggtcaaagctgcttactctgcaaaggcccacctaggcctgagggtggcgcacaaccgagctgtaacccgagagcggacgaggaacaatgaggggatttttttgtacagggccagggtattaccccatgacctggtgaaagggaccactgagccgtaatgcaaccattgtaactctggagataatccgtcatctaacatttgattattcaactggatagatgatgtctccttatgggacaccaccaccatatgcagcaatgtatgcacaaggtacaccatatcagcaggcaccaatgccaccgggttcacacccatacagtccttatcctatgcagttaccaaacgggacagttcaaactccaacatctggtgctggtggtacagcgacagataaatcaaataaaaataagcggaaggcttccctcaagagatcaaaaggaagcttaggtagtctggatgttgttgcagtaaaaaataacaagtcaccggcaaagccttcaacttcttcctccaatgaaggttcttcacaaagtgagagtggaagcgggagttcttctgaaggaagcagtacaaattcaaaaagggttcaagggtgaaggataattctgagcaaggacagggtaatgatgctaggagtaaatgtactcaaagctctgtcgttgagcccacacaaccatcttcagggtctgttgtgcttaaccctatgatgccattttggcctgtgccccctcccatggctggcccagcaactactctgaatatgggagtggattactggggtactcctgcttctgtacccatgcatggtaaagttattgcagcaccgacatcagctccttcgtcaaattcacgtgatattgttctcagtgatccgactatacaggatgggagagaactgaagagacaaaaacggaagcaatcaaatagggaatcagctcgacgctcaagattgcgcaagcaggctgaatgggaggaagtagccaatcgtgcagatttgctaaagcaggaaaatagttcacttaaagaagaattgaaacaacttcaggagaagtgtgatggcttgacctcagaaaatacatctctacatgagaagcttaaagcgcttgaggatgagaaatcaaatggaaattggtacaaggattaaaggctgaaacttctctctctttctgactgctgatgtaaggttacttgtgagctgccgttaggccccttacagaataccaactctgattgctggtgtaatgttctccatatttttttcagataatttggtggtaacctgataggacgacaactaaggaggtattcatatacggtattagacttttgtccgagggggtaaaattgtatcataggatttgacatggttgacggctacagattcttcgtccagttgtgctgctgtgctgtgttgtctttcttccctcttcgtgctagatcctacagaagtacaactatgtagaaacccccaggtggtgtttgaagcctggggggattagcgtgtggtattggtatagctgttgtagagctgctcactgagcttcttgacagaaactgaagcgtgctaaagcagtcgtgtgatttacgattcagacggattaattttacggatagtaatgtaactgcactcatgaatacaaatagccttttactgatttcgccctgtacggggaacggctttggaaaactgtggaagctgaacagtgtgtggtgttgctcatatgttagttgggaa

SEQ ID NO: 28786 - DNA, 3292 bp, Zea Mays
tttctcccctcaccctttctctttctccctcgaccgccccggatctatctcgccgcgccggcgcgcagctgagccgccgaagcgaggaggcaatcgaggcggacgaagcgccgcaccaaattcgacgggggatcgagcaccagaggcgtagcgcaaaatgttcaagttcctcaaggaggtggtcgcgggatccggatcgggactcaaggacttcccctacaccatcggcgagccctacgcatcggcttggggctcatggaaacaccaccgcggtacctccaaggatgatgggtcgcctgtgtcaattttttctctgtcagggagcaaccctcaggacagacacatggttgctggtcgcaacggtgttaagagattacgaacagtgcggcatccaaatatcttatcctttttacacagtactgaagcagaagctgcggatggacctgccatgaaatacacaatttatattgtaacagagcctgttatgccactttctgaaaagctcaaggaactgaatcttggtggtacacagagagatgagtactttgcatgggggcttcatcagatatccaaagctgtgagctttctcaataatgactgcaaacttgttcatggtaatgtatgcttggccagtgttgttgttacacaaaccctggattggaagcttcatgcttttgatgttctgtcagaatttgatgctaataatgaagcctctggtagccccatgttgcaatttgaatggttagttggaacacagtacaagccaatggagctgtcaaagtcagattgggcttcaattagaaaatcacccccatgggccattgattcttggggactagggtgtttaatttatgaactattttctggtgcaaagctggctagaacagaggaccttcgaaatactgcttcaatcccaaagtctctacttccagattaccagaggctcttgaattccacaccttctcgtagactaaatccttcaaaacttattgacaacagcgagtttttccagaacaagttagtagagaccatccagttcatggaaattcttaatttgaaagacacctttgagaaagacagtttttttcgtaaactccccaatatagctgaacagcttcctcgtgaaatagttctgaaaaagctgctccctgtattggcttcttctcttgaatttggttcagctgccgctccagccttaactgttttgttaaagatgggttcctggcttcctgctgaccaatttaatatcaaggtcttgccaactattgtcaagctttttgcctccaatgaccgagctatccgagcatgtcttttgcatcacataaatcagtttggggaatcaatgtcagctcaaattgttgacgaacaagtttttcctcatgtagccactggcttctctgatactgatggtactattcgtgaactgacattgaagtcgatgctcgtattagcaccaaaagtaagttgcttctatcctcctgttgggtatgggtttatcagtgagatgtattataaactggctagatcttagttatgaaaaaatataacttttttttgtcaatttttctagatttgttattttcttggttgtgatttgtattgcaaagaaacagaacatatatgtattaatttgataaccaatattgtcttgtgttcagtcttattctgtaaatgggttttttctaaggttaatattatgcaagcttagggctgaattcctataaccaatttggttttatgaactcatattcttgcctttagatgcaggagcgtgcacatacgcacaacaatttgccatggcatgctttgatggaatatttctgggattttagatcctcaatccctcatgcactgatttctatttcctgccaaaagctatacttgcagatgactgattgtctggtggacgaagaacctggtatcaggacaaacacaacaattcttcttggcaatattgcaggctacatgaacgatgggacaaggaagagagtactgatcaatgcattcacagttcgtgcattacgtgataccttccctccggccagagcagctggaatcatggcactgagtgtcactagttcatactatgaaatgacagagattgcaactcgcatcctgcctaacattgttgtgctcacatttgacccaaatagtgatgtccgaacgaaggcttttcaggctaccgatcagttcttgcaaatagcaaaacaacaccatgaaaagcttaatacaggagacaacagtgtggctgaaagtactggtgttaagttaaagcctggaaatgcaggtttacttgggtgggccatgagttctgttacacaaaagggtaaaccttttgaccatgccccaatatctactgcaaatgccaataattctcaagcatcaacaacctcgactgccactccagacactcaggcttccacactagcgtatgcaccatccacatccacctcgcttgatcaagctgcatcagcatcagcaaggtcgtcagtagatgggtggggtgagcttgaggatggtaatatccatgaggagaatagtagcgataaagatggatgggatgatgtagacccatttgaggacaagccatccccatctcttctatccaacatacaggctgctcaaaaacgtccagtggtgcaaccaaagcaaccggttgcaaactcatctaaaccaaacccactgaaagcgccaaagtcagaagacgatcctttgtggggtcctatagctgctgcaccacctaaaagtgcagtaaaatctgcagacatcaagccatcaacatcacataatgatgaggatgacctctggggttcaatagcagcacctccaaaatcatctgggaagcctttgaagccagctgtagcgaatagtgacgacttatggggtgccatcgcagcacctccaccagcaaccaaagccagacccttagcctcgtcaggtaggggccgaggaacaaagccagcgcaaccaaaacttggtgctcaaagaataggaagaacatcttcaactggaatgtgacgtcttatgatatcaagtgttgtacaagaatgcaaagttttcctttttttttcccctgccttgcgttgagtctgtccaggatgacattctttgtaaactagtaaaaagatttatgtatatgagcacagttttgaccaatgtattagtattattttaccattgtgtattaaaatagatccagaagatttttgcacatcacagctgcaatcatcttaagtccatattattaatatattgctatgtcttattttggcgtgataagagcaacttaatg

SEQ ID NO: 28787 - DNA, 2922 bp, Zea Mays
gctgcagatgctggcattcgatccgtgtgcgtcacaaatttcagctgggacttcatttatgcagagtacgttgtagctgctggacatcatcatcgctcaattgtgtggcagatagcagaggattactcccattgtgaattcttgctcagactccccggatactgccctatgcctgctttccgtgatgtcattgatgttcctctggtggtcagaagattgcacagatctagaactgaggtgagaaaggaactagggatcgcaaatgatgttaaggtggtcattttcaactttggaggacagcctgccggatgggaactgaagaaagagtggttgcctgacggttggctatgtttggtatgtggtgcatctgatactcaagagctccctctaaatttcattaagcttgcaaaggatgcctacacacctgatttgatggcggcatctgactgcatgcttgggaaaatcggatatggcactgtgagtgaggctttggcttacaatctgccatttgtatttgttcgaagagattatttcaatgaggaaccatttttgcggaatatgcttgagcattatcaatgtggcattgagatgatacggagggatttacttactggccattggaaaccttatcttcaacgtgctatcacacttcaaccctgctatgatggtcccataaatggtggcaaggtagctgcacatatcctccaagatactgctgttgggaagaagtatatttctggaaagttgagcggagcaagacggttgcgtgatgccattgtgcttggctatcagcttcaaagggctcctgggagagatgtaggaattccttactggtattctcactctgagaaagaaattagtgttggcccagcgcccacatctcatgatatgaatggaagtgatgagtcatcgttcgaggactttgagatactccatggtgacatgcaaggcttaactgatactatgtcctttttgaagagtttatcagggcttgttggaaatgacttaagaagccctgagaagcaaactcgagagagggctgctgcttctgtgctctttgactgggaggaggaaatatatgttgcaagagcacctgggcgattagacgttatgggtggtatcgcagattactctggaagtcttgtattgcagatgcccatccgagaggcatgccatgttgctgttcagagaagtgaccctaccaaacagaagcaatggaagcatacacaggctagacaactagcaaatggaggagcagtaccagtgttacaaattgtatcctttggttctgaattaagtaatcgtgcacctacgtttgacatggacctttctgattttatggatggcgacaaaccaatatcttatgataatgtgaaggaatacttttctcgggatccatcccaaaaatgggctgcctatgttgctggaactatttttgtattgatggctgaactaggggtgcgctttaaagacagcatgagcattttggtttcttcatctgtccctgaaggcaaaggtgtctcctcttctgcatctgtggaggttgcttctatgtctgctatcgccgctgcctatggtttaaacattgctccaagggatcttgctttgctctgtcaaaaggttgagaatcgtgtcgtcggagctccttgtggagtaatggaccaaatgacatctgcttgtggagaagctaacaaactcctagcaatggtttgccagcctgcagaagtgaaggagttggttaacattccaactcatataagattttggggtcttgactctgggatacgtcatagtgttggtgggactgattatgggtctgtaagagtaggcacttacatgggccgcaagatgatcaagtgtgctgcatccaacctactttcagaattgttgctctcgtgtacgtctacgcaaccaggcgactcaagtcccgacgaatatgaaggacatggcgtcgacctcctgaaatctgaagcgtcaatggagtatctatgcaacttaccaccacataggtatgaagctgttttcgcgaaagaaattccggagacgatcactggcgatgcgtttttagagaagtatggagaccacaacgatgcggtaacagaagttgacccaaagcggtcttactgtgtcaaggctcctactagacatcccatatacgagaacttccgagtcgaggccttcaaagcgttgctaacagctgccaaaacagacgagcagctctcagcccttggagagctgatgttccagctacaacgcttgcgggctcggctctgacggcacagacaggctagtgaatctagttcaagaaatccggcacaggaagagctcgcgcgccggagggcccagcctgttcggcgcgaagatcaccggcggagggtccggcggctcggtctgcgtgatggggaagaactgcctgaaaagcagcgaggagatcctcgagatccagaagaggtacaaagcggcgactgggtacctcccgactgttttcgacggctcgtctcccggcgccggcaagtttgggtacctgaagattcggcgccggtccacgtcgccgtctgattgaagaagaagaagaaggaagagctctgctcggtcggccgtaccctcacggtcgtattgatcgtatcgtatcccacgcactacgcccaagatgccaataaatgggacagattgatcggcaataataatactagtagccatagaaaactctagtgataagctgcgaaacaacttgtatgtcgaagaaaatatttgaaaccatggtatctttgtggtcgatatctgaagtgagatgatgtgaatggctattggcgtatgttcatgtttgagctgtacggagaagaaaaggccgtatccaacaagagttcatctgcatagttacctcaaacacattatagaatgcactgaatataagagataagc

SEQ ID NO: 28788 - DNA, 2715 bp, Zea Mays
acacaatacgcacacttcgcaaagcgtcttcctccgaccccatcgcctctgtggcttcctggctgtctgactgcgtctgcctggtcgtacgcgagcgcgtgcgtcccttcaccgtcacgagcggcgcacaccgtcaccgccacgctccgtcgccttccagaaaatctaaaccccagcggagccggccacggccagtcagccctcacacggactccgacgcgctgcccgctcgcctgccaaacccccaccccctcgccggcgatgctgccgcgtcggtttagcaaccacccgggctcctcctcacccctcccgttcctcgtcgtctgcggcctgctcctcgctgcggccgtagcattttccccggtcgctgccgccgaggccgctggccgcggcggcggcggcggcggcggcggcgctgggcacgagggccgcgcggggaagccggaggtcgaggcggaggcggaggcgcgcggggatggggtggccgtggcggaggccggcggcgaggtggtggctcagggcaatgccacggaggccaaggagggcagcctcgccgacatgatcgaccgcgcgctggagaaggagttcccggagtccgagagcgagcagggcggcggagagaccgatcctggtagcttcaacaacacggtagctgagaagcaggaaaggaaattcgcttttggactggactgtgcctgattcctacacttgtgaatctactagtatatagttatggagccttgaccctgtcgttagtatatctatgttgcaaccttctagcattcaatgacccatccatatgtcatcattgtatagcttttgggcactttgactttatatgatcattttgctttatgttgtttgatcggcattttcctagtgctgatgagggacatcaatatcttggatgttgtttatttcgtgctatgcttggcaatgttaagggcttatttgtttcggctttttttatgagcttttctgagaatctggttgtggggagaatttggttgtgagggagaatctgagtatcgtggggattacgtgcggaggaatatgaaggggtacatagtgtttaggatctaggaagtgacggattccttctatcgtgatgattcagccgattgtgtattcatgttgattttggacggttttcaccaaatcaattatcatagaagtgggctgaaaagctaggcgtttgtcagtccacagcacagtagcttctggcgaccagaatcaacaaaaaagctgaaacaaacatgcccgaagtatgactatatgcttgttgtgcacatgggagggagttcttgaaactgtagctagaagagtaacaaagaagaatgaaaccaaagataacaagtcatttccttttaaggaggtcttcttggatcgatctgagcaagaagatgttcccacattgattgatcggaaggacaatgtttttatcatatcaaacccaaagtcaaaataccctgtgctgcagctggaccttagattgatatcagatcttgttgttgttatcgtgtctgctacatgtggtggaatcgcttttgcttgccttgggcaacctgatctataattgggcctggaggttttagctttgtcaatgaaatggtgcaagtaaggttgaaacggtagcccagtttggtgtgatatttctcctgtttgcattgggacttgagttttctactgcaaaacttcgagttgttcgtgctgttgctgttctcggaggaatgctccaaattatgctgttcatgtttctttgtggtattttggctacactatgtggaggcaaaacaaaagaaggtgtttttgttggtgtgcttctctccatgtcttcaacagctgtggttttaaagtttctgatggaaagaaatagtatcaatgctcttcatggccaagttacagttgggacacttatattgcaggattgtgctgttggtctgctgtttgcgcttcttccaattttgagtggtacatctggccttcttcacggagttgcatcaatgacgaagtcgttggtggtattgataacgttcctgaccattctctctatcctctcccgcacgggcgttccttggtttcttaaactgatgataagtctgtcatcacagacaaatgaactataccagctggcagcggttgcgttctgcttgttatttgcttgggagattcggcttattttctggcttttaccgaagtacccatcccacttggaggatcgctggcatttgctatccacaacggcataaccaagaactgagcattgctgcccttttgccacccacaactacttttcccttgaacacgcaggagagctgctatttgccaattacctataagccagcgtacaagctgggttgccaaacaacaacaacaacaacaacaacaacaacaaagcctttttgggctagagttgaaatccaacaaaaaccacaagtcaaggactcaaggttgccaaacaaccctacaactttgggtctgtttggcaacaatgtttctcaaaaccatggttttacaatactatacttcgcaagggtttggagatcttgggctccaccaaaatgctgttttttcatttggttggtggcccaaaatagatgttggacagttgatcgcttggcaaaaggggattgaatcaccctatcagatgtcctttatgtgaccagcaaggggaaaccctgaaccacttgcttgtgaattgtgtcttctcaagga

SEQ ID NO: 28789 - DNA, 3385 bp, Zea Mays
ctcggcctctttccttcctctgttcctcatcttcgtctcggcctcacccccgacgaccccgcaccgatccctccacgcgctcgcgcgcagcacgggcggagttgggcgaactccgtgctcgttcaacccgtactctagtacctccagggttcgggtcgggtctgccttcctcttcgtatggcttccgccgccgcggaaaccctcgcctcgttcccaatcgcatccccgtcccgctcgctcctacgccccttccccaggcgaccagccggcgctaggacaggcgcaccgtcgatccggatatccgccgtgccgccgcggggcctcgggctcgcgctcgtacaccgccgctgcccgccagcggcgcgcgcgaatgttgagcgcgacggcgacggcgcctccgggaacggcgagccgtcgtcctcgtctggggatggcgaccgcgacgcggctgcggagtcggggggcgatagcaccagcacgagcaccacgagcacggccgcgacaccgccgccgccctcgtcgaagaggaacgaaaataagtggcggcggaggctgactaagggaggcggcgtggggcggtggctatgggagcccatagtccagggacgggagatgggcttcctcctgctccagctgggcttcgccatatttgcgctacgcatgcttcgcccagagatcgcgttgcccggttcagagccccgcccacagacgacgtacgtcagtgtaccatacagcgacttcctggccagcataaacaaggaccaggtgaagaaggttgaggtggacggggtgcatatcatgttccgactccgcccagaggtggagtcccaggtccgtgttgagcagacaccgacacagcgcggagcagattatgtcattgataatgctggagtttcaaggagaattgtgttcacgacgactcgtccagtggacataaagacaccatacgagaagatggtggaaaacatggttgaatttgggtcaccggacaagaggtctggcggcatgctcaattctgccctggtaggtcttatctatgttgtattgattgcggtagttttgcagcgcctgccaataagcttttctcagcaatcacccggtcagttgaggaataggaagaattctaattccggcggagcaaaagtttctgaaagttcggatatagttacatttgctgatgtggctggagtagatgaggcaaaagaagagcttgaagaaattgtggagttcttaaggaacccagaaagatatatcccattcataagttgctctgctagtgaatttgttgagctatatgtaggcatgggagcagctcgagtacgtgacctatttgctaaggccaaaaaggaatcgccatcgattatttttatcgatgagattgatgccgttgcaaaaagccgtgatagtcgatatcgcattgtcagtaatgatgaacgtgagcagacattaaaccaattgctcacggtaggacagtgccctttcttatttcttgagcattcaccaaattagcttcatcgcaagttgggacccaattaaagcttatacttgtatttttattggctgataattgattttttgctcttggtaaaacttaaaaggggtttgagccacactctacttcactactaaggatactgctttatcatgcaatatttgtttttgagaaagggcggaaatggtattattattggtttagctgccttgattttgggttctccccaggaaatggatggctttgataccaactcggctgtcattgtattgggggcaacaaatcgagctgatgttttggatcctgcccttaggcgccctgggagatttgaccgtgtggttatggttgaagctcctgataggtttggaagagaatcaattctaaaagttcatgtgaaaagaagagagcttccactgagtaaagatgtagatctagccaatattgctgcaatgacaactggttttactggaccttgcaaacttggtaaacgaagctgctctgttggctgggcgattaaataaagaaatagtggaaaaggttgacttcatccgtgcggttgagcgatctatagcagggatagagaaaaagcatgcaaaattgaagggtaatgaaaaagctgttgttgcgcggcatgaagtaggtcatgcactcgtgggaactgctgtagcaaacctccttcctggacagccacgtgtggagaaattgagtatattgccaagatctggaggtgcattaggcttcacgtacacccctcccgtcacagaggatagatatttactctttgttgatgaactacgtggccgtttagtaacactactgggtgggagggcagcagaggaagttgttttagcaggacgggtttcgactggtgcacttgatgacataagacgtgctactgacatggcctacaaagctgtagcagaatacggtcttagtcagcgcatcgggccaatatcacttgctacactgtcaaatggtggtttagatgactctggtggctctccatggggaaaggaccagggacatctagttgatctcgttcagagggaagtaaaagcgcttttacagtcgtcactggaagtagctctttcagttattcgtgctaatcctgcagttttggaaggcctcggagcatacttagaagagaaagaaaaggttgaaggcgaggagcttcaagagtggctaaaatcggttgttgcatcaaaagagttgacctcttttatcagaggacagcaagagcaagttcttcagctggaagcaggctcctagcgtcaggagtatgcaccgggctcttaaaattaattacttaacaaaagtgactcagcaattagaacatacaatatgagacacaaggtatgcaatggaaaccttcatatactgggaagagacctgtggccatgtgtggtgggttgtatgaacccccacccattcatgctaagacaaaccgggtctgctaagacaaactggtcggatgcccaccctttgttcggtgaatcatgagatcgagccctatacgagaattcaggaaaaaaaaagaaaatctacatgcccgagtgaccatgtaaatatctatcattgcagttcctgaacccttgactacaaaaaaagaaatccagagatgattcatattgagctgtaacattgtacgatcaacctcaggaatattgtaagtgattcagcttcacatgttgttccatagattaggtcggtgttacacatgtaaaagattcttttttggcaatatattcttgtactcaccctattggaagttgttttcctctatataccatcctagaaatgatcaataggataatgcttatacggactatggttcctgtattgagaattgttcttcagaaatcagaatagtgatcgctttttgaaagaataaaa

SEQ ID NO: 28790 - DNA, 1661 bp, Zea Mays
ttccacccgccggaacactggtaaccctcacgccggcgcagccgcagccgaggcgccatgaacaacctccggaagcgcatgatctcccttctcctccgggcacctggatcaccatacgtcccttgcccccacttcttcccgctcttctatccccaccgcctcctctccgccaccaaatgcgtcgctacaaaaccattcgccgtcgaggactacctcgtcgccacatgcggcctcacccaagcacaggccctcaaggcgtcgaagcatgtctcccatctgaaggatccctcgaaagccgacgcggtcgtcgccttcctctccaacctcggcctgtccagcgccgagatcaccgacgtcgtgaccagggaccccaaagtcctctgctccgacgtggagagatccctcaccgctcgcgtcgccgagctcaccgacctcgggttttcacgtccggagatcgtccgccttctcatcgttggcatgaaccacttccgccatagctcgcttcgcctcaatcttgagttttggatctcggtctttggctctctcgacgagctcattcgggcgctcagaattaacgccgctctcctcagcacaaggattgaggaggtctgcaagcccaacttggagctccttcaagagtgtggtataaatgtttctgatatctccaacagcttcatgtcccgtgtgctcaccagggaccctaagagcctgcaggaagctttggctcgccttcatgagttcagaatccagccgggctctcaacctttcttccgtgggctttatacatttgcaatccttggcagcgggaagataaccaagagcattcagctgtttgagaagcttggatggtcaaaggaccatatagtatcagcggtgaagagagacccgactatattgggtttcaccgaggagagggttcgaagaaacatggaattcttgatcagggttgtcggattggaggtaccatacatcgcacgaaggccagcgctgataaattatagtattgaccgtcggttgttgccacggaattgcttgatcaattttctcagggcaaaggggttgttcaatgacgaggctagtttcctttctgtcgccgctataggcgatgagaaatttcggcgccgatacgtgcatccttacgaggaggattttccaggccttgctgctgcttttgcttctagctgtgctggagaacaccaatgggaacggctatataagatgacaggcgaaaataaagaaagctgacaattgttctggaaagtacaatcaggaacctgctgcaagccttgtttttcatcaccatggctgcagaacaatctctaactacgtgattggttgtctacccgtgtacaaccgtgctctcaacgtgcgttgaccagaatgcggccggtgttcggtttattgcgtacacgagtctaggattgcagctgcagggaaggctagaaatacctcctttttgaccagagtgcggccggtgtttggtttattgtgtagacgagtcatccgcagctgcagggcaggctagacctcctttaactgtatccgtaggtacgtataggacatttcacttggttaccggtatcatctcattttgtatctgtaaagtagaaactgtgcgagaatgaaaatgagaaccactgtttctttattgaataaagcaa

SEQ ID NO: 28791 - DNA, 1648 bp, Zea Mays
ctactctccataaaagttacttgtacgtgagttgagccagcaatttcctgcagttatacctcttgccttgattctcaagaagtttttggctgaccggagtttggaccacccctattcaggtggtctgagctcttactgtttggtgctgttaattgttcgttttctccagcatgagcatcatcttggtcgacctattaataaaaatctgggcagccttttgatggatttcttgtacttctttgggaacatatttgatccacgccatatgcgcatttctatccaaggaagtggaatttatttgaatcgagaaagagggcaaagcattgacccgattcacatagatgatccacattgccctgctaacaatgtgggcaggaattgtttccgcattcaccaatgtattaagaatacaattgatgacagggtggaatgacctgtgctgccttctagacacactgatgtctatgcagctgctcagaagcctcagtgtggcaagtttgatacctctggaatagaccaaaaaatagaccggcaagatggcaatattcaaacgtgagctcttgtgtgttcatgcaatggcacatgatgccttgctccctgatcgagcttcttgatgttcagatctctgactgaggtaaattggcttactcaagaacaaggtggtgaattggctttctcatgaacaaggcgttgctgcacacagactactgacgtggctgttcttgcacctttctgaataagcccattcatgtaatgtttggtaaatgcaaaccgcatgattatccgcttgatactgtgattgatagatgcttcacctcgtgccaatattctgtgttccaatgccaagtcacatattctgagcagcaactggagatttgctcatgtaccgattcttcaaggtcctaggatcatttggggtgatgaagattgtgaaatacatgtggaggggtacttatatggagatgcatggtcttagtaattaagcggtcaagaacttatggtcacctgatgaaaacaaggatggttgtgaagagaacggagtagtggcatcagctatcagggaaagggaagtgctattgacatcatggctgacccctttcagattatcgcgctgagatcttcctggcgaggattgggagctacgagccagatatccttgacggaaatgtttgcttggacagcgtaaaccggaaagtaccggcgatgatattgatgatgataatcgcactgctctctattgtcatactgttgtctgcactcttcagcgacatgtcttgtgccttttcaacgtgcgaaatgtgagcaattgctcttgtaaagctgcactatttcactaaaacattattgtttgggttatttagatccatggtattactatttatctatttggaaacttacattacaattttccctggatgtacccgatccatgccatttcctacgcttctccactcggcagattgttgaatcgtatcccaaaatctctcccattgtcgtctccatgaattgctcatctcacctctctaccatggagggtttagggtttatatctttctatcaggttaaactggttggtgtatataacttaatatggtattagatgtctcgaatttaaatcctagttagtataattaaataaaaataaata

SEQ ID NO: 28792 - DNA, 3004 bp, Zea Mays
ttttcgagccactccaggactcaacagcagaggagagtgttcactgccggtcgccgtcgctgatggcgatcccccgtcgcctatcttgccttcccacggttgccgcggccaccaagtggtcggccgggaatctcgccatagacatcggcacaatcggcgcgagaccctcaacggcagccctggctgccgccgcgacggcggccgccgccgccggccgcgcctcggagtgccagtccctcctcctccgcatgtcgcgccgccgcggcgcctctcgacgcgagatcgtctcttccctcctcgcctcgtcccccactccgcagccgcaggtgttcgacctcctcatccgcacctacacccagtcgcggaagccccgggaggcctttgaggccttccgcctcctcctcgaccaccgcgtccccgtcccagcctctgcgtccaacgctctccttgccgtgctctcccgcgccgggtggcctcacctcgcccaggaggcctaccgcctcgtcctctcgtctgactcggagattccgtgctggagatgtggatgcagcgatcgcattggttgattccatggccaatagggggttgaagcctgggattgtgacatacaattcggttttgaaggggttgtgtaagcacagaaggtttgataaggcaaaggaggtgttcaggacaatggaccagtgcagtgttgcaccagatgttcggagtttcaatattttgatcggaggattttgtagggttggggaggttaaggaggcagtgaagttttacaaggagatgcaacatcgttatgttacaccagatgtggtcagctttagctgtttgattggattattctcgaggagaggggagatggaccatgcaggggcatacttgagggaaatgaaggggcttggattggtgcctgatggtgtgatttacacaatggtcataggtgggttttgtagggctggatcaatgtcagaggctctaagagttagggatgagatggttggctttggatgtctgccagatgtggtaacatacaataccctgttgaatgggctctgtaagcagcacaggttgcttgacgcggagaaacttttgaatgagatggaggagagaggggttacaccagatttatgcactttcacaactttgattcatgggtactgtaggcaaggtaactttgagaatgcattgcaattgtttgacacactgttgcgccagcgtttgaggccagatgtcgtgacatacaatagtttgattgatgggatgtgcagaaaaggtgatctggccaaagctaatgagctatgggatgatatgcatgctcgagaaatcttacccaatcacattacctacagtatcctaatagacagccactgtgagaagggacaagttgaggatgcattcggttttctggatgaaatggtcaagaagggaaatttgcctaatatcaggacctataattccatcatcaagggttattgccgatcaggtaatgtaaaaaaggggcagcagtttttgcaaaagatgaggcaagataacgtattcccagatctgattactttcaacaccctgatccatggttatataaaagaagaaaacatgcatggagctttcaatgtgtttaatataatggagaaggaaatggtacggccagatgctgtcacgtataatatgatcataaatgggttttctgaacaaggcaatatgcaagatgctggtcgtgttttcaagggaatgggtgacagtggaattgaaccggatagatatacatacatgtcattgataaatggtcatgttacagctggcaactcgaagcaggcgttccaacttcatgacgagatgatccatagagggtttgctcccgatgacaaattttgaggcttgtcagttctgacctattggacataagcaagagaaatgcatgtgttgtgtgtttgacagtgtctttgaaaatcacacctccagaaatttgtgatttcgaagcgtcgaagggacaggtccagaaaaaaaggggagattgttaaaattccattacttgggagtgaccgcacgaactatggtaatgttggcatgttgctccaactatgttctaaagattccatggcgtggctaagcaaaactgctgcacaaaaaggaaacagaatttgactggacgtctgaatatcttcccttcagtctgagctccagaccagagtgcaaaaagaaacattgaaccaatggaaaaaatgaataaaagaacaatcagtaactacagtgcatgtctgaagattctcatgggcgtgggcatcttcctccaggattgttgggatcaaatgtgcagccagacgctccaggcatcgaggatgtcagggacaccgagcttcctcgttgtggctgtgatttctctctcaggacacggaatgcagcgatggtagtggcttgtgccgccagggccaggcagattatgagaaccagaggtagaacttggtttctttggaacatcgtggtatcttgtgaacttcagtatcgagtgagatgcgaagctaggatttgaggctattatatattaagtttatggtctgcgtgttggtttccttggcgatcacggtttttacgcgttctcccatgtggacgagtattcacaaggttgaccgcatgtatacagagtcgctcaactcgtcgtgaacaagttcacagaaggatctctattgcacaagcacaatgtatttcagaagtagaaataagaccattggttactgtgtcgcaatgtcttccttaggaaaaaataatccacagcaataccacaaaacttctgcgtcagttctgtcatctttcattggagcatccctgatccgtgcctcgcaaggttctacaaatgtcaacctcatttcgttgcaggttcacaactataattttatagttttacctgaccgaccaggctcacgtgagactgggtgtgcggacacagtaaaccaatcaggcgcaatataaatctaaattatttaaaaatatttctaatttaaataacaaataa

SEQ ID NO: 28793 - DNA, 4330 bp, Zea Mays
ctttcttgaatccaagcatactcatctgggatcatagactggggtatttgctcgtccagagcgcttatcgttcatccaacccagccatatttgctctctacctgtgaagaaatgaagctttgggactgggacgatgattggaagtgcatacaaaaatttggtagggaacacactgattccatacttcaagtggcatttagcccaaatgacagttttgccagtgtttcaagtgatcacacaataaagctttggtgcctgaaatctcccacatcagagtgtactctgcacggccattcggacaaagtgaattgcttggatttcgtcacacatgatggtcagcaatatttgattagtggatctcaagactgtactgccaaggcatgggccttgaaggaaaaggaatgcgtccagacaatggatgttttcatgtcgccagttgtttctgtcatttcccttccggacactccatatataactacaggttcagcagatggcactattcatttgtggagttctgctaatttcaggcttgagagaatacttagccttggtttatgtggccctgtttgggatctacgtttgattgggccaacgaggatcgtgattcaaccgaacaactatgaaatatcagtcatcatggatattgacacaggttctgaggctagctcgtcagctccctcaaatgagctgatccaggttgaccccaaagagttgcgcttcccggttgcccaagaggtgtcaagcacactagagatccgtaacgttacagatcaccatgtggcattctgtatgtggtcattgaaccatacagcaaattacattccagtgccgaacatagaagttctatcaccacagtcaatgcggcaagttgttataacaagaattgcacgacgagagcctgtgccagcagaccccgtcgacgacatagtctatgtgaagggcactaccgtggttcagggtacaacgagcgcagatgtcacttatgacatgttcgatggaacaaggacaggccaaattctgcaaccggccatggagctgaatgttgttctcgtagctgactccgagatcatacacaaagcaaggttaccatgggccttagatgtgcatccaacaatgccatggataatgatggctcaaggagattaccaaattcgtatatggaactataagacacgggcaattacttcggctaaatttataatgcacaagcaatggattctggcgggctgttctagtggacttgtctatgtgtaccgttatgaaccagaaaagaaaaaatcagtagagaaaatccgagttctacaaggacactcaaatgctatcaattccttggctgttcattcaactaagccatgcgtgctgtcagcatccaaagatggcaaaattttgatctgggactatgaaaatgagtgggagttaatgaaaacatttgatgtcaaaagtcctgtgcagcatgttgcgtttagcccaaaggactccaatatgttcgccagtgcccaggacaaaacagtaaagatatgggattggcattctggtaactgcaagtctacattgtctgggcattcagatttggtgttatgtctggattacttcagtcagggtgatcagctatacttgatcactggttcacgagacaaaactgccaagatatgggattgcaagacgaggagttgtgttcggacattggaagggcatacagatgttgttaatgttgcatgttgccatccagatcttctaatactaattacaggttcattgaacgggtcagttcgtctgtgggatttgaatcgctcaactacgttccgatatgagctcatatttgaccttggagaagtatatgctatagcaagtttgaagggtacaaggattgtgattggacacgaaataggattagcactggtagacatagacctagagggcaagaaggatggatatgtgaagagcaatgtcgcaattatggattcaaaaaatgacacagatcaaaatatgaaagagttaagcccaacagcttcctcaagtgaggtgcaaaaggtgtcaagcattatagcattggagactctatacaaaatgaagtcatcagaatcgtctatagatgtccatccaacagagacatggatggtcattacatccgacaaatatgttcatatatgggactaccatacaaggtcagattggctaaatttatagcccgcaagcaatgggttattgcgggtgctactagtggattcatcttcgtctatgattatgactcaaaaaaggaaataatacacgttttgtgtaaccacacagaacccatcaagtctttggctattcacggaactgagccccttgtgctgtcagcatccgtggatggcaaaattttgctgtgggactatgcaaatgactggcatttgattaaaacatttgatgcgagaagtcaacgtttggtgcaagtcgcgtttaatccaaaggacaccaatatgtttgctagtgctcagggcaaaacagtaaagatttgggatcgccagcatgatgaatgccaatacaaattagatgggcattcacatcagatcgagtgttttgattactttagtggtggtgattttgataagctatatatagtcaccggctctcaagataaaactgccaagatctgggactgcgagaatgcgggctgtgtccagacactggaaggacatgcaggtcccgttagagctgtctgttaccatcagaatctctcgttattaattacagggtgctctgacggatcaattcatctatggaactccactaccttcagaagccgaccgtgtggtagaggattcgaatacgttcgaagacgaaccacaggactcgcttgagcaaggcttgagcataaactgaactttgctgacttcggattactgagttctgtagcttgtttgaaaggatcgaaaaggattgcaatcagaagcagggaaggattagcacttgtagacatagacatagaggacaagaaggatagcgatgtggagagcatcacgactactgcttccatgaacgacacaggtccaattacagaagagaacggagtggcagcagaccatatctctgatgaccacctggcgcagggcgtagtatatgtacatacagagattataggcaaagtcaattcagcatgcaccatagacgtccatccgacaaagccatggatggtcatcactcaagctaacaagtttgttcatgtttgggactaccatacaaaggtagtggaatggacgattcagattaagggagcgaaagttagttcagctaaatttatagccagccaggattggattgtggcgggtactacccgtggattcctccacgtgtacgattgcgaatcgaggaaggaaatacgccgtctttgtgaacacccgaaatctatcacgtcattggctgttgacgatgatgcccttgagctggtgctgtcagcgtccatcgatggcaagattttgatctggagctactggcactactatcacgcacgtagacgtagtacctggcatttggaaaaaacatttgacgcgggaagccagtgtctgaagcaagtcgcgtttattgctccaagtgtccatcgcagcagcagcactatcatcgctactgctcgagacggaacagtaaagatttgggatcccgatcgttctgacggatgccgtgagttcacattggctgcggattcaggtcagattgttgaatgtttcgattggtttagtcgtggtactgatatatacttggtcaccggttctcgagacaacactgccaagatctgggacatagaggatgggagttgtgtccgaacactggaaggacacgcagatcatgttaccgttgtctgttaccatccggatctttcaatgctcattacaggttcaagggacggctcgattcgtctgtggaactccactaccttcaggtttgagcatgagctgaactttgacctcgggtctctgagttctttagcttgtatcaagggatcaacaaggattgcaatcggatatgaaagaggtctagtactggcagacatttgcactcaggaacatagagcatgatctataaagcggcataataccttgagagcgacagaataaaatctaaacattgataaagcggcaaaaatccctggcaaacatttgctgatgcgatgggattgcatccaaacatttttcttggtaagctaatagactgcaataagtttttccatggacttgggaggtgtcgatctgcggatatgcttttgtatggtttaaacatatcatcggatagaaatttatactactatattaaaaatttaatatggacatctcgtgctactatgactttatccttc

SEQ ID NO: 28794 - DNA, 1646 bp, Zea Mays
gccgcacacggcacatctcagcgcctcgcctccaccagtccacctccacaacgtcaccttcacctcctcgccgccagacgcgcccgccgccaccccgtgagccggcaacctcccaccatctagcctctgcgcccgcccggccaccgggcactggccacgtccggccgacggccgcctgaggcagtgaggcctgaccacgccctcccttctccactttgtgtctgtgcccggtcttggattcgtggttgtctccgccactgatctcctcctagcacggcagcaccccagagccctagcgcaagcctggtgctccagatctccaccctgaccatgtcggggcggagacaggcctggcagtttgcggccgcgctggtcttcttccacggctccgagtacgtcctcgctgccgctttccacggccgccagaacgtcaccgctacttcacttcttattagcaagcagtatgtattggcaatgggttttgcaatgctggaacacctgacagaaattcttattctcccggaagtaaaggagttctggtttgtcagtaatattggccttctaatggttattatcggtgaaattatccgtaaacttgctgtagtgacagctggacgtgccttcacacacgttataagaacttattatgaagatcagcatcaattgatcacgcatggactgtataggtttatgcgccaccctgggtattctggctttcttatatgggcagtaggaacccaggttatgctgtgtaatccattatcaacagttgcattcacattggtcttgtggcgattcttttcaaaacggataccaatttttcttgaagcagttctttggctctgaatacgatgaatatgcacagagagtacactctggaataccatttattaaatgaaagtatggcacttgcaaaaaagaggatgtaaagggaatgcaggtagagctaatggcccaagctaaaagaatgaatcatgattatcattcgaggcaattcctttatcatatttcatctgctgtattctccaagtgacattttcactgatgtatgctcgataactccaataaaggcataaagcgagagatgctacagctttgttgaatgcaaacaggtttgctcgtgttgaattattgtaaggccgcgcatagcagagcgtgcatatgttgaattattgttgaatgcaaacattgttttgtaccgtagactatattgtttacagagtagagtttgaaatagattagagtttgaaatagagtaaagtttgaaatagagtagagtttgaaatagtgagtaagataggagatgagatagagaggctgctggagatagcctatcgtattacaagtgcagaaacttgctccagcttgcttgggacaaaagaatctgatgccatttttgttgttattccagaacagcacaactcaactatcagggtttttttatctggttataagctgttgttttgtactgagatttcattgttcacttgaagaaacccttgctgggagagcagaatgcatggtgctgtttaagtgatcccgtgttatatttactcatgtagtcatggcatacatgtcaagtatgctggttgcttttctgctgtccggcgtcatgttctaaattaatatatgtagtgatatttctg

SEQ ID NO: 28795 - DNA, 778 bp, Zea Mays
gtttccttttcatgttgtctttgtcttacggggtgacgttttctgctcaattcgcctgttgctcatcttcagtgggagaaacatggaacctgctctgcccctgtggttcaggatgaattacagtatttcacccttgcccttgacctctacttcaagtataacgttacggaaatgctgtcaagtggatggatacaggtttcaaatggtaaggaatatgcactgagcgatgtcatcgataccatcaaacatgcttttgggggatcaccacaaattgtttgcaagaggggttcaatcgaagaacttaggttatgcttcgacaaagaattgaagcctcgtgattgccttaccacttctttggcgaatggaagtgtatcaaaaagcaagcactgcccgcggtacatcaccttgccaacgtatgatccccttgagatcatgacacagttcgatgaatttgaggtgcctgcagctctttatacagcctaaaatgcaattgttgcaatagcagaaggtgctcgcgtgagcacctagaaccaggcacatttatcctgggatattcaatcatttgtacatgtacacttgaaagagaactgacatcttttcaacctgaaaatttataagctttatgtaaccgtgaaggtcggatattgcacatgtaattcgctaaatcaaaactgtatcttgaggtagaattttcaagtagtaataatagagatataagaaacttatcgcccatcatgtctgtcattaatcatgattcatggattagccgattaggaag

SEQ ID NO: 28796 - DNA, 1867 bp, Zea Mays
ccgcgctccactcgccacgtgtccccgaaccctcatgtaaatccagcacggtgcatacccaatcagttcccgttcccctcgtcgacacctgcagtgccaagttgcatcgactcctccccggtcctccaccgcccgccgccgatggatgtggatgtggacgaggccaccgccacccctgcctccgcctctgccaagcccgcttccaacggcgaggccccctccggcgcccgcgaggtggatgtcggcgaggagtacacgctcgccggcgttctgcgcagcttcgtcgacggcgtctggtacccggacgagccgctgctccggcggctccgggcggcgtcctgcgaggccgcgccgcggctgaagggggcgtctcggaactcagcgcgggatctgctcgagtggacaaggcagggcagcggcctccgcgccatcctcgtcatctcggtgggcgcgcctcattgatccgtaacataagcacgggttttcatgtcctgtttactaaatctgactcgatgttctttaggtgattgcgtattggtacacttgttttactttgtgctatcagtcaattgggttactgtgtcatatagcattgaaatgttggtttatattggtactgtttaggtctcaggggccaaaatgtttacaagatctgtagagggaaatgaagaataggatgaattgtaatccctccttcctgaaatataataggtatatgcagggatggcaatggagaattgttcatcgcagaatagctccacacaggggcgaagctaggattcaaaattagaggggaccaaattagattagggggctattagaaacattttttgcactatttacataaaattagctaaagacctaagatatcctgcacatcccgtccccgtggcctctatgtttgccctaaatcaatctttaacatctacaacctcaaataggtaaacaataaaaatagatttagtacggtatcagggtttttaatactgctcatttagtatcgtaaatattatcggttttttctaaaaacttattaaactgagcttagtttgacgacttcggacagctcaaaacttgcatttcaaggtggagactggagagtgcatcttgtaagcggaaacaaaaacatggtggattactttcggtagcaacagagcatggttgattgctttcgcatgcagttttgatcccataaaactcttacatgataccttggtttggtatggcatccattttagcaattattgaaatttctcagtaaataaattttcctcattttacccttttctgatctggcaggtcgggacaatcatgcctatagcattgactggccttttaatcttcatgttctttctgctaattgccactgctaatgcgatcatcgtctcagccctgatgtcactggccgctgctggcggattcttggctatcttctttgcttgcttggttgcagtgtatattggagcagtaggagttgctatctttgccatttctgccattgtcatctcatcagttgttggagttatgattactactggttgggttgggttcttctggatgatctggttcaccgcaaggaagagcatggacctgacgaagcattccatcagcatgacgagctcggcagtccaatcctattccgcgtcccgccaagtgaagcagaagcatgtcgactgaggctagttggttgcgtcttgcgtcctgtatgaagaagccctcgggtcgatctgggtgaattacggtagacgacatgcttgttttggcagttctgtttttcacggacactaggtatgcagtatgtacatgccgattcatgagttgataataaaactatcactatattttttttcctttttccatttcttcc

SEQ ID NO: 28797 - DNA, 2570 bp, Zea Mays
atggcggtagcgccggtggtgcgccagcagagccttacagagggattgatttcctgtaggactgatgttcaatgtttgcatagatggcagaaggttttgaaccctgagcttgttaaagggccttggtcgaaagaaataactactgatgtgaaacatttcgatgtgacatcttcatttagatggcacaaccatcttaatcctgggatcaataaggacgcatggacacaagacgaggaaatcaggctcatccatgctcatcaaacttatggaaacaaatgggctgaattgacaaagtttttaccaggaaggacagacaatgcaattaaaaatcattggcacagctcggtgaagaagaaagttgattcatacagatcatctggtttactggctcaatcccagggcttcacacctgttgaatacactgctggtggtttaaatgttgattcttcatctgcaataaccaatcaaattagcgaaggcagtggttttaatgtttttcgggaggctgaagattcgatggagttaagtcagtcttcgtttgccaagggttcttgctctcaggaggagcaaaatgatgtgactttgggatctcatttgcatgtgcatgaatctttgtgtccagatggttccactaatgatggcaatggtgcttctggtttacctgacattcatcaccgcttatgcacttctgacatggatcaagataaacacttgcaggaaggaatggatttggataaacacttgcagcatgaattctctcaaggaacggatttgcatcttgatgtagatgaagtgccaaacaactttgtgataaaaggtagccagtcatctaatgagcttgcagttcaatttcatgacacagagattatgaatagttcaaaaaatgatggagtgtctttggtaccacatgctataacaccatgtgttcccatcttacctagtgtttctggatgtgtgcataacataaatgtgatatacgaaatgggcataaaaaatgataattgtttccaatctgaaaagtgccaggatatttccattcaatcaggtgcatactcgtctgaagctgcaggcagctttttagcaccactttacccattgcagacatctgaaccagcaataatgatgggtggccctgtgtactatcagagttctgtaatgtcattaccaccaggctttatttcttctgatggtgcttctaatgcatctggtgtcaaatctgagacaagttactatcctgtttctcgccaaaatttggagattaaaacttgccacaatgcttctggtgatcctgaacaaaattcatatattagcagcgaagatgacagaaacaagacttctgaacctatgggcagaatatcagaatctgaaaagaaacagcaagttgatgttgaacaatcatgtttggagcctgcagcctgcattggaaaggaagcattatctagtcatggtgacaccatattaagtaaaaaggaggatgctggagctctatgctatgaacctccttgctttcggagttttgaatttccctttgtcagctgtgagcttgtaaactccagcgatctcccagaatatagtcctcttggcattcgagagttgatgaggacatccttgaacttccctaccccagtaagattgtggggctcccctactagggatggtagccctgatgctgtgctaaagaatgctgccaaaagattcatgtgcaccccgtccataatgaaaaaaaggcacagagatcttttatctccagtttctgatataagaactgacaagaaaccaaatactgaaagggattttatgagctcaggcatatcctctacaagagttgggaaatcttgcatggatagcgctgatgattcagctgatttagtttcaccgaaagagagtgcatttcaaaagaagctgaagctttgtcacgaaaacaaagaaaatttgaatgaaattgctgatcaaggagaaaatgaagccaatgcaaagcattcttcagggattcttactccgagcagtgttgacaaccataatacacataagcatggtccaaattttcgaattcaggagctaaataccactgtacaggctttgtctaactctaaagacataatattttctagatcaaagccatcagaacatgttgaaaaatctgcagcctgcattgatgcagattacgagtatttgaacatattggctgatactccaggtattaaaagaggcttagaatctccttctgcctggaagtctcctgtgttcacaccattccaggatgcatacttcatgagcccagcaagcagagcttttgatgccttaggattggtgaagcagattaatgagcagagtgcttctgctgtggaggaagcacatgaagttctggcaaatggaagcccatggaaacaacataacaaggaaaactctgacaaagaaaatatagaaaatacagctttgaagcatgagcatgtcacaagcaaacctccatcgatactcatgcctagttccagtctccggctgttagaaataagcaacaaggattatggatgctaatgcaaattctcagtggcaaactggcaataatctaa

SEQ ID NO: 28798 - DNA, 2200 bp, Zea Mays
tcgggtccccttcccctccgtccagctcgccgtctgagggaagcagggcgcagcagtcaccagtgaccagtcatggctcgctgcgttgccggcagctgccctcccgtcaccttcgcgtgttgcccccgccggactggacgaagtgctgttgttcagtgtggcactgcatcgagcacaccagcaatatctggaactggaccttcatcatctggatcctcggggcttgttcaagattgtactgcccctctggtctgtgcactgcaattaactgccagacaagatgtttcctgctttcacttcccaggacacaacagaggaaaagctgctccatcttccttgtcgaaactcattggctcaggggcatttctgcatgacttgcccgagctacccgagctcgatgatctcttctccccaaaaggtgtgattctagatgcccagaggcgagcagctcaactgtttgggtcatctaaaacttggttccttgtcaacggaacgacctgtggaatccaggcctcagtgatggctacctgttctcctggcgactacctcattgtgccacggaactgccacctttcagtgatctctgcgctggtcttgtctggtgtggtgcctaaatacataataccagaatataattctgggtgggacattgctggtggtatcaccccgctgcagctggatgaagcagtaaaagagctggaggaggatgggaagagggtaggcgctgttcttgttacttcacccacctaccatggtgtatgcagcaatgtgcaaggtattgtcagtgtttgtcatccacgaggcattccggttatagttgatgaagcgcatggtgcacatttcaggttccatgacagtttgccaagcactgcaattgagcaaggtgctgacctagctgtgcaatccacacacaaggtcctgtgctcccttacacagtcttcaatgcttcacatgtctggagatcttgtcgatgtagataaagtaagccagtgccttcagctcctccagagctcgagcccgagttaccttctactgtcatctttagatgccgcgagagatcagctgagccagaacacaaatatatttgatgagccattagctatagcatcggaaacaaaagacctgctggcgagaatccctgggatatctgttctagacttaccatgctttgcttctgatttccctgccattgatccgttgcgcatcacactcagtgcctcagatctgcaattatcgggatacgaagccgatgacattttatatgaaggccatcaaatcgtatctgagcttgttggcacaagggccgtgacatttgcagtcaacttaggaaccagagtgcaggacgctgagaagcttgtgcagtctgcaaagcatctatcagaaaaacatttctttgcaaatagcctgaaacccgtgaaggagaatcgtgtgcatggcccattagagaatatctctgtgcatctgagtccaagagaggccttctttacagagaagaggagagtgaaaatcgaggacagccttggtgaaatctgtggtgagctaatatgcccgtatccacctggtatcccagttctgattccaggcgaggtagtaacccatgattcactgtcctacttgatgagcgttagacaccaaggcatcacgatcagtggagcggctgatgctgagctaaattccattctggtgtgcgacttatgatgattgccctattgtttgtcacaagactgtgttgtcgcagagataccgtgggtgggagagatcaagtatggtttatgccaagtcaagagcacaatgtattgtccgcttgatggatgtaaaccaacggctggcggtttgtagccaccggccacttggccaaataatttagtctgtgttgtgttgtgtctcggtctcgtgagccgaaagagttgccaagctgcgacatatgatgccaaagcatgaataagggtctatagcatgtgatctcctgtgttgttgtttgaagtatgagttgctagggagggagggctacctttctatctgaagtgccgtgcaatgtaatggtttcctctttgcttctcttctgaactgggaggtccggtctgaactggcagtaaagctgaagcatcatatgcaggtctgcacacctccacggttgtgctacctccggctgcatgttttgcagggcttctgaaacaattcctaggtagcaaggtctagc

SEQ ID NO: 28799 - DNA, 2127 bp, Zea Mays
atctctccatcggcgtctcgtgcgctccgttagtccgttcgacgttcgtccagctcccacctcacccgctgatccattcattgatcaggggcacacacgccacggcagccgacaccacacgagacacgacactccccgagcacacacgccgcaacagcaccacccccagacccaagtcctgtcaaggcctcaacacacacacacactctctcgcttgacctacccccctccgccccccgcccgagcgccgccacggcatggcttcctccatctccgccgccgctaaggcctccgcggccttcgcccacaagaaggagctggccgcgccggcgccgcaccgcgcgggctcgagccgccggaccaagccgtgccgcgtgcgcgccgtcgcgtcgcccgcgcgcaccccccgcgccccgtcgtccaccggctcggtgaagaccgcgatgacgatgacggagaagatcctggcgagggcgtcggagcgcgcggcgctggagcccggggagaacgtgtgggtggacatcgacgtgctcatgacgcacgacgtctgcgggcccggcaccatcggcatcttcaagaaggagttcggggaggatgccaaggtctgggaccgcgagaaggtcgtcatcatccccgaccactacatcttcaccagcgacgagcgcgccaaccgcaacgtcgatatcctcagggacttctgtctggagcagaacatcaagtacttctatgatatcaaggacctcagcgatttcagggctaatccagactacaagggtgtctgccacattgcacttgctcaggaaggccactgccgaccaggcgaggttctcctgggtactgattctcatacgtgcaatgctggagcctttggtcaatttgcaaccggaattggaaacactgatgcaggttttgtgatgggcactggaaaggctcttcttcaggtgccacctactatcaggtttgtattagatggagaaatgccgccttatttacttgcgaaggatctgattttgcaaattattggtgagatttcagtatctggtgcaacctacaaatcgatggagtttgttggatcaactgtagaaagtctaaccatggaagaacgtatgacactatgcaacatggttgttgaagctggtggaaagaacggtgtcgtgcctgctgatgaaactacatttaaataccttgagggtaggacatcagttgattatcaacctgtctacagtgatgctgaggccagattttttagtgactaccggtttgatgtatcgaaactggagccagtagttgccaagccacattcgcctgacaaccgtgccctagcaagagaatgcaaagatgtcaagatcgaccgagtctatattggttcctgcactggtggcaagactgaggacttccttgctgccgcaaaggtgttcttagcctcgggaaagaaggttaaagttcccacattccttgtccctgccacacaaaaggtgtggatggacgtatatagccttcctgtaccaggatctggcggcaaaacttgcgcccagatattcgaggaggctggttgtgatacaccagcaagtcctaattgcggcgcttgtctgggtggccctcgcgatacgtatgcacggatgaatgaacctacggtctgcgtgtccaccacgaacaggaacttcccgggcaggatggggcacaaggaagggcagatctacctggcgtccccctacaccgctgcagcctcggccctgacggggtacgtcacggaccccagggacttcctcatgtgaacgatcttgaaacagccacagagtgcctgcaccgctgttttttgtgttgaaccttagtttaggcgtgtgcccttcgttgagaaataaactcccatgtcgggaggctgccattgccatttatgttttttgcgttatatttattacagtgactgccgataacgtagttgagcgttacaagggaaatacattcattctttccagtatcgatggcagtcactagactccgttcttacaaaaaaaaggcatgtcgagagatcttgtagttcatacacttgttaaaacacttttttgtacaatgtatgggaaagaagctcagtcgatctttcttgttttgaatgctctacgacacgtc

SEQ ID NO: 28800 - DNA, 1585 bp, Zea Mays
cctttttatgtgctggcttctttttacaaatcttggtggtgaaaagcgatttgcatcaattgtggcaaaaaggctagagtctcttggtgctttaacacaaggagatcgcagggctgggccttctttgagtgcttttaactatgatagcaactatgggaaaaaggcattaaccatgatgtataggggaataatggaacaggattcttttccagttgttcctccggggtgttctgatgatgaaactagcatccaagaattcatcaatgaagcaaaagctgctctagtatcagttggaattattagggatgctttcatatgcaatggaaaagatccagggaagctttctggtcggattgtagattcagatatgcatgatgttgctcgttttctcaaccgccttttggggttgtctccaaacatccaaaacaggttgtttgatctttttacaagtatacttgatattgtccttcacaatgcaaggatagaagggcagctagattctggaattgttgatatcaaagctaagaatgttgaaatgacagaatcacctaggactgttcacactgatagcttgtctggtgctttgacggtactatttactttcaccattgaccggggagttacttgggagtcggcaaaaacgatgcttgaggaaagggagaaatttggtgctggtacttccattgatggcttttacgagtccagaagggaatggatggggagaaggcacttcattctatctttggaaggctcaactgaaggaatgtacaaaataatccggcctgctattggtgaagcattgagggagatgccttcaagtgaactgaaaagcaagtacaggaaggtgtcatcaatagacaaagttagtaaaggatggcaggaagagtacgatgcttcatcgaagcagtgtatgcatggatctaaatgtaaaattgggagctactgtactgtaggaagaaggttgcaagagcttaatatattgggtggcctcatacttccagtttggggtacaatagaaaaggccctggccaagcaggaacgcctcattcacaagagaatacgggttgtccgtttagtcacaacaaatgacagtcagcgaatcgttgggctgctgattccgaattcagcggtagagtcagtactaacaggtttgcaatgggtgggacattgatgactgacatggaaaggcttgaattttgtttctcagctgcattcagtttgctgggctttttttaacttcgtggcactgttctgatattagatgcagcagcatctagggcacacttgattttgtttgtagggagatagcaaggtaacttacccgaagcgatgaaattcttagcttacaggtcaggcaggtatatgctgacaacttttgtatgtaaaatacgcggtgcggtgtggtgcggctgtaagacatgtaatgtaaagctactaaaaaagctcaggttaatctcaaaagaaagtcgcacctcacaatctggtgctgccacaatgataatgtttcatgtggagttactgcttatgtcggactgaactgcacaagaaaaactaaggcttatttatattatagccaaattatcta

SEQ ID NO: 28801 - DNA, 1408 bp, Zea Mays
tttgcttcatataaatatgttagcagcttcacgatgaagttgcttgaggagggttttgatctttgtgcacatctactggctctgcggcggtaccatttcatggaaatagctgactgggcagactcctttattgcttcaatttatcagaagaaatggtcatttgttaaatctgagcagaaaagatcggagatccaaggacttatggacttggcattgcagagatcttcatgcgattctgatccttataaggaaagattatttatatacatgagggagtcacctgtggattctgttgatgcctctccatgtggtcttgatttgctggatgatatcttgttgggttataaagctgaatggccaatgaatattgtcattacagtagatgcactgaaaatatatgctgaaatattctgttatcttcttcaagtcaggtttgcagtgttttccctgactgaagtttggagatttttaaaggagttgacacagttcatcggtcgttccagccatagcagatctgatgtgttgaagaaattgaattttgtaatgaaattgaggcataaactttatcactttctatcaacactacagcagtatctccactgccatttatctgatatatcgtggcgccgttttcaacattcccttaaaaatcaggtgagggatatactggatctggagtatgtgcatatatgttatattactgatgcacttgacatatgtttcttatctgatgagtcaaaacaagttgctacgataatcaagagcatgctgcagctggctttggagttacgatcatgctttcagagtggtgacacttgtgatttatcagtaaatcaactcagtaatttgcaataccttataaacttctctcaggtggatgtaattagaacaaagttcgaggataacatcaaagatctctatattttgcattcgaaatcttcaaaatatacggagcttggcctttcccgtttctgggggtatctgaactacaatgagtatcattctacgaaagtcagcaaagatatggacaacttctatttttgataggacattgcaagactgaagtaaggtttgcctttatatttgggcaatagctcactggccaccgggactagcttaccttttgaggtacacactgctgagtggtgagagttcttgtagatatacgctggtttgatcaaattggcccttgtattggtttttggcgaacttaagagaactattgttcagacatgccatatacttggagatgcatgtatgtcctaatggtgtatcccagttttacgatcaaaatgggaaatcatgtgtagttctggaaaggtgggaactttgtatagccaatgttgatattgattgttgacacgttacaattggtaaatggaaggtgaatgattgctctctggcctca

SEQ ID NO: 28802 - DNA, 5975 bp, Zea Mays
tccctttctatctccgtccccgtgaacccgcaccctccagcctcccgtgctccactggcgcccttctggaaccctcagccctcctaatctcagccgaagttattaacctctttttttcttatataggccaaattagttcccctcccgcgattccaaggctttgctcttcgatctcagccgcgccgtgttcttcgcggcgagttcggagcgttggtgcccaatccgtcgaggttgtgagttgcttccgctgctgctactgccgccgccaccgctggtgttagtgatctgatctggtgggcggattgcggcgcggaggtggaattgttttggctctggggaaagctagctatgcggattgaggcgtcgccggattgagcatgaggggcggggctgctggcggtggcggtggtaagcgtggcgcggatgatgggatcgccggatgggcggctcgtggagttgttcggtgcggtgaagtcgtggatgccgcggcggggcgaccactctccgccgcccgcgttgcagtcggacgcggcggctgggcagccgctgccgcatgacttgtcgagggacttctggatgccggaccagagctgccgcgtgtgttacgactgcgacgcgcagttcaccattctgaatcggcgccaccattgccggcactgcggccgtgtgttctgcgcccggtgcacggctaactctgtgccccgctcgccgggggacgccgcgagggaggacggcgagaggattagggtctgcaattactgctttaagcgctggatggaggaggaacccgcagcgcggggggccgctgcagggcaacagccgtctagcccgtctctgtctgccgctagtgtttgcagtgacaagtccagcttcactgggacgaatgggcaaatgtcgtcttatgcgaatattagctactccgaatttccggtccatggagagggcaactgcggcgaggatgacggctatcgtgaggagcagcagcctgctatggaccccgctccaaccatggagcctgcagcttacgctgataactcgtctgatcgattcaacttttgcttgcagaggagtgacgacgaagatgatgattacacagttttccgttcagatttggaagagcagcacatgcaaaattctgataaatattatggacctatgtattttgatggacatcatgttagctgtagtgatgacgcaaaagaatctacatccccaaggaaaaaattgacaaccctagttgattctttgggagcagataagaatgaagatcataacgttgatgagtgctgtaatgctcggtcttcttccatgtatagcatggaagtgctagataatgagcccgtagactttgaaaacaatagcttactttgggtagctccagaacccgaggacggagaggatgatcacgatggtgaacatgatgatgatgagggggtggatgctacaggagagtggggatatctacgcacaaacagctttggcagtgggcactgtcgaagtagagataagtcagctgaggaacacaagaaagccatgaaagacatagttgatggccactttcgggcgttagtttctcaacttcttcaggctgaaaaggtaccattagttgatgggagtggcaaagaaagttggctagatatagttacttctctgtcttgggaagctgcatctcttttgaagccagataccaccagcaaaggcggtcagatggaccctggtggctatgttaaggtgaaatgcttagcttgtggtcacccaagtgaaagtttcgttgtaaaaggagttgtttgtaagaagaatgttgctcaccggcgtatgtcatcaaaaaaggaaaagcctccaatcttgattcttggtggtgcactcgaatatcagcgtgtatcaaatttgctttcaagttttgatactttactgcagcaggaaacagattatttgaaaatggctgttgcgaagatcaaagcacaccaaccaagtgttgtattggtagagaaatctgtgtctcgttatgctcaggatttatttctagagaaaaatatctcccttgttctgaatatcaaaaggccactgctggaaaggatatcacgttgcactggtgctcatatagttccctcaattgattgtttgtcatccgagaagcttggacgctgtgatttattccatgtagagaagtatgttgaagagcatggaaccgctggggaaggtgggaagaaaatgctgaagaacctcatgttttttgaaggctgtcccaaaccgttcggttgtacaatcttgcttaaaggtgctaatggtgatgagctaaaaaaggtgaagcatgttttgcaatatggagtatttgcagcctaccatttggcacttgaaacatcattccttgtggatgaaggtgcaactcttccagaactccctttgaagtcgccaattattgtagcttttccagacaaaccttccagtgctgatagatctatctcgacaatacctatcataccaatccctagtgcttcaccgccaaacagttgcctgcaagcatttggcttgcaaaatgatgatctgacatttgatggcactaaacgaatggaacaaacagcattgggagttccttatgaacaaacagcatctgttcagatcaatagccaaaatggacatattaccggttttctggatatggtccctcaatcatctgttggtcccttgtttcagcagtcggacattcactgtcctgatggtactggaggtgtgaacagaaaaatgaatttacaaggcagcctacctggaaccactagaaatgtgttggttaatgactttagccatagtgtatctactgctcatccgacaaatttggtgtcagctaagggtgacggttcacttgccaagaatcctgagattggtgacaagatagcagataagccggctgcccctctcaacgtacagatttctcatgacgatgagagcataaagaataattcagttgcaaaaacagatgaaattccagcatctccagcagaaaatcagagtatattagtttctttatcctctcgttgcgtttggaaagagagtctgtgtgagcggccacaccttcttcgcataaaatattatggtaactttgacagacctttaggcaggtttttgcgtgaccagctatttgatcagagcaagctttgccaatcttgtgagctaccaccagaggcccatgtttattgctatgtacatccccaaggcagtttaacaatatcagtaaggaaactttcaataaagttgcctggcaatggtgaaaatgatggtagaatttggatgtggcatagatgcttacgctgccctcgagtcaatgggctccctccagcaactaaaagagtagtgatgtctgatgctgcttggggtttgtcttttggaaaatttttggaacttagtttttcaaaccatgcggcagcaagtagggttgccagctgtggtcattcacttcacagggattgccttcgcttttacggcttcggtgaaatggttgcttgcttccgatatgcatcaattagagtccactctgtgtatttaccaccaccaaaacttgattttacttctgagcatcaggaatgggtagaagaagaagcaaaagaggtggatgactcagctgaacttctgttctctgaagttctgaacgcactccacaaaatttcaggaggaaggccaattacaggttcttttgatggcaacttgaagattcttgagttgagaagaaatattggagaactggaagagatcctggtggcagagaagactgactttatggagtcattaaagaatctactgaaaacggatatgagaaaggaacagccgttcattgatattcttgatgtcaacaaactaaggaggcacttattatttctgtgttacttgtgggatcaacggctgaaattcattgcaaattcaggtggcaagtactgtgatgcactagctggtttacggattgggagtgggaattctgattttaatggtaaaccagttggtgcagccccaaagctagagaagggctcaaaggctacagttctttcaattgctaaggaagggtcgttacaacagagctcttgtccatctcatggtgaagatgaggggttcaaccaagccaatgaatataatgaaaatatctcaaggaatgctgcagaattgagcggcactgaagattccattgcaaaaatcaatcatgctaccagtgcagatgttaaggatcgactggataaccaagaatccagaactggtgtacgcagggttgtttctgatggacaatttccagttgctactgacattccagacacattggatgcaaaatggagaggtcagaatgaacctgctcctgattcaaacttggcaaaaccaccactttcagtcgaagacacaacagttgatgttaaaagtcaagccaaggctgtgcatacttttactttcactgttcgttctggagatgcagcagaggaattacttagatggattaagatgccatacatgacatcaaacagttccttaaacacaacttctagttcaccactgagattcacttccttggcagagtacattcctaaatacgtcgagttgttttgtgatctatcacagaaaggtggagcaagacttttcttacctactggagctaatgacattgttattcctgtatttgatgatgagccaacaagtgttatttcgtacgcacttgtttcacccatgtactgcttccagttgtctgatgacagcagcaaaaatagagacaaggagtcttcacttccattgcctgtatatgattcaggaaattttaatccatttcatttgtttgaggaatttggatcccactacgatgttacttcatcagtgtctggagttagaggatcctttgctcctgatcaggtgcacttgagtgtttcttttgaagatggtgggccacttgggaaagtcaaatataatgtcacatgctactatgcaaaaaagtttgaagcactaagaagagtccataagcactggaagccctacatgcttagcaaaaattttggggatctatcaggttactagtaagcatgtaaagggtggcaaggagtcaaagatggatttgcttgtgatggaaaatcttttgtttggacggaatattaccaggctctatgatctaaagggatcttcaaggtcaaggtataatgcagattcaaatggtagcaacaaggttcttcttgaccagaacttaattgaagcaatgccaacttcaccgatttttgttgggaacaaggcaaagcggctactggaaagagctgtttggaacgatacatctttcctagctggaatcgatgtgatggactattccttgcttgtgggagtcgacgaggagaaacatgaactggtcttaggaattattgattttatgaggcagtatacatgggacaagcaccttgaaacatgggtaaaatcttctggcattctaggtgggccgaagaacgcttctccaactgtcatttcacctatgcaatataagaagcggttcaggaaagccatgtctgcttattttattgtcattcctgagcaatggatgcctgcaataatcaatccaagcaaatcatcatcaaatatttgccaagaagattctcaaaatgggtctcaagagtgatatgatgttcgataagtccggttttttgtcctgtcctgtcgtgaaaagttctgaactgctagtctggcgcaatgccttggctgctactgttgcgtcaaagtgatattctggctgaccgcattctcttgtgctaattggcacaggtccgattgcatcattgagtccctcaagcatcggatgtgtatattcccaaagatgtaattatgccctagtcgtagttttccccccttcaataaatcagttccatagtatcatcacttgtgtcgtcgtcgcttaatttttgttgtatgtatagaactagcaggacgcttgtttttgtggtcgttttgtatattattaaatcttccatttt

SEQ ID NO: 28803 - DNA, 1484 bp, Zea Mays
taataataaaccgacaacatttgccgattgcaaaaatgcaagggaggaccattaaccactgaccctgtatttcgtgtcacctagcgactccgacgagccccaatcccgcgcgccggtgaccatggagttcatcgacccctgggactcccagtcccgcgctcgcgtcgtccattccggcgccaactccacttcgttctcctcctccaccgccaaagcacccctctccctccgccacgccgcatcttgcgccgccgcggccgtcgcacttctcgccgccgcgttctacctcctcccgacctaccagatcctctcctccctcctcatatggatcgcttcgtccctgctcctcgcccccttcgcgcccttgtcggccactggcggcgacatctccgtcggccgaggccgcgtcgttccggctccagaaccggccccagaacccacaccggaacccacgcccgccccccgccgcggccgtcgccagaacccagtcccgacgcccacaaaaccctcagatccgggcactccccccgtccaatcggccgcatcactgcatccgttgcagaaggcgacaactgcggatggagccgtggtggacggcggcgagagggaggaggacgccggcgagtggactgaccaagagctggagctgctccggcggcagatggtgaagcacccggcgggtgagccccagcgctgggagaagatcgccgcggtgtttggcggccgccgcacgccggagaatgtcatccgggcggcaaagtcgggcgctcccgcggcgggaggaagctcgttcgagcagttcctacgcaagcggaagccgctcgatccgagggccgaggctgctgtcactgcggacgatgcgggaggcgccgagagtgcggacgccgcttggagcgccggggatgaccgggccttgctgaacgctcttaaggagttcccgaaggacactgcaatgaggtgggagaaggtggcggcctctgtacccgggaagacaaaggccgtgtgcatgaagaggatcaccgagctcaagcgagacttcaggagcaccaagacggcatcggaagcagcatcataggcgaaacctgataattttggtgccggactgaatgacatgcgctgcactggtttggctagcgaggaagaactttacatggctagctccagtgaaccatggaaacggcagaggattaactacactacggagagggccggagctatagaacagatcatgtaattttcctattgaactagagacagggtatcccttgatataggagaaactttgacttactactggacacatggcatgagacaggaagaacctgttcttgtttcaaactaaagcatgttttcattgcaatcttttgtaggggtcctattgctagtcggttaaatgtttttgtgtactgcttcgaattcctcgtttgagagtgggaaaccaagcagcgtttttttttatggtctgcgcgcttaggccatctcag

SEQ ID NO: 28804 - DNA, 450 bp, Zea Mays
gtcggttgcaacggccaagtctgccagatgagggtctgtaacagcctcgggctataagtcgtgctccaagccctctggttaacacctctgcgctcccaactcgagaccaaggaaaaagagaagggggacgagtgcggctgtgggcgggattctgttcgaccgccgattcgaccccggggaagcctctggttaacacctctgcgcacccaactcgagaccgaggaaaaagagaagggaaagcatagggtggcggggaaggtatcgcctcggaaggactcaaatcaacggcaattcctcgccggacattgctttccgtcgtgaagtcgctccgctctgtggacaggctcgtcatcaagccaatcgcgagagctgtccaaaaggaagcccaggagccaactcccgagcctgccaccgaggatctcctcgcagcctcagcttttgaaggcaagc

SEQ ID NO: 28805 - DNA, 457 bp, Zea Mays
ctctcccacctttgcttccactccatccccacatcaccgcagcctttttgcctcgcatcatcgccatgttgctttaaagttcaaaacttgcagggttgggaggaacggagtcttaagattagcgctgtcggtgtcgtccttgaggtggacgtcaacggcgaggagctctttttcgttgataaggtgcggtgcggctccctcttagcttgtgttcacgtttgcttcctcttcctcctccatgtatgattatgatttatgccattttaagttctcttcttgctctgctctcaactctctggtgtgtttatgctcctctccatacacggcggcggcggtgatgatgtcgatgcttttggttttggtgctgtactctttcccagattggcagcttgctgcccacagcctagcggtcggctctctatttttggactcactgttgtctagccgcttgtttctt

SEQ ID NO: 28806 - DNA, 1620 bp, Zea Mays
ggaatgctccttgatagataataatataaccacagaaatccatcgacgaacaactgagaagagctgcgcctgcgcctgcgcctgcgggaaagggagaacatggtggggaagaagaggggtgttatctccccgctggaccatctcgctgggctgctggaggtgcgcgtggtgaggggagtggacctcgccatccgcgacctccgatccagcgacccctacgtcgtccttcgcatcggcaaggcgcagaaagtgaagacgcgagtggtcaagaagagcatcaatccggaatggaacgaaaaactcaccctctctattgaagaccctgccgttcctattagactggtacgccttcgcttccacctttccttcccgaactctacaagtattctgagcaaacgagtaacagaggaaataatttactgctagctagtagtaccaatctattactcgtcttccttgatatgtgcaggtgtagctgttagttgttatatgtacaatcaattgaacgaaacattcgtgagccatatatgtttcgtactacagtttttttaaaaaagattaaagttgttctgtacggtgagaaaatcacgtctctcctgatgtaatattagtgattatatatgctaactcagcatgcggtcactaccgaatgacttccatattatggaaattaactttgtctattcttacatgcacacttgtaatttgcctatgccagccaatacagttcagattaagccatatttacggtgttttaagcttttacgttgcacgcatcagtttcgtgagcctgcctgtggttttgatatttgagttgagtcccaagaactttcctagctcaaaaacactgattccaagtcctttcagaagactattttatagcctagcgattacacacccgtgacttcattttccaactctcttaaagagacagacgctcatgctgagtattgacaagtaataactctttctcatttttattttttcaggaagtatttgacaaggacactttcgttgatgatgcaatgggtaacgcggagctggacatccgcccgttagtcgagattgtgaagatgaagctccagggtgtcgctgacaaaacggtggtaaagaagctggtgcccaacagacagaactgcctagccgaggagagctccatatacatatcggaggggaaggtgaagcaagacctggtcgtacggctaaggaacgtagagtgtggcgaaatcgagctccaacttcagtgggtccacctccctggctctaagggtgtatgagaagagttatgagcgctgcctagcttgcactgctcaggttcttcgcttcacattaaagtaatctatttgaactgtagttgtaatctatagagataaaagcagtgtaaaaatagtagaaatcgttatggattaaagacagtcgacccagctcttgctagttgaaaagaacccagctcttgccatttgacatgttgatcatgtagcggtagccgaagaggatgcaatcctaaatggcccatgtgcattatagttctatcaaatagttatatttttttattacaagagatagtgacttgtatcgggctagagttcgtatttcaggaacaaggcaacttgcagaatc

SEQ ID NO: 28807 - DNA, 1804 bp, Zea Mays
cttcccacgtacacttctcacatgtggcaacctaggatatttctccatgcccctacccagccattcccctaaaaatctccagccgtctgtcttgctgctcgttcctgcagctcagacgtcgcctcccttctaccccttgctcctcagccaggcttgttagccgagcccctccaactagcgtgctagacctttgacgccgtttccccgtcgtccaagctccaccatgcccacacgtccgtcctgctcctccatgcacacgcccatgcatccttatctccctggaaacttcactcgtgtacggctccctggtgataatattcagcgatgcttcgccagggcaccgttcccctgcgcgctcgctggacgccgtcgcacatgctccctgctcggcctccccggcgtgctgctccctcgccttggtgcccctgcgagctccttctctctggcccggtttccagctcgggcctcgctagatgccgatgccgcttttctgacctcgtctcgatactcaatcgctgcagcacgccatgccgtgtgtgctgcactgtcatcattcgctatcctcatttttgctaatttttctcgtcgtttctcgtctacaaccttgtcagctcctgcgtgtcgtgcgcgtcttgtgttcgggtcgagccccaggattttgaggaaaaggaagctccagtgcattggccggtgaaatgaataaaatggattttgaagaaaaggaagctccaatgcatcagccggtgaaatgaataaaatggtggtaattatggtccttgtgaaatctgagatcaacttagtcgcgggtctcgctgccgcagaacgttgtcgcagaccgcttcaccgtcgaccctttgaactgcgtcatccccggttaatctcgcgcgcgtaccgacagcttcgaagaacacctagatgaggtggtacttgaagaagtctactccagtgcctgctcatcaagtggatggagctatctaactaaaggttaggtataaggatctagaatctcttctctgcaacaaaggcaagccccggtgcatttaccccttccttgtatttttaaaaagacttttatatactttaagtctagtgaaatgtgcattaagtttataggaattgattggaaactattggatgcattgactaccttgatatccattcctgttatatatacttctttcgaagtatcaaatattgtttacaaaaatgcttagccctgcttagatctggtggatagaggttgtcttttgcaataatgcctagctcaggggttatcctgaggacggatggcttctaccagcaagaatattttcattgggagcatggtgggatcttactacaaagttccctataatgctcttttcatcctaaggaacacaaaacaatcctaaggatggaagtacttaaatcgagacttgggctaggaacaggtgatgctcctcccagcacggcagccgctagatggcgggcttggcggcgctagggtgagggcgagaacaggcggcgctgggaggaagaggaattgatgtgagtggtgtcagcaaatactccagccgcaggacacggcatctcagcccatgagccgaaacgcaccgatcgggctcgtagtccaagcatagaaacctcctacccagaatgggctagattcaccctagaagaccggctcatctccagcaggccgtttatagttatagggtcatgtaaagtactattttgtactatagattacattgtttctagaataaaatttaaaatagagagtaaaatagggagtctgttggagatagtctaaagctttacgagc

SEQ ID NO: 28808 - DNA, 2682 bp, Zea Mays
gcgcatcatttggagtcttaaaaaatccaaatttctccactgttggatggctgttgggccggccgataaacaattttcccgttcgagcgtctcgcttctcccgttcccgatcccgatcccgatcccgatcccgatccctgcgtcctttcgcttatcccgttgatccggcgttcactcgtgcgatctcctgtggcgacaactgggcgatcgacgccgccgctgctgtcgccgtcctatacgagaggtgcgcaggcgttcgttggtcccttcgccaggcttttgtctacccttcgccgacgacgagcacaatttatttgcaggccagatttctttgtctgacttgtggaagcctcttacaactattgtacaaggctgctgtattgaagatgtctgagttccttgacctagagctacaagatgggataaggatgccctggaatgttattccaggcacaaaacaggagactgtgaactgtgtgattcctgtttccgctatctacacacctttgaaaccaatttctgatatccctgttcttccatattcacctcttcgctgtcgcatgtgtcgttccatcctcaaccctttctccattgttgactatgttgctaagatttgggtctgttcattctgctttcaacgcaaccagttccctcaacactactcttcgatctcagaaaataatctccctgcggaactctttcctcagtacaccaccgtcgagtacatatcttcaactgaaactggtcctatagttccaccggttttcatttttgttgtagatacttgcatgattgaagaagaaattggttatttgaagtctgcactggcacaagctgttgagctattgccagataattctcttgttggattcattacgttcgggacgtatgtgcaggttcatgaattgggttttggcttattgccaaaatcatatgtattcaaaggaacaaaggaggtcaccaaggagcaaatattggaacaaatgtgcttttttgcggggaagaaaatgcctaccacaggcgtgattgctggtaccagagatggcctttcatctgagagcatctctagatttctgctgcctgcttctgaatgcgagtttgtattgaactcagttatagaagaaatacaaaaggacccttggcctgttccagctgatcagcgtgcatctaggtgcactggagctgccttaagtgttgcagccaatctccttggggtttgtgttcctggatcaggtgctaggataatggcatttgttggtggtccatctacggagggccctggtcctattgtatccaaatccttatcagagcccattcgttcacacaaagaccttgataaagactcggcaccactctatgataaagctgttaagttttatgatcaaattgcaaagcagcttgtgcaccaagggcatgtgctggatttgtttgcttgtgcagttgaccaggttggagtcgctgaaatgaaggttgcgattgagaagactggaggaattgttgtccttgctgaaagttttggtcattctgttttcaaagactcacttctccgcatctttcagtcaacagatgacaaccttggtttatcattcaatggtattcttgaaattaactgttcaaaggatgtaaaggttcaaggcatcattggaccctgttcttccctggagaagaaaagtcctttgtcttccgacactgttattggtcaaggaaacactagcgcttggaagatgtgcggccttgacaggaagacatcactttgcttggtatatgatattgcaaaaaaagatggcccagattcaattgctcaatcagcaaacaatcagttctacttccagttcttaacctactatcagcataatgagggtcagatgagattaagatcgaccacaatctccagaagatgggtctctggtgacaaccatgtggaggaactagtagctggctttgatcaagaagctgcagctgcagtcatggcacgcttggtgtcatttaagatggaaactgaggttgattttgacccagtaaggtggcttgatcgagctttgatacgtttatgctcaaaatttggagattatcagaaggagacaccctcatcgttcagtttatccccacggctatcaatatttccccaatttatatttaatttgaggcgttctcagtttgttcaggtttttaataacagtcctgatgaaactgcgtattttaggatgatgttggacagagagaatgtaaccaatacagttgtgatgattcaaccttcacttatatcctattcatttcaatcagggccagagccagttctcttggatgcaactgcaattgcttctgacaagatccttttattggactcttattttactgttgtcatattccatggggtaaccattgcgcagtggcgaaatgctggctaccaagatcaagaaggtcacgaggtttttgctcagttgttaaaagctccacatgaggaagctaatttaataataaaggagcgatttcctgtaccccgtttggtagtctgtgatcaatatggatctcaggctcgatttttactggcgaagttaaatccatcagtgacatataactcggacaatccctcccctggtggagacgtcatattcacagatgatagagaaaattgagtcgtggcgagctaggcccactgtgtcacacctaaagcccagggac

SEQ ID NO: 28809 - DNA, 2563 bp, Zea Mays
cgcgcccggcctctccttcctccccggttccttcccttgccacacgcgtgcgtgcgtgcgcgcgcgcgggcgcacaaataatcacgaggaccccgcgaggccgcgccaccattattccacttgcctgactcctctccctccctctctctctctctatctctcatttcctcacgcacgtctcgcaactgccgcggcacaccgcgccgcttcttctcctcctcctcctcctcctccttccgagccgagagaaaggctgctgccagagggacgaggacgagcgaggatccttccgagcgatggagcagtacgaggtggtggagcagatcggccggggcgcctacggctccgcctacctcgtcctccacaaggccgagcgcaagaggtacgtcatgaagaagatccgcctctccaagcagaacgacaagttccagcggaccgcttaccaggagatgtccctgatggcaagcctcagcaacccgtacatcgtcgagtacaaggacggatgggtggacgaggggacctccgtctgcatcgtcacaagctactgcgaaggaggggacatggccgagaggatcaagaaggcaaggggcatcctattctcagaagagagggtgtgtcggtggttcacgcaattgctcctcgccctcgactacctgcactgcaaccgtgtgctccaccgtgatctcaagtgttccaacattttattgacaagggataacaatatcagactcgctgactttgggctggcaaaactgctcatggaggaccttgcctcatcggtaggaataggatccacacttttcgttggagcatttttaatgtaaatcagtatataataatacaggcaaaaaacacatttccgggttggaattaggaaactggacacaactcttccactagtcatgttttcccacaccgaatcacggcacgatgttatcaccagtatgtctgtatgacatttgatattcagtgacatttttacagctcatgttaaccaaaaaagagtagcatgaaagtaaatgccatttcaaaaattagttggcagaatttctgcatatccccactatatgctaacgtccaagagcgtgttagtaatgttttgacataaaacccataattcactgataattttaacatttaccacatttcaggttgtaggaaccccaaactatatgtgcccagaaatactagcagacataccttatggatacaaatccgatatatggtcacttggttgctgtatgtttgagattttagcacaccgacctgcatttaaagctacagacatggcagcattagtcaacaaaataaacagatcttcaatatctccaatgcccccaatatactcatcagcactgaagcagatcgtgaagagcatgctaaggaaaaatccagaacataggcctactgctggggagctgctgaggcatccacatctgcaaccatatctttctgaatcgtccaactgttcaccgatctatcttccggtgaaacccaccaaaggtaacctggtagacaagcagtcaaagaagccaagcagtggcagaaagcgagctgtcaaagccaatggatccaatggaacattagaaactgcagcagagcacgctgtggaagcaagagacagctccacaaacttctcagatgtatcaactataggtacccaggaagccttgatattgcaaatgccggtggatcctgatgccggaagcaaagaagagcagaacgttgatgttgtaccgtttcagcatgcggcagagaatctgatggcgacaaccgatagacaggtcgatgcgaccatacgtcttaaagccataagaaccagtaacgcaaaagaggcggccccggtcacagttgcagaccaaaagttcaacgaggcgccaataccaaatgaggaactgacaatcggggtagtgcaggaacaaaggaaggacgtgaagccacgctcttaccaggcaggaaaaccagagatgtgtgacacaaccgtaacggaggaatcgtcgcccatcagcacgctaaagctggcgcacacggagagcgcgcccgcggagtgggaccacctgaacatagtccagcagagggccgacgcgctggagtcgctcctggagctctgcgcgaagctcctggagcaggagaggctcgacgagctcgcgggcgttctccggccgttcggcgagggcgccgtgtcgtctagggagacggcgatctggctgaccaagagcctgatgacccccccacccaagttcggagagtccccgacgaagcttttgtaaaacagtgattcgtttgagagtttttgtttttttttcgagtgccattttcgagagtgtacatagcatcaacagaatttgagttcaagattgctgtgcttacctaggcctgagctttatttatcttggatgtatatggtttgcatggcaccgactgttgtgagcgatgactggttatttaccagccgccttgttttatttattgtgctggaaatcatgccgagtccatttctgtttactgagtactagtagtactttcataagagctgtgtgtgaatggttggccacgtgtagtt

SEQ ID NO: 28810 - DNA, 1638 bp, Zea Mays
tccgcgctcgtcccggccaccgccgccgcactctcacggtcccacctctctgtggcatgagaagatggtcgcgtgctccaggggactcgcgtggccgccgttcgatctgaccacggcgaggggggcggcgtcctggccgcgccggcgtgccgcgatccggtgctgctgcgccggagcagacgcacagccgcagaggcgactctcgagggcggccgcggtcgcgcccgagcgcgccgaggagtggcgcatcgatgggaacaagccgtccgccgcggcaccgggacggcggcgcaccagcctcaccgccatgcccccgctccccttccctgcacctcgctctagaagacaggtcaagcaaccggacttctacccgcggtgcactccgagggggtcggctcctcaatcccgtgataccccgcccaagagagacactggtattgctagtgagaaggaatggggaatcaacttgctggacgaagccgtcaaggagtctggaataaatgaagatggaagcacttggtacagggagagtggagatgatattggcgagaacgggtaccgctgccgctgggcaagaatgggaggacagagccatgatggttccaccgaatggaaagagacttggtgggagaaaagtgactggactggatataaggaattaggtgcggagaaatctgggaggaatgctgaaggagattcttggtgggagaaatggaaagaagttctgtaccaagacgaatggagcaatcttgcaagaatagagagaagtgctgagaaacaagcaaaatcaggcatagaaaatgctgggtggtacgagaaatggtgggagaaatatgatgccaaaggttggacagaaaaaggtgctcacaaatatggaagattgaatgagcagtcctggtgggagagatggggtgaacattatgatggccgtggatttgttttgaaatgataagtgggcagagacagacttaggcaccaaatggggggacaagtgggaggagaaattctttgcaggaattggttctcgacaaggggagacatggcatgtatgtcctggcggtgaacgttggtcaagaacctggggagaagaacactttggtaacggaaaagtccacaagtatggaaagagcacaaccggcgagaggtgggacttggtagtcgacgaggagacatactacgaggcggagccccattacggatgggccgatgtcgtcggagactcgacgcagctgctgtccatacagcccgtggagaggccacccggcgtgttcccggccatcgacttcagctccgcgccgccgccgaaggacgctccgccgggcatgcccccttctcctctggactgagtgaattaggcctgccagcacagacggatttttctgtctatataggctccagattttgcctgtaagggaacagcattctttgtaggaagttgacggaaccccgttcctgcgttcattggttggctcattctttgctacgcattcctttcctctggctgggatatatatatattttgcttgggaactgggtggatgcaataatcaaacggcgcccgtggttgtgtgtgttgcccctgtccccctatgtgcttgcaacttggtctgaaggcagtgtggtctgggcaaagctttc

SEQ ID NO: 28811 - DNA, 1382 bp, Zea Mays
tgccttcatatgtacaaccccagaggtgcatgcagtaacagctcaaggcacatggggtcgtcaagccatcgcagcccgcaggtgaaagggcctaagcgtattggggcactctatgttacctgccagctattcaaaatttacttcaggcttggaacagtaaacctttgccgtagtgtcataagaagtatcgaaactgcaaggaattttgattttgaagactttccagtgaaagacaaggtcacttatatgtactacactgggcggttggaggtgtttaacgagaactttcttgttgcagatcagaagctaacttatgctttgatgcattgcaatcctcaaagcgagtcaaatttgaggagaattttgaagttccttatccctgtaaagctttcaataggtgtactgccaaaaaggactcttttggagcggtatagtttgcttgagtatgcagatgttgtcactgcacttaagagaggagatctcaggcttctcaggcaagctctagacaggcacgaagaccaatttttgaaatctggcgtctaccttgtactggagaaacttgaacttcaagtctatcagagattagttaagaaaatccacatcattcagagacagaaggaaccagctaaggcacatcagattaagctagatgttgtcgtaaaagctctgaaatggcttgaaatcgacatggatgtggatgaggtggagtgcatcatggcatgccttatatacaagaaccttataaaagggtactttgctcacaagagtaaggtccttgtcctcagcaaacaagaccccttccccaagttgaacgggaagcctgtttaaatacaattgtcacggagaaatcctgtaatacaatggtattttttttgtttagtatgcagagatgctttccatattaagtgaaactccaagcctgacaaggacatttagggcctgatcggttataccggaataagccaggattcattctagctcatcaaaatctatataaggccttgttcgtttgtgccggattggtgggtcggaacgattcctaaccggattgtttctctaaattatataaactttgattagctgaaacgatttcgggtgcaatccgacacaaacgaacaaggcctaaattagagaagtaatccagctaggaattaatccgggactccaatcccaaacaaccgaacaaggccttatatttaatcacctctggatgtaatgtaacctgtatcattattgcctcattgaccttcattttccatacgcgaatgcgctatgtttatttttctatcatgtttagaagagagttcttgtccggtacccaggtcagcaaaatcacttaaggccttgttcggttattcccaatacacatggattggatgtga

SEQ ID NO: 28812 - DNA, 1829 bp, Zea Mays
atggcgaggacgcgctccggaataccagatgagcgaagccactcgacggggataccacaatcccaaaaggctcgccaaaaccccctcggcggttacccttctctcccgatggcaaccgccgccgccgccgccgtggcggcacccgagcagccgcgtcgccggaagccggcgccggggcgtgggggcgtggccctccctgcgggactctcggaagaggaggccagggtgcgggccatcgccgagatcgtctcggcgatgggggagctctcgcggcgcggggaggatgtggaccttaactcgctcaagtctgccgcgtgccggagatacggtctggcgcgggcgcccaagctagtggagatgatcgccgccgtgcccgaggccgaccgtgccacgctgcttccgcggttgcgcgctaagcccgtgcgcacggcgtcgggtatcgccgtcgtcgccgtcatgtcgaagccgcaccgttgcccacacatcgccaccaccgggaacatctgtgtctactgccccggcggtcccgattccgacttcgagtacagcacgcaatcctacacgggatacgagcccaccagcatgcgtgccattcgggcaaggtataatccatatgtgcaagccaggagcaggatagatcagctcaagaggctagggcatagcgtggataaggtcgaattcatcttgatgggtgggactttcatgtccttaccagctgaatatcgtgattatttcatcagaaatcttcatgatgctttatcgggtcacacttctgcaaatgttgaggaggctatttgttattcggaacatagtgctgtcaaatgtattggtatgacgattgagacgagacctgattattgcttggggcctcatctgcgccagatgctatcttatggttgtacccgcttggaaattggtgtccagagtacatatgaggatgttgcccgtgacacaaacagaggacacacagtggctgctgttgctgattgcttctgtttggcaaaagatgctgggtttaaggtggttgcccacatgatgccagatttacctaatgttggagttgaaagagatttggaaagtttcagagaattttttggaagtccagcgttccgggctgatggtctgaagatttatccaacacttgtgattcgtggaactggtctttatgagctctggaaaactggcagatatagaaattatccacctgagctgttggtggatattgtggcaagaattctgtctttggtaccaccttggacacgagtgtatcgggtccagagagatattcctatgcctcttgttacttctggtgtcgagaaaggtaaccttcgcgagcttgctttggctcgaatggaagatctgggcttaaaatgccgggacgtcagaacccgtgaggcagggattcaggatatccatcacaagatccggccagatgaagtagagcttgtcagacgtgactatgctgcaaatgagggttgggaaacattcctctcttatgaggatacacgacaggatatcctgatcgggctgttgcgcttgcgtaaatgtggccgtaatgttacatgccctgaacttgtagggaggtgttcaattgtgcgtgagcttcatgtctatggaactgcagtccctgtgcatggccgtgatgtggacaaactgcagcaccagggatacggaactctattaatggaagaagcagaaaggattgctcgaaaggagcaccgatcgaagaaattagctgtcatttcggggcaactgtgatatgtagtcaggttactccttatttggtgttcaaaacccgttatccatgaatgaaggaaacaatcaattca

SEQ ID NO: 28813 - DNA, 2786 bp, Zea Mays
cgtcattcttatctcctcctcccgtcgttctccctctccctctccctctccctgatattatctcacgcgcgtgcagcaagcccagcccagccgctcccttcctccagctccctctaccggtcgccaggaccatagctcggtctccactacaagcaatgaacgtccttgccctctccctcccctgtttccatggccgcgcacaaagctcctctgctggcgcgcccaagctccatctcacagcgcgccctctccgtggaagcttgcatcacgccccctctgctcgcctctggctcggatggcgcccccaggtcccaggttgctcggtatcaagcctccctacgcacagcttctcctgtccagcctcttcccaagccaccatctctagccgtcctgtggagcgccaactgcgtctcttcccacgtctaagctccagatctcatccatgacttcctccctggttcgctggtctgcgtgtccctgcttgccatggctgccggtcagcccttgcgacgctccagctcggattcagctcagctcgcccaagtcactcatggccgcacacggtgttcttgtcgacgttgtgctcgtcgggattagcctatgcgcgtccctgctcccttgcgcgcgcacgctcctgctgagctcggccgtgtccatttcgccgcgctcggtctctagctccctgtgcgtgccgttgcaagctcgtcagccaccgttgtcttgtcacagaacccccaacgccgtcatccatggtcgcgacctcgccaaatgcgttcgtcgcttgacctagtgtcgtttggctcgtcgaccttgtccgctgccacgtgcacttgttcctaagacgcatcacgcagtagttggatctcgcgcgcgtggttttgaagctctgcgcgttcgttgtgccgcgtcatgtgccgatattctctcccggcagacctcgccgtcgaccatgttcaagtgattgctcggctcctcgcatcccgcctattcgataaaaacacctgaatccatagattgtcgacacactgctgccatacacggctgtcttcgtcacttgcgtcagctcgccagacctgcagctctatatacgtcaccctcttgtatcgtcgtcgatcccgtcgaacctcgttcttccctgcccgacctcgtcgaacctcgaatcctagacgttaggcaaaaataagcaaggtccctatgcatcgcttatcaagtgctcagtctaagacttcaatcgaaggtcatcgtcgttcgggcatccctaagaatcgggtgaagacgaagctagcagggtgatattcaccaattgctcgacaaaagctcgaacaagtcgtcgatcgtcatcctcgtctacgccaagctttgagaagatgcgcagaagaaaataaatcagtacacggtcggagaatactcgatgcggataaagatgaagcacgatttgacgcagcactcaccctattttcggtgaaatgtggagctgaaaggcgtcgtcgatttcgaggtttcaagtcggatgtcataagggtaagttgattcgtattccagtcaactaggtctataaatagattaaatagaattgttggtcacaataaaggttattaatttagcatgcgtatattgtgatgatcgatttagataaatcgataaatcaagtaattaagatgcacagtttaaagagttaataaaaagctaggaataaaaatagatgttctagtgttattatgtcaatttggttaatggatgtagtcgatgccctgctgtgatatccatgatgcttaatgcttggttttaagtgtttcatccttttagtgtagattatctatattatactcgttatactcgtgctcatacatgtgcatcgtgcatctcatgaggtacaataaataatcgcgtgatgcggaagacgagccaagtcgaccccaagcgcgggctaatccgcaggatgaagctgatggaccaacctgaagatagttaaattaagcaagtgctcggtcgagggatactcctcaagcggatgtcgtctaacaaacactaacgtagtgtttattccaggcaagccccggtgcatttgccccttgtgttttaaatgctttttcaccctaactgatgcattaggtgatagaagttgtgtgataaacaattgatgcattactattccttggaaactccttaatcccggttttataaaaagaactgataatgcttagccctgcttagaaactgaaaaatcatttgttttcaaaaagaatgattgtggaacattggttatgggcctttcgtttcaaaaatcaaagcaaacttatggtgatgattccacttcagccggagtgggttcatcattcggaaaagagtacccctgtcgggtaccaaaaatgggaaaatggtttgaatacatctataccagacgctaagcggacatggtcgcccgtctgtgtcgattaaggaccattcgatgtaggcctattatggtggagactttgcaactatccacatgctccgctaagcctaaacctggctattccatacgtgaaaaagacaaccgcgcactggacgtgggagatggtgggagtagcgtgtaccctcctagctagaggcttgatggaggagtattgtgctcccgtgtagcgcggaccggttcacgttgtggaggatccatgggaatggttgacatatgcaagggttaagtgctacatatgtcgtgtggttagggacccacagctgggtataattggttcgaatcgtcgttgctcctcggtcatggagactctaccctccgaccactcatcgta

SEQ ID NO: 28814 - DNA, 510 bp, Zea Mays
cctgttcgtgcgacgaacattgtgctggccgccattgctgctcaccagagatcccgcggatggcttcatgccggtggactcggtaacgaaccgcgaatatcacgccggggccgcgccatcccggaagtatttaaccctctcgcagctacctctcccctgtttcctatcttccgcgctcgcaccgccctgcaatgtgccgccaccgtggaactcgcctgcgccaccacttcgggactcaccaagcagtcgaggtgtgttgctaggtcacctcgcatcggtccggggctctttctggcgaggattgcatccggactggggggaattcctcgccgcacttgctgccccgtcgtagaacctgctcgcgctgtagcccgactcctctgcgacgtcattgccggtaagatgcccttggccatgttcgccgtcattactgccttgcgtagcattcatcgaatcggtgtttgggcgcgtggttcggagtttgggtgacgccggccatggcgctgccac

SEQ ID NO: 28815 - DNA, 528 bp, Zea Mays
cacacgtgacgctatctgtgtaaatctcacttctacgaagcgcgtagcataactccttgtcctccagtcctcctcccctccgcggcttctcgcagtgcttcgtgaatcctaaattcacgccgatccgacgcgaatcgatcgagaggcaggaggcagcacgattcggatcgagacgagcgccatgaacccgagaggggcccgttgtggatggatcacacgcgattagtgcgatcggtacgctgtgattgttaaggattaagacgatgtgctgctgtctacttaccttggcttgtagataattcagttgttgtctcaaaattatggttgaggaattccttccaaagacaaatcgattgctgtattggacagtttcatttccccaactctaagtttgttgtttgtttgaggatcacgaatctaggtttatcagacatggaagttggtttcacgtgattattgaatgggcttgttttgcttatctgtctcaagagagaagagaccaataaatttgtaacttgggactctaag

SEQ ID NO: 28816 - DNA, 2755 bp, Zea Mays
gaagatcgggcgtcgcccgtccgtctcctctccccgctccgctggtcgccttctcccctccccgcgaactcgggctcaaagcaaaccaaaccccttctagggtttgcgctccgggcatgatccccttgtagccaccgcctcccatggccctagccgtgtcctgctggccatgaccacctcggcttccccactcttccccaacccgcgcaagcgccacctcgacgcctccccccttccccgccacttccacggcccgcagagccaaacccgcctaagccagcgccaccgccgccggttcttcttgccgctaccaccgaaggcgcggtccttcgcttccgacatgggaaatcacatgtccagtgccttcggttggcccagtgatgacgggcgggggctcctctgttgctggatcggcaaggcgcggggtctcacggtggccatggatgtggaggcggggacgggactgcatttggtggaccggcggagggttacggattcgaggaagactacgttgaaggaggaggcggtgaagcctccccaatggaagaaaaggaggcccttctacaaggaggcgttggaggcagcagcgacacattacgatccgaggctggaggcaatcgggatcgagataaggctccaaaaggagaagcttgcctatataccaaagtcggataaggctgccaaggaggatatgtctgaactatttaaacctctcactgctgaggaggaaaatgatgttcatgactgtctctacagtagaggctcgagtagcaaagttctagtgctgcatgaaccatctaacattgaggttagcaaagagaaattccagtgcttgagacgtggctgctggttaaatgatgaggttattaatctgtaccttgaattgttgaaggagcgagaaaaaagagaaccaaacaggatgtttgcatcttttttccgtactaaaattggcatttttttgtgtatcctccttgaagaagttttttgttttgtttctaaatgaactagttgatgttgaattgttgattgaattttcagtattagctcttataagaaatgtagatgacgtaatcaaatttgaatgatagcatatcatagtttagttttgtggtggttcatttattacatcaagtattaatccctcttatttataaatgtgttaatagcttggataattagttgtcaagttgtacatttggctgctaattctgcacaaatctatatctgttatgaacttgcattactaatttatatatggtagttgctatagttttaatgtgatcgatttgtaatggtatgtggtcgtatagttaggaaagtttaattacatattttccatggcggtttacatttgtagatataattggcatcctgaatctctgagttgttcgacactttaccttcttggtttcttagatcgtattatctacccaaaccccttagattgcattattattacttgatttgctttcttggttccttatactatactatcttgctttgcacttttgtttggtattgtatactgataatatttgatatatctttgtttcttgtttggtgtacccaaattgtatttaatgaaatcacatattggcctctgtatatcagttattagctatgttcacttttgtttaaacccctttctcactgatgacatggacttctgccttgcatgtatctgccttcgtttattgttcatggatttttttttgcctatgaatgttgatccttactgacttcctgaatgttactcagcttgcttgtggaaaaaatggttatgattacaaatctgttaaaagatggacctcccaaaggaagttgggatatgaactcattgaatgcgataaagtaatgtaaatgttgcattctttttttacttgttcctacctttgtgtggcttgtgtttttctcatgttgctttctgaatttctttatagatatttgtccctgtgcataaagatgtacattggtgtttagcaattataaacgtgaaggaaaatttctttcagtatcttgattcccttggtggcatggatcataatgtaccaaaagtactggctcgatatatttcagaggaagtgaaggacaaaagtaacagagtaatcaacaccagtttgtggcatgaagagctagttgatattcctttacagcggaatgggtgggactgcggtatgtttatgctcaagtacattgatttccacagcagaggactgcccctgtcttttagtcaggaacacatggagtattttaggaagaggacagcgaaggagatcttaagactaagagctgactgatggatagacattcatcactttttggaacagaggctgactttttttactgcattttggggattataataaataaaagctgctaagtcaagtctatggcattgttgagcatgctcagggtggggtcatctacctgagatggttggtaatgtggccctgataatgtaaatactatagatattctgtagagaaattttgtttagggatttatttgactcggagaagcagtgaggggggaaatagatgtagctacgctgatattcgttgttggtttaaagttgtttcagattaatttgttcttgtggaattattttgcagccatggttgtcatacttaagttacccttgaatctccttggagaatagttgtatccgaaatctaatttagcgctaaagggttggctgccctggtctggcctagacggtggactgatgtcaggacttttacattaaggaagggcg

SEQ ID NO: 28817 - DNA, 244 bp, Zea Mays
gtattcctcaaagttcaaattcacatttgctctccattcctctcggcaagcctccacactttgatggggaggactacggattttggagtcacaaaatgcgtagtcacctattctctctccatccaagcatatgggagattgtcgaaaatggaatgaaatttgatagctcggatagtcccatttttattaatgaacagatccatagaaatgcacaagctactactgtgttgttagcctccttgtg

SEQ ID NO: 28818 - DNA, 3507 bp, Zea Mays
gtcccacaaaaccactacgccgactcgccgaggctgcgagggagaacccagcagctcccattaatggactgcgcaacagcttaaactccgccgcccatttcaaacagaaccgaaccggccgcagcatcgcagcgcagcggtacgcgcctcggaggtggagggaatgtcggaggcggtggcgatcctctcgctctccgcgtccgccgtggtagaagacgtgctgcggcagcacgggtgccgcctcagcgaccgcgacctcgcgtcccgcagggccgaggaagctgcggggaggaggaacgaggcggcgggatggctgcgccgcacggtgggggccgttgccgcgcgcgatcttccggaggagccgtcggaggaggagtttcgcctcggcctccgcaacggccagatcctctgcggcgcgcttaatcgtgtccacccgggcgccgtcccgaaggcaagcgctccttgtgccgacggcgcggcgctgtcggcgtttcagtacttcgagaacgtgcgcaacttcctggtggcggcgcaggagatcggcctgccgtgctttgaggcctccgatttggagcagggagggaagagcgccagggtggtgaactgcgtcctcgcactgaagtcgtacggtgactggaagcaatgcggtggcaccgggccgtggaagtacggcgggaatcttaagccatcggtatccggcaagtccggccacgggaggaagaactctgaaccgttccggaggagccaatcgatcaatgaaggtgaagtgccctatgaggaagctgggttcaacggcgacgctcattttgattccagtgacatgtcaacatcccgcccccttaaaatgttggtcagtgcagttttgtccgacaaaaggccagatgaagttccacagctcttggagtccatgctgagcaaacttgttgaagaatttgaaaatcgtctaaacagccaaaatgaattggtcaaagcggctctaaaaagtggtattgataacaccaaatcattttcaaaatcaaaggtcctggttgagacccctcctaatactagtgggagaaagatggatacaggagatatttactgtaaccacaaaaaaacaaaaaaagaagcatcaagagaagtggcactgaagcaacatttaattttacaacaacagtcaaagaatgttgaggaacttaagagtgatctgataactacaagggcgggtatggagtatatgcaaatgaagtactctgaggatctcaaccttcttggcacctgtttagcttggctcatgctgcttctggttatcacaaagttcttgaagaaaatagaaaactatacaaccaggtgcaggatcttaaaggaagtatcagggtatattgtagggtgcgtccctttttgcctggacaagcaagtccgtccactgtgggttccatcgacgagggcaacataaccattgtcaccccttccaagtctggaaaggaaggccggaaaacttttagcttcaataaggtttttggcccatcagcaacacaagctgaggtgttcttggatactcaacccctcattcgctcggtccttgatggatacaatgtttgtatcttcgcatatggccaaaccggatcagggaagacatacacgatgagtgggcccaagaacatgactgagcaaacccaaggcgtcaactatcgggcacttggtgatctatttaagcttgctgaacaaaggaaaggaaccttcatttatgatattgctgtacaaatgattgagatttacaatgaacaagttagggatctccttgtcagtgatggtctcaacaaaaaattagagattcggaataattctcaaaatgggctaaatgttccggatgcaagccttgttcgtgtggcatcaacaatggatgtcatggaattgatgaatgttgggcaaaagaatcgtgctgttggcgcgactgcactaaatgacaggagtagtcgttcccacagttgtttaactgttcatgttcagggaagggatctgacatcagggacaatctttcgtggttgcatgcatctagttgatcttgctggaagtgaacgggttgataaatcagaggtcactggagaaaggttaaaagaagcacaacatataaacaaatcattgtcagccttaggggatgtaattgcttcgcttgcccaaaagaattcacatgtaccttacaggaatagtaaattaacacaacttctccaagattcacttggaggtcaggccaaaaccttgatgtttgttcatataagcccagaaagtgatgctgtaggagaaaccatcagcaccttgaagtttgctgagcgtgtgtcaactgttgaacttggtgctgctcgattaaataaagaatctggagaagttagagagcttaaagagcagattgctcgacttaaatcagcattagctgcgaaaaatttaggatcggagcaaatcatcagtcatgactctgaggcatttaatataaagatgccttcgcctggtttttcaaacacacgacagggtagctgtgatctactctctagccaaagtaacttcagacaaccaatggaggatgttggaaacatagaggctagagccaatcatacactgaggcaaaagaaaccaagctttgatctccaggatttattaacagcaagtgattctccttcatggccagatagcaatttgagggtaaattttcagatgggagatgaaagagaagcaattggtggggactggatagataaggttgtagtgaacaacaataattcagccagtgattgggagggtgacaacacagctttacctgactttttttaccagagatatcattcaggtatgagggagaagcagtaccagaggaacaacatgagacaaaaggatgaccacgagtatgaacagcaaaggcctcgattttactctacaaatactgatgattctgatgacattgacatagcaacaagtgattcctcagaatcagatgcattatggcagctcaatgtccaaagcatgaataactcaattagtgagagtggttcaaaggttaagaaaccacaaataaagcttagagatggttcagatgccaggacaccgattcattctcaaataccatcagggtcgagaaaagtcgcaaacggttcgagtagatctgttaggcagcctttaagcagaagcgacagcagaaggctttcatcaaatggaagacaaactggtgcaaagtagggacttacaatgatcgcgtgcagtttttgcctttttcttttctgtgtttgtcacgagagattgtgaggttgctctcgagtacagcaatgagtgacaataaacccaattgagtgtgtcagtgtggtgagttgtgatctcaacaactggtgtgtgaggccattaactttttttccttattggcttatcaggctacgttgagttcttgctaattctctgtatcttgtccataatataaatacataatgaaaagaaaggaaattgattgatcaaaagctggtgcctaataattttttatactcg

SEQ ID NO: 28819 - DNA, 1146 bp, Zea Mays
cgagcaccaaaaataggagaagacaaaatcacatattaccaggatggagagggatcaaagaaccgagacgccagattaactgcaaagttttcctccccagggttagcagggggaggagtgcttcctgaaggatcctgggggggataatatgaagagggacccggatcaccctggtggggaggcgggaaaactgatccctatcatcaaagaactcttcttattcaatatcttcatcttcagcagacatgaatggaacaccataagtttgttggtgacattcattgatttctggagggggtgcatggagaggcacgtcgagcgagcggggagcaaaaggatttcccatggagatagactgacgacggagattgtcatccatctcccgctgtcgcctggccagctcatgaacgtcagcagaaatgttcctgcacatagagaaaaaggttgcaatcccatgagccaacctggctcccatgccgcgaccacgacctcgaccatgaccacgaccacatggagtgggagagccacgaccaggagaatgatgggagggactagctgaggtctgctcgcgagagctggcaggagccttccccaaccgccctactagattattggggtcaatccaaaaaggggtataggaaagatgtctggtgcccttttcatatctgaattgggtgacaacctcaatcattttcatgatgtagggggcatgcagacaaccctttagtgggaagcaagaggcatgcatgatttcttgacagatcatatcaaacatattcaatctctcacagctattgggcttcatgaaagagagaagaaccttgctttcacccagaatgttcatttgatttccccctttgggaatgagagtcatcctgaaaagagagttgagatacatgtagtacttatgcaaatttgtggatttctagtactcgtcattttcagaaatatgtagatctttggcctcagccctggtgggagggcaaaaatcatgaattttgatcttatctccagcaatatcattatcagtgaatcccaaaatatgagcaaatcttctatagctgaccttgtaccagctcccttcaataaaaaagttcatataaggaaagttgtagggactttcctcatctgcatgcttgatccaca

SEQ ID NO: 28820 - DNA, 327 bp, Zea Mays
atcaaatccaacctctaatcctttaattcccatgatccacaacctccaaaagcctataattacagggaggaacaaggatctcatccatacctagggtttccccaagaaatcttcaagagaagatggagaagaacatctccttgatcctctcttcctcttcaattcaacgtgcccctccttttctcgatccttgctgcgtagggggagatcttgggggaggaagcaatggaggatggctgccatagggggagggggcgtccagccaagggggagaaaaagggggtggcggccaagaggggggggtgaagggaaaaaaaggggtggcca

SEQ ID NO: 28821 - DNA, 2545 bp, Zea Mays
cttcagtcgaggacacgagcgaatagcaaccgactcgtcctcttcatctcaattctctgcgtcgtcgcttatctgtcctgccgtcccttcatctgccgtgcagcagatcaagggagagcggtgtctgcgaaccgccgccgacgttttgacgacctgcaccgctgcacgggtgccggcaaatcaggcaggaagttctggggcttcccgttcttcgcggggagctgcgcaagtggacacaaggcagtgctgaatcagaggtcggatgtggctgagctgtgctctcagatggtgcggaagcttcgcgatgtgtatgatcccaacaacaagatagacgtgaaggttaagatcctgtccgggtcacctcccggcgccgtggccaaggaatccaagcgggtgcaagcagcctgggttgtgctggacaaggagctgaagcacgaggagaagcgctgcatggaggagctgcagtgcaacatcgtggctatgaagcgctcccaacccaaagttcttcggctgaacctggtgggatcgcattcgcatgagagggaagagtcgtccagaccacctcctcctccggcgccatcgccaccgccacctgagccgagcacgagtccgagtccgagccgagtgccatcgtcagcgacacctagcagcagcccagagtcagaagaagcgcccttcgacactagtaccaccgacgtcggagcgtcctgcgtctcgagctccgattcggacacgaacagcttttcgacgaataaagggacgacgacgacgacaacgacagcggcggccaaggacagcgtccagcgctcggacgccgactctgagagtgaggcttcgtcgctggagccatggatggctaccattttattacagacgcctgcagataggctagtcggaaaccggcccaggcccaggaggacgcccaccgcagactctctgctcgagaagatcgccaagctggacctcctgactgagatcagcgcgatccggagcaggtccgacctgaacttcagagggaacgtgagggacgccgtcgcgttggacaggagcgcgccgccggggcctccgcctttgtgctccatctgccagcacaaggcccccgtgttcgggaagccgccgcggtggttcagctacgcggagctggaggtcgcgaccggcggcttctcccgcgccaacttcttggccgaaggcgggttcgggtccgtccacagaggcgtccttccagacggccgggccgtcgccgtgaagcagcacaggctcgctagctcacagggcgacgtggagttctgctccgaggtggaggtcctgagctgcgcgcagcaccgcaatgtcgtcatgctgattggcttctgcgtcgagaataagaggcggttgcttgtgtacgagtacatctgcaatggatcgctggacacacacctttatgaccgtaacaaagaaacgctggagtgggctgccagacacaagattgcagtaggagccgccagaggcctgcgctacctccacgaagagtgtagggtgggctgtataatacaccgtgacatgagaccgaacaacatccttgtcacacacgatttcgaaccactggttggagatttcggcttggctaggtggcaacctgatggcgacatgggtgttgagacaagagtcattggcacattcggctatctggcgcccgagtatgctcagagtgggcaaataacggagaaggcagatgtctactcgttcggggttgtactagtggaacttgtaactggacggaaggctgtggacatcaacaggcccaagggccagcaattcctaaccgaatgggctcggcctctgctggaagagtgcgccatggacgagctgctggaccctcgcctgggagggcgcttctgcgagaacgaggtctactgcatggtgcacgcggcaaacctgtgcatacggcgtgaccctcatctcaggccgcgcatgtcccatgttctgcgcatactggagggcgggggcggcgacatggtggtggactcagctggcagcaggagctggcggatgcagcagcaccagcgttggcaggagcagagcagcccagcagctcaacgtgattcatcacagcgtgggcaggagactgcgggaagcccgtggagtcgagaacgaaggcagaacttgtgccatagatactagctagctagctagtatccctttcacttctccgggggatctgtgttgctgctgttcttgttcttgatgatttttttggctactagatggatgaactagtgtgtgtatagtggtggagattgtagtggtaggctcacattacgttacatatttttcacatattgttgtcatgaggcgtgcatggtttgtgcatcaccacgtgtccataaaaggacctcctgaactatgtatgggtgttcttgcttgcaggccttgtactgcatgcatcgagggagaaatgatgcgcgtatcccattcaagtaacatccgttaacttacaagcacagaggcatctacctaggccgtgacatcgatgccaccatcggcctcttcttccgctgccgccgcg

SEQ ID NO: 28822 - DNA, 680 bp, Zea Mays
ccatggctggctttaggacgtaacgcatcacatatggcgatggcgagcagatcctccacgaccggaacggcggtgctgtgctttcttgtggtggtctccctcttcctggccccgtcgttgttcgttgccggaactgaagcagcagcggcctacggtgcaggtgcaggtgcaggcaggaagatgaagcaggcagctgcgggagctgtggcgacgaagcaggatggctacggctaccctgcaaccagttcaccagcgggatacccggcggtgccttgttgccctcatccacctgagggcggtcggggttaagagagagcccagctgcagctagacttcatgtgcatgatattgcagaattaccgtctctgaatacagatacagaaactagcatttatatacgaatcatatattatctatatcctcatgccatgagagatgtgtatcactctcgctaaataattagcagctacgacgcgcctgcctgtcacactgtgctactattctatattcctgctccctctctctatatatacatacacacatatgtgtgtgtgaaataaagattagcttggagcaccgcgcatcaatattctcacgggtgtttgaatacatttggatgtccatattagggcttcttcggttattcccaatacacatggattggatgggattggaaaaaa

SEQ ID NO: 28823 - DNA, 1508 bp, Zea Mays
gccgagtcgcctcgcggcgctcatcgggcgcgcggcggggcggcgcggtccctcgatgctggtgcgcgagacggcggcgctgcaactgcagcggaggcgcgcggactgggcgcactcccgccccgtcctcgcgctcgacatcgcctggaacgtcgccttcgccgcggccgccgccgccgtgctctcgtcctctgccgaggagagccccgtcaagccgctccgcctgtgggtcgtcgggtacgccgcccagtgcctggtccacgtcgggctcgtctgcgccgacacccgccgcgagacgcggcgcgcccggagatcggcgtctgacgtcgagtctgccggcgctgggacagacagctcggacgccgacagcgaagatgacgaaagggcggaagggaggagcagctatacaggtcgttgcgagacgatgaacacgttgatatcatttctgtggtggatcattggattctactggatattctcaggttaaccattgtgtttctggccttcgatgtgttttttgctgtgttttgtgttgctgtggcctgtttcattgggattgcactgtgttgctgcttgccttgtgtcattgctattctgtatgctctggctggccaggagggtgcatcagatgcagatattagtgttcttctgagatatagatattctgatccaagcgaagatggtgagaagggggtcgatgaaggactgatgatccctatcctgaataatagtggaatgtcaacaagtgagcgtattctccttcgcgaggatgctgaatgctgtatctgtctatcatcatatgaagatggagctgagttatctgctctcccctgcaatcatcacttccactggccttgtattaccaaatggctgcgcatgaatgcgacgtgtccactctgcaagtataacattctcaaaggcagtgacagtgcatgaccaacttattctgacataacttccgtacacagcttcctttcaagtggcgttctcaaagcaatgctgttttcacagctgtgttattaagtgacagtgatctgtgtttttctgtttaggatgtggtgataacctgtagatggatgaaaccttatttacaattgtccttgttaatatcgcttgtaaatacctttcgagttgttttctacgtatgatggaattggaattgctgaaatactttgtgattctggtttgactttatgctgttttaacagctgtgtttttaagtgacagtgatgtgtgttctgctgtttaggatgtggtgagtggtgacaacctgtaaatggatgaaacctaactcagtcaccctaatatcgtttgtaaatatctttggagttgttttctgcgtttgatctttgatgtaattggaattatcgaaatactttgtgataggctcactgtttgcacagttatgaataatattgagaataatgcagcgcttgcccatctaaaatctcgggtaggttctctggcctgcataacattgctgatgaattcagacaacaaaaaaaaaa

SEQ ID NO: 28824 - DNA, 1110 bp, Zea Mays
atattttcactctagtgttagtctgtactttgttgtcgtgtgagaccgaccctgatttccctcatttccgtccattttgtgtatggattctcttggattcactgtaggtttaaaccatttttgtagtccattcaaatttcagtgtgcacaatcatttggaagtgagattgcagttttattctgggaaattggttggtggcaaggggatccagcttctatttgcaagatccattgaggcatgatttccagtggagctggctttttgaacccttcccatatgatcagaaatatcagcagtttctccgcattgctttacgtgcgccaactattgctgaactaggagactgggctggatgggtgaaatctcgattccgtttcctgattctgaagctggaaagggctgggattgagtgtgatccatgcccctcggaggaagttgatcatacagacaatgaccccaacgtggtcttctactggggccttatccctaaaagaatcattcaggtcgacactagctccctgaaaggagatttcatggaagacctcaccaatgatgtgtacggcacggtgaagtgcacgcattcagatgtgacaatatctgtggttgggctgccacagctgcctaagagcatgtgcagccgggtctatccaccggcagtacatgcagcactgtatgatgggctacgagggcacagatgaaggccagatcgagcgcagggattcaaggtactggaccgggtattcttttgagctgggaggagtgcttgtgtgcgcaagaatatgggaggactactgaccggtagaagagcaaagaaaatgtgtatagcagaggcatgtaaaaacttaggccctgtcggcataggcagtgtacacttcttttgtgttctaagtgctgctggatcctgattcattcaaattttgcaatgaacaagatggcaagatgtgtatatagttggttctattggctgggtggatgttgattttgagtacaatgccttgtttatgactgacagagttaggcaatacccgatttagttattcagtagggcgatggggtgacgactgaataaccgaatggtgtattggctaactctatggataactgaatcg

SEQ ID NO: 28825 - DNA, 5740 bp, Zea Mays
ctttccgtcacactcgcatcgccgtccccttggcccttgcccctttctcgcgctctctctctctctacccggagaaaacaaaaccagaccatcagcaggagactggggtgtgagtgaccgtgcgagaagggggaaaaacaatccaaacactctcgccagcacacaaatctcgcgcacgggttcgggggcgccagctcgatccgcggccgaaaccctaggtggtgacgacggtggtgctccgtggtggtgctggaggacgaggaggagggctgggagcgatgacgtcgccgaggaaggacgcggggttcctgacgcaggaccagcgggagaagctgcggatcgcggtgcagaacgcggagacgcagtcgctcgcctccccgcgctcgcccacggggggcaccacctccgcgctgctgcagcagtacgagctgcagatgctggagcagaagcgcgccgccgcggccgccgccgccgcccggggcggcggcggcggcggaggtgggcccaggcacgtgcgccggtcgcattccgggaaggccatcaaggtgaagaaaggtgaggtggcggagccccgatctgttcactcctgctatgtttagcgccttgattgcttgtttaggataggagtgtaggacaggagataggataagatggtttgtgtgactcgtgtgctgcatattattaatatgctgccttgtttgcattggtcagggcgcgatgccgatactggttgcagcgtcatatatgtaaattttttgcttacgttgctacggatgtaggtccagcagctccgttcatatagctctgcttgtttattaggaggatctatacttcttcgaggcgtctccttgctgcatatagctctggatttctagtgtcctgctagtttgtggctcgtgaaatggtggactcattattaacgcagagacgtagcattgatgcgaattgttgtgtagaaacattgatgtttttctagctggttttatatctgcccaacagaaactgttaagtatataagcactctgtttaaaatattctgtgctatatatacatgtttgttatgtagaactgtagaaggttggttgtgaatgcataatggttgttcattgtgcgggttgacttctagtctcagctgtcaataggggattagctggtggttgagccacataagggagtgatttagttggaccatgccatttgtatatttggcagtgtagtgatttctatcggaaggccaattcatttggggtatgtgcattctatcttcactcgccacccttttagctatttctgtcgccaacatactcttttgtcgtatttctgtgtaactatacaaactgtttcttggatcaaaatatgatacagtaaaattgacagtgcaaattgtgcccttggttctgatagccagctttcagttagttgaaccactgaattttcctgtgtgatggtatgatgtgaaccaccttgcacaatccagctgctaaatcaagggcgcactgaaagtagctcctgtgtgccatgtaggatgttttatacgtgatttgtttttattaagcacggctactacatttgtttttgcttatcaatcacctatcatctcgtttggcaaattgtgtcctgaactcctaattggggttctgtagagcattctttgacttgaacctaatcattcagaattgttccattcctttcagttggcaattttacctgatgatatttggactttgtctacgcatatgcagtgtttttaaggcgtcgcataggcgtccagacgctcggataattctaggcgccttgctcgcctaggcgccgcttaggcgttaaggtggtgatcatgtttatttgctcgccttactgccttaagaacactgcacataagtgtgtgcaacctgcatgtcgaaaagtgggctgagtggaaaatccatacctatcttatagcatgtgcttctattgcctttatttaattgtcaattcttgttgtcactgatcacaatattcatccttgatactgccagctatctatgcacattaaaacatggtctgcagtgctgttttggacttactttcaacctttcctttttttgtttagaaacttaggttataatgtaattttacatttttgtctttcagtcatggtttccttaatctgttttatattcacatggtgtattagggatatgtttagaagcatgtttgcttccaggtctaccatgaatgcataatatggttatatcttgtgcgaaagcaggatatgtatcaacataatttgctgttataaaataccacctgtcaggtgtactttggatgtccatgttcctttagctttattctgcttattgtagtccttgcaactcaagaaacaagaaaaggatccatctatgtgttagatctagtgttatggttgctagttcggtgagggattggagctgcttgtggaacagtacccgccaatgaacagtagatacgtagagggcattggagagggaggatcgatgcgcaggaacgccagggcctctgcccatggccgagcaagaggagggtttctcctatttcttgcctactttatttctcatccattgattacatagatagaccagctggccacccttatctagttagagatccttatttccttaaaacactcctaaaaactctcaacaaactactaactgatgaccttcctagataatctcaactaatcttcttatcctttgacctgcgcttcttgctgctgctccttgccgcagccccctttggccctgacatctagtttatcatattagggatggccatatgcagcctacatgtaacatttatagcatgcggccgactatttatgtagcctacatgtgatttccatgtgtgttgtgcaaagatatgaaatgcaagtgtgcaatgcgtactttggactatactactttgaaaactcatgtgccttctgacactgttgcatgctatggagtgtcggttgtttagttcttgcgagtattttattttatgcatgacattgttgactaactacttatgatctaaggcaacacatagatgggattaggcccgatttgatgacaatagctttgtaaaagcatctccaaaagcctttctaaattttactatctaaattttagagtcatttgtataaaaatcactttctatatcttttcaatctccaacagcttttctatatcttgtttatactttagagagtcattcacgttttctatatttggctagcgagaaacccggaatagaagatggctgtatttggataaccatttagacaagctgttggaagatggagctggcggcaaagggacttggggcaaactaattgagactgatgcagaggcatgccttgatcgaaatgatccaaattatgacagtggtgaggagccatatgagttagttgaggcccctgtttcaaccccactagaagactacaagaaatctgttgtccctttaattgaggaatatttcagcaatggggatgtaaaattagctgcttctgatcttaaagagttgggtcatgatggtttccactgttactttgtcaagaagcttgtttccacagcaatggataggcatgacaaggagaaagagatggcatcagtgcttctgtcgtatctttatggcaacgtggtcagttcaactcaaattaggctgggatttgtgctgctattagaggctgttgatgacttggctgttgacatacctgatgtggttgatgtgctcgcccttttcattgcacgtgcagttgttgatgacattctgccacctgctttcctcagcaatgcaaaagtgagtctgtcaggatcttcaaagggtatgcaggttgtacaaattgcagagaaaagctatctttcagcaccccaccatgcagagttaattgagcgacgatggggtggttcaacccacatcacagtagaagaggtgaagaggaggattgctgatcttctgaaggaatacatcagaaatggtgatacagctgaggcttgtaggtgcattagagaattggcagtgccgtttttccatcatgaggtggtgaagcgagctcttactcttggaatggagagtccagctgctgaagctcttattgtcaagcttctgaaggaagcatctgaagaatgtttagtaagctctagtcagatgatgaaaggattccaccgtgttgctgagagtcttgatgatctcattcttgacataccatctgcaaagtctgaatttcagttgttggtatcaaaagccatttctgagggatggttagattcttcctatgtgaactcaggtgtcaacggaagcgttgaagacgatgaacatgagaagctggctaggtacaagagggaggctgtatccataatacacgaatactttttctctgatgatacaacagaggtcatccgtagtgtcaaagagcttggttatccggaatacaatccgatcttcgtcaagaagctcataacaattgctatggaccgcaagaacagggagaaagaaatggcatcggttcttctcccttcattaagcatggagctgttctcgtctgaagacatcgccaagggatttgtaatgctccttgaatctgcagaagacaccgcgctggacatattggatgcctcagatgagctgggactgttcctagccagggctgtgattgatgacgttctcgcacctctaaacttggatgagattagcagcaagcttccaccaaactgcagtggggctgaaacattgaacatggcacgctcccttgcgtcggcccgtcatgccggtgagaggcttctgaggtgctggggcggtggaaccggatgggctgtggaggatgccaaggacaagataacaaagctcctggaggagtatgagagtggaggcgatgtaggggaggcatgcaactgcatccgtgagctgggtatgtctttcttcaaccatgaagttgtcaagaaggcgctcgtgatggcaatggagaagaagaacgagaggaccctgaacctgctgcaggagtgctttggtgaagggatcataaccatcaaccagatgaccaaggggttctcaagggtcagggatgggctcgacgatctggctctcgacattcctgatgccagggagaagttcctttcctatgtgcagcgcgcgaagaagagtggatggctcctgcctgggttcggtgtggcatcttcggcttgaacagctgggcagaagagaagtacgaagctgaagcggctcagcaaacccagtttggatgtgtgttttcgtcgttcgtggttgcccttgcgcctaggttagcggagcgagcccttcctggttgcggtggtggtggcttgtgtaggtctcgcatctgacatgttcatgctgttcttgtttcatttcatttaactctccatagaccctttttttttacatcaagctaaaacagagaagagaaaaaaaagaccatgttgtaaaagttctcccatgctccgcctgcattgcggccggttttttcatcctcatttagctgcaatcgtgcgttcctgccctctcatggccgccgtagctgtttttctatgccattggatgcttggattgtgattgctagtttgttactcttttattctttgtggaaatggtgtggcctggtgaatgcctggattgctagcatgcaccgccggccgcccggcactgtatctttcgatgctttctttgttttatgatgcgacgaatgctcatggacttggatttcagagactatggcatgggctttttc

SEQ ID NO: 28826 - DNA, 980 bp, Zea Mays
taacccaagcctgttttcaagatatggagtccgtggtttcccagccattcttcttgtaaatgagactacgatggttcgatatcggggttcaaaagatcttaactctctggtcgatttctataaagaaactacaggtctcgatccaattgcatatattgatgttgttgaacaagagagcacaggaagcttgagctcagttatgccatgggatcgttctattcgtgaaatggccaaagatgagatgtatttgttagttgcagttctttttattatcgtgaaggttgtagcacacttcatacctgttgtcatgtctcatctgagagctttcttagttgttcgtgtccaaaacttgaacctagggatccgtaggggatcaaaccagctcctggaacgagccttgaatgttcttgatgtaaggaggctttggagcaagctgaggctgagcaataaggcaacagacttgaggaagggagcaaataatgctcgagcgtgggcttcctcatttccttctgtttcactgggtgaaccgtcatcttcaagacaagcttagccatcttagagatgtttgttagggtagctgctcacatgtttctgtgcaaaaccatttaatctttgctccccactgtttctgtgcagtcaggaagggggggaaaccttgcatgcatgtaaattttgaggaaatcatgtgctgttgtatattaggaatacctttgcatttgctggtgcctaatctttctgtctattaaccagagttatttggcaatgtatcatgaacatctttgtaggggttttttaggatttctctcttgtttgtggtgttgttttactttacactgtaatcttcattaaagaacttggtttcacttcgttattatactccaatttgaagagcttgaagcttagtccctacactgcagaactcaataggtctttagttttaggtcattcattcactataatgtttttaagatacaaggtca

SEQ ID NO: 28827 - DNA, 2556 bp, Zea Mays
cccgcctatccctcgcttccccagacccctcaccggcgggcgtagctagcgtacgtccatccatccgtccatgctccaccgccaccagcccgccgttccgacaagctccaatcatacgcaccaccggaccaccctcggcaaggagggacaagctcacgcgcctcgcgccctgcccggcccgacctcgagcagatcgacacatgcacgcacgacgtagacgatacacaacagtacgcgggggcgcactgacacacgcccgcactatcatccctgtcccccgtccgtccatctccccactcgtgcgagttgcgaatttgcgatgcgccgcctgagcagaagctccaaagcctcatgatggcagcacgggccagagccagcactcgcagcagctgatccgagctcgtacaggcgcgccaggcagcacatcaatgggcacaccactccttgaccgcatcagtgaccggtgggactgagcactgactgcagtcgcgttgctctgcgcttcttcctggctggtgtcggcgaacagcaggaggaggaggcgagaagaatcttgggagcttagcttgcaatgccgaggctgtattcggaggaaggagcaggtgctgacgaggctaccgccgctgcgacagtgaggctggccaacaagatccggaagcgccgcgcggtgtcgtcgtcggggggctcggacccggcggcggtggggaggaggctgcggtccaggcggcccgcggtgcggctgccgcggcaccggaccagcgcgggcggggacatgtcggagtcgtcccggagccggcattgccgtggcagcggcaaccgtgtcgccgaagggacgctgccgtccgcgtctgcgaggaggctcgtcgacgcgttctggcagaacatgggcagcggtggtctgcttgacggggacgcggcggcggcgcgccggagcctggtcctgtggagcggcgcctccacgaaggtgtccaagaggtcgagaagtaagagcaaggtcttggaggctgatggtaagggaagtcggcgcaacggccatcctcggtggttttcagcagatctgatgagtaacggtagtgcaatggaggttggtaccttttctcaagacgatgtttcaagatgtcctgaaaagacagtgaacctagatgatctgcagaacagcttgattgcagctaaggagctggtaaaagtacttgcccacatatggggacctggagagctgaatccgtcaagtgcatcactcatttctgctctacgttcagagcttgatgttgcccgttctcatgttagaaagctaatcaaagaacagaaatctgatgcctttgaaattgaggacttaaagttgcaacttacagaagaattggaatcgtggaaggtcaaacaaaaggagaaggttggaaatgctctccgatttgtagtttcagagctagacactgagaagaagtcaaggaaaagagcagagaagacaaataagaagttgagcattgccttagcaaacactgaagcctctttgcaggcagtgacgaaagaacttgaaagggagaggaagtataaaagaagagttgagaagatctgcaacgagcttatcagaggcattgatgaggacaaagctgaggtgcaggcactgaagagggaaactgagaaggcacaagaagagctccagaaagagcgtgaaatgcttcaacttgcagatgagtggcgtgaacaaagggttcagatgaagcttttagaagcacgggttcaatttgaggagaaaaatgcagctgttaatcagctgcgcgatgaactccaagcttatctggatactaagaaagagcaggaaccgttgaatgatccaatggaactgtcccatgcatctgaaattggcaacactgcagctgatttagttcctgacagaaatggtggaaacatcagcgaagacgcctcagaaggcagtgatatacactccattgagctaaacgtcgatggcatcaacaggacctacacctggagctacactccttcctcaaaaggcaggcagaggagcccatcaaggcatgaaccgttttcggatagagggatggatggagtgaactcgtggcgtttagagcaaagttttcgggacatggatgaagaactggagggagactgggcagaagggtgcagcaacggaatgctgaacttggatcatgacgaggagaggtatctggctatcaagaatctgagagagcagatgttggccgggtcggggttcatcctgtcacaaggtagagaaaatgctaaaagagagtattgtggcttgtaagataaactgaacaagaaaaattaaaagtaatgtgccgtatgaatcgctgcttgatgctagatccaactgttcaaggatatatatagtgatggttctctgtggattactttccccttgtaaatatcttgagctcttgaaaggttaggttacagggctggtgtgttcatgttcatgattctgatgtcttgtatgtgtgttaatgtccatttaagtgtctggaaatagtttataaaacgtgattggaaatataacacaaaaagaaaacattggtatga

SEQ ID NO: 28828 - DNA, 1266 bp, Zea Mays
gtttctgtggcctgcgcgtcaatgtgtcatgacatctcaccgcagtcaatgtctcatactctcatctcattgcttcgccatgatgtcacctcgacaaagacggattggggggctggggagggtgctacctcgccttcaaacatcgcgcttcttctgaacggcgtgaggggtctgatgctggacatgtacgacttccgcaacgacgtctggctctgccactcctacggcggcatctgccagaacttcaccgcgtttcaaccggcggtgaacgtgctccgcgaggtggagcgcttcctgtcgcggaaccccgccgaggtggtgaccatcttcgtggaggactacgtggagtcgcccatggggctcacccgggtgctcaacgcgtcgggcctcgcgcgctacgtgctccccgcctggcgcatgcccaagagcggcggcgactggccgctgctcagcgacatggtccgcgacaaccaccgcctgctcgtcttcacctccaaggccgctaaggaggccgccgagggcgtcgcctacgagtggcgctacgtcgtcgagaaccagtacgggaccaaggggatggtgaaggggacgtgccacaaccgcgccgagtcggccgccatgaacgacctgtcgaggtcgctggtgctcgtcaactacttcagggacctcccgaacctgccggcggcgtgcaaggacaactcggcgcagctgctggacatggtcaccgcctgccacgacaagtccggggaccggtggcccaacttcatcgccgtggacttctacaagaggagcgaccggggcggcgcggcggaggccacggacaaggcgaacggcggcctagtctgcggctgcgggagcatatcggcctgcaacgccaacgggacatgcactccccggcacggcaggacgcccagaggcatcttcaacgcctcatctgacgcagcggcgtggaggccgccgccgccggtgctgcaatggcagaggctcatcctgctgccttctctccttgctcttcttctgggcctgtgaattctacgtattttgttgtatagaccgatacggatcggtttggttgcaggcaccgagcgcattttgttgtgtatatatacacacagatgacagattggttgaagccagctagcagcttagtccatggtagtctgtgtataagacagagtgcatatacaaggttaacacaacatcaacaatcagatgcggaaaactgcgtttaatcatgatctcacactaaacgcctcttttgcagcttct

SEQ ID NO: 28829 - DNA, 2521 bp, Zea Mays
ggctccaatgcgagtcgtgaacgcaaacagatagcatcccgcgtcgccgcgatggaactctcgcccttgccgatgctcgctgcctcccgcttcctgtccctgtcgccgctgctggcgccaacatgcccccagcggaccgctccttcagtccgcgtggccacgcagacgctggaagcgccggaggcgcccaaaccgccgcggccgtcccccaggcgcagcgccgtcgctgaggtcaagggggcccttgaccccatcgccgccctcaacaggtttgaggaggtactgcagacacaagactgcaacataattctgcgccactgcggggacattaggcgttgggatgacctctctaaggtctttgagtggatgcaggagcgcgagatgaccaacgctgcatcttatagcagctacttcaagtaccttggactgagccgtgaccctgcgagggtgcttcgagtgtacggtgccatcaaagaccgaacattgagggtccatgtctccgtctgtaattcagttcttgggtgcttggtgaagaatgggaggttggacagcagcttcaagctctatgacgagatgatacgggaaggtctatctcctgatccattcacctacagcaccctgttagcagggtgtatgaagttgaagcaaggttataccaaggcaatgggattgatcaatgagatgaaatctcgtggtcttcagatggatattgtaatatatggcactcttctggcaatatgtgcatctcataactactgtgaggaggctgaagtatactttcagaaaatgaaagatgaaggccatagtcctaatctgttccattacagctccctgttgaatgcatattcagaaaattctgattatggaaaagctgagctattgatgaaagatctgaggtcctctggattaacaccaaataaggttatgttgaccactttgttaaaggtgtattctaaaggtggtctctttgagaaggctaagggactgctaactgaactggaagcctcaggttttgcacaggatgagatgccatactgcatattgattgatggccttgtcaaaggtggaaagatacaggaagcaaatattctatttaacgaaatgaaagaaaaaggagtcaaatctgatggttatgcatttagcatcatgatttcagcattgcacagaggtggtcatcaccaagaatcgaaacagcttgccaaagaattcgagtctgagaatgcatcatatgatctggttatgcttaatacatcactgcgcacttactgcagcacaaatgacatggagagcgtaatgaggatgctaaagaaaatggatgaatcaaacatatcacctgataacattacatttaataccttgataaggtacttctgcaatgcaaaggagctttgttctcatgtaatggtacagctaggaaaggcaggtttcccttctgaagcattttctgtgtataatatgttgagatatagtaaaagaacagttcacaaatctcttcatgagaaggtcttaggcatcttagttccagcagaacttctcaaagctgcttatatagttgttaaggacaatgctgatctgatatctccttcttctttggagaagtttgctaaatcgttcatggtctcaggcaatataaatctaattaatgatgttatgaaagccctaaaccgctccgggtggcgtatcagccaggacatctttgggagagcaattaagagatacatccaaaagcctgataagaaacagttgctgctgtgcctcttggactggatgattggacaaggctattctgtagactcgtcatcaaggaacttacttttgaagaatgcacaactttttggcgaaaaacaagttatagcagaaatcctttctaagcagcagatagcatcaaggactattggcctaagacacaaaaaatgataaaggaaagattttgtatatgtaaattgttcatatacatccaggatatgcctaggctgattgtttgaggatcaatttattgtgctctgaggggaattttccaatgaggcatgcttgttccagtagcggtacagctgggagtggagtatgaccatgcttgctatgatatgtgtgttagattgtgttgtctgaaggcttacacccagataaaattgtagccatgctgaggcatccaatgtttatctgttatctctattgaaaggcttgaagttatttgtcttcatcgctaaattggtgccaatgttgaggtgaacttggagaaagaatcgtgctttagtctgacaatttatttgctggtggttacataagatgtcctttttagagatgcgtctatggcacgaactggtaaacagtgacatgaacagatagctactgtactatattttagctttgaggcagagcccgattatttttcttatgctaggcgtcaattttgcctttgagatatttcagtttgagcttagctgaacggtggggactctatgattgaacttaaccaccacaagccgcatgatcttttcaataaatattgtcctgagtctac

SEQ ID NO: 28830 - DNA, 1743 bp, Zea Mays
tcatatcaagcccacgcgtggtgtcggttaggcggcgcgctccgccttccccttcttcgacctcccgacgcgtgctcacctcctcttcggatcgtggatccgctgctgcgctgcacgaataatcaattccgagtgaaataaattacatatagccatctagaagagagtcctttctagagccgacgcgacgggatcaagatttgtatttgaacccggacgacgggaggagtacgaggcccagtcatggaggaggagaagcaagtgatggagggtgccgctacggcggcgaggcggcggctggtgatcggggtggggttctgggtgcagggcttccggctcttcccgtggctgggcgtcaatttcttcctcaaggacggcatgggcgttgctgcctcctcgctgcagatcctccaggcctccgccaacctgcccatggtcgccaagccgctcattggcctcctctcggatgccgtccccatacgcggccatcgccgcctgccctacgtcgccatcggcgctctcttgcaggcaatttcatggctagcaattgcactttggcaagatatctctcttcaagttcttaccatttttctcctcttgagcaactttggtgcttccatatgtgaggttgccaatgatgccattgtagcggagtctgggaagaaagcggcctcttcctcaggatcagttcttcacaactgtggctatacctgagggctctctcaaactccctaaggtagctacttctaccaatctatcagcactcaccagcatccgtaagcaagtcaaagagctgtcatgcgccctatctatgcctgaaatgttttggtcaattatatggtttacagcgtcatacgctgtcataccttttctacttgggaccatgttcttctaccagactgaagtgctaagactagactcctcggttatcggcttatcgaaggtgtttgggcaagtggctctattggcttggagcatgtcatacaacaagtacttcaagacaatgtccgcccggaagctcctgtcagttctgcagttcgtcacagcgctcgtaatgttgtcagatgtgttgttcgttcagggagtatacaggaaggtgggaattccagactccatatacacgattgtcttctccgggctgctcgagggccttatgtttttcaaggtcctgcccttcagtgttcatgttgcaaaactttgccctgctggctgtgagggatcagtgatggcctttgtcatgtctgcgcttgcccttgcgactatcgtcagtggctaccttggagttgctcttgctgccttcatgggagtgtctggagatgatttctcagcactgccagcttgcctgttgattgaggctgcgtgcacaatgttgccactatgttgctcgtccttgatcaaagagagaagagaaaaggagaaaaaacaagagtagattacatatatattatctgaagatgatgtaaagctcattgttgttaccctcgtcctcatggtgtcatttcagtttgttatgtgatcatagcttgcagaaacaaaataggagatgattacacatttacacttgtccggtgttaacacctctaaggcttgtcaagaactacagtcaaacgagcatatatgtacatacatgcgtgccgctaccattcttctacagatttaggccatgtttatttccctcttggatcttggattatataagttaaattatggtggaagggttggaaggtaaaatatcactttggg

SEQ ID NO: 28831 - DNA, 4194 bp, Zea Mays
gaaaatcaaccaacaattttccttccccattttctccacccacgaactcgtcgtctctcatccccggccgccaccgcctcccctccgttctcgcaccccaccaaaaccctagccgccgtaccccagcgcgctcgcggtcccctctccccgccgccacgtctgtctagatccgcgcgcgccctagggcttcaagggccccgcgtcgccagcttccgcatctgggctggtagtttttcagttagggttggcccgccatgcctcggagctcgcgtcacaggtcgcaccggtcccacaggcgaggagggtccgctgaccggtcggagtcagatggcgaggagtcggctccggtcgccggcgcgcgcgaggaggccgcggcggctagggtttccagagatcccgagcctgagaggcgccgctcgtcctcgggacaggaggccgtgagatcagggaacgggtacgctgagcacgggaagaagaggaaggagagggttgaggaggccgtggttgatgtggtcagcgaccggtggaacagtggcgtctgtgacgatcacctggtcgacaagaggtccaagagcgagacctttgggcatgctgaagtggagaagctggccgacaggtccaggggatcaggggatgagtccaagaggtcaagcagacgagcagtggctgtggatgacagggctgaggaggttctgtctaagagtgactctgggaaacggaggtcagagaaacagaaggatgtggggaggaaggagagtaccgggcattataaggataacagagatagggagaacgaaagggaaaggggggaagaatgggagcggcagaaggagcgagataggggaaggagtagggatagagagcgtgagaaggaaagagcacgagagaaggagagggagagagaacgggagcgtgagaaagatagggaccgagagcgggacagggagcatgagagggagcgtgataggcagaaggagcgggagtgggacaagaaagatcatgattccaagcacgagaggtatgaggatggcgggagcaggaagagtggcttgaagatgagtaggacggaacaggaggcctactcatataggagagatacagatgtcaatgaaatttcagcgaaagagaagtacaataatcctgatatgcaagctgaaaaacacagccgaagaaaagatgattctgaagatacagataagtggtccactgacaatagagacagtgatgacagaaagaccctgtccagatatgaacatggtaaatctaggagctctaaggaacaaaggtttgatgacgacaagtataaggaaaagtacaaggatgattacgtaagggataagaggcaacatgacgacaagttttctaatgagcgagtggcccgtagtcatgaaagtgatagagctgaatataagagtgctaaagatggacgcagaagctcagagagccattacagaaaggatgcagttcaagatgttgatcattatgaggattacaacaataggtacaaggaaagtagagggaaaaaacgacctcctgaggaaaatgatgaccaatatgatttaaagcctccaagcacacgtgatcaacgtgtgcatttggaaaaatcttcaggcagtgggcgtctggattctctgactgagagagcaagacctgatcgtagttctagtccaagtaaaatccactcaagaagttcacctagcccaagttcttatcatgacaaagatcagagccggcatgggtctaaagtggtggatcatggaaagagagaaattccatatgatgagagaaataatcgtccaagagcatcttctggtagagaaaggacacctgcttctagacttcgtgacagggatgcagaaaattggtcgtctgaaaggcttaaacagaaggatgattaccaacctcgtgatgtaacattggaaatttctacatcacactatgaccgcacacctagcaaagataagcatacttcaccaaaacaactgtctgaaaaatctccatcttcaggtgaccataggttttcaggtaggcttagtggtgggcgtagtcttgataataaaggagaaagaaagagccttacgaaatacagagatagagatggtgacatagctcaagagcgatcacatcatcaagatcgaatgccagctaaggttccattcagggagccaacaccgtcaaattcatccataagtagaggtggtcattttttgggcagttcaccaaataatcctttgccacctgcacggaacggtgacccttccttccagggtccacatgatgatgaccgtaggcctcaaaatggagataggaggttccatggtcatcaaaaaaggaatgacatgaattctgttcgtggacatggacatggctggaacagccagccaaactggccttctccagtttctaatggtttcgtccccatccaacatggtggtgctcctggttttcatccacctgtccatcagtttccaggcccacctatgtttaaccttagacctcaaatgaaattaaaccaacctggagtttcatatcctatgcatgatgctgttgataggttttcgacccacatgcgcccatttgggtggcctaatcatctggatgaatcatgcccacctcatatgcaagtttggaatggaggtagtggtgtatttcctggtgaaccctatatctatggtagacaagagtgggatcagaatagacctcatgctggtagcagaggttgggagctgactggtgatgtatccaagggaccaaatgatgtgccggatgctgaacttctggtagctaagaaggatcctgactctgcaataactgctgtttctgattctggtggacaacacaatcttcaacctgaggctgaccaaaaggaaattggacgcttgactgctgaaaactttgaagcgaagaatcatactaaaagttcaaaaagtttggaagctcctcaaggagcacaacttgtgacttctatgctgtcaaagaatagcgtggtcttttgtaaaaactatctatccagaatcagtgtttcacatgatcttgttgagcctgagttgtacaaaaggtgtatatccttgctgggagatttggacgtaacaaaaacctctcatttggttaggaatgaaattcaggataatggaaatattggaaaaatgtcaacaaaatatggaaacctcaaccctttcagttcacgttacctcaaaagtgacaatactatctttgagagagctttggcccttcataagaaccagactcaaaagggtttaactactgcctctgcatctgtaaaaatggaagagaagatggctgtaccagaagatgaccatgacatggaattgcttgaaccagtggtgagcaatcctgctccacaacgtcacactgatgtcatggaggaaggatcagtatcaaaacatgaacttggtgatggcatagggagaactattgctgcaactataggatctggggttctggatgcacctccagaaatttcacttccccaacctgaggtggtggtggcaacaacagtaatcacacagccgaacaagcacatggaggatgtgttgcctccagcaattgaggatggtgcactacaagcaaccctcgaacatgctgttggcataccggaagttacacccgctgatgtcttgctggatgttgcaccttctgctgttggagaatcaggtgatgacatggagatcataccctctgctatggcagaacctcaactaggcaaggagcctgctcctgttgctagtcctgacagtcaagagaagcccttcatgcttgattctgagacaggtatggaggttgaggttaaggttatcgatgataatcctggggatggtagggtgagctctatactcggcaccaaacttgattttgctgcaattgatggggattctgaagctttgttggtggaaagtagggtaaatttaagtcggatacctaattccccagaaagtacacattgaactcttcctattttattttaattccttttctgagggtcttgtgccctcagcctagccttttgagctgccatattctgtttacatctgggcgttcttctgtagtgtaatgttcccagtgagataggtatgcttatggggaacttggacgtacctgcgggacgcaggacctgctgcaatggcacgcctctcaagtagtgcgtgcccatccagctgcgtctcttgttctctg

SEQ ID NO: 28832 - DNA, 2449 bp, Zea Mays
gtcgttgcgttgcctcgttggttgtcaaccaggaccaaacgcccagcacaccacctggctgcctctccatctttggcactgccccccacatcgtcccctgccttccccccgcccccacgcagcactccgcgggccggggccgcgcggccgcgaacgtcgccacggtcatggtcgccatgacggagccgcgcgacccgccgaccggctgcgccctgttcggcatctacaacggcatgttccgccgccgccgctccgcgtccatgacctccctccacaggatcaacggggccgaggccgaggccgaggccgcggcgccgccgaaccagaagcccgccgcgcaccgcgactcctccctcgcgcgccgccccagcgccatgcccgtgccggcggcggcgcagaacggcaggagcaggccggccgccaaggcagcgcccgccgcggagccggcggcggagtacagcggcatggccgcggagctggacaggatgatcctcgaccaccagagggtcaagggcaccgcgcagctggtgcgcgccacctcgggcaacatgatgctgcaccgcaacctcggcaacctgaacgcgggcggcagggcggcgaacgagcggaaggcgccccacgggtacgcgtcctccggcatggggaacatcgtcagggagccccggccggcacctgcagcggggggccagctgtgccgggcgctgtcgcaccgcacggaccccgagaagctcaaggagatgggcaacgaggagtaccgccaggggcactacgcggaggcggtggcgctctacgaccaggccatcatcatggacgccagccgcccggcgtactggagcaacaaggcggccgcgctcgccgcgctcggacgcctcatcgaggccgtcgccgactgcaaggaggccgtccggatcgatccttcgtacgatcgcgcgcaccaccggcttgccggcttgtacctcaggtaccgcgtacatctcgccgattttcagatcagagagaggcacagtctacagatttctgccatccattgccttgcccctccgtcgtgtcactgctcgtccaattctgcttcaactcttcgtcaccagttgtgcggagaacctgacaaagccatctaccacatgaagcaatcctccaacgaatccgcgggcgcagacgtttcccgtgcgcaatcggtgaagagccgcatcgccaggagcaacgacgcgcgcaggctcaagaactggatcacggtgctccaggaagcgcaggccgccgtggccgacggcgccgactgtgctccgcaggtgatggcgttgcaagccgaggcgttgctgaggctgcaacggcacgacgaagccgactcgcttctcagcggcgccggcgcgccaaggttcggggtcgacgagtcgaccaagttcttcggcaccttcggccacgcctacttcctcatcgtgcgagctcaggtcgacatggctgctggaaggttcgaggacgcggtggcgacggcgcagacggcgtttcagctggacccaagcaaccgggaggtctcggtcgttcagaggagggccaaggcggcggccgcggcgcggctgcgtggcaacgacctcttcaaggccgccaagttcgcggaggcgtgcgccgcgtacggcgagggcctcgacagggagcccggcaacgccgtgctgctctgcaaccgcgcggcgtgccacgccaagctcgggcggcacgagaaggccgtcgaggactgcagcgccgcgctcgacgtgcgcccctcgtacagcaaggcgcggctcaggagggcggactgcaacgtcaagctggagaggtgggaagcgtccttgagagattaccaggtgctggtccaagaactgccggagaatgaggacgtgaagaaggctctctctgaggtcgaagccaagctcaagggccaaaggcatggggccgcagcagccagatctcagcactgacgtcatgttttctttactctgtcggctaccagagaaatcaaccgcgactgcttaagacttaagaggacaagattttcgaaagaacaattctgcatgcgccgatgaacaatttgttataccaaatctgtatgttttttttgtccaccatatacaccaatttgaaaaggaggtcaagagatggaactgtacataatacttgctccagtgtgatgtatagttagttgaatgcgtttggttccttgcgaaaagaaagctgatgtatttggttgcaggggtgccggtgacggatcccagagatttgtaaggtttcagtttggctctgaaaatgacaactaccgactgaagactctgctctagaaatgaatgatcatctcgaatctaaattatgtgatttgttcctttgagcaaggcctcttttgctgcagctgcagccattctcctgctgttcccatcttacaacttcagatgtaaaactttgatcgatgacttaattattttct

SEQ ID NO: 28833 - DNA, 2229 bp, Zea Mays
gcatacatgtaacctaaccactcccatggactataaaaggatgatgtagagcagcatttaaggggatccccattcggttccactcaggttctattcagactttagtcttcaccaaacatcaaccaagtatgatcaattcgatccggtcaagataactacaattagagtcggtctggctttccacaatactctcatcttgtaggtggtcttggagtctcctggtgctagagtttgtactctttttgtatcatctacacacatcaatacatgatcagcaagagaacgtagggtattgcactcactgtggccttaacttctatgaaaattcatgtattagactcttaatgccatgacctcacagacatactctacggtgttaggactcgctccctgctcttctagttattgtttatctggtattcttagtaccctggtgtctttgctacgacactagtaattagtagaaataccaaaacaactggttttagattgaaatattagtttatgcatataaggtgtttgaggaaaagcatattcatataagcatggttagttagaactatgaattctaatgctttgtcatttttttattttaattattaaccagataccgggcatcatttagatgaagatgaacagattgcacaggctctgcaagaaaatattggtcataacctagctgaagacgaacagcttgcacgggctctgcaagaaagtatgaatgatggacctcctcgtcagcacattccagttgaagatgttaactcagaaagtactccagcaagcatcttgccctcaaatattttccgcacaagtggcttgagggtttgtgctggatgcagaagtccaattggccgcggtcggtttctcagttgtatggactctgtttggcatcccgagtgcttcaggtgttatgcttgtgatagaccaatatcagagtatgagtttgctgttcatgaaaaccatgcctaccacaggccctgctacaaggagcgtttccatcctaaatgtgatgtttgcagtagctttattcccacagataaaaatggcctcattgaataccgggcccatcctttttggatgcagaagtattgtccttcccatgaaaatgatggtacacctaggtgctgcagttgtgaacgaatggagccaaaggacagtcaatacataacattagatgatggccggagactctgcttggagtgtctgcatactgctattatggagaccaatgaatgccagccactgtacattgatattcaagaattttatgagggtatgaacatgaaagtagagcaacaagttcccttgcttttggttgagcgacaagctttaaatgaagccatggaagcagagaaatctgtgcaccaccttcctgaaacaagaggcctctgcctatctgaggagcagattgtcagaactatattgaaaggaccaattggaccaggcaacagaatcatagatatggtcacaggaccatacaaactcattagacggtgtgaagtgactgcaattcttatactgtacgggctgccaaggctgctaactggctcgattctggctcatgagatgatgcatgcttacctccgacttaaaggataccgaaccctgagtccagaggttgaagaaggcatctgtcaggttctagctcatctttggcttgagtcagaaatcacatcaggttctggtagcatgtcaaccacctcagatgcgtcatcgtcatcttcaacatcttcatcatcgaaaaagggcgcaaagacggaatttgaaaaaagactcggggagttcttcaagtaccaaattgaaacagattcttctgtcgcttatggagatgggtttcgagcaggcatgcgagccattgagcggtacggcttgagaagcacccttgatcatatcaagatgacggggtcttttccatgctgaagctggtttttttttacctcggcttggatatgggtatacatattttttttggagaacttttggttcaggttatacatacgaaaagccgaacttctgtgtcgagaagaggcataaggatttagctatactgtccattgcaggaaaaaaaactgtttcccttttcaattataaaatttcacagtgcagacatgaaggtatgtggtctttagcttggccaaccttgtggaatgctgtcacttgatgcaaaagaaatttcgaatacatatgctttgctgtgcttgaaatgcaatggttggatgctatgct

SEQ ID NO: 28834 - DNA, 1823 bp, Zea Mays
atggccgcagggagcaggaagatgcggggcagcaagatctgtgcagatgccgcaggagctagtgcaggcaggggcggctgcttggggcgcaagaaggttggtggcgttgcttccaggggcgcagcagggggatcggttgagggaacgaagaagatgggggcgccgacgatgggaacgaagaagatgggatcgcagcaggggaaacgccggcctaggggggatcagagcaggggggatcgggagggcacaaggaaggagatgaaggccggcagaaggaaggagatggctatatgcaaaggaatcaaagcaaagatgatgttggaagttttgagaaaaggcccaaggactactgcagaattggaggcacctgtagatgatacatctcttgtgtctgctgatgcacctcgtgtgcttgctgatactgtactggatatatctggtggggagcgtgcttttattgaggcagatgaagcaaaggaactgcttagtccacttaccaaaccagggaattcatataaaagaatttgctttagcaacaggagctttggcctgaggatgaagcccttgatgtgatgcgcatattctccaaagcattagagggttctgtcctgagatatctgaacatctctgacaatgctttgggtgagaagggtgtcagggcattcagtgagctcctgaaatcacaggaatccctcgaagaactatatgtgatgaatgatggcatatcagaggaagctgcgaaagctctatctgagcttattcctgcaactgagaagcttaaggttctccacttccacaacaacatgacgggagatgaaggtgctatgtatattgctgagatggttaagcgttctccgaatgtagagagtttcaggtgctcagcaacaaggataggatctgatggtggagtcgcattgtctgaggcattagggacatgcactcgcctgaagaaacttgatctcagggacaacttgtttggtgttgatgcagggttagctctcagcaaaacccttccaaagcttcctgatcttgttgagctttatctcagtgatctcaatctagaaaacaagggtactatagcaattgccaaagccctcgaacagtcagcaccacagttggaggtccttgaaattgctggaaatgaaataaatgccaaagcagccccagatttggccaagtgcctagcggcaatgcagtcactcaagaagctgactttggctgaaaatgaactgaaggatgatggtgccgtgataatcgcaaaatcattggaagatggccacatagatctcaaggagcttgatgttagcgtgaacatgctgcagagggttggagctcggtgctttgcgcgggcagtcgctaataaaccggcttttgagctgctgaacatcaatggaaatttcatctctggtgaagggatcgatgaggtggaggaaatcttgaaggctggtaagaaacccctgaaagtgctgggcccactagatgagaatgagcctgatggagagcctgatgatgacgatgaagaggttgaggataatgaggacgagctgaattcgaagctgcagagtgtgaaggttgagcaggatgattgaccgagttggtatcgagatataagcctgtcgcagggtcttgataactgagttatctacaatgctgttgatctttggttttgtagtcggtttttgttatgaaaaaccagaaccagctatcttgtgacttgtgcaatctgattatagattagaactgctcttatttattcgtttatattaatgacatcgttccattacaaatggcctgatatatagatgctacctattttcccaaca

SEQ ID NO: 28835 - DNA, 4418 bp, Zea Mays
ggcccgcgcatccccttccgctgattctccccttccatccgctgcattcctcccacattccaccgcacccacacgtttctttaccctaaccccgacagccgccgccgtttcttcatcttcctcgcagcgccggcgctccatcttccgctccctccccgactcgcgatcggcacgcaggcgacgtcggggcagtctcggactcggcggcggcgtcagcggctccccctcccgccctcgccagtcgcttccggtcctccgcacaccaaccggcgactctgcgtgcgcgcctcctgcttccggtggaccgtcgacggcgcccgggccccggtggccggcgggcagcgagagccagcagcctggcagttttcctcattggaaaggaaggacaatcagagccaagagtttcttcataaacctgaataaaaggacatgcgattacggaatacagacagggcaccgcgtagctcaggtcgtcgcaataatgttctttcatggatctctgaagttaaagacacatctaatgtgggcgtaagaaagaaaagggggagaagagcacctccatctgctaaaagattgcgtgataaaagggtggataaggcgattgaaagtgatggtgctgttgacagtgacagcgatgatacagatggacaggttgacaagaatcagcctagtgcacacattgaggaacatgttgatgggagaactggtgatgacttagcaacagcaggccactcaggcaattcttccaatggtccatcctcagcttcagaagaacaggaccattcaacaaactctaaagacaagctccaaaaagctagctctcaaaacacaaagaaggtttttggaaactcaacaaacggcaagcaaggtgcatctaatttggaacaggaatgtgcaaatgaagatgggtctcatgtgctagttgctgctgtgtacaaggatattgataatgaaagaagctctcaaaagattagggatgatcaggtatcagatgcacaactggatacagcttcatctgatgacaaaagttcagaagaagtcgaagacgtgaaggtttgtgacatttgtggagatgttggtgaggaggagaagctcgctgtctgtagcagatgcaatgacggcgcagagcacacgtattgcatgcgggtaatgatggaagaggttccagatagtgagtggttgtgtgaagactgccaaactgctgtagaatctgaaaatgagaatagactacaaaagtctcaggtgaaggctggcacttcaaaagagctttccttagaaggggagattaacaaacctgccattgctgcaaagggaagaagttcatctgactgtgaattgaaggctgggaatatagaaaacaaagagtcaaataccacaaatgagaggaatggcacagtcaaaaccaggacggaagaagatgctgtgacgacatcctcaactagagatattttttctgaaactggtggcttgtacatgggggctgactctagaaagagaatggaaccatcacacgagacattcgtgtctgatgctgacaaaggaaagcaacctagccatcaagtatcaacttcattggtggttaatgctctgaagaatcaggcaccacagtctcgtggtcaactttccaaatccacttctttcaataactcaaaggtccccaaagtgaaacagctattgaatgaagttcctcagaagccaaaatttttgaaggaatcttggtcctctattatcaataaaaaggaaggaccaatcagcatgactactaagtcagcgaccttcaaaaagcctaagccttgtgagccaacaaacaaggcaaagtcttccgtcttgtcacctgtcgaggagccaagggtgccgaatcagttggcgagccacaatgtaacaaatggtcagtgttctatattggggcctccctctgccacatcatcaatggttgctcctgttctaagaactgatagcacaactcagctgctctctacaagaaataacacagttgactcaaataatttaggttctgttcatctacaaggaaacagtgagctaaagaagcctcgtttagcaaaagtgccgggaagtatgatgctatctaatgctgaaagatccgcaggtgggattcttggttccggtgctcatcgagaagtgattcaaaattcagacccttcacatagggatgctaaaataaaggaccaaactggcttcagacagggtgcttctagcagcaatcggacaatccgttgccaaagatgtaatgaatatggccattctacacatttttgcgaagttgaaaaacttcgtttgtcttcaggaaaacctttgagtgagcgaaacttgaaggatgcatctgccaaaagaaataagacatccgaagttagtacattggcttctagtgaaaaaactccttccagagaaccagagcatgtcgtaaagtgtgctattaatcagaatctgataaatgggcctaatgatggtatacctgccccattcagccatgtaaagaagcactcattatcacctcgagctaatgtgtccatccctgggagcggagtagattgtagcaagcctaagttcaaaaataatgatccatctctatctggcacagcaggaatctttgttcataatggtcgcattatgccaaatgatcatagggatgaacctgctcaagggttttcagctggtgatgaaccaacgtcttcaactgtccctgagctgggctggatatggcaaggtggttttgagctgcagaggactggaagttcaccggagctgtgtgatggtttccaagcccatttatcatgttctgcttcacagttagtgctggacgcagttaagaaattcccttctaaagtccagcttgaggaagttcctcggaagaattcatggccaacacagtttcagaaaaacggtccaacttatgacaacataggtctttttttctttgctagagatgttcaaagctatgaaaatcactacagtaaattagttgagaatatgctgaagaatgatttagttctcagaggaagtgttggtactgttgagttgcttatattcccttccaatatcctatcaaagaacttccaaaggtggaatatgttgtactttctatggggtctattcagagttagcaaaaaagattcctctaacctcccatcttatctatccacaagtagagtagaacgaaattttaatgatgatctccaggccatggattggatgccatctacccattcattctcacagaacaggagtgatttagctgaaccggaccctgatttgttaaagtcaactaattttgaaccgagtttggaagccagtcgtgaggtgtgtttggatggagagaactctttgaatcaacttgtacgcagaagagctctagatgatcacctagattcagatgcaaaagcatgttcaacgattagcaatggtgccatgggttcctctgccatgtctatgcaaagaaaacatcagaaacctgattatccagaacatcaagataaaaagagggacacttttggtggtaatgttagtgaaagagatttcgatgtgaacacggtgccagttacttgttctgtctccttaactcaccttcaggaagaacctggtaagctgagcacagccatcgacctcatggatatagaccatggggttagcgcaggtgcactggatcgttcacatgcatcaggtggtgcaggtaaaagaagttttgagacggccgaagtagctgctgaagtacccgagcataagaaaactaagctggataataatgttgtgcctataagctctggtccacgcgagaatgcctgtacgaatgatggcaatagcgataaactgatgcctggaagctcaagcagtgatggcaagcgcgtgtttccacttgatctaaatgcagtgggggatgaggacatcgtaaatattccagccttcaggtgatgaagagttcgctgttccatgacaaaccaaccgtggtggtttggttcagaatgagagatgtgcattgtaaatcgcatgtgcagtttttgacctaatgttttcagacaacacttacagatgtgatgttcccctctttggcagtgaataattctgctccagaatatgcttacagatgtgatctcatctgccagattccttgtgatgtcatgctaatatcgtacaccacctggcttcgcttggcaggatacacgtccatcaagttactaattaggatgcgtgtatgcacgtggagacaccgttcaaacggacgtgtaaaacactgttttctactctgtaggtgacaatttatagatagccttaccatcttcagggatttgcccaaatggccgacgccgcgagaggtttgatctgcgacaatagacatgcttaattttcgtttttgttcattgtatcaagaagcacgaacaagacttatatcccatgaaagagaa

SEQ ID NO: 28836 - DNA, 220 bp, Zea Mays
gttacatcgtatcattacaacaaaagcctaatcttccttaaagattttctcagcggcttcattcagcacctatcgacgacttcgtcgacgatggagttagcgacgctcattacatccagcgcttctttcatgacgggatcggccaggggatcgtatggctcgggcagtggtgagagttaagatgtagtagacaaactgttagttcgaagccagaaaataa

SEQ ID NO: 28837 - DNA, 708 bp, Zea Mays
accatcgagatgggataacgcaatgccagcatcgttgctttttttggcaggcttcggtatatccaggcataaagaatacccaaggctcagatttgctccttcatcttcttcctcccacacctcacctacaaactgctctatctcttgtgttgtgcatcgacatcattattcagggttagaagatggcaatactggtcatcaccatggtgaacgtgcagtgctgccactgcagagccagcatcaccaagatcctggaaagccacaaaggaggaggagatttaatctccattcatccctgtgtaaccgaataagaccaagttttgttatgtgcgcgcggcatggacgcgctgtgaagagatgccagtttcgtggggttttattactccggagtccggtgtcaacatctgtgagaaacatgtggaattgaggaggctttggacttcatgctatgtgcgccggatcggatggatggataacgcatagacggcttattaggagcagtggtcagcaacataccaaagagctgcagaagatacctaatattcagtgtgtgtcatgtcagtgtggtatatagaagttacacctgtgatgtttagtaacaactacatacgaggaaaattaggaggtgcatgttcacgaaatcagccgagacgcagcttccaatatagagaattcctatcaatttatttactatgaacagatatagac

SEQ ID NO: 28838 - DNA, 2125 bp, Zea Mays
aaaatcaattggtacttcaacaaaagatcatgcaccttgcgaacagcgaaacaggtcagccacgaaggcatctcttaaccactggatggagtgcatttgttaataggaagaagctcatttctggagatgcagttctcttccttcgaggcgaagatggagtgcttcgactgggagtgcgccgagcagcccagctaaaaattgtaactcctattcctgcacctcataaccagtgctcaagtaatagcaatcttggaaacgttgcacaagctgtggccacgaagactgttttccacatctactacaatcccaggttaactcaatctgaattcattgtaccctattggaagttcacaagaagcttcaatcaaccaatttctgttggaatgaggtgcagaatgcgatatgaaagtgacgatgcttctgaaagaaggtgcactggtataataattggaagcagagaagctgatcctatatggtatggttcgaaatggaaatgcttggtgatgggatgatggtatagagtgccgttggcccaatagggtatctccttgggagattgagctcacaggatctgtttcaggatctcaaatgtgcgctcccagttcaaaacgtctgaaaccatgcctcccccaagttaatccggagattgtgcttccaaatggaagtgtttcttcagattttgcgggatctgccagattccacaaggtcttgcaaggtcaagaattgttgggtttcaaaacccatgatggtcctgctatttctgcttctcaggcaactgaagcaagaaatttgcagtacagtgatgaacggagtaacaataacttagggatcccaagacttggtgttaggtctccaactggaatccctgggtttccctaccattgctcaggctttggggaatctcaaagattccaaaaggtcttgcaaggtcaagaagtgtttcatcctttccgaggaggatgtttggctgatggccatataagaactgctggcatgtatcaacctgacggtaggcatgtatctggtgcagcttataaatggtctgcaccacaagggcgaagcaatagaagaatgtactggaactgtgaatatgcactcccccgtcagtggtgcagagcatgaatcaaacaatgagagtacagttgaaaatggctgcaaaatctttggtatctcattggctgaaaagatccgatcatgcgatgaagcagactcttgtagtgcaaaatgtaattctcggctccagcctttgaagtcacaaatgccaaaatcgctaggcagctgttgggccactgtaagtgctttgtactatttattctattgacattttgtttgtgtgattgctcattgactggtgaaagttttgcaggttcacgagcaaaggcctgttgttggcagggtggttgacgtctcggcgacagatatgtgatctgatccacatggcatatccttgtagaatatgcaggaaggactaccgagtgcaactttcatggcctgaaccacatcctggatgaaagattgctgaaggtgaccttatgattcttgaaacagggatgtttgacaaatttgtaatgtacttttgggctttaagtatcttattatcttaagctacctagtaatcagcacttgtaccttaaggtgtgcgttatggcaagttcttttagagggcttgtttggactagcaccatctcccaagtactcgttgcattgtttctttgccccgggaaacaagtccgttttggaagttcggctccagtcctgttggtaccatttgttgcatcgtgtgtgcttgtacaattgcacatctcaagcggtaaagcatgatttgaccagctagttgctgccttaattgggacgttcagtcaaggaataaaggccttgcagtatcatcacttggcggaactgccagcagtaggcagtagctaattagctagtgttgacaagctggcgtggtgagcatacgctcctgtttgtttcggcttttcgcagtttctggccaccaaaagcttctatagactgtcaagtactcaatttttcagccagttcctataaaattcgtttgggtaaaaaccattcaaaatcaatgtaacatataatcggttgagtcgtcgcaatagtagtaatccgt

SEQ ID NO: 28839 - DNA, 2953 bp, Zea Mays
agccagcccctcacatatacctccgccgcgcgctcccctcttccccccgctggccgctgctctcttcctccctcctcctcggtccactccaaccccaggcctgccgcggccacagacgggccgcgccgccgccgcagcttccgattccgcttccgccggccgttctgccgcgcgcgcgcctgtggcgcttgagcgggcggatttgttcggcccgttctttggccgccgccgttgcgctgcgccgtgttggcttccaggtgcgcaatccggtcccgtgctctgttcgtgagctgaggatttgagtagtccgccaccctggatcctgatggggccgttcctgtgcagttcccatccaggcgtcttgagattccccggccggagatctgcttaattcgtacctctctctggttctgaggcccctccgaggtggaggaggagctcgtgggtcgacgaaagaacaatcgtttctttgcccactcctgcggctgcttctccgtcccaggctttccagccatggaggaggtggaggtggccaacatggccgcggtggagagctgccaccgggtgctggctctgctctcgcagcagcaggacccagccctgctcaagagcgtagcttcagagacggctgaagcctgcgccaagttcaggaaggtagcggccctcctcggcagtgccagtggcggaggtggctgtggccatgctagaggcaggttctccagacgagtccggcctctggggctcgtcaaccagaagagccccttggggatcgccaccggcagcggcaacccgctggagatgatgcccagcacagctgctgctgctgggtctccatctccacctcagtcgactagctatgcgcaaatgcgcgctcggcttagcagtgcgccagagtcctcacgagggctggatttggcctgctccagcagcaggtgtagccctcatccatttggagcccccaagctggtccagccactgtctgtgcagttccagattgggagtgttgcgcataggtacccgttccaccagcagcagtcgaggcagaagctgcaggccgagatgttcaggaggagcaacagtgggatcagcctcaagttcgatagccctagccccagcggtggtgctgctggcaccatgtcgtctgcgagatcattcatgtcgtcgttgagtatagacaggagcatggcgagcttggatgggaagcggccgttccatttggtaggcaccccggtggcgagcgacccagcagatgcgcaccgtgcgcccaaacggcgatgcacgggtagaggggaggatggaagaggcaagtgtgccaccactggcagatgccattgctcaaagagaaggaaactgcggattaagaggtcgattagagtgccagccattagcaacaaaatcgctgatatccctcctgatgagtactcgtggcgcaagtacgggcagaagccaattaagggttccccacacccgaggtatgaaccgaacaagaaatattcaactaatatgaaaaatgtgtatcaaatcctttgcagtcataatgattgatgcattattccccttgcaccatgggaggtggcatatctgcatcaggctctcagggtgccccttttatctgtagaataattgtctgttgatcctcctccccactttatcttttccttcctcccaagtggttctgcaactaaggcctgtcgataacttagtagctagcacaattgaatatttggttagtggatagtctcagggctcaactctttttgtgcccatttactgacaaaacaatgatctgtcatggtgtgttggggggggggggggaccaaaagtaggtaaattattattgctacaggcgtttgaatgccatgttaggctatctacatcctaatcttgattgcgctcattcccctaccccatatccaactttaagtctgctctggatgataggaaaatgtagctataccatgaaggcaagcacatggggctgattgttcccccctgtgtttcacatattctctttggctttaatcaaatgcaggggttactacaaatgcagcagcgtcaggggctgcccagcaaggaagcacgtcgagcgatgtgtagacgacccggcgatgctaatcgtgacatacgaaggcgagcacagccacacccagctgccagcacagcctgcccagacctagaagatcagtaaatcgtcgctccattctggaagcgcggggagcatgcctttgcacctagatggtcatgtagaatctcaggccttcgattttcgattgcagcagcagcaatgaccatggagagaatcttatgagctgcttggcccccctcctgagtcactctgttacagatgcaagagtggggactgctgccaagttgttcatctttcttgtgagctgtggcatgtatgtataattgaaagatggtgcaggaaggaaggaaaatgcagcgtccgacagcgaccggtgagctttgccggtgagcctgaagggttgaaagcaaagactgacaagaggaagtgaacaaccgcgcattgttgtgagggtggattaggatgggaagatttggcttttagcgtgcacaagttcacttgccatggactagcctctgtatgttgcttttgctttttctgaaatatcgcatcacctcttttgttgacaaaataaaaaagggtggggttgcatcccagtatcaaaggagggagctccgtactgaccccgctgcaagttaggaccatctgggttttccaggtgtaagcattccagaagggaaggtgcaaagctgttgttggtgtgatttgccacccccagtactgttgctcttgtgtaaagcattctgtgtaattaatgatttgtgccatctgcaatcttgaggatgaatggatgctctaactgaaactttgtacgcgggctaaagattatttattttgaaaaatcttctaaaccttttttcgcagcct

SEQ ID NO: 28840 - DNA, 555 bp, Zea Mays
ctgagatttcctatgaaaagaggtgcccctgcctgcggaggcatggaaagcccataactgcataccagatgagcactatgttcagacgttgcttgcacaaagtggtctagaagaagaacttacgcggcgatcagtaacacatagtgcatgggatctttcagcttctaaagatcgtgaaagacgcgggtggcatcctgtaacatataaagtctctgatgctactacaagacttataaaatctataaaggatattgataatatatattacgagaccgaaaatagaagggagtggtgtacaagtaatggaaagccagccccctgcttcctttttgccaggaagtttacacgtggagctggtctgaagcttcttgattcatcactgatagcttcaaagtgatgaatattagtgacagatgcaagtgccttttgattgtttcacctttcgagaatatttcagttcacacaaatgtaaagtgtcttctggtggcacagctgcgaatcgagtgtcttctggatagcgccggacctcgccctcaaggggggtcggcgccaaga

SEQ ID NO: 28841 - DNA, 614 bp, Zea Mays
ctcaaagaaaaggcaaatttcaagttgagggctaccgtcatgatggcaatttttttctccctgactgcacccattggcattgcattagggattggaatttcatcaagctacaatggccatagcactacagcgttcattgttgaaggagtgttcaactcagcctcagcaggaattttgatctacatgtcattagtcgatcttctggccacagatttcaataagcccaaactgcagacgaatacaaagcttcagctgatgacatatcttgcacttttcttaggtgcagggatgatgtccatgcttgctatatgggcatagattttcagaccatcaaaggatggctagagttgaagaaataagtttatttgtccaagagttctccattttctcaaacaagatgcccttggtgaagggttcatcatattaatccacgagttctccatcttccgtacgatatagcctcagatagtccttttgtacttcataatgtgagattacatgatttgtcatttgttggcatagtccattatcctaaagctatgatagtcattagctgtggttcatgtgctgaacattcagtcataaagacagagctaagccaattctatcataca

SEQ ID NO: 28842 - DNA, 1614 bp, Zea Mays
atccattacacgatttcttcctgaaaccgcacagtttgctgaaaatttctgtttttttacatatctactagctgtttaaatcttaccatttttgctctctccctcataaatgatttctagctctgcccctagccgcctactatgaatgatcatcccgtctgcttccgtatacattattgattgtaggtgtaagtgtcggcgcagcagaaattcgggatcaactacgggcagatcgcgaacaatctcccggacccgacgcaggtggcgaccctcctccggtcgatgaacgtgaacaaggtgaagctctacgacgcggacccccgggtgctgacggcgttcgccaacacgggcgtggagttcatcatcgccgtgggcaacgagaacctgcagaccatggccggcagccccgccgcggcgcggcagtgggtggcggcgaacgtgcggccctacatcccggccacgcgcatcacctgcgtcaccgtgggcaacgaggtcttctccggcaacgacacggccacgatggccagcctcctccccgccatgaaggccgtccacgcggcgctcgcggacctgggcctcggcggccaggccaccgtctcgtcggcgcactccgtgaacgtgctcgccgccagcttcccgccgtcgtcgggcgcgttccgggaggacctggcggagtacatgaagcccatcctggacttccacgcccagacggggtcgccgttcctcatcaacgcctaccccttcttcgcgtacaaggcgagcccgggcagcgtgtcgctgccgtacgtgctgttcgagcccaacccgggggtgcgcgaccccagcaccggcctcagctacgacaacatgctgtacgcccagatcgacgccgtgtacgccgccatgaaggccatggggcacacggacgtgggcgtccggatctcggagaccgggtggccgtccaggggcgacgaggacgagaccggggccacggtgcagaacgccgccgcgtacaacggcaacctcatgcagagggtcgccatgagccaggggacgccgctcaagcccaacgtgcccgtcgacgtctacgtgttcgcgctcttcaacgagaacatgaagccagggcccacgtcggagcgcaactacgggctgttctaccccaacggctcgccggtgtacgcgctcagcgccggctccggcggcggttcaggtccgggcgggtcgctcaacccgtactacacatccatgttctcctcgtcgtccagatccgcggtgagcgcgaccttcttgacagagagagtgatgctgttactgctgctgcaagcaactgtaatactccgacactactgctagtcagtgaataccttgtaatcttgtatacgaaaaaaaaaatgcatctcaattcaacccatagggtaggccttagattcggaaatttggcacgacagtgtggctgctcgaaaaggtctcatctttttttttttctcttttattcccccgcagcaatgaccttgaaagttcttgaaaaggtgaccttttttcttctctgtgcacaaacctatcgagatgtggaaacacctaaagctgaggtttgaggttgattgatgtccgggcatcgtcgaaagcgcggtcatt

SEQ ID NO: 28843 - DNA, 1847 bp, Zea Mays
ctcatctcgatctccctcccggctccccgacctttgtaaaccctaaaaatcaatctagttcgcaccaaatcgatcgcgcctcagctcaaaatccgaaacggttcgaacgatcagaacgattcagcttcagctcctgaatccagcagcaatggatcgctcccgctccaagcgcggctaccactacgaccaggactccccgccgccccgctccaagcagcgcttcgaccgccgcagcggtggcggccagaatgctaactcgagctatcaccgccgcggccccctcggcggcggcggctccgaccgccgcgggttcctgccccctgcccccgcgccgcccccgcccccgcccccaccgccgcttcctccctcgtcggccacggcgggtggcggcgctggtcccaccaccaccaccacctccttccgcatcctgtgccccgagtgcaaggcctacggcttcccacccggcttcgttgccaaggtccgggacgacagcggcgcgcttgtcactgtgcacccgcccttcgcgggcgactacgtccgggtcatcgagacggtggacggcgcgaggcgcgaggcagacggccgcccgcccatgttctccccggcccaagaggcccttctcatggtgcaccgccggattctcgagaccgacgctgacgacggcgacgaggatggcgagtatgggcccaggggcaaggactccagggacagggggaagaccaccacacgactcatcgtgcccaagatgcacgtcggatgcttgctcggcaaaggtgggaagatcatagagcaaatgaggatggagaccaagacgcacattaggatcctgccgcgtgaccagcacactccgcgctgcgtttccttgtccgaggaggttgtacaggttgttggagatggaaattgtgttaagaaggctgtagcaataatcactgatcgcctaaaggaaagcttacaccgtgaccgtggtcccttccgtgggcgaatgaattcaccagagcctcgaatttctcaggaagatgattatttgggtgtttcgcagatgcctgcatacgaggaatctctgggacgatctgatcagattaggaacaacactagcatggagccaccaggatatgagtttgattcaaatgatggcaaggtgattgaacatccagatatcctgtacgatgacataatttttcgaattctatgcccaaatgacaaggttgacaatttagttgcaacaaatgatggaatactggagatgctacaggctgatgttggtgttgatgttagactatctgatattattgctggttctgatgaaagggtagtaatcatcacatctagagagggaccagaccatgagcttttcccagctcaggaagcagtgctgcacattcaaactcatattgtagacctcggcccagacaaggataacattatcacaacaagactacttgtaccttcaagtgaaattgcttgctttgatggaagggaggggtcattatctgatatacagcgacagactagtgcaaacgtgcagatattaccaaaagaagatcttccattatgcgctttagagtcagatgaactcatacagattgttggagagattagtgctgctcggaatgctctgatacaagtaacaacaaaattaaggagttttctataccgtgagatgtctggtcctattcaagttggcaatattaatgtacatggagccatttctccagtagcaggctcacctggaggacccaacctcggaaatgatatgccaatgagtgcttatcaccaagcatcacaactggcaacttcatggcattcaaaatttggtgttcctctgcagggcatctagtgcgacaatg

SEQ ID NO: 28844 - DNA, 770 bp, Zea Mays
ccatgttatccaccagataaatgatggcccatgcgcccttattgcagtctgcaatgttctattgctcagggggacatctcttttgaaccacatgaaactgtggtgtcaatggagtatctacttggccttgtccttgctcttcttggaggaagtgtgaaaatgcaggactattctgatgaaagaaaaagtcagatattggatgtggtgaagagtctggccggagggtttgatatggatgttatcttcaccagaacggatggttttacaatgactcaagagtggttgcttctggattgcttagatctcaaccttcgacatggttggattgctgctagggatttgttgaccggacccgaagtatcatttgaaagtcttacattggcttctaatgaacctggttttccacatgcttggtttcgctgcaagaagactttgttgagaatgttccgtgcattctgttctggaacaagcattaccatactatagttatgatcaatggagtattaaattctctagtcactgattctaattatttagaaactcgtatagtttggcagacgcttgacggggtcaacggtgatggagtatatttggacaacaacttcacaccagtttatgtggggctagatgcagctacttctgtatatgtaatgtggcccaaaataaattaattttctgtatctgcaatactttgttattatggtatgatcttttccttttccatttctatttctatatgtgatatatttatgttgtagaagtagtcaaat

SEQ ID NO: 28845 - DNA, 2190 bp, Zea Mays
cccactgctgcttatctcgtggccgatccgcgctcgccccgtccccgcatctcgccgccgcgccccggtcagtgtgcgcttgagacatcgcccacacgagacatcgtgtgtgatgcccgcccccaacccttccccggtgtgatgcccgccgttgacgtctcttctctcgcccccatcctcctcaacctcggcgccgcccctgcccctgtcctcgatggcaaggaaacttcccccgggcataaatctcactgctcacgcgccattagcgccatacccgctacctcctctggcatgccacacgccgccatccccctagcccatcgtgtgtcacgcgcccagatctcctatttttacgcccccacgcaacataggccatcccaccatggagcaagaaaccctagcgtagccaccaaccactgctgccccacatggcatcctgactgtggctgcatccatctcggcgcctcgcccaccacgttgcaccaccaccgccgctcctcctccccaccgcgctgtcgccctgagtaccaccgccaccgccaccgtgcatgtcgctagggccgcatctctcgatgttagggcccaaccgaacatcgtcgtcgcctccacctctgcgtctgggccaccgcaagagtttagggctcctccggggttcgagatcatgtccgaccagcagagcagcatcctcagcaccatgctcgacaaccccctccacctcggtactggcgtcttcgccctcgggtacgcaccacaccttttctcaccatccgagcattgccaaggagctcctctccatccccaacgcgcgccacgccccaccaccaacgatgaatgggtgcttcagattcactaagacgatggcgcgtctgcggcaaggagcttcagattcactgccatcagaaacttgcaggttgtctgcgctcttctcttagggatcgagaatcgcagggaggttcctcgcttctataagaaagatgtgcttttttatttcattttccttgtggagttgtagttcagttcagtttgtcttcatgcatggggagtgcttggttcgattgttcatagccataggtgctacagattcgtctatggccaagacagaagtttttgttttcatgatgttttcatggaagaagatggcgagaagctctctgcccttctcatagttaactcttttgattaagtgattaaccaatttagtaacacatatttaatgtttcagcttgtttggtttagacatggtccctcagtaaattttttatttttttattatctttatccataaactaagttggtatgtagtgacgggtaagaaatactgtggtggtttggacctcagttattggccagatgaagggcgaaggccattatcagatcctcgtccacctttgggctattgctgacaagtggacgagtgtcgtacacctctccaattccccccttcaatgtggtcagtgttgaatcatctacgtcatacagtgagcaagggcatactgatgagggaagggatgacatggatttttctcgttcgagcatcaggttttgtgcgttgattatggtgtgctcgttggtgagactgcgacgtcctcgttcaagtcagctgataatcgtgtcctccaagagcaactactacagaagaatgtggaaatcaacgatttataagaaaaagtttttcacgttgagcaataactctcagcaaaagtggatatatcctctgagaaggaagctgattgtgcacatcaggagactattgatttgaaatctaaacttcagtccaaggaagctaaaattgaaaagatgaaatatgagcatctggcgagggaggctgctttggtagaggatcttcttgaagaggagtacaagaaaaagtttgatgaggcaaacaaggaactatctcttgagaatgatctagcaagcatgtgggttcttgttgctaagttgaaaagaggggctttagacacatctgatttgaatgttgatgatcgaactaaagtgtaagggcgtagagatcgccacactgttgtctcataattggtgttaataaaaaataacatggtgctgcacggaatctctactttgtcttgtaagcaggattgttctgtcggtataatttgatttgtatgtataatgtcttcatgctttacttgcccttttatgaaatgtggcgaccggtcctcttgtctttctttt

SEQ ID NO: 28846 - DNA, 1103 bp, Zea Mays
ctggtggtggcaaagtgaacatgggctggaagtgagggtctcggcccatgatgctcgagtcatgtgggacaacaaaactggacgttccaggggttatggttttgtctccttccgtaatcaacaggaagctgaaactgctataactgaaatgactggaaaatggcttggaagcagacaaataaggtgcaattgggcaacaaagaccaattcagaagagaaaccagaaactgacaatcataatgcagttgtactaacaaatggtagctccaccaattcagcaacagatgcaagccaggatgcaggaagtaaagagaacccagagaacaatcctgattgtactactgtatatgttggcaaccttggacatgaggttaatcgggatgagcttcaccgccacttctataacttgggggtcggggcaatcgaggaaatccgtgttcaacaggataaggggtttggatttgtgagatatagcacccatggggaagcagcattagctattcagatggccaatggattggtagtccgtgggaaatcaattaagtgctcatggggaaacaagccaactccacctggcaccacctccaagcccctaccccctccagttgcttcataccagcctgctgtagcaatgtcaggtgtcccacaaggtttcacagcagccgaacttcttgcttaccagaggcagcttgccttaagccaggctgcagcagggcagattgctggccagcatggtctcgcgggtcaggtttctgcaggtcttcttgctgctgctggttctcaggccctctacgatggctacccgaaccagtcatcagcccagcagcttatgtactacaactagagttcaagaggacggcgttggccatcgtcgccctgttttttattttgtggttcatgtactatttgtgtgagagttcttgatctcttgtcgccgcggaattgtgttactatcttattactgtaccattgaccatttttcttgtgagattcatttgagtagtcactttaacagagtaagagatgtattctatgtgacttcgcgattgattaatgtaatgctcccctgtgcatagaagtatggaagaaaaaaaatacagaaa

SEQ ID NO: 28847 - DNA, 3675 bp, Zea Mays
acagcgactgcggtgaggcgaccgttgcggtgccgtgcattaaaccaccctgccccccctgtcccccgcccccctctgcccccgctcctcgccgtcggcacccgcacccgcgcggcacggcggcgtccggggtccggtgggctgggctgagtcgacgagcgcttgagctgagccgtcccagtgcgggggcgatcgcgtcgcctccggcctactccaggagcttcaactgatcgggcaatcggttgtcttcgtcccgcgttgaagtagattcggtcaaaaagtcaaaccgacgtgaggggaatttttctggtttggtttggtttggtttggtttggtctggatccgaaatgctgtgctggaaagcggttggtcagtaaatcgccgctgctaaagtttctgctccctgagctcagttggatcggagagttttagttcagtgtgcccatcctaaaacagggcgagttctgccgtgaatttgttggcttgtgttgtttgatcacaactgtattaaaaaaaaaggatcgatctttgcggctacaagagagtgacaacaaggaggcttggtcagctcgttcctttcacctgtttggcgagtgcttgaggaagaagacgacctgctcagctcctcctttggttgctcatcgaatcaaagaagactagggaaatgggggtaatgtcccggcgggttctgcccgcctgcagcagcctttgctacttctgcccatctctgcgggcgcgctctcggcagcctgtcaagcggtacaagaagatcatagcagatatctaccagctgcaaccggatggagagccaaatgatagaaggatcgggaaactctgtgattatgtctcgagaaatccaacacgcataccaaagatcacagagtatcttgaacagagattctataaagatctaaggcatgagaattttacgttggccaaagttgtgccatgcatctataggaaaattctatgttcatgcaaggagctcaggccattgctagccacaagctcattaagcaccattcgcactcttcttgatatgaaagcgcatgatgatctacaagttctgggttgtcttatgcttgttgacttcctgaatggccaggttgatagcacacatatgtttaatttggaaggcctcataccaaaactttgcaaaattggtcacgaattaagagaagatgatgaagggctccgtcttcgatctgcagctcttcaggctcttgcttctatggtccaatacatgggcgaccactcacacatttcaatggaacttgatgaagttgtctcagtgatcataagctgttacgaggctaatcaaacactctcaataaaagagccacgactattggtctcctgaaagtgggattgccctttccgttctgcaagaaatgcagaaactgatggacaaatcagggcaacatggtcatttgttgttatctttcactataaagcacatagaccataaaagtattgccaagaattctgtcaagcaaatcaatattgtaaaagttgcttcacatcttgcaaggcatgcaaagttgaaggcatcagtgacgatagcaagtgctatcagtgacttaataaagcacttgcgcaaatgtatgcattttgctattgaagcatctaatgcaaatgctgattgtgacaagtggtacagtgcactttatgtggccttggaggagtgcctagtgcagttgacagaaaaggttggggatgttggtcctattcttgatatggttggggtaatgcttgagaatctctctcatactgctaccatcgcaagaacaacaatttcatctgtttatcgcacatcacaaatagcagcatctgtctacaagtcatcataccatcagaaggcatttcctgaagctttatttcaccagcttctcttagcaatgttgcactcagacaataagacaaggattggttcacatcgtgttctatctaccattgtagcaccttcaatggcgtgtccatggtcggacatcagctttcctatcccaatgaagggtgatgattcacataacttgcatttgttggttctctcagctttctcttctgaggccataatcaatgaaacacggaccaaaaacaagatccaagaatccttgcaagaaaacaacaaatcagaagctatagtggatcctgagaatggatacacacagacagaaccagataaaaggaagtattcaggggggccatgtctaaatgagcattatcgtacagcttttaatgatgaaaacttaaagttcatgaagttgaacgaccaccagattgttctccttctttcatctatttggagtcaagcatctctggatgacaacttacctgcaaattttgaagcaatgggccttgtctacagcattgctttattatgttcaaaaccaaaaagctccagtcatgtgacacgtattcgttgtttccagttggcgttctctctcaggagaaactctcttagccctgaaagtgatttgaagccatctcgtagaaggtgtctgtatacgatggcatcagcgatgctcatcttttcagcaaaaattgctgatctccaccagataattcctcttgtgaaagccgcagcaccagagaaaatggttgatcctcatcttcgcttgatggatgactgccagcttgttaatacctctgcagagtcatctaacagcgagatggtttatggttccgaggaagatgaaagtgatgcactggcttttctttcagccatcaacaagcctgacacagagttaatagaaaccgtgatgtgccacttcagggagaagttcgaaaatttaccagaggttaacgggatagaagagcaacttcttcaagagttttccctggatgattcgtttcctcttggtgctccactattcatggagatgccacactcttgttcaatgtatgcagaaaaggatgaagaatgttttgacgaggacactgttccttctgagctagacgatgacgacatcatctttgagcatagtgggtctcaatctgaccggaaaacgtcaggttccatggcttcgtcagatgttctaactgtcaaccaactaatagaatctgttcatgagaccgcaaggcaagttgccaacgttccagttcccgccaaccctgtaccgtacgaccagatgaagagtcagtgcgaagccctggtcatggagaagcaacagaagatgtctgtcctcttgagcttgaagcattcgaggactgactcacatggttcagccggtgtggatgggcttgaaacgaatgagtcttctctgctgtctgagcctgagttacagtcaacaaggaaggggcgcatgcgccgctgcgattcagcgtccagcgaatctgactgttcgttcaggctgccacctgctagcccatatgacaagttcctgaaggcggctggacggtagcctgatgcggttgcggcagcttggcgcttcagttttcaactctctcaagtctgcatgagagttcagtacaagtgattcatcggcactctctcgttctcggagtccattctttcaagtgtatattatatttacatccctcgacacaaggtgtataaagttctgttactgtttccttcagaataaaccgaagtgtataggcactagcggatgatcatgttcaagacggtatttgttcatttgttgatcgtgaaaagaaaacattttacacaaatca

SEQ ID NO: 28848 - DNA, 2280 bp, Zea Mays
atggagcagaggttgggggcaacgtatcagtggtggtcatggagtcacagtaagagctgtgaatcggtggagcggaaggggcgggagtggctggatgaggcaggacttgcctctggattacagcttgtattggatatgttggtgactgtgggagaacctgagcttggttcaagccgcggacctgtgtcatggggcgtggcaggtttttgtggagtgactgttgctgagaagagaccaatgatgcaatctcgtgatgttgataaatatttgaacaaagctgacaacattaaccatgtgctcatgaactctggcgacatttctaaaattggtggtcactgcctgcatggtacacatggtttggggactcggctagattctgatgctcagagttcatacaaacatgtatgtccatgacttcttgaggcaagtagtcagcgaagttccagatattggtgcatctgatgttattgctgatgataagcttggcaaaggacgtatatctatcctgtagttgataaggttcttacatgtcaaaataatcttctacgaagtgttaataaatgctgaattgtcatcaggaaagctggagatggaagcgaggaggaattaaagaggacaataaacaaagcagaaaaccatacaggcaatgacaggttgtgcgaggggttgtgtacttgtgtgagaggctgccgcggacgtgtggaacttagcgggtgttgtcatagttcataaacaattcgtggagaaccaatctagcaagctagtagcctaaaagtggagatagccgatgaggtcttaagatgcaactgaagcaaaagaggctactacatcaaggagcagttcaaccactcatttgatggcatagtccatttgatgaggtcttagatgcaactgaacccactccaaggggtttgctcaggaacattgacttgaatttagatccaactgatgaagaagatgagattacagtgccaccccaagcccagtcgatccagcgactagttccgttgcagccactgcgggaccatctgttgcactttctgggtgcttgggaactgcctgacatgaacaatatggagatgggccctgtccagtttgctttgtaaaaaaaatacagattggagagaatgggtattatgacaatcaagactagctctgcccttatagctttcagagtggataagtaggatagcaggacagttgtaggttcatcttaactctttagagattctcatgtatcatgtgtatcatagccgccaaagctgcagatgcagcttataatgtgccagaggtttaaggttggctggctagttgactgtaacgttccgaagctagattcgctcaacacgtagtgctttggcatgtagtaccagttgtacttgtacactcctgtctccagttgctctccagtttaatgttaattatatgcttatgcttcattggatagttgaggaagatcttgctggatgcatgtatggcaaataaaaagcaagaaagagtttcagattacttatcacagctcattccatgacaggagtcaatattttcatatatgatagacctgcgaaaagattgcgagccttcagggataacgcgtcatcatactgggagatgatacctttatttcctgaaacatggttatccaagcacaaggaaaaagttccagcagtgattgcgactcgccagctcaaggtgactgcggaatccaagatgggatcgatgcttctacagctgcttgaagttgttccacaccgcccccaccttggccttgcacagcttctttccgctgccggcatccacctcgacagtaaaatgcatggtcctggcatcacgttctgcacatatattatacatgggatgcatcagtggtggctccaacgatatcaactaggtttatgcagagtgacatgtctttcggtcttgctgttgtgctccgtgaccgtgactgaagcacgcgagctcaatggcctcgaggtcgctctcacacccagtgggtgcgttttggacgtcgtccaccatcccacaggccgttctcgtctcggccatggctgctggagcctgtggagagggagaaaagctgtgcagagggagaaagaggaagctgcggcgagacgagacagacgacgacagacactcctgagtcctgcttgtagtagtagagcaccaacaacgggctattgcataccatcaatgggcaggtctcctaatctagaagtgaatttactttctgccaattcttccattatctgctattgcatagctttttcattacttcacttc

SEQ ID NO: 28849 - DNA, 884 bp, Zea Mays
ccgccgcatggtacccctgcccagccgccgggcccaccggtcgggttccttcttcctcgcaaccaccctctccactcgcatgccgccaatcgtgttgagcccccacgacgcgcacaaggagccgcccagtccagtgcacgtcgagttcctctacggatcgagctctcctctaatggcgtcgttgctccgtcattggaactgctccctgggcgcggccgactttcttccccctgttagccgacccgctcccaaccccactttctgcgcgcgcccgagcccagttcggccgggacctcgctgtccgaatcgcggcaaggaggcctgcgcgcggctgagccctcctgtgcgcgcgagccctatagcttggctgaccggggcccccttgctgcgcgcgcgccctaccgagccgtggccatggcgtccagccaggaaccgcccctgcccatgcgttcctccggtgaagtgcccccttgccgacagccatgcttctcccccactcgccatggccacctgctactctgcgtcctaccgttctgtgcagcagggcagcaggagagtagaccctccccctgcagctgttggtcgtgctctctccgtgtaatcaaatcaaccatggatgacccctttctcctggtcgtgcttttggctgaagaaagaagagaaatgcccatagccacactgatcccatccttccgggatctgttgtggtcttgcttcttgtgaccctttgtgcggccacttcgtcaccagtgagatgcactacatcatcgatcgcgatctgtttccgagcttcgaggaatcgacggtcaggcttcaatgaccaagtgatcaagctcttcgagttctacgaggctgaagaccctgagcatctgattggtgaaggc

SEQ ID NO: 28850 - DNA, 2850 bp, Zea Mays
tttgtggttactttttcaaaaattaactctttcgttcactataactacaaaatagtaagccagtgtactgcaagaacaatgttcttcttgaatactcaaaagaacaatgtccatcatggattctgctacgtgaccatgtggtccagcttgtttggtacacgaggccatatctttgtgttcgctttatgtatatgttccctttttattcctcagtttattcacttttatcttgtagttgcaggtttcttactcctgggtaggttccatttgtcttaaatagctttagagcaccaccttatgatatctccttttgactatgattattttcctatgaataatttttctgggaatactattaagataccaactaatctttgatatcctctaaaccaaacgcttcatgatagatgattcttgaggttgttgaatgaattggtcttgcgcatgtttgcaggcctttattggcccactaatctttgatacccactaatctttgtgctctcaattagctctaaactaatctttgatacccactaatatttgtgctctgaattggcctaattaatgatcaagtggtcatggtgtatgtcaactaatcactttctcttcatgtactactaggttataattatttgatgtggagtataaacatgcttcttgtaacatacatactgatggttaggtacctatcctagtcgtgtttgcaggcctttcagattgaaccgattacttcaacggtgtcatacatgattggtagggatgtgatggaggggagggggcaatgcaggtgcaggtgcattccgaatctccttccctttctccggattctattgttctttgtttcctcctattcgtttctgtagtgagaaatgtcttcggtaagatttggttggtggaaattcactgcatttacttattattgtctcccaatttcctcttcatagtcaggaactttctggttcagtggaaatgtggaattgtaccaatgtagagtctagaataagtgtgcccttatcctcccagttagcataatgtgggtacttcgtttgtcatgtatggggcatagtgcaatacaaatccttttgttaattaataatgattcagggatgcctcgttgtccatgtaacatccaaactgcccacacacacacatcaaattttggcatgataaccctgttcattaaatctgttttgtttgtaaatcacaaacaaatatgttaaccttttattgaagtgtgagatactcaatcatgttgtgttttttggttttctattttgagtgtataggtaaaatttagaattttaagagcataataccctggttgtatttggcttgggagtaagtggatgttagcaatagtggagcatgtgtgggaagcggaggctgacgacagctcttacgttatcaaggaacaaacttatcctgagaaagtgctcacacgtggaacacagactactctttatttgagagatgatgacaagtatgagtttactgaccctgcaagaattgaaagcttagttaagaactgctcacaatttgtgtcattctcatatatacatggaaggagaaatcaagaacatttggggtctaaagagtctaaagaggaggaagaataaaaaaaggtgaagaggtcactgaggttagttttgtgtcagtgtaatatgttgtttgttttcatgtaattcttgcttctaatattatagaaagaatccggataggcagataagaacatgtcaatgattttgatattttcagaaataaggatttctatggtgcatgttatttaaaaaacaagccaactatagcttgtgtcaggtcatagatgcttgctattattggaactggtccatgcaaatcatttttgctcaaaatccaacttggccaatcattagtaggtcaagttatattcatgaaaccttttgtttgttgtttctttgcctaaaaacatgctttcattggttagttcattatcctagagttgcagagggactttatgtagcatgatccatgctcaggtattgcaattttggcaatttctgtaatgtaacatggaattggtgaaggtccttggtcgagtaatcacaatactattgatattattcatattgattaaatttttatcattggttctctttgtttgttatattatcttgtgtcatcgattaacaactctttcaccggacgtcttgaggtgactttagtttcttatcttttatatgtatcctgacataaaaccagtgcttattttctattcgtgcatgtgcaggtgttgtactgtttcttagaattatccagcaacttcgatgggaggaattttgtttgagcttgtgggcccaatttgagaagttttacatatagagtaaaaaaaggtcctgctctcgtgttttcgtgtaaaactggattttgttcagttcttactgtggagctatgcttcctagataaaacttctcgatttgtataacttctcgatttgtataaaaacttctccatttacatattgggaagtctatatgtaaaacttctcgatttatatatcaactatgcttcctgtggagcaaggaagcgaacgcaagctagccttttgtattagtgcattctgttcagttcttacttgatcatcccgtgttctcgcgtgtgccatggctgagtggcaagctcaacactggtattgttgtcttgtctcaaatgaagtccggttccacaagttaaccggaaatcttcatgggtgatagctgcgtcagattcttccgcgcatagggcaagtaatgcaagtgatagctgtgtcagtttacccccattttcttgggcatcacttgtctcaaatgaagtccattggaggttcgcaattta

SEQ ID NO: 28851 - DNA, 2304 bp, Zea Mays
gaaatactttgtcattaattacaccctgcgttccaaattactgtagatgaacttgtcttgaggaacttcaattactgtgtgatagatgaagttgattcaatccttattgatgaagcaagaacacctcttataatatcaggcctagctgaaaagccaagtgatcggtattacaaagcagcaaaaatagctgaagcttttgagcgagacattcattacacggtggatgaaaagcagagaaacgttttacttacagaagaaggttatgctgatgctgaagaaatactggacatagatgatctgtacgatcctcgtgaacagtgggcttcgtatattctaaatgcaatcaaggctaaggagctcttccttaaagatgtcaattacattgttcgtagcaaggaagtgcttattgtagatgagtttactggcagagttatggcgggcaggcgatggagtgatggtctccatcaagcaattgaagcaaaagaaggtgtacctatacaaaatgaaaccataactctcgcatcaataagttaccaaaacttctttcttcaggatgactcagatgttgttttcagagcaacaaatggaaaatggcgtgctgttcttgttgagatatcaagaatgaataaagttggccgtcctgtgcttgttggtaccaccagtgttgagcaaagcgaatctttatcaaagcaattgcgtgaagctgggattcctcacgaggtcctgaatgctaagccagagaatgttgagagggaggcagagatcgtagctcagagtggacgccttggtgctgtgacaattgctaccaatatggcgggacgtggaactgatattatccttggtggcaatgcagaattcatggccaggttgaagttgcgtgagatccttatgccaagagtcgtcaatccaatagatggtgttattgtatccaaaaagcagatgccaccaagaaagacatggaagacaaatgaaagcttgttcccatgtgaactttcaaaagaaacattatcgtctgtcaaggatacagttgaaatggctgtcaaagaatggggagataaatcattaactgaactggaagcagaagagcggctgtcctattcatgtgagaagggaccaacacgtgatgaagtaatagcgaatttgagaaatgcatttgtgaagatagcagacgaatataaagtttacactgaggaggaaaagcagaaggttatatggcattataaaagaaacattgatagctctatctgttgctgttcagtgtagcgtagtgttcacgtgatcaattttattcaggtcattacagtaggtgggcttcacgtagtaggaacagagcgccatgaatcacgcagaattgacaatcagctccgtggtcgaagtggaagacagggggatcctggaagctctcgcttctttcttagtctcgaggataatattttccggatctttggaggtgacaggatacagggtctgatgcaagcattccgagttgaagatcttcctatcgaatcgaaaatgctaacgagggctctagatgaagcgcagcggaaagttgagaattacttttttgacatcaggaagcagttgtttgagtatgatgaggtattgaatagccagagagatcgtgtatatgcggaaagaagacgtgctcttgcatctgacagtcttcaatcacttattgtggaatatgctgaattgacaatggacgacatattaggggctaacataggacctgatactccaaaggaaaattgggacctgaacaaacttatagctaagctgcaacagtattgccatctgttggatgacttgacaccagaattgttggagggcaaaagctcaagctacgacgatttgcgggagtacctgcgtaagcgagggcgtgaagcttacttccagaaaactgttagttatttctccttttcctttcatggatattgttttttcgcatggttcaaaggttttaagaagttcaacaacaacaacatcaacatagccttttagtcccaaacaagttggggtaggctagagttgaaacccaacaagaagtcaccaaaaagagaaagagagagaaaggggaggggaaaaagtttttgagagaactaaaagggaaaaggcctaatcacagttcgggcacgtggatagtttttttccaagcacttctatccaaacacaactcctttggatattccattccttcaagtcccttttgattgcttccttccatgtcaagtttggtcgtcctctacctctcttcacattattgtcctgtcttatgatgcctttgtgcactggtgcctctggggg

SEQ ID NO: 28852 - DNA, 2726 bp, Zea Mays
aaggaaacctgcccgttgctttgctccccccttcggcatctctacctgcgtgcgtcaccggcatttaatcccgcgttccattccgaacagcgagcacaaccaccgctgctgcgatctcgccgtctccctcctccacgccgtctcggtctccctcccatggccggctacccgcctcccggctccggctacccctacggtcccggcgggggctacggcgccccgccgccgccctacggctcctcgcccgcgccctccgccccgccgtacggcgagaagccgcccaaggaaggcaagacctcgacctcctccgcgcccccctactacggcgcgcctcccccatcctacggcgcgccgcccccctcccagccctacggcggcgggggcgggggcgggggcgggtacgggtacggcgcctcgcagccgccgccctacggcggcgccccgcagcagcagcccccgtacgggggcggggccccggcagggttcggcagcccgttcgcgtcgctggtgccctccgcgttcccgcccggcaccgaccccaacgtcgtggcctgcttccaggcggccgaccgcgacggcagcggcatgatcgacgacaaggagctgcagtccgcgctgtccgggtacaaccagagcttcagcctccgcaccgtccacctcctcatgtacctcttcaccaacaccaacgtccgcaagatcggtgagtgcgccagacgtcgacgaccgacctcaccctgagacctccttccttcccctcgactgtcgtaaaattgcaatttctttctgttgttcttgttcgatctgtcgcgcagcacggatcgatctatcgagacagagcgttagttcctaaaaccaatcatggtgttctccaggtcgccaaaaagaactgcacgcggcagcaggccagcagcaaatgcttcctccaacttcttttagctttttctaaaaagtaacttctaaaatgttaaaaaaaagtcccatagcaaacttgttggcggtaccatctccggctacctaccgagctgcggcgctggcatctggcaagaagccagacgaactgggacttggatttagggccaaatattgatttgatcaactagacccatttctttatgcgcagggtccaagatgatcatgtagagtagtaggctgtagatgacttgcgtgcatatgggattaagttccagtactgaccatgcgctgtacatactgcaaggaacgtggagttcttgttggcagcctttattgtagaccatgaaccttcttttatagtgtgtcaacaggtcgagtactgctagtaggccatgtcgctccctagccatttgcctgtaaatgctggccgcctggcacatagtttggcaaccaaggaggccccatggattcagtcagctctagatgtgtttatttagaaattatttactatctgccacaggcataccaactggtctgttctttgttctgtactgacaaactagcaatttgatcattccttaacgaagcagatagtttagttaaattttacactctgatcgagtggccaatattgaatcgatcaagtgcatccatttctctatgcgcaaaatccaagatggtcatgcagatgacttcatggttataaggttatttttttagtaccgatgatgtgctcaaaacatattgtactgtaagtaacatgaagttcccctatggaacttctctgtagcgtttgaacaaatgaagtattgctagtaggctatctcactctcaagactttcgatgtaacagtggcacatagtttggtaatggtaatgatgccttttgggcaatcctgtttgctggagtttggatccagctgggtactgattctgtgtgatttgatattcttaacttgatcttcgtagtcaaaacaatttgtgcaagattttcatataccattttattcaagccatgagacgaatgtttcttcattcgtgtgaccttaaaaggccagtgctaacttgtgttccttttcctctccctttttctgactagtacgaagcacacctatatcagattcagtatttcctttctatgtcctgtacagtctgcttttcttgataaaaatatgctaatttctgtttctgccctttcaggacccaaggaatttacttctgtgttttacagtcttcagaactggagagcaatatttgagaggtttgatcgtgatcgaagtggcaggatcgacatgtcagaactgcgcgatgctcttctcagtctcggatattctgtgtctccaactgtccttgatctgcttgtgtctaaatttgacaagactgggggcaagagcaaagcaatcgaatatgacaacttcattgaatgctgcctcactgttaaggggctgacagagaagttcaaggagaaggacaccgcctactctgggtcggcgactttcacctacgaggccttcatgctgaccgtgctgcctttcctcattgcgtagtggcagtccactccgccgctcaaaacaagctttataagcttttccaatagtactgtaatattatgcctgctgtaaagagatttatgttcgcagagttgtttttagacgagttgttttgattctggatttaacttgtgttgtgaatcataaagttgctctgaaatggagaatgtacctgttggttgaacagatgctttgtggttgtggtatgtggttggtattggtggctctagggatggcaatgggtaagctatctactggacacaca

SEQ ID NO: 28853 - DNA, 618 bp, Zea Mays
gccaagtgacacgaccttgacagtcaatatgctctttcagctaggcagagcatgttctatttacagcaggccagcagacaccaggcagtaatgtgatgtatgagtcaattatcaggatggaaatgttttttggcagctttctcagtgaatcagtatcaccgcagaacctttttggacacctagatgtcgagagatgcccattcctgaggaatatcaatggagctacaaccttttccctctcttctgctttgccagtagctgctcaaggaggcaagggtccaatttttgaggaagggtcaggctttgagtcagcattcaagctttttcatggccgagatggaatagttcccctttcagaaagatcatatgtatctgatgaaaaccacaatgagagcattgacgtcaagttatatacttagttaggctcaatttagagtacacttatgtagagtacacttatttatattgaactgtcggagttcatacatatgtattaagttatatacttagttaggctcaatgttagcacaaacagttgatgagcaactttaaatttagaatacacttatgtatgagttatttgacaatgcttatttatgagatattgaatgttattta

SEQ ID NO: 28854 - DNA, 1166 bp, Zea Mays
tatagtttttgtatttaaattataggtagttacgtttaatataaaccgtgtaactaacccaaaaataaacgtgagagatcttttaaaaaaacattttctcctgaaaaagtgtttccagagggaaattagaaatccatcccgatcctatcgtccccaatttcttctgctccacctaaatagatccgtagccgtagcctaggcgcgcacattgcagaaagatcgagcggaaggtcggcagcaggcgcatagatgcaggggtgagggcacgggcggcagcgcttgacgggcgacgagtaaaccctaacgctttgattgcgggcggcgtcgtctgagccagtcccgagtcgatacgctgtcatgcctgtcaatcctcctccgccacctcctgggtcgtcgtctttggctccggcgggggccagctacttcccgctccctttccacctgcagcagcaccagccgccgccgccgcaggtgccgccgcctatggcggcgagcagctatcagcagtatcagcaacagctgcatcaggcccatcagctcttccagcgggacgcgcagaccataacccccgaagcgctgcagagcgtcaaggctgccctcgccaccagcgacgtcctcgaccccgtcgccgccgccaacgccaggctctccgatccctctaccagcaagaagcccatcccccgtcgcgctgccggacaatcctgggaggatcctaccctcactgaatggcccgaaaacgactaccggctgttctgtggagatctaggcaacgaagttaatgatgatgttctctccaaagcattttcacggtttccatccttcaacatggcaagggttgttagagataagaggactggcaaaactaaaggctatggatttgtgagcttttcaaaccctactgatctggctgcagcaataaaagagatgaatggaaagtatgttgggaaccgccctattaaattgcgtaagagtaactggaaggagaggacagatgttgaggctctggaaagacaaaagaatcatgtcaagaggaagcctaaaattcccaagaagactattcttcacaagtagagatacaaaggccctaccgagggtgaatgccagctcatgctattacacattttgctgaggtctgatggatggcttatatgatgtgtatgatgcag

SEQ ID NO: 28855 - DNA, 2311 bp, Zea Mays
ttgcaacacacgggtacgcacctaataaaaagataatactacaattactcgggcgcaaatgtgtttgtttaaaaataaaggaaaacaacaccatcccacccaaggccagcgcatgggcagaaaggaaggagaaggaaaaaaaacccgccctcccctcccgcaccgcaccccagcaaggcaggcaggcaggccagccagaatcacacgacacacgcatacagttttagtttgttcaactacacacgcaaatcggaatcgaaaccctatctcggatccgatggctcgttcgccgccgccttcttcgtcggccggcggcgcgcagtacgcgcagcagttcctcaacacggcgctctcccagcggggcccgtccgcgctgccgtacgccgaggacgtcaagtggctcatccgcaaccacctggtagcgctggccgaggccttcccctccctccatcccaaggccgccctcttcacccacaacgacggccgcgccgctcacctcctccaggccgacggcaccatccccatccaccacgccggtgcctcctacaacctccccgccgtcatctggctgcccgagccctacccgcgctccccgccgctcgtcttcctctccccgacccgagacatggtcatcaagccccaccaccgcctcgtcgacagctccggcctcgtcgccaacgcgccctacctccgctcctgggtcttcccctcctccaacctcgtcgacctcgtccgatccctctcgcacctattcggcctcgacccgcccctcttcaccaggaaccctcctgccgccgcacaggctccgccaccgaatccctcgccgacccagcccccaccacggctcgccgcctccccttccccctcctacagcaggcttgggggtgccgccggcttcccggcgtcgccccagctcgccccccgcccgccccccacggaggaccccgccgaggtcttcaagcgcaacgccgtcgccaagctcgtcgacatggcctacgccgacgccgccgcactgcgcaccgcacgggaggctgaggtcgacgccctcttcgccgtccaggccgagctgcggcacaggggaggcatcgtcgctcaaggtgtgcgcaacatgggggaggagatggaagcgctcgagcggcgcctgcaggacgtcatgatggccaccgatgttgtggaggactgggtcaggcagaacaacaggagaggcagcaaccaagccaccgaggacgacgaagccatcgagccggcggatgtgctgtccaggcagatgatccagtgcacagcggcagatttggcgctcgaggacaccatctacgcgctcgacaaggcaatccaggaaggatccgtgccctttgacggctacctcaggagcgtgcgtgcactgtcccgtgagcagtttttccaccgcgccctatctgccaaggtgcatagcgcgcagcagcaggctaaggttgctagcatggcagcacgggcgccaccgcagtacgcatcatagggatcatgggaaggggaagatgattcaatgctgcctgtcacatttacttagtaagactggatggatatgaaaggacttgtctctataatagcttgagtttgaataaacatttggatgtcttgttcttctttggagacaaacccacttctatctgtttatgatatgaaatttcatgggcctgcttgttccccatgcgctaactctgcagcgcagtgcaaccatgatgtaattcaaccgtcagctgattaacatagtacatggattcatgttcacctttggaaggttaggtttccattctttcattttcaggggcaactatgtgaatgctgggaactttcaagttgatcagttccgagtcctggattattttcagaagtgttctatcttaaaatggaatatgattacatactatctctgttggaattgaaggctgattgctttagtttagccctttttctcctcatttgtcttggccccgagctagatccccagggaaggatatgatgctagcatgtcaccattgtcttgtaagtagattataaacaatgcaataacctgtatggtattttgtgctgaagaattgtaacatcaacttgggggcgtcgtcagaaacattgccttatggctggagccatgcagaaatataagggagcggaccagatgtgttggagtattttaggacagaagaaggctggtgatgtgtccaaaccattctggatttgaccatgtctttagaaatttatggcgtgtttgatttgaagaatgagttagtccatcatcttctcattcatcactttcttgtttggtttgtggaat

SEQ ID NO: 28856 - DNA, 759 bp, Zea Mays
tttccttctgcccctgcgctctctgtctctccctctgtccactctcggactctcaaagcctgccagctccggcagtccggcctacagttactactagtacgttggcgtctgctcccttcccttgcgtttgggagacacggaaatggccctcccggtcccttgcccacctctcgcttccccgcgccccagcaaactgccgtgctcgccccagccggtgaaaggccgtcgaggaccagcagcagcaagcaagatggcctcgtatggggcccgcgaacctgcacccaggggcgccatggccgcctggagaccacgcgggctggacgcggacgcggacgcggagggaggaggccggtgatctctagagaccaacccggtgatctctacgccggggtgggcatgtctggagaagttgggaatgaagcgtcttggtccgggagcgtatacatacagtagtagttttttttttcgagtaacatttacatttatacaccagatacaattattttttcagtggttagtattgaccagggccgtagctaggcaaattctttccgcggcgaactgtcagttcagctgcagctgcaagcgtgagaccattcagaaaccagaacacgtttgctctttgcttgtcatgtgaatgtccccgtggtattctttacgcgctccagtccagactccagcggcatatgaagcgaccagcgagctgttggccgtgctcgctgacggtagcgtgccgccgtgggcgcacggacgaggact

SEQ ID NO: 28857 - DNA, 1798 bp, Zea Mays
ggcaggcaactgaaacggggcggagacttcgccgaggccgagcggcgagagctcggtttcttgtcgagagagaacccagagagagggtccagagggagcgggctctgagagaaccggagatggggaacatctgcggtggctccgggaaggatcgggtggccgaggatttcaggccgtctagcccagggacaacaatgacctccaagacgagcggcagcataaccaccagcctgagcaccacggggaagctctcctccgtgggcagcagcttcatggcgtccgccagcagccgcagcaccagcggcgggttcgacgagggggccaagtactccgacggccagatcctcgaggcgcccaacctccgcaccttcacattcgtagagctcaagacggccaccaagaacttccggccggacagcgtccttggcgaaggagggttcgggagagtctacaaagggtgggtggatgagaagaccatggcgccgaccaggaacagcaccggcatggttgttgcggtcaagaagctcaactcggagagcatgcaggggtttgaggaatggcagtcggagataaattttctaggaaggctctcccatccgaacctagtgaagctcttgggctactgttgggaggacaaggaacttcttctcgtgtacgaattcatggccaaagggagcttggaaaaccacctattcaggagaggatgtgcccccctgtcctgggagctgaggctgaagatagccattggtgcagctcgaggactcgcgttcttgcatgcatcggaaaaacaagtaatctaccgtgatttcaaggcgtctaacatccttttagacgcgaactataacgcaaagctctctgatttcggccttgctaagctggggccaactggtagcaactcgcacatcacaaccagggtgatggggacatatgggtatgcagctccagagtacgtagccaccgggcatctgtacgtgaagagcgacgtgtacggtttcggcgtggtgatgctggagatgctgtcggggcagcgagcgctggacccgaaccggccgagcgggcagctgagcctggccgactgggcgaagccgtacctggcggaccgccggaggctggcgcggctcatggacccgcggttcgagggccagtacaactccaggcaggcgttccaggcggcgcagctgacgctcggctgcctggccggcgacccccgcagccggccctcgatgaaggaggtggtggagacgctggagcgggtggaggcggtgaagagccgggcgcgcggcggcgggtccgggtccgggtctggccgcgccggtgccgcggcgcaccaccggtcgccgcgcgtcggtggcggtgcccgtgccgcgtccaggcccgccgccaacggccacaacgccaggcccgcgcgatgacgctccggcagggtggtgacgattcttcatgtaaatggcgtctttttttttttggcctggttcgcgtgctgttcttgcatggcggccgctgttgttgtaagttgtagccaatagtgtaatagttaaaaaaaagtgctagaagaaaggaataaccattcaatcaaaaacgtgtttttcttttcgcaaaaggaacaaaggaagaggacggtttttgtgtatgtgttgttgtttttctgttaaccattggtggggggaaaaggacgacgagtttatactgaagaagatcttgtgctgaacgtgttgactttatcgttgctggatctatcaaaaatctgaagcggatcatcgtgacatgccctaacaagtgcatcgagtcaaagtggcga

SEQ ID NO: 28858 - DNA, 1532 bp, Zea Mays
cacagcagtacaagccgacgcagagatgcaaaacacgtcgtcgcgaacttcgcgcttcctcccgccggctcctccccccgcctccgctctcaccgcggccggccagccatggagcaaggccaggggccgccgccgccgaagccgcctgcgacggagcgcgacatcggattcgccgagcgggccgtggcggcggcaggcgcggccgtcgtgtcagccgtcctcgtcaaccccctcgacgtcgccaagacgaggttgcaagcacaagctgctggagttgtttataacccgatatggtcagattttaggtgctatccatcatgcagcactggtggaatcaatggtttaggcccatgctcgtcctgcagtcctgaatgctttcagtacagaggaactatggatgtgttctctaaagtcactagacaggaaggaatttttagactatggagaggtactggtgcaagcctggcattggctgtaccaacggttggaatatatctgcctagttacgatttattgcgcaattggattgaagaatactcggaccgcaattgtcccaagcttagaccatatgctcctcttatttctggctctattgcacgatcattggcatgcataacttgttgccctattgagttagcaagaacacgtatgcaggccttcaaagaatcaaatgttggagggaagccccctggaatgtggaagaccttgataggtgtgctttcatcaagacagagcatcaagagccctgaaaacgtgcgaggataccacctcctatggactggtctgggagcgcaactagcacgcgatgcgccctactcagctatatgctggacagttcttgaaccaattagacgacatgtgacacgactattcggtgatcaaagcaacgcgacagttatattgggggcgaacttttctgcaggctttattgctggggttatctctgcgggcgctacctgccctcttgatgttgccaagacacgcagacaaatagagaaggatcctgaaagggtattgagcatgaacacaaggcgcatattgcttgaggtttggaggaaggaaggtgtggaaggtctgttcagaggcgcaggccctcgaatggggcgcgcaggcccgtcggtgggcatcgtcgtctcctcctacgaagttgtgaagcacctcatgcacaagaacacgagcaatgcagcagacctatgattcgatgagctcgattagcacgccctaatggcacaagtaggattaggaatgtcgctattcaaagaaacacatttttttacggtagtccatgacagataaatgttatccctccattccattacaaactgttacttctaagatgggtttttatgcatctagtggctagcttataacctgagttatatcgcaacgagatctacgtatctagccacgtatgtagtggctaggattttatgtacaagtggcaaaggtttatgttctaacagattgctcaacacatgagtcgcacactatgtaattaaaattaaggtggtgaaccgaaatataacgtaaat

SEQ ID NO: 28859 - DNA, 1139 bp, Zea Mays
atctaagcccaaacctaatggcgctggcagcctctagccctctacacgccgtccctcctgctcctgctctccacacgccgccggagaaacgcgacggaacgcccagcacgggctgcacggcaggtcggcactcggcagcacatccctcccggtggtccggccctccgccgtcccagcacgacagcacttccggcgaccaggtcccaggctcccagcgtccggcggtcccagcagtctagcacggcagtcgacagcacttcgggaccacggctccacgcgttctgctgtgcaggttctagcattctgctgtccatggctccgcgcgtccaggaggtgaccaccagaccaagcctccgccgtccagaccagggggcaggggctggatttacatggctcaagacttaggttctagcttgttgaggtatacaaacaagtccgaattggggatccgttggagaaaggcaccttactgggaccagtgcacactcctgcttcaaaagagaactttttgaaaggcattcagactatcaaatctcagaccttgaaggaagcaattgaaatcaataactctgttcctcaaggattgagcagttctatgtttacaaagaggccagatattatttttaagtggctcgggccccatggtagtgattgtggtatagtgaatgtgaacatacctactaatggtgctgaaattggtggagcatttggtggagaaaaagcagctggtggtggacgagaagcagggagtgattcctggaagcagtacatgaggagggcgacttggagggaggtcctagaggcagtaagtcacttgtttactccatgatgacaatagcaagcagatcgcggtggtgcctatggatgctacaataagaaagatcaaaagttcttttggatggatgcagctagatattttgttttgtattttctccaaaagagaaatttgcaacgttgtgaatgatattataattgtgatgcttttgtgaatatataattgtggtgcttttgtgtttatgtgatggatctatgactgtggtatactgattaactgtgtatgtctttatgatttgtgtataaaaatctgtgatttgtagtgcttaattaaatatatattattattaataacaactgtaaaa

SEQ ID NO: 28860 - DNA, 2072 bp, Zea Mays
ttcaaatgtatatgccttttggcttccttttactgcaaaacttggctcgaacagatgacaattcttggaaggagagggaaactgctgttttgtgtctaggcgctatagcagaggggtgcattggtggtctatacccacaccttcctcagattgttgccttcctaatcccacttcttgatgataaatttcctcttatacggagtattacgtgttggacgctctctcgatatagcaaattcattgttcagagccttgatcatccaaatggacgtgaacaatttgataagattctcatgggattgctaagaaggatattggatactaacaaaagagtgcaagaggctgcttgttcagcgtttgcaactcttgaagaggaagcttctgaagaattagtaccccacttggaagtaattttgcagcacctcatgtgtgcctatggaaaataccagagacgaaatcttcggatactctatgatgcccttggtaccctggctgatgctgttggagcagaattaaatcaggcaaaatatctagatatatttatgccgcctttgatcacgaagtggcagcaactttccaattctgacaaagatctatttccactccttgaatgctttacatctattgcacaggcattgggaccaggatttgctcagtttgcggaaccagtgtttcaaaggtgcatcaatcttatccaatcgcaacagttggcaaagattgatcctactgcagctggtgcggtgtatgatagagaattcattgtttgttcgttggacctactgtctggacttgcagaaggtcttggcgctggtattgaaagtcttgttgcacagagcagtttgagagatctgcttttgcaatgctgcatggatgaagcagctgatgttcgacaaagtgcccttgcccttcttggagacctttctagggtttgcccaatacatttgcatccacgtcttcaagaatttcttactgttgcagcaaagcaactgaaccctcagtctgtgaaggatgcggtatcagtagctaacaatgcctgttgggctattggagaattagcaatcaagattggcaaagaaatagcacctgtggtgatcaccgttgtttcgtgcttgattaccatcctaaaatccccagagggtttgaacaagtcacttgttgaaaatagtgcgatcactcttgggaggcttagctgggtctgtccagacatcgtggcccctcatatggagcatttcatgcaagcatggtgcagtgccttgtgcacagatgattttgagaaagaggacgcgtttcatggactgtgtgcaatggtggcagcaaaccctacaggagccgctggttcattagcttacatctgccaggcctgtgcaagttggactgagataaaaagcgaaggtcttcacaatgaggtgtgccagattctgaatggctacaagcagctgcttggaaacaacggtgggtgggaacaatgcatggccgccctgaaaccagacgttgtgcagaaattagctagatacggagtatgatgagaagcaagctcgtgtggtttattcacctcatacaccgaccatcatctttatggcggagacaagagaggagcagaaaggggtgggggtcgtcgagagtgtctctgctgctgatgcatcatctttacatgtgtggcacttgagagtcgattcggttcgttggtacgccattgtccgttcgttcattgttatactggttggtgcacagcatttccagagcgagagtaggatgtcttggtaaaccccccatgtgtattggttggttgggccagtggacttggttttggtttttttgtcattcctactggcaaacacaacaaggccaccaccctcttgctcgccccaccccggcaacattgagaaaacagaaaggttttgtagcgtgtaattctctctcttttcttggtttcttattattattaggtgtaggattgttttcgagtcttgtttggcaggaagggtttgtacgagaaatcaattgattgctcactcaccacaaaataataaaaaagatcgatcgatggggcttgtatctcctgcgactcttcc

SEQ ID NO: 28861 - DNA, 1239 bp, Zea Mays
gttgcgttaggctagatccgctcccctgcaggccacgccttctcgccgctcgcggaaccaccgccgccacctcaccactccagctccagcccccgcccgccataatcgcgtccccttctcgtccttccagagcttcttaaaccacccggcccgctcccagcgtcccttctccgcccacagccagcggcgaactcgatcgagcaggatggggtttatcggcgcgcacggcgtggagacgctgaagcggtataggtacagtggagaggaccgctcggtggtggccaagtacgtgctgcagcccttctggagccgatgcgtcactctcttcccgctctggatgcctacatggttatgctttccgacatttcagatcacacttacaggattttcgtttctagtactatcagcgctgcttggctatatatgttcgcctcaccttgacactgctccccctaggtgggtccatcttgcccatggattacttctcttcttgtaccagtttgaagcattggcccttggaagcaccttgatgtgtggaggatggacactttgtttctgggtagttgccgctgtcccgttctatcttgcaacctgggaacacttctttacaaatacgctcattctgcctacaataaatggaccaacggagggcctgatgctgatctatgtatcacatttgtttacattttttactggcgctgaatggtgggcacaggattttcggaaatcactaccctttttcggttggattccacttccatttctttctgaaattgaaattcctttatatgttcttgtgctgattcttatgatcgtatgtgctgttatacctactgttagatccaatgtcagcaatgtccaagaggtagttgaggcacgaaaaggaagcatggcattagcattagccatgatccttccttttattgtactgttagctggagttgctatctggtgctatctttctccttcaagtataatgaggaaccagccacatttgctcgtgattggaactggctttaattttggatatttggtgggaagaatgatacttgctcatttgtgtgatgaacccaaaggtctaaaatctgggatgttcatgtctctggtgtttctttgttttccaattgcaaatgctctcattgcaaagatcaacgatgggagtcctttagttgatgagcttgttctgctgctgctttattgtgcatatacagtgtgttatgtgtctgtcttctgggatta

SEQ ID NO: 28862 - DNA, 1961 bp, Zea Mays
ttggaatggaggagtatataatagctattcttcatatatctacattgagtgggagattggagtctgataggagctagaaccctcatatgtcacaccagaatgaatgggtgattggagtcgaatgttaatggagttggaaagaccgcagttacagtggagtacccagagcgtcctggacagcctctctgtgagtactatgcaaagaatggcacctgtaaatttggttccaattgcaagtttgatcatcccagggagggtggttttgtacctgtcacattgaacagcggtggattccccctgcgtctgggtgaaaaggaatgttcctattacatgaaaactggacattgcaagtttggagctacatgtaaattccatcacccagaacttggtttccttacggagacgcctggcatgtacccaccagttcaaccaccacctatttcctcctcgcatccatatccacatcttgccaattggcaaatggggaggcctcctgttgtgccagggtcatttttaccagccacctatgaaccaagttacaccagctggaggacagcaagctgttccagtaggggcatcttatggtttgtcgcaccaggggcctacctctgccatgacttatggcagtcattatgcgcaattatattcttcatctgggacttcaagcagcaacatacaagaatatgcctttccagagcgaccggggcagcctgaatgtgaacattacatgaagactggaacctgtaaatatggggcagcctgcaaatatcatcatcctcaatacttcagtggaccaaagtctaactgcatactgagccctctgggtctccccctccgtcctggttctcagccatgtgcttactatgcacaccatgggtattgcaagtttgggccgacatgcaagtttgatcacccgatgggtactccaaactatagtatttcaacatcttcacttactgatgtgccaatcgctccatatcctcagagtttccctgttactcctatgccttcatatctgccatcttctgatctgcgtccacaatacactcaagtcaaggattcctctgctaatccaccaccatcgcctggaactacttatggtcctgttgggtctatatcaaaggtttatgctccccacacgcttatccgatccccggcttctgcagctgctggcatgcaagcgtcctaatgagacacggttgagagcattagtcctctctgtcatgaagatagttcttgggcaatcttctcaggtttttctaccattggcggaatgaggtctcgattcttttttgctccagttcgacttcccagcaattgtgaataaaggctgcagctgacatagaaaagtctcaataaatgcaaagataggaattggcaagctcattcacttgccatttttctgtccatctcggaaatgagaggagaaaattctgattgtagtaggatccagagctacgttattatcctgtataagatgcaccgatgcaagggattcgtatctgaaagctgatgggttctgtagctcaaaaccttttgtttatctcaccatcatatatatagagagggcagatcaccctaggtgatgattatccacgctggaatggtttaacaaatcttcaataattgttaaaccattcgtgctttttgttaaaccatctcaggatgggtgatcatcacctaggtgacgaatagccatatatatgaatatgagcagcagctatgacttcacaacatgtatatctacctatatatatgaactgggaacacggcatgttgtagcgagacgctttggaacccttgattgaatcatctgaaaccattcgctggtcatcccctgattttcgggtgttttagttctgctaactttcagattccttgtttatatgaatcggttgggtttaacgtcttgtttgtaaaccgtggaatttattgcctgcctgttttttttacctcggagc

SEQ ID NO: 28863 - DNA, 943 bp, Zea Mays
ctgaaccttggatcaggttggaaaggaagaaaagatcttgtcaccttgctgtacctcactggtgtgctcgagtgggataaaggagaagtgagtaactgaagtctggagtccccgttttctgcagaaatatcaaggtttgatatttggcttgtgaccctgatcaagttcagtgttttatatgtgtctttgaacctgggaggagtgcatgagagccacgtacttgaacctaggttgtgctggcacactaggagttcttccccactaagttgtgtacaagtacagagagcaccttagggatggttccaataaaattatcctccaacaatcctcaagctccaaccagggtacagcgtgtgtgagtggtagaacttctgtccacaccggtgttcacctgtccccagtccccaaacttggtctgtccagaagctgagcgcgccaacacctggtctagtgaccacactcgccagttcttcacctcgccgtggccaggtagttccggtgtttggaacagagctgtgccgccgcagactggcgccgaggacagccccaccgtcgacccgtctaattgcgtcgtccccggatgaattcttgcgagcacggacgccttgagctcccaatagaaagatgaaggttcaagatgaagtggttgctgaagaggagtctactctagtgtctactgatcaagtggaggaaccatctaactgggtattttataggaggatttagcacatcttctcttcaacaaagacaagacccgatgtatttgccccttccttgtattgttaaaagacttttatacactttaagtctagtgaaatatgcattaagtttataggggttgcttggaaactatttgatgcatttactaccttgatatccattccttttatagatacttatttggaagtatcaaatattgtttacaaaattgcttagccctgcc

SEQ ID NO: 28864 - DNA, 1909 bp, Zea Mays
caacgttgaaaacgggtgatgccgcgccggggactctggctatagggagtagcgacgaccttagctagcaatagcagccagcaggaactgtagattgctgctgggcaacagactgagagttgcttgcgctgcggcagcggagaagagagatgattgctgttcgatgggcggcgctgctggtcgcgctggtggtggcgtgcggcagcgctgctgcaggtgcagcggcgggggaaggacctaactggctgggcgggctgagccgggcggcgttccccaaggacttcgtgttcgggaccgcgacgtcggcgtaccaggtcgagggcgccgcgtccaccaacggccgaggcccctccacctgggacgcgttcgtgcacaccccaggaaacattgtatacaatcagacggcagatgtcgcagtggatcaatatcatcgctacagggaagatgtcgacctcatgaaaagtttgaattttgatgcctaccggttttcaatctcatggtccaggatcttcccagatggcgagggaagagtcaatccagaaggtgttgcctattacaacaatctgataaactacctgcttcggaaaggcattacaccgtacgccaatctttaccattccgatctccctcttgcgcttcagaacaagaaactgttcacagactatgccgacttctgttttaagacttttggcgaccgtgtaaagcattggtttacattcaatgagccaaggatagtagcactacttggttatgacgctgggtcgattcctcctcaaaggtgtaccaaatgctctgctggtgggaattcagcaacggaaccttatatcgttgctcataattttctcttgtcacatgctgctgctgtgtcaagataccgtaacaagtatcaggctgctcagaaaggaaaggttggaatagttctggacttcaattggtatgaagctctcacaaactcaaccgaagaccaagcagcggctcaaagagcaagggatttccatgttggttggtttgctgatccattaataaatggacattatccacagataatgcaagatattgtgaaagagaggctgcccaagtttactccggagcaagctaagttggtcaagggctcagcggattacattgggatcaatcaatacaccgctagctacgtgaagggccagaaactgctccagcagaagcctactagctactcagctgattggcaggttcaatatgttttagaacggaacggcaaaccgatcggaccacaggcgaattcaaagtggctttacatcgtcccagaagggatgtacggttgtgtgaactatctgaagcacaagtatggaaatccaacagttttcataaccgagaacgccaggaaacttgactcgtggccagtacctgcacgacaccacaagggtgcaattctacaaaggctacctcgctgagctgaggaaagccatcgatgacggcgccgacgtggctggctacttcgcttggtctctcctcgacaacttcgagtggcagtcaggttacacgtccaagtttggaatcgtctacgtcgacttcagcacgcccaagctcgaacgacaccccaaggcgtcagcctactggttcagagacatgctccagaaacacttatgagcgtctaacaaccaagcctgaaataggtaccattaaatttcttcagcgttgcctaagctagtggccatattattgtagcaaaagttgtaagctagcacagtgcaagggtatcaaaaattataaacgggcaatgaatttgtatgttccatgctaattgcattttaccatcggtcttgaaaattatctagcgagttgtcatctagatcctcgaagttccaaaatactatatatttttagctcactaaagttgtagcgggtttcattcaagtcccaaacggac

SEQ ID NO: 28865 - DNA, 1474 bp, Zea Mays
tcgactcctcttcttatttgttctgttgtactggctccaggcacactttgagaaggtgaagaggatttgcgacactaccacattgcctttggctatgcatcatctcagtgataagataacaagccaactggatatttcaaaattgactgacaaactacggcaagcaaaggtagactcaagtgcactgacaccaaaggagaagtacgaaacctgggaggagattaaaattaagagtttcgcaaagatagtttcttcaatgtgggcaatgacattgcttagcttgtatgttagagttcaggtcaccatattaggcaggcatctctacttagattttgcccaaggtacaaatggtccacagttacaggcagaatctgacacctttagtgaaaatggacacaggagctttcttgcaatggctgattatcttgtcactgacaaaatcactggattcctaacgcaaatgcaacgtgcagcaactgaagtccttaaagagaagcaactgaaagaccgtatgaacatggaccaagtattgcagacagtattacaaatattggacatgttcatgggcctttctgaagataactcatggataaattatcttgtacctgagaatccccctgtttatgcacagttgatggctgtgtccagtagtggctttgatgattcatcactcctaaacgatttcagaaagctagaccaactaatgtctgagacacgaatagtactggcaagtgatgatttcagaaatatcatggagaggtcattgaggaagatcgcgggagtggtggtagaggatctgggtgtgcagattgtaactccaggatcgggattgcccttagcaacgctcttgcccaaagttgatcatctgagttccccgttgcttgaggaaccaaacaagaacaaacacattcagatcatccgaagtatgccggaagtggaactcttctacacattgctctacacaaacatgccaccagaaacgtaatccgtacattgatgtgaaaagaacacttgcttctgaattttggctacaaagatctggtggtatatgtgcaggttgagccgcctgaaatcaggaaactgataaacgtggagagatataggttggcattttctgccctgtatatactgagaatgagatattccgttgttgctaacaggaactgagtaaggttccttccatttggattctttcttgttttttcaaggttcggttgtgcacgtctaggtagaacctcacgaatcgggtctgctattttactattttttgggtgctattttactatattttttgggagcttacacgctgacagatgttccagatgttttactggccacacaaggttaatgtaattgtatacattgtcagttgaatcttgtgtgtcgggtgaatgaatattcgagcccacagtttgcgaccctgcagcatatgccgaagtgaagcttttgtgaggacattcggctaagttgaccc

SEQ ID NO: 28866 - DNA, 2923 bp, Zea Mays
gcgtccgttcccggagcaaaaataaaaaaaatcaaaaacacaaaagaattcgctacttcgccggcgacaggggcgaccgcgcgcgccccggccggtgctgatccggactctcccatgcacccattctgctgtgcgccgctcgtgcctgtatcgcccgtggcctccgccgcggccgcgtcctctgcggtggcgggcgccccggccgtgatgccgccaccgcagcccccgcctcctccgcctcctccgccccgaagcaaccccgcctctggcggtgagaggcgcgcgcgcgcggcgggggtcagcggtggcggaggaggcggttcctcgccgcccgagggggtgaagctgaacgagatcgtcggcggcggcatctcgggaatcctgtacaagtgggtcaactacgggcgcggttggaggccgcgctggttcgctctccacgacggcgtgctctcctactacaagatccacgggcccgaccgcatcatcctatcgcgcgagaccgagcggggcgccaaggtcatcggcgatgattccctccgccgcctcaaccgcccctccacctcctcgtcgtcccactccaacggccaccaccatcctcgaaaccccatcggcgaaatccacctcaaggtgtcgaccgtgagggagagcagatcggacgacaggagattctccatcttctcggggacgaagacgttgcacctgagagcggagaccagggaggacagagctgcgtggctcgaggcgctgcgggcgaccaaggacatgttcccgaggatgtcctccagcgagatggtcgggccaggggacaccgcagcggcagtggccgtctcgaccgagcgcctaaggcagcggctgcagcaggaaggggtcagcgaggcggccattgctgacagcgagatgatcgtgcgggcagaattcgaggctctgcacaagcagcttgtgctctccaagcagaagcacgcgctcctcttggaaactcttcgccagctagagacagaaaaggttgatttggagaatacccttgtcgatgagagtcaaaggcagtcgaaagagtatggatctgcttctaaaccaagacatgagaagtatagtgaaggaagtgctagtgaatctgatgattataatgaaccacaagatcctgctgaagagactgatgatgatgagaacctttattttgatacaagagattttctatcctcaagctcttttaaaagtagtggatctgatttccaaagatctgaagctggttcagatgatgaagacgattatccaatggatggaattgatccttccatgaagtctattgggattagttatccatatgtaagaaggcggaagaagctaccagatccggttgagaaagaaaagggtgtaagtttgtggtcaatgatcaaggacaacataggaaaggatcttacaaaagtttgtctgcctgtttacttcaatgagccactttcatcgttacaaaaatgttttgaagatctggagtattcctaccttattgatcgtgcatctgaatgggggaaaagggggaatagtcttatgaggattcttagcgtagcagcatttgctgtttctggatatgcctctacagatggcaggagctgtaagccttttaacccccttcttggggagacatatgaagcagactatccagacaaaggcctccgttttttctctgaaaaggttagtcatcaccctatggttgttgcttgccactgtgagggaactggctggaggttttgggctgatagcaacctaaagagtaaattctggggtcgttccatccaacttgatcctgttggtgaattaacactggagtttgatgatggggaagttttccaatggagcaaggtgacaacttcaatttacaatctcatattgggcaagctatattgcgatcactatggtactatgcgcattcaaggtaatcgtgagtattcatgtaagcttaagttcaaggagcagtcaattatcgatcgcaaccctcaccagatgtcgttaaggaggatgagcttgccgttgctcgtggaccatcaatccttagctgtttggcgatacggtggcaaggaggtgcaaggtgttgttcaagatagaaatggtcgaactgttgctacactatttggaaaatgggatgaaagcatgcactatgtaatgggtgattgctttgggaaaggcaagggaactgaacagttatcggaggcccatttgttgtggaaaagaagcaaaccacctaagtttcccactagatacaatctcactcaatttgcaattacattgaatgaacttacccctggattgaaggagaaactgccacctacagactcaagattacgaccagaccagagatgtctggagaacggtgaatatgaaagggcaaatgctgagaaattgaggcttgaacagagacaacggcaggcacgaaagatgcaggagagcggatggaagcctcggtggtttgcgaaggataaagctactgacacataccgttacgtcggtgggtactgggaatccagagaaaagagcagctgggaaggttgccccgacatcttcggacaagtccctaacgatctgatggtaactgactaggttcgagtaggttataggtcttttgcttctccttatcggtatcacttgattccggaaattttagtggttcatattatagagcaattaagtgcccgttgacaagtaaacattggcagtgcctccggtaatattggtctcgtacataataagaagaaaatggttcggtctcacatgttaccttatttttttttggcttttggtatagtaatagttttttttccttgtgaggttttcatgctcacaagttcagtcttcaaagtggtgtagcgtgggcgattagtggtcatgactaaatatatgtaactacgctacgcatacaggaggaggccgtgaa

SEQ ID NO: 28867 - DNA, 214 bp, Zea Mays
cagagagtgacacggtgcagtggtcgttgcgtgtaggtgctccgtgctcgcgccagcagtgagaccgatcgatctgttctgttcttttgtgcgacgtacggtaatgatcagccatgatgcgcccttgcggcgttacgtaccttgtcaacgcctcagcctacgtactcatcagcaagccagccagccagccagccgtgctcttgctctctggcgg

SEQ ID NO: 28868 - DNA, 2505 bp, Zea Mays
acgcgcgatgcctctgtagctgtactgcttgctcctcagtccagctatccgcatagacttcgcaccaacccatctcccagtctcacacaccaaagaggaaaaaaagccttgttttttttcttcggagaaaggagagggggagaaaattatactactctcttctgtccagtccagccgcggacaccaaggcacagaggcaggcaggcggacagggtaggcaagaggcgagctcggcgaaggcgcggagaggggagacagccagccgctgcattgcgctacattgggcaggagggctcgccgccgggggaggctcggatcttgcgtctctggccgtggctgccgcgtgcttgcttcgtttggtggcgctgcgcccattggcgggcggcctcggtccagcgcggcgtgatctggcgcgcgccgccgactccactcgcgtggggaggcctggatcttgacgctctgctgtcgctgccgcgagaccctgggggagccacgctgtgctcagtcgcccgcagtccgctgagctgccgagtgcgtccggcgggcgggagatctggccgacggcgcggcgctgcagatcccctgcctgcgcgggcacggctcactgctgctgtggaggctgttgcgcgcggtggtgccgatgggctacgggtacgtggatcccttcccgccccctcagcagccacaacaggcggcatacgtcgcgccgcagcagggggactacgggcagccgcagccgcagccggctccgcggccaccggcttgcccgtactcgtcgtccgcctccgctccgccgggctccgcgtcctatcatttttcgcctccggcaccgtcccctccgccgtcgcattcgaactcgagccatgcagctagtggcagtggcaagaacatcgagatatcgagggaagcggccaccaccattgtagcactggccggtctcgccatgctcagctttattggcgcgaccatttggttcgtcaagaaaaagcgccggcgcatagagcctccggctacattgcctacacagcaaccagctcctccgccaccgcccaactacattccatcttcggctggatcctcgctagcatcagacggattctacttgagatcgccagggtatcctttcatgaggtacagcactgggagccatggttttccatactccccagccgactctgggattgggtattcccatatgctgttcacaccagagaatttggcagctatcacagatgactttgcagaagataaccttttgggagaaggtggatttgggtgtgtgttcaagggcattttgccggatggtcgccctgtcgccgtcaagaagctcaagattgggaatgggcaaggcgagcgtgagttcaaggctgaggtcgatactatcagcagagtacatcataggcatttggtttctctagtaggctattgcattgcggagggccagcgaatgcttgtttatgattttgttcccaacaacacactatattaccacctccatgtaagtgaaacatcactggattggcggacaagggttaagattgcagctggagcagcccgagggattggttacctccatgaagattgtcatccacgtattattcatagagatattaaatcatccaatattttgttggacaacaactttgaagctcaggtttctgattttggacttgcaaggttagcggctgattccaatacacatgttaccacacgtgtcatggggacatttgggtatttggctccagagtatgcattgtcaggaaagttaacagcaaagtctgatgtatattcttttggggttgttcttttggagctgatcacaggaagaaaacctgttgatgcttctcagccgttgggagatgaaagtctggttgaatgggcccgctccgttctgacgaaggcgatcgagcatcgggagttcggggaccttcctgaccccaggatggagaacaggttcgacgaaaacgagatgtttcacatgatagtagccgcggccgcatgcatccggcactcggcggcaatgaggccacggatggggcaggtggttagagcactagatagcttagcggactctaatctgaacaacggcctccagcccgggcgctgcgaggtgttcttggagccgcagtccgaggagatcaggctgttccggctgagggagttcggcagcccggacggtagcgaggagctgagccaggcgagctggaggagccggagagacctgtgaacagacacactcggtacaaggtcattaacattcttttttttttgggggccattctttacatgtaattatctcgtttacatgattctttcttccttcttacttttcgtttgttactttactcctccctgaggcaattcttgttcctggtggaatagattttgcattttcgttcgggagataagtaaatgaatcctctgtcttttctctctctctctctctctctccagtgaatagtacacagaaagtttggttcctggcattctttctctgataagtac

SEQ ID NO: 28869 - DNA, 1978 bp, Zea Mays
agccttttgctatactgctgcatacacacacacacacacacaggatagtgagagatgattaagtcgctcccacatagcaaagccaaaagtttagcagctcaccgcaggcatcttcttgtcctcttgctctttccttgatccatccatggaccatgcatggtgcttttgcaggccgccggctcccctctcaagctatagcggttactagtactactagactactagctagtgcacgaatgcccccttctgcacctcgcttgccatagcttgcatcatcatcagctgctagcctgctagcagctcggtccacgcgcgactactagtctactagtagatgagcagtccagcagtgaaagtgtagtggcagtggcagcggcagccatatccccaccacactgctcgatcatcaccacgcctccgtcgtcagacctgcacctagctttgcatcgcgcattaatcaggaatcggaggaggggtctgattcttccaagttaaagatggatcataacctgagcgacatgacgatcctgagcgagcacgcatggggcgacgaggccggcgccgtcttgctgtcgccaccggaggtgggcagcgtcatcgaaggcggcgggggcatgacggtgctggagaggctggtgctcgacgaggcgctggcagccgcgatcctggagctgcaggccatccagcaggccgcccccgggcccgcctcctgcgccggcaagcagcagctggcggccggtggcggtggtggtgtggttggggcggaggccgctgtcgccttcccctcgatgatggcgatggcgatggcggcgccaacgcccgcctacgcggacgcggacgtggacgcgggtgtcctgcagcgacagcagcatcaccatcgccctcacgccgcgatggggatgcctagtcccgactacgacctcgcaccagcagcagcagcaacacccgcggtcgcggtaactgctgccgcgccgcccgccttcaccacaaacacaaacgccgcggttgacagcggatgcagcggcctcgtagtccttggacgctcgccgccgccgccggtcttctccgccagcaacgagaccgcagcaacggcgagcctggactgtgaacatggcggcggaggccgtggtggtggccgaaggcaacgccggcccaacaggaagaggaaggccgccgccgaggccgagcggtcgcgacctgtgcgtgtggcggcggcagcggcacaggaagagagcaccttgtgcagcctcctggcgtccaccgccccgaccaccgcgggcggcatccagatcgcgttcagcacggcggccgtgcatcagcagcagcatgctgccggtggggccggcggcgccaagacatcagcgaagccgtcgtctctgagtctgagcagcagcggctcgtcgagcaacatcagcttcgacggccggaaccccgcgcgcaacgtgcgcatctcgtccgacccgcagacggtggcggcgcggcagcggcgggagcgcatcagcgaccgcctccgcgtgctgcagaagctcgtcccgggcggcgccaagatggacaccgcctccatgctggacgaggccgccagctacctccgcttcctcaagtcccaggtccgggacctgcaaaccctagaccgccgcaactacggtgcagcttcttcgaatgacgccgccgccaccatggctgccgttgtcgggtcgtcactcagctacaaccgtggcaccggtgccatgcccgcattcaccttcccggcagcaggcgaaaccctacgaggagcaggatgatgatagatttgtaacacacccacgcagcatgcatgttgttgttaaccctttttttatgttcgtctaatgtgcatgagaccatctttatgatgtatttcatcattattaatgttagatcaaagactaggtagacgatgatgatcatatcatcatatcgatgatggaaccaatccaatatgcaatcaaatgcaagggcg

SEQ ID NO: 28870 - DNA, 751 bp, Zea Mays
tccagaggcatttagaacgttcctctgaagcacaagtctcgggcaagtctcaatagaggaaggggagggcaaggcgaaggaccttggagtcatgtttattgaaaccagtgctaaggctgggtttaacattaaggcgctgttccgtaaaattgctgctgcacttcctggaatggagacgctctcatcagcgaaacaggaagacatggttgatgtgaacttgaggtccggcaatgcaaactcgtcccagtctcaggctcaggctgggggatgcagttgttagttgcagtctctgacacttgcttgctcatgatctttgggactctgagcatcagaaggcgttatcactgatgcttctctcgggaagaagagttgattgcctctcgccagtgaacacaccatagtctttacccggtgaatggaccgtttgcattggaacgatacgttttatgagttttctgttatttcctcagtggcctaagctagcaacagtgtatagttgggttgacacttcaaacttctaccattcgagttgggtattagaactagttattattggttcatgttgaacttatatatatttccatccttttgcagttagtttgagtcgtatttgctgtgtaccaaacatgtattgcaaatttggaatttttgtaagctataataaggccagcacggcaatatccccacatgataaccccgaaatttgtatcgttcaaagttcaaaccatggtatcctaattcaaaaattttg

SEQ ID NO: 28871 - DNA, 1963 bp, Zea Mays
tgttcacaaagcaatcgccaagaacatcgatgtccattcgaccattcctgacaacccatatcccaatcaatctaccacctctccggccgttccacactgatcggatggcggccttgaccttccacccggccgcctgcttcttcccacgaccacgagaggcagcagcgacaacgaagcagccgctccaccattactgctcgcctctccggaccctcgtccctagaactacaagaccgtgccttctcagggccaggtcctccaacgggctcccgcagaccggcggcgcctcgttcggcagcagcaacgaggtgctggatgggacgccgacgggagatggggcaccggggcaggggcagcggggagggagcaccgtcagcatcacggtcgtcggcgcctccggcgacctcgccaagaagaagatcttcccggctctcttcgccttgttctacgagggctggctcccggagtgttcggctatgcccgtagcgagatgaacgaccaagagctcaggaacatgattagcatgaccctgacgtgccgaatcgacaaaagtgagaactgcggcgacaagatggaacagttcctgaagaggtgcttctaccagtctgggcagtacaactcggaggaggggtttgcggagttagacagaaagctcaaagaaaaagaggcaggcaggctaccgaacaggctattttacctgtcgatcccgccaaacatattcgtggatgtggttagatccgctagccgcaccgcgtcgtcttcaagcgggtggacaagatttatagtggagaagccattcggccgtgactcggagtcctccggcgagctcactcggtccttgaagaagtacttggtcgaggagcaaatattcaggatcgaccattacctgggcaaggaactggttgagaatctctccgtcctccgcttctccaacctcgtcttcgagccgctgtggtcgaggaactacatccggaacgtgcagctcatattctctgaagatttcggcaccgagggtcgaggcggctacttcgacaactacggcatcatccgggacatcatgcagaaccacctgctgcagatcctggccctgttcgccatggagaccccggtgagcctggacgccgaggacatccgcaacgagaaggtgaaggtgctgaggtccatgaggcagctgaagctcgaggacgtggtggtgggccagtacaagggccactccaagggcggcaagtcgtacccgggctacgccgacgaccccaccgtgcccaagggcagcgtcacgcccaccttcgccgccgccgcgctcttcatcgacaacgcgcgctgggacggtgtgccgttcctgatgaaggcaggcaaggcgctgcacacacgacgcgcggagatccgggtgcagttccggcgcgtgccgggaaacctgtaccggcggaacatcggcgcggacctggacaaggcgaccaacgagctggtgctccgggtgcagcccgacgaggccatctacctcaaggtcaacaacaaggtgcccgggctgggcatgcgcctcgaccgcagcaacctcaacctgctctactccgagcgctaccgccgcgagatccccgacgcgtacgagcgccttctgctggacgccatggagggcgagcgccgcctcttcatccggagcgacgagctcgacgccgcctgggccatcttcacgcccgcgctcagggagctggaggacaggaaagtggcgccggagctctacccgtacggcagcaggggccccgtcggcgcgcactacctcgccgccaactacaacgtcaggtggggagacatcaccagcgatgacgacggcgccttctagctctagacagagacatgcatccatcgattcgtgacgctacgccttattgtggaagggacacgcagttgtatccaatccaatcaaatttaacaaaaatggcaagggggcttggcacagaataagaac

SEQ ID NO: 28872 - DNA, 4291 bp, Zea Mays
gggcgtctcgacctgaccaatcctaccgccagcctctgcccttgtgctccagtctcctcccgcgaccgttccaaattcctcctcgcgttcgtattccattccacgcggcgacgtcgccgtcgcggccgccgctccgctccccttccttcgcctatacgtaggtagccgctgcggccgcctccccaaaccctaagcctttccctcccacacgcgcttcaccccgcacatcgccggcgatgggatccaaggaccagggcggaggggccgcctcctcgggcggcggcttcttctcgtcgttcgccgccggcatgcgcagctggggcaccgccgtgcacaaatccgtcaacgggctgcttggttatgaaggccttgaagttattaaccccgatggaggcacagatgatgctgaagaagaagctttaaggggccgatggaagcaagaggatcgtgatagctattggaagatgatgcacaagtacataggatcagatgttacatcacttgtgacacttccagtcataatttttgagccaatgacaatgcttcagaaaatggctgagttgatggaatactgtgagttgttagacaaagcagatgaatgtgaggatccatacatgcgtatggtttatgcttctacatgggctgtttcggtatacttcgcgtatcagcgcacatggaagccttttaatccgatccttggagagacttacgagatggttaaccaccagggcatcacatttcttgccgagcaggtaagccatcatcccccaatgggtgctgctcactgtgagaatgagcattttacttatgatatcacgtctaaggactagagtgacacttaaaaaatctggtgtcgtgttggatttggtgccaccactaacaaaggttaacaacctgatatttgggcgtacttgggttgattctcctggagagatggttatgacaaacctgacaaccggagacaaagctgtgttatatttccagccatgtggctggttcggggctggccggtatgaggtagatgggtatgtgtacagtgcagcggaagaacccaaaataatgattacagggaaatggaacaagtcactgagctgccaaccatgtgaccaagaaggcgaccctcttccaggcacggagctgaaggagatctggagagtcgcccctgccccacagaacgacgggtatcagtacacacactttgcgcacaaaataaacagcttcagcacggcacctaagaagctgttggcatctgattcccggctgaggcccgatagatatgccctcgagaagggcgacatgtccaagtctggctcagaaaagagcaggctggaggagcagcagagagccgagaaaaggactcgagaggccaagggcgagcagttcactccgcgatggttcaacgtgacggatgcggtcgcctccacgccgtggggtgacctggaaatttgtgagtacagcggcagatacacggagcaccgggctgccatagacagctccaacagcaccgacgacgacgacgagatagacgtcacttcggtcgagttcgacccatggcagtatggtggtagctcgtcatctccccaatgattctccgcgtccggaagctgccgtgcctgtgctccttgtgtaaaaaaaaaatgcttccaggcggcctggccttcgctggtttgttgtggcaccagcggtttccgtgcccttgtagtagtattatgacctgccccctctttctcttattaacgctacagatttattcaggaagtggtgtgttttgataaaaaaaagaaacatttcctctctctctctctctgacgtcttaactcggatcacgagttgaaatttgggtcggggacaagccatgaacaacgcaaccaccagttgttaactaaccctcttttaaacttcaagcaaccaaagccaagagcagaaatggttttccaaaagtggtcgtcgtcgtcagagatggagtcgtgcggtggaggccaagtcccggagatgccacgcgttcccaagtccgcgaggggcaagagatcggtcaggaagaaggaggcccagagcccggcccagatgtctgcaatcgaccttctcgcaaccgtggcagggaagctgtttgacgagggggcggggtcgctggggaacacgagcgccggtgccccggccttggctgcgttcgcaaaggatgccctggtgaagcaggagcagtgtgatgagcaaatgaagctgttcaagcatgaggcgacggatcaggatagctgcaatgagagtgcaatcctcccccacattgtgctccagcgggtggtgaataatgctaggaatgaggatcctaaggcgaagtctgaggtccaggacaaggaatcctccatgatcagctatacgaaggctgaattgggttgtaattttggtgtgatcgcagacaggtggtcgcctgaatccgtggaatcaggagccttcacaggagatgcagtggcgagactgatgatgacggccccggcaggatttcataagaatgcacccgaaatgtatagtttgcttgattcaatggatgtggatgtcaagccgcctcctttggtcagctctgacagcaccggcgagatgccattgcatggcgataaaattcaccgctcaacctccttaccgagggccccaaagggggtggggttttttgctgtagatagagatgatgacgacgacaagtcctctgggtgcactcatccgagcaccgccactaacaaggatttcacatccaattgtaaagctgagtataatagggtaaggaagctgctcactagtaagcacaggaaagttgctccagcgaggattcacaaatctgatctttcctatagtgatgtcgagcggaagccttctttccggtacaaaaaaatgcatacacgacagaggacacaaaggagtacattcaagcggaggaagctctttgatcgccatttagctctagcatctgaatttggtacagcaaatggaaagggaaacacaaaggttgccggaagaaactccaatgctgtgtctttggaagcaaacaaggggactaattcaatgccattccagaaatcttgtgggtcaaatgattgccatgtgaaacttagaattaagtcttttaacgtgcctgaacttcttgttgaaatcccagacagtgcaactgttggctcactaaagaaaactgttctcgaggcagtgactgcgattcttggaggtggcctacgtgttggtgttcttcaccatggaaagaaagtcagagatgatagtaaaacgttaattcaggctgggattggtcaggatgatatgctggacaaccttggcttttcacttgaacccaactgtactcaaaacccacaagtacaagctcctgaagatgtcagtttcctcgaaaacattgatactaccgaacccctcgcaaggatcacacctgctgactcgtcttctaagcttggtgaagttgacgtatcacaggagcttgcattaaccccattagcaatgaactaccagggcagtgatcatgattccgtgcactcccctggggctgtctcgtcgcgcgataaagactcgcgagccttatttctggttccagctgcagatcccaatgcaggagctgtagttccagcaaataagactaagaggtcaccagagcagggacaccgcagaatcaggcggccgttctctgttgctgaagtagaagcacttgtgctcgcagtcgaaaagcttggaaccggaaggtggcgagatgttaaacttcgcgcttttgacaatgcaaagcaccgtacctacgttgaccttaagaaattcaaggtgctgcttgaccaagctcggctccggcttccagtttttggattctcttgtgaagaagttgctgcctcttttttatacagcagaagctgagagccgaacagtgtatttggcttgaattgcagcctatatagtttcatccactcatacagacggccacaaatgccgtaaaaggagggtagcttcttttgctgagtctagtcttgggagcaaagctcaggaccgaagtctagacttgagacggagcgggggccaaagcggcacccgaatgaaagcttcagattcttttgttcagttaaattcattctttggtagtggagactgacggaaggataggagattaggtggggtggatctttggttctctttttctttcttcttctattattacattattagttgtattaatgtactatattattttaccaatcttgtagttaccctcaaatttgtaattggtgaaattaacaaaattgaaggaaatacatttccacca

SEQ ID NO: 28873 - DNA, 2234 bp, Zea Mays
gccgcgggctcccgtctcccccctcctgccgcttttcgggatttcgtttcgtttcactcgagggcgaggctggatttgcgcgtcctgtaccgagcgttccatgtgacaggtcgctcgcttgcccccgccccgccgctccccctcctcgtctcgcaaagcaaccgcaacgcgccgagccggcagcggggtccccccaaaagacgaggcagcgagcaaggtaggcaggcaggcaggcagcgggctggcggaaaagactagtgcgcgctcgtgctcgtgctggtgctccccgaccagactagaccagcttgctagcgccagcaaggcgagcggcgatgctcgcacgatctactacagctgccgccgcggccgccgccgggatctgcctgtgattaaggatgtcggcgtcgcggagcgggaggcggcggaccggtagcgtggcgctcggagaccttctgcagcgggaggcgtcggcggagcgggccgcgttgggatgcggcgagcggccctcggtcgcggcggggcaggcctgccgggcgaagaagggtgaggacttcgcgctgctcaagcccgcctgcgagcgacgccccggcgcgccgtccacctccttctccgccttcgccctgttcgatgggcacaacgggagcgccgccgcggtgtacgccaaggagcacctcctcggcaacgtgctcagctgcgtcccgaccgatctggcctgggacgactggctcgccgcgctgccgagggccctcgtcgcggggttcgtcaagaccgacaaggatttccagactaaagctcattcctcggggacaaccgtgacgcttgccataattgatggctccgttgtaactgttgcatctgttggtgattcacgttgtgtccttgaagctgagggatccatctactatttgtcggctgaccatcgcttcgacgctaatgaagaggaggttggacgtgtaaccgaatgtggaggtgaagttggaagactaaatgtcgtcggtggtgctgagattggtccccttagatgttggccaggtggtttatgcctctcaagatcgattggtgatcaggatctgtctaatgctggaggccgtcttattatttcaagcgacggtgtttgggatgctttgactgcagaaatggcttttaaatgtgcacgagggcttcctcctgaggccgcagctgagcaaattgttaaagaagcagttgaagcaaaaggattgagagatgatacaacttgcattgtcattgacataatatcaccagagaaaccaaaacgcactatacaatctcaaagaacgccaggaaaaggccttgtgcttctaaaaaatttctttttaaggaaaacaacatctgactcgttgtctctccctgataaggataattatcctgagccagatttagaggaggtctttgaggacggatgcccatccctttcaaggaggcttaattctgagtatcctgtccgagacatgttcaaactttttgcatgtgcaatttgtcaaattgacttggaatctggccaaggcatatccatacacgagggtttgtcaaggccagggaagctgcgtccctgggatggccctttcctttgtcacagctgccaggaaaagaaagaggcgatggaggggaagcgccattcacgagattcctcgtccagaaatagcgggtcaagtgaatcgtgactgaagccgagaatcatcttgaggcaaacgcctagcggtgtgacgagctaattatcgttgctgctgttatcttgcagcactttctcatggattaccattgaattgagacatgttggaagtcgccatgcctatatatatgttggagctgtacggtactggaccgtagagcaaatccaatcgcctctagataccacaccagcgtcttcggcagggcttgtgacagcagcttatgcagggaatgatgacaagaggttattattagtgaagaatgtcgacagtggccaacagtcatgtaaattattcgtcgtgtagaggtgcaagtgacaaatagccacggttttgtaattctcaactaggattaggtattgagacctgtaattcgtctgggcagacctcaaactgaaggtcaacaacgtagcctggccctattgtagaatgtatgttgccctacaatctaaatgattcaacgctgcaattaaatctaagatctttgcagaccaccataattctttttcggttactatactagtgtaatgtttgtccaatcatatt

SEQ ID NO: 28874 - DNA, 2798 bp, Zea Mays
ctctagctactactactactattctgtagattgatacagatagcggcgctcttctcgcttcgcctcgctgccaatctcgtcgccgatccccgggtccggcgccgccacgagcttccagatccaccgcccgggcaatgctgtagcgcctcgcgccgagatgggcggcgtcggcgccgcctcgcttgccctgctgccgctccccctcctcctcctcctgctcgtccgcgcggaggcctccgctctccacggaactatattgcctaacccagcaccgagtccatctagcccccctgaagcgagatcgtttggacctcgaatttccccttcatatcctccaagggcactgtctccaggatctcctgacattgatgtgcgctctcattcgcacaagcccccacaccatagagagtcaaatcagggcccttcaccatcctcagcagaaggttgttctagttatatatgcactgaaccactgactgcaacaccaattggttccccttgtggctgtgtcgagcctattagtgttatcgttgatctggacttagctccttacctactgttcatgagcatagctgagttagaagttgaagttgcagctgggacatttcttaaacaaagccaagtgaagatcatggctgcagttgcaagtatccaggatgaccagaagacacgggtgaccatttatttggtgccactaagagaagagtttgatacttatacggcatccctaatatctgataggttcagggataaaaaggtccagataaattcatctatatttggagattataaagttatcaatgtcagctatcatggattgcaatccccaccatcatctgtgcctggaggatcggatccttcaggaaccgaagatcctataactgcagaggtgcctgatcagatgaaaaagcacaagaaatcagatattttgatcgtcgtggtagcgttagggtcttctcttggacttctgttgacatgtgctgttgtcctgatcttactagtaagatggaagaaacttggacggcttcatgaggatatgaaccctgcaactaccccaacagttaatagaagatacggtgctagatcaactttgtcaaccggcatggtgagctctgcgtcagcatcagcgttttcaacagtggctacttgcacaacatctgtaaagacattttcactaggccaacttcagaaggccacagatggttttgattcgagaagagttttgggtcaaggtggctttgggtgtgtctaccatgggacaatagaggatggaaacgaaattgctgttaaattgcttacaagggaggacaggagtggtgaccgtgagtttattgcggaggtggaaatgctcagtcgactgcaccaccgtaatcttgtcaaattgattggtatttgcgttgatcggagcaaaagatgtcttgtgtatgagctcatacgcaacggaagtgtggaatctcatcttcatggcgctgacaaggctaagggtaagctgaactgggatgttaggatgaaaattgctcttggggctgctcgaggcttagcatacctgcatgaagattcaaaccctcatgtcatacaccgtgacttcaaggccagcaatatcttgttagaggaagatttcactcccaaagttactgattttggtttagcaagggaagcatccaatgcaactcaacctatatctaccagggtaatgggcactttcggttatgttgctccagaatatgcaatgacgggtcatcttcttgtgaagagcgacgtctacagttacggggttgtcttgctggaacttctatcaggaaggaagcccgtaagcatctccgagtcgaaggatcccgagaaccttgtgacctgggcccgtcctctgctaagccacaaggagggcctggagaagttgatcgacccttctctggaagggaacttcaacttcgacaacgtggctaaggtggcgtccatcgcttccatgtgcgtgcacgcggacccatcgcagaggccgttcatgggcgaagccgtccaggcactgaagctcatctacagtgatccggacgaggcctgcgacgattcctacagcccgaggaactcatccgaccaagacggtggctacgacggagacctggtcttcgggagcgggagctgggggtttggggcctctggctctgggtgcctggactaccggaactccctgccgtttgttaccatggactacagttccggccgaatagaagggccgcgcgaccctcgcgcggcgttgtcggcgggctcccatgcccagccaccggtgctgcagaatagatcaggccccttgcgggtgaagaagaagctggccgcctcctaccgctctagaggcagtgttagcgagcatgggcacctgccgcgccattgatcagtagtagccaatgaagtagtgttaggccgctaccttccggtttgaccttggaggctgcggtggggtttgtcatcacctctcgatgattcgtgcctcgtgctagttagtgtacagttagttcgtggtgacccttggacatgcatgcatgcctgcctgccttgggtgtaggtgtttttttctttcttattcttcttgtttgccttctgcttcttccccggaagcaatgaggatggggttggcagatgctgtctaattttcgcaaaaatgcggctcatgcatctgattggtgtaatctggtttagggctttgacggaattctggacatcatgttgttgtggctaggttgttgtattggatgcagttcgtcactaacaagcgttagggcctgttcgtttcgcatggaacgaaggag

SEQ ID NO: 28875 - DNA, 1500 bp, Zea Mays
ggccaggtgcctgcctccatctccctcctccactcgggtcttcacgatgccgccgccgccacacgacatcgcacatccgctcttctccctcccctcgctctcggcggtcgacgtccgctcccctggtgccatcgcttgtgcctggctcccgccatcgctggctccccgatggacctcacggctagtgtggggccatggatccccgacggatcgagggtcgcgccgcctcatgagaaaattcatctttctggctcgaacagaaaatacctgaagcttcaatttgacgtcgtgtagcaatgaatgcgtgcaaggaatgctcttttacatgttgagaatgaagaaaaattagatgtcgtggaggcatcccaaaacatgtactttccattttgcacattttagtccaaggttcaatacaaactttctcagaaaactatctcaaacactactaatcgttgttggtctgcagggtttcaaattaggacttagctatttttccatcagcctgaaacagcctaataatcttactttgatcccttgggaaaaaatgttcttattattttgagtttttgacctatagtcaggtctagaacatacccctgacatcacactactaatctgggacaaaaatatgtagttctccaaaagaaaattgtttctaatcctgccttgaaaatgtttgctgaaatactatttggtaaagttgctgaaatactgtttatgtatatttctctttcaaattattataatttggatgcgctccttgtttgagtgctccaaatctgaaaaccaagaaggtaagaaaatgtaaaggcattggtccaatcagtaattccaggcatatttagggcacatgcatttaggagtccaagtgtccaacattgctagatcaataagaaataaagattgatgatttgaaaaaaactgaagtagcttaaataaattgtttgattgacaaattcagatagctgtacctttgaacttcctcttacttggaggactttcagtgtttcttctatctgcaggaatgtcctcaggaggcttggagccttcatgctggtcaatcttcccaagaagaaaggtgtattgagacttcaaatgcttgtagtttgtcttcggctgagtctgcagccgaaacagtagccagctgaacatgctgacatgttattgcgggtggtcaaggctcaggattcagagcagaagatacacataaatactggtgaatgatgccatcgacgatgatgaactgatcaaacgatggatgatgccatcgatgaaagatggaatggaactcaaatttgggtggtcgcacaagtgtggagacttgaatttatatatacttagtctcaatgttagcacaaacagttgatgagcaagttttcccattgtattttagtttgaatttagagtacacttatgtaagagttatttgacaatgcttatttatgagatattgaatgatatttatatatattaaattaattataatgttattaaatatat

SEQ ID NO: 28876 - DNA, 1077 bp, Zea Mays
ttcacgattcagccttgtgaactacccactttccaattcgacatcttcgccctcgaatcgagcttccctccaccgaatcgagttcctccatccaaatcgagctcattgccgccggatcgaggtctgcgtggatcgagctcgagctttggagaaggagaggaaacgggggacgggcacggggggagcaaggcaaccaaacgggtggagggaaacacgccaaacaggctcctcgatcgttccgggctcgggctgccacccgccattcggtgtcccctccttgacaggtgcccgagccgcgccgagctccagcctcatttccacggtccgcgccggcactcttccctctcccgatcgtcctcctcgtcgcctgccgcctcttccttcttcccactccactagcttcaggttggactgcacaacgtggagcggagatctatccgaacacgggattgattcatctggtggtgttacaacatagggtttttgatatagcaatgggattactcatgtataaatgaacaaagtttggagacagttggacctgacaattgccactttttacatgttttaactcattttttttctgggaaacaagtaattctgaagttaccttggaagtcctttgcgcttttgactggtcgggttgcataggccattgttgagaggtgatttggcctaagaatgggggctccaaaacaaaggtggacttctgaggaagaggctgctcttagagctggaatagcaaggcatggagttggaaaatggcgcacaatattgaaagatccagaatttagttccaccttatgctaccgctcaaatgttgatctcaaggacaagtggcgaaacatgaatgtgattgtcagtacatcgagttctcgtgacaaggcgaagtctgcattgaagagaatacgaactattcccaagaataatgagcacaccatggcaattaccagagttacttctgatattgatgatgagattgttgacgaaaagcctatagtatcattgcctagtgaagcaaagaacacatcaagttcgaagaaatctcacagttgccatttgtcaatagaactaaaa

SEQ ID NO: 28877 - DNA, 1404 bp, Zea Mays
aaattatattacgagggtgcaggcatgctggccttctcgaccttgctctcctccggcagcggccaccaatgcaccaccgccgggggccagacctgtgcgccgtccaccattaaggacaacatcggatggggcctcggtttcggcattccgtgcgccgtcatggcagctgcgctcgccgtattccttctcggtacaaggaggtaccggtactacgtcactgccggggagcggggcctgttcgctcgtgccggcgaggcttttgttgagtggcggagcaggcgaaaggctcttcagcatggtgatcgacctgtagcagagggggcgccgggattcagcgctggtgtcgacgaggaggagcaggctgcagtcagccatgacgcaggcctcgtcaaggagaccaaggacatcctccgtctattcccgatatgggcgacgtgcctgctctacgcggtggcgttctcgcagtcgtcgacgttcttcacgaaacaggcggcgaccctggaccggcgcgtcgggcggcacttgcaggtaccaccggccgcgctgcagagcttcatcagcatcaccatcgtggtcttcatccccctctacgaccgcgtcctcgtgccggtggcgcgccggtactccggcaacccatccggcatcaccatgctgcagcgcatcgggacggggatgttcctctcgctcttgtccatggtgatcgcggcgctcgtcgagaagcaccggctccgcgtggcagtggacgctggcctcgtggacaagccaatggtccccctgccgatgagcctatggtggatggtgccgcagtacgtgctgttcggggccgccgacgtgtacaccatggtcgggctgcaggagttcttctacgatcaggtgcccgacaagctgcgcagcctcgggctggcactctaccttagcatcttcggcgtcggcagcttcatcagcagcacgctcgtgtcgatcatcgacagtgtgacgacggccaggggcgggagctggttctccaacaacctgaaccgtggccacgtggactacttctactggctactcgccgcgctcagcgccctcgagctcctcgcctatgtcttcttcgcggtgacatacaagtacaagaacaaagcaaccgtgcatgcaactgttgttggtcagtcgctttagttcaaaaatgaattagcggcaacaaatattcgagaatggagttagtacatcatcctacgacatagtataggtgatatgacacacaactaaatgtaaatggtaccttttctccgttagggtttgtggtccatacttatctttgattttgattcccatttgtatctgttgggacttgggagggtcaatgctatcattcaattcttaaggcaagggttcatccgtaatcagcaaatcggtcgttcgttt

SEQ ID NO: 28878 - DNA, 155 bp, Zea Mays
tcatcacaagaaggacatagctcttgagttcaagtcggtgtaaacccactccccagccaccatgcttattctgtccagtttatcacacgccaactcctctgtagtgaccacgccatcagtttgcccacctcgccgtggtcaggtatgctcaaggg

SEQ ID NO: 28879 - DNA, 3058 bp, Zea Mays
cgccatcacgtccgcagcccacatgctccaccctcgcccccctccccgccattctcggcgcaccgctcgccatccccataggccatcattgctagcgcgcccatgccccctgcccctgtcatcggcaccagaaaccgctcccctcgcacgccggccctagctggctagctcccaaatccgcccctccgcctcagatccctacggtgggatgcgagggaacgacaaccacgcggcctcccgtccttagagcctcaaatccgatgccccctccctaagccattccctcggccgcgacatcaacgaaaacgagcatggcccccctctacctcctccaccttgccgtttatggcctccgcactgccccaacgtcgacaccttcgtcctccccctctactcccagtgcaccgccgccgcgtatgcgctatcccacccgatggacgtgttgccgcctctgcagcacgccctgtcgctgtcgaccccacccagccatgcatttggagtttacaatgtggagacatgatttatccaccggacgacgaggttggtgcgcggatggcgagggaggacctccactgggcctactccacacctcttcctgtctaccgaggtcgagcacatggaggacctgctccgctgtcgggcactcctgagccagcgactacaaaatccactctggctctctacttcaccctccatattacaatatgtactttgtatatgtgagatgagacacccaagcagtcaaactaaacactattgtccaatcccctcttccaaattcattacaatcctattagcatgcaaagatttaatttgatgcaatgttttgatttgtactacgtttttactagctttgcagatgcttcagaaggttatggtcagtgacttttttcttttcagatttgttagaatagacacagaaatttagatttctctcctgtaatgttgttagcattggtcttaattttatttgttgttgttaggagaggatttgattatcatgatcagtacaagatatcaatcattaaatagcgaattcactctaatttctagccaccatttttctaagtaccatgttgctgctctctttccgctggatgaacatttgaacagtggcaccgaatagtgatcttatagtgctggcccgcaacacatggggtgcttctgttcttttacccattgaaatgttatggatcttttttctaatctaagattagaagtatggtcgtgatactattttgctataatctatgaatgtttttctgtaaaaaccaatctgtttttgctttagattaccaaactaaattgtctctatgcttttttgtgggtgattttgttggacccctacagccgtgatggcatgggaggctggcaagtcgattctttgtatatagttagtagtacaaaactatatgctatgagggtccagagaaattgatgatgaggagcagctagaggtcgtggtggagaagggctagagaaagggatgacgagggacagttgcaagttgtggtggagaagggcgacgaccccatgacaacatggggtgaatttctatatcagttgccaatcataagaaacaaatcttattattgcactccagacagtttgtcatcaagcctttgtctggattcctttttggcactcttatggagtactaagccacactgaagaatttgggcttaagagtgaggttttgaaggtgactcttgcaactgacgtcgtgaactgagtgtgaatatctactggatgggcaagcaagtttccaaccccatgccctcccatcgattctgctgcctgatccggctagagtttattaggactcgcaactacctcggagttcactgctgtaaatatgggtaacaccctaccagtgcatgatatgtcggaatccacaggtaaaatcgaatctatgttgcttcaaaagttactcccttttgtctgttcttggctagaacaaggtctggtcaaaataagaatgttttttgttccattttagttggagtttgggttttcaaatctgggccagattagttggatttaataatttggtttctaaggtgcagcagccataggatctcccaacaaggaggatcttgcaacaatgacattgatcaagaattggatgttggaaattatggtttggcattgttacttctcttactcctgtttcatgtcccaatctgaggtgactcgtgttggtaatcatgtaatttttccttcgtgcttctattcttcctatacgctttaggcatggcatgttgtgcactaacattttgattaacaatacaacacatggtcatacatatggtattgttgcactatttttttgttgcaacgcacgggtattcaaccagggcatctcagattgggagtgggaggaggatgaggagatgatttggtgctaccagggacaggccccatctcctagaaatggatcttcctcctttgcatgggcaacttgtgcatcgggctactcttcaccaacagaaaaccatcactgagaaagagcagttagcaactggtgttgtcgtgttgcgactcaaaagggcttgcctatgggcatccacataggagccatccccaaatgctgactgaccaaatgttcggtatgggagccacaaatagcagcacgatgggaatgcagcagcagcagcagcaaggggtatacgggaacatgcaggcaggtgcacagaacgtgcaaagtatggtgggccttcagaaccagacccagaatcccaacttcactcagcagattcaacaaaaccaacaatgattcaacactaacggtcatggaggttgaaagatgagcaatatagccatcgttttgctatttgtctgttggtctttactcagcttatctgtgagactgatagtagccccaggttgatagccttcgtttttctgtaaatcaatgtagatgcatcgccattagcgagatgcaggtcaattatatacgttgtaactgtgttttggatatgtgaatagtgttacgtgtgttccttttatttataattaagcctcgcagcaaggccgacaatcgaattgcatacgacta

SEQ ID NO: 28880 - DNA, 1554 bp, Zea Mays
tgctttctctcttcttctcctttacacattccgggttccggcggccttatatatgctgctgtcatcccgtttgcacggtaggcagcaagcaaaagtacttaaaatatatgctgcaaggccggtgttcgtcatcgtcttcggccaaactctcaacaacagatatttatatataacgagcgcagctagctagctagagcctgaaagaattgagaagctaaggatagaggcgaagctaggctgcgaaccactggatcaagaggagctagctaggcagcgagaatgagagggtttgagagaaaaggggtccggcagtacaaccggtcagaggtgccgaggatgcggtggacggaggagctgcaccggcagttcgtcgaggccgtcgagtgcctcggtggccaggacgaagcaactccgaagcgaattcttcagctgatgggcgcgaagggagttagcatatctcatatcaagagccatcttcagatgtacagagcctccatctccagcagcagcagtacccatcatcagcccagcctccagaagtcgacatcaaccgcagcgagcaacaacaagcgcgtgttcttcacgcgtgaagattgtgcgtcacaggaaggcaacgctccagcttcagacaagaacatctataccaccacggtccgtggttgcggccagtactcatcaccgtaccaaataccgtcgctacagcaagtgttcagatgctgggaacaaaagagagggcgtgttgcttggaactccgacgtgctaacaacagagaagggggtgattattaggccaagtcacactaggaagcacgagacgcagcagcacacgggatgcgacctcacgctgtcgatcgggctgtgggaggacgcgagcagcagcgacgacgccgacggctcgagctccatcagcgaggagctgctgcctgctccggcagcgggcggcgctcgccgcgtcgccgccgtagtgaaggaggaggaggagagcaagccggcggctctgaacctggacctgaccatctcgtcgtcctggctggcctgacgacgtacgccggcggacggctggtggcgttatgcgtacgtggccggcgtaggtacaaatacgtacatactatacgcggactcttgcagatcgagcagcagactgtgtgatcagggcatcggtactaggactactgtatattttcgtgtcgtcctgcccactccgttctagccactctctttttttttttcttattagatcatctgtacaacattttcgggtccgttcgattaggaacggccgcctgggcttcagacgacggtgggtgaggaatttctgcggccctttttccttgtccggggagaaggcgctgtatacctcagttcctcacatgtcatcgtctgatcgattgagcatatacttagtatgttattagttctggcagctatatatttcagtgaatgacagaggacagatatgtttatatatatagtcttttatttttgctagcagcagctgtatatttcagtcaacaactagcaaaagtcatccagtacagtacgtccaacaaaatca

SEQ ID NO: 28881 - DNA, 441 bp, Zea Mays
ggccgatccggcgccagcagcggcggtgctcgaccttcaggcatcagagctgcgggacatcacacgcaccgctacgatctcctcctgcgagcgagatctcaccaccgcagcggcgccgcggccatggcgggaaggtatcaccaggatcagggcggggacgggggcgcgtccatggaggtagtcagcacgccgaaccaggagctggcccttaccaactgcgcatacgtctctcccgctgacctccgccgcttccccaacgggctcgccctcgtcgctgacgcctgggtcttcaccctacgtgaccacaatgctgttgcaagtggacgcattgccttgaatgctattcagcgtcggcaggcaaaggtttcagctggggattctgttactgttagcagatcctactagtgcttgatgattgatcagtgtcatctgatattcatt

SEQ ID NO: 28882 - DNA, 588 bp, Zea Mays
ccggatgattcgtattgctgcgcgttattaaaactttgcggtgcgaccaaccaaacccaatgtttttgaggcgcccgtccaagcatcccatccattctctctcgctgctctgctccccacggaccacggggcaccaccacaaaccagacgcgacgcacgcgcgcaaaatcatccggcggagccagggcggaggcaagccagagacgcggcacgcgacgcgtgagggcgaggagcagcggcagcgcgggcgcggcgacaccgcgaggacagagcgagacgcagcggcggaggaggggcagaggcgagcgccgcctagagtccctgctaccatggacactttcttcctgtcgcacggctcgcccacgctctccatcgacgacaacatcccggcgcggcacttcttcaagtcgtgggtgccggcgaaggtcgcgggcgaccagcccccgcgcgccatcctcgtcgtgtcgggacactgggacacggccacgccggaggtcaacgtcatccgcggcagcaacgacaccatttacgacttctatggctttcccaagcccatgtacaagaaaaggtctgatgcagagcactggt

SEQ ID NO: 28883 - DNA, 642 bp, Zea Mays
tgcctggcctcggaaactcttccgatacagaactggagactaaaaggatattgcttgagattttcaaggagcggcagcggaagagtgctgaagctggttccatcccaagtttctacaagaagaaacctgaagaaggatctattagctctagagttcaaaggttggccaagtataggtttttaaagaaacaatcagagatgctgctgaatgctgatgatcttgatgccatgtgggtttgtctcagagaaaattgtgtaatcgatgatgctactggtgctgaaaagatgaattatgaagatttctgccatatcgctacagtctgcacggagcagattggtcagaaatgcaaacgcttcttcagcccttcaaacttcatgaagtttgagaaggatgactctgggaggattgctatcctaccattttatctttatgtcatgcgaacagtgagttattttctgcgagaaagagcagttaaacttgccagctagttttgtcccagatgcttcattttgtttctaatagattgtgggttggttaaaatccacattattagcgattctgttctctattcttatctgaagtaatttttactccattagttataccgtttcgttatttataccaagtttgtctaaataacgg

SEQ ID NO: 28884 - DNA, 2622 bp, Zea Mays
cttggcccctccagctctgacgaattatcatccgtttggccgcttcatttctctccccgcttcggtgctgcctgctggccgaccgccgaagcgacaaccgaggccaccgatcagttgactcccgtctcctcgtcgcagggtctcctcacacgagcacacgaacatcgagccctccccgcaggagcataagacgcttcgcttgatactttatgttggatcagtggcggctcaaactgctcagttgactgtggatgcttcacctcagaatgctcagataatccctggcaatatgtttggcatcttctttgaggaaatcaaccatgctggtgctggtggattgtgggcagagcttgtaagcaacagaggttttgaagctggtggttctaatactccttcaaacattgacccatggttgatcattggggatgaatcaaatattattgtggcaacagatcggtcatcatgttttgctagtaacccaattgcacttcgaatggaagtactttgtggagctagtgaaactaatgcttgcccatcaggaggagttggaatctacaatcctggttactggggcatgaacattgaaagaacaaatgtctatagagttaccatatacatcaggtcatcagaatcggtggagctaatggtttctttaacaagttcagatggtcttcaaaatctagcctctcatacaatcatgggagacaaagaagatttcgttgagtggacgaaggttgaatttgatttgcaatcaaattatataaatactaattcaagacttcagcttacaaccaccaaaagtggcataatttggtttgatcaagtatcacttatgccatcagatacttatatggggcatggtttccgtaaagatcttgcctctatgctggcaaatctgaagcctcgatttctaaaatttccaggtggcaactatgtaatgggaaattaccttataaatgcattccgctggagtgaaactgttggaccatgggaagagagacctggccacttcaatgatgcttgggcctattggactgatgatggacttgggttttttgaatttcttcaactagcagaagaccttggcgcttgccccgtttgggtggtaaatgatggggccagcatctatgaaggagttccatcagcaacaatagctgcatttgtaaaggatgttgttaatggtattgagtttgccaggggagaccccgagactgcatggggttcagttcgtgcagcaatggggcatccagagccctttcagctttattacgtttcaataggaaatcaagaatgttcaaagtactattataaagataactatgtgaagttctactctgcaataaaagcatcctatccagacatcaaaatcatatcaagctgtgacagatctgctatttcatcagacaacccagctgatttgtatgatgtccatgtctatacttcatcaggtgatatgttttccaaatctagaatgtttgataatacagcccgtaccggacccaaggcaattgttagtgaatatgctgtaactggaaatgatgctggccgaggaacactaatagctgctttagctgaagctgcatttctcattggattagaaaggaacagcgacgtggttgagatggcaagttgtgctccactctttgtaaacgacaatgaccaaaggtggaacccagatgctatagtctttaactcatggcagcactatggatgtccaaattactggatgctgcactttttcaaagattcaagcagcgccacacttcatccgtccactattcaactaccgaactacgaccaactggtcacatctgctatcacttggaataacccacatgatgggaacacttacatgaaaataaaggttgtaaattttggaagcaaagctgttagtctgaatatatctgtaactgggttggaaactgatattcagacatttggatccataaagacggttctcacgtcgggttggctgcgggatgagaactccttccaacagcccgacaaggtggtgccggcggcaagtccaataaccaacgcgggcaagcaaatgggtgttatattgaactcgtactccctgacctcatttgatctcctcttggactcggagtctcaggttcgagcctccatccaagcttatgattagtgtgagatgtgtcgtgtgcgtgcccacaatactcaataccgagatacgggtccccccaaggctccccacaaggctttcaatagaaaatacgatatttgtgaattattgtgaagtacaggcgtacagctggctatgtgtatgagattcaacaaatggtttctacgaccctaataaaggtataaaagcacctttcctcggatatcacacatccgttgtagtctgcactcttgacattttctcttttttagagcatgtacagtgtacctaactaccgcaaactttttgtcctggtgcactacagcgaatgtgccatatataagaataaaaagaagggaaatataaccgtatccatttgtgtgtgtaaccatgtaatcaaggcgtagggatggaggttatagactcaactgatatgttcttgttgggggtttactctgtcgaaggtccttataaaattttcactttagcataaacaaata

SEQ ID NO: 28885 - DNA, 1996 bp, Zea Mays
agtaaaggcaaagtgaagcgaagtgccgaactactacgagcaaagagagagagagagggggttggggggtgagggagagagagaaaaaaacagcgtccccgcacgacgctaacacgtcccagatctaacaggaaaaaaaaaccaccccaccacgtcgccaccaactaacccatcatccatcaacgcaggtcctccccggtcacgcggcagtcacccccactctgctttgctctgccgccccgccccgcccgcactgcatcgcgtcctccggcgccctcgctgtcggcgccattggcgggctcgccttcaactgccccgtccgctggaaccaaccaggtctaaacatgcttcatcgttcaaatagccggaaccaaaggaacaggggatcaagaatcaaaacactactccaagctaccttgcttataggtgttattttttggctcctatatcaggggaggaaagaaaaggcaggtagttacagtgatagcaatatccaaatggttgacgacaattctgatgtaacgactaaaccagaagaacgtgatgcagatcaccattcagatacttttaattataatgagaagactggagaaactgtgttcgataaagacagtactaacttgaatgaagatgacaagagaaacactgagaggtcagaagcggaaggacaagtcaacagtgcagatggtaatacagaagttaataataataacaatgaagatgaaactaccggtcatgcagaagaaggcaagcatgatactgaatccaactctgctgctgagagtaaaagtgaagtcaattcaactggagatgatatgtcccgaaacaattatgcacaagaggaaaacactggggaggcaagtggaacgtctcatgaagtggtgcaaggtgaacaatcgaccagtgcaagtggaagcgggaatggatcggatggagatggtgagaaaaatgaggcagttgatattaaaagtggttctgaatcccttcctgatgatgccaaggctgaagcaactgatgaccgtgctactgtcagtcttcctgatgaaaccgggaatataccatcagttcatactgataattcgcaaaatgatgccagtgaaaaccaaggtgatgcaacttacactacctcggattcgtctgagcatggcattgttgaggctgtccatattgaaactggattggaagatgaaagtgcaacagcatcatctgggactggatctggtgatgacaacggtaactcatctgatagcgcctctgcagaagaaaatactgagactgtatctggtgatgatgagaagggcatgggaacaggtacaaccactgaagcgtcatattccatacaacagaactctgagaacagcagtgtctcagctgaggcagagaactcccaaggggattcttccagcggagtgaatggttcttcagaagagacatctaacaagggtgatggagctacagaaacgtataacaagggtgagcaggtggatcccaagattgaaactagcacatccaccaatgccgagcataatgaatctcaaggggctgatggcagctctggatcaaatggtaacggccctgaacaaaccggtaaatctgaaagccagtgatttccaccatcgagagttcgagacacgaatttagtatacaggtttgttttctggagattgaagaggggatagtgcacatagaaaaactgttcactgtggtttatcgagattttagtcgatactgccgaagtataattgtgcagatcgcaagattggttgtctgctatgcttattgcttatggcatgatttctcgtcaagttgtacttgagtcaatatttctgtacggttattaatctcgacatggtactctgttcattgttggatattatgacagtcttacaatattctgcagtgtggccgaaatgccctttgcccgttttgatcactgcgggtacctgtgggtttatacgctcatgtttctcatttacggtcattttttttagagcct

SEQ ID NO: 28886 - DNA, 464 bp, Zea Mays
agctccacggctcaaccacccgtgcggagtcgccgggttctgttacagccaccgcgatccaacctccgctggagccccatataaacaactgaggcctcgctcgcccatcaaccatcgaactccgtgaagccctcaccattgtagcacccgagagagagagagaacgtgagatgtgagccgcggtatgggtcccattgcctcgggtgagtcgtgtgggattccctgggaagctctgcgcgtgcttggggtctcaccaggggagaatggcgaccggaatccttcaacaacgtcgagctgcgagtttaacagagactcatacgacggcggggttaatacaccgcaggatccaaggtaatgagctgacccttggattcctcgttctctccgcgtagtgtggctataccgaattggggaataatcaacggattatgcggattggaatcgccggccatgggcaccgtcgt

SEQ ID NO: 28887 - DNA, 1582 bp, Zea Mays
ggccggcaagctagatgcactgaccacggtgacccatctcgatcgatcggcggcttcgctagctagctgggacacagcccccatataaatcatccactcctccgtagcaagcacatcctgaagctgcctttcttttccaataagctaagcagcaggtgcaaagggaattcgagatccagagagctagctgatcgatggatccgaaagttggcgttgctctgaccctctccctcgtcggcgggctaagcacctcccttggtgcactgttggctatcctcaaccatgcgccaaacaacagaacactcgggattctacagggctttgctactgggctcatgctcagcatgtctttctttgacttggcttacgatgctgtcaacgccatcggctttctgagagggaacctctggtttttcgctggagcgctgctgttctcaacaatcgcggacgttttccctgagccagactgcagtgcggcagatgaaaatgggaagcagcagggtggaaaggaactcatgatgagacatcgccgaagagttatatttagcgtcattgtcacagcaattgttgctggtgtgagtttacaaaacttccctgtgggcactgctgcatttcttggaacaacaaagggcttccgtgttggtttgaacttggctcttgctatagcactacactacattccagagggtatttcagtagctctcccagcatactttgccactagcagcaaatggcaagccttcaaattagcaactctatctggttttgcagagccactgggtgtgattattgtggcatacctattcccaagcaatttgaaccctgaaatactggaaggtctacttggattaggacgcaaggatgctgttaaagcagtatttgttggtatggcctttatgtctatgagcttgtattttctagatgctagcctcccaaaggagatgagcgcttaacataatttgcgcctaaaccaattcatgtgatggtcaagagaatttcatcatgggtgctgcaacaaggtgttagtgggaaggacgtgcatccaactcgagatcatgagagatgagatgtttccagcaacagtacacaatacaacgactgacagatcaagcttttatcaatgtccatgggacatgtgaccaaaatggtttgcaacacaatcatatttatataaaaaagggaagtacaattgtacaaacaggcatatgctaacaacatatcatgtacattttaattagattcggtcatatcatgtacatagagggtaagattaattgtatatactgaataaagtaggcacaaaacactgatacgatgtaaaataatggaaataaacggttgcatacatgatgaatgattgaccgacgtatctgctgaacaaactttaaacgggctatacaagttatgaggcaaagagactttactcttttaaacatggttataataaattcaatttactcatgtttaatctggctataataagtttaatctacttgttgtgcatccattataagtttataactattggacctttactcatatatagagagagaggacaacactttttatctagtgtgatatc

SEQ ID NO: 28888 - DNA, 1910 bp, Zea Mays
gagcaaagtacagcaattaaacagaccaacaagcaaaccatgcgatggcgcttctggtgctgctgatgacttccgtcattcacatcgcatgccataatgtgacatgatactcttctcactgtcaaattgctggacctttgcgaccagactataaatgctataagttaccacttgctaacatgtgtgtactttgggagtgtattcgtgaatctgtcgtactcctttggccctttcctccgtttgctgcttcccgcttcccgcttggatgatctatcctttctgaacccatttgcaacatcactactgcctgaggcagtagccttcgacttctttcgcgatttccgtcttgattttggggacttccgttttttagatggtgacgaactagtgtcctcggatgtggattgactatttctgggcaatggttcatcctcgtctatcacatgccaattgtatactgcatcattctcggtgtcaaactgttgggtgatcggctcccagggttccgctaacatatcttcattgttccagcctttccggtcaaggagaactgaatctggtctcacaatggtacccagaatgctcctattatgtcccaaactaataaacaagtttgcatcagttaacacagagtacgccttggaaaatgctgatttcacctgaaaaaaggggggatttattcaatgttttcttatgtcgaaatattccagagtaacagtatcatcaaagcaaaaggcaaaatgagttaaagcatcaaacagttccagtatcatttcgttcagaaatttcgggtagcaacttacaaaaccctaaattattttgggtaattcgggtatcataatcgggtatccaaattacccgaacttttatgtgtcaagtactcatgtcattcttaattattaacttgtacatctataattatgtgtaaatgtgcatgacttgtggttgtagattggttgtgttttttatgtccatctatatcattattcaaactgtacttttataataatttaatagggtacatgcgtttttatgaagctgacacaacagatcggtagttcggcaatacccgaattttcgggtattgtaaaacccgttgtaatttcaggtatcgattctcaaaaccagaaattttaaatacccgaattacccgccccgaaattttcgggtaacccaaacgcccaccctactttcatatccacagcatcggcaacatgccctgcagaagcatcagtaaaaaatcaatagtgattaccttaaagtagttaaaggaattctttccgatatcattatctggtgcctggacatcatgagttgaatgagttaatcaattgcgactcaagatcctcaagttaggtgaaaaagaaaggacaggtattttaccataggatcctgaatcgctaaaagatgtggccggtcatgattcataaagctacaaaatcataataaaagaatcagagaagcgcagaaataaactagtataaaaagcttaggacctggagaaactaaataataattttgacttaccacctgacaagttttttaatcattaaaggaattaaagaaattcacatatctgtgtctactgttaatctacaaacagcaacataatactccctccattcttttttatttgtcgcgatttagttcaaaaataaactaacgggcgacaaatattcgagaacggaggtagtgttttttaacaatgaccaaactaaatgaaaacaagatatgttgccagctcaacaattgcaagtcaataatcagtgagttgtctggcataagttcatctagtaaatcatcagcttactctttatcactcttcaagaaaaaggtccttgaagaattgcatgatactccgacatcccagttgttcaacttgcgtccataaaaatcaaaaaacctgacct

SEQ ID NO: 28889 - DNA, 2333 bp, Zea Mays
ttcctcctgtcagggcgcgtgcatcccctacgaccagggcagcgtatatccttgtcgctcttcgtcgtctccccccacaactgttatattcccaccggcgccgccggctcttcgtcgtcctcctccgggtgtgccccagttcgctgcccgttccccagccgccgatccctcgatctccgctagcttcgttccttcgtacaggaacggtcgagcagaaactagcagccactcccgagtcccgactcccgatcgcgattacttgccgcggcaccagtactccagcggccaccatgagcagcgggaagcgatccttcttcgcgcccaagaagaaggccaccaacccgttcgattccgactccgacgacgacaaaccgcagcagcggccagcgcgggcgtcctccgtgcctcccccggacgagcagcggggctcctcctctctcttcggcgccggcgacagaggcgggctcttctcttccgcggccaaccatcactaccggaacgacttccgcgacgctggcggccttgagggccagtccgtgcaggagctggagggctacgcggcgtacaaggccgaggagaccacgcgccggacgcgggggtgcgtcaggatcgccgaggagatgagggacaccgcatccaagacgctcgtcaccgtccaccagcaggggcagcagatccaccgcacgcacatgatggccgtcgacatcgaccaggatctctccagggtaactatagccttttcgaatttctttcgtttgcggtgtggcatcagtttatgagattgtttgtaccgctagcttagttctgttcgcctgaagaggggatagtcactgttctttcaaatctagtccgtttcagaaaccctgaaacccaacaagaggaggtgctaactgactaatttacagagggtaaattaaacctgcaatcgccaacatttttgcaagtttatgctgctccatttgcacaagccacaaggctaaccccgggatataaaagatcttatgctaataacgagccttattctgctcaagtagggcataatcgcacagcactctcaatttcaaaccagaattggacagttcctgaaatcctgaaatcagcaggtattctcgctaataactctagaaattctagttttagtggggagggattaaaacctggaagtattaacaatgacatgcttgttagttgttactatcggcttttgtaactgcatattgcgactatggatgctcctttgcacattgcagacatgtgacaggtgttgaataaatgttttggctcaatatttcagagtgagaagctattgggcgatcttgggggtctattttccaaaaagtggaagccaaagaagaatggcgccatcaggggtcctatgctaactagagatgattccttcataaggaaggggagtcatttggagcaaaggcagaaactagggctggcagatcatccacctccatcaaatgcgcgccaattccgttctgaaccctcatcagcacttgagaaagttgaggtactgtagacacttgtgaagctaatgcatctccagcacgtgatgaaaaatcttgatgcgtctgatatcctgcatctttattccataaccatctggtcgtttcttttgtagatagagaaggcaaagcaggatgatgatctgtctgatctaagcaacatactgacggagctgaaagggatggccgttgacatgggctctgagatcgagaggcaaacaaaagcaatgggggatgcagagaaggattatgacgagctgaacttcagggtcaagggagcaaacactcgagctcgccgtctcctcgggagataaaaaaatgcatatattcttgtctcttggatggtccataacacattaactatatgggggcatcaaattctgatgattttgtgcatcagattttgattagcattgttaccgtggacatgtcggcgtgtatggtagttgagacatattttatatgtttgcttcttttttctatttttttagcattgcacgagcttaggatttcagtggattttacatggaaaaccttgtctgattagaaacttcttttcgggtaaataatgctgatacatagtgatttgtcgccgtacactcttcacaccatcaagtacctacgtatgagtagaaactttgccagcgatttacgaatgtaaacaccatatatactgatacggggcctgttgcatttatgcccgcattttatattgaaattgtgatggttgggttttgacaagtggaacccaaacaagaggaagtgtttgagcacagtaacgagacaaatatgaaataacggctcaaatgtcgtcaaccgttg

SEQ ID NO: 28890 - DNA, 3904 bp, Zea Mays
atcctggagagtttgtggtgacattcccaagggcataccacattgggtttagtcatggatttaattgtggtgaagctgccaactttgcaactccacaatggttaaaatttgctaaagaggctgccgtacgaagggctgtgatgaattatcttccgatgctctctcatcagcagcttctgtacttgctagcagtttcttttataaccagaaccccaaatgtattgtctggaattcgttctcgcttgagagatcggaaaaaagaagaaagagaactgctggtgaagcaggaattcttgcaggacatgattagtgaaaacaagcttttgtgttctttcctggaaaagaaatcaattcgtcatgttgtgctctgggagcctgacttgttaccatcttcgactgctctacattcctgttcttctggctcaaaagctcctgagaagaagtctgaggatggttgcagaattgaatctagtgaacgtggcaccaaagataacagctctgatggcagtgcacatatgattggcgcacaaactaaatttatgtccgggaatagcaaatcatctggaactgcatctgcttccatggatgaggtcaatgctgatactgatgatgaggatgacctaccttttgatttgagcattgattctgggtcattgacctgtgttgcttgtggaattcttggttatccattcatggcaattctgcaaccttcaagagaagtattggaagggatttcccttgctcacacgagtagatacaagatgagttctgaaaaagataattgttcaaacacaattccatgctgtcccactgacagatgttcatttgttcccagtagaccttcttggcctgcggaacagcaatgtctggctactcctttggggcaagctaacatcagtcatcagaataagtgaaaatactcttcattcatgtagtgacaggggaaaatccgagaataagatttctgaggacagtcttggcccagaagtaggtgaacaaacaggcaaatatgtcatcaatgcgcaagctgcagaaagttctgatggtactattaactggaatacttattgtacatttgcacggccccggatcttttgcctgcagcatgcccttgagattgaaaagttgcttgagggcaaaggcggtgtccatggtctcattatttgccactcagactttgtcaaactaaaagcacttgcaatatcagtagctgaggaaattgagtttcaatttgattgtacagacatttcacttgcaaaagcatcaaagtctgatttacatctgatcaatatttcaattgacgacgagggacatgaggaagatggaagagactggacgtcacagatgggtctaaacctgaaatattctgccaaactcaggaaagagaaatcagaaaatcaagaacagtctcctttgccatttgggggactgctttcctgcccttcgcctgtttcggttgttcctaatcttaagtggctttgcaaaagagcgcggacaccatacacagttattggtactatgaggggttctagtgcaacagcaactgctgcggaacttaagcctggagtgaaaacagaaatattcactaatggaaatgtttgcgaggatgacaatagacatcattcttttcgacaaactggcctcgagcaaccaggtggactgcaagattgtgataagccttcatgttccgaggagaatggccatggaagacattgtcttgttaacattcctatcgctgttgctgaatatcctatgatgcatcaagtccgtgagggtccagtgagtgttagcacgtgcaatgactccatttgtttgtcaggttccctggatttacctccacacgcctctccagttgaagtaactagatacctaggatgtatacagtcaactgagctgagcagtttaccagccttttctgttcaacatttctttaatgatgaaagtacctctgtggaaggaagcatagactgtgtaagcaatggctgcttagaatctcaggatgatattttagggagcagagatgaacgtttgcaagttcaacaatatcaagagaagatggggcttcgcaataaccccaatatgaagtcagttgattcacacctgatagaaggtttggctgtatcagaaggaaagcatggggaaactgtggcagcattccttgaaaacaaggagcgttgtgctaagacatcctactgttctaatactgaaacaaaaactactaaatctgcaatagacaatcgattggagactcatcatctgggtactggtccagtgaaactaaattcaagctttaatgagatgcacagtgctgatagacaatgcagtttagtctttggctgccttgactcagctgatgttcctgcttcaactcaggctctgtcagtttcacctgttttgatgagtgacgagcagcaggtcgatgacgcccattctgctgtcaaggccattgagcacctgggcaataatctggctaacataaagcacaaatccctgcatatggatgtcctcatgttagaggacgcccaagttgcttccatggctgcagtccctgggcatgagggagaatctgtcgaggctggatcaaattcttttgatattttacttggagctctggctgaagagtccaaggcagcagatgctcctgggaaagatgaagttggcaaagcttccttgacattaataacactggctagcaacgagccctctgttacagaaggcagagttgtagacgtggtggaaacagacacaattttgggagcaggaaaagatgataaacaacttgaccagccacatggcttccatttgtcagatctggtgtctagatgcatcgggagctcaaatagatccgatatcatatgctatgtcagacgcaaacacaaaaggaagagggattactcgtgtttcgtccgctctccctgtgagagcttgaggccaaggtccaagcctgcagtagtcgaggagtcggaatggagcagaacagccgaggcttcttttgctaaaaggggtaagaggacacaagcagtgggatcatttcagtgtgatattgatctgtgtgacatggcatttgagactagggccgaactcaatgcccacaagcgcaatatttgcactgacgagtcatgtggcaagcgtttcagctcacacaaatacttgaagcgacatcagtgtgtccacagcgagatgaggccatttaaatgcccctgggaaggttgtaaaatgaccttcaagtggttgtgggctcagactgagcatgtcagagtgcacactggagagcggccatacaagtgctcggctcctgactgcgggcagacattcagatacgtatcggattacagccggcacagaaagaaatttaaccattactgacagcttctagttttccgagttattggccgcagctcggggcaaatctccagctgcttgtgtcggtgggccttgtttgttgtagtagctcagctcacgtatttattaacaacctgacagctgataggcctagtgaatgttccccgttaacaatgggctagtaatttagtcggtgtaggagttagaaattgttggggggtgaagtgcaacccccttctgttggtgtaggtttgcataagctgatcaccccccactgacacgtggccattcattatttgtttctcagatcagtgatgatgtatttaatccctgatgacaaacttcatgaacactgaaaccatatgatgtcggatgtcaaaatgatcaggggttgccaccgtcctcatgtaattcctgtcttcgacacattgtccaggtcctcattattctgtcatactgtttcagcagattacttgtatgcctttgtctacgcgaaatctaatcatttttaaattcagcgagatgctgccatctatatgccactgtttcgcttagatttaac

SEQ ID NO: 28891 - DNA, 2313 bp, Zea Mays
cgaccggaaaaggacattgttcttttctgcgcccctactccacccgccgcctccgctcctcgccgccgcgcggcgcggcgacgtgcaatcttagggttcgtgagagggttcccgaatcctccttgccgtgcaccacaccgtccccctccaccgacgccgctgcttcccatgtcgctccgatccggcggccgccagctatctttcgagcttctcgcgggcgacctcaccgccgacgacccggacgacatctccccgcgctccctgcccgatacatcgtccgatgggcagcgccggcgcaggaggcggtctaagcgcaagcgtgggttccggagccccccgatccaggaggcggtttcggagggggagcagcagccgcgcgtggagggcggcggcaactcggccgcggcgttcagggtcctggatctgaagtcgactgcggagacggtgtgcgagagctcggacgcggaaaggtctgcggcgagctgcgtgacctatgttggcgtggagctgaggcagaggagcgtctccgggggcgggagggtggtggcagcgtccgcggatgatgggaccagcagctgcggaagcagcacgcgggagagcgccgcagctgctgcggctgtggcggatgtggcagccatggcgtggcggcctgaggcaaatggcggcatgaagaagaagctggagaaggagtcgtcgctggactgggagaagtacatgaaggacaataacaaaattctcggagaatttgagcgccttgacaaatcaccattcagatactttcttggggaactatatggtggcaattcactgagaagcacaattgcagtgggcaatgagaagaagcggcagcgggtgtacaacactatgtttcatgtcccatggagatgtgaacgggattcttcgtctgcttggattcctttctgtcattgcttacaattatgcctgcacgaattgtcgttaccatctggcgggtgatgaagaccaggaagttccggcggccaaatgctgctgatttatcagattatggatgttttgtagttctagcccttggagttgcctctttgcaaatgatagatattagcttaatttaccatgtcattcgtggtcagggcacaatcaagctttatgtcgtatacaacgtactagagatctttgacaaactctgtcaatcattcggtgaggatgtgctgcaagttctgttcaactcagctgaggggttgtcagcatgctcgacagataatgtgacatttgaactgatgcggttcattttggatgaggctatagccgttgttgcatttgttgtccattcatttgtcttgttagctcaggcgatcaccctgtcaacatgcattattgcccacaataatgcattattggctctactggtatcaaacaattttgctgagattaaaagtaatgtatttaagcgtgttagcaaagagaatcttcataatttggtatactatgacatcattgagcgatttcacatcatggcctttctgctatttgttcttgctcaaaatatcttggaagcagagggcccatggtttgacagctttcttattaatgcgtcattggtttttttgtgtgaagtacttatcgatgctatcaaacattctttccttgcaaaatttaatgagataaagccagttgcatattcagaatttttggaagatctttgcaagcagattttgaatgacaaacctgatgaccgtcagaaggacctaacattcatcccacttgccccagcttgtgttgtaattcgtgtattgaccccagtatatgctaccctccttcctgctggcccttttatctggagaatattctggattttactttggtcagttctgacctattttatgctcgccatattcaagataatcgtgggattgatactgcgctgccttgcaaattggtatgtaaatctacggctcacaagaaaacaacacgtggattgagtacatggcaccacaattctgctgctatcgttacatctgtgagtagaaattttgctgtggtgcatgaagtgcagcaagcactgcagctgctgagagttatatgacagaagtattcatagtatagtacagcgcagatgaatattatagtctcttcttccaagggttttgtcgattcgaggaacagattagtcaaattttgtggtgtttagacttctgacctccgtttgtgcatagctcagcttcatccaaaactatctgctgtcacctaaccaagatgttctggtctgtgatgtaagacatgtttatacattttttttaaaaaagaaacaaactgtactttcgtgttcagcagaag

SEQ ID NO: 28892 - DNA, 1333 bp, Zea Mays
gccggcagtggcactcgcagactcgcttctccccgaaaaacggctgaaccctgaaccctcactacgtcccgccgcctgcttcacagttcaccccggccatggtctccaccgctcgcgccgccctcccgacgccccacctctctctcgcttcctcctcccgccgcaggccccatctgtttttcacgccctcctccgcacctcgcctgcgcggcggcgctgccacctccatcaccgccggcagctccgcctcgccgcagcagcaccaggtcaccacgcgcctgggcgacgtgatagaggcgcagcagttcgatcgggactcgcttaacgagatctttgaggtggcgcgggagatggaggccgtggagcggagctcccacggcgctcccagtcgcgtcctcgaggggtacctcatggccactctcttctacgagccctccacgcgcacgcgcctctccttcgaggccgctatgcggaggctcggcggggaggtgctcaccaccgagaacgcgcgcgagttctcttccgccgccaagggggagacactcgaagataccataagaaccgttgagggttattctgatattattgttctgagacattttgaaagtggagctgcaaggagagcagcatatactgcgaatattcctgttattaatgcaggtgatgggccagggcaacatccaacccaggctttgttggatgtttatacaataaagagagaaattggcacactagatggaataaaacttggtttggttggtgaccttgctaatgggaggacagttcgttctctggcttacttgattgctaagtaccagaacattaagatatactttgtatctccagatgttgttaaaatgaaggatgatatcaaggactacttaaattcccaaggtgttgaatgggaagaatgttcagatttgttggaggtggcatccaagtgtgatgttatttatcaaacacgtattcaaaaagaaagatttggtgagaggattgatctttataaagctgctcgtggtaagtacattgtggataagaaggtcttagatgtgctgccaaagcatgctgtgatcatgcatccccttccaaggcttgatgagatcacggcagaagtcgatagtgatccaagagctgcatattttaggcaggctaagaatggcctctacataaggatggcattgctcaaacttctgcttgttggtcactgacatatctgctagtgtgtgagcttgtgctgcgtcaagggatgaggaaatgtactaataatcagcagctcctgtcaaaattcaacgttcctgcgctgtcagggttcaatgcaatgcatccaatacat

SEQ ID NO: 28893 - DNA, 608 bp, Zea Mays
accaaacaaaccgcgtccgcgtcgagtctctactctctcggctgtccggtccggcgcggctctcgcgtctccaacctacccatgctgcagctcctccaactccaaggctcacaccaccccgcgacgggcgacgctaattaagtagagctgcaacacctgggttggaggctagagcttgcaaacaccaccagcgaaaacgtcgtggccagccatcccggtgtcgtcccgcgttctacagccaccgctgtcgtcgccgtcctagactcctagatccgtcagcttaacgagctccattccttcgaggccagccatcccggtgtctcagcagcggcggcggcggcgtcgagctcttgctttctgtgggaggacgcatggcgatgtctgcggggcgtgggctcttggtcctcttcttctctgccgccgtagtggctgagctcgcctctgccgcgaacggtcctttcctgtccgatagcgtcttccagtcgagcgccggatctacagggaggagcttgctgcaggccaagaatattgcttcttgcttgggcggttgggccactaggcaacatggctcatggtgtaactccagctcatacctaggatgattcctc

SEQ ID NO: 28894 - DNA, 2031 bp, Zea Mays
ggcaaaccgtattgttggcttcgcctagggtctcccttctactgtcgccgcaacctgaccaacctcccttctactgcccgcctagggtctcccttctactgccgccgcaacggcgcaacctcccttctactgccgccgcaacctcccttcttcgagtcccatccgacctagccctgcaacccgccggacgacgagcagtgaggcccgcggccgagatggaccggtacctgacggtggagcggccacggaacgagtcaaccatcgaagagaacgggatccgcatcaccgcgcagggcctcatctgcaactatgtctcctacgctacctccctcctccaggtgcctgggcttgtcctcaccatcgccgtcgtatcgtattgtacttaggatgcgctgttctgttcgagtcccgtccctgtcgattcgaagagatccccagcaacgtgagggaggtgttcctgaccggccccacctccaagttcggcagggccatcgcgctctacctctgcaggaagaagatcagagtcctgatgttcacggtgtcgtcggagaggttcctgaagatccagagggaggcaccgccggagtaccagcagtacctcgtgcaggtgaccaagtaccaggccgcacagaactgcaaggtagttgatcatagttttgcatgaactattggcgttggctatctaaaaggacagaaaggcagacatgagcaacagatcccgctccatgggctgaaactgggattcgtgatggcaggcgcccctcttagtcgtgtgtagggcgagctgctgccatggtggctttttcttgcgggtgtgagctccgctcgccgccggtcttggacgccgtggctaggctcctaccacccctccctccacccgggactccacgctgccaccgccacacgacagtacgcatacactcttcttcctcccctcgctctggatggctggcgtccgctccctcagcgcctccgcccatgcccggctcccgcacttgccggctccccgatggagatgaatgaagaaaggaagatctgcaagaataaagtcgaggcggaggcttggtttactggtcttagtgccttgatatgtcgaagacagcatggatcccaggtccaacatatagatggaatccggattgctggacttcctattgattttccaagatcggagatgcaatttcatactgtgcaaaagcaatttcgctatgcaagtcacgcatacagaacctgaaaagttccaaggatgctttgttggatggtatagatggtggtgatgcatctgctgctgaagctgaaggaggctcagaaaaatctaccattgaaaaagagctagagcagcttactagcatattgcctgatcttgagaagaagcttgaggacctgtctgaagcaaacccaagcgctgacatggatgagatggtgaaggcaattgtgtccagggtaactgaagtgatgccaaaagctgcatcttttacttcttcccaaatagcaacctcaagcaatggattcgactcctcggttatgtctacgacagcgacaactggaagctctggaagcactgtgaactgaccttggggttgtaggcagaggcgtcaaacgagctagcatcaagccgatctctgccaaacctgttgctaagaaacctgcacttgattcaccatctctccaaggtgacaacagcatcaactctgaggttgtccctgcgacgcagactgatgaatccagctaaagctctacatttgaaacgaacgctttctgacgggggcacggcgataacacgccttctattctagtatgcttagatagattcaatgttagcgcaaacgactgatgataagtttttcagttagtattttaatttggatttagagtacacttatgtatgatttatttgacaatgcttatttatgagacattgaattgtacttatctatattacattaaatatgatgttattaaatatgtgtgtatgtatatttatcttttaaattattataatgtgacatctcaaaaatgattataaattga

SEQ ID NO: 28895 - DNA, 4987 bp, Zea Mays
ctgcctctctccctctccgcctacctctccttccctaccgtctcctgccactgcgcccctccaatagcgttgtcccttgccctcgcgcgccccgtgctcttcgtcgtcttcgccagcccaggtggcaggaagctacccatagccagcctcgtcttctcggccaaatccttcttcggtgcaccgctggccgccacctcggcctccgtcgctttgtcgctcctgtgccagtggctgcctccagctcgctcgaggtcgtcgctacggggaagaaggggcctttccgaccaaatccttctttggcgcgccactggccgccaccgcggcctccgtcgcgttgccactcccgcgacaaccggccgcctccaactcgcttgaggtcatcgcagcggggaagaaggggctttcccagccagatccttctttgacgtgccgctggccaccaccgcgccctccatcgcatcgccactcccgctagctcgaggtcgtcacaatggggaagaagggctgcaagatgaagacacacaagcgatttcgggtgacaaggaaggacaagatcatgcggcggtgcgctgggaagcaacacttgctcgccaagaaaaacaccaagcgcaagaagagactctccaagatggtattcttctttcctccactcttgtgccgctcaaattttgttcagccgctcattttgtcgcggaggtcgtttcaatagcagtaaatagaaatcatggctggtgcacctccgtgaattagatgctaatgtggaatgacgatgtcaatagcatttgctctcgtattttaattgcttgatagttttaacgtgacaacgttgctgaaaactagaaaggcgaaatgcaagggcgtgagtttgttttgctgatgtgctctggggtgcttcatttgttatttcttggcatatgtctcctactcattaggaagctcagtttattcctcgattttcaaatgtgtgtgagggccagtacccgatagatggcatgaaaaaagcttttggctaaaattgaacatgtcaaagttcacagattattatcatggtccttaatataacgtttgtttctgaaaatgaactattttattgtacacataaagttaccactactatttttgaaaaagctagaaaatagtcatgacaattttgagaataaggtgggtgggagtgggtgtttaatgttttgacctacgagtacttctaattttacttcattattgttagtcatctaatatatacttgttcctacttcattattaggcgtgggtgtttattctgtgttaataagcagttataaattatggggtgttaaagtagtagcacgtctttgttacaagattatagccgatcaagcatacttcgtttactacttggataacacaccaagcagaaatagctgaacaaatatccctacaaacagctcagacatcattgtttcagttcatgtccgtactctgctttgatcaaatacagttcccggtatccagtccatacattttagtttccagatttttgtttggataacattaagcccatactttttcatattttcagttagcacatacatttcatttcatccaagacatgctgaaaactgaatgtgactcatacaacgggctaggcatcctgttcaaatctaaaaacttagtcagtttggatcacatcatattttcagattttcagcttataagctgaaatttgacgcccagtttccagattttagattttcatttttcagttttttatttaaacagtttggatcacattcatgtttcaactttcgatttgcagataatatgcacgtagttttcatattgacatatattatatggtggtctgaatcttgaaaaattgcttgcttgttgagtgaagaactccttgccatggttgttgcagcctaaatctgtttatattacttgtagatattcagttgttattttgtgccttgctgctaccaaaattaagaaatgataacactatagcccacctagcattgttctaacattttaaaatagaataattggatctataccattaaaagattctaactttctgcataggtctatcgttggaaatgaagggacatgtcgtttttctgtccaacgagaatagcagttgtcttctgctaatattgtcgctggacaaatgaactctgtgtttttgtgtgcaagcaataattcagttgttgctttgttggtctggctatctcactaaccatttttgtggtgatttaatcttgaagcatcgattgtgctaaatagtttatcggatcctttatactcatgttttcccttgaactggacagaggtgccggatagggcttaatagttgaatcgaagattaggatacgttggtaggagtactagggagggatcacctggatcagtgcattaaagttagctgacagtaaatattattgttcttgctattctttcgagcaatgttcctcaaaccatgatacatatatcttgtaataagaaaatcagtgacctttttggtgagtgacaattctattatgatatttttgacgatggagatctaggctagcttgttcctgagttggtcctaaggataggtttcatcactttgtggcgttttattcatcttctagcttagacggtttagttattacactgagaattatattcacttggaaacacttgtttcagctggctatttacttgtagctaatagggagttccatttagttgactatctcacatatagttatccaaatggttaagatgtagtggtgtgttgttttgctttttggtgtgtgtcaatttctgcaggagatgttcgccgatctgtgggccaaaggcttcagtttgctaggtgagcatctgcacagttctgaaataggcgcctatggttgcacagttttttactacaacacttattccacactcaggctaaatttggctcagttggttacaatgtcatgttgattggaatctgccatttgtgaatctatggtctatgacttatctggtagggttagattggataaatgtgttcaatacacaaaaacttgtactatctatatgacactagagattagtgtgccagattgttaaaagctagataatctactgctaccatttaaaagtaactgctggattaattttataggtggattgtgcttaaattgcaatatggagataaatttgttaaatctgtgtatcagatggcctgggctgatctttattaggcttgttattcatgttcttctattttcccaggattcatctgctttagctcaattgggatggccagatatgcggataccaatcttatacaccttatcatggccagatagaatctatcgccctagctcaatttgttaaatctgtctagatatttgcaagcatgacatcttcacaactcctgggctacttttacaggacatctgatgcttttatttggaaatgacctccaagaattcaggtcttattttttattacagtatggggttgttctaataagctactggcatatgatggtaatacttgataaattcgtatggatgagggaaacctaagtcagctgttgctcatcaaacttggaccttgacctaaactcatttcaattttggtgtcattttgaatagttatatgtacgagttgagttggataccatggtaaggttgctaaacatgaatatgctttcgaaaaaaggatgttaagtaacttagtgactctgcttaacactgtaggatttgaggctgccatagtatgctctctgaccgtgctaacgggaggaaggagatgatttaagttctccatgtttataaccagaaagaggaggatagtccaatcatggtaactaaatagtaggtagtaatgtttcacggtaaatcacagttctcgaatgcgatatgatctttgactcggagtattgaagactaatttagtttgagtttgagattagttgtttttgtcattaataaactcacattagcgtctggttacgagctcactactagattttagatctccatttttggtgtacttctgctgcatgtgcctcccatagttgcggatttgcaggtatcacctgattccttttgatttttggattgagatacagtaaaagttatctttgcctgtttccaccacactgtatcatacaggtaaacatgaatacaaggctggcttgatctggcaagtgctcgccattctatgggcccatcacacttttcgagtacactgtttgatcatgaagagcagtctgctgccactaaacttgaggttgttgatcatgattgtctgaaaatttatcggggatatgccttgggatggagaaatgtcacagaacacaggatgaagacgattccaagaatccacccatgtcaggtaacacaatagcatgtcagccatatgctatacatgcatatattatggtatggaaataactccggagagtatatcacattgtgttatgtatgcaaacactaatgcaagacagccatcctgcccatcatgttggtaggggtcaaaagcttcttgctgctgaaattgatggtacaccgtacaagcatttacctttgattttttctgacgttaatatgttgcttcactgaaggactagaagacgccttcacatcacggagtagagctctcagcaacaacagtgcaacgatgtttggacttttgttcacatatgggagtgtttaaactcctgcacctagatttagaaacaccaccatgtaaaatagacaaggcggtgcttttgcaaacatgatgctgccacgagacccgaacttatgtatggccaaacatgttaacatattttgtatgtcatgggctgttccagaaacattctgaaatacacggttccttctaaattctatattttgtcttgatagaacgcccgtaaaagtgcttcaatgttctagtttacatgaaaggtatatagcaatttactcaagaattctattgtctctataggacggctccacttattctagtaaaataaaaaaaa

SEQ ID NO: 28896 - DNA, 9003 bp, Zea Mays
ctctcctgtcgattcctccctcttcttcctcctcgtccctcccaaatccccgaacccgagcgcgcgactccctcccgcctcccagatcttccagaacccgctacgattcgggcaatccgccggcccgcgccctagtaggtctccgcgggcgggattggttgatgcctccccgcctcgcgtgaccgctgcccgagggctggaccggagatctccgcatggatcacaggggcggcggcggcggtggcggaaacaagaaccgcaccgatctcctcgctgcagggcggaagaagctgcagcagttccggaagaagaaggggaagcggggtcccggcaataaggccgacgccgatgctgacgcggaggccggggagggggcgcccaaggcggcggaggagtctgtgcccgagccgaaatcgcctgttgggttgaagctcctcgccggggagggcggcggcgggagcactccatttgaggaagcggagaggtctcaggcggagcagtgcaacggtgaggggcctggtaccgcggagtccagctctgtggagagttccaatgcggtgcaagaacaggagacggtgcaagagcaggagacggatgatgtctccgatgcacatcatgtcggtcctagtgagcaggggatttcggagcatcctgaaagccagacagctggtggcagggatctatcacttcaggctaccagtggagacagcattggtgatgataatgtaggacgagctcagctgggtgatgtggatagcatggagctgaatgcttcttctgaaggtaatggagcagatggtgattgcaatcaactaggggaacaccagcaggtggaaatggatgctgttgaaaggccaacaagttccagtttcgaagaattcaccgagttgccaattcattctcaaggcattgaagccgataatatccacggtgaaggggctcaggaaatggtgatggatgtttctgggaggccattagatggagacatacagcatgacatcgagcccacagcttctgctgaaatagatgccgagactgcacttgaagagtcaactgttgcagcttcaattgtgattcctgagagtactgcaagaggtactgagtacgaaagagacactgggtatgaaaccgatggagtagacaaagaggctctcctagaagatccaagcatggtgcatgtaagtgatgaagctgtcactatagatgatttgagtgttcaggccaagccaacagcatcagcggatatgccactttgtgagcagaagggggatccagctttatctagaagtgcggtattgcaaggcattatgccacttcacttcgaggatatacaaaatcatatgttctctgcaactctgtcaagggattttctccagttgcagctagatgaggctgctggcctttattcagattttacacaacagtcttctgacaataccacacagctccgggtactgctaaaagaaactgaagaaagcaaactagcagttgacagagagcttcatcaatgtagacatgagctctccaaggtgaacatagaaaaggggcaacttgaactgaccatggcttccttgaaagaagaaatcaacactagcaacacgaggtgcacatatttggagagtgagctacattcctccaaggagagcacagaacaaatccacagtgaactagctaacagcagattgttactggaagctctgcaaaaagagaacatggagcttactgcaagccttgcttttgagaaagaagccaaaaaagaagttgaagaacagcgggaccatctatcttctgataacaggaagcttttatcggagttgtcaggtcttgagcttagcttagcttctgtgaaagaggaaatggatgctagcagtagcagatgtaatgtttttgagtgtgagctgcgttcctccaatgagaatatgaatcatactttgacagagttggcaaattgccaggctttattggaaacattacagaaagataatttggagctgtctgcaaattctgcctccgaaagagaagcaaaaatgaaactccaagaagacaatttgtatctatgtaatgaaaagggcaagctttcttcaaatttacgtgaactaaatgacaagttggaagtttcgtatgccaagcataagcagcttgagtcacatgtcaaagatacagaaacatactttggacaacttaccgagcagctaattgaggaaaatctgtacacaagtattagcatcgatatttaccaatctacaaccaaagacttagacactaagtacaatattgtgctgggacaattccagaatattatgcgtcaagaacttcatttggactcgtctgaagtcactactgagaatgctgaaagagccattatgacccctagacatgatagccatggtaataatcagtgtttgcttaatctggtaaatgcgaatgactcatgtaactcaactgctttgctgtcgctgaagggccatctagaggtggcaaaaagtgatttgcataaccttgaaaagttgctagagaggatctcctctaggtctgatggacgtgttctggtatcaaaactcattaaatcctttgagtcaaagggaagtgacgatgatactggactgtctgagggggagcatgataatttacaaaagtcaactcgggagatgctatcatgcctaggggagaagtttatagcaatgagctcagatattacaaaaactgaagaatatttggctgaactgtgtaacaaaattgaactttacgtcaagtctactgtgcagcatgatagagatagacaatgtactgttgttcttgaggccaaaatggatgaacttgctggcaagctgagcaactacaaggagacaattgacaatctgcacaatcaggttgctattgtgcagcaggatgcaaacagtaatgctggaaagctcattgatcaagcagaactgttgcagaaggatgcggtagaaaggatttccattcttgagaatgagagaatgtctttatcagatttactcagtgaagtaacaaacaagctcacctctttgggagatgctgtatttcctagtggttccagtgaaattgaaggtctcaatttctgcactttgagctgtgtggaccttgttgctagatcatttcaaagtcttcaggagaaattagaggctgctcaaatagataatgctcagctcaatagttctctggtggagctcaggaaggcaattggtgttgctcaagagaggagtgaacatgcagatggaattgtcaagaaactgtatgattccctacaggaacttctatgtgattcacttggaagttcaaatgaatttggggccagatatagtgttgaggaaccaattgaaagtcaatatggaagactcattgcgcatttaaagaatttgttgcatgaccaccattccgcgctgtcaactaatgctgaacttgagttgagtctgttaagtaaatgtgaagaagttgaggagctcaacatgagatgcagttctctattaaaaaaattggatgaagtttgtattctaaatgaggagcttaagtcagcttcttcaagtaaaaacgtcacactggataaactacacagtagatgccttactgtagcagaaatgttggcttcatgctcagcaaatcattcctcgacagttcagttgatatctgatattggtgaaggatctagcaaggaagatcatattcttaccacccttctcccatgcattgaggcggacgtggcttcatgcatcgagaaatttgaaaatgcagctgaagaaatccgtttgtctaagatatgcttgcaagaaatcagcatatttgaccagatttcatttgaaaaatggtcttaccccttgcccacattgattaaagaggaagttttaccaaagatatgtgatttgcaagacagattcgaccagctcaatgcactaaacattcagctggaaactgaagttgcagtcctcaaggatggcatgaaagagctggatgaagatcttggaacttcgcgatctgagcttcagaaaaaggtttctgaacttgaacagttagatcagaaattttcatctgtgaaggaaaaacttagtattgctgttgcaaaaggtaaaggtttgatagtgcagcgtgacagccttaagcagtctttgctggagaagtctggtgagatcgagaaactcacacaagaactgcagttaaaggaaacattgctgaaagagttggaagccaaactcaaatcctatacagaagcagatcgaattgaagccttggaatcggagctgtcatacataaggaattcagctacagctctaagggattcatttcttctaaaagactctgttcttcagagaattgaagaggtcttagaagaactagatttgccagagcaatttcattctcgagatattgttgaaaaaatagaactgctgtcaaagatggccattggcactcctttcactctacctgatggtgataagggatcctctgttgatgggcattctgagtctggtgtggctatgaatgtcatagacgatgagcagaactcaaattcaaattcagtatctgatgaagtaaagagcaaatatgaggaactgaataggagattctgtgagctggctgaacagaacaatatgctggaacaatctctagtggagaggaacagtcttatacagaaatgggaagaagtccttggccaaattagcatccccccacagttcaggatgttggaagcagaagataagttagcatggttaggaaacagattcttggaggtggaacaggagagagattcattacagttgaagattgagcatcttgaggattcctcagaaatgcttattgctgatctagaagagtcacataaaaggatatctgaactcagtgcagaggtggttgctataaaggctgagaaggatttcttttcacaaagcctagagaaactgagatttgagttccttgggctctctgagaaagttgttcaagatgagtttgttagagataaattgcgaatggatctatctgaactgcgggataagttcgctgaaaaaaccgaggagagcaggcactaccatgaaatggacaccgaggtccacaaactgctgaatttggtgcaaaacacattgcaggatagcactaactctgaaatttcatctggaggcatttctgctgtgttgtgcttgggcaaaatgctgaagaaacttttagatgactatggcactcttctgtacaagtcgactgaaggcaattttgccgagagagacattcagttagaggatatcaagccatctaaggatgcctctaaatcggacactggtgcatacgagaaagagatggaactaaattctttaaataacgagttagatcatgctcacaacaatctggccttagcgcaacaggagtgtgatgaagctgtggagaaggcacaatcactaatgatggaaattgagaccttacatgctcaaataagtaaattgcaggaaagtgatgctgaacaaatgcaaaagaaagagatggaactaaattctttaaataacgagttagatcatgctcgtaacaatctggccttagtggagcaggagcgtgatgaagctgtggagaaggcacaatcactaatgatggaaattgagaccttacatgctcaaataagtaaattgcaggaaagtgatgctgaacagatgcaaaaatatcagtcgcttgtccttgaactagaaagtgtgggtaagcaacgggacaatctacaggagcggttaaatcaggaggagcaaaagtgtgcctcattgagggagaaactaaatgttgctgtcagaaaagggaagggtctagtgcaacacagagacagcttgaagcaaactatggaagagatgaatgtagtgatagagaaacttaaaagtgaaagaaaacagcacatagaatcacttgagaccgagaaatcatcgttaatggatcgattggctgagaatgaaaagagcttgcatgaaacaaaccagtacttgagtggactattaaatgctttaaatagagtggatgttgctcgggaatttgatatggatccaatcaccaaggttgaaaagatggctaaatttttccttgacctacagtcaacagtggcttcatcgcaaaacgaagtgatgaaatcaaaacgagcaacagagctgcttcttgctgagttaaatgaagctcatgaaagggctgacaacctgcaggaggaattggtcaaggcagaagctgcactttctgaatcttctaaacaatacattgttacagaatctgcaagagctgatgctgttcgtcagcttgaacttattatgcatgcacagtcacaaacaaggaggaggcaagcagatcatttgctggagttaaactccaccagcagtcaactaagagaagtctgctttgaactttcacactgtcttgttaatacattcagtaaggatgtggaccttatctgctatgtggtgaacttcatgaggtcttctggtaaattgatggatgacacaaatacgatggacataccgattgcctctaaacatgttttgtccaaccgcacaaacaacaaggctcatattccaaatgctcctttggaaattaagacggatgatacggatgacagtcagtttttgcatcatcttgctattgcatgccatgctttatctgattgtgttaaggactgtaatgatctcaaaagaaacattgatgagcatgacttttcagttgaacagaaagcaaccgagctatttgatgttatgtccaccttaaagaataggttcacttctcagcataatgagttggaatctttgagagcaaaatttgttgaactacagtcagagatggaagaaagagacaaggagattatatttgcacaaaggaatatgagcttgctatatgaagcatgcgcaagttcagttgctgagattgaaggaattagtgatatatatcctggtaaacacagctatgctgttgaacattctgcagatgaatgtataaaatcaatcgttgaacagttagttatggctgtaaaaacttctcagaacagtaacgaaggtagcacaaaggagctgaaggctattgttcttgagttgcagcaggagcttcaagctaaagatgtccaaattagcacaatcagttctgatctatcatatcagttaagggtggctgaatcttctgcaaagcagttctcagttgatcttgaagatgcaagaatggagctccaaaatttggagaaacaagttgatgtgttgcagaatcagaagaaggatttagagactcaattaaatgagcttaaaaatatggaatcaatggcaagtgaacaacatggaagaattgagaaattgactgatgaattaagcagaaaagatcaagaaattgaaggtttggtgcaagcactcgatgaagaagaaaaagagcttgaaatcttggagaataaaagccttcagttggagcaaatgctgcaagagaaagaatttgccttgaagacctcagaagtttctaggaccaaagctttggcaaaacttgcaacgactgttgacaaatttgatgagctgcatagcttgtctgagaaccttcttgctgaagtggaaaaccttcagttgcaattgcaagaaagagattctgagatctcatttctgcgaaaagaagttacaaaaagcactaatgaactgctaaccactgaagagagcaacaaaaattattcatctcagctaaatggtttcatgaagtggttagaaagagaactgttgcagttcggcttccattctgagagtgccaatgattatgattacactcaatttcctgtctatatggatatgttggacaaaaaaataggatctctgatagccgaatcagatgatttaagggttacagttcaaagcaaagattctttactacaggttgagagggccaaaattgaggagttgatgcgtaaatcagatggtctagaagcttcattgagccaaaaggattcccagatagggttacttcgccgggacagagcatccaatcagcagagcagatctataaatttgcctggcacttcagagattgagcaaatgaatgacaaagtaagcccagctgcagttgtcactcagattcgaggcgcacgaaaagtcatcaatgaccaagttgctattgatgtagagatggagaaggacaagccttttgatgatgaagatgatgacaaagcccatggtttcaagtcattgactatgtcacgctttgttcctaaattcactcgaccggtatcagacagaattgatgggatgtgggtctcaggcgatagattgctcatgaggcaaccgaccttaagactcggcgtcttgatatattggattgcactgcatgctttgcttgctagttttatttgaactctgtaaagatgtagccatctcctggcgagtgactgtacagtactctgtgtctatagcaagttatatctaaacagaagcagtttgcactgataccgtgattcctttcgaaaatgttaccgaatacttgagccgtattggcagctgcagaaatcttcatgatgcattttcacccttcatcctggtgcaaatcctgtctagcttagtttgtgttcaattgatacaaatggatggaagagaactgaaggaagcagcagcaaagaaccccctgtacatacatttttgtttgctctattctttgcttttagaaaaaagatggagggcattctacatgctagcgactacttactacactatatgatacaggattacagggaagtgacatgtagttttggaagttagggttttgggatggtagcaggtcatcccctcccttgagttggccccctcaatcccatcatgccttctaatctttttcgtttacatgtataacacagtgattatatcatttattgtaatccacatagtgtgcaatgggggagcttgcacattttattaacgtcaagtgaagcctgagtgctgaaagttcatgtcaggtctgatttggggagtgcgttgagccctggcgtatgctgtgaggcttcagcggttgttttgctactgttgc

SEQ ID NO: 28897 - DNA, 1278 bp, Zea Mays
gcattcctagggcttatattattgattctctaccatgtgacaccagcctcttaaaaatgttcccttgtccagtcgtccttaagattacctgtacatatataggtagtgtttgtttatttgagttgaataagtcacattactcggactacatacactcagtagccaagcaacacccgttcctgcacatccacacctaataattccagccccctcaccccagtttacacaagctagtggttcagaccaaagtgcaagttgaactgtgcatccaaacatttgtaccttgagtgttttggttcatggcaggtacccttagattgcagcaggactaaaaagagcagtgttgctgtattcacagcatttgttcttgcctggcaagcaatcatccttgcattcataaggttgtcgttatcatggtcaacagatgtacctggaaaccatgaagttgcccctatggatggggcaagtgatccaagagtaacagttgctcttgcagtttcgctcagtttaaatcgcaagcgtgatggaaatgtagcttatgctggaatggagtccagcatatgtaagatggattaatccaatggagatcagccttcaggtgattgtgcatctgaaaattcgtgttggtgtgtggtccctagtcccagtcaccgtgcacagggtctgatgatcaagaagtgtgtcctgtcctgtacaagtctgcagtcatcaactcatcaccccgttgtctgcatgactagggcctgtttggtttggtgtctaacttgccacactttgcctaacttttctgtctaaggttagtttttcaattcgaaggactaaccttaggcaaagtgtggcagatttagccaccaaccaaacagcccctacattcatcagcggtcagcctttggaccaaactctggaagacctagctactctcttttcctgagagttaccagtaagtgtatccagttctgtatgcagtcatcatcgtgttgtttacaccactgggttgtagccagtgatgatatgatcattcgtctgtaccaaatttttattgttgcaactaaggtgtgatctagcgtgtagtgctctgtgtttggtggtttcaagtatagagcgcttctcttgtacttcaaaataaacccgtttacccatgatgatgctatatttagtagatttctcttctgattatgcttgtctctttaccaaagcatctctcggatagctatggcataaaaggcttgtacatgtttgaatgagcacacttatcaaacaatagaggttgtcttcttt

SEQ ID NO: 28898 - DNA, 3751 bp, Zea Mays
ccaagccccaaacagctagctcttccccacttcgcctgcggcggcgctccctcccgccggtttgctcgctgggccctggcgcgttcgtctcaacgaagcactcgcaccgccggccaccccgaagcaatcgccactgctatctcggtgtcctctccctccacccggactcggattgacttcctatctctcgtcgggggccaagcatgatggaggtgggtttgaacccgggggaggagctggacttcggggacaaccaggaggacgacgacgacgcgggggacatctcacccgccagcaaggagctggccgccatggtggcggcggcggcggcggcggagacagtcgagcttgacgacggcggcgccggtgtcgaggcggccgcctccgctgccgccgccgcgtcgtcgtcgtcagcggcggcgcggtacggggacgaccgcacgccgcgggacgggatggtgttcaagtcctacgaggaggtgctcaacttctacaagcgctatgccctgcgcacgggcttcggcgtctgcgtcaagaagtcctccttcaccaaggccggcctctgccgccgcctcgtcctcgtctgcaacaagtggggcaacggcaaggaggacgcctgctaccaggccaggcccacggccaagaccaactgccaggccaccgtcgtcgccagactcctgggggacgacttgctgcacctcacggatgtgaacctggagcacaaccacgcgctcaacccatccgccgcacgcttcctcaggtgctacaagacgctgcctagcgggttgagcaaagatctcgtggtgagggctgccagaggggaatgctcggtggcgggtgacatcgatgtcccgatatttgatgaatgggggcggcttaagaccgggcaagctgatgtcctggccatcaacgctttcttcacccagatgcaggcaaagcttccaaactccttctatgtcatggacttctatgtggagggccatctgaggagtgttctctgggctgattccagatccagggcagcgtatcagtatttcagcgacgctgtttggattgatacggcatgcttaaggaacaagtatcatgtcccgcttgtttcgtttctgggtgtcaatcatcatggtcagcttgtattgctaggctgtggattgctgtcagatgagagcacagagagcttcttgtggctgttcaagtcatggttaacttgtatgaagggacagcctccaaatgccatagttaccgatgaatgtgtggcgataaaagccgcagttcgagaagtgtttccgaagacacgccatagaataagtgattggcatgtagtgagaagtatttcagaaaaaataggtgacttgccagaatatgaagcgatgagaaccaatttggttactgtaatatatgattctttaaacgacaatgagtttgaggcaaggtggaagaactggattgatagatttagccttcaggataatgaatggatcacctttctgtatgagaatcggcacttgtgggcccctgccttccttagggacactttctcagctgggctctgtactgttagccagcgtgaaagtccaagtacattttttgaggatgcagtcagttcagagaccacattggtgacgttccttgccagctacatgacacttttggataacaaatacaaaatggagcaacaagatgattttgattcattaaatagcagcaggctcctgatatcaaagtaccaaatggaagaacagctatccagattgtacaccttgaatatgtttatgaagttccaggatgagctaaaggcaaccatgcattgtcaagttcagctggatgggtcagcatcttcttttatagttattgatttgactgaagcagggagtgaaatgctgaataaaaagtacgaggttgttcactgcatggcgacaaacaggatggagtgtaactgtggcctatttcagtttcatggtatcgtttgtcggcatgcattatctgtgcttaaatggcagcaagtatacgacatccccccttgctatgtacttaacaggtggcgggctgacttcaagcagttgcactacctagataatccatcaaaggatttagcaacaagtaatcatgtcgagcgttatgattatatttctttgcagtttcttcgtctcgtcgagattgggatggtatccgacgagaagtataggcatgcagtaaggcttcttaaagacatgaaagagactcttcttgatgataatctgtgccgtgatttggagcagaagcttacaccagctgagcgtgcaattgtgaatggtgacaaccatacacaacctggttcatctgagggcggtgctgcaaaaaagcggcgaggccgtcctcctaaaaagaataaagagataaacatggattccatggaccctttactagtatcctcggatgtaactcagaaggacacttttcattctgcttcaactacctcaaaccttggcactcatgtccggacgcatggcattgttgatctcatggaagaagtcaatccaagcgagctgtcatttgatagccgttacggggtgcaatctggccactcgcaccattttgtttggccaatctacatcagcagcagagcagtctagggttcagtgggtgtttcataatggcatgtatcaggatgaccaagtgacttacggcagacggacatcataacaattggacttgttaggctccagggtttgccgtttcaggtttctttctcttgagattttattcccgtgtgtgccatgatgaggtgatagatagatcatgtctttcttgcaagttaatatactagccattgcttctacagatagaggagtgactgaaactttgttgagaaaatatagcattttacataagaaccctgtggaacaggaagtcaggaaggccatgaaaatctgcttaataagagctccatcggcatacagtatttgttatggaagctttatgtgtttaggccttgttcgtttaggaggtggatcgaggggaattagaggaattgaataggaagggatttgatccccctcaatcccctccgatccccatacaaccgaacatggcctgagtagaaagttttcgtctaagcggcattcagtgatgagctatatttccaaattttcatctgtccattttctgacgattttatttcatgccacatgtcctgcatggaatgtgcaggaaatcgggtcaggggtcctcggtttttggactttggagcaccgatgacttaagtgatcctccattgtgcttcgaacgttgagccttgggagatgcatgctggaactggctgctggtgatggtggcggcggcggcatctgaaggcaggatacactgtagaaacagaagtttgccactaagccagccgaacgcttccataagccatcaatgttagccaactaactgacatgtgtatatacacacacatcatctcagaaagaagccgtcattccgtgggaagtgctgcgtaaactcctgataataggcgtggtcagcgtcggacaagaaattgagagcttcattttctttctttcacgtgggaaagatacaattttgttgcctcctgacgatcagctaaaagggggaggaaatatccatgctcttcatctgggaaagatgcaaaaaccatccagctttatcatctttgctccttcagtaccgtgcctggaatcctgctttaccaatttttagcacccaaaaaaagaaaaacaaaaaaaaactatctgtggcgccccttgacacaaac

SEQ ID NO: 28899 - DNA, 342 bp, Zea Mays
tccatcttctatattatactcaaggcaaggaattaggagcagaccggagacttgggggcttcacctgctgtatctcattaccatctgcatctggttgcccgttgattgagaaggaggagctgagggccatggcgaccgagaagcccatcctgtacaacgcctggatcagctcctgctcccaccgtgttcgcatcgcactcaacctcaaagtctaagatgtttcgcaagaatcacatccaggctcgtctatttctggacaatttctgaagttcgctcagctagggattagcgatgactaccgatgctagcaattctgttgtatttcttggtctgttaactgtg

SEQ ID NO: 28900 - DNA, 2188 bp, Zea Mays
ctctccctctgcggcacactcgcacccttccgctagccttccttcttgaatcttgagcacagagtaggctcgctcacaggacagtcacttgcctgggaagccagatattattgcagcctcatacaccgcccttccctactgcttcctgagatttgagagctcgggcgccagatctgaaacctcttgtgttgtgcctttggtagttcggtgtagcattgagctagcagaggtgctgttctagttccaggatgagcaaggaggatgtcctcaagacattgatgctgagagtgaacatacactgtgacgggtgcgagaagaaggtcaagaagaccctccacaagatcgacggtgtctaccagagcagcatcgacgcggaacagggcaaggtgacggtgtccggtttgctggatccggacaccatcatcaggaagctcaacaaggccggcaagccggctcagctgtggggttccaagcccggcatccctcagaacgcctaccatggcggcggcaaggcccattccaaggaggctggcggcggcaaggcccattccaaggactccggaggtggcaagggccattccaaggatgccggcggcggcaaggcccagaagggcggtgcgggtggcggcggtcacaagggccctggcggtggcggtggcggaggcggtggcgtgggcaatcctaagatggtgatgccgcagccgacgccgcagcagctccagcagctgcagcagcagctgcagatgaaggggctgaagcttccgccgcacctgttgggcggcaatatgccggcgttccccgcggctgcgccgatgaaggaccccgagtccgtcaagtttgccctccccgaggacgactttcgacgactacggccgcgtagttcgacgatgacttcgacgacggcttcgacgacgacgaggacgactacgacgacgacggcctggacgacgacgtctacggcgaccccaagatgatgatgaaagcccatggctgtgccgccgccggcccggcgggggcgacaagaagggcggtggcggcaagaagggtggtggtggggggaacgagatcccggtgcagatcaagggaaacaaccacggcggtgccggtgggcagccgcacaatgcaaagggaggcgccccgggaggcggggcccacctgggccaggggaagaagggcggcggcagcgccgccgccgtcggtgtcggtggcccgatgggcggaatgctgcctcaacaaggcatgatgaggcctcctaacattcttggtggtgctggtgccggcttccccagcacggcccagatgggcggcggacctatgggcatgccggttggccacccgcacatgggtattatgcagcagagcggcggtggcggttgcggagctggcggcatgccgggcctggggttccacccgggattgggcggcggaatgcattctggggcggatatgcttcaggccgccgcggcatccgggaaccccgtggcgcagcagcagtacatggccttgatgcagcagcagcagcagcagatgatgatgatgcagcagcagcaacagcagcacgggaacggcggtgcaggatacccggcggcaatgggctacggctatggccggccaccgatgcattacccaatgggctacccagtgctgcccccgcactcgcatgctgagccttacaacatcttcagcgacgagaacgccaacagctgctcactgatgtgatcagcaattccgcatggaatggccctgttccaagtaaaccatctcaaggagctcaatgtcaccgctgatcaccgacagacatcgccatggttgaagcgccgtgaatcaatcaacaatcagtatgcttggggatgagtcctagctagaaccctgtccctttcctgctccttccccccctttctctagcttattttcgccttgcttttaaaaaaaaaggaacttccttgaatgcgaagttaggtatagtaattatgaggtttccataagggaggggaggagagaggagacgatagggacttcgtacggggtcgttcgcttgtgggttcttcttccctcctggcttcataaaggtggactaatggtagaacaatgttgtcaatctcagtcgtaaatcagtgtgaatatgtcgtgatttctcttctaatctaactaactatatatatggtaataagttctgtttatcggagtc

SEQ ID NO: 28901 - DNA, 697 bp, Zea Mays
ccaactcaacgcattgcgagaacaggcccgccgccacgccgcccaggtaggttttgtttgggatctcaccatttcttccttgtctctgtctcaacacggcgccgccgcttctgccgccgggagccgagcccaagcctaagcgaaagccatggcgattggttctctgatcgcctctactttcgccagatctagccatgccctccccgctgccgccgcttcggccatctctcaggctcccagatcccagcacaccgcatctcctctactctccggccttggagcagcggctcgtgctttcaggtggttttaaggatagcatgatgaggcagtagttgacgaacaagaacatgaataaccagaaattatgatctggactgctttactgctttttcttagaccaataattgcaggagaatgttagttcatcttacttaaagattcgtccgtgtactttgttcctatctacttcctgcttacttttggtgtcatgagtgaacattaaactgatcgtaagttatgctttagagtgattgtttcttgccacagttagctgttcacctcgtggccactcaaatagcagaagttcccgacaaactgaagacaatcaataatactaatttatgcaaacagctatgatagacgccgtatgtttgaaggaattgataagttcattacgtcaacatcgatacgttcaggg

SEQ ID NO: 28902 - DNA, 2193 bp, Zea Mays
cttcaacaaaccccatattattttttagagagagcactgcatatccgtcatcatttgattttcgaggtgcacttgctgcactattaaataatcctctatggtccaatgatgtccggaaattactggatgctggttttgttaagcctcgtcaaggtcatgatgctggggaccatcctccaatcactccaatgaggtcagcaacagaagcatctttgggaactgatgcttggaggctgtaccaatacatatgccagcacttcattggaactgttagtcctgattgtagatatacaaggactgccattgagttcacttcaggtggtgaaacattccactgtgttgggtatcgagtcacttctaaaggatttacatctatcatgccatggctggctgtcagcgagaacagtcttcctgcatttaaaaagggagactctgttagtattcataaggctgacatatatgagggaagcactacaccacctgattacctcactgaaagtgaattgatttccctcatggagaagaatggcataggtacagatgcatcaattcctgtacatataaacaacatttgtgaacgtaattatgttcaggtgaattctggaagaaggttagtaccaacacccctgggaactacgttgataagagggtatcagtgtattgatgctgatctctgcttgccagatatcagaagctttattgagcaacagattactctaattgcaaaaggaaaagctgatcatcttcgagttgttcaacatgtcattcagcaatttatgaaaaagtactcttactttgtgaaaaagattgaaaacatggatgctctgttcgaggcacagttttcacctttggcagactctgggcgcctactaagcaagtgtggaaaatgtggtcggtatatgaagtacatttccactcagccaatgaggttgtactgtataacttgtgaggatgtctattatcttcctcagaacggttcaattaagctttacaaggaaatcgtatgccctcttgatggttttgagttgcttttgttctcgatggtgggacctgatgcaaaatctttcccactgtgccctttttgctataattgtcctccatttgaaggcatcgacaaactctttggtgctctcaagctcgatgacaccggcaaggttgggaaaggggccggcatgccatgcttcctttgtcctcacccgacatgcaagcaatctatgatcactcagggagtttgtgcttgtcctgagtgtagtggtaccctgattcttgatccagttagtgcacccaaatggcggctttactgcaacatgtgtaattgcattgtattgctcccacatgctgctcacaggatcaccactacagataagaagtgcctaacatgtgaatctactatcattgaagttgatttcaacaagaaaaccacccctcttcaagatggagctacattgcatgagggatgtatcttatgtgatgatctgttgcattcactcattgaaatgaagcatggtaagtcattctttattcggagagggagaggaagaggcagagggagaggtcggggcagaggaagcagccggggtagaggaagacgagggaactcaaggtatgatgatcctaaaatgagtttccgggatttttgaagattttggacaaccaacattcggtcactactcactactttgtctgcttcttcgtgactgctgccaagactgccccggctttggaacacaggaatttcacaggaattagttcaaaaacataggaaaaacacatgattcaggaaattttgtttattccaaaggagctgtaagccatgcttaggcaggaaactgaccatcatctgcaactttgtcttgcgttcagttaccccccagaatggagtcaatatattactagaaagtgacttaagagttaattgctgccccatgtctgtattgacacacactgaatctgtagtttgatttcaaatttttgatagaacaaggatcaactcaattgtattactcagtagtgtttctgtaatactcaatcattgacagaagagctcaggtaggtgagaattgagaactagctcaatatgacaaaggcaccagtcaacagattgaaagctcaacaaactcctctctttgcaatatttggttgcacctaaatagcttcttctgagctgttacgattcttctagatggattctcg

SEQ ID NO: 28903 - DNA, 2808 bp, Zea Mays
gcaaaagagcaaactgccaagtgcaaagcgaaaccatcaaaccggtgccgatgctctgccggcgcccgtgccccggcgtgttcctccgcctcttcgccacttcctgccgccgcagctccctccacccctcgcagccgcacctccggacagctacagctctcccgacgctgcctgtggcgaagaaggtccccttcaatgtgtcggcgcacgggaggtcgtggagtgacccgtaccactggatgcgcgacacctccgacccggacctcgcggtcctcctcgccgctgagaacgcgtacgccgacgcgttcgtaggatcggcaggtggcggcggcctccgcgcgcacctcgccgcggagatgcgcgcccggctgcccgcttctactgccacaccgcctcagctctggggaccttggttgtattatcagtatgttccagagggaaaggagtaccctgttttatctaggaagctgaggccctctagtggtctggtaggaactctgcttgattacctttctggttctgagaaggagcaagtgttgcttgattggaacgaggttgcagaaaaaaatggtttttgtaattgaatctgataatctaagagaaggattatggcctatacggaaacgtgttgacaaagttcagtactttttggagcaccacaacgggttcttttacattcttaccaatgctcctgtaaatgataccgaaacgacaactgaaggctactatctggccaggtgtagggctgaaaagtcactggtggatagatggcagattgtgacggtacctgactcggactgcaccattcaggatatggacatttttcatgataatttagttctctttcttcgaaagaatggtactcctcttttttgctccatcagtatgccaattgatgttgatgttcaggagccaaaggaacttgatgatctcaacccatggttttttcccataccgtcagagttatgcagcattgttgctggatccaacaatgatttcatgtcatctacttatcagctagttatttcatcacctgtgataccggacttaactgtggactatgatttgagaaaaaagactttcaccatccttcatcaagaggaagtaactaccatctctgcaaatctaggcggcctgggctttcaatccaatgtttcaagcatccaacaaaacatgcagcttgttaaaacctcacaaaattggagtgatctttccaagctattctcatgtgaaagggttgaagttatatcacatgatggtgtttcaatacctttagtgatcctgtattcatggggagcacattgtcatggagaatcacctgggatcttatacggttatggagcttatggagaggatttggacaaaagctggtgttctgagaggttaagcctcctctctcgaggttgggttcttgcatttgcagatgttaggggtggaggggatttatcatggcatatggcaggaaccaaagctaataaaatgcattcaattcaagattttgctgcatgcggcaggcatctcataaagcaaggctttgttcaccaaaatcgcctttgtgctataggctgtagtgctggtggtctgttggtgggtgccgtcattaatatgcttccagacttattttctgctgcagttctcaaggtcccctttcttgatatctgcaacacaatgttggatcctactttacctctcactgtcttggactatgaagaatttggtgaccctaatagcccagatgagtttgaggcgatcagcagttattctccttatgataacttagcacctgatgtgtgctatcctccagtcctggtgactgcctcgtttaatgatacaagggtaggagtttgggaagctgctaagtgggttgcaaaagtaagagatgtcgcgtgcccatcctgttcccagtcagttattctcaaaactaatatgcaaagtggccattttggtgagggtgggcgtttcacgcactgtgatgaaacagcctttgagtatgcatttctcatgaaggccttgggtttggatgacgtagctatgatgtagcgtactcatgcctgaggattttcacggaacagatttttttgtggctctggaagcaaaaactgagataattaccttttgtgatatgctcagggataagattgtatcctcataattattgattaaaagagctcgcaatggaaggtgatgcacccttgaggtgtgttctgtttggcattggcttttaatagtcaagctgtggatttctacatgcatattatcaacttatgctttcaaaaatagcacacttggatgctgctcatcaacagtgcaaaggtggcagatgagatccttattatggtgttcgatatggggcttttgaccaaaggataaatggttgatcatggatgttgattttgacttctacttcatacggcaggttggtgcatgttgctttcttctctttgggtcatctggcagatgatgtactctttttacgccatccttaaattaagctcaggttccatgtcacatccttgtgctcatttttttagcgtaatcgtaatcgtcctcggccggtcggccccttgctatgcccacacatactcctatgttcagtgcaacactacaaattaaatgatggcttgctagaacttattgagcacatttctccgagcttatcctaggcaccctttccttccttttttttcgaggatcctagtcaccgtctgtatgtatacttgtgcccactttgcttagtgcagcaatgcaaagtaaatgatgactgtttgaaacgtaccgagcacatttctctctgggctatcctatttt

SEQ ID NO: 28904 - DNA, 2216 bp, Zea Mays
gaagtttgcccttttgccttggtactaaccgaaggaaggtatccaatgatccagaacttcaccagaaggtggcaggtgtattggttgagtcaaatggtgtcaacaatgacttacaagagctgtctcctgatagaaaatttccacaagatgattttgcaccctactcaaatcacagccatgattggaatcctgctggatcaggtatcatgtggaacaaatataattttcctgtatttctactttcagaagagagtacaaacactcttcaaaagatttcagaaaaaaatgagaagactggcaatggatataaagcaaatgttgcagaattcgaccttgttatgcagacaaccaaagctcaaacacatgattcagcatcctgcctcaaagaacaatcatgcttgcccttaggtggacacagggcagtgtatggacttcattaccgccacttaataacggatctacagagcatccgaaacctttaatattggctattgcgtctcaagactctgcatcattttttcgggaccgtagtcttggttcagattctcccatatctggattgattgctttgctcactgctgttgatgctctttctcacattcatggtctaagcaagcttaagaaacagcttgtgttcgctgtttttaatggtgaggcctggggttatcttggtagtcggaaattcttacaggaattagatgaaggcgctgcttctgtgaatggaattagtagcttaaagattgaccaggtactggagattggttctgttggcaaggctatacttgaggaatatccatcattttatgtgcatgctgaagggaatccatcagcttcaaaggaaatattagatgcactgcaaagtgccagcaagtctcttggttctgataatgttaaagtaaaacaagcagcttcatcaaatcctggtgttccaccatcttcattaatgtcattcataaggaagaacatgtcaacttctggagttgtgttggaggattttgattcccacttctccaatagattttatcatagctatctggataactctgtaaacatcaattcctcgtcaatagctgcagccgccgctttggttgcgaggtcgatgtatattcttgctagtgatgactcagttgttgaccttataacactaaacactataaaagtgaacgtttcattggtcgaagaacttattggatgcctgcttacttgcaatcctggtctttcgtgcggccttgtgaaaagattcatttctccaagcaatccctgcccaagtcattatgttggtgtttttctggatgacccatctggcacgcagcttccttcatatgcagatgacacgtctcggtttgtatggaactttttggcagacagaactaattcagcaggcaataaaagctcatgtactggaaagtgtggtgatgaaggtgaagtatgtgtaggggcagaggtggagggtggaggtagatgtgttgtatctacaaccaggtatgttcctgcttattcaactcgggtgaagtttgaggacaatgcatggcacgttcttccagcgaactcgtcagatccaatgggtgctgcagatcccgtgtggactgaaagcttctggaacactattggcctcagggtctacgccgtgcaagatccagcttacgattggcttattcttcttgccgggctcggaatcactgctgcatcttattgcgctgtacactttggcagagcatacatttcaaaggtggcgaagcttgactgaagcgtcagtgagctgccccactgataatgggtatctagagctggaaatagaactaattaggctggcaattcgtagaacattagcagcgcatgagacagggtgattaagctgcgagaaagccgcaataaattatgagaaccaagcacacccgaagcaagtcctccatcattatgcggacgtccaggtcgatgtaatattaatgaaattgtgaccgtgttacgttttgtgttgaactggtactggtaggtaggttatgacacgcctctagctctagttggtggatgtttccggtaacgtgtttttctgtttgtggatcctgcctactcagttttggttgcgtataagcctgcccctcatgaatcctatgagtttgtgaacaccaactattatactggtgacttgcattcgcatgatgattggatcttgtatcgtgtttggtttcgccgctccagttgccactgtttgggct

SEQ ID NO: 28905 - DNA, 2958 bp, Zea Mays
gccagcagcggcggtgctcgaccttcaggcatcagagctgcgggacatcacacgcaccgctacgatctcctcctgcgagcgagatctcaccaccgcagcggcgccgcggccatggcgggaaggtatcaccaggatcagggcggggacgggggcgcgtccatggaggtagtcagcacgccgaaccaggagctggcccttaccaactgcgcatacgtctctcccgctgacctccgccgcttccccaacgggctcgccctcgtcgctgacgcctgggtcttcaccctacgatatccttttgtagacggtctctgaccacaatgctgttgcaagtggacgcattgccttgaatgctattcagcgtcggcaggcaaaggtttcagctggggattctgttactgttagcagttttgtcccccctgatgatttcaagttggctttgctcactttagatctagattatgccaaggcaagagccaaccgaaatgacgagctggatgctgttgtgcttgcccaacaactccgtaagaggtttctgaatcaggtcatgacctcagggcaaagggtgccatttgaattttatggaacaaactatgtattcaccgtcaatcaagctttgctagagggtcaagagagttctacaccattggatagaggattcttgtccagtgatacatacatcatatttgaggctgctcctaattcaggaattaaggtgatcaaccaaaaggaagctgctagcagcaagcttttcaaacataaagagtttaacctggaaaaattgggtataggtggattaagcgctgaattcactgacatatttcgtagggcattcgcttcaagagtctttccgcctcatgttgtcagtaagttgggcatcaaacatgttaagggtatattgctatatggacctcctggtactggcaagactctaatggccagacaaattggaaagttactgaatggaaaagatcccaagattgtgaatggacctgaagttctgagcaagtttgttggagaaactgagaagaatgtgagagatttgtttgctgatgctgaaaatgagcagagaacacgaggtgatcagagtgacctccatgttatcatattcgatgaaattgatgccatctgcaagtctagaggatctacccgtgatggtacaggtgtacatgatagcattgtaaaccagctgcttacaaagatagatggtgttgaggcgttgaataatgtattgcttattggaatgacgaatcgtaaagatttgcttgatgaagctttattgagacctggacgattggaagtacacattgagataaacctgcctgatgaaaatggtcgtttgcaaatccttcaaattcatacaaataagatgaaggagaattctttcctgtctccagatattaatcttcaggagctaggcaccctaaggcaaggatcaagggaaagcttagcaacccaaaaccagattccctcctcacccatgtgaaaagtgccagcaaacagcagctgcacacaaccacacatgattgtgccagttcagcaataacattacttatgcacattagcactcagttttacctttggaaattctttatgtatcaaatgacaactgagtttcttaacaaagctgcgcggacaaagaactacagtggagcagagttggaaggtgttgtcaaaagtgctgtctcatttgctttgaaccggcagataaccatggatgacctcactaaacctttggatgaggaaagcatcaaggttaccatggatgattttgtgaatgcacttcatgaaattacccctgcatttggtgcttccaccgatgatctcgaaagatgcagattgcgtggtattgttgattgtggcaaggcacataagcacatttatcaaagagctatgctcctcgtagagcaagttaaagttagcaaaggtagcccactcgtgacttgcctattggaaggtcctgctggaagtgggaaaacggctatggcagcaagtgttggcattgacagtgattttgcatatgtgaaaattatatcagcagaaacaatgattggtttcagtgaaagcagcaaatgcgcacagatttgcaaggtttttgaggacgcatacaagtctcagttcagcatgataattcttgatgatatcgaaaggtgcttgagcccttgattctagaagtgaacaggctgccatgcaaaactttatgcatctcatttcgctctgttttagtattcttgtatgattttgtaggttactggagtatgtagccatcggaccacgtttttcaaacttgatctcacaaactcttctggtcctcctcaagagagttcctcctaagggaaaaaacttgcttgtcgttggaacaacaagcgaggttggcttcctagaatctgttggaatgtgtgacgtgttctctgtgacctaccatgttcccaaactgaaaaaggaggatgccaaaaaggtattgcatcatcttgatgtgttcgatgacggagatcttgacgcagcagcagaagcactggacgatatgccaatcaagaagttgtacacacttgttgagatggctgctcaggggccaaccggaggaagtgctgaagcgatttatgccggagagaagatagatatcaaccatttctttagcatcttgagtgatattatccgttactaagcccgcatggagccgaaatgaaccctataagtatccagtaggagtttgtttgcacccgtgcttcatcaaccatttctgtagattggtttgatctttgatgtgttgtttttgtttgatgcacctactagagctgttggattagatcagaggcgaattacacgatatatcatttttgtattgtatgacgatgtttatacagttcttaatgggatccagctttacacctcagaacaccgataattttcacattcctattagacccgcttgttttgttgaaattgaattctattttaata

SEQ ID NO: 28906 - DNA, 4288 bp, Zea Mays
gtcatcggcaggacatccacaccaacccgtgctcaaggaaaaaaaaccggggcggcgaaaaccctcgaaccctaatccttacgcccctcatggcggacgctgatgcggcgctgccaacgccgcctccggaggtagtagcccccgaggagcatcccgtgggcgccgaatccaccgtcgccgcgccggccgaagtcgataacaagcggaagctagaggaggtcagcgccgacgcggaggtgaaaggcaccagcgaggacgccaagcgcccgcgcgtggacggcgagcccgacgccgcaacaggggttgagcagcaaatcgatgggtcctccgtgaatgcggatcccgcagctccggaggataaggctgctcttaacgttggcgcagcaatggatggtgataatgacacgcctgctcccgctcccgctccagactcgcaggcggtttctgacgagaagccgcttgaagcagcagctgaagctccacagcaggaaggtgatgcagcaactgctgtacaggagatttctcgtaagatcgaagtgcccaacagcaaggttggtgtcgttattggaaaagctggtgagacaatcaggaacttgcaaatcagctcgggtgcaaagatccaaatcaccaaggacatcgaagcggactcaaatgccctgactcggccggttgaactagttggaacacctggcagcgttgataaagctgagcagcttattaagagtgtcatagctgaggctgaggctggtggttcccctgccttaatagctagaggatttggaagtggacagcctggatcagagcaatttgagatgacagttcctgataacaaggtcggtctcattatcggaaaaggtggtgagacaattaaaggcatgcagaccaaatctggtgctcgtattcagttaataccccaacatcctccagagggtgttacattgactgaaagaattgtacgtgttactgggaataagaagcagattgaagctgcaaaggatttgatcaagcaagctatgaatcaggtgatgtgatcttcctttgtgattttttggtagtcgatttgtgtttcaattgttaagtcatggtagatgctggtatgatactatatgcttttaattgttcatgctttatgtgattttactctgatggttgctgatgatgtcatcacatttcatgattcattgttcatgatatggttacttttgtgatcgtagataccgaattcaatgttgtcttcatggtattttttgaccaaggcaaattcaacctatcgagaacattgccttattacaatgctatgatggaccaattgattttttagctttgggtttcataatatgcctgtttttatcattgcatacattttgtacaattttcctgatcaagccaaacttgagaatccatgataagctttgtagcttgcatatatttgggttccataatatgcctgttttatcattgcacgcaattcatagtttcatactgtctttctgttcaaactaagcttgagaattccctgatgagctttgtagcttatataggtgtcccaagtgtactgatatttttgttatgaacaaaacatgatttgattttgtacttcattcatactgtgaatatattactatttctcttgtatcggacccttgaattttaagtgttgttttaaactaatcaatcttctctacacttggccttgtatgaagtatccatgatatatagcagagcctaattgggctggaaggtaagtttcttttaatgtttgagttctcatctttagatgaaagacaaatgggacaccgttgcgttttcaagattataaggatgtaaaacttttaaatccgatttactagctcaatgaatatttcactttctttcccttgtcaaaatctcttatcctgggtgttaagcactgcgaactttggcttattttgccttcttgtttttactggatcatacacgcttccattttgtacctgttcgttggagcatagttcttgatttatgcattaatgacatatgatatatgaattatggaagagtaaaaaatgagtgcatgatcatacgattcagaaatgaacttttgagctgtaatacatagcatatgatttgtctggaaatctgggtactgattgaattcttgatcccattagcttgactattcttcgtaggatatacactatgagtaggacttctcatcttcatctatcagccttaacagtaaacatgggcatgctttggatcaatgtccatgactatagctttggaagtgttgtataccagcggatcatccagttgctagatgagatatgattctgtttcctacataagcagtctgaactgacacatcaagttccctcgcttctagttttcgtcaattatttttgttgaaggtgccgatttggagttggtcaggtatcctaatgcagatacagctagctttcttcatggggggtcatcgctcttcatcgtttacttgcaccgaagagggacattgaccattatcccttagccttgcatggtgtatgtagttggtaactggtaaggctgcctattgccgaaaggaaacataaactgtttggcattggaagactgcaacaagtgtatcattgccatgacaaggcttctacatcaccatgttagacattttcaaagcatacaaatcagtctggcggatatggtccacaaggttaccgacctcagggtcatggtgccgcttctcagttggggccacgctctcagaatcatggctatggatacccacctagaggtatgcctccacctcaaaactacaacgcaccctacggtggctacccaccgcagggaccgtcaagaggtggcatgggctgggaccagaggccgggcccaccaacccatccttcgtaccagggtggtggttctgactactacaagcagggatctcagccatatgatagccagccacccagctaccctcctgggccagggaattacaacagttatgggcaatcccagggccctaactatggccaacctcagtatccgcaacatgcacctcaacagaactacagccatggctatggtgatcctagatacaatgccccccctccgaaccagcagtactatggtcagccaccgatggccccgcagcaaggctatcctcaacagccagatccctatgctaggcctccatacagtggacctggtcaatggacccccaggggtgctcccgccgcagatggctcctaccaggcgccaccttcatcttatgggccaccgtctcagcaacctcctgcttatgggcaaacatatggtgcagcaacgggacctgatgggtatggtcaacagggttacccacagcagggtggccaggtaccagcttcatatggtcagagtgcaccagcagctccaggatatcctcagcaaggcacgcagcaaggtggctatgcacagtacccgcagacccaaccagcatatggtgatcaagcagctcaagccaatgcgaactatgggtaccagggagctccagcagatcccaactacggaagtgcgtacccacagcagccagggtatggtcctcctggtcaggcaactggtcaggctggttatgcatcctctgcgccagcggccagccagcctgtgtatggccaggctggatatacccagccacctacaaatcctccaagttatgatcagtctgcagcaccagcggcgactcagagcggttatgctgcgccccctgcaaatccacaacagcctgctgcagcaaaaggggtctcgccacagcctgctgctgctgctgctgctggatatggtgctagcgggcagtggacggcatgagcctcgtcttccgaacttcgatgacagcaaggtcaggttggatatccgcttttggcgcgtgtttgaatgtttgcatcttttggatgtctgtggacgcatcatgtagggcttgaccccgttatcgaaagagattgtaaccccttgagttgtgatactggacatcttctgtagtatctacgagtagttgcttaatgtgacttttaaacattctattcagtttggatgttccttgtcttgctacttcacagcttgccaagccagtaatctttggattcatgtttggttgctctttggtctttgctgtcgttcctgtaaataaatattggcgtttggccttctcttacgtcgttcatgggatgacggggtgccctttcgagttggcaatagatctgctgttcatccaaactcagttggttttgtttgtatttgttccgaatcatgttggtacagttagcatgtgaatggacaagcc

SEQ ID NO: 28907 - DNA, 574 bp, Zea Mays
gatgggacattcgtaaagttaagtttttctgcactctaggctaaacttcactgacgttacggaaggggtctcgaagagctgccaagacccacctgccacctccgatggacttcgccggccgggtatccgtcctgctcttcttcctggtcgctcgcactgtagcaaacgaccagatcttcaccacttcaggtttgccatttgggcgaagttcgcgtgagccaaggtaccgcgtcgagttccatcctgttgattcgccattccatccagagaatggtcaggaatcggtaccaatggctagtcatgaggggaagcgttataagtgctttctaccagttgaagaaactaaaaccatgaagtcaatgctcccacaaaatgcaactaatattataatagaaagtgaaaggagaattaagccaaaggagccagatgagttacttgaggttctcaaggatcagtgtttctacaggcacgaaggttggtggtcgtatgaattctgttattatgggaaaatcagacaggtccatgtagaggacggtaagtgcaagaattgctagcttctaatggagaagcaaag

SEQ ID NO: 28908 - DNA, 1847 bp, Zea Mays
aaaccaatcacgtccttgtcaccaaatcgacgttttgctggtaactgccaaacaacgttgatcacccaaccaagtggcaaacccccggaccctgtccacggtgcacccacccgtaggccccacgtgtcaccctctaatatacgcagcctccgttcaagtttagagtcacccgctaatatacggagcagctgcaatgctgaacgctgcacacctgtaaaagatagagctatcccctccctccccatcccttggagccagcaactccactcctgagtcctcacctcgtgctgcccgcgccatttccacctcccactgtcctttcgtccagtccccagccctgcagcccaaccgtggaggttctggaaggcggtgtatcccttctagaaccttctcgagatgcagagcgccgcggctttccggccatgccccactcggctgctggtgagcagcccttgtcgccccctcctctcggcccgcccgcttcgtgcctccgccgctggcgccgtcgctaccagaagcagcgccgtgggccctcgcggtctggggctcgggctgctgccagcctcgcccgatcgggatggcaagtgccgccagcgacaggtgtcatgcagcgcggccggggatgctgtggcggccccgaaggcggaagaaggaggcgggctcatgaagacgctgtggctcggctcgctcttcggcctctggtacctgttcaacatctacttcaacatctataacaagcaggtactcaaggttttcccataccctataaacatcacagaagttcaatttgctgtcggaactgtagcagctctgttcatgtggatcactggtattattaagaggccaaagatttctggagcacagcttgtagccatcctacctctggctattgttcatactatgggcaatctcttcaccaacatgagccttgggaaagttgcagtgtcatttacgcacaccatcaaggctatggagcctttcttttctgttattctttctgcaattttccttggcgagctacctactatttgggtagtatcttctcttcttccaattgttggtggtgttgcattggcatctcttactgaggcatcctttaactgggctggcttttggagtgcaatggcttcaaatgttacctttcaatcccgaaatgtattgagcaagaagctcatggttaagaaagaggaatccttggacaaccttaatctcttctctatcattacagtgatgtcatttttccttttggcccctgttaccttctttacagaaggtgtcaaaattactcctacatttttgcaatctgctggttaattttgattggctttgtgtttgtagggtctgaatgtaaaccaagtccttacaaggtgtcttttcgctggactgtgtttccatgcataccaacaggtgtcttacatgattttggcgatggtgtctcctgtcactcattctgtgggcaactgtgttaaacgtgttgtggtcattgtaacatcagtgctgttcttcaggacacctgtttctcctatcaactctctcggtactgcgattgcacttgccggagttttcctgtactcacagctcaagcgacttaagcccaagccgaagacggcttaaatagggattgtattttccatctctttgtgttaatggagttaaacacttctatgtttcagaattccattacgcaatggcgcttttggaggtatatgttcaaaccatctcaaccgatagacaagctttttctttaaatggtgttatctctagcctataatgtatatcataattctggactcgattattttctatatgaccacaaaattaatgtaacatatatatttccgcaacac

SEQ ID NO: 28909 - DNA, 2163 bp, Zea Mays
ttcggccgagcagacccgtggcctcactcccccgcgcgttagggttccgctctcatccttcgtgcctgctcaccgccgccacttccagctaggccgtcgtcgccgcgccccaccagcttcttaactacactacctgtcatccagtagccctgttcgtcgtcgacactccagttcgaataaggctctgagagcacctcaccttcacatgaagccccaccacgtagcctaggactgcgccaagaggaatgccgatcaggtagtacgacgtgacgttgacgtacgcgactacgccttgccaaccggcaccaacagcgacacctgacagcacgggctggacgctgttgagcagtatggagaaggccagcaggggcgagaggtcggcgacggctgcggccaccgcctggctctcggtgaatatgtaggcgaggctcccgcggaagaagaggaagagcacgaacagcacgagcccgatggcgaaggaggtgacgaccacgttgtagatcgcgaacttggccctcctcgcgctcccagctcccagctcgttcgccactcgcactctgaaaaagatagccaggaagcctatggagatcatcatctcccaaccattgatgttaaggctgcacatttagtaaagcagctagcaagtgatgaaagtgtagagtgatctgtggacattatcattagggttcctttaatattaccatatcgaaagggcgtcaagtgcgatctccgcattcttcatgtatcctgtgaggagcaccagtatggtgttgtaccacaattccaagctgaaagaaaaaaagactacgatgcggatggataccatccacacccacagaccacagtggcttgctttgcttaccagagcatgacaccagaagagagcgagagcctgacgatggcgccgaggtcggcgaaggcggcggacgagaatccggtccaggtgagagggcatccgccgaagaagacgaaggcgagctggccgaacacggggatccacatggcgacgaccatggagcccatgacgccggcgaggccgaggcggaggtggacggcggcgagccaggacagggcgaggtggaggccgaggttgagcatggcgaggtacgtgatgatcatgttcttgatctgcgcctgcaggtacatctgcagcgggaaggcccagacgaaggagaagagcacggggatgtaccagagcgccacggtccccgccaccgccgagatgtccgggtcctgccccagcgccaccagcagcggctccgtgaacaggtacacggggagctgcaccacggcgcacgccgacaggatgatccacgaccgctgcagcgcgcccggccggacgccgacgacgcggacttgttggaacagagccgtcgtcgaccagtcgacgcctgggtgcctggccattttcttcgccgaagaagggaaaaagaagccgccgccaagaccaagagggaagaagaggaagcagcagccaagagagcaattggaacatgactgttgggatcggcacgagatgtcgtcgaggcggcggcaagctttattgattccaatgttttttttttctatctagcttgtccggcacgagttggtggctgactttattcgggctctgaaccgagagcacggatcgatcttttgaatcgaatgctgctggcgggggcgggccgcctggagctcgacgaacgaagggcaagacgacatcgactacaaaatggtccccgatcgtgttgtgcagcgtgttgctcgtgatcactatacttgcatgcatctttgaatttgaatcatgcatgcgtgcatgtccgtatatagatccacaacatgggctgtactttttttgaaaaaaattgtttcgtctttctcttttttgcgaacgataattgtcggcacgtttttttttcgttcggaggccggtgttagagagtacacatgtgaactgtctgtccacttctctctccgttagcttaatcttgtgttctaacgagagagagagtacgtgtgtgtgcgtgtatggagggagttatgcgaacaagaatcaagaacgaatggattgatagaaagacacgtacgtaccaggatgccgttgctgaacctcatgaggacggtggagacgagcgcgtaggcggcgagctcggtggcgccgatgtggccgatgaaggcctg

SEQ ID NO: 28910 - DNA, 2254 bp, Zea Mays
tttgtccatgctgctgtcagctagcgagccagctcaccgtttttaaaaccaattaaacaaaagtttatcccaagttcagattgtaacaaaaggttcgagcaaacttttgatctgattgataccttcaggagcgtgcgtagaatccaagaaaccccaaatctgtgcctggagcatcgagcatccattatccggatcatggagaggttcggtaaagcccagtgaagaaatccgagctctgttgcagtctcctagcgggctgcgggccataggagatctcgcgcgcgacagcacaagcgaccacggaaatgtcgccgcagccggcccccgacctcgccgaggacaaggagagggacaccaatgtcttcatcgaggaggccccgggatcgccagctaaggtggccgagggcgacggccatggccacggcagccccccaacgtcgccggtggcgtggttccggatgctggccagggaactgcactggagcttcgtcttcggcgtggtggccacgtacggcatcagccagggcctcggtggcggcatctcgcgcgtcgcgtccgactactactggaaggacgtgcagcgggtgcagccgtcggtggcgcaggtgtaccagggcgtcacgtccatcccctggatggtcaagccgctctggggcctgctcaccgacgtgctccccgttgccggataccgccgccggccctactttattcttgcaggcttcatcggagtgattgcaatgcttatactcgctctccacagcaagcttcatgcattgttcgctttgttggcattgatgaccggaagcgctagcgtggcgatagctgatgttactatagatgcttgcgtggcagaaaacagtatagtgtaccctcatcttgctgctgatatgataagcttaaaatggattctgttcatctgttggaggtcttatcggattctcaataagtggttttcttgttcatgcaataggggctcaaggtgcccttggcctgttaaccataccctctgccttggtaattttatccggaactctgctaaaggaggttcatatccccaactttccatacgagcaggcccataagaagttcgtagaagcaagtgggaaaatgttaacagctttgaaatgtcctgaagtatggcgaccatgtgtttacatgtacatatcacttgcgttgagtgtcgacatccaagaaggaatgttcttctggtacacggaccaaagcgcagggttatcttttcatgagggatttattggcttcatgttcgctattggatcagttggttctcttgtgggtgttatactttatcagaatattcttaaggaccattcctttcgaagccttcttttttcaagccagctgttgctaagcttggcaggaatgcttgatctgatcttggtgcttcgactaaatcttaagatggggataccagattactactttgcggtgatcgatgagggggtctccaaaatgatcaaccgtatcaaatggatgcctcttctagtgcttagctcaaagctttgccccactggcattgaaggcacattctacgcattgctcatgtccatcgacaacattggctcgttaactggatcatgggttggtggattgctccttcatttgttgagaatcacaagaacagaattcaagaacctctgggccgcaatcttgattcggaatatgatgaggctgctaccactggcgctgctgttcttggtgccaagaagtgatccgaattccactcttcttccatccgatttgctgaatgagggagatgatgatgaagctcagcgagtagagaatgtcgagttaacttctctccctgcaaacagaaattcttgcgatggtaaatctctccatgacggagaacgggatgacgatgaagcttcacttcttgccaacaggagttgatactggattgaatatggagatttttcttttgtacacgagcaaatagataaaatttagaaaaatctttgacatttgtttactatagatactcatttagatgttcacgttgttaaattcattgaatttgcagcagggtagcgaaggcttgagagaagatactggggatgctttgagctggatttcccatataccaaaactataatggatcaaactttactaagtgtgaatcttgacttttcttatgaagttcacacatgctgctatgttacagttgtcagagtcgttgactaattgaaagattagtcaacgtccggtcaggcattgtaaacactataaaagaaag

SEQ ID NO: 28911 - DNA, 359 bp, Zea Mays
gcaatatggtacctattgaacccgaatcattttcgttgtgaaaatatgcagatcgttgaggagatatcagaggaggtagatgactccgatgactatcttcactgcacggatccacgcaaacatctttgtgaagcttgttgttaggctgcccatctggcactggcaacatagatgcttctgcagcaggggtcagacctgactgttcaatccctacagcttcagaaaaactgccaactaggataccacgagcagtttggtcgtactcctcgtgatgctgattgagcgtttcaatattgtaagtcacttgtgtactggtgcttttcatttacgtgctgcaggcaaggccttgacatagtaga

SEQ ID NO: 28912 - DNA, 1218 bp, Zea Mays
gttctggccgatgtcgatgaggtagagcgcgttccggaagccgtgggctccgacttcacgggcggcgccaacttcgccatctccggctcctccacgctgccccgcaacgtccccttcgcgctccacgtccaggtccagcagttcctgcacctgaagcagcgctcgctcgacctcgccgcccacggcgggacggctcccgtcgacgccgacggcttccggaacgcgctctacctcatcgacatcggccagaacgacctgtccgccgcattcgggagcggagcgccctacgacgacgtcgtccaccacaggatcccggctatcgtgtcagagataaaggacgctatcatgactctctactacaacggcgccaagaacttctgggtccacggcaccggccctctgggctgcttgccccagaagctcgccgcgccgaggcccgacgacagcgacctcgactacaacggctgcctcaagaccctcaacgacggcgcctacgagttcaacggtcagctgtgcgccgcctgcgacggcctcaggtcgcagctgcgcggcgccaccatcgtctacaccgacgtcttgctcgtcaagtacgacctcatcgccaaccacaccgcctacgggttcgaggagccgctcatggcgtgctgcggctacggcgggccgccctacaactacaacgccaacgtgagctgcctcggcccgggcttccgggtgtgcgaggacggcaccaagttcgtcagctgggacggcgtgcactacaccgacgccgcaaacgcccttgttgccgcgaagatcttctccggccaattctccacgccccaaatgcccttcgactacttctgccaggcatgaccatcgtacgagtacgacccagcatagctagctgagcgattcagctgttgcgagagagaatccattcgtgtaactaagaaatgtaacaagcaccgcagatcatatcatgctgaataattcgcgattgacctatttgtcacgcacgctacctgtgagactcaagcgctaacgctagctgggctttagatgaagtgctatggcctgttaagggtttgtttgcttggtggcctgttaagggtttgtcatagctttctatataagcagttgtttggttcgcggcaagggccccgattaccctgaatttggtccagaaacataatactcctcgacgtttcgacccaaagaaataaatctatgcaacttgaa

SEQ ID NO: 28913 - DNA, 1301 bp, Zea Mays
caacgctcaacagcagtgatacggtgctgcacgggtcctcatctgtatgactgtatcacatatgcatacgattctgtccgcatcaacgctcaaaggcacatgcgggctgcggcatggtgtgaggggtggggatgaagtggaggcaggaaggtggcgcgtccagcggattggccttgggcatcatggtcaggttacaacaacaattaacaaccttatccttggtcgagtatattgccatcaccatggcacaatgaacataagtgggaatagacgatattcatgcaaactgacgtttaaagagcagtctttccttgatcggaatcctcgccaggttcaaggagttgtcaacgatgctgatggaagcaaggtcgcaacattgatggggaagtgggatgaaagtatgcattatatcatcaacaatgatgcctccaagaccaactcccatggttcacatgagggttctggtgccactttgctatgggagaaaaacgagcctccagtcaatcccactcgctacaacttgtccacatttgcaataacattaaatgagttaacaccagagctcaagctgccaccaacggattcaaggctgagaccagatcaacgtcacctggagaatggggagtacgagaaggccaatgctgaaaaactgcgtctcgagacacggcagcggatggcaaggaagatgcaggagagtggctggaaaccaagatggttccaaagggacagcgaggatgggacataccgctacgtcggaggctactgggaggcaagggagcagagaacatgggttggctgcaatgacatatttggtaacttgtctagcagcccaaagctgccgccatccggtctcaacactagctcaagtatatagaggtaagggcatactgtagtcagtatgtgttgacgtcacattagtcacttatggtacataattgagaggggcttctctcgtttctgttgtgttacgtgttaagctgtgagctaacatgcttctgtcgatactaggagctgacatcgcattaatcacttgggtttagctgtgagctaacatcacttgtggtacactgaatcatttgtcacattgaagccaaggacattcaagcttaacccaagcttttgtcgatactagaaagaacacgagaaatattgccaaaactattgttaaaagaattctttatgatatcattttcttctgcattgcacaaggacgttttgcatgtttggtgcttgtgttgtttgtctcgttggtgatgctgctcaaggttgttcaagaactagagcatcaggctgggcttcat

SEQ ID NO: 28914 - DNA, 1177 bp, Zea Mays
agttctccacccgcttcttttccctcgctcgctcgtccgtcgcccgcctgcctgcctgccagtgcgcgccctctccctccctccctccctcatggcggactgcttcccgcccgagtcggacgacttccaccgccgctggctgccgcgggagatcctcgccgacattggcatcgccgaccccgaggccgtcggcgccgagaccccgcccgaggccgccgccgccgccgccgtggaggagctcgcggctcagctcgccggcatcctcggcggcggcgccaaggcgtggccgctcggcccgccgccgacgccgcctacgcccgcggctccgcccgccgccgcggcggccgttgccccgtgctacggcgcgaaggtcgggagcggcctggtgaaccacggcggcgtgctggactacccggtgctgccccctgctgctctaccctgccacgtcccgccgcccgccaacctgcgcggcggcaccggcgtgttcctgccgcgcatcgaggcgtaccgctacgcggccgctcccccggccaccgccaaaggtggggcagcgacaaagccgtgggctgggactgggagcaggccggcaacggggaagaagcaggagcggcagcaggccgagcaggcggcgccggcagcaaagcacccccagaagcagcggcagcagcagcagcaggctaccggcgcagcgctggctctgccccaggactggtgctaccgctgatgatgtgttggaggcgcgtgcgtgcatgcatggacatggacatggacatggatggacgcgatggtgcctgccaagacgatggcgaacgttcaagcaattcgtattcgtagcagacgttctttagtagtggcagtggccagggaaaaagaataacaacaacaataaataagaataaggaaacgatgatggatggatggataatgtagctgcagctgcaagataaacaaagacaagggtagcaggagtcttattatactactactatagtataagtggtcatcttcctcgggtcgtactgtcgcatgtcgctgtagcaagcctacacctacgctgatctgatccccgacttctgttgtttgctgagcgatgtactaatactgctagaggaataaatatgttatctgcagtattgtagtattgctcaaaagaaaataaagtggtattgatattata

SEQ ID NO: 28915 - DNA, 1843 bp, Zea Mays
gccagaccggtcaggagcagagcacccgaccgcctttcctcccccgcctggccgcctgccaccgcgcgccagatcccgatctcgctgcgatccatggcgtcgtcgccgcagccgccgccgccgttcgccgcgcaaaaccctaccgcgcagggctcgggccaggggccgccaggctccggggtgggggctctccccggggcgttcgccaacctccagatctcccgcggcgcggccccgccgcccggcgccccgcgggggctcacgccgcagcaggcaccgcccaccttagccgcgcgtccgggccccccaccgtccgctgcccgtcccgccttccctggcagcccgcccgcaccgccattcgtgcgggcgccgacaccgtcaacttccgcctcgccgccctttggcggacagcctggggtaatgtcccagccgccgccaccgttcggagggcctccaggtgcgtcgtctcagccgccgccgccgttcggtgtcccccccggggtggtgtcccaggccccttccctgtttggaggccctcctgcgacggcatcgcaggcgtcttcgccttttgttggtcactctgttgctgcgtctcaggcggcaccattcggtgccccccctgttgcgggttcgcatcctccacccttcggtgggcctcctggagcggggcctcagccagcaccgccattgcggcagacattcgctggccagcctgggccaatggccgcagcggcagcttggacgcagccacctccacctagctttggagccccgcaacagcctccaccaccattcggttcgcggccagctgggcagccgctctttgctacacaatcagcgcctgcggcacaacaactgccattcatggggccacccagggtaaatgccccggcgtttggacctccgtcttggcaaactcagggagctgggtctggtgcaatgcagccacctttgagaatgccaggcattcctggtagcatgcagccaaacacactaggaccccctggcaccccgactataccttattctccacatgctggaacccaggtatcaaccccgtccaaaattgatcctaatcaaattccacgtcccatgcgtgaatcatcagtcatcatttatgagacccgtcaaggtggccaagcaaccattcccccggctgcatctagtgaatttattgtgaaggacactgggaactgtagcccccgtctaatgcgctgcactgtgaatcaaataccatgtactggggatctcttgactacttcgggcatgcctttagctctgatggttcaacctttttctcttcctcacccatctgaggaacatattcagcttgtggacttcggagagatgggacccattcggtgttctcgttgcaaagcgtacataaaccctttcatgaaatttgttgaccaagggaggcatttcatctgtaacttatgtggattcagaaatgatactcctagagactacatgtgcaacttagggcctgatggtaggcgacgtgatgctgatgacaggcctgaattgtctagaggaacagttgaatttgttgctacgaaggaatttctggttcgtgatccaatgcctgctgtatacttcttccttattgatgtctctatgaatgctatacaaactggtgcaactgctgcagcttgcagtgctatttctcaggctatttcagatctgccgacggtggcgtcccgggtgtctccggagcgtcgcagggcttttgtttgggagtggatgcagctgccagagttgagatggagcagggaaaaaattggtggaggatctcaccgccatgtgtcgaaagcgggctggcctccagtggtttgaatggtgg

SEQ ID NO: 28916 - DNA, 245 bp, Zea Mays
ttctctgcatcttctctcgcatccaccgcctgctgccgcccgtgcctcgccctccccgcgtgcatctcgctcccggcaacctcggccatgcatgcctgacacgcccgccgtcggtccatgctctcgcgttgtcatgacccatggcctagggttcgccaaaccctagacgtgagctgcgacagcaggaaccgacaacttccctggtaagcttcggtggcaaggaagaagaagtagacatatttgtg

SEQ ID NO: 28917 - DNA, 1546 bp, Zea Mays
gaccagtaaaggagttgcgcgcgaaaaagttgacgcgggagtggatgcatgggatttgcatgccaaggagactgtcggggaattgggcgcctacaggtcctgcaaggagggttttgcattttcccattgtaccacctgcaaggctccatattatttgagggttcattcccacactgacaggaaatggcgaacactgaagtttcgtttctttgttactagagatatactattcatctttgctctagtccagactgtcatctctgcattggcatacttggtacattttcttgatgggtaccagcaatattggttgaggacagcctggggttttgataaccaagttagtttttattacatatgtggtgcattattattttttgctctattgggactatcaggttgcttcataacctgttatgaccgaagagtacgaaatgatttggctcagccttgtcgagaattatgtctttgttgctgtcaaccagggatgtgtgcagattgccatctacctggcacgttatgcatgtggactgactgcaccacctgcttcgaaggttgtgctaccacagctggcgagtgtggtggttgcttgggaggtgctggggaagctgggctacctctgcttctcatcatgggggttattgtgcttgggcttttcacggtcatcggcatattctacagtgtcctggtcgcgacaatggttggccagcggatctggcagcggcattatcacattcttgcaaaacgaatgctaaccaaggaaatggtggctaaagacaaggctcaagcagcacctgcaagccatgatgaagttgatcttgatgagttgatggatgaccctgaacttgagaagttgcacgcggagagaattgctgcccttaagaaagaggttgagaagcgtgaagtgctaaaaaggcaaggtcacggtgaatacagggaggtaattgaaggggacttccttggggaggttactggcagtgaaagagtcatatgtcatttctatcaccgtgaattttaccgttgcaagatcatggataagcatttgaaggcccttgctcctgtctatgtgggaacaaaattcatcaagcttgatgctgaaaatgctccattctttgtagccaaactggcaatcaaaaccttgccatgtgtaatattgttcaagaagggtattgctgttgaccggttagttgggtttcaagatctcggaagtaaagacgatttttcaacaagagcgttggaaaacattctcaagatgaaagggataatcgatgagaagaagaaagatgacgatgatgatgatgaagaaagcgagtctaagaataggaggattagatcttcaactgctcaagattctgactcggactgaacatgagatggggattgaggattcaccctttttgcactttatattttgtctgttctgtactgcaattgatttgtgcgactcatgtatctataccagataaccagaacaaaagcatgtacaagagattcttaacttatctaacttatgaacacattctctcggaaaaaagttaaaccaaac

SEQ ID NO: 28918 - DNA, 188 bp, Zea Mays
cgatagatatgggaaaaccaaaggcatcaaactcaagaagataatcagacatgtctttccggggttaggttgataaaataacgacatgatcctcaagaagaggcaaaatggaattagggatatcagcttgcaccaacggaacaagggaatggttttggaaggagacatgacttggggtctgtttggtt

SEQ ID NO: 28919 - DNA, 2041 bp, Zea Mays
gtattggcctttgattctttattggctgccctcgatacacgtggcacccgggaggcacagctgcattcaatgttgcaagtgatcgagccaaccttcaaggaagctattaaaagaaatgtgagtatagaattatctgctggaaggtatccaaagaatggagctactgacatgataagggcaaattatcacagtgaggttggaagctcaagcagtactcctagtgctacatctgacagtataacagcatattctgattcttttaaagtagagcttgggcgtaatgattttgagaagacagctatctcaaaaagggcagatatatttttaaaatggatgtggagggaattctacaatcaggaattgacatgtgccatgaaatacggcaagaaaagatgctctgaattgttgcattcgtgtaattgctgctatcagatttacctagcagaagaaaggcactgttcttcttgccataagactttcaaatccatttacaatttttctgatcatacaacacaatgcgaagagaaacagagaacagaacctttctggaacatgcaaaacactgattattctgtcccaataggaatggcatatataccatcagaagcacttcaaccattttggactgatgtgtatcgaaaatcttggagtgtgaagctgtacactaccaaatctattgctgaaatattccagcttttgactgttctggaaggtgcaataagaccagattgcctctcttctgattttgaaacaagtgagtgtctaaactcacaggttggatctgcttctgtccttccatgggttcccgacactacttcagctgttatgctccgaatgttagaccttgactcagctattttgtatgttcaaaatcaaaagatggatagagatgatggaggtttcatgaaatttccgtcaaggtatacagttgctaagagcaaacaagaaacaacacctgaaacagctggtttggatctgtatgatggaaggtggcttcctggtagtggccgtaggggtcgtggacgtggaagtagaggaggtagcaggggaggcagaggtcgaagtcgaggtggaaggatcccaagaggtgttagcagctcatcaaggatcgagttcaagggtggtattgttgcttctgataaagcgccaaggaagaatgtacgccgagggcgtggtcgtggtcgtggtcgtagacgtggacgtcgaactgtgaggcctcggcagccatctgttggcagagccagatcaattccaaaggaaaatttgttgggaagctttagcatgcttagcagctcaaaggctgctaccattgaggagtctccacgaagctctggcgcagacgagtggggcttggagaccagaacgacatacactgaatgtgatgagaacagctctggatcacagtcagaagataacgaggaaaatggccagcccatggatgatgattatgaagatcaagttccagattactcaataggctattctaccggctcgaggcaccatgtaatgatgtccatgatggaccatgatagtgacgaggaggatgaagatgctgaaggtgatgagaatgtggaagaagatgcagaccttgcagttgacgatgccgatgttgagatggacgaagatgatgaaattggtgatgatggagaggatggtggcgttggaggggagatgaatgcggatgaggatccggatgctacttcatattcatccgattacagcgactaagaaagcagaaataagggaaccttatcccagattcctccctcggcatggaatgcatgtagtaccgagtaggcattcccccccgttgtgagccaaaagggagcttagatgcttaggttcgaaggagcgaggaactgttttttaggcaccgcaggttttaatagaatttctgacgcattcgacgaagtgtttggttgtaccgtggtagttgtgttactggggaattccccgagttattatacaatgtgttaagacaaaatactgtcatatcgcatctggttgccatgcgtctaactggttcacggttttaccgtta

SEQ ID NO: 28920 - DNA, 3031 bp, Zea Mays
ttcccttccgtgcagttgcaagtgttgccacgccgcgccgcgacacaccacgcaggaggcagcgagcgcaataatgcgcacgcagaggagcacagcggcgtcactgctgcggcagtaatggccgcctggttccacttccaccacggtgtgcactagcgctacaccgaggccaccttttcttggttccttcaacacgcctactccggcctccggatcgggcaccacgtctgccccctgctcccggaatctttgccaagcggcgccgctactgtccggcaaggcgaccccgtctctcggccggcgttgatctggtgatgcgcttttcacggtgttttttttttttgtttcactcccccctccgtcctgtgtgattgtgctgcagttttgtgccggtgctaacggaaaccggaaagtttgcgtctttatgttactgtggttgaggcgggcggagtggcggcgcgatgggcatctcggcgaggtggctcaagtcgttagttgggttgaggaaggtggggcggcagcagcagcagcggcgaaaggatgatgcagatgttggtcgaatgaatcatttttcatacccgagtcaatccacaccaccaaaagaatgaactatttaatcaggcttcttgatcatatcctgggaaggtctgtactgatcaatgttagttatccatccttgactgaatcgggattgcagtcggtaattccttgtgcactggttgaattaattttaatttttttttactgaggagagcatattgttgagtaatttgttacctgctttgttcaaagcttacttaagtacttgacttcattggcacttcttgaactatgagaacaaaaaatcttggtggttatgcaatcacaagagctttaaattaactgatggatatgtatagcttagtatggccaaaccttgccttctgatatacacatggagaacatatttttgtgccacttccctcagactcagaatatacattgttttgcttacgagttgccaactggagaaactgcagaaaaccgatgtcgccgaccagtttcattttcagattcagcactctcaagatgacaatagcattgctgcacaagaaattccagaggtttcttatggaaatgatccacctgaagatgattctaatgtaccttcatgcttcgagcctgctcgtagttcagctcatatgccattttgtcaaactgaagaagcccagaaagagatctgggctgctacaattattcagacagcatttagagctttcctggcaaggagagcccgccgagctttaaaagggttggttaggcttcaagcccttgtaagaggtcatatagtaagaaagcgagcagctacgacactccgttgtatgcaagctttggtcagggttcaggcccgtgttagagcaaggcgagttcgcatggctttggaaaaccagactgatcggcaaaatacttcaccagagcacacgatcgaggcacgtgtcagagaaatcgaggatggctggtgtgatagtatcggttctgtgggagatatccaagcaaaacttctaaagaggcaggaagcggcagctaaacgtgagcgagccatggcctatgctctagctcatcagtggcaggcaagttcaagacaacctacagcatttgaacctgacaagaacagctggggctggaattggctagagagatggatggctgttcggccttgggagagtcggttccttggcacttacgggacagatgggatttttgtagttaatgaaaccagacaacctgacagaagtgcaaccaagaccccatacagaaaacctgttaaaaagcatgattcaacccttcaatcaaacatgttgaaccagaaggtcttcccatcaaactcagagggtggtggctcctcgacaaatcgatcaagtggtttggtatcaactaaatctagactgaaggttttacccagagaaggttctgaggaagcctcatctcatccttcagtaattgtgcggtccactagtaatccgaaggagaggatttccagtattaattcaaaggagaggactggggacttggattttcaagttcataaaagatcctccttgcctggcattggtccagaagctggcaaacacctgacaaagaaaggcatggttaaccgatccctgaaggccacaaaagattcccaaatactggggtcaaggcatcatcttgccagttccattgatccagttcccaccagagttgaactggagacttgagaaggcatgttatgctcgaacatcgccatggattgcacctagcagcttggatgccgttcatgcctcaatggctgcatgaatgtgtcgcaacatctatgttatactggtggtggcggttttcgagtttcgacaccatatatgtaggctcatttcatgagataaaatcagatgcatgtgagcatgtccatatatgttaagaggattaccattggttttattgttgtatttgtaagttgccgttaggaggtgtaaatttgtgtcgtcgagtggtacttattatgtgttgtcgtatagttgtgactcgaaggttaaaggtggttttggttctactgcgaagtgtgaactgtagtgagctgtgttctgtaaaaaaataaagttgttgtgatttgtctactgtaaaaaaaatggaagtaacttggttcaagctgccgtgaaaatgtagattttatatgattttttttttttttttgcaatgctcctgagagtctgatagattttttatatgcaaaacgatactaacacaacattttttgagatgactaacgtaatttccattgctataatattccatacatacagataattaaaatatatagacgttcatagttcatctcaaagtttgccaattacaaagctatctcatgtagctctcgcactagttaatattgtagctatcctgtgaatggtcttcatggtcttgttctctccttccatctcgtcgtacctttgttttgtgtaactgcatttgatgttctaggcatgtattcacctctcaaactgtctctcaagttgct

SEQ ID NO: 28921 - DNA, 1866 bp, Zea Mays
cgaagtttgtcactgtcccgttcgtcgtgtcccaaagtccaaaacccaacccacaatggccgccacctcgccggccccggcgccgccgcgcatcctcctcgccggggatgcccacggccgactccaccagctcttcaagcgcgtcaaatcggtgaaccagtcaacggggccgttccacgcgctgctctgcgtggggcagtttttctcccccgagggtgctgcagagggctcaccggaggacgtcaccgactacctcgaggggcgcgcttccgtgcccatcccgacctacttcaccggcgactacggcccagccgcgccgcgattgctatcgaaggccgccgctggtgctcgcgggttcgcacccggtggcatcgagatatgccccaacgtcttctggcttaggggaagcaaccgcttcaccctccacggtttgtcggtggtttatttgtcagggaggaaagggttaggagggcctggctgttacagccaggatgatgtggatgccctacgggctcttgcagaagagccagggattgacgatctgttcttgacatatccttttttcccttatactgtttctttcactgcttgctaatattaatattgagttgctttgtgttagcatctattctggatgcatcaaatttaggttcccttgacagtaacgagattgcactaatgaatggccgactggagtggtcagtgggtctgacacttccaatgtgcctaatcaggttttggatcccaatgggtatgatcctattgttgctgaattggttgctgagattaaaccaagatatcacattgctggcacaaaaggtgtcttttactcaagggaaccatatgtcaatgattctgctgctcatgttacccgctttattggacttgctaatgttggaaacaaagagaagcagcatctgtcatgtccagtgctgatatcaatgccaagcctccaaacgccactttgtcaccatatgttggttcagcaaaatcagttcctatcgaagaagctccaaaacgtgcagcggagaacatagattcacaatattggcgttatgatgtcaagcggcaaaggcatggggaagctggtgggggtggattgtgtttcaaatttgtatcctcaggatcctgtcaaagagggagtagatgcagttataggcatgatgaagaggcagtggagcattaccagagaaatgtctgttttgattttctaaacaaaggaaaatgtgagaggggcccagaatgcaagtttgttcacagtctttctggggagactgctctaagggatgcaagacctcctagtgaaagaagacgagtggagagcagttgctggttctgcttgtcgagtccagatgtcgagtcacatcttgtcattagcatcggtgaaggttactactgcacacttgcaaaggggccacttgttccaaatcacgttctaatgattcccgtggaacactgccccagtacattgatgatgcctccggaagcagaggcagaacttgggagatataagattgctctgagtaagtactttgagaagcaaggaaaaactgcagtctactttgagtgggtttcaccacgctctcaccatgcaaacctgcaggctgttcctgtaccattgtctaaagcagacgctgttaacaagatatttcatctagcagccaaaaaactgggatttgaattctctatggtgaatccagatggtgcaaaaactgctagagaatcattgatgtctcaatgcgaaagcaaatcagggctgttttatgttgagctcccggaaggtagaattctcttgcacatggtcgacagtaacgagaagttccctgttcagtttggacgcgagctggctgtccttcattttcatgg

SEQ ID NO: 28922 - DNA, 2370 bp, Zea Mays
caagggaaaaaaatcatgaatgaaaccacagctcttgatgcgaggagaagaaaaaagaagaaccagagacacccaggtatcgtgatcgtgctaaggagcggcgtgaagatcaaaaccctgattatgaacctacagaacttggttcgtttcatgcagtggcacctcctgggagtgatttgaggttggcggatgcccacaagatttcaattgagaaaagcaaatatcttggagatgcgccaacagagagaaaccctaggaaaacatgtcatgcactttcttgctggttatatttccatgttttcaggacagggtccttttcagacagggataacacggattatattgcttggaacaatgttactattctttctcacctgctattgctagcgcaagcagttcctcacctcactgtgcattacctatcaaactggagcatgggcaaggccacaaggcaacacttggccattggctaccaaactgacttgatcatggaatatgcagaaatcccctgttgatgagcaactggtggtcctattgtactgcttatttataggtgatttggagcatacacatctggtcaagggcctgggctatgctctacttcacaaagtacggagtgaaattgaaaagaaacctgaggcagaggatgggaaggatgcaaagtcaagggcaacaaaagaagatcaggcagtctccttccgcactgcaactgcaaagtctgtctaccagtggatcataaagcctcaaagcataattaaagagaatgaattgtttcttcctggtcggatgtcatttatttacaacttggaggaggtagtaaccaatgacattccaacaactcttcataggagcaaagctgattgcccagttcaagaggagatggtaactgtaagtgtggatggttctgtacttgacaggattgctaaaattatgacgtaccttcggcttggatcatcagggaaggttttgaagaaaaagaaaaaggagagagatataaaagggaagaacaatttggcaagtggcgactgtgatgagtcagtaaaaccttccaaaattaatggttctactcagaaacatcaatcagatatgccaccaccaccagctcgaccccctcagaacaataatttcactggaaaggagaaacaaccagtccctgttgcaagagcagacgatgatgacatttttgttggagatggagttgactatacagttcctaacgaggaaatgagtcagagccctgtttctgatatggatgaatccccacataaccatcagaagcagtccaatttcattgaacccatgtatggccctgtaccaccatctgaacctgctcaagcttggcaacagccgaatgggtatgatgctgttcaagcccagatggcagctgctggatatcaaggtgactggtcaagctatgtgtatgcagaacagcagttgggttatccagagcagtacgtgcagcaaagcacacaggaatatgatgtgttagctgaccccagtatatcacaggatccgaggttcatgactcaggcagacaaggatcggggtttaggttctgttttcaaacgtgacgatcaaaggcttaatcagctgagggaaaaggacgaacgggagagagatccaaattttatttcagatagttactcagagtgttatcctggttaccaggagtataataatgagatcgcaggaagcgatgatgaagatgatttatcgaagatggatatgggtggacgggcgaagggccgtcttcacaggtgggacttcgagactgaagaggagtgggccaagtacaacgatcagaaagaagccatgccgaaggctgccttccagttcggggtgaagatgcaggacggcaggaaaaccaggaagcagaacaaggaccagaagctgacgaatgacctccacaagatcaacaagattctggctaggaagaagggcgagaaagatggggcggaagatggcggtcactacgatgatgatttacctagctcaaagaaacagcgtggctgaagcagtcatttttttgtttttgtttctcctgctcgtactgtaggcaggcgaacattctatgaagagtcacagtgtcatgtttagctggcagctgtatcctgctgcgtttgtttaaggtgtcctggtaggaaatatgttgatgctattgagccgaaaccatggaaggaatgtggctatatatatatatatatatatatatatatatatatatatatatatatatatatattcttagaaagaaaagccagatctttatgttacaattacagtgatgaacctgcaagtatttaatttgtcatattgggaggcttttgcaatgtggttagagctgagaatatccaagagtgtggctcagtg

SEQ ID NO: 28923 - DNA, 1410 bp, Zea Mays
cactgatccaccgaaagcacaaccgccgccgtttcttcatctcccatcttcgtcgtcttcgcagcaccggcgctccattttccgctctcggcacgcaggcgacggcggcggcgctcaggcttgggatctcaacgacggagtcagcggtttcccctccccctctcgccagccgcctcgcgccttcgcctccggtcctccgcacaccggctggtgaccctgcgtgcgtgcctctctctctcctcccgccttcggtggatcgtcaacgccgccaggccccggcatctgagccgcgcgcggcctgagggcagcgagagccagcagatgctgctccaccaaggtggtcgcgcatgcccaaagcgaagcgttacccgtcctcttagcgctgaagcgtgcgcttagtgccggcttttggaaccctgtatcataccgaattgcgcattatagaaattggctaggactacactgggtttgccattggccatgacgtgtgctgcttacagtatcagaggtcctctcatgcttgctgcaaggcgcagctcggatgtgttcgctagtagcaagtcgtgcaatggcaagtcttcggtgtcttaccccgttattcagtggtggagcagtaactgctcatccttcacaatgcggcatgtcgcctcccatcatcacttgattgttaaggcttcagcaacgtggcactcaaaagcttcagcaactgatgcagccactgcttccggcagggagcatgctctttgttatgccttgaaccgttccccatcatgtgctgcagttctatgtgcccctggtaatgctggtattgctcagtccggggatgcaacatgtatttcagatttggacatctccagtagcgatgatgttatctcgttctgccgcaagagggaagtgggaatggttgtagtgggtcctgaagcccctcttgtcgcgggtcttgtgaatgaccttgtcaaagttgggataccaacctttggcccttcatcagaggctgcagcattagaaggatcaaaggacttcatgaagaagttgtgtgataagtacaacatccctacagccaagtatcgcacattcacggacgctgtggaagctaaaaaatatgttaaaaatgaaggagcccctatcgttgttaaagctgatggactggctgctggaaagggtgtggttgtcgcaatgactttggatgaggcgttcgaagccatagattctatgttggttgaaggctcattcggttctgctggttcactggttatcatcgaagaatttctagagggtgaagaagcctctttctttgcattggtagatggcacaaatgctttacctcttgaatcagcacaggatcacaaaagagttggtgatggtgatgttggcccaaataccggtggtatgggtgcatactcccctgct

SEQ ID NO: 28924 - DNA, 1900 bp, Zea Mays
gaaaaaacagatcaaatcgacgcgacgacgagataaagaagagaacccaccaaatcaaaggcggacacatcgccacatcctccattccgccttctcggctcctccccacctggccaccactaccacctcccgtctcctcgcctccttccaaatccaccggttgccatccgtccgacgaggacggaaagggaccggcgtgagggaaacctagatgacccgttcctgggtcgggaccagagagccttccgggctgcgccttcgatcgccgccccgccgcctagggttcccgcgcctgtagatcgggtttgggggacgaggaaggggagtgccaagtaagggaacgatggggccgaggcgctccaagcgcgtttcgtgggccaccggggccaatctctgcaagctggcccaagctcagatgattcgctgccacctggcttcgaatcattgcagccaacaagctgtctcaaaattgacatatcccaaatccatgttattaggtggagatgcccaccaaaggtattgcataatcctgtttggcttgtagctgctggagaagaaagtgaggaggttgccttgcagaatgatagaatatttggagcacttgaggctatatatccacggccgtcgaatatacccccaaacccatttgttactcctgatgtgaaagactcccaatatgatgattcccgaacccagttggttccgttgctcccagttgaagaggatgatgcctctgaccagttggaagaaccacctgttggtctatcaagtagttaccagcagtcagataagtacgactcagcaacattcagggtcccacaagcctcagacgctccctttaccactgcgcagcagcagcagccgaatggttccatcaacaccacaaggtctggtgcccccgttgagcctgacacagtggctgctgcatctgctgcttacactgcaataattcagagcaaccgaatgggaaatatgattgacaaagatctgctcgtcgaaatgctaagtgaccctgcccaacttgagaggttaatgaaagaatatggcgcgcttaagcacgaacagtcaactaacagttctgttgccccaatggtgcaaggtccaccaccccagatgacagctagtgttccggtctccttcccagatcacaccactacttttcacaacataaactctacactgccgcctccacctgttctgaatcgtctgcctcctccagctattccttcagcagttaccatcaatccaccagcaagttcaagtcaagcaattagctttccaactggccgaaccagcggcttgaactattaccagaccctgatccatcagcatggaggggagaggcaggagccacagccacttcaacagcatggaatgcactttccaatgcatcatcgcactgtcgcttcccagtctagcgccactgatattgtcagcagtggtactatgccagctagggatactaagcaaaggcctacgaggccttgtgcttacttcaacagcgccagaggatgccgcaatggtgcgaactgcacctttctgcacgatgtgtctgccgcgaggaaagaacagccaaagggatccaaaagaattaagctagacagtagaatagctggtcggtattgaggaggctgctgccggttgattttttactgttctttggttcaaaatccttttcctcctttttcccttcaaaaaattattcagtaaatattgcgccccagctcctttgctttctcttagccaatttctatttgtttactagaagaacatgctcttagcccatttctctttgttgactaaaagaaaatgttttagaagaaagaaaaaaaatcccatgattaaatggagctctgtcgttattgaaccagttgaacacatgttaattggtggcagttat

SEQ ID NO: 28925 - DNA, 2315 bp, Zea Mays
gtgagtgtcagacatccccttccccgtttcaatcgcgaccacgcgctcgcagccgcaatcgactcgacccggcccgaccgagctccccgtgcccaacaaaccctcacaattaccagttccccatcgccgacgccgtacaccggagctcgaccgctccgcgtggtgtccgattctacttcgtcgaagactacaagcggcctcctagagttccacctcaactgcgcaggggaagggaggctcccaacgcatccccgccgacctcaacgccgacggtcctttcctaacccgcagccgccggccgcagtctctctcttctggtccagtgggggctgctatcttccaggaatattggagatgtgccttcaacactctagggctcgattgtctccagatgagcaacttgctgcagaaaaaagttttgccttgtattgcaagccagttgaattgtacaatattatccagaggcgagctattaaaaatccaccttttgttcaaagatcccttctttataagatacaggcaaggagaaaaaagaggattcagataactgtatcactttctgcaagtacaaatacacaagcacagaatatctttcccctttatgtacttttagctagacctaccagtaatatttcgcttgaggggcattctccgatatatcgattcagtagggcttgtttgcttacaaattttagtgaatttggaaataaagacaaaactgaagccacattcatcatccctgatgtgaagaatttatcaacctcccgtgcttgcaaccttaacattatatttattagccgtgggcaagtaggacaaattattggtgaagatagctgttccgggaatgatgtggaaggatcttccctccaaaagcttgaagggaaatgttcctggggtaaaatgccgactaatttacttgcgccctctttggagaaatgtgtgactttaagtacaggaaatgctgtggatttgacttctacagttacaatgaacccaagcttcttagagttactgaagatttttcctgcccattttgcttggtaccatgtggaagcttcaagggcctaggatgccacttaaattcatcacatgacctgttccactatgagttgtggatatctgaagagtgccaggctgtgaatgttagtctgaaggctgatgcctggaaaactgagtttgtggcagagggagttgatccaaggcatcaaacattttcctactgctcgaggtttaagaagcgtagaaggttggaaaccacagctgagaaattcaggcatgttcacccacatattatggaatcaggatcacatgaagatgcccaggcagggtctgaagatgactatgtgcaaagggaaaatgggctttctgtagcaaatacttcagttgaccctagtcagcctgtacatgggagcaatctttcaccaccaacagtgctacagtttggaaagtcaagaaaactatctgccgagcgatctgaccccagaaaccgacaactgttgcaaaagcgtcagttcttccattcacacagggcacagccaatgccattggaacaagtcctctcagatcatgatagcgaagacgaggttgatgatgacattgccgactttgaggatagacggatgctcgacgattttgttgatgttacaaaagatgagaagcttattatgcatatgtggaattcatttgttcgaaagcaaagggtgctagccgatggtcatataccgtgggcatgcgaggcgttctccagatgccatggacaacagcttgtacaaaaccctgccctgctgtggggctggcgtttcttcatgattaaactctggaaccacagccttcttgacgcccgcgccatgaatgcttgcaacacaatccttcaaggctaccaagacggaagtgcggaccccaagtaaatctacaatccagagaaatcgttggccagcgtgtgtaagatctgccggttccggcggttatttctgaaccccaaaacagctatgtgaagaactggaatggggccatagcggcatttgttttaaggtttagggttactccatttttccaagggaggaaactaatttcccttggaaaaatgaaaatccattgggaaaaatgagtttcccaaactagccattaaaagggtagcttcctcccacctagggggaaaaaaactaggagggaaaagctggatccttggccgagacaatcatcattgcttcattcgtgattcggttgtatttatcggtaccagttgttgttggcatgtggagtttgtatggatgataatgataaatgaagtgattcactgcagcccttgtatagtt

SEQ ID NO: 28926 - DNA, 3027 bp, Zea Mays
cgcaacaaaattcgcatcggcatcgcaatctcgctcgcagggaggagagggggagcctctaaccctaaccctacctgcctctgtcgcaatcgccatggccgccggcggagagccctcccccctgtcccctgccaaatactctcgcttgcccgacgacgcccagcccgacgcatccccgaagcgccgcaagcgccaccaccgccaccaccaccaccaccaccaccgtcgacaccgtcacgccgattccccgatacccgaggcggccgacgaagaggtagaggagggggagatactcgacgatgcttcctccgtctctgctatggaggtcaatgccgagtccgccgccccacagtcttcccttgctccggagcactttggtaatggtgctgatattaacacagatgcaaccaagatgcaagctcctgctccgcctacccttccatcctcaaaagatagaaggaggtcacttcacggtgcccctgagtctgaaagcggaggtatcctatcaagtgatgctgaggataacaaagggcatggacggaggcaaagtcaaagttgttcaaaatctccaaagcccagaagggagaaggaaaggaggcacaaagatgggcatcactcttcatcttcaaaagatcattatcccaaaaatcgctctagagcatctccatactcaaggcatcagagtgaagctcattcaagagatcacttgagatctggagaaagaggtgatgatactaatggttctgatcgtgagagcaatgatcagaatgggaagtctggcagacatacgactgggacccaggagaatgaaagagaaaggagcagcagccatggtattcatgatagacatggtgataggcataatgacagacatggcagccaggaaaggtacagagacgataggacatatagagacaaaattgattcgctagaagctacttggaagcacagagaaagaagcaggagtcatagtagatcggatctaagggaaagtacacgtcttcgtgatcaaagccgggagagtgaaagacggattggtagttcaatgcatagggatcatggcagcaagagggatacaagtaaacatagagaatctgacagggttaacagtgcatatgaaagggagagagggagagatgctggggacagggaatggcacagggtcaagggaagcgaaactcatagagctaaggaaggacgggacaaagttagcgatagtgataggtacagggattcaacacgctcgaaatatagtgtgtctgatggctacaaagagagaacaagatctggggagaaaggtagagatgttgaccgtaaaaaccgaaagtttgaagaaatgaaggaaaattatctcaaggaggaagatgaagagaagtaccaagagaaaatagaacagcagttagcaatgcaggaggaagaggaccctgaaaaaatcaaagaggaagcaaggaggaggaaagaagctatcatggcgaagtacaggcagcagcaatcacagaagcaggatatggaagctaaaccaagcagcaatgatgaagaagtaagagctatggatggaaatgtaactatgcatcagaaagatgataacggtagcagttccacgggcaatgacaaagctgaaaataagcatgattcttcagaggtatttgatggcaaaaccgacttttctgtgggaaagtctcctgctcaaaatgatacttcaactagcacgggagcattcactgatgagaggacaatagatgtttcaggtcttggagagggttctcccaagagtgagagatcagcagacatgttttgtgatgacattttcggagaatcacctgcgggagttagaaaatcgggcaagggtgatggtttgcatgttgagagaaatgctcttcatgacaactgggatgatgcagatgggtactacacttaccggttcggagaattgctggatggccattacgaaatcatagcagcacatgggaagggtgtgttctcaaaagtcgtgcgggcaaaagatcttaaagcgagtaaagatgatcctgaagaagttgctatcaaaattattcgcaacaaggagacaatgtacaaggctggtaagcaagaggtttcaatactggaaaaacttgcaagtgtggaccgtgaggacaaacgccactgcgtgcggtttatttctagtttcatcttttcatcgccctgaagcacctgaagaactgcaaagttttgcactgtgatattaaacctgacaatatgctggtgaatgaggctaagaatgtgctcaagctatgtgattttgggaatgctatgcttgctggtatgaatgaagttacgccttatcttgttagccgtttctatcgggcacctgagatcattcttgggttagcctatgatcatcctttagacatgtggtcagttggctgctgtctatatgagctttataccggtaaagtcttatttcctggtccatcaaacaatgccatgcttcggcttcatatggaattgaagggtccattccctaagaagatgcttcgaaagggtgcctttactatgcaacactttgatcaagatctcaattttcatgctaccgaggaggatcctgtgacaaaaacggctgtgagaaggttaattttgaacattaaaccaaaggatgtcggttttttgattttgaactctcctggcgaggatccaaaaatgctatccagttttaaagatcttcttgataaaatgtttatattagatccagaaaagaggataaccgtatcacaagcacttagccatccatttatcactgctctgagaacaaatacatggatgaagcacggaactatcgaagagatggctatctgcagaccttgttgcatgcacttatcatttggatatgttctgttgcttgattctgccagggcctctgctgtgtgtacactttatatgcttaagcgccaacatttgaaggttgagagatggcatctatattgaattttataccattcatatgtcctgatcgttcggtcccattagcatatgtacaatattgaatctatt

SEQ ID NO: 28927 - DNA, 1499 bp, Zea Mays
atgacgacgctagatgatgtgatatatgaggccttggagttgagggatggaggatctgattatcttggcaagggtgttcttaaggctgtgaacaatgtaaatagcattattggaccagcaattgttggaaagcttgatggaacctccaacgaatggggctggtgcaaacagaagcttggagcaaatgccattcttgcggtctcacttgctgtgtgcaaagctggagctatggtgcagaagattcctctttaccagcacattgcaaatcttgctggaaacaaaactctggtgctccctgtacctgcctttaatgtgattaatggaggatcacatgctggaaacaagcttgccatgcaggagttcatgatcctcccaactggtgcctcattcaaggaggccatgaagatgggagttgaggtgtaccaccatctgaagagcataatcaagaagaactgaagaagtatggtcaagatgctacaaatgttggggatgaaggtggttttgcacctaacattcaggaaaacaaaaaaggccttgaactactgaaggcggctatagaaaaggctggctacactgggaaggtgttcattggaatggatgttgctgcttctgaattcttcagtgagaaggacaagacttatgatcttaatttcaaggaggagaacaacgatggttcgaacaaaatatcaggtgacagcctgaaagatctgtacaagtccttcgtttctgagtaccctattgtgtcgatcgaagacccatttgatcaggatgactggaccacttacgccaaactcactggtgagattggacagcaagtgcagattgtaggagacgatcttctcgttactaatcccacaagggtcgccaaggccatcaatgagaagacctgcaacgctcttctcttgaaggtgaaccaaatcggctctgtgaccgagagtatcgaggctgtcagaatgtccaagcgtgctggatggggagtgatggcaagccacaggagtggcgagacagaggacaccttcatttctgacctctcagttggcctggctacgggccaaatcaagacaggagctccctgccggtctgagcgcctggccaaatacaaccagctgcgcttaggatcgaggaagagctcggtgttgccgcagtccacgccggagcgaagttcagagcaccagtggagccctactgaaccacgtgtgcctagagcctggagaaagaagatgaggatgtttccccactagttcgctgctgctttttgatagaatgcctgtacgatcacagtaatagaagtttggccttgtttgccgaatagctacactagtgggtttttttttctcgtggaaaaaaagaaagaaataaaacctttttttattctgaggagtgacgactgacgagtggtggtccgcactcgtggtaatatcgttgcccaaaatgattttgatggaacgggaaaatgttgctggtctttgccatatatgagtaggggatccaaatgtttc

SEQ ID NO: 28928 - DNA, 3144 bp, Zea Mays
gcggccgcgggctgtttccatctcaagcaagcaaccacccatagcattcctatcactgtgcttggttgcgcatggattaccaaggggacaatcttagagatttctttcaaactaatgggcgtaaggtgcttcagagagcggaaaacaactatagcttgaaatattttacagaaaatgagatacgaaacataactgatgggtataagtctgttctgggaagaggggcatttggtgaggtctacaaaggaacgctagaagaccaatcctcagttgcagtaaagagatatatacatgggacccacaaagaggtgtttgccaaggaagtcatagtgcactctcaaataaaccacaagaatgttgtcagactcttgggctgctgcacagaagaaaatgctctaatgattgtcatggagtttatctccaatgggaacctcgacagcatacttcatggcaacagaggtaatggtcgggttcccttccctctgaagaaaaggatagaaattgccattgaggttgctgaagtattatggtgcatgcattcgatgtatagtcctgttcttcatggtgacatcaaacctgctaacatactgctagatgaaaattttcagccaaagatatcagattttggaattgcaagactgctttctgctaatggcccccagcaagctaccactgtcattggttccataggctaccttgatccagcatactgtgagagtggaattctaaccccaaagagcgatgtttacagctttggagtggttttgctggaaattatcacaaggaataaagcagtggatggcaccgttacccttgctcaaagttttaatgaggctcttacaaaaggggaggatgtgcagcacatgtttgatgaggaaatcagtgttgcagaaaacaagaagtttcttcgacgcattggacagttagcagctaaatgcttgcagagggacgtcaaaacgcgtcctgaaatggttgaagttgctaatagtctaaggatgatcaggaaagctatgcagagagaccaggatgaggatgtactgttagcagcataccaatttggagatctaaaaattttcaatgaaactgaaatgaaggaaatgacaaaaaactacagcatggcctttaggaaatcgatgtgtgaatgtctctacaatggagtcatcggcatgaatcgtccaattatagtaagactacttgagacaagttcagaaactggcagagagatatttctgaacactatgagcatattgagtcaaaagaaccacaaaaatgttgtgaatattgttggcttccacatagggaagtccagtttagagtgtgtatatgagtcttgctgtgatctatccaagacaatgcttggctctatatcactatctaacagaaacctttatgacactatctgttccatgaaaaaacttcatcttcaacaacgcctgtcaatagcagtccagtgtgcagagggtctggttcatatccattcattagcagctgaaagtcctgaatcatgtggcaccagcctcttaggaaacttcagatctgccaacatatttttggacgagaactttgtaccaaaaatcttcaatgtgaacttgtcaacatttcttggactttcaggtgcacaaaaacatacagtgttttcaattcattacaatggaccagaaaagtattattcagacccaagggatgtttctggtcaacttcttaacaaaaaatctgatgtatatagctttggagttgttcttttagagctcatcacttggaagactgtgagatacatgtacaatcttagggctcgtgtgcttaccacagacttccttgattcttataggagagaccgtgatgcaattgggatgttcggcaaggtttgtgatgaacatgaagggtactttgttcatgaggccctttccattgccatcgattgcttacaacttgatattcaaatgaggccagaaatggaacatgtacttttccgtctccggatcattgttgctagaagcaaacttgctgctggtagtaacaataaacctagccaacatattggtcgggcccttgttaacaacattgataaacttcacccaactctcatatcaaccatttccatggaggaactgaatgaagcaaccgggaacttcagtaatgatgttcttataggacagggaccatacgccgaatgtttcctgggagttcttaaagatgggcagaatcttgctgtaaaaaggctacgtacttctgaagaaattcaagtagaggttccgaccattttaagaatgtgttaccatgacaatgttgtgcaatttctaggatgttttcttgaagggggaactcgtgttcttgcttatgagtacgccccaaggggctccttgcatgatattcttcatggtaaaatgggcatcaagggagcccgaccagggccacctctatcgtggttgcagcgtgtgaagattgccgtaagtgctgcaaaaggcatcgagttcctccatgagaaggtgacattggtgtttcaatacatgatgcccatcgccgggttcataattgggccgagtactattctgtcagggaacatctagcacctgagttcgcattcagaagaaggtatagcacaaagagcgatgtctacagcttcgggcttgtactgttggagcttttaactggccgctcagtttttcatgttgcgacacaatgtggcccgaggagcgcagttagatgggctaaaccaatgcttagtcaagacaaggtggaacagtgcatagatccaaggcttggaggagggtacctactaaacgatgtcagaaagatggcttctgttgctgcactgtgtttacaagacgagccagagttccggcctgaaatgagcatcgtcgtcgaggctctgagcctgttactgaacagcaagtgaacaagtaaccgtccctgcattggtgaagcacgtggaatgtgatttccttgcatgtcattgcgagctcaagatcacgggtttcgtgaaggcgattggcccccaacagaaagttatgattactgcattcatctaggcttggaacttgtgctttctttgtctgtgcacatgtaatactcaaaattctaaataaagaatatagagagatcttctcattttatgtgccttatttgcatcataaaaagagcaca

SEQ ID NO: 28929 - DNA, 1482 bp, Zea Mays
aaaggtgagaattttacctttttagccaccggggaccgagctggaatgctaatttatcaaatcaaacgatgaaaagttgaaaacgtccagaagaggaaaggtattttccaattatttcattttccacctagacaattccagtaccgcttctgcccccagcaggtgccagcgccatcgccgttcgcctcctctccacactccgccagatcccatccctctcgcccacgcgcgggtatcggagtcggagcatggcgtctgcagtggtggtggacgccggcgacgcgccggagcccacggttcgtaacctcctggaccaggagtccctcaagtgggtcttcgtcggcgggaagggcggcgtcggcaagactacctgcagctccatcctctccgtcctcctcgccggggtccgctcgtccgtgctcgtcatctccaccgaccccgcgcacaacctcagcgacgccttccagcagcgcttcaccaagttccccactctcgtccgcggattcaccaacctctacgccatggaaattgacccaaaggtagaaaatgatgatttatccaatgaaggaatggaaggattcctgtcagaactgacaaatgcgattccaggagtagatgaagctatgagttttgctgaaatgctaaaattagtccaaacaatggattactctgttgtagtttttgatactgctcctacagggcatacattacggttgcttcagttcccagcaaccctagagaagggtcttgagaaaatgatggagttgaaaaatagatttggcggtctgttgaatcaggccagtcgattgtttggtcttggtgatgagctgaacgaggatgcaatgcttgggaaacttgagggtatgaaggatgtgatcgaacaagtgaacaggcaatttaaagatccagacttgacaacttttgtatgtgtttgtatcccggaatttctttcattgtatgaaacagaaagattggtgcaagagttagcgaagtttgagattgattcacacaatattattattaatcaagttatatttgatgaggaagctgtcgagtcaaaactgctaaaagcacggatgaaaatgcaacaaaaatacattgatcagttccatatgttatacgatgacttcaacatcaccaagcttcccttgctttcagaagagcacttccttacaccatacaagtctactcttaaaaggggcaccgtcgaggagctcgaacagagaataactatattaaaatctgcactgcaagaagctgagacagagttagatagggttaggaaagggaagcagtcagtgtgattttttttccacaggtcaagtgtgtaaaaccagagagacgatcaattttttcgtgtcattacactcttgttgatttcactatcatgtttcctcatcgaggagtttagacttgtaatagctatcggcagagaagtgtttgattcacacaagatatatagatccattctttttgccggtt

SEQ ID NO: 28930 - DNA, 6272 bp, Zea Mays
atgcagcccagcgggggggcctccggcagctcccggggctcgccggcgtcgtcgccgcacccggaccaccagcagccgccgaccccggcgtccgcgcagcagcaagcgcagcaactagggtttaggggccagggaatgatgcatcaccatgaacagcagcaagccttccactctggtgcgccgcatggcatgatgggaccaggcggcgtgaacttccctcagtcctccggtccagtgtcgtccttccagggtcagaggaatctgccgctgtccagtggtggaccgcagggcatggttggaggtcagatgcacaaccaggttgcgatgcagcaacagttcctgaagcttgcgatgcagcagcagcagcagcagcagaaggcggcccaggggatgctcctccagcagcaggccaagatgaatatggcgggttcatcatcaagagaccaggacatgcttaacaaccctgccaagatgcaggagcttatggctcttcatcaggcccagatgtataagcggcagtgtgagcagaaagagcaggggcagtcaagtggtagtgagcaaagaagcggtgatatgaggccacctatgcctcctcaaggagtccctggacagcagttgccatcaatgggtatgatcaggcccatgcagccaatacaaggccaggtaggaatgggcagcgctggtgggaacccgataacaccaacacagtttcaagccatccaagcctgggcaaaagagcacaactttgatctgtccaatcctgcaaacataagtgcaatttctcaactcctgcccatctggcagtccaacaggatggcagccatgcagaagcagaacgaggcaaacatggctgcgcagcagcagcaagcattgccctctcaggtgaacagtgataccccagggcatgtcaatgctcccagccagggtgccctactgaagccccggcaaccccttgcccccagctcaatttctggcggggaagaggctaaggtagtgaattcgagcaacttgcagttgcaacaacagttccctgtgcataacagggatggttcaaatgaaagggctgtgaggtcacttatgacagggggcaatggtgcgcaaacgacgcatatcccccaaagttctggacatgtaaataagattcccgagcaacccaatccaaaaaatgtgcttgcaaattccgaagcaatgcagatgcagcatgtgagacagatgcaacagcttaaccaggctgctgcccccacatctaccccaattgaagcaggaggatcacaggtcccaactagtgctcagccacaaacagggcaaacgggtttcaccaaaaatcaacttcatgtactcaaagctcagatattagctttccggcgtttaaagcgtggtgaccgactcccgcctgaagttcttgaattaattgtatctggtcggccacctgattcacaaggacagcagcaagtttcgggaccccaggtaacacataaccgtgaaagacctactgtaagcaatgctgatgaacatggaaagcagatggagagtggtggtaaagctcctgaaaaacctgcattgttgaaaggaccctgtttaccaaaggtggaggtttctacttcagaagacaaagctagtcctgccagtggtcctggtcccgcgcaagtgatgaaagcttcaccaaaagagcctcttaaaattggaccagtgtctgtaccagaacattgtaacactactgtgattaaatctgagcaggatctggaacggaacatccagagaacacctgggcgaagtgattacaatgctgagaggggtaaatctgtaccagcagaaagtggttcagtggatgttgagcaggcaaaaaggactggctccacaagcagtgcccctgttccaagagatgttcccagaaaataccatggcccattattcgatttcccatccttcactaggagacacgattccatgggatctgcaaattacaacagcaatctgtcactaggttatgatgtgaaagatttattagctcaggaggggatgatagttcttggtaggaaacgtgaggataacttaaaaaagataagtggtttgcttgcaatcaatctagagaggaaaagaatccgacctgatcttgtcttgaggctacagatcgaagaaaagaagctcaaactcctagagcatcaggctcgtctaagggatgaagttgagcatgaacaacaagaaatcatggcaatgccagataggatatacagaaagtttgtcagacaatgtgaacgccaacgtgttgagcttgtaaggcaagttcagcagatgcagagagcttcaagagagaaacagctgaaatccattttccagtggcgcaagaagcttttggaggcacattgggccattcgtgatgctcgaataactcgtaatcgtggggtggccaagtaccatgaaaggatgttgagagaattctcaaagaagaaagatgatgaccggaacaaaagaatggaggcattgaaaaacaacgatgtggaaagataccgtcaaatattgttggaacagcagactagtgttcctggtgatgcagctcaaagatacaatgttctatcttctttcttgacccagactgaagagtatctttataaactaggaggaaaaataactgctaccaagagtcagcaacaagtagaagaggcagcaaatgctgctgcagcagctgcacgggcacagggcctgtctgaggaagaagtgaaggctgctgcacaatgtgctggtcaggaggttatgataaggaacacattctctgagatgaatgcaccaagggataatacatctgttaacaagtactatactttagcccatgctgtgagtgagagagttactaagcagccatcactgttgcgagcaggaactttaagggactaccaattggtgggcctacagtggatgctttctttgtacaataataagttgaatggcattttggctgatgagatgggtcttggcaagactgtacaggtcatggcattggttgcgtacctgatggaatttaaagggaattatggccctcatctcataatagtgccaaatgctgtcttagtcaattggaagagcgaactgttaaattggttaccatctgcatcttgtatcttttatgttggtgcaaaggaccaaaggcagaagttgttctctcaagaggttatggccatgaaatttaatgttcttgtaacaacatatgaatttgttatgtttgatcgttccaagctttcaagggttgattggaagtacattataattgatgaggcacagaggatgaaggacagagactccgtcttggcgcgtgatcttgatcgctatcgctgccagcggcgcctccttctcaccggtactcctctacagaatgatctcaaggagctttggtccctcttgaatttgttgcttccagaagtatttgacagtagcaaggcattttcagattggttctctaagccttttcagagggatggtcctacacataatgaagaagaagacgattggcttgagacagagaagaaagtaataataattcacaggctgcatcagattttggaacctttcatgctacgtaggcgtgtggaagatgttgaaggatcacttccacggaaggattccattgttttgagatgcagaatgtctgccgttcaaggagctatatatgattggatcaagtctactggtaccattagagttgatcctgaagatgagaaaaggcgtgcacaacggaatcccatgtaccaggtcaagacatacaagaatctcaataacaagtgcatggagctgaggaaagtttgtaatcatcctctgctgtcatatccattcttaaatcatgggaaagattttatgatcagatcttgtgggaagttgtggaatcttgatagaattttaattaagcttcacaagtcaggccatcgtgtacttctttttagcaccatgacaaagcttcttgacatcatggaggactatttgcagtggagacgacttgtttataggcgaattgatggaacaacaagcctggaagatcgagagtcagcaattgttgacttcaacaggcctggttctgattgttttatattcttgcttagtattcgtgctgctgggaggggtctgaatcttcagagtgcagacactgtcgtaatatatgaccctgatccaaatccacaaaatgaggagcaagcagttgctagggcccatcgtatagggcagacaagggaggtaaaggttatttacatggaggctgttgttgataacatatcaagttatcagaaagaggatgaattgagaaatggagggagtggagatttggaggatgatcttgctggaaaagatagatacatgggatcaattgaaagtctcatccgcaacaatatccaacaatacaaaattgatatggcagatgaggtcattaatgctggtcgttttgatcaaagaacaacccatgaggaaagacgaatgactctggagacactcctgcatgatgaagagagatatcaagactctgttcatgatgttccttcattgcaggaagtgaaccgtatgattgctaggactgaaagtgaagtcgagctttttgatcagatggatgaagactttgattggacaggtgatatgacgaagcatcatcaggttccaaagtggcttcgtgttaactccaatgaagtagatgctgtggtggctagtctgtccaaaaagccgtcaagaaatatgtcatctgggggcattgctttagacactaacgaaacacttgagaaaagaagggggcggccaaggggtacgggcaagtactccatctacagggagatcgatgatgaagatcttgaagaatctgatgaagattctgaggagaggaatactgcatccctacctgaagaaggggaagtaggggaattcgaagatgaagaagacaatgatgactcagtacctgataacaaggatgaatcagaggaagaagagcctatgaatgatgatgtatatgaatttactgaaggattaagaggcagaaaagctaataggatggaagaagctggttcaacaggctcttcttctggaagcaggagattaccaccacctgtaccttcctcatcttcaaaaaaattgcggtctctatctgcattagatgcccgcccaggcactttgtcaaagagaactccggatgacctagaggaaggtgagattgcaatgtctggggactcacatatggacctccagcagtcagggagctggaaccatgaacgtgatgacggtgaggatgaacaagtactacaaccgaaaataaaacgcaaacgaagtattcgtcttcgtccaaaacctaatgcagaaaagcaggaagatagatctggagaaggggccttccctcagcgtgctgccaggcagcaagacgcggttcatcctatagtgaaacagaagcgcaacatgtcatctaggaaggtttcaccggcttctaggtctgggaaattgagtcacttgtctgggtctggtgaggggtctgctgaactctccaaggaaaattggagcagtaaggccattgattccactgcccctgagttcggtggcacaaagatgtctgacagtatgcaaagaaagtgcaaaaatgtgataagcaagctttggaggaggattgacaaagaaggtcatcaaatgatacctaacatatcttcttggtggcggaggaatgagaattcgtcgttcagaggtccggctggtagcacacttgacctacaaaaaatcgagcagcgagtcgatgggttggagtacggcgctgtaaccgagttcatagcggacatgcagcagatgttgaaaagcgtggtccagcacttcagctataggcatgaggtccggatagaggccgagaccctccacaacttgtttttcaacataatgaagatcgccttcccagactcggacttcatggaagctaagaacgccatgtcgttttcgaatcctggaagcggtgcgcattcggatcatcaagcgggggcaagctcgtcagcacccggcatcggagacatccagtgggcgaagcctgccaagaggctgaggaccgacagagcaggcagaggcggccgagcctaacggttggttcttctttagcgtcatatggatgtgtaaatgcatccacgtagcggatggaggcgtttgataataatcgtcagtgtatttagttcatcgtcctagcaagtcaaactttgctggcagtttttaaaacagttttttaaggaaaatcaggttatatttcagacctctttaattaatttgctggttcgttccta

SEQ ID NO: 28931 - DNA, 1213 bp, Zea Mays
ctgaacacaggcgttcttcaacctcggggctgcggagccgcctcttggcctcttcttgttcctattcgttctcgcctagtaggctactaggctggagcagaacggagaaccagagacaaggaggttattcggacacagaaactcctctctcgatgataatcttacgttcaatgataccatgatagcacttcaattgatgcgcacacagtttccaaagctggataaggttttggcgcagccattcattttgcagtcacaattgtatagcagtgtgaaggatagaacacaagttgacagagacttggagtcatttaagaaagacaaagtgttacggatattcaaacttagttctgggcaagatgatcatgcaatcatgttcatggatgattatttgaaacaggtctcttttgctattaaacggtcagggggtaaagaccaagatggtagtgaagtatttgagtggtttgagagatatgtggtcccttcaaaactggatgttagcataactcaactagagctgtgctcactgttatcacagggtggtgatgtaacagacaaacatatcacactattgatgaatgctggtctcttaactcgtcaacttattgatccaaatatttactggttttctattccaagaattggccccatattgaaaggcctatcccagggcaggaatgaaattctttcgctgttgaaccgtagaaagtacaaggagatgccgctttcttcactggagaatacaaagttaagattatcacctcttgatacgcggttcctccttcgcgatttgattggatctgggcacataaaaacagttcaaacgcccactggtttgctcgctcgcgtatcaagggattaatagagctctctgtcgtaatcctacttatctgtctgccttatctcttatctgatcatgcacgatttggtgattctagtttcgttttgcattttacctgttttcaaacagcattcaacatgaccccaactcgtcgatagtctttttcattttaagagggtggttgggactccgctctacgttttgatgttccgtggaaactccagcaactcggttccccaaaaagcgtttttgatggagaaattcgttttaagatgtagatgtggagttcagggttaattacccaccaatgtcattcattaaatgccattcattatgatgagaaaataacatttcgtctcaatctattccttc

SEQ ID NO: 28932 - DNA, 7244 bp, Zea Mays
gtcgatcccattcccagcctcgcagctccgaaatcggtcactttttcccgcccattcccacccccgagatctccaaagcccgaccgcaaaatttccccaaccgggcttcttcggtcatccacctagacggcaatggaggccgccgctgccgacctcatcgccgccctctcgtccccatcctcattcgctggcctctactctcgcttcgccgcctacctacagcccttcaccccctacctgcacagctcaaaccctaacaccaagccaccgcagaagagggcgacgaagcagaacaagcagccgccgcctcccgacgcggccaccctccgcccccttgcgaagcgattcctgccgtttctcggtcgcgcgctccacctcctcccgccgctcgtccgcgcttgtcctgtttcgggcgataagggcggcgaagccgccgacgaactgcttgagatctacggcctcctcttggactgcctagaggccatatcaccctgccttgcggggaaaccctactccgtgttgctccaacgcggccgcttcatctgttgcctcgagtcgcgcggtcacttcgcacgcgccagtgcggaggctgccgctaccctcgacgccctccgctccgcgctctctccacccaccacgagcaccaagtcgcgacgtggtgctgcaggcgttgatcccgtcctccttccggaccccggcagcgctggggaggctggcacggatcctgaagtcaccctccttgcggttgagctcactgtttgccttgctaattgttccagcaagggcaaggtgaaggaacctaccccttatgaacgactcatcagccttttcaaacagctaaaaccatggcttcgtattcttactaatgaagtcagcaggaagtatctcccgttgcttatgaatgccatgagccggtgtaccctttttctggtttctgagtcttcccttttcaatactgatctagtgcatggattctgtcgttacacgatgcaagagtgtgtgggggaggggatgattgagcttttgccagcaattgctcgcaagatttgctcttctgtagatttgacttggggagggagcacacagcttttgctccatgtgctaaaaactgtcactgattctgttgtacgtttaaaggatgatttaccaaaatctgtaaatgagcttctggtatttgtggcgtatttttgccggttcattctttctgccaatagggatttatctgttggcgcttcagaactactttataaacaaggtggttatttctctgaggtttcctctcctactgcctcaatgcttcttctttatgcgactgggttatacttgagtgcccagcaagcagaaagtgaaataccaccctatttatcggtgggtattcccaaggatcaaaagtatctacatgccttagagaagggtcttggcacattagcacgatgcccacatgataatacatctttggtcacatacttggactctttggagtttattagcaagatattatcacagcaagtgaatacactttggaaggacttctctgaaggaaaaccaacccattattctggtaacatggactatgtcttgacagcactgcatcagttcattgattcgagcttcacgtcttttagctgtaggcaaatgtctcaaggggacaacgagagacagcatgaacaacatggaaccttactgacagtccttgtttccgcgatcaagttttcctttcttaccaagaaagatatccagaagagcttgggtttcatcgtctgtgccatttcaagtaaatggtttacacttgaggagctcaaattcttgataccttcacttggcaacatcggagtgacacttcataacactggacatgttaaagaggcaccaaaggctttagaactgtgctgccaaacaatatgggcacacatcagccttttttactatagactatcttcaagaacaaaaggaaacgacattatgacagatctgtcgatggatacactgaaggatatggatatcattttggatgcattttcaagaattgcaaagatggttgatgctctctgtagatgtggcacagagatagaaacaccacttgtgattgttgcgaagagtttgtctataatgttgcctgatggcgacaattctgaatataacaaatgttcttttatactgatcaaggcatgggttaaggcagtacacaaggattttagggatactaaggtggatgatgctccacttctctatccctttcttctgaaatatcggtctccatggccaattaagctgataggcttaatagtagagcaggagttattagcatatggattaactgaagcccgaagcatagaattctgctctaaaatgcagataaggatcatagatgttctgcttcataaaatttactgtacgaaagaacattttttggagagatcaagggttcttattagaaaggcaggtgcacttcgtgcatctggagtggaaaacataaaaaactgccttgagtctctacgtgatgccatatctttactgcaaaagatctcacatgattcaactcgtaccaacactactgcaaacaatcagttggccattgcgtactgtttgtatgcgcagtgtgctcaggaagacaaacttggtggggaggtaatatttgatagcgctgagaaagcacttaacttgtggttggacatggaggcttttgaccattcttcttctgatatggtcttgcaacagccatcaaaaactattgtaccacttatttgtttcctggttgatttgttgtctatgaagggctgttttgagcttcagtttaagttgtgcaaggttatgataatgatatggaagcaagaaaaattacccattgagaagttgttgtccttgctgttcaccagtgggcgccttagtcatgcatgctgttatctcccactggatgagcgatttctttctattgccaaagagcatcttggtgtatgttgccatgatattgaattttggataaactgtttcaaaggagaccatccttctctctgtatgtttcttcagagaacgctgcctagtgccttatttattcctcaatcatgtaagcatccctttggaaggcagttcagtttcgtcacgagtgttgatgaagtcagcaaagttgcctcatctctggtatctggagatacttcaaatgagcaatctacctttctagctggatgtttatactatgacttgtcagaaaaagttttttcacgcggacaacttttccaggccttttcatatggaaacaaagccctccatttgcgcaaaaagctcctaaaaaagaagttcaaaatcaattcgggcatatctggaaatatggaaagacaacactgtgggcaggacatctctcttgaagtgtgtggccctacaatagttgagatttggccaaattccagcagttcagtcaacactaaagattttttccttaccccatggaatgtccttaggtgctatcttgagagcactttacaggttgctatgatgcacgaattgattggcaatggtgctgaagctgaagttctcttacagacaggaaaagagatatcaaatttccatggtttatcagttttctgtattgtatttacatcatttctaggtcaactatattgtaagcggcagctatgggatgaagcggagagtgagcttaattatgcccgagatcttgtgaaaaatgatgcaacaatttcatgtaagctctgcagtctgactttggggatatctgttgacatgcaagttggtgatctgtcttggagtctgtttgaaaaaaaaattcataaacagattacagctggtttgtctaacactttaggcatgtaccaatctgcaatagacaaattgaatagcactaacttggaatattgtaacgggtcctttgatagacatacaactggttatcttgtgtgcagcaaagactgtataccgagcaagtatgaagcttgtaatttgggggcagaacccctaacttcaaatgatggattgttatctccatgtagtgtttgcatggtaatacaagttcgaaggaaaaactcagggaatgctgaagctggtccacctttagatgcaaaagcaaggaggtcatcaagaaattcatcacgtttagctaagggacagaatgtagagactcttgcaaagactagaactcgctctagtaaacgaaatgcatgtatgaaaagtgagaaggttttaactgagctaaatagtaaaaataacgtaactgggagtaaggaattggctgcagatgcttctgtttgtggtgaagcagagtgttttcctgatggcattgatcacagcaaagacgacctatgcaatatgtttggttgctggagctgccttttcattaaatccctcaattcggggtgcattcagaatattttgcagctgagattggactatgttcaccgacactaccttgtgtcacttcttttaaaaaaagctagagccttgggatctcatagcaatggggactgtgaagttcatagtgtctattggaagtgcatatcactgctgttcttcaggtcccttccacaagattgctgtaggacttatgggccttatttaattggactaatcatggataggagcattggtgattttcttcctttagagtgtgcagaaatactattcaatatgagcttcttcttgctaaaaagccccctttctgaacagtcaagggacatctgctgtatcttctctagtgtaacaatggcagacgttgtcccctggttgctcaaagcttttgttctatccagagagagcccctcacttgttcaggaggtttgcaagttacttgcatgcatattcttgctatcaactacagattcctcaattcaactgcctttgggttctcataaagaatctctttctttgaatcactgggccacatacttccatcaagtttctgtgggaactaatctcaattgtcattactttgctagcttacaagcatcgtccgaggaaaaggttccaaaggacacctataaagatttcagaaatgagacagatgacaatgtctcgaaatttctcaggttgtcatcaagggacatcaaatatattgagaaacatatgacagaattcttccaaaaacttcctgatgtaccagttctgtgcattagtatgcttggaggtgattatgttaatgcccttctgaaattccattgccatcctccgttttttcctgcttggatgttgctttcaaggtttgattcaacaaatgaacccacaacattgcttcttccagtggattctatttcagaaatgcaatttgaagattcctgcaccaaagatttgggcaatccaacgagagttttagataagtggcaatgcccttggggctatggaattactgactatgtagccccagtttttagaaatatactcgaggagaattttatgtccctctccagcgcaacccttactattgatgatgtaaatgcagatcgtgtcaggtggtggtcccatagaatgaagctcaacaattaccttgctaacacattgaaagacattgaagattcttggtttggaccctggaaatgccttctgttgggccatcaattatctgatgaacacattgagactgcctcatcaatgattatcactggtctggatacagaattcgaatttgaagtcaatccaatgctcatcaaggctatccttggtggtgctgtgtcagtggatgaagtacaagaatgttttctccaactcattttgtataaaggttactttggaaggggaggatgctgtgggaaagatagacttaaagctttctcttcctgccaaatggatgatggatctatggagacactcaaacgtataataacggatgcatcatatgagttgcctcagccagctgatagagatccagttattttagttcttgatgtcaatgttcagatgcttccttgggagaacctgcctgtactaaggaatcaagaaatttatcgcatgccgtcaatgggtagcatctttttagcattatctcgaaccaataatgattacaaagatcacagttctccttttcctgtcatcgatcctttcaatacatattatctgttgaatcctagcggtgatctgagtagcacacaagaagaatttgttcagttattcagaaactatgagtggaagggagtggctgggaattctccgaaggctgacgagctggttttggccttgacaaatcatgacctattcctgtactttgggcatggaagtggaacccagtatatttctagtaaggaagtcgaaaagatagataactgtgcagctgctcttcttatgggatgtagcagtggaacacttcattgcaaaggaagttatgctcctcgaggggccccattatcatatttatttgctggttcccctgctatcattgcgaatctctgggatgtttcagacaaggacattgacaggtttagtaaggctttgctcaattcatggttgcatgacaaatctctagatggcaacaattgttcaaaatgttgccagctaacaatggagcttgagtccatgagtattgcttccaaggaaaatggtaaagcaagacgacaaggcacacgaggaaagaagcaacaacatataaatgatagtaccaagtgctgcagctgcaagcagaggcgaatagcttcatatataagtgaagctaggagggcttgcaggcttccacttttgataggcgcatctcctgtgtgttacggcgtgcctacaatcattaggaagaaagtaatgacggattctaccacgagagagatgacctaaaagtgtggtagtatcggcatggtattggtgactattgatagtgtgatctatggcgttgatggagttggcacgaaagtgtgccagctcaaatgcactgactaatttatgctttatacccagtgcttggacgcatggtcttgctggacgacctgcagtgggcgtgcacctattggtattccagagctgtaacgagtgtatattgaagtaaatgttctgtacaatggcgctgtacataactgtaatgtcactggagcatcacttagagaaagtatgttgaggctattgatttcaattgtataacgtgtactatagttttgtccaggaacatagagaatgcatgttgaggcagttaatttcaattgtataaaatgtgtactacagttttgacccttgtaagttacttataagaagctgttgtctatactgtactgaattctacatgaagttacgtaggcagtatgacggaagttttgaaagcatgtagg

SEQ ID NO: 28933 - DNA, 2175 bp, Zea Mays
ctttcttccacgaaagctaaagacggaggcttggatgtcattcagacctatgtcttttggaacggacatgagcctacgcctggaaatgattcggatggtattttttttcgcttcgagcagtactatttcgaggagagcggcttcccagtttggttgaagtatgtaccgggcatcagcttcaggacagacaacgaacctttcaagacggccatgcagggtttcactgagaaaattgtgggaatgatgaagagcgaaaacctctttgcatcccaaggtggcccaattatcctctctcaggcaagtataatcttttccttagatttgattgagaatgagtatgggccagaaggcagggagtttggtgccgcaggtcaggcatatatcaactgggcagcaaagatggcagtcggattgggtactggtgtgccgtgggtgatgtgcaaggaggaggatgcacctgatccagtgatcaatgcatgcaatggtttctactgtgatgcattttctcctaacaaaccttacaagcccacaatgtggactgaagcttggagtggctggttcacggaatttggtgggaccatccgccaacgaccggttgaagatcttgcatttgctgttgctagatttgtacaaaagggtggttcttttatcaattactacatgtatcatggaggaacaaattttgggcgcactgctgggggtcccttcatcacaacaagctatgattatgatgctccaattgatgaatatggacttgttagagaaccaaagcacagtcatcttaaagaactccacagagctgttaagttatgcgagcaggctttggtttctgttgacccagcaattactacccttggtaccatgcaagaggcccgcgtcttccaatctccatctggttgtgcagctttccttgcaaactacaattctaactcctatgcgaaagttgtgttcaacaatgagcaatacagcctaccaccttggtcgattagcatccttcctgattgcaaaaatgttgtttttaacagtgccacagttggtgttcagacatctcagatgcaaatgtggggagatggtgcctcatcaatgacgtgggagaggtatgatgaggaggttgattctctggcagctgctccattgctcaccacaactggtttgcttgagcagcttaatgtcacgagagacagcagtgattatttgtggtacatcaccagtgttgacataagctcatctgaaaactttctacaaggtggcggcaagcctctgtctctcagtgtgcagtctgctggtcatgccttgcatgtctttgtcaatggacaacttcaaggttctgcttatggtaccagggaagatcgaagaatcaaatataatggcaatgctagccttcgagctggtactaacaaaattgcactgctgagtgttgcctgtggattgccgaatgttggagtgcattatgagacgtggaacactggtgttggtggtcctgttgtgcttcatgggctggatgaaggttcacgagaccttacttggcagacttggtcctatcaggttggcctgaaaggcgaacagatgaatctgaactccatagaaggctcaagctcagttgaatggatgcaagggtcattgatagctcaaaaccagcagccattggcctggtatagggcttactttgagactcccagcggggacgagccattggctttggatatgggtagcatgggcaagggccaaatctggataaatggacaaagcattggacgctactggacagcatatgcagatggggactgcaaagaatgcagttacacgggaaccttccgggcacccaaatgtcaatcaggctgtggtcagcccacgcaacgatggtatcatgtgccaaagtcctggctgcagcccaccagaaacctgctggtagtcttcgaggaacttggtggggattcatcgaagatcgccctagtgaagaggtcagtctcaagtgtctgtgctgatgtatctgaggatcacccaaacatcaagaactggcagatcgaaagctacggcgagcgcgagtaccacagggcccaaagtgcacttaagatgtgcacgtgggcagtccatttccgcaatcaaattcgcaagctttgggacacctacgggaacctgtggagatttccagcaaggagattgccactcagctaa

SEQ ID NO: 28934 - DNA, 1120 bp, Zea Mays
gtccaccacccttaccgtgcccccgctccagccccgcccgcgccgtcttcctccctgcaatcccgccaccgcccgcgcgtcgtcctttcccttcaatctcgccctcgcccgcgccgtcccttccctgcatcccgtccccgtccgtgagccccctccacacgctcccgtccgcgaccccagatcccgtgactgccgccgtgtcttcgcccctagctccatcatcccgtcgtgtcccgccgtgccatcctccgctccgcgaccaccgcctctgctcccctcgtgcccagcgccgcgtccgcgaaccagcacccctcactctctctcccgcccggctctcctcgcccaactctctctcccgcaatcccacggcctcgccccaaatcgccgccccggctctcggtcctcgcccaagctctccatggaaggagatcgaggaatccgcgtccgctgcgcccggctctctctgcgtccgtagtctccctggaaggcgattcctcgatccgcgtctgctcgcttcggctcctccgttcccaaacctcctcaaccagcatctctagggttttcgcagccaccgcccatggctgccactccggaccgcgtcaatgccgaccttcatcgtcgcctcgccgtcgacactccaccgccgccccaggtagccagagggaggaatcgtccaggcactaagcacaaggaacagatggaatgggtactccatggattaccaaggaaaaaacaagctggtttttagcctaactgatccgaaatcatgcacagcacaaggtagagactgtacgatagttgattgcaccagaaaaatagtagcccaggtatgccgcgcctttttaatcctaaatcccctacagctctgcttttgtagtgcgttatctttgcagattccttttgttgtcacagattaaaggcatatcccatgagagcagaaaataatatgtctacatctagatgtctatagacatggtgcatttttttggctaagaaaaatgtataaccgtctctagaaatagtgctaccctgtgatgtacatgtgtttgcaagtacttgtatgaaagtgtagaagtttaagggcagcattacactcatgccaccagcatttgagtgtcag

SEQ ID NO: 28935 - DNA, 1855 bp, Zea Mays
agcagctgcggacttgcgagcccaggcaggagaggactcgtccacatctattccttccttgttcggccgcccttcctcagggaaggacgacccaagacaggaggaggaggaggaggaggaggaggaggaggaggaggaggaggaggaggaggaggaggacagtgccgccatgaccggaggaggggaggagcaggggaggtcgctgttcggcgtgtctctgacaaacaggcctaggtggcagcagttcatgatctgctcctcgggcttcttcttcggctacctcgtcaatggcatctgcgaggagtacgtgtacaacaggcttcagttcaggtacacagctacggctggtacttcacgtttgtgcaggggttcgtgtacctggcgctgatacggctgcaggggttcacggtgaagcagatggtgaacccgtggcggacctacgtgcgcctctcggcggtgctcatgggctccaatggcctcaccaagggatccctcgccttcctcaattaccctgcacagatcatgttcaagtcaaccaagatagcacagctatgaatgaaaagggagcacaagtagtgtacctggcatcaagatttgatgttttggttaggtgccaaactagccatctatgtcatgtctctctctactttaggggtacgaatactacatctctggctacagcgagaatagctaagccaagcaatttggactcttctttactgagatcgatataattaatgagatcgatataactgcaaacaagcattctgatctgaacagaaataccaagctgtatactaatccttcaggttctaccggtgatggtgatgggagccttcatccctggtctgaggcgcaagtacgcgttccaagagtacgtgtcggccgtgatgctcgtcgtcggcctcatactcttcacgctcgcggacgcgcagacgtcgcccaacttcagcatggccggcgtggccatggtgtccggggcgctcgtcatggatgctttccttggcaacctgcaagaagcaatcttcaagatgaacccggacacgactcagatggagatgctgttctgctccactgtcgttggccttccgttcctagcggtgcccatggtgttaacaggagagctcgtgacggcttggacttcctgctcccagcatctgtacgtgtacgcggtgctggtgttggaggcgatggccacgttcgtcggccaggtctccgtgctctccctcatcgcgcttttcggtgcagcaaccacagccatggtgacgacggcgaggaaggcggtgacgctgctgctgtcgtacctgatattcaccaagcccctcacggagcagcacgcgacggggctcctcctcataaccatgggcatcgtcatcaagctcctgccggagaacaaggagagacgcccgcgccggctgcccaagaatgacgacgacgacaagccccgggagagcagagaagcgggggaggaaacagcatgactgctgctatagacccgacacccgagcaaagcagaactgacgccagctcgatcagcaaccctagaagaaattctcagtcctccaaaacagcaatcccaggaggaggatgggatatacatgcaggatagagcactacatacagtaataataacctttttcctcgctcctcccctcgcttttctcatgtgctgtggttaatgttaattgtgcacttcgctctaacatcttaagctttttataaaggcaagggccagaggtctgaattctaattagcgcaatatctaaggtcttgttcagttattcctatcctatgtggattgtatgagattaaaaaaaatttataaaagattttgacttattcaggattgaaatcc

SEQ ID NO: 28936 - DNA, 665 bp, Zea Mays
ctatgcagagggcatgccaactaatgaggctttcttgaaaaggtcacaagctcacacttgtttggctctatagcacttcttgcgaaaagtgggaatctttctctaactgaattaatgttagaatggagccgaacaagtttatgtttttatgcgacttcaagagttgacaaaggtttaagttctgagctccagaatcagaattggagagttctttctgtagctaatgaatgtagcatagaggttcctgtgttttaaatgttcaaaggcttcagcagttgcttctcaccttggctactctaataaaaaagggaactatgtgactcatctgttctggtgattggatatataatgaaaaatattctgtgaggaagacttcgcaaggagatgtggttctgtcacttatgtgactgttgccgtgtatggagacgaggacaagccagcgcttataatgtttacagagatgtggttctgtgactgttgtcgtgtactcaggctttatttcaacaggatttaaatatgagatgtagagtgattgatgtacatcacttcactaatcatgaaatctgtagaaggcgaaactactagccatatatgatatgcataatctgtgtggtaaacattatcaatatcacacaaattatttttaatgggttttgcattatcat

SEQ ID NO: 28937 - DNA, 1085 bp, Zea Mays
gaagataagggtgcccgtttctctcctcgacgacgacattctcaactctgaaacggcgatgtcacggctactcccgcccgtgctctctcctttaccggcgttctcgctgccgccgccgcttcttcctcgcatccacatccgcacgtcggcggtgagaggcggtgcggcggagaacgcgatggcgtccgggacgacggcgagggagcggcgcctggtcaaggtgcgggaggagcgccgccgccgcgagtacgaccgggagcacacctaccccggatgggccaaggtactggagaacgcctgcagggatgatgaagagctccgcgccattcttggtgatagcatcggcaacccggagctcatgaagcaacggatccaggaaagggtgcgcaagaaaggcagggcccaattcaataaatccaagacaggctccattgttgcttttaaagtcagctttcgagactttaacccattgaattctttcatttggtttgagctctttggagaaccaacagatcgagatgttgacctgcttggtggtgtaaagtggcattgtacaatttcattggattctccttattcagaaaacaacatactgtcttgacgtgaagtgttctttacaggtagtccaagcttggtatgtcatgggaaggctaggagcttacaattcttcaaatttgcaggttgggttcattcaaatttatctttttatttcctttgttggctacttaattcgtcagttctttcgagaacatgtaacgttgccagtttcaatgtcagctggccaactcaatgatggactacgacccttcatatgattctgaagaagcttccacagtaatgccatcatctttccatgatatcagtgatgttgagttccaagacaattgggccagggtttggtgagcgttggaaccatttggcagtttgggcacttgtaaaaggatatgtgcagactctgaaattcccctcactgttttttcctttcagggtggaccttggaacctcggattaccttggcttggatgtattactaaactgcttaacacagttgagctcagaatttggaagcattcctccttataact

SEQ ID NO: 28938 - DNA, 2002 bp, Zea Mays
ctcggatccgccccactacgcccccaaatcatcccaagcgctccaaccgctcgcagccctaaatctaatccgtcgtcttccgggtcgccatccgccctcatcccctcacgctcaaaccaaaccctagcaaaccctagcagatgtcagcccacgacgaggacggcggccgccgccgcaggacccttgccaaggtttcactctcgttggtctcgagcaccatggcggaggcctccacctactccttagacgcagttaagacgcgccacctctagctccaccacagccccggcggcgcgggcgtgcgcggcgtaatccgggtcgcggccgagctcgtccgagatagcggggtttaacggggcttaaccccctccgttctccgccacctgatgtacacccgctttgcatcgtggggttccagcatcttcggtccaccctcgctagcaactgggggaggatggcctttttgggaaggcgctcgccggtggactttcaggtgttgctgcacagtcactgatagggcagccgttctgggtttcctatgagaaactgcaccaaacatcaggtattttatcattttggcaatcgagtgtgtttcatggtagaaccatttttatgttcattactagagtgtgggcttttatcctttgctgtctccaaggaaacatggatgaaattgctacgcctcacattgtattttgacaatctacaagattcatgagctccacagaaaactgacaatctcatccattatcccttttctattaacaaagttgtttgctcaatctatatttgtgtgatttatagcctcacgtcggaagttatatatgtcattcaaaatttgacatctatagatatttattcataacttttaatcaaagtataaggatgaaagaagattttaaaatgtgatgtatatgaactaaataaccttagcttatgactgcaataattggacgcccggtgggaaatcctctcagtgccagatgtgatggaccatcctgccggtgtcacctctagccttcgcttggtaattgtaattcggcagcgactgaaaccatggctcaattgcagggccgacatgttgtgttgggcgcctttccatggttgcagggccggcacggatgtatggttgtcgtgctgagtgagcaggccggaagatgctcttttagtactttgtctgatcaagtccatttagattttccctatgtcaaactattttacctttgactatcaatttttaaacttgacaggctgatgacacaattcacattattactaggtttattatgaaaaagacagcatattcttgacgatattgctatatgaagtgtcatactaagagactactgatcggatggacgagtgtattattttagtagttagtggtgcttgtttagaactaagattgcaaatacactgagatgatttgggtattataatacaagccaagctgcaaatatggaaccatgcaacttccacaattagtcaagttatctttgggtcctgcttttaattcttgggattccaaactcatgtttggtcaagacaaggacattacgacattgtgcaatgggctggcttttgataaactcgaatgtggaggtggcttgctactgcaagccttgttactggcttataaatctggcttccaagtgtgggatgtggaacatgtttatgatgtaagatagctagatacagacatgatggctctatttcatttattcaagtgctaaaggatccaattttcacaaccgaatctcgagacagatttgtagatgtacggccatcgctagctcttgcatgtgatcgtgtatgattgcaacaatcctgacaaaatatggtggtactttatattttggcatattgtgcacaaaaacaagtgtcttctatgaccaccgtgatttatgtattttcaaacgaaattttatggcacttcttgttgtgttttacgcttctactaaaaaacagtcttactgcgttttacaccaaatttatgacactt

SEQ ID NO: 28939 - DNA, 1511 bp, Zea Mays
cgagaagcgccgtcttccccctttccaacctcaagtctacagtctacaccgaatccatcccccatcgccgccgccgccgccgccgacgacgacgatggcaagcctactccggcgatctgccgtacccgcgcgccagctcctcctcctcccgcgccatttcgccgccgccggctccgcccccgccttgtcccgctcgttctcccgcttcaacccccgagacgacagctctatgttcgatccaccggagccgccggtgaactggggcgtgagcatagttccggagaagaaggcttacgttgtggagagattcgggaagtatctcaagaccctcggctccgggttccacctcctgatccccgccgtcgaccgtattgcctacgtgcactcgctcaaggaagagaccatccctatccctcaccagaacgccatcaccaaggacaacgtcaccatacagattgacagcgtcatctatgtcaagcacatcgagtggcgtgactgcatgtctgtcaatttgaatctaccaagtgccatcaatgaagcagccacagattggggcctgaagtgtatccgctatgagatcagggacataaatcctccagcagggattaggcaggctatggagatgcaggctgaggcagaaaggaaaaaacgcgctcaaatccttgagtcagaagggatgaaacaggcccaaatccttgaatcagaagggaaaaagactgcccagatccttgaatctgaaggagctatgttggatctagcaaaccgtgccaagggtgcggctgaagcaattcttgccaagtcagaagctactgctcgtggaatgagattggtttcagatgcgatgacaactgaaggcagtgccaaggctgctagcctgaaacttgcagagcaatacatcgaagcattctcaaatctggcacaaaaggtgatagtgccagcccagcatctttcgtggcccaggcaatgaagacgtatgagcaaatccattcccacagccaggcattaaagagccacccccagatagaagagctgaaggaatcaggagagaccagtcctgctccatcttctgaggcgagcaagacaccaccactcattgaggaagcagattctaaccagaccttctcactgcaacgccccaagaacaagcagtgagcttcgctcaagtgtttgaagtccttttttctatctgttgttctgaaacatgagtgccactgagaaacaccactagtaggttttagttttctttagtctgagagagctgatatgtggcggagaagggatagacccctaggcatttggtttctgggagctaaatgcgaccggagagacctagagagattttgattctcgtgaaggttatactttggttccttgttggaatgaagtttgtaaaaaggcaaggttgggttaacgttggttagacaaaatgcataaatgcttaagttatttctttcttgctgagcttgactacatatattttcaaggatttatttctgtttatttgcgaaacc

SEQ ID NO: 28940 - DNA, 2637 bp, Zea Mays
aataatagaaagaaaactctgtcgggactagcctcagcgcagcggttgccgcggctgtttctgcttgctgtcgccggccgcagtctccgccgcggctcacggatgccctgcatcctccttcccgcggccgcgcttaatcgaagccttcttctgcaccaaccttatcctgtcagctggaaacgccaaattctccaaaccctagcgccaaaatccccattctgatcgctgcaaccggagccggattctcttggtttacgcctggcgctcgtatcgtgtctccgcatgatgcaacgagcacgcgcatgaactcgatggatgaaatcaacctgctgcggcaggcgcagcggcagcatcagcatcatctcatggtgcgcggcatcggcgaggagatcgacctcgagatcggccctgtcgacgatccctctttttccggagcttccttagtggccgttacgtccacgcacgacactgtcgttcacgccgacgaccacaagagcctcctcatcccgtgttcgcagcccggcgcggcggacgggctggcgccgcagcagcacctgtcgcagggggaagagcatgacgggatgctcaggtcgccgtcggggcacaccaagaagaagaagaaggtggtcaagaaatggcgggaggagtgggcggacacctacaagtgggcctacgtcgccgtgcacgacaccaccaccaggatcttctgctcggtgtgcaaggagtacggccggaagcaccgccggaatccatatggtaacgagggaagcaggaatatgcagatgagtgcgcttgaggagcacaacaatagcttgttgcataaggaggcgctccggttacagatggcctccaaggagaagttgcagcctcccgagattgaggggccggtctatgtcaaagctttatcgaaaacagcagcatcaatacttgaatgtgtcctaaggagggatccccatgaagctgaatatatacagtcgatccaggaggtggttcattccttagaacctgttttggtgaagaatgcccaatatattcaaattttggagcgtttgttggaacctgagagatgctttatcttcagagtgccatggattgatgacagaggtgaagcacacgtcaatagaggtttccgtgtgcaattcagtcaggcgttaggtccatgcaggggtggtcttcggtttcacccatccatgagcttaagtgtggcaaagtttctggcctttgaacatactttaaagaatgctttgtcactatataaacttggaggtgctgctggaggaagtgattttgatccaaagggaaaaagtgataatgagataatgcgcttttgccaaagtttcatggatgagctgtatagatatttgggccctgatcaggattttcccgctgaagatattggtgttggtccaagggaaatgggttacctttttgggcagtatagacgtctttctggtcattttcaggacctaaaattttctggtcagggtcaagttttcgaacagaagctactggatatggtctggtgttttttgcacgtcttttacttgctgaaatgaataaagagcttaaaggattaagatgtgtgatcagcggttctgggaagatagcaatgcatgttttggaaaagcttttgccttgtggagccattcctattactgtctcagattcaaagggatatttgttagatgaagatgggtttgattatatgaaatattcacttctaagggatattaaggctcagcaaaagagcctcaaggagtacttgaaatcatatccacatgctaagtatattgatgatgcaaaaccatggagccagcggtgtgatgttgcatttccttgtgcatcacataatgagattgaccaaggggaggctgttgcaatcagcaactctggttgtcgtgttcttgtcgaatgttcaaatatgtcgtgcactgttcaagctgttgatatcctaagaaaggcaaaagttattgttgctccagcaaaggcaactgctgctggtggggtagcacttggggagattgaattgaatccagagtttaatttgatgcaattgtcagtggaggattttgagaatagaattcaagatgcaataaagcaaacatatgaaaggtcggtcaaagctgctcaagattacgggatcatgaaagaaagccccgagtttttggtccatggcgcgaacatttgtgctttccttaatatcgcgcaagccatgactgaccagggatgtgtttagttaggcctggattctgtcaagaagcttcaactggagctttctgcaaccgcgagggaaaaaactttctgacaactagaggtgctttgatgcttaaactttgagtagttctgcacaaatcttgaagccctacaaaacagggagtaactaggatccatttacccctgtttatgctagaaatgtgtacagctaaggtgtaggaaaggcaactaggatccatttatgctagaaatgtgtacagctaaatgtaaatggaaagttctacattgtatgcaaagcctatatccgcaccatctgttacaccaatttgatttcattgttatgaacgacatattattctagtgcaaccacgctaattggtgcaacagtgcaatcaagataagacacgacaatggagttgagag

SEQ ID NO: 28941 - DNA, 1680 bp, Zea Mays
caccggagagtcaaagccaaaatgacggagagggatacaaagattcgtgacaccaaataggtatagcaaacttggattttctgggaactcagagccgtctttcaccctccctactgtcgtagcagcaaatgaatcttttctagaccagacagagctgttgagtagtgcaaactggatagcgcagtataatgcaggcatcatggctgatcttgacttttttattggagacgaggctctatcgcggtttagatctagtgggctgtacactttaagaagtccaatccgtcatggtcaggtttatgactgggatacaatggagagattttggcagcaatgtattttcaattatctacgttgcaatcccgaagagcactatttccttcttacggatagtcctgttagtacacctgaaagtcgtgaatgtacaggagaaataatgttcgagaccttcaatgtccctggattatatatttctgttcaatctgtcctcagcctttctgctggatatgcatatctgaaaagtctttctgatgacgattccgataccaggtctgatatgacaggagtagtagttgatattggggatggagctccacaaatcgtgccagttgtaaatggctatgtaattgggagtagcataaagtcttttccttcttccggaagtgatgtaacccagtttatttcgcaacttttacaggaaagaggtgagcttttggcacctgaggattctttggatatatctcgtaaagtgaaagaagtgtattgttatacttgttcagacattgtcaaggagttcaagaagcatgacaagaagcctgataagtacatcaaacattggtcagctgttaaaccaaagacgggggtcccatatacaattgacattggatatgaacgctttcttgggccagagatcttcttcaatcctgagatttactctgccgacttctccactcctttacctgagttgattgataactgtgttcagtctgcaccaattgacacaaggagagctctgtacaagaatatagtattatctggtggatctaccatgtttaaagacttccacaagagactccaaactgatataaagaagatagtggatgaccgtgttgctgcgactaatgcccgtcatcgtgtggaagtgagacctattgaagtcaacgtggttgcccatccaatccagagttatgcagtttggttcggggggtcagtagctgcatctaaccctgaattctttgagttctgccacacaaaggaggaatacgaggaacatggagccagcatctgcagaacaagcccggttttcaaaggaatgtactgaattttcctcacaacccatcgtctagcaggagagttcatttaggtttcttcgatagaatagtcaattttgattcttttctggtccgttgcacaaccattgtcgggctcgggccaccctgactagatttgtagttgtagctctgtttgtactagttgtttggtctgtgttctgcgtcgaatgttgtgtatagccaacagctcggttcctgttcgaggtgcttgattgtagccagaaggcccagaaccttggacagtttagaggggaaatattgttttttttacattagcttgttcagacagatttacggaactcatataataataaatcaggctaatctagagtggccaggatagaagata

SEQ ID NO: 28942 - DNA, 3352 bp, Zea Mays
aatcggatggtataccctgtctgcccacaaacccgcaaaccccccaaatcctccatcgagtccgcttgagtctcgacctatcacaacaagcgattccccccaagtcgaagcagcagaaccaacagcgagccgccggccgccaatggcgttctcatcgccggcttccgcgcgtccgcagcgctcgcctgacgaggtggaggacatcatcctccgcaagatccttctcgtctccctcacgccgctggccaaccccgggcccgccgtcgcctacctcgagctcaccgccgccgagctcctctccgagtcgcgccctctcctagctctgcgcgacgccgccgagcgcctccttatagaccgcctctcgctcccggacccgcccgccgggtctccgacccctttcgccttcctcgtctccgctttccgccgcgccgccgacgaggcgcgtaagatctccaccatccgcgacgctgctctccgggcgcgcctcgcggcctccatcgcgcacctccgggccctcattctctcctacgcccgtatcgtcgccgggaaccccgacaccttcccctcccaacccggcgcgcaacaccccgccgccgaactcctcgtattcctcctcgctgaggcagccgacccgctagaccccaccccaggccccggggcgccgccgccgcctggcttcattgatgagttcttcagcggcgctgactatgactccatcgagacggccatgggggagctgtacgagcttcttaggcagagcgtcgataaagtttcggccctcggtgacttccagcgcccactgcgggtgctcaggcggcttgtggggatccccaattgtgccaaggccctggtgaaccatcccaagtggataccaaagaatcagatcatgttcattggggaagggagagtcatggagctctacagtgtccttggagccttcttccatgttagtgctatccgagaccgtgagtttgccagcaagcctgatgtcgggtagacccattaaaatgtgcaagttcaggtatgtttgtgaatcttagtgctgtgatgctccgtctatgcgagccttttttggataacatggaatcaaagaaggataagattgatgtcaaatacctcttttgcaacaatagaattgatttcaaggatttgacagctataaatgcgtcttcagaagaagtctcatcttggatagagagcataaataacgagcatgctcaaaataatgccagtggagaggctcgttttgtggaatcacaggaagccacaagctctggcaaaaatagtgcatcttcacaacttcggtgctcaaagaagaacttctcatttgtttgcgaatgtttcttcatgacctcaagggtacttaatctcggtttgatgaaagctatatcagacttcaaacatatttctcagcaacttgcaaggtttgaagatgatttggagtcaaacagagcagtcagagatcagggagggggttcaccacagcttgaacaagatataactcgtttggagaagattgtcgagattttatcacaggacaaattatgttatgaagctcagatactacgagatggtgcattccttcaacgagcattatctttctacagattaatgattctgtggtcagttaatctagttggcggttttaagatgcctttgccatcacaatgctccaaggagtttgcttgcattccagaacattttcttgacgatgcaatggatttacttgttctaacctctagaattccaaaggctttggaaagctttgtattggatgacttcctcagcttcataattatgttcatgggaagcacatcttacattaagaatccttacctaagagcaaagatggttgaagttttgaattgctggatgccgcaaagaagtggcttgagttctacagcctcgttgtttgaggggcaccaactgtgtcttgactatcttgttagaaatcttctaaagctttatgtggatattgaattcactggttcccatacacaattttttgacaagtttaacattcgacataatattgctgagcttctggagtatttatgggatgtccccagtcaccgaaacgcatggagacaaatagctaaagaggaggaaaagggtgtatacttaaattttcttaactttctcatcaatgatagcatctatcttcttgatgagagcttgaacaaaattttggaactgaaagaaatagaggctgaaatgactaacactgttgagtgggagcgcagacctgctcaagaaagagaggagcggctccgtgtatttcatcaatgggaaaatattgttcgatttgacatgaggctagccaatgaggatgttgggatgcttgcattcacctcggaacaaattccagcacctttccttctccctgaaatggtggaaagggtcgcgagcatgcttaattacttcctcttgcaacttgctggtccccagaggaaatctttgactgtaaaggatccagagaagtacgagttcaagccgaagcagctgttgaaacagattgccaccatctatgtccatatctcaaggggcgacaaggaatctgtcttcccagctgcaatctcgaaagatggcagagcatacaacgatcagttgtttgctagtgcagctaatattctgtggaagattgggggtgatcccaaaatcatacaggagtttatgcagcttgctggtagggcaaaagctgctgcttctgaagctatggatgctgaggcaatccttggggacattccagacgaattcctggatccaattcagtacactctgatgaaagatcctgtgacactgccatcatcgaaggtcacagtggatcggcccgtaattatcaggcatctgctgagtgattctacggatccatttaaccgctcccacctcactcaagacatgctgataccaaacacggagctcaagttgcagatcgaggaatttgtccagtcccagcagttgagaaagcgaactgctgcggtgtcagagattggccaagcggatggtgctgatgatatggccgaatgaattgtgcgagcagcagggatggacattttcttttgtggtggggaaagacggatgctaatttacgcgaaatttaccagttcatcggtccgtataaaatcggtttgccagcttgtgtcaccatttgtctccattctttgtaaatgttgtaagtgcacggttgtaattttaagtccctgtttgtttacctttgagattatggccctgtttgtccttctaggattatatagtccagcttattataagcatctattgacctgcttatgaattatcataatttaggtgtttagattacataatttatataataatttgtgttgtttgttta

SEQ ID NO: 28943 - DNA, 1829 bp, Zea Mays
aaaaaattcaatcatccaaatagcagaggacctacgttcaccctttggtccgcgtccgtgcgcgcgccctctctcactcctggcgcaactggccgacgaccgccgccgccgtactcctggttctctggtgcccaggtctagcaacgtcagtcccttcgccaggtcttcgttggggccttcactggcgacgagcacccaccagttattgggtgtacatctgtatgctcatgtcctttgctgggtccgctcctgatcctaccatattgatgttttctgagagttggccaggtctaccaaggggtgtagaatttaatcccagtgatagtgatcttctgtggcatctagcagcagaagttgggaacgctctagctgagcgccatccatttatcaacgagttcattaaatttgttgatgatgttagagaatttatttgcactcatcctcaacatataccaggtgttaggcaagatggtcgtgcatcatacttcttccatagaagttttgagccctacatcaatgagaatgatgtaaataactgctggaagaaaattggaagccctagatccatcatcctggatggaacactgacgggttgcaaggaagtgtttgccctgtatgcagacatgccgagtgataaaagatctcaggaaactgattggagattacatcagtatcatttacaaaacacagtgaaggcagagtcagagatagtggcgtcaaaaatattccttgcatcacggaacagtctgtgtgaattggccgaggaaactcatattgaatccgaatgggatgtttccacacataaagattcaagcgtggaatgtgccaaaggctttaatcctgaaatctgtactgaaaccgatgagcttgatcatatatctctgaaagagcgctacaggatccttctagcagacaaaagtctggggcttactacagtatcagctgggaaatctataatgcatgtggaaactagcagagcatctcccaaaagaaatcatgagggaaaaataagcaaagaagatatattcagcatgttgcaggaaatttcttctgcaccttctattatagagagtaatcccatggatgatgacagcaacaggagaatacttggtgaagatcttccaggtacccaaatgtctttcagggaatgtcttgttggaagcagttcatgtcataaactcatagggcactggacagctactctgtaaattctgcataagtgtagttcttgctctcctgatggtcctaaaaacaagcagtttcaatttctttaaattaatgggctatgtcacgttgtcaaccaacttaggaggctggacatgacatgccttatatttactctactccttgtttggttatacttaatgtccatttaaatgtcaagaaaacaataattctgcaacttatattgctaaacaagctaatgcagggaactcaggtttcctgaatgtttttggtatgtcatctaatagtaaaccatgcctatttgaacttggatattgtcatgatccagtggagggttccgaaaaccagataggtggcactgcaacttgtatgggtgaaaacagtgagctggttgcaagaaaacaaggggctcatctggctgatgtaaaactggaacctgcattaggaggttatgagattggtccttccgaattacctcaagaaaattctactcatgccgaaggctcagtactatctttaggaataaaagatgaactaactgactgtgagttacctggcttatgtgagaatgtttctttcagttcccgacaacgcagaaaaaggaaaacaagttattcaactgaaaaaacacttaaagaagataa

SEQ ID NO: 28944 - DNA, 2454 bp, Zea Mays
caacttccagatcgttctcatcccatcgtttcctcctctgctcaagcacggcagccagtccagccaccatttgggtgctcatctccctctgctcggcacccagccccagctcgcccgagctccctgcgccgacctcatcctccccatggtgcgtcaccttctactcctctccttcccacggcacagcagcgcccctgcagctccccttctccagatccatggcgcccaacaccttgagcgcccctgccgctgctcctccaccgggatctcctcctccactaggcgtccaggcttgtcccaccatggctgcccctcctccatctcctccctccccaccaggttacccagattccatggccgccgccgccccagccatctccctggtggccgacctcgcccctgccccagccacagctcccccttcggccctgctgctgcaagcactcagcccctcccatggcacacggagaaatcccatgatttgggggaagacgaagtccaagcacaacccccgccaatcgctcgatgaaaaatctaaaccaaaaccctcagcgttttcatgggttccggagggattttatgttggtaaggatgatatggcctcccgcccaaagctgtctggtattcagaagcaggttttggcgctgtacaggggattccttcggacagcacgccttaaggcccctgaagaacgccgcaggatcgagtctgttatcttggcagagttccgtgacaacgcaaggagtgttgaccgtaggaactttgtacacatagagtacttgttgaggagagggaagaagcagcttgagcagctcaagaatcctgatattactggactcgctacccttgtagtaaagaaatgagcaagagaagaaggaagacaagtcagacaaaacagaagacgagaagaggttcctaccataacacttaagcaaggaatcctgtacacttctctcctggggttgtgacttgtatattgtcaaggatcacttggatgtggtaaatgctatactggacactgatgatagctgcataaggattgtgcgaaaaaacgggaagacatccctacatactgctgcaaggattggataccatcgtattgtcaaggcactcatagagagggatccaggaattgttccgatcaaggataggaagggacaaactgcacttcacatggctgtgaaaggcaagaacacagatgtagtggaagagttactgatggctgatgtttccattctcaatgtgcgggacaagaagggaaatactgctttgcacatagctacatggaaatgggagaattttgggattatgaaacaccgcagacgtggcttcgacgaaacggaggcgtaggcgagggattcgacattatgaaaaaccagagaagatactacactctaaaatggacatgaatcctctattaccagggaaggatgatgtttattacactgaaacagacgctgtctcacatccgttacccgcactagacgcacccagtctttctacagagagaatcgcgccgttcttgaatctgccattcgctgaatctgccattcgctgctgttgtttctggacagtgaagcagtattccggacagtgaacaaaaatctgggaacacatttcattttcactgtcattggctaccagagtccgggaacaaaatctgggaacaaaatctgggaacacaaaaatctgggaacaaaatctgcctttggctaccagagtttattgctcccatatcattcgctgtccatttcactgtccattcgctgaacacaaaaagctgggaacaaactcattttcccagtgaacaggtagcacaatttagttcacaaaatctgggagcacaatttagttcacaaaatctgggagcaataaacaggttgaacaggtagaacaaaatctgggagcaataaactgccatcccagaacaaaattcgcagctcacatttcagttcacaagctagttcacaatttagttcccaggtggcgtagtagcagtcgtgtgttcatcttcatttgcagcaacgacaagttcacggcttggtgcttcatcttcatttccagctacaacaacgacaagccacctgctttggcgcggactagggttgtggtcgcagcgccgccgccacctgctttggcgcggggccgcgagcagcaagggagaagacgcggagtttggagagaaggaggtgcagcgccgccgccacctgctttggcgcgggaccacgggcagcagatctccgggcagcaggggaggagactagcaggggagggaaatggagattgaagaaaatgagatggaaggaagaggcttgacgggagagagaagaaccttgaagagagaagaacggctctggacggcagaagaaaacggcgcgtgggctgatagcgacggaagatcattattcgttctcctgaacgactaataacgatgctgtctatcttgtttttcag

SEQ ID NO: 28945 - DNA, 678 bp, Zea Mays
atccatgtacccggaccggaccccctcaattcaaatcccccctccgtcatcatctcgtctcgtcatactcctcgccccccacctccaccccctcgtgattatctccccggattccaaatcccatctccgattcactcggccccagagccgccgccgggttcttcgcgcggacgatggcgggggctgccgagggcgccggcgcggaggcggtggagagggcgcacgggctctaccgcggcggccgccaccgggaggcgctggagctctactccgccgcgctggctgcggcgcggggccccgcgcagcgcatcgcgctccacagcaaccgcgccgcctgctacctaaagctccacgacttccacaaggcagcacaagagtgtacatctgtcctcgagttggatacggagcatgctggagctctgatgttacgtgcccagactctcgtcactctgaaggattatcagtcagctctgtttgatgtcaacaggctcgttgagataaacccgtcgtctgaagtgtatcggaacctgcaggcacgattgaagacacagctagtttatgttttgtccaaatgatgtggtggtcaaaagagagcaaaattatatatttcttaagacatggagatggataggatgataaagtcaacggtgcacaaagatctaagttaacactatagtc

SEQ ID NO: 28946 - DNA, 2179 bp, Zea Mays
aacccacaccaccgcaccacgcacctccaccaccagaagaaaaaaccaaggcggagggcggagaggagagcaaggagggtgaagggggaaaagggtaataaaaataaaagaggagaggagaagcaagacgaggaggaagagggagcacccagaggtaggggagggggaataattccgcaggggctgagggatctcggcgagtccggccgcggagcagcgcagcgaggcggcgatccgagggcgatcggaggcgggcgggcgtagacgccggcgagatttgtgttggtgacaagccatgaacagcgcaaccaccagttgttaagtaaccctcctgtaaacttgaagcaaccgaagcggagagcagaaatggtgttccaaaagaggcccagaacccgccccagatgtcagcattcgaccttctcgcgacggtggcagggaagctgcttgatgagggggtgggctcgctggggaacatgagcgctggtgccccagctttgactgcatgcgcgaaggatgtccgtgtgaagaaggagcagtgtgacgaggaaatgaagcagttcaagcatgaggtgacagatcaggatagctgcaatgagagtgcaattctcccgcacattgtgttccagcgggcggtgaataatgctcggaatgaggatcctaaggcgaagtctgaggcccaggacaaggaatcctccatgatcagctgtaccaaggctgaactgggttgtaattttggtgtgattgcagataggtggtcgcctgaatccgtggaatcaggagccttcacaggagatgcagtggcgagcctgatgccacctgccccagcaggatttcataagaatgcacccgaaatgtataatttgcttgattcaatggatgtggatgtcaagcctcctcctttggtcagctctgacagcaccggcgagatgccattgtatggcgataaagttcaccgctcaacctccttaccaagggtctcgaagggagtggggttttttgctgtagatagagatgatgacgacgataagtcctctgggtgcactcatcccagcaccaccactaacaaggatttcaggtccaattgtacagctgagtatagtagggtaaggaagttgctcaccagtaagtacaggaaagttgctccagcgagggtttacaaatctgatctttcctatagtgatgttgatcggaagccttctttccggaacaaaaaaatgcattatacacgacagaggacacaaaggagtacattcaagcgtaggaagctctttgatcgccattcagttctagcatctgaatttggtaccgcacatggaaagggaaacacgaagaaggttaccggaagagactcccatgctgtgtctttggaagcaaacaaggggactagttcaacgccattccagaaatctcgtgggtcaaatgattgccatgtgaaacttaaaattaagtcttttaaggtgcctgaacttcttgttgaaatcccagaaagtgcaactgttggctcactaaagaaaactgttctcgaggcagtgactgcgattctcggaggtggtctacgtgttggtgttcttcaccatggaaagaaagttagagatgataataaaacgttgattcaggctggtattggtcaggaggatatgctggacaaccttggcttttcacttgaacccaactgtacacaaaacccacaagtccaagctcctgaagatatcagtttcctggaaaccattgatactgctgaacccctcgcaaggattgcacctgctgactcgtcttctaagcatggtgaagttgacctatcacaggagtttgcattaaccccattagcaatgaactaccagggcagtgatcatgattctgtgcactcccctgggggcgtctcatcgcccgataaagtctccacaaactcgcgagctttagttccagttccagctgcagatcccaatgcaggagctatagttccagcgaataagtctaagaggtcaccagagcaggggcaacgcagaatcaggcgcccgttctctgttgctgaagtagaagcacttgtgctcgcagtcgaaaagcttggaaccggaaggtggcgagatgttaaacttcgcgcgtttgacaatgcgaagcaccgtacctatgttgatcttaaggcaatggattaaccgtgtcgaaattgtggtgcgaacag

SEQ ID NO: 28947 - DNA, 1383 bp, Zea Mays
ggtgttccttcgccatggctactctggcggccatctcctccgtgtcttatgacacagacaccgattccgactcctcgcggtgcagcgaggcaagcacatgggattctcaagtgttaagcaggcatgctgaatgtctggagctggaggagttgactgcaatatcagtcaatcccagtctgcttccagctttgaatcagttgcttctcgaggcgtatgccattctacgtcccaagccgcttgactatgaccagcgcaacaccttggttgatgtcttcaggaagatggtgaatcaaagatttggtagcaacagtgggtctccggttgtggaaccatttggatcattcacgatggatttatttactcctcacagtgacctggacctctctatcaattttagtgctaatactgatgagcaatatactcgcaagcaaatgatctctattatcaagaaattttccaaggttctattttcttatcagaggagtggaattttctgtggggttttacctattgtaagtgctagggtgcctatactgaaggttattgatcgtggcacaggggtcgaatgtgatatttcggttgaaaacaaagatggcatgacaaggtcaatgatcattaaatttgtttcctcacttgatgaaaggtttcagatactaagttacttggttaagttctgggctaaggtacatgatctgaataccccaagacaactaactatgagctccatgtcaattatttcactagttgctttccatttgcaggtaccatgggttaattattattttggtttggttattaaattgcaagtaactgtcccattaccttttgttttaattaattgacctactaaccaatctgcatttgaagacacaaactttggattcatttgtatagaaaataagacgatacttattggggaaattatgaattatcttctttactatcgacaaattctggatatgctttatgccagttcagaaaacatgatagatacccttcttctacacttcctcagtctaaattcctacacttcatgctattgcattctatgtaccagaaaaaatggattttactccattttccttaatggtagtgtttgagtagcaactcattagatgcatggctaagaagataagcatcaatgtgcagtgcagacccggcatcctccaatattgcctgcgttctctgacttgttaaaagatgggttagattgcgaaagcattgagaggaatgctttacggtttagggattttgggagtagaaataaagaatctgtcgctgaactgtttgtatcattgataagtaaagttactacacagttctgatactctcaccatggttcaggcgttgtttgaattacttgctgaagagactcgtcttaag

SEQ ID NO: 28948 - DNA, 1876 bp, Zea Mays
tacaggcaaaatatttccggtcctcaaagctcccgcccgccctccttccctccctccctccggcgccagtccaggcacaggcaggcttcagtctccagagatggcgaggaacgagcccctagacttcgagaacgaggacgatccgctcctccccgccccgcgccccgccaagaggagcaaggtcatcggcatggatgatctcctgctggattactttcaatctggtaaaaaggacaagctcaaagttaaggctgccaagtctaagcatggccccaaaggaggatatgattcaggtgaggaagacgacagggctacacagcaagagattacagtctgcaaaatatttgaggaagttcagcaaaagggcaaagtgatggatgctagagacgatgtacccccatggggtcaacaattttttagatgccagaaccccccctcaaatcttagcaatggcggagttgagaattgtcatctcctgcaatcattctctgcaattgaagatataggttttgatctagagatgcatcaaggagaggggttcctcgaaggcatgctgttggatggatggcttctgaatttggttcgcatatgtggttttgttgaagactctgtagcatcgtggacgctgaccaacttgttgcattcacccaatgagaaattacaagtttctgcagctgacttttgggatggcattctttccttggatgaggctggtgaaccgttggtcaaccttgggtattttccaagttactctgttctaaaacgggctatgctgagctatggatatctatttgatacttcaggcactaaggcttcaatctctggaagcactgctgcaggtggccctgatgatagtctgcctcataacatcattgcttggttaagagttgtatctgcttgctgcaaaatcagaaaagtgcattccatcttctcgccttctgaggcagaagaacttcttgctattgccatttccctctttttggaccgtcgacttgaagggttgctgcttgttttgggagactgcctgaattcacttatattatacttcaatacgagtgagtgggaaactagctgtgtgatggtggctgaatcaattgctcagagggtcacactggacctcaattgtttaagggttgttgactgcatcactggtacaaataagcgcagcaaaatcctaaggagtcaggtggcacttcagctgctgaagatcagctttgggcttaaggtggcgaatgttgagaagattttgaagctagtcacatccatcaacgtgaaggagaaagaatgtgacttcttcaggctttatgtgtatctagtattgatggacaacttgctcttctcaagtgatgcatttagagataagactgggatggttgatgcttggcggaattatctgcgcaactgttccacccaaattgggtgcacggactggagattctatgctccaaaggttcaatcttgaaaaaaagcagtggcgatggtaaaagttgtgtccggtaatcaaaggggaccaaatgtctggtgcagcagtgcccaggttgtggttccattcgatgggcaacggcgaagtgctcatatcattccatgttttatgtacaattcttttttagttgttgtgttttagttcaaaaatgaactagcgagcgacaaatattcgagaacagagttagcagccagatttagaggggtgttgattgatgtatctgtgggggtgcttctgcttggttgattgacagaaacaaaaaggaaagagagcagcaagggatgattgggtgcagcctggagggggatgttttgtttatctcgtgttattaggttcttctccaactggctggttagctggctggccagattccgagcatcgttttcggacttg

SEQ ID NO: 28949 - DNA, 2563 bp, Zea Mays
cgcacacgcgcacatgcgaccagagcttagctcagcttagcttatagcagtatagcttattgcttatactgtctccccctcggcttcgtcgctcggaggtgtgcacacacacaaaccgaagcccttgccctcccatccccctccaaacgcgcgcaaccatggagagtggcggcatcattgcgccgtgtactccccaatgattgatctctcatcgtctcttcttccaaccacctcctcgtcctcgcactcgcactcgcactcgcccttctctcttccctgcccggctgcccgcttgtctccccaaaatgaccagcaacagcagccagaacatgagcagctgcagcaccggcggaagcgacgcggcggtcggcggcggcagctggctcggcttctcgctgtcgcctcacatggcggcgaccatggacggcgcggccgacggcgttccggtgcagcaccaccaccacgaaggcctcttctaccctcccgtcgtcagctcctcgcccgcgcccttctgctacgctctcggcggcggccaagatggcctcgccacggcggccgccaatggtggcggggggttctaccccgggctctcctctatgccgctcaagtccgacggctccctatgcatcctggaggccctccacaggagcgagcaagaacggcacggggtggtggtgtcgtcgtcgtcgcccaaactggaggatttcttgggcgcgagcgcgagcacggcgatggcgctgagcttggacagctccagcttctactacggctgcggccacggccacggccacgaccaaggcgggtacctgcagccaatgcagtgcgcggtgatgcccggctcgggcgggcacgacgtgtacggcggcgggcacgcgcagatggtggacgagcagtccgccgcggcaatggcggcgagctggttctccgcccgcggcaatggcggctacgacgtcgacggcgccggcgccggcgccatcgtgccgttgcagggccacccgcacccgctcgccctctccatgagctccgggacggggtcccagtccagcagcgtcaccatgcaagtcggcagcgcccacgccgacgccgtcaccgagtacatcgccatggacgggagcaagaagcgcggcgccggcaacggcgctagtgccgggcagaagcagcccaccatccaccgcaagaccatcgacacattcgggcagcgcacgtcgcagtaccgcggcgtcaccaggcataggtggacggggaggtatgaggcgcacctctgggacaacagctgcaggaaggaagggcagacccggaaaggccggcaagtttatctcggcgggtatgacgtggaggagaaggccgcgagggcatatgacctggcggcgctcaagtactgggggacgtccacgcacgtgaatttcccggtggaggactacagggaagagctggaggagatgaagaacatgaccagacaggagtacgtcgctcacctgagaagcggcttctcgcgcggcgcttcgatctaccggggagtcaccaggcatcaccagcacgggcggtggcaggcgcgcatcggccgcgtctcgggcaacaaggacctctacctcggaacgttcagcacccaggaggaggcggcggaggcgtacgacgtggccgcgatcaagttccgcggcctcagcgcggtcaccaacttcgacatcacgcggtacgacgtggacaagatcatggagagcagcacgctgctcccgggcgagcaggtccggcgcaggaaggaaggcgccgacgccgcggtctcggaggccgccgccgcgctggtgcaggccggcaactgcatgacggacacctggaagatccaggcggcgctgccggctgccgcgcgggccgacgagcgcggcgccggccagcagcagcgtcaggacttgctgtcgagcgaggccttctcgctgctccacgacatcgtgtccgtcgacgccgctgctggtacagggacagggggcatgtcgaacgcgtcctcgtcgctggcccccagcgtgagcaactcccgggagcagagcccggaccggggcggcgccagcctcgccatgctcttcgccaagcccgccgcggcgcccaagctggcttgcccgctgccgctggggtcctgggtgtcgccgtccgcggtgtccgccaggccgcccggcgtgtcaatcgcgcacctgccggtgttcgccgcgtggaccgacgcatgaacaaacatccgtgtcattaccagggtacggttcttttggtttgcttagagcgtgctttttagctgggtaaggttagctgcgtagcggtggtctgatcagcatatgtgagaggaactagccatgcgtgtctgctttggcctcctgcgattcctcctccagttgcgttgcgaggaggtttctttttgtaataccggggctagatagcacagcatggatctcctcctgtagccaacactaatttggagtaggatggttagtgttgatctcctaacttcaattaggaaaaatatgccaagtaagataagtttaaacctgtgcgctttgcaattcatcaatgagctgggattcag

SEQ ID NO: 28950 - DNA, 2556 bp, Zea Mays
cccgcactcaccaacagaaagggaaaagaccatcctacccacgccagctccggagttccgacgcaacttcccattccgatccacatcagccccgtcgctgtctctccaggatctggagaccctacccgcctgagccctcagccggccgcgcggtgcggcaccgcaccaccgccaccgagccacgaacccgccggagtaccgacccgcctgcgccctccgctggccgtgcggcgtggcagcgcaccacctacggcgggctgcggcaccgccccggccctcgcaccagttccgcggcgacgtggtccagcagcaccgccaggccgcctacggccatttcactcgcggcttctgagcatctacctgcacttcttcaattacctgcagctttcatcgtatttcctttgcattgcataccgtgcagccacctctgcacatgatgtttcggatgttatcttattattaaaaaactagatttactcatgtttttcttcctctgtcattattgctgatttggtaactaatctttctgtggggtttatgcactgttaatttttccctgtcattttaggtctaatttgtattcgacactctcatcgtagtaactgcctcataggttttgtgccctctgtatacatctctatcggctccatgtccaaggcactgcaccacccttttgttatcaggttttaaaccggcttttggaattgtacacatggatcaatttgtgggagtggaaattagagcagatttctgtgcttttttttttccagcacatctgccagactagtatcatcagcaattgtccatcgcagcatagcctgatggtcaagagagagatagtttacgtacctgcaagtgtgctcaggcaggctggccccggccggtctaattctgcagcctcgcatcgccaaacagagcatcaaatctttatctgagagcgactccgtgtctgaaggattggtgctcacgtcgcgacatccaaagccagccacaagataggcacacagcgctgctccgcaccaagaatgacgccaagtgtcacgccctggattcctctggcacccaccctcctattagtactctgcactggacttgcagcgctgtggatccatcactgcaacttcatggattataattttgacaccagcgtcctcgacgaggacgtcgccgggagaggaggcagggaagggagctgcccgccagcatgggccagggcgtgcgacgggtgccgcgcagcccccagcgtggtgtactgccatgcggacaccgcgtacctgtgcgcgtcatgcaactcgcgggtgcatgccgccaatcgcgtggcctcgcgccatgagcgcgtgcgcgtctgcgaggcctgcgagtgcgcccccgcggtgctcgcgtgccgcgccgacgcggcggcgctctgcgctgcctgcgacgcgcaggtccactccgccaacccgcttgcggggaggcaccagcgcgtgcccgtcctgccgctcccggccgccgccgtcccggctgcctctgtgctcgccgaggcagctgccaccgccgcggccgttgctggtgacaaggacgaggaggtcgactcctggctgctgctcaccaaggacccagacgacgacgacaagaaccacaactgcagtagcaacaacaacaacatcagcagcaacaccagcacgttctacgcagacgttgacgagtacttcgatctggtcgggtacagttcctactgtgacaaccacatcaatagcaacacgaaacagtacgggatgcaagagcagcagctcctgctgcacaaggagtttggagacaaggagggaagcgagtacgtggtgccttcacaggtcgggcagcagcagagtggctatcacagagttattgggacggagcaggctgcctccatgactcccggggtcagtgcttacacagattccatcagcaacagcatctctttctcatcgtcaatggaggtgggtatagtaccagacaacatggcaacgacagacatgccaagctccggcatcctgctgacgcctgctggggccatcagcctgttctcgtcgggtcctccgctccagatgccgcttcacttggcctccatggacagggaggccagggtgctgaggtacagggagaagaagaagagcaggaagtttgagaagaccatacggtatgcaacgaggaagacgtacgcagaagcacggccgaggatcaagggacgcttcgcgaaaagatcgtctgatatggatgtcgaagtggatcagatgttctcagctgcggctctgtcgtctgatggtagctatggtaccgttccatggttctgaaggaactttagtgagacattatatgtatcatacagtataataattgtaacatgcgttgaccatatatagtggtaaggtcaagtacaagtagttctaggaaaccgatggtaatgagtgatattgtgtttgttttgaaagataaatgaacaaatatcttagcatttgagttttggtttgtaattgcatgcacatatcaggtctatacagaattttcagtcacttaaacatttttcactgaacagat

SEQ ID NO: 28951 - DNA, 1940 bp, Zea Mays
caatctcgcagtcctttcttcctccgacctccgcagcgaatcggaccaggggatagggttccgccgcgcctctccaaccaggcgccactcgccagggtctaggctgatcatggaaggaaacgtcgcagccgggaagaggtcccggacggagacggcgaacggggctgccggcggcgggaagcgctccaaagtacgattgggtgcccgtttggtgagggatgtcgttttctgcactttgtccctggcggttacccggcagttgcaaaaatgctcaatctaggtagccctgctgtatctgcgccatcaagaactcatgtggatcacgccgctcttactggcacctctcattcagcttcgtcaggcaagacacgcatgtgcaccaagtacaatactacagaaggctgcagatttggtgataagtgccactttgctcatagcgaaagagaacttgggaaaccagcgtacatgccttatggagaacctcctatgggcggtcgatttggaggccgacctgaacctgtgcagccagctgccatgggccctccagcaggaaactttggtgcctcggcgactgccaagatcagtgtggatgcgtctcttgccggtggcataattggtaagggcggggtcaacactaagcagataagcagagtcacaggcgtcaagctctgtatccgcgaccacgagtctagccccaacctgaagaacattgagctggaaggcaattttgaccagatcaagcaagccggcgaaatggtgagggacctcatcgcgaccatcagcacgagcatgccggcgaaaaactcatctgctgccgtggctccagcaggaggccgaggcggtggtctgggtagcaagagcaactacaagacgaagctatgcgagaacttcgcgaagggtgcctgtactttcggcgagcggtgccactttgcccatggcgagaacgagcagcggagtggtgctgtttgagagttgaggtgccaactctagtttaaagatgctgggggtttcgaggccttagtcagcgggaagaccactgagatgcagaggatcgatgtcaatgagcgaattgttggacttgagcgcttgaatccgacaccacgccccacaacatcgccgtttctggagggtcgatggaattttgaatggtttggtgatagcagtcctggagcatttgcggcccgccttttgtttgagaggtcgcctacatcggttgcacactttatgggacttgatgtgttgatcaaggatggatactccaagctctcatctaacctcaagtttctaaacacgatacaaagcaaattcctactgactactcaattgtccgttgagggccccatcaggatgaaagaggaatacgttgagggccttatagcgattcccagaatcaatgaagaatcattgcctgaacagttgaagggcttgcttggccaaactgcaggagctctacaacaacttcctagccctataagggaagctgtttcggaggggcttaaattgccactcggtggggcatttcaacgattattcatgatctcttacttggatgaagaaatattgattgtcagggacgctgctggagcaccagatgtcttaaccagactagaggggccacaaccgagtccaggtgatggcacagcagatgcagtgatatcagaatatgaaagctaatggctgattactaactgtaactccacacctagttcctgtttacggctcctttctcctttggtcgtttttctcaggcctgcgcatgtataaaggctgtagtgttgtcaacgataacgaccacttgagtgatttttacttgcatccctttcggcggctattctgattttttctgaatgcgagcaataatatcagatgaccatcatcattctttatatgaatcaatgtaaaaaaaaggctctgcttgttcaaagctaactgatacttcc

SEQ ID NO: 28952 - DNA, 1891 bp, Zea Mays
gtggctggctgtgtcctccatcctttcaaggacctcgggaatccagaaaattccggtggtcggtgcccacggacaggcgtgtgcgccacgagcccgacgaacaagggaacgaggccatttccaccggtcaaactaggagaagcaagcaaagctccccgccattagtagaatccgcccgaagtctgccccgctcttcggcctcgtcccttctctccaggtgctaatgagtttggccagttgggagatgggacagaggacagcgcgaaagagcccaagaaggtcaagtcattggagactgagtttgtaaaatcagtatcctgtggcgcacattgtacagctgccgtcgctgagcctcgagaaaacgatggcacggtatcgaaaagcaggctttgggtttggggacaaaatcagggttcagattaccctcgtctattttggggagctttcacaccaaacacggtgattaagcaagtttcttgtggagctgttcatgtcatggctctatccgaggatggtctactgcaagcatggggctacaatgagtatggtcagcttggcagaggtcgcacttctcaaggacttcagggagctcgtgtgttaaatgcttatgcaaggttccttgatgacgcccccgagcaagtgaagattgttagagtgtcatgtggagagtaccatacagcagctatatctgaaaatggggaggtgtatacttggggactgggaagcatggggcagcttgggcattgctccctccaatctggagataatgagctgatccctaggcgagttgtggcccttgatggtatagtagttggggacgtttcttgtggaggtgtccactcttgtgctgtaactgaagggggagctctatatgcctggggcggaggacatgtgggtcagctgggagtcgggcctcagggtggcttcttctcttgctcccttaatggatccgacatgctgctccgaaacatcccagtcctggtgataccctcaggtgttcgtcttgctacctgtgggcactcccacacacttgtgtctatgaaagatggccgcatatatgggtggggctataatagttacggtcaagcgacgaacgagaaatctacttatgcttggtttccctctccggtcgattggtgtgttggtgaagtgagacgactcgccgctggaggtggccattctgctgttctgactgatgcatgttcgctgaaagagctgtgcgaattcaagctcgcagagaccgtgaacctttcaaatgctcagctaatagaagatgttgcatcgcggactggtgcggatgccttggcacgcttgtgcgagaaagtaagggagcatttggataaggaaggagaatgtgaattcctggaaaagcaagtggcagaagaggtcaacactataggcagttaggccactagcaaaacagttcaagcagtctgaggctgaagccagtctgggattaaacagggagtcatctacaattgatagcttgacctcccagtaaagttactgattcggacattaattgttgtggtgatcatggaaaatatgtgactcgtcaattgattctgattggtctgtagacctccattggtggtgagcctctcagctgcatcggggaggcgcagaggctctatatgtgtcatgatcttgttccgaactgtcaggttgctgtaatgtagccaaatggaaacctttgtatccctggaacttgaaaggcatgtacctggtatctgcagccagtaagtttggcaatctgaattcgatgccaattcctgggcgtattcgaacgtcctacgtccatgtatttatttcagttcatgtgcatctaaacaatattggtatagcatgaaatttaagtacatcaacacacatttaataggattaacagaat

SEQ ID NO: 28953 - DNA, 2309 bp, Zea Mays
aaaaccgcccccggttaaaaattccgaacgcatcacgcaatcgagaaaaacacaaaccgaaaaacctcctctacagtcccatctaggcgcccctcctcggctccgatccagtttcgccggcggccatgtcgcagccggcggcgacggtggccgcggcggcgcagccgcagggtcgcggccccgcggggcgccagggcggcctggggcagagcatcgcaggcatcgtgcggatggcggtgttctggtactttgcgtccaagttcttcgggcccaagcgcccacccgcggaccccgggatgctcatgtccaacctcttccagaagggcgagccaatggatatgtggatgtatttgtcagagaacgagaagttcaacgattttgctaatgaggatgcacttatttggcacgaggcaaacataccatatgcagtctggggacctaccagtactagaacacggtatcccaacaataatgtacctcccattgttgctccatatctgaatgtggatccagttacgggcgattattatcctacagtattcttcaatgagttttggctattgaaggataaattaatagcgctcaacgagactgtggaggaattgcccttaaaccttgaagttggtcctattagcatgaccaagtggcaattatttttacagattgagcagtccttccaggttcatcgtagttatggaagtatgcttgaaggcgaggctgatgaactcaagagggtttttcttgaaggaaatccttatcttcttggattgactatggtcgtttctctattacactccctgtttgattttctggccttcaaaaatgatatccagttctggaacaagaacaagtccatggaaggtctatcggcaaaatctgtggttctgaattttgtgtgtcaactagttgttttcctgtaccttcttgacaatgacacttcatggatgatccttgctagctctggagttggtgtgtgcattgaattttggaagattggaaaggcaatgcatattgaggttgatagaagtggaaaaattcccatgttgaggttccgagaccgtgaatcatatgcacagaataagactaaagagtacgatgccattgcaatgaagtaccttacctatgtacttttcctccttgtggtcggtttctctatctattcacttaagtatgaaaagcacaagagctggtactcatggatactttcttctatgacaagctgtgtgtacatgtttggtttcattatgatgtgcccccaattgtttatcaactacaagctgaagtctgttgctcatatgccatggagacaaatgacctacaagttcctcaacactataatcgatgacctttttgcatttgtcatcaaaatgccaatgcttcatcgtctctcagttttcagagatgatgttatcttcttgatatacctctatcagaggtggaagtatccggtcgacaagaagcgtgttaacgagtttggcttcgggggcgaggacgaaccggcagcccaggaggctgtggaaggaagtgattcagctgcagcaccccagctaacggaggccgggtccgagacgagtacggaggacaagaaaaccaagtgatctccaatcttttgatcatccaaatacaagcatacatctctgcaacatctgccttcccagcgggcgtgaaatttctttgctgaaactggatgctggactcttgcggtcttgtcttaccgagacgtgctgaccataagataaggcgtgtaacaagggacacgatagtcttttgtctagagcagcgggcgaacaggcacacactgtcacaattacgtttccagttcgtcttttagcagccattactagttgatatgcttgtttgattggtttgtgtacaaattttgtgcatttttcttaaaacacacaattggcggctcgtagtttcatcgtgatgtgttttccctaatattagtgttgcaacgagtgtccactagtgagtgcacacaacggtgcggttctaaactgttcctcacaagaaacaattgaatccctgccaagagaagtagagaagcatgttggtaaccaaattattagatctataggccatatttggttgcaaggatgggttctgattcttgctaggggatggaagcgggttctgttgttagtctccggtgaatcattttatgtgaagcggttgttttgaattagagaaagaaaagagagagatcatttcccagttttgaattgttcggatatctgccaaacacacggtgcgttcctcgggcagtttctctttttatggctggcgctggctgcaccagagtgaaa

SEQ ID NO: 28954 - DNA, 650 bp, Zea Mays
  misc_feature (650)..(650): n is a, c, g, or t
aacggaaactcctccgctccgctcctcactcccgctcccccgctcgctgttggtggaaatctagggtttcggtggggttcttgccgctgcggttgttcgtgcggcgcggatttagggagggttctgaggcgagggcttttgccccctcgagcgcaaggctcactaaatggagtctcacaatggcgaggccaatgacttgcctccaccacctcctctgattgctggtgttgaaccacttaaagctgatgaaacaaagatgccattgaaacctaggagtctggtccagagaaatggatttggcagaaaggggcagccaataaagctgataacaaatcacttcaaagtttctcttgtgaatgctgaagaatttttctaccattactatgtcaatttgaagtatgaagatgatacaccggttgatcgcaaagggtcaggaaggaaagtgattgaaaaactgcagcaaacttatgctgctgaacttgcaaataaagattttgcctatgatggtgagaagagcctgttcacaattggtgctcttcctcaagttaaaaatgagtttactgtcgtggttgaagatttttcaactggaaagactcctgcaaacggcagtccaggaaatgacagtcctcccggaagtgaccggaaaaggn

SEQ ID NO: 28955 - DNA, 830 bp, Zea Mays
atataccctttcgtctccgcccagcagcaacggcacccaccgaatccgcccctccctctttccgttccgcctcgttgcgctcgctctcgctgcgccgcccgccccacctcacggagctcacggcaacaccggcagggacggaaaaggaaagccgaggaggcgaggagagagagatacaaggcaggcagccaggcacaggcagcccgcggctggctacggggccaaaacccttacgcgcgacgcggccccctcctcttcttctctctcccaccaccgccctccccttgccatttttgccgcaggagccgccgccatccgatccggaagagggaggaggggggagggaggaggatctgtgtcccgattcgattggagctctcgtccccggcggtccaggatggtgcggggcaagacgcagatgaagcggatagagaacccggccagtcgccaggtcaccttctccaagcgccgcaacggcctgctcaagaaggcgttcgagctctccgtcctctgcgacgccgaggtcgcgctcgtcgtcttctccccgcgcggcaagctctacgaattcgccagcggaagtgcccagaaaacaattgaacgttatagaacgtacacaaaggataatgtcagcaacaagacagcacatcaggacattgagcaagtaaaagctgatgctgagggcctggcaaagaaactggaagcacttgaagcttacaaaagaaaacttttgggtgagaggttggaagaatgctcctttgaagaactgcacagtttggaagtgaaactcgaaaagagccttcattgcatcaggggaagaaagctggtcttcc

SEQ ID NO: 28956 - DNA, 2635 bp, Zea Mays
agtagattttgtagttcatttcaatcaaactgtgaacttgtgaagcataagctaaagcatacattctcatctttggcattgaaagaactgaaccatagaaaaattaaagacaggagcacttctccagattcaatgccaatgaaagaacttatagctgttgcacaagctagaaggttttctcgatcaacttcctttccagataacttcctaaatgccaagagtccgtttgataatattcagcagaagaaattagcagcacatggagccaatgcagcgcgaaggtctttcaaagatttcctcagtacattgacaagaaccaaagaaagtatatcgcgcgcgacacgtcttgctatggaatgtgctaaatttggcattgctggtgaggcaattgacattatcgttgaacatctggaaaaggaatcaaatttgtataagagggtggatctcttctttcttgtagattcaataacacaatgctcccgcaatcagaaaggcggagctggagatgtatatccctctctcattcaggcagttctacctcgaatactctatgctgctgcacctcctggaaactcagcttgggagaatcgaaagcaatgtctcaaggttttgaaactttggcttgaaaggaaaacactttcagaatatatcatccgtcaccatattagagaaattgagactatcaacgaggcatcatttggaagttctcgccgtccttcaagaacagagagagctctaaatgaccctttgcgtgacaatgaaggaatgcttgttgatgagtatgggagtaatgctggttttcagctacccaacttaatttgcacaaaagtacttgaagaagaggaagaaaactcttctgaaggcaggagcttgagctttgaagctgttacacctgaacaggatgccccatataatgatgacaatgaagaatctcaaatgcctgttgagaagcatcaccatattctggaagaggttgatggtgagcttgagatggaggatgtagctccaccatctgatattggggcaaccaccaagtgccaaccagagcaaagtgacaccaatcgtgcaccatctgaccaacgcccttcagatgctggccctccacttcctgtggaccggcctccatctcctccgccattgccatcatctcctccacctgtccccgttcctcagagtgcacagatgcagcctaaattacaaatggcatctgatcccatggcgccacatcctcaaagagctacatatagtgttcaaagtcaacaacagcattctattgcagagcacccaggtaacatgaattcttctgttgcaccattgccacccccaccgtttaacagttcaggatatggagggcaacaaaatcagataccacctcccccaccaatggcaccactcaatcctcctggtccccatggcagtttccctgctcccccagcaccttaccatgggaacaactatcatcggcctccaaccacatccatgcctaacgagggatatcatcagcaaccaccaccccctccaccgcctccaaatcaattcccttctgtgccaccagaacaccaacataggccacatcactggggtaataactgtccaccgtatcccgagagatatcggtacaatggacatgatcgaggtaatcacagacatgatagaaggcatcatggacatgacagacaacaccattatgatgatagaggataccactacgatgatagaggatatcactatgatgatagaggccattactttgatgatagaagacatcattttgacgatagaggacatcactttgatgagagagctattagggggccaatgcacaatgatgccgctgaccagggaagatattcttttcctccaggtcctcctcggattcctgaccattttgaagctccaccagccccaatgcactatgggcgaccatcagatcctccgccaaggccttgtgcaggctggtctaggccgcctaggatatctgataactattctccctcgagacattctgtggagcctccagtttcacatacagctggaggtcatggtggatggagacctagataacctttttcggtatcgaagcggtgctctgatgctttccttggtctgtgggggcttaacctgtgggagagtctgtctggtgtctctgcttcaggttgaaggcacccacggaggtggagcactccaggaaagtgggagctggtacctgcctccttgtacagatgtatctcatggattctacggcggtcgggctgcctgaactgctgtttgtaccctagtaggggtttagactgcgcgaccacacgcagagctgagttgtaggggtgtagggtgtcttctatcaaccgatcgtagtcttacattgtactgtttgttagtgcaacagtcctcgattccattgctgaattcctcctggcctcatcagacgacagccagctgctctgatgtcttgccgaaactgtttgagcacagcgtacatatatgcctaaaaaagagaaatataaatcattttgcccgttgcacctgcttatatataagagcatggtcgaactaaggggtgtttggtttctaggttcgctcaattttattttatttaatatggaaattttagttaacctagaaattagtctctaga

SEQ ID NO: 28957 - DNA, 1018 bp, Zea Mays
ccagttataactattatccagctctcgccatcctttggcttatgatttcactcgaatactgagctccttttatttcaaggggtatactttattgacaaaaatacagcgcatcgaatggaacaataggggtatgtccagcgcacatgcaatttttatcacggctgtatcattatatattgtcacgtcgactgatcttttctccgattgtgtcaaggggcctattacattccgtaattcgataatatccacttctgcattgggggtttctgttggctacttcatcactgatcttgaaatgatcttctggctgtatccttcccttggtggaatggaatatgtcctccaccatactctttctctggttgcaatagcttacacaatgttgtctggggaagggcagttttacacatacatggttctcatttcagagacaaccacccctgaaatcaacttgcgatggtttcttgacactgctggactgaagaaatcaagtgcttacttggttaatggaattctgatgtttgttgcatggctggtggcaaggatatttttgttcatgtatgtattttaccacatttatttgcattacagtcagatgcatgcctttgggtactacctgacgtttgttgtgccatcggtgctctttgtaatgaacacaatgtggttcatgaagatcttaaaaggcgtgatgaaaacactggcaaaatggtcatgatggatgatgccaagaggatcccagaactatcaacaggatttggtctttctggcatcattgatctgtaaagttatggatatcagggtaactagagaaagttaatatgtaaagtattagcaaacaagctagattaggtgaaattgccctattttcagcagtgctggaagttcataaccagtttggtttgtaccggagatccagcacgctgttctgcttacccccaatgccatgtgtatatctggagcattttgcttaccccaatgccatgtgtatatttggagcattttaatggatggtttgttc

SEQ ID NO: 28958 - DNA, 813 bp, Zea Mays
caaatccacaaacttgagatagtgatttggggatctggagcctcccctcatttgttggctcccacctcgtgtattcttcatcttcatagtggagttttgctcgccgccgtccgtgggttttctctctgcaaggagtttcccacgtaaatctccgtgtcttcacttgcttggaaggacccattgccaattggactgcactgcagagtctcatgcattgctcacctcaaagaatgacactgcaaacaaaggtggaaacgatgttactcctatctgttacggatgcactacctgtgtctgataaaggaaagtacaattctagcatatgatacctcaaacttgattaattatagataaaagaagttcagcttgtgtttcagaaacgtcatgctgagtacaattctagcatatgataacttactgcagcttggtaattacgatttactagctgcacattcccaaatctgcagcatgtgcgttcaacgatgaggtgtttggacgaaggagttttgcaccttcttccattgttaagagcagtagatggtgaggaagtacctggagaggtcgtggtgtcgacggagaagctggcgagggggatgacgaacgacttaatcctccccgtgcagtacttcgtcttggatgccatcttggacgtgttctgcagtacggtgagcatgagcacttctcagaatccggtggagcaagcaggcaagctgcatgcagctccgtctccgaacgagacctacctgcatgagaaggtagctcttgccatcgccggagttcttgatgaccttgaagctctgaccgtagtatatc

SEQ ID NO: 28959 - DNA, 2048 bp, Zea Mays
gttactctggctatgtttattgataattatgtatatctataagcgtgttgtttcacttgtaatttgactatcattgttatctcatatatatatgaagtgattttagtttgtcaaataggatattgtatatgggctaatggtacaaaggatctttaaaattctctactatattaaagtaccagttttaacaatttataaaaaaacccttacacttctttaaattctaacccgcggtacgttgcccccttctcgcgctcccaaacaatcgtccagcctcctccccttccattctcctccccacgccgccatccgctccgctccaaccacgcttatagcttatatccctcaccggttgttattcctctccctagataagctttatctcaccaaactaatctcgctataaacaaggacccaatttcatccagtaatcccgctataaacaaggacccgatttcatcctttgcgagtaagaagcaaaaaaccaaggtgggcgaggacgcgaagaagcaagggagaaggacagagcgggaggaggatgctgcctgctgctttccctgctccttgacacgaaggccgccctggatggtggatccgaggggttccatggcctgccccatggcgtcaaggcgacatgctacgccgaggtggaggccgggttgaacgccgtataccggcagtgccggagccttgaccgctccttggggccgctagagatccgcatggtgtccctcgacgccgcgactacaacatcaccatgtccggcgccagcgcgcaagaggagttgtccatgtggcatcatctctggctccgccactctggtttgagggatgccgaggggttgtacctcgccagcgattcgaacaagcggctattgatctacttcccctttatgcaggtcaagctacattccgtgctattcaaaggccccaaggatgacggtaagatttgcaactccctgtctgtctgggtctgtgagctaacggacttgtgccaaattgttagtttatatgttcaaagtagatagaagtactactttcctatgagttagtttcagcaacaaggatgtggaagtaaaccaactgctgctctaacggttacatgcagaattgcagaccatgagttcaaccccatcttttcacatggcactcatcagactctttatggaatagttaacattagtgttattaagaacaaaagttagattcataattaagtgagtctataattttgatgtccatataaaggagcactcatgtactagcgttgaatagatatttagctgaaatgcatatttatgtaataaatgtcagcaatggcaatgactatctaccaatggacatcgtggagctatcttccgatcatttgatagagaataaacctttgctgctaaaggatgtcaagttctaaaacgtacacgggcttaccagtgcttatggacctttgtttgttcgggacactacctttgctaatggggaacaggtaagcggtaggctatatatcttgtttctcttttgaaataatgcaaaatactcttacatctttacataagctttaatgttgattgttgcagatttttttggtccagggttaattatattttattttgttaatataattagaaatgatcacaataagggagctacatttgagttatttgagttgtagggtgcgttcaggagactatagggtcgtgggtgtaagatatggtttagagaatgtgtctactggaacatcctttgtaccaattccctgtatacatctatctatcgttaaaacaccttctattggaacatattttcactatacatacacttatgagtaaggtatttagctcaaatttatctatacaatatccttttgtattcctaaatagcctgccgaaagaagaagatagccacaattatgcatgaaagctccgtttctacgattgtataccgtcacaacgtacgggtattggactagtttgtatagaaaagagagaagggaaaatctgaattttcttgcctctacatgtccatctccaacaaagcaacaactacaaccca

SEQ ID NO: 28960 - DNA, 1273 bp, Zea Mays
catcccctgtttcaaacccattgccatccatagactgggctttggattcctagcaattccgttcccccctgcatccgcgcccgcctgctcctcgtcctccctccacccgtctcctattcccttcctcccgccgcagcagcgagagcagagagcagagcggaacgagcaaatcttggggggggggggggggtgtcgcacccgctctccccgtgctgctggtggattcgttcaaggcgggggccgcctgcctgcccgcccgcttttccgtaccctggtccccggttgggttgggttggatttggttgcgaggtgttgttgggggtgggcgctcgggtggcggagtggttacttccccgcttggcctcttgctgcgccccgctgggccgtgtcgtgccattaaagccggcgcctttggtttctctctccacctctctctatccgcccccgccccggctctctctctagctgcagattggtgcctcacccctagcggtcggtggttggggccgggttccgacggctgctcgggagctcgactggggcttggaagtccaaagccgccgcctcctcgtggcgcgccgctccggaattcttgccttcttgggctccgaatctcgccgcccggtgtttgatttgcggcgttcctagcgaattcggggctgatttgcccccctatggcgaggatttgagtggactcgagaggaacaagtagaggggagtcctgatttgggcccctgccgtggtatgtgccatgaggaagctcttcttctccgagtcggcctgcaaggagaccaagctccactgcgcgccccactcatggctgcccctcgagagggggaagctctccaagttctccggccatgccgccgccggctcctccatgctctaaacaaccttggaagtgtttatgtggattgtgggaagcttgacctggcagctgaatgctacattaacgccctaaagatcggccacaccagagcgcaccaaggccttgcgagggttcatttccttcggaacaacagagtcggtgcgtatgatgaaatgaccaagctgatagagaaggccaggaacaacgcgtcggcatacgagaagagatctgagtactgcgagcgggagctgacgaaaacggacttgcagatggtcaccaaactcgaccctctgcgagtctacccctacagataccgtgctgctggtatgtgcttttggctgttgattagctggagcgttctttcttgctactactattactatactacccgtcggtcaggattag

SEQ ID NO: 28961 - DNA, 1414 bp, Zea Mays
ggaagaaggatgacatatctgatgaagcggtaactggaaaaacttaccgaactgattactttgacaagatcgggcggagtatccttgtcatgagacctggatgccagaataccaagaatgccaatgggcaagtcaagtacttggtgtactgtatggagaatgcaattctaaatctgccacatggtcaggatcagatggtttggctcattgattttgctggtttcaatttaggcaacttgtcaattcaggtgacaaagatgacggcagatgtcctacaaggccattatcctgaaaggttgggtgtggcaattctttttaacgctccaaagttttttgagcctttctggaagatggcaagcccccttcttgagaagaagaccagaaacaaggtcaaatttgtatactcagatagacctgacaccatgaagatcatggaagaccttttcaacatggatgagttagaatgtgcgtttggtggcaagaacccagctactttcaatataaatgattatgctgcgaggatgagagaagatgacaagaagatgccatcattttggagccctgagaattcagctcttgcttctgagccatatcagatgagcagccaaaaagccctaggaagcgtttcaggtgcgaagactgaagatgctggatctggaaagatggacgacatggagactgctcctgaaaagagtgaagaatcgggtactgaatctggagaggaggtacaaacacggactgaatcaagcacagttgagcagaaaaacttgcctggagaagataatgccccagcagataaaagtggcctttaatctgatctccgggtatcaccatgaaacataaatgtgaaacattgataggagctctaccacatttcactaaggtttgaacatgaaaggcgacgagaaactcttttaacacggcaaatcggcatgcctgacttgttttgtagtcggcacctatttctctgtcctcaagatcttatttggggaaccttttcatgacagaatgagatctaccagatggtaaagaactaataccatactgttaccctcagttttcatgacagaatatggtctggtgttcagtttctgatatgcccttgtattttcgctggaaaagaaaaatactattgtatctggagctgttgggttaataatatatcattgttcagtttgtattctgttcagtaaccaccattgactttcagttagtatagccccacttggtacaaagacaagtgttaggcttcaaaaacttgggccttttcgctacaaacgtttatgatctttgtaacctactctatcatcacgagtcaaaacttcagaagtcgtcatagaagctgtgtctcttgggtatcgcgggggagtcgcagtggatcctagcgtccagagtcgagtagccctttctgatc

SEQ ID NO: 28962 - DNA, 1963 bp, Zea Mays
cctgcatgggggagtcttcaccgggcaggcacatcactagctagtacagaaaatggagcaggccggtgacgagacgccgggagagatcgggcgagaggctgctcgccgtgaagctgcgctccggagcggcggcggagacgccggagagcgcgtagacaaggctgtggtggacggcggagaagacgagcggtttcgcgtgcagcggaaatggaggcggttcttggcccatgtcgggcccggagctctcgtggccattggcttcctggatcctagcaacttggaaaccgacatgcaagctggggctgacttcaagtaccagcttctgtgggtgattttagtcgggatggtcttcgcgcttctgatccaaacactggccgccaaccttggagtgaagacaggcaagcatctcgctgagctctgcagggaagagtacccacgttccgtcaacatctgcctgtggatcatcgcggagctggcggtgatatccgacgacatccccgaagtgctgggcacagccttcgcgttcaacatcctgctcgggatcccggtgtgggccggagtcgtcctcacggtgctcagcacgctgctgctcctcggggtggagagattcggggcccgcaagctggagttcgtcgtggcagctttcatgttcgccatggcggcctgcttcttcggggagctgagctacctgaggccgtccgcgggggaggttgtcgagggcatgttcgtccccaggctccgagggaaaggcgcggcagccaacgccatcgcgctcttcggcgccatcatcacgccgtacaacctgttcctgcactcggcgcttgtgctctccaggaagaccccgcggtcagtgaaaagcatcagggccgcgtgcaggtacttcctcgtggagtgcagcctggcgttcgtggtggcgttcctcatcaacgtggcggtggtcgtcgtcgccgggtccatctgcaacgcggcgggcggcaacctgtccccggccgacgcggccgcgtgcggcgacctcactctgcagtccacgcctctgctgctcagggacgttctggggaggtcgagctccgtcgtgtacgccgtcgcgctgctggcgtccgggcagagcaccaccatcagctgcacgtttgccgggcaggttatcatgcaggggttcctggacatgaggatgaagagctgggtgcggaacctgaccacgcgcgccatcgccatcgcccccagcctcgtcgtctccatcgtcagcggcccgtcgggtgctggcaagctcatcgtcttctcgtcgatggtgctgtcgttcgagctgccattcgcgctcatcccgctcctcaagttctgcaacagcagcaacaaagtcgggcccctcaaggagtccatctacacggtggtgatcgcgtgggcgctgagcttcgcgctcatcgtggtgaacacctacttcctggtgtggacgtacgtggactggctggtgcacagtcggctccccaagtacgccaccgcgctcctctccgtcgccgtcctggcgctcatggccgcctacctcgccttcgtcgtctacctggcgttcaggagggacgcggtgcgcacgtacgtgccggtgtcggagcgggcggaggacggcagcgggtcgcaggcggtggcggcggcggcctccgccgacgacgctgacatgccggcgccgttcaggaaggacctggctgatgcttccacgtagacacggagatgctctcgttcgggcagtgaccatatcgatcaatcctgttcatgcatatgatttgtggatcgtcgtcgagaggcgtgctggctcattcgtctgctcagtgaccgaatttgttcgtgtacgtagattatcataagatcttacacgcagccgcataccaagccacacgaaccttcgtgtacggttttgatatatcccatatccaacagttcatccatgttttacaatatagataatattattcgcaga

SEQ ID NO: 28963 - DNA, 1567 bp, Zea Mays
tttgttttcatgacatgtgattttgtattaaatgggtgcacatcaaatacaaattggccactaggtacatttacagcaagcagctgaagtgaaaagaatagttgagtgggtcatgggaaaccttgatggaacgttaggtgttgatgctagtaatcctacgttacaacatggtggtacagttattcctgatacccaagaaaatgactcttcaagaggctctaatactcttacacggagtacttccaagatcccatttgtccaaggaaaaacaaatgatttttccattataaattcgttaaagaatgttcgggctgatgtcttgagagagaacactgaagcagttttcgcggcttgtgatgctgcccatggacggtgggctaagctgctaggtgttcgttctgctttacatcccaggttaaggcttcaagaattcttgatcatctacaacataacagaagaatttatagctgctacagaaaagattggaggcaggttgggttacaacattcgtggaatcctacatcaacaatcgaagcaattcgttgattatcagcataatgttcggatgacaaaaatcaaggcagttctagatcaagagacgtgggttgctgtggatgttcctgaagagtttcaagcaatcgttctttcactttcatccacttattcttctgttaatggcatggagatgcctagcactgatgataactcaaagtttagtgatcatcggtctacaagtcaagaaccgacatattcagctaaaaatattgctgataatggcaaagtaacatccgggactggtgaaaacaaggttgaattcacttcacagactgaaaataatgttgccgggaatctaaagtccaccttgcaaacgattgtacatggaggtgttggctatcatatggtaaactgtggtttaatactgttgaagatgttatccgaatacgttgacatcagtaaatgtttaccatcactatctttggaggtggtccaacgtgttgtggaaatattaaagcttttcaacactaggacttgccaacttgttctcggtgcaggagccatgcaggtgtctggacttaaatcaattacgtccaaacatttagctttggcgagtcaaatcattagttttatgcattctttaattccagatatcaggcgagtacttttcctgaaaatacctgaagcgcgcaaacatctgttaatgtctgagctggatagagtagctcaggactacaagatccatcgagatgaaattcacaacaaacttgtccagataatgagagagaggttgcttgcaaatcttagaaaattaccccaaattgtggaaggctggaatggcccagaggataatgacgtgcagccgagtcaatttgctaaagctgttacaaaggaagttacctatttgcatcgcattctttcccaaacattgcttgaggttgaggtgcaaacaatattcaggcaagtggttcaaatattccattcacatattacagaagcattttcaaaattggaagtcaatactccctctggcaaagaataggtatgctgcttatttgtgcatcttttagca

SEQ ID NO: 28964 - DNA, 284 bp, Zea Mays
taggtatggaaacttcgtcatgaactgccatttgcatgggaggagaagggcctcaatgaactatgtggcatgctgaaaatagtagatggtgacataaagaaatgcgctgacaactgtggacatgtgatggcggtccaaaacaaacccaactttaagaaggataaatctcaaaagaagaatgacaaggctaaagatacgatctccaagccaaaccaaaagcccaaggctggaccagttgtagatgctgaatgtttttattgcaaagcagtacttggcctctatta

SEQ ID NO: 28965 - DNA, 745 bp, Zea Mays
gccactgcggcgtagagtgccccctacggcgcaatgcaaggggagggggctgcgaaggggcagcgttgcagttagtctgacattttacgccgtcagacgactggcagactgggccgccgccgccctaaaccagctgaggctttcgttggtctcttcgccggcaacgagcaccaccagtttaagatgtcagaagcacttcagaaagataaggaaattggtgaagaggaagaggaagaggagtatgtattgttagagttggacaattgtctttattcagacatatcgcctggtgctcagttcgtactctctggtttggatacattgacgcctaccttgatagtaggtgacaatctgaagatggtcggggaatatgatgaaactattggcacctgctatctattttctgaaagtgaaactgaaccaaaacctgcaagtgatgagctggcaccttctaaagaaaacacagaaacaccgcttaacagcagtaaggaagcgcccttgaaggaggtgaaccatctggccagcgttcaaaagatcctcaaatttaagccaatcaatgtggagcactcgcagcatcgagcatatcagcacaaggacaaggaactttagaggaaaaaaaatacctgctgttttcttcagtcaatgcattcagtgtacagttttaggttcattgaaatgaggtgggctgtatacttgttgaatgttgagttcatctatatatatgagctactatatcgatctgctt

SEQ ID NO: 28966 - DNA, 3580 bp, Zea Mays
cccattttgtttctgtcactaaataggttgtcttctttgtgctgttttgaaatagggtttattcagatgggactggacaataaaccgctctagatttccatttgcggtttaattagttggacggtcgattcaaccagctttcaatataacaagtttagttcaaataattaaaactgcaacaataactcagtgtgggaattctttcttagggaagggtcaaaggttcaaaggcttgtgatgttgccttttactttgttttttacatttatgatattgttgtcatttatcttcataatttctccttccattttttgtagaaaaacagctctgcaggaacacacatgaaaaaacaggcgtgggaggcacgcgtgatggaaaaaaaacggaggtggcacatgaaaatacagggtgtaaggagtggggagttgaccctaccaaagagataccttcaagtgcagctacaaccaagtacactgatttcctacttgcaactgcggctggaaaagttgatggcacaaaaggttctgacaaaatggttactccatttgagaagactaaaattgctgcatacattgttggggccataactccatgcatgaggctttatgcatatctaggcaaagaactcatggctttccttaaacaagatgaaaatcatccatataagaaatggattaacacatatgcatccagtgattttgagaacaatgcactccaaatagaagaattgctggacaaactgagtgtatcattaactggtgaggaacttgagattattggcaagctctaccagcaagctatgaaactggaagtggagttcttttctgctaagcttgtagaccaacctgttgtagctccactttcaagatattgtgatccaaaatataaactcttgatcttctctgattttgatttgacatgcactgttgttgattcgtctgccattttggcggagatcgcaattttgtcattccaaaaggcaagtcaaagtgggattgataataacctcgaccgtgcaaaatcgggagaactgagaaatttgtggaacatgctctctaagcaatacatggaagagtatgaggaatgcatggaaagactacttcctccagaagaatcaaagtcactagattatgataaactgtataaaggcctggaggtgcttgctgagtttgagaaggctgcaaattctagggttgtcgactctggtgtcctgaggggaatgaatttagaagacatcaggaaagctggggagcggcttattcttcagggtggctgtaaaaatttctttcagaagattgtaaaaacaagggagatcctcaatttggatatccatattctttcctactgctggtgtgcagagcttataagatccgccttctcatcagccggctgtctagatggtttgaacatacatgcgaacgagttcgcctttgaggaatctgtttcaactggtgagattgacagaaagatccagtccccgctagacaaggttgagaagttcaagagcatcagaagcgacgcggacagcacggtgccattcctgtctgtttacatcggagactcggccggtgatttgctctgcttattggaggcagatatcggtatcgtcgttgggtcaagcacaagcttgcgtagagtgggcagacagttcggtgtttcctttgtcccgttgtttctcggtctagtggagaagcagaggcaactgatggatgaagatgcgtccgtgttcaagccgcggtctggagtcctttatacggtctctagctggtcagaaatacacgccttcgtgctgggaagcgatttcagctgatggatctgctgcttcttttctccatctttttccccttgagaagcaaaaaagcttttgccggttgattctgatgcatacgatgcgtgaatcctaatgtggtcattttatgaaagccacatgtcgattctggctaccactatgtatgaatgaatacctgtagtttgtggtgtggaatgggttaagtttgtgcccgtgaattgtgatcaatgtatcattgattcatccttgttccatttgggactaatttctgggtgttgctggcagcaactacagtatactggatgaatgatgaagtacaactcgtttttatttcagattctcagcaggaagcgtactagtactagccactagggcgaaatgcatgctactagatgtatgatgtgtcatatcggagtacaaatactgatgaactgccagcctggggttcggatgggtgcataatatatgatagaatatgaatgtggtctgttttcatatgctgtatcgtgttttagctagttgaaggtggcggcggcgcgggcgtcgacggcgaggatggtgctgaggttgagcgggtgcatgtactcctgtgggccgtccatgaactggctgacgatgatgcggttggccttctccgtggggtggaagttgtcccagaaggcgtagacgctgcggtccgggcagacgctggacgcggcggtgcagagccccacgccgttgtatggtccctggccgcagcacgcgaccttggaggtgacgaagccgtaggccgccgggtcggagatgaagtccatgtgcatccggtaggcgttgacggcgacgaagacgtcggcgccgagctccgcgttgacgcccttgatcatgtccaccagctgcgggttgtagagcgcggcggcgcgctgcagctcggcgtcgcactccccgtcgcggctgccccgcagcgccagctcggctggggcgcaccccagcgggcccgaccccgtgaccagcacccggcgcgcgcccagcgagtagagctgccgcagcaccttggcgtactcggacacgacgtagcgcacgtagtccggcagcgcgaactcgcgggaccgcgccgagaagggcaccaggtagtagttgttgatgaagtcgttgccgcccagggtgacgagcacgagcgctccgcggacgaggcgcgcggcggcgtcctcgccgacgaggcggctcaagcggtcctggtactgccggaagtagcgcagctgcttctggacgcggatgatgttggcgaactggacccccgtgtcgttgagcacgcccacgcccgccgacgcgaagttggcgcccaccagcagcttccgcccgtccaggtgcgggctcaggtacggcagcgccggctccgcgcccaggtactcgctgatgatgtccggcacgttcttgccgttggagaagcggcccgtcgcgcggtgcgtcgggtagtcgaggccgtacggcggcgagtcggcgcgcgccgtcgtggccaggtagttgttgttgccgctgtccaccagcgagtcgccgaagacgaagaaggcgcggggcggggtcggggtggccgtggctgggcgcacctgcagcagcaggaggacgaggaggaagcacgcagtggctgcgacgagcctgccacggctacctgctgctcctggaacggaaagcattctgctgctgcttcttcgccgctgctctgctcagctgctgctgcgggacgcctatataacaggaagaagataacggggagagtgggatgatcaatagtatacgggctgatggagctgctgc

SEQ ID NO: 28967 - DNA, 3409 bp, Zea Mays
tgagagggccgggcagggttcttctgcgcgcgcggcgttaggccacttctcgtcgcagaaactatgtattgtagttgtaggtatagtttatataaattaatataatagaaatagaaaccatgtgtgtgtgtggttttcagcaccgtggctcttagcttctcgtgtcctggccgtaagcattccgtgcgatgcctccgctgtccggccgtcgtggtctcgtcacgcacgcacacgtacacacacctcgcttgatatgatgcccgtgtgctctcaggtctcaaacaacgctgtccgtctctccggcgcggaggggataaaagtctcggcgtgaactcctggccagtcttttgctgctgccatatccgcgcgcactgccggccggccagccagccagccagcgcgcgcgtgtcgcggcggagctagagggctaggtagcagagtggtggccagtgccgcgggttgcgttgggatggcggcgcttgtggcgctgacgctggcgctggcgctgacggcggcagtgacagcgacggcgaaggagtgcaccaacatcccgacggagctgtcgtcgcacacggtgcgggcgcggctgcaggcggcgccgggcggagcggcggagtggcggtggcgcgagctgttccacgagcacctcaaccccaccgacgaggccgcgtggatggacctcatgccgccgcctggcgccgcggctgcggcgcaacaccagcagcaccaccgccaggaggagctcgactgggtgatgctctaccggtcgctcaagggccagcagcagcagcagccggtggggggcggcaccgccgcagccgggagtacgccgttcctggaggaggtgtccctgcacgacgtgcgcctggaccccgacggcgacgtggcgtacgggcgcgcgcagcagacgaacctcgagtacctgctgctgctggacgtggaccgcctcgtctggagcttccgctcccaggcggggctgccggcgcccggaaccccctacggcggctgggagaagcctgacagcgagctcaggggccacttcgtcggtcactacctgagcgcgacggccaagatgtgggcgagcacgcacaacggcacgctcgccggcaggatgtcggcggtggtggacgcgctcgacgagtgccagcgcgccggcggcacgggctacctctccgccttccccgccgagttcttcgaccgcttcgaggccatcaagcccgtctgggcgccctactacaccatccacaagatcatgcagggcctcctcgaccagcacgtggtggccggcaacggcaaggcgctgcggatgttggtcgccatggccgactacttcgccggccgggtcaggaacgtcatccagaggtacagcatcgagcgccactggacgtcgctcaacgaggagaccggagggatgaacgacgtgctctaccagctctacaccatcacgcacgaccagaggcatctggtgctggcccatctattcgacaagccatgcttcctgggtttgcttgcggtgcaggctgacagcctttcgaatttccatgccaacacccatattccggttgtaattggcgggcagatgagatatgaagttacaggtgatcctctttataaggaaattgcgacgttcttcatggacacagtgaactcctctcacgcatacgcgactggtggtacatctgtcagtgaattctggtccaatccaaagcgattagctgaagctctgaccactgagactgaggagtcctgcacaacttacaatatgctcaagctcgcaggtttcgcgccatctgttcagatggacgaaggagatcgcgtacgcggactactacgagcgagcgctgatcaacggcgtgctgagcatccagaggggcagggaccccggagtgatgatctacatgctgccccagggccccgggagatccaaggcgaagagctaccatggctggggaactcagtacgaatcgttctggtgctgctatggcactgggatagaatcgttctccaagctgggagattccatttacttcgaggagagaggtgagaggccggcactgtatgttgttcagttcataccgagcacgttcagctggagaactgcaggccttactgtcgcacagcagctgatgcccctcagctcgtcggatcagtaccttcaggtctcgttctccgtatctgccaagacgacaaacggtcagtttgcgacgttgaacgtgagaataccatcgtggacatctttgaatggcgcaaaggcaacactgaatggcaagcatctggaattagcatctccagggacatttctcactatcagcaagcagtggggcagcggtgatcagttgtcactccagttacctatccacctaaggactgaagcaataaaagatgaccggccggagtacgcgtctatacaagcagtcctgttcgggccgttcctcctcgccggcctcaccaccggagactgggacgccaagaccggcgccgccgacgccgcagcctccgactggatcacccccgtccctgtggagtccaactcccagctggtgacgctggcgcaggagtccggcggcgaggccttcgtcctctccgccctgaacgggtccttgacgatgctgcagcggcccaaagacggcggcggcaccgaggccgccgtgcacgcgacgttcaggctcgtcccgcagggaggcgccggcgcgggcgccgccgcgatgctcgagccgctggacatgccggggatggtggtcacggacaggctcacggtggccgcggagaagagctcgggcgccgcgttcaacgtcgtgccggggctcgccggtgcgcccggctcggtgtcgctcgagctcgcgtccaggccggggtgcttcttggtcggcggcggcgagaaggtgcaggtgggctgtgccggtggtgcccagcagaagcgcggcgacggcgcctggttccggcggtcggccagcttcgcgcggggcgagccgctgcggcggtaccaccccatgagcttcgctgccaggggcgtgaggaggagcttcctcctggagccattgttcaccttgagggacgagttctacaccgtctacttcaaccttgtagcgtgacagacgggagatgacgacgagacctgcaggtcgaggactcgaggttgatgttgcttcggcctctggtaaccaaggggggaaaatgttgagttggaggtggagtgtcggacagttatgtttagagaaaagagaatgattttcccatattcaccgaatgatccgcggccgcctatttctgcttcaaccattcatcatcgtcgccataattctaaccacttcttgggtccctcctccagcttgctgcgtccaagcacagtttatttgccagtttctaaatctatactatatttaaagcaccagtttcaacggtcgtcatg

SEQ ID NO: 28968 - DNA, 2363 bp, Zea Mays
cgcacggacgacatcgaggaaccctagactagagcacattgcacgggcgacggcgcgccaccggtgactggcgtcccctcctcggtcctcactccccagcatggcgacgccctgccgcagcaggggcttcgagcgtgtggagctgcggtgtcccagggagctggacccacggccgagctggacgctcggcgatgtgctcgctgagcttgacgcgctggatgccacccgccgcgctgcgccacccacgcccctgaagcagccgccggattgggctaacggtggtggtgagaaggcctttgtgatgcgggttgatgacgacgacgaagacgacacagaagatgaagacgatggtacaagtggtgggaagtcccgggctctggtggccaaaggagcaaggttctcgtgtaatgatcttgcatcaagtgattcagaggatgaattagatggtcaggttgccccataccacttaatggagaaaagggacctagcgaagagcattcttcttgagctggaacacgagcatcatctaaaagttcaagaagaagttagaagtaagctagcttcattggaggtatgccaccaaaatgaaattcggagaacgatctctgcatttgcccgacttcagaaatatgcagaatcaagaaaggagatagacagaagacttgatgtacacttccagagaagaatggatcatgaacaaaaatcccagattgttgaacgccgaataagagatgatgcagctcttgaagaagctaaaagaaaagagcaagctgtcaaggaagaaaagttaaggcaggaaagagcccagcaagaagcagaggctagacagaaggaagctgcaaaattagcagctgaagcacgaaaaacagcatttgaggctgctaaaaaggaagcagcagaaaaggaagcagcagaaaaggaggctgctaaattgagagatgcagcagcttctcaacctagtccgaattcccagaataatactgcagaaggcattaaagtttttggcgataaatacgcactagaagcagagtcacggaggcatgcattagtacagaatcaagtgccagaaaacattcatcacagcaaggaattcagcaaatatgaccgacaaattgccaaatccataagtaaacttatgccaactactgacagtgtcagaacaagggctagtgagcttgttaaagctttaaatggacaggattgtccccgtccaatctcttgttgtctatttgctaacaagattatttccattgtcaagagtagaaatacaaaggacaagacctttggaaatttggcctttgcgtgtggatatgtcatgctattagttacaaatcaggtaccagacgcaatggattatcttttagctgagttcaacagagtttgcatatacacggttccaaagcatatgcatgctttgaatgcacaagcacgaaatagagattattacagactgataggttaccaggaagaaaatggacagctcgagagcactgaaagttatctaacatacgtcgttgcatatgttaaactctacgcagcaatgattcagacggaaatcaaaggtgttcgtcatcctcatggtttagctgagggatggaagtggcttgccatgttcctcaattctctcccagctactacagccactgcatgtgcccttcacgctttcctcaagatggctggttttgcacttcacaagaaatatgggtcacagttcatgaaaatcctggatgtaatatcacggtgctttttaccagctttgaaggaacaaggcaacaagatgcaggctgaggctgtcaacaatctacagaattacctgaacgacaagatctacctggaggaaccagaagggcagtacctcgtccagcaactactatccaaggagttgttcatgtaaagatcaaaacaccagatcggtatgagacatcgtgtgtgatcgtctgaagggcggtacctcgtccaagctaccactatcgcaagaggggcctcatgtagagatgaaagcaccagatcgatatggagctgttcgtgtttcagaaacacgatcgagcctttcaaatctcacgaacattatttatgggacagtcccccagatcatttcccccctctgcacgggatcctgacgatgtatttgtttatgtgacttgtatccggccaaggacaggtatgataggttgaggttttatgtttgttgtagttgtacatgtactactagaatcgtgaccagaacaaaataatactcgaccacttcggcgtgggcccagcggtggccaaagtcaaggtcaacttgacacgcgacactttgtctactctgtttgcaatgaaatctaatgtttgtgcttcaaacaaaatagttttaatataaa

SEQ ID NO: 28969 - DNA, 2132 bp, Zea Mays
cgttacttgcctgcacaatgggacgcccccatcttattgtcatgaagagaaggcttccacatcaggcaaacaataaaattgtacggacatttggagagaagagagtagaggaaaatttgaagaatcacgtggacctttgcaggatgcttgacattgtcgcattggagaagggtgctgatgtggctggtggtaggggtttctatttaaaggatgaaggtgtcctccttaacctggcattgataaattttgggctagcctttctgagaaaacggggatttaaaccaatgcaaactccctttttcatgagaaaggaaactatggcaaaatgtgcccagttggcccagtttgatgaggagctttacaaagttacaggtgatggtgaagacaaatatctcatagctacatcagagcagcctttatgtgcttatcacttaggtgatagaatataccctgctgaacttccaatcaaatatgctgggtactccacatgcttccggaaggaagctggttcgcatggaagggacacagctggtatcttcagagtccaccagtttgaaaaaatcgaacaattctgcattacaagcccaaatgacaacgattcttgggagatgcatgaagagatgctaaaaaactcagaagattactataaggagattgggctaccataccaagttgtttccattgtctctggcgctcttaatgatgctgctgctaagaaatatgatttggaagcatggttccctgcatcaaagaccttccgagagttagtatcctgttcaaactgcactgactttcagtcaaggagacttggaattgggtatggccagaaaaagaatgatgagcagtccaagcagtttgttcatatgctgaactctaccttgactgccactgagaggaccctctgttgtattctggagaatttccaaaaggaggacggcgtcgaggtgccaaaggcactgcaaccttatatgggtggaatagagtttcttcctttcaagcaacctttggatgtcaaacaagcttctgactccaaatcaaacaagtccaaatcaaagggaaatgctgcttgagctggatgaggaacactatgttaatttttgggcctaccagtacacaatacccatagcatgactatggcgttgcagagaggttgggcagcaccatcagcttctcagagtgtggagggattgagatcgaggagaactgggacaaagttaagactatttttcttcctactgagaagccaacgaggcaacgacgtctgattcatgtgctcctttgattgcgacccatccattggaggcacacagaaaaattggcgacttcattaaaggagtatttgctgtcttccaagatgaatccgttcactatggtcaacggggagacatatcctctggacatcagaggagaactagatgacacaacagccttcaaaaacttcaagaagtggggaggtatagaattccctctaccttttggaagagtactcagccctacagaaagtttcatccatgaactagatgagaagattgagataatcttgggaaagagtgacaaattcgatgagttgatggttgctgccgccgccgagaggcgagaagttgaagatgaagagcaggcttgaaaaaacagtgccgaccatccctgccacgcgtgacgcctccgccggcccccgtaggatcctttcgtctcctgctgtggcctcttcattcgcagccgccccatcagcccatcctccacggctggcctgaatcgccttgcagccccttgtcttccccgtccgcctcttttactgatttgtttgaaaggtaacagtgtgttgctcttttgttgttttgatgattctaactgaatgtataaagaagtcccctctccgatgcatcctatacatgttccttcccctcattgcatgtctccctactctttgcagtcataaccattttattgtcttttgttgctaggtcgaaaccttatatagtgctagatgtcttagcagtaacatcggtactactggctaatactggctactgagctaggtggtcctcaacattgcgacctaaagctgaaaacattttgctatgtttgtttggtctccttgcatgtaaaaatggctccctaaaaacttttgtttt

SEQ ID NO: 28970 - DNA, 2349 bp, Zea Mays
gtctcctttcccagaaaaaccctcgttcagctgctacactcaccgcggtctctctctgtccatttcccgcctcctcgccgcaactagggtttcttaagccctcaccgcccatggcgagcggcagggcggctacatccagttccatcctcgtcaacgccgccggcaccagcaagaccctgtccgcatcgctatggtgggactccttcgtcgtcctctccgacgacctcgaccgagccactgctggcccctctgtcccggatgccctcgctaagcggatcaaaagccaccacgcgtggctccgagggtcggtctctatgttcgggaagccgaacgacgcgtccaggagcgcactggaagttggcgaggttgccgtcggggagcgtcgcctcactgtcaagccagagctcaaggaggccgcgcttcgtgcaagcaaatgcctgaacctggatgaagtgcaatcatacattctggtcaagagatcttcagaagtctctccaacaatccgtgatgctgatgctgaggagtttcttcatctggtatctgtacgatattaccttgagcgtcagtgcttactgaagtgcatcagaagaatctttgtgcatgcaagtgacgtgtctgattcaactgatcccattcgagatgaggcttcattattgattagtgaagagatagacagaaaactgatatctatcattgaagattctttttcaactgcatcttctgtaaaagcggaagcggaatttacaatttctagtctggaagaaactttgattgaagttaacttgattcttgacatattgtttcttactttttatgataacttctcaagatgtaatggtagacagtggataactttgtgttcaatttttaaggacattctatgtggttcttatggtgtcgggaaatttgttgcatctgttgaggcaaagaattcatttcattatgctaaagctcagctacttctcatccttattgaaactttggactttgagaatctcctccggatgattcatgatgaagttcctctgagtggagggtgttctgcattttctgtcggtgatattctggagatggatgttgaaatatcaaaattgcctgaattttcattggtagaatcaggaccacttatactggcttgggcagttttcctttgcctagttctgtctcttccagaaagtaacaccaacttggaaattgatcatacatcctatgcccgacgggcctttgagtttgcgccattcaattatttactaggagttctttgttcaagcatcttcagggagtcagatggtcctgtttctggttatcggggtatattgcggacattcatttcagcattcatcgcttcatatgaggtatcttatcagaaagaacacagttcctttgacatgatttcgagtattttatgtgaagtttatgatggagaggaatctctctgtatgcaattttgggataaagatagctttgttgatggtcctatcagatctgttcttcatatgctggaggaggagtatccttttcagatatctgaactgatacgtttcttatcagcagtttgccatgggacctggcctgctaattgtgtatataattatcttgagaggatgaatggagttacaacaatctataccatcccttgtgttgctgatggtgttggttatggccatcaaattgaaagtcatcatccagtcagcattcctagtattgaaggcattacaattccacaaggaacccatggctacattttgaaagttcttcaagaggataccacattagttcgctgggagttcccgcattctggggtatcctttttgctcataactctggcgcaagagctccattcatgcaattacaagaaggcatgtgatatcataggtctactttatcggatggtgtcgtcaaataaggacctgtgcttcgctttgatgcatgttgacaagtcactggctgttcaaacatcaaataacttaggacaaattgaaaagcatgtcaggattgatattgctaaggtattttgcaattccattttcaaatatgtgcgagatgttaataatgctgacatattgtccaaaacctttggtctactagcagaaatgatgaaatgcgctccatatcacgtgtttgatgcggcgttcgagtgcaacatcttcacttcacaattaagtagtccatcaagtgattggttactttctggtgccctagctagaatgctttttgctgcctatgaaggaaatggagattgttcttcgcttacatcttcagtttctgacccctggatggctcgatatatatgttttgaaacatagcggagctcttagagaggatgttgtacactcaaggcttaaataa

SEQ ID NO: 28971 - DNA, 1290 bp, Zea Mays
tttccttttgctgccctcccctcttgcatcatccttgttcatcgtctctccagccgcgcgcccagcagcagcgttctcgatcgatcagtcgtcgatccggccgtgtgttcttcttctgtatcactatcaccttcaccgcttcacctattcggccggccagctgctgatatcttcttcttcgctgccgcctgctgccgattaatttattcactcgacggcagcgacttcatcgtctatcataggaagctgagcaaagaagacgtagggtgcagccgtgcaggaggaatagagatagagagcttcaggtatatatagcaggcaggcaggctgtgtggttgatccggtgatctatatcgatccgtcgaggatgtgcaccaggggccactggagaccgtcggaggacgagaagctgaaggagctcgtcgcgctctacggcccgcacaactggaacgccatcgccgagaagcttcaagggagatcagggaaaagctgcaggctgaggtggttcaaccagctggacccgaggatcaaccggagccccttctcagagcaggaggaggcgctgctcctggcgtcccaccgcgtccacggcaaccggtgggccgtcatcgccaggctcttcccggggcgcaccgacaacgccgtcaagaaccactggcatgtgatcatggcgcggcggtgcagggagcggatgaggctctcgaacaggggcggcgccgctgctggccagcatggtgccgtcgacaccggtgctgtggaagatggcagtaaccctaggaacgccaagaagctgaggcctgatgccagcagcgtggcctccttcctagacaagtaccgaagagaattttccgtcgtcgtcccgtttgctattaaccatgatcgcaagcagcaggactattgttcaactactaacgaagcagacgcaaacaaatcggttgaattctacgattttctccaagtgaatgcgaactcgagcgacaccaagtgtggttcgagcatcgaggagcaggaggagaaccgggatgatcaagccgaagggcaggtgcagttcatagacttcctggaggttgtaatgctttgtgaaagacgcatatgctgcaaatggcaatcgtctgctagctaacaccaaacgtacttatagaggaagcagaatgcaccgcgtacatatatgacatgtaacttattgatatgtatacatatctgtccatatccgcgcgccgtttgggggccggtacacatgcaaaattattctgagataaatgaggaattaattattatttcatcatattt

SEQ ID NO: 28972 - DNA, 1933 bp, Zea Mays
cgcaactacccgtccagtcgtccacgcaccagagtatcagagacgaccgccattgccccccgtgtcgaacacggggcgtaaagtccttcgagatctcgcttctgcaagcttccgcgccggcgcggtgggtgatatgaaccccgctccggtggcgaacggcgccgcggccggcgctggcgtgggcatgaaccggctgggcggtaggttgtggtacgcggccgccggcgccctcatcgtggcgctcctcgccgtggccgtgagctaccgcagcttcccggacatcccttcgtcgtctcctggaagctgcggctgcccggctgcgaggaagtacacggggatggtggaggattgctgctgcgactatgagacggtggacgccatcaacgaggaggtcctgcatccaatcctacaggaactcgttaagttgcccttctttaggtacttcaaggttaaattgtggtgtgactgccctttttggcccgatgatggaatgtgcaagcttagagattgtagtgtttgtgagtgctcagagaatgagttccccgaaccattcaggaaaccttacagtggactttctccagatagtatgatgtgccaagaaggaaaaccacaggctgcagttgataaaacacttgacagcaaggttttcaaaagatgggttgaaactgacaatccgtggacatctgatgacgagactgataataatgagatgacttacgtgaatcttcaactgaatcctgaacgatacactggctataccggtgattcagcaaggaggatatgggatgctatttataaagagaactgtccaaaatatccctctgaagaactgtgccatgagaagaaggtattgtacaagcttatttcagggttgcactcctcaatctcggtgcatattgcttatgattaccttcttgatgaatctactaactcatggggacaaaatctttctttgctgtatgaccgtgtcctgaagtacccagaacgtgtccagaatctatacttcacctacctgtttgttcttcgagccgtgacaaaggcagcagattatcttgagcaggctgagtacaatactggcaatcctgaagatgacttgaaaacagaatctcttgtgaagcaattgctttacaattcccagttaagatctgcatgtccattgccttttgatgaagccaaactctggcaaggtgaaaatggtcctgagctaaagcaagagattcagaagcaatttagaaacattagtgcaattatggactgtgttggatgcgagaagtgccgactgtggggaaagctccaagttcttggccttggaactgctctgaaaattcttttctccgttgatggagacagccatttgaatcagccgctgcagcgaaatgaggtcattgcattgttcaatcttctgaacaggctctcagagtctgtcaaatttgtacatgaaaaaggatcatcagtcgaagaagtcatcaacgaacagagcccttcaactgttcaaaagggtgcttccaagacgaatcttaagggcttgttcggttattcccaatacacatggattggatgggattgaaaaaaattgtgaagaagtttgacttgtttgggattcaaacccatccaatcccgctcaatccacatggattgagagctaaccgaacaagccctaaactggtacccccacccctccccggctttgtattgtttcttgcattcatcgctcgtaatctttcgttattgattcttccgcaggacttcctctgagatgtaagggtgtaatttgtagttatagaaggacacgctggaagattaacatagatatgcacggatataccgaaagattaacatgcgctggccgtacgtactttgttgcaaagagatacaaaccctttttagctaaatgtgatgccacagttaaccaaatatacagctagagaactaa

SEQ ID NO: 28973 - DNA, 1590 bp, Zea Mays
atgacggcgacgtccaaggctccgcggcggccccgcatccgcccccgcggcccgccgccggcgccgacgccgatccgcacggcgcgcggcgcgcgcaccgcggccgccgacgagcgcgtcctcgccgagttcctcgaggcctccctccgcgtgccggacctctccctgcccccacggaagcgcttcagcttcccaccgccgccggcgccggaaccggacgggatcccttctcacgccctcgtttcgggcgacgcggacgcggagcagcgggcgattgccgcggcagcggagaccggcgcgttccgcgtgaccagcgcggtcgacgctcgcgaggcgcgcgacgccgtggaggcggcgtcggagctcgtgttcgcggcgccggaggaggtgaagcgcggcctggagagatggtaccgaaggagagatcgggagccccgggaggagttcgtctggttccggccgatgagcgccgacgaggacagagcgatggccgcggccttcccaggctccacgtaccgtgcgttcagggagaaggtggacaccttggcgtccaaaatggaggatatagcaaaagctgtcatcagggttctacacgataacgtcaaaaaccctaaagcctctgccgagcccagagaagccgccccgtcaatcctgcgcctggcactgtacagcagtgacacgtcgagtacgtgctggaacgagcttgacagcaccactgctcctaactcgcacgctttgagcgtccacctctgcggacaagaccggcggatctgtctgcggcggagtctggggggctcgaccgtctccactctacctgcgggctgcatgcttgtcacagtcggcaagcagattcaggaatggtccaacgggcagttcaaggccgctgttggaggagaggtagtactgttcgagacgaccgacgaaccaggccccttcgtctccgcggaactcatcgtgtactgttactgtccacacgacctgcgtctctctgaggctggccggtacgccagccgccgcgttgaccgtgccacgatcgtttcctttagggaccagatactggtcgctctggttttgctgtctttgttctacctcttccggggctgatccgggtggatcgatccgtttggactggattgtcgattccttttgcgacgtccgagatggctagattttacagccttgtcggacctgtgacgactgcctgcccttctctgttggctggctacggagatgatgggggaaaacaccgcgtggattgcggtggcatgcaacaggtggttcgagtgtttgtggtgatttgcatggcttttcttttcttggagggataggtcataggtccggtacatactgctgttagtttgtgatagttgaggggaaatgggacatgctatgtggggttggttgattttttttttcccgattgagagagttgacgacgctgcgattgaagtgtttactgtgatagtggtttctcttctcttttttttgtaagtacattgctgaatcatgtatgtaataattgtatgtgtgttggtctttgttggctgtgtggcaaggatatactagggaaattgcttccttgcaatgtga

SEQ ID NO: 28974 - DNA, 1879 bp, Zea Mays
ctctattccccaattgcccctcacctccattaccttccccgtctccctcgtacattcgacattccccttcccctgccattcggtcccgctcccgccgcctccgccgcgattccactctcccttccgcctccgccgcgattccactctcccttccgcctccgccgcgattcttgtctcccttccgcctccgccgcttaccgccgcggccacgccgcaagcgtttcgtctcgggatccccacttcgtctcgctcgagcggtagagccacgctcccaccgcccaggcgtccgccgcggaggcgtcggtggcctatctgagcaggctctcctcgtcgggcttttttgctttagagggagagacttcctggtcggcgcgccgcgagaagagcaccagccatgtcgcaaactaactgggaggcggacaagatgctggatgtatacatatatgattattttatgaagagaaatttgcaggcaactgcaaaggccttccaagcagagggaaaggtctcttcggatccagttgcaattgacgcacctggtggatttcttttcgagtggtggtcggttttttgggatatattcatagcaagaactaatgagaagcattcagatgttgcagcctcatatattgaggtaaacatttttttgcatttaattgtcctttctgtgatcaaattttatttaacgtgtgcccgtttgacctatttgcttctttttgtaagtccttcaacaaagagtatattattttgtgcttgtaaaagtacacctagatttgcgagtatttttcaatgcaatttttagttctacacatataacttaatgttttcaaactaaatagcttttaaaaggttattaatgtttgtagttttaaagtttggctataaaacttatcctaaacgatatgtttttatgaccggagggtgtggcttttgctaatcaactgtttggtctgtggatcagtttctgttcatggcatacatttatctttgttttcttttggtatacatgtctggttttgcacctttttctctcctaggacatgttgttacctaaggattgaagtttataaatcgtgatctgtctttgctgcatcaatagacatgagtgttggcagggtttgctgtcctagcaatactaacccaggtacaaatgagcacattattccagactcagctcatgaaagccagggagcaacaacatcaacagcagcaacagatccctcaacagaggcagcagcagccacagcatatacaaatgcaacaaatgctgttgcaaagagctgtgcagcagcagcagcagcagcagcaacaacaacaacaacaacaacaacaacaacaacaacaacaacaacaacaacaacctcagcagcagcagcagcagcagctgcaacagcaacagctgcaacagcagcgtagagatggttctcatcttctcaatggttctgcaaatggaatttctggaaacaatcctttaatgcggcaaaaccaaagtactgcaaatgttatggcaacaaaaatgtacgaggaaaggttaaaggtaccttccgagagagactctttggaagaggcatcattgaagcaaaggtacggagagaatgctgggcaactacttgattcaaatgaagcatcattgttgaaagcagcttcaagcgcgcaatcctcagggcaaattttgcatggaactgttggtggcttgtcaggcactctgcaacaagttcaggccaggagccctcaacttcctggtcctgctcagggtatcaagacagagattaatcccattctgacccccagagctgcaggcccagaagggtcatttataggtgctcaaggatctaatcaagctgggaacaatttgactctgaaaggatggccactcacg

SEQ ID NO: 28975 - DNA, 1757 bp, Zea Mays
atcaataccactcggtccgcgacgctttcctctcccttcgcgatgccgacgatttcctcgcgttgcctcccttcgcgccgccgcctccctcgcgtcggccgtcgcctccccccacatcggccgtcacccctcaccgaacaatagagggtttcttcttaaggagtggtgagacagtgagcagaaacttcaatgcatgcctcctagcagtattgaagcttcaccaattgctccttaagaaaccagaacctatacctgagggctgcacagactttagatggaatcacttcaagagttgtttgggtgcattggatggcacacatgtaaaggtgactgtcccaactaagttgaaggggagatataggtcaagaaaaggagaaattgtgacaaatgtgttgggtgtttgtgcacctgacatgcagtttatatatgtcttacctggttgggagggttctgcacatgacgggcgtgtgcttcgagatgccatctcgaggccgaatggattacgtgtccctcaaggttgctattatcttgttgatgctggttacacaaatgcaaatggtttcttagcaccatatcgaggacagaggtatcatctaggaggtttcactactcaaaacccaccacatagtgctgaggagtacttcaacttgtgccatgctagagctaggaatattgttgagagggcatttggaaggctcaagggtcggtgggcaattttaagagacccatttgaaaatgatgaggagccagctatggatgcatcatttgaagttatggatggagaaatcagtgaaccagaatttatcacaggtgtctcaacatctaatgaatggactgatttccgcaataatcttgctcaggggatgtataatagatatagagctaggtctaataactaaggacatgaaccaattagagagctcaagtgttactcggggaagagggaaaaacaaaaggatctggacttattatgaggatgaggagttaattaaagcactatatgagatatctttagatccaaagtggaaaagtgagggaggttttaagaatgggtattgttctgttctagaaaatgaactcaaagcaaggctaccagggtgtggtctcagtgctattccacacattgagtctagagtgaggcattttaggaccaagtatggttctattgaggtcatgcttgctaagagtggttttaatcagatgacgatgcttttcgcgcttcctgagactcttaggagagaattcatcctgaacatgattgcagatgaagctcaaaggaagtgacttgtcaaattatcaatgaagaatgtcaggagcatttggtgaagagtgatcggcatatcaacttctggaagttgaattttgaagacgtttgaagtcctaagacatttctagaacatgaaaattatgaattcctaaggctagctttttttgactgactgtgttgttgactttgtgtgaaaataacccgttgtttgaaacctattatatttgctagctttatttgctattcagcaagacatataaagttgctagctttattggttgtctgtgttttcaactgtttgtgaaaataaccagtataaagttgttgtttagaacatgttatttgtgctagcgcaaagctgaaaataaaatcagtatttttgtgcgccataattttgaagttgttctttaaatcagtatttatttgctacggcagttcataattttgaagtaaaataactatttctgtgcggctgctaggcttatgtgtg

SEQ ID NO: 28976 - DNA, 1282 bp, Zea Mays
atggccggcatatatggttgcattgagctgggccttgtgattctaatgttgttgcaaaaacgaaagggtgtgggtggatggttgggcggcatgcgcggtcttttcagcggctcgggcaaaaggcgacaagtcagtgcagagaagatagtgcttgatctaacccctctacaggaacagaggctgcaaagtctgaaggaaaggctaaatgtgccatatgacgaaactcggacagatcatcaagaatcgcttagggctctatggaatgcatcctttcccgatacagagctcactagcttagtttcagaacagtggaaagacatggggtggcagggcgtgaacccagcaactgatttcaggggctgtgggtttgtttcgctcgagaaccttttgttttttgcaagaacatacccggcttctttcaagaggctgatgctgaagcagcaaggaatgcgaactacatgggagtacccctttgcggtcgcgggtgtaaatatctcatacatgttgattcaactgctggagctcaactcagtgcgccccgaagtctttgccagggattaacttcatcaaagtgttgacagaacacgaggatgcattcgacgtgctgtactgcatagcgttcgagatgatggacgcccagtggctagcaatgcgagcctcgtacatgcagttcaaagaggtgctggaggccacaaggcagcagctcgagagggagctctccctggaggatctcaatggcatccatgacctccctgcctgcaacctcttgtacaaatagtgctactggtagttagattatattactgggatgcagtcaaaggaaaatttgatcaggttacatcgtaaccagcatcatcagcctgtaaaaaagaaaaaggaaaagaaaaagagagaagggagacacacatctctggttgtcagtaattcacatacgccacagttttgcccaggatcgatccagcctacagtagggatacacacacaccacgaccacgtatatgtgaaaattgaattaagctggtcaaaaggttgtgtttgcgtttgcacgttttgcggtcatgtcatgtgaagaggaggcgcttgctgtgtgctttttgactggatccgcccgggagtataggccaactgctagctgccgatcgcatgcaatgaatgatcactaagcgcctgcaggcatcatcagacccttttgtggcttgtggattgtgtagatttctgaaattaaaaaaaatttgatgtggttgtaagctgagactatatagcttgatgtagactatgcact

SEQ ID NO: 28977 - DNA, 297 bp, Zea Mays
aagaggaaaaggaggagaggtggccaggtggtggagggcggtgacgggacaaagtagtggcctgggcgtgccggcgcggaggagggggcggccatggagaagggcgcgggcacgcggcggtggcggctggtggaaagagggtcggatcgtctcgccttcatcaacagccagacacgcagcctttcctgcgacccgattccaggttgacagcctgtttctgaagcttgatatttccaaggcctttgactcggtatcgtgggcttttcttcttgaagttttatctcacctgggtttcgg

SEQ ID NO: 28978 - DNA, 2607 bp, Zea Mays
gctcaagctcaggcaagcggcagcaaggcgttggcaatcccagtccagtcgtcggagcactcgcaatttcccgtcacagctggccaccgccccaccctcacggcctcacctcctcccgctacacgcacgcgcccacctacccaaaacgaccgcgcgcggcgccctcctcccgcggtgccaccaccaccaccacctcgtcggaccatcaccacgccgatcggcagctaagcagctcccgcccccagcaccgcgagctgcgatggcaatggacgcggccgtggccgtgaagagcggcggtggcggcgccggatcgaccggggtcaccgcggcggcctcgcagtccccgcaggcggcgactaacggcggcgagcggcggtcccggttccagcgcatctgcgtgtactgcggcagcgccaagggccggaagcctagctaccaggacgccgccgtcgagctgggcaaggagctggtggagaggggcatagacctggtctacgggggcggttccatcggcctcatggggctggtctcgcatgcagttcatgacggagggcgccatgtgattgggtcactggcgagcctgttggggaagtaagggccgtctccggcatgcacgagaggaaggccgagatggcccgcttcgccgatgccttcatagcgttacctggtggctatggaactctggaagagctgctggaggtcatcacctgggcgcaactagggatccataagaagccggtaattaatcctcctgataattgggctatcatgtgcgcggcacagaattctttttttctctttctctctctcctagcaattctgtagcaatccactagtttaattatcacaaaaagtcgttagatttagggatactgcgatcttttttcttcttctttcctttctgcgaacatcatggcttcgtggcgcacggtctgcccatgtgtgtgctagctggggttttggaagtctcaggctctagtttagctggggtgttgtggttggagattagctggggggagcacgcgatctgcgccccccgttgtttatacgctctgtccacataaacacctcagcacacggatatgttgacgagagcagtagtagatcgagtgattccgctgggatcttctgctggtcagactaaaggaatgtgcagttggcaacctctctaaacaaattgcgccacacactggtaggtagatggaagatttgtagagtcgcgcgccgatgcctcatttgctgtcggcttttgcttagtcagctgtttgactagcattgcagcccgacggcattggccccccaccggaagattgcttgttaccaatgcaaaacaccgccgcctgctagctagtctgtttgttacttaccatctgttagcttcttttttttccttctctctctgtttgtactataccactaaccgagtgttacatgtccacccccccaggtcgggcttctgaacgtggacgggttctacgacccgctgctgtccttcatcgacatggccgtcaacgaagggttcatcaaggaggacgcccgccgcatcgtcatctcggctcccacggccaaggagctggtcctcaagcttgaggagtacgttccggagtacgaggtaggcctggtgtgggaggaccagatgccaccgtccgccgccgccgcgcacgggttcgccccggagcttgtggagcccgggatcacctcctcgtcctgatctggactggacggggacgtcggccgggcctgcctacctacgctaaccccagattctgaccgacggccagcccggcaccaagtagaaaggctatccatactagtaccacctaattaataccgtaatctactactactactactaacaaagaagattgttgggatcgaggatgacagctagctagcgtctgctcagtcagcagcatatcgtcgttagccgcgcagtgtgcagctgcgtcagctctgccattgctactgctccttttgggcttttgtgttgtgctctcctagaagtagggaggaaggaaggaaggcatgctatgtatattccccgggtatatggttgtggtatggcgattggatttgtcttgctcgcagcctcgcacgtgtgatggatggatcttggaacaaaagctagttgcaatgcaaaagcgattcatttctatcctacagtaaatcataccagagtttgctgctgtgctgtgctttctgctttgtttgcttgtttactagtagttgtcgcgcgccctgtgcgcgtgctgctgcccactgatgaatataataacccgttcctttagagaattaattcatatttatgtaataatctagatgctatgtctgaatggagacctctccggacatgaaccgttgcattgccgcatcatccagggcacaggtcacaggggctaggaagcacaagcaatggtagagggaagctatttagagagcctgagcacacaatatatagataatagggttttatatgtctggaatattcacatcagcatggaatgaaaaagaggggtaaaggaatgatacatcatacctgtgggcatcactaaatgaaacaaatgtctgaaaatggaacttcattctcctttgaggatgctttacttc

SEQ ID NO: 28979 - DNA, 188 bp, Zea Mays
ttgcaggtactccttgattgattgatggtgtgacttggccttcatccctgccaccgggatagatggtcgagtgggttattgcttccgcgggagaggaccaggaggagtactgtggccaggcttcgccatgttactcggttttctccgttagttatttccgctgcattaaaatttatggttattatttc

SEQ ID NO: 28980 - DNA, 1827 bp, Zea Mays
ccttatcgctccatctccatggttaccattgcaacatctggaggtagggttggacgggcaggtagccaggagctgagggcaccagcgagggggacttgcgccagatcaggttaggctatctccagcagcagcatctgaggagctggcaccagaggtggggacacttcgactgtgaggagcaggcaggggtcagcaccatgtaagagaaaggggctggcaatggagaccaacatgcaaagcacagatgatgccaatgagaggctgcaatggcgaaagaaaggaagcatcagaaaggatatgccgaggattaatttggaagagatggcttgactcacaacatgttggaaatgatacattgtcattggaggcgccaggaaatctgcaaagttagatgccgaggcgttccaactgttgatatgaagaatctctgttatcatcttgaggagaagtcaggtggaaaagtcattcaccgagtaggcggcgttgtttttctatatagaggaagacattatgatcctaagacccgtcctcgctatccactaatgctctggaaacctgcaactcctgtatatccaaaactcatcaaagaagctccagatgggtttacaaaagaagaagcggatgaaatgagaagaaaagggcgtgatctgctgccaatctgtaaattagccaaaaatggaatatacatcactcttgtcaaggatgtgcgagatgcttttgaaggaagtgacctggtgaagattgactgtgagggtttgaatccaagtgactacaaaaagattggagcgaaactaagggatcttgttccctgtgttcttttatcatttgatgatgagcagatattgatgcacagaggcaaagaatggaaatccagatactcgaagcctcttactctcattccaaaagttccaaagaataatctggcaatgacatctgtcatgaatagttcagatgaagttagtgatgccaacactcaagttgcgataagagaagtattgagacccaaaatgttcaaattatggaagagtgcggtggactcgtctctggcattgctgctggatgacgccgaagcaaataatctcacacccgattcgctcctgactctggttgaggagttcagcgtgacatctcaggcggtggagcactcatttcctgctctgcttgtgaccaatggtgatgcgagcaccgactctctaagtgcagagtacatgaatgacgagcctgaaacaagcgttgctggaaacgaagagggccagctggagcagtcacctgatctccgtgacgatgaacattttgatgtcgacatgtttgagcgtctggagtcatctgtgccattgggatcgctgcctattgacagcatgatagagcggctgaacagtgagtgaagtacagcgagcagttcgttctgtccactgggataactactgatggtcagattgcaatctcggatcgtgtgatgcattatctacgttcctccggaccctcagtctggtgataatctcaagatccgagaatttcctgcgatttggtagcaaacgtgatgtaaagaaactaactgtagtatgcaagtgcgccatgcatttggcaaacgcaccaacggataacacgtctcgtttgccatcgtcaatgagtgcgcttgcatgtatatgaatatctgcatttatactgtgtttaccaaaaaaaaaagtattgtgccatgctccaaaaagatgcggagctagcagtgtcagaagtctataaactctatagtaatttatacttctgcattttctgaatatttttgaaaataaagaatcggtctatggttcagaaaaaagatggggaaaa

SEQ ID NO: 28981 - DNA, 1754 bp, Zea Mays
ttgagttcgattcttggtgtgaatctgctgcaactattgcctgattgaccaaactactcaaattaatctgattttttcatgcagccatggcctttaactactaccgaagcacttggtgtgggtctgctgcagctaataagaacaatgaagaaattgaagcatgtgctgttttggttgcaacattgaggaagaagcggcgttggggagggtctgttgttggccataagatgaaaaaacgcgaccgtattggtggcgacattcaactgaataatgactactttattgagaggtcgttgttcaaccctgagcaattccgcagaaggttccgtatgcaacaatcccttttcttggagattgaagataaattggcagctgcaaataagttctttagacaaaaaagaaatgcagctggtgtgttgggattctccagtagacaaaagtgtactgtggctttgcagatgttggcttatggagctgctgagggcactcaggccgctgctactcctgatgtatgtgctgcccgattgttggttcctggagctcaggcaattaatctaattgggaagcaaggtgcaactatcaaagcaatccaggagagcacgagtgcaacaatacgggtaatatcagtagatgaacatgaacgaccattctatgtaactgacgatgaaaggatagttgagatacaaggcgatacagagaaagttctaaaagcactgcaagcagtttcaaatcatcttcggaagtttttggttgatcatagtgtacttccattatttgaaaagactaatactacagtgagccaagatcgcaatggtgatggttggagcgatatgtcacgtccttcaattggttctgcacaagtgaatcaactaccttcagtgttagatgactatattcttcaagtgaagagggatcctctgtaccttgaacgagaatctttggtagatcataacattcatcgctcaggcgtatcactttatgggcgtgatccagccttgtcaacactacgaccctctgcagtacatggtgctggctcactacttacacagataacccaaaccatgcaaatcccacttacctatgctgaagacattataggagttaaaggagcaaatattgcgtacatacgagctaatagtggggctgttgttacaattcaggagagtttgggtagtcctgatgatattactgttgaaataaaggggacatcttcacaggtgcaagctgcacagcagctcatccaggactcgttggctgcacaccgagaacctgtcaggagcagttatgtgggggcaggattagattcagtatataggtccagctactcacaatatggcagctcaatctatccctcgtcatcactgccgtcttattctagcatcgatgatgttagtagatacccgtcttcaggccttggtggctatggttcgagttaccggtactaatagcagtttgtcctcgggcttgaatgcttgatggcaccagtgatcattgtatcccagtacccagacttcagggtctgctttgttttgacaaacaattaattggttttatagattttcgccactcatggattcagaaattgtacatgtttgctggtgccttttttttttccttagcgctacaatttaggagctgtttggttggtctttttcagaccaccaatgatttccggcgtggatgtggatgtatgtatagtgctattttttgtttggatggctgggcccgtatcaactacagcgtaaattgatccg

SEQ ID NO: 28982 - DNA, 3685 bp, Zea Mays
tttagatcactcgtttggtcgcttccatctcaagtgctggttgtgcaacagtcattgccatcctccatccctctgaactccgaaggccgaaccagttccgacgaaacggtacggtgacggctcacctcgggggtctccatgtccatggacggccctgccacctcgccggcaagcgaggtgccgttccgcatcagcttctccggccacagcggccacctccgcctcgaccctaccccgcacacgcccagccccattccggacttcgtcctggggtatgaaagccactggaagtgtttccgggatggagaacttgtagaggagcaacctgcatcatcatcgaatgacacaatggagaagtactctgtgcagtttgatgatcttttcaagatagcgtgggaggaagatactgccaacaagttgttgaaggacggtgttgttcaacaatctgctgaagaaattggcgaacaaaaagttgatgcattgcaggatgagttcgagagtataacaacgctagatgacgagaaacaggaagttgatgtcataagaaatgttcctgaaactcaaacagacttggatcagatgttatcttctgaagtacaggatacaggcagggaaccaggtgcatcaggtgataagaagccaacacaagatggcatggtttgggcacttgttggtggggacgaggacatagtgactaacttctccaaactcgttccagatatggcaatcgagtttccatttgaattggataagttccagaaggaggctatatattatctcgagaagggtgaatcagtctttgttgcagcccatacttcagctggaaagacggttgttgctgagtatgcattcgcattagcaacgaaacattgcactaggtctgtctatactgctcctattaaaactatcagcaaccagaaatacagagatttttctgggaagtttgatgtgggacttctgacaggagatgttagcatcaggccagaggcaacttgcttaattatgactactgagatattgcgttcaatgctctacagaggcgcagacattatacgtgatattgaatgggtaatctttgatgaagtgcattatgtaaatgatgctgaaagaggtgtagtctgggaggaggtcattataatgctcccgaagcacattaacattgttcttctttcggcaacggtcccaaatactgttgaatttgctgactggattggtcggacaaagcagaagaaaattcgtgtcacatcgtggtgattttttgtttctcaaagaatcgctgtgataaatcggcagatagtatgtttggcactgatctcaccagtagttcagagaaaagtgaaatacgtgtcttctgtgacaaggcattttcacgtcttaaaggatctgataggaaccttccacaggttgtaggaatacaaagccttctgcgaagaggaattggagtacaccacgctgggcttctccctattgtgaaggaagttgttgagatgctgttttgccgtggtgtaatcaaggtactgttttccactgagacatttgcaatgggtgtcaatgcaccggcaagaacggttgtgtttgattctttaagaaagtttgatggaaaagaacaccggaaattgcttccaggggaatatatacaaatggctgggcgagctggtcggagaggacttgataacattggtactgtgatcattatgtgtcgtgatgaaattcctgaagaaagcgatttgaaaaatttgatcgttggaaaaccaactcgtttggaatctcaatttcgattaacatacaccatgatactacatcttctgcgtgtggaggaactgaaggtcgaggacatgctcaagagaagttttgctgaattccacgcacaaaagaatttgcctgagaaggaaaagcttcttctgcaaatgcttcgtcaacctacaaggacaatagagtgcataaaaggagagccttctattgaggaatactacgagatgactttagatgctgaggcacacagggaatacataacagaagcaattatgcagctgcctaattctcaacagtttcttacgcctgggagattggtggttgttaaatctgattctgatgatgatcacttgcttggtgttatactgaaaaatccatctgcattgctaaagaaatatgttgttctggtattgactggtgattgcagttcatctgcactagcccctgagttcaataaaaatgaaaagggtcctgtggattttcaaggaggacaatttattgtcctgaaaggaaaacgtggcatggacgatgaatatttctcttctgttagttcacgaaaagcttcaggtgtaatcaatatcaatctaccatacaagggggatgcatctggaatgggctttgaagtaagagcaattgagaataaagaaatcattagtatatgcagcagcaaaataaagattgatcaagtcagacttcttgaggagcctaacaaaactgcatactctagaactgtccaacagcttataaaggagcaaccagatggaaccaagtatcctcctgctttagatgcaataaaagatctaaaaatgaaagacatgtatcttgttgaaagttaccgtgcatatcacatactactgcaaaaaatgtctgaaaacaagtgccatggttgtataaaactgaaggagcatatatcattgatgagggagcaaaagatgtacaaggatcagttgaatgaattgaaattccaaatgtccgacgaggcacttcaacaaatgccagagtttcaaggcagaattgatgtactaaaggtaatccactacattgattctgatctagttgtgcaacttaagggtcgggtagcatgtgaaatgaactccggtgaggagttaatatcaacagaatgtctgtttgaaaatcaattggatgacctagaacccgaagaagctgtggctattatgtctgcattcgtcttccaacaacgcaatgcttcagaaccatctcttactccaaaactggctgaagcgaagaagaggctctatgatacagccataaaattagggaagctccaatccgagttcaaggtgcctgtggaccctgaagagtatgcacgtgataatctcaagtttggccttgttgaggtcgtctacgagtgggcaaaggggacgcctttcgcagacatatgcgagctgactgatgtatccgaagggatcattgtaagaacaatcgtccgtctggacgaaacatgtagggaattcaggaatgcagcttccatcatggggaactctgcgctgttcaagaagatggaggtcgcgtctaacgctattaagcgtgacattgtgtttgcagcaagtttgtatgtcacaggaatctgatgcatgtaacctcgtagtctcccttgcttcttttgttagagaaatcgttgtgctggtggaatgctactaacctaaccttagctagaacaattgttgtggtatttttttttccagttctggattattgcttttgctagttttgcgaagttttctgaagcggcgaccagcagagtaaaggaaaatcgaaagcgggtgggattctcgtttttttttcactgagaatatgattattgtattattagcggaaacaaaacgttctcgtactcaagacacctggaatccgtctagtaggagctcgatgtctaaagcaaaagtgcttaactggattgggaaacactgag

SEQ ID NO: 28983 - DNA, 1852 bp, Zea Mays
accacgcgaaacgaagcgaagaaaacgccggcgcccccgcagccagacgctggaagcgccggaacgaacgaacgcgcggcgccaccacccacatcactgccctgccgtcgtagcccagccccacccacccagcgccgcccgcccacgccaccacgcggaccgcagccgcgccgcagctgctcacacacacagggcaacagacgcctcctccatccccacgcgagcggacgacacgacgcggccatcgccgcacgttgagatcccctccgctcctcctctcgatggtctccgccagcgcgccgccgccgccgccgcaggcccagtccgacgcggccgggtcgggggaggaagccagcaagaaggtgcggaagccgtacaccatcaccaagtcgcgggagagctggacggagcaggagcacgacaagttcctcgaggccctgcagctctttgaccgtgactggaagaagatagaggcttttgttggctccaagaccgtcatccagattaggagtcacgcacaaaagtactttttgaaggttcagaaaaatggaaccagtgaacatgtcccacctccacgaccaaagcgaaaagctgcccatccatatcctcagaaagcttccaagaatgaaccaaactatggtctcaagacagattcatcttccatacataggaactctggcatgaatgtgtctgtttcttcatggcctcataggtctatcccgcaagctgttgcttcatcgatggtgaaagaagatttaggtgctggaacactaggtccaaacaatttttgctcaagcagtactgaaggccctccaagaacttggcaacctggtgaaacaaatggtccaataaatcaaattccgtcactccgccttatgccggattttgcgggagtgtacagcttcttaggtagtgttttcgatccaagcacaagtgatcatctgcagaaactgaaggagatgaatccaattgatgttgagacggcgctgttgttgatgaggaatctctccatcaatttgaccagtcctgattttgaagatcaaaggaaattgttgtctttatatagcgcttctgatggacctgagctagggagctccaggagttcggctctagcaacgagtgcacctttcatgattaagggtggatagtgtggccaggtctgtccgcatataatttcagttggacagacctcaggatggtgccctggcgtagcaccgatgagtgacgaaggaggcgcctgcaccttttcgcttctcgctagcttcatgactgctgattgtgtaagggtgcggccatgaaaggtgagattggtctgcggtcatgaaaggtgagattggtctgcggcctgatgtgtatataaaatttttgccacgaaggaggcgcctgcacctatcccaaaagctcggccatctagggcattggatgctgcttcagttcagataatcaaggctgtccttggaaatgggacgagaggaaagatcccttccccattcgttgagttcagttctctgattggtttcttgctgccctcttgatacggggacctgtgcgccatgtggccgtctcgctgtttatgtgggcaagtttcacttgaggagttgagagggcttgaggcgatcgtggttttgtagagcaacgagtgcaccttccgaatattccttgttcctgtgtgaatcgtctatattgcatcaggcgtcgttgccattgtgtaaaagggaaataaaatcacaatgtaaaggatacactaccatttgaattgtattcagtatcgaagcaacctggcgacgagttcattgcaagggtggatatgttatttgaagtggcctttccaaatgctttcggtttattagtt

SEQ ID NO: 28984 - DNA, 1435 bp, Zea Mays
caactcacaggctcgactcttccagcctccgactccgcatccgcctccccggcggagcctctcgccaccgcacagcctagatccgcccagaggagctcaatctccccctcgaggccccaaaacgagatcctctgcattcctgcataggcgcctcatcgttcctggcctagcacagatgcagacggctgcttcgtttgggtatgcggcgggacggggacctcggaagcgagctacaacgacgtccccccccccccccccccccccccccccccccgcaccgatcgccgccgtggccctggctcgggtggccaccaggagatctgtcctccctccctcaaacgacgcctccatctcctcgcatttccttctccttttccccttttcaaacattcaggagccgaaggtgccagccaccctttgctcggcgcgtgtcccggcgtagctcacgacgcatcctcacctgcctgcaccgagccaaggagagtcgttggctatgcgcgttagctccgctgctgggtggtcaccatcgtccgagcacaacacagatgcagacagattgaggattctttgtttgtagaacgccatggatgagaggctgctcatgtttgatgtggttgatgacgtgtggacagtgctaacatgattgttcgagttggatgcacacgagagccttaggtggtttggacatgtcttcgagccaagagttgaaatcttgatgggattatgttggggcagatcttaactggaatacatatacggaacccggttggcagcagaggtagtgccccggtgcgccgcgcgcaggggcacgcgacagctacaaatattcggtggaggactggcttaggaaccttggatgcaagtgagttttcaattctttgtaagagaattcgagttgtgttaatttttgctttgcagactccaaatgtcatggtggcagggtgattggaaggaaatttgttgaggtggagatggactagaccaaggctaatatcaaggggtacctgtgagggaacaggactacactggatttggctcccgtctcaagagtaaagtagcactacaactagcaatgtatggatgaattgaaggaagtaaaagaaggcagacaatcttatagaaactctgcatattgaaaccgccatgattggcaaagaagttggatgcatctttgcattggtgtgttcttatcaccaagcagtaatgtgaagcaagttcatttgttgactaagaacggatcaacacaaattagtgaagattttgttcacaagagatgcaggatggagaggtggtagatttcaatatggctttgatactattttttccacttacaatattttgtatggaacaagaaaaaacaatgtatgtggttactattgtaattcaagaatttatttctaaataataaatatatttgtttatattttgtttatga

SEQ ID NO: 28985 - DNA, 3173 bp, Zea Mays
cctggccgcctccctgcctcctcgccgccgccaccgcttgtagcctccgctacgtagaccacgtcagtgtattttcttgtttgatctggagcatgctgtatcggtgattttctccttcttttgccgacgctgcggagcggcgaggagttttgattcagctgtagagagattctaggatctatggggtccgagaagggtggagccaaggttattggcggcggtggaggaggaggcgggatcttcaacctatttgattggaagcgaaagtcacgcaagaagctgttctccaactcgccagaggcgtctaagcttgtcaagaggagcgaagaaaccttgctgtcagtgcgtctccacttgggtgatgaagatgaggggattggtgtatcaagcttcaagggaagcagcgactacagctgtgcgtcttcagtgaccgatgaggaagggcgtgagatgaaggcgccaggtgttgtggccaggctcatgggcctggacgccatgcccaccttgggtgttccagaaccgtactgcacaccgttccgagacacaatatcattcagggacagccacagcctcaagaggagccctgagtactcaacgaatgaccaattcggtcatgttcctcgaagagttgatggatatatcaggaagccattggatttcagagcaccaaagatgccaagcagcccgattgaaaggttccagatggaagcattgccaccaaggtccgcaaagcctctaccaatgtctcaccatagattgttgtcccccatcaagaatccaggtttcacttcagcgaggaatgctgtccagatcatggaggaagcagccaagattcttcagccaagggcacaaacaagctctagggagaaagtatgttcttttagcccggcgcggattcctttgagagtttcggagccaagagagaacatccctttttctcagagggctgtgcctctgaaaccgcaatcatccaggactgctcctgagctgccaaatgtgagaatctctagagcacagcagatgaaccgaagctggaatagtgaggaggatattgtcatattcagaccatcggttgattcttatgagattaataatcctagttgttctaagaacaacaagggaaagtctgtttcattggcagtccaggcaaagaacaacgtccagaagagggaaggcgcaactggttctgggaggaattcacgagtacaaaaagaacatgatgagaaaagggtaaaccaaccatttaggagtcagtctaatctccagagaaacaagcagcaaaagaagccatcatcatctggcacttcttcccctgttctttggcaaaataatcagaaacagaattctttggtgaccaaaggcaaggtggcactaaacaaaaccgtctcaacacagcaaggcagaaaggtgatggccggagattcatcttctgggaagatcaagagtggaagcaagaactctaaagttggcagaaaagacattgtggaaagcattagtggtgatagagaaggatcatcgtcgaacaacaaggacttcccgcagaagaaacggttgatagagagaaactccaccaacgagaagggtacatttgtgcctgaaaacccagtgggtaaacttctgaagcaggttcaacctaatgttgttatggacgagcacattaaatggaacaaggaatgtaaagataccacagatgttgtgtcatttaccttcacctcacccttggtcaaaccatcggcaggaccgtccagactggcgggtaagtgggatacaagaagcaatcttgatatggacgcaggatgtgataaagatgattcagataacaaggctcaagggttgtcatcagtggggctgaactttgtaaatggtgatgcattgagccttcttctagaaaagaagctgaaggagctaacatcaaaaattgatccatcaatcacctttacgaggggtgacacatttgcgcctgctacttttaccttggaggaaccaccaacctcttcatgcagtaattggggctcagaaagtggagcatttgactgtagcccttctgaactaaaaccttctcagtatgattattgcccttcagcccagtcatctacaaaaggccaaaattttcgaggcagtaaaataaaggtggaagaacaagaagaatgcagcagcataagcaatgcaaggaaggaacaggaaaatgaagatctaagtcccctatctgtgcttgaacccaccacctctctaagcgagagttgctggtcttctgagtgttcggacagcagcgggggtaaggtttatccatcactttttgatgttaaaaatggtcaggggaatttcttgattaacccagcatcagttgatatcgaggcaaagacaacagactcagcctcttcggcatcagcagatacatcggatgtttcagatatcacccaatgctctaaaagatcaagacacacagagctggagtacatcgcagatgtgctaagcagtgtgaacttgacaacagatgaactgggatcactcttcgtcaatcaggatagatcagctctgcaccccctcctcttcgagaaactggagaatacgcatgcgtacacacaagggaaagagcccttttgccatcgagggtacaggcggctgttgttcgactgcgtgaatgagtgcctggagacaagacgcacgacctacttccgggcaggatatgcggcatggagcaaaggagcagcgacgctgggcatggaggaggcccaagtctgcagtgaggtaaccagctggaagcgcatgggagactggacggaggacgagctcgtcgacaaggacatgagcggcgggctgggcacatgggtcgatttccgggtggaggagttcgaggccggtgaggaggtggagaaccacgtactgagctcactgctcgatgaggtggtgggcgacatggtcgcgagacggcggcggccaggagtatttgtgatttgagaatgggccctgtaattttgtttcgttttgctgttacatatctccccaatttattttgtcaccccagaagtgtgctgttcaaatcagtgataaatgttcatcgatcgttttcagctcggctactgaatgccctgcttgacacggtttctgaagtctttttacctctgtgataggcaaaacaactctggccatttctactcgtaattcgatccaaa

SEQ ID NO: 28986 - DNA, 3754 bp, Zea Mays
ccggactaccaggggcgaatcgcggacgccgcccacctcccccatctccttccccagcacgtcgcaaacccttcgtcgccacccccgcctcccgccgcggctcccgtcgtcgcgtggccgtcgcgagccaccgctggcgtctctcgtccggttctctgagtctcggcgacctgttcctccgccgagttctcggggccctgctgtcgccaccgccgaatcctgctgtcctcgccgcagccggggaacgcggtgtgttgcgggagctggcaccgcctccttcgagaactaagtcaacagtctttatgggcttcatgctagtagatgatagttcctggcttcctgcactgcttttggaagacctgccttttcaatcatagaggattggtagaccagatcctggcaaagcaatgctgatggaccctcctgttatgcaaatggactgcaagttgaaaaatgctatggataaaacaccacaaatcgcctatgataggaagctgaccgtctcacatgatgattatgggtgggcaggctctgatgtccacctaaaagatgatacaatagtatgtagccctgtcgatcttagcgatgcttgtcaatcaggcatggatcgggtattagattctgcttccaaaaattcatctcttaatttgggcgatttatctcaggggacagaactaagagagaagaatagcgacagttcttactccgatgtaaaacttcagttaaatttaagtgctggaaattataatggcttgcaaactgatgattatagctttaataaacagagttttggtaagaaggatatgcatcatcctcaggaagagatacattcttctcccaatacaatgtcattaccaagtccatgcagactcaatggagacgtcacaccttgtgaagcggagaaaatagcagaggatcgtggcaaagtagatgggattgtagatgctgtaagtaaggaagtcaaaactgacttggtaggatgccatgcacggcaggaagaattgcaatgcacgctccaagatctatcagaaatagcctgcagtattgatttagtacgtaataaatcttctccacaagaagagaagaagtctgtttcccctttgaatgacatgggccataatgtggataacaatagttgtaatggtgataccaattataaagggcaggagctcaatatggggaatgttggagatgaggatcatgctgtagcactttgggtgaagtggagaggaaaatggcaaactggaatccgatgctgtagagcagattgtcctttacctactctaagggcaaaaccaacacatgacaggaagacctatatagttgttttcttcccacgaacaaaaacttactcttgggtagacatgctacttgttcttccaatagaggaatgtcctttgccacttgtgaatggaactcatcgtaaatggagaaagctggtaaaggatttgaacattcctcgacgattcaacatacagaatcttgccattttaatgataaatttaattgatgagcttcatattgaggctgtagttgataatgcacggaaggctacaacatggaaagaatttgccctggaagcatcttgctgtagagattacactgatcttgggaagatgctcctcaaatttcaaaatttcaggcttcttgatgtccctcagcgaccaagtggtcaatctgctcaacaaacagaagggatgagtggtctgcccctttatgatagccacaacgttgaggatgaaaatggctcacagaagtttgtctgcagattatgtgggctcaaatttgatcttctgccagatcttggccgccaccataaagtcgctcatatggtctcaggtgctgttggccacattccactgggccgtgggaagtaccagcttaaccgcggccgacactactattccgctttcaagaaaagtttgcgaccaacaagtacattaaagaagagcagtagctctggaatcgataaaaatttgaagtttcagatctctggcttaacatctcaaatagttgaatctgaaacatccagccttggtaagttacaggatttccaatgcttagatgttgcacaaactttattttccaagattcaaaagacaagaccccatccaagcaactttgatgttttatcggttgcccgctctgtatgctgtaagacaagtcttcttgctgcgttggaagttaaatacggacctttacctgagaacatatttgtgaaagctgcaaagctttgcagtgacaatggcatccaaattgattggcatcaagagggattcatatgccctaaagggtgcaagtctagatataattcaaatgctctgcttcctatgcaactcacggcagttgattttcttgaagctcctgttgattcccgtaatgatgatgaaatgtggggaatggaagaataccattatgttcttgattcaaagcacttcggatggaagcctaaaaatgagagtgttgttctctgtgaagacataagctttggcagggagaaagttccaattgtctgtgtcattgatgtggatgcaaaagattctttaggtatgaagcctgaagaacttttgccacatggcagttctttgccttgggaaggatttcactatatcacaaaccgtgtgatggattcatctcttattgattcagagaactctatgcctgggtgtgcatgttctcatcctgaatgttctcctgagaactgtggtcacgtgagtctctttgatggtgtctacaatagcctggtggatatcaatggaacaccaatgcatggcagatttgcatatgatgaagatagtaaaattattttacaggaagggtatccaatatatgagtgcaattcatcatgtatttgtgactcgtcctgccagaataaagtattgcagaaagggctgcttgttaagttggaactctttagaagtgagaataagggttgggctattagggctgctgaacctattctacagggtacctttgtctgcgagtatattggtgaagttgtgaaggctgacaaggctatgaaaaatgcagaaagtgtgtcatcaaagggtgggtgcagttacttgtttagcattgcttcccagattgatagggaaagagttcggactgtaggggctattgaatactttattgatgccacaaggtctggaaatgtttcccgttatattagtcacagttgttccccgaatctcagtacccggttggttttggtagagagcaaagattgccagcttgctcacattggattgtttgctaatcaagatattgccgtaggagaagaactcgcctatgattaccgacaaaagcttgtagcaggcgatggctgcccatgccattgtggaactaccaattgccgaggccgtgtctattgattttgcaggaatacactaactgttcaatgctcggttgcagaactccagagatttcaacagttgtgtaggcttgctgagcgatttagcattgcaattttcctacagcttgagtgcagggctaggatctcattgttaatgctacaaatagtgattgtgatataggactcaggcaagcattaggcaataacatagtgtcgattttagtcatggtaccatcatgtttaactgattatttgttagaagcagcctgaaatgaaactgattcaggctgctctgttcgtaggcgagaattctctctgtaaaattccttcattcatattttatggttcatgagcaccatcattgacgtgaagtaataaactagttatcccagtggcctattg

SEQ ID NO: 28987 - DNA, 4326 bp, Zea Mays
gccctcgccatgcccccgcacggccccgaagaagacgccgccgacgcgcacctcttcgctggcgtccgcttcgcgctccacggcttcgaccagatctccgcgtcccagtgtgtgtggcggcgaggaaggccgggaagaaggtcgtcgttgatcagtgggtggaagacagctttgatctcggagaattggcagatgcagatcgggtgctatatgctccagtcagagattttaaaggcattccaggttgcgataaacttcacatttgtttgacagggtaccagaagaattggcgcgacgacataatgaaaatggtttctttgatgggagcaaacttctccaagtctctggcagcaaacataattacccatctcatttgctacaaatttgaaggtgagaaatacgaacttgctaaaagggtgaatataaagcttgtcaatcaccggtggctggaagaatgcttaaaggcttgggaaatccttccggtcgaccattatacgaaaagtggttgggaagtagagataatgggagctcaagctaaggactctgaagatgaaacagaatatgctggtacatgctcattaagtagcagacgtattgacagaaggacccctattagagagatcagcacaaaatctcatgttgactctgctctacatgcacccagtggaggtcctactgtctctgctagcaatgtagtgggtgctactggaaaacacttgagcactccagagcagtttatgaaagcacacgatgcgagcacaaaatcatctgacattagaactgactcaggaactgcccctgacacaaagtgtgctgcaatgtctgttgataatgatactcttaaacctacccgctctcacatttaccacaatgagaatgatgaggttcctgcagataaggccagtagggatgaagctaaagatgatcacagaagggaacttgacaccagggatagtacccttcgtactcccagtgtacataaaagcattgcacccactattccaggagacaatatagagaacactaacaggaattgtttccatggtttcagtcagatcaatgtcaacagtgatcttcagttaaactcttctgaagaaaatttctccaagaaaatattacactcaacaaacttgagcagaaaggtagaccagaaggatgacgggcatgtacctgatcccaaacccaacatttctcagtcatcagttgaagaaaacctaaacatgtgtgagtttaatccaagatcagaaggcaattcagcatcaagaaatgatcaacccttaggctattcaagaaggcgatcttcaaagtcaggatcacttaatgttcataggaagaaaagcattctttcttcagtcagttcaaaggcaccaaatgaagccccagactcgggaagtggaatatcaagcgcaactgcttctgatgtgggtagaagccccaccgaacctaccaaagttgatggtcatgtaaacagtggtccaactatgaattcaacagagaaccagatgtccggttgtaaaagcaacctgttaagttataggagaacatctttgaagcttgtaagctctgctgaagtagaaaagcttcctgaaaattctgttaatgataagaacatggtggagccagatgtagtaaagacaccagcactgcacgaggcaacaactgaggagccttccccttccgtctgttctgaagttagaaaagaaagtttaggtgttcatcagaatagggacgctgaaatgactgatgctcagctgctaagcaaaactgaagatgcagctccttgctcaaaacctgataaagtggtttcttgtcagaactcgggactagaaggttgtaaagatgtcccagttaacaagatcactgatgaacatggaatatttccctcgaaaatatcaacttctagagtgaagaaggttggtgccaagcggtctcgcaatgccggcagtaaagctgctagtgaatttacaaatagtagaagtgaggttgcagctttgaagcctaagcatgataaagttgcttctcatgaaaacgtggaggcacaacagggagaaggatgttgtagtccaaatgctgctgaatgtacaccaccatctcctgcagaagccctgaacaacaaatcaacgaatgaagttctaaccagctcccagggccccaatcataagacaaacgaatcactagtggcttccaaggcggagtctgttaatatgactctgcaaagaaacaagaaggggaaccgcagaaagcttccaaacacttcaaatgcagatgaaaatcaaagaagttcatctcggacagtaccaaattccaaatcaggtaatttggttgcaaaggggtctcggactgctgatttcaatatatctgactcaccaactgtcgatgaaactgagacagtgccatcaaattcgagttttaatgaggcagttcctccaggaaatggtgaagaaaaacataaaaggctttcaagcagtgcaaacgcagatgaccctgaagcatgtacagcaaataaagtaccaaacaatagagtccgtaaggtcgtagccaagaggaagctatctgatgtccaaagccacaaatctggtagtgagccttgcaagactgcgaaggtattggtatctgaagttaaagttgtgtcaccagccagagttgcgcagagttctagaaatgctaacaaggtaacagtggttcaagacctgcagaacaccaatactggtaggacgaacgatacagttggatcattttgcaaagatgtcacggaagactgctcaaaagacatgcagagctctaaaactagaagcagcaggagacaaaagattgcagatctagtggatggttcaacggaccatgacaaggagaacatactagtcgatagtaattttacttccaatacaaaacgtggaaataacagcatgagttccaaatccaacacaaagacattacaaagtagcaaagctgtgcttgatgagagtagtgtgatcaaaaggaatggttatggaaccttggatgtgccagaaccaacatggtttattctaagtggacatcgcctgctgagaaaagagtatagggctatacttagacgtttgagaggtagagtttgcagggattcacatcactggtctttccaagcaacacaccttgtcaccactgagatgcgcagaactgaaaaattcttcgcagctgctgcggctggcaggtggatactgaagcctgattacttgactgctagcaatgaggctggcaagttcttagaggaagagccatttgagtggcacggtgaaggccttaatatcggtgatacgatcagcttggatgctccaaggaagtggcgccagctgcggcagcgtactggctatggcgctttctatgggatgcaggtcatcatatatggggaatgcattgctccaacactggacacgttaaaacgcgcgatcaggtgtggtgatggcaccatcttagcaacctccccaccttacacccggttctttaagtccagtgttgacttcgctgttgtatccgcgggcatgccaagcgcggacgcgtgggtgcaggaattcatgcggcatagcatcccctgcatcagcgcagattacctggtggagtacgtgtgcaagcccgggcaccccttgggcaagcacgtcctcttcaacatgcacgatctggccgagaggtccctgcagaagctcatgaagaaccaagaagatgctcccgggagctgttccgcttgtgggtcagacaaccgggaagtgccgatgctggtgtgcggcggcgacgggaggagccagtcttccggctgtggggtccggacgcatgccgattgctgcaaccctcccgtggaaggctgcgatggtggcgagtggctgtgcggtaggtgcgaccagcagaaatctgcaaagaaggctaagaagaccgctgcgaaaccgagggtgctgaaacagagatgattctggtttggcccgtacaagcgatgcaaaaggtcgtctcccaaggtaacgacgaatgatggcagcgggggtgctcttgctctctacaagttgatgacaactagctcgttgcctttggaaagcacccgtgcatgtgatctgatgaatgaaaacaaagtgatgggtgtaaacgtataaggactttagactggtgccaataaatattacgtatttatgtaaatgcacggatctgatggaatgctgtgatcaacttgaacatatatggtgcccatcaatctgggcattgggcgctgtcgaatgtccggtaaagcgcgctatttccggatcgtccttcatggttgtgtgcgtccgagtaaaggcaatggccgtgcaaaagtttcttcgacgg

SEQ ID NO: 28988 - DNA, 5457 bp, Zea Mays
taatctctctcaaatacccccacttttttcttcttctttattttagcttcaagtcttcaacattcctctgcagcagccagcagccaccagtgaggccgtgagggtgagtcgagtcgagtccaccaccaccaccaccaccaccaaatagccaaacacgcagtggtgctgctctctagtcctcccttcttccactccgctaaccccccgtcgcaagcacgcacgcgcgcgctcatcggattcggctacgcgccggcgagatccgggccgccgcagcacggtccggcagacgccgccgaaggcgcaagccgcgatcttgtcgccgcgggagctgcattggcgccccacgcggccgttccggcgtttcttgggaggttgcggcggcgggaggagttcgtgtccgggatccgccagatccgtgctcgccggcggcggcagcagtggtggtggccgccatggaggccgatgcgccgctcgacctcgcgctcttccagctatcccctcggcgtcagcggtgcgagctagtggtgtgcggcaatgggcggacggagaagatcgcgtcagggtcggtgaagccgttcgtggcgcacctgcgggctgcggaggaacaggcgtcggctcagccaccgccgctggccatccggctgcagctggagcggcccgccccgtggtttagcaagggcacccttgagaggttcgtgcgcttcgtgagcacaccggaggtgctggagttggcgaacacctatgatctggagatgtcgcagctggaaggggccaggaagatttatgcgcagggaggtactggagatgctacttcaggtggagctggtatgtaggatgattttatctagtgtttggatcgcccttctattgtcaattggggtttgaatattgctagcttagttcatctatgttcatacctggtaatgtttctctgcacttttttactttgggggaatttagtccaagttagcttgatcgacactgaaatttcaaatacacattgatggtaaaatcagaagaaaagaaggaaaaatataggtaggaatataactgggataattgatccacatggaattttaggaactcttgactatgaaataatgcatcggatagcaccagctttgcattggaagcaatctacgtctaattcaggaaagacataaatgctgtaattagttggtaactgttctgtgaagttattgaatattgatataatgtcgcattgttagtacaatcttgcatatcttctgttactgaatctagtttatgtaatctctggccatgcttattggcagctgaaaatgttacagcctcagcggcagcggcggcagatattacaaagaaagaacttcttagggcaattgatgtgcgtctaagttcccttaaacaagatctggccgcagcttgttctcgagcatcctctgctgggttcaatcctatcagtgtatctgagcttattctttttgctaaccattttggtgccagtcggctgagcgaagcatgcacaaagttcatgtcactttgccagcggcgtcctgacatcagtcctcaaactgcacagccagcagtttcatcacactggaaggtctttgacgatgggaatgtccgtggttcttcgagttcagacatgtctatagatgaaccactagttgatctcagtgaatccaagaacaaatctacagtcagtggaagtggctctcaggtccacagactaagcaacatccaaggtttagaatctgctgcagcacagcaacccaagccaaccatccaacaagcagtagataaacaagaagcagaaacagatgcgtctcctgcaccttctaaaggagagctttcaaggcggctgagtgtgaaggacaggataaacatgtttgagagccagaaaaaggagcagactccaagttctggtaacagcaactctgccggtactggtagagtggttccagggaaaggtgagcaccgcagggttccttctggcgcctccatggagaagttagttagaaggtggagcagtgttagcgacatgagtattgacctcagcaacaatgagagtagtagcttaaatgacaaaaaggataatggaactcctgccgggactccaacatctactgatttggaggccgactctaaagtaagagctaatgaggactctaatggacagaaggattcaatcacgtcacactcttggccttgtcaaaaggataatgtaccaatggatctggccaccacagatttgtgcccaccctcaattttaagtaatacacttgctcctcataaagagagtatatatggtgatggtgcagaaaacgacatggttatgaactctagcattgaaagtgaagcatcctttgggaaagaaccgggggttattcaaggacacacaaggatgtcaaatcatgctacttcaaatgtttccactcaagaccgtctaaaatcttctgcaaagtcagttgaagaagccttgctgaaaaataaagttattgtaactagtgcatcgtcagaggagcatgtctgcatgatagacaaggaaatcacagctgttgctcatgaagtaccagttgcaagtgaacagattccccagaatgatattagaggtctccatacaaaagatattcacactgaagcagaagtgactggaaggaaggatcagccttcacgatcatttggaagggtatctggtggtgttaatcctaaaccaaaagcctcatccaattcccgagctaatgctaaaggctcatctgttagggatgcgattgcctctacagaaactgagttccgtgacgttagtttgcagcggaatcgtctaccacggaagtcagaagatgtagggaaaaaggttacagctggttctgattcagattgctctggtcgtcagggaaaaaatttgagcaggcaatcatccattaccgatcaggaactaaacttgcaggctagagtgacaagaccaggaaaagggaaccaagatcggcatggtgaattgcaaatgaaggccaatgagttggagaaattatttgctgaacacaagttaacatcctcccgacgaggtaaacctacagatgtgcaggttgaaagcacacctatggtgagtgaggtaaagccgacaatggttcttcatgagacaattcatacaaaacaagttgtaaaggagagtataactgtcaatgattttgatgccggtgagcttctgaagatggtgaataatcaagaatttaacattagcacaccacaaaaacttggcattctaagtttagaagagtcgagagggaagttttatgagcattatatgcagaagagggatgcaaaactgaaggaaggctggaagctgcagagagaggagaaggaagcaatgttaaaggctatgcatgacagcctagaacggagcaaggctgagttgcttacaaaattctctcggtctgcagatgtccctgactcaacttatgtttcccattgttctcagaagattcctccttcgcgatcagcaagaaaaaataaagatcagggggttggctcattcttggtggaagaggaaatgaatagtgactacctatctggtgatggttcttccaggagtgctgattccagaaagcatttttcaaataaagttgcttctacccaaaatgcatctgctggtcctatccataaacgttcatcaagaaccgcaagctctggttatgctaatcgcaggaatccaccagaaaatcctctcgcacagtctgtccccagtttttctgacttgagaaaagaaaatacaaagccttcacctggagtcagtagagtgagtgcaagagttcagcaaaagtcttttgcccgtagcaagagtattattgaagagtcaaagagcatattgaaagaagatcaatcgaggaggtcacaatctatgaggaagaaccaaattcctgatgagcttaaggacatttcgtcagggaatgatgatatttacaattgggctccctcaagaatttccaagaatcaatcagagggaccttttgcttacagtacccgtagatcgggtccaccaaagccttttcttaggaaaggcaatgggactcaccctgttattggtatagctggatttcaggctgcagctgccatgatggcgaatgccctccagcatggtgacagtggtgattttgaagatcagcaagaggattcccctgatgatgccaaagaagaggaagaatatgaaagcatggaagaaaatcttagagaaagtgactttcctgctgattctgacagtgagaacccaagagtgagtcatgaatttggaaattcagatgacccagggtcagaaaacggtgatgctgattttccaagcaaaacacctgccattggcagtactaagttcactgcttttacaggaaatgttcacaatccagctggtgatgttccagcaccctggagttctcgtcttccacagctgttcccttacacgaatgataattcagatggtgacgcctttgctgattcaccatcgggaagtccatcaccatggaattctcattcactggatgaaataacagatgctgatgtatctcggatgcggaaaaagtggggcagtgcacagatgccttttgctggtgtcaatgcacctcaacagccacgcaaagatgtttccaaaggattgaagaaattgtggaaatttggtaggaagactagaggcggtgacggtttagtaaatgattgggtatctgcctccactgcctcagaatgtgatgatgacatggaagatggacgggatctggtagtaggatcttctgatgatttcagaaagtctcgaatgggttatcttgcttcatatgacggttttgttgagaacgaggttttttctgaacaagaacaatcactacgcagctccattccaaacccacctgcaaatttcagattgagggaggatcagctgactggaagttctcttaaagcgccgcgttctttcttctccctgtcaacattccgaagcaagggaggtgatgccaggctcaggtgatcctcagaagacaccagaggtgtggtgtgtataaaatatcttgtcaagttaggtatggttatcaaattttcagggtggtacgtggatgctgctagcttgtgattatatatatattgtgtatctatggcggttcatataagctaccagttgagctctctccattgttgccgtttgattattcttttttcccctgtgtagagttggacttttgcaatctgttctttcaactggcccaggactcctgtattttttttcattgtttttgtgatatatctgtatctccctctcaacttgtttcttcattcacatatatcacaaattcaagatatatggtaattttgccaactatagcaaaccacctgagatgctagctctgcttgtgataaaattgaaacgagtttgtgacaaaattgaaacgagagtcgagccgagttgaccaagagctgagcgagctcacaagatacaagtatttt

SEQ ID NO: 28989 - DNA, 3841 bp, Zea Mays
ggtccttctcagtctccctcgtctccctcagatctaagccaccgtcccttcccccagctccggcgatcaccggagtgcctccgccttggggcatgatggacctcctcatcgcgcagatcaccactgacctccgctcctcggacgcgctccggcagtcgtcggcgctgctgcaggccctgcagcagtgcgccgcggggcgggacgtctccgcgctcgcccgcaccgcggccaccgagatcctgtcggcgccctcctccgccgtctgcaagcgcctggcgctcgacctcctccgcgcgctcccgctgccgccggacctcctcgacccgctccttctctcctccctccgctccgatctctcctttccagaccccgacgtcgccgcctcctccatcgcctcgttcccatccctgccctcccaccttctcccctcgcttctctcctccgcccacgctgaaatcgctaatgcactctcctcgcccgctgagtcgctgcgcctcgcagctgtcacatctctgtcctcgctcctcccgcgcgatgacctaacgctcatgtgctccacaaacccctccctcatggcgcatgctaccacgtggtggggccgcctggccgagcttgcgctggactctgcagacgctgtttccgccggtgcgtttgaggctcttgcacggctgttccaggagctagaggggcgccgcatgagccggctagctggagacaagcttgttgatggagaaggtgcgcttgcagtgcgtgcccagtgggcggctgatgccattgatttcatttggtcaaggcgcaacatgctgattgcgcgctctatggtgatgcctgtggagagcttccgagttactgtgtaccctctagtgcatgcagcaaaaatggttgcttctggtgtggtaaacactctgcggcgagttgctaagccaggagacactacaattgctgatagcgtggagtcgagtgcggagaaattggtaggagtgtcagacatcgtctcacacttgctgccatttcttagttcacttgacccaccactggtgttcgaggttgggatcaatatgctggcgcttgcagatgtccctggaggcaagccagagtgggcatcagctgcaattattgcaatcctgacactatgggaccggcaagagttctcttcgatgagggagacaattgtaagggctgttgtaaccaatcttcatttgctggatcttggaatgcaggtctctctattcaaaagactgcttcagatggtgagaaacttgagagcagaatcagatcgaatgcatgctttggcatgtatttgtcggactgctctttgtgttgatctttttgcaaaggagagtgtccgaagaggtcagaagcctgttcctggaacagatgtgatatcgctctttgaagatgtgagggtgaaggaagatctaaacagcgtaacaagcaaaaacttgttcagagaagagctagtggcttccctagtcgaaagttgtttccagctatctcttccactaccagagttgaagaattctgggacagagagcagagttataggagcgttagcctatggaactggttatggtgcccttaactggacagaacctgctttggatgtggtggaagtttgcaggccatgtgttctttgggactgtgatggtcgtacctatgcaattgattgctatctaaagttacttgtgaggctttgtcatatatatgataccagaggcggtgtgaagacaattaaagctggtgcatctcaagatcagattctgaatgagacacgacttagaaatttgcagctgcagcttatcagggaccttcgcgaggttcacactccacgtatatcttcacgcttgatatgggcaatttctgaacactttgatcttgaaggtctggatccccttttagctgatgacccagaggacccactgaatattgtcatatctaacatgcacaagatattattcaacaccgattcatctgctactacatcaaataggatacaagatgtgcaggctgttctaatttgcgctcagcggttgggagcaagaaatgcaagagcaggccaacttctcactaaagaactggaagagtttagggcaagtacttcagctgattctatgaccaagcatcaatcacgttatgtgttgcaagtaataaaatacgtaacaaaccatcctgacaacaggtgggttggtgtaggtgatgctacaggggattatccatttagtcaccacaagcttaccgttcaattttcagaggcgtctgctgcccaagataggaaattggagggattagtccataaggccatccgggagctttggaggccgaatcccagtcaattaattctcctacaaacaaggggaattggtgctttgcataaagagcttccaaaagcgtgtgctttgactggcagcagtgatccgtgctacatcgaagcatatcatttggcagatccaactgatggcagaattaccctacatctaaagattttaaatttgactgagctggaactcaacagggtggacatccgtgttggcctgtctggagcactgtattatatggatggtttctctcgcactgttcgtcaccttcggaatcttgtttcccaggatccagtccaaagtagtgtgactgttggagtttcacattttgagagatgctcgctctgggttcaagttttgtattacccgttttatggaagtagtggatcaacagactatgaaggagattatgcagaagaggattcacagatgatgaggcagaagcgctcacatcggcctgaacttggggaaccggttgttttgcggtgccaaccatacaagtttcctctcgctgagctcctcctaccattagagtgttctccagttgagtatttccggctatggcctagcctaccagccatggtggagtgcactggcacatacacatatgaaggcagtggtttcaaggccaccgctgctcagcagtatgacagctctcccttcctcagtggattgaagtcgatttcttctaagcccttccatcaagtctgctcacatttcatccggacagtagctggattccagacatggtttggtggatttgtgggcatgatgatatttggggcaagtgaagtcagccggaatgttgatttgggtgatgagaccaccacaatgatctgcaaattcgtcatgcgcgcatccgatgaatccatcacgagagagatcaaatccgacctccagggctggctggatgatatcaccgacggcgctgtggaatacatgcctgaggatgaggtgaagagtgtggccgccgagcagctgaagatctccatggagaggattgccctgctcaaggcagccaggccaaaggtcccacccgcaaagaccgatcaagaggaggaagaggagcgaaagcagagcgaggaactagatgggtttggaaaccccaagggcccctcgacgctctccaagctcaccgcggaggaggctgagcaccgcgctctccaggctgccgtgcttcaggagtggcaccagctatgcaaagagagagccatgaaagcgcagtgaggtcgatttggaccgtgtggatcttacgcgcatgtataattttgtatttttccttcgtctcccattctttgcgtgtctatactgctggtttcactcactgtataccgtcgccgatttgttcattgtattctcaaatacttgtgcacgaaaaaacctgttttgtaacatactactgttagggcgtttttaagcttcggtgtgaagatcgattgtacaagagaatccaaatgtcattgttgccttcccagttttatgaaaatgcattctgtaattgaagaattctccccaaaatgccacga

SEQ ID NO: 28990 - DNA, 2292 bp, Zea Mays
cgggctcagacctccaccaattttgtggcgctccgggcaggggaggtgctgtccaagttggcgtcgttcggggtgaaggtcctactggacgagcggagaggggagtcgtcatcggagaggaggcgcgccagggcggtggagttgcgcaccatcttcactaggctcggcccaaccttcgtcaaaattggacagggcctgtccacgcgccccgacctctgcccggccgagtacctcgaggagctcgccgagctgcaggattcacttcccacatttccggatgaagaggcatttgcatgtattgagagagagcttggcttcacgcttgattcaatctactcgacaatttcaccttcccccattgcagcggctagtttaggtcaagtttataaagcacggttgaaatactctgggaagctggtagctgtgaaggtgcagagacccagtattgagaaagccattgggcttgatttttatctacttagaggacttggctttcttataaataagtatgttgacattgtaaccagcgatgttgttgccctcatcgatgaatttgctcgaagagtttttcaagagcttaattatgttcaggaaggccaaaatgcaagaaggtttaagaaattatatgccgataagcaagatgtattagtgcctgatatattttgggattacacaagtgcaaaggttctaacaatggagtggattgagggtgtaaaattaaaccaacaagcagttattgaaagtcaaggattgaaggttctggatttggtcaacattggtatccagtgtagcttgagacagcttctggagtatggttactttcatgcagaccctcatcctggtaatatattagcaacacctgaggggaaactggcttttcttgattttggcatgatgagtgaaacaccagaggatgcgagggtagccattataggacatgttgtccacttagtcaacagggactacgaagcaatggctcgtgattattatgcactagatttcttggaacccgatgtagatgtttccccgattgtgcctgctctcaagaattttttcgatgatgcactaaatgcaacagtgagtgagttgaacttcaagacaatagttgatggcctaggtgctgttctctatcagtacccattcaatgtaccagcatactatgcattgatactgcgatcgctcaccgtactggaaggtttagcactctatgctgaccctgattttaaggtgcttgctgcatcatacccttactttgcgaaaaggctactgactgatcccaacccatatctcagagatgctttaattgagcttgtattcaaggatggaaaattcaggcaagtacctgctcatctgtatatattttatactcttcacagatcaaagcaccactcaggatagcgttgtttaatgttcacgtctctgcagatggaataggcttgaaaatcttcttgttcaagggcgccaagatagggagtttgcagccaaagatgcactgcagcctgttctaaagcttctccttggtcctggtggggaggaattgcgtgcgttagttgtgaaagaggcagttcgtgtgacagaagccatcgccattggaacactggtcgattcatacaatgcagctccatcatttttgaagccattaatttccagcggcaatctagctgaaccctttaagtttagtgagactgaacaagaacagatgatggagctccgagaccaggttttcagagtatggggtcttttgagatcctcaaataactttgatccgagccttttgcagccaatcgttcaggttctacaagaaccagaggcccgtgtcttgggttctcgtgtcgcaggtggtgtaacacagcgccttgcggcacgtctgctgcaacagcttctcaggacccctcctgctcctggatcttcttagcagatatatagatataggctcgtatgattgtatgaagcatgtaaattgacacgatatttttcacaggaaatgagaaggaagcacaacccagaattcgagtatatagctagtttcttggttctaagtggataaagacattgtgcatcgagctttgtccagcagaccgtgtatatagttgtgtaaaaaacattgttttgtgctgtagattacactgtttacggagtgaagattgaaatgataagacatggacgagtgagctgctaagatgtcacgcagcttagatccaccgctgttcaccctgtaaatcatgatacgcggaccaattatgcatttacgcgtatgtgtagccctaaaacttctacgtgtcaaaataaaag

SEQ ID NO: 28991 - DNA, 4282 bp, Zea Mays
acggccagcaggtaccctgacgatcaatacgacagattatggacacctatgattattgacgccatcgactggctggtgctatccacgacggaaaaggtgcggaacatatatgatgacctcttcgaggtgccgtcgaaggtgatgcagacggcgatcacgccgcgtgacgctaccagcagcatcaacttctattggaactccaagggctcgtcgcttgggtacataccggtcttccacttctccgaggtgctgcaggcgggcgccggcgttgttcgccagttcaacatcaacatcaacggcaagcggttcacctcccatgattattacacaccacggcacctcgaaagtggctacgtatacggtaccagaccttacaccaaccagatccggtataacgtctccatcgttaagacagacacgtcaacgctcccgcctatcatcaacgccgacgagattttcatcgtcatctctacgaccaacgttggcacggactcggaggacgtctctgctatgaaggctatcaaggcgaagtatcaggtgaagaagaactggatgggagacccgtgcgttgctgggacttttaggtgggatggactgacgtgcagctatgccatttctgatcctccaaaaattactgccctaaacatgtccttcagtggtctgaccggtgacatatcatctgctttcgcaaatctcaaggctgtccaatccttggatttgtcacacaacaacctgacgggctcaatccctagctccctgtcacaactgccgtcactgacaactctagatttgacggggaatcagctcagcggaccaataccctctagtcttctcaaaagaatccaagacggctccttaaacctaatctatgccgataatccagacctttgcaccaacgccggggattcatgtcagacggcgccgcaaggaaagagcaagctagtcatctactacgtcgctgttcctatggctctgatcgtggtggcgttggcagtactgctgtgttgtcttctgcggcggcgaaagacgcgagggctagcggacgtctctgtgaagccccgggacaagactccgacgagccttgcttcaatggcggccgacgaacacagacttagctcgctgcggcttgagaaccgccggttcacatacgaggacctagagatgatcaccgacagcttcaagcgtgtcattggccggggcggctttggatacgtctacgagggcttcttggaggatggcactcaggtggcggtgaagatgaggtctcagtcgtccaatcagggtgccaaggagttcctcacggaggcacagatcttgacacggatccatcacaagaaccttgtctccatggtcggctactgcaaagatggggtgtacatggcgcttgtctacgagtacatgtcagaaggatccctgcaggagcacattgcaggaaaacgcttgacttgggggcagaggcttcgaatcgcattggaatcagcgcaagggctagagtatctgcacaggggctgcaacccgcctctgattcacagggacgtgaagaccagcaacatcctactgaacgcgaaactggaggccaaggttgctgatttcggcatgtcaaaggctctagaccgcgacacctatgcgtccacgaacactcttgttggcacaccaggatacgtcgacccagagtaccacctggcgcgcggcgacatcgaggtcgtggtggacgcgtccatgggaggcaaccacgacgtcaacagcgtgtggaaagccgcggaggtcgcgctccagtgcaccgagcaggcgtcggcgcagcgccccaccatgggcgacgtggtggcgcagctcctggagtgcctcgacctcgagaagggccgctccgccaacgaaagtttctgcgacggagacgacagcggctccgcgaccgcgagcttgagccacagcagcgcatttgtgacggggcgtatttttgggacggtgccaatggtggagacaggccctgccacgagacgcgcgctcgtgtgtgtctcactgtctcccctgtcccctctcccgcgtgctcgtctaccttcggctcccccatgggatgagagcgccttcctcgccatggccgcctcccacctgccccccgcagccaccctcgtcaagaagtacccaactctcctccacccgttcggcgccaaaccacacgcccagaggctgatcttcaggtgccgcgcgaccagcagcgagggtgcggacgatggctgggcgtcctttgtggacgagctcaagaggtcgctgcaggtggacccgtccgacgcggtgattagcaacgccggcgcgggtctcacatcaaataacgacctcgtcaccgcgctgccactggaaccctccgctggtccggctgcgggagacgcgaccactgccgctgccggcgcggtgagcgagctcctgggcgtggacgcgtcaggcgcggtggccacccccgaccgcctcctgagctccctgctgcacctggacgcgtccaacccggtggcgagcgtggcgggcggcgcgctgtctcgcctggacgcgctcacgtcgggactgtcggacgcgcagcggtgggcgctgttcgggttcctggccgcgacgtggctgtacctgaccgcgcggcccggggtgctgagcggcgccgtggacatgtacgtgctggcgccgctgcagctggcgctggacagcgtgctgggccggcggagcctcaagatgagcgacttcgtcgtcggcgagcgcatcggggagggctccttcggggtggtgtatgccggcgccgtggtgccgaagaacggcgccgtcgtggaggagcggtccggcaaggccaagacgagcctccagaacgacgacaggtacaaggagaaggtcatactcaagaagatcaaggtcatgacggtgggggcgaaggagtgtggggactacgaggagtggttcaactaccgcgtgtcgagagcggcgccggagtcgtgcgccgacttcctcgggagcttcgtcgccgacaagaacaaggcggagttcgtcaagggcggcaagtggctcgtctggaagtttgagggcgacaggacgctggccaattacctgagcgagcgcggcttcccgtccaacctggagcgtctcatgttcgggcgcgtgctgcagggcctgggcccgctggagcgcgaggcgctggtggtgaagcaggtgatgcggcagctgatcacgtcgctgaagcgcatccacgccacgggcatcgtgcaccgcgacatcaagccgtccaacctcgtcgtgacccgccgcgggcaggtgaagctcatcgacttcggagccgccaccgacctccgcatcggcaagaactacgtgcccgaccgcgcgctgctcgacccggactactgcccgcccgagctctacgtcctccccgaggagacgcccgagcccccgccggagcccatcgccgccatcctctccccgatcctctggcagctgaacagcccggacctgttcgacatgtactcggcggggatagtgctgatgcagatggccataccgacgctgcggacgcagtcggggctcaagaacttcaacgccgagctcaggtccgccggctacgacctcaacaggtggcggcagagcgcgcggcggaggcccgacctgcagatcctggacctcgactccggccgaggctgggacctcgccaccaagctcatctcggagaggggcgccaacggcggtggccgcctgtctgccgcggccgcgttgcgccacccgtattttctcctgggtggcgaccaggccgcggcggtgctgtccaagttctcgctcagtaaatagcatccatccatggcccatggctgggtacctacgacctacgggatatatacacatcggcttattggaatcctccgatcgattcaccatccttgtatattgcgcattattgaatccttgggcataccataccggcagtgggaggcatcccaaattcaaaagggagtcatctggtaactgatgttacaacttttctgtatgggaatgctgtgaacaatgtggtgcagagtttcacacactaactaaccttacattatgctagacagagatcctacttcctttgcttcagttcctcgaatctatgcagatgcagacactcgcagagagagctcatcaactggctgcaaaattctgacctgctccttctttcagccaatcagatgtttggccatgctcgttctgatcctatactgacagacgaatccggccatggatcgcctctactgtcactggcagtacggatcgaacttcttctgga

SEQ ID NO: 28992 - DNA, 2355 bp, Zea Mays
aagccccccaggccccagctcgacgctcgctaccctaccccgcaaggccgcaaccccgagcagagtcccaagcccaagaaaccaacccccgacgcgcgcgagacggcgagagagggagagataggtgtgcggcagtaatatagtgggtttgctctttgattggccgcggctaagcaccaaaccttggggaaatggagctgctcagtggtgcagtggcgcagcgggagcttggggaagcggaagcttgcgagcagccagagcactagccattacccagcgctaccatacactgacatatctatcgatctgatcgggctgctgctgagtgcagtgtgtgtacaaaaggccctgaaggcggtaagaccgagctgcacctgcactagaggtgaaggggtgtgagggagaagaaaagcgagtagcccgtgagctgctgcggtgcgagggagcccagggtttcgtctcgcccggccgcgcctggaccgtgccgacttcgctagcatgatgaaccccggctcgcgccagatttatctgaccttcccggccgacagcacgttccgcgaggaggacgtctccaactatttcagcatctacggtccagttcacgacgtgcgcatcccctaccagcagaagcgcatgttcgggttcgtcaccttcgtctacccagagacggtgaagctcatcctggccaagggcaacccgcacttcatctgcgacgcacgcgtgctcgtcaagccgtataaggagaagggcaaggtccccgacaagtacaggaagcagcagcaaggggacttctccggctgcacgacgcccactggcgggctggacgcccgagatccctttgatctgcaccaactcggcgcgaggatgctgcaacattcgaacagcgccaacgagctgctgttgcgccggaagctggaggagcagcagcaggctgccgaactgcagcacgccattgagctccagagccgccgcctcatgggtctccagctgctcgacctcaaggctcgcgcagctgcgacagcatcggcactgccaacaccaattgccaatgccttcgcgtccagccatcctttgagcaccatggcagtcgagtcgccactagagtctggagagcagctcaagctgagcagtgggtttgctctggatgggaagctcaacggtggcgacaaggaagaatctgcttgcgaggcgagccctgacgccgctgatagcgaccaaagtggagagcacaacttgccggacagcccatttgcgtcccctaccaagtctgccgcgctcgtgcacgacagtttcgccgccacggagcctgagaacaccgcgtcctgtgttgggagcaagatcgacggcggcagtaaccatctccgcccccctgcgctggaaatcccttcgcccagctcctacttcttccccatgcgcaggctgtcctccgatcacggagccatggggatgtaaagttcagcattggaagcgagtgataccccagcctaatcatagaatactagaagccaaggaaaagtgatgttggatatataggagaaaaaaaagagagttgagtgtcagcatagtgttagctcccactttcttttgttcttttagtccctacctttttagtggatagttctactaaaccacaagaggagaagatgccattagccttgattaagaaaacggcggcatatgcaatattatcgccagatataagtatatatatattatatatacaaataatcccctagtttctagtatatatatagtatctgtacttagtatttaacagtagcaggtaacgtcagcccaaagatttttactgtgacaaggtcctacaactacagccacctccactaggtttaccaaatgtgaggttaatccacagttctggtaccagccacagcgacagccacaggtcacatgtaataccagtacagctacagcctgacgcggacatttgtatgctagggcggcccagtgacaggaaaaagagcacatggccatggcagttgtctgtaagctatttttactgctactgctgcaagatcccaagctgggtcctcctatggatagagagaaagagacgtgtgtgcgtgtgttttgcttgtggccttgtatggctttgacacctactgcaaaatactactgttatatgattatatgttattgttgtgcctttgttcccatctgtttgagtggatcctagtgtagttgacacccctacagaaagaatggaagcaaagtgagtgctttgcccctccatttatctcccaccttttcagaatcggaaccgggtattggtatagctgttgttgtgagatggctgtcaggacattgactaatgattgttgctaatctattgagggg

SEQ ID NO: 28993 - DNA, 633 bp, Zea Mays
  misc_feature (632)..(633): n is a, c, g, or t
ctgctgtacatcagattatagaatgcaggcgagtgctgaaaatggacatatgcttatggctactatctggatgataaggtgaggctgagtctggtttggaacgtctgcatcagtgcgctgagaaagacttgcacaattttttgactcctgtgaaatttgagagcactgaaacgacgacccctacagtggctgaatttggtgaattccgggtgaagcttgctgggctcacaagcgttactcggaattactttgagaaccttgttcaagctttggaagctgggttggaggatgtccacgccactgcccaggctgctggtacatccatcgccggcaccagctccaagaaaggaggaactaaatccaagaagaaacaacacactaagccatcgtctgaccacactgatgatggttggccctgcgagcgctgcacatttcttaaccctccctcagtggttgtgtgcagcgtctgcgaaaagagtaggtactagatgatggaatagctcaaagggaggcaccccaagaaaagctcaaagcttatgagaagaggggtgcacttcagatcctgcatcggatgctgagaagctgagcctccagcagctgccatgatggtgtacagtgagttattgaaggtnn

SEQ ID NO: 28994 - DNA, 3097 bp, Zea Mays
cccctatcctctctcctcgcccaccggaaacgcaacgcaacgcaacgcaaccagagggggaggggggggggggggaaagccggagccgactgcccgcaccacccacaggaacgccgcggggcaggggggcaggaggaagacgccggcggcggcggcttaaaagggcagggcgccattacctgcttccctgtcttccccttcccctcatgtactatagtactgcgctgcgccctttcatttacccggagtagtaaacgagaagaggaataattgtgtcgcaaactaatccgtttcgccgctgcctgctgcttgagccaatcttccgcgggtcggggccgatgacctgccaactggtctgtttcacttgccattttggataggatcgctcgttttggaattaactttatgctaacagaatctaggtgtcattaagctagattaagcttgctgcttgacttagtagtgtaaatctgtaaagaaaattacctggtttgggtttagtctctataaaagaaatggaacagaggaatgttctggcattgggtgaacatgttctaaaagctactgtttggaagcggaagcataagactgctatggagcaccctgaaggcaatgatgtgatggtgttctctcagcatgatcaaagaaagcaccctgtgatatttgacgacagagctaaatgtaagaagtctaaattaatttcctgtgggagtggagttatattggagtcatattggaactttaagacaagtgggctgcctgtgcgcgtgcttttctaccaacatggtgactggagtgattttccagaggatgttgtaaatctagcacaacaggacttccagttgaagaagccaattacaactgctgtgttccagaacaagcacatcctgttggacttcattcacatgatttgcatagattatgagatgaccatagacaaaccactagcatgggttgatgataatggcaaacgcttctttccagatttatctgctgggctctacacatctaaaccatctcagcatgagaatggtgaagctgatgagtgtgatggaacgcctacaagtgtagctgaaagttctagttcggtatctgttggtgaagtagtttctcatggtaagaggatcaatgatattgcagaggacaacatgagagcacataacatattgtatgaagctgttggtgaaaatatttcaggtccttcattccatttgaatgaatattctagtggaaccatacaagctactggcaagccaaacgattgtcgacgtattgattcagctgtgcggaatttgttgctcaaaggattaggtcagccgtttagtgaggaagatattattggtatctatagaacaccactgctagatcagcgagggcaagttcgttgtggtctcttccagaaggagatcgaagagaccaggagtcgtcgggggaatgcaaatgtacgttatgcttggcttccttgctcaagatataccatggagcagatggcaatgcggggtgctctggaaatcgcgaagcctcataaggggtccatttgtggtgttgggacttgtcttgctcctgcaaactgtacaaattcatgtgccagatattctgattttcatgaagatggcatcatcagaatgatgttgtgccgtgtaataatgggtaatgttgaggttgttttgcctggatcaaagcaatttcagccatccaatggaagttttgataatggtgtggatgatcttcaaaatccacagaattacatcgtatgggatgctaatgtgcataaacacatatatgctgaatatgctgttattgtccaagcacctctcgtgaccaatgaatgttcgggcttgaaggatagcgtgcccaacatatctgagatcataagttctggttctcgagacaatctaaccaaggtatacttgttggggttcggcttgtgtgggtgcatatagctcaagttcagcatcctttatatggagcacagcagcacatgtatgcctaatatgtgttgcattactgcacgtctcatagcacatagatactatggtctaaaatgatgtgtgatcagatcacatcttgtttccatcatttgctttttttattggcaagtcgtgaaccaacatagaaataggctgtcaatggttaacctttatttatggcagaaggcagatatcatttacctagcctttgaaatttagatgcttcttattggcaatcccaatcccgtggttaggaaatggaatgtattgtattttgacaaaaccatgtactttgttccgtgcttcttggccggagccatattcttaggttgatgagaactattggaatgatggatcctcttttccttgtttgttttgatcaggaggataggttcgcgccttgtggtgtcgaacaagaagcacctaggctggggcgtgctccaagggccccctcctcaccatggatgcccttttcgatgctttttgctgctatttccacgaaagtgcctcgttcggacatggagttggtcatcagatactatgaagaattcaagaggaagaggatgagccggagcgacctggtggtacggatgaggcaaatagtcggtgataagatattggtttctacaataatgaggcttcaccaccagaagaagcccccatcgatggcagcagcagcagctgggctagcaagagcactcgcaaggggggaagagggagggggagtagccgagtaagattagtttaagccgccttgtcttttgagaaatttatggagcacatatgctttgtcgacatggccagacccaaggtgtcaaaagggagggagatgagctgagcaactgttgtagtgtagtctcaaactcaaagcgtttaggtcttgacatttgacaaactaaaactcagaaacattatcatgagtagtgtttttttttcgtttctctttcctggatttaactattgttattgctatttcgtggatatctgggcactgaaggccgtgctattgttggttaatgatggtatgattaagggtgcgcttgccattttaaccctttgaccacatccaaacaatcacggctccttgtgccagctcaaaggcaacatctatcatgtgaaaatttaag

SEQ ID NO: 28995 - DNA, 1712 bp, Zea Mays
gaatgctatacagagagaggctgcgttgcctcgtatccaatctaacggcggataacaccgagtggcgaccgcctgacgcgcccgtgtcggcaagccgccgacgacttgacgtggggcgggggaaacaaaacaacgcgggcagcgctacggcaagcgcgtccctgccacggcgcggacacagagagtggaaaccggaaggggggaagagagatggattcctccacctcggcggcggcggcaggggaggcggccgtgccgccggaggacgacgtctgctccgtctgccacgaccgcttccggatcccgtgtcaggcgaactgctcccattggttctgtgaggttgcaagacctacccttcttcatccgaagactgttcagagaactaatggacccccagcggaccctcccactcgtgttcagggcgcggatgctgatgatggcatgctgggcctctttggattcgtcgatgacctgctcatcctgctgatcgtgttcctccacctcgccgcggtgtaccggtcgttgctcctgtaccgccacgggggccagtagaagtcgctgtgcataaaccgtttgtttagctggtttccatgtggagttctctgagatcgcagcagcggatttggaagatcgccgactcgccgagtagatggcaacgtcacggacggcttagcctgtccctgctctgtaccattctactacgcctgtttttctgagactctgacacggatgttggcaagaccatcagcaccgcctttggtgactgctcaaactcctgaagtcggcatcttcattacagctcgcaacgtctcgggtgcactggtcgccaagcttcctggtaacaaaaacaagtgtggaggaagatcgaatgtccggcagcggaacatccaacctgggaaaaggggctgtcgtcgggagtggcgggcgctctcagcagctgaccaagcgcaggcttctaccttggacgtagatgaggagtgcaaacgggtgctcactccattgggtttctccagcgaagacgccgagaagatgctgaagaaagcgtttggctggacccactcgccgtactggagcgaggagagggagaaggaggttccgaccgccgaggcggtagctggagtgctggactacatcaggagcctggggctgtcggacgaagaccttggcaggctgctgaagaagttccccgaggttcttgggtgcgacctcgacggcgaggtgaggccgaatgtgggcaagctggacagtgactggggaataaacgggaagaccctgcggagccttctgctgaggaaccccaaggttctgggctacaatgttgactgcagaggggattgcatggcccagtgcacccgctgttgggttaggttctgatgatgattggttttgttcttcgtcgccacatcgttggtcaggaacttgggacttggttttgcttgctggccatttttctgtaagctagcacctgtcgaatgtagcacaatcgctagctgctggatattgggttggccactgttagttcttatgtacgtacaacagattcaagagctaaaccatgctgctgttgtctgtaaaagagttgcaataaatatggccagaattcctgaatggcctgtggtaccgcagtgacttgctattgttcttctgctctggatttccacattgtcttgttgtgatgtgaggtcctgtccttgtgctttgatgcatctccc

SEQ ID NO: 28996 - DNA, 615 bp, Zea Mays
gcgtccacttcgctcccctaggtcgcgagcgagcgacggccgactgcgcgagaccgcgagtgaccgccggtcgagccccgaggccggagcggctcccccgcaggcctgccctcgtctggtcgccgcctcgccgcgcagcaaccccgcgacccgctgcccggccggcccgcgttactcgggcgatgcaggcgaagaagctgaccctgctgcagacggtggcagctgcgggagtcttctctgccgtctccttttggtatggcttcatgttcggaagggagtccgcgcggcgcgagcttggtggcatcatagacgacctccgcagcaacaagcccaccaatacccctgccggtcccgatgctcattcgaagccatagtggggtatggtgttctgttgttcctcctttgccgtactaaatctaaatgtggtcaagcttgtcttgtggatcctgctaggctgtagacggaagaactagccttggagctaccagttttttgtccccttctttcataatgtgtatacggcttgaacatcagtttttagactgaaaaaaaaaacaagttaacctgccacaaaagacaaggaagaaaaacaagttaaaacctcctttggttcag

SEQ ID NO: 28997 - DNA, 211 bp, Zea Mays
tctctaatctggcgattgatctgctggaacttatctagccccggatgtacatttttctgatgggccaaaaagcaacaagcctaattacgcttccactccggtctccttcctcttgctaattaggaagtagtcctcgtgtgtcaaataagattagtataaataaacctagaacgatttttcgttgcatcctgtcacagtatctccaaaagcc

SEQ ID NO: 28998 - DNA, 2206 bp, Zea Mays
gttgacactccccatcagagagccctcttgacgccagcccactcccagctcaaccatttccagcctcaattagccgaggcccggcccattccttgcccacgtcatctttctgtctctccctctcatcgccgcgtcacgcacagccgccgccgtcgtgcgcgtgtgccggaacggccgcgtggatcctccgccccgtcccagcggcgacttgtccgtgcgaagatgctggggttctcgaccggacagctgctggtcgtcctcggggcctgctccgtcatgatgaagcccagtgatatggtgaagattgcgaggacggccgggcggatgactggaagagcggttgggcggctcatagtggctcgccggcagctggacgagattctgggccagtctgcagccacccaggttcataaggagcttaaagacgctatgacacaattagactcgatccgttatgaagtccagaacttatcaagattatctcctgggcagtttatgttgaagcaacataacgctggcatggctgaagcagggaaatctgactcctctgatggtcctacaaccaacgtcgcgggttcgaagcagtctcctcatttgcggagaaggcttgtcttggttgattcgttccccaaaccccactcatatgggagcctccgtctgtccgccactgggtctgcccttttaatatgagtatttgaggtctaatggttgatatttcaacagatttaaaatgcttaaatgtgaatttgctataagtagcagcctgatgtgcctactatgacatacagatacagtctgttgtgtgacttcagtacagatacattttaggctgatatagtcctattctgtgcattctggccatgattcattttgaaattattccaaggcttaaaacatgcacaagaaacaatcacacgaaggatgtgcttttttaagttatgtgttgttcaatgttttttcacttttttgtagatagatcatagatctgagtgttgaccatgttgtggtcgccaatagctacatgatgttggaacttttcatttcaatgcttgcactgcacttgaaacattggttccttctacttgttaacttttggtttacttctttgtcaagagatatacttaatagagcttttatggcaatgcagcaagaagaatttcgtcaggaaattcgcagtataattcgcgatgaatttgaaaaatactgtagaacacagcccattcaaaactctgtgagcacaactgaacacagaaaacttcatgtggctgatgaaccaacggcactgaaatccaaggacatgaagatggctaattcaggattgacaaatctgcacaaccaagcaatgacgtatgcaaggctatctgaagccccaggacttaagatggattcttccttgagtgggaactacaaagatcaatctaaggagatggatgggctgctaactgtactgccaatatcagctgaaagtgctggattacttccaagccgcccagataaaccaacaggctcagatctagtccttgaggctgtgcttgaagcggaagttgcggagaacgctaaactgtttgtgtcgcagcctcatgatcagctacctaaggaatgaagacgaagatgatgtgcttgaagacgttgcaaacaggaccaaactgttcagctgacagccgcatggtcagttgcctacggagcgatgatggtagtttttgatccttaacaggatttggcatactaggcctgtttggtagagctctagaagttgatataccgatctggcgtccagcaccagcggtgtagcttgtagtcttgtaccctcaggcctcaactagccagctaggattcggatgccatggtagaaactggcgacatagcttgtagcctcaactagccaggtaggtttggctgccatagttgaggtaaagctgtggccggtgggcacgtagcttgtggcctcaaaaggagcaagaaagaaaaatagagtaaattagttgtggttatcaatgtgcatggtgattttaaagcttttaaggatgtcatctgtattctgtgtcctcgcaacactgatattctttgcaactctgagtagagagatacacggaatgttcagcttttcagatccattgatggtagtgttgtttttaatgttcccaagacttctgaggaagctgcaagagcaggaattgtgcatggcctccgagaacctgatggtcat

SEQ ID NO: 28999 - DNA, 3569 bp, Zea Mays
cgtcgttgggctaagtgggctgttacacgcgggcaaagacaagaaagagaaaaagcccatgttgggagggggtaacgtgcgacccactccaccgatgcagcgcaatagcgcaagctctcgccgccttcctcctctccttatcctcctgacctcctctgacctctgcccccccctccattcccatttcccacgcggcaggcagctagccctacctctggtctcctctgccacctcctcccctgccacctcctcccctgcctagggtgcgccttcctcgccggacgccggcgcagggtcgggacgcttccgctgccgcgcgttccacgacccctctctgggagacgaaactcggcgccggcttggtagatacagacctgggattgccttttcctagttcagcatggagggcactctagttcagtctgcggttgttccaaccgtttacagaagcagctcaggtcggttccgtgtgcgtgcaagggccagaaccaatgctacaatggtgcgaaatatgccaacaaggactcttactcttggtggtttccaaggattgcgtcagacaaactttttagacacgaggtccgtgatcaagcgtgactttggatcgatcgtggcaagtcagattgcaagaccgcgtggatcagcctcaagaggggtggttcgtgccatgtttgagcgcttcactgagaaagcaatcaaggtgattatgcttgcacaggaggaggcaaggcgcctgggacataactttgttgggacagagcagattttgctggggcttattggtgagggcacgggtattgcggcgaaggttctgaagtctatgggaatcaatcttaaggatgcccgagttgaagtcgagaagataattggacgtggcagtgggtttgtggctgttgaaatcccattcacacctcgtgcaaaacgtgtattggaattgtcccttgaagaagctcgtcaacttgggcataactatgtaggatctgaacacttgctccttgggctacttcgtgagggtgaaggtgttgctgctcgtgtgcttgaaagccttggcgctgatccaaacaacatccgcacccaggtcataagaatggttggggaaagcacagaagctgttggggctggagttggtggaggaagcagtggccagaagatgcccacacttgaagaatacggtactaatttgacaaaattagcagaagagtcgtttggtagacaagatcagattgagcgtgttactcagattttgggcaggcggacaaagaaacaacccctgcctaattggagagcctggtgttggaaaagactgctattgctgaggggcttgctcagcgtattgccaatggggatgttcctgaaacaatttgaaggaaagaaggttattactcttgacatggggctccttgttgctggaactaaataccgaggagagtttgaagagagactaaagaaacttatggaggaaattaagcaaaatgaagacattattctctttattgatgaagtgcacacactgattggagcaggtgcagcagaaggtgcgattgatgctgctaatattttgaagccagctcttgctagaggtgaacttcagtgcattggtgccacaacactggatgagtataggaagcatatagagaaagatcctgccttggaaagaaggtttcaaccagttaaggttccagagcctactgtggatgaaacaatacagatcttaagaggacttcgtgagagatatgaacttcatcacaaactgagatacacagatgatgctttaattgctgctgcacagctgtcttatcagtatatcagcgatcgtttcctgcctgacaaagccattgacttgattgatgaagctggatctcgtgttaggctgaggcatgcgcagctccctgatgaagccaaagagctggacaaagagctgcggcagataaccaagcagaaaaatgaggctgtacgtggccaagatttcgagaaggctggcgaattaagggaccgagaaatggagcttaaggctcaaattacagccattattgacaagagcaaggaaatgattaaagcagagactgaatctggtgaagtcggtccgcttgttactgaggcagacattcaacatattgtctcctcttggactggaattcctgtggagaaagtgtcatcggatgagtctgaccgcctcctaaagatggaagagacgctgcatacacgtatcattggacaggatgaggctgtcaaagctattagccgtgctatccgccgtgctcgtgttggcctcaagaatccaaataggccaattgccagcttcatattctctggaccgactggagttggcaaatcagagcttgcaaaggccctggcggcctactactttggctcggaggaggctatgatcaggcttgacatgagtgagttcatggagcggcatactgtctccaaactcattggatcacctccaggttatgttgggtacactgagggaggccaactaactgaagcagtccgtcgccgcccgtacacagttgttctctttgatgagattgagaaggcacatccagatgttttcaacatgatgcttcagatcttagaagatgggcggttaactgatagcaaggggcgcactgttgatttcaagaacacactattgatcatgacatctaatgtcgggagcagtgtcattgagaagggaggtcgcaagattgggttcgaccttgattatgatgagaaagacacaagctataacaggatcaagagccttgtgactgaggagttgaagcagtacttccggccagagttcttgaacagattggatgagatgattgtattccggcagctgactaaattggaggtgaaagagattgcagacattatgctgaaagaagtgtttgacaggctgaaggccaaggacattaatctccaggtgacggagaagttccgagatagagttgttgacgaaggttataacccgagctatggtgccagacctttgcggcgtgctatcatgaggcttctggaggatagtctggcagagaagatgctggctggtgaggtgaaagaaggtgactctgccatcgttgatgtggattcagatggcaaggtaatagtcctgaatggtggtagcggtgttgctgagccactggaacctgctctcagtacctaaccgaggttaaaatctttgggccgaaatggccttctttacaagtcagctgggctcttcgtgatggtaaagtagactgttattacttggccgctccattagttgctttatctttcattgatttttttttgttggaagtgaggcagtagggtcactatggaaacgaatagacggagaggcattagccgaaatgaatgtttttcagtttgatgcacttgtattattaggccttgctagcaacaaggtgcagatgcctctccgtttgctgttgtactttagtgtaacttaccttccgaatgtattattaggcgttgctagcaacaagatacggaggttatacatttgattttcagtaaaaaggtagactctttgttgcgccgcagctgttttattgtctgcgcactgcagtgttcgttca

SEQ ID NO: 29000 - DNA, 1780 bp, Zea Mays
ctttttccccccctagagattgagatcaagcgggagatttcgactatgaagctgatcaaacatcccaatgtggtacagctgcatgaggtcaattctggaaggctaggagaggatgaagctaggatatactttcatcaacttataaatgcagttgattattgccatagccgaggagtgtaccatagagacctgaagccagagaatttgcttctggattcaaatggagctcttaaagtttcagacttcggcctaagtgcatttgcaccacaaacaaatgaggatgggcttctgcatactacctgtggaactccaaactatgtagcacctgaggtgcttgctgataaaggttatgatggtatggctgcagatgtatggtcctgtggcataatcttatttgttcttatggctggatacttaccctttgatgatgccaatctgatgagactgtacaaactgatctgccaagcatatttttcttgcccaccatggttttcttctggagcgaagaagtttattaagcgcattctcgatcctaatcctgatacgaggataacaattgcagaaattttggaagatgaatggttcaaaaaagattataaaccaccacgttttgaacaaggtgaagatgttagccttgacgacattgatgctgcattcaatgattcagaggaccgtcttgtggcagagaaaagagagaaaccggaatccatgaacgcgtttgctcttatttcgaggtcgcagggtttcaaccttggaaatttgtttgagaaggagatgatgggaatggtaaagagggaaacatctttcacgtctcaatgcacagcacaggagatcatgacaaaaatagaggatgcatgtgggccactcggtttcaacgtgcggaaacaaaattacaagatgaaattgaaaggtgacaaatctggaagaaaaggtcacttatctgttgcaactgaggtttttgaggttgccccatcacttcacatggttgagcttcgtaaaaccggaggagacacattggagttccacagcttctacaagaacttctcatcggagctgaaagatatcgtgtggaaagctgaatctgacgcaaataataaacagacgaataagtgatacccagagaatctgtgtagccctcatgaggccacattcagatagatcacctcttcgggtgataccacctgcttggtactgtatgcttttttttttactggtaccacattagcagccaaaatctcttgtaaacgggaactccttctgaatgagcgcaattgtacaaaacacatatgaagaggccctccgtgagatgctccgaacactgcaatgggatgtcaaatagttctgaatggtgagtgctgtttttgcatctataggggcatatatgtttccattccatgtgcatgtaccgttgttgtatgcgcatgggggtacgtgtgcagcaggagagagagaacatctgaacgtgtcctgagaggaaaaaaaaagtctatgtccgtttctaaaatgctttggttgtcaccagggttgagtgcctttgttttatgaaaatggacaatggagaatgatgtatgaagcttaactctagtatttgggagtaaaagtatgtttggttggatgtataatgaggaatggaagggggtcgtcacactttctatagtgtttggatgaaagttaagcggtgaagaggtaaatgccggagtaattttttggtggtgtagggaatgttgagatccacatagttgtacttggttggatacgctattatttttagcacatatta

SEQ ID NO: 29001 - DNA, 1705 bp, Zea Mays
ccttgccttaggtaccccgttcctgggtacacgacagattttgtggttgaaatcatttgacaacagagaaaacatgaagcgatgatgtgccaaaaggacggtaccgagcaggttcatgagaagcagaaaagacaaccggcagggaagaaactgacgaaggaggagaaagacaagctgatgcaagaaagaaaacaaaaacggcaggaagataaactactgaagcaagccttgaaagatgaactagctaagaagaagaaaatggaaaaagcaattcagaaatgggaatcaggaaaatttgctttagaatgtataactgttgagattgacaacagtgttatccaaaggggctctattggaggtcctcttctttcaagtttgacagagaatggtctttcctatgaacctaccaagaatagaatcagcggttcaattttatggaagttggatgttcctgatgatattgctcaggcgttttccgaccttaacaatagctgtgatatgaaccaaaatccattgtcacaagtgaaatatgtagcaattgtgcttgaagctgaggaattttgtaaccttataagcaatggatcgttctttgatcatgtccaaagagtttgtgatggatacccaggattcaccatttgctacatcattaataaattgatgaactacatcaacaaatgtgagcaaagtcaatacaagaacccttcaaatacttggagacgtccgccagtggaagaggttttatgcaaactggcaacacactatattaacgttcactcaaggcaatgcatagatgaagctgaagtagtagagcaccttgttggcctgacgtctagtcttgcaaaatgcaaattcaggaaaccactgacatggttatctgtgcaagctaacggtgcagttatcccgaaaggttttgttcataaggacctggcgaagaaagacacctggttaaaagctttaatagcgatccctgacatccagccaagatatgcttttgcaatctggaagaagtatccctgcatgagatcccttctaaatgaatatatggatggcagtaaaaccgttgccgagaaggaacttctgcttagcgacttgaagtgggaagatcgactgggtgacgaaggcaaaaggctggggaacaaatgctctagaagggtgtacagaatgctcatggcacagaatggagacctggatgcagatgaccccgaagctggcggtagatcttagtgcctaatcatctggaccttgggccatcaatatatgcatgcccgccctcttgctgaccggtttgtgtacatatcgtccttttgaccatgcttgcactgtcagtgtcatggtgaaagagtcgcgcattagctcgtgcgatgtttggtgccgaaagcatggcctgcaatgctacacacgatggcacatggtgtgtgtgttttatttattaggtacctgtgaaaagcatttggtcgaagtcgaatgctaggaaactgggcattcgttgtgcgtagctagcttactgcctctatagagccccccaacaggctactccaacttttgagaacctataatatattatactagtagttcagaaaggcacgaggaaatgtttgtattgaatccatgctgccgtgctgtgtacggtaacccgcattgatccactgaaagatcccatgtatcgccgtttgtggaggacagctaccagtgaagtgacccttgc

SEQ ID NO: 29002 - DNA, 6516 bp, Zea Mays
ctgctggccaggccatactactagagagggacgccctcccttcctctcgcttggcttacacttctccccatcccccaacacaaacccaacacaactccgccgtgtcgcctacacgcactggccacgaccaaaccctaggcgccgccgcccccggggcccccaggtacgcctctcgcctatccgccgccgtgattccgcctccgcgccgccgtcgtggcgctcagcgactgagagatacgcactagggttcgctgcgatttcgttgggaggagaaggaggaggagatcggtgaggagagaaggggatttatgtcccagcgaggggacaggggcgaggggcacgccaggagacccggccggtccagcagcttcggcggccaccgcggaggcggagtcggtggcgcgggcaagggcggcgcgggctcctcaggccagcctcctctctcatccaaccgcagctttagaaagcctggcaatggccacggcgggcaccagagggtggtgaaccagcccgacaccactggcttccagcctgcaccagcgcctggcacccaccaaactcctgcgcgcccgccacctgcgcctcagaatgcagccgtgcatgttcctgtctccgcatcacggccacaacaccaggatccacatgtgtcatcttcattgtctgccagcgagaaaccggctaatccgccgttaccactaccgaaagctacacatgctgctccaagggctctaccaaaaaactctaacacagcgcttcctcagggaggatcgcaaggagaaccatcaaaggggtttaactttcagtttggtagtataaatatgaatgggctaccgcaatttcctgccaggacaagctcagctcctccaaatttggatgaacaaaaacgtaatcaggcacttgtggaggaacttaaggttacacctgcccctgtgcaaccagctctgaaacagcagcagttgcagcagcagccacagctgccgccacagctgccgccgcagcaggttccccagcagccacagcagcagtcagcaagaaaggaagctgttggttccagccaacataactccatcaatccccatattacatcgcaattgaaaagagatgtgcacccatctccatctgtccctaatgttacatctcttagacctaccgttcaaattcctggtgttcagatgccgatccccttccatcaccagccggcacaagtttccttgcagtttggtggtcatggggcacaactgcagcctcaagtcgtgcctagctcatatcaaatgtcaatgggattgacaggcagtagtacacaagtcccacagcagctgtatgcccctactctgcagcatcatcaattgcaacagcaagcaatgatgcatcctggccagggtatgggttatgttccttccgttgctcaccaattcccacagttgggaaacattcctatgaacatcgcatcacaatatgctcagcaacagccaaacacgcatgctgctgcacgtaagactactgtaaaaattactcatccagacactcatgaagagttgaagctcgataagaggatggactcttctgggcagagagctgcaccgagcttgacacaacaatcccagcccgttggtaattatgctcctcatattggcttctttcatcagccacagagttcctacaatcagtcaggaatgtattaccctactacagctggtgtgaaccaggttgctactggatcttcaggtcctagatataattatcctgtcactcagtctgggcaagcgatgacatatatcagtccatctgcagtgcctccggtatctgctcagtcccaatatacagttaaaccgcaccctattgggttggtgactgaaaaatctagtactcatgtcacaataagtgctccaccagctaaatctgagcctcctaagttacgtgctgctgaggattctgcgtcaagtcggcaaaaggataatgaaattgtttctgggatcgctgtttctagtaaatcaatccttgagaaggaggagagtaacgatcctttagtcacagtgaagcattcgactgtaataagcccgtccttgccaattcatggtgcaaaatcacaaacttcagtgacatcatctcctgttgtgaattcagtctcacctgtggcaggagttgatggaaaaagcatagaatctattcaaaggactggatcatttaatgataacaagaaaattgtcactaaaaaggatgtcaggatttcatctgaaccaccgaattcagcttcatctgttgaagataaggtgcaaactgtaaaggctggaggcagtgatcaccaggaaactaacaacctgaacaatgagttggatttggccagctcatcttcatgctcaacggttccactggcagtaagtaggatctttccagggaccgtttcagtgaatgctaacagcacagcagtaactgctgctgatgttcctgggacagatagaagctcaagaagaccatctcccgagggtactggtgagcctgcagtagaaagcttcactgttttggctgttgaatgtgacaaaaggaagcggactgatgaagttgcgacagatcctagcaaggataatatttcttctgatgctaccaaacatgaattgcctgatgcatgtgcagtggaccctactgaacaggcatcagcagtgacttctaatactgatgattcatatgcatcccctatagtaaataatcaggagcagttgctgaaagagtctgctccatctgcttctgaggaacaagctatgatgaataacttttccaagaattctgagacttcacattttcttgatagcaatgctgtggaagtgagaactggaacttcagagcctactgttcaaagttccaatgacgaaggtgactcggatattagtccagaaacagacctagctgtttgcaatgttcctctagtttcatctgagggacaactgaaatctgagagtagggctgatgatcaacaggctgctgaaccaacagtttcagttcgatcagtatccagggaaaagcctagtgttgagatcgccaggtcaaagtccgcagctgggaagaggaagaagaaaaaggaaatgcttgctaaggctgatgctgctgggtcttcagatctttataatgcatacaagggaccagaagagaagtctgaaatggttggtactgcagatggtgctgatagttcttcaatagttgacacaacacatgtgctgcttgatgaagcagaaagggatgttagtacgtttgcagatgattgtaagaaaaaagttgagcttgatgattgggaagatgctgcagacatgtctactccaaagctggcaccagattctggaaatcaggctggcaccacccaagtgctagattcagatacaagtgaagcaaacagcaggaagaaatattcacgggattttctgttgaccttgcaacaccactgtactggtcttcctgttggatttcagatgaatgaagctgtcaatgcaataatgaataatttggttggaaagtcttatgttgttgaccgggaaccttaccctagtcctggaaggggtttggaccgcccaacttctcgtggtgaccgccgtggtgctgccatgactgacgacaggtggactaagacgggtgttcctctcagtcctggtcgtgatgttcacatggacctgccaaatggaacatcagttgtcaactaccgtagctcaggaggtaatcatggtgttttaaggaatccacgtggccaaccatcaaatcaatatggtggtggtcttcttgcaggacctgtgcattctgttgggcctcaagtacctcgcagcggctctgattctgatagatggcagcaaaagggtctcatgccttcccctgtcacacccatgcaaacaatgcacaaagcagagaggaagtatgttgttgggaaagtttctgatgaggaggaggcgaaacagaggcagttgaaaggcattcttaacaagctgactccacaaaactttgaaaaactgtttgaacaagttaaggaagtcaacattgacagtgtagcaactcttactggggtcatttcacagatatttgacaaagctttgatggaaccaactttttgtgaaatgtatgctaatttttgcttccatctggctggtgccttgcctgacttcagtgaagacaatgaaaagatcacattcaaaagattgcttttgaataaatgccaagaggagtttgagagaggtgaaagggaagaagctgaagctgataaaacagaagaggaaggtgagatcaaacagaccaaagaagaaagagaggaaaagagaatccgtgctcgaaggcgcatgctgggaaacattaggttaatcggagagttgttcaaaaagaaaatgttgacagaaaggattatgcatgagtgcattaaaaaattgtttggaaattgtgatgatcccgatgaggagaacattgaagcactatgcaaattgatgagtacaattggtgagatgattgatcgtgcaaaggcaaaggagcacatggatgcatattttggtatgatgcataagatgtcaacaagtcagaagttgtcttctcgtgtaaggtttatgttgagagattcaattgacctcaggagaaataaatggcaacagaggcgtaaagttgaaggccccaagaagattgaggaggtgcacagagatgcagctcaagaaagacatgctcagtcaagtaggctaggacgtggtccagctgttagttctgtttcaagaagaggagcaccttctatggattatggctctcgtggctcatctgcgttagcatcctcaagttcccaacaagggagcattcgtggaatgcctccacactcgcgtggttcacaagacatccgatatgaggagaggaaccagtttgacaatagaactgttcttccccagcgtgtagtcaaggatgaagctatcactcttgggccacaaggtggccttgctaggggtatgtctataagagggctgtcaccagcatcaaatactgaacttccttctgttattgaccaccggagaatattatctggttctaatggttataactctgtgactgattggacatcatcatctggaagagaagattctagctcaataattccagatcgaacctctggccgaacttctgcttctagtcaatctgctggaccttcacagaggcctgccagccaggaaggccgtccaggaagtaaatcatattctgaggatgaattgagagaaaaatctgttttggccattcgggaatattacagtgcaaaagatgaaaaggaggttgctttgtgtattgaggagctgaatgctccgagtttctatccttctgttgtatcactttgggtaaatgattccttcgagagaaaagacatggaaagagagttgttggctaaacttctcgtcagcctttgcagtggtcgacataatttgttgagcaagcaacaactcagtgatggcctttcatctgttcttaccttattggaagatactctaagtgatgctccaagggccaccgagtaccttggacgactttttgcaaggtttgtggaggaaagcatattgctcttggaagagacaaaggggattcattcttgaatgaggttaagtcaacttcgagtttaaaattggttgatttcagaccacatcatcttaagcgatcaaagttggatgccttcatgtagctacatgagttattattacctgattcaccaatgggtgcggccgccaagcagtttactttgttcgcacgcaaatacccatcggcctttttgatgtactgtgaaaaattcctctgatgctactcctacttgctgtacctgatcgtgcactatttataagatggaaggcgatgggtcacccattttttcagagttgatgctggttgtaaactactgtcaatgaagggtcatgggtgggaagcagctagctaggcccccataagaggatcagggaatatttttgcgatcacagggagaagtctgctaaccaatattagttggtagttgggggaactgtaggttgaacttaatgcctcctgcgggcttctgaccaaatactcctttgtgatcagaattggtagtcggttaacttagcggcattttcgtgatagccaatgtttctcgtgatggtctgaatatgttgatgttgcttaaattttgctgtaatttgctatttttcctcgttctttgtttttgtacttattgagaattgatgcctcggattctctgatgtatgtatgattgggctcaggctcagggcactttgccatccctattttgtcatttcggttcttccttagcgtggaacgtaatgagtgtgagaaagtaaaattggtgaaagtgaaaatgggaactgagagcactttttttattgcattctcatacaagtgaaaagtcacatgcgaagacgtgcgaaagtgtagaatgtgcaaagggatatgtcccatgatcatttggttcatgcgactagtgcagtgcagtaataactgtttacatcatgtaacacttttccttaagcaagtggagaa

SEQ ID NO: 29003 - DNA, 1282 bp, Zea Mays
cccgctcccgttccccaatcccagcaccgatccccgcccctccgacgcgccggcggccatggacatgtcgtcgatcgccgcgaacctcggtctctcggggtcccgccccgtcatccgcaaggccggcgagctccgccgcctctgcgacgtcaacttcgattcttctgtcctcggcatcggcgaggtctgcaaggccatcatctgcctggagatcgccgcgtccaagttacaggtgatatttgaccgggcggaggctgtgcgtatgagcgggatgtctgagaaggcgtacatcagatcattcaattcgctccaaaatggtcttggtgtcaagacgactttggatgtgcgtgaattgggcatccagtttggctgtgtcaggctgatacctttcgttcagaagggattgtcactctataaggagcgcttccttgctgcattgccaccttcacgccgggcaagcactgactttggtcggccagtgtttactgcagcagcattctacttatgtgcgaggaggcacaaggtttcaacatcaatgacagacctctgctttgatgtttttgggatagccaaggagaagaaggatccaaagtccatcaaagggaacagagaactgctggatgttttgccaagcaaaaggaaacatgaagatggcggtgattcatctgcatccgatgaatcctcagacaacgatcaagacgagctagatttaccaactcacaagaggcgcaagaagatggagagagaagcatacaaggactggaagtcgtccgttctctcctcgaacaagaaaaccaaaccagaccctgccaagcctaggaggcaagctcaactcaacttcaagaagccggcagaagtacctcctgcagccaactagatgagtacgaaccctcttcgcaacaaatgcagtttgctgagactgaaagtggtgtatttgctccatcctcatctatgttccttctgaacgcatatgggaaaaaaaagcccggacgcctttttgctccttgtttttgtttatctttgtgacgtaagttattcatgaaagtgctgttgtgcggcatacatactagtgtaaatgacgacatgtttatattctagtgttacatagagagagagagagagatgtgttggaggatgactagctggtctgttatctcatctcatatctagtcttcttggtgctgtcagcccaattggcgccacttgcaccctgacgccctggcgcctacgcgtgcccatgtggtcatctggcaggctccaggtattctttaaagaatacgag

SEQ ID NO: 29004 - DNA, 1176 bp, Zea Mays
agcggttcggctgctttaaagccagcagctccggcctccggttgccgctgctggcatgtacagagagaaacactgtacaaatatggtgaacttcagcagcaacagccctgcgttgcagccagccgaacagcagaaagacattgtagtagttgctagcaagtcaagagtttaggtaaccaagtggttgatgagcaaaggacaggtgctgacatggacaacatatgatacacttctgctcgcacttcttatggataaacgggtagacgaagctgagtcagtttggaacactgtaatacagactcatacccgctcagtgcccaagaggttgttctctcggatgatcttgatctacgacattcaccagcgcccagataaagttttggagatattcgcggatatggaggagttaggtgtgcgtccggacgaggatacagcgagacggatcggaaaggcattcgtggcttctggccaagaagaaaaggagaagcatgtcctcgagaaatacttgaagaagtggaagtacatccatttcaacggcgagcgcgttcgcgtgcggagggacggaccattggcgtagtgcccgttttctgaaaaatgctcgaacctatcagagtatcgtgccggtaggcggtagggcaggggagatgctgttactgccgctgtgacagtcaggcacatggatatcggcactagtccctatcctatgtatgtggaatggaacggaaactggagattggttccatggctctagcctgtggaggagacgagcggatggggggtggctggctactaccggcgagatagtgatttaataggcactacataggcgtccagtgattgcgatggctttaacttgcgtatgtgtctgcggaatggtcccgtgctatttcggtgacttgtgcttgtggaattgtgaacacccactggaaagtgtatatcatgagagggacgatacctgacgtctgggcccatggcttgctgatttcacgcaacgaaccattttctgtttgttgcggtgccccggggttcacgtacttgttctgttcttgtgatctggcacagagctgttggcttatccatttctatgcccatccttcttcagcaaatgatcatgtgagttgcgttccgtttgttctgtctggcactcaacccacatggtgcgtgtcagtgtttggc

SEQ ID NO: 29005 - DNA, 3637 bp, Zea Mays
ggctacggcgaccgtagccctcccggcggcggccgcaccggctacggcgaccatagccctccccgcggcagccgcatcggctacggcgaccgcagcccgccccgcggcgaccgcattggctacggcgaccgcagcccgccccgcggcgaccgcattggctacggcgaccgtagcccgccccgtatcggccgcatccgcatcggctacggcaaccgcagcccgccccggcgcgagcgcgctggctacggccaccttgacgcgtcgccccgccgcgggcatgcgccgtacaaggacgccttcggctcgccgggcggcgaccgccacgcttctccccgcgggcgcagggaatacggagatagccgcgtctcgccccccgggggtagggactacgaaagggcgccctgccgcgaggagcgcgaccggtacggccgccctggccgcggtgccgatctcgggcacaactccccgccagcccacatgctcccagaccacccgtccgacctgggacgttcagcatccctacgcgctgacgaccatagccttctcaaggacgactaccctaggggaggccctcatcggagcatcagaaaggagaacgagttgtttgcgaacggtgacctgactctcagaataagtgcaactgaaatgggaaggactagcgccatgtactcccaagaccgcaggctctcacctccaccacctatttatccctatgtgccacgtgagacgggattcttgacaggcggatctgccatgaaggccagtgatggttatggtgctggaactggaagcgcccagcggctgcatgatgatgacgattttaagtaccacaaggatgccccacacattgagaggagtagagatattgataggcattattctggcagtagggacttagttgttgagaaaggtggagttgctgaaaggtatgcttctgctgatgatctgccttctgggaggattcgagaaacagagagtctttactctagtagaggtatgctggagtctgacctggtgccgtgtaggcagttgaaggttcttggtgatccttcctcagctttgcctgccaaggaccaccatccatacaggatgtacactgaacctggctacgagacaagcaacagatacatcatggagggccttggcaggtcatctcatgactcactggggcatgggagtgaccatcctcataggttttcaggaggttcattagagcatgtaagcggtcatggtgatgaaacattattggatattgcaaggcaggcacactctaagcatacaccaagagctgcatcattggagtacgatgtacatgatacgcatagtgaaccagagaacttacgtgggaatgtctcaatgacttcaaggcacacatctgtctcaacatctttgagaggtcttagggatgaaaggattaacgacaatctgaggttatcccgtaggattgaagaagatgagggtagcattgaatccatgcatcaggacacagagcacttaattcgtcattgttacaacggtgacgcttctgtacagtaccaaacagcaaggggtggtgatgatcactattcccactcccctggaactgaacctattggaattgcaaggcggctagctcatcaacatgagtttgattcctttggttactcaagtgatcaagaagcttcccttatggtttctaggaaaagatgcaggagtcctgaatatcatgatcatgagattgatatgtatcaagctgatcatgggtttgcaggacatgagcactatgatgatgatgttgttgatgaatatgatatacccccaccaagaatgtcacggtttgatgatgaatatgatgaaatacatgatgtgctagctaatcgtgatgttttctcaaggatttctttgccacatgaaaccaatcaggaatggactgatatggatcaggggaaccatcctcattctaacatcttgggttacgggtgttcaaaacacgtacctatgcatcagaggttgtctaaacccaattaccactcacaatttggggaaactcccatgcatggaagaggaagaggaagaggaggattgactaaaagtgccaaaaagggactgagaactgctcctcatcagttgcatgatgggtacccatcaggtagaaatgaatttgttagaccaaataaattttcaaagtcgtcaaaagatgaacttaatggttctgaagtgaagcatgaagatgctccagagtatgaggatgttcctctgcagaaagatccaccagaaggttcagaggagttcagtaaacaggttgatgaagcctttcttaagtacacaaagatattaaatgagagtccagctatgcagaagaaataccgggaggcgccaaaaggatctttgccatgctgtgtctgtggcagtgtagcgaggaaatttctggaccttgatgcattgctatcacatgcttatgatacatgcaaggccggtttgaagacaaaacacttggggtttcacaaagcactgtgtgttctgatggggtggaattggcatgttgctccagacacatctaaatcacatcactccattccatctgaggaagtaaatgccatgaggggagacctcatgctgtggcctccagttgttgtgatacataacagctcgactggtcatgaggcaaaggatactgatgcaaagattgtgtccatagaagaaatcgaaggtgtattggcagatattggggtagcgcatgagaaggctagggttagccatggaagatcagccaatcagagcgtgttcctggtgaagttccagccaacaatatctgggttccaagaagccatgagagtgcatacccatttctccaccagaaaccatggcaaggaagagttccagctgatgaaaggcagcaaaggtaagaaggctgcctccactgatagcctggaagagctgctgtatgcgcatattggggtcgtggaagacctggggctgctggatgagggaacaaagaagagatgcaaggtcatgaggaagaaggaaattgaggcaaatgcagaggcaacactgaatttagaagtttattaggtctagtactaggatccgaaccatttgaagtggtcctcttttgcttcatcttgcagctgcttgcttgtccttgcggctgtaacgtcaaaagaagaaaagaagtgtaaattctgcttttgccattaaagagtgacgaaactcagttggcttctgtctgctggggaaggcctgcctcggtttgcatggcatggcaaggacataattttgtggctagatggggacaccttaacggcaaaagcagaattacctggtcgaagaaccgagtttaatctttatattatggaatcccttctttttttaagtcttttgctgcgtgaagttatgcataattcgttgaagtgtctataggtttgatggtggactagcatgtatgtatagtagcagctgcagtgagtgacttttctcaggtgttgcatgcatgagaaacgcaaactctattcggcgatggtttgcgctccagcttctcagttgctttgctctccatctccgacaggctgagtctgctcatcagcttgagtctgcttcaaatgaggacttaatataagcgagcaaacatcgctagactagtaaataattctggacaatt

SEQ ID NO: 29006 - DNA, 1263 bp, Zea Mays
ccaccgtctcgactctcgactcctctttcccctccccgagcgtgcacgtctcgtcatcgccctactcgctcgccccatcccggagtctccccggctcccaaaccctagcgcctcccggacctcgcaggtgagggaggcggcgatgttcttctccggtgacccatcggcgcggcggcgggtcgacctcggcgggcggagcagcaaggagcgggaccgcaaggtgctgctcgagcagacgcgcgaggagcggcgccggcgccagggcctccgcctccagaacacctccgccacgaagatccagagggaagaaggctttggaattggcccgctcagaggttcggaagaatttttgctcaacttttggggagcattgcgagaggatagagtggaacatctttggcactaattctgactttcttcggcaattactgttcttcttcaatgcaaatgaagacaatgacatagctatactttgtcatgtctgcaatttgctgctgcaatatgttaaacaaggcggagatgttgtaactctcttcactggtgtgaatggctcctcgctgcaacctcttgttgctcaccgagtaaaaaaatttgccctcatctgtgtgcaagcagtctatcaaaagaggcatgattggggcagccaacttttaacaacacctggaaccacatcagtgccttctgtgtcattactggaaactgtaggttgcttgataaatccaaaatttctttggaactgcaaagtagttggttatcttcagcagagaaagatctattgcttatttcgtggcattatcgtatctgtaccgcaaaatgtcagaaattctggtcattttgatagtgcatctgtgctggagcaagtgcttatgcttgttgcttcgcatgttggccatcatccctgttgttgtctgaaagtggatccaagatggagtttctcgtctcagcttctgtccatcccttttctatggcatcgtttaccacaactcaagaaggttttctccgttaacgggctcaacaaatattatatccatcaaatagcttgccttttgcccagtcttgttgatgtccttccaaacgatatatcagctaatcatccaggatatgcgtgcgtccttgcaaatgttcttgaagctgcaacctggattttgtctgatgcaaagttagcttctgattcagcggctgacatcattgctgtttgtacctcgttgttggatacgttgccagcagtcacaacacctactgaaaatttttctttgatgtgta

SEQ ID NO: 29007 - DNA, 1371 bp, Zea Mays
tttaaatcttaaagatacaattgataagactgataggtctaaacttctcaagggctcctcagatgagttcatcgatgccaacatccagcttgctctcgttgttgctaggaagctcaaagagctcaaggggactaggtcttgtatagtgtttcctgatcaacctgaaaaacgtagggcatcagagttgttcaagacagctatagacacgattgagggtgtaaccatcagctccctggatgatgtacccactgaccctgtcaacagcttcttcaaatcaataagaaacaccctggattttgacttctcagatgacaatgaaggtagatggaaatctgatgaaccaccatcgttatatatcttcatcaacagcagcacgcgtgaccttgcttctatagagaagtatgtggaaaagttcgccacatctgttccagcccttctattcaatctcgaactagatacattgcgttctgacctggggcttctcgggttccccccaaaagatctgcactaccggttcctttctcaattcaccccagtattttatatcagacagcgtgactattccaaagtattcatctgtcttacttttatccatctagaaacatccttgtgtttatagcttcttgcaccatctatgactactttcccttaaccgtgtagacaatcgcagttgctccatacatagtgaattatagtggagctgtattccgccaatacccagccccctggcaggtcatgctgaagcaggctgatggttcctatgcatgtgtcgctgagagcgaagctcggttcactttgggacaggcgaaagaagaactattgagagttattggtttacaagaagaagagggaagctcccttgaatttctcagaagaggatacaagaatgctacctggtgggaagagaacgttgatcaggagacgtcgtctgcctggcgaacttgagatgctatacttgctggatggatgcttttctaacctggaactgggaatggataatttggccaacgagtgtccatgtcttgttgtatggaactaaaaaatctgaaattacagaaagagaagtccatgtacagcgtaataacattgcctgtgatgatcgtattattattattgttgttattattatgcgagtacacagagcttgtgagcactaagaatgtttttttacaatggtgatttgtacatttgttctgtttgtggccttgggcacttcagcttgaatgcgcagttgtaaaaaaaagcattggattggtttgagtattagaaattgttgaagtgtataagtggattgactaccttcttccatcagcttgagcttttgggtcgtccactttaacatggtattaaagccagaggtctcgagttcga

SEQ ID NO: 29008 - DNA, 3322 bp, Zea Mays
ataggaggggttgacacgatcaatttccttgtcaatagttcagctgtcacatttttcttggagtctgtcaatgcctcaagctgctggaagacttttagaaagaaagatcctcacttgttttggactccatgtgctgctcactgtttggacctcatgcttgaggacattgggaaaattggagagttcaagaaatgcatttcccatgctcgccaagtgacaaccttcatatatatgcatggcaagcttcttgatgctacgagggagaagatatggggtgatttagtgagacctgcagttacaaaatttgttacatctttccttactctccagtccatatataagcataagcaatctttgagatgcctctttgttagtgatgactggactaggtccaagctatcaagcatagaagcaggaaagaaggtcacagagatacttctttctacaaacttttggaactcagtccaagattgtattcgagcatcacaaccactcatcgtgttgccagaggttgccgctgccatggatatggcaaaagcaaagatcacttcgggttttgaaggtagagaggcaatgaagaggaagttgcttgccattattaatcggaggtggcaagatcaaatggaggtgaagttgtatggggctgcattgtttttaaatccaaataagttctttgaacttcaaaaaaaggatccaacaaaaagggaggttggtaagctgagggcaacattcaatgaggtgctatggaagatggttgaagattatgaccttcaagctataatcagtaaacaagctgatgagtggaagaagaccaaagttgacatgaatatgtatagaaaggcagctgcactttgggttgaactgcgtgttgaactcctatcagccattgaatattatgcagaagataaagtcaattcagctcaaatttggcggctatactgggcaagtcatcagcgtttctttaggcatatgtgtatgtctgcaaaggtacctgctgtcgtgagattggcaaaagaagccttagcagaagaaaaatgtgtggtgattggtcttcagagcactggagaagctcgaacagaggaagctgttgctaaatatggcattgaattggaagatttcgtttctggtcctagagagcttcttcttaagctggtagaagataattatcctttgcctccaaagcctgattgttttgagcaaggtgaagaaaaagtccaggagtttcagcacaagcggcattatggatctgacatgtccttaaaaggacgagttagtaaacttggaaaaaaggaagacgtgagtgaagatgggggtgatgagtatcctccaccagattcagatcatgaatcaacagaatctgatgaggacttctatatgtgtcagatttgcaacactgaagaggagaaaaactcattgttttgttgctgtatttgtgcttcacgggttcaccctggttgcctcactccaccttcgactgacatcgtgaatgatgattggtcatgttatggttgcaaggagaaagtaaaaagctacttaaaagaaagagatgcttacttgactgaactctcaaagaggtatgatgctgcattggacagaaagtcaaaaattcttgacataatccgttccttggatttacctagtaatcctttagatgatatcatcgatcagcttggtggtcctgacaatgttgcagaaataactggacgacgtggtatgctaataagagcatcagatggaaaaggtgttatttaccaggcgcgaaacacgaaagaagttgcattggacatgatcaatatgcatgaaaagcagcaattcatggatggagaaaagaatgttgccataatatcagaagcaggatcagctggcgtttctctacatgctgatcgaagggcaaaaaatcagaggagaagagtgcacataacactagagcttccttggagtgcagaccgtgcgattcagcagtttgggagaacccatcgttctaatcaaacttctgcacctgaatataggcttcttttcacaaaccttggtggtgaaaagcgatttgcatcaatcgtggcaaagagactggagtctcttggagctttaacgcaaggagatcgaagggctggaccatcacttagcgccttcaactatgacagtaattatggaaagaaagccctgacaatgatgtacagaggaataatggaacaggatgcctttcctgttgtgcctttcgaatgctctgagaatcaagctacccttgaagagttcatcactaaagcaaaagctgctttagtgtcagttggaattattagggaccctataatgtgcaatggtaaaaatggtggaaagcttactggtaggattattgattctgatatgcatgatgttgcccgtttccttaatcgtattctgggattgtttccagacattcagaatagattatttgaccttttcacaagcatacttgatatagtcattcagaatgcacgaattgaaggacaacttgattctggtattgttgatatcaaagctaaaagtgtcgaaatgaaagaatcaccaaagactgttcatgttgatactgtgtccggtgctagtacaatattatatacttttacagttgaccgtggagtttcttgggaggagagctgtgcatcatattataaaagaggaaaattaggggaaaagaatcccttacaattgtagaacatgaaggtgcttgatatatttgatagatggggtacaatatatagactcacaaccctaaccctaatgggccggcagcccaacagtggtgccggcccacgcacacacacacaatctaacatctccccgcagtcgcaacgggggcaccacacatgatgagactagagtagaagcagaaggtaggagccaacgggttgaaatccccttgtagtcacaacgtcgtaagggtgcgaatgttgcggctggagtagagaccggtgtgtgctccaaggagacgatagcccgtagatgccaaggtagttgaagtcgaggtggccgcagtcgggagacacgtagcatgagcctgttcgttgggaggggtcgacgttcgagcgtcaacgaatggtgagggcgacacaacaaaagagcaccagcaacctcagagccttcttacttcgttccacgatcgatcgtcgaggagcctcgccagggaggccggcgacagcgcacgcatctgcgccagtcagggtgggtcgcgcccgcggcagaaaagaaggggtatcggcggatccggtcggaaaagccacgacagcgatggatccagccatgaagacgacgatctagacaaagggatggcggatctagtcgggagggc

SEQ ID NO: 29009 - DNA, 748 bp, Zea Mays
gtttgtctcccttcccttcccttggatccatacagagccgaggaggacggcggcggcggcggcgagaagagatggccgacggcagcagcaactcatcggcgtcggtggccatgggacaggaggtgcaggctttcgttgagaacaagtatggtggaatggtgcctaagaagcctctgatttcaaaggatcaggagcgcgcctattttgattctgcagactgggtccttggcaagcaagctgcaaacagcggcaccgcacgggctgcgactgctatcgaattcttgaagccaaagctaaagaggacgccccatcaccagcttccccctcgcaagccgacctgtgcgtccagctgagctcaagacagtgcgaaaatccaaagggccaggcttacaaaagctccctggctgggagagacgatgaagagcgttatcaagttttttttagttggttgcattggttaggaaggcaaattcaggattgatgagccctgcatttggctttgttcgcagcactcgctgaattattaatttaagcatgtgggggacatagataaaactagactcctgctattatatgcttaattgtggaagtggtagatgacacccatctgtttcaatgtatctttggtcggcagatgaaatgtatcctctctatctacttggcttctccctttctttactagacctcatatataatattcaccgaaaagagaatgaacgaatggatattccaatttgggatgaaaatg

SEQ ID NO: 29010 - DNA, 4517 bp, Zea Mays
gaggagattgacttattcaattttgactctcgtcggctccggtatttcgacttccaaaatagccctaacatttaccgaagctcctcccgccggcgcgctgcgatccaactccgagatgctcgcaccgcttccgcgcctgacgagcgcgctccgcggccactacgacgctgatcaggcctacctcctccgcaagagcgccctccaggctctcaccctccccaggccgcatgacgagtggaagttcgctcggaaaatcgtgcctggctgggacgatgcttccagcgaagtgcgtcaggcgtataaacaatttatcggggccgttgtggagttgttgagcggagaggcagtgtctgaagaactctaccaagttgcgcagactgtatatactctatttggtggcgatgacacggagtatgttggtgctaaaaaagtcctttccaaaaggaatgagttggagagccttgtgggctacactgtacaagactcagttttgaaaaagctagctcagttagctcagaagctcgattcccttcaacgagcaagtgcctatgaatctgtacacagaatagcggatgatgtaaatgaaaatgatagaattgaatttggagcagacttcgatttcaagccacttgcccgtttcattgttgatgtttctcttgacgcacccttagaaagtgctgaattgggcagtggtccatttgaaaaatggcagtatgatgcttggagcacatccacaactagtcattcaactgctgttaggggttctgtgagtttgaggtggctgaaagatcagtgtgctttgataactaaaagtggtggctcaatgctctcaggagatgaacttgcaatgaccttgtgcagagtgctcctatcaaataaagcaggcgatcagatagctggtgaacttttggacctggttggcgacaccgcttttgaaatagttcaagatcttcttttgcataggaaagagctagtggatgcaattcaacatggattgtcgatactgaaatctgagaaaatgacctcaggtaatcaaccaaagatgccaacttatggtacacaggtaactgtacaaacagagtctgaacgccagcttgataagattaggaggaaagaggaaagacgtagcaagcgcagtgcagacagtggcaataatgatattggtgttgatgatttttcatcccttcttttggcaagtgaacggaaggaggcatttgatgacgtgattggtagtggagaagggtcagacagttttacagtaacttcccttcctcaaggaaccacaaggaaacacatgaagggttatgaagaagtgaagattccaccaactccaacagcatcactgaaacccaatgagaagctgattgaaataaaagaattagatgagtttgcccaagctgccttccagggatacaagtcactcaatcgtgtgcagagtcgtattttccaagctacatactacaccaatgagaatattttagtttgtgccccaacaggtgctgggaaaacaaatattgcaatgattgcagttcttcatgaggttaaacagcacttcagggatggtattttacataaaaacgagtttaagatagtctatgttgctccaatgaaggccttggccgcagaggtaacagcaacattcagtcgccgattatctccattgaacctggttgttagagaacttacaggagatatgcagttgaccaaaaatgagattgaagaaactcagatgatagtgactactcctgagaagtgggatgttattacacgcaaaagcagtgacatgtcactttcaatgctggttaagctgatcatcattgatgaagtacaccttttaaatgacgatagaggttcagtaattgaggcgctagtagctcggactctccgccaggttgagtctatgcaatcaatgattcgcattgttggcctatctgctaccctgcctacctacttagaggtcgcacattttttgcgggttaatccagacactggacttttcttttttgactcaagctatcgtccagttcctcttgctcagcagtacattgggatcagtgaaagggattacacaaagagaagtgaattattcaatactttgtgttatgagaaggttgttgagtccattaagcaaggtcaccaagcattggtttttgtccatacccgtaaggatactgggaaaaccgctagaaccctgattgacctagcagcaaaagcaggggaattggaattattttcaagtgcagatcatcctcaatttccattaatcaagaaagatgttagtaaagcaaaaagtcgtgaagttgttgaattttttgaatctggatttggtatacacaatgctggaatgatgcgatctgacagaagtttgatggagcgcttgtttggtgacgggcttttgaaagtccttgtttgtacagcaactttggcttggggagtaaacttaccagctcatacagttgttataaagggcacacagctatatgatcctaaagctggtgggtggcgagacttggggatgcttgatgtgatgcagatctttggacgtgctggaaggccacagtttgataaaagtggcgaaggaattattatcacaacacatgacaaattggcttattacttgaggttattgacaagtcagcttccaatagagagccaggttatgggagatccttctatgggtgcaaagcaaagaacatttattattgatgctgcacgagcactggacaaagctaagatgatgcgctttgatgaaaagagtggtaacttctactgcaccgaacttggtcgaattgcaagtcatttttaccttcagtactccagtgtcgagacttacaatgagatgcttcgacgtcacatgagtgaaagtgagttgattactatggtggcccattcctctgaatttgagaatatcgtagtaagagaagaagaacaggatgaattagaagcccttgcaaggaaagcatgccctttagaaattaagggtgggccgactgacaaacatgggaaaatttcaattctcatacaggtttatatttcccgtgctccaatcgatagctcctctttacattctgatgctcaatacattagtcaaagtttggcacgcataatgagggcactatttgagatttgtctgcgtcggggatggtctgagatgtcatccttattgttgcaatattgcaaggccgtggaccgcaagatatggccccatcttcatccacttaggcagtttgataaggatctttctcctcaggtattgtggaaactcgaggaaagaaatgttgatctggatcatctttatgagatggaggaaaatgaaattggagctctgatccggttttctcatcagggaaagttggtcaagcaatacgttggatacttcccgtatgtcaacctatctgcaaccgtgagcccaatcactaggacagttcttaaagtggacctgcatataactcctgaatttgtgtggaaagatcgttatcatggcatgtcagaacgatggtggatcattgttgaggattctgaaaatgataccatttatcattcagagctattcacattaacgaagaagatggcaagaggaacacctacaaagatatcttttaatgtaccaatatttgaacctcatccgccacagtactatatacatgccatctcagactcatggctacatgctgaaacactcttcactgtttcttttcataatttgacattgccacagacacaaataacacacacagaactcttggacttgaagcctcttccactgagtgctcttggcaacaaaacgtatgaggatctgtacagattttcccatttcaacccgatacaaactcaggcttttcatgttctttatcacactgataacaatgtactcttgggagctccaactgggagtggcaaaacaatttcggcagaacttgcaatgctccatcttttcagtacacaaccagacatgaaggtagtttacattgctcctctaaaggcaatagtacgagaaagaatgaatgattggagaaaacgtcttgtaattcagcttgggaagaagatggttgagatgactggtgacttcactccagatttgatggccctattgtcagctgacatcatcatttctacccctgaaaaatgggatgggattagtcgaaattggcatagcagaagttacgttatgaaggtcgggctcatgatattggatgagatacatcttctgggagctgaccgtggacccatccttgaggtcattgtatcaagaatgcgatacatatcatcacaaacagaacgttcaattcggtttgttggtttatcaacggcattagcaaatgctcgtgatttagctgattggttgggcgttacagatgacggtctattcaatttcaagcctagtgtgagacctgtacctcttgaagtgcatatccagggatatcctgggaaattctattgtccaagaatgaatagcatgaacaaaccagcttatgcagccatatgcactcattcacccaataaaccagttctcattt

SEQ ID NO: 29011 - DNA, 1831 bp, Zea Mays
atggagggagctggaagagatgccaaccctttgggcggttaccgaattggcaaaaccctaggaatcgggtcgttcggtaaagtgaagatcgcggaacatatattgactggccataaggtggcaatcaagatcctcaatcgccgtaagatcagaagcatggaaatggaagagaaagtgaagagagaaatcaagatactgagattatttatgcatcctcatatcatacgcctttatgaggtgatagatacacctgctgatatttatgttgttatggagtatgttaaatctggagagttgtttgattacattgttgagaagggaagactacatgaagaagaagcccggcgcttttttcagcagatcatatctggtgttgaatattgccataggaacatggttgctcaccgtgatttaaagccagagaatcttcttttggattcgaaatgcaacattaagattgctgattttggcttaagtaatgttatgcgtgatggtcactttcttaagacgagttgtggtagcccgaattatgcagcacctgaggtcatatctggtaaactatatgctggtcctgaagttgatgtctggagctgcggcgttattctttatgctcttctttgtggcactcttccatttgacgatgagaatattccaaacctttttaagaaaataaagtcatttgtcaccttcagcgagggacttgattcctagaatgctggttgttgatccgatgaaaaggattacaatacgtgaaatccgtgaacatatgtggttcaaaattcaacttccgcgctatttggctgtaccgcctccagacactgcccaacaagttaagaagctggacgaggaaacccttaatgatgttattaagatgggttttgacaagaatcagctaattgaatctctgcacaacagattgcagaatgaggcaacagttgcctattatttactcatggacaataggcttcgtacaaccagtggttatcttggatctgagtttcaagaatctatggacccatctttctctcaagtacatgctgaaacaccaacttcagcaactgaacatcggcagcatgtgtttacagaatctccggggtctggtttgaggcagcattttgcatctgaaaggaaatgggcccttggtcttcagtctcgagcacatccacgagaaataataagtgaagtgcttaaagcactgcaagaactgaatgtttactggaaaaagattggacactacaacatgaaatgcagatggagtcctggctgccttgagagtatgatgcataactgtgatggctttagtgcagagtctgctataattgaaactgatgatctcatagcgaaatcaacccgtatagtgaagtttgagattcagctttacaaaacgagggatgagaagtaccttcttgacctgcaaagggtcagtggaccacaactcctctttctggacttgtgttccgcctttctaacgcagctgagagttctttgagcctgatgacatgattggcttcccaagcacaatccttgatgcaccccatggactttcaaattacattcgtgctgtacataatggccatatataatcctccggtagattatattttctggagcatgtggaccgtacaggtatgtcctggttgccgagatgattgtcacctaaggtcctaaacaagaggccacatgcgagccccaggccttcttcctcaattagattatgcgagttttgttcggcctttctttagtccttggacatgtttttttctttgccttgtttggttgtgtttggatcaaaggagattgagagctggtttgatgaccagggaaatggagg

SEQ ID NO: 29012 - DNA, 1963 bp, Zea Mays
ccagtcgtcctcctctgcccggtacagctgcgaagccggcactggctctgctctgctcgccagcagcaccgacctccactctacgtctccaccagaccaccagcaaggtgctttgtttggcccatgggcatggcttgtcatgacaattggaatttctgcacttattctaggcttatggcctatgcatgtgatttggacatattactgcatcatcagaaccaagatggtaggaccggtcgtaaagttgctgcttcttattgttgcaactgcggttttggttatatggctaataattggcgtcgtgggaagcatccttgctggtttggcctatggctttctcgcaccagtaatggctacatttgatgcgattggggaaggaaaagaaaatccacttgttcactgttttttggatggaacatggagcactatcacaggaagctgtacagttgtcagggacatgaaagacatgttggtacactcatatttttcaatcatggatgaagttcgtcttcatgcaccacccgacggcaagccatatgagataagattgctacaaattcctggtgcaatatttgctgctgcttgtgggcttgtagtggatgcaataatgttcacactgattgccttgtacaagttccccgttatgctattcaaaggatggaagcggttgattgaagatcttattggcagagaaggaccttttcttgagacagcttgcatgccatttgctggtcttgcaattcttctctggccatttgcagttataggagcttttatagcctctgttatttgcagtgttccttttggtgtatatgctgctgtggtggtttatcaggaatcctcacttttcttgggactgtcttatgcaatatcatcagtatccatctttgatgaatatacaaatgacgtacttgacatggcaccaggatcttgctttcctaggtttaaatataggacaaatgaagcttcctcacatggtggctctctctcgagacccgcttcattcaaggacaagcatgatggaaagaaagcccctcagcgtgtaacatcatttaaaagtagctttgatgagttcaatccattcaagttgctagatcaccttttcatagagtgtaagcaccatggcaaggatctggtcgctgaaggagtgataaccccaaaagatatagaaggaacaaaggcaggcaaagccagcactggggtacttaatgttgggttaccagcatatgttatccttaaggcactcctccgatctgctaaagccaattctgatggtctcgttctaagtaatggatctgagataacatccgacaataggcctacgagtaaaatctttgagtggttttttgaccctctgatggtaatcaaagatcaaatcaaagctgaaaacttcacagaagaagaggaagcataccttgagaagcaagtgctcttgattagtgatccaaagcgcatcaaggagaatctcattcggcttccaccattgagtgagagaaaacaagcagaaatagaagcatttgctcgaaggttgcaagggatcacaaagtcgatatcaaggtaccccacatccaagcgtcgcttcgacgcccttgtgaaggctctttcagaagagcttgcaaggacaatgggtggtaatcaatctgccaatgggtctcaggtccggaagataagaagtggtatcgtccgaatgcttagtcagagatcactagggaaaacaacaggcatcccgggcgatgatcatgaggctcagctaacaagcgatggtttcacttcatgatgttctggaggtgttcaactgtaacctcagtttgaaaaggagatactacttttctgtgttattttgctaactggatacaaagaactgacacttctgtatgaagagtttaacctcaaccatctcgaggatgagttgtttgttttcaggactgtatctggacaacactgtagtaatacttcgtaacag

SEQ ID NO: 29013 - DNA, 748 bp, Zea Mays
cggccggccctgtggattcccctttcccctggagcgatggctctgtctgcgacgctacggatttctcttagcgtcgcgttctttggggttctggcgttcgtgcttggtgtcatcgccgaaaacaaaaagtataaatttatgcaagaggaggatgggttttggcatagtggtgggaagccttcccattcagccaaaggtcctgcattcgacgcagcctctttgcaaaatgctctctgcaaaatgcttgtctcagccctggctcttgcaatgtcgctgtgggcaactgtcaccgagggtcttcaccgcagcaagaacatccaccacgacatggactaccagtgccctactgccaagaccggcctgttcggcggcgccgctttcctcgcccttgacgctgctctcttctggcttgtttgccagatgctggccctcaatgcaagggctgactaccttgacgaggatgacggcaagggagaatatggccagatttatgctgctcaagtcgatgatggctcgaaggtctgagcctatgtggtcatgctcggcagggttctatgattagtgtcatttggctacattatgccatcaacaaagtcgctttagctctcagtaaatttgtatataagttgcaaagtcttacataaggctggtggttattgcactttcgtgtttcagtgtgatcgataaacagtatctcagtacaatcggtttgctatgccccttggcgaacttgtccttgagttttctg

SEQ ID NO: 29014 - DNA, 2191 bp, Zea Mays
agataggacatttgcgatggcaaataaggtactaggcaaaattgcagtggcatacaaagattgccctgtcggaatgataggtccttgattcattcaaatttcaaaggttttagtaaagcagtctgtgcatattacatgatcatgacagcatttcattaactttctgccttgatcatagtagtatgcagaagcagctcccaattgattgggtcataggggcgatgatttaattctcgggcttatgcatttggaaactttgcgattttgagtaggtaaaataatgaccttaatggcaggtatcattgttcgtaatacacttgtgacctatgaccgtcacaatgaaaagattgggttctggaaaactaactgttcagagttgtgggagaggttacatatcggtgacactccttcaccagccccttcaagtgatacaagttcagaacatgatatgtcgcctgctcctgcccctagtaatttgccagagtttgatgttggtctcatcaccgttgatatgtctataaatgttacttacccaaatttgaaacctcatctccatgagctggccgagctgatagctaaagagctggagattgactcacgtcagagttatgaatattacgagccaaggaaattctactctgattagatggggtattttcccagcagaatccgataatgctatgtccaacgcaacagcaatgggtatcatatatcggttaactcagcatcatgttcagttgcctgaaaatcttggcagttatcagttgcttgagtggaatgtgcagcctttgccgagaaggtcatggtttcaagaacatgtagtctctatgctgcttgggattttactagtaattttggtcactttgtcagcctttttagtagtacttgtttggagaaagaaatttagtggtcaagcagcctacagacctgttgattcagtggtccccgagcaagaactccagccactataatccaaattaaagctgtttgacggaacaacatatagatgattctttggtagagatacccttgtgcgggggggttacgcatcacagcggcacgcatctgctgctggagtaagcccttctttgtatgtaacacaagctacaagtttacagaagaagcactgtatgattacatgacttctccattcaaaacttagaggtgttcataaactgtctagtgattcagatcaagagctcctctcttgtgcttacagtagaagaaggttttgttcatgtaatgtagattaagtagggggtagagaagaaactaggcacagccgcggaacgaaatggtgtaatatttattttagtgccgagggtatttgtcttcaaagcttttcagggcatgcttgattctcttgcctactatttttattattattaaggacgttcttgctcatccctgttctcttcggcggctagtgttgaagagccatcacatcccaaaagacaagcacacagatacagtgcattggttattattctaggttatagcacgtccgaggagaaacacagcacacaagcacggaaggaaccgtcgcgacattccgacgctcggcgcgctaaactagcagtacaagactagaagctgtgcaggatcgcgagcgaaatcctgggtcatcctccctcccttagagcggtagggcctaggggcacttggggcgctggttcttgggggacttcatgtccctgtagcaggggcactcgtccttgctggcgtacggccccgacggcacgcagccctggcacttgccgcagcacatcatgcacaggcccatgcaccgcccggccttcttcagcgagcaccggctgcggcacttgccgtcgcacacgccgtccggcaccgcgccgccgtctgcaatgcacacacagggtgtagtcaagtatttacagaaaggagagaggatctcgccctgcaatggttcggtaagattgggaggcgaaaagttacctgctgcctcggcgagatgcttgaacgaggaggcggcagcaaccaggacgaggagcaggagagccacggggatcgccttcatcttcagaagctcttgctgttcgcctgttcctccgagccgaggaaccactggctggctgggctgccgaggtgaaactccaatcgtgagtgaagtggcgacgttgctgtagcgccttcagagttgaggcgctttcggtgtgagtgtgagtcacca

SEQ ID NO: 29015 - DNA, 1135 bp, Zea Mays
tccagatccgcggcgccgtcgcctggatgcgctggggaatttgcgatccgttgtgtgaaggaagggggacgcggaggaagatggggctcgcgttcgggaagctcttcagccggctcttcgccaagaaggagatgcggatcctcatggtcggcctcgacgccgccggtaaaaccaccatcctctacaagctcaagctcggcgagatcgtcaccaccatccccaccatcggtttcaatgttgaaactgttgagtacaagaacattagcttcactgtctgggatgtcgggggtcaggacaagatcagacctctttggaggcattacttccagaacacccagggtcttatctttgttgtggacagcaatgaccgtgaccgtgttgttgaagccagagatgagctccacaggatgctgaacgaggatgagctacgtgatgctgtgctgcttgtttttgccaacaagcaagatcttcccaatgccatgaatgctgctgagattactgacaagcttggattacactccctgcgccagcgacactggtacatccagagcacttgtgccacaactggcgagggtctgtatgaaggcctggactggctgtccagcaacattgcgagcaaggcttgaggcctaccttgaatgtcaaccgcgaactgactaggagctccggatgtatcatggaaactcaggacagaatcgcagttgcaacctgttagatgtcttctaccggcactatatatattttttgtttgatgtgtaatgatgttactgttcaacgtttattaccctactatactgttggatgttctttggacctgtttcatttcgcacaaggattggacttccaatatcatgctacattttacattcgtggtaaatacctgattagaaagttagccgaggagatccaatgtcatggtacatggaaatccagattaggttaaacattcttaagtatacagaagactggtaccctagccaccactttttttagcagttgtgtttttttcatttgtctagaattctcaatcctggtgaagcggtgtcattttgatttgattgtaagctttagttgaagtctcgctcactctcggtgcatgaagttttgcattgcaacaatataaaataagctctgg

SEQ ID NO: 29016 - DNA, 747 bp, Zea Mays
tttaccttatacaagttttggctttaaacccctttcccctcgcttgccgctgctccgccgtcgccgcgccccgaccagcatcggcgaatacctcccgcgcactcaaccgatggttgtagttgaatgtaatcgattggtgttccctggcaccatctttgtctgagttccgattctggaattgcgggattggttggtcgggtccggtgagcacgctcggggcggcgccggccgatggcggagctggtggggccgcgcgtctacagttgctgcaactgccggaacaacgtctgcctccacgacgacatcctctcaaaggcttttcagccgtgcctttatgttctcccatgccatgaatgtagttgtgggggcgaaggaggatcggcaactaacgatagggctacacaaggttgctgatatctactgtagtgattgccgtgaggtgttgggctggaagtatgagagagcatatgaagaaacgcagaaatacaaggaaagttcatatttgagaagtcaaagattgtcaaagaaaactggtagtgtccaaattgtgactcagcaaacgttctggtgaagatgaaatgttataatatgcttttggatgtctgcgtccttgtagatagctgtcctccatggattgcagcccggaagtgctttaatgttcttgttgtagtgacaattgtaaagcacacttatttctgttcatttgtgtgaataagatactgcatatggttatttggccttgaaaca

SEQ ID NO: 29017 - DNA, 237 bp, Zea Mays
cttacaaatagactcgtccctggtggccgatgatgtattccttttggcctccaggaggtcgtcggacagctcgtccctcactagctcctcgtccatctgacgctgccgacgacggacttcagctcgtatagatggactgcaggctccggagcgtctccgacttgctgctcctggctagggacagagacgtgtgcctgcggctgcgccgtcctcgacggagccgccctccctcaccac

SEQ ID NO: 29018 - DNA, 1406 bp, Zea Mays
gtgggggcgggcgcgcgcgcgcggtggatccgcgggagcgcgcgcgggatccgcgggaggttggggatagcggggcagtctacacgtgactcttaataattaggtctaaatgtgatttaaaaaaaagacaaataaaaaaattcggacgacctacgcacacgctcagacaggtttacgcgctgacaagctgcccttccgcgaactacacgttcgacgaaatgccgccgcgagagtcgagacctcttcatcgtcaactgagattcgcctagcatcttctcggattccttccccaactttcgtccccatcagcggacctactcgagatcgacgagactcgtcggagcccggttcctaggcgtcccagcgcccgactggatctcctggctcgggccgccttgatggtccctggggtcggtccggggtggagttcgaggcgatgagcaggcttgcgtcggggctccagcgcttgcggaggtcgtcgtcgcagtgggaggtgctgtggtcggcgctcgcgtcatgcggcctagtgcttttctcgcagctcgccgtggcgatggttccccgtctcttccctttcctctccctcctcgcgatgctccccatcgcgggtcggtgctctctggttgctcgcttcctttttggttctctgcacagctgcactgcacccgattgcgggagtttctattttttaagcgccagagcgattctgatcttccttcgactgcgtgttgcatagggttggtgttcatcgcggctatcgtgctcggccgcctgtggaggaggttcatcggggtggcggcgtcggccccgctcttcgtgctcttcaacatcctcctattgtggggcgtttacgtattcgtaatccggagagaaacttcttctctgctggacatgctaataaatgcagagtgtgcacttcttctgtggggattctacaggattttatctggtgatcctggtattgttgcttgtgattcttcatatttggaagaagctggctgcaaggattttgtggaagctatatactcgagtgagaaactcccaatgctctcaagggtcaggcagtgtacctggtgcaaagcaaacattaggggctatgaccatcattgtcctgcatttggtacttgcataggacagaaaaatcatcgtctatttatggcccttttgacaggatttgttgttgctgaatcaacatatacgatgtgctcaacaaaatatattaccagatgcatcagttcagggactataagatcggagaatcctgtatctttaaacatagtaatcagtacaacgctcttctctatcctccaggtcctctggcaggctgtgaactgaagtcatcagtaaaaagaggaagtgtgttcagcccggaattcgaaagcatgccacaagaaatacgacttcag

SEQ ID NO: 29019 - DNA, 1390 bp, Zea Mays
ctctagaaagcgacaccaaagtcttctccctctccctcccgcggttccgcccgccacgcctcctctattccaggagtcttctagaggtgaagagggaccacaggtccacagccgcggcagcaccgccacctacgccggcagaatccttgatcgagacaggagcggacgtggcctagggtttctgagccaggccggcgccatggtgggctgctctaggggctccctccccacctggatgaccgccgccgccgcgcgggtcgacctctctggcggcgtaacgccttcgcaccagggctcgccctctccacctcactcctcctcgggtcccgctccggccgcgggggcggaccagcagcttgggttgttcgagcgcgcgctctccgccgccggcgccgccttcgtctcagctatcatcgtcaaccctctcgatgttgccaagacgaggctgcaggctcaggccgcaggggtgctgtaccaccagcctgcccagatggcggcgctcggccccgatgcaatcctgtctgaattcagatgttctccttcatgcacacgtggtctcttactaggaagtgagccagtttgtcctcctgattgcttccagtacaagggaacacttgatgtattcttgaaagtggttagacaggagggtttcagtagactatggagaggaacaaatgcaggcttagcattagctgtacccactgttgggatatacttgccttgttatgatatattccgcaacggcattgaggatttcacaagaagtaatgctcctggcttgacaccatatgccccactagtagcaggatcagttgcacgttcgttagcatgcattgcttgttctccaattgagttggcaaggacgcgtatgcaggcatataaagagtttcgtcctggattaaagcctcctggaatgtggaaaaccttggttggtgttctcccaccacttgcaggttctagtcagaatgtacaaaattatcgtgttctgtggactggggtgggtgcacaactggctcgagatgttcctttctccgctatatgctggtcaactcttgagcctattcgaagacaactgcttggtcttcttggagaagacggcaatgcagccagtgtattgggtgcaaattttgctgctggttttgtagcaggcagtcttgctgctggtgctacatgcccgttggatgttgcaaaaacaaggagacagatagaggatactgaaaaggcaatgaggatgactacaaggcaaacgttaactgagatatggaggtctggaggcttgaaagggctgttcaccggcgtcggcccacgtgttgcacgtgctggtccatcagttgggagcaggcgtagtgagcagtgtgttgtgtgcacaatgtacaacctgcaggcaaat

SEQ ID NO: 29020 - DNA, 4172 bp, Zea Mays
accaattgattttcttcacccgtccacctcgtcttgcgctcctctgtctcggcgacgactgtgctaccgccgccgccgccgcaagacttcgtcgggcactttgccggcgacgatttcccaccaggatcagaggaggtgatggcgaggagtgacagctgcctggcgcgcgtgggtgccggaattgctatcggtggcgcggtcggcggagccgtcggtgcttgctatggaacttttgaggcgttcagatacaagatccctggattgctaaagatcagatacattgggcaaaccaccgttggcagcgctgcgatttttgggcttttcttgggggctgggagcttgattcactgtggaaaatcctactagtttgtttccctttttttttctgaagtctgaacacacctttgtcgatgggcttcagtgaaaactattcaatgcctgtttcatgtaacagctaatagctcagggttggaaaagaacaatcaagttatgtcctagttttggtgtggatggaaatagaatcaacgttcatctgcacgagaatcgtcaatttctcatctagcgtcttatgttctcatctcattttctttaaaaacgtaaggaattctttactcaccatatactttagctcggcagggcgccgcgaagcgcgcaactttttgtttactagtacttattagcagccggtgaagtaataaaagtgcgtacagcttttgctttactttttgtttacctattgcatccctactttggctctgaagtgtcctgccagcggcctgcgtacttaggcctaatttgataggccatgagtatgtggccagctgagtggcgcgcaggccataaatgcgctgcagtcagaggggctacttctaccgtcgcgagtactgcaccgcgtgcgcgtcctccacgaccagacacgtgtcccgccagtcctcgaccgcgccggcaacacggttcactccaccacgtcctcgcgcgagtgcgtgtctcaggtgttagccacgacgactggccacccggctgctccggtccgtcagttaagacccagcactcgtccttcatcgctctcggtccatcagcacgagcccgtatgaccttcacctcggccgtcgaccaccatccctatgctccacacctacacaccacaagccgaccgatatggttgcacaaaacataatctcacactctggtcagtccacagactaccacagagtgctattcgttgataatcactcatcatcaacccgaaccacaagggaagagacaaatcaaccttgtgttcgcacttttccaaccctatttctccacaagccgaccacaaaggtcaaggcaaatcctttccttaaacttgctcaacgagcgggagatacaaacttcttggggtcttccacaagttggagactcccaagcacacacaaaccgtcaaggaaccaaagttccaagagtaataaattcgcacaagtgaagtttgcaaaacgagctcaagtgagggagagggaggaggagagtgaaaaaccaacaacaaatcaacgaacgtcacctcacaccgaagatcctccaaccgttggaagaggatgcgatttgaggtgtgggagatagagttagagcgcttgttttgagtttggtgagcagtaaagtcagggagagtggctgaagtaaatgaggagagagagggaaaggggagtatatataggtgtccctctctcagggcagaagatttgaaaaatctgtgcaaaggtcggttgaaccgcacccagggccggttcaaccgtctgataggtcagacctatcagaacggccttctgactaaaggtcggttgaaccgcaccctagggccggttcaaccgctattttccagagaggtctgagtataaagtccggttgaaccagccaacagggcgaggttcaaccgcattttgtcagagaggtttgcgaggccggttcaaccgctttttaccagagacttccggaacagagtccggttgaaccgcaccctagggccggttcaaccacacttttccagagacttcttttggagaagtcaggttgaattgcccctgaggtaggttcaacctttcttcctagagagggtatcaaatgcaaattctctggagcggattgaacttttgcaaaccaaattcgaaatgcggttttcaaaatagattttgaagagtagagattttgagctcttgcaaacattttatacctttgtgcgaatccctcttgattgtacggtgaatcctatgactcaagaaaaagtaaatttcgaagagccttctcttggaaacaccagaaacacagtgcgatgtatgaaccaagttttagtagttatcgccttgatccgtgtttcttcctcttttaaaatgtattctgtttatctacctaatttgcaataactaaatatacacttggagcaaacttgttagacaccttatttgttttgtcatttaatgaccaaaaccttcaaaaaggttgattgtacttacaccttcggcggttgcgcagaggaaagcggttgcccgacagcgctcctctcgcatgtacgtatcgagcaagtctgtgaacgacgcggctttggcggcgaagggggcgccccgtcccctcgggtcctcttactgccggcgccggatggggcggctcctttcgctgtcgccttcgtcccaccagctgaggcggcgactgctcctcgcgtggcagacgctccagcctccttggtcgtcctggaggtgccaggagtggttgcccctggtgcggccttctttgagccgccgccttctgcacctggcccggggcaggtttcggtcgccgaggaagtcgttgtcggcgcgcgctcggtggcggcagggtcggtcgccggtctgccgccgccgcccccgccccgtgaagggggttctgggttggcgctgttgcccgcggaggtcgccgcgccctaggtgccaccgccgcctgccgctattgccttgacttccgcaggtgccgcggtacccatgggatctgaggaaatccacggggggcttcccctctccctccctgaaggacggggggcagaggcagaagagtggcagcggaccgagtcagcctcgtctcgggccaactcgagcttagaaactatcgagcgcatgttcggtagcttcgaggaggcgatttcgattgcttgggcgtcgatgacgcgggatctgattccttttggttagcgcctccttatgcggtcggtggctcgagaggaagcgctactagccgcccaacaggaggtggagcagttgcgtgctggggccattcggctcagggagtgggagcgcgagctcaccaccctttgttctgaggctgtccggcttcggagcgagacgccgctcctacgcgtggagcatgacgatgcttagggcaacatggatcacctacgggaggaggggtcccgactctaagaggccctcgatgggatgagccttggggccgagggggccacgccgaaccttggggaggtcgacgcctgtctaggggaggcaaactcggagctccaaagggaacgcaatgcaactggagagctctaaaagatgatttcccaagctgaggtcgccaggaaggcagcagaagaggcgaagacggtggcagaaggaaggatacgagagctctcgcttgcttgtgatggcaccgttgtttcgagactccaggcggagacctcactttcggagcggagcgccgagctccaagtgcttcacccgatcgtcggctcggtgtgcactcacctttcttctccaccgccgatcgaggtccctctaatcaatcggctgcgagcgctgtccgatcatgtggagcacgtggtcgtcgagggagcatatcacgggagcatccttgccctgggacagatggtctcccatttcgatgaaatcgactctggtgtgatcgcggaaggcttcgccgccggttgaagtgacgaggagctgggtgccattgaggtgcaggtccatccccacgcccggtcgatcgtgggccgggtcaatgtgaagttcctcctgatcgacccctggagcctgggaccactcgccggtggtccgtccacccattcttagtcggcgttcattgtaatgttttgtaatgactatctttagatgtcctgactgtgatcttatgtataatattatctgttttaaactctgcatccttcctttttcctt

SEQ ID NO: 29021 - DNA, 2117 bp, Zea Mays
cgcgcaaacacggaccgccctcgtctcgtcagggctcggcgggcaacacgccagggccaggcaaacagcagcgtagagctgggcctgggcagagcccccgagccgagcagttggtttggtggcgcgcctttactgccgctgccgctcactttcccagggaggggttaattgcctccgccggcctcgctctcgcgtcgcgtccttcggatgccgcactgaccgcgaccaagtcacgcagctcagccgcgcgccgcgatgggcgagaggaggaggcgtgcgagcactgcttccctcgggggtggaggtggagctggaggtagcggtgctgtgcccgcgcggaacgaggaggacaaggccgcggagccgcctccaccgacgttgtggttcgcgctcaagcggtcgctgcactgccgctccgagctgtcggaggtccacgtgccgcgcgccaacaaggcctccggtccagtcgtcgcgagcggtggccacctgtcgtcgatcgtcaccaagcgcgcctccgcgcggtcggggtgctcgcgctccatcgccaacctgcgggacgtcatccacgggagcaagcgccacccggggcagccgcccagctgcagcccgcggtccatcggcagcagcgagttcctcaaccccatcgcgcacgaggtcgtgctcagcaccaactcccgctgcgagctcaagatcaccggcttcgggggctgcggcgggctggcggccgtggggaccggcgccgcggccgcgcacgacgcctgcggcgggggcgacggcggcgtggtgtcgtcgttcgtcggcacgctccgccccggcacgccgggccccgcgtgggccggagccgggcacggcctgccgtgcagcggctccgtgcggggcggggtgcgctgcacgccgccgcggtccccgtgcgtgctgctcgagaggaacggttccgtggtcagcggccaccgcgcgtcctcctgcgaggagaccgcaaaggacggcggcgccggcaagggttccggcgggctcagctgccacaggtgcggcgagcagttcagcaagtgggaggcgctggaggagcaccacctctccagtgacggagctggtggaaggggactcgtcgcggaagatcgtggagatcatctgccggacgagcctgctaaagtcggagagcagctgcgtccggatcgagcgggtgttcaaggtgcacaacacgcagcggacgctgtcccgcttcgaggagtaccgcgaggccgtgaagctgagggcgagcaagctgcccaagaagcacccgcgctgcctcgccgacggcaacgagctgctgcgcttccacggcaccacgctctcgtgcgcgctcggcggcggcggcggcggcggcggcggttcgtcccgcctctgcgcctccgacaagtgcgccgtgtgccgcatcatccggcacggcttctccggcaggaaggagggcaagaccggcgtgggcgtgttcaccacgtccaccagcggccgcgctttcgagtccatcgaggctgccggcgccgacggggctggcgctggcagtgtcagtggcaccacgcgcagggcgctgctggtgtgcagggtgatcgccggccgcgtgcacaagccgctggacaacctcaaggagttcgcggggcagacgatgggcttcgactcgctcgccggcaaggtcggcccctactccaacatcgaggagctgtacctgctgaacccgagggcgctgctcccgtgcttcgtggtcatctgcaaaccctagcctactagtacttgcttaattaaacacaccgtctcattgttagtgctggtaaattaaccaaccaaccattcttctctcctttcgactgctgctgctctgtttgtgtgagtgagctacacgttgggtcggatgtatttgtccgtccatgtttctgtgcagagatgcgtgcgtgccttgggtgggtgtctcattcaccgtcgggcttcggaccagctgagcagacgacatcggagaaagatgtgtcgatgtaggtagcacacaaagagtagctagctcatcactctctagtatgtacagtcgtctcgtctggtgtttaaactctaccacgaagttaccagtcaggcatccactggtcccttgaatg

SEQ ID NO: 29022 - DNA, 184 bp, Zea Mays
cttggattctccccctttccttcctcccttcttccctccaccaaaatgattgaagactcgcaccacgacgacgatgatccgagcggcaaggattggcaccttgggaggaggggattgatgggggggggctagggtttggtggctgcaagaatggagagaggaggagatgggcaggggggcggcg

SEQ ID NO: 29023 - DNA, 2715 bp, Zea Mays
gcaaggtacaagcaggtctcgtttttacagaagaagaagttgaatatagagtgcgtgatgttcttgccaatgttgaatcatctttatctaatgggtcattctcatggggaagccctcccaagatagtggcttggagtgccccattgtatgactataagaatctgggagcagtaccgacatcacatgacgattttttaaagaaaaaattaccattggccacaccttcttgctgcggcgaccttgcctgctctaaatttggagttagacacaggttctctacccactctggaagaattaaaatgtttcctgaaagaaataacaccagaggacaattgggctcctctcaagagaatgcccgcaagatctatccttaaaaggacaatcagtcaaaggaagatcaaaagtaatgctacattaagcaccatcaatgaagaaaacatagatgatgctgccaccatggattctgttgcatcaggaaagaggattataaactcgaagtttgcatcagagaactcactggaagttagtggtggaacagaaattactttggatgctttggctgcttacctaaaatatcttgaaggcacaggaaatgctagttggcaagagttgcatgataaagtgcgtttagctgaaaccagatatggtgcttcattctacatcttgtttggtcctgcaattcaacttggagtcatatctaggaggaaagcttacactgagactatccaatatgaaaaagatcgcaatgcaggttttctatcaccatttgggtactcaacacctacagtaacatcagcagtagatgctatatgttcaatggagtggtattggctcttggcatcaaaatcccaagtatgcatcgaggggaaatattctataagaatttggagatggaagggttatcttgtacagtacacctttcttggcaacgaaggtccacctgttcttcttgtgcatggttttggagctttcctggagcattttcgtgacaatatagacaagattgctgctacgggccaccgagtttgggcaattactcttgttggctttgggaaatcagagaaaccaaatgtcaactattcagaacttttctggtctgaactactgagggattttattgttgaaattgtgagggagcctgttcatcttcttggcaactctattggaggttatctctgtgctattgctgctggtttatggccttctcttgcaaagtctctggttcttttaaactcagctggttcagttgttccaaattactccttcatcccactgagtgaagaaagacgaacatcatggatttccaggttgcaggcacagctccttttgctcttcttgaggtcaagggcagaaggcattcttaaagaatattatcctacaagaactgaacgggtggacaagccacttctggaccagattgtaagagcttcatatgatcctggtgctgcaaaagtccttgagagtgtattcaacttcaatctttcaattcctcttaacttcttatttgattcttttggagggaagatattagttatccagggtatgaaagacccccttacaaaatctgaggcatttgtcaccatgctccgagaacattgcagcaaggttcaaatcagagagttaaatgcaggtcatgctccacatgatgaagttccagatgaagtaaataccatactatgtaaatgggtggagcagattgaagttaagccagccctggagaagaccaaggcaatataggtaacatttagaattatggacaccctatccattggttgattgtttaacatgatcttcaggagcaccttggtacattttcagtgacctaccaaaacttgtgtgattaaagcattgtgaattgttagccctatacaaattgtgattaaagtattgtgaattgttagctatatacaaaacttggtacattttctttcagctgatgttgagatgaacatacatgaaaccaaaaggacttttttttgggggtggggggtgggctagcatttgagcatgtttctgagtaagtttgcagagccgagatgcattctaagttgcacataacatgcctggttctgcttcttagggcttgtttagatagagggactagagctgatccctgttttatgggatgaaaagattgggtcagatccctgccaattcagacaagccctaaatgttgcttttgattaaaggctgaatctgaccggaaataaaccttggaccctcaacgacatataatctaaaatcacaatagttgcgcttgtgatcccattgtgcaagtaatgtttaatcatgctacttctatacttgcatccactgtactccactcctgcttgttttattgagacagcagcgtcacacaattattttttatctcacgccaactggtgctttatcatgtcatttatgtaattatgtgcaatcagcaatttcatgagagaagccaattgtaatcaccttgttgaactattctccagcaaggtgagctgctggaacttttagtgaaggatttgaactggatgtgttagtattcttttgttatagtgcagccgtgaccctctagagcttgatctgggttctaagtttaaacgtaggatcagagcagacccggacgcctggtttcaatatcagcacatgccatcataggctcacgacgacgaagagctgtcactttggccaccttcccccagcaaaaagaacgcgagcattacctctagg

SEQ ID NO: 29024 - DNA, 1152 bp, Zea Mays
atatctctcgctcgccctttccccttcgatgcaactggtgtggcggcggcggctgcgggcggcgtgatacggcaccccctcctcccgcccccttatgcaagcgggcaatcagaactccgatcacccgcacgccggcacgccagtgtcgtcttcgcaaccatgaactccatcgagcctttcaaccggctggtgaggctggcggcccgcgccttctacgacgacgtctccatgaagggcgacaaccagcccaagacttcccgcggggacaaccgcggcatggccgtcgtcgtcctggacgcgctcaccagtcagcaaaaaacgcaaaagcacataatgctgcagctgctaatgatggtcaaccaattgctaaggagggagaagagaaagtaaagctgcacacacattcatactgttgcttggattatgctcagatctgtgatgttgtaaggtaccggattcaccgcatgaagaaaaaattgaaggatgaattggacagcagaaatacaattcaacactatatatgtcctagctgcaataaaagatactcagccttcgatgcactacaactggtaagctacacggatgagtacttccattgtgaaacttgcaatggtgaactggttgcagagagtgacaagcttgcttctgaggaaatgggagatggcgatgacaatgttagaaagcgcaggcgtgagaaattaaaggacatgcagcaaagaatagaagagcaattgaagccattggttgcacaacttgatagagtgaagaatattcctgcaccagagtttgggagtctacaaacatgggaaagagcaaatattggtgcttttgcaattggtgaccctgctgcagctgattcttctaggaattcacaagggcagtatggtacaccaatgccatacattggagagacaaaggttgaagttgatctgttgagtgatggtgtgaaagaaggtgctgaatcaggtaaaactgattctgaactgaaagttttacctccatggatgatcaaggatggcatgaatcttactaaggaacaaagaggagagataattgcgccacaaaaacttgagaaatctgatgccggagatgacaagaagcatgacttgaaagatgatgattgttttcgctcagctcaggaatgaacacata

SEQ ID NO: 29025 - DNA, 6973 bp, Zea Mays
atgtggaacggcgtgccgcctccgcctccgcctccgttgcagatggcggcggcccctcctccccctggcacgacggtgcccggggcaggccagcccccgcccccgcccccgccgcctgccggggcgtcgcagggcggcaagccgctgacaccgatggagctggaggcgcagctggtggagaaggcccgcaaatggcaccagctcaactccaagcgctacggcgacaaacgcaagttcgggttcgtcgaggcacagaaggaggacatgccccctgagcacgtccgcaaaatcaccagagaccatggagacatgacttccaagaagtacagacatgataagcgtgtttatcttggagcactcaaatttgtgccccacgctgtgtacaaactgctggagaacatgccgatgccttgggagcaggttcgccatgtgaaaatcttgtatcatatcactggggctatcacttttgtaaatgaaatcccatgggttgttgaacccatatacctcgcacagggggtccgaagtttgagccattataccgtgatatggagaagggtgatgaggactggaatgagttcaatgatataaataagctcatcatacgtcagccacttcgaactgagtacaggattgctttccctcacctgtacaacaacaggccaaggaaagtgaaacttggtatatatcatacccccatgataatgtatatcaagactgaagatccagacctgccagcgttctactatgatcctctgataaaccctatcacttcaaccaacaaggttgatcgtagggagaggaaagcagctgaagaggaagatgatgaagatttttgtctcccagaagatgtagagcctctcttgaaacagactgaactctacactgatacaacagctgctggtatatcgttactttttgctccaaagccttttaacatgagatctggtcggacacgtcgtgcagaggatattcctcttgtatctgagtggtacaaggaacattgccctccagcttatcctgtgaaagttcgggtgagctatcagaagctattgaagtgttatgtgctcaatgagctacatcataggcctcccaaggctcagaaaaagaagcatctgttccgttcactccaagcaactaagtttttccaaactactgagcttgactgggcagaagcaggcttgcaagtttgcaagcaggggtacaacatgttaaacttgttgattcacaggaagaatcttaattatctccatttagattacaatttcaatttgaagcctgtgaagactcttacaacaaaggaaaggaagaaatctcgttttggaaatgcatttcatctgtgtcgtgagattttacgacttacgaagttggttgttgatgctaacatccagttccgtctgggaaatgtggatgccttccagttggctgatggtctgcaatatatattttctcatgttggacagttaactggtatgtataggtacaagtaccgattgatgaggcagattaggatgtgcaaagatctgaagcacttgatatattaccgtttcaacactggtcctgttggcaaaggacctggttgtgggttttgggctccaatgtggagagtgtggctctttttccttcgaggtattgtcccactattggagcgttggttgggtaatcttttggcacggcagtttgagggtcgtcattccaagggtgtggccaaaactgtaacaaagcaacgtgttgagtctcacttcgatttagaacttcgcgctgcagttatgcacgatgttttagatgctatgccagaaggcatcaagcaaaataaggctcgaactatattacagcatcttagtgaggcatggcgttgctggaaggcaaatatcccatggaaagtccctggtctacctgtgcctattgagaacatgattcttcgttatgtgaagtcgaaggcagactggtggactaatgtcgctcattacaatcgtgagcgtatcaggcgtggtgctacagttgacaaaactgtttgtcggaaaaatctaggaaggttaactcgtctgtggcttaaggcagagcaagagaggcaacacaattacttgaaagatgggccatatgtaactcctgaagaggctgttgctatctatacaacaactgttcattggctggaatcaagaaagttctcgccaattccttttccgccgttgtcatacaagcatgacactaaacttcttatacttgcactggaaagactgaaggagtcctacagtgtagcagttagattgaaccaattgcaacgggaggagcttgggttgatcgaacaagcgtatgataatccacatgaagcactgtcaaggataaaaaggcacctccttactcagcgagctttcaaagaagttggtatagaattcatggacttgtacagctacttgattccagtatatgaaattgaacctcttgaaaagatcactgatgcataccttgaccagtacctgtggtacgagggggacaaacgacacctctttccaaattgggttaagcctgctgattcagaaccaccacctcttcttgtttataaatggtgccagggcataaataatttactggatatatgggacacaagtgatgggcagtgtgttgtgatgctccagacaaaatttgagaagttctttgaaaaaattgatctgactctgttgaacaggcttctgcggttggtcttggatcataacatagctgactatgtcactgcaaagaacaatgtagtgctgtcttacaaggacatgagtcacacaaattcttatggtctcattcgagggcttcaatttgcatcttttgttgttcagtactatggccttgtgctggatctcctgattcttggccttactcgtgcaagtgagattgctgggccacctcaaatgccaaatgaatttcttacatatgctgacacaaaagttgagacaaggcatcccatcagattgtattctcgatatattgacaaggtgcatatattgttccggttcacccatgaggaagcacgggatctcattcagcgttacttgacagaacatcctgatcctaacaatgagaacatggttggttacaataacaagaaatgttggcccagagatgcaagaatgaggcttatgaaacatgatgtgaatcttggaagaagtgtgttctgggatatgaagaaccgccttccgaggagcattacaactttagaatgggagaataactttgtctctgtttacagcaaggacaatccaaacctgctttttagcatgtgtggctttgaagtccggatactgccaaagatacggatgactcaggaggcgttcagcaacacaaaggatggggtatggaatttgcagaatgaacagacaaaagaaaggacagcaattgccttcctgagggttgatgatgaacatatgaaagtgttcgagaaccgtgtcaggcagattctaatgtcatctgggtcaacaacgttcacgaagatagtcaataagtggaatacggctcttattggccttatgacatattttcgtgaagcaactgtccatacccaggagcttttggatttactagtcaaatgtgaaaacaagatccagacccgtataaagattggcctgaattcaaagatgcctagcaggtttcctccagttatcttctatactcccaaggagattggaggtcttggaatgttatcaatgggccatattcttataccacagagcgatcttaggtatagcaagcagacagatgttggtgtaacacattttagaagtggcatgagccatgaagaggaccagctcattccaaacttgtatcgttacattcagccatgggagagtgagtttattgattcacagcgtgtttgggctgagtatgctttgaagaggcaggaagcacaatcacagaacagacgattaactcttgaggatctcgaagattcatgggatagaggtatacctcgtatcaacactcttttccaaaaagaccgccatacactagcctatgacaaaggatggagagtgagaacggattttaagcaatatcaagtgctgaaacagaacccattctggtggacacatcagcggcatgatgggaagctttggaatctaaataactacagaactgatgtcattcaagcacttggtggtgtagaaggcatcctggagcatacattatttaaagggacttacttccctacttgggagggtctgttttgggagaaggcatcaggtttcgaagagtcaatgaaatacaagaagctgacaaatgcacaacgttctggtctcaatcaaatccccaatcgaagatttaccctgtggtggtcaccaaccatcaatcgtgcaaacgtgtatgttggtttccaggtccagctagatcttacggggatattcatgcatgggaaaatcccgacgttgaagatttctctgatccagatcttccgtgcacatctgtggcaaaagatccatgaaagtgttgttatggatctttgccaagttttggaccaggagttggatgcacttgagattgagactgtgcagaaggagacaatacatcccaggaagagttacaagatgaacagctcctgtgcagatatccttctctttgctgcacacagatggacgatgtccaaaccaagcttagtttctgagtccaaggatgtctttgatcagaaagcaagtaacaagtattggattgatgtgcaactgcgttggggagactatgattcacatgacgtagaacgatatacaagagccaagttcatggattacacaacagacaatatgtccatatacccatcgccaactggtgtgatgattggaatcgatctagcatataatttgcactctgctttcggtaactggtttcctggatcaaagccactacttcagcaggcaatgaacaagatcatgaagtcaaatcctgccctgtatgtcctgagggagagaataaggaagggtctgcagttgtactcttctgaacccacagaaccgtacctgtcttcacaaaactatggagagatattcagcaatcaaatcatatggtttgtggatgatacaaatgtgtatcgagtcactattcacaaaacatttgagggtaacttgaccaccaaaccaatcaatggtgctattttcattttcaatccaagaacgggtcaactttttcttaaggttatccacacaagtgtatgggcagggcaaaaacgtcttgggcagctggccaagtggaaaacagctgaggaggttgctgcattagttcgatctcttcctgtagaagagcagccaaagcaaattattgtgacaaggaagggcatgttagatcccttggaggtccatctacttgacttccctaacattgttatcaaaggcagcgagctgcagcttcctttccaggcttgcttgaagattgagaagtttggtgatctgatactgaaggcaactgaaccacaaatggttctttataatatatatgatgattggttgaaaagtatctcatcatacacagcattctctcgcattgtgcttatcctacgtgcacttcatgtgaataatgagaaggcaaagatgttgctcaaacctgacaaaacaattgttactgaaccacatcatatatggccaactctgaatgatgaacagtggttgaaggttgaatgtgcactaagggacctcattctttccgattatgcaaagaaaaacaatgttaatacttctgcactcacacaatctgaaatgcgagatatcatccttggtgctgaaattgctccaccatcacagcagaggcaacagattgctgaaattgagaaacagtcaagagagacgactcagttaactgctgtaaccacaaggacaacaaatgtgcatggagatgaactcattatcacaaccacaagtccatacgagcaacaagcattcgcatccaagactgattggcgtgtcagagccatctctgccacaaacttgtatcttcgtgtaaatcacatttatgtcaattctgatgatataaaggagactggctacacttacattatgccaaagaacatattgaagaaattcatatgcatagcagatctgcggacacaaattgctggatttttgtatgggctgagtccacaggacaatcctcaagtcaaagagattaggtgtatagccatgcctccacagcatggaacacaccagatggtgactcttccagcaaatcttcctgagcacgagttccttaatgatctagaacccttgggatggatgcatacacagccaaatgaagctccacagctatcgccacaggacctgacatcacatgccaagattctggagaacaacaaacaatgggatggtgagaagtgcatcattctgacatgcagcttcaccccaggatcttgctcgttgactgcatacaagctgacaccaagcggttacgagtggggacgcagcaacaaggacaacggaagcaatccacatggataccttccaactcactacgagaaggtccagatgcttctgagcgaccgcttccttggattctacatggttccggataacgctccttggaacttcaacttcatgggagtgaagcacgacccacagatgaagtacaacatgaagctgggcatgccccgggacttctatcacgaggaccacaggccaacacacttcctcgagttcagcaacatcgaggagggtgaggccgctgaaggcgatagggaggacacattcacgtaggcgcctgttagaaactgctctgttttaacggcagtgtgtgtagctgtaacctgacttgacgggtgtcatctgttcgcctgttgcttaagcctgtattatactacctctttgttgtaagaagccctggtgagggattaaaattgtacaagtgcgcgccatggtaacagtaaaggttttgcttcctcccaagcttccaccttcaatccttccaggcttcataaatttaaattaaaaaaggtcttttaatagattcctttctttat

SEQ ID NO: 29026 - DNA, 2812 bp, Zea Mays
catatttatatccaggttgctttccttatataccgcccagtgatgcggctttttaagagcactaatggaggtgacacttgttggcctcttgatgataacgaggaaggagaatctgtatcatctgatgatcttatcttacatcttgactcgtttcaggaaccaatcatgtggtcagatcttcttaacgcagtccagtcaattttgccagcaaaagcttggaacagtctttcaccagacctatatgctgctttctggggcttaacactctatgatcttcactttccaaaagaccgttatgatacagaaatcaagaagctgcacgagaatctcaaacaattggaggacaactcagataattctagcattgcaatttcaagacgtaagaaggacaaggagagaatccaagatttacttgacagactgaacagtgaatctcagaagcaccagcagcacgttgcatctgtggtccaaaggttagctcgtgaaaaggataagtggttgagctccagtccggatgcaatgaaaatcaacatggaattcttgcagcgctgcatattcccacgatgtgtttttagtatgcaagatgcagtgtattgtgctacatttgtccaaacactacactcccttgggactcccttctttaacacagtcaatcatatcgatgttcttgtctgtaaaaccctacagccaatgatatgctgttgcacagaatttgaagctggcaggcttggaagattttttcatgatacgttgaagatggcctactattggaagtgtacttcagatacccaaacagccagcgtgtgtcctacagtcagtttgttcgggttcattggaagtggagttcaagaatcaccaaagcacttaatcaatgtatggaatcaaaagaatacatggaaattcgaaatgcccttattgtccttacgaagatttctagtgtcttcccggtgattcgtaaaagtggtgtcaatcttgagaaacgggtggctaaactaaaaggggatgaaagagaagatcttaaagttctagccactggtgtagctgctgctttagctgctcgcaagagttcttggctatctgaagaagagtttggcgggggtcacattgatctgaagccagcaacagcaagatctgtgcttggaaaccagtcagcagatctctcgatggcaaaagatcaaaatgcccgtgcaaagtctgtagagaataggcatgaaaggtcagagggtgctatgaagcctgacgttcagcaaaagaagagcactgtggcttcaaatggatctgatattctaatacaatcttcctccgtacaagggaaatcttcagtggttgcacgtgcaatggatgagcctccaaaacctgtgtctgatgagggggttaaagtttctacaaaatctacttcagaatttgagacaagggcaacacaaaagcgtgctggcaatgctgggaaggtaatgaagcatgatgttgcaaaggaagatgcaaaagctgggaaacctacaagctggaatgtaaatcaacaagtctccactgttgatagagaagtgtctcatgcagctgatgctgcccaagaaaccagtaccactattagcaatggtaacttgcatccagcgccgcataaggtttcatcatcttctcaaagaaatgcagttacacataatggagcagccaatccctctgttgagtctactgatatgattgactctcctgtgagacagcaaaaaagaccgccggttgaggagcaagatagatcaggtaaacggaggaagggagaaaatgaacccgatttgagtgaacaccatgtagacaaggaaaagagtttggactcacgtggtggagataagtttcgttcagtggatcatgagaagagtgctaatgaggaacaaaatttaagagcgggcaaaataaaagaaaaatctgatgataaatatgacagagatcctagggaaaaattagatcggggtgaaaggcgtcgtggggaagatgccattgagagatcaacagatagattgtcggacaggagagaacgttccattgaaaggatgcaagagagaggtacagataaagcccttgaaaaaggtagagaggatagaaataaggatgagaggaataaagttaaatatgctgaaccttcggtggaccggacacattcttctgatgaacgattccgagggcaaagtttgccaccgcccccacctcttcccgcaagttttgtaccccaatcagttggcgccaaccgacgtgaagaagatgctgaccgaaggggtgggagctccaggcatgttcaaaggtcatctcctaggcacgatgagaaagaaaggaggcagtcagaggagaatatttcgtcatttcaggatgatgggaagcacagaagagaggaagatattcgtgatagaaagcgtgaggacagggatactttatcaaacaaggtagatgacagggatagggaaaaggggacttctttgaaagaagacagtgatcctagtaatgtttctaaacggagaaagatcaagcgagaacagactttagaagctggggaatatgcaccttctgctccacagcctccctcccatggatctggcagctcacaattgtctgacatacgagaaagagaaaggaaaggggtaatttcacagcatcgtatttcacacgctgatgaccttcctaggacacatggcaaggacatgacaagcaagtcaagtcgtcgagagtctgaccaataggaataaggtgaaaaatcatacccagaaccataccattctgagctgttgggcggtacatcatcatcatccactggctgcagtagcacttgatg

SEQ ID NO: 29027 - DNA, 1131 bp, Zea Mays
tttgaattgccagtgctgtttgataaccctgtttcagtcaaatattcaccgacgtggtgggtagcccttactacgtggcaccagaggtgctgaagaagaagtacggtccagaggcagacgtctggagcgccggtgtgatcatctacatcctgctgtccggagtgccgccattctgggcagagaacgagcagggcatattcgaagaggttttgcacgggaggctcgacttcgagtcggagccatggcccagcgtctccgaaggcgccaaggatcttgtgaggagaatgctcatcagggacccgaggaagagactgaccgcccatgaagttctacggcatccttgggtccaggttggtggtttggctcctgacaagccgctggactcggctgttctttctcgcatgaagcagttctcggccatgaacaagctgaaaaagatggctctcagggtgatcgccgagaacctgtccgaggacgagatcgcggggctgaaggagatgttcaagatgatcgacgcggacaacagcgggcagatcacgttcgaggagctcaaggtggggctgaagaaggtgggcgccaacctccaggagtcggagatctacgcgctgatgcaagctgcggacgtggacaacaacggcacgatcgactacggcgagttcatcgcggccacgctgcacctgaacaaggtggagcgggaggaccacctgttcgcggcgttccagtacttcgacaaggacggcagcggatacatcaccgccgacgagctgcaggtggcgtgcgaggagttcggcctgggcgacgtccagctggaggacgtgatcggggaggtcgaccaggacaacgacggccgcatagactacaacgagttcgtcgcgatgatgcagaagccgccggcgggtctgcccaacaagaaggccggcctgcagaacagcttcagcatcgggttcagggaggcactcaggatggcctgaccctgaacagctggttggctgcctgcctgcctgtagatgacgaacggagttccgaactgggtgagttccagtagagacggcccgaggcgggcttgagacgtgtacatgtgccatggaggcagaagttggactgctcggttccaaaacggttttgtttcat

SEQ ID NO: 29028 - DNA, 991 bp, Zea Mays
gtttgaaattgatcagttttagtgagccaatcgatgttatgaactcggtttaaccgcacatgaccaaaatcaactgttgctgaggatatcaaaatggcaatcaagctgccaaagtgtgtcagtttgaattggttacatgattagttgattatttaatgaggccagttcgacaaataataaaggaaagagtatggacatagagggaactgatgctggagaaactgacaaggctctttcttccaaaacggttaagcagaaggattcggtggaaagtgtaataaagcagataagtggcattgctatttccgagtcacatgcaacgccgtccacaaatactacaaacaattcacaaccggaatcatctgctccagacatagataagaaaattcgagcattgaaaaagaagatacgcttagctgaagcacaagtacaaggtgaccctgaaaaattgagacttgaggcactggaaaagatgaaaaagattgatggatggcttaaggagctgaagcttttggaggacaagagagcgcctgctgcttagacaaaatcaacttcggttctgatgtagagccaccacgaccacaccatggtgccgatccagattcgaaggtgcaactgaatcaccataggcttctccgtcacccgtggtggttattggaagagcagtccagtagatgtgggtttgcgcagaacgatggaagtttttcaccgcacatttctggcgccaagtttcaagatctgtaccgcaagaaagaccgctgctaattatggggatctctgacactgggtcagaatttacttttgctctcacggcccgaattcatctccggctttaccaccattgttcaattagctgttatatcacggttgaaactgactggaagtgccggaattcttatgtctctggctccctgcctctcttcatcacatgtactacctccgttcttaataatatttatcgctggctagttcatttttaaactaaaacaca

SEQ ID NO: 29029 - DNA, 2652 bp, Zea Mays
cccaggccaacaaaatcacctcccgcacctccgcgattcttctcgaagactcgaaccgcctggaatcagaatcgccgttgtcgggaatcgctccgatgcccgcggcgatcgggaggcggccgcccgaacgccgggtctagacctcgcgtgcgatggcgaggtcgaggcctagggtttggctcgtggcgggctgcgccgccgtcatcctgtgggcctccgtcgcgcagctcgtcgccgtcggccgctttctcctccttttcggcctcgtgggcgacgccgatccctcgccgccaccttccgcgcttccgcccccgagaatatacatgagcaatggttatctgaagatatcttgtaatgggggtctgaatcagatgcgctcagagatttgtgacatggtggcagttgctcgtcttctaaatctcactatggttgtccccgaacttgacaagagatcattctgggctgatcaaagtaattttggagatatatttgacgtgaggcatttcatcaactctttgagagataaggtgcacatcattgaacagcttccagagaagcttggtccaagagattcaaacattattatacttgaaatgccacctgtgagctggtcagatgaaaaatattacttgcatcagatcctaccgctgttcaacaaatacagcatcatccattttaacaaaacagatgctcgcatagccaataatggtatcagtacagagcttcaattgcttagatgccgtgttaattttcatgcactgaaattcacacctcaaattgagggattagggaataaactggtacataaactgcgagccaagggatcatttgtagccttgcatttacgctatgagatggatatgctggcgttttctggttgcaaccatggcctttcacctgaagaagccgaggagctcaaaaaaatgaggtctggcagcgtctgcttcaagcatcttatctggtccaggtcgttcagaattgatcacagaccccataatcctctctaaaaggaatctggaaaaatatggggtaggaggtgattccaaattgaactagagaaatatgtagactttcaggaatttattctgctccccgtttggttgagattacatatttttggcagcgaatctggtttagagagctgaaccaaacacaccttcaatatctcactgatttttatttaaataatttttttccacaagaactgcttttggatcctcggacatggaagaactctcagtaggagacagaccagtagagaccgcaatagatgaaggcgttaatgtatctcccaatcacattctttcaagcaagagaccttgtttcttggataaggatcagcttgccagattagaagtatcacaagttgcagaacctgcacctaaacaggtagtagatgctgcaaatgactttgtggaagggttgccctaacacttccaggtagggctagggccagccactgagccgtagacttggcaagcatgtctgcgtgtttgttctctctatctcttcgaatgacatctccattcttcacactatatgcttatccatggtggagagataaagaaattgattctcaagccaagaggtcgcaaggactgtgcccacttactcctgaggaggcatcacttgttttgaaagctctaggatttcaaaaggatgctcttatgtacatcgcagctggtgaaatttatgggggagataggagactagaaccactacggtctgcttttccaaaccttgtacgaaaggagatgctgctagactctgaagttctgcatcaattccaaaatcactcttcccagatggctgcacttgacttcattgtatccacagctagcgatgttttcattcccactttcgatggtaacatggcaaagcttgttgaaggtcaccgaaggttcctgggttttcggagaagtgtggtgctagaccgccggaaattagttgaacttctagatctgtacaccaacaagacaatctcttgggacaaatttgcatcttctgttcgggaagctcataaggaccgtgtagctcaaccatcctgcaggcgaaaacttgaaaacagaccaaaagaagaggattacttctatgctaacccccatgaatgcctagccaattcaaccttgtgcagctaaactgagtttctggtttctgttaggtgaccagatgtgagcgtgaaatcattaccaggcaggaattggcacacggttgttttgatgtcgtgttgtcgagggaccgaagccagatttacacagcccatcacgatcttttgacttcgaattccttattatcctgttgtataggtcagtttttagcttctgtattgattcgttcgctttccaacatgccaaaaggggcctgtttggagcatgtaaattttggtttgttgtctaccatttttcttcatcggtgtctaactcgtgctgctaggccgaagggttagctgtttcatcttttggttttgtttctctaattttacaaattcttagtggaattatcacctttttaaaactgtgctgtttcaatacaggagtgctgaacctgtctcatttgtctctcttttcttttttggaaaaggttgtccagtttgcttggtgcatcagccttctcgatgaatgctttactgtgtaaacccttccgtgagatcat

SEQ ID NO: 29030 - DNA, 3501 bp, Zea Mays
caaaaatgccaaaccacaacaagtcgcttccgtccctccccacgccgccgagggccgccgaccaggagatcacgcgctcatctctcatggagtccgtctagcttccgctcgtctgcgcccactccaagcagccgcagcggaactcaactactgcaggttgagatgaacggtccatcgaatttcatgcctactcctgaacaggatgttctggacgtcaagcccttgaggacattggctccaatgttccctgctcctctgggtgtcaatacatttaaccactcaaccacgccaccattgatatttgtcactccttctggacaatttcaagggggttttggtgattggaataattctgctgccaaatcatttttcgctttcagcagcaaggatgctcgtggaggcaaggctgatacatttagtgatcagaatactggtactggcaaggctgccacttttggtgatcaggatgcttttggcagccagaatgtttttgctagtgatcacagtactggtactggcaaggctgccacttttggtgatcaggatgcttttggcagccagaatgtcgccactggtgtgcaggatgctgcgaaaggccagactgcaacagattggacagatgtgagtgccaatcctaatggcccaattgatgccattgccatttcagcttacaggtcaacacagcctaatgttatatcactggatgatgatgatgacgacgacgatgatgagccttatgctgctaacaagacatcagcatctggacgcaagatcaagaggccatcccacctcagcggatacaatgtgagtgatgctttggtaagtgacagctccaacagcatgaaggttaagcgccccaaatcctctcacgggaaagctgctgctgacaacgagcatgccttgcttccaccttctgaggatcccagggaaattgtggaggcagttctcatgacctttgaggcgttgcggcgtaggcatctccaattggatgaggcacaagagactagcaagcgtgcagatctgaaggctagtgctatcttgatgtccagtaatatcagggctaaccctgggaagaggataggggttgttcctggagttgaaataggggacattttctacttcaggatggagctatgtattattgggctgcatgctcctagcatggccggaattgactatatgactgccaagtttggtgacgaggatgattctgttgcaatatgtattgttgctgcaggtggttatgacaataatgatgatgatacagatgtactggtttacagtggttcaggaggtaatagcaagaacagtgaggagaagcatgaccagaagcttgagaggggcaacctggctcttgagaggagcttgtccagaaaaaatgtaatccgtgtggttcggggctataaggatccaggttgcttgactgggaaggtttatatttatgatggcctctataggattcacgagtcatggaaggagaaaacgaagagtggaatattttgttttaagtacaagctgctgcgagagccaggacaacctgatggggttgcaatctggaagatgtcccagaaatgggtacaaaatccactgactagaggcagtgttttaaatcctgatctatcatctggtgcagaaaatcttccagtgtgtcttgttaatgacattgacagtgatgaagtgccacaccatttcacatataccactcaggtcgaacacttgaaaccactcagttctgtgaagcctttacagggttgcagatgccttagtgtttgtctgcctggtgatgccaactgctgctgtgcacagcgtaatggaggcagcttaccttacagctcatcaggactgcttgtatgccgcaagactatggtttatgaatgtggtgaatcctgtcggtgttctttcaattgtcgtaacagagtgacccagaaaggagttaggatccactttgaggtctttaagacgggaaatcgaggctggggtcttcgttcgtgggacgctatacgggctggttcatttatatgcgagtatgttggtgaggttattgatgatgctaacattaatctgaatgatattgaagatgattatatatttcagatgtcgtgtcctggtgagaggacattaaaatggaattttggacctgaattgataggggagcaaagcacaaatgtttctgctgatacctttgagactctacccattaagataagtgctaaaagaataggaaacatatcacgtttcatgaaccatagttgtgctcctaacgtattttggcagccagttcagtttgaccatgaagatgatcatcgcccacatatcatgttctttgctttgaagcatattcctcccatgacagagttgacttatgactatggtgacgttggagctgatcctagtggtgtacggtctcctagagcaaagaactgcctttgtgaatcctcaaattgtcggggattctttatctgaccgtggaaaatgcatattctatctatcaacattcaaccctaccagctaggtaaaaacttctagttttttttccagttctgagtttcagccatgcttctagttacggatgaagttcctgggttttcttgtttcgtctaaggggttgagttttcataggcaaccagtttgtgttgatactattcctgtaatcctgtttactgttgatgttttttaatgtgaaaccatgctgcttgttgattttggtttatctgtcgatgtgtcttccatcctgcacaagtttcatatccatgcactgtgtctcatgatgttggccagaactacctccgttgtctcaagattgggaatttgttgttgacagattctcggctttgtcgacaactcgacatcgaattgtttctgattcaacagctaatgtcgcaagacagcatcaatttcgtcatccaaaattatcactccatatcctttttggtggcacctgaagaaaaagtaggactgttcgaacagcttgcatcactctgtcgttgtggaaccattatattaattaatgtcaatcttttagatgaccattcagcaactaatgcacaaacgtttcttttgtgggggaagaatgttggtcttggaagttcaattttgtgtagtttgtagacttgtagagcatttagtgctgctaaacttgtgcaccttaagtcttttggctgtaaaagagcctcgaggctccagctgaattggttaggcagtctaagtagcatttctttgatcctgaatttgactccacgtgagtcaatttcaagctggagttaaaaaaaacattcttatgttctatactaaagtacagttctaaggctcaaccatgatcatagtcgttctcacatgtgctatattgctgttgtgtatgggtgtggtacgtgaaacttgatatattggtaaagtttttttatactaattaaaaacttgagaaaatacagactacccaagtgtagagctgttggatcctcgcattttatccatatctctctcgtcgcttcattttctacaaca

SEQ ID NO: 29031 - DNA, 1186 bp, Zea Mays
gcgcctgccaaccgccctcgcccctttccctccctcccacttaaaacgcaaccaaaggaaagcgacgacgaacgaaacgaacacaaccgccccgcccccaagcgcggagcggagtccagtcctccaagtccaggaaaggcgcgcgagatccaacgagcggtgaagtgaccctgatcttccaagatgctccgccgagcaagggttccctgcgccgcggcgcccgcgcccgcgcccgcggtcgtcgtggcggtggcgctcctggccctcagcgccgtggccgccgccgacttcttctcccctctcgcccccatcttctcccccgtcatcaattccatatgcagcacggtggcctgcgggcagggcaactgcacggtggcgccgggcacgctgggctaccgctgcgactgccgcccgggctggacgcagctccacgtcggcgacagcctcaggctccatcgacagctcatgtttcaatggttcgccggcgccggcaccggcgctagcgctgacgcctttgccgccacctaaaaacttctcgctcgacccatgcgagctagcgtactgcggcgccggcggcacgtgcaggaagaacggctccggcatgagctaccactgcgagtgcaaggaggggtacagcaacctcctcaacatgaccgcgatgccttgcttccagaactgttccatcggcgcagactgcgcgagcataggtattcatccctcctcgaccagcaacagcccgcccgcgccacctggctccgagagcatttctaaccaaggcagtacagcggcaccaggatccatttcacagcggattctactgccactgctgctgatggtggtggtctcattggccgtcggttacgtgatgtaggtcgaggatggagcgtcccacggcaacactagactgttttttttttatccgcaggacagggtagagctgatagtttgttagggtggtgatacacttttggatgtgtattgtactgctgcgtggttacgttttggcgattggtttgtgtagatgttacccggccgggtcattttatgtcgatatggaataaagcgcctctgtgaatactactggggtgattaaactgactctgcattgggtaactgcgcttagctttgcttttttctgaacttctgatcacattcagataattttatgacagagccttttgcttca

SEQ ID NO: 29032 - DNA, 2274 bp, Zea Mays
gtttattttcacttagaaaaatagaaatcacttggtgaaataaggttccaaactagaacttaaaaaaatagagttctaaaactagccctgaccctgattattgaatgaccattgtaccggtaaccatttataatcgtacacccaaaagaatcagacagatacccgttcacccctcgctctcgctgccacttctcccgttcggcctctttttccttccaccaatggaagctctcacagcccgctcctccgtactctcgccgccggggattgccggagacacctcgccctcccttcccctgcccctccgccgagcctccgccgcgtttcttgggcctcgcaggagcccctccgccctcgccatctccacgcgctggctgcgcgctccgcctcgacgcggcggccgcctgctcgcgggggaaggggaagaagtgccccccgaccccgccgatgacgcggctggccgggcggaagattttctagtactcgagaataatgtaactctacgccaaagcaatgacatggataccattaaacatgatgatgctggcacttctggaattggtgggagtaacactggtggctctaggactggcctattcagaacacctatttcaggtggtgtgcacagtgcaactgctgttcatgatttaccaccaccagctttggctgttcgcaacctcatggaacaggcaaggtttgctcatctgtgcactgtaatgtctcggatgcatcaccgccgtgagggatacccattcggttccctagtagattttgcacctgacccatttggccacccgatcttctcattatccccactagctatccacacaagaaatttgttggcagacccaagatgcacccttgttgtacaggttcctggatggagtgggctatcaaatgcacgagtaactatctttggcgatgtcattccgttgcccactgaacaacaggtttgcactaaaatcactactgatgttatctcttttcctgaataccatctctcacaatgccatgtcacttaattcagtaaattttgtgtttgatatttacactatgaagctatttctggacatgtgtgctatattgccattatttcgttcatatctgaactatgtactgcagaaagctaacccctgctggcttcagcaggctatatgatggtcatacatggaatgaacaaaataaactcaaaatcaagccacctatttgaacttgccttcagcttaagacatgccaaagttgaagtcacagttttttttcctacttatggttactaatccttatagctaccaatcaataggagtcaccctaactgaaaacctgccaaaaatgggggtaaaagactcatgaacatgagttaagcatctgggagttggagttttgtttcctatgaggaatgggctcatcagcagtatgtttcaaagcaccagcagtgggcatcccaacagtggggtaacttttactattacagaatgcacacaataagtgacatatatttcattggaggttttggtactgttgcttgggtagatgtgaacgaatatgaggctctgcaacctgacaagattgctatggatggaggggaacaaaatctgaaggaactcaacgcaatgttctcaaagcctctgaaagagcttttgtcaactgatgaaggagaggtagacgatgttgctcttatttcaatggacagcaaaggtatcgatatccgtgtccgacaaggtgcacagttcaacatacagagggtgccctttgaggtggatcacagcgtcgaaacactggatgaagccactgaagcgctcaggaggataatcagcaagtctaggtggcacacaaagagctcagtcataggacgcccttgaaagctgaagctggaggctctatagaacagtttgtacagtgcggcagcagtctctactatggtatgtgccaataagaggaactccgttccagagtttcgtctactgccaagggcctcgtgtttgtgggtgggttgaataaacacgcaatttgagatgacgctgttttgaccatgaatttagattgaacgcacaacggcaaaaaggattttatgtgaagttgtcgatgggttgaaaaagatgtgaccatctctgacggtctgacctgcttcattcatgaggaattgaggataaagcacatttgaacatgcgcatgccattttgtttttaccaaatccagtttgcatgaaacgtgaaagtgggcatgcctagattgattgtgtcaggcgcgaacaaatcacccagtttttgagtgcca

SEQ ID NO: 29033 - DNA, 777 bp, Zea Mays
ggctgcgaggcagggaactgaggaaacgtctcgaatggtcgaacagtagtttgctcgctattatccatggcgacttctacggctgctgccactgcactgctccgccccaggccggcagttccagccaagaggaggtgcctccatgcggttgctgggtggacgacgatgaggaggaggggagctgcaggggtcgtgcgagctttcttcaaccctctcggggatgagcgcatcctccgagaagccatcaaggagccagtagcattcatgggtggtgtgtttgctggcctcttgaggcttgacctgaatgaggatcctctcaaggaatggataagtcggacagtggaggcttctggaatagctgaggaaaacagctctgaagaatcaagtgaggcagatcaaaatgatgcacctcagcaaattgagattgagtgagggacggctatcggaatatccttcgcctgtaaggatggttggcaccccagaaccagaaactgcgtaattgttgatttgaccccaaggcacagacgttaactcgagtgatatatcaatgcaaccgctaactacttgatgacgactggaaaatatttccgctagacttatgcctctcattgttgatgaccggaaatctggaagatttttctgctagagatcttttatgcttctcactggaaaggggctgccctttaatgctgacgatgaagaaatggcatgaattcatgttaagaacatttccagcaattgcattggagaagttgcatatggtttatcaattgataa

SEQ ID NO: 29034 - DNA, 2655 bp, Zea Mays
gctcctaacccttctcccctccgacggtctaaaccctgccgccgaaatgctcctccgccctttcctccgccgcggcgccgccgccgccgccgccgcggtatcctctaacggggctcgcgccatagcactccccgacccgcctgccgctctcgcctcccttttactcgcctcccgatcctacgcgaaggccaagggcgggggcaagccggcgtcgtccacgtcaaaccgcggcaaggtccgcgccaaggacccgcgcggggtggcgtcggccgatgatgccgcgggagccgaattctccgccggaggtgggggcgacgacattgacaccgagttcgagctgcccaccgacccgctgccccctacatatgatccagctctcgacgtcggccccggcggccgcccgctcttcgctttcactgacacgttcgggtccttcgcccaccgtgacgcgaacatctatgtcgacttcactttggatgaatggaatgccatgttaccagaagggctgccagcagggatgatgaaagagtttcaggagacaagacggtgtgctgtgatggtgaggaaaagcttcctagatctccgggataacttccgtaggattgttgatccagctgttacaacaaacctcaaagataccagaaaacaaattgtcttggatggcccacggagttgtggtaaaagcattgcacttgcgatgcttgtccattgggcgcgtactgaaggatggctggtattttatgttccacaagggaaggattggactcatggaggattcttttatagaaacacatacagtgattttttcgatacaccagtacaggctgccaatatcttgcagaattttttgaagtacaatgaaacacgtttacaacagttaccatgccaaatttttgagcgtattcccctgggagaaggtgctggtgttggaatgatgaaaggggttgacacaatggaaatgcctgaagggtccacattatatgatctcattcaaactgggataactcaaacacatgcttcagttggtgttatggttcgcttaaggaaggagctgtcccttgttaaagacgtgcctgtactatttgccattgatcagtacaatagctggttcacattcagtgacttccaggaacctgtaactgtccgatcctgtcgatcgatccatgcaaaagagcttacaatggtttgttgcactgagatacttcaccttgttcaagcaacacattcttttatgtccttcagaaacctactttgaaagtaacaaatatttgcacacccattctgcttatttgcatgtattttttggttgtgatgtagtaaaaattgttacgttccttacacttttctatgcgttaattatcttgtcttgtgtaacatttcatggactctgttttgttgcctaataagtaaatatacagtttctgagcgacttatatttttgtaaagataaacatatgaatctgtattagccttttttactgcttggtggagatcttgggacatgtgtaagatgtacgatgcctagcatcatctgttcgcttggctttaatccgtaccggcttctactactttcacaatgtttttgtctctattgattgcagctgcagcagtccaaacagccggctttaatccgagcgctttttttaacactagtaatcagttccctggacatacacatttaatgtttcacttgcactataaacaggtcaatgcttatagatcaatgctgcacaatgatatgatggtgggggctttttcacactcaacagcagttggcaaactacggcaggagctgccagatgttccttctgatgctcgtttgatctttccacgttacaccttagatgaagctgagactgcatgtcactattatatgaggcaaaagatcattcggcgcgagaatttttcagaagagaaatggaaaaagatatactacttatcaaatggaaatggtgcagagatgagatggcttgctgccttcgtttgaggtagatatactgtccctgaagtttctgatacctggattgtactcagttttggtggtggtgtagaaaggttgccacctctgtttcagcattccgttacacaccacagttcattgttgtgtacttgtagtccgtctcttgacatctctagaagaaagtttggcgtcaacatcatttgtgctgagtagaacttgaggagataaggcataagtatgtggctcagttacatgattatatccttaggcttctttcagttctcgctcagatgctagatacaaaataatgtagcattgttattggagaagttttcacatgttttggctccgccgagcacgatgagtatgatgagttgatgccaatctactcagcatgcttgctactatgttgctgaattgagctccgttgagtattttttttaaattactgtacgaatcgaacaattatttgagttgggaacaatattcttctttgcggaactcaaaggttacgaggcatatcctcagtttgaatagtttagcttacccttgtttcctcagtttgaatagtttagcttacccttgtttctcggagagatgcaacatattgatttagctacattgtctattccggtgtactcctatgccgtttatcgattttccttctggaaacgaataactctttaactttttct

SEQ ID NO: 29035 - DNA, 1482 bp, Zea Mays
tctaaacacacatcatttgtattttgtagcaatatagttattacaaacagatggggcaaaagatgatggccggaagactatcataacacagtgaataatatgccaaccgttttattacatccatcaataaaaagatacagaccacaacagtggccaaaaacaaaataataaacaagaaagaaataaagaaccaaaaaagcgacttggttatccatagattttagattttctccccctttttggcagcaaggaccaaaaacgaggagagagagagagagagcacatgaatcaataccctccgggaggaggataggaaggatagtccggaaaaaagtccgcatcatgtattcctcgaatgatgagtcccgagggggctcatcaccagagggaaaaccagatgtggaagacataccctaatgaggaggagggggaggatggtggtggtaaccgaagccagaaggcctcgggtcaccaggaatgggtccctgactcgggtagggaggaggaggaaagtgaccggagccggatggtctggggtcaccgggaatgggtccctgacccgaataaggaggaggaggaggagccgaggtatagtaggattcatcaaactcctcggcttcatcctcaggagtaatgaatggcacaccaaattcctgttggtgccactcattaaggttcacagggaaggtgggggttggaggcgaaggggacccaggaggcaggggatgacccgtggcggtggcataacgacgaaagtcctcatgtagcacgtcagtccgacgcctatgcacagactcctcgattgcccagtcgtggcacatggcaaaggagccaaaaatgcccttggccagatgaataaacaaccccccccgccatgaccccgtccctgacattgacctctacctctcccgctgtggtccatcggacgtgatgcagcggcggcgcgagaggaggactcatgatgaggaggctaaggaggtggctcatcagaagaagcagggcctccagaccctgaaggagcccgctttatacgagcagttgggatcctcgatgccctcgcaacctgcgtgcggggggtgtcgaaaggttgcgagggcatcgaggatccctccccttccaatcggccagaacctcgtcctctcttggagagagaacgacgaggcggaggggaagaaatatgagattcttcctggatttcgtcagagtcactactgaactcgaccactgagggattgcggcgtcgcaccatcttgatgagtatctccgagaagatgagttccaagaggaaatagatgaaatgcgagtggttttagagagctcaagtggctggaaaaattgaaggcttgaatgtgtgagaaacttgtgaggtgaggagtggcctttaaataggcagttgggtcggtcagcccaagaccggttcaaccggtatggcgaccgattcaaccggtttcgaacagtgcgggcagccgagcagtgttggcg

SEQ ID NO: 29036 - DNA, 1571 bp, Zea Mays
gtcgcattcgcccgtttgttgttcgttcgagttttctttgtatggtggcacacaactcttaacaaggaggcaccaacattatgtgctaactaagcaaggtttggttgagacagacccagagggtgcacttgctggttttgatcaagtagtcagtatggagcctgaaaaagctgaatggggatttaaagctcttaaacaaactgtcaagctttactataagctgggaaaatacaaagaaatgatggatgcctatagagagatgttaacatacataaaatctgctgtcacccggaactacagtgagaaatgtataaacaacataatggattttgtttctggatcagctagtcagaactttagtcttctgcaagagttctaccagacaacactgaaagcgcttgaagaagcgaaaaatgagagattatggttcaagacaaacttgaagctctgcaaaatttggtttgatatgggcgaatatggtcgcatgagcaagatattgaaggagctgcataaatcttgccaaagggaagatggttctgatgatcaaaagaaaggcacacagcttttggaagtctatgctattgaaatccaaatgtacactgaaacaaagaataataaaaagcttaaggaattgtatcaaagggctctttccatcaaatcggcgataccacatccaagaatcatgggtataattcgtgagtgtggtgggaagatgcatatggctgagaggcagtgggatgaggctgccactgatttctttgaagctttcaagaactatgatgaagcaggcaatccgcggagaattcaatgcctaaaatatcttgtccttgccaatatgttgatggagtctgaagtgaatccttttgatggacaagaggccaagccgtacaagaacgatagtgaaatccttgcaatgacaaacctgattgcagcgtaccagaagaacgacatcatggagtttgaaaagatcctgaagagtaatagaagaacaataatggatgatccttttatccgtaactatattgaggatctgttgaagaacatcagaacccaagtgctgctcaagcttattaaaccgtatacacgaatcaggattccattcatttcgcaggaactcaatttcccggagaaggatgtggagcagctgttggtatcgctcatcctggacaaccgaatccaaggccacatagaccaggtcaacaagttgctagagcgtggagagaggtccaaggggatgaggaagtacaatgccatcgacaagtggaatactcagctcaagtccatttaccaaacattgtccaacagagtttgatgagacgaatcgtggctgctgtatgtttgcacacctagaattgttgatagcctgttttggggatttgagggcaactgcaaagagctgtatggcaacgcttgcagtagaatcttggatctgggtaaaatgagatgtccatgtaagcatttgatattagctttttcagttatattgactatgaggatgtccatgtagcgatttcgttaggactgctttcaacgtctaatctcgagaatgtcactggtgccttttactgttg

SEQ ID NO: 29037 - DNA, 2291 bp, Zea Mays
ctaggctcacagctcgcgactcgcaaggaggagcttgcggcagctcggtatgaaaaagggcatctgtcttctttatccatcgtccgtctccttccacccagacacaggccaggcgggcccattgttgcccaagaccctggaatccggagcaggagtcctctctctctctgactctctcctgagggggaggaggaggaggaggaggcagaggcggaagagcaaccaccaagcagcagagcgcgaggcgacacggggacggagccctggaggtctctcgcgagtccagaggcgatcgacggagtcgcgattcgtctcccagtaccgactaatctctcgctcccgcttccgcttccgcttcgatcccgtgctgcttgcccactgctgtaatctcgtgcttgcccagtgctctagttcgagcactctcttgcttctcgcttcgcttcgctgcctgccgcgctgcgtcgagagctttcgccttgcaccggcgattgccccgacacgattgcgtccggtttttcttctaggttctgcgtagatagatagataggtatatatttttcgagtccaattacggggtgcttctggcactggtgaggaaggctattagggttgcctgcctgtgtgtgctgaccgtgaacggaagcgaaggtttctcgcgctaatctgccaggacgctttgttctttcctggcccttggtagttagcagggtgtctccaaccattacactgtcaagtctggactctggaagggttaaaatctcatgaaagtaacgacgccaatcgtgccagcactgctacgctacgagccattgcaccgttctgtgtctctgcgtgaaccaacaatttccatgggttcggccaaaaattcctgccctccgattatcctggttcttcctactactgtaagcagtttactccgtgatatttagaaccgtctccattgcggtactacttagatattgctgcattgttaagctctttccgcaccattcgtatttatcacatgattccctgtccttcttgcatcagcacagggtttctctttgtagggatatgaacaacgggactttggtttttaacggcagctagagggtagcctggagtgagcatttcattctggagatacaatgggtggctgctgctgctgctgctgttctgcaagggcatctgattcagatagagcaccgatgtggagaagtcaggcattaaaatcaaaactgacgggcagcagtccccaaaagtggacgaatttgagtcgtgcgaaaaaggtgcccctgaggataaggctgatgaggaggaggatgtttgtccaatatgtcttgaaggcctgcattcttcttgttactaggcttaagaattttggagctcatctgtggatatacattcagttgggtgaaacacgaaatggattgcatttctgaactaggtagtttgaacaagtgctgctgctgtgaagtgtctttgatagatgttatatgtgttccatatcctttcttagtgtaggagtatttgtattctctctccgcatgtacgatatgctctagcagttcagtagtgggtaggtgcatatatgatggagccaatgcaaatggcttggtacctgttgaacttccttgtgcttttctttttgcctgtggtgcatggtaatcttaactgatgcatcagccgatgatgccattctgaaattaatttccaaaccagaagatttcacatataaagctttgcctgcccttccacaccagaatacgacaaagaaaatccacgttcggtcaccaagtgcgagcatcatttccatctctgttgcatactcgaatggatggagaggagcgagacatgcccagtctgtgaccagataactctgatagatgggatgtacgaatagcattcttggcggcggttcctgttgagttggcgttctttgtttttgtttttgttgtggtctggtctggacggctgtctggtggaggagatggttgatgagtcttggcaaaaaaataatttatagaagaaaaatgacatgaaattgtgctagagtcgcctgtgtcctgtttttacctgaaaaccctgtgagatttgctccctggtttcctcttgcttggtttgcgtgttcattcttccatttagatttcagtttctcagtgcctgtgtgacagggaaatcatctgtattgtacagttagtctgaaacggtgacagaaaagaagaaaagctgattctaccatatggttggtttgaactttgtccaatcttgctggcctaatggcacaaggtcgtttgccaggtcagaccgct

SEQ ID NO: 29038 - DNA, 3141 bp, Zea Mays
cccatgtcagcccgtctttatcgattaaggtcactttaccactagttaaagacgagcgccgcgtgcagacggagtggtagaaaaagctggatgtccatcgccttgcttccaggttttctccaaccatgtccaccaacacactgatctagtactaggactagtactagatcgatcctgcctgcctgcctgcttgtaacagcaacagcagcagaagtggcgcactgtgctttgcggtggcggaggctgcgagagaggaggaacttgcaagccgacttccatggctgccgccttctccgccgctatcctcttccacctgctgctgctcctcttctcgccgtccgctgcgcagcctggtttcattagcttggactgcgggggagctcgtgatcacacggatgccattgggatccagtggacctctgatgccagcttcgtctctggcggccaggccgcgcagctgctggtccagaatggcctgcagcagacccagcagcagctgaccaccgtgcgctacttccccgcggacaacaggaagcactgctacaccatgaacgtcaggaacaggacgcgctaccttgtcagggccactttcctctacggcaacttcgataacagcaacgtctacccgaagttcgatatctccctcggagcgtctccctggtccaccatcgtcgtcgacgacgccaccacccccgtcgttgaggaagccatcatcttggctgctgctcccacgctcagtgtatgtctctccaatgccagcacgggacagcccttcatctctactctggagcttcgacagtttaacggttcgctctactacaccactgacgagacacgcttctttcttggactgtctgcgaggataaattttggcgcaggaagcaatgattcagtgagatatcctgatgatccatttgatagaatctgggaatctgattctgtgaggagagcaaattaccttgttgatgttgctccagggactgaaagaatatcaactacaaaacccatatttgtcggtaccaacgaagaaccacctgaaaaggtcatgcaaacagcagtagttggccaggatgggtcattgaactaccgccttgatttggaaggtttcccagcaaatgcttggggagtctcgtattttgcagaaattgaagatttggcaccaaatgaaacgaggaaatttaagttagaggtccctggcatgccagcactcagtaaaccaactgttgatgtggaggagaatgctcaagggaaataccgtttgtatgaaccaggctacacgaatttgtcacttccgtttgttttctcctttgggttcaggaagacgaatgattcttcaaaggggcctattttgaatgccctggagatttacaaatatgtccaaattactatgggatcacaggatgcaaatatcatggccagcatggtatcacgatatccacaggaaggttgggcacaagagggtggtgatccgtgcttaccagcatcatggtcctgggtgcaatgcagttcagaaacttctccaaggatattctcaatcacattgtctgggaagaacattaccggaagtatcccggtggaactgacaaagctatcagggttggttgagctaaggcttgatggtaattcattttctggccaaattcctgatttcagagaatgtgggaatttgcagtatattcaccttgagaacaatcagttaactggtgaattgccatcttctttgggtgacctacctaacctgaaagagttgtatgttcaaaataacaagctgtctgggcaggttccaaaagcacttttcaagagaagcattattttgaacttctcaggtaacagtggccttcacatagtaagcaatggcattagccacaccataattgttatatgtctggtgattggagccgttgtcttactgggtgttgctattgggtgctatttcattacatgtaggagaaagaagaaatctcatgaagacactgttgtcattgcagcagcaccagctaaaaaacttggttcatattttagtgaagtggctacagaatcagcacacagattttctttatctgaaattgaaaatgctactggcaaatttgagagaagaattgggtctggaggctttggcatagtatactatggaaagttggctgatgggagagagattgcagtcaaacttctcacgaatgactcgtatcagggaatcagagaattcttgaatgaggtgacattgctttccagaatacatcatagacacctggttacattccttggttacagtcagcaagatggcaaaaacatactagtgtatgagttcatgcataatgggacactaaaagagcaccttcgtggagctgataatgaaaagataactagctggctgaagcgtcttgagattgcagaagattctgcgaaaggtatagagtatctccacacgggatgctccccaacaatcatccatagagacctgaagagcagtaacattctcctagacaagaacatgagagcaaaagtggcagacttcggtctttcgaaacctgcagtggatgggtctcatgtgtcaagtatagttcgagggacagttggatacctggacccagagtactacatctcgcagcagctgacggagaagagcgacatctacagcttcggcgtgattttgctggagctcatctctgggcatgaacccatctcgaatgacaactttgggctcaactgccggaacattgttgcgcccgatcgcacatcgagagcgggaacatccacgccatcattgatgagtcgttggacagaggctgctatgacctgcagtcggtgtggaagatcgcggaggtggccataatgtgtgtgaagcccaagggcgcccagaggcctcccatctcggaagtgctcaaggagatccaggacgccattgccatggagcgggtgctcgtgtccaattgcagcaacaggatgggttcaggtagcgtggagcagaatggaggagcatctttcgacgagctgctcatgcagccgggtctcagatgagatgagaacaacctactcgtaccttgagtccattgtatgtagtaattaatgtgtttactacattttttttgagaaacaaattaagtaatgctagcaaaggaaccagtatattattattattat

SEQ ID NO: 29039 - DNA, 2385 bp, Zea Mays
aaaagctcccccggccttccacagcttctcccattccactcggtgctttgcccgaggcccggagaagccttatcgcctcctccttgcacgccgaccgatcgccacaatcccccaccgctcgcctgcctggtgcccgccatgccggagatcaagtgcggcgcggccgagaaggtgaagccggcggcgagcccggaggcggagaagcccgcggacatcgctggcaacatctcctaccacgcgcagtacagcccccacttctcaccgttcgcgttcgggccggagcaggccttctacgccaccgccgagagcgtccgcgaccacctcatccaggaaaaagatgcagctctagggaatggcggcttgggtaggcttgcatcttgctttttggattcaatggcaacattgaatttgcctgcttggggctatggcctgcgttaccgatatggactgttcaaacaacacattgccaaggagggccaggaagaagttgcagaagattggcttgataaattcagcccttgggagattcccaggcatgatgtggtgttccctgtcagattttttggccatgttgagattttgcctgatggctctcggaaattggtcggaggagaagtcctgaaggctttagcatatgatgtgccaatccctggatacaagacaaaaaatgcaatcagtcttcgtctttgggaagcaaaagctactgctgaagatttcaacttatttcaattcaatgatggtcaatatgagtcagctgcccaacttcatgctagggctcaacagatatgtgccgttctttatcccggtgatgctacagaagaaggaaagcttctaaggctgaagcagcagtttttcctttgcagcgcatcacttcaggtgaatggagtggctgagttgcatagcaacattttgaagcaagaactatttgcagattatgtctctatatggcctaccaaattccaaaacaaaactaatggaatcacgcctcgaagatggctccggttttgtaaccctgagttgagtgaaatagtcacaaaatggctaaagtcagatcagtggacaagtaatcttgatctgctcactggacttcgcaaatttgcagatgatgaaaagcttcatgctgagtgggcagcagccaagttatcttgcaagaagcgcctggccaaacatgtgttggatgtgacaggtgttacgattgatccaactagcctttttgatatacagattaagcgcatacatgagtacaagagacagctcctaaacatattgggagctgtttacagatacaaaaaattaaagggaatgagtgcagaagagaagcagaaggtcacaccgcgcactgtcatgataggagggaaagcgtttgcaacatacactaatgccaaaagaatagtgaaattggtgaatgatgttggtgctgttgtgaacaatgatcccgaagttaacaaatatctgaaggttgtctttatcccaaattacaatgtatcagtggctgaagtgcttattcctggtagcgaattgtcacagcatattagtactgctggtatggaagcaagtggaacaagcaacatgaaattctctctgaatggttgtgttatcattggcacccttgatggagctaatgttgaaataagagaggaggttggagaagataatttcttccttttcggtgccaaagccgatgaagttgctgggctgaggaaggatagagaaaatggtctgttcaaaccagacccacgttttgaagaagccaagcagtttataaggagtggcgcttttggcagctatgactatgaacctctcttggattcccttgaagggaattctggatttgggcgtggtgattatttccttgttggctatgacttcccaagctacatcgatgcacaggatcgggtggatgcagcctacaaggataagaagaagtggaccaagatgtccatcttgaacacagctgggagtggcaaattcagtagcgatcgcaccatcgcccagtatgccaaggagatatgggacatcaaggctagccctgtcgtgtgaacgagggggttgcgattcaacaccaaacgtagtttcttggggtgctataatagtaaggaagaataatgacccacggtgcttgacgcccacttgcgttgtaggcatggaacgggggcacctagcttgttctacagcgctgtctattttgaattggtgcgactttgttgctcttttttcctcccccttatatcttatgaaacaagatccttttgatctgtgctctgaaataaaataattcagttatgatattcgtcgccataatgtgcttgagaaatggatgtcccttcctccaaggtcagcagtgcccaaactccacaagactgtttgatctaagcatattgatat

SEQ ID NO: 29040 - DNA, 2590 bp, Zea Mays
tcctcctttatttccctctctctctctctctctctaactttttatgatactagtagcaataaggaggaacagcacaagagaccagttcatccctggttgcctctcacagtcatcttcttgacaagagagagaaagagaggagagagtaactccagtactggagacacagacacccaccaaggccaaagcagaagcacaaacgagagaagagagcccccccctcttccacacaacaccaagaaccttctcttcctcctcttgtatatatccatcaatcgcatgagccctcctccaagctagccgggcatgaagagaggagagaccgcggggtgggaactgcaagcgtcgtgcgatcaggagagaggggcgtcagccgaaggtagacggcgggcgatggaggcgagctcggccgcgtcgccggacctgtcgctgcacatcagcctgcctagcagcgcggcggggtccggcccgtccggcaggcgcgccgccgtggggggaggaacgggaggaggaggaggcgccgggggagacccgtggcggaggctgaacgggtccacagcgtccacggagctgtccctgtcgccgccggtcgagcaggagcacgcggacgcgctgccgtggcgacaccggccgtcggcggcggccgcgtcctccgcgggccaccacgtcggcgggcgccacgctgatgcccgccatgccgatgcttcagccgctggacggcgggggcgggctaggcgccggcgccggcgcaggagggggagcgtcggtggcgctgccaatccgagggatacctatctacaacggcccggggggcttcccgttccttccgccggcctccggggccgacggcgcccccctccaccaccaccagcagcagcagaagctcgggttctacggctcgtaccacccgagcacgtggccctcgtcgctcggctccacgtcgccgtcgccgtcgccgctcgcgccgggcacgccgccgtccccgctgctggacccagcgtcggcggcgttcctgtccccggccgcgcatcaccaccaccggatgctgtcggcatcgggccggctcaacggcatgctcaccgacaccctccgcggctacggcgctggcggcgtcggcggactgggcggcatcgtcggcgggcaccaccaccaccaccaccacctccacggcgcgcagccgttcggcctgggctcccggttcatgcccaagctccccgccaagcgcagcatgcgcgcgccgcgcatgcggtggacgagcacgctccacgcccgcttcgtccacgccgtcgagctcctcggaggccacgagagggctacgcccaagtcggtgctggagctcatggacgtgaaggatctgaccctagcccacgtcaagagccatctccagatgtatcggaccgtgaagagcactgacaagcctgcggcgtcatcaggggcgaacgacggcggctccggcgacgaggacttcgccggcggtggccaggctggctccggcggcgagaacatgtgcgcgaggccgttcggggagcaccggtccacctccgagggtgcggcgagctcggtgggcggcggcggcgggggcgacatggaccagtcttcggcaggcaacggcagcaccaggtggagcaactcgtcaagggacccatggctgtcgtcgaattcatgcaacatggatgctcatcgcttggcagcgttgtcttctccgattgagctcgcaggtgtcgaaccaggagctgatgagcagcccgagcctggagttcacgcttgggaggccggactggcagggcacggatcatgactagcagtagcaatagctaagctactagctgctagccatgcgtcgaccgtacgtggagctctagctagctagaaggctaacttcttcattgaggccgggtggttatagtagcagcactactactgatatcaggcggtgcgcgcgtgtgcatgcctgatgatcccccaagcaactcgtagacgacgacgacgacgacaggttttttcgcctgcgaagtcgaacagatcaatcaacaagtacagcagcagcagcaaccgcgcgcgtctccatcgatgggtgtggagatcatggtgagtacgtacgtgccgacggacggagcaccggcctggaagaagggattttaaagacttactgggtcactctctctatttcttctctgtcagagagagggagggagagttgagtgggctgcctttgggtgagtggtttgttagattggccatgccatgttcctgatttccttttctttcttgcttctctctctttttgtttccttgtgccatgtcgagcgggcgcgagattgtgtcagcgcagccggcggtgcagcagggggtatgcatgatgggagtcgtcgtagctggctggctagctgatgatggcgagagagaggcgtaaagctagccttgtgtggtggtgtgggagtgagtgagtgagtcgtgtgcgttcgtccaatgcatgtttggtccgtgtggtgtgtgaagctagctatacctagcgtatcattagcacatgcaaagctggaaaggagagaaaagaaagaaaagggaatgagttctcatgaagcaatatcta

SEQ ID NO: 29041 - DNA, 923 bp, Zea Mays
cgacgaaacacacactctgtgtgcgtttcgtttgggtacttttggttaagttgccttttcgattctcagaaaaagactggctctgcactcggataattttaaaatggatagtgcacagcagcccactggggaattgaacaattcgttcgatactcttatggtttctggaggtgaccagagtcgacagcctcaggatgctggcaatgaaacgagcttcacgaattggaaagacctccccatggagctgctcctgcgtatcatttcactagttggagatgacaggatagtcattgtggcctccggtgtatgcacaggatggcgtgacaccttggggtggggggttgcaaatctttcactatcatggtgccaggaccgcatgaatgacttggtgatatcactggctcacaaattcacgaagctgcaagttctatctctacgccagatcaggcctcagctagaagacagcggcgtggaggccgtggcaaaccactgccacgacctgcgcgagctggatctcagcagaagcttcaggctgagcgaccggtccttgtacgccctggcgcacgggtgccctcagcttaccaggctcaacatcagcgggtgctccagtttcagcgacgtggcgctcgtgttcctctccagccagtgcgggaacctgagatgcctgaacctgtgcgggtgtgtgagggcggcctctgacagagcgctacaggtactttcgtttgctgcagccttggtcgcttgagctcgcgttgatccctgctgttttggtggtgtgtcctgtcctgtgtaggccatcgcctgttactgtggccagctgcagtcgttgaacctgggctggtgtgatggcatcactgacaagggggtgaccagcctggcttcgggatgccctgaactcagggccgtcgacctgtgcggctgac

SEQ ID NO: 29042 - DNA, 570 bp, Zea Mays
gccgtggcctcgcccacaaactaatcctacggcccacggaaccagtcagtcctctctccttccggcttccgctgctcttctttctttcctggcatcttggagacggcggcgagacgaggagaggactggaactggaccatggctgcctcttcggctctcaggctaatcctgggctcctcgtcggcgtcgcgtcgccagattctgtccgagatgggatacaagttcacgcttattagtgcggatatcgatgagaaagcgatcagaaaggagaacccagaggaactggtggtcgccttggctcatgcgaaagcagacgctattctggagaagatgcagaacaatgggatgatgaaagagattcttgattctcaagatactactctgatgataactgctgatcaggatcatttgcaatttgaatggctccagtgctatcacacagaagaggtgtaggagtatcacaagagacaccaagatcaaccaataaccatcgtagccatataatctcgacagtagtggtagcaagagctcgaagttctgcttctgcactagatcttgatacaacaactt

SEQ ID NO: 29043 - DNA, 3589 bp, Zea Mays
cgcccagagtcgtcaacctccctgcgattccagcgcggtcagggggcgaacccgcccgatttctacggtgcggccttggaccaaattcttctctggcgtataaatccccaatcgtgcccgcctcttgctcaaccacctcgcaccgccaccaggggaccctcgtcaccgagaaagagagagccacgagggagagagggagtcttcttcgccgatctgcgctcatcggcgacgacaagggaaggaagggcaccggctctgtgtcagtatcccttcatcagtcactggaggtcaggcagagcatgttcgaggagatgcagcagataatgaagctacaaggctcgcaggccaagcaccaaggtttataggccagaatgggctaaatagttgctaggccggcctgtgtgccggagtataatatataagccaaacttagggcagagaaggggatgaaatgaacctgactctgaattctactatctactatcgtctccctgttcttcacctctattcatcttctttgtgttgtctgtctgtatctctccactcctgctattctattagtgatctattaggatagctaacaattggtatcagatatccaccgatcctcgaattccatcgttcctcgaccggaaaacatccatggcgtcttcttcaccggtccatactcagctcattcaagcgttggagcttcagacgcgcgccctcctctcggagttagacaagcgtctcgactccaagtgggggaccaaatgggaatcccgtgttggagcgatcgaatcgcgttccgccgattcgactcgcgccatgtccgatttctcctctgctcttcactccgacgtggaagcgcacctcacagcagctgacgccgccaccgactccaaccttctccagatcgaagccgagctggacccccgcgtgtcggcgctcaaatcctcagtgcacgccctcgatctgtggtgtcctcgcgtggattcatcgatcgaggggctccacgcgtcggtggatttcatcagcaccgaagtgtccaagatggggattctatggaaccacgacgtgtgtgtcgacgacttagccaggccgggcttgttcggagcacacagatcggcggcgtgcttcgacgcgtccgccagcgcgccgtccatcccagcctcggtcatcgccgacaactggggagggttcttcgacgatggcgagcagtactgcgcggcgctggacgcgctgcccaacagcatccactcagacctcctcaacacattcgcgcgtcacagccacgaccatctcttcgtcctcaaccccgtggccgcccaggattcctctgccgaggaggccatggccacgatggaagcagccgcggacgcgggggatcccgcgaggctcgtccagtcctctccgtccccttccctactcatcgcggggaacctgctgccaccctccctcacgatgccgcagctgcaagctgaggtggtggacaagcagtaccgcgtcgcgatgagtccaccgcctcctcttcccgtcgtcgacgagctgtaccgcgaagaggcaagtcctccgcctcccatccacgacgacgctgcaggggtgatgtccttggactcgagcgcgttcaaggtgctcgaccaaatgtccaagagcgcaagagccgacggtctagtggtgaacccgttcgaggagctggaaagcggctcgatggcacttctcgcggaggcgacgggcgaaaaggtgatcgtcgttgggtctgtcttgctatgccgctcaccaagtctctaccctcaatccatgtcgtgtgacacgaggcgatgcatggcgtggctggatgccaaggcgcccaagtctgtggtgtacgtgagcttcggcagtgccaaatgcatgccacccattcagctcaggcagctcggcatggcgtttgcctcatgcccctcgcctgtgctctggctcatcaaggacgctgactccctgcccaacaacatcaaggatttgctacacgagcacactgttgcagacgatgtcgcaggaagcaagtgcctggtggtgcgcggttgggcgctacacgtggccatcctggcccatcctgccagtgacggcttcatggcgctctgtggatggggctccactctggaggttgttgcagccggtcttcccatggctgcctggccctttttcgccgaacaatttatcaacgagcagctcatcatggacgtgcttggtattggattgtctgtcgctgtgatgaagccaattgaaaatgttttgattgccagtaacatgggtggtgctgttgtgatgatatatgctcctgttttttggtcttgcctgacaagcttcacacttggaatccatggtcagatagttggggttctatgtttgccatttctgatgcaacaagctagtctgtcttttgtcacgaagacaggatggctggtgattatcctttccttgctgctactccaatgggacaagccaaaccttcggggtcttaacaaatccaagtgcattcagcgtggcttccgtcgatgctatgtacatgcttgtccaagcaggtggtctgactggcttccgtcggccgagttttggtataatagctcgttccattctgctaccggtcgatctccttttgaggacttatatggttatgcacctcgccatttctgtattacttcatgtgatggtccctcagctggcctaaatgcattcttgcaagacaaactggttatgaccaaactgttacagcaacatcttttgcgcgccaagcaatagatgaagtctatggatgataagcaccgcactgagtgtgaatttgctgttggagatctgaaggccgtgggtgtgctaacgtcctggtatctccgttgctgcctgccactgactctgcttggcacattcatgaacagatattggagcgacatctggtcgtcccaaccttcctcgttggcaacatgggaagacttggaagcactcaagcacacctttcctcaggctccagcttgggggcaagctggttctcatggaggagggaatgtcagtatcccttcatcagtcactggaggtcaggcagagcatgttcgaggagatgcagcagataatgaagctacaaggctcgcaggccaagcaccaaggtttataggccagaatgggctaaatagttgctaggccggcctgtgtgccggagtataatatataagccaaacttagggcagagaaggggatgaaatgaacctgactctgaattctactatctactatcgtctccctgttcttcacctctattcatcttctttgtgttgtctgtctgtatctctccactcctgctattctattagtgatctattaggatagctaacactctgaccgcgttttggcatggggatttcgctgtgattgcgactttgtgccggtcaatggagtccgccgcaacaccgggtgagcgcatcggtgtcggccgcaagggaagggaggaaacctcgtctgggcagttcctcgcagccgtggacactcgccgtcatccacctagcgatcgactccacccccgttccgaactctcgttgcatcaggtttcgctgccatttgcagcgattgtgctctagttcgg

SEQ ID NO: 29044 - DNA, 2419 bp, Zea Mays
caaacacaccgtagcccccctcctctcttccccaaacacacaccacaaccataaccacgaactacctgaacggctgaacaattcccttcgtcccatcttcctctcgtctctcccaccccccgacccgaccgggcggcctcctccccgaaccctagcccctctacaaccaccgcgtcctgcctcctctgggcggctccgccccagatccagcacagcaggttaaaaagggggcgggcaggcgttggatggacgggccgaagcggtcgcagctgcgggtgcgcctccgcgtcacggcgcgccggcgtggtgccgatggcgacggcgccgggggcgctgccgggcctggggggcgtaagcgccggatggaggcccccgtccgcaactccgtcgccaagctgcagcgccgcgagatcgggggccgccagctcgccgcgcgcggcggcggccccgccgccgccgtgcccgagcgcttccggaacatgcagctccaggaggagttcgatacatatgatgaaaatgctcacctatttgtgaagctgcagtttcttaaaagaagatccaaaattattgagattgttgcagcaaaggatatcatatttgcccttgctaattctgggctttgtgctgcttttgaccgagtaacaaacaagcgcatagccttcttgaatttgagcccagatgaagtgattcggagcttgttttacaacaagaacaatgattctcttattactgtttcagtttatgcggctgacaaattcagcacattgaagtgcagaacaaccccgattgagtatattagaaggaatcagttagatgcagggtttcctctctttgaatcagagtctctgaaatggcctggatttgtggagtttgatgatgtgaatggaaaagtactcacatattcagcgcaggatggcatatataaggtatttgaattgaagaactactccttcctatattcaataccagatgaaaacgtgcaggagataaagatcagtccaggaatcatgctcttgatatatgataggacaccaagttatgttccattgaagatactatcaattgaagatggaaagcaactgaaatcttttaagcacttgttgcatcgcaacaagaaaattgatttcatcgagcagttcaatgagaagctccttgtcaagcaagagaatgaaaacttccagatatttgatgtgcggagttctgagctaattgaagtcagtgtctccaagtttatgaccccttcagcattcatttttctgtatgagaacaacctcttcttgacattccgaaacagaacagtcgctgtatgggacttcagaggagagcttgtgacttcatttgaagaccatttgctctggcataatgattgtagcaccaacaatatttacatcacgagtgaccaggatctcattatctcgtactgcaaatctgaggcagtggctgaggatggtacaggtgcagtactcaaaccctgaccatttcctcagtatttagtttgcactatctatatagatgcaactgctcccatatcccaattgggatttttcctttttactggcctcttcaactagcctctgatgtcaacatgctggatgtttgcaacattgaatataggctgatagatatcgggcaccattacaaggtcatgaatatgaccacataaaaaaagtgaactggcattatagaaatctttctttgattgtgctatcaggaaataatcttgacactggtgtcgtgcagttgttccagttggatccatcaacataagtgagattatgacaggcaggtgtatcgccaagattactgccaatgatccttccctaagtgtacccggacgcagaaatggttacagcaagcggtcctcggactggagcaccgttccagaagctctggaggacgtcactgcactgttttatgatgaggacaggaatgagatctacaccggcaacagccatgggctggtgcatgtgtggtctaactagatagtagcatgtacatacatcatttcgcccttttgatttgacttggttagctttactgcatgctgtataatccttggctcgggggctcacctagcttttctatttggcaatagaatgtgtttccttgagcaattgtgattgcatagtgttcttgtaaatatcttttgttcagctaccttgttcaagtaacatagaaataggcctgccaaatgtaactttgctggatactgccagccaagtttcgggcagcaagagagtgaagacctgcagttctgaccatcatgttattgttattttcaagtgtgttgtagtgttcgttttgtctgtaagctgctgaattatcgtatctgaagccttggatgaaccacctttaattatcagttaatctgtacctgattgacctcagtattcttggtccggagaccaccctcctggta

SEQ ID NO: 29045 - DNA, 1865 bp, Zea Mays
ctgggctagacagaccggctcatgttggcaaaatattctgggccgtatcatgttggcaaaaatatactgactccggtccgcaactccggatgtgtcggcgaccaggcaaagctccgtgtcctctcgtctcgtgtgactgacgaccaggtgggagggccataaggcctttagcgcggcggcggcaatggcgcccacggcctgcctccggacccccttcttccccgcccgtgcccgatccaccaacgccaccccgttctcgccacaccgccgcttttctctcaaatgcagcgcctccaacggtgacaactccaaccccaactccatctccatctctcccacctcgccgcctcggctaacggtgtcggacggcgtcgagtctgtggacgttaacgggttgcgtcgcccgccagcgcccgcctccgtccccgccgcccgcgatccccactggctgcctcgtccgctcacaagtgcggacgtcatggaggtggacgggaaggggctcaaggttgcttaccagggttgtgctggagcgtacagcgaagcagcagcaaagaaggcgtacccgaattgtgagactgtgccctgtgagcacttcgacactgcatttcaggctgttcaaaactgggtagctgatagggccgtactgccacttgagaattcattgggaggtagcatacataggaattatgatcttttgcttcggcatagtttgcacattgtaggagaagttcgccttgcggttcgccattgcttattagccaatcctggcgtgaagattgaaaacctgaaaagtgctatgagtcatccccaggctcttgcgcaatgtgagcacacattaacatcactaggaattgagcatagagaagctgttgacgacactgctggtgcagcaaagattgttgcagaacatatgctccaggacactggtgctattgctagttcgttggcggctaaactgtatggattggatgttcttgctgagaatattcaggatgacaaagataatgtcacccgttttatgatgctagctcgagaacccatcatacctcgcactgataaaccatttaagacaagcatagtcttttcactagaagaaggacctggacagctctttaaggcacttgctgtatttgcactgagggacatcaacctcacaaagattgaaagtcgtccacacaaggaaaggcctcttcgggtatctgatgactgttcctcactcttaaagaactttgattaccttttttatgttgaccttgaagcatcaatggctgatccaaagactcagaatgctcttggaaatctgaaggagtttgcaacatttttaagagttcttggaagctatcctacagatgtgaatgaaccttagattgaaagtactgcagattacatactggtataaaaccgaatgttgtaaaaatgaagaattgcatagagaagatgagtgggtggtgtcaagcagtggagcttgaagctttggtaattgaaggatggaggctcaagcaacgtgaggatgaaaaaggagcaggcaggctatcatggctgacattgagtgaattgggctgacgtgatggtcctcggttctgtggatggactgcgtggggaataaaaagaagattgtcacgtggatgacttttagttgccgcagccaaattcacgccttagaggacttgtcatctttgctttcttatacatagtcattttgagtttactgaaagaatcctataaaacttctaataaactaggcaactaagtagcagaagttgatgaccatggttattaaagcactaaagcactactgagatgttaaagcgctgcaaagcttcacgaattgacgtaaagcgcccgttttaagcgctaaagcgcca

SEQ ID NO: 29046 - DNA, 1441 bp, Zea Mays
catatctatactacttcttaagaacctaaggagggcgtccaccatccggtgaagcctgcccccgctcgcgtggtccccctctgcgtctcctccatgtttggtctccctctgctggaagcacattctttcacgtctcctctcaccccatacgatgtgggcatgatttaggaggcaggtattggtgttgggattagcggcgcagaaggaattatgctgtcaagcgtcctatttgcaagagataaatggcttacgcccgaggggcttattcttccttatcatggtatgatataattatcatacaaaaatgttacactgcttttacagggtgtacctcatctatttgcttgtacaattcatcttactactgctttgacaaacattggtctgctctgctttggtctgtgctttaggattctgtttcattgggagaaacaaatgcccttgcttactttcattataactgtgctatttttttgatccaatgttgttctaagatcaagaagtggaatacttgttctaagggtcccaagttgggtggtggtggtgggaagcgttttcaggtcggtcgtgactttggttatccactgaaaagatatgcttggtggtgctttcttgtgttgaagaacaagtatcccacggaaccacaaccgtttgtattatctggtgatttcctacattattagctggcctaactaaaccatgcgctcagaccctaaaccagctgtaagtctgtaacttaaaagcacagtgcactagcggaatggggttccttgctttttggagcgtttccccagtcagatcggcggcagggcaggtcacgtggacggggctccttgttgctggaactaaataccgtggagagtttgaagtgagactaaagaaacttatggaggaaattaagcaaaatgaagacattattctctttattgattaagtgcacacactgattggagcaggtgcagcagaagtgcattggtgccacaacactggatgagtataggaagcatatagagaaagatcctgccttggaaagaaggtttcaaccagttaaggttccagagcctactatggatgaaacaatacagatcttaagaggacttcgtgagagatatgaacttcatcacaaactgagatacacagatgatgctttaattgctgctgcacagctgtcttatcagtatatcagcgatcgttttctgcctgacaaagccattgacttgattgatgaagctggatctcgtgttaggctgaggcatgcgcagctccctgatgaagccaaagagctggacaaagagctgcggcagataagcaagcagaaaaatgaggctgtacgtggccaagattttgagaagaatctgtagcaaatggctaacgatgaggatatccattactttgtttatgacaataaaactgatatgttcaagattccgtagcaacgcac

SEQ ID NO: 29047 - DNA, 3685 bp, Zea Mays
atgacccaaacaactctttcactagcagtagctgaagagataatggatcataattggactcaagcatcggcacctgcaacattcaggtacgagcacagctgtgacatgaacagcagcaaatggtgcacaaccgtgctagttcaaggcagtttgtctctaaaagcacttctggtgcacaatagacgccccgtctcatcatactcgcccttggtgatatgctggttttcagggaaaacgaccttggccaatatcgcaccacccaaccaggccgagtaccttgctaggttctcggacatgtattcaggggggctggaagaaacattgctcaagttagtaatagccagggaagtgaggaggggattgactaggagcagcaatgagggtaccttcacaagtgatggaaagattgctgaagcagacagatttgcttctctctggaacctgtcctcaaagccttgaggaagaaaaaaagtgagataaaccttagtgattaaatgagtctaagcaaaactacaagagtttagattaaatatgcataaagatccacaagttgtatacacaactgtccaagagagccaattgaacatgcaaagctgtaaccatggcatgaaatgtagctgttgcctgttgctattgctacctaattcttacttaaccaacatacttcccacttccagttgtgctattgctacctaattcttacttaaccaacatacttcccacttccagttgtgctattgctacctaattcttacttaaccaacatactttccacctccagttgtgctattgctacccatattcactacaatgtttgactacttatccaaaggacaagtatcaaatgaaacttcaaagttctaacagaacatcaaagctggcactctttattattagggaacataacaacagagaatgtcccggactagtggtgcataggttggcatccatacaatcagttcataccgaaggcagattttcatcttgaatgaagctgcgttcaactagaaaacatatgttaaatccacaaaagtttaaaacaaaatgatattacttaccctatacagctaattgatatgcatttgacctatagctaaaaaaactcggccggtagggaaagaccgccctcccgatattaaattaagaagagaccgaatcatggtttcgactgataaaatccattctgcccactctacaacggcccagcgggagggtggcgcgcaggacataacccaagaacgggtgggacacagcgaggggatttttttaaccaagcccgaagttagggatcgaaccaggacctggagatgctactcggaagccttaaccattacgttagaggccctttcgctatttgacctatgactcacaaggttgaataaagcaaaggtgcacatcaaaaacaaaaggcaactaaccagtcattgatgtggtgccaccacataacatggtattttcaagcagctgacgatggtactctgatgaaacatttgaggcgctagtaactagctggtgaacgataccataatcttccaagcccaatatatgtggttgaaataaagcttcaccaacaatgtacctctctttctcaattgttatgacctggagaaagaagcggaagtgcctttctggttggcaagagctttctatagccttcaaaagccaactgatcttctgtgcaacatgcatactgctctttcagcctctcaacatcagaaacatcaaggtttactgatggattagtttttcagttcgtgtgaaaagaggtttgtcaagtcaactaccccaatctctaatctcttagaagctgtgttgaacagctgcttcacaaactggagcaatatctggtaaaatagaagcaaatgtcactctccaacatcaaccttgcttgctgaccactaattagtgaagtaaaacaagcactggatggccataactgaaccaaaatgtaggcaaagtctactttagttaaagctagccgatcaaaagatttggtatgccacgtgtattttgcaaagtagtcaactatgccacactaaacaaatcacccaaaaatgaggaagaactttgaaatcctaaagaaacaacaatcacaagataaatgcaagtacaaacagttttaaaccacaagcatgcagtcacattcccgtaaatgaaccaataccttaagaaatactatgatgcataccctaggagcaaccggcacctaaaaaactcaacctgtgggggtatgatagcccccaggcatagcatgatagagaagacctcatgcaggtcgaggaaacctctgatcctacaccccactcatacaaattggcactgcagcctatgtaagcaacctgggtcaggtcttagacctatgttttggtatggaagagacaaggagatttttttaaacccaggctaaggaccttgctaataaagccactaagctggcacctagaaaatccaaaaaaaactcgagctacaggaggtaagacagccctggaatttgtattaagatgttattctcgcccaagtcgagaaaacccccgaacccctaccccacccatgcacagtggcaccgtagccaatgtgagaacgaccacaatagggctgggccttaagcccttaagcctgtgctttggcatgggacagacgagaggattttttatcccaacctaaaattcactccaacgggaagtcgaactcaagaccagaggagtgctagaggctctttcgtggcacctaagaaatcaagattttaaaagaagatgtgaagtaggtgtaatcattatgcactatttcttcaggtatattactattatcttttggttattttgttagacgtgaagcttcataatataatgtgctccctttggtaagggaagagtgttgttcctggcatccaattattattcaaatgcaactatggcattttatttatgttatatttatgaaaggatttataatatgaaagtatttttttcaaaatgattccactatcattttatatttttaatatctatatgcagtataagtattgttatcccaaatggcttcttatcagaaactccatttagtttcatctttaccctaagttgaaaaaggaacaatgttaattggttacttgaagaacctacagaaagactcctctaggtgcaagaaatgcaataatacatctttgtagaaaggtaaatgtaattaggtgaaagaactgtcgcacagctatatgcaaaaaatagtgtttcaaaagcgctacacattaggcaggaggtcaggctacgcgtagtgcctatgaaatgctaggtgtttgtactttatgtgggtgattagaattatcctgctaaaaactgatattatcatacatccatgagtgacatgactgcagctcatcttcctccatctctaatattttccattttcaagcatacatcatgcccaaaacatctctatgcacaaaaaaagcctagacaaaacaccaaggtgctaagtgaggtgatgcagctcaacctagtgccaaggtggagctagacaccgccttttaaaataccggcaaagatacacaaatgaaaccagcacaacattataacagtatgacacaagccatggttcattgttcattcacaactcatgagactagattaattaattgcataaagcccataaccttttgatattttgtattgtaactagtcggttgccc

SEQ ID NO: 29048 - DNA, 2625 bp, Zea Mays
ggaagaggccctatgtggttgcctgaacctgatcgtttttttttctgtgtccagggctccagcgcgctctcctcgtccctgttcttccctagccgccgcaggctgcagagcccccggcgagctgccgcccctgccacatatactcagcctccgtccctcgccggtcccaataccctgtcgtccccagacgaagccgacgagcgtgaccctcgcttgcctgaatctgacgcctccgggctcgggctatagttcaatcggtgccggcggggcaagaggaatggcgtggcggatgatgcgaaggaaggattttcacacgggccttgtgactttggcgttccgaaaggatcttgggttcaaaaagtttttctccagtggaaaaatcggaaatctgtcccaggtctacggcagtgataagcccaaatactctgctaattgcatgccctctaaccatttcactatcaggtgtttatttgttagcatggagtcagaaaagggaggatgttgtaggtctgaaagctcccaaaaaggagaagcgagtgaagaaagaaaatagaacacaacctcctgtagaagcaccatatgttgcaccaaaaacgaagatatctatcaaacctgtaccagataaaactgttgagatttttgacgggatgactttgcttgacctttctaaacgaactggtgcgtatattagtacacttcaaggcatacttgcagatcttggtgaaaaggttgaatctgagtttgactctatcagcattgatcttgctgagttggttgctatggaacttggcgttaatagcagaagaatgcacactggtgaaggcaagaatgagccacgccctgctgttgtgacggtaatgggacatgttgaccatggtaaaacatcacttttggatgctctccgtcaaacatctgttgctgccaaggaagctggtggtatcactcagcatataggtgccttcgttgttgagatgtcgtcaggagcatctataacattccttgatactccaggacatgctgcatttagtgccatgcgggctaggggcgctgctgttacggatattgtagtccttgtggttgcagcagatgatggtattatgcctcagacactagaagctatgtctcatgcaaaagcagcaaatgttcctattgtagttgcaataaacaaatgtgacaaatctggagctgatcctgagagggtcagaattcaacttggttcagaaggtttacttttggaggatatgggtggggatgtgcaggttgttgaaatctctgcagttacaaaaactggtttggataaattggaagaggctttgctccttcaagctgagatgatggacctgaaagccagaatagatggccctgctcaggcttttgtggtggaggcaagggtggacaggggcaggggtccactcgcaacagctatagtcaagtatggcacattagttagtgggcaacacattgttgtgggagcagagtggggaagaattaggtctcttagagacacagcagggaatataacgcagtctgcaaaacctgcaatgcctattgaaattgaggggttaaagggccttccaatggctggggatgacgttgtagttgttgactcagaggagagggcaagaatgctaagtcatgggcggaagaagaagcaggagaaagacaggcttcgaaaaattgatgaggggatggcagaggagctagaaattaaagaagagactcctgaaagagttgaaatgaccattattgtcaaagccgatgtacaaggcagtgttcaagctgtcacagatgctttaagaagtcttaatagcgcacaggtgttcgtgaatgttgttcatgtaggtgttggcccaatcagtcagcatgacattgatctggcacaagcgtgtggagcatatatagttggtttcaacattcgcagtccacctagtcctatcactcaagcagcagcaagagccaacataaaggttttgcttcacaaggtcatctatcaccttcttgaggagatgggaaaggccattgtggagaaggcaccgggaactgctgaaacccaggtttcaggagaggctgaggttctgaacatatttgagctgaaagggcgcagcaagtcaaaaggaccggatgtcaaaattgctggctgccgtataactgatggccacttcagcaaatccggaaccatgagactgttgaggagcggagatgttgtctttgagggtccatgcgagtctctgaagcgggagaagaaggacgcagaaacagtcgaaaagggtaacgactgtgggctggtgattcaggattgcgatgatttccaggtaggggatatcatacagtgcgtggagcaggtgattaggaagcccaagttcatctcgacgcagagtggttcggttcggattgaatgctgaaatgtagtaatggttgtggctgacactactgttccatttccctattaattcagctagttgtgctttactgaccaaaggtttcgagtgtaacaagattttgttggctagcaacttgttgcaactgcaaccaaacccctttctgatatgagataattaggacaaaacaacagagttaagttgcttttttttggggtcatgttaaacaatgtatgcagtattgctc

SEQ ID NO: 29049 - DNA, 2203 bp, Zea Mays
cgcccgcatcccgccccgcatcccgcgaccttcttcctctgctgcctcctgcccgcatcctgccggcggacgcaccccgccccgcatcccgcgaccttcttcctctgttgcctccacgggagccttctcacctccacgcgtcgttgcgtcagatccgtctgtcgctagagaaaaccctacccaatgaccacatgcattcttactgggacgacgccactattggcgcagaggagcagatatggcgcatcgcatgtactccgtcgctgtcctcctcgaatccgcctctaatttctccaacgccataggcaaggagatgcctgcccaccgccccggcaccccccgccctcgccgcgcacaccccaagccccgcggatcacagtcgcctctaccctagcgggagccgcgcccgcacccacattacccgcacgatggcaagaggcagcggcacaaggccacggcgactcctcgagcagaggaacccgaccgagcgcagcaacgcaaatcttcaatctcaaatccgtgctgcgagaaaagtttcactcctctggctgctccttgtgtgtgtgtgtccactaatgcgttcagcattgcaactgctgctgccaaatgctgaggtatgacctttatttttcaacaaaaagtgtctttgtgactacaaaacaagttaacgttcagcattgcagtaatgtagcaaattttgttctgaatttttttatcttcaatgtctggtccgtccgtccgtataaaaaaaatgtatgcattcttctatcttcaggcagcagtatacataactggttcaatttgtgcagcattcgttgccaacatagatggtcactctgataaaactgtcaccttcaatgggaggatgctcagaaatttggtggctggtggatctacttaagaatcaaaagtcagacaaggtggacatcaccatccaaccggaggagcaggaagccatgaatgatgttctagcagccagccatgaccgcgtccacgtcatcaactttgacatcaagcaggggctacagtggccgggcctcctccagaaaaagaggaattgaagcagtatctgactcgaaaacttggtagaaaaagaggaattcctgcatacattttcgaaggaatgtgaatatatcagaactgcagtgacaaatggtagtgccattaagcatgatggctcatatgaatcagatcctgcagttgagattgttcgagttgaactccaaggtgctgctgcatttcttttattctcgtctggttccacgcctatatatattggagaacatggatgggaaatgcttctggtagtaaaaaaggcaacacaagaggctggttcaaaatttgaactgctaggttttgcatctgtgcataacttctatcattatcctgagagtattcgcttacgaatcagccagatacttgtgttgccaccttatcagggtgaaggccatggtcttggtcttcttgaagcaatcaattatattgcacagtctgagaacatttacgatgttacaatagaaagcccttctgattacctgcagtatgtgagatcatccattgactgcctctgtttgctcatgtttgatccgatcaaacctgcacttggtgctattgtctcgtctctgaaggagaccaacctgtcaaaaagggcccaaagtttgagaatggttccaccggttgacctgatggagactcagccagaggatctcaggacgcaggagcaacagctcaatgagctcgtggacatccaaatcgaggagattgatggggtcgccaagaacgtcacttcacgtggcaaggataagatggcagagctggcggttcaatgaatctgggtgaggttcctacttcaaacgatgttaaaatgttgtcgtagcttatctggtgaggtctcttttacgagttggcttcttggtagaaagggaatgtcacggcataggcactgagtagattgtcacgacagattattatatacttcaattctggaatatttgatggaaatgctattttagattgcttggtaagtgggaaccgcctcaaatcacagaagtagaagcagcttccgattcagccggaaccatttcttcaaaaatgttctattatagaataaacaaggcttaggagatagaaaacattatttacaatataaatatgtaatattattataaatgtaccgactcaaataaaatgaactggtattgaa

SEQ ID NO: 29050 - DNA, 548 bp, Zea Mays
gcctgcattgccagcaaagtcaacggcgctacaactgcattactgcaggcaggctttttgcttgcttccgcgggcctcgcatgccataggctcaataacctcgccagcggatcccttccttgcgaggccggaactgagctgccgccggcgctatggcgagcggcggcctggcggctgcgtcggaagtcgccgtcgttttcctcatccgccctgtccttgccatcgccttcgtcttcaccctcatcctcctcagctggtacgtggcgtggaggacggtgctggtgcacgtgccgctggtgcaggagatcgccggcctgcgcccgaaaaagccctctaaacccaagccagccaaccgcggccgcttcgccaagttctaccagaaccaggccgaagccgcacaaagtgatgggcaagtacatagaacctaaggacgaaagaacattgctatgtggtaccgaatccgttgcttgtaggctacggtagctgttttagaagcctgctgcagcagtggttgggagcgtctccaacttggctaggagaatttgttt

SEQ ID NO: 29051 - DNA, 1074 bp, Zea Mays
attatcaatgcagaaagttacccatacaaggaagcccaagggcctgtccggtctatcacgttttgctgatacaaaggcagggagatacaacccaagaatggacccagttatcccagtggagaattggagaaaaggctcacagtgggctgtgctaattaaaaagcatgctgaggttgtggttgatgatgaagtggtgttaccagaattccagaagcattgcaggaggagacccttgccagagttctggcgggattgggatcgtcctattcctgcggaggcatggaaagcccataactgcataccagatgagcactatgttcagacgttgcttgcacaaagtggtctagaagaagaacttacgcggcgatcagtaacacatagtgcatgggatctttcagcttctaaagatcgtgaaagacgcgggtggcatcctgtaacatataaagtctctgatgctactacaagacttataaaatctataaaggatattgataatatatattacgagaccgaaaatagaagggagtggtgtacaagtaatggaaagccagccccctgcttcctttttgccaggaagtttacacgtggagctggtctgaagcttcttgattcatcactgatagcttcaaagtgatgaatattagtgacagatgcaagtgccttttgattgtttcacctttcgagaatatttcagttcacacaaatgtaaaggtacgggaccacggaaaagacacaaaataacaggactttctttttattcagtgtgtgattatcatatattattttgttgcttcatagaaaggcacgatacatgttgtaaagaattatcttcgttccttttatttcctaggatagcacgtccattaacacatgactcagcattataacatcagtcgaccagttggtcgtggagtcctgagaaaacttgtcggcaaaattatgaagaaatgttctctcatactgcccatattcattttactgtacgcatcgcagtgtcttctggtggcacagctgcgaatcgagtgtcttctggatagcgccggacctcgccctcaaggggggtcggcgccaaga

SEQ ID NO: 29052 - DNA, 3125 bp, Zea Mays
catgacaggagagcagattcaggccccttcaagtcccagggatggcgaggatgttgcaattaccattgggcgccccaaggaaagtggacctaagttcggcaccatgatgggtgtctttgttccatgcttgcagaacatcttgggaatcatttattatatccgttttacctggattgtaggtatgtcaggtgtatggcagtcacttgtgttggtttcattttgtggtgcatgcacatttttgacctcgatatcattaagtgccattgcaacgaatggagctatgaagggtggtgggccatattatcttataggccgtgcacttggtcctgaagttggagttagtataggattatgcttcttcctcgggaatgcagtggctggatccatgtatgtgcttggggctgtagaaacctttcttgacgctgttccttctgctggacttttccaaaagagtgtaacagttgtcaacaatacattagtgaatggtacagaaactgctggcacgtcaactatatctacacccagcttgcacgatcttcaagtgtatggtgttattgtgaccatactgctgtgttttattgtgttcggtggtgtcaaaattatcaacaaggttgcacctgctttcttaataccagtcctgttttctttgctgtgcatctatcttggtgtcttcattgcaccaaggcataatgctccaaagggaatcactggattgagtataaccacattgaaagacaattggggtgaaaactatcaacgtacaaataatgctggcgttcctgatccaagtggatcaatatattgggatttcaatgctttggtaggtctgtttttcccagcagtcactggaattatggctggctcaaaccgatctgcttcactgaaagatacacagcgttcgataccaatcggcacattatctgcaactctttcaacaactgctatgtacttgttctctgtgcttctgtttggagccttggccacacgggaagagcttctaactgataggcttcttactgctacggtggcttggcctgctcctgcagtgatttacattggtattattctgtccaccttaggtgcagcactgcagagtttgactggggctccaaggttgcttgcagcaattgcgaatgatgacattcttcctgttcttaattacttcaaagtttctgagggatctgagccacatgcggccactttattcacagctttcatctgtatttgctgtgttgttattggaaacttggatttgattacccccactatcacaatgtttttccttctgtgctatgctggcgtgaacctgtcatgctttctgcttgacctccttgatgctcctagttggcgccctagatggaaatttcaccattggagcctttcacttgttggggcattactctgtgttgcctcatctattactatgtgagcataaaagggaaggctggagactggggagatgggttcaagagtgcatactttcaattggccctccgaagtctcagatcacttggagcaaaccaagtccatcctaagaattggtaccccattcctctggtattctgccgtccatggggtaaacttccggaaaatgttccttgtcatccaaaacttgcagacttcgctaattgtatgaagaagaagggtcgtggtatgtccatttttgtctcgataattgatggtgattatcatgaactagctgaggatgcaaagactgcctgccgccaactagatgcttatattgactacaaacgctgtgagggtgttgcagagatcattgtagctcctaatatgtctgatggtttccgtagcattgtgcagacaatgggcctaggaaacttaaaaccaaatattgttgtgatgcggtaccctgagatctggcgacgtgagaatttgacacagataccgtcaacatttgtcagcataataaatgattgcattattgctaacaaggcagtagtcattgtgaagggactcgatgagtggcctaatgagtaccagcgacaatacggtactattgacctctactggattgtaagagatggaggattgatgcttcttctgtctcagctcctgctgacaaaggagagttttgagagctgtaagatccaagtattctgcatatctgaagaggatacagatgcagaggagttgaaggctgatgtcaagaagttcttgtatgatcttaggatgcaagctgaggtcattgttgtcactatgaaatcatgggaatcacacatggagagcagcagtaacggcgctcagcaggataactcccatgaggcttacacaagcgcacagcaaaggatcaggacataccttgatgagatgaaggaaactgctcaaacagaaaggcagttactaatggagaatgggaggcaagttgtgaacgaacagaaggttgataaattcctttacacaatgtttaagttgaactccacgatactcaggtactccagaatggcagctgtagttcttgtgagccttcctccaccgccattataccatccttcatatttctacatggagtacatggatttgcttgtagagaatgtcccacgcatgttaatagttaggggatatacgagagatgttgtcacatttttcacatgattatacatacgaacttctcacctggagactctagtgccgtcaggctgttgtactatctcagcagagactggatacacaagagcgtggaatctaccactgaaatgacaagccctcaccttgaaggcaaccacgatgagatgtcagatgtgcagagctgttgttcgcatattggattcgtgaactattgaactgcagtgtcttcattcttttttctggatttaaaagatccacatagcgagctttgattcttacagattttgtagctatcatatgtaaacacttaccatcttgtaattgtaagcatacttacatgctggcccaaagacaaatgcaatccttaccttctcactgaaacatttatataggtattttttttgcatcacttgtatgcgtctaaaactgatggacttgttgagatgagcagagctgcgaattttgaatggctacccccaaatgaattttggttatgctttgtcgcaaatatttggttttaatggtacaagatttctgag

SEQ ID NO: 29053 - DNA, 654 bp, Zea Mays
cccgagctcctgaccacttattattcccagcggttcctcttttagagcagatacgcatagcgaagctggaagccttgctgtacaacaaagatggtccgagcggtggatccgaggcaacttcctctgccgtgaaggatctccagtcgaagctagatgtggttactgcagaatgcttgactgaaaaggagaagaacaagaagctgaccatggagaacgagaagctccagtaccgcatgacccatctgattcgtgcgataaaagaggcggaatcgagataggagcagcccggcgaggccgattcaaagcctgatgtcgaagtgttccccacccgccttgctgatcctacacgctgttcctgcatctacctcaagttatcattgtgatcttgagatagagcttggtcacaagtcaagactgtattatcaaactgtcgattgaaaatgatgatgtgtgcacagctttctgtcttcacctgaccccatctcgaagggcacattggaacacaaaatgttatctgaaatgacagttcatattttgaaacatttcgcccccacttcatttatgcctaggggaatgttggtgatctactgagctgataatggagagccggatgttggtgatctactcagctgataacggttggagcaaagaggg

SEQ ID NO: 29054 - DNA, 2639 bp, Zea Mays
ggaaacggactaccagcgctgagccgttccgtttcttttcaatcttggcgttttgtctccattcaatagggaaagggatgtttcgcttgaggctttcctttgtgcctgtgtcttctctgtagctttcaagagaataaaaatttggagcttctctcgcaccagcgtcctttccttcttccttggtttcatgctgacaactagggctgatcttcaggacggcctgttcttggttcggttcctgagagcgattgatagcgccagacggagtttcttctttaggagtcgtgcactatgggtaattgctggtttaaggggaatccatactttaacagggtttcttccaatgcaaccaaagcaggtacgactatttattactttggtttgatctctgtgatgatgtaactgcaactgtagtatgcagaagtttcatatatttgtttgatgccctcaatttagacattaacgaaactgctgctatgtgtgtgttctctcgtcttgatagaatcagggaccatgtccctgctcttgtttagtccaattacggctatttcagtactgaatattttcttcacaaaaaatcagtcctaatgttcaatcttatccaacccaatgattcttttttccctaaccttgacagttgattttatgattattccatgtaatgatcagatacttttgttctgccgtatgaaattcttgttcatcttttggtaacttatttacaaagtttctgaataatctgcaccctgtatttcagtccccgtacttgacttgtctatttgttttctgcagaatctcccaaaattcagagcccctcggagagaactgaaaaggaggattgccagctaccatccaacccgaaagaggtggaggcgctgagaaaggatacagctcgcaatcctttgatagcgttcacatttgaggagctcaagagaatgacaaaaaatttcaggcaagattcgttactaggcggtggtggatttggcagagtctacaaaggttttatcaccaaggatctccgcgaagggttagagatagaagagcccacaagagttgccgttaaggtccatgatggtgacaatagcttccagggccatagggagtggctggctgaggttatatttcttggacagctctctcacccgaatttagtgaagttgatcggctattgttgtgaagatgaccacagggtccttgtttacgagttcatgcctctaggaagtgtggagtctcatttgttttcaagtaattcttatcctattcttgacagattgttgattggttttatatagtttcttgtcattttgtcataacactgactatggtatatccacacatggcattcatgcaaattctcatactcataactgaaaagaatcgattgaaaacgagcataaacctgtccctcactcctatcctgaaccagtataatttaacttgcttcgagtggcagcattataaatttctgcatgacctatgtggtcagttctgcattattatttgtccatttgagatccaccagtgtatattatcagatcagtggagtatttgttttcataatgcaggggttatggtgccacttacgtggtcgatcagaatgaaaattgcgctcggtgctgcgaaaggacttgcttttctgcatgaagctgagaagcccgtcatctatcgggacttcaagacatcaaatatattactagatgaggaatataatgcaaaactatctgactttgggcttgcaaaagatggaccagttggcgataagtcccatgtttcaactcgtattatgggtacctacggttatgctgcaccagagtacattatgacagggcatctaacggcgatgagtgatgtctacagctatggtgttgtactactggagctcctcacgggccggaagtcactggacaagtcccggccagtcagggagcagatgctggcagactgggcactcccattgttggcacagaagaagaaggtgcttggcatagtagacccaaggcttgccgaggactacccagtgaaggcagtgcagaagacggcgatgctggcgtaccattgcctcagccgcaacccaaaggctaggccgctgatgcgcgacatcgtcgcgactttggagcctcttcaacagctggaggagacccctggagacagcgtggcagtgacacttgaagggacttgaagcagtgttccattcacagctcacatcacagtcacacacagctctggaaaactcgggtgccacgtacttaactatgcatgataatagtagctagctagtgttcttgatatgcaggatgatttcttgattgtttaattaatccatggagacagtagctttgttcagcagaaagttagtgtgtatctcagtaggacggttcatgtgtgtgtatccaggtgttcagtcctggcgtagcgaactccctggcatttcggatgcgggcaagtctgtgcaatctgtatttgcaatgcttgttgcccgcagaggaagcttgcttaccagtgtttgtaacctagtattgtgcagttcatgatctatgcatgttgaataatgtgtgtgtatatatatatataacaggtataacgggagcactgagcttccaatagttaaagaaagcctaagccgaccaaccctgcaacct

SEQ ID NO: 29055 - DNA, 2458 bp, Zea Mays
atgaacgggcggccagccagcgcgcgaacggtttcccgcacccgacgcgctctccgcagattaaaaggcggcggcggcctacctgtggcgtctcttggccctagtcctcgcagaaaccgtcgtgtcgccgaaaccagctcgccggtttcgcctccccaccgttccttgtctcgcgcccctctcggctccagcctccaggtctgcttgttgctatctttcaatatgccggcgtcggagatggaagcgcctgcgtccgcgcacgcctcggcggcggccgctgatgacagccaggaggactctgcgcccacggccgcggtggcggcggccgctgatgaggcgcagccggccgcagctgcagtacccgcgctgtacgtgggcgatctgcacgaggacgtggcggaagaacacctcttcgaagctttcagcaagatcggcactgtcacgtccgtgcgtgtttgccgtgacaacgccacaagcagatctctccgatatggatacgtgaattatttctctcgcgccgacgctgtggtggctcttgataagttgaatcatagcttggttttggataagcccataagggtaatgtggtccaatcgggatccagatgcccggagaagtggcgttggtaacatttttgttaagaaccttagtagttctgttgacaatgccagccttcaagaattgttctccaagtttggagacgttttgtcatgcaaagttgcaaaaaatgaggatgggaccagtagaggatatgggtttgttcaatttacatcacaggagtcagcagatgaagcaattgggaacctcaatggctcccttttcaatgacagaaaattgcatgtagctacgttcattaagaaaagtgaacgatctgcaaataatgatgataagtttactaacttatatatgaagcatctagatgatgacataacagaggaacttgttaaattgaagttctctcagtttggttcgatagtcagcgtgaagattatgaagagacccgatgggtcatctttggggtttgggtttgtcagtttccaaaaccctgagagtgctattaaagcacagagcaccatgaatgggatgctacttggatcaaaagccttatacgtggcgagggctcaaaagaaggaggaaaggaaacaatatttgcaacgcttacatgaggaaaagagaaacgaaataatgactaggtgcaatgaatcaaatgtatatataaaaaacattcatgacgaggttgatgatgatgctcttcgtgctcgctttgttgaatttggtaatatcacatcagcaaaagtcatgcgtgatgacaagggaatcagtagaggctttggatttgtatgctatagtacccctgaggaggcaaagagcgctgtaaacaacatgcgaggtgttatgttttttgggaaaccattgtatgttgctattttccaaagaaaagaggagagaaaagccaagttgcagcaacatttcgctcagcttgcaagaatggttggacctgcgaactctatgatccccactggatatccacaagtttattttgcccatccaagtacccatatccctcaaggtcctccaagacatggttttgtgtatccacccatgggccttagtcatgaatggagaccaagtatgttccccccagcaccaaatctccagcaaatacattcacccgtgatgccaaattcgccaaggcattacagaagcaaccgaggaaggatgggtgggaatatgatgcctcttcctcatgcagttcatacaatgaactatatgacacatccacagccagctaaagaattcatgtctttgcctcgacagtacttctcaaatgatgttatggccaacagcttggccatccatcaaagtgacccggtttcaacaatgaatgattcttttagcaactatttggcctccgctccacccgcggaacaaaagaacttgcttgggaacaggctctatcctcttgttgagaggcatcagcccgaactcgcgagcaaaatcactgggatgctcttggagcttgacaactctgaagtggtcacgttgctttgctcgtcggagatgttgtcggttaaggtcgacgagtgtgtccagctgttgcaagcaaccaagcctaaggctgaggatcatgaggcactgcacccaggattcatgctcgagcctcggcctcctagtgtaaatgccagttgatgaggttctgattgcgcggatgagcttctggatgcgcttgtgtttagggatatggtaacaagctagtcgctagctgctgcgttcgttctctcctagtttgcgaagttttggtgtttggattaatctactgagccgttattgctttctatatatagaacttaatagtaataaggactatatatattcagctagaaactttttatctggacatgttatatgaatgtatgttagaacctttattcctatccaacattaggaatagttgtcc

SEQ ID NO: 29056 - DNA, 3730 bp, Zea Mays
gagactgatacacgctcagtcgcttacggctcacccaagaccaagaaccccgggcggacgaaaagatgggcgccgatgccgcacgcacgccggcgccgcacgcgctgctgctcccttacccagcgcagggccacgtgatcccgttcatggagctggccgaccgcctcctcgaccgcggcttcgccgtcaccttcgtcaacaccgagttcaaccaccgccgcgtcgtcgtggccgccggcggcggccgggcgcccgatggccggctgcggctcgtgggtgtcgctgacgggatgggcgacggcgaggaccgcgacaacttcgtccgcctcaacgcctgcatgaaggaggccatgccgctgcggctcgacgcgctcctcgacgccgacgacgagcgcctcggcagggtcacgtgcgtcgtggtcgacgtcggcatgtcgtgggcgctggacgcggtcaagcggcgtgggctcccggccgccgcactctggcccgcgtcggcggccgtgctcgccgtcctgttcggcgccaagaagctcatacgcgatggcgtcatcgatgacgacgaatggtgcgcgtgcgtgcaggagctccagtgaagcaggagaaccactcgttccggctggccgagtcgatgccccccatggacgccgtcttcctggcgtggaactacatgggcaaccgcgacgtcgagcgcatggtcttccactacctgaccaccaccgcgtgggccgccgtggctaaggcggacgtcgtcctctgcaacaccttcgaggacctcgagccggacatcttcggcgcccactccccggcggccgcctccatcctcccgatcggcccgctgcgcacctgccagcgccggacgagcgaggcgccggccgggcacttttggcgcgccgacgacgaggcctgcgcgtccttcctggacgcgcagccccgtgggtccgtgacgtacgtggcgttcgggagcctgacggtcatgagccccgcgcagctccaggagctcgcgctggccctgctggcctccgcccgccccttcctgtgggtgttccggccggggctggcggccgagctcccgcccgcgttcacggatctcctgccacgccatgcgaggggcaaggtggtggagtgggcgccgcaggagaaagtgctcgcgcaccctgctgtcggctgcttcctgacgcattgcgggtggaactcgacgctggagggcgtccgccatggcgtgcctttgctttgctggccctacttcaccgaccagttcacgaaccaggcatacatttgtgatatctggaaggtggggttaagggtggtgcccgacggcggtgatggcattgtcgccaaggaaaggatcatggagaggttgacgagcctaatgggtgacagtggtgtgaaggaaagggtgaaaagattgaaggaattggcagagaggagcatggggcctgagggcaaatctttgaagaacatcaacgccttcatggaatccatgacgaagcgatctccggtccttgcccctcgtcacctcgtggtgggtcattggatcactgcttcctgcaacctccaaccgggcgggcgcgggccactggaccagcgacacatccggggagaagaaagctcggaggatccgaacgacgctgacggcgaggccgtaaccgcagagcagcggttgttgggatctcctgctcctggtcctggatgctggcacttgaattccagcatgaggtcaaagaagatatttggtttatcaatttcccttgtactcatcaacctagcttctatattggaacgagctgatgagaatctcctcccagctgtttacaaggaagtcagtgctgctttcgatgccggtcctactgatctggggtaccttacatttctgatgaactttctgaagtccatagcatctcccttggcaggtgttcttgctcttcactatgaccgccctgcagtgcttgcgatagggactgcgttctgggctttgtcaacgggggctgttggtgtcagccagtattttgggcaggttgcattctggagagctattaatggtgttgggcttgccattgtaataccagctcttcaatccttcattgctgatagttacaaagatggcacacgtggagcgggatttggtttgctatcacttattggttcagtaggtgggataggaggtagtgttttggcaaccatcgtggctggaggggattattatggttttccaggatggcggcttgcatttatatctgttgcatttgtgagcttcttaattggacttcttgtatacctttacactgttgatcctaggaaattatctccaagccattttggcggtggtgaggacaatgagaggtatggtcttttgattttttttttagggaaaagctcttatcttgcctattcatattttaaaagataaattacactgagttttatgtggaaggcgtagtagtattactgcatattcttcttatcagctataaaagtttcatctgagtgaaagatttatgaaagttacatttggtcagcaatggtatccttcctccacattccatctggaaggattcgtggatagcggcgagatccgtaatgaaagttcggacctttcaaatcattgtgttgcaaggcattgttggctctttaccatgggctgctgtagttttcttcaccatgtggtttgaactcattggtttcgacaacagcagctcagcggcgctgaatagctttttcgctattgggtgcgccagtggatcatttctgggtggtgtgatagcagatgtcttatctagatactatccagattctgctcgcgtcatgtgcgctcagttcagcgccttcatgggcatccctttttcatggatcctcctcacagtcattccccagtctgttgattactggtctgcctatgccgtcacactctttttaatgggaattaccataagctggtgcgctacttgtgcaaacaaccccatgttcgcagaggtagtccctcccaagcaccgcacaatgatctacgcctttgaccgcgcatttgagggttcatttggctcgcttgctgcacctgctgttggattagtgaccgaaaagatctatggctacaatgcaaaggccgtcgatctatcacatggatcagtggatggagcttatgcactctctagaggtctattgactatgatgattgtcccttttgctctgtgcctcatgttttacaccccactgtatacagtgttcaagcgtgaccgagaaaatgctagattggccagcatcaaggagcaggaacttacttgaaaagctttctaacaaggagtactgatgtagtttggattactatagtctacaacaccgccaacctggaggttttgattgaagtactttggttgatgtctaggatactcaggttttatgtttcttcagtcggatatcatttaagagtacacattttgtacacaagcgatagattgtttgatctcgtcgtatgtaactggttcagtatacattcggacctcaacctggagagtggagagaggatgttgcagctttccattgaactttcagcatatagatacagttctttctcgttttgttactatttacggtctgtaatcttgttttgaactgcctgaaccatcacgtcattccaatgatgatgacatttgcagaactcttgtaccagtttcagtttatatcattataagatcaacgcttttctgacagtgtgcatgtgttcagcacagtgaag

SEQ ID NO: 29057 - DNA, 1937 bp, Zea Mays
gcctgctttgcttgcttcgtcgagaaagattttttcactgatttggtataataatgttcctcatccaaagttagtggaatacaagaaggaccagaactgggtcaggaagtctggtaactattttgttttccctggaggtgggactcaattcaaaaatggcgtggcttcatacattaaattcattgaacagattttaccaaacattcaatggggaatccatacaagaactgtccttgatgttggatgtggtgtggccagctttggtggatatttgcttgataggaatgtcattaccatgtctgttgcacccaaagatgagcatgaagctcagatacagtttgcactggagcgtgggattccagcatttttggcagtgattggaacacaaaagcttcctttccctgataattcatttgatgtcatccactgtgcaaggtgtagggtccactggtatgctgatggtggaaaaccattgttggagctcaatagagtactcaggcctggagggtattacatttggtctgcaacacctgtctatcgcaaaaacccaagagatatagatgattggaatgcggtggtagctctgaccaaatcgatctgctggaggacagtggtaaggtctcgagatatcaataagatcggagttgttatataccaaaagccgacatcaaattcatgctcccttgagagaaaaaataatgaaccacctctgtgctctgagagtgatggatcacgtttcccttggtacattttcttgaactgtcttaaccagtggttacatcagtggtcaatagtcaaggcaattatgatttgtgcaatcttgggtcttggttactgatgcatcggcttcagaggggatttatgctatgatctttttcataccatatatgttaatcatcttgttccccttcttcaggtataaacctctcgatagttgcctctttcctgcagttccgagttcaggtgaagggaatagttgggccgtctcgtggcctgaaagacttaatattaagcactcggctacatctaacaattcttccattcagtttcctcaagaaaaaattgattctgatacaagttattggaaggaccttgtttcagaaatatatctcaacgaatttgcagttaattggtctagtgttcgcaatgttatggacatgaatgcgggttttggaggatttgcagcatcaattatcaatcgaccgttgtgggttatgaatgttgtacctgttgatcagccagatacattgcacatcattttcaacagaggtctgattggggtatatcatgactggtgtgaatcttttaacacatacccacgaacttatgatcttattcacatgagttatctcttagggccccttacgaaaaggtgccacatcattgaagttgcagctgaaattgacagaatacttagacctggtagatggtttgtgctgcaagacactatagacatgataagaaagatggaccctgttctcaggtctttgcattacaagactacaattgtcaaacatcaatttcttcttgccaccaagggtttctggcgccctggcagtataggttcttagtcatgatgattccggcttccacccaaaatggttggcaatgtgaataggctggaggaatgtgtgtagctatattggtgccaaccggtgaggagagggcatcaattaccattttaccagaactcacttgtttcccaagctcatctatctcttccccactgatatatgatgttcttcctcgaatgtattccggttatgaacattgtggagatttctgaactctgattacagctaccccgtttcccaatcctcgaacgagccgagcggagccccttctttgagctcattttttcagcgagccgagtcggctcgttccagctcgcgagccttgcaaaattgatcaatttatagaataataatgaatattag

SEQ ID NO: 29058 - DNA, 3275 bp, Zea Mays
cccttgaggctaggaaagataattgccttgtttgctttgttctaactgtatggagaacttgattttcggttcccggtgggagctccgttacatggcattcaagcattcctaagaactaatcagctcaaggtttatgataaagcaagaaatgcagttgctcttgcccttagtccagttgttcgggctctggttgatcctgatggtgcattgcagcaagtgcgggacttggatgatgtaagtttcagtgattggttcatgtccaaagggggtactcgggagagtatcacaagaatgtgggatcctgttgcttacgctttgggtttcattgactgtgataatatcagtgcacgttgcatgcttactattttcaccttgtttgccacaaagacagaggcatccctgttacgcatgctaaagggttcacctgatgtttacttaagtggcccaataaagaagtatataacagacaggggtggtaggtttcacttaaggtggggatgcagagaggttctctatgagaaatcacctgatggagagacctatgttaaaggccttctcctcaccaaggctacaagtagagagataatcaaagctgatgcatacgtcgcagcctgtgatgttccgggtatcaaaagattacttccatcagaatggagggaatgggaaatgtttgacaatatctacaagttagatggtgtccctgttgtcactgtccagctccgctacaatggatgggtcactgaacttcaagatttggagaaatcaagacaactgcaaagggcggttgggttggataaccttttgtacacggcggatgcagacttttcctgtttttcggaccttgctctctcatctcctgctgattactacattgaagggcaaggttccctgatccaagctgtgctgactcctggagatccatacatgccattgccaaacgaggagatcattagtaaggttcaaaagcaggttgtagaactgttcccatcttcccggggcttggaagttacatggtccagtgtggtaaagatcggacaatcgctgtaccgtgaggctcctggaaacgacccattcaggcctgatcagaagacgcccgttaaaaacttcttcctctctggatcttacacgaaacaggactacattgacagcatggaaggagcaactctctccggcaggcgaacgtcggcctacatctgcggtgccggggaggagctgctggccctccgaaagaagctactcatcgacgacggcgagaaggcgctggggaacgttcaagtcctgcaggctagctgaacaacccctcctgcactgcagagaagcttggatctttccaaccacacatacatgctggaatggacaaaccaaccaaccattggcttttctcgcttcagggtgctggcgattcccgcagcgacctcctgtgtatcgtatccaatttgagcattagatctgccccccctgcaggcgtttctttcctatccctgatccgagaagcagggtgtagtctaggtggctggcatacgggattacatcaggcagtgtgtaagttcagctggaactcgattggtaattgggatggatgattgatgatatatatatagcacacactgttcttgcgtcttgcaagaaaatatagcaagcgatgatccggcgacacttgctgggagactgtaccaacgatcttacttcattttggccattgtgttttttttttttttacaaaatagcagcatcctgtatcaactcgagctctcgtgctaaaccttttcgtttcatatgaaaaatatttcgttatcgttaggcttaggccatgcgcatttgagctatggtttatggaaagcttgccggccttgacgctggaaggagaaaccagtcagtctccggcgctgcccctcccgccgtggccggcgacgggtggaggcagtatgtggagcgagagacagtgggcagccggagccggcgtgtccctctgaaggcctcacgacctgccggcttgtgatggccacgagcgcgtgcgcgtgagcgtcagcgtccgacctccagtggtccgtgtttccccgagcaagagcgaacagcagtttggcggcggctgatggcaccaagcgcagccgccggaccgccgtccctggcccggccatcgacatcgagtagcagccacctgcggcgcgccggcagcgccctccagcccgtctccgtcccgcgcgccttggtgcaggggcggaggcgcctcacgggcgccgtccgagccgcgccggacgcgccgccggtggtcagggctgccgtcagcgccgtcaccgagctcctcagagccctctccccgaacaaggcgctcaggggcgctgctacccagcagcagcagggcgaggagccggatccggacccgacctgcggcagcgtcgaggacgtgctcgccgtgctccgagacgattaccggcgcgcctacttcctcaccggggatttcactccgggaatatacaccgaagactgcttgttcgaggacccgacgatcaagttccgcggactctccaggtactcccagaacctgggtctgctggtgcccttcttcgacagcccttcgctcgagctagagaacattgagaagggttcgagggccgaaacgaagttcgtcaaggcgacatggaaactaaggacgtatctgaggcttccatggaggccgctggtcgcgatcggagggagcacgacgtatgatctggatggagatttcaaggttactcggcactccgagagctgggacgtctctgcgcttcaggccatcgctcagatcttcgtctcggccccggaggagaagctggaaggcagctgaggctgaggcagagcatgcaatgtacagcgccacgcagacgcaggatcagtgatctgaatccgtgatgagcaggtgtccaaagccgtctgtcagagctccgctggtcttctctgtgcaaacaaactgtaccctctctgttccaggttataaacattcgaataattttgctacttacctagatatatgttacgtatatagatatatagtaaagggcggttattatgacacaaatttgtagggtgtaggtacaggttttgaatttgacatttgatgaacactatataaaaaccgactctcctatattccaaacgaacatcctcttttgaatcagatagacccatcggacccatccttctcgccacgagccacactcttctgtgcttaccaaaatgggctggccggttcctggacctggcccgtcttgtgccgatcctcctgaagcttctccggc

SEQ ID NO: 29059 - DNA, 1154 bp, Zea Mays
agcatttctgacagtatctggacagctcaatggtgaaacatatgcttcagctctatctgatatttacacatttggtccaacgtttagggctgaaaattcaaacactgcaaggcatctggctgaattttggatgattgaacctgagcttgcctttgcggatctaaatgatgacatggcttgtgcaactgcatatctccagtatgtagtaaagtatattctagagaactgcaaagaggatatggatttcttcaatacatgggttgagaaaggcatcatagatcgattaaatgatgtagtagagaagaactttgttcacttgtcttacactgatgctgtcgagctactacttgggtccaagaagaaatttgagtttccggtaaagtggggtttggatcttcaaagtgagcacgagcgatatatcacagaagttgcctttgatgggcgccctgtaataatcagagattacccaaaggaaatcaaagctttctatatgagagaaaatgatgatgggaagacagttgctgcaatggatttgttggttcctcgggttggtgagcttattgggggaagccagagggaagagcgtcttgattaccttgaagcccgactagacgagcaaaatctgaacaaggagagctactggtggtatctggacctacggcgatatggatcagttccccacgccggtttcggtcttggatttgagcggcttgtacagtttgctactggaatagacaacatcagagacgccatcccatttccccgagttcctggctcagccgagttttaggcttcctttcgaatgtaggaattttatggggatggtatatgaatttcacaggaaatggttcaaaaacacatgaattatcttttaatccaaaggaggccttagcgccccgaaagtgttgtcatttgtttcatcattgtacagagttgagctgagactcgtggttaatcgagccaaccagtgttgtggcatgcttctccaaatatatatccagcaggtgctcctgactcactccatcttgcttgcagtcgttgacgaaggcttgcttcactcacccgacgatcctaaaccatgctatctccagcagtcttactatctcatcccctaaaacagtgtaatctacatattttgtgagtctatatatacg

SEQ ID NO: 29060 - DNA, 524 bp, Zea Mays
cgttgtttctcacttcaaagctgatattcatgaggccttatcgtctgaaagaagaaatggtcatccaaagatcatccaccgcgacattaaggcatctaacattcttcttgacttcaaatttgaagctaaggtcgctgactttggacttgcaaagtgcactactgataataacacccatgtttcgacaagagtaatgggcacctttgggtatttggcacctgagtatgcaacatctggcaagctcacagaaaaatccgatgtattttctttcggagtcatgcttcttgagcttattactgggcagcgaccaattgacacaacccaattagcaatgcttgctataagcacatatgtacttccatttgcatgttgtataatactaataccaattgcaaaattatagttatttttctacccttgttagttaataagcatatttctggtcaataggttgtattcttattcttgtaaccgtgttaattaatgttatggacttgtagtctcgtattaccttgtgaatatat

SEQ ID NO: 29061 - DNA, 870 bp, Zea Mays
ctgtttgccgttttctccctttacacgctcgattccccccgccgtttccacgggggccaggtgcctgcattactgggtccgggcctagcgtcagcgcaaccgaacacgccggcgaccgctgccgcccttctcccagctgcccaggtcttcgtcgggccctttgcctgcggcgtcggcgacgagcgcctgccacaccaggaatcccgttaagtttatttatgctcaccaatttaagggcagaacttacggacctcaagctcttggttactcctgatcttctctaggcgactaggcacaattgccctctggcaaaatgccatcagtttatctttacatccctaacattatcgggtattttaggatcatcataaatttcattgcatttgcggtttgctattccaacaaggctctctttgctatcctgtacttcatcagctttgtccttgatggtgtggatggttggtttgcaaggaagttcaatcaagcatcaacctttggagctgtgttagacatggttacagatagggttagcactgcttgtttgttggcccttctctcccagttttacagacctggtttagtcttcttgatattgcttggattggatattacgagccactggtttcaaatgtacaggtcagtttcctctaccattttgttcagtttttgcaagttcccagtttgttttctagtcagcacctaatcctgttctttaggtagtcaaggcaacagaattaatctgttagcaattacattttcaataattgcctgatggtttcattatgcatgcgttctattcaagagtttctcactttcaattattttttacttatttattagtccttcaattccaaattataagtcttcgtg

SEQ ID NO: 29062 - DNA, 2542 bp, Zea Mays
ggaaattttcatgcacaaccataacaacgactacacctttattacaattgtgagttgtattgtgaaatgcttgacgaagttgatgaggcggcaattgaaaaggaagataatggaaagatggaggacatcgattgcaatcatgacatccggattcatgaagatttgggtcatgtatgccgtgtgtgtggtatgattgtgagaagagctgattcaataattgattatcagtggaaaaaggcttcaaggagaagaacgaatggctatggaggacattcaaaagatgctgatgagatagattgtggtactgttaaactgtctgaagatttcatagtcgcagatattgctattcatcctagacatgctcggataatgaaaccacatcagttggaaggtttcaactttttggttaagaatttgattggagacaagcctggaggttgcattctagctcatgccccaggtacagggaaaacatttatgcttataagcttcattcagagcttcatggcaaggtatccatctgcaaggcctcttgttgtgctgcccaaagggattctaggtatatggaagacagaaattaaacgatggcaagtgcaggatataccagtgtacgatttttactctgtcaaggctgaaaaaagagtagaacagttgcaaatcctcaaatcttgggaagacaagatgagtatactatttcttggatacaagcagttctccacaatcgtcactgatgatgggggcagcaatgtcacagctgcatgtcgagacaggctgcttaaggttcccaaccttctgatacttgacgaaggacatacacctagaaatcgggagactaatgtactcgaatcactaaatagagtggaaacaccacgcaaagtggttctttcgggtacacttttccagaatcatgttgaagaagtgtttaatatcttgaatctcgttcgcccaaagtttctcaggatggaatcatcccgtcctactgccagacgtataatgagtcaagttgaaatagttggtagaagttcgaaagggcttgctgatggcgcattcactaaggcagttgaagaaaccttattgaatgatgagaacttcaagagaaaagctcatgttattagaggtcttagagaactaacaaaggatgttcttcactattataagggtgatatcttagatgaactacctggcttagtagacttcagtgtgtttttgaagctcacacccaaacagaaagacattatttataagttggaagcacatgatcggttcaaaagaaatgcagtagggagtgcactgtacattcatccatgtctttcagaactttcagaggttaatgctgagcatagggctaacacctttagagatgatttagttgatagtctggtagattctatcactgtgagagatggcgtgaaggccaattttttcatgaatatcctgtcacttgctaattctgcaggagagaaagtgctagctttcagtcaatatatatctcccatgattttctttgaaaggctgctggtgaagaagaaaggctggcatgtggggaaagagatctttatgatctctggtgatactagccaagaagacagagaattggcaacggaccattttaacaactctgctgacgcaaaaattatgtttggttctatcaaggcatgtggggagggtatctccctcgttggtgcgtcgagagttgtcattctggacgtacacctgaacccatctgtcacccgtcaagcgattgggcgtgcattcaggcccggacagcagaagaaggtgtttgtgtacaggcttgtagctgccgattctgacgaggtaaaggtccatgagacagcattcaagaaagaagtcataccgaagctgtggttcgaatggagcgagcactgtactacggaagacttcaaacttggtcaaattgatattgatgactctggtgacgaactgttggatactaaagcaatccgcaaggatatcaaagcgctgtatagaaggtaggtaacaagctttgtggccactggacaccatgtacatattgcagtgctgaccgtcgagctgatccttaaactgaagaaagagggtgttgcggtggctacattgcgcggtcattcccagctatatccgtggaatggcggcttcttttgttcgtagtatgtgccaacttggggcagcagtcagctgatccccagacacatttctagactcttttttaggctcaagtttctgagaattaacctgctatggcgtttagccttaagtaaatatttcgttcgcaacaataataacccagtaaacctaatttgttcttgtgcgtttgtggtggtggttcttgaaatttacctggcgccttcttcctgggctagatgctatgcaggtgtcacaggttggtttgttggcatgtagaatcgggaaatgctaatctcgaaagctcgtagtttccttttcccccccgggtgacatgtttattcacctcttactagttaccacgtccatttccaactataagatatgatactttggcttttgaagatacattacttttatt

SEQ ID NO: 29063 - DNA, 1740 bp, Zea Mays
aactgggaaagatgctcctccccactctccgtcctgctccggcaagaggcggcacaccgcgcaaggatgccacctagggctgctccggcgctgcgggtgctcccgctcgcgctcgcagcggccatcttctcggggctcaccgccatcctcttctacctctccggcgtctcctcctcacatagcggctctcggctctcggaggcggacctggcggcgctcgccgcgctgcggggtggcttcagcaagtgcgtggatgcaaatgggctaggactgaaagccgtgaccggggaggactactgtcgtgttgtgatacaatacccaagtgacacagtttctaagtggagagatccaatcacccataaggctgaaagtctgtcgtttgagttcaatctgtgtgaagctgtggcctcatgggagcacgtccggaacagtacaacagtactcacaaaggagtacattgatgctttgccaaatggctgggaggaatatgcatggagaagaatcaacaaaggaatccttctgaataagtgccagaacagaagcctctgcatggaaaagctctcactagttctacctgagacatcaccatacgttcctcgccactttggtcgatgtgctgttgttgggaactcaggtgatcttctcaaaactaaatttggggatgaaattgattcttatgatgctgtcttcagagaaaatggtgcacccacccagaattacactgaatatgttggtagaaagagtacatttcgccttctgaatagaggatccgcaaaggcactagataaagttgttgagttagatgaaacaaaaaaagaggcactgatcgttaagacgacaatacatgatatcatgaaccaaatgattcgggaacttccaataaccaatccagtatacctcatgctaggcacatcatttggttcctcagctaaaggaaccgggcttaaagctcttgaatttgccctctccatctgtgacagtgttgatatgtatggcttcaccgtagacccaggttacaaggaatggacaaggtacttctcagagctggtgaaaatccattcaccgatgcgaggagatcctggcaggacagtgaggtggctgcctaccaaggctaccatcgaggctgctagagttgcttccgagaagttgttgaagagacctggtgctggaagtgatgatcctctggggacttgcaccatgataaagaagcgcaggaaagggaaggcgccaaacagatctggtctacgagatgctgccatgaagcacctcgaggacatgaaaggtgccgctaggtatcccttggagcggaatgcagggggtggttacctctgcatgatcaatgatagataggaccgcggctgattatggcatcagttgccccctcccccctcccctccacttgagtcgaagaaaggaatgcagtttgagggaacgaaaaggccgattctttgatttatgcagctggtgtacaacgtttgagtgtagagaaagttaggtgtaatgttttgagtgtagagaaagttatatgttgtggatggatacaaatggtcaaattgtagcacttttggtgcttataatactaatttccgctcgctctgttgggccacgaaaattagaccaactaggctgatcatagttgacagaaaatagcagtgctaatttttatgggctatttatagctgatggaaattagtctagctaatgggccgttgatggaaatttgataatttctgtgcatag

SEQ ID NO: 29064 - DNA, 190 bp, Zea Mays
cgacgtcccattacaacagcccgtcgtaaaactctagtgcttgtcattgatatccagtcgtctccaacctttgtcttgccgtcgtcgttcggtcaccccgtctcgatgtcggtccgtacgtgatgcctctgagttggaatcgcgctgacaaaagaatccccaagaaagatgtccaaagatttgatggtgg

SEQ ID NO: 29065 - DNA, 4089 bp, Zea Mays
gggatgtgaaactgcaaattaatagttccaggacttacatgcatctctggacaagctcaaagatgctgatgttctctacccactctggaagaattaaaatgtttcctgaaagaaataacaccagaggacaattgggctcctctcaagagaatgcccgcaagatctatccttaaaaggacaatcagtcaaaggaagatcaaaagtaatgctacattaagcaccatcaatgaagaaaacatagatgatgctgccaccatggattctgttgcatcaggaaagaggattataaactcgaagtttgcatcagagaactcactggaagttagtggtggaacagaaattactttggatgctttggctgcttacctaaaatatcttgaaggcacaggaaatgctagttggcaagagttgcatgataaagtgcgtttagctgaaaccagatatggtgcttcattctacatcttgtttggtcctgcaattcaacttggagtcatatctaggaggaaagcttacactgagactatccaatatgaaaaagatcgcaatgcaggttttctatcaccatttgggtactcaacacctacagtaacatcagcagtagatgctatatgttcaatggagtggtattggctcttggcatcaaaatcccaagtatgcatcgaggggaaatattctataagaatttggagatggaagggttatcttgtacagtacacctttcttggcaacgaaggtccacctgttcttcttgtgcatggttttggagctttcctggagcattttcgtgacaatatagacaagattgctgctacgggccaccgagtttgggcaattactcttgttggctttgggaaatcagagaaaccaaatgtcaactattcagaacttttctggtctgaactactgagggattttattgttgaaattgtgagggagcctgttcatcttcttggcaactctattggaggttatctctgtgctattgctgctggtttatggccttctcttgcaaagtctctggttcttttaaactcagctggttcagttgttccaaattactccttcatcccactgagtgaagaaagacgaacatcatggatttccaggttgcaggcacagctccttttgctcttcttgaggtcaagggcagaaggcattcttaaagaatattatcctacaagaactgaacgggtggacaagccacttctggaccagattgtaagagcttcatatgatcctggtgctgcaaaagtccttgagagtgtattcaacttcaatctttcaattcctcttaacttcttatttgattcttttggagggaagatattagttatccagggtatgaaagacccccttacaaaatctgaggcatttgtcaccatgctccgagaacattgcagcaaggttcaaatcagagagttaaatgcaggtcatgctccacatgatgaagttccagatgaagtaaataccatactatgtaaatgggtggagcagattgaagttaagccagccctggagaagaccaaggcaatataggtaacatttagaattatggacaccctatccattggttgattgtttaacatgatcttcaggagcaccttggtacattttcagtgacctaccaaaacttgtgtgattaaagcattgtgaattgttagccctatacaaattgtgattaaagtattgtgaattgttagctatatacaaaacttggtacattttctttcagctgatgttgagatgaacatacatgaaaccaaaaggacttttttttgggggtggggggtgggctagcatttgagcatgtttctgagtaagtttgcagagccgagatgcattctaagttgcacataacatgcctggttctgcttcttagggcttgtttagatagagggactagagctgatccctgttttatgggatgaaaagattgggtcagatccctgccaattcagacaagccctaaatgttgcttttgattaaaggctgaatctgaccggaaataaaccttggaccctcaacgacatataatctaaaatcacaatagttgcgcttgtgatcccattgtgcaagtaatgtttaatcatgctacttctatacttgcatccactgtactccactcctgcttgttttattgagacagcagcgtcacacaattattttttatctcacgccaactggtgctttatcatgtcatttatgtaattatgtgcaatcagcaatttcatgagagaagccaattgtaatcaccttgttgaactattctccagcaaggtgagctgctggaacttttagtgaaggatttgaactggatgtgttagtattcttttgttatagtgcagccgtgaccctctagagcttgatctgggttctaagtttaaacgtaggatcagagcagacccggacgcctggtttcaatatcagcacatgccatcataggctcacgacgacgaagaggtaaggcggttatttacgccgatattttttgagctgtcagtcatcacagtccctagtgcggctgtgttaatcagaagacactggattatatacgtatagattatataatagagagaccaagttcggtgtcgtagtttgtcaaatgctcccctttctgcttgcgtattgtaccccttcttttccgtactgaacaattcgtgctcggttgttcagtatggaacacacttgtcgacactggagcagggtttcgtttcatcatcctgcgtttgcattacatcagttgtgcagttccagttccatttccacgccaatctactaatcgctggtgcttccatcctttcgcggtgccatactgtcatgaaactgcagctgtcactttggccaccttcccccagcaaaaagaacgcgagcattacctctagggccaggcggacagcgaccactcagaaaacaaatcagcagtgcttccaccagtcatgagccctggtgaccatccgagaaatctttgggcgcgcatcagtgaggccataaaacaaaagcgctgattgggatcgcccaaccaacgcaccttatcagctttccccctctctcttggtttcaccaaatctgacggtgacgcgcccggtgcatggcctccggaagatgtcaagttgcagtcggtccggtcactcgtggatgttacaagctgctgctcatgggccaccagttgctgcactcttgctgtctgctttcaagccaagtgctctctccagtctcctcccttgtgctggatttcttggcgagttcttacgctagtgcctaggcgtagcgacgtgcgttgcgcaggtcgggcgacagaatcggggccgggctgtgaaacttctggagcttttccggtaggacaggagtgtaggacctctttcgaacaagctacgttttagaatttaaacacaaaatatatgttccatccgtcctaaaaaactggtctgtagtttataacaaaaatactatcaacaggtatggttatatataggaatatgtgaaaggttattttgaggaattcaataactcttatttaatatcattaatatttatacatttttaatagaaaatggtcaaaatgaagattgtttgacctatcatcggagtgagaagtataccatttttaggacggaaaagtatacactaagattgtctctagcggtttctctaaagggccccttgtcctatatctggagaaaattcttctcctctatacgctctagcagtgtcttctagatatagatgatgtttctctatcctctctctatatagattctctcttctatctacttattttatagcaaaactaaactatttataagatatttgagtgcatgataaatacatacatacataaatctagaacaaaatatgtttttaatattatttaacgtaaagaggacggaatatgaaggacgctggggagaaataagacatgagggaatgtttttagaggagactgtaaatgagatatatagatgaggaatatagatgatatggttggagatagtacaagactgtaaaattgctatgattttgacattggaactgttaatatattaaaccatttctatgtgaaactcttaaattccaaatagtcgctacacg

SEQ ID NO: 29066 - DNA, 6329 bp, Zea Mays
ccaccgcaatgctaagtaccaaccgaaggaagagcaacagccctttgtccctcccagttcttagtctccatatcgcagatccctcagcgtcacttgtaggtgtcgaagatgtgttcgtgttgccggatccagtggcgttgttcagcagcttactgcatgatgacgaccagcattagcacagcttaagtgtggtgtgatatatgacatgcagcatctggtttaacatttcatattcagatatccttacaaatcactaaagccttgttcggttattccaattacatatggattggatgggattagaaaaaaattaaatagaagcttaatttgtttaggatttaaacacatccaatccgactcaatccacatgtactaagagctaaccgaacaagctctaaggggtgtttagtttttgggactaatttttagtccctctattttattatattttagtccctaaattgttaaatacggaaactaaaatgtatttaccaatttagagactaaaatagaataaaatagagggactaaaaattagtctctacaaatcaaacatcccctaaaacagaccttatggttatggtccatgatacaatttttctgaaacaggaatgtccactgcaaggtaatcttagctgcgacatatatcttttatctacaataatagatggtctgtatggttcctttctatgtacgtttctttgagtgtgtgggtggggatccccaccaaatttattgatgttggagcttcttgcaagctcataaaaaacaaaggtttaggagattttgttacaaaaggtggttgggtttgcacagcatacctagattgtaagcaaatgtaagaaatgaatgatttaccaccactagtaaacagtttatctttatttgccacagtactattatcttttacacttaagaagcataggcaataatatataaacaggacagtatcatggatatcacaaaggagaagtttcagcagtttaccttccaggaaataaacagctgtcatgacctgcgcagcaaaagatatccatttgttaggaaagcagagtggatgttggagatataaactttttaaatgatatctgcaaaagattgacgcgaagttcgtgtacggtccaacatgcgaacataaaaaaatagtccgacaggtttatgggcctcgaacacagagacgcacagcaaaatcctagaggtagaggaatatgattttccaaagccactaagaaaaaaaagctgggcaaaaaaaattcaaaataacctacgcctgtagattatcaaacgggtacaatattgccgttcacatggtgctcagagacctcagggccactaaaaggaacgaccgtcgttagtggatcgtacatgactatacaacggagcccatgtaaattctgtagcatggggaaactttggcctcccaccacagaaacatcataccatgttgcaaagtaaaccgagagctttgccagcaggtctgggaaaccatgcctgaagaacgggaagttgttttctgatgataaaaaagaactcacggtccaaaacgcatgaacaggttctggtatttcagacaaaaacattagaacacgatctaaatggcactaggtactgaaaaaactgcagaaggcccaaatgagcatcctggaccactcagattatattcagaggtttccacccagtgttgcctgagcacataaccaccaaacgcgtacagcccagagtcagtgttcgaccgtcattcatccacattagggtacccttggagcaaggctacgtgctctggtactctagagcagtctgaggaaaacagcagatcgagaatcagccttccgtaggcatgtgtccagataattataatactgttctcataccagacaatgctgcatgctcccagcacttcctccagttggccactagcatgggtcacactttgtcttgatcccacattgcatccagatccaagagattccagtctgcactctcctttttccgttcccccccccccttgccattttctctctctatccctactattattaagaacggaaggtggacacttggtgctaccacggcttcaccccacgctgacacactgggtccgccctacacacggcttccaccccacgctgacacactgggcccgccccacacgcccctcgactcagcgtcgccctgttggccccaacgctcatcacgctctcatctactgccctatgtacccgagcgcccgtgcaaccaccagtccaccaccagtccacacataccttagtgtttagaaataaacaataattatataaaaaatagtgcaaagcgatcatttgaacatacgtcccctactctagaaatttggagctaaccaccagactacatatatcttagtgtttagaaataaacaataattatatttgaataaacatctcaatacctatttatataatatataaaaaccgtagtaaaagcacaggcaactggatagtatatatatatatgtaagatagaagcaatggactaatggtatatatagaccttgtgacacatggtagtgttgtgattcatatgccaagaatgcctaacctcctgcaacaacaacaaaaattcctaacttcctgaccacatgctctcagctctgtggtggccaatagcccattgcattgcagataagactagtgtccacaggacaaagaccaatcccccccatcaattactgttagtcttgatttgtttaaaacacgaacagtaatcaaacatactaggtatggtaaaaatgtggcaactggcaaccatccgaacgtgtcctagatctccagagtggccaccattcgctacacaacaatgcccagttacactcggctgtatttgaaagctggcgaacgcaaacttgtaccgatgcagcagagcagcatccgaaaggaaatgatgggcaagcagaaagatctcccatcacggttcacctttagcctttcgagcacgccgcagccacatgagccatgagccatgattgaactttgccgaaagatgagggggaaaacaatttgtactcaagtttttttcccgattccggtgtgaatgagaaggaagcaggaaaaaacaacgcagccaaattatttgtgtctgccaaaaatccataggaaaagaggagagccattcattcccgcgtgctagacatggtgaaagtgatgcgaggcgtgcaatcggacggcaatgtgccacccttggggccttggcatgcaggacaggacaggaagctcacatgtgaaaaggagacgactgattcttttttatacagtacagccgtggcgccaaagtatatgtactagcaaacgatgaggaatcgtccaggcctggcaccggcaagagcaccagacaaatctacagccagatccagctcggctccgtcaccgtagtgcgctgcgcgtgcttctctcgtcctctcctacctacgtgaccaaaccaaaagctttgctacatgtatgttgtgtttggtttgtggagtcactctatgcttcatgaggtgatgcatcataagtccattccatcaattttggtggaatcaacccactcctcatgtatatactaattattagcttatgaggaatgtggtggtgatggatcaacccattctattccacaaaccaaataaaaaaagtgaggagtgagaagaagatggatcacttcattcctcaaaccaaacacactcgtaatggaaaccaccaaccaaggtgatggactgatggcaaggtagtcactgccagagtgccagtgagaaatgcttggacctggatggctggatagtagtagtagtagattggaatcggatggtccgattccgacgccatggattttctttctctctctgcgtcagatttctttgtacagatatgatagatcaatgtacaggaaacaaatcatctgatttgtttgtcatcccatctatcgagtgatcagcaaccaccaacgggttcccgtacctagctccatattctccctccctccctcccgcaagaccccaaaagcagcagctcacctacagggaaaagcaaacatttctcctacccatcgacaactgttccattcaactagctagcccatagtgcgctagcgctctcaaaaccagaggacaaacccaacaactttccatgccccgcccccgcgggcgttcaatactgaacggtgaatgagcgccaccacctgctttttcctgggcgtgacaatagcgtcgctcctactgctcgaacccacaccaaaacgtacagcagaaaaaaaggcgagatgacactcactcggatccacggtggtgaccatgccggcgccctggaagtagcacgagccggcggcgcggccctgggactggtagtaggcgtcgaacgcgaacgacgcgtggctgcgcacgtcgtcgggctggtagcacgcctgcccgggctgtatcgccgtgcagtcggcgcgcccgggcccgcacgcccagtccatggccgcctgcaccgccttctggtccgcgtcgtcggcggccacgcagaaggtccggtccgtcgtgtcgttccccaggaacccgtccgcgccggacacgtgcaggaggtacaccggggtgccgttcccgtagaacaggccccagttcgcctccgacacggggcccgcccggaggtcctcgttgaagagctcgtagatgtaggcgctggactgcgcgccggcgccgggcgccatgggcgtgccggccttctcctccagcacgtgcttgatcaggttcgagttgtacgcgtccgcgttgtcccttcccgcgtacggctccgcgcgccggtccccgtacgacggccaccccgtctccgtcaccaggatcggcacgcccgcgccgcccgtcgcgttcaggttccgcacggccacgcgcaccgcgtccagcatcgcgtcgaacacgttcgtgtaccggagcagcgtgttcgggtccaccatctccatcgacggcggcagcggccggaacagcgcgttgtccagcgggatcacgcccttgctctgcatcagcgagtagtaggggtacaggttcagcatcagcggcgccgacgtgttggcgaggtgcgccagcagcggcgccacgaacgacttgtccagggactggttgaagaaggcctgcgacggcgggaacgggtccaccaccacggagaagggcagcggcgtcgacaccgggatggacgagaggttggcggcggcgagcgcggccgccagggaccggatggccgggagcagcacgggcagcgccgacgggagcgcggtcgggacctcgtccccgacggcgatggcggagacgacgttcggggtgctggagttcacgcccgcgaaggggaccacgcggcgggacacccaggaggcggccgtcgccggggaggaccccagcgccaggagctcgtcgttggggacccccacgatggcacgcacgccggaggccgctagcgccgacagcagccgcgggtccgcgtcgtacagccgcacgcgggtgatgcgctgcgcgcgcaggaacgacgccaggtccgacggcgacagcaggttcgtcacctgcgtgccgatcgtcacgcccacgtacggctcgccggaccccgccgccgacaccagcaccgccgatgggcctgctgcgcgaagagagatgaggtggagcaagaggaggaaggggaagagtagcaagcagctgccactgacactccctcctccgctcctgctccccattgggatttggtagtgtgccctgctgcgcctgctcctgctcgtgccggcctccgggactgcttctttcgtccaagactgcttcttttgatgcgcactcgatcgctttctccaggaatctccttccctcccacccccaagattgctgatttctgctgcgtggcgttggcgtgggagtgggagcgtgcgtgcttgccgcttggtgctggatggatggagctggtcctggagtgatgtcggcgaggttggtgaggtgtcggggcaaaagatgcgttgggattgggggattttccggggctcggttgggagtgggtgaattactgactctttgtttcttggttattggtgccttctagggttcaaggttcattagctgattagtgtcgactcctcactccgctgctattcggtggggacacagggtgggggagaaagcagtgtgccagagagtcagcaacctggacaatgggcactgaaatatgcacaagtcatgtcaatggtggacccccccctttctggccaccttgctaaacccttgtttttccccagacagttttagtgctgtaataacgatccaaaaatgttttaggcaatattcgcgcccgttgagcttaaactacattttt

SEQ ID NO: 29067 - DNA, 683 bp, Zea Mays
ccacggttctcgctcggcttcatatccggactagccgtcgcacacggctgtcgtatccccaagctctgcactctggcgccgcctcctctagccctgcccgcttgtgccgacggcccggcgccacctcccgcaactccacacggcggtaaccccaactctatccgctaacatctcagcacggtgaacccgccactcgcagccctcccgtctcagatccagtttgattagttggttatttgtgcagatcctacagtttgattagttagttatttgtgcagatcctaaccaactgtgatcgctgctgctgcggcttgatcagagcgcgttctctggtgacatacctctggagattgggcggctgcagcagctctaaggctgaccttaacagcagcaagtttgaggacaactacagttagccaatatgttttctgtctatgtcctcgcgaagtactagagcagtagctacataccgtggtttgtccatatcctgttgttagatgatcaagggtgattagatacatgttctggaaccaatgttcagatgacaaattgcaaactaaacacccttttgttctctatctttttttttttgcaattgcaatgcgtgtaaagtacattatcaatgtcagccccaggcatatcaatcgtcctcatgcccggccgtgtcctagcgtggaaaaatt

SEQ ID NO: 29068 - DNA, 3052 bp, Zea Mays
caaaccaaacaaaaaaaaaaaagaaagaaaataaaaagagagagagagacagagatggcttgcaccttgaaactccaaaacccaccatgaaaaaagaccttctctggcccctgaccctgagagagagttgctgttgctgccattcggtcggtgcctccttttcggtacgccgctggtatgtggtatcactggtatggttgttctcccatcccaaggcgacgagggaataggaagctagaaagttcgtctgcagtctgcacctttgcccatggcctaggcgcctagctcaggccgtagctcagcgtccgtccatgggccagggagtctgaaaccttgcttgccttgcctgcccgctcctctcacttctctctctcctcctcgctcgtgtccccggcgttctgctggtccctggggactggagagcgaaggtctgtctcctttgcgcctgctctgcttcttcaatgctgggcgtcggtggcttgggctcgggctcgggcatggaaccaggtaccagctgcggtgctctgctcagagagcttcagcaaatctgggcagaagtaggggaaagtgagggcgagaagaacaaggcgttgctggacatcgaaagagagtgcctggaagtctaccgcaggaaggtggacgatgccaatcggactagggtccagctgcaccagtcagtggctgccaaagaagctgaggttgcatctctgatggcaacccttggggagcacaagctgtacttgaagaaagacaagggcgttgtaccactcaaggaacaacttgccaccgtcgccccagtactggagagcttgaaatgcaagaaagaggaaaggatcaaacagttctctaatattaggtcacagattgagaagatccgctttgagctaagtgaatataatgatcagggtgatgacccgagcagtcttgctgctgaggaacacgatttgtcgatgaggaagcttaatagttaccaaacacagcttcgtgcccttcagaaagataagtctgagcgcctccgcaaggttctggagtatataaatgaagtgcattccttatgtggagtccttggaattgattttggaagtactgtacacgaagttcatcccagtttgcatcagaatggtgttgagcagtccagaaatatcagtaacagcacactggagggccttgctagtacaatttataagctaaaagcggaacgaaagtctagaatccacaaggcgagagagatcatggagtcgttgtgtcaactttggaaactcatggactctcctgaagaagaaaagagacagtttagtaacgtaatgagcagcctcatattacctgaggagggaatcacgtcacctggagttctctccgaggaaacaatcgagaagatggaatttgaggtcgagaggttaacaagactaaagaccagcagactgaaggaaatcgtcatgaaaaggagggcagagttagaagcgatctgccagaatgcacacatagaacctgatgtcagcacggcccctgaacagactgatgctttgatcgattctggcctcatcgacccttctgagctcctggcgaatattgagtcacaaatattaaaagcgaaagaagagtctcttagtcggaaagatataatggacaggataaatagatggattgctgcttgcgatgaagaggcttggcttgaagaatataaccaggacccaaagaggtacagtgctggaaggggtgctcatataaaccttaaacgggcagaaaaggcacggattttggttagaaaaatcccaagtatggtggacgacttgataaaccgaacctttgcttgggaaaacgcaagaaataaaccctttctctatgatgggggacgcctaatatctgtactagaagagtacaggcttagccggcatcagaaagaagaggaaaatcgacggtaccgggaccagaagaagctggagagcatcctacttgcagagaaagaagcgatcttcggatctagaccaagcccaaggaagacgagcagcttaagtaggaaggcaaatgggtaccggccaaatgggaacaccaacggactcaagactccaactcctcgccgattgtctctcggcagtgctactcctgagcttttgacgcccagatcgtactctggccataatagatactttggcgatgtgaggcgtctatcgacttcccatctgaacttcggtgatgattcgctgtcaacgtttacatccatcagtggctctgaaccagaatccccctctattggatgaacaccgtactgctggatgactggatggtcagtattgcgtattgtaaatgggcaccatgttaccaagttcttgcactagcatgtacattcctgatgtcatatatttagctcatattggagtactaagtattggacgggttgacttggtttgggttgggtgtggagttgaattgtttcaagttgatggctttgtagattgacaattaggcggaaagatgtaggggagcgatctggatttgggcagtcagctgtaacatatcataacttatgtgtttggtttgtgtgtgcaaccttgtgtacaggtgcaatgaaaaatctgtgtgcagaatctactacttcaatagtactggtgttcctcaatatgcaccatgtgacgatgccggcttgagcttatcttgcgaaccagcacactttgtcttctgtgagcttcagactgcaagcaatggcatcaggtccacatgatgactccttccaaacatagtggcacaaggcgacacgaagggggctcggctccctgatcctcctagcgtggaccctgtggaaacatagaaaccagtatgcgttgtgatggagtgacaccatcggtctcggtagcgctccaggaaccaggagccaagcgagcaggcacattgctgtactttggcgggcggcaagaacggatcgaggacaaaataggagtaggagtacaaagatgaacattgaaatattaaagtgaggacatccaagttaggttgagcaggagatctcatgctaaaaatctaaactctactacttgcaacagagcaatgagcgggt

SEQ ID NO: 29069 - DNA, 2329 bp, Zea Mays
ccagcactagtcctgtactcccgtgcgctagtgcgctcggcgctgcccccgtccgcccgcagtccgtccccgctcgccgcccatgcgctcgccggccgcccctcggcgctcccccatctcctcccgctccgcccccgccctccgtctggtagtccgtcgccgctcctcccgcacgccagcacgacctagtagacggctcgaagcgaagacggtcccatttccagtctccgtgagatggatttagaggtatccgagggttcaggtactaatgccacctcggatgaccaatcggtgcaaacgctgcctagaagggcaaagcttttggagtattttcaaccggagttagttgaggtcaatggcgtgatgaaggctatttgcaaatattgcggggcgatgttgaggagttcaagcacaaatagccttagaaaccacgttgcggatacatgtcctaaaatttcagttgaggaccgcaagcaattcattgctacaatggaaaaaggaccagcggaagcttcatttgtgtttgactctcaaaaggctcgtgagtgtatggttaagtggtgcatcagtgccgaggtcgcattcaacaagtttgacgatcctttctttgctcagtggatggagtcaatgcagccatcattcagcggtgttgggcgtcaaacaatgcaaaatgattgtattaccagattcaagatgatgaggcaagagctaagaaatgagctacaaagtcttaactctcggatttgcttgacaactaatctttggacctcaaatcagaagttgggttatctttgcttgacagcccactacattaatgcagactttatcttgaaaaaaaagattattgcgttcaaatatttgaaatatccacatacaggcctagcaatcaaagaaggaattacagagtgtctcaaagagtgggggataaaagagaagatgtttactatcacattagataatgtttctaacaatctgtcagtgcgtgaccttcgagaaagtgggctatttggaggcgatcttcgtattgtccaatgttgtgcacacatattgattctcttagttcaagatggaatggcaattgctcatggagcaatctataagattcgtgagctggtcagacatatcaattcctcaccctcccgcatacaagcttttaatgggattgctgagaggtctggattgccttcaaaggatagattaattcttgacgttccaaaccgttggaattcgacacacgacatgattatggaggccattgagtacaaggttgtcttgaaaagatatgctgaagaacaacttgagccttcaccaaatgatgaagagtggacaaattctgaggcaattggagagtttcttgaggcatttgagaaagctacaaaagcattctcgacacatagaagtccaacatctcatttgtttttacataatgtgctatgtatccatcgaactctgagaaatacaaattggcaaatcaattgtgtgcttaaggattcggcacgggcgatggatgctaagttcgataaatactgggagaagggcaagtataacatgacacttgtcttagccaccatacttgatccatcaaagaagatggattttttggacttcttttatgagaagatgtctcaatattttgttgacatccagataaacgtggtcttggttaaacaatgtctcaccaaattatttgaaaaatatgcaacacttgttcaaatagataataaaagttcaccttttattgatataaggactagtaatttaggctcaacagttcttggaaaaagaaggttggatgaagaattttctcaatggtcccaaataagaggaagacgttttccaaagtctgagcttgacacatacttagaggaagaacttgtgagaatagatgaaagatttgaaattctaaattggtggaggacaaatgcaaacaaatacccggtgctttcagctatggcgcgtgatattttagcaatacctttgagcactgttccttcggagtttgcgttcagcgctggtggtcgtattcttgatgataatcgaagcacaatgacaccagaaacacttgaatgctttgtatgctgtaaggattggttatatgaatacccaaatattcaagcttagttgatctgacttccttcaaacatgttgaacagtacggcattcaagggagatttatgcatcattctgcgggctcctgtagctgcttagggatgacccttccactgctgctcgcttcaagcttgatcagatactctttctactgatacgcaaggccaaataaaatccaagaatcaaggttgcaatggatttcctcgggtaacatgctggc

SEQ ID NO: 29070 - DNA, 363 bp, Zea Mays
cgcgtcgtgcgcacgtagcaccatgcccagccgttccggtcccacctgtcataagcatcttcatccaaccatcccctccattcccacacgtacaaacaccccgacgatcgactccaaaatcgaaactgccagaccctcacctcctcctcgccatggctgctccgtgcacagcaaccgcacacttctccagcgagccgtcgacaccgtcgatcctcatccgcattcgtggtcgctacgccctccgatgccaagattgcgatccgtttccgagcttcgagggatcagagatcaagcgttggcgaccaagtgatctagttcttcgagttccacgaggctgaagaccctgagcatctctttggtgaa

SEQ ID NO: 29071 - DNA, 2402 bp, Zea Mays
tgcacactgcacactgcacaccgcccaacctcacactagctaccgcctaccgctggcgctaccacgccgccagtccagtccaacgatcaaaagctcccgtctctcctgcttactacacctttcccaccttttttccctgttaaaaaatatccgccgcgtcccctccaggcctccagggaactatcggatctcgctgagctcgtcaatcaccgcatttctttactaatcgccccttctcgaagagattaatctttagaagcgcttaaccatgaagtgttttgagttgagcttccaagaaacagagggaagctagagagcctcgaaaggatcctcggattctctacgggctgccatgggagaggggagatagcttcccttttccaatcaccctctcactggagttgcggcagccgtccagtcttcagtcccccagtgtgtgctcctacccattgtcggcggcggccgccgccgcggttcgtcctctcgctcctgctccgcagccacctagcgagttcctctgtgcgcgtatttgcttttcttgagagtttctgagaagtgtcccagctcacagctaatcatatccttgggcacaagaatatgtcgtccaagagactacatggcgtgtttacccttcttatgctcatggttttcaatgtttcaggggcatttgttggtatcactattggcaatgacatgtcaaacataccaccagcaacagatatagtgtctatcctcaaagcaaaaaagattcagcatgttcgcctgcttgattcagaccatcaaatgttgaatgcccttgcaaatactggaatagaagtgatggttggggttccaaatgatcagctacttcgtgtgggccaatctcgttccacagctgctgattggattaataagaatgtcggtgcttacattccggcgactaacatcacatatattgctgtgggtaatgaggtccttactaccattcccaatgcagcacttgtactcgtacctgcactgcaattcctccagtcagcactgttggctgcgaacctcaatactcaagtgaaaatttcaagtcctcattcaatggatgtgatctcaaaggcctttccaccctctgctgcgactttcaatttgacatggagctcaataatgtctcaatatcttcagtttctcaagaatacgggatcttcgtttatgctgaatgcccaaccatactatggctatgtcggagggcaaggcgtatttcccttggagtatgcactattccgctcacttaatccgaacagtcaaatctcagatcctaacaccaatctcttttataccaatatgtttgatgctataattgatgctacctacaactcaattcaagcaatgaattttacgggcattcctgttttagtcacagcttctggttggccatggcgtggtgggccaagtgagaaggctgctactgttgataatgctttggcctataatacaaacctcatacatcatgtactgaacaattctggtactcccagccaaccgaataatcagccaagcacctacatctttgaacttttcaatgaggataatcggtcagggcctgtatcagagcaaaattgggggattatgtttcccaatgcaaccactatatattctctatcatttgaggacgtggccacagctattcctgaatcaccagctttgcgtggggtgttttgtgtggcaaattcaagtgcatcccatagtgcactgaagcatagtttggattgggcatgtggccctggttctgcaaactgcagtgcagttcaacctgggcaaccatgctatgcatcagatgatattgtagctgttgcttcttatgctttcaacgattattaccatagaacacagtctagtggtggtacatgcaacttcaatggcaccgcgatgataacatcgactgatccaagccatggttcatgcattttcagtggaagcgctggcgccaacggcagcaacggtggaacagcatccgggcctgtaagcccggacagttttgcttcaaaatcccagtcgtgctggctgactcacctagtagccacattgctgccaattctatttgtagtgatgtaaatcattgtaatcatgtcgcattttggatgagatgcccgcaatttatcgtggatcttgtcattagatacagtagtgactagcgagccatttgttctgctgtattcaggtagatgccatgtaaccttatcccagaatttcttgccctaggaatcagtacttcgtcaaatcatcaattttgaacgccaacttggaaaattgagctgtgacaagccgagaactctctgaaatattggaagttccaaatgatttgtactgcatagtatttagtttctcagctatacgcatatagtttaagggctagtttgggaactatatttttt

SEQ ID NO: 29072 - DNA, 1083 bp, Zea Mays
aaaaggtcagatacaacattcacccttccttaatatactatcacttttcaagtgttttgagtattcaatgtccactagaaaatgtgctcaactagatttacttctttttgttaccaggccatagaaatttggaacatcatctcaaatggtggttacttgtatatttgcggtgatgccaagggaatggctagagatgtacacaaaatgcttcatacaatagtccaagagcagagatctttggatagctccaaaaccgagagctatgtaaagagcatgcagatggaaggagcacgagatgagcgcgttgatgtacttagtactgtgaaatcaaactggaggaggctgcaattctgcattacacctacaaaaaattctcaaacctaacctcaagaagggatagatgtggctgcaaaccaactaaagaagatgtgaagcaatgttttatcttggaatttgaccgtttggcattcatcggtggcctcaaggaatccgacgtctatcaatgcaataacatcagcgaaagcacaataaaaaacaaagtcatcaaacatgggtctcggaaacaaggaccacatccggctaaactgaactgctggtcagtccaaattggaaggcggtcacgggaaggtgcaggtaagcgtcagaaagatcctagaaatggttgatgcccaggaaggagcagcgaggccgccaatgtcgcccccaggttttcttgagctggctgaaagcaccactgccttttcatgacattatgtgaggcattgtttgagtattgactgaggttggtttaaccatgcgtgatacatgcagccttgagcatacagtgagtcactcaacaactttggcgaaagcccagatgttttcttgcagtttttgaaaaatattccgcgccctgatttcatgattgtgtgccatcgcaacacacgggcaactggctattatatatataagttatcatggtattatatggtcccgttgcaacgcacgggcactcacctagttattttatatgtgtatagtaggatttaggagatgatttaggacttgtttggttattttttaatctatatggatggtagagga

SEQ ID NO: 29073 - DNA, 2137 bp, Zea Mays
gaacgggagagttcgaccaaaattcccacgcccggcggttctacggtcgagccaagccccctcaactgctgaacggagagttcgacctagcacgcccggccgccgccgcagcccgcaatggcgtcccttttcaaggaccccagcaagctctcggcgtacagggaccgccggttcaaggggacgcaggaggagtatgaggcggcgctgcttgcgtcgacaacgctgtacatcggtaatatgtccttctacaccacggaggagcaggcctacgagctcttctcccgcgccggcgagatcaagaagatcatcatggggctcgacaagaactccaagaccccatgcggtttctgctttgtactgtgcgggcctcttcccttccttgatacgtcgcgttaattggctctttgattttggattcggtgctgtagtttccttcaatctacaggaacataaccttcgccctagtttaattagaaggggagatagtcccaattgttctgctggaatgtagtttgatgcaattagacgctgagtagatgggttccagacctgtttatgtattgatttgtttcctcagtagtgtgagttgttcatctgctagttgcaattggacattgcttcgtgaaattttatttgctgccaggaacatgtgagatgcctagaacatgaatagagaactgtgctatctcagcatgtacattcctcaggatattgcaatagattggatggagcccaactgcttgttgagggggggggggggggggaggaggtggagtaaagagctgagtactagcttgatcattgatgacgattatgagcgcaacgacgtgtatatgatgcaatgactgatggacatggcacttagctagctagcgacatgacatacatttattagctctctgcagtggtgtggtacatgcatatctatggaaaagcaatgggtacggacagggcaaccccgcagcagaacgccatgggcgacggcgcttgcctctgctgtatgctgcatttcatcatagtgtatatgtatttatctcttatcttgccgcccacccctaaacaattatcttcaactgctcctatggtcactgttgatttttgcactctagtgagggtgtggtatagtttgtcaattttgatgagagttgaaatttagtaacatataatgttccaaactggtgatttcagtggccatttgggaatttttatatgtaaaagcttgtaccacagctgttttctgtgcttggttctgagcccttcaccagaagcctaggatgtgagttcatgggcactgatatttaggtactactctagggaggatgctgaagatgctgtcaaatacattagtggaacgatgcttgacgatcgtccaatccgcgttgatttcgattggggctttgaagaaggcagacagtggggccgtggacgaagtggtggacaagtcagagatgagtaccgtacagattatgatcctggaagaggtggttacggtaagatggttctgagggaactagaagcacagcgagaattagttgactatggtggatcttttcaaccgaatgcaccacctccctatgagagaagtgagcggaagagaggacatggagattctcataggaatgacagaggagattaccagcggaaacgctaccggaacgatgaccggtcagcaccagaggagtccaagagagcaccggactctgatccagcggagaagaatcctagattccgtgagaaaggtgactctgacgaagaagaggatgactacgacggcaaacgtcgtcgctaaagctgtggaacagccgttgctactacatgcagctgttctggtgtccagacgttgcagaagagtccacagctagcagcagtatccggatctcgccctgttgtacaacagatttaattcttcggtcggccattcctccttttctagtgctcctatcatctgttaatctgaatgtgcgcggtgttacatgtgctccaagtggggcactgttctcacagatacaatgagccttatctgtacgtttgctgctgatgaagcttgagaccagtgcatatattaattctaacagattgttaccgaacccaatcttcaatttttcctgtctgtttccccgacaaccctagtaggccc

SEQ ID NO: 29074 - DNA, 3436 bp, Zea Mays
cgggtcacatcaaacgtttgacttttaaataggagtatgaaatatagacccaaccaactgaactagattcgtctcgtcttttaattttcggctgacaaattagttttataatccgactacatttaatacccggaacggaggttcaaacattcgatgggacatggctaaattttagcgggttgtgcgatacggcccaagtgtggttcagcaacgccgaagaaaaatcagacaagaagcccctccggccctcgccctccctagtccctattcgccgcgcccgcgcccgcgccgtctcgaggtccgccggtctccttccgccgcaagctttgctccattccaccgccgcctcttccgcctccgtcggcaaaatgccggtctacagcatccgcggcgtcaacgtcgacttccccttcgacgcctacgactgccagatcacctacatggaccgcgtcatcgagtccctgcaacaggggaagaacgcgctgctggagagtcctacgggtacggggaagacactgtgcctgctgtgtgcgtcgctcgcgtggcgccgcactttcggcgagttcctgcgggtcgggcgtgggggcggtgggactaagcagttgccctacgggagtcagccgtccgctagccagcagtcagaggactctacgtctcagaagcagcagcagtcgcggtacccagtcatcatctacgcctcacggacccacagccagcttcggcaggttatcaaggagctcaaggctaccagctacaggccgaagatggcagtgctaggttcccgtgagcagatgtgcatccacgacgaagtgagcaaactccatggaagagcacagaacaatgcctgtcacttcctctgcaagaaacgacggtgccctcataataaccatgttgctgagttcataaaaaacaaacctgagcttgggaatgagccttttgatatagaagatttgataaatattgggaggcataagggcccgtgcccatattacatctcccgggaactttcaaagtcggttgatattttgtttgccccttacaactatcttattgatccgggaaaccgtcgttccctaaatggcataccatgggacaatgcagtacttatatttgacgaagcacacaacttggagagtatatgtgcagatgcagcctcttttgatttatttccgaataacctcacagcttgcatagcggaagctcatgaatgcatcaaactgtgttcagcaaagaggtccattgaaaattctgctgataaacaatttgatcctgaaaactatgcaatcctcaaagctcttttaatggcacttgagaaaaaaattgctgagctgttaattggatccgagttgggctacacaaaagctgggagttacatatacgattttctctctgaactgaacattacatcagacacatccaaaaaactgattgagacaattgattgtgcttctttgctactagaggaaggaaattctgctcaaactgggccaggggtccaggcaaaggctgcagtgtctagattggagtcaattagggacatgttagacataatttttaggggtggtggtcaaaaccatgcaaaatattatcgatttcatgtgaacgaatctcaacaaacacatggagatgcattgaaatttttgggtaagtcttcaaggacccttagttggtggtgtttcaacccggggctggcgatggaagaatttctcaagttgggtgtgcgctctatcatattaacctcaggcaccttgtctccgttggattcactagccatggaactaaacctgttagtgagggtcttgattttgctgatcgtgctgggagggcagtaatagttactggaatgccctttgctactccaactgatgccaaggttcggctcaagcgcgagtatttggataagcaggggacaccatctaataaaaacacaaagatgttgacaggagaagaatggtatgtgcaacaagcagcacgggctgtcaatcaggctgttggacgtgttatcagacatcgccatgactatggagctattatttattgtgatgaaaggtttgtgtggccaaattatcaatctcagatgtcatattggctccgacctcatataaagtgctactcaaagtatggggaagtagtccaaggattgacccgattttttcgagataaagcttcttcagatcctttgacactagagccaacagattgtaatagaggccaacaacagggactgtttcttgagcctatttttaagccagctttcggccggagcgagggtcatgtgatcttgagcgatttcaagtttatgcagcaacttctttgccagacaaagctgagagacaatatgccctacctgcttatcactccagattgtatagcaccaccagcaaacaaacacatgcttaaagagaagctatcagatttggtacatcctttgcattgacatagctgatcgagatttaagtttaatgcatctggagcttacggatgctgccttccttctgctaggctgccagtgcacaagatgagtgcccacaaatcacattatcaggaaattcaaccatgagaagaagtaacttcatgaagttggctcagatcactcctgctaatcgttcaacccttactacaaaacacaactttgtgtctacatctacgaagcacaacctcccagaagaccagctgtcacaggataccaatgttgatattactgttgacttggcaatacaagggcatttgaaggaacataccttcaagtctttagggcttaagaaagctaaaacaatggacagatccaaagatgctgttgttttagatgacgtctcttcaaaattgcctcaaaatatagggtcaagagctttggccagataccaatgtggtggacctacacctgaatcaaagaaaagcactatagcaacagcatgcggaaagaatgatggggcctgtgaaaaaactgaaggccaggaatctaactcagggccagccttcttgaagctggttcaagaaaagcttagtcctgcagagtacacagagtttgttgaatacatgaaggccttaaaattgaaaactatgcataccaaggactcacttgaagcaataactaagcttttttcgtccccaggaagacttccacttcttgaagggttcagggtttttgttgcaaagaaccatcttccattatatgagcagcttgttcgaagacacaataatgtttctagtacatgacaaccacttctgctatgttcgcaggcatattcagtttttttgtttgtgccatgtatttcattaagtgataagtacagttttggttgttttcaacacttaactgtttatcaacggaacattagcagattcttgggtgcatgcaattacttttggaatgtgttatggtgcttctgtaatctaaggaaaagaaatggacctgaaaaaaaaaactctatttaag

SEQ ID NO: 29075 - DNA, 1506 bp, Zea Mays
ttgtctggcgactgaattttgtttgaaattactagtggaggcttcttcaggggatacacaaagctgtgcaagggcctcgccgtcatattgctcattgtgcaccttgtagtccagttgtttccgtccgccgtcacctatctcgcgcttatccctggaagaacgatcccttttgcttggaacctgataactgcaggctatgtcgagcaaacaattccagggatggttgtcagcatcattggccttcttttatttgggaagttgttagaacctctatggggttcaaaagagttatcaaagttcatttttatcgtcaacctttcaacttctgcttgtgttttcatgactgctattgtgctgtactatataactcagcaagagatctacctctatactcctttttctggattttatggggttctatcaggattgttggtgggcattaaacagcttttacctgatcaagagcttaatctttttgtgctaaaaattaaggcaaagtggattccatctcttgttgcattgatatccattcttggaagcatcttcatatacgactttatgtcttacctcccagttctgttgtttggcatgtatatgagttggatctacctccgttactttcaaaagagacttgagaccagcctgaaaggggatccaagtgaggagttctctttctcaagcttcttccctgaatttgtaagaccatttctcgacccaatagcatctgtattccataggttactttgtggaagatctgatgccaggggagaaacattagacacctcaccattacctggttcagattcgtttgaggcaaacaggaggagagagaggggtcaacgggcactggagcaaagattagctgagaagctggctgcagtcaggagttcagagggcggcacatcactggatgccgctgacaaagtttgagtcttctatgcaacgaacaacgagctgtgcggtgcagtttgtgatttcctggcaattcgtttctatgtgatttcaccagccccagcctcaccgccgagtgcttcattttttttatggtttctcatcctaatcatcatcgggaaccaactaatgaagcactgcgcgcccattttccccatggtttctctgtaatcaactagaagtgatcaagtaccaagcagtgtacaatgcgatgctccctaggacaagaactcatctatgttcggtttcctgttttttttcttccaaatggtgcggttgatacttgatagtagttgacacttgacaggaacaaaattatttttgtaaccttttagagctctgtgttggatggcaaattgacggtgctaacggtccggccccgagtctagacggtccgcgcgcgtagtcagttagggttctgagtttcttgctacagttgttggctagattcgcggaattaacttgggagatttgtatgtaatgggttcagccccctcctctataaatatagaggaatacgaccgattaaacattatcaatcgaattaataatcag

SEQ ID NO: 29076 - DNA, 1232 bp, Zea Mays
gaaccgattctcgcttaaacggacctcccaaactaccattcccagttcccacggcacgatggcctccgccgaaatccccaactccagccccgacgccaccaaccccgcccccgccgccgccgccgccaccggccccgacctctcctcttcgccgccgccgctcccgccgcgcaagcgccgcctttcgccttccccaccaccaacgcggtccgcgtcacgctctcggtccccccgctcccgctccccgcacggccgacgctcgcgcagccggagccgcagcccgcagcagtacccgaccgatggcaagcggcaacggcacaatggccttaccgtggatgcgtgccgcgatttcctgcgcgacagggacaataaggtgactgcgtgtgcggattctctgaggaacaattgcttccgggggatgacatgccgttactaccatccgcctccacatatccaggagcaattactgagatcagttggcgtggaagacccaaaggtgaagacgatctgcagagattttacacgtgggaagtgttcaagatcagcaaatgagtgccgattcttgcaccattcatctgttgaagatgttgcaattgtttgccaagacttcttgcgtggacagtgcaatcgcatagcatgtaggtactctcatgtagtagcacatccgatgccaccaatgaaccatgttcccatgccataccctgagatgctttacatgccaccaccaccaccaccaccccttggagtaccaatgatggggcctctgccttcacctcctataccatttgctgataatacgaacagagttgaagtttgtagggacttcttgaagaacatgtgcaatagagaatcctgccggtttgtgcaccctgagacacatacaacggcggtgaacgccaatgttgaagtatgccgtgattttaaacgaggagaatgcaatcgatctgcctgtcgctttttccatccacatacaagctgaagttttctgttgcctaaagtaaagtaaattatactttgtttccccccttttaatacaaatgactgccaaatacatatagatgaaagaatactcccttaggaacacctatttacagagttaactttgacttcaattccttgtggatcttgtgtctattcaaaccagctagagcaatatagagtttaagattggcaatttgtcatttgagtgaatcaacatattttttccaatgaaatgcaacttttatccgttc

SEQ ID NO: 29077 - DNA, 1184 bp, Zea Mays
ctactgctgatgctatattagaatctatatatgttttgattccagccccatattgggtcagttatcctgagatggctagactggctgatgcgactccagtgattcttcctacaaacatatcagagaatttcttgttaaggccagagttgcttaccgacaagatcaatgagaaatcgaggctcttaattctctgctctccatctaatccaacagggtcagtatatccaaaggagttgcttgagaaaatagctgatatagtcaagaagcatccgaggcttttggttttatctgatgaaatttatgagcatattatctatcagcctgcaaaacacacaagctttgcttcactacctggaatgtgggaaagaacattaactgtaaatggtttttctaaggcttttgcaatgacgggttggcgtcttggttaccttgcagcccctaaacattttgttgcagcatgtggaaagatccaaagccagttcacctcaggtgccagcagcatatcacagaaggcaggggttgccgctctgaatcttggctatgctggtggtgaagcagtatcaactatggtcaaagcattccaggaacgccgtgactatcttgtgaaaaatttcaaggaactgcctggtgtgaaaatatcagaacctcagggtgccttttatttgttcattgacttcagcgcctactatgggtctgaagtagaggggtttggcactatcaagaattccgagtccctttgcatcttcctattagagaaagcacaggttgcccttgtccctggtgacgcatttggggatgacaagtgcattcgtatttcatatgctgcatccctaactacacttcagactgcgatgtcaaaattaaaggaagctgttgctctgctcaagccctgtgttgctgcgtagcaagatcactaaattgcaataaggagtgaccaaggcacctttaactaacctttcacattattttaaacacaatgttcgaattgttgggcagacttggtctgttgtttttatatgtaacattatggatttatgatgtgtacatgcaaataaaaatgttttgtttagaaaaggctaggttgtggtactatgcgaattaccttctatacaaaagaagatggtcgctggagcaataatcatttcagtcctgcaacacttagatggaaaagaacagcaatgcat

SEQ ID NO: 29078 - DNA, 3613 bp, Zea Mays
agaggcgcgggagctattggccgttgaatccgaaacagacgagacggatgaagtgactgcaggggcaaatggggctgactgcagacgatttccgcttcgggaaatcctcctcccatgtcccgtttcctatccccttcttcgccaagcaatcctctccccctttcagaaaaaaaagtaatcctctccggagtccaagctccgaccagatccggacccccccccccccctccgaacaagctcgggcatgcccagcagctgatgaggtcgctccgcggggtcctcatcccgctcgtcctcctcgcggggctcgccttccgcgtggacgacggcggcgccgcgctcctcccgctcccgccacccgcgcttcccgcttccccgtcccgcctcgcgctccccggaggcactccgaaggatgatggggcggcggcttcgcgctccacggaggtcgtcacggcgggggtgcgctccaccgagatcgtcgccccagtggggcccaagaagcagagcctccgggagctccttgtccggccgcagcctgcacgtcacgagccgtctagcttggttagcggcgaggcgaaagccgaaaccagatctgtgctccagttttacgacaatggcacgattcagcttgtggacaagctgtctcaatctcctctgtgggagattgccacagggcctccactctcagaccatattactaccactgagtctggtccgaattacctcatttatcctttcaatgggaacgagaacatgaatgggaatagtactgaactttgggaggtttataatgggaacagcgtgaggctcccatggaaattggaggaattcgttgccaggagcccatatattcgggattctgttgttactatcggatcaaaagtttcaactgtttttgtagttgatgctgatagtggtgagattatttacaggcatagtatcccatctgcgttaaaggaattggaaggaccaggggttgaaggagcaccatccaagctaaatgtccgtactagtgatgacagtgataatatcatagtgcttgtgagaactgactattctctcagtgcatcagaccttggcaatcatttatttaactggacaagaacttctttcactgcaaactactatgtgaaatacaagcaccctgacatgcttgatcagtcatcttgcctgcaaggagacattccatgcattagaactgagggtttgccacttgctttacctgatttaaattcagctaatgtaattgtcttgaaagatggtaccccttttgtttctatgcatggttctgatgctttggaaccagttcaaaccccaaggaagctaccaaacactgctgggaagtcaaatatcctattggatgattctcaaaatcaaactcatgatgttgctcgatctcatgccatctctgccgatcctgaagctaccctaaaccccactaggaacacttctggatggctattccctttgtttcccatatttttggtcactggttatctgttgagcttgatatctgcaagcaagtcatgcaggcagtttatgattcaacttattgagccattcacgcacaacaagaaaacggtggacattagaggcaggtcggagggaactcccaaaaaaagaaaaacacggaagaaggatggacttgtcaatagctctgagaccttgacagcatctgacaaggagtgcagtgatactggtgggtcaactgaggcaccaatgaaaaattctgcgctaacagatgcccttggtggtcgtcagattggtaaggtatatgtctccaataaagaaattggcagagggagcaatggcacaattgtttttgaaggatcttatgatggtcgtcaagttgccgtgaaacgtctgctgcgttcccacaatgacatagccgaaaaggagactcgaaatcttattatatcggatcatgatcctaatattgttagactctacggttgtgaccatgacagtgattttgtttatatctcccttgagaggtgccactgcagcttggctgacctaatccaaaaacagtcatatttgtcttctggagagtctatttctaacaatgaggtcagtatgagcatcaactcaaagatttcaaatgttaagggaatagacgtggagttgtggacgcaggatgggcttccttcagcacaactcctgaagctgatgagagatgtggttgctggccttgtgcatttgcataacttgggaattattcatcgtgatttgaagcctcagaatgtcttaataagcgcagaaggacctattagagcaaagctttctgatatgggtatcagtaagcacctgcaagatgacatgacttctgttagccatcatggtacaggaattggaagctctggctggcaagcacccgaacagcttcgtcatggtcgtcaaactcgtgcaatggatctttttagtttgggctgccttattttctattgtatcactaaaggcaagcatccgtttggtgaatactatgaacgggatacaaacattgtaaacaatcgctttgatctctttgtggtggactacataccagaagcagtacatcttatatctcaactgttacaaccaaacccagagacaagaccaacggcagtatacgtcatgcatcatcctctcttctggagccctgaattgcgcctttcgtttctaagggataccagtgacagaattgagaaaaccagtgaaacggacctcataaacgcactggaaagcataggaccagtggcgtttggtgggaaatggggagagaaactggatgctgctttagttacagacatgggtcgttatagaaaatataactttgagtctactcgtgatcttctgaggtatatcagaaataaatcgggtcattacagagaactttcaaatgatctcaaggtttgttggtgctgcactttactgtgttcgattttgtcatgctgtatgaatggagttaaattgttgattagttgctgatctaattagggtaggctgtgtgcgttacctgatagttttgactagacattaggtatggacggcatgcgaacgaacatgcatgttgtgaattagcagagaatttcctagggcaatttaaatacagcttatgttttatattgcaaatttgctctgctcatcagtcaagtcaacctttgttttgtctcataagctcacaattgatggatgcaaattccagggcatacttgggtcattgccagagggatttgatcactattttgctagccgatttccaaagttgctaattgaggtgtacaaggtcttgtgggtgcactgcaaggacgaagaagctttcagtaaacatttcaatggaagctccttatagctggagaggattgccttttcctactgtaaatactaaccctgatgtagaagttgtatgtacatttgatatgtataccatattacccgttttatagaataaagagagctcagtctgtacattatgtagcatattactgtgttgcctataaatccaagctttactgttgaatggtgaacaatggtaacacaatctgctggatggaaaccagtggtatgtataatacccactttgtaagaaaagtctaaaaagaaaaattatattactttgtatctgtatgtgtta

SEQ ID NO: 29079 - DNA, 2274 bp, Zea Mays
cagtggtgttctgatggtggtatctgcggatttttagctctgggagggcggttgcttttttttaggaggagcagggggaggggaagaaggatgcagcgaaagcgacggggaaagaggacgctgcgtcggatggtgggcccacggggactcccctcccagacaaaaagttgctactcttcatcctcgataggctccagaagaaggatacttatggagttttctcggagcctgtcgatgcagaggagcttccagattactttgacattattgaccatccaatggacttctcaacaatccgtgagaagctgttgaatgactcgtattctaagttggagcagtttgaggatgatgtgtttctactcacatcaaatgccatgtcttacaattcagctgatacaatctacttccgacaggcacggtctattgaagctcttgccaaaaaggattttgagaacctgaggcaacccagtgatgaagaggaacccaaaccaccagctcgaaggggtaggccaccgaagaatcccaagacagagggtgatgtgtcaccagacctatctaatgtgaaagcaaataaacctgaagacaatgtcgatacattcagaaaaaggtcaactggagacagaactcgaaatacaaataccccaatgaaagatctgtccagttttcacgatacgtttggttcttttagtgcaaaaagaacagataaaattggtgattattctggttcatcgaagtggggaaagaaacctgttagtctagatgacgaccgcaggagtacatatgatcagcactattcacgtaatagctctctgtttgctgccctggatgatgagaggaaactactggtgccagtaggggttcagcagccacatgcatatgctaggagcttggcacgatttgcatcaaaattgggcccagttggctgggatgtggcagcaaatcgtatcagaagggcactcccccctgggacaagtttcggcccaggatgggttgtagatggtgaaccacctcaaaactctcagtgggctcctgcagcatcgactaatccctcctctgagcccactgctccacccaatatgccatccaagaatgatgtactcgatcacaagtctggaccgtcttctaatggggatgttactggtgaggagcatttaactagaactcaaacagtggcttctacatcaacaagctttgataagagctctgacatttccagtaaagtaaccaagcttgagaacggagttaccgagtcatgtggtggtacggacaatacgggatcagcagcgcctccaatgcagcaacacagccacagtcgagaaatccactctaacatcaatggctttactgctatgtcaaacgccatgagtcagtacgcggggcaagggttatttggatcaggcattcatatgacgcacgcccaagtgcttgggatgttttctggcatgaatggcaaagtcaatggctatatccataggcacccagtaactgctgatagtcttaaaacagcaggacagaacggagatgttggaaaggcaactgtgaaccccgtgcaaagcgcaggccaggatccaaagaccgcgaccgaaaatagctctgctcacccaggcttgaattccagagcccagtcatcaggttcctcgcctaggggaaagctgacaaatccgaagcaccctgatctggctttgcagctatgagcgcggtagtaggcattgacatagtttggtttagtactgtgatctgtgacagaggcatgagctcctcgagcactgctcctccgggcctaattctcaagcttccggcacgctgatagacatttgtagcttgccaagcggttgaagaggtaacagatggttggattgttgtcagagaataataacgcaaagcagctgttgcatgaggcggcggcggaacaccatgtaggccccccattttaatcatttgacccccagtgagttgttgtaaaagggtagggtagcttctgtacaggttctaatcttattggagatgacagtgtttcggatgaggcggccgcctgttgtccaatttgtaacatttataggaggaagtatacaggcgaaaaaggcagtgaataattgtgccttttgaaatgttcgaacggccgattggcgacatgttgctgttgttttgatttcttgtgccttttgggctcactctgtccactggatacgttggatgctggtgattggcatatatatgtaggtcatgctcttgagccttctactcgctgtgattcttcttcgcctcggaaattag

SEQ ID NO: 29080 - DNA, 3405 bp, Zea Mays
ctcccagccccagaccgctgcatccgctgaacatgccgctgcctcagccgctgctcggcggcgcctcgcccgctccggcgcgagcggcctcatccttcctccacccccttctccacacgcgccaccgcgtctccactgcacctgccgctgcctcctccttcgtgcctgcatctcactcctcccacgcgaacgacgccatgctcctccgccgtgccgccgacgtggccgaccgttctgcgggactcacctccccgcacccgaacttcgggtgcgtcatcgcacggccccagcttaataccgacagcgctgattcctgggtggtcggcgaagggttcctctatgcgcaggggacgccctgcgccgagctcctcgcctcacaggaggccggtgagcacgcgcgcggcggcacggcatacctcaatctcgagcctggggactgctttggtgacaacacagccgtcggatccctcgtccaggaattacaagagttgtggtgggtcttagacatcccttgaagcacttgagagggaaggcaattcaagcattacgaaatgaaggcattcaagttgatgttgtgggggaggatctgcagagtaaattgttcaaggaagctctgaagtcatgcctcactgtaaatgctccattgctttacagagctgcctttcatgtccctttttcggtcctgaagtatgctatgacagcagatggaaaaatagcagcaagtagtggacatgcttcttggataagtggcaaagcatcaagagggcgtgtatttgaattgcgtggcagaagtgacgctgttattgttggtggaaatacagtgcgttttgacgatcctcgattaactgcaaggcatgttaaaggacatgttccagtgcgtatagtgatgtcacagtctcttaaccttccagaggaagcaaatttatggaatcttaacgatgcctatacgattgttgcgactcagagaggtgctcggcgagattttcaaaggaagcttgctatgaagggtgttgaagtagtagagtttgacatgctgaatccaagagctgttatgtcatattgttatgatcgtggttatcttgctgtattatgggaatgtggtggaacactagctgcttctgctatatctgcgagtgttatccataaggtctatgcattctgggctccgaaaataattgggggattaaatgcacctacgccagttggtgaactggggatgagtcaaatgactcaggcaataaatttaattgatgtctcgtacgagcagattgacagggacatgctcatgagtggattcatcgaacccattcctgatctttcacctgttataccatccgtggaagaaataccttccattgatccagaagtatctccatatgaaacaaatattatttccttttacaagacttgggatatttttggggctttctcaaacttttctcctcattcaattcaaatgcctgatgaaaatggagattatttcacatggccaacagtggaacactattaccaggctcataagtttgttggtgttgacaatcctcaagcaagagacattgttcaagaaataaagctagcaaagagtcctgaagaggctgctagaataggaaggacccgacaaaaagggttccctgaactggtatgtccgattattgtatttaggcctgttcagtggtggtttagaacaggtttggatatttggccagcttcctaaaccaaacgttatgcttacggcttagatggtttgatttgctggtgtatgcgggttcaaaccggaggacggcaacatggcctgtcacaccgatgctgcagtccagggctcggacagggttggtgccctcagtctcttcagtgctcgctgcatctgctccacctgcaccatgcacgatgacgaggtcagctgcctccatgctgtcgtggccgcaggggcactggtgaacctgattccgctgttgtggaggtggtcagtggcaggcccagggagacaaccggcactgccatggcggtttggctggttcaaaccacggttttactcaacccgtaccgaagccacagattcggtttcaacaggctggttttacgagttgcactggtttgcaataaacggtgaacagccgtaattacattctatttttaactgattgtagtgggaagggatgaagggaccttgctttctggtacctaacaaagtatgatatcatccttctgatgaaagatattctagaagaggaatctatatatctagtataggctttgccacttccacttatcatttagtataaatacatgcttgaaagctacaatggtgcccacaagtccattatagtcccaccaaaatttattttataatatcaacgactgttgtagaatccgtactattttcctcaacctctcctctggttaactcagacacagcaacaacgggactgcaaccactaggtagcatgggtgcaaaatcattagcctgggacttccctttcagatactttctactgttcaaagttcatggtattatggattgcctgatgccaaacatctacgtgctttctatttacagggattagttgtagggtcttaactcaatgtattgctacaaatacctatttaaaatgatatgaaccatcaagtaatggtaagaacagattgggagagtacaaaaatagatgtgatgtatagagctatcaaatgcaagttttcaacttatccccatctgactaatatgttgctgtcaactgctggctctgttctcgttgaggcatcgcctcacgatttattttggggcggtgggagggagggagaaggcctgaattacttgggtaggttgttgatgcagttgagatcagagattctggggacagtcccagcaagcgctgaagtaggggaggcagattgatcctgaagcgagcaaatcttgtttagcaggagtgttgattgcaagaccagacgttaaggtgtggctgggtcccgattgctacagtggatggtgctagtgaaacgaagcgcaaatgagattggttaaattatctgtatgcctgtgaagaacaaacataccatgggtcttgctcttttgtcgaacaatttcatctggccctcggggtataggaattatgaaatacaaaggaggaacaccaacagtcatgcatagaatgtggtagtcctggtagatgaatgtgtttgataaggtgataaggactaatacattggaccagaagtagaagacgtgcttgttcagtaatggttgtttagtaaaaaggagggcgaattatttaataaaattaaatgcatcattgcaccatgaagtcttttgcctttgtttcacttaggcccatcaacagggagagtaggtttttgggtacatgtttgatgcatctctaatctgtacctctgttttgtttctattcggtg

SEQ ID NO: 29081 - DNA, 1660 bp, Zea Mays
agccgagcagccgcccagctttctcatgccagagcaaacccataggtccagtccaaatccaatccctgttgccatcagaatttcaggggcagccatggccgaaaaggagagcaacggagtgcgggtgtgcgtcaccggaggagccgggttcatcggctcctggctcgtcaggaagctcctcgagaaaggctacaccgtccacgccaccctgcggaacaccggggacgaggcgaaggcggggctgctgcgtcggctggtccccggcgcggcggagcggctgcggttgttccaggccgacctcttcgacgccgccaccttcgcgccggcgatcgctgggtgccagttcgtcttcctcgtcgccacgccattcgggctcgatagcgccggctcccaggtgaagcttgccgtcgcgttcgctcccttcactgttttactagtcaacgagtggtcaggcggcgacgcgccgtgctgtctcttcttaattttaagttgtggaaaattactgtccttgcaaaggaaaaatttgatcagactgagtatgagtaaagaccagtaagacagcacaaggattgcgagctgcgactgcgagcagaggaaacgtcttcacagttattcttgtctgccttgtttttctctatctgaagcaaaatcttgtggtgcccatcgaccgcgtatagcagtataagagcacggcggaagctgtggtggacgcggtgcgcgcgatcctccggcaatgcgaggagtcccggacggtgaagcgagtgatccacacagcctccgtagcggccgcctcgccgttgctggaggaggaggtctccgcctccggcgtcgggtacagagacttcatcgacgaatcttgttggacttcgctcaacgttgactatcctctccgaagcgcacacttcgacaagtacatactgtcgaagctgcggtcagagcaggagctcctgagctacaacggcggcgagagcccggcgttcgaggtggtgaccctgccgctggggctcgtggcgggcgacacggtcctcggccgcgccccggagacggtggagagcgccgtggcgcccgtgtcccgcagcgagccctgcttcggcctcctgcgcatactgcagcagctcctggggtcgctgccgctggtgcacgtggacgacgtctgcgacgcgctcgtcttctgcatggagcggcgcccctccgtcgccggccgcttcctctgcgccgccgcgtacccgacgatccacgacgtggtcgcccactacgccagcaagttccctcacctcgacatcttgaaagagacggaggcggtggcgacggtgcggcctgcccgggacaggttgggcgagctgggcttcaagtacaagtacggcatggaagagattctggatagcagcgttgcctgtgcggcgagattaggttcccttgacgcatccaagctcggcctacagaaaggataaaagctcgaagcttactcataagcaccatggggaacttggattgttcgctgtccactatacgcgttcgaaatttggaaactagacatactccaataaaacaagaggtaaagaaacgtgggctaactgatacgcgttgagcagttgagctagcctagtttagtccacctgtgtgcagggtttaaaacttcgacgaaattttatgacttgcg

SEQ ID NO: 29082 - DNA, 1155 bp, Zea Mays
aaatgggtcactgtgcgttgggggttcccgtggttgttcacttaaagatcatatcctctttctaaacatggaccagtaacagagtaacttgtggtggagttgctgagtaggctccgatcaccgtatttattgggcctgattggccattgttcggaaggtgaacactgtctacttgtatatgagttcatggccaatgggggtctccaggagcatctctatccaaacagaggttcatgtggtggaatctcaaaattggactgggacacaagaatgagaattgcacttgaagcagccaaaggtttggaatatcttcatgaacatgttaatccacctgttatacatagagacttcaagagtagcaatattctcctggacaaggacttccatgcaagaatttcagactttggtctagccaaacttggatctgatagagctggtggtcatgtctcaactcgagttttgggcacacaaggctatgttgcaccagagtatgcattggctgggcatttgactaccaaatcagatgtgtacagttatggtgttgtgcttttggaattgcttactggcagagtaccagttgatatgaagaggtctcctggagaaggtgttttagttaactgggcattgcctatgctcactgaccgagataaagttgtgcggatcttggatccagcatcggaaggtcaatattccttgaaagatgctgtccaagtggctgctattgctgccatgtgtgttcaaccagaggctgactataggccattaatggctgatgttgtccaatcgctggttccacttgtcaagaaccgttataatcagaaatcttgcaatcccaatgtgcaaccatcgaagccacttgactaggagaaaagctagtgtttgatctgcagtttgtgctcgtccttctggaacccttctcgagttctcgtctataacgaactactgttgagacagattcacacgcttcctaacaatgatttcgtctgctggtgccctcctgattttgttgttttttgtaggggtgtgttgtgtgcaggtaggttgcaaatttaaaggggatatagttgaacggtcctgagaacttatttgagtctgaaggcaagtttctgtcacctaaaattaggtgcatgttgatggtgggctgttgggattaat

SEQ ID NO: 29083 - DNA, 1055 bp, Zea Mays
ttatactcaaccatgtctccgcaattagccatcgagagacaagtcactgatggagggtttcaagggagaaggaacaagctcagtgatacatgctatgctttttgggttggaggcgtcttgaagatcttgggtgcataccacttgatcgacagctgtgctctgcggagtttcttgctcacctgccagtcgcctgtaattgacctcagaacctcttcaatcagcttaatcccattctcggatagctcagggtatgtttttcgttcactgctgcaacagtatggaggcttcacgaagttcccggatgatcggataccagacatctaccattcttactacggcctggcagccctctccttgttggaagaggaagggctggaacccctctgcgtcgaactggggatcctctccgctgctgcattatagaaacttgtgtttctaccgaatccagttactgtacaatgtttgtgggggggggggggggggggggtaatccagtacttaacacaggataaacagctgagaaatcgaagggagtaatttattgatagagtgaggccttgttcggttattcccaatacatatggattggaaaaaattcttaagaagtttgacttgtttgggattcaaacccatccaatcccactcaatccacatggattgagagctaaccgaacaagccctgagttggtccgtgctgtcagtgtgctgcgcagatcgtgtaacattacttcgtgagttcgaaaggcgtgtgacaattttgtttgcaaaagtgcgatgggcaggctaactgagccagtcttcttcccagttggttgatctgattgttgacagttgagttagctgaacgctttgtatgattgtatcgtcacttggaaaggtactcgaatgtttgacgtttctgtttccgtctgtttggcataactaaatggcttgtgtctgctgccgtgaacaactttacatattgcatgcttcttcacaacattttgtttcagttaacactctctttaggcatctgcatactcatcgcttttctctcagaattcaggtgagtgaga

SEQ ID NO: 29084 - DNA, 2926 bp, Zea Mays
cagtacaacaactggagcctgctaccgcttgccggcgcgggtggtgggctagctctcgccatcgccactaggtgcgtcatctgtctggcggaatacgaagagggagacgagctccgcgtgctgcctccctgcagccacaccttccacacgggctgtatcagcctgtggctggcgcagaactcgacgtgcccggtctgtagagtctcgctgctcgtgcctgatactagtactacccctgaaagcgaacactctgcaccccatcctcctcctcctcctcatcatcatcatcatctgtccagcatagtgataataagcccaccaagctcccccgaaccgtcgagatcggacccgtgccgatgcctgttcgccagcggtggtgggcactcgtcaagggcggcagaggctcctcctcctcctcctcctcccagacacgagcccgaccaggtcgtatctggtccaccaccggcagcagatggggctagcggctacagctcgccgttgcctgaagttattcaccccgctcctgctcctgaaaccaacgggcagacagtacggaagcaggcgggcagcagatctactaccccgctaggcccctgcaaatagcggccgctcactctgtgtgggtgggtggggtgaacaggtggtgcgtggtaaaagcgaagtagagagaaacaagcgacttgaagaggcctgggttcgttcgtgtacatacgatcgagaaatcgtttcaggtcattcattcatccattcattcatccatgggcacatactgtggtattacggagtattacggtgtacgtgtagtgtgccgcaggagagacgacgcgacggcagcagtgcgttttccatatgcgacgggacgggagcattcgaggagatgatggcaatggcatggttttgtgtactgtacggtaacatttgtcgctgggaattaataataaaaaacccgtggctggctgatgcagcagcagctgtcttattatccagccacgcatgtgaaaatttcttctcgggcagcagcagcgtgatcagtcgccaccttgtcagcttgtatccctctgctgtaggctgtagtaccatgtggtctgaatccaatgcgacgacgacgacgacgccgcccagtcggtctctgatgaacctgagattacctacctgatcttgctactgccagggcgcgcgatcaacattccatttgacactggtaactgttggcggtggtgcacagtgctgactgacggacctgcctgtcatccagggtcagggtacatggagatgaggatcttggatggatgggggagaggggcctgcatctgcatcagagccagagggaggcgggcgaggaggggggaacaagcaaagcatgcggtgctgggctgccctgcccacgcagcgtcgtacgctcgtgtcggtcgccggcccagtcgaatggaatgaatgatgactctctcacccgtcccagatctagccgcgtcagcgcgcacggaaccgctccctttttttttcccccacacctccctcccttgctctcccgtgcgtgcactgacacacacaagttggttggtgagcggaattaagccagctcgtgacgcaatccaatccgaacacgctcttttgcctgggaaggataagcgcgtcgtgtttagtttacagtggtctcgtttggaagttcttcactctctatagactcgatagctgattctctactaatgtaatttcaagtgattctctagtaaagtgattctctagtaaaagtaaatttaattgataaaaaccgtttgataaataagatgtgaagtgcttgaacagttagtggggagtaggttgagacttgagagcggtggaaagctgatttttttggctctcactttctagtataaaatagaaactagattaactctactttcatcatagagtaatttagatttttaccggtttgactctggaggagtaattctgggagcggagctgtgagctctgcaaaacggctcctgtgtgcccaaatgatccagtccacagactcaggctcaggctctaggacgagtgatgagctctgcagccagtgacccctgtcggcggcggtagcttaaattggccaccatgtcgccacgatccatcggactcctctgcaaataaagccatcgggggagtgagtaagtgagtgggtgtgaggagagctttgaggggaggggagctagctagctactggaggagggcttcctccggcgccggacatgggggaggtgaagcacctgtgcctggccaagttcaaggacggcgtcgtggtggacgacgtgctcaagggcatgaccgacctcgccgccgggatggacacggtcaagtctttcgagtggggccaggacgtgctgaaccaggagatgctgacgcagggcttcacgcacgtcttctcgctcaccttcgcctccgccgccgacctcgccgcctacatggcccacgacagccacaccgccttcgccgccaccttcatggccgccatcgacaaggtgctcgtcgtcgacttccccgtcgtcgtcgccaagcctccgccgccggcatgacccgctggccgctctcgcatccgccggccactgtacgcctccccttctcaggtcgcgcagcagatccacgtgtgcctgcggcggcggtgctggtagtagtactagtactgtctattgcctgttatttatgttctatctatctatctatctatctatctacgtcacgtacgtacctactattattgtttggttatcttcggaataaattttcggtcacttttatggtagcgtatatctagcggctagctgcttgcaatacaccctttccgatgtttatgatggattgtcagattcctaatcgacttttagttttcttgttactggctcctggttaaacaacagcagatttctcagagcattgaggattcaga

SEQ ID NO: 29085 - DNA, 3102 bp, Zea Mays
tgatgacatcttccactcttcctttctgcggcgcacccttctttctccatccacttgtgtactttcgacgtcgtcttcctcagtagcgcccccttctttctccacccgccgtcgacgcagctgccttccagccatctccatatccgtttcgccgtccccttcctcctcatcaggacccgcgcaagtggctcgtcaagcgcgtcgtcgggatgcatgggggctccgtcacctaccttgtcgaccccggcaacaacgactcctcctccagaaccgtcgtggtgagttggtcactactgggctgggcttttgggttcctactgcttgttaggtgctgcctccgtgatccgatttgtgctcaactgattgatgctgagcattgttggtcttaatggagtttcagtagttgtttttagcgacgggcttagggggtgtttgggaacacagttttttacagtattggaacaatactgtggtatttgagaataccatggtataatatacagaaaggtgtttggaaatgtaggtaaaatctctgtatttaaaactaaagtattatcaatactgcagctgtttcaaagtattgtaaactttgctctccaccaaagttttcttctgtaaacaagcttgtgagcgtgcggtaccggcgatggcgtgggaccgagctgggttctgcggacacaatgccgaaaaggctgtcactggtgtacctatcgctcgttccaaacttccaatgctgcacggggctgtatgagtatgacagcttgggtgtacgtacgtgtacccaatggttcagctttcatatgattttagctttattagttgcaataaccaactaccgctagctttagattgtatgatatttgttatctagaaggaagacttcaatttatggaataactcaaccatgcggctgttactaaccttagggaatttagaagataattccaataggggaacagagagcctcacatggtatatactttgttcccaaacacctccatgtattcaaaattgtggtattctaaaactgtggtattgaaaactgagatcatgtcatggcatttgtatactgtggtatttgaaataccatggttttgaaaaactgtgtttccaaacacccccttagtacttgtcagtacattttacatgcttcgaattgagatgcataggaattaggagacgtgcgttttttagtaattggtacctacttgcgcctgagactctagtctaggcaccaaagtcagggaggtgtttctctgagctctgcttcaaaactgtattatctgatgtttgtctgagccacaagtcatgaattttgcctgtagtcaaggatggtgaaggtccaatcatgtgcatatcattggtttcctcttgttatgatgaccaaacttgtatctaatatattgatttgaatatgatgacctctatattgtaagtttctgaatttttgcaacacaggtcatgcatttttcctgtagtcaaggatggtgaaggtccaatcatgtgcatatcattggtttcctcttgttatgatgaagagatctggattcaatacttgatttttcatttgtttttaaatatttgttaactgttatggtgtatgtcaatggaatttgggcattggttgctttgactgtttcttggaatgcagataaactacgcctatgctcgagacaatgaaacactatttgatattattagtgtgaagatgaacctctcaattgacaagcgatgcaggataaataatttgtccacaagcatgattgcattatcctagcggcggcggggccgtacaaagagatgctggaagtggtgaacgcgtgcgcgacccggatccggtggcgcctcagtccagcttccaagcgccgcctcctcaacggtcagtgcccactcgcttgctgctttctcttagtagttgtagtcgttttttaacgggaaatacaacagggaagccaccagcccaccactatgtaggattttattaattgaaaaatagtgttgtagttgttattatctctatttaggacttgttgttggcaattgtcctatttcttgcttaattcgctaccgccatgctgtctttctgttctactgctaaaacacttattttttgtggtcgttgaatgaattgttaaccaaactcaattgcagaagacattcatccactaatcgtcacatgatccaccttagttcataagtttataccaccgtagttataggtcacttggtcagtagctgcaacttgcaagtgatttagggtttaataaaaaatttctggtagtaaagttgaaaggtatggtttgaggagagtgaatggtatcatgtcgaattacagtacattacaatttacaagtaaattgattagtcctctggtcttttgattggtagcatgtttttcctatgtaattgcctctgttcttctttaggggctaggttcgttgtaatcatttgaccgtggggatgtttgtactaaattcttatttctcttaaggaaaatcatgctaatgcacgaccacgaagaaaaagtaaattcatgaacaaatctacctaacttatgatttctgttggattttaactctagtctacctctttgaaattaaaaggttgtgctgtggttgttgatgaacaaacccagttgttgccaaatatcctgtttctctgcactaggttgcgtcctgtggtactggtcgactatggtggcacaatgcctcagctacaagaaaatctttgtggcctgctatatcttgcccgacagttcaagctctacaaggttaggtctgttcagtttggctagaaaggcatcccctacctgaacacctacgacgaccgcaccatccgctaccccgaccctctcatcaaggccaacgacaccatcaagatcgatctggagaccaacaagatcatggacttcatcaagttgtatttgccctttcatggacttcatcaagttatatacttagttaggctcaatgttagcacaaacagttgatgagcaagtttaaatttagagtacacttatgtatgagttatttgacaatgcttatttatgagatattgaatattatttatctatattatattaattatagtgttattaaatat

SEQ ID NO: 29086 - DNA, 2730 bp, Zea Mays
catccctcatctctcctcccgtgacgtcgcgccacatcgtcctcttcctccgcgtgccgctgctaccgtggcccccttgcctgctcgcctccacggccacacgaaggccccctgtgttgctctcggatatgcgctgccatcgccggcgtagccggagctggccgtccacgcaaccctgccacgggagggcgacgcgttgatgctggagctcacaaggtgtcgctgctggagcagcgtacgacgacgaaggcgctgtggcagcacctggtgctagcgctacactactactgaattttgtgatgttgcaatttcatcttttattttgttttttggggtgatgcaaaaaaacaaaactcaaaagtctactaaaggccataaattgagcaatgttgctgcttcaagaaacaaattatcaacttattcccatctaacctttgatgggatttggtttagcattaaggaattctcaaaatcaaaatagcaggtacttgtcacgatctctactgtgtttctttgaggtattcacttttctatttgaagaacaccactaatcgagtttatttttcttagtttcaagtgccagatgatgcaaggctttcagctagaagtgtagctgttctctgaaatctttgccaaaaggttaatttcattctaccttgcatgctacctgtttagcatgatcgttagtttattcgctaacaaaaaactttgccgaatggatgacttccttctgagaagactgaactgaataattatgtcaaagttgtttcagtagtttggcctaatcagtattgatctatggtgtatagtctacaggttgtactatatggttgattgttctgatttcgagcttggttagtctaatgttcttaattatggatgatgatcctttgaagttcatgcacgaagacttgccgttctgaaggcccttacttcctgttccactagtagttctgagatgatggaaaagctaaacgaaatcgtgtttgacatcttggaaaaggttggccatccataatttgagtattctttgtacagttacattagtctttaaactacttttctcatcctcactaattatattgtcggcaatatattgtcgacaagaatggttctggatatattgaatgttcaatggtactcctattggataatcctatcagcacgacaagtgcttccatagcttatgatgttgaattttgctgctccatggcagcagcagcagcccctgccagttgaccattctgacgccttctcctagcattatgctttcttgtagcttcatttggaaaaggcagattgctcaaggaatttcatgcttagttgcaccacaccagggtatcatcaatcattcagccccattctactgatgtaaattgtgcaaatcctttttctttgagacttttgagagtggtctgtcgattacttgcaagaaatatgaacctttgtttctgtgcatgggcataaaacaaacagcttctagcctcttttacggtacttgcacttgcaagaaatgtgaactccttttcatttctgtatgtggacataatgccaaagcatccaggatttttcatggttgttgatgtctttacacagttcatctccaccagtatgccctcctcgtactctatataaacacatcaacagcaccgcaattagccacataaacacatctcgcagccacctttttttgttctgttgtaagtatactttcccttaccatctttatttgttagtttaatttgtaattgggaagtattagtggaaagaggatgagacgctatcatctatgtactctgcaaatgcatctgacattatatgggctgcttcatataatttgaattgctccattcttgccgacaatatattgcaaggtacatgtctaggagctatttaaactacgtcgacctcactaattataagcattgaaaaagcaacaattgctacagtgcacttaaacttgcagctcattattatctggctaagatgatgggccaacttagtttatttgatctaaaaattgtgagtcttatgttctgaactcaaacttgtgacaatttattttattttcgcagtctattatacgtggtaatttgcaatatgcttctttaagtgcactcagaaggcatccacttgatctcggtaatcaagcattcctccaccgagctgtggaagggaacatgacccctgaagcagctttggatcatgtacgatccattaggcctcgagtgcttttggcaccctcgcagtggtatgtcactcaagtagatctaaagttattctttgagtccatatgtggtgagctaaaagtttgcagaaatggcaccatcaagatcgatctggagaccaacaagatcatggacttcatcaagtttgacgtcggcaatgtggtcatggtgaccggcgggaggaacaccgggcgtgtaggagtgatcaagaacagggagaagcacaagggcagcttcgagaccatccacgtgctgcttggagctttttgctatgtctagttttctcctatttgttgtacaggaaaacatagaatggaattcaaatttggtggccacaaaagtgtggagacttgaattcatataaagttagccttaacattagtgcaaacagttgtatcttagtttagatttagagtacacttatgtatgcgttgtttgacaatgcttatttatgatatattgaatggtacttatttatattatattaattataatgttgttc

SEQ ID NO: 29087 - DNA, 544 bp, Zea Mays
aaaaaaaagatgcatcttgtatcaaactcggttacgtataaagaaactttcggagctggtcaatgatgcatacaaggatgcgcatcaacggagcgtccaggccatgaaagagaggatgtctgacttggcacagagcttaggaatgcctgcgggccttggtgatggtctcaagtgatgctgcctgccattcgggaagcctttctaataatttttttccctcaattttgaatacgagccgtgtgggcacctctcgtagtcacgtagtaagaagtgtactcgtgaccagctgtttcgttcagcgttagctgtgattttgttttgtacaagcagatatatttgcactaaatcgtggtaacgtcgtcctatggaactcggatatcacatgtggtatgctaatctgcaagatataggggatatgcaccgaaaccaatttaaatcgtgtgataaatgatgtacattgtgtgtgtaacaaattaatgaattatgtttttttatacacccttttttttaacgtgaacgtaagggaccagattgtaaaatataa

SEQ ID NO: 29088 - DNA, 2189 bp, Zea Mays
tttgtaccttagcccaagatagcaaacaatttcctccattggcctactcctgccccttccataagaaacctcttctccttttatttatggctttaaaaaaccatttgggcagatccagagctagcatcagatgaatgggagttgcagaaatcacggatttgacaataattaatcttccagctttgcttaaaagaggtgctttccaacctggcagcctatttgcaattttgtcaagtaaaggttgaagattcgtcttagagggtttatgtatattgagggggattccaagataagtgcaaggaaaaccgccaatagaacaggataggatatcagatgttctcgcaatatcttcatttgaaaattgaatgggtatagcagaacttttaaccagattagttttcagaccagaaacatgtccaaaatactgcagaacatctcttatcacatacaggtcagcaggattgggtctcaaaaatataatcacatcagagtaaagaagatgatccttagatcactcaaacactcacaaaactcagcacgaacacgagaagaacacactgagtttttttggcgttcacaaactacactgccatagatgtattctattgatttgttatatatacaattacaaaggctcacaaccataaatcacggaatcgatgaacaatcaattagctaagaaaggaaactatccaatcaactatcaatttgctaagagggaaagtaatcaatcaactatcaattagctaagaaaggaaactaatcaatcaactaagaaggaaacaaataaaccgagctggattatgcaacaagtgttgccatttcgaagtggccaaggctaccttcgtgttcgccttcccagacctgctaacggtgcacccgcgatgcatccttcagagggctcctttgaagacgacttcatgcttccgccaaggcatcatttcggaaacctccttggatgaagtttgggggcaacattcggggtttctgcgagaacaaataccttcggtccacatcaagggtgaggttaaaaacatgtgaacagagggggaccccatggggagtgaggaattggaaactgctttgatggagatggtcgagcatgacaacagacgtatgttgagtgcaaaggttgagaagcttgaaacagaggcatatgaactgcgcaaagctttttcagacaagcaagagcaagagcaagtaatgcttcagatcttgttaagaatggagcaagaacagaaagtggcagaagatgcccgcatagccgctgagcgagatgctgctgaacaaaaacacgctgctcacttgctccaggagaagtatgaagcagcaatgacagcactttcacaaatggagaagagagctgtaatggcagaaacaatgctggaagctacaaagcaataccaggttgggcaggttaaagccaaccaatctttcacttcaagttcacctcgtgcagaccatgttcctgcgaagataaatcaagaaccaaaccaaactgcacctatcaggagaatcggcctgctttctaggggacttggatggcttgacaagggcaagggaaggcagaattccaatgaaacatctggagcctaaactcatctaaagtccaggatgaagtcatagctcccaacaagatctggattgttcattaacgcttggattgcttgatcaccgtaagagtgttgaaatcagcatcgatacatgttttctcgggaagattcagctggtatattccatgaagttttgcaggaagtgtatcttgtatcatattgagttcaattgtcagataaagttttgttggtaggtcagaaaggcttctgcaagtcatcggtgtaaattttcttttattagttccattaagattgtcaatagttagtgttccaaataggagaaagaaaagaacgacttactacacacaagaaaaatttctgttagattagttacagtatcatggagttgttctggagaagagcatgttttttttatctcttcagaaatgtcaaaaccaccgaagagattctctctctgtatttttgtctgatacgtgtggctcatacattcttcagtcacagttgacatgtttgatgtaaggcaattattgtcacgaggattctgattacgaatacaacagcagaaactccactatagggaggcgttttggaaagttaattgttgtcagttcctca

SEQ ID NO: 29089 - DNA, 2043 bp, Zea Mays
ctgggttatgtcagcattatgcctacgtcgctgaacaaagtgtccaaaacgagcactagtgtattttttattcctactcccagtcgccgcctgcatttgtctctcggtcaggaacatggaggggagacggctttcacggcggcagttacgctcgctaccggacgccgcgtccttctcgccggaagtcgcggccagcccggggctcgtcggctccggccagttgggtctcggtctctcggcggcgttcgagactctgccgccgattttggtagaagtgaatggctttacaaggacactgattttgaataggccaaagcagttaaatgcactctcctcgaccatgattatgggactcttgaggtgtttcactgcttatgagaaagacgatggagttaaattgttgattatgaagggtaaaggaagagcattttgtgctggaggtgatgttgctgcagttgttcgatctatacataaagacagctggaaatatggtgctgatttcttccgaaatgaatttttgttgaattacataattgcaacttataccaaacctcaggtttctcttcttagtggaatcgtcatgggtggaggtgctggcgtttctttacatggaaggtttagagttgccactgataacacggtttttgcaatgccagaaacagctctgggtctctttccagatataggggcctcatattttctgtctcggcttcctggattctatggttatcttatatgtctcttctttttctttatattcagtcgaattacatgttgcgatgtcatttccatctatacagtattgttggatattattcagtcctgaaatatcacgcatcttcaaattttcctttgaagttttccaaataccgtctacttgattgaattttagcaatagtgcttcatgcacaatagtgattgtggagataaatcatataggttgtggagatataatcatatatagaaatgagagtgaccaaatgtaggttcacttatgacttatattagttgtaatgcgtgaaggcagcttcttagttgatggcaaaggtatcttaggagatactgttcactaaactgttttcatgttcttttctccaggagagtatgttggtcttgctggtgccagattggatggtggggaaatgcttgcatgtggtctggcaactcattttgtccagtcaaattgtgtggtatcatcgatcaatttgctcaacaaccatcactgaaagaaagcagctctttgaataggttggaaatcatcaacaaatgcttttccaaaaggacagtcgaagaaattatatccgctcttgaagtagaggcctcaaattcggcagatgaatgggttgctacaacaatccagtccttgaagaaggcttctcctaccagtctgaaaatctctctgagatcgataagagaagggaggacacaaactgttggggagtgcttgcagcgggaatatagaatggtctgccatgtcatgcgtggtgacttcagcagagacttctttgagggatgcagggctatattgctggataaagaccgaaacccaaagtggatgcctccaaggttggaacaagtgcatgacgaggctgttgaacagtatttctccagaattgatgatccacagtgggaagacttgaacctacctgctagacgctcccacggaagaaatatcgagtccaagctttgatcgaaggtcatgggagaaaggtggaactctggaacggagccttggtagtggtcagaataacacattattgcacatcatctcaagtttgaagagtctgcagactattgataaaataaacatgaatgtgccatataggtcaacttatatcacagaaagaaactctttgctgtttatacgtggagactggagtcatatgcatttttaaataattataagtaataaaatcgaaaaagaaatcgttggaaagacttttcttggagtcagaccctacttgatggtgataatcgatgagctttctacacgaccaattgttagatgaacgcgtagggctgtggagctggcccatgtacggc

SEQ ID NO: 29090 - DNA, 2422 bp, Zea Mays
gctagcctacctacacacacagcgtgtgcctgacggctgacgatgccgggtgccggccgcgccatttgtctatatataagctaattataagctaagcaatcgttcacagctagcttccctcatcttgagaaagaactcctcgtcctcgctccctccccaaccatcaagagcgcgcacgcacacgcacacgcacacgccgcgcgcaagccggccgacgtacggcatggagaagagcgctacaactggcggcggttcaagcggcggcggcggagaggctgcggaggaggcgaaggtgcctctgctgcagccgagggctgcggcggcggcggcggcggccgaggaggaccatggaggaggaggaggatacgacggcaaggcggcgcgcgtgggaggagaacaagaagctgtgggtggtggccgggccgtccatcttcacgcgcttcgcgtcgttcggcgtcaccgtcatcagccaggccttcatcggccacatcggcgccaccgagctcgccgcctacgcgctcgtctccaccgtcctcatgaggttcagcaacggcatcctgctgggcatggcgagcgcgctggagacgctgtgcgggcagtcgtacggggcgaagcagtaccacatgctgggcatctacctgcagcggtcgtggatcatcctgtcggcgtgcgccgtggtgcagctccccgtgtacctgttcacggagccgctgctggtggcgctggggcaggacccggacatctcggcggtggcggggaccgtggcgctctgctcgccttcgtcttcttcggcggatgccctctcacctggaccggattctcgtccgccgccttcgccgacctcggcgccatcgtcaggctctcgctctcttctggtgtcatgctctgcttggaattgtggtacaacaccatactggtgctcctcacaggatacatgaagaatgcggagatcgcacttgacgccctttcgatatgccttaacatcaatggttgggagatgatgatctccataggcttcctggctgcaacaggagtgcgagtggcgaacgagctgggagctgggagcgcgaggagggccaagttcgcgatctacaacgtggtcgtcacctccttcgccatcgggctcgtgctgttcgtgctcttcctcttcttccgcgggagcctcgcctacatattcaccgagagccaggcggtggccgcagccgtcgccgacctctcgcccctgctggccttctccatactgctcaacagcgtccagcccgtgctgtcaggtgtcgctgttggtgccggttggcaaggcgtagtcgcgtacgtcaacgtcacgtcgtactacctgatcggcattcctcttggcgcagtcctaggctacgtggtggggcttcatgtgaagggcatttggatcggaatgctgctcggaacgctggtccagactatcgtgcttctcttcataacagtaaagaccgactgggacaaacaggtggtggccgctcaagagaggctgaagaaatggtacatggaagagaacagaaggatgcaggcctcgagggggaatccttgagccggtccttcaaccaacttcaagcctggcctttgtgggttgctgattgacacaattttatgctaatatttctactattcatcacctcaacatcaaagtgagcccggcattccagatcgtgtgctcctcgagccaagcaatggaaaggcactgtcactgtcagcagcagtaggataaccaaaaaaaaacattgtgttatttgctaagtgcgagtttggctcaattttcgctaagtgagagagagcctatgttggctaagtgcgactttggctcaattttgggcgtatgctaatatgtttcacaacagggcagtgcttgagatttgggatatctgtagcgctataactgactcaattttgggcatatgctaatttgctaagtgcgaacaaattcatgcagttatggccatgcactactacacttcgacatgtgtgtgtatatactcaggttcatgaaaatagtgtggtagatcgatcgtgggactgaaccacatattgatcacatcaattagtaataagggacctagcgtcgtatcgtatcacattctgcaaccaaacatgaaaggaacacagagaacacaaccatattcacagagcactacgctaataactggaacaaattatttaggtgcaaaactgtattgtcaccttattcgaactggagtgtcgacgacgaacagggctactggatgacaggtagtgtagttaagaagctgcaatcatattttacaggaaaatattagtaagaaattaagaatgcaagatgaggaatgttcgaagtactgaatcgaacagatcacaccgatagcatttgatacatatacatcaaagaaacacgatttgaaggcaaaaaggaatcaatgta

SEQ ID NO: 29091 - DNA, 3009 bp, Zea Mays
aaaaagctaaggtagcgtagcgtgcgttttgcttgtgcatggcatgtgctccgatcctcctcctccgacctcccggcccattctttctcccttcttcttgagggggcaccctccgtcctttcctcttcttcttccttcagaaatcgcaagaaaatggggaagagaagccagaagcgccttattcgacgccaccaggacggcagcataggctgcatggcaggcctcatccgcatgttctattcccgccatgacgccaataagctcctgttggacaggaagcagccagggagtagaaggcacagtttcagtgccttttctggacgaaggggccactcaagaaagaattccaaggacttggacgaaatagatgaatacggcgattataacatggaggaacccagttccagcaaaccaacagtcaaaagacttatggaggacgagctacgaaagctaaaacagctgaagcttccaaatgatgaggttgagagaatattagctgacctgggacatggtgcctgcctggacaaaagttcagcccaaaacagcaaagcgaagaagggagaccaaaatcacatcagagatttcttaggacggatccatagaaattgcaacaataatggggagttatgtacggagatgaaagccctaatccaaacaaagattgcagagctagataatcctccgtgcacatttgcttatgagcagcaaacttcacggggtgacgaatatgatactgctggtggcaaacatcgatgtagcagtagtaaaactcagcccaaaaaattcagagatgcgctggagatgctaagctcagacaccgaacttttctttcagaagtcaaattcacgtattttggagagcgcccaaagaaaccaaaacagactgatagggaacaatctagagcccacaaaaatagcagataataccgactccaacaaagatccaaagagtctgaaccagcatgagttggccaccaggagatatggtaaagagagcaggaatatctttttctggaagaaggaaagatcctcaccaaggcagactgcacaaggaaccagtagttctcagccagttaacaaaatagttatactgaagccaaatccaaggagagagatcggccatgctgtggctgttagttcaacccaagctccaaaactaggtgcaaccgagagctcaaaattttcaattaaggaggtcagaaggagattcagaatcgtgactagtgaagctacaaaaggaataccctcagtgtctgaagataacctccaaaaaggtcagcattggctcaacagttcagctttcacaataataaaagataccagacagctcgctgaacagacctcagaagggaaattctcatcttcagttatgaaggattttagatcatcaaacagcggtaggcaaaagaaaagaaaaaatgatgggccaaccgaaaaaaacagtagcataattacgtcatccaaggatgaatctgtcttctatgacgaggccaggaaacatctaacagagattctcaaggacaaaagacaaacaaccaagcagcacccgacacttgagatctcaaggtccttggtgaggatgctttccttccctcagtccagcacatcatcacctaggagtagccctagggcaaaagactgcatttacctctcacctgaagaggcaagcattcgtgccatatacaagtcaaataaagatcttttagaagaagaaagccagtctggagaatttccagagaatgttgtgtgtgatcctagtgaagcactgcatgagcaggctgttcaggaaaggtggtgcgtcaaagaagaaagtcaagaaacaacacaagaaggtgcagaacttgacactctgcgcactaaagaaattgacaagctggattgcatgggaaaaaatagcaatgcatggggcaccccagcaaagcaatgcacatataaaccatcacaagatatggtgggagaagcagagccaggacaaaggcatgtcaggacgtttccaagctcccctgagaacgactttgaaaaactggaatgccaagagcccacgactccccgaccgagtgcacagatcgaacagatatcacaattttctcctgatggaaaccacgaaaagcaagaacagccgagccctcaatctgttcttgatgtgttcttcctcgacggtgagttgcacaaagatatcttgaggacacgctacaacaccacaggggatggttcagaccaagggattttctgggaggacaagcatccgaggttatgttacataaaggaattgctagagctgtcagaattgtgtgcaaaccagaacttagaggtatggtatctagaagatgaattaatcagcccttgcttgttcgaagaagtacatggaggcaatcaaattgatggtacgaagcttttatttgactgcatttgcgaagctgtgacagaaatccaggacatatactttagaaaccctccatgcctatcttctctcacacacagcataagggcacctcctccagcgggacaaaaccttatctcagaaatcaataagcgtgttgaacgccatcttcactatcgatttccaagcacattagaccagctggttaacatggatcttgaaggtggcagttggatggatcttggatcagaaagcggagaggtcgctgtagtaatatgggactgcacactagatgagcttttggaagaattagtttacgacctgtggatttcaggcttcaatctcgcagccggtaaccatctgtagatttggtagagtcataccgttaaatagaagtaacatgtttgtgtggcaaaatcctgtgatttggacatggagggctgcatgagtcgttcttaaaggcatgagcatggtacgggatgttcactcatgtgaatttcatcgtgaccctcaacatattattatgtgtctagtgtcagttaggcctagtttggatactctagtaatgagtaggatttgagtggattaagatgtattgagagagtatttaatctattggggatttacacc

SEQ ID NO: 29092 - DNA, 1567 bp, Zea Mays
ttttttttatatgtgccccctctctccctcactgctctcgctctctcctttgcactgctcctccgacttgctcttcggtttgcttctcttgccttggttcccttgctttgttgtttcgatccgaatccatctcgtgttcttgctgaatttcgcttgatgaccatatatatatatgcttgtttgatttttatttctttgcagcgcagcaagacggagaaacaagaaccatccctccccctaccgctgctactcatgcacgcgcgcactgcctcctggtgccgccgcgtatgatccagacatgaatagggcgcacagcagcagctccaagctcatcaacgagaagctcgtggaacaccggatctccactgcgaagcactgcccccactgcggcgagaaaatcgacagcaaaccggattgggtggggctgccggcaggcgtcaagttcgatccaactgaccaggagctgatcgagcacctcgaggcgaaagtgaaggatgaaggctcgagatctcaccctctcatcgacgagttcatacccacaatagatggggaggacggcatatgttacacccaccccgagaaacttccaggttggtataggtggtgatcaggtgccatctaatcagcttggacgttcagagccgcatcatgccggcctggggcagcagccacacggcccggtgctcgcgacgaagacggctgtgcctgctacagctttcctgatcagtaggccatcgaaccctgtctcgactatagtgccacctgcaatgcagcacgcatcagttgttctcgatcatgatcagttccatgtgccagcaatccttctccatcaccatgacaaatttcagccacaacaaaagcttgaccgcagatctgccggcttggaagaactgataatgggctgcacgtcgtccacaagcacaaaaggagatgcttccattgctcacccccaagagacagaatggccttacacgtactggccacctgacaaccaagatcatcatgggtagtagcaacagggacctggtaaatagtggcgatgtgaatgctgaaggaacactaaccgcaaccactttcactggaatggtttttgtctgcttgaatatgcagcgttgctttcttggagaatgtacacctacaatagtggggaaagaacagagaaaaaaaacgtatctctgtagatctccctcaataaagaaatgaggataaaactagttaacagtgtgagctctccaagacagaagagacaaaatggccaacgaaaagagaagggggaaagaccgatgggaggaaaggtactgtgtgtgctgacattgaagggatcatgtgtggacagtttagatgtattagaacaccttaatcaagtataactataatcagtttacggtttatcacagttttttattcgtgctacctgttagtggcattgtttgcatgtacattaacccttttaatttcttttagtttctaaattgatgctgattttcctttggttagttcatgctaatatgcatcacgaagaaataaagttagtaagaagctcataattccttcctttttttagcac

SEQ ID NO: 29093 - DNA, 357 bp, Zea Mays
cttaccataatagaagtggtgaggtgctcgtcgatccgccgaaacgagtccgcggcgacgctgaattccgatgagaaattctcggtcaaatccggcttcccggttcccatggcttcctcgactcgttacccacttctcccgcgcacactcccctgttcgccaatcgtccctgtgaatgatgaatcgcgcagcggcacaaccctcccctgctctagttcctggcgttaggcaaaaccgtcctcggacgatggggcgcatgagcttatatcatccctgagtccgcgagatgaccgacagcccatgaacggcataccacacggaaaccccgaggatcccgatcgcgccggcatgcgcgcg

SEQ ID NO: 29094 - DNA, 3147 bp, Zea Mays
ctgctgcttatctcgtggccgatccgcgctcgccccgtccccgcatctcgccgccgcgccccggtcagtgtgcgcttgagacatcgcccacacgagacatcgtgtgtgatgcccgcccccaacccttccccggtgtgatgcccgccgttgacgtctcttctctcgcccccatcctcctcaacctcggcgccgcccctgcccctgtcctcgatggcaaggaaacttcccccgggcataaatctcactgctcacgcgccattagcgccatacccgctacctcctctggcatgccacacgccgccatccccctagcccatcgtgtgtcacgcgcccagatctcctatttttacgcccccacgcaacataggccatcccaccatggagcaagaaaccctagcgtagccaccaaccactgctgccccacatggcatcctgactgtggctgcatccatctcggcgcctcgcccaccacgttgcaccaccaccgccgctcctcctccccaccgcgctgtcgccctgagtaccaccgccaccgccaccgtgcatgtcgctagggccgcatctctcgatgttagggcccaaccgaacatcgtcgtcgcctccacctctgcgtctgggccaccgcaagagtttagggctcctccggggttcgagatcatgtccgaccagcagagcagcatcctcagcaccatgctcgacaaccccctccacctcggtactggcgtcttcgccctcgggtacgcaccacaccttttctcaccatccgagcattgccaaggagctcctctccatccccaacgcgcgccacgccccaccaccaacgatgaatgggtgcttcagattcactaagacgatggcgcgtctgcggcaaggagcttcagattcactgccatcagaaacttgcaggtgaggaaggagagggtccaagttcctgacctctgcatcgattgggagggtccaagttcctgacccctgcattgactgattatctttgagtttaatcattatgttgaaattggtgtgcattcaaaatattcaattgattctcacggctaccatggctcctagcgaaacttgtttatcgttggtgtatctggcgtattaatggaaaaaatttaccttctctctttgagggttccagtccatttcgttctctataattgtcacctacccttcctgagcctacttttgttgctaatgtaagaataagaaagaaaaaagcttcatctctatttgtttctgctatgcattgtgtagcttagagttgtcacttaacttacaatcttacgttggtgtaaaacagtgaccacactaaaagcacaaatgcaaggttttatagaccatgtgtgatgctgctaccactaacatgtacaaataggaaaggcaacaaaatggcttagagcaagtattttttaaagaaaaaaatgatccatttaagaaaccttttaataagttactcctgataccaactcctcaattcgcgagtgtcttcagcttcgctttctctatttgttgtatgctggtgtttcttcgtcttgtgtgtgagttggatgagaactggacaactggtaggaaccactctcagtttcagtttctgattgtgtttcactttggttcaggttgtctgcgctcttctcttagggatcgagaatcgcagggaggttcctcgcttctataagaaagatgtgcttttttatttcattttccttgtggagttgtagttcagttcagtttgtcttcatgcatggggagtgcttggttcgattgttcatagccataggtgctacagattcgtctatggccaagacagaagtttttgttttcatgatgttttcatggaagaagatggcgagaagctctctgcccttctcatagttaactcttttgattaagtgattaaccaatttagtaacacatatttaatgtttcagcttgtttggtttagacatggtccctcagtaaattttttatttttttattatctttatccataaactaagttggtatgtagtgacgggtaagaaatactgtggtggtttggacctcagttattggccagatgaagggcgaaggccattatcagatcctcgtccacctttgggctattgctgacaagtggacgagtgtcgtacacctctccaattccccccttcaatgtggtcagtgttgaatcatctacgtcatacagtgagcaagggcatactgatgagggaagggatgacatggatttttctcgttcgagcatcaggttttgtgcgttgattatggtgtgctcgttggtgagactgcgacgtcctcgttcaagtcagctgataatcgtgtcctccaagagcaactactacagaagaatgtggaaatcaacgatttataagaaaaagtttttcacgttgagcaataactctcagcaaaagtggatatatcctctgagaaggaagctgattgtgcacatcaggagactattgatttgaaatctaaacttcagtccaaggttcttttactgataatgttctttcactttgtgtatttgagccccttgtgtagtgcatattcttcaacatacaatattcatggtttggttactgacctttcaccaaattttctgttatgtccttcctgtaattctacttgatagaaatagtatgcatgttcattagatggctatatgcaaactgcttgtattttatgctttccttgttgatatttaagccaaccaactttgatgatgtactttggtaggaagctaaaattgaaaagatgaaatatgagcatctggcgagggaggctgctttggtagaggatcttcttgaagaggagtacaagaaaaagtttgatgaggcaaacaaggaactatctcttgagaatgatctagcaagcatgtgggttcttgttgctaagttgaaaagaggggctttagacacatctgatttgaatgttgatgatcgaactaaagtgtaagggcgtagagatcgccacactgttgtctcataattggtgttaataaaaaataacatggtgctgcacggaatctctactttgtcttgtaagcaggattgttctgtcggtataatttgatttgtatgtataatgtcttcatgctttacttgcccttttatgaaatgtggcgaccggtcctcttgtctttctttt

SEQ ID NO: 29095 - DNA, 1624 bp, Zea Mays
gtgagttccagccttgaatagtctgttcttgggtcaactagcacaattctgttagtggtttggatgtgacagtacaacagtgataaacatacttactcatcgcgattcggtgcagcgtggactcattcaacaggaatacagggctatgtatcatgaggaactctcccaccgtatttcatctgaactcagtggaaaccacaagaaagctatgtcgctgtggattcttgatcctgctggacgtgatgcaactgttttgagagaagctctaaatggtgacactatggatctgagagcagccactgagattatatgttccaggacaccatcacagttgcaaataatgaaacagacttattatgctagattcggtacttatcttgagcatgacattgctcaccacacatccggtgatcaccagaagcttttacttgcatatatggggattccacgctatgaaggtcccgaggttgatcctacaattgtgacacatgatgcaaaggatttgtacaaagctggtgagaaaaggctgggtacggacgagaagatttttatccgtgttttcactgaacgcagttgggcacacttggcatctgtttcttctgcttaccatcatatgtatgaccggaaattagagaaggttatcaagagcgaaacttctggaaactttgaatttgcacttttgactatcctcagatgcgcggaaaacccagcaaagtattttgctaagctcttacgaaaggccatgaaaggtttaggcactgatgacatgacacttataagggtggtggtgacgaggaccgagattgacatgcaatatatcaaggcagagtacttgaagaagtacaagaagccattagctgaggctatcaactccgagacatcaggaaactatcggacgttccttctttcacttgttggtcatggccattaggctatgtttcgaccatgggacatgatatttctatcgatccaccctaaatgcagcgacctacctggaaaacttatgatgttgccatttatctgtcgtgactcctggatctaactgccacatatcacatatgcggttcctagtatgcttgtttaaagtattcgtgtatatatttccatccgggtttcttgttggaagattctggatgggataccagatcagctgttgctggtcacagtgggcttgactggtgtctctatgacgccaatattattatgtcatgttcttgtggtatttccttcatttgttattctgtttttcgctgcttatcccatatccctgttttctccgtccttcacggagaccaacgtcttaggacataacccagagatataggggtacgtttcttggagtataaaagataggttttgtatcttattgtaagatatgactcatacgagggttgtatatatgaagctgtttgttggacttaaaagaaccgtgttaaagatatgtcattgttagaacaactactccctccgtttctttttatttgttgctggatagtgtaattttacactatacaccgacaaataaaaagaaacagagggagtacaagagcttcctaaaaagttgttccccaaaacatcatattaggggctgctgaaaaacaaactcctctaaaaaaaatctaaa

SEQ ID NO: 29096 - DNA, 3483 bp, Zea Mays
ctcggcctctttccttcctctgttcctcatcttcgtctcggcctcacccccgacgaccccgcaccgatccctccacgcgctcgcgcgcagcacgggcggagttgggcgaactccgtgctcgttcaacccgtactctagtacctccagggttcgggtcgggtctgccttcctcttcgtatggcttccgccgccgcggaaaccctcgcctcgttcccaatcgcatccccgtcccgctcgctcctacgccccttccccaggcgaccagccggcgctaggacaggcgcaccgtcgatccggatatccgccgtgccgccgcggggcctcgggctcgcgctcgtacaccgccgctgcccgccagcggcgcgcgcgaatgttgagcgcgacggcgacggcgcctccgggaacggcgagccgtcgtcctcgtctggggatggcgaccgcgacgcggctgcggagtcggggggcgatagcaccagcacgagcaccacgagcacggccgcgacaccgccgccgccctcgtcgaagaggaacgaaaataagtggcggcggaggctgactaagggaggcggcgtggggcggtggctatgggagcccatagtccagggacgggagatgggcttcctcctgctccagctgggcttcgccatatttgcgctacgcatgcttcgcccagagatcgcgttgcccggttcagagccccgcccacagacgacgtacgtcagtgtaccatacagcgacttcctggccagcataaacaaggaccaggtgaagaaggttgaggtggacggggtgcatatcatgttccgactccgcccagaggtggagtcccaggtccgtgttgagcagacaccgacacagcgcggagcagattatgtcattgataatgctggagtttcaaggagaattgtgttcacgacgactcgtccagtggacataaagacaccatacgagaagatggtggaaaacatggttgaatttgggtcaccggacaagaggtctggcggcatgctcaattctgccctggtaggtcttatctatgttgtattgattgcggtagttttgcagcgcctgccaataagcttttctcagcaatcacccggtcagttgaggaataggaagaattctaattccggcggagcaaaagtttctgaaagttcggatatagttacatttgctgatgtggctggagtagatgaggcaaaagaagagcttgaagaaattgtggagttcttaaggaacccagaaagatatattcgtctcggtgctcgccctcctcgtggtgtcttattggtgggtcttccagggactggaaagacacttcttgcaaaagccgtagcaggagaagcagaagtcccattcataagttgctctgctagtgaatttgttgagctatatgtaggcatgggagcagctcgagtacgtgacctatttgctaaggccaaaaaggaatcgccatcgattatttttatcgatgagattgatgccgttgcaaaaagccgtgatagtcgatatcgcattgtcagtaatgatgaacgtgagcagacattaaaccaattgctcacggtaggacagtgccctttcttatttcttgagcattcaccaaattagcttcatcgcaagttgggacccaattaaagcttatacttgtatttttattggctgataattgattttttgctcttggtaaaacttaaaaggggtttgagccacactctacttcactactaaggatactgctttatcatgcaatatttgtttttgagaaagggcggaaatggtattattattggtttagctgccttgattttgggttctccccaggaaatggatggctttgataccaactcggctgtcattgtattgggggcaacaaatcgagctgatgttttggatcctgcccttaggcgccctgggagatttgaccgtgtggttatggttgaagctcctgataggtttggaagagaatcaattctaaaagttcatgtgaaaagaagagagcttccactgagtaaagatgtagatctagccaatattgctgcaatgacaactggttttactggagcagaccttgcaaacttggtaaacgaagctgctctgttggctgggcgattaaataaagaaatagtggaaaaggttgacttcatccgtgcggttgagcgatctatagcagggatagagaaaaagcatgcaaaattgaagggtaatgaaaaagctgttgttgcgcggcatgaagtaggtcatgcactcgtgggaactgctgtagcaaacctccttcctggacagccacgtaaattgagtatattgccaagatctggaggtgcattaggcttcacgtacacccctcccgtcacagaggatagatatttactctttgttgatgaactacgtggccgtttagtaacactactgggtgggagggcagcagaggaagttgttttagcaggacgggtttcgactggtgcacttgatgacataagacgtgctactgacatggcctacaaagctgtagcagaatacggtcttagtcagcgcatcgggccaatatcacttgctacactgtcaaatggtggtttagatgactctggtggctctccatggggaaaggaccagggacatctagttgatctcgttcagagggaagtaaaagcgcttttacagtcgtcactggaagtagctctttcagttattcgtgctaatcctgcagttttggaaggcctcggagcatacttagaagagaaagaaaaggttgaaggcgaggagcttcaagagtggctaaaatcggttgttgcatcaaaagagttgacctcttttatcagaggacagcaagagcaagttcttcagctggaagcaggctcctagcgtcaggagtatgcaccgggctcttaaaattaattacttaacaaaagtgactcagcaattagaacatacaatatgagacacaaggtatgcaatggaaaccttcatatactgggaagagacctgtggccatgtgtggtgggttgtatgaacccccacccattcatgctaagacaaaccgggtctgctaagacaaactggtcggatgcccaccctttgttcggtgaatcatgagatcgagccctatacgagaattcaggaaaaaaaaagaaaatctacatgcccgagtgaccatgtaaatatctatcattgcagttcctgaacccttgactacaaaaaaagaaatccagagatgattcatattgagctgtaacattgtacgatcaacctcaggaatattgtaagtgattcagcttcacatgttgttccatagattaggtcggtgttacacatgtaaaagattcttttttggcaatatattcttgtactcaccctattggaagttgttttcctctatataccatcctagaaatgatcaataggataatgcttatacggactatggttcctgtattgagaattgttcttcagaaatcagaatagtgatcgctttttgaaagaataaaa

SEQ ID NO: 29097 - DNA, 955 bp, Zea Mays
ggaaacagctaataagaaaggaaggcaatttttaattttgtgctagaagggaatgcccttaaagccatagagctgacagaagaaatggcacctaacttgctagagaatgatatggatctacattttgatcttcttagtctccacttcattgagctagttcgctccaaaaaattcacagaagctcttgactttggccagaaaaaattgacatcatttcagaaggttaccaagtatattgagaaactagaggactttatggccctcctggcttatgaagagccggagaagtcacctatgtttcatctactaagcccagagcacaggcagaatgttgcagagggcttgaatcgggctgtccttgcacatgctaatcttccagcatattcatcgttggagagggtggtccagcaagcgactgtggttagacaatacctacagcaggaagttggcaaggcctttctgagcaagtaaatgtgcaaatggtcacttcttcagaacagggtaaccacctctccaggccatcatgtacatgtacccttgtggagtgcatacacgatgaagtagtttatacagttgaggtgttgttgacaccacttatacagttgcaatggtgttgtactttgaaaaggagggtgctgtatgctgtctgcttccttgatttacattctgttttacttgtctctctgccttagacatggcgaaagcatgtatgtatgacctgttgagctattctgtgcgttcgttcggtgaactcagttcgagtcggtttgtaattggtcttttttattactaccgccatgtgcagaggctaaaggtccgaactctggatgcgtaagcgtaacgggttattctgtccatggtactcctatttgcgatttccatatataagggactgtgaattcttcatcacttgtagatgttgatataattttttcagaaaaaaaaatgttcagag

SEQ ID NO: 29098 - DNA, 2910 bp, Zea Mays
taaaaactactggctgcgaaagaccacagacatgcggaaggacgagagaaagaaacatcgtaaaatattgggggcttctattcggccggatctctctcttctctctctcccaaccaagacgtgttgagctgtttcccagtccttcgtcgctttccctccgctcaggcctcagcagcatcagctccccaccccaccccacgcctcccctcctcttccttcataagctcactctcaaacggaggtggagcggagctagcttctgcagggtaccactagtaccagtaacctctggggattttcctgtgagaagagggattggcattggactggactggagcttgggggggagccaaaagcaaaaagaagcccaggattagcgtgtggcggattgcgtggctatttcgggaggcgagagaacgagaggcgtggggcctaggccgggggaggcggcggctccttggaccggccattgatggcgccgtggagcggcttctggggcggcaagcccggcggcgacgcctaccggggcacgccggtggtggtcaagatggagaaccccaactggtccatctccgagatctcctcgccggaggacgacgacgaggacatcttggccgccgccgccgccgccggccgccgcaacaaggggggccgcaccaagaacgccaagcagatcaggtgggtgctgctcctcaaggcgcaccgcgccgccgggtgcctcgcctcgctggcctccgccgccgtcgcgctcggcggcgcggccaggcgcagggtggccgcggggaggaccgacgccgaggccggcgtcgtggccgccgccggcgagagccccgtggtgcgctccaggttctacgccttcatcaaggccttcctcgtcgtctccctgctgctcctggccgtcgaggtcgccgcgtacttcaacggctgggacctcgccgcctccgcgctcgcactccccgccatcggcctcgagtcgctgtacgcctcctggctgcgcttccgcgccacctacgttgcgccggggatacagttcctcaccgacgcctgcgtcgtgctcttcctcatccagagcgccgaccgactcatccagtgcctcggctgcttctacattcacatcaagcgcatcaagcccaagcccaggtcgcttgcattgcctgatgcggaggacccggatgccgggtactaccccatggtacttgtgcagataccaatgtgcaacgagaaggaggtgtatcaacaatcaatcgcggccgtgtgcaaccttgactggcccaaatccaacttcttggtccaggtgttggatgactcggacgacccactcacacagactctgatcagagaagaggtggccaaatggcaacagcagggtgcccggattgtgtacaggcaccgtgtgctgagggatggttacaaggctggaaacctcaagtcggccatgagctgcagctatgtgaaggagtacgagtttgttgccatctttgacgcagacttccaacctcatcccgactttctgaagcgcactgtgccacatttcaaggacaatgatgagcttgggctagtgcaagcaagatggtcctttgtcaataaggatgagaacctgctgactcggttgcaatatattaacctttgcttccactttgaggtggaacagcaggtgaatggagtgttcttaaacttctttgggttcaatggcactgctggggtgtggaggatcaaggcattggaggactcaggtggatggttggaacggacaaccgtggaggatatggacattgctgttagggcacatctccatggctggaagtttatattcctgaatgacgttgagtgcgaattgcccgagtcttatgaggcttacaggaagcagcagcatcggtggcattcgggtccaatgcagctattcaggctttgtttaccggacatcatcaaatgcaagattgcattttggaagaaggcgaacctgatattccttttcttcctgctccggaagctcatactgcctttctactccttcacgctgttctgcatcatcctcccgatgacgatgttcgtgccggaggccgagctccccgactgggtggtgtgctacgtcccggccctgatgtccctgctgaacatcctgccgtcccccaagtcgttccccttcatcatcccgtacctgctcttcgagaacaccatgtccgtgaccaagttcaacgcgatgatctccgggctgttccagctggggagcgcgtacgagtgggtggtgaccaagaagtcgggccgctcgtcggagggcgacctcatcgcgctggccccgcccaaggagcctgtgaagcacgcgacgaggacgggctccgcgccgaacctcgacgccgtcgccaaggaggagcaacagcagcagcagctggcggcgtcgaggaaggacgccgccgcgaagaagaaggagaagcacaaccggatatacaagaaggagctggcgctgtcgatgctgctcctgaccgcggccgcccggagcctgctgtcgaagcagggcatacacttctacttcctcctgttccagggcgtgtccttcttgctagtaggccttgacctcataggcgagcaggtcgagtgaaatgtgtaaaacaggaaattgataggtgtggggaaaaaaaaacggtgagtcaccatggatggaagtgctgggagaggagggggatgtgttatttctggctggctgccatggcacggcggcatggcatggcatggcagcagctcttgggcgcttcttggctgagattcggaacatgcgttgtgcggttgagccttcccggatctgtcctggctgcacggcatggtatcccacacgtgagagagcaacctcctccgcctgtacggaggtgtagatacagttttctcttgttttttcatgtgtgtgggcctgtagga

SEQ ID NO: 29099 - DNA, 2695 bp, Zea Mays
ccaccatacagagcccacactgcagagccccctcttgttcgcgtccgaaccagattccccgtcccctctagggttacgcccactctcccccgccgctccggcgatgtcgtcggagcctctacccgcggagtcacccgaggcgcccgcttccgcctctggctccccttcgaaggacgccgtcggcactgaggctagagctgttagaaatctgtgggttggtggcattagcccatcgatttcaaaggaggagcttgagggggagtttctgaagttcggaaaagttgaaggtgttgcattctcccaagatcagacttcagcatacatagattttgagaagcttgaagacgcaatttctgctcacagatccttgaatggaaaaatgctaggtggcaaggaattgtgtgttgatttccagaggtccaagggaagagcggaatggtcagaagctagcagcttcaatggtagagtaccagggccagtgggtgataagagaggcagtggccctctgaagagttctgctggagtgcggatgcgagaggcacagcctaccaatgttctctgggttggttttccaggttcttatagagtcattgatgaggaggcacttaagcatgccatgtcagtattcggtgtcgttacgaagataaaagttttccagacaaggcagtatgcttttgttgagtttgcaaatgttgcggaagcttgtaatgctaagatgaatctagatggtcatcttttcaatgatcccaggattcagattcttttctcaaacagtgggcttgcaccaaacaaattggacaacccaacatcggttgctggatttcctagttcagaaatctattccagtgatggtcgtctaggccctggtattggcagtggaactttgcaagggtatgatccaccaagaggaggaagaacaagatattacgattatgcgggtatgcctactccaggtggtatcctttcacaacctgaaccatttgatccaagagaagcaaaaagaatgaggcttgctgctggtgctgacccttacgatgtaagggcaggcagcacaggtctttattctgctggataccgtcatcagggcagttctgtgcacgctgagggaagctcaagtcctgttattcgagtccggggcacagtgcatcgtacatcatacattgagcactgttggcgtggcagtattgccaaaggtggatcccctgtttgtcgtgctcgttgtttgcctataacaaagggcagtgacatacctttaccggatgttatgaattgctcagctcggactggattggatatgctggcgaagcactacgcagatgccactggatttgacattgtctttttcttgccagatagtgaagatgactttgtttcttatactgagttcttgcgttacctgggctcaaaaagtcgggcaggggttgtaaaagttgatgcagggactacattatttttggttccaccatcagatttcctaacaaatgtgttacaagttgatggtccagagcgcctttatggtgtggtattacacattccacaaatctctgctgctgctgcactgaggccacagttaactgggaccgaacaacaaccttactatgatgaaaggggaactctgcctacttcacaaagaaagtatagtatcatttctcctaatgacagtggccaccttgatgctgattatcggacatctttgcatgaggattcaatgcatcggttggggcatattcctggaaggcctcgggtggatgaaggacaagcagttcaaccagctcttgcaggttttcctgctaatcaagcagctgggctgcaagtacaatcttcactcaagcctgacattatggctacattagcaaaacttctgcctagtgtgcaatcgtcaccgctggtaagtggtcagatgaatgccatagacagaacatcgcagatacaggatccatccatgctttcaaaagtatggaatcctgaaaaccaagttactgcttcaaattcatcctttgggcaaatggctaatgttcagcatccaggacagcagtttagtggccaagcttcagctgctcatttgacaaactatgggaacatggtgagtgctcaggagcgctcaatacaacatactgcttacaaccctgaagttactttgaacttgccaccaccacctccacttccaacaataccacacagttctgctacattacagtctcaaggtggccacagtttgccctcacagacaaaccagcaactgtatcagccagagcagtattatgtgccccaaaacaactatggtccattagttccagttagccattctaaccttcaaatcagcaacactaacaaccccacccttaccatcccacaagtgaaccctggacctccaacaaataatcagattgggaatttggcccagccacagcattctatgccactgcatgttgatagagcaagtcaggatttctcttctcaggggcaacaacaaaatcgtggtcctggtgctgcacaagctcccgaggaggataaaagcaagaagtaccaggcgacactccagttagctcaaaacctactgcttcagttacagcagcgtggatctggaaatcaatcctgagacctaattattgcttcagggtgaacttactacgcaccagtgatagaaaatcttcgaagatatcgcctgcgtataaacaatgcggcaggagtcgct

SEQ ID NO: 29100 - DNA, 1017 bp, Zea Mays
atccctgcatcgcaccctcccgggccgccttctcttctccagcgtccgatctcccactcccctccctcaccgcagctctcccacctccgccctccccccgcacgcgctcgccacctcgccctcccctccacgttgctcgcacccgcgcttatataagtgcaggaggagctcatggcggaagctccggcgagccctggcggcggcggcgggagccacgagagcgggagccccaggggaggcggaggcggtggcagcgtcagggagcaggacaggttcctgcccatcgccaacatcagtcgcatcatgaagaaggccatcccggctaacgggaagatcgccaaggacgctaaggagaccgtgcaggagtgcgtctccgagttcatctccttcatcactagcgaagcgagtgacaagtgccagagggagaagcggaagaccatcaatggcgacgatctgctgtgggccatggccacgctggggtttgaagactacattgaacccctcaaggtgtacctgcagaagtacagagaggtgcagggtgatagcaagttaactgcaaaatctagcgatggctcaattaaaaaggatgcccttggtcatgtgggagcaagtagctcagctgcacaagggatgggccaacagggagcatacaaccaaggaatgggttatatgcaaccccagtaccataacggggatatctcaaactaatggaggtatggaccttttctgcgacagctgctcttacctgagaactgatgaggtcgctcactaggagtaagtcgcttccctgggaacggttgtcggctagcaccgctcttgtatgtatattaagagtaacttaatgattggtcttttggctgcgatttgattacatgtatttgtatcgggaggcataaatattgtgtaatttgtgttaaagactggtgtaattgaactatgggaagagctgctttggttgtaaccatattttgatgcccgtatattaggcaaaaatagaaggctgtgggcgtgcacaac

SEQ ID NO: 29101 - DNA, 3243 bp, Zea Mays
caagaacacacccctcatgacgacaagaatggctgactcttatcttgtactcctcttcctactagtgttcgtcacctccaactccagctcgcaatccatggcgcagatcactgacgcaagcgagctagcaatactcctagcaatcaagaaaggctggggcagcccatctgctctcagctcatggagctcccagaacgcttcctactgcagctgggcaggggtcagcgctctacagctgctcggctgctcggttccttgacctctccaacaatcgattctccggtgccctcccagctgacatcaacaggctgtcgtcggcgatggagcacctcaacctgtcgagcaatggcttcacaggcagtgtgccccgggcgattgccgcgttcacgaagctgcggtccctggttcttgacaccaacagcttcgacgggacgtatccgggctcggctatcgcaggcctcagcgagctcgagacgctaactctggcaaataaccccttcgtgccaggccccatccccgacgacttcgggaagctgacgaagctgcagacactgtggatgtcggggatgaacctgactggtcgcatccccgacaagctgtcgtcgctcactgagctgacgacgttggccttgagcgtaaacaagcttcacggtgaaatcccggcgtgggtttggagcctccagaagcttcagatcctgtacctctacgataacagcttcaccggtgcaattgggccggacatcaccgccgtgagcctgcaagagatcgacctctcctcgaactggctcaacggaaccataccggagagcatgggcgatttgagggacctgacgttgctcttcctgtacttcaacaacctcaccggaccgattccgtcgagcgtggggcttctcccgaacctcaccgatatccggctgttcaacaaccggctctctggacccctcccgccggagctcgggaaacactcgccgctggccaacctcgaagtgagcaacaacctcctcagaggcgagctcccggacaccctctgcctcaacaggaagctctacgacctcgtcgtcttcaacaacagcttctccggcgttttcccggcgaacctcgcggactgcgacacggtgaacaacatcatggcgtacaataacctcttcaccggcgagttccccgagaaggtatggtcggggttcccagtcctgacgactgtcatgatccagaacaacagcttcactggcactatgcccagtgcgatatcctccaacatcacacggatcgagatggggaacaaccgattctccggcgacgtgccgacctccgcaccggggctgaagacgttcaaggcggggaacaaccagttctccggtactctgccggaggacatgtcggggctagccaatctcatcgagctgaacctcgctgggaacacgatatctggcgcgattccgccttccatcggatcgctgcaacgcctgaattacctgaacttaagcagcaatcagatatccggagcgattccgcctgggatcgggttgctgccagtgctcaccatccttgatctctccagcaacgagctcaccggagaaatacccgaggacttcaacgacctccataccagcttcctcaatctctcctccaaccaactcaccggcgagctccccgagtcgctgaagaacccagcatacgaccggtcgttcctcggaaaccgtggcctctgcgccgcggtgaacccgaacgtaaacttcccggcgtgccgctaccgccgccacagccagatgtcaatcgggctgatcatcctcgtctccgtggtcgccggcgccatcctcgtcggcgcggtcgggtgtttcatcgtccggcggaagaagcaacggtgcaacgtgacgtcgtggaagatgatgccgttccgcaagctggacttcagcgagtgcgacgtgctaataaccaacctccgcgacgaggacgtgatcggcagcggcggctccggcaaggtgtaccgcgtccacctccccgctcgcgggcgcgggcgcggctgcgccggcacggtggtggccgtgaagaagctgtgcagcagggggaaggccgaggagaagctcgaccgggagttcgacacggaggtgaagatcctcggcgacatccggcacaacaacatcgtgagcctcctctgctacatctcgagcgaggacaccaagctgctggtgtacgagtacatggagaacggcagcctcgaccggtggctgcaccccaaggacaacgcggccacggcggcgctggactggccgacgcggctgggcatcgccatcgacgcggcgagggggctcagctacatgcacgacgagtgcgcgcagcccatcatgcaccgggacgtcaagtccagcaacatcctgctcgacccggggttccgtgccaagatcgccgacttcgggctcgcccggatcctgctcaagtccggcgagcccgagtccgtgtccgccgtcagtggcaccttcggatacatggctccagagtacggacgcggcgccaaggtgaaccagaaggtagacgtgtacagcttcggcgtggtgctgctggagctggcgaccgggagggtagccaacgacagcagcaaggacgccgctgactgctgcctggtggagtgggcgtggcggaggtacaaggcgggggaccctctccacgacgtcgtggacgagaccatccaggacagggccgtttacatcgacgacgccgtggccatgttcaagctcggggtcatgtgcaccggggacgacgcgccgtcccggccgtcgatgaagcaagtcctgcagcaacttgcccggtacgaccgcaccgccagcgttgccggcgcgtgccaggacgaccgcggcgtcgaactgggacatctgcccaagggaaagcaaggtcgtcaccaagttgccaagagatcgttagacgccggatcatttttgggtggcgacgaggagagcggcaacttcgtggcccatcctgtttaaattttcagtttaactttactttttcggtatgacgttaaatatttctcgaatgtaaatttttgtggcttcccgtaatatgtgctgcgtgtacacgatgaagacgatagacaaattagggatttactaaaagtaagtgtctcaatttaagtttttcatacgatggtcattgcatatattctaaacaaaaaccatagatttggtttctcgtaacttatgtagtcataatctgcgatttttatttctaagaataaaagatccgttaaag

SEQ ID NO: 29102 - DNA, 5211 bp, Zea Mays
ttcgcttctttctgccttcttcctcctcgcggccggggcgggggcgtgctgctctctcctctccagggagttttctgcgggggttttggttgggttttcttcagcgccagccgtggatgtgtttaacgcaacaaagggcctggagttgaagcacgaatcatcgaagcgcagcaaaactgagacacacgtcttacttcttcacaagttcttggacgatggacatcttcgggagcccattctgctccaagcaagccgtcgcctcatgcggcggatggacggacatactcgactcctccagctgcacgaaccatatcctggaaaccggcaccgccgctctgatcaccgtcgctctcgcgctgcacctcctcgtcgtcaggattactacgaagaccagagcgtccgcacgccgcccccctgtcgcgcccggcctgccgctgcagctggccggcgcggcgttcaccgcctgcttgggcctcgtctacctcggcctcgcgtcgtggatgctggggagcaacttcactcagcacgcttccgcttacctcccacactggtgggtgacggcactgtcccagggactctgcttggtcctcgccggcttcgctctcagcggcgtcggaggagcacgtctcctcgggccaatgtctgcgcgcgcgtggtcggctctgctggccgcgtacgccgcgttcgtcgcttgttcctcggtcgttcacatggttgcggatagggcactgaccatgaagggttttctggacgctctgttcctgccaggtgcactgctgcttgtctgtggcgcttggtgcgtcaaggaagaggacggtgatggcggaactggaactgctgcttctttgtataagcccttgaagactgacgacactgttgatgatgagaggggtgggtctgagagccatgtgaccccgttcgctaaagccggggttttcagcgtgatgtcgttctggtggatgaacccgatgatgaagacgggctacgagaagccgctcgaggagaaagacatgccgctcttgggtccctcggaccgagcgtacagccagtacctggtgttcctggagaagctcaacaggaagaagcagctgcgggcacacggcaacccgtcgatgttttggaccatcgtttcttgccagaaaactgggatcttggtctcgggtctctttgcactgctcaaggttctcacgctgtcttcgggcccggtgcttctgaaagcattcatcaacgtctcgctcgggaaagggtccttcaagtacgaaggctacgtgttggccgtagcgatgttcctctgcaaatgctgcgaatctctgtcgcagaggcagtggtacttccgcacgcggaggctagggctccaggtgcggtcgttcctgtcggccgccgtctacaagaagcatcagaggctgtccaactcggcgaagctgaagcactcttccggcgagatcatgaactacgtcaccgtcgacgcctaccggatcggcgagttcccgtactggttccaccagacgtggacgacgagcgtccagctctgcatcgctctagcgatcctgtacgacgcggtcggcctcgccacggtcgcggcgctggccgtcatcatcgccaccgtggtctgcaacgcgccgctggccaagctgcagcacaagttccagagcaggcttatggaggcgcaggacgtgaggttgaaggcgatgtcggagtccttggttcacatgaaggtcctgaagctttacgcgtgggagacccacttcaagaaggtcatcgaggggctgagggaggtcgagatcaaatggctgtcggcgttccagcttaggaaagcgtacaacagcttcctgttctggacgtcgcctatcttggtctcggctgcgaccttcctggcatgctatcttctgaagatccctcttgatgccagcaacgtcttcacttttgtggccaccctgcgcctcgttcaggatccgattcggcagataccagacgtgatcggagttgtgattcaggcgaaagttgccttcaccaggataaccaagttccttgacgcgcctgagctgagtggacaggtcaggaagaaaagctgtctgggggatgagtatccgatagtgatgaattgctgcagtttctcgtgggacgagaacccgtcgaaaccagctctaaagaatgtaaatctggtggtcaaaactggacagaaggttgcaatatgcggcgaggtaggatcaggaaagtctacactgctggctgcagttcttggagaggttccgaaaactgaaggcacgatccaagtttgcgggaaaacagcatatgtttctcagaacgcatggatccaaacaggaaccgtgcaggacaacattctctttgggtcttcgatggacaggcaaaggtaccaggaaacactcgagcggtgttctttagtgaaggatcttgagatgttgccgtatggagaccgtactcagatcggcgagcggggcataaatcttagcggcggtcagaagcagcgtgttcagcttgctcgtgcattgtaccagaatgcagacatctatctccttgatgaccctttcagcgctgttgatgcccacacagcaacgagtctgtttaatggatatgtcatgggagctctgtcagacaagactgttcttttggtgacccaccaagttgattttctgcctgtattcgattctattctgttaatgtcagatggtcaaattattcgttctgcatcttatcatgatctattggcatattgtcaagaatttcagaaccttgtaaatgcccataaagacactattggtgtttcagatcttaacagggtgcctccccatagagaaaatgaaatattgatcaaggagacaattgatgttcatggaagcagatacaaagagtctttgaagccatcaccaacagatcaactgattaagacagaagaaagagaaatgggtgatactggtctcaagccttatattctctacctgcgtcagaataaaggcttcttctatgcttctctgggtattatttcccatatagttttcgtatgtggccaaatatcacagaattcatggatggctactaatgtcgagaatcctgatgttagtactcttaagttgacttctgtgtacattgcaattggaatcttctcggtgttcttcttgctatttagatcattagcagttgttgttcttggggtcaagacatcaagatccttattttctcagttactaaactcattattccgtgcaccaatgtccttttatgattctacccctcttggaagaatacttagccgggtttcttcagatctgagtattgttgaccttgatattccgtttggcttcatgtttagcattggtgctggcataaatgcatatagcaatctaggagtattggctgttgttacatggcaagttctgttcgtctctgtgccaatgattgttttggcaatcaggttgcagaggtattatttagcctcatctaaggaattgatgaggatcaatggcactaccaaatctgctctcgctaatcacttgggcgagtcgattgcaggggctataacaataagggcttttcaggaagaagatcgtttctttgagaaaaacttggaacttgttgacaagaatgctggtccatatttctataattttgcagcaactgaatggctcattcaacgtttggagaccatgagtgctgcagttctttctttttctgcccttatcatggctcttcttcctcaaggaacttttaaccctggctttgtaggaatggcattatcttatggtctatccctgaatatatcctttgttttctctatccaaaaccaatgccagctagctagtcaaatcatctctgtggaaagggttcatcagtacatggacataccaagtgaagcagcagagattattgaagaaaatcgaccagcaccagactggccccaagttggcagggtggaccttaaagatttgaagattagatacagacaagatgctcctcttgtattacatggaatcacctgcagtttccacggtggagataagatcggtatagttgggcgaacaggaagtggaaagacaactttaattggtgcactgtttcgtcttgttgagccaactggagggaaaataattatagactctatagacatcaccacaataggcttacatgacctgcgttcacgtttgggtatcattccgcaagatccgacactctttcaaggaaccataagatataatctagaccctcttgggcaattctctgatcaacaaatatgggaggttctaggcaaatgtcagcttcttgaagctgtccaggagaaggagcagggattggactcacttgttgtggaagatggttcgaactggagcatgggtcaaaggcagctcttttgtttgggacgtgcacttctaagaagatgccgtatcttagttcttgatgaggccacggcatctatagacaacgctactgatgctatccttcagaagacgatcaggacagagtttagagattgcactgtcatcactgtcgcacaccgtatacccaccgttatggactgcgatatggtacttgcaatgagtgacgggaaagtagtggagtacgacaagcctacaaagctcgtggaaaccgaaggatctctcttccgtgatcttgtcaaggagtactggtcatacacatcgaattgaaatatctaggagaaactgtgacaatcacatgttcactcgttgcagtctcttaaaaaagagataacaggagcctgttctcacacacatccgatgaactattctatctcaagtccgaagtagaggtgtcaggcattgtcgggaagtgctttttgttaactagttgaacagggggaaacctgtcgtcccttaaaaaaaaggaaacctccagcgtttttttgctccgatattgagcgaataaaccgaaatatctagtggaaggcgcatcaagtatgcatccttgatactgcatgttcacagaaatgcttgtgcggcaggctgttccaaggctttaaactttatggtgctttacattcctaataaaccgaattgtgtatatgatgtttgggaaaatggtgatttttcaggtttcagctccctctcttgctcacgtttaatgtattatcagtgtaaattcatccgtgattggatttaaggcaaccaatttgttggtacgtagctctgttttcacagcgtgtgcccttcaaacttataactcttgggctccctcatatcc

SEQ ID NO: 29103 - DNA, 3141 bp, Zea Mays
tttgcatacacaccgctacgcccccggctccaaccctacccccctccgcctcctcgccggcgcgctctaccccgcctcactccccatcagtgtctctcatcggcggctctccgggcttcacgttggtccggggtacctctcgtgcgatccgcgcgcaatggagcaagatcaaagcccagccgtcgacagcgcggattctggcgccgcggcttttgattttgcgactggcaatgcacctagctcggctgtgaccagcggaagcgccgtggcccctgacggtggggctcaggcagctgatacttctgcctaccaggccgagcacacggagttgaatgggacgactggcgatatgtctaattaccaatctgcaggagctgcagagaatggcacagccgtcaccgagataggcgagccggttcctgagccatcctacgaggaagctgtgctttcagcagaagaggctagattgtggagtgttgttactgcaaattgcttagatttcaatgcctggaccacacttattgaggagacggagaaaaatgctgagaacgatattttgaagatacggaaagtgtacgattcatttcttacggaattccctctttgctttgggtactggaagaaatatgctgatcatgaagcgagacttgatggtgtcaataaagttattgaggtgtatgagcgagcagttcttgcagttacttattcagtggacatttggtataactattgtcaattcgcaatttcaacatatgatgacccagatatcgtccgaagactgtttgaacgtggcttggcatacgttggaactgattatcgctccaatattttgtgggatgagtatattaagtatgaagagtcactggaggcatggagtcacctcgctgttatatatacaagagtattggaacatcccatccagcagcttgatcgctattttaattgcctcaaggaattggcttcaaagcacagtttttcagaaatacttactgcggaagaagcctcggtgtatgttgtcacgtctgagaccagtgctcaagcgcctgatggtgacacacatcctgatgatatcgataaggctggtcaaccagaactttcatctttggcagatgcagaaaaccttgcaaagtatgtctccatgagggaagagatgtacaagaaggctaaagagtacgaatctgagatcattggttttgagctagctattagaaggccatattttcatgtcaagcctcttgacaatccagagcttgaaaattggcatagctaccttgactttatcgagaaggaagaagacattaataagtatttggacgaagcttcctttgtaatgggatgttgaactgaggatagagcgtggacataatgtttggtttcgatgaggctaagtatttgcttaatgctcaccttcttaaccatctatctatcgagcaggatggtccctcctttcttatggaggggcctccataatcagctaatggagtaatctgtgtgaacttctcttttttttgtcaataccatatccttactatcattatttaccccctttatttcctcacatgcacaaggtttctgatggtatgctaaattgttttcaggttatcaaattgtatgaaaggtgtgtgattgcatgtgctagttattcagaattctggatccgctatgtgcaatgtatggaggataaagggagtctagacctagcaaacaatgccctggctcgtgctactcatgtgtttgtcaagaagcagccggagatccatctatttagtgctcgctttaaggagcttaatggggatatttctggagcacgtgcagaatatcagcatctttactcagatttatgtcctggctttctagaggccatcgtgaagcattctaatatggaacaccgactgtttatgaaaaggccatcgctgctgagaagggaaaggaacagagccagctcttgccgacgttgcttattcagtactcccgtttcttatttttggccatccgagatttggagaaggcaagagaaatattaactgtgctgcatgagcagttaaatgtaacaaaaacagtgcttgaggctgtcattcatctagagtcaatttttccatgcgaaaagcgtattgattttttagactcacttgtggagaagtttgttacacctgaatcatctcagggagaggtggcaagtctagttgacaaagaggaaatatcttccatatttttagagtttttggatctctttggggatgcaaagtcaatcaagaaggctttaactcggcatacaactcttttttcatgtaagagaagcattctgccatcaaagaaacggaaagcagatgacactgttgtctcagacagggacaaatttgctaaaactgtggttactcagtcagccacgggaactgatccaaatgcttccaatcctcctgtttggcctgcaacttctgaagcatctgggcaacaatggggagcttcttatgcacagcaggctgcatatcctgcatatggaacttacgactacagccatcaaatgccccagcctgctcctcaagcagctgcctatggtgcttatcctccaacatactctgcacaggcctatacacaacaaagctacccacagcctgcagtaattccagcagcaccagtaccagcacctacagcgccgtcagcttatcctcaacaacctgcggcagctcaaccttattatggcacaacctactactgataagtagagtagtcgtggatggtgatccgatgagcctgttaatctaccttttcgcatgtgtggttgctctgtactgccattgtttagctcgcctttagacgaatgctagcgacgagatgatcacttgagaacaaatctgagattcgtacaatcagcatttttgtcgctaggagttgccattgttttcatgcaatagcataatctactttagacgagatagcgttgttaaccatgaatatgaacataatcgacataattcagtgttcatgcctcctttcgtactgtatttttaccccaccagtggtgatggcgggattcctgtcaagcacgctcactggtggagccctccgaacaaattgtcagctaatggctcacgatctgcgactacgcagttgactaatttatactgtgtcaatgctcaacag

SEQ ID NO: 29104 - DNA, 541 bp, Zea Mays
tttcatgagaacaatggatgtgatggagttctattctttattaaggatcttccccatccaaacgagaagacatttttggcggtgcgtgatgaggaatgtgttgagagcgtttagacttttgggctcatcagcaaggacggtgctgttgttcgacagaaggcaccggtgacagtgaggacaagctggaagtgtactgccacccccttcagttcggtgcagattgtcaatggttgctccttcagaaatgttgctgagcagccccagtgtcactgactctggcagacaatgttgttccagggaatccaggctatgcatcagcctagaccaacgatcaagaccatgctgctcttgttcactcatggtagcgagaaagaactaggcttcggaggcgccgtgatgtgaatccccaaatcagcacgcataacaacctggattggagcaatgtcatgagaaggacagcaactagcaaccaatcgttccccaacacgcggatcgaccaaggaattttatgtgaaagcatgcgagtgtttgcgggtgtttg

SEQ ID NO: 29105 - DNA, 3110 bp, Zea Mays
ctccgactccgactccgagggcggtgcgagtgaccttgcccttgtttggattggacgacgactgggtccgcgagctgccagcgcggtctcccaccactatccctctctcccctctccgtttgtctccatcctttctacctcggctgctgcgttgcgtgtggcgctgtgcttgggcagacgtgggcaccatgcctgggtgacttggtgtagcactgtagctgtggcatggagctgaggaagacgacgacgggggagagaagaatgctccccgggtgctaacttggccgccgctgctcaggggacgagtcgagggggagaagaggaaagtccagtttcttcagcttcttggttggatgcaggaaagctatagaggattactttgacaagtttacagatggctctgaacctgtgatatgtcctgttacaaagatggccatgcagagcaagacactgaggagtaatcttccgttgaagagcacaattgcagagtggattacaaggaatgaagcgacacgggtcaggatcgcacgcaccgcgctctctatggcgaccacagaggctatggtgcttgaggccatacatgagctgaaggtgctggctaggctgaggagaaagaacagggatcagatgcacaagattggcatcaccaagttcctagcacggcttctggaccacaaggatgcacttattcgctgtgactccctcgacctcctctgcttgttggttgaggatgatacaggaaaggaaatcatagcgaaaaccagagccgtctcaaggacaataaagctgctatccagcagtagtactgatgagaggcatgcatctatatctttcttgctagagctttcgaagtcagagttgctgttggagaacattggatcaactgctgggagcatactgatcctcaccacgatgaagtttaatagctcatctgatcctattgctgccgagaaggctggagaagtcctcgagaacctggagaaatgccccaagaatatcaagtacatggctgaaagtggctacttggatcctctgcaaaggcacctagttgaaggaccagaagatgtgcagatggagatggtgagctacctcggcgagctggtccagaagcaggagatgaccatcaatatagcagggagtgcatcagagatcctcatcaaaatggtgtgcagtggtaatacggcaattcgaaaggcgaccctcgatgtcctggttcagatctcgtcccaccaccccaacgccaagacgcttgtggatgctggtgccgtccctgtcatggtagaggagctcttcatacgaaagattgatgatgagcccatgggctctaagacagaggctgccgcggtgctcgccaacatcgtcgagtctggcttggatccagaggccatcaccgtgaacaaggaaggccacgtcatcacgtccaagtactcggtatacaacttcgctcacatgctcaagtgctccatgcctgacaccctcaacctaagcattgtgcgcgtgctgctcgcgctgaccgctctccccaagcctctcgccacggtggtctcggtcatgaaggagcaagacagtggacagacggtgattgagctgatgggctcgctgacagagtcgcttgtcatcgccgcaatgaggctgcttattgcgttgtccccgcagatggggcacaccattgccgagaagctgtgcaaggccccggggcagccagggaggcttgtcaagagcattggcctgcacgggcggatcatggagcggcacgccatgtcagctactctcctggcgaagctgccgtaccagcacatcgctctgaacctggcgctgatcaaccagggcgcgatggttaccgtgctagccaagatagaggagatgcagcgcggcgagacgcgggcaagccgccatgcgaaggcgtatatggagggcctcatgggtgtgctggtccggctaacgacgacgctgtatgacccggacgtgctcttggcggccatggatcacaacctcacgtcggtgctcacagatctcgtgcggtccgcaggcagcgacgaggtccagcggctcgccgcgattggtctcgagaacctcagcagccagtcgcccaacctttcccagcccccgaccgaggagcggcgcccgaagaagaagaacatcctccggcgcctgcgcgaggcgcacgcggggcgggtgcacgacaaccggaggccgccggcgcacagccgggtttgcccggtgcaccgtggggtgtgttccccgtccaccacgttctgcctggtggaggctggcgcggtggagggcctcttgtgcgtcctggagagcagcgagaacgggcgcgtggtggaggccgcgctcggtgcgctgtgcacgctcatggacgacgcggtggacgtgacgagcggcgtggccgtgctcgcggagcacgacgcggcgcggcacgtgcttcgcgcgctgcggcagcaccgtgacgacgggcggagagggggcggcggcgctgccgcaggcgagacggtcactcggaggtgtttctgggcggtggagaggttcctggctcacggcagcgagcggtgcgtgagggaggtcaccagcgatcgggcgctgccgagcctgctggtgggcgccttccacaagggcgacgccgccaccaagcaggtggccgagagcgtgctccggtgcctgcaccgcatgccggattactccgcgacctacgaatccgtcgaactgtaaccaacacatgacgcgcacgactgcgcatgtcttgcctctcttttatcaagcttcgtctcttggttatgtttgtaaaattggtttttgtgtgtaacatgggttgatgtattgtttggtgtagctaaaggaaaatagaaaaggaaaaactgaagatgcagttatgtatgcaagtataaccaaagtttatagcaagggaagatactagtcttttgattcttcttactatttttttgtgtgtgtgttcagtagttcttttttagggaccgtgttcaattcagtaggttttgacaagagtgcctcctaaaatcagtctccagataatttgttttgtaattttgatgtttcgtttgacatgcctctctagccttttctcgacacgactactagcaagtattccc

SEQ ID NO: 29106 - DNA, 477 bp, Zea Mays
tttccggtggctcggacccatctatcagcatgggtccacaggggaagtgggagcgttgttgcctgtggttgggacgttactacagtttagtcctgacgagctcaagaagtgccagcaaggtgtcctttcgagtgtggtctcttcacaagctactgcagtgtcagatggcacaaccacacagaattcgttctttgcaagattctcgttctgaggcattgccctcgaagatcagcagtttagctgggggagaggatgtcctgagccttcagattcacagttttgttgaccgtagaaaacgtttattcatttattagttacaagcgtccttacccccccccccccccccctctccttttgtaaaagtagtgcatatagcaggattaagataaacacatgtaatggagtatatattgtgcaactgccatatattatatgatatatagcggctcatattaggttgccgaatgtagaagggaa

SEQ ID NO: 29107 - DNA, 148 bp, Zea Mays
tacaactaggagtacgagctcatctaggtggagtctcccgttcaactttatggcgccaaggattaatgtttagtttgctttattgttctcatttatttttgtaagacttcttctatgtaataatgatatttgtgacatttatctccat

SEQ ID NO: 29108 - DNA, 741 bp, Zea Mays
tttgtggagaataattgatgatttgttcatttgcagaaactaacctggcatactaccaaagatgttttggattgtcaaatatcagttgtagttattcatgagtgggcgactcaattcaggtgtatgatgtcactccttttatggatgagcatcctggtggagatgaggttttgctagctgtaactgggaaagatgctacagctgattttgaagatattggccacagtgattccgcaagggacatgatggagaagtaccacatcgggcagatagatgcttcaacaatcccagcaaagcgaacttatgtgcacccccagcaagcgcccagccactcagacaagaataatgatctcctcatcaagatcctgcagttccttgtgcccattatgatcctgggccttgcatttggtatacgtcagtacaccaaatcagagtagtactgttcttgaagacttgcctttggagtctgttttatggtaatggtttggatgagaacagttcagtaattgcttagtgtatttgtcaggtggatgttatctcattggtcatatactatgtattatggacatccatgtgttgccgaaatgtgctcttttccccatgaaccgaggcatacaagatgaattctgactcttccatgaaccgagtagttgataccagattattgcagtaatgtttgttttgtgtatgcgcacttggatgtcgcaataaacagaaccaaaccataaactacgttcatcg

SEQ ID NO: 29109 - DNA, 3371 bp, Zea Mays
cacgcgcacacacacgctgctgaatgctgatgccgcttcgcccctccgccgtctcgcttaaatgcccaggcctaatcattcccacccccagtccctctgccctctctctctctctctctctctctccgtgccccccaggccctcctcccaggctcccagcccccctcccgtccctctctctgtctctctccacgcaccatggcgatctccgagctcgggtgagctgacaaggtgggcgtcccgtacctagtaccgctgcctgcctcgggtgaacgagcgtcggttcggctcggtgcagaatgcggccgatttgagcgaggacgggaggggcgcgatggatgcgggttcgggcggattcgcgaggaggctctagaggaggttaggtttcggccccggccccggcccggctgtgggagatgagctcctcgtccgcggccagcatcgggcagcagccgccggaggaagagaagaagtgcctcaactcggagctgtggcacgcgtgcgccggcccgctcgtctgcctccccaccgtcgccacgcgcgtcgtctacttcccgcagggccacagcgagcaggtggcggcgtcgacgaacaaggaggtggacgggcacatccccaactaccccaacctgccgccgcagctgatctgccagctgcacgatgtcacaatgcatgcggatgtggagacggatgaagtgtacgcgcagatgacgctgcagccgctcaacccacaagagcagaacgacccgtacctgcctgcggagatgggaatcatgagcaagcagccgacgaactacttctgcaagacgctgactgcgagcgacaccagcacgcacggcgggttctctgtgccccgtcgcgcggccgagcgtgtcttccccccactgtgtggtttgtaggatttcacacagcagcctccagcacaggagcttattgcacgggatattcatgatgtcgagtggaagttcaggcatatcttccgagcccaaaagacacctgctgactactggctggagtgtgtttgtcagtgctaagagacttgttgctggagattctgtgctattcatatggaatgagaaaaaccagcttctgcttggaatcagacgcgccagccgtccacagactgtgatgccctcttctgttctttcgagtgacagcatgcacattgggctccttgcagcagcagctcatgctgctgcaacaaacagccgtttcacaattttctttaatcctagggcaagtccatcagaatttgttatacccctttcgaaatacatcaaggcagtttttcacacgcggatatcagttgggatgcgattcaggatgttgtttgagacagaggaatctagtgtccgcaggtacatggggacaataactgaagtgagtgatgctgacccagtgcgttggcctagttcctattggagatcagtgaaggttggctgggatgaatcaacagcaggagaaaggccacctagagtttctctgtgggaaattgagccactgacaacctttcctatgtatccatccctcttcccactgcgagttaagcatccatggtattcaggagttgctgctcttcatgatgacagcaatgctttgatgtggctgagaggagttgctggtgaagggggctttcagtctttaaacttccagtcacctggtgtaggttcctggggacaacagagactccatccatccttacttagcaatgaccatgatcagtatcaagcagtggttgctgccgcagctgcttcccagtcggatggttatctgaagcagcaattcctacaccttcaacaacctatgcagtccccacaggaacagtgcaatctcaatccgctgttgcagcagcaaatactacagcaagggagccaacagcagatggttagtcctgatgctcaaaatatccagtccgtgctcaacccaaatgctattcagcagcagctccaacaattccagcagatgcagcatgctcataatgaccagaagcagaagattcaaccagatcagccgtaccaagttcctagcagtgcggttctctcgagtccaacatcattaccaagccatttgcgggaaaaatttggcttttctgatcctaatgtcaactcttccagcttcatcagctctagcagcaacgagaatatgctggaatcaaacttccttcagggaagctcaaaatctgtggatttgtctagattcaaccaacctgtagttagcgagcagcagcagcaacaggcatggaagcaaaagtttatttgctcacaatcgatgtcttttgggggctcggtttcacttaactcacccactaccaaagatggtcctgttgacaacaaaattggtcgtgatgtgcagaaccagaccctttttagccctcaagttgactcttcctccctactgtacaatatggtacctaatttgacctcaaatgttgcggataataatatatcaacgattccctctggatcaacatatctgcaaagtccaatgtatggttgtctggatgactcttctggtttattgcaaaatacaggagagaatgatccgacaactagaacattcgttaaggtttacaagtcaggatcggtggggagatccttggacatcacccggttctctaattatgctgaacttcgagaggaactgggtcagatgttcggcattaagggtcagttggatgaccctgatagatcaggctggcagcttgtatttgtcgacagggagaacgatgtgcttctccttggagacgacccgtgggagtcatttgtgaatagtgtatggtacatcaaaatactttcacctgaggatgtgcataagatgggaaagccaggaaacgatccacgctacctatcttaaattgatacccagagctctttcgggctcccgtgacgattctgtggcacactgtagcactgtccatggcggtccggtgtgctgtgctcccatgttcgctggtgtcacctctagcatgtacaccgtgcgcgtcttcagaactcccccgttacttgtatccggtgcaggccaccgctctggactgatatcttgtaggttccacttaggaatcagtatcagcgactctatcctagttggtttgtagctcgcacggcactcgttcttgtgtcgcatcgaaatcttcaggctaaatgcttagttgaaactgttcccgtgattcttaagctatctatgtatttgaggattccccggcatgctttcgacgatgaactgcaataatctgaatgcaggaggattgtttgaatgctatcttgtgtctgccgggtgctgggtgcaaggttgattttgacgcatctagctttagcttatgacgtttcaggtgttctctgtctgaaactatttttatgcatggtgagttgatg

SEQ ID NO: 29110 - DNA, 1899 bp, Zea Mays
ggtttacttgtcacttgcatgcacgtgacgaacgccatggcgcttgcggttcgtctcatcggccgccgccggttcctcccgccgccgctcgccgccgccgttgctcacctctctgccgcttcccagagcccgtgccaccaccaccacccacttccgacccccgcgctcccgttgccccctcgtgagctccatcctttcgctctccactggcgaagcttctcctggtactcccgctccggctccgggtctgatagcagtcccggcaccgctgccgcggacgctcgcggagaggacgtgtacatcgagaaggaaagcgtgcacttggatggcgtgacaatcgttgatgacgggggaggggtcgtcagtgaggcgggtgctgcggcggatgccgtgggagatgccgccggcgccacggccgacggcgtcgggggagtgccggaattggctgttagcacagttttggacctcatggacgggatccatagcctcaccggactgccgtggtggatgacaatctcctttttctactgtggccatgagattgtggatacttcccgtcctcatagtgcagttacagaagactgctgaaattggtgaagtgttccgaaaagtgtccacttcattaccccctcctcagcctggaagcaatttccgtgaacagtacactctgttccagaagaaaaagaaggagcttggttgcccctcatttatctggaattttgcctattttttggtacagttcccttgctttattctttggatgacgagtataaggagcatgtgcttgaataatcaccctggatttgataatggtgggattctgtggttccataacttgactgagtttccacatggtactttagctcccatctttcctatcttagttgctggtctgcattacctaaatgttcagatttcttttcaggggtcccagatcaaggatcacccaggaatttttggcttgctggctaagggatgcctggtctactggactacaaatggtttattttctgtagctcagcaattatccttgagaaatgatgctgtccgcaagctgttgggattgccagatactagagctcaggttggttacagagcacaaaagtcacctcttgaggtacctgagatgatgcagtggtcacagcttgaagatgctaacttgcaaacgaaatcgatgccatctgacaagggaacagccagtgagagtacaactcctaattttgcaatgggaagtatggatggaaatatatctgcgtccagctcacctgaggagctacttgaacaagcattacagtatctgggcacaggctgccgagatcaagccattccactgatcaggacagcagtagagagaaacccagatctgtacacagcgttgattgggatgggacaaaccctgttctcaaatagattgtttcccgaagccgcggtttgttttgaacatgctataccaaagattcaagaagatgaccctcttcttgtgcttgcgtattttggggcaggtctttcgaacaagcgtcagggggataatgagacggcaataaaactcctggagagattagcagagctcaaggaaccagaaaagcccatcaacaaaagccgctacttccaagggatgcttgctttggcaagtatattatatagagaaggccggaattcggaggctgccaaatatctgcggatggctattgcttatgatccttctgtagaaaggcttctcaaggaatgcgaggaaggaatggacgatcagccaaagccagaggagaagtgatgtgctggacctgaaaaagccacagtaacagagatagcacaccgcttttgtttttgaacactaaaaccgcccccagctttttaccctttacccatatgatcgtgcaaaacagagtgaagttgaataga

SEQ ID NO: 29111 - DNA, 387 bp, Zea Mays
atacttgggtgtagaatgcttttctttagagctctgaataaagcctgtagagaaacataacctttagttcttagtggagaaagaaaattatagcagacaacatcggcaaataaagttgacgcacgccatcgagtaaaaccactacagcattattagtaaacaaccaattaaaagaaataagtaacaaatatgaaatccacatgatttacaagatgttagactgttttagcagacaacataagcaaataagtaatgtttacttatgtcatactaagcattgatgcacataaggttcagatacacaccaaaaaaagagctaaaaattacaagattccagaattatccataagcaataacaaaccttctctacaccaagtatttaaatta

SEQ ID NO: 29112 - DNA, 207 bp, Zea Mays
tcgtagtcacccggtcgcgcgatgagttgccagccctgacactcgtcctttgtccgtgtcgtttaggccatgatttcctagtccgagtttcaaatccatagtttgtagctcccgtcgtctagctctcaaagacatttctcgccagtgaagcatagtcgccgcgccctgtgtccttgtcgtgtccgtgaagacattgtggagttgccg

SEQ ID NO: 29113 - DNA, 1205 bp, Zea Mays
ctggcacaaagaggactctctcttccagagcggtgtttttttttgtaaccagggggacgagacaattcaacttattgtaacaacttgcgtgtttgctcgtcagttttggcataacctcctgggcccctggcccctttgggcctggatcaattgtctcctagcagggaagagctgaacttcgcagagtggtggaggagatcaactaggagaattgataaatctcagaggaaatgtttcaatagcattgtggctctaggtcttcattgatgcttttctatatgtgccagtgtggattttatatctatagcatcggtgctcttgttgcttgggaaacccgcagaaaagattttgctgtaatgatgtctcatcatatttttccgaattgggaccatcattctcgctcttcatgatgcaagtgatgtgtttcttgagactgccaaattgtgcaaatacacagaaaaagagctgggtgctagcttgttttttggtctcttcgctatctcctggcttctattgcgtctgatttacttcccattttggataatcaaagcctctagctatcattccatcacattcttgaggaagctggatgaattcccaacaactttgtactacatcttgaacacaatgcttctcacattgcttgtattccatatgtactggtggaaactcatatgtttgatgataatgagacagctgaataataaaggacaagttacagacgatgtccgatctgattctgaggatgaggagtaatgggagattcattctttgacatctgcaacgtggcatttcctcgtcaatacttttctatgcctgcttccagaattgattgcttttaatcttggcaagtctcgggaacgtataggaaagtttaatctctgtatattgccttatgatatcaaacatggctagaccgggaatggatctatacatgatgacgggcatagctagcaagcttacttcaaggttccttaaaaaattttggttcacctttatttgatatggggaaagacatgagagggtgtacagctttttcctgaagcttgcagaacccccctctgtaccatgatcaatatacttcacttgtgagtagatttagttctaattgatgataataaattgattcttttgattgggaatgaatctcacctgaaccttaatgatctcatctgatgtgtattgagcattatgatgctatataa

SEQ ID NO: 29114 - DNA, 2069 bp, Zea Mays
gacaacatggctagcacaacccaagaaagatccatagggagggtagcgcgtgcacggtgcacacacatggatcctttggcttgttctagatctagcgacttgggacgcttgctcacaggagattctccattctcgtaagaacagcccaccgtcactagcaacatgccaaattgccaatgacaatatcataagctgcatccaggtcggagatgcccacacagccaccaacacgtacccaactcccacgcagctcggttcagtaaaagctactagcagtagtgggcggtggttggcacatcgcagttgatacggaggcgtagcgtaggctgtactggttctcccgcgtcggcgtcgacggccgtgtccttctcgggaagatggtaatgggggccgcgtccgtcggcacgctgctcgtcgcgctcgccgtcctcgctccggcggtgatgacgcagagctgcgacgacgagctgccggctcagctcgccggcaacttctcggggctcgcctgcgcccccgtctggaacagcttcgtgctccggtacgcgcaggacaaggacaacgtgctgcgggtggtgctgtcgaccatgtacagcacggggtgggtggggatggggttctccaagaacggcctcatggtggactccagcgccatggtggggtggatcggcaagacggggctcccgcacatcaagccgttctcgctgcggggcaagaccccctcccaggtggtcgcggaccagggcttcctcgtctccagcgacaaccacaagcccaccgtgctcgtgcagcaggccaagatctacctcgccttccagctcagcttcaccgagccgctcaggcgccagaacgtgctcctcgccgtcggctccgccatccccgtcaacgaccgcctcgccgagcaccaggataagacctccatcgtattcgatttcaccacaggtccgtttgattattgcttcattcattctagtgccgcctttcactctgagagaaaatcagtcgtggggttctctgcttcgtgagcacagtcattcgaacgaacatttggaagctgcgtgtgcaattcattgtgatctactatgcctctcaaatcagagaaccgtagctcagacaaatggcaaacaactgaagaatgcacttctgctctgacgtcccaatcaccaaaccatccttctcactgaaagaaacaaacacaccgtacttgttttgcaggcagctcatcaggctcgtcatccttcccggaaggtctgaaaaggacccatggggcgctcaacctgttcgcctggggcgtgctactgccgatcggcgccatcgtcgcaaggtactgcaggagatgggaccctctgtggttctacctccacgccggcatccagttcgtggggttcatcctgggcctagccggcgtcgtggctggagtatccttgtacagcaagatccaggccgacgtccccgcgcacaggggccttggcatattcgtgctcgtgcttgccattttgcagatcctggcgattttcctgaggcccaacaaggactccaagtaccgcaagttctggaactggtaccaccactgggtcggcaggctcgccctcttctttgcagccatcaacattgtgctcgggatcaaggtcggcggagcaggcaactcttggaagatcggctacggtttcaacctggccgtccttctgatcaccatcgtcaccctggaagtcctgctctggacgaggtggaaaaacagcaccggttccacgggggcatattagctacttaaccgatttttataggtgtttgtgatggtcagtgaaggaggttcgtattcttttgttcgaatattttcgcgtgtatgcagttgctgtaatgtccgcgtttgctgcgtgatgtgttttccttttggtgcatgtgtcctggacttgccgttccgatgccttttgtgctgctcggaatggagatggaatgatgatttccgcaattccgccgcatttcccatgctgcgaatggtggtagatctggtatattctgttgtgacactgtgactgacttagagtatctatacgagactatatttttgactc

SEQ ID NO: 29115 - DNA, 2174 bp, Zea Mays
  misc_feature (1194)..(1198): n is a, c, g, or t
gccagggaaaaacgtgcagaatttgtacttcttaagtgcaccttcgttcggagggcatcagaatttttaaggaattactttcctagtttgattgattctatgctaaatgacaaaggaaacttctctcagcgaggtcatctgcagaggcctgatcacactgatatgaggtacaaatttaggacttatgcacgacttttacaacacatcaagagtttggacaagagttgtatgatgcctttgcggaaagcttactgccattcgctgaacatgataattcgacgtgagtctcgtgacttttctaatgaactccgtaatagttcaaaagcatcaaagagcagcacaccattgtttgagggtcctgcaggtgcaaaccagcctgcaagtattacagatagtcctgcagatgcatactccaagatgattactgttttcgttccacttcttgttgatgagagtgcattccttgcacattttatgtgctttgaagtttctgcacttcctcaatctgatgcttcaagtagcaatcctaatgctgaatcaactattacttcttcagttgcattagaagcttctgcaagcattggcaaaacaagtaacaatccagccgagatgggagcgctaaatgaatgcattcaggagttgcttgatggtattcaggaggacttttatgctttggttgactgggcattcaagctagatccattgagttgcatatcaatgcatggactaacagatcggtatctttctggtcagaaagcagaggtctccggatatgtacaagtgttgcttgatgacttggagacaagaataacaattttattcagcaggtttgttgatgatgcctgctaccagattgagaaatatgagcgtaatgtgcgtcaaattggagttgtgccctatattcccaggttctcacaacttgcagcacgtatggagcagtatatcaatggatccagggatctagttgaccaggcatatactaaaattgttaccattatgtttgtcattctggagaaaattgctcaagtggaacctaaatatgttgatattgtacttttggaaaactatgcagctttccagcacagcttgtatgatttagcaaatgttgtgccaacacttgctaaatattattcatcaagctagtgaagcctatgaacaagctttgctcacgccatatcaatttggtcataatannnnnaaaagaaaagctattccaattcgctcggaaaattgaggaattaatgtacaacatgagccctgaggagatacccttccaagttggaatgtcaaaggtagattttcgcaagatgttgaagtctagcttaactggacttgacaagacaatcaatgcaatgtatagaaaactacagaagaatatgactgccgaggaattgctgccttcgctatgggaaaaatgcaagaaagagtttcttgataaatacgcaacattcctcaagttgatttcgaaaatatatcctgacgagaaggtgatatctgtgaacgaaatgagagatactctagcttcactgtagctatttcgttagaaggttcgcatgtccgttggtttgcttgcgcatataagttgacctgattcagcatcatcttaggttcttgatcctcactgaaccaactatctgatatgtgatcccttaccaattatctgattcatggtctgttgtggaacctttaagggcttgttcaatccatgtggattgggtgggattgagtgacaatctcacccaatccacgtgggataggaataaccaaacaatgcctaaataaattctggatgacatggatgttaaacaatttgtttatttctgtttttactagcaataatgtgcattagtcaagcttaaatatggtccattaccttcatggattggtggtgatggcacgagagggccttaattccattaccttcctcggtgtctggactatgtggaaacgtaggaattgttgtgtttttgataggatgtggctggacatgaactagagctttggaggttggctggtgcttggagtctctctctcctcatcggttctataccgggttgcggaatctttagttggtagttgccctgttgttttagttatgaatccttttgttattgtgtatgcttgcttcttgtaacggtcataatagaccgaaacttccttctacttaatttaat

SEQ ID NO: 29116 - DNA, 441 bp, Zea Mays
cttacacatatgtatttcataatatgcacatgatcattaacaaatttatattacattgataccttcggcttgttcgaaggtgtagatgcgatagtgattacaattcagcgtgaaaagtacgggagtactattcacctatttataggcacgggacgcagcccgggtaaaagtacaattatgaccttaacacttgtccataatcgtaacaaaaatcactagggactaactagccttttcctctttggcttggctccatgtttgatattcggcatcattttaaggcgaagttgttgtccttcggtggtagcttcggtattcgtcatcgttgcttccaaacagtatcttcgtctcgaggatcttcgacagagagagacagagagagacctcaaaattactttgccaatgatacctttgtcttgaggaccttcggcggagaagaag

SEQ ID NO: 29117 - DNA, 1322 bp, Zea Mays
agcaacacgttatcgacaagcacgtctccttccttccccacccactgctccacctccatcctccatggctcctccgccgcggcgaaacccgccgcaccagaaccccacccggaggaaggttttagtggtgcgtcaggacctcaagatgggggctggtaaaatagcttcccaatgtgcccatgcagcgactggcttgtacgcagaattgttgtcaagcaatcggggtttacttagacaatgggagcaacttggacaagctaagattgttttgacatgcaagaatcaacaggaaatgaacaggctaaaggaaactgcagaacatagaggtattcctacatttattgtagctgatgcaggccgcacacaggtgctggctggatccaaaacagttcttgcaataggaccagggaggaaagctgacatcgattcagttactgggaaactgcgtttgctgtgatcttcagctgcctctcggagatggtcaacctctgttctactgatttcttcatatggttgttttactgtcttgccaacgccaacatatctggttattaactggacattacaagattcatgatagtcactaatttgagagcccttatttcaaaatcatagtaggaaaaaatacttgattatgcaaatcagcaaatcccatcttaagcaatcagtgtatgttttgcaaccacttaagagcttgttcggttattcccaatacacatggattggatgggattggaaaaaattgagaagaagtttgacttgtttgggattcaaacccatccaatcccactcaatccacatggattgagagctaaccgaacaagccctaatgtggataattactgctaaaataggttgcgttttctctctctacagagtactgtcttcccagttgaagagccctgcgccccgtttagcatcagaaacagttgcctgtcgttgtagccgtttgaaggttaacctgatgtttattcgtgaagttgtaagttttaggtggcccatttgagatgccatggcatacaagagatttcttgttgagacaatcctcattatgccataaaaaattatatcatcccttgtgtgtcactagctctatatatcatacaaccaaaaatatcttgcgttccaactatttatagtaaatttctatatgaaaatccatgagctactataatcttattttattgaaaaccaaacattcaaaaaaaatagaatgaagctactctattctttctcacttcaatcaaacacacccttagttatctatccaagagctactataatcttattttattgaaaaccaaacattcaaaaaaaaaaaa

SEQ ID NO: 29118 - DNA, 3908 bp, Zea Mays
actcgcgactccgcccgcctgcccagcgatagcgccatagcggcgaccggcgagctccaatatcacgcggatcggcggcggcgcccttgccccggagccccgcggcggcgcggccctgtccccgttccccgccccggcggtaggcagccccgtctcctgtcgagcgctcccaccaccccagccccggcgcccccgctcccagcccgaccgctgtatccgcggcgaccggcgtcccgaacggacgcggcccgagcgcctggctcacagaaaatctgcacacaaaactacaaaagtttaaggtcaccaagaaccttgcaggataacacaagtgctggattttggaaatggaccatgggctttatgctccacaacatggatgggagaacaacagtgcatcaaatgggtatggtgcaatcaatgagccagattttaggtctggtggatcctacaatggtaggagatctgtggatgaaggttttcctagagattcatatgggaggggtgcatactgtcaggatacacatgatagaaatatgtatgcaccaccgccatctgttggtggaatatggtctcagcctcgaaggaatcatgatgaggaatatgcaactgcaagagatcacagaaggcacaatactgattatcacaatgatggaaaacatcatgagtttgattcatacagagttgatagactccatgataattatcatgctactgacagctattatgaatctggcagtcgccctgattttggtgttgataggagcaaaaggattggaagcagagaaagtgcggagtttcatggtgagtttgaagaccggtaccacagttctaaccaaagcagagatgacagctatgagagagatcatgaatatggtcattatgattatgattcggaccatgagagaggcaggagagatagtagctggaaaagacgcgattcatgcgagagcaaacgtgaaagaagtggattaagtcgtgaaagagaggaaagtccatacatgcgccatagccgttctcgatcacatggacgtgatgaccgatcaagatcatggtctagatcaagatctcctcgtgcgagaagtcatggtcggaaccaaagagatggcctgtatgatgataatcgatttgacagaagaagggaatatgattgggatgataggaggcatggtgattcagtggtattgacatactgcatacatacatacatttgtagcagtggctttggaatttacaaaccatgagtttgcattcatgtttgcaggccccatctgccactgttgttgtcaagggactgtctatgaagactaatgatgatgacctatatcagattcttgtacaagttcttcataacttcttgcaccggttttaagtgtattgtctattgtctcgttcgttttaatcatttcgcctgttctcttgtagtctcagtggggccctctacgcagtgtacgtgtgatcaaggaacggaattctggcatgtctcgtggatttgcttttattgacttctccactgtggaagctgcctgtagaatgatggaagctactggaaagagtggtctccaaattgatggcaggaatgtgttctttcagtacagtgcaatgaacctcgtgctgaggatgctctaccagctgatgcgacaggttcctctccacactttgggagaaagggatctgaactaggcaagttcagttttattctggatttatctgaactatgtattgtgctgccttatttagttgctgtcatttgcaggtccaactcatgttttagttgttcgtggcttagatgaaaatgctgatgaggaaatgcttcggtacgaatttgctaagcacgcaccattaaaggacatccgccttgttcgggataagtttactcatgtgtctagaggttttgccttcgttcatttccattcggtggaagatgctacgaaagctctggaagctacaaatgggattacactcgagaaaaacggtcaggttttgcgtgtagcatatgctaaaagtacacatggacctgcatcagggggctcacagtcaaacagccttgctgcagctgccattgaggctgcatcatttgctcaacagtatgatgccataggttgggctccaaaagagtacaatcctgatgacaaacagaacagtaactttgaatctcaaaaagacgatggcagtggcacagcacagtcgggatttgtttgggatgaaaaatctggttactactatgattctgcatctggattctattatgacggaacaactggcctttactatgacagcaactctggagtttggtattcgtacgatcaacagactcaacagtatgtcccttgtactgaccagagcaatactaaggcagccggggagacgtccagtgaaaacatgatctcagatagtatttgtgggaaaaaggttgtgatctctgcgcctgctgccacaattaaacaaaacaagaaaacatcactccctgatgctgttcaagctgctgcaaatgcagccctggctgcagaaaagagagaaaaggagaaggcaaaagagattaagttggcctcaaaaagtagtctcatagctaataagaagaagatgaacaatgtcctagccatgtggaagcaaaggaatcaagaagggcaggccgcacggattgtcattgatgacaaagaaccaccaaattctgatgatagatttaatcattcacatagtggaactggtttctcttcgaaaagcaagccaaattttgaatttgaaaatgctatggataattctgttcgccaaggaattgcatcgacccaaatgttggattctgatgtaaagcctagacctgtcagtaacagcttaggtactacagttatgggtgtcataagaggttctactagaggagtgatcaagtcggatactacgtttcatgcattatctgatgccgggagcactgattcccgcaccactataatcacaagatcaaatgggttaatgacaagtcctgtggaacttgtaactcctgcaccctacaaaactgatgtgtctgccttagtctctaatacttcatcgggagtttctgggagtggtaaacgtcggttttctgaggcaccagggcaatcccagtacagggatcgagctgcagaaagacggaatctgtatggatcatctcttcgcactgatgctgttggattggattcaactggtcactatccgtcccgaaagggtccaagtgagatagggtcgatgccatttcctcctggcgtgggtgaacgttctaatggtgaaattggcaacaacgaaaactatgaagttattaccgctgatagcgcaatcgacgaaagcaatgtgggtaaccgtattctacgcaacatgggttggcaagagggactgggtctcggaaaggatggcagcggtatcaaggaaccagtccaggcaaaatccgtggacgtcagggctggactaggaagtcagcagcggaaggctgatccaatcctggaggccaaagccggagacagctacaaaaccatcatccagaagaaggccatggcaagattcaaggagatgtcctagctagaccttttttttttgtatattcggttgtcgtattttgtcgtccgtatacttttttttttacaatctgtgcactgttttgcttgtgttttttttcttcacaaacctagccactgaattgtgatttattatcctcaaaggggcaccgtgtttatcttattattactatgtagttcgagacctggatgctttttttttcatgtgtgttggggttttcatttgcacgacgaatgtgcccgatcagttgctttgccacacatgatgtggcggtactgcctctacatcttatcgtggcacaggttgttttttaaacggtgttagagattgatgattttacaaacttggcaactctattttttcgtgaa

SEQ ID NO: 29119 - DNA, 1877 bp, Zea Mays
aaaatcaaaaaaatatggtaccggcataggggcgggctcctcgctcttgcgccgcgcttcggcccctcccacaacccgagaacatccgccgcccgttgcgcaattcgacgagaaaaccccacagcctgcacctcggggacgccggcgcggagggatggagtgccacgccctacagtgatttctcccccgctccgatccccggcgcatgaccgggtcggctggcctatgcatcgcagcaggagttgtcgtcgattgcccctgcctgccccagttaatcccgcccggtcgcaatccagcattagaggcgccgatctcctgccccgtcctgccctgtggattatcgacagcggcgccggataccacggaagagaaggaagacaaggaaggggccgaaactaacttgcttgtgccggggcaaggacgagatcgagggcagccgagccggtacccgaaactctaggcgaggcaatggtaatgaagacggtgacagcgacagatttgtttacttcgtcataacgtttctctccctccatgatggccctattttgaagtttgaaatgaatgctcgacgggttcacatgttttctcctggaggacacatccacaggtggatgcttatgctgtcaagaaatggaataaaagaaattcaaattaagacaaggatatggaggaattacaaaatcccttcttctttcttctcatgcgtggaattggaatatgcttgcctgcaaggatgtatattccagttgccacctctgtttgcaggctttaagcggatgcgtacccttcatttcgttgagttctgtgcaacggaaaacaatattggggaattagtagcgagctgcccgaacttggaggaacttattctctccaggttgctcagctttgctgatatcaccatccactcaacaaagctcaaagtcctaagagttgatggcatgtttaaacatctcaatcttgtgacgccgcacgtctcttcagcagtgattaacctgcaagttaacactggttatgtcaaaagggctgggtccaactttaatctttcccaattcattggttctcttttggatattgaaaatatttcattgctcgggcacgcttttgagtgtgcagcacatggaatcgtgcctggtaaactaccgagatcgttaaatcggctgaccgagataaccctggagcttgaccttggtaacctgaaggaagcaaacgcggctcactgtttgtttcaaattgctcccaacttgcgacgcatggagctacagcttatgcacaggggctattctgcacccacctcgagtttctgggactcggttgatcgtcaggattgtctcttcaagaacctttacacagttgtcatgaacaacttcactggttcctgtgcagagtcaggcttcttgaaacttctgctcgatgacgcgcctgtacttagaagtgcgcggatagaagacaacaacaaactggacaaagaatccctcaaacgcctcctgaagatgagaagagcatccaaggacgcagaaataatcctcctttgaggcgtggtcccctggctccagtagatgcccactgttctttcctggtgaagcgatttggtctgctgtgttataggttttattcaactaggcgtttgggcacaacttcgtctgaacaaaagttgtgtcttcgcgtatacctgtgtttcagtgtgtcaccttcagcaaagctaaatgttgcacccgagtcagagtcgtgtttcttttagcattttgtgttggtacttcgaaattctcttgctgcgctggccaacatgggtttgcttatatggctttggaatgatggacaaaatagtgcttgttagttgtggaattgtccatttaggcaacaaagtttttgaaaaccac

SEQ ID NO: 29120 - DNA, 1312 bp, Zea Mays
tgcactttttaagggatccaccacccctctcccctaccgttccttttctccaccattgaaacactctctgaccctcactcgctccctgtcacacacactacactcgcaattcatccgcagtcacaagctcggctgctgctcccgctaacggttgaggcgttgctggtgcacacaggaagggaagggaagggagagctgcacacagctttgctctggctcttggctcccctgtccagctgtcctgtccgtccatcatggaggaaacgcccagcccgcagctctagccgccgtcaatctcgtctcgtatcggagtcgaaggaagtaagaggcgggatggcatgaagcgacctaccaagaatgagaggctgggcaacccccggcacaagtaggaggaagaacccgagcaaccgagccacagggaggaggaggagatgggcaactgcggcacacgggaggagaatgccgtcgtcgctgcgcacgcgcaagccttccaagaacgccaatgcagataggaagcacacctgcatgtcatcagatataagtgacccttccacacctaggaaagttgaagatgccaagaacatttccatatacaacgatgtgattgccttcacattgtttgagctagagacaatcacaaagagcttccgtgttgattatgttcttggcgaaggaggatttgggaccgtttacaagggttacatagatgaaaatgtcagggttgggctgaagtcactgcctgttgcagtcaaggtgctcaacaaagatggacatcaagggcacagagaatggcttaccgaggttaactgcctggggcagttgaggcatccaaatttggtgaagttgatcggatattgctgcgaagatgaccatcggctgcttgtctacgagttcatgtttcgaggaagtctagaaaaccacttattccgaaagacagctacgccattgccctggggtactaggatgtcaatcgcgctgggagccgctaaagggctcgcttgcctccacaacgctcaaaggcccgtcatctacagagatttcaagacatcaaacattctgctggactccgattatactgccaaactgtctgactttggccatccccaaccccaagtgcacgcctgttgtcccggcttgcagagtgcggtgatgttgctgcgcttcggttgaagctgctgggataggttcaggtgtgtactgtgaccatgggtggtggtgcgttttgatgatctgcatgttggattaatgtgggcttggcccaaattaatattcaataatagtcaatgctaatggcccactttaatgctatggt

SEQ ID NO: 29121 - DNA, 2828 bp, Zea Mays
ctgtccatctctacttctctagtagtagtactttgccattgcgaacgggttaccgaaatttcttcattgcaagcgtctactttctctctctctctctctctctctcgttgcccccgcatactctctgtcttgggcgctctctgtctctggtggcggcgagtagcatactctctgtcttgggcgctctgtctctggtggcgacgactcgccgccgccgccgccgcgataggccacgcctcctggtcgccatttccggatccttaccgacgacgcgcacccaccaccccatctttttccgttcctgctgtgcgacacacaaaccctagctgtatcgggtgggctgtgaaatggaccaagctgcagattcctctgaactgcttcgtcgcatcgaggagctccagcgcgaaaaggatgaaaaacagaattctttggaactattgttaagacggattgaagggctacaatatgaaatggatgaaaaagtagatcttgttgaagtgttaactcgtcaagttgaaaatctgcagcgagagcgtgatgagctcagaaaagatattgagcaattatgtatgcaacaagctgggcctggttatgtttctgttgcaactcgaatgcttactcagaggacagcagctttggaacaggatattgagaacctccagaaaaagttaggtggttgcttaagagagaatcaaaatttgcaagaggagcttgctgaagcttatcgaattaagagccagcttgctgagttacatggtgctgcactatcaaagaacaaggatcttgaaaagcaagtaagatttttccagagcagtgtcgctcaagcgtttgctgaacgggacagttcattaatggagtgtgagaaagcaaaagagcgggaagaagcagtgtcaagaaagtttgctgattttgaggaaaggatgagagaatatcaatcagagattgatgaacagaaacacttaaatgatgacttgcagagagaactgacagaactgaaggcacatacagaattgtccttgaaagttattctaaaattctatgaccttcgttgcagagactctggatgttcttcaagccttactattgaagagaagtgttcaatccttcttggtgattctgctgacaattggagttttagctctgatggcggaacctcaactttgaagtacattgcatctttagaagaggagaaagagtcacttaaagctaaaatatcgaagctgcaaagcaacctaagaatgggccttgaaattgaacaacatttgcaaagaaatgcacgaatattagagaaaagacaggcactgtatgatggattcctgagaaatggattgtccgaacttcaaaagttctacacatgtcaaaaggctgaaattatgaaaatattggaagaagaatcgttgcggttgatgaaagttgttgcagagattcaggataaactaactgaaatttgtatcaacactgaagttagtgaccaccctgccgatgagattcaatgttgtgacagcagttgtaaagatgtgcatgttactaaagatatcagtcctagcacatgtcgtaagagtgattatcctgctgatcttaactccgtgtcgtttgatgaatctaaagcacttgcacaagccttacaggagaagatggaagcacttatgctcttctcacaggaacaagaaagatacctattagagaaacagagagacctgattgttatcgaggaactccagaagaacttatctcaagttaaagatgaaaaggtgaaggtcctgatggaattaacaaaactaaaagaacaatatttgctattgaagggctctgctgtcaaggaaggtcatgatactggtgattcatctaaactcattcctgggcatgaccaacaagggatgctgaagactatgctgaagaggacatctttaagacactggatgaggaaagaaagtaatactattggacatgggagctctgatggaaatgatcatacagtttgcaaagaacattcagtggatgttgcaagattaagagttgaaaatgctatgcttcttgaaggtgttggtactgttgagcatctcacttcttcagtgcatagactgcatattgtgcttttgaaggcagggcaggattttttttggttgtattactaggtgataactttcataccaacaaacatgtcaggcttatgatgatatcaagtcagctgatcctttggagagtacctttgaagcgctcaacagtcttataactgaagcaaaccttatgaagacagctcttaatgtggttcttcctgtaagctggtccggggattcatcagatgcaattaaatatgaagctatgtgcgatccatctgattcacctaaatcgaagtctgggaaagtagacccgctctcttctgcaggcatggagatggtggagctactaatattggctgctgagattctcaaggagagctttctggtgaagaaataaggcctccatgtaaggacgagtatggctctccttgtttgtttagaagcatgcaatttaatccttaatttttttgggtgtatatacttaaactgattgctaaaagtgcactactagattatttcggatgtagagaaagagccgaatgtgcactgtaatttacggttcgctgctattgatgtgtcttgtgttggtagactaaaggatttaagagccatgtgtacaaaattcagtttacaagcaaagatcaaagaatagacatgaactagggaaagagaaagaaaaacaaactgaaagttccatacctaaaagcgtcggcactggttgtcgcctaaaggaaggtgaatagacggaatctaaaaattataaactta

SEQ ID NO: 29122 - DNA, 218 bp, Zea Mays
ccggatgtcacgataggcaacctctcaaccctcgggtgttggaccgagtgcatcatcggaccatggaggtggtgaattcgtgctcgcctcgagaaagtgtcaaccggtgttccaggaattactcaccggaattggcctccgcggtcgtgtcgccttgtgccgcgggtaggatccaaagcgccctaatccatggaggtaagcccaccatctaactcgcg

SEQ ID NO: 29123 - DNA, 2212 bp, Zea Mays
caccaatgcgatattccatgtggaacttgtgacgttagattaagatggaaacaatttacaattgttgccagcaacggagggcgtaaattcccagcactactaacgactgggcctataaaatgggaagccctctcgtctcctgcatgctctgcaaacgagcttctcttgtcactcatcagcacggttagtatagctagccaccatgaaggtagagcgcgatctccacatgagccggggcgacggcgaggacagctacgcctccaactcaaggcttcaggagaagtccatactgaagacgaggccggtgctgcacaaggccgtggcggcggcgcacgccttgtcgctctcctcaggaggacccggcggcggcgccatggtcgtcgcggacctcggctgctcgtcggggcccaacacactgctcgtcgtctcggaggtgctagcagcggtggcgatggtggccggcggcagcgcccaaccgcagcacgtgcagttcttcctgaacgacctccccgggaacgactttaacctcgtcttccggtcgctggacctgttgaagaacaagaagctggccgccaaggacaggcgggaggagtcgctgctaccgccgtactacgtggccgggctgccgggctccttctacacccggctgttcccggaccactgcgtccacctcttccactcctcctactgcctcatgtggcgctccaaggtccccgacgagctcgccggtggcgcggtcctcaacgagggccacatgtacatctgggaaaccacgccgcaggcggtggtggccctgtacaggaggcagttccaggaggacatgtcgctgttcctcaggctttgccacagggagctcgtgcccggtggccacatggtgctggcgttcctgggcaggaagaagagcaaggacgtgcttcgtggcgaggtcagctacacgtgggggctcctcgcgcaggctctccagtccctcgtcaaacagggccgtgtgaagaaggataagctggactccttcaacctgccgttctacgcaccttcgatggacgaggtgagggacgtgatcacgcggagccaggcgttcgacatcacccacatccagctcttcgagtccaactgggatccacacgacgacgacgacgtggagatgaagatggaagaagacgtcgccgccgtccagagcggcgtcaacgtcgccaggtccatcagggccgtgatcgggcccctcatcgcccgccactttggcgagcacatactcgacgatctcttcgagctgcatgccaaaaatgtcgcagtgcacctgcagaaagtgaagaccaagtaccctgtcatcgtcgtttccctccaggcgaaatgagccgcgcgccaaataaaggaccaagctagctgatgcaaaatctggcgtcaagttagctattagtaccgctactattatatgcatgcagaataattagtcaaacaatcagaaaaataaagtgcctcagagactgttagtggcagatccaatgtttcgttaattatatgtagtgtaatggtaatggtaatggtaatggtagacatcaggtttcatcgtccatataatatagggtgggcagatcatgggctctggctttttctttaaaaaagctagagaagtggtaaacattgattttaaaatgacttcccatgaaaagctagagcagtggtaaaaatcctctatgctggactagagcaagtccctaggcagtagcttttaatgttgaagaatgtttgggttaaagagaatgagaggacatttgcaattgtgcaaaggtatagaatggggaattcattctctaattctgcatatatggatgacatcttacttgtcagttgtgatgaaaagttcttgtcctcaagattaagtgaaattggtctcggtgaagtgtctcttgttctaagaattgagattcattgagatagaagagaaaaggggtacgtattaggattattgcatatataggcatgctaagaaaggttgtaaagaaataaagtattcatgcgagaaacctacgtctgttccagtgatcaagggtaatggatttgggaactttaatgttctaaagtggtaatatgtaatagattaaatgtaccatatgcttcaactgtttgaagctcaataaatgcacaagtatggtgttaccctgacgttgtttatatgtccgggttgttttggtagtgtccaatccagatatagatc

SEQ ID NO: 29124 - DNA, 2517 bp, Zea Mays
tctcgctctctcccgagttccattgcaaaacctcgggcgatttgttagtgttggcataaggagaaggtctagctctttccggtttggaccatgcaacatccaatccgatggggtatgaagagagcaaaaaacatctcctcagtctcagctaccctgagctgcaatgtttgtgcaaaaggtataaccttcctgctaagaagacccactctcagttagcaagttcgctcgcctcgctgcttgaggcatctccatctcctgctcctcctcctgtccaattagcaaatatgaaagaagcatccacatgcaatcatgctaacaacaaaagaggcccatacaatggcagggatgatggtaaaccacttgtgcatgcgaaacatcaaaaaggagatcagacacctgttgatgaaacatctaaaaaggggattgacactggtacgagtatacctccagtttctatgaaccatggaagaccagaatatcatggccatctatcttctgacctgagaactgctcataatttacagtcccaatgtgacgtgggaattgcaactaatacaacaaatctagaatttgttggcaaacatgattgttcacctgctaacgtaattgatcaaatctgtccccctattattcaaaaatatccttctaatggtaatggtcaggcttccactaagttcggccgtatgaatgataacacagaaaagggttgtcggctgtctgataagatatcagcaaatgctgctgctgttcaattttctgtaatgtcagatgagggcattgatcttcttgttgatctgaactccagttcagcaacatgggccaagaacttcatggcagaaatgcacattacccctccgtctgaacatgggaatttctctagcttcattagcagtttgtcaactaaggatgatcatagcactgcgtcaccatctggaaatatcattgttgacattcagaacaagggagctgagaacattgttccttccactgattcatcacttgcttcagatgttggtgagagctcccgttcagtgctctatccagttgatacgactactgtgaactcagtgtcatccacgtctacagtggctggtaccccagttgaactttctgggtatcaggagggtgctccagtggtatgttcttcatgtttaacagctgatgttcagaacaatgtgacatctgatatgccaggtgcttcggataacgaggtgcttcctccagaacctgctgatgtctttttgcagtctgaaagaatcactgcaccagctgtatgtggttcagtgcaaccaattggcaataaatgcacaatgagttctggggatgaggttagaagtggctccaatgaagactcctgtccaaaatcttcaggaaaacaaactggagatgaaaccctaatggaaaatgaacctgtgaaggcagtagcagtggaagaaaatataggtcgtgatgacagtttgtccatttcttatcaactagcctgtaagacagtagcagaactgcctgttacagatgcccagtcgcctgctagttcttctggtcattttattgctggaaattttgacaacacacatccaacatcttccgccacttcggacaatgctattaattctctgacttcaaagttcggtgcagagctagcacaaagtcatgattctacggacaaaaagggacagaatgatgctgaggaggttgaggagttagagagtatgacaccagcagcctatagtgaacctcccagaaatatacaacttagcttacgaagtgcttccgctaaggtcaagccttctacactaccaagacgatcagcgaggcttcttcctaagtaaccgccgtaaatgatacagatgagatccagtgtgagaatagcctcactaccggcttagtcagattccatgaggatgaagggatagaaaacagttaacaagcttagattctaattttgtatgttcttgttaattcttttttgttccagcaactgagtagaacttggtttctgaagcttaggctgcgtgactttttatctcctcgtgtccatcaacatctgttacagttacagtcgtactgtcgagctttcatacactattgtacaaacgactcctacttttacagcatctgtttcctctggtctgcgacttgttggatgatgtcttctgtgttttatatcaatgcaatataactattggtgcaggagcaatgatatttccgattccacaagttaaccggaaatcttcatgggtgatagctgtgtcagattctttcgcgcatagtgatagctgtgtcagtttacccccattttcttgggcatcacttgtctcaaatgaagttcattggaggttcgcaatttatgttccgtggcatcacaccggcacctacctatttgctggttatctaattttacatacggaggacctggattgccacctgctaattgctatcgcggccttgaccaaaaaggtaagagcatcccttctcaatcagagccgtggaaccatagccaaatttgccaagtgttaa

SEQ ID NO: 29125 - DNA, 746 bp, Zea Mays
aagtctgcaactcatcaaattggagtctatgcttacagttatcttccttagtggtctgaaggatgaggaaaggactgcatcctcagatgcaatggatttcatatgtgacgcagagtggtaggctgatcaatatcatgatgaccaaggtgaatcatactggcaaagtgtaccacatgagggccaagcggcaaatggctcaaagcctcggccagattgcgaagttcaaacgtcgatatgagcaggaagcagagaaaagcaaagacaagtaggatggtgttgggaaggaggtgtagcctctgtggtcttagtcagttctgttgactgcgaagttttcagctaaggatcttcgattgaatgattttattttagatcacatcatcttttgctccacttcataattgtgttgtaccccatcttgagcaaacactttggcacttgttgcaccttaaagccccaagaagatagtctatggatcgcctttgctctgacgttcgagttttatggtttatatttctccatgttattatgtttgatgatattgttttacctggtctttgacgacaccaatagtacttgttgtctcgagttgttgtgaatgaccgcagcactattcagctggcacctttgacggtcaagttcattccttatcatacattttctgttgcagacatatttggcgggcgtggccttgacactaagctgtaacaatgtatcaatctgtatattagattagatgttgtgatgtg

SEQ ID NO: 29126 - DNA, 2280 bp, Zea Mays
aaaacggaccggatcccgacccaatttaaccaagcccccatcagttgcggccgcgcgctcgtgccgttgcgctgcggcaaagcctccccccacacctctctcctccacccgccgcccccgcgggaccgaaaccctagctagggttctgcccgccgccgccgccgccttcgatccagacgcggccaggcttcccgcaacaccgccatggacacgggccgcaagcggaccgcaccggagggcgccaacggcgcgggcggccccaagcgcgcgagagaatcggagacaactggtgtaggaagcaaatccaagccgtgcaccaaatttttcaggttctaatctagcttaaaatgaacagtcatccggtaacatctactatcgttattatgctcttcttttttttaaattaaaatttgttatgttactaaatgctgtgcttgatgctaacaaatgggtcggtctagattctgctacaggatggttttatctaatcattgcttaagaacactcaacggagtaaaaaattggaatctactgctgtttatcactgtgaaaattggtgcaacaagggaacgtactgctgtttatcactgtgaaaaccgatgcaacaagggaacctactgctgtatatcactgaaaatctgaaccatgcaacaatgttttcaaggaagcaaaacttcctctcaaaaggaacaatcagtcaataacaccatggaacaggttcacttgaagaaatcaagaagattagattgaacatggggactgtaattcaattccttgtgaattgtaccagttatttgttcaattgcatttccttatcaatatgttgcagtagtagttctgaacaccttgaagcttgattatgaatggcatttctatataaagcatgatttctaaaagattagtttgtatcatttacttcagcttttattctttgcatatatatttttagcagtcatctagtgaggttgcattatccagctgcatgtaacttaatctcttccatcaacattgtttgcatttgtgtatcaactaaaatcatctgtaggttgtcagatatattagcatgttctgttgcttatattatgttttcaatgtgcagcactgcgggttgcccctttggtgcaagttgccattttctccataacttcccgggtggctaccaggccgtttcaaagatgaccaacttgggtggaccgcctgttccggctccaccaggaagaatgcctatgggacctggtggtcctgatgggccaccttcacctgctgtgaagactcgcatgtgtaacaagtacaacactgccgaaggatgtaaatgggggagcaagtgccactttgctcatggagagagggagcttggaaagcccctgcagatggacaacccgatgggacctcctccaatggggccagggcccaacgggcacttcatgccaccgccaatgcctttcccagacatggttcctccctccacattcggtgcttccgccacagccaagatcagcgtcgatgcatcccttgctggtgccatcattgggaagggtggtaccaacacaaagcatatatcccgagtgactggggccaagttagccatccgggacaacgaggctgatcccaaccataaaaacatcgagctcgagggaacatttgaccagatcaagcacgctagcgcaatggtcacagagttgattgtccgcatcagtggtaagccgcctccacaagccaagaacaacccaggtagggggcctggttctcatgccgggggtcctggaagcaacttcaaaaccaaattgtgcgagaacttcaacaaaggctcctgcacctttggagacaggtgccacttcgcccatggcgaaggtgagctgcgcaaacctgctgctgcttgacaggcatgcttattgtggcctgtggtgattaatctgcctgtatggctgaataacaccatgaccaaggacagtggcgccagcgccatggtgaagtgtgctgagccacatgctgcctgagagagagcatttccctgtggctcgtatttgatcttaatgctgtaacaaactctcctcgatggagattaagcaatggccgtttatttaggatttgtaggattgccgtattggtcacccttttatctatcctgtttttgtaccgtttcttaggcactcttggctggcagatcattgtgagtctgttgaacttgagaatagttgctattgatgttatcggtttgtggattcttactagctcatttgaagtccagacggctaatctgaaatcccgacgtcattagtg

SEQ ID NO: 29127 - DNA, 1857 bp, Zea Mays
aacttctggcctttagacattttctcctccgtagattgcagaagtttttttttcgcttatcagtatttcggtcgagaaattcgcgaagggattaggggaattcgaggcagggatttgcaagaatcagggcagtttgatgttgcttcctgtgcgcgtcgctaatttctctgttttattcgcgtgatttttagggttttattttgagtttttcgttttctccaccgtatttcgttggcttcgttccgtgctactgtaaattcagaatcttgtcagagaaaagagaaggaaaaggaaaaacaaacaaaatagtaaggggaatttggtacctgggtgtttgctgttccttgagttggtgaatctttggagtgcctggctccgacgagatcgaaaggagggacctttccttggttcctctgctggagctgtgattgcagaggtgaaccatgtcagcgatggcggcggcgggtgaagcggagtatggtgaatgcgtgcagaaggggtccctgcagcagcaccaggcgcctcaacccagccccggcgctctattctacacccatgatggcgtcgccgtctacaggaatccggtcatgccggcgttctaccaacagcccgcgggcagcaatgtcgtcgtgccggcggctccagggccagctcattcccctgccagctctgagcccttcaagcgcaagcgcgggcgcccccgcaatccgcagagtggtggcgtggtgagtcggcaggcctcgccggcgccggcgccggcgtcaggtgctcccgatgtcaagaagcggggccggccgtcgggcccctccagcaagaagcagcagccgcaggcggcagcgcctggaccaggctggactggattgaagcctcatattttcacagttcaagctggagaggatgtagcatcaagagccatgtcattttctgggaatggatgggctgtttgtatcctgacagccaatggcactgtatctaatgtgaccctgcgtcaaggagagtcttctggtggaacagtaacttatgagggccgttttgagattctctctttggctgggtcatatcttctgtctgaaagtactggcatgagcagtcgaacgggtggacttagtgtttctcttgctagtcctgatgggcatgttttaggtggtgctgtcgcaggacctctaaccgcagcttcgccagttcaggtggtcattgggagctttctggctgatacaaaaatggagcttgaccctggatcagcacctgagaaacatgttttcagcaggtttcaaactaccagcagtccatctaggggtaccgaatcctcgggtgggcatgcaagcccaccaaacaccacaggctccttcagcaccagcacacagccaggcttcccaagctttcccacatggaaatgagtttacctgctatggtggagtgggaccgtggcctctggggatgaggagggaggaatttggaactgacagtcctcgagcgtcgtcgctgtagtttcatgagatgttatgagagtcaatcctatttaggtacttctaactggttacaatgaagttccggtttgctgcttgtcttgacattttgcatcattgaggcacttcaaactccaaagtggtggtaacatacagtatattagatgattccccctatcaaatgccttttgtcattctcctgctcttatattggttattactgctgtgtgggcgtgttgatataagcagcgttttcaagttcaggctggcctgcgcgccccatgaatccagtttgtgaacccatctccattctgcttatataggcagccaatgatatagaagtttagaacttttgaggctgaagagcaagaaaagttaagtcagcaggaaa

SEQ ID NO: 29128 - DNA, 1443 bp, Zea Mays
cgccgtttttctcaaacctggccatcctcatctaccttgcagcgccggcgccctatcttccgctccttccgttccttgcgctcggcgcgcaggtggcggccccatctttcgcttcctcccttcctccgccaccactcaccccttgatccgttctgcctcctaaatttggcgtcaccaagcaaccccactcatgccgttctcaaaaccctacccgaccaatccgtccaattccaaggctgtcggctttgcgttatgagcgccgggtcaggggaggggcggaggatcagatcagcagccgcacgagcattgagcgatatggcttctatgtaggatgcaactggacatcgccgtccactcgtctagctattgatgctgaagtcccgatgcttcatgccaccgcgatggtggctggttgatctccgatatcaagaggagggaagaggcactgaagaatggtgcagatccacatttgtttttgcataattgctgccttagctccaccaattgtatttcatgggaaatcattaacgagaacacatggttatggtgttccacagactggcattttattcattcattgaaaggcttacctcgcttatggtgttccacagagtgacatgaaactattttcacttatgcaaaaggtttgataaaggaactattgtacttagattttgtcctacgtttagcatgtcagcaatttacattagatttgttcctacgtttacacctttttagccctcagatgcatgcataaatcttgattggtagatatattgacaagacatcattttccatatgctctaaatgttttagtagtttatgctgatgattttgctttctttccagttatgatatttcaatagacctttttatatgtgctaactacacaaaagataagctggtatctaccagctcaagacattgtttgctagtagacttcatattagttgatgattgtctcggtacaactcaagacatttttcataacaccattgttggtctatgagaaaataaagacaaccctttaggttgctgcaattttcatcgacctaggcacatgtgattattacacttgttgtggttttattataatatattgttctaagtctgattatgctttttagatgtacatatcatcgcactatatatgcaccccttttgcaactgttataactagccatggcaccatttatgcatccaactgttataccattggaaatccgcgcaactgcactatatccattggaattctgtgcttttgtcagtaattggtttgatggatttgaatttatgatccccaagtataatggcagatgcttaaatagttattggaaaatgggaaatctttctgctagacatgtatagggatgttttttgcgctcacaaccagttgattggaagcacattaagtcattagctctgctagtttatggaatatgg

SEQ ID NO: 29129 - DNA, 2405 bp, Zea Mays
ggggacgggccccacgttcccgtgcgccgtggccctgcgcgggcggtaggcaggacagccaccgccgaacgaagtggcgcgctccggcaagcaactgcggccgtgccgtgccgcgccgcgacatgggcgctggccgtcccgtcccgtgccgacggggagctcgcgtcttccttcggatggtggatgcatgcatgcatggtagacacgccggcccaaccagaattgacaagtggaagcgtatgggtattaccagcaacgacgcggcccctcgtgccgtcctcctccgcttcttgtttctgctctgcataggctgcaaatgcctggcatcagaggtagaggccacccagacggcgaccctcgcggtggacgcctcgccgcagcttgctcggaagatccctgatacactgttcgggatcttctttgaggagatcaaccatgcaggggctggtggcatatgggctgaacttgttagtaacagagggtttgaagctggaggcctccatactccatcaaacattgacccatggtccatcattggagacgactcctctgtatttgtggagaccgatcgcacatcatgtttcagtcgaaacatcgttgctctcaggatggaggtcctttgcgataactgtcctactggtggtgttggtgtttacaacccagggttctggggcatgaacatagaagaaggaaaggtctacaatcttgttatgtttgttaagtcaccagaaacaactgacttgacagtttcactaacaagctctaacgggttgcaaaatctggcttcagctacagtaacagtttccggcgaatcaaactggataaaagtggagcaaaagttggttgctaaaggaaccaatagaacctcaaggcttcaaataacaactaacaagaaaggagttgtctggtttgatcaagtatcactcatgcctgaagacacatacaagggacatggctttcgcacagaacttatatccatgattttggatttaaaaccacgattcttgagatttcctggaggctgctttgtagaaggtggctggttaagaaatgcctttaggtggagagaatctattggtccatgggaagagagacctggacacttcggggatgtttggcattactggactgatgatggccttggatactatgaatttcttcagcttgcggaggacctgggtactgaaccaatctgggtattcaacaatggagtcagccacaatgatgaagttgatactgttgctattgctccttttgtaaaggatgtattggacagtatagaatttgcaagggggagtgcaaattcaacatggggctctgttagggctgcaatgggccaccctgaaccattcccagtgaaatatgttgcaataggaaatgaagattgtgggaaaaaattttaccgcggtaactacctcaagttctacaatgctataagacaggcctatccagacattcaaatgatttcaaactgcgatggttcatctacaccacttgatcatcctgctgatttatacgacttccatgtctataatgattctaagactttgttcaacatgaagagcacatttgacagaacatctcgtagtggacccaaggcttttgtaagtgagtacgctgtttggagaggtgatgcaggtagaggaagtcttcttgcttcattggcagaagctgctttccttactggactggagaagaatagtgacattgtttccatggcaagttacgcgccactattcgtaaacgacaatgaccagacgtggaacccagacgcaatcgtcttcaactcctggcagcattacggcactcccagttactggatgcagacgcttttccgcgagtctagtggtgctatgttccatccaacgacaatcagctccagctactcaggttcacttgcagcgtctgcgattacctggcaggactccgagaacagcttcctaagagtaaaggtcataaacttcgggtcagatgctgtgaccctgacaatctccacaagtgggctccaggccagtatcaacgctctgggatcaaccgccactgttctcacatcagcagatgtgatggatgaaaactccttcagcaacccaaccaaggttgtgccggtaaagagcgatctgagcaatgctgcagagcagatgcaggtcacgctggctcctcgctccttcagctcgttcgatctcgccctggctcagtccaagcttgtagcggagatgtgagctaggctggtacactagtatacaatacaacgtgtgaagtgtggtacacaaataccagcaaccacaggggttgccaagctgttgttagcatcttgaacacatggctttgtattgtgtataatgacatgatgctgatactaatctctattatataaagcactagtttctatgttgtcgtgctcccac

SEQ ID NO: 29130 - DNA, 1323 bp, Zea Mays
ccttggcatgctgtcagtccctcccaacctccattccttcctcctttgccaatgcagctctgatctctcctacctgagaatgtcagtgtgagtggccattccatctgcacaacatcctcctccacgcacgcaaaacatacaaaaaggcagaagcggaggagatgaaggcaatggccgggccaaagctgctcgtcgtccacgcgtcgtcgaacaaggccctgaacgggatggcgcccacgtcgccggcgtcgcccggctggtcgcggtgcctgtggctggtggtgttcctggccttgttcacctgcgtgtccctcctgaccgtgctctccacggcgcgcgcctcggccggggcgccggcgtgccaggcggcgtcgctcacggccagcgctgccggcgccacggaggccggcctgccgcggcacgtgttcgacgcgctggtgcagtacgcggcggcggcagggaacttgtcgtcgagcatgccggagccggacgtgcgcgcgatcgcgtcggtgctccggcggcgcgcgccgtgcaacctgctggtgttcgggctgggcgcggagacgccgctgtggcgcgcgctcaaccacggcgggcgcacggtgttcctggacgagaacccgtactacgtggcccacctggagggtaagcacccggggctggaggcctacgacgtggcctacgccacggcggtgcgcgagctccccgacctcctcgacgccgcccgtgccgcgcgcgccgctgagtgccgccccgtccagaacctgctcttctccgagtgccgcctcgccatcaacgacctccccaaccagctctacgacgtcgcctgggacgtcatcctcgtcgacggcccgcgcgggttcatggaggggtcgccggggaggatgtcggcgatctactcggctgcggtgatggcgcggaccaagggcgcggagacggaggtgatggtgcacgactacgagcgggaggtggagcgcgcgtgcggccgggagttcctgtgtgacgagaaccgggtcacggcgaccagcacgccgtcgctcggccacttcctcgttcgcggcggcgccgccgccaaccgggaagccttctgcgggccgcccgccggcgccgcccagaaatcgaaaccgagctaagcgagtcgtagtcgttatttctcctttcccgggcaatgttggcgatctctctttgacaggggaaagtaatgaactcgcggaattgactcaaggaagcatagtcggtcaaagtacgtaagctcagcctgccacacacccggatccatcaagagaaaccaaggcaatcggcatttaaaattaagtacaaaaa

SEQ ID NO: 29131 - DNA, 1312 bp, Zea Mays
ccgaggcctgccttcccctgcaaatgctgagagactacctcaagccctcgaacccatgatccggtgactcagtgagacaactctcaccactgcaccagaatatgcaccagggctatcccaaagaaacactggtgcgtttccttaaggctagagagtggaacgtaccaaaggctcataaaatgattgttgattctttggattggaggattgaaaatgaaattgatagtgtgctagagagacctatagtcccagtagatttatacagatcaatacgtgattcacaacttattggcctgtcaggatacacaaaggagggtctcccagtttttggcattggtgttggacatagcacatatgacaaagcttcggttcactactatgtgcaatctcatatccagattaatgagtaccgtgatcgtataattttgcctaggctgacacaacagtttgagcggcctgttgtcaggtgcataaaagttctggatatgactggtttgaagctatcagcactgagccaaataaagatgttaacttccatatcaacagttgatgatttaaattaccctgaaaagacagagacctattatgttgtcaacgttccatacatattttctgcttgttggaaggttgtgaagcccttattgcaggagaggacaaaaaagaaggttaaagttttgagtggctgtgggagagatgaactgctgaagattatggactactcatcacttccccatttctgccgccgggagggctctggatcatcaaagcattcgtctgctgatgttgacgattgctactcccttgaccatccattccacaaagaactatacgaccatatcaaagagcaagcgtcgcgtagggagctcatcaagatgggatcgttgcacgtgagcattcctgagccagacccagaggacgccaagatcgttgaggtcatccaggctgagttccagaagatcggcgagcaggatgagtccaccaccggccacaaggattagcatgccccaaggacggtcatgtgcggagcgccgccggtgacctcccatgaagttgatcgctgctgtccgtttctattttttttggttgacagtccccagttgcgtggggaatatagcagcaagctcatgcatttgcatgatggagtttatgtagttggaggagaggctgagagataaacgagccagtgtatattagatgcacatgaagccataatcgccttttttgttagtatataaccaacacatatttagctgtatattaaagaagccaaaatccatggaatcgcctttttccatacacttgtttgctgtgt

SEQ ID NO: 29132 - DNA, 218 bp, Zea Mays
gtagaggacacacccaataagtcgtacatggcgtgagcacaggcgtgggagatcacagcataatcttgtctaggtcacctttaattcctgggtccgtcactggccttagctattttctttctgggcaaatggctaggtcatgacattctcccctcattaagccacatctcctcaagctgtgaacttaggagtagctatggcactagcggacccatctg

SEQ ID NO: 29133 - DNA, 2255 bp, Zea Mays
ctcctctccacgtggccacctgcctcttacccaacggctatttcaccatgtccccatccccagccgcagccggcctcccgcgtccccgcctgtcgctagttctctcgccttgaccgcagaaataaaacgaaaaaaaaacagcgcgccaccgccaccaaccaaacagaggaaaaggaggggaggaagaagcggaggagagagaaaccctaatcgagatgggcaagcttctctgcgacccctccgccgccgccgtcgccgaggccctgccgccgtccccagcccccgctccgcctccgccgctcctcgcttggtcctccccggccccggcctcctcccccgaggcctccatctcgcccacaggctgggacgcggtctgggcgctcgaggaccagcagcgccgccgcctccaccggatctgggagcggggcgtcgcgtggaaaccctcctcgccgggcgccggcgaggccgcgctgcctcccgtggtcttccgcctcgaccacggcggggaggtcgacgccgatggcaactgcctcttcaccgccgcgcggacggcagccgctgccaaggccgacgcgcgcgagctgaggcaccgcgcagtgcgccgattcgccgaggtctacgccgccgctggggaggacgacaagaacgccgtcgacgccgccgtgaggcacctctacgcgccggatctcaaggccgggtggggtgtccatgtcgtgcaggagatcaaggtgctcgtgcccaaggcccagcgccacgcgctcgactccgccatccaggagctcgtcgatctcggtatccaaaggtaccgtgctcgcggatctgcccttgctcgctgctctagctcaaatcttttgattttctcgccacttcaagatctaaaagccttgtcatttttttcccgtatgcctttttgatgatttcgccattcttgctcttggtctaatcagacgctcgtgcaatgtcgttttctcgccaccttcgcaataaaatattctccgtttcccagcccaaaatatatttgttcttgacttcttgagattatcaaagattatttggttcagctaatttacatatagcagttcgtgtctctttagcccttcctgaatttcataacacatccacaaacacggattgacgaaatcttgtgggctttggcatcgtggagatgcaggacacatcgcttcacaaggtgtctgcgttgtatccttgaaattaaaaggtcaatgaaatgaaggatggaatcgtccttttaagtattgcgacgcaagtgttgatgtaatgggagcccacgcttgtccaccctgttatttccaatacatcacttaatactcccatgttgaccctgggaaatagcagctgaaactatctacaaggaaagatgcatcactgtagacaatggggatagttggaccaagtacatgtccatttctggttcttcagaggacgagcatgacattatcaccctgcagtacacagaggaggggttactgacaatagatgagaaccgagatggccgtgcagctgcatttggcgatgatattgccattgaatgcctagctactgaattcaagagagaagtttacgtggtgcaagcccatggagcggatgcaatggttgacgaggataactgtgtgttcttcctcccacaccgtcctcgaggagaagtttgcgagccaccgatttttcttttcatgaaaggaacagcatggtgtggtgctggtgctgaccattacgagcctttgatcgccactgtcctccagcatgttactccagacaaggcagctgtcatcctttgagaatgactgcagttttttctacctcccttagcttttagtcagcggtggagttgagacaattttgttattggagctagagtgctgaattgaggagcgacatcaatatgcccaagagattagagagacggccaacctgagtatcttgctctgttgcggggttttgcctgcttatgaagctgtgtatggtgattttgttgttgtatgtttatgagtaggctctgactagcgaggatattctgagtgtagaacgtcgaatctagattttttgagggtctgatgttgtttgccattgtcggccggcatttttgtattgcttattgtgaggattttcgtttcttgacgcctgtttctagggacatcatgattggacatttggaatgcaaacaattcctttgtggtgttgggttaactcttctctctcaataatttttattgctgaacgtagagtaattattgaaa

SEQ ID NO: 29134 - DNA, 5170 bp, Zea Mays
cacgtactctgtcaaacgatacgccgcgatgcttccagacaagcgccatccccttcctcgccccacacgccgtcgtgttggccgcgcctctcttcaaccttttcttgagcattggcgagagcccttcacatggtgcggcgctggcatcgttgttggcgacctctgcgcggtcggatctgcaaaggttgcagctagcgcgcctacagtacgtcaacatggtgcggcatctctttttgcagatccccaacttgctacgccgccggccgccgcatcggaactccttgcaccgcttgcctttcttctcccattcaaccggcaagcgttccctggctcaataacgcaactgggggatgtctgtcgctatctccatataggaaacgacaggtgcgacagatttagattttcaggtgatgcgtggtcgggatcgccggatcaatcaaaataagtgtgaaatttgagaggccgtggaacttccagatcgagtagtatccatccagatcgatatcccagaagaccaagcctggccatgaaacgcatgctaccccgatctcttcttcaccttttcttatccgcaggtaccaacaaaaaaagtgacccttttgacgacgtattgcgtgggcaaggcatgacagtgcgacaagagagaaactaacaaagagctctgttcgttctgctgattgcttatgattcgactcgcagtggcggtagctgggagagcttgggactggccagacacgaccaactcaccactgtaataagacgacttttatacatagctgacagtacgcaacctcagttcaggcgcaagctccaagcagcagagctgcagagaggcgtcagcggagcacaagctggcgtccaagcaaagcccgctgaagtgtccccccctgcctttcttctctccttcactctctcgttcgtggcgacgcttgtgcgaccactcaccgtagcccgctcgacgccagttattcgccgtgcagctcgccggcgacgagcaccctccagcctaaggaggggagccggagatgttctactcgcagttcatcttggccaagaagggccccctcgggaccatatggattgccgcacacttggagcggaagctgcgcaagaaccaggtcgcggacacggacatcggcgtctcagtagattccatcatattccctgacgttccaatcgcacttcggttatcaagtcatcttatgttaggcgtggtcagaatctattctcggaaggtcaactacctattccatgactgcagcgaagctttgctgaagataaaacaagctttcaggtccactgctgttgatctacctcctgaggagtcaactgctccatatcactctataactctgcctgagacattcgatcttgatgattttgaactgccagaagctgtgtttcaaggcgatactgatcatcatgtgagcacaaaagagcagatcactttgcaagacaacccagagaaaacaggatattcaacatcccagtttggcctagatgaaagatttggtgatggcagttcatcacatattggcttggacttggaggaggaattaattctgaacaaggaccactcaattcatctcgagtctgatgatggtattattattcaaggtcggtcatcggtcccttctactgatatggagattgatgataacaaaagtacaaacataacagctgaaggatacagcaacatggacggtgggccttctagtcatgtaaagttaggtccactgaatgcagatgacctaggaggaaacagtatccgtaactggactggttacaatgtacagactcctgatttgaatgatatattattgcataataatgaggatattgcaggcccatcaacttcgtactatcaacctagcccatttacttgtgatgaacctgcatcaccagagttcattagcgctcaggccccagctacacctggtttaatggaagagacagttccttccagagtccatgaaagtcctgttctgagtccacagagaaaggcatcaccatcaactaatgatgaaactgcaaaggctgacactcctgctgcaccagcctcagattttctccattcagctacaggaaatgccagtgatgtggtgggtgctgagatgacagaacttggattggcgaaaccggtgcaagttgagtcttctgttgtgcaggactctgatgcatcggtgcaacagcacacaagtgagggtttaccatcccagggtcaagcttcacacttggaagctgctgctgataagttggtcggctctgatggtatagctgcatcggttgatgaaacggtaactgtcaatgcaaccattgaagatgtacctttggctgtaaatgattcagagccatgtgttgatggttctgctggaccatctgtggtgaacctggtacagatggatggtccattatttgatgcacaaggtacagtactaagtgcagattttcaacatgaagtccaagcaatgcaacaagtagtggcatctaacgatagactgaatgaactatcaacttcagaatttgccgagcctgagaaaatgctgacagctccgaatgctgaattcaatcatgcgattgacttggggcagataactgcggaaaaaggaacaattgaatctgatggaagtaacataataggcagcctaacaagcagaaaaagacacctggaatatagcttaccagctttagagagtgagaccactaaaaagttgcctagccgaccacatgttaaaagaaccaatgattttgttcctcatgatgatgatatactggcatctattttagtcggtaggacccctgggttcacacttgattcaacaccactaccaccaagggaatcatctctgaaacgcccaaggttggggtcgaagatgggtacactcaagagaaaagtgcagatagatgatgccatggtcctgcatgctgatactatacggcaacagttgatcaatactgaggatatacggcgcattcgtaaaaaggctccatgcactcgttccgaaatatggatgattgagaaaggttcactggaagatgatttattccacgagcccatcttttcctgcctatctgaggagctaaacaatttacacaatcggacatatgagactattgtacaccctgctgttcagagaatggaactacatggtcaattagacatgcctgaaacaataccagaatatagaaatattgctgggtttggttctgctactattgatggcccacttcacataccagatgggattcaatcagatgccatgttgtcaggcgcaaatgttgcatatggcgctacagctgcttttggtttgcaaattcctcctgactaccaggttaaccgtgcatctaatgattttgttgtcggcactcagcttcaagaggtggctaaaccttttattggtaatgagcacgaagtggcacctcctgacagagagcatgctcaagtagatacattgtatagtgaccgttttcaaggtgttccatctgatttgcagaggagtaatgatgcaaatgtttctagtcaagatgtggttctagataactctggccaagcttgtgctcatgcagtggacggcatgacaagggagtttaatcattttgttcatagagacgctaatctttttgggagtactgaggtccctgcttctgagattactggggtggaatataatcaagatgcctctggttttcctcgacaaacagaggatgacaacacggtggagtataatcaagatgcctctggttttcctcgaccaacggagggtgggaatgcggtggagtataatcaagatgtctctggttttcctcgaccaacagaggatggaaaaacggtggagtataatcaagatgcctctggttttcctcgaccaacagaggatgaaaacacggtggagtataatcaagatgcctctggttttcctcagccaaccgaggatgaaaacacggtggagtataatcaagatgcctctggttttcctcggccaacggaggatgaaaatgccgcgtctgctacgggagataattctggcttccaagaaaacaacacgggttctcatatggatctggatatgatgaatgactatgaagtgaaggaatgcaacgattttgggagtgcgattcatggcgttgatacagattttctgaactatggtgacgacgacaacgacgacgacttcgtcgacgccgacgagccaaatcccagtgagttccagtctctcgacaacagcggctggtcttctcgcaccaggggtgtcgcgagatatctcaagactctgttcgacgaggagtccggtctggggaggaagagcgtcgccatcgaccatctggtgcgcgggaagacgcggaaggaagcgtcgaggatgttcttcgagaccttggtgctgacgacgaaggactacatcagcgtggaccaaccgaaccccttcgactttgtgagcgtgaagccaggcccgaagctgctcatgtcagagttctagttcaacaaagtcagcgtaccctggcgcgatacattccctcttaccattgtatccatcatcacaccgaccaacaacaacaccgcagatatccccccccccctcctcttccaaaaccatttttgtgtatgttgttgcagttcccctcccctgtagcatctggtgcgctgatccgttgttgttgccagggcgtctgtccgagtaggatggtggttgtgttgtaccgtcggctatccaacagtatatagtagtagtatgattttagcgacactcggtgaagcccgccatgtaatctgctagggttcatgctcccctaagttactgtcgctttagactggctaaagcccgtagaggaattgtatacgagaaggacagggacagcccgagatgatgaatgatgtattgatgtgcctgttgactatgtgaggactgacggttttaactcaataattcaagtgacctttcctgtgaaccatgaatccatgccggatatgaggtaaagatgaggaatggcctcgtacatccgtgcctttcgcgatgaaagaaagtggcttgtgatttgttttcccgttacaggccgatgggcgatggtggcccagggaagaagagacgagagcaggagaggaacgagaagagaaggcgagaaatcggtagaggacgacgagtggctggcaagaggatcatgtcgtcacggtcac

SEQ ID NO: 29135 - DNA, 5658 bp, Zea Mays
tgaaagccggcccccaaatcacgagctcctccctctaacctccggcctcttcctgcgtcaccaccgcgcaggcgcagccatccccatccttcctcaaattcccaaccccacccaagccagatctcaccccctccccgatcgctacacctccgatgttcccgcctctttcgcctatcccttcatagccgcgtcgccaccggcgccgctgcgaggcggccgctgcctttctccgctccctttgtatggaaacgcgcagccgcaagcgggcggaggcctcttcttcttccgcgacctcctcctcccgctcctccaagcgctcgcgacacaaccctaaccctaatcctcccgccggcccctcccccgcccccaaactcgtcccgttgccaccacgcacccgccgctcgaccgctgtcaatcccctccccccgatggattcctcgggcgacaacaactccaatcccgtcccgccgccgcggcgccgcggtcgcccctccaacacagataaggttgtgcattatggtgctgtgccttgcttttgtgcccggcttctcaccattgaatacatggacttggcggagcagtcattgcaagctcttaaaaaaatatccctggagcatccaactgcgtgcttgcgagctggtgcactaatggcagtcctatcataccttgactttttctccacaggtgttcagagagttgcattatctacagctgctaatatgtgtaggaaacttccttctgatgcatcagattttgtaatggaagcggttccacttcttactaatctactgaactaccatgattcaaaagtactggagcatgcttctgtctgccttacccgtattgcggaatctttttcaccatttccagaaaaattggatgagttgtgcagtcatggattggttgcacaagctgctagcttagtgtctgttagcaactcagcaggacaggcatccttgagtacatcaacatatacgggtgtgattcgtcttctctcaatatgcgcaagtggatcacctctggcagctaaaacacttctccttcttggaattagtggcatacttaaagatatcctttcaggctctgggttggttgctggcacgactgtgtcccctgctttaacaagaccagctgatcagatgaatgagattgtgaagcttgcagatgagttacttccttctctgcctgttgggaccatttctttaccagtgtattctggtgttcacatgaaaggttgttctgtaaagaaatccacttctagtaagcagggtgaacatggttcaacagcaaatgaactatcaggtcgggagaagttattgcgtgatcagcctgaacttctgcagcaatttggcatggacctgttacctaccatgacacaggtgtatggctctagtgtaagtggaccaatacggcacaggtgcttatctgtcattgggaaattaatgtactatagctcagctgagatgatccagtctctccttagcacaacaaacatttccagctttttggctggcattttagcttggaaagatccacaagtgttgatccctgctcttcagatagcagaagttttaatggaaaaacttccagagatttttttgaagatgtttgtgagggaaggcgttgttcatgctgttgagtcacttatatgcccagaattatctggtcaggtgactcctcatgtggattccattacatcttcacataataggcgcaaccgccgtagaaataatgctgtgaacactggaaataacttgcctgatggaccaaaaggttccaattctatgattgccaattcacccccaagcatggctgaagttccaaataatagtcttcgtgctttagttagtaatcatgcaaagtcatttaaggataaatatttcccttccgagcctggctcaagtgacattgcagttaccgatgaccttcttaaactgagggcactttgtgcaaaactgaatacaacagctgacactatcaaaacaaaagctaaaggaaaatcaaaggtagtgtctgacaatagttttgatgtcttgtgcaatattgaggagcaattggatgatataatagctgaaatgttgtctgagcttagcaagggtgatggtgtttcgacatttgagttcatcggaagtggagttgttacggctttgctaacctatctgtcatgtggaacatttgggagggaaaaggtgtctgaggcaaacataccaaatttgcgtcatcaggcagtcagacgatacaaaacatttatatcttttgcacttccaaatgataaagatgggaataaaactcctatggcattcctagtccataaactgcaaagtgccctatcttcgttggaacgtttcccagttgtgctcagccattctggaagggcatcgactttgggaggatcccgcctgacaacaggtttaggatctctgtcgcagcccatcaaattgcgtctttgtcgagcgcctggtgagaagtcacttaaggatttttcgtccaatgttgttcttattgactcattagctagtctggcagctgttgaagattttctttggcctagagtccagcgcactgaaccagtattgaagcctccaatgtcatctgcaaataattctggatctggagcagcaagctccacagcttgtgcgccttcaattccatcagaaactcaatctgtccgtcgcacatcgttaagatcaaagtcatcagctgccaccagtggtgcaattaagaaggattatcaggagggaagcataaacacctcaaagggaaaaggaaaagctgttcttaaattgagtttggatgaacctaaaggcccacatactaggaatgctgcgcgcagaaaagctacttcagagaaagatgttgaactgaagccatcacatggtcacatcacttcagaggatgaagatcttgatgcttctcctgttgagattgatgatgctttaattcttgatgatgatgacgaggatgtcccagatgatgaagatgatgatcatgaggcggttctccgaggttctcttccttcctgtgttcctgagagagtgcatgatgtgaaattaggagatgctgatgattctagtgttgcctcattggcaaatgataaccaggcacagccctcatctggttctagtacaaaaaatacttctagcaggggattggacactgctgaatttagaagtccagccacatttggttcacgaggtgcaatgtcgtttgctgcagctgcaatggctggattaactccagtaggtggtcgtggaattagaggtagccgagatcggaatggccttccattgggtgctcgtgcaactgagcattacaacaaattgatatttacagctgctgggaagcagctgaacaaacatttgactgtatatcaagctgttcaaagacaagtagttcatgccgaggatgatgaagatcgattcggtggatctgatttacctgatgatggtaaccacttctgggatgatataaggggtgatgtgttcactataacgtatcagaaggctgataacacagcggagaaggggtctgttggaggttcagcttcagtgccaaaatcttccaaatcagattcttgcagaactttgtctgaaaaacagtgtacttctcttcttgatagtattttgcaaggagagcttccctgtgatttagagaaatcaaaccaaacctacaatatcttatcactattacatgtgttggagggtttgaatcagttatcacctcgtctgagactgcagtcagcctgtgatgattttgctgaaggaaaagttgctacattaaatgggctatacgatgttggagctaaggtaccctcaaaggagtttatcaacagtaagatgaccccaaaacttgctcggcaaattcaggatgttcttgcactgtgtagtggcagtttaccatcttggtgttatcagctgacgaaagcttgtccttttctgtttcctttcgaaacacgaaggcaatacttctattccacagcttttgggttgtctcgtgcacttcatcgtcttcagcaacaaccgggcaatgataataacactgcttttgaaagagaagtcaggattggtagattgcaacgccagaaagtccgtgtttctcgtaaccgtatcttggattctgcagctaaagttatggagatgttctctaatcaaaaggctgtcctagaagttgaatactttggtgaagttggaactggtcttggtccaactttggagttttatactctcttaagccgtgagctgcaaagggttgacttaggattgtggagatctcattcttcagataattctgggatgcaaattgatgcgaatgctgatgatttaataagaagtaaaaatcatgaatcagaatcacttactgagagcaggaacatagtacaatcacctcttggattatttcctcagccttggccacctactgctgctgcatcagaaggtagcaaattcttcaaagttgtcgagtatttccgcttagttggtcgagtgatggcaaaagcattgcaagatggaaggcttctcgatttgcctttgtcgacagcattttacaaacttttgcttggacaagaacttgatttatatgatatattatcttttgataccgagttcggaaagacattgcaagaattgcaaattctcgttgcacgtaaacaatttttggactcctgctctagtgagagccaaaagatagatctatgtttccgtggtgctcccgttgaagatttatatttggacttcactcttccgggctatcctgaatatgttctcaaggaaggtggagagaatgcagaggtcaacatttgtaacttagaagagtatatttctttggttgtggatgctactgttaagaccggcataatgcggcaagtagaggcatttaaggcaggattcaatcaggtgtttgacatatcatcactgcaaatattttctcctcaagaacttgattatctgatttgtggtcgctgtgaactttgggagccggaaacactgcctgaacatataaaattcgaccatggttatacctctaagagtcctgcaattattaattttcttgagatcatggcagaatttactcctgagcagcaacatgctttctgccagtttgtgaccggtgctcctcggcttccacctgggggtttggctgctctaaatcctaagttgaccattgttaggaagcactcttctgtggcaaataataattcaaatgcaactggagcgacagagtctgcagatgatgatttgcctagtgtcatgacttgcgccaactatcttaaactaccaccatactccaccaaggctatcatgctaaagaaactgctttatgcgatcaacgaaggccaagggtcatttgatctttcgtgaatctcaacactaacataggtattggtccacctagaaatctgcgtcattgttacccagagttagtttctacctcattcatgtatgacataggttaaactcagctctccggagtcccaccgaaggtttggagcccgtacctttgggtgtggatgtctatactctcttttcttcttggttgtatattcttgcggatctttatagtgaataatagtaataaattgttttgcgcttcttactatgctaatcatcagtgccccacccgaagcgtcagtcgtacaaattttgctcgatggtttcgctg

SEQ ID NO: 29136 - DNA, 252 bp, Zea Mays
aagatgagtcaagatccacaatcctggatggagtctttctttaccccactctttcttgcccaaacctatataggctttaaaagatatcgtttatcctgcataataaagtatctataaccatatatacctatgctctcctaaataactaactaataaaaaaaaaagaagggaactcttgatttttgaactagctagaaactaaaatctagactacaagctaaatttgttgtatcatgttccttataaatctcg

SEQ ID NO: 29137 - DNA, 2025 bp, Zea Mays
cagccaccgtccacacccccatttttttatctccgcttccactgttccaccaaaccaagccgagaaatttctcctaaatttcagatcaaatcctcctcctcctccccctctccctctccgaggattctgcccagcagcgcggcgatccgcctcgatccggaatggagcgcgtcttctccatggaggagatccccaacccctactgggcgcgatgaaccggtgcccatctgagtggtacttccagaagttcctcgaggaggccgtgctcgacagtccgggtcccgtcgccggcgtgggtagaagcagcggacaagctggagttgaggcggcggagagcaagccgctgggcgccgcggcgccggcgtccgtctcgagctcggtcgttgaccccgtcgagtacaacgcgatgctcaagcagaagctggagaaggacctcgctgccatcgctatgtggagggcttctggtgcagcacctccagatctttctgcgactgctgcttccttgccaagtgtcggtgctccgcatgcagctcctcttaaacccgtcggaggtgatcacccaatcatcattttgccgcgtcttcaaatttattatgaaacttggctcaaatgtgtgaatgaccttatgtctcttgtctcagtgctctatactcatgtaataggtattagatcttcggttcctctctgtccttgtaatcatcaggttgcttgcaaggaaccatttcgaaaatgcaggagagctgtgtttctctcttgcgtttctttgcattaagaagaaaagcagcgaaaatccttacaaacatacacaacacaccaagcagatccatctcgcggctgacttgtaaatcatgggggaacttgatattctgttgagtttttaaaataaaacaacttgtgattgtgaagcttttaactatgatctgacttttatcttgtgcatgtatcaggtactgaaagtctagttcaaaacatgctagctggtgctccagtaggggggtcaggtccacatgtagtacaaattgctgatatccctgttaagcaaaccactagctcttcctcacgagagcagtcagatgatgatgacatggaaggcgatgctgagacaaatggaaatggaaaccctgttcaacaaagacaacagagaaggaagcaatccaaccgggaatcagccaggcgttcgagaagcagaaaggcggctcacttgaatgaactggaggcacaggtagcacaattaagagtcgaaaactcttcgctgctaaggcggcttgctgatgttaaccagaagttcaatgaagctgctgttgacaatagggtgctaaaggcagacgtcgaaaccttaagagcaaaggtgaagatggcagaggactcggtgaagcgggtaacaggcatgaacgcattgtaccctgccgtgtcggatatgtcttccctcagcatgccattcaatggctccccttctgactccgcctctgatagcaccgtcccggtacaagatgacctgaacagttacttcgccaacccaagcgaaatcggatgcaacaacggctacatgccagatatagcctcctcggttcaacaggacgacaattttgtcaacgggtatcaggctgctggcaagatgggcagaacagactcgctgcagcgggtggcaagcctggagcacctccagaaaagaatgtgcggaggcccggcttcatccggctcgacctcctaggtttcatatgaaaaagtccctggtgcctaacggcaagaatgctaaattaacaatttcaacatgctttgtactggacattgataatcctgcgatgcgcattagtgcgttatggacttgtgggtcaattgctatttggcgtgtgctggctgctcactgtagtgagcagaacaagttccagtttctatcgaagagcaccctctccttttcgctagtgacttatgaatggtcgatggtttattagcaacattgtgtctttcgcaagttcagtaatgaatggtcgacagggatgaaaataaatacttataaagagatct

SEQ ID NO: 29138 - DNA, 4756 bp, Zea Mays
ctgttcagatgattcaaaccttggtaatcacttcttgaacaataacttgcggcaaggagttcaagcttccctccctcagtgcctgtttgctgttggagatcattcggtggaaacctatgaattttgtggcaatagttcaactgaattgactagagttgaattgctaaaaacttttggcgagtgcacattctgttatgatgtcagtaccaaagatcaagatggcaatttagtgagctcaacttccatgtcgatctatttggctcctttgcttttatgggtgcactttcatacaatatacatgctactgagttttgtaagtaatgttgagtctgatttgtcacatggagagcataaaattcaaaagcatggtgacgaaaagggaagcagattgactaccagcacaaccatgtcctcaagtggaagtctaaaagttcagatatccctagcacaggcaagaattgtcctgtgctttccatctgagttttcatgggatttgagccacccatctgtcctggataagttcctggtgatcgaccatacttcatgtctgaacatggtagaaactgcatcacaccctcaaaacgaaatgcaaaatgaggttcatcttagcaagtcgtgtacctcaatacatttggctgtaggggacatagatgtatatttggttaagccagtcaataatgtattggttggtagaatctgttcttcaagtaggcaaactttctctgcaatgaaaattctttctgttactggatccagttataatgactctggcatcacactgatcaggagaaagtatcctgtaactggccctgagattttgaacaatgcttggagtttgccaaagatgcatgatgaaaagatcactaaaaatcaaaacagcaaatgggctggcatttccccttcttcaaatgatcttttagagacaggatctagtatgcgccaggagctccttaagagcactgagctcttatttcatgttcaactttcttgtgtttcattacgacttagtaaaaaggattgtgagttactaaataagctgctagatcatgtcattaaggggatatcaaatgaacaaacaagcatttctggaaattccaaggaccaatctgttctgatcaatgataccttcattcaaacgtctgtcctttttgaatgcagtatattggaaatttgcactgaattgaatgaaacagtggaagttggtcctttattacaggcagaactaaaaggatcctggaactctgttaagttgaatgtttcaaaattttgtcttttctcctgttcaaatgttggaggcctcaacaatgccagttttctttgggtgaatcatggtgaaggtgagctttggggttctgttagtgctaagaatgataaaatccctggagaaagtaaagattttcttatagtggcttgcaaggactctgcctgcaggcggggtgatggtgaaggtactaatgtgctgtctattggtgctgctggctgttctgtgacccacatcaggaacccaaagctaaaagagaattacacttctgttgatgttcgttctggcacaattgtagcacctggtggccgtatggattggatcaatgcgatatgcctgctgttcagttcaggctcagatagaactgaaaagtcagatgatagtaacacaccaaatagctatcagtctggtgaaccttattcatcatctttatttatcgagttggctgatgttgctgttagctatgaacctcattttaaacattccactctcagtgctggagcagccgaccgcaagtttttctcatgccttttagctgcatcatcatttaaactccataataaatctgcatcagcctctgcagctactgattttgatatccaattacgtgatcttggagtcctcatttctcaatcatctggttcaacaaatggtacttgcagttatggtgtagattaccttcgtcaagcaggttatactaaggttgtccagaacacattcattgaagcttctctaagattagattcttccttttggaagcttgaaatatctgattcccaatttgacattggtacatgtcatgacacaacttatggtcttattggtttgggatctcaactccagcagctatatggtccagatatgcaggatgctttagatcatctgcagtctaggtggaatagtgttcagcaagcaaacaagcaaaatatggctgctgatgcatcagacaagtctgagagcagtttggagattttggtcgattctggggattaccagtcagatggacttcttgatgatattattgagaatgcttttaacacagaggattgcatggacaccaatttttgggagaacaattaccatcacttatttagtagcagtgagacggatgatggatttgagctgaatgcggccacttcacatgtatttcctatatctactccagaaggcaatgttactcaaatatcactagaacagaacgtctgtcctgatcaaatcattgattcatattgtgtgcctgaatttcatcaatcattatcaactctatgtgatgaagagcataaatgtacatctggtgacaattctcatagaaccctggaaagtgaagatgctggatggtataacaatgttcccttaacaatagttgagaatcatgttttgaaaaagaaaaacgagcaagtacttcaacacaaagtgtcttctgtttgcagtttgaatcctgatgaatattgtaatctgaaaggaaaggttcatattcatgatatagatgtaaagtggcggatgtatgctggagatgactggttattacctcagaaagatttgactagcttaacatgcacagatggaagaaataggagctcttcactggaatttactgtgagagggctcaatatccaagttgacatgtatccaaatggggatgtttctatatctaggctatctgtagctgctgaggacataactctttgtgatcaaagtatccatgctccatggaaactggttcttggatgttacaactcaaaggattacccaagagagtcatgctccagtgcattcaggttagaattggagtctgtgaggccggagccacaggctcctttggaagactacaggctccatcttgagattttgcctctacagttgcatcttgatcaagagcaacttaacttcctaataaatttcttcaagaatgattcatgtaacaatgatcctcatttgcattgcgaaaatgatactgttgatgtgaagagcacaagcaatggaagcaatatggttgtggatgaggcattacttcctttctttcagaaatttgacgtaaagccacttattctgcacattaattatataccccgtcagtttgacccgattgccctaagcaagggaaattacgcagaacttctcaacattcttccatggaagggaattgatttgaagcttaagcatgtttctgcaatgggcatttacggatggaacagcataggtgatacggtagcagcggaatggttggaagacatttctaaaaatcaggtgcacaaattgctaaaagggcttcctccaataagatcactagttgctgttggttcagggaccagaaagttggtctcgttgcccatcaaaagctacaagaaggatcggaaattgctcaagggaatgcaaagaggcgcagttgcttttattagaagtgttaccattgaggcagtagggcttggagtccatttggctgcaggagctcatgatatgcttgtgaagacagaatgcgcccttacaactgttccaccacctttagcctcatgtgaagtgaaacgaacaaagcacaacattagagctaaccaacctgaaagtgcacagcaaggaatgaaacaggcatatgaaagtttaactgacgggtttggaagaacttcctctgctatcattggcaatcctattaaagtttataaccgaggggctggtgtcggatcagttctggctactgcaatctgtggagcaccagctgctgcagtagctccaatctcagcatctgctcgtgctttacattatgcacttcttgggctaaggaacagccttgatcctgagcataagaaggaatccatgtacaaataccagggaccctcccaagcatagacgtcattggtggtcggttcattctttggcgagccttacaccatctccctgaaactggttttaggagctcctttgccagtctcgtccaatggtgaggtgcaaacttgtacagtgtgtacagatcgtaagacagattatatttggcatcaaagccacacactaaattgacacataagggtttaattagcactcatattttgcaccacgaaggcacgtggaagttttgtaatccctcttcgttgcatgactgcccccgatgtacataatgtggttgctgtgtgggttgtgcggatgtaaattatcttcatgactgtccccaatgtacataatgtggctgctgcgtgagttgtgcggatgtaaatatctcttttgctttggttgcgtgtgcgcgcgcctctggtccgctgttcaagagtgtgttttgagctgctgctgctggtgtcatttgccgcagcccatgaacctgatcattctggctttctagtgttatcacgctaaaatatctgatatagaagttgtgcaatattaagtctagcgcctgactccttcgccacgatccaacggccttcgcgtcgcttgccacgcacgcctgcataccgcacacggctgacctgaagcttgtataaatgtaacacatcaagacctaatacgtac

SEQ ID NO: 29139 - DNA, 1865 bp, Zea Mays
aggcgcccaattctctcccgctctcccctctgctgcaagtctgcaaccgcagcagcacgtccatttcacgtgccctttcctccctccctttcccctgcccccacgccacctccgttcgccgccgcccgccgcgccggcgatggcgatgaccgaagggcttgtgcctattacgcggacctacctcgcgcgctactacgacaagtacccgctgcccccgctgcccgacgccactacggacctcgccgcccggctccgtgctctctccgccgacctcgctgccgttgctcccatcgccccagatgaggagctcttggaacaagaagcagctggcatacctgcccacaaaattgatgagaatttgtggaagaaccgagaacaaatggaagaaattcttttcttgattaacacatcccatcgtcctgtggctcttcaacagaagtccaccccagaagatgctgagatagtttgtacacttgatgatatagaagctaaattgaaggatatgttgaagaacttagaacaatttcagttgaaaaatgctgacaatgttttcaatacagttatgacatacatgccccaagattttcggggtactctaatcaggcaacagcgagaacgctcagagagaaataagcaagcagaggtagatgctctggttagtgctggtggaagcattcatgatcgatatgcattgttatggaaacagcaaatggaaaggttttattggattttattcgacaaataaatgacgataatgggcctatggaagaacaaagagaacgttatggtccagccctttacacccttacaaaactggtgcttgcaattcggttgtatttgcatgtctctttggcacgatatggacaaaggaaaatagagaaggatgacgctgctgtgttgcagcaagctgtggttatctacaccaaggagtttttgaagttcactgaattcattggtgaggtctttgtgaatgcaccattctttatatctgctgaggatgcaggtgccgtggatgcaaggaaaagtgatgagtacaaagaaactattattccagctggaaagacacatgaggtcattttgagtgttgaagctgtaaactcatacatcgcatgggacttttccttgcaacaaggggccctcaacatggtattggacattggctttcatgtggagtacattagcccttcaggggagaaaactttaattcttccataccgacgatatgaagctgaccaaggtaatttttgcactgtttcatcgggatcatacaaacttgtgtgggacaattcatattcttcattcttcaaaaaggtccttcggtacaaggtggatgctgtgccaccggttgttgagccggccttgtcagccacggaactctgaagaggtctgtcttaatataatgatgtaacgagggccgatgcatgcccgagtatagctgtacaaatgtttctgaaggccccacacggtgctgttactgattattccatcgaatgctttgcggtgttctgatcgcagcattccctgatagctcgctgtcagagcgcatggatatgtactttgtgtgcacatggctgcggccacttgtcaccgacgaatgcctgaatataacagaaatgtattatatcgaccaataagagcatgtctgattggaagctgtcgtggtttgtttttattttttttctcgaatacggagagctgtgtgtcattgcaccaggaagaggaagagctgtggacgtgctccctggaaagagcatcccctttggctaccaattgttgaatttgccagtccatattttagcgcttcggatctgctcagatcccgattctgtttggatgaattgagctttgctttccccaacgaaaat

SEQ ID NO: 29140 - DNA, 530 bp, Zea Mays
cgtcaccccagtccccataccacaccaccaccgcggcacacacaaaccaaccacaggcaataaacactaaacagctcccactcccagtaaatttctcgtctcccaatctccgattcgaggaagccggaggaggggatttcgagccgcggaatcgggacattagagtggccctcacccggcgctggaattgccgagagggactgggttggagtggagttcgggaggtgtgagagaaggcggcgatggggcggctgttcctgatgcacctggacggcaacgtctacagctgcaagcactgcaggacccagctcggcgttgccagcgacatcatctccaaggccttccactgcaggcacgggaaggcgtacctcttccataaggttgccaatgtgacttctggagtaaaagaagatcgcatgatgatgacaggaatgcatactgtttctgatatcttctgtgttggctgtggatccatcgttggatggaaatatgctgctcatgagaagagccagagatacaaggaaggaaag

SEQ ID NO: 29141 - DNA, 2321 bp, Zea Mays
ctcgggacttctttcgctgctctctctctctccgagcacagctgggggtggtgttcacggtaggcagcagcgcactgcgcacgggcgcagtggtgaggcgcctaagggagagtggcagtagtgacgcctggcgccggtgcaggagtgcaagggagacggtggcggcagcggctcgtgtcgacggccggagcccggaggcagcggggcggcggaggcgtcagtgtacgcgggcggggcggaggaggcactgaagcagctcgcggcggcgggcttgagccagcgttgcggcactctcgggccggtggcttcgggagttgggaggcactggcctgtgcaagaagggcttccgagaagaaacggtagaagagaagttggggatacgaatgttttttatcgagtccttgtttatccgaatccagaagttagctagtcgatgtaaatactccagagtggaaattctccaaaatgattcatgatgcaaaaattaaattctctgatcattctatcctaaggattgttcaaatgttgggtcgatatggaaattggaaatgtgttttgcaagtggttgaatggctccagtcacatgaaaggttcaaatcctacaagagcaggtatatttacacaacagttctcgatgttctagggaaggcaaagagaccattcgaggcgttgaatgtattttataccatgcagaaccaattgtcatcttatcctgacatggcagcttatcattgtattgctgttactcttgggcaagctggtcttataaaagaattatttgatgtgattgattgcatgtgttctcctcctaggaagaagttcaaattgagccctcttcagaattgggatcctcgcttggaaccagaccttattgtatacaatgcagttttgaatgcttgtgtgcaacaaaagcaatgggaaggggcattttgggtactgcaacagttgaaagagaagaacatttgtccaacaaattcaacatatggtcttgttatggaggtaatgcttgtctgtggaaagtacaatttggtttatgagttcttcaataaggtggataaatcatcaatacctggtgctctgaactataaagttcttgtaaatgcactttggagagaaggaaagattgatgaagcagtgatggctgtgaaggatatggaaagtcgtggaattgttggttctgctagtctgtattatgacctagctcgatgcctttgcagtggtggacggtgcaaagaagcacttctccaggttgaaaagatatgcaaggttgccaacaaaccgctggttgttacctacacaggactcattcagacttgcatagacaatggtggcatggaagatgctaaatacatattcaaccacatgtgcaactactgttcacctaattctgttacttgcaacatcatgatgaagtcatatattaaacatggaatgcttgaagacgcgaaagacctgctccatgatattctgaattgcaggataaggagtaaagcggattctaatcaagtggcaaccgctgacaagtttactttcaatactttcatggaggcctgtgctgcagcaaaaaggtggaatgacttcgagtatgcgtttcgtgagatgttattgaatgggtaccatttcgatgagcgaagacaccttcggatggtacttgacgcttttaggcatgggaaggaacagctgttggatgatctatggcactacctgtgccgtcacagccgtgtcccgccctcccctgtcataatggaaagattctgcctaaaactgatgcagggagatacactggcggcgatctcctgcgtcagcagcttccatgagggcaagatatgcaacgtctcctccatgtcatggctcaatctgctgagccgcaatgcagataggctgaaggaggagcatgttaccaagttagctcatgaactcaacagcctcattagcttgaggagttcctctgatagcattagtcttagcctgtaccaaaaaattattagtagctgtacggcattcctctctggagccacagttgtagaaaaggcaccttctggccaataggtggtgttacagaaattataataaccacagttagtaaattctagtactccaaatcataattaccacgactgatggagtgtattgcattcaacgtttggttatcggtacaaagttagaaatggaaaattttcacgtaaggaattagttctttttttagtataatacaaaggctgatttgggagcataagcgataaagcttgctttgtttgattaattttatactggttactttcaaattcacaagtcataataccatgagcatcatttattga

SEQ ID NO: 29142 - DNA, 2511 bp, Zea Mays
ccacgagacaggcataggcaccgtcgcacagagctgtgacttttttttaagcaccacagagctgggactttgagagggaggactcagcgagctccaaagccgacgaggataaagaggatcccggctccgcacgcgggagcgagaggatcgccggcgcaggatgtggtgcgcatcgtgcttggcgtccgcctgcgcgggctgcacctgcaacctctgcacgtcggcggcatcggccgtgtcccgccgctccgcgcgcctcgcttactgcggcctcttcgccgcctcccttatcctctccttcttgctccgccagttcgccgcgccgctcctcaagcatatcccatgattcactaaatttctccatgtcctgaaggcttaagatgcagaaaagtaatgtggagtgtccttttgctccacaaaatgaaatgcattccttcagttgaatattttactgtttcgtcgttcccatagagtacttgcagacagcagagggttttttctggacaacaacagcagaggttgctactagttgttgtcgaaagttctaatatttgcaattttgcaacccacaagtgttgactctttgctattataccacctcggtctatgatttgtgagtccgtctgtctatgatttgtgggaccaatggcaaagtggtgaagcccaatgatgatgatggcaaaattgcaaatcccttaaagttcggtgctgtacagaaaagacatctgggataaatgcgtttgatcaaacaccaccagaagaatggtttcaaatgaatgctgttcttcgtgtaagcctggggaacttcttgttctttgcaatattttctctcgtgatgattggtgtgaaagaccagaatgaccggcgagatgcctggcaccatggtggctggattgcaaagattgctgtatgggctgttctcattgttcttatgttctgtgtgccgaacattgtcattactatttacgaggtactttcgaagtttggatctggcttctttcttctagtacaggttgtgatgcttttagacttcacaaataattggaatgactcatgggttgagaaagaagagcggaaatgggaaatagctttgctggtagtgactgtggtttgctatctttctacattggccttctctggtgtgctcttcatgtggtttaatccatccggtcatgactgtggtctcaatgtgttctttatcgtcatgacactcatccttgcttttgcgtttgcaatagttgctttacatcctcaggtccatggaagcgttatgcctgcttctgtcatttctgtttactgcgcatacctgtgctacacgagtctctcgagtgaaccggatgactatgagtgcaatgggcttcacaggcattctaagcaggtttcaatgagtgctcttatactcgggatgctcactacggtgctctctgttgtgtactcagcagtccgtgctggatcctcgactacattcctttcaccgccatcatctcctagatctggagccaaaaacccgctactcggtgacgaggaggacggcaaaggcgatggcaaagaaagcgaaccgcgacccgtgagctactcctacaccttcttccacctcatcttcgcccttgcaagcatgtattcagccatgctcctgaccggctggacgagcgctgcatcagagagctccgagctgatggatgttggatggacgaccgtctgggtgcgcatctgcacggaatgggtcaccgccgggttgtacatctggaccctcatcgccccactgctcttcccagaccgtgatttctcctaggcacccacgcacccatagcctatgagttgtttggtggtgttagttgcgattgtgaatatgaataagccgaagctgggagctggtagggatctggtattgtctctgtatgctatctggcatgcctaatgtgatggcactggttagtacctgtttgtatggccttgtatagaatatatttcgaccgagtgtaggttgtggactttaaagtcatatagctatacttgacctgatgtcaagtcgcggttgtgtgtaatgacgacaattatcatgtgtaagaatacgtctattgctcgtaatgttgtaataactacgactgtagcttgtgtttagggcatctacaacctactacataaatacataaataacatatatcttagggtttttaaagttggtgctctcagttttgctaatgtcctcatttttattcttagtcgtgttttttttctcagttttgtccttctagtgttatagagcagaaaaacaaaactgagcagaaaaacaaaactaagggtaaaatgaggaacactagcaaaactgaggataccagcttaaaaaccctatatcttaaggggtaagtacaaaaaataaagagacgtattttggttaagtaatatctcgattctctaagtctagatatgttccattcatacaattcatataaggtcttgttcggttaattcccttacccatggattggatgggattgaaaaaaataagaa

SEQ ID NO: 29143 - DNA, 1034 bp, Zea Mays
agtcagtccccgggccttgctctccctccacttccgccgcgacgatctcctcccacccgtagaccaacaacaacggtactaaccagtaccagccccgcatgcctctcgcggcggctgccgcggccgttgccgcatgtccttcgccgatcggcctcacccgctctttgtgccgtatcgaggcgcatccgcggcgccggcggaggttccggttggaggcaaattcgtcggcgtctacgtccgctcccgcgccgaccgcggcggatgagggaggcggagcggggttgtgccctgtggtcaggttcgacatggccgacttcaccgtcgccgaccgcgtcagcgtcgggctccatggacggtcggatgagatgatcttcgaggccacggtgtgcgatccgagcagcgagctgtatgggtcaacggtggtcctgcggcagctgaagagtttgcaggcgaagcgcagggggcgtcgcgctctcgaggtgctgaagaagctggctcgtcgccaaatgatgtaccactcctacgcacttcaggtccatggttacattgctccgtgcaatgccgtggaggaggaagatgtcccgttagtattggttcatgggtatcatgggagtcattccctgcgtcactggttgcaactctcagattggatcccaaccttagaggcaacattagcgttggacgaagaacaagtgaggagggtaggagatgactctgttggaggaccagctgtaactcgacagctgcgtcttatcaggatattgatgagagaccttttgattggtgtaaattatctacatagccatgggctggcacacaccgagcttaggatagagaatgttcacgtgagcccaatagacaagcatgttaaaggcacccaggtcttcaatgcatctccaagggccaaatttaattgtcccagtgaagaagacctcatatgctgatttactagagtaaatcccatgattggataggcgccaagagtgttgatctggggtgtcaagttggagctccacgttatcaatgaaattcca

SEQ ID NO: 29144 - DNA, 2613 bp, Zea Mays
attttggcgcgaaaggatcccatctgttaccgccaaaacccgctccttctcccccttcttcctccccgtctcacaatcacaatcccattcagacgcggccgcccctaccctagcaggcgcggacgcagccaccatgccggcccatccaacccctcccgccgcgcgcctcagcggcgtcacatcccgccgccacgcggagctgcttctccacagcggcgtcgacggcgtttctgtcaaggacctccgcctccgccgcatcgtcccacccgccgccggctccctcgacacctcccccaagtgcgtctcacccgtgaaacccggatctgttgacagcacgcctccggaggctgtgtcgtcagcggcggcggcggcggccggggaccttgaccggaagttggcgcccccgcggtctaagctcgtccgcgatccacgctcgtttggctaccggcgcctgctgcctttcctgaacgagatgacgaaaaacaatagctcaatcggcaaggaggtgttcctgcaagacacggctgcacacccaacggatgagctcagccgatctgattctcggttagctgatgaatctataggcgttagtcacagcgaacctgatgccatggatcctgtcgagccggcggtggtgagcactggaggagacaccgatgggaaggctacctgcggcaatgtcatggaagagaccaagactgcccctcatgacctaactaacaagccgttgcttgcccgatgcacaaggtcgaggtttgtccatcatccaagctcgttcagctacaagaggatgctgccatttctaatggaagacgaaatatatgctcaagaaagtggcagggtcaaaattcgaaaagttgctgaggaaaggcagtttgcggcaaacaagcatgatgcctcagccaatgggcagcagtgtcttgctgtctcggatgactcttctcaggaaggcaatagagctcaatttaaaatagtggaagaagaaaagccactaaaagcagatgtgaatcatattcttgatgacagacagcttaagcctcctgtcatagaagcgtctcctgattgtagtgcaactgaagtgcaaaatgtcatgcagcaagaagctttagcttcaagtcaagttcccctaacttcttttgatggtgaattaacatcagacggggacaatgtccagtccattggacaacatcagcttgttgtatcagaagagtctcaagaggaatgcaaaagagatgaagtcaacagaagcattcacgatgaagcagtacaatcagatgggggctatgctctggatagcagagaatttcagcctgctgcatcagaagtctcttgttcagaaaacagcatggctggagtgcaaggggctgcacaagaagaaccgttacctttagatggagttcaggaaaattcagacatgggcgacgatgtttccacagagcaggctcagctctgtgtcacaagtgaatccttgtctgcgcagctgcaaaacaatgctgaattcgctgaagtactgccgtgccaagacttggactcaggatgtcacgacattggtttcggtagtcctaccaagagagtcgtaccatcgttgcatcggcattgcgcacaacaacctcaggactctgtggtttctcatgatgatcagcttcttgacgatgacatacaaatggtcggcagactttctgatccctgtgctgctgacagatcctcatcaatggaggaaatgtctggccgcattctgttcacccaatcagcatcgagcaaagcagccatatcatggccaagtggtgcccattcaatggaaaaaagagctcggtctcctaaggagctttccccaaagaaagggatactcaagaggagtacacgggggtgcaagggtatctgcatgtgcctggactgctgtacgtttcgcctacacgccgaccgagctttcgagttctccaggaagcagatgagagaagccgatgacatcataagtaacttactgaaggaggtggacagtcttaggagcctgctggagaagcatgctggccaagcagcccgaagacaggcctgccgggtgcaggaggtggccaggaaccgctgccagcagatgtttgcggatctaaactcccactgcagaatccccggaccaagggttaggttcgccgaatacgtcgaggagaaggccgcgtcgtctccacgcaggagcagccggaggtgactggatttcaggaggtggcaggtgaactggcctgcccgatcgtgttgctgaattgttcggtacaataactaagtagtgctgcttggcgaaccatcacccttgtcactggtttgtgttggtttgccatgctttgagctttgagttttgtactgtatactatgtgttccctacattccagaaaattgtaagtcgatttgactttttagttatatgcctagttacatagcaaaagttattacatatctagaaaagtcggagtgacttgtaatttgaagaggaggggatacaatttatatattcatagacaatagcttcagattcgttgagttggtcagcatgagttctggtttgtttcaggtcttctttttgaacgttagactgtctccagcagcgtcccctaaatttcgtcccct

SEQ ID NO: 29145 - DNA, 1099 bp, Zea Mays
cggatgtccgtgggaaacgaggatgggaacgtccccgtttatccgttggacgatatatttttttccatttacattctcgtgggaacaaacttcctcatcccctaatagaagaattctacatggtataggctcccgcttatttctttgttacaagcagtaatctaaatttgcaccattagatcctcaagccaaatttagatgtccttgctctgctattttgatgctcgttgttgtaactatgatctcgctcctattttatcctgtgtgttcgtccccgagtgtgtagtatgaagttatagcaagatgcttgtatattgtatatatatgtttaccgaaatgacgaaaacattagtggagcagttaccgacaaggtaagcagcgcatctacatagctgtccccgatgcatgcttgtcgtcgatgcatgtctcctacagtacgtaacgggagtgcagaattgttcgaggggggttgtgcttgtgcctgtgcatgcatatgcgttgaggccctttgtcggtagcgctaggtcgctagctctgcattcgtactccgttccgttctcggttcttctttggaacgtccggagcattcgagcgccgttccggccggacgcgcctgcctggtctgccaaagcgaacccgatcgatcgcccggcgcccggcggcgaaccgcgcatgcacgagcgagcgacaggggcggggcccgcggggcatttactgtcgggcggccgggctcgtgccgtggagtggagtagtggaagcgcgcgtgggacggagaggagcggaggtggccgtcgcttttgccccgcggaggaggcgcgccacgtgcatgcatggcgagagggagggcatgggcgttggcgcgacgtacaggaccggaccggacctgacctcggcggcggcggcggcggcggcgcccgtctgtttgctatgggtgcaggtcggcatcactggccacgtacggcgctccaccacccgcaccgcaccgcagctcctcctccgcacgcatgaagaaggtgtcgtggcgcgcattaactaattggcctagagagagagagagagagagagctagctacggaccggaggcgtacgtagggctgcg

SEQ ID NO: 29146 - DNA, 1571 bp, Zea Mays
cttgcacaaaggtctaattttaaaccctatactaccaaatagggtaccaaacacccccctgaaggcatcccaacagctccttaatttcattcccaaattcatgttttaggaaaaaaacaagaaaacaagcactccaacaattccctaattaccttccctttcctcccgcgcgcgcaaaaacccagtcgcgcgcccagatatccgccgtcctccctcgaccgccgtcgttcgtctgctcgaccctcgtcccttcatctcctcgacgacgacgaccttcatccaggccacgcccctcgtcgccgagacaccgccggcaaacatccaacacctcgacgacatatctaggaggcagccccggtcggaagttgcggcccactagaggcccatcgtcgggcccagccccaaccctagctccagccgccgcttggctctcctgctgtccgtcctggtaccgcgcggccgcaccacctctccaggctccagctccagcgccgcagcgcgctcgcccgcggcccgcgcctcctgctcctgccctcctctgtcctctccaggctccagctcgcccgtcaggccgccaccgccaggcgctcgcccgccagcgcgctcgctcgccaggccgccaccgccaggcgcagccgcccacagcggccacagcgcgctcgccccgtcgcccgccaccgccaggcgccagccgcggagcgccggaggcccggagccgcaggccgccgcagcgctcgcccggagccgcaggccgcagcgcgctcgcccgcagtggtgtcgtcgtgctcacctacgagctccgcgaccgcatcgttaagctggtttactagcttacccacgcacggccgccgccgcctcacgcacgcagcagccggccagccgcggtacgttctccaggtcgtgccgacgtccgacgacaaagaaggccctgggggcgctggcgcgcatcgcgagtcccctcgccggcaagtatatttgcaagcagaccctcgagctcgtgcgtttagcctcggagggcaagttcccgaaccggggaatcaaggacgtcgtcaggagcatctgttgcgggaacgtagggaaaatgtcaacgaatcctgatgaacctaagagtcgtgcccggacagactttttgctcaacaatgaactggaggtccagaagttttgggatgagaacacggtttttcaggctgatcctggcaatgactctccaagccccggggaaaaattctttgggaactttccatacccttacatgaatggcttgctgcatctgggtcatgccttctcattgtccaagcttgagtttggtgctgcataccacaggcttcgtggctccaatgttcttttgccctttgctttccactgcactggaatgcccatcaaggcctccgcagataagctagctagggaaatccaacaatatggatatcctccggtgtttcctgtggcagagggttctagtgctgcagtagcagatgctacccaggctgaccaggctgatgttgttgccccagataagtttaaggggaagaagtccaaggctactgcaaaggctggtgcacaaaagtacc

SEQ ID NO: 29147 - DNA, 1797 bp, Zea Mays
gcacaactctctcgcaggcttctctcccctctgcgcccttcccgcagcaccctgctcgcagcgctctctccacaggactgctccgcgcgcgccgcccccatcgccggcaaggcggcggtgctgctgcatattctcccggtcccccctccggagccaccctccccttctccgggaccttgagtaactttggagtaccagtgatgcaaagggacactagctctagcgatgtttctgcttctcatgtagggcgtgtaagacgtcgcaaacatccatctgaggctaccacagatgggaatagagctaatggacaaccgttgcttgtcaatgatcagaacaagtataaatcaatgcttatccgtacatattctacagtatggatgattggaggctttgcctttattatttatgtgggtcatctatatatctgggctatggtggttgtgattcaaatatacatggcaagagaacttttcaacctactcagaaaatccagtgaagagaaacaacttcctgggttcaggctactgaattggcacttctttttcacggcaatgctgtacacttatgggcgctttcttagtcggcagcttgtgaatacagtaacttcagatcacttgctttataaggtcgttagtggcctaataaagtatcagatgtttatctgttattttctttatattgcaggttttgtatggtttattttgactctcaagaaaaagacatataagtaccagttcaaacagtatgcctggacgcacatgatacttctaacggtttttgcacagtctgctttcactgtggcaaacatatttgaagggatattctggtttcttttgcctgcttcacttattgtgatcaacgatatatttgcttatttatttgggttctttcttgggagaacaccattaatcaagttgtccccaaagaaaacatgggaaggttttattggtgcatccgtgacaactatcatctctgcatttctgttagcaaatgtaatgggccgtttccaatggttgacatgcccaagaaaggatctgtcaactgggtggctttattgtgatcctggtccaatgtttaagccagagcattactcattgggagagtcggtgccacattggttcccatggaaagatctagccattatgcctgtgcagtggcatgctttagccctaggtttatttgcgtcaataatagcaccattcggaggattttttgcgagtggcttcaagagggctttcaaaataaaggattttggtgacagcatacctgggcatggtggaattactgatagaatggattgccaaatggttatggcagtgtttgcatacatataccaccagtcattcattgcacctcagaacttctctgttgagataatcttggatcagattctaagaaacctgacctatgaggagcaaaaatacctatatgaacaacttggggaaatgttccatgagaggcaattagggcaaaactgagagttagcgtgcttatgaaatgcatgataatttcttgtgtatttaagcattctgctcattatgtagctatagtccttgtccaaacctttgtatagaatggtagaatggagagaatgattgggttttaggtgctttattcactcttcactgacgctgcttaattcactccccttgtcatgatttctgcactctttgtaaaaggggacctgggaagttttattgtttcttatcacttcgtggtgctgtcctcagatcatatattcgaggattcacagaatataagatgaagcagcagtgctagttcttatttgaaaaaaaa

SEQ ID NO: 29148 - DNA, 993 bp, Zea Mays
ccgaaacgacacctcacctcaccaccgccaccttccagcagccccccaccggtccaccgcgcgtccccatcggcggcggtagggcagaacagaacaccggagatggagcgggagcgcggcgcgtcggcggcgctgtgggggcacgcgcacctcccactgctggcgcgcgccgggtccaaggagtcggtcgagtacatcctgcaggcgctctggcgcacgcgccgcacgggcctcgacgccgccgaccgcaccgtcgcccgcgacgccctccagctctcctccgacgccgagctcgaccctgacgacatccccaagctcttccccgaggaggtgccccccgagctgcagaagctgctcaccttgctgctgcagaagttccagccggagtggcaggcggatgccgccaaggatcaggaagccgcgctgcattccagcgcggcagagtgccaatcgaaccaaaatggagacacgtcagagcaccgagatgctgctaatgcagagcttcagaacggtgcagcacctgttaagggttctctagaatcaggacagaaagaagtgaagaagtctccgttagctaaggattctttggacaaaatgctgaaggacttgttctcaaccagggaccaaatggcaactgatggcaggaacaccggtcacgaactcacgatggggtagctggcagcacttagggcctgtatggctaatccattgctcatcagtaatttggcatatcaatgcttcgttgttttccttcgatctagatcactgacacccacgtcgcacggcagctgcattccgttgttgttagcgagaatgttaatgctaactacttcctccgttcttttttatttatcgtggtttagtttatttttatttgttgcggtttagttcattcaaaaatgaactagagagctacaaatatttgaaccgaggtagtatatcattgcctactgaaattgccattcccacggctgaaggggatatatatgttca

SEQ ID NO: 29149 - DNA, 2312 bp, Zea Mays
accgccccacctcgctacgcacctccatctcccctatccccaccaacgccacgacgcagcaatcccatcaggccaccaccaccatgcccccgcctctcccgccagatccgatcgagccgtgcgcgccggcgccggcgatggacgtggcgttgccagcagccgtcgtcgccacaatcctctcccgcctcgacgtccgctccctcctcctcgccgccgccgcctgccgcggactccgtgcctgcgcctcccacgcgctcgaggtggctcttacgcacgaactgctgcgcccgctgctgccgccgaacccgagcctgcggagcctgcgcctcgactgcgctcgcctcgaggacgctgccatcgcctgcctcgcgcgcgccggcctgcacgagctcctcctcctcaactgcgacaacatcagcggccgcctgctctgcgaactgggcaccacctgcagagatctcagggtgctttctctcaactctcttggtgcacgtaggggactggtggtaaatttctctgatctacaggaattgctcaatggatgttctcagctagagaatctgagattggcacttgatttctcaacttttgatgaccccaactttggtcgtgtatgggcatctgcttctgaaaggctatcatctcttgagattggttatattcctatgacaatgttacttgaacttctggtagcagttacagaaggacaacaatgcatggattatgttaagacaccagttttctttcctagccttcaaaagttatgcctggctgtggatttcataaccgaccatctaattggttccatatcagtcgcacttccatcactgacacatctggacctgcaagatgcaccaattgtagagcctaattcgtcatcagatctcaccaatgctggtcttcagcaaatcaatccgcatggtaaactgaagcatatttctctcatgcgcagccaggaattcttagtaacatctttccgccgggtgaatgatctcggaatcctgttgatggccgacaggtgttcaaatcttgaaagtgtatgtcttggtggcttctcccgtgttacagacactggttttagggcaatcattcactcctgttctggtcttcataagcttcgggtttcccatggaagccatctaactgatttggttttccatgacattatagccacttctctttgcctaacccatgtgagtctgaggtggtgcaaactcctaactaatgttgggattgagagattatcatgcaacaaggatctcaatgtactggatctcagggactgccgcagtttgggtgatgaagctgttagggctctgagctgccttcccaagttgcagactttgacattggatgccactgatattagcgaccaatcattgaaatatctaggacttggaacatgccctctaacttccttgtctctgaggggttgtcggaagcttacaaacgattgtatcaccttattatttgctggtcatgtgaaacagagcctacagatgttggatctctccagaattccaagtatcacggatgatggtatcatgttattagcaaggagcagaactcctcttattgagctcagaatgcgagaaaatccgaaaatcggggatgcctctgtgatggctcttgcttccatgcaaatagatggtggaacctacggtagtaccttgcagctgctggatctttttgactgtggtgggattacaccccttgcagcacgttggtttaagaaaccttacttccctagattgcggtggctgggaattacaggtagcttgaatagggttatggtggatgcactgtctcgaagccggccattcttacatatggcttgccgtggtgaagaattagggactatgctctgggacacctcctctgactggtatcggcataatgacgacgatctcgacgagcttgaacagtggctcttggaaggtgaaccggtttcagatgatgacaccatcatggaagaatgaggaaactgtttggtaagctggtgtcatgttcctgccatagttgcttgaccaaatacgatgtcaccaagctcgaattagctatgcgatgatctgttgtactagtagtgaagatattctcaatatatatgtatcattccttgggcagccattctgtgtgcatatggcaacctgacgttatgtatgtttgattcagatttttgttctggtccagttctcacgtgacattgacacattgaggagtcgtgctggccattccaagcataaagctagtgtgctgttttatgattttaacatattgatatttctactcatacttggcaaaattatttcaga

SEQ ID NO: 29150 - DNA, 1873 bp, Zea Mays
ggcggccaggctccgacgataaattacataatggaatccttggatctaattcgaagccattcgcgggcatcatactcaagaaacctcagcaggttggatccctgcccctccgtgcaaggggatccattttttcttcaccacgcaggcttttctcccctaaggcagcagcccctaaatcaggggattccatacgcattgcagtgctaggggccagcggttatactggagctgagattgttcggattctagcgaaccaccctcagtttcatataaaagtgatgactgcagatagaaaagctggcgagcaatttggatcagtatttcctcacttgataacacaggacctgccgagactggtcgcaataaaagacgctgacttttcagatgttgatgctgttttttgctgcttgccacatggtacaacccaggaaattatcaaaagcttaccccgacacttaaagattgttgatctctcagcgttgttgaaaaactattgcttacaggacttccgactacgcgacatcaatgagtatgctgagtggtatggacattcccacagggcaccggaacttcagggggaagctgtgtatggtttgaccgaacttaaacgagatgacataagaaatgcacgcctggtagcaaatccagggtgttatcccacatctattcaacttccgctcgttcctttggtaaaggcaaaactgatcaagctaaccaacattattattgatgcaaaatctggagtcagtggtgcaggacgtggggctaaggaagcaaatctttacactgaaatcgctgagggtatccatgcttatgggataacaagccatcggcatgtgcctgagattgagcaaggacttacagatgctgctgaatcaaaagttactatcagctttactccacatttgatgtgtatgaaacgtgggatgcaatctactgtgtatgttgaattggcatctggagtgactcccagggatttgtatgaacacctaaagtctacttacgagaatgaagaatttgtcaagctgttacatggtagcaatgttccttgcacaagccatgttgtgggatcaaattactgcttcatgaatgtctatgaggatagaatacctggaagggccatcatcatctctgtcatagataatcttgtgaagggagcatctggtcaggctttgcaaaatcttaatctgatgatgggactgcctgagaatatggggctgcaataccagcccctgttcccttgatcttttgtgtcattatctattattacattatttaggagtccagaaaccaaattatcattactgtcaagaggtggcaaggagcctgacatcagaattcagtcaagtcgaagttagacagttagtgtagcttggtctgtgttgttttagctttattaaaccattaagagaataatgatgatggcaatttagcagtacaatggtagtattatgtgggcagcttggttccaataaaatcataagcctatacacatcttgtgcccgcaatgttgtttgctattttgatcacgaaatcaatattgagcttgaattcagttctgaggcagctatccttggcatcactggataactttatggtatcttttttactatgttcaagcaaaaagtttagcccattacagttgtactttgagaagattgaaatgtctcttagtatagttcttaagtctcttagtatgattctcaagttttatcctatagcagtatagctgcatggactcatagcttgctactgtagctatcttatctgcagcgtttcttttaacaggattttcatctctgcagcgttgctgctgtgtaaacatctgtaatacagacaactacgaaacgaactttcttgtttatgtgtgaag

SEQ ID NO: 29151 - DNA, 4202 bp, Zea Mays
cgtcaccgccgccagtacgcccgccaccggcgctcgttcttgtcttcgtccatgcactgtacactacacatcaccgactgtaccgcacccgcacatgcgggaagccgcctcatcctcttcgtcgccgtgatccatccatccacatcactgatcagacccgtgccgtgcagttccaccacacttgggggaggcagagccccaagcgcgcgtccgacctctggacctccgcaggcggaacctattgctccctgcaggttctctcgcgggcctagccgtgcttcttccccacccggaatctgatgggatcgctcacgcgggtgccggcggaggacccagcagcggcggaggaggagtggtccgacgaggcggtcatctacgtcaacggcgtccgccgcgtgctcccggacggcctcgcccacctcaccctgcttcagtaccttagagatattggccttcgagggacaaagcttggatgtggtgaaggtggttgtggagcttgcactgtcatggtctcttgctatgaccgaattacaaagaaatcactgcattttgcaatcaatgcatgcttggctccactttattccgtggaaggaatgcatataatcacagttgagggaattggagatcgtcagcgaggtttgcacccagttcaggaatgtttagccaaggcacatggttcacaatgtggattttgcacccctggttttgtgatgtctatgtatgcactgctgagatctagcaaacagcctcccactgaagaccagattgaagactgccttgcaggaaatttatgtcgttgtactggctaccgaccaattatagatgccttccgtgtgtttgccaaaacagataatttggcatacaccaattcatgttcagaagatgcaaaggaccaagctatctgcccttctactgggaaaccatgttcctgcaggaatgagacagatgtcaatgttaatgagtcctcgttatcatcgtctgtggaaagatattcaccttattcatacaatgaaattgatgggagtgcatacaatgaaagggaactcatcttccccccagaacttcagttgagaaaagttatgccacttaaattaaatgggtctaatgagatcaagtggtataggcctcttaaactaaagcaattactacatttgaaatcttgctacctggatgcaaagcttatcattggtaactcagaagtgggagtcgaaacgaagtttaagaatgcccaatataaggtcttgatcgcagttactcatattccagagcttaataccctcaaagctaaagaagatggcatacacattggttctgctgtaagacttgcacaacttcaaaattttcttaaaaaggttgtagcagaacatgatttgcctgaaacttcgtcatgccaggcaatagtacgtcagttaaaatggtttgcgggtacacaaatcaggaatgttgcatccattggtggtaacatttgtactgctagtccaatatcagacctaaatccactttggatagctgtaggtgcgaaattccatataatagatgtgaacggtaatgttagaactacccttgcaaaggacttctttcttggttatcgtaaagttgatataaaaccagaagaaatattgctttctattatactaccatggacaaggccttttgaatatgtcaaagaatttaaacaggcacatagaagggaggatgacattgctttggttaatgctggaatgcgtgtgtatttacaagaaactgaacgaaattggataatatctgatgtttcaattgtctttggtggggtagcagcagttccacttagtgcttcaagaactgaaaacttccttactggaaagaaatgggactctgggttgctggatgatactttcaatttattgaaagaagacatctctatttcagagaatgcacctggtggaatgattgaatttcgcagatcgcttactttgagtttctttttcaaatttttcctgtctgttacccatgaaatgaaaataaaagggttgttagcagatggattgcatgcagatcatctgtcagctgtacagccttacagtaggcctgttactgttggaactcaaagttatgaattagtaaggcaaggagcttctgtaggtcagccaatggttcatatgtcagctatgcttcaggctccgcagaagcatcagaagtatgttgcaagtgttcttggtcttccacaatcaaaagtcgtttgcaagactaagcgtattggtggtggatttggtggaaaagaaaccagatcagcaatatttgctgctgcagcatctgtaccctctttctgtctgagaaggccagtaaagcttgttttggacagggacgttgacatgatatcaactggacagaggcacagtttccttgggaaatataaggtgggatttaccaatgaagggaagatactggccctagacctggaaatttataacaacggtggccattcacttgatctatcccttgcagtactggaacgtgctatgtttcattcagaaaatgtctatgacatagaaaacatcagaatcaatgggcaagtatgctttacaaacttcccaagtaatactgctttccgaggttttggtggtccacaaggcttgttgattgcagagaattggattcaccatatagctacagaactccaacgaagtcctgaagagataaaagaacttaattttcacaatgatggagttgtgctacattatggccagttgctccagaattgtacaataagttcagtttgggatgaactaaaagcatcttgtaattttgtggaagctcgcaaagccataaataattttaacagtaataaccgctggaggaagcgaggaattgccatgattccgacaaaatttggcatatccttcactgcaaaattcatgaatcaggctggcgctcttgtgcaagtttacactgatggcactgtcctggtaacacatggcggggtcgagatgggacagggtttgcacacaaaggtagcccaagttgctgcctcgtcattcaatatccctcttagctctgtatttatatcagagacaagtactgataaggttcctaatgcatcaccaacagcagcctctgctagttcagatctgtatggagctgcagttttggatgcttgtcaacaaatcaaggttcgaatggaacccattgctagcaaaggaacccacaactcgtttgcagagttggctcaagcatgctacatggaacgtgtggatctctctgctcatgggttttatgctacacctaatattgggtttgactggacgattggcaagggaactccattcaattatttcacgtatggagctgcatttgcagaagttgagatcgacaccctaactggggatttttacacaaggacagctgatattgttatggatctcggattttcaattaatccagcaattgacattggccagattgaaggagcttttatccaaggattgggctgggcagccatagaagagctaaaatggggggatgataaccataagtggattcgacctggacacctcttcacctgcggtcctggttcttacaaaataccctctgtaaatgatatacctctgaatttcaaggtttctctattaaagggtgttccaaatccaaaggctattcattcttccaaagccgtgggagagccaccatttttcctaggttccgccgtcttatttgcgataaaggatgcgatctctgcggcaagggctgaggaggggcacttggactggtttccactcgacaacccggcgacaccggaaagaataagaatggcatgtgtggattccattacaaagaaatttgccggtatagattatcggtccaagcttagtgtatagcggctgctgggctggtcacgggagaataaattggaaacagaagcccgcatttgtaaagtttcatgccctttgtgctaaaaagaatgggagggacggtttagtgttacttgtgggaaactttaaccctaacaaaggattgggtgatgtattaatagactgagttagttgggtctgacatacacatggatgagaagataattatacggtaaaccctaaggccctgttcggtttttagggattggagccccggattgattcctagccggattacttctctaatttatatagattttgatgagctggaacaaatcttggtttattcctgtacaaccgaacaggccctaaacg

SEQ ID NO: 29152 - DNA, 1256 bp, Zea Mays
cgcctgtacatcttgacaataaatagtaccaataatgcctcatcacaagtttacttgattgatgctcttccatcttatgggcgcggtagagaactccccggcaaaagacatcaaagtctaatatttggatccaatcttaccgatgtgataataaccggtgccaatggcaccgtcgatggccagggtgcggtttggtgggactggtttcacaaccacacattgaactatactagaccaccgctcgttgagttgatgtactctaccagagttgttatttccaacctgaccttcataaattcgccgttctggaatatccatcctgtgtactgcagccaggttttggtccagcatctcacaatcctagcacctatcagttcaccaaacaccgacggcatcgatccagactcgtccacaaacgtctgcatcgaagactgctacgtcagaaacggcgacgacattatcgtcatcaagagcgggtgggacgagtacggcatctccttcgcccaccccagctccaacatcagcatccgcaacatcacaggacagacgaggaacagcgccgggctcgcctttggaagcgagatgtcaggcggcatatcggacgtccgagcggagggtgtccggatcgtcaactcggtgcacggtatccgcatcaagacggccccagggcgtggagggtacgtgaagaacgtgtatgtagctgacgtcagcttcgacaacgtttccatagccatcaggatcactggaaactatggtgaacaccctgacgatggctacgacaggaacgcgcttcccaccataagcaacataaccatcaaggatgtcgtgggtgtcaacattggtgttgcaggaatgctgcagggcattccgggggatagcttcagtggcatctgcttgtcaaatgtttctctaagtgtcaggtctactgatccatggaattgttcacttgtcgaagggtattcgagctctgtgtcacctgaggtgtgtgagcaactgagagccactcctggtcctgggtccggacagatgtgctatggaggtaactatccggcagctgcggcacaaccgcagccgccgcagaagtcaggtgctagccggctggttctgggctggcttgtccttgtaagatacgggtgccggcatataacttggtttctcctcgcaaacgaacttccagggttattcaacaaaggctaaattgcattacaagaccgtgtaaaaataattttgttttctaccgtaagtacctctgctgc

SEQ ID NO: 29153 - DNA, 1143 bp, Zea Mays
gttttaacaggtatgcaattgataatatgcaatctgctagcatggaggaagccaagaaaaatggtatccagcagctagctgaagaaacaactctggtgcagtttatatttgggggttatctgcgatctaagataaaatgtacgaagtgtcaggtcatttcaaaacacagtgagcgtattttggatttaactgttgaaatagatggggatatcagtacccttgatggtgcacttcgtcggtttacatcttcagaaattttagacggtgataatagatgtaattcgtacgagcgtgcccaaaagaagttgactatattagaggccccaaatatattgacaattgcactgaaaagatatcagtctggtgttcttggcaagatcagcaaggctgtcaagttcccagagcacttaaatttgtcccagtatatgtgtagaacagatgattctagtcctgtgtacagcttatatgctgtggttgtccaccgcaatgttaggaatgcaactgtgtctggtcattatgtatgttatgtcaaggattcccaagggaagtggcacgagatggacgataacaaggtgaaacctgtgtctgtccaaaaagtcctgtcaagatgtgcatacatgctgctctatgcaagatgttcaccgcgtgccccaacctctgcacgcgctaagaaacccaagcagatggcacgttcaggatcattcccttcgggaggaggcaggtaccggagcaggcaccaaggtgggctttatccaatctgggaggagcagatggagagttatgaagcaatgtactagctagagagctggagcctggaggcctaccgtacgtcgtcagggtcgaacggttggttgaagaagaaaacttgaagagaactgaatccctcgataaacatacttacatatatatataccaaaaaactcaggtgcagaataatgctcagactgatgagcgcgagacgttttgatgacatgcccgtggtgctttctttttctctttgtttctctctctctctctgatggtgcatggcaagatactggttgctgttgctggctgtaaaactttttttgtggaggaagcggaagttaacttttgaccgtgacagcagctgaggtctgtgattctatgtcgtgaatgattcgt

SEQ ID NO: 29154 - DNA, 3100 bp, Zea Mays
cgcaggcccagcgcacctccccgcggatagatggttcttcttcgttcaggccgagatccactgctcactgcaccgagccgagcgcaggttaggcgggcgcgcgatcaccgaagccgacgcggcgcccgcacgcgccaacggccgaacgcactctctctctctctctctctctctctctctctcccctctccgttgtgctccccgacccaaccctacgcgctcctgccgcccccccgcaggccgcagctacatctctcctcccacctcgccagtcgccaccgcgcggtgggagctcgctgaagtgcttccccccgctttgcggcagcgtcagctcagaccccttgcccgcgctctcgttgtctggcgggctcagctggtttggtcagcgtggcgaggttgtcctggccagatcctgctcccgcccgcgcacgactgggtgtgggcggtggattggctgcgcgggtcatcagatctatgccggagatctagggcgccaggtgccgaggtggaggccgtgagccggtggcgatcggagggccgaggacagggatggcgtggtggtccgggaaggtgtcgctcggcggcctgcaggacatcgctggagccgtcaacaagatcagcgagagcgtgaagaacatcgaaaagaacttcgacagcgcgctcggcctagaggagaagcgtgacgatgaagatgcatcaggatcacagacatccaactctgatagaataggattcttcaatcctgtcatggctttcatgggacacaatggtgaggaggatggcactgaagtatcagaaaagccacaatctctgaagaatctgtcagcagaggaaggaattaatagcacaccaactaagaaacatatatctgaggtagatccttcggaagtatcaggaacaacatctccaaaactgccttcaaaatcggaagaagttcatagtatttccaatgggtcacctgtttctaaggcagatgtttctgagcaatccataacaccacaaactccaacacatccttcagtagcagaagaaaagcttgatagctctactgaggcacctgcatctaaggtgggtgatgctgaagcatcagaaacatcacaatctgcaggacatccttcaacagtggaagaaaaccagcaccatcaagttagcaaacattctgatcctagtgatgaagcagagccgaatcagcttagagagtctgttcgagacttacctgatggtagtgcatcttcttcgcctactaaaatacatcaatcaggtgacaccgaaacaggggaatctattcacacaggaaaggaagatacgtctgataggaacatcttgcagtcacaaccagcagagtctgcgctagctagttcagatgatataacggaagctgaggacaatattgctcaagaatatgatgccccaaaagaacttagtggcccacaggagagtagtgatatggtagacaaaggtactcatcttgaagttaaattacatgatagcaatattaatactgaaaaaagtgaggaagaaagcaataagatggagtcaggggaatcatctgttgttgtacaggaggataatgcaatggagcaacctcaagacttaacgttgaagtccttaactgcagagcatgactcaaattcgcagaacgagtcagtgatcaattcgactgatatacctgttggactaggtgaaggtcctccaaatgattttacaaaagaagaaaagattctagaatctgttagaggcacagattctcagactctggactctgttgtttctgtcgatgagctagagaaattaagacgtgaattgaagatgatggaagctgcattgcaaggtgctgcaagacagtcacagtccaaagctgatgaaattgcaaggttgataaatgagaatgagcaactaaaatcaacaatcgatgatctcaagagtaagtcatctgaagcagaaatggattcactgaaggatgaatatcaccaaagagtagcaactcttgaaaggaaggtatatgcactaaccaaagagcgtgatacactaaggagagaacagaataaaaaaagtgatgcagctgcccttttgaaagaaaaggatgagatcatcaatcaggtcatggctgaaggtgaagaactatccaaaaaacaagctgctcaagaagctacaatacgaaaactgagagcacagattcgtgagtttgaagaagaaaaacaacgcctgaactcaaagatccaggttgaggaggctaaggttgagagcatcaagagagacaaagcagcaactgagaagttgcttcaagaaacaatagaaagaaatcagactgaacttgcagctcaaaaggagttctacaccaatgctcttaatgcggctaaagaggctgaggcattggctgaagcaagagtcaacagtgaagccaaaattgaactggagaatcttttaggagaagctggtgaaaaagaaaatatgctgattaagacaatcgaggagttgaggcattttctcacccggcaagaacaggaggctgctttcagggaaaaaagactaaaaggggactatgatgatcttcaaaagcggtatcaagccagtgaacttcgttataatgaactggtaacgcaagttcctgagtctaccagaccgcttctaagacaaattgaagccatgcaggagacaactgctcgaagggaagatgcttgggctggtgtggagagaaccttaaactctcgccttcaggaagcagaagctaaagctgcttcttcagaagaaaaggagcgatctgtaaatgagagattgtcacaaagtttatcccggataactgtccttgagacccagattacaattcttagaacagagcagacacagctgagccgatctcttgaaaaggagaggcagagagcatctgaaagtagacaggagtacctagcaatcaaagaggaggcagcaatacaagaagggcgagctaaacagtttgaagaagagatgaaggagcttagagctaggcacaaggaggagctgcaagaagcagcagaacacagggacctgcttgagaaggaccacatcatcagcatacaaggatattctatgatgtaggggtctagatgaaagaggttgcaac

SEQ ID NO: 29155 - DNA, 3947 bp, Zea Mays
ttaggcatgccttccccgatggctcgcatcttccaccgccatctcctcctcgccgtcgtcaccttagccgtggccgcttctctccttcgcccagctgccgcagtgcgcccatttgttttggttctctccggtgaggacttcctcaaggatccggccgcgcacccgtcccttccctctgccgactccgacgacgacgatgggtgggacgacttcgccgacgattcaccggccgccgacccgctactctctccgtcctcctgggcccccctcctcgacccaaccatctctctcccctctggcgatgagacggactcgccggccgacgcgctcttcgtcgcgggcacccgcgcgatgctatccgcagcgtctgatggagacgacgcggcgttcaccacggctgccgcgcagatcgaggcctcggcagaggcggggcacccgggcgcgcagtctgcgctcgcgttccttaccggcgccgggatgacgcgtccggcatcccggtcgctcgcgttcctgctgcacaagttcgccgccgacgcaggagatctccagtcaaagatggccctcgcgtactcctacttccgccaggagatgtatgaagaagctgttatactatacgctgaacttgcagaagctgccctaacaagctccttgatatcaaaggagccaccagtgattgaaccaatccgtcttcacagtgggactgaagaaaataaagaggccttgaggaagtcccgaggtgaggacgatgaagatttccaaatcacagagtatcaggcacagcgaggcaacgctgccaacatgtacaaattagggcttctgtattactatggactacgtgggctccgccgtgattatggaaaagcatttcattggttttctaaggctgttgagaaaggcgagacacgggcattggagcttctgggtgagatctatgctagaggtgctggagtggaaaggaactatactgaagcgtacaagtggttggcacttgctgccaagcagcaacattactcagcttacaatggattgggttatctatatgttaaaggctatggggtggagaagaaaaacttgacaaaagtaagtatgctgcataagaacttccgatacaagtgcatgtgtatagcggaccgtaatagctgaacattggaaagcttaaaaaagctgttggaactaaatgtcctatttacacttcgctttagcctctactgttagggcagacccaatgttggaagcttcaatatgagtggggtctggagaaaggataaaccgaggcaagtcttaccccgcaattgcggggaggctgcttcgaacctgtgacctgatgactcactgagacaactctcaccacagtaccagacctgcccttctctactgtaccttcttaatggtcattaaaatttgtaggtgattaactttatctgtacttcattttggtaaatatactgctatttgtaacttatctgtagagatgtacttaaatgagtgacctgttaataacaatggaacccttcgttccacaagagtaccattgatcttgttgacatgattattcatattaacatcaaaaagcataatagttatggagcaacttgagtggtattatttatttttcatgtttagtgtatggtatccagcttccatcattttatcctagtagtttaaggatgaagcatgtattgttaaagaaatatcatgtctctggattctcttggtagctgattatgtttacgggtcatatttataatgtcttggagttgggttgccccctgttttaggtctctggtgacacgttctcgtgagaaacctttcagttattcactcttagctgttgaataattgctaacatctgtgaatccattcaatacacaagtatattttcacaggtaatcatagtgttacctttatctgttggtgtcctaccagcactacttgtataccattctgccatgagatcgaccaaatttgatgccaacccgacaagcaaacaccaattacatgggacatgtggtctattgaatctatggcatgtcatgacatgcgaaaacgagttatggaacggagaagtgtgtgagtcttatggatttattagataaagacatagaaccactccttcaaaagaaagaaaccacaatttttttttcgaacacacatgagagttgtgtaccattttacacattttgtaaagaagacaaatggaaacaaagaagtgtgtgtgtgtgtggttgtggtggaactaaaccatatactaattacaccaggtctgacaacagaggcttaaaatacaattaaacatgattcacgtaatatatctactctaaatgctcatgaacctaggaaattaccatccttgttgttgttgcaggcaagggaacttttcgaacttgcagccgagaataaggaagccggtggacattataaccttggtgtgttgtatcttaagggaattggtgtgaagagggatgtaattagagcatgtaatttcttgcttcatgcagttaatgctgggcaaccaaaagctatttatcaggtggcgaagctgttccagaaaggcattggtcttaagaggaatctccatatggcaacaatgctgtacaagtctattgctgagaggggaccctggagttcactgtccagatgggctctggagtcttatttgaaaggcgatgtagggaaagcattgctcttgtattccagaatggcagatcttggatatgaggttgcacagagcaatgctgcctggattctggataggtatagtgatcaaagtatttgcatgggagaatctagtttttgcacagatatggaaagacatcttcgtgcacatgctttgtggtggcatgcatccgagcagggtaatgagcatgctgctttgttgattggcgatgcctactactatggccggggcgtcgcaagggactatgaacgtgcagcagaggcatatatgcatgctcggtcacagtctaatgctcaagctatttttaaccttgggtacatgcatgagcatggtcatggactcccccttgatttgcacttggcaaaaagatattatgatcaagccgttgaggtggattcagctgctaagctccctgtcatgcttgcattaacaagtttatggctaaggacgaactatgcagacagttttttggttggttttatcgattcacttccagaaatgtatcctgttgttaaggaatgggtggaagatgttctcatggatgaagggaatgcaacaattttgactctctttgcttgccttgtaactgtcctctacttgcgagaacgccaaaggcgtcaagtagcagcagcagccaaccccctaacaacatgatgatgtggccatgtaaatgtcggttttcatgacatgggcaggccttttgcttgagggaactcgagatgtaaaatgatggctcattgacatgactcgcgcactaaattgagtagagggacatgaaagccgctggagactcagacaatgtttgctgcctggcgaatattcacctctccaagacttagggagctatgcttgtaaaggacaacaattcttggaaactggctgctcagaaatacagtttagaaatctcacagatgttgaaaagcatgctccccccttgttgcgcatatgcatggccatggaatttcgacaagcacacacggagaacatttctggaagaggcaactttacaattggtagtttagcgatcggctttcggagttgaaccgatgatgtgacaccgcttcgctccgtggtccacgccagtagctctcaaagctggctaaaaaaaaccccaacctgaatgaaaacggtaattggccgggggcggcgaggctgggtggctcgcgaaggacggcccgaagtgggaggcgctgggaggctgggactagtgggaggaatccgttcatcaaactgaccagaaggcaaagaggctgccgaaagcggtgtcggt

SEQ ID NO: 29156 - DNA, 2310 bp, Zea Mays
cgggtcacgtgagtgacgtggcacgcaagcagttcagctttcggttctcctgccggcggcgccgcgtcttttcccgcaccttcgcatcgtatgccacttcagacgccatggccgtggctccgcctctctcaacccacgtctcccgaactctaacctcaaacctgcacctctggccgcggacccacggtggcgtggctcatgcgcggacgcgggctctgatcccgacaccggctgcggcgtgcgccttccgtttcagtttccgtgttcgcgccaccgccagtggctcgaagctgccgccttatcctctacccgatgtcttcccctacattaccgccgagtgggaggccgtcgcgaagggttgggcgtgcgccgccgtcgccgtatactgcctctcccgcgcagtgcccgccgcggggcgcctgccgcgcgcgctcgccggcggcggcgggggagggggcgcggctgttgtggtggcagccaggggcggggtcgccctcgctgcgtttgcatcggcgcgtgccgccgctacatacgcgcagcaggcgtttctctgggaggcggcgctgcaggcggcggggcggctgcgggagcgcgccttcgagcgcctcctagagcgcgatctcgagttcttcgagggtaggggaggggtggctgcgggcgacatcgcgcacaggatcaccgacgaggcggacgatgtcgcggatgccttgttctccgtgctcaacgtacttccatctatgctgactgtgaaggcaaacaatggggaacttaaggagatcatgagattccaaaagttagctcgtgctgatctaaagaataatttgagtaagaagaaaatgaaggctctcatacctcaagcggttcgagcaacatacattgggggcctgcttgtgctctgtgctgggtcgatagttgtttcaggctcatcctttgatgctgaagagtttctgtctttcctaacagcacttgctcttgttgtggagcctattcaggatgcagggaaggcatacaatgaatataagcaaggacagccagcattagaacgcatatttgatcttatgaggttcaaccctaaggtgactgataagccaagggcaattcatttacaaagtattaatggggacattaagttccatgatgttacatttagatatgttgatgacatgcctccagtagcagatggtgtgaatcttcatattagaccgggagaaataattgctttagttggaccttctggtggaggcaaaactactcttgccaaattactcctccgtctttatcatccacaaaaagggtatatacttctggacaaccatgatattcaggacattcaatcgcaatgcctgagaacacatatcgcttttgtttcacaggacactatgctattttctgggacaattgctgaaaacattgcttatagagaccctgtgggagatattgacatgaatagggttgagtacgctgctaagattgccaatgctgaggagttcattaagatgttgccagaagggtacaattcaaatgtgggacagagaggttctagtttgagcggtggacagaagcaaaggttatctattgccagggcaatctatcaaaattcctccatattgataatggatgaagcaacttctgctttggatatcagatctgagctgctactgaaagaagcgcttagtaatctaattgcaaaacactcagtaactgttatcatcattgctcatcgacaggaaatggtcctaatggctgacaggattatttcactagagcgcggtgaattgcgagagatgtcgaaacaggcatttttgtctcaagatggtcacttcagcttaccaaggatcaggagtccaaattagggtgtccaaactagggtgagacttggcatgggtaatggtagtttctctcgtgaagatttgttcatatatttggccatggaagaaaacgattgatagaatcacatttcttgcctgagccctgctcagaactttggcttcttggaaccttgtttcatcccaacagcaacaaatctgtcaacattatcgaaggtcgtctgccggagagaatagcaggctcctcagcggcattggctcctacctgctgcaagattctcctcaagacctcaacaggaaggtcaaagcaaggtatagggttttaccaatttttgtacacatgaaaaagcacaggttccttacatcccccgcccccgcccctgcatacatgcaggatgcagtagttgagctgtatatatgccaaaataaagttattcgttttagatttttttattgccaaactccagattggtgcgtttcagaa

SEQ ID NO: 29157 - DNA, 5339 bp, Zea Mays
atcgcgcggtgcacgttctgccgctccgctcacgcccgcggccgaacgctcccccgcaccttccatcctccgcgcagccacagctgcgattccctgctccccgcaccttccatcctctgcgcagccacagccgcgattcccgccgccccgccgcgctcaccttccctcccgcggcagagtgctccctcgacggggccgccccaaccatcgccctcctcatccgccatcgcgatccactcctcgacgcaatccatctaccccacagaactgctgccggcgtggcagatctcctcctcggcacctagatctcctcggcgcgatcaacggctgagcccgctgcccccaccacacaaccgatatgctctccatggaaggtcagggacctgctcgcccatgatctccatggaaggtggtctactgtcgacggcctctccctcgtgctccttcgtcaaccccgtccgccgcgccgccgagccccgagatcgcgccgatccgccattctcgcgccctcgccccgacacgcgctcaccaccggccctcaccaacctccactcgcgttccccacaccaccctccaccccatccgcgtccgccccatccgtagcacgcgggctgcagccgccccatccctaaaatgtgggcgctggcgctaccacggctccgcaccatgcctccgcgctgccagacagcgccgggcgataccatgcccccaccccggcttcttcctgccagtgaggagcagcggaagcccgaaccgaatccaaccgagtcatctcaacgactccgccagtttccaatcgccccttttttaggcgttcaagttccttcgagatgatgacaagcagaggagagagatagcgtctccttcaatccctctggcgacaccaacaacgcatccccgtggccatcctcgattctccttgccaaggaggcgacagccaagtcgtcgcggtcacggccggcgatccactcgagggtgttcctggtgagtagcaccactgcggtggggatcggggatgggggaggcggcaatggcgatggcggggtgcagctcgccgacaaccttaagatcttcaaggctgacaacttcgatctcgacgtctagattccttccaaggctctgtgcagctgttcatccatttctcccttcgatgtcggtgtttgtccctgctatgtgtgttggatcaccattgacatatatgtggaagtaggttctctgctgaaagaatacatacctgtaacaaactggggattagaccggcatacagtgctggtaccccaccttggtcgacaatcttaaggcatgttgcaagcgcattcattctggttgcttttacttgcatctgtagctgcctaaggaccacttcaaatgtgtatgtagcagcttcagcacagcaaccagcaatggccccatagagagaatgcagataagccatcttcagtatgccatacactccatagaatacaacgccagaggatgccatactgataagagaaggcaccaatcccttatacagcgagaagaatccttcagtttggatcatgtggcgggcaacaccaatgaccccacctaaagcttcaccaccaggagcatccatctttgtcctgatctgaaaccaacagctcaaatcagggatcttgtgaagacataggatggttgcaaagaactcgggcatcacttcgttcagttgatgggacaggtcacttcaaggagattttgcatgagataaggttttggatatgaacatgatgatgctaggatgaccaatataaatttgtttaaggaatttactgccctaagcagggtaagtgtttcctgaactacaattgttttttttggctttttgcagatctgcacatctgaatttcctattatcctgttgggctgcctcttttttggagtgactgtagcaaccacttctaattcattttcaattgtattgaactggatgttgaccttcctagcataattagctctattttttaaaaaaatagttcattatgtatgtttctattttttatggtaccgcctatgtttatataaatttagcctagcactgcttgaataacaagtgattgaatgaggctcatatgcaaccattaaatcaatatttatgaaccaatgtttgttaaagtaataaaacatttacaaggaccatcgatgacctcaagaagctggtggtggcgtagatgggaacgcaccccgagaagatttgcatctagaggtggtgaccccacctctgtcctcaaccgccacctcgtacctcgtcttcggcgccgccggctcctgccccccttggcacgccttcggggtcctcgctggcggcaagcacctccgtcccggaggcatctgccgctgcagcatagaccaccgcgtcctcgctcagcagcaccgatgtcgatgatggcaacaaggaggacggctccgcgagcacccccgagatctgctgctgccactcccacgcagctcttgcttgtgagatctgtgtgcaggttgatgtcctcgtggcgccacgccgacctcaccgccaccaagcgcgccacccatgtcctcaccgacctcgccaaaaactataagaataggtgtagtcactgtcggggtgtacatccaattgagttttgagttggtgtttagctttcccttaccagggacggatcaaagcaccgtaataagtgtcgatatagctctttcaattgcgcctattgttttgtgcgggctatatggatcaaggaaccctctttgcagcagaggtttgttttgtgttctgctgctagtagtcgcatgtcagtttaatcttttgagttctggaagctgttggtcccttaggtgtttgggagatccttttgaatcgaagcacacacactcaggtgctatgacctttggcatttcatagttgcatatttaactggtgtgcgaagagcaccaggatagcacccttgcagcaggaacttacttttggttgcttttctgttgcctgtcatatcccgatatttgtttcctgcaaatttactttgtttaattgtattctattgattttacagcttttgtacttgtacagttacattgtcatctggtttctattgcacgtgtagctgattagttgtagtcactatcttgcaagcatagatattagggaggtattatgtccagtcaagttttgtgttggctatgtgtagcgaattaggattgcttttcctgggatggatcagagcacatgtactgtggcgatatagttgtttcaatagtatagttgccaaattttatgtgtgtgctatatagaccagggaacccacttagaagcagaaaattttctgtgtgcgcgcgaaattttctgtgtgtgctaacaaattgcaggcaaccatcttaacaacaaaagaggctcgtacaatagcagagatgatgctaaaccacttgtgcatgcaaagtatcaaaaaggagaccagacacatgttgatgaaacatctaaaaaggtgttggcaaatcttcattggtgcatctcttactgaaagattctgcagtggctcgaccagcccaaacaattgggtgtgcagttggtgttaaacatattacttacagtagcccagggagttcatctaatagcgtcaagggtgatgctgaaaggaacttctttgttgagctttgggatgtttctggacatgagcgctacaaagagtgccgttcacttttttattcacaaattaatggtgtcatatttgtttatgacctctcccagaggaaaacaaagacaaatttgaacaagtgggcagtggaggtttctgaatctgggaccttttcagctcctcttgggtctggtggtcccggtggccttccagttccttacctagttattgccaacaaagtggatattgctccaagagatggtagaagagtgagcagtggtaatcttgttgatgttgctcgtcaatgggttgaaaaacaaggtctgcttccatccagtgaagtgcttccacttgcagataactttcctggcaattctggtttgctcacggtaaagcttctctatagtctatgtaccaatatttgctgtctgatgtcttgctttaactgactgcagtgtggtgatccttaggttgtctggcttgtggagaaacaagaattcctgtttttttattgaatatgtatgtgctatgctatttaaagtttgaaataacaggtgtgacctttgaatacaggctgccaaagaggcaagatatgataaagaagctctaatcaagttcttccgcatgttgataaggagaaggtatttttcgaatgagcttcctgcccctagcccatggtcactcactcccagggaagataccattcttcccgtagaaactgtgaacgatgatgacatgttccaaagaaaaagctacggcggacagagctacaaatacaatggggttaccccactgcctgcacagcggaacctaactccgccccccacactctatccacagcagccaatgtcctcttcatcagaaaactacagataccacagattttcctcttcgtcaatacctgattcaagtggtggttcaaaaagccgagcgaaccttaatatatgatgggatatgtaagtccttatccattatcacctggagtgtgggaaaaaaacatgacacctgggttttttggttctcaggtttttgatctttttgagttgttcatctgtctttgatttgattgtaatatgtgcatgttgacagggcgccagagcattatgtttgtgggatcactagtgataattctttggttcttctctgtatatctcctaattttgtgtatgaattcaatatagttatttaggaaaacacattacatggtcagatggtctacactgtgcaacggcaatctgaatcaatcttttttcctgagtcccttcaagtcacctgggagaaatcaagtctcgtggtgttatggggcacagcaactttatataaatcagcattcagtctgatgggttttcactctatctggttccttatagacagattaaaggcatgtttggttcattacctcaattgccacattttgcctaacttttctacctaaggttagttattcaattcgaacgattaaccttaggcaaagtgtggcacatttagccacaaaccaaacatgccctatgattgtcaagcacatattttgttggcttgagaaatgtgtttggtataggcgaaccctactggcagggattttcgacaaatttgaattttagtttgaaaaaagtagcacgtggagtccacatttgtcattaattgctactttctccgttttcaagttgtaagacatttcggattttatagatatattgtttttataaacatactatggcg

SEQ ID NO: 29158 - DNA, 3184 bp, Zea Mays
ctacgtacaagtcgaccgagtgaggaagttgaactaattgccgagcgaagaagcaaaaatcatatcaatagccatagaagcacatcattagtcttgcgcttttcactagtttggattcggacttcctgagctccgccgattccttcctcctccacctcctctcctcccccagccgccgccgctgctcatcttatctttatctcatccccatcgcccgcccttgctccgcccccgggaatcgtcgatggcggcgtcggcgttgtggcagccgcaggagcaggggctccgcgagatctgcgcccacctggaggcgcatatctcacccaactctgaccaggcccgcatctggcagcagctccagcagtacagccagttccccgacttcaacaattacctactcttcatcctggcccgcggagaggggaaatctattgaagttagacaggcagctggtctattactgaaaaacaatctgcgaacgacttacatttccatgcaatcttcatcccagcattatgttaagtctgagctgttaccatgtataggggcaaccaatagggcaattagatccacagttggaacagtgatcagtgtgcttttccaaattgtacgagttgctggatggattgagttgtttcaggcactccataagtgtttggagagtaatgacctggatcacatggaaggtgctatggatgcgatatacaagatctgtgaggatgtccctgaagagcttgatgttgatgttcctggtttgtctgaacgaccgatcaacgtgtttatgccaagaatactgcagtttttccagtcaccacatgcaagtttgagaaaactatcattgggtatcataaaccagtacatagtagtgatgccatcggcactctacatgtctatggatcagtatattcagggattattcaaccttgcaaaggactcttcagcagatgttcggaaactggtttgttcagcctgggttcagctcattgaagttcgcccatcaattttggagccacatcttaaaaatgttactgaattgattctgcaagctaataaagattcagatgatgaagttgctctggaagcttgtgagttctggtctgcatactgtgatgtgagcatgcctcctgaaggtttacaggagttcttgccgcacttaatcccgactttgttgtcgaacatggtatatgctgacggcgatgagtcccttgatgatgctgaggaagatgaatcctttccagacagggaccaggatttgaagccccgcttccatgattctcgattgcatggatcggaaactggagatgacgatgatgatgctgatgctgtaaatgtctggaacctgcggaagtgtagtgctgctgggttggatgttctctctaatgtgtttggtgacagcatccttccaactttaatgccattgattgagcaaaacttggctcgaacagatgatgattcttggaaggagagggaaactgctgttttatgtctaggcgctatagcagaggggtgcattagtggtctatacccacaccttcctcagattgttgcctttctaatcccacttcttgatgataaatttcctcttatacggagtattacgtgttggacgctctctcgatacagcaaattcattgttcagagccttgatcatccaaatggacgcggacaatttgataagattcttatgggagtgctcagaaggatattggatactaacaaaagagtgcaagaggctgcttgttcggcgtttgcaatccttgaagaggaagcttctgaagaattagtaccccatttggaagtaattttgcagcacctcatgtgtgcctatagaaaataccagagacgaaatctccggatactctatgacgccctcggtaccctggctgatgctgttggagcagaattaaatcaggcaaaatatctagacatatttatgccgcctttaatcacaaagtggcagcaactttccaattatgacaaagatctatttccactccttgaatgctttacatctatcgcacaggcattgggaccaggatttgctcagtttgcggaaccagtgtttcaaaggtgcattaatcttatccattcgcaacagttgtcaaagattgatcctactgcagctggtgcggtgtatgatagagaattcattgtttgttcgttggacctactatcaggacttgcagaaggtcttggcgctggtattgaaagtcttaaactatcagttctgttacatggggctgtaccatgggtgccgagtagattgtccagctggtaattttgctggtagctgagtttaggcatttttaaacaagttccaattttgtctgtatagcatgtagcctggatgaatgttaggtgcgactcctcaggcttgagatctcacttctcactggaatacctggatatgtttttcttttccaatagaaagagttagttccacttgttatgttggttttaccaatgactgtcatatagcgaagtctgagtttattgaaactaagtgctgatgctcggccatgatactgtgcagtaataaaattgaattaaatccttccatctctcacccctctccaacctgtctatccgtccttcgacccaccatctttcactattacctttctagcattgagtttgggcttgcaaaaccttcgccgcaccattcatgtcatggcctggctgcctgagaccgtgtgcattgtggcacacctatggacatgtggttcgacttccacctttcttaaactcggagcaggtgcacacaatagccacccatttgagttgagcgctgaacctctctatggccagtatagtggccatgtgcaattctgctcaggtgaacagtgcgcgtgcattcctgttcacaacgggctcaaggtgggtatgttgcccgtttgttggttagagattagaccagattgcgctgttttctatttccttaatccaagagagctttattcaaggtcaagtctttccatgtcactaagcaaggaatagattgaagtttctagttacctccctgccctttgtggggtatagtcacactattgtggatttgtggtttagagccaaataaagtatggctgtgacatctgcactttcttgaagggcaattactctgaagaattttcctttgtttgctgattatacttaaaattttagtaccaaatatgcataagttcga

SEQ ID NO: 29159 - DNA, 2100 bp, Zea Mays
tgccactcctctttctctacagcccccttccctctctcttctgcgccgctcccagcccagcctacagccgccgctgcccccagccccctgcgccagcatgcagccggccctgcaggatctcaggccagccccgtccggccactacagcggttggctgccaccgcggctaggccctagccgtccatcatcagctcgacacccagaaagattcattgatggatttaagttttcatgttccgacttcgaatactcaattcattggagatgagcatcgtacttcagcacagatgttatggcaggctatctcggttgaaattgatggtggtggctcctcagagatggcagttgtcacatttgacggaattgcaattcttacaccgaggggtcggtacagtgtggagcttcatcagtcattcttgcgactccaaggacaagctaatgatttcaaaatccagtatagtagtattctccgcctatttgttttaccaaagtcacacaatccacatacctttgtggttatcacacttgatccaccaattcgcaaaggacaaactttgtatcctcacattgttattcagtttgagacagaggcagttgttgaaagggaactgacattaagtggggagattttggctgagaagtacaaggataggcttgagagctcttataggggtctaatacatgaggtattctccaaggtccttcgtggcctgtctagtgctaaagtgacacggccaagtacattccgcagttgcctagatggatatgcagtcaaatcatcacttaaagctgaagatggtttgctttatccactcgaaaagggcttcttctttctgccaaagcccccaacactaattcctcatgaagagattgagtatgttgagttcgagcgtcatggtgctggaggtgcaagtatatcatctcattactttgaccttttggtcaagctgacaaatgatcaagaacttctcttcagaaacatccaaaggaatgaataccataacctcttcaacttcatcagcggtaagcatttgaaaattctgaatcttggagatggacaaggtagaactagtggtgttactgctgttcttcagagcactgatgatgattctgttgatccacatctggagcggataaaaaatcaggccggtaatgaggaaagtgatgaagaggatgaagattttgtggcagacaaggatgatagtggatctccaaccgatgattctgatgcagaaggctctgatgctagtatgagtggaggagaaaaggagaaaccttccaagaaggaagctagtagctcaaagccgcctgtgaagaagaagcagaagagtgggccagatgaaggttctcaaaaaaagaagccaaagaagaagaaagatcccaatgcccctaagagagctatagctccattcatgtacttctcaaaggctgagcgagctaatatcaagagcagcaatcctgaactggcgaccacagagattgcaaagaagctcggagaaaggtggcaaaagatgacagcggaggagaggcagccatatgtggagcagtctcaggtcgacaagcaacgctatgcagaagagtctgcagcctaccgtggtgcagccgctcagcagggctctggtgctggatcggaatgaaggtttaatcgtctcgacagttaacttgcaaggctggatgattgagtcgtcagaataaagctggaatacccaaaaacctaagctgaatgtcatcgtttgacctgttgggttgttccggaattcaaccaggattcattctagttcatcaatgcttatattaattaggcaagcaatctggtctggaatcgatcgaggccgttccctggaaccgaacatacccctaagcaaatcctgccaggtaggacaaaatgtagcagcaggtttaaacaaatttcagagaagtacaagtattttttgcataagaagtacacaattacaactgttttgacatgtatcatagaactacaattaattcccttttggcgccatgaaaatacagcacctttgatacttgactaatactatgagaatagctttagttacgtggtatccagtgtcaatagttgtagttatctgatacatg

SEQ ID NO: 29160 - DNA, 4171 bp, Zea Mays
cggcgaacctgcagtcagacttaccaccaagtggacgcagcagctttaaccccccaaagcctcgacgccgcgagcacagctccgccgccaccgcccccttctcatccgcggtctcctccgcctgctgcatctctatcgatctagcgggactggctccttcccgtgctgggtccttcgtcaatcgtcagcgcgcaagatcggcacttgtgtacatctgagcagtttccggtgccctaattcaggcgcgggcgttgttgggttttcgataattttgggggttcacctgaaccctcatgacccaggtgaagcccgcccctgggggaaggatgctgaccgtgctgcgggtgcacctcccgtcggagatcccgatcgtcggctgtgagatcacgccgtatgtgctcctgcggcgccccgacggaggcgtcttcaccgacgacgtgtctgagaccgcgcccgtggatgggtacttcatgcgctacaagtggtaccgcatacaaagtgatcgtagagctgctatctgcagtgtacacccaacagaacaagcaacacttcagtgcatagggtgtctgaagtcaaaaatacctgttgctaagagctaccattgttcttctaagtgcttctccgatgcttggcaacaccacaaggttttgcatgaccgtgctataagtgctttaaatgaaaacggaaccgaagatgatgagttgtttggcagatttggtagcggcagttcgagctcaggggttattagtgctgcgttgtctggttcaacatcaaacctttcactgagctcaggtgttaataatggacctacacctgtgtatccaacaggcactgagaagagttctggtgaaacttggtttgaagtgggatggtcacgaacatatacggcaactactgatgatattggacatgtgctaagatttgaatgtatagttgtggatgtggaaacacgggggactgtgagagctcctacttcagtcatgacatcccgtgtaatcccagcaccgaccccgacaccacgccgcttgatccctgttaatgcagctgatgcaatggtccacttcgatttagatagccggacttcttcttttgggacatttactgtgctgtcctacaatattcttgctgatacatatgcaacaagtgatacatacagctattgtccaacttgggcacttacatgggcttatagaaggcaaaatttgttgcgtgaaattattggttaccatgctgatattatctgccttcaggaggtacaaagtaatcactttgaagattttttttcaccggagcttgataaacatgggtaccaacctctatataagaaaaggacgacagaggtgtacagcggaagtcctcaagcaattgatggttgcgctactttctttcgtcgggacagattttcgcatgtcaaaaaatatgaggtcgagttcaataaggctgcacagtctttaactgatgcaattattcctgccgctcaaaaaaagttagctctaaatcgtttggttaaggataatattgcgctaattgcagttttagaagctaaatttagtaaccatggaactgaaaaccctagtaaaaggcaacttctctgtgtggatcaaagcagggtggacgaaatggtgtcaagcatcgagagtcctatgtgataagagagtgctacaaaagctgaaaggcaagttatacaggacacgattaggcctgctatgttatatggggttgagtgttgggctactaagtactaaggatgtcatatttaacaactatgtgtcgcagagagccagagatgcatatgttgcgttggatatgtgggcacacaagattggaccgagtgagaaatgatgacattcgcgatcggctatgagtagcgccaattgaagaaaaacttattgaacaccgattgagatggtttgggcatgtccaccagagacccacaaagtcaccggtgcacagaggcatcataagacatgacactaatatgaagagaggtatagggtggccaaacttgacatggggggaggcaatcgaaagggacttgaagaaatggaatatcgcaaaggagttgtgtttggatagaagggcttggaaataagctatccacgtgcctgaaccgtgattaggccttttccattttagttctctcaaaagctttccccctccctttctctttctttctttttggtgacttcttgctgggtttcaactttagcctaccccaacttgcttgggactaaaaggctatgttgatgttgatgttgatgttcatttggaatttattatggttaggccagtgttcattggccataatttgcttgccatctttttaataagctaccctagatgcgggatccttagaatgaatataaatgacacgatttagctagatccatgcaatgatcaggtcagactgaactgctttgctagacatggggataatggtaatagttaggggaataaaaaagatattggaacttggaagacaggtaaactggtcctctatgctttttattctggaaggtggccaaccatgtttttacatggcagaagtgacaagaaaacgatttcactgaacagtagagctcttttgactagatcatgccaattgtccctctaattctttttgttgggtttttgaatatagcaattgatcttgttttattgtgtgggtcttataccacctatgtttatatttacttgttgtatcggatataaatatgatctctggtcaaagtatgtgctagcgaaattcaataattttattacgataaagaagtaacttcgatggtggtctatttgtatcaattttacgctttacggataatggtggtcaaagtttctaaagtttggctatgtctgctgtaggaggcatctgttttagactggagatagtaatatgttattccttgtggatctcatgtttcttgattttttgtgcaggctaatacacatataaatatccaccatgaccttaaagatgtgaagctatggcagattcataccctcctaaaagggttggaaaaaatagctgttagtgcagacattccaatgttggtctgtggagattttaattcaactcctggaagtacgtcacatgggcttcttgcaaggggcaaagttgatcatttgcatccagatctagcaatagatcctcttggaattttgcgcccactaagcaagctgacacaccagcttcctctggtcagtgcatactcatcattcgtgagtatggctggtgttggctatgatttggatcaccagcgaaggaggatggaccctgggacaaatgagccattgttcacaaattgcacaagggattttaccggtaccctagattacatattttacacagcggattcattgactgtagagtcattattggagctgttggatgaggatagcttgagaaaagacacggctcttccttctcctgaatggtcatcggatcatatagcgctcctagcagaattccggtgcaagcttagagttagacgatgatactttaggaggagctgtaggggagggattcttgacaatcgcatgagatgatgagaatgtaccctggcgaaggcaggaacgagaagcctaagggaaagaggcttgttatgttcctcacccttttacatttccgcctcgatgttctctagtggcactagttggaatgcgacttccaatagaagatatattatcaatgcaaagagaaatgatttaatagattcgtgtgccgtttttagttttccatcctcacattctcgcccccctcccccccccccccccccccctcttcaatgtgagttcattgtccacatttttgtttcctaccatgaatgtgctctagttcttacaaactaaaaatggccccttccatagtgtatgtatgtctcttgagcagggatcagctttggcgtagtttactgtgttgaagatgcttagttgaaaagtgatgtcgggttatctatgatggatattgaacgaatacctggtgactagagagagcttcacattggggaagctatactgaatgaaaactgtgaattttgatgtctctcttgcagtggtttctgaagcacccatctcaatctattgttatatatatatatttttattcctgaacttgttatacaaagtaatttgtttcacatggcaataacatgttggaactggtttggaagag

SEQ ID NO: 29161 - DNA, 2175 bp, Zea Mays
aacatgtaaaagaagaagagattcatccctccgccactccccaacatgtaaaccagaccattctcctctccgaattcaataattcctccgccgcaccacgcttcctcctcctctgctccgcctcttcatccagcgagcgtcctccgattgctgacggatccctcctcgccgccgccgcgggccgaccgtggggagaggaggggaggcgggagtgatggaggccgccgaccacgggaagctctttgtcggcggcatctcgtgggagacgagcgaggaccgcctccgcgagtacttcggccgcttcggcgaggtcaccgaggccgtcatcatgcgggaccgcagcacggggcgtgcccgcgggttcggctttgtggtcttcgccgatgctgctgtcgccgagcgcgtcactacggaaaaacatatgatcgacggacgaatggtggaagcaaagaaggctgttcccagggacgaccacagtattgtgaccaagagcaacgccagcagcatagggtcacctggaccgggacgcaccaggaagatctttgttggaggcctgccctcgaacgtcacggaggctgacttcagaaggtactttgagcagtttggcgtcatcactgatgtggttgtgatgtacgaccacaacacgcagaggccgaggggctttggattcatcacctacgattcagaagacgccgtggacaaagccctgcacaagagcttccatgagctcaatggtaaaatggttgaggtcaagagggctgttccaaaggagcagtcgcctggacctgccgcacgctcacctgtgggagtggggcagaactatgctatgaacagggttcatagcttcctcaatggcttcaaccagggttacaatccgaaccccataggaggttacggcatcagggtggatggaaggtatggcttgatttcaggtgcacgaaatgggttctcttcttttggaccagggtatgggatgggcatgaatgttgaaggtgggttgggcggaacatttggtgcaagctctggtttcatcagcaactccaacgggaggcaaatgggttcgtacttcaatgcaagttcgaacagattgggtagccctattgggtaccttggccttaatgatgttccgggatcaatgttgagttccatgtctaggaatgtttggggtaatgggagtctaaactacccgagcaatcctacaaatatgagtgcttttgcttcacctaggaatgggggccaagtcagtcttcccagtgacaattggggaggtcttccttctgctcatgggatggacaacatttcaagccttgggtcagggaaccttggtcgtggaactggagataataactttggtttgccttctggtagctatggcaggaacaactcaactggtacaattggtgagcctttttctgcagcaggcaatacatatgaagtaaacaatcgagatacatatgggagcagctctatttatggtggcacagcctggaggttcgcatcatctgaggttgacatgccttcttttgttcatgatattggaaatgttgatccgactattaaatgatacatgtcagcaagtcacatgggcaactaccctgttaacaacaatcagccaagcagaggcatcagttcctagggggcggcgagtattacacttgggggtagtagaagaaagaaacacccattcagccaggcaatcccggcgcacacggctgtgaatcggtcggtgattgtcaggttaatacacaggttagtttttgtgtagctaacccagcggcgtggtttgcgaacaccgacatgctagaggtggaagctgctaggctagctagaggaaaggagcgcggatggatatacagaaacatttcgtgaaggttttgtttttgttttgttttttggtttttgcgggggtggtggtcatgttctagttttggttcgtacgcgcgtggtgaggccttttggagttttgaaatgagatgtagtagtaattgttgcggcacatattttagaagtcaagccatgttccaacagaagctggaaagagatgtccgctgtatacgggtgagcatgtataccaaccaaagggatgctgtattatacattagcctgtgtgtgtgtgtgcgtgtttttatttttaaaaaaaacgctcaaatgagcttctataatcagtcacatggt

SEQ ID NO: 29162 - DNA, 261 bp, Zea Mays
ggagagaagagagagctctgctgtccccatttatagagagaaggaggggagaagaagagtctgccagggaggtcatgaggtgccgcaggcttcaaatgccgtcaatatgtcggttactaatggagaaataataggaataagaaacggatgaaataaatcgccatgaagcaagaaacggacgacggttcgcggcgtttggtcgtcgggcgcgctcggcatcgcggtgggctggcgcggcagcgcgctgctcgcgcagggcgg

SEQ ID NO: 29163 - DNA, 226 bp, Zea Mays
gttgaaatgcaagagatctttgatgaacaagttgcagaagaagcaactgaggctgagggtgctggtgttatagcgacaataacaaaccaacgtagaactgcaaaaaaaggtgcaggggcaacagctaccccaagaaagagcactcaagaaaaatcgaaggttcagggaaagggctacagggacaaatgctatgagtctatcagggtggctgttgaggcccgcttca

SEQ ID NO: 29164 - DNA, 1422 bp, Zea Mays
caaaaaaaacatgtgtggcgcgcaaattagtggctgccccaaataccagccgcgccgccgcagcccaaaaccctatctcccttcccgtaattccagtcgtcgcgctccacccaaaaattgatgccgccgccgccaatcgccgtccacagccgcgcgccctagccggccggttgcaaccgccgtcccagccgcgcgcccaagcaggccggcccccaacgccgtcgccgtgatcctattacctgatgcggcggcaccaaacctcgcaaggtcgaagcccgtacgccgccctttgtcgcccaccgtgagtcacccctccggtcctccctccttaccccctcgccaagtccctagaggtcgctcaacgctggatctgccacgaccctaggctcccagctatctacgtcctactcctgcccctggctatacctatgactgcgtctcggcagccggcgccctgtggaagccctccgcttcatatccccgtgctgtcgtgcagccagctgccaggagggacacctgaccacacaaaatggataggtttttttagcagcaaacaagactttatcgatgtagttgaggcaatattcagaggtgcgatgaaaggcaaactgatagtgtcttgcccccttcctcctgagaggataccaagattctaacttcttttcaaggatgtctgagaaaactgcagctcatcacgtgcacacaatcagctacctagcccaaggtttgtatttaatcacgttcatcaaatatgatgggtatagatttcttgtttggtctactagtcaagcaagagaatgcccttcgttttgctgaggatgcaagtatgttctactcaaataaattactcatccaacatcctgtgtttttcgctattggtgtcatagtatgttctccctacaacattttattattgcagaccagttgtgctatggcacctgcctttagtgtcttccttacttcctattcatatggcgattctatgagtatggcacgagcagtagaagctataaaggtaaaattggccagctatgcataactatgaattcccaaacacttgttttgaccctttttgtttgaccatcattttttatttgcacgtgaactgctcaaattatatggtacaaatgtcttgggttagagatgtaagttttttctgaactactttgtttacatgtgttttcagtatgcaaatattgctatgtctcaatttataaagcaataaaaagtcattgttgtctatttaacacgcaccttctgtgacaatggccatttcgtcacaattaatggcgtcaccaaaatactacctatgacaaataaacactagttagtgacgtaatcataatgtcactgaaggcctaaaatgttgtagtgtattttgagtagcagcaaggtgtccttgagtagcagcaaggacacttg

SEQ ID NO: 29165 - DNA, 3108 bp, Zea Mays
gcacagcacaacgcctgggtgacaccgtgagtccatgacagccgccgcccgccggtctgcccgtccctggctgttggctccctcagtccctccccccgccattttcggttctggcctgtggccttcccctttgcctccggtcgagtggacgtgctcccttctcattcacctccgagtggccgtgctccgcaccgctgcacctgcacagccgcgccgtgctcccttccccttcgggtcgccgaggcaccggggttgccggactatcgggcactggcttcttcaccagctcaactcgacattgccctcccctcagccgcagcaagacaagcaccatacgcgtcccgccgggcgccagcagccgatcttcagtgcgcgacagcaaatcttcagtgcatgattgctaagtgatggattcattatcagctcgttcagctgtgcaagggaaagggaggagtgaaagagatgagactgattcagagagcaactcttttgaccataatgatgacatgtctgaggatgagatgacagtgctaggtgggaaagatgctgatgttgttacagttaatgaatctgatggcgatagagccaagaaaagtcgtcgaggggtgaagatgccagttaaggttgaggggggcagcaagagcaaatccaaggtttgggaggtctgtgataagattaatgtgcccaataagtcagataaggagaatccgctattgaaggcaaagtgcaaatattgtaacaagctttatagttgaaggcaaagtgctattgaagaactgtcccaagtatcgaaagcatattgaagaaaagctagatcaaacactgttgaactttgctccttcaaaggcaggtgaatctggttgtggtctccctactatctcatctcctagagaatataatcatgaacaagtctaaaaattaaatgctaagatgattatagttcatgagtacccgtttagaatggttgagcacacatggtttaatattgtcatgaagtatatgaatctgttgtatgaatttattggtagaaagaccataagagctgaatgtataaaggtttatgagtctgaaaaagaatcattggctaaggcccttaaaggtgtggatttcatttccttgaccactgatttatggacatctaatcaaatgttgtcctatatgtgtttggttgcacactacattgataaagattggaaaatgcaatattgtgtgctgaatttttttgagttagaccctccaaaggacatgtgataggacaagctgcatatgttgtgttactgcatggaaaatagaagataagattatttctttcactctagataatgttgcaaacaatgacagtgctatacgtggtctgagggctagatttgcagctagaaaggggaatgctttcatttcaaaatacttccatgtctgttgttgtgcacacatcatcaatttggttgtcaatgatggagccgctgcattagcttctttgatagaaaacctaaggttaacagtcaagtaccttaagaagtctccatcttgtatgcataagtttgttgacatttgtagatctcctgcaattcaaattggagaagggatgaggcttgatgtctcaacgaggtggggttcaacatataagatgttgcgcactactatagcttacaaagaagctataaagacataggctgattcagatttgaattataagtggaaacctacattagaagaatgagatttgtttgctgcaattgagccaattctagcctctttaggaaccactacactgtcaacttcttcctaccccaccgcaaacctattctatccccataatgtggatgtcaaaattgcattgagagcagcaatggtttctactaattttaatatgaaaaaatgggtattgcgatgatggagaaattcaacaagtattgggaataaaggaacaatgttatggtgattgctactatcctagatccaaggtataagatgagatatattgagtggtgttttggtaagattttttatgtagaccaagttggatttgagatagaagaatttagagacgaattggaaaagttgtatgaagactatgagatgcaacatagagagagaaaagctgctcaaagcaagcttagtgcatcatcatcattggcaatgaatagatcttgtagtttgcctactgcatcatgtgagtttcagtcatacttatcatctactgaagtgaatccatcaaaaagtgagttgctcatctattggatgaaacaatgtgagtttggctgataaggattttgatttgctaagctggtgcaaggttaactcacatagatttccagtggtgtcgaggatggcaaagttcttaattgtgcccgctacctctgtgtcttcagagtctacttttcgcactgggggtcgaactctagatgactatcgtagctctctaagcccttctatggtagaggcattgatatgctcctctagttggattcgaagtgcacatgatgggagtcatatgtattgtagtatgatattcttctacttttttattctagtgtgttttctatttttttatcaatgtaatgctctatttattttttggagcaagatgaagaagacgatattgaaaacaatgcatttccaaaaagtttggtggagagcaactagatcttgatatcttttggacaattggatggttgatcacatagcaagtcgcatggatgatggactcatcagtcatcactcatggacatgttcacatggatgagcacacaacaagtggcatttgattctggaattttggatggtggtagttgcatgccacttgtatttgtgtaactgtgggctgtcacctgttaggttgtgcggctgtggcatggttctttacttcttttgtttatctcttcactgtttagacttgagaatttgtagttgcattcgtattgcagactttattgtcttactgttggagatggtagtgatgttactgaatactgaggtagtgtaactgttggagttggcagactttattgtcttgcacttttgctattggagttggtattgcagacttaagtgttatttcagtttgtgagtaatgtgactatgtccccttatgtttattcaagtcataaa

SEQ ID NO: 29166 - DNA, 1622 bp, Zea Mays
aagtgcgtgcgtgcgtgcgttcgtccggggctccgggctgtgccggccgggcgatcgatcggcgatggcgccgccgtcgagggactactggctcggcttcttccgcggcgcgggggacaacatcttcgacgccatcgaggcggccatcaccgtcgccgcatccgaccacccggccgccctccgggagcgccgcgacggcatcgccgagcgcctcttcaccgcgctcctggtcaccagcgccgcggcagcggccgcgggggcggcggcggcggccccgggaggaggagcagcggggggaacccccgtggctggggcgcccactccggcacagctccaccccgagggcgccgccagcgtgcccagcctctgcagctccgaccgcgccgaggccatcgccgacgacgccgcgccgcgctgcgacgatcctgtcctcgccgagacggagcgcatcaaggccgtcctcctcagcgaccaagagaagccggaggccgagttgctggagctactccggcggctgcaggagctggacctcgcgttcgacaccttggatgccaccgcgattggcaaagcagttgccaacttccggaagcacagctccaagcagattcggaatctcgtgagatcgctcatcgaagactggaaacacacagttgacgtgtggattgctcaccgcagagatgctgttgtagatcaaacacctcagtccatgggtccttcaagcttggagcaggaggatcgaggggcggcttccacccacatggatgaaggcgacctcttcgcaacgccgagcactacaattcggctgtccgaggcatcatgaccaatgacagtagggactgtgggcagcggtacccgatgatgaaccaagaaccggctagaaggcctccgccaatgggccagcggtacgacccagagccatgctggaggcagtctcggccgcaggaactgagcaacgggcagacaaaggagcagttcgtcgcggagatgcttgccagaccctcgagcgtggagtcgggccccgggagaccgcaggcgaggcctaggcagcagcaccaggacaccccagcagctcaagccaggccgcagccggctgcgtccgagaaaccggcggctcaactcgacgcgaactctgtgcgagcgaagctggagctcgcgaagaacgccaagctcgaggcgaccaagaggaagctccaggaagggtaccaagaatccgataacgcgaagaagcagaggaacgtacagatggtgggtccgcagaacctgcccaagcaagggaacacgaacaacaaccgtagtttccagcctagcggtagcggcaggccaaggagtagcggcaacgtcaatagcaacaggaactggtcaagatgagaggcaccgattccaattccgattccaattccttcaagagcggcaggatcccttttctttttctttttctttttacatcggctacaacaatttttagtctaggccagtagtacataaacagcaataaggcttgttttcggaattgcatgtttggcatgtcacaatgctcggctggctggtctttgccgatgaaacctgtaaagataacactaccaaattctgatcttgagcttactatccatgctaggacgctg

SEQ ID NO: 29167 - DNA, 966 bp, Zea Mays
gtccgtcagttatttctcttcctcctccaaaccaccgatgtcgctaccggttctatccctgcgctgccattgctcgtccgcatcctccttggatttccctcccagcaagaagatgggatgtctgatggcttgtacacttacaagcatcaccgcgagcgaggagctgatatccacaccatctttgtgaagaagagcaaattcaggattctgctgtcatttatcggcacaacgttccttcttgtgtctgtttgctgcgccctgttatcgaaggatggtttatgtctttgttccctttggagcatttcatttgccagtgtaattgcgaaatgcctgcgatgtgaccctgtgaagaaagagtcattggtgatcatgccgacttttggaattcaattagagcaacacttttggagtggaagagttcatcgcaaatttgtgcccattggcaagattctaagaccagtgctgaatgagcatgtgacccctgtctcatgctactggagcttggccttgcttgtacgcgaagaatatgagctcatgcttgttttcaagagcttgaatccaccagtcaagatgttggttccaatctggaaagcgttatgtgcattcgtagactccaatacgctgggcaattctgcattgcctcaatccacatgattacatgaacatgcttaaacaagttggtggctgtgtgcagccctgatgataattcgaacatatggttcgctgaagactttgctgactgacaacataatgtttagtttcgatacaaatgatgatggaatgtacggaatgttaccgacactggggctattacgtctcacgtggagtgtgaattgtgaaaggatcgtgatgcttaagagtggatgaattgagattctctaaaaaactctttcgataattaagtcctaattgcaagcttaatcaaaagttttgcaccctaatctttaaccttgtactatcaatggc

SEQ ID NO: 29168 - DNA, 1310 bp, Zea Mays
caaaatgctagcaaaatttctttggtgttgccaaacttgtgaaggcttgcggggatccaaaccaaatagccctcgagaaccctatgctgctgtagccaagcagatgcccgctagtccctcgctttctctcttccacccgctcctcacgccgccacagcgccactgctccttcggcctagttgaggagagatacatccatcctggcctggattggctggtgctggtccttctgctgaatggcagaatttgttctatggactttcacagcaaggctaccaactatctcgtgacagctagcgatgatgaatcaatccgtttatacgatacccaagatgcagtgtgtttgaatactattaatagcaaaaaatatggggttggacttgtgtgcttcactgataacccatctattgtcttatattcatcgaacaatggctgggatgaatctctgcgtctgctctcaatgaatgataaccggtttattagatattataaaggtcaccttgatagggttgtctgcatcgcactttgctctggaaaagaaaactttctctcatgttcgcttgatcgtaccattctcttatgggaccatcgggctgaaaaaccgcagggcttactgcgcgcgcaaaggaggcctacagtttcgtacgacgcccagggcatggtatttgctgtcgcctatggtggccgcataaagatgtttgatattcggaaattcggaatggggccttttgcgaccttctctgtcggcactgatgattcggaagcccatgtcgtacagttcagcggtgatggcaggcggattctgttaaccactaaagctgggcgtgttcatgtgctagattcttttgaaggcaacagcattgcatcgtttcgcgcgaagccaatattaaccaattcgacactggaggcatcgttctgtcccgagggaaaccatatcgtatctggctccggtgatggtagtgtctatgcttggaacgttgagagcggaaaggttgcatgctgggaaagcacagatgtgaaaccgccgcgggtaaggtggtctccaggatccttgatgttcgtgacaggaacgtcggagctgtcctgctgggtgccggatttgtccaagctggagtccttcaccatcagccacaccaacaccaggtccagctcgtccctgtaggcttggaccgatttgcatgccgtgtggccggttgacgcgaaggaggaacaagaaagcatagcggagcatcttgtaccaattgagtttgtgatctgttcctgatggcccggtaagctactattgcaacgattgtggtctgcggcaacgg

SEQ ID NO: 29169 - DNA, 3400 bp, Zea Mays
attatattttaggactgtgtgagtaacatatatggttaaatatgtatcttatgcattaatcttataatgcccattaaaattagtgatgggatattgtatttggtttagggttggagtagaactgttttcctctcaaatctagaggacgagtatcataggcaacaaatcaaagacccccattcctcgcctcccccgcttccaaggtttcgtaaagcaggaggggaagagaagaggcgggcatacctattcattgccggagaaggacacgacgaagacctgggcatctggaggcgacataggtagtataccgctagatatatagggagagaggacgcaagcggagaaaaaagcccagccggagcagctccaaactaagaggcacccgcaccaggcgtcagtccgagaagggcgagagaatgcgagtgtcttcccagccttggacccaccgaagcgacacaatgccaccaccaactctatagcatatgtcgactgctgtcacgctacgggccttagttgtccattatctcagatttggactcatcatcgctaatataacctaagcgtggcagacgtcatcatgtcctcctcgacggcacgcacggagaaaggccaagtgcatgaccgactcgccccgtacccacatcaacgagcgtcggtcggctcgcggttgcgaccatgggcagcaggttggggaggaagaacaaggcaaaggtcgagaagatgaacgagacgtccgacgacgacgaaaatgatggtgcgcgcatgatatgaaacgtcctcgtggacgtgcaatagccactgcgcgagtcggtgtcggggctggtgtcggacgaatacggggaggagacgcctgctcctacgccctctgtcgagaatgaggtggcacggaggtggaggcatgaggggagagagaaaagaagtagaatgacgaacgaggtggtgacaactgagacgatgaccattattatcgtgcagaggtataaatagccaaatggatcgtgtttggcgagccgacccgaggcacgacatatttaatagtgtctgggccaacccaacacgagcgtcgtgcggtgcttgggccgtagcctcggcccgtagtgctggcccgacccgacatgattattttttttaaaaaaaatatatacatatgtacaatttatattcaatattataatcacctgatcatgatattctactggttagatagtttcgcccagagtcttccaccacccttcaattagagtgtgggacagtgggttcaaacctcacctcctacatcactttttaacataccccatgatgcaccgctcgctttttaatattttacgctgaattgatttggaaaaaattatagggattttttttataaaaaaatgacgcggtacgaccgttgaaactggtggtttaagtataaaatagagagtagaaaaatttaaaagttttaatccctctcagtcttttacaatctccttgtaaacgaacaagacctcccctgataccttggaaccaacacgccagagacacaaattacagagccggctccacagagacacttcactgctgcaaagagcagcagccacgagcttcaactccacgcaagattaccccaagttctcaacacgtacccgacggccgaacacgtgactccagccagtgagggcacaccacgtcaccccgccgccactcatatataaaacctattgacctcactacccgccgccggcgaccaccagacagcagccccatcaccccctgagtcctgactcctgagtcctgacgcaccgcgaggccgggccaaatcgtcgagagccaagtcagcgaagccccgaaccctccctccctcccatggccgtccgccgcaggaccgcggcggccgctgccggggacccgcctccgcaggcgccaccggcagatgaggcggcggcggtggcaccagacgaaccggtcctccgggcgccgaacctgcgcgtggccgctgtggcagcggcgctcttcctcgcgcccttctcgtacctcgcgttcgtgcactactccctgaccgccgatctgcagcgatccatcctcaaatgcggcgccatgagcctcgttgggttctgcgtcgcgctcaagctcatccctatcgcggcccgctaccacctccgccgccgtatgttcggctacgacatcaacaagaaaggcttgcctacgggtcaaatcaaagtgcctgaggcactaggccttgttgtggggattgtctatttggtcattgctattatatttcagcagtttcactatgccccagactccatttggcttgttgaatataatgcagcattgacatccatctgctttatgattcttcttggatttgttgatgatgttcttgatgttccatggagagtgaaattggcgctgccaacatttgcagcactcccattgttgatggcatatgctggtggcacttccatcatcattccaaagcctttaaccccttatgttgggctaacagttttggagctaggtttattttacaagctattcatgctcttgttagcagtcttttgtacaaactcgataaatatacatgctggcctaaatggacttgaagttgggcagacagttgttatatctgcggcggttttgatacataatgtaatgcgcatagcatcttctacagatattgaaactcagcaagctcatgaattctctatttatcttgtcttgccattcctaaccatttcattagctctgctagcttttaactggtatccttcaattgtttttgttggtgatacctacacctattttgctggaatggctttggctgtgataggaattttgggacatttcagctctttcactttgttccttgcccaagacataggttgccgaggtttgatcctggagcgggtctgttgactggtaccaaagatgggaatctggttaacatattccttaggttatttggaaagtgctcagagagggccctttgcataaggctccttattttccaggctctatgttgcgtattctgcttctggctaaggcacatgctcaccggatggtacaagtgataacctgcaatcggctctccatcctgacacccagctcgttgggaaaaaaaatcagctgcatctgatggctgttgttttcctcgacatacttgtagactaaccagagtaggtttttggattcatttcctgtgtatacttgtgctaactacagtttccaagtctttgtaaccatatttatgcaatgccttggcttcaaggaagtcttcggtatacttgtgtaccaagagcctgtttcttctctgatatcctgtttggttcaaggagtaggatgatggaattggaaagagtaaaatgtatcttaatggttagtttgaaaactccaatctgaggggatttagatggaaatt

SEQ ID NO: 29170 - DNA, 2735 bp, Zea Mays
attgtactcccttctccattccactcgtccccttcctccccttccgtctcgcaacaggcgaggcgagagaactcgtcgtcgaagcgaaatatagccagcgcaccaatcccaattcccaacccgacgcaacgcaacgcaacgcacctcatcccggttgcttgcgccaacgtaggggatcgcccggccccgccccgctccgcttcgcgcccctccttcctgcctgccgtaaccgcgccgtgcaactgtgcaagggtggggtggtggtgccatggcgagcacggtgtggagggaaggcggttgtggccagcatgtacttttctgtttcggtactctggttcgatcctgatggggttttcgtccatcgatcgcgtctcggtcctgcacgcaatgcagagggggttacggttctttctgttcttcctccccgcggtccgcgtcgggatgctggtctggtcgatgctttttttggcttaccgcggacgcgacgggatgcttcggccgttgttttcttttgatctctgtgacccttctgggaatcgattccatgccggattggtcgcaatgtgcgggaggttttttcttgtcctgttttttcctcgctggctggttggattctgccgcgaaaagttctcccccttatgcacctttcccccccccctcaagatatctttattcgtcgttttcgtggttccttatgggtgcttgggttcccttgtgtggttaaaaggccaataagctgcagtgtttttgttctcaagagttctttccttgtgacagggggacatcacagattctttggtatcttcctggaaatttccatcaattgttttctcctcaaccattgctggtcatgttgtttgtagtgattgtctgtcaggtgaaacatgttgtgtttggtgatgttcttactagcattcaaatgactcaagatacattagttatttgtcagttgttttgtatctgatggaccaatatatgctcaggattcatatttgggcacttgaggtgaaaaccatcttattcgattttgttgaactgtgataccactcattcttaatgaaatggatcatttccctttgccagtatcttgttgctttatttgcacccttgactatagttagtatagtttcagtattcgaggtgttgtcctatttgcaatatcaaacaggaagcataagataagagaaaagtgtatgtggcttcattgttagatttaaaatattgatactgtctaagtgattgtcaagctaggttgtcatatccatatggttcctcattacacatttaattgtgggatctgtatggtttcacagacgcatttataacattcattgtgcgtttcatggatcattatttaattgttgtatattaatgctccatttcttagggcatttctgcattcatgtgggcaagctggatgattcaaagttgttgatatgtggtggttgttgagtctagataccagatgatggacctgtccacgacttcagtgctggcagctaaagcttacaaatacaaagcagaatcacttgttaaggagtaccttcttgcagattcgtatgtttcatacactgctgtacttggtgggatcctgatgtgcaagatggcttatgacataacaagcataatcagctcattgtactacaagggttatggttcacttacaaaaacccaaaagcttgagtggaacaacaggggcatgtccactatccatgcgatattcatcacagtggtgtcagtgtacctggttttcttctccaacctattctctgatgagctggatggactagtaacttatcggagttcaaatctatccaatttcactttgggggtttctgttgggtatttcatcactgaccttgctatgatattatgggcttatccttctcttggtggaatggagtatgtccttcaccatatgctgtcgcttatttctatagtctatgctatgtattctggggaaggacagttgtacacatacatggttctcatctctgaaacaaccacacctggaatcaacctccgatggttccttgataccgctggactgaaaaaatccaaggcctatcttgtcaatggtgttacgatgtttattgcatggctggtggcacggatcattttgttcgtctacttgttttaccacatttacttccactatgatcaggtcaagcagatgcatacgtttagctgcattctgatatttgctgtgcctacaatactgctcgtcatgaacacaatgtggtttgccaagatcttgagaggccttaaaaagacgctagccaagaggcagtgaaaagaagaatggtaaaacaagctcaaggacatcgatagccaaaatccatcccctcgtacagtcactttacagttacatgcacttcccgagtaaagccgtcagtgcagctcgtagcacaagctaaagcccttgcacatgatcctgaaatacgctaaacacagctcatttttttccctggatgctctgccttgtacatacggccgtctgtattgggtgcttacaccttgagggatcgtttggtgaccaggaaaatagatgggaaagaaatccctttgttacggcctcgttcgtttcaactggtttggctttggcccgtttccggcctcattccgggtggaaatggaatttggttgtttctctatgagctgttcgatggctgagtctgacgattgcgctgttgcgtttgtcttttctatttcttccgatcttaaatatacgagga

SEQ ID NO: 29171 - DNA, 1882 bp, Zea Mays
cacgggccagagactgcgcgcctccctttccgagccgcttcctccctccgtcactcctcatgggtcatggcattggcagttgcgcactaggcagaacagagtggaaaatagaattaggcctaccctccgagagtcagatctgaggcgcgccacccgcgaccaccgcaccgcgtcgtcctcctcctcgctctagcgacgccttctggaagctttgggaggccgcgctacgctacgcgacgctacgctccggcgggcggtcgggatggggctgttcgaccggctgcccccgatggaccacatgcggtccgagaagatgtgcttcgtgcagctcatcatgcccgccgagagctcgcgcctcgccgtcacctacctcggcgagctcggcctactccagttcaaggacttgaatgaggataagagtcctttccagcgtatatttgtcaaccaggtaaagcgatgtgcagaaatgtcacgcaaactaaaatttttcagtgatcagatcaacagggcaggtttaagatcttctgttcgacctgcacttgaaccggatattgatctggaggagctagaggcaagattgggtgaacatgagcatgaactgcttgagatgaatacaaatagtgacaagctaaaacagacatacaatgagcttcttgaattcaagctggtcttgtcaaaggcaggtcacatccttgcttcttctcacagccatgcagcttcagctgagcatgagctagatgaaaacatatatgacaatggaatacatgagggaaatgcctatctgctcgaacagggagtgcatcaaggagcacatggacattctggagtgagatttgttagtggaataatattaaagtcgaaggcacttgcttttgagcggatgctttttcgagctacaagaggaaacatgttattcaatcaggcatctgcaggggaacctgtaactgatcccatatctggtgaagaggtagagaaagctgtttttgtagttttcttttctggggaacaagcaaaagcaaagatactaaagatttgtgattcatttggagcaagttgctaccctgttcctgaggagatggtcaagcagagacaaattttcaatgaggtatcggctcgtctctctgacctggaagttactttggatgctggaatccagcacagaaacaaagctcttgagtcaataggatcacaattgtggaggtggacaatcatggttaaaaaggagaaagctgtatatgacacgctcaacatgttgaactttgatgtgacaaagaagtgccttgttggagaaggatggtgtcctatatttgctaaatctcagatcaaggattgtttgcagcgttccacaattcacagcaattcacaagttggtacaatatttcatgagatggacactattgaatcaccacctacatatttccgaactgataagtttaccaatgctttccaggaaattgttgatgcatatggcgttgcccgatatcaagaagctaatccggctgtatattctgttgtgacgttcccatttctttttgctgttatgtttggagattggggtcatggaatatgtctattactaggagctttggttcttatacttcgcgagaagagattttcctctcagaagcttggtagctttatggagttggcattcggcggacgatatgttattcttctgatggcaatattctcaatatactgtggccttatatacaatgagttcttctcagttccattccatatatttggcaaatctgcatatgaatgccgggacaaaagctgcagcgatgcacatacttttggtctcatcaaagtccgtgaaccctatccttttggggtggacccaagctggcgtggaagtcggtctgagctaccctttcta

SEQ ID NO: 29172 - DNA, 3100 bp, Zea Mays
cggacagctcggagccgctaggtctccgctctctgccgcattccgtggcatatcctataacaatttccccaacgccacatggccaacgccgacgctggcgacggcgacgaggtcatcctcgacgctcccggcttcatacgagtgtacaggagcggccgcgtcgagcgctttctgccggtcgacttcgccccgccctccactgacgccgccaccggcgtctcttcaaaggacgtcgccatcctcccagacgcctgcctattggttcgcatttacctcccattgcccccctcttccggaagttacagcggcaaactccccgtcctggtgttcttccacggcggcgggttctgcctcggttcggcgtttgatgcggcggtgcactcccacgccaaccggttagccgcggctgccggcgcaatcatcgtgtcggactgtcggtggaataccgcctcgcgccagagcatccggtccccgctctctacggggacgcgtggacggcgctccagtgggtggccgcgcactccgtgggccgggggcaggaaccctggctgactgcccacgcggacctcgggcgcgtccacgtcggcggagagagcgcgggcgcgaacattgcccaccacgccgcgatgcgcgctggcagagaggagctgggccacggcgtgaagctcagctcgctcgtgatgatccatccctacttcctgggaggcgagagctccgagacagacgacatgggcgtagcgttgctccgcgagctcgtccggctgtggccggtggtgtgcccgggcacgagcgggtgcgatgacgacccgttgatcaatccgatggcagagggtgcccccaatctcgctagcttggggtgccgacgcgtactggtgtgcgtcgggggaaaggacccgatgagaggcagaggaaggctgtattgtgagaagctgaagagaagtgggtggcgcggggaggtggatgactgggaggcggacggccagggacacggtttccatctctcgtgccccatgagcgcagaggcggaggcgcaagtccgggtcatcgctgagtttctgacctacggatgacatatctgttttcccactccttcacgcggccatggtgcattgttctcgaatctgatatacattttttgtttcgagtttggattgaggacatgcatgtttatattttatatttttatctactatttcataagcttaataaatgtttggctatgggttccagattctcaattttcatcagaagaaggggttactgagctgtattagacttacctttgggttaatatctattggtgcaagacccagattggctatacctttgtaatcgaatttgctttgcctggctaaagtttatgacaaaatcgtcgcattgctcacattctctttaatacagtcctggtgaccttgtcgcataacatgagcagtcatttagtatacatgagtgatgagtcgtgaggcttctcataatagagcagtgttcctgcacaaatgggagaaagggctggtagtctcacatgcaaagagtccaggagcagccacctatgatggatcataacccaacagttgtaaaagaaatcaatatggggagaatttctcttggaccaacttatttgatgatatctcttgctttgatatccaccttcaggcatcctaggtgtgttttgtttgtcctacaaggcatgcattatgtcttggtcaatcttttacttccattgctgcatcatggggctttgagaaatactgcttccttgacttgtccttttgctttcattgaccaaacacactttcctttatcatcttgcaaaaggcatgctgtttgagcaagacataagttatacacataaattttatgatatgcgtggactgaaggctaaaaggctttttaaagctaccccaacttgcttgggataaaaggcttttgttgttgttgttgttgcatgaactgaaggatcttggtagaatttacagagaaatgctgtagcgatttgatctgttgcaatatcaatgattgagttagggttgaccatcttgcatatgttcgttggggatcagaagtacaacacaatggatgctctactatcagatatttgtatcagcacatctgctgctccaacctatcttcctgcatactctacttcaagacagaagatttccatgggaacaccaaggagttccatcctattgatggaggagtagctgccaataatctggtgcaatatttgtcagtaattatgcatcgcacttcaatcatgacgcaaggttgatacattatttgcacttctatgtgtaaaatcttgcaaagtgtcaacatggctttagttgccatttgagaagtaaccaagcagatattcaaggaaagcccagattcttcccaataaaacctatggatcatgactgatttttggtcatttcactaggcaggctcagcaaagtttgaagcaaactacaacgcacaaacaactaaatcatggagagtgttgagttggttgcttggcagtggatccactcccttagtatctattttcacacaggcaagtgcagatatggtggatattcatatctctgctagtttcaaagccttgcattctgagtaaaacgatctgagcattcaggatgatactctacaaggactgtgtcctcggttgatgttgcaaccgaggaaaaaatggagaaacttgccagagttagagatatgctactaaagaaacctgtctcacaggcgaatttggaaactggctatatggtgcgtgcctgtcataggacagagctgactaatgacgaagctctcaagagatttgcgaagctgctgtctgatgaaaggcaaattcgtaaggcaagatggccaaaatgaagaaagcccttgtggttgtttcaacacacagagaactctgcattacttcaattaagaattatggttgatattatttgttgatatgaattgtaacaataaaacaacttgtattggatcatgctgacactatgaattgatgatgttggcttctgccgggtgccggctgtcttttgtagcgtgtgaaggaatggaaaatattaatattctttttgataaatataagcattggattacttgtata

SEQ ID NO: 29173 - DNA, 886 bp, Zea Mays
tccttacccgctaggctaaaggccctttcgcaatttgaaaattgcactcgatcacgaataggtttagatacacacggacacaccaggttcgagggttcgagcggtcgagcctggtgacctgatccctgtgctggtcaacgtcaaccgagtccgaaccgcatcgatcggacggtctcacgacgacgaaggtgttgtgaaagacaaacggactatatggcgactgagcataatctcagacttcttctgggccattgtgagctttatcagaatcttctttgacacactgttctcattggacaaaactgacaacttcaagaaagggtatggtgctggtaagaagtgggatggtggacctggtggtggtgggcggggcccatatggcggtggaggaggtggaggattcggcggcggaggtggaggtggttcacggggtcctcgcactctatctgacatccaatccaatgaccacagttctctccctgcttgtggatcctgctgtggctaataagcgtgcaaccgttccgcctgatgactacgtataacaaatgaatacacatgcttctgtatgttctgaagaacatcgtagctattgatatgtattttactgtcagacgattgtatcataatcgatatgtcgtttattaacagcctatttacctgtagcttgactctggcatgattcgcatggtacattcatggttcatctttcgtgtaccgctgcctgattgcataataactagatcagttacaaagtttaataaattgtctggtgtgctgttctgttaatgtcttgtatagcagtaattggtgaatacaaacagtgaggcacctgcgggctgcggcctgcgggtagttgtatttgatgatcagatagagcatgaaaatg

SEQ ID NO: 29174 - DNA, 242 bp, Zea Mays
tagagataaatgtcacaataacactagagtatttaatacatagcggaagtcttattacaaaataaaagataaatgtaaaacaaactaaggatcatccttggcgctaatatgtcaactgggaaacgccacctagatcagatctaactcctcgctttgtggctcctcctgaaccacctgttcttctcctatggggggtgtgagacagcaagggttagctcacacataatcatagctcaacaatt

SEQ ID NO: 29175 - DNA, 4117 bp, Zea Mays
cacccaccccccaccaccacgcccgacctcgtccgcggtgaaggtcaaggagacggcggaggaagcctgacaaccgtgtggatggggatctcgttcaagctgtcgaaggtcggggtccgcgtgcacccggccgcgcgctcggcgtccgcggcggtggcggaaaagccgggcgcgggtgggaaggagggttcgctgtctgagtcgacacgcgaggacaaaagaaaagatgtcaatggcatcaaaattttaccagcatgctccaaagaaattttgccagatcatgaggtttctttcacattgagcctctatgagagaggttatctcatttcaaagtcagcacccatggatcctagtcagacctcaattcaggacggcaaaacactgcatccctatgatagagcatcagaaaagttgttctctgctatcgaagctgggaggctacctggcgatatttttgatgagataccaagcaagtactataatggatcagttgtttgtgagatacatgactaccgaaagcatgtgtccaaccaagcgcctgcatcatctgctgagctaggatcaccaattgtgaataaagtacgactgcgaatgacctttgaaaatgttgtaaaggacattacccttctatctgatgattcctggagttacagggattttatggaagctgaggcttgtattttgagagctctacaaccggaactttgcttagaccccacacctaaactggatcgacttcatcaggatcctgttccgcataagttgagccttggtatagggaaaaagaggaggctgaggcaaaatcctgaagttgtcacatccagtcacatgtctcatggtaaaaaggtttgcattgataggttacctgaaagtgccaaagctgatgagatgggcatcactagcagtaatgcagctcagcaggttggtggtaacattaccatccaaaatatgtcagtctcaggtggttctcagacacttagaccaaataattcttcacaagatgctgccagaacgcttttgcctcaatctggtctacagcaaaccttgtgttattctgctgctggtaatgatcatatggcaggaccacctgccaatttttctggaaccagttcatgcatttcatctcatcagagcctgattggttacagtgactctgtggctgccaacagccttctatctgtgaagagggaaatgcaggatgcctcgcttcaagatcctaagagaataaagcgaactggtggtattgatgatgtacagcagcagcagataaggcctcaaccccttggtgggcaggagatgcaatggaagaaccatcaactgcatccacaattagatgttaaggggatgcagtatgcatcttcactgagtggtcagagatatccttcttcgatgatgaacaacatgcaagatccaggatcttccttatattttagtcatcagcaaaatttgagatacgatgctaagcaagagcagatggatggttctgataagtcaaaagacaccttgcagtctatggcacctgaaacttccatgctggatcagcagcaatcccaatctcaacatttaccacaacaatcagtggcaagaaataatgttccaaacatgggacagtggcaaaatactcggttcgcagctgagaaggacttcaaaaaagaagacataattcagagaagaaagttagcacctagctctcgtgcccctactgggcctgtgattcagtctccagtgtcctcgaaatctggagagttatcaggcagttcaatgggtggccagtttggttctgctgtgacatcagctgtaacaggggtacagaaagataaatttgctgcaaattccggtactgcagttggatttccttctgtagcttccagtcctagtgattccatgcaccgaatacaacagcctgctgttgcttcctcaaagaggaaaacaaattctgtccccaaaactcaaccgccttttctttggaagtctgtcatgggagactttttaaggaagttttgggttgcacggtaccagcttttcaataagaagaagtttgataaaatatctcaaaagaaaaccattatcaatcgaaaccaaaatgtagctggttgtctcaacagttgtttccattctgaggattatatagataccacaagacctctttgtaattctatgattagtggaactataaacacatgcaagggtagggtaataaactttgtgagcacaaaagacatgtaccaaggtcattcaaggccattcccggttgattttaacgaactgtctgatgaaactgtaagaatgcaatatggagatataaaagattttgatgatccaaattcatatggttgtgtattcatattaccgacaaagcactatgctgacttgtttgcggggcagcttatttcccttatgttgcaagatggacattctaaagctgacgatgaagttgtgcgtagcaccccttttgctaacatcagtacaccctttggacctttaccaaacaacgtagtgagtgatgtaaagcaagagggaggtgtaagccaacaacttaatgccgcagcccatgcaaatgtggcacctggaacacaaatgcaacagcttcctgtcaataggatgcttccatctgcaaatggcaaccagattctagcaatgcagcaaggttatatgcaaggggcagccatgcctccaaggagccagcatcttgaccaaaatttggttcagcagccgcagcaccaacagccacaacagcaaccactgcagcaaaatgctcaagcccaggtgcagcaaccatcatctcttccactgaaccagatgcaaagacctcaggttctgcctacgagcccattatctcagatgttggggcctggctcaaatctcccaatgggctcaagtcagataggtaagaataaggctcctcccacatctttgcagcttcaaatgctacaggcacaaccccaacaacctatgtctaggaaagtgatgatggggcttggctcagccatgaacatgggcaatatggttaacaatgttgttggtcttggtggcctcggaaatgttatgggaatgggcaacgtgcggccaatatcttcccccatggcatcgatgtcaggcttaggtaacaattccaatccaatgaacatgggaatggcatccaatcttgctgcagctggacttcggccaggcatgaaccctgctgctattgccaaggtgcgtatggggttggcacagcaaagggcagcaggcatgtaccctggaatggttggaatgcctggaagcagctcatcaatccttcctagttcagctggcttgtctatgatgggccagccgctaaacagaggcaaccttggccccctccagagggccatgatgtcgtctatgggccctccaaaaatgccaggaggtaactttcagctgaatgctcaacagcaaatacacctccagcatcagttgcagcagctccaacagaacccacagcagcagctccaacagctacagcaacagcaacaaatacaacaactgcagcagcagcagcagcagcagctccaacaacagcaactgcagcagcaacaacaaatgggatctccgttaggccctcctccaagcccgcagctgagctccggtcaacagcatagctaactccccgatggagcagctgcaaggcgccattaagggaggtcctggtagtagtaaccggagtccacttcttgcctatggaaggtgtaaacactgaccaagatcactctgttctcttgtttgctgtggtaaatgaggttaaattaggtgtgttataagttataggccatagaggacagctttaaggaccagctttatgcttggatttttatgctgtacattgtagttagtaggaatggtgtgttggagctcggtaatcagttctatgcaagcattattcaattggacagttttctactcttgtagcttcatgtttaaatttaaattaaattcatcaaaattgtggacttgttacgtaaccattgtggttaccgataagtatcttcatttgttcgccaacaattttgtaacgttgtcaaattcaattttggctgtgtatatgggtctgactggatatcggcattagcctatatccaggctgtgtgtttggttgcct

SEQ ID NO: 29176 - DNA, 158 bp, Zea Mays
caagagatgtctccaacaacaaagggttcatttatgtttttaaggtttgacgctcctgacttgcttccagaagattagtacaagctttgcggttttgatccctagctgtagttagtaatcctggctgtagttggtaaatttgtgtttggaaattaatc

SEQ ID NO: 29177 - DNA, 1677 bp, Zea Mays
tccagctcatgggtgaagttttgaaattatctagtaagtatgcattccagcgtcaccagcagtggctacagcacgcaaaaactcgcagtgctagacacaaaattatgagattcttaagggagcaagctgctctttctgctgctgaaattactgctgacgcagttaatagttttgttgctgatcttgaagatgaaagtgatagtgagctttcacttccaagcaccaagaaagaagatagtaaattcaactgggagaagatattaagttctgataaattattctttgtcaacaaaagtagtgatggctttttacctgttaataatgtctatccaaaggtcaatgggaagcaaaacaaaactgttaaggatttgggcatcaaaatcaatggtcattctacaattcgaggtgatagcttcagtgagttaatgcaccctagcaattccacctgcaaggaagttttccctggtttggatgactggaaatctggtaaaatttctggttggcataatacggaaggcaactctgtccaatggctttgcatagcctgtgttgatcgaaaagggatgatggcggaggttacatctgctcttacagcttgtggaattactgtatgttcctgtgtggcagaagtcagtaaaaggaggggaatgggtgctatgctgttccattttgagggaagctatgagaacgtggtcagtgcttgtttgagtgttgacatgatttttggtgttcttggttggtctgtggggtgtagctggtgtccattgggtgctcttgagtgctaatgggtatcaagagacgtatactgcagtagttcaccactaatactatcttcctccaagatgatgataatgttggaagcaccaagacatcggtggctcaaaattttgttggtcagatccttaaaatctgggaacatagagcttgtccatattcctcattttggaaacgttcgtccgttccggagacgtgggaacaatctcgtcccccatctcatccttgtagtgttaaaatcctttttaagcacgttcccgttcctcaacctcatcgatccagaaacttggttgctaaggtcagatcatgattggacaggtgagcgagtggaatcctttacttctctgtcaaatcagaaagtgagggtgagcaaagtagaactagatatatatggttcattctgaaagtgagtgtacatagcagagtgagtagggttgggctatggctaacaaatcgtacatatgatcatgtaaaacactgttttgcattgcgaattacactgtttacattgtgtagtttgaaataagagatagagatgaataagctgccgactatggagagtcagtgcatgctgggattgattggattatacagaaggccttgtaaaagattgttaagggcggttcttctcactttgtggttcgcatatactagtttgcttaaatgtgcagctagaattttgacctggacgctaattccaaattttgtctgtgtttagtttcctacctctgcatgtaaatgttattgtatagcttcagttttgcgagtcaaaatttgagcatacttaactggcagatgcacgcttctggattacttgccatttcctgcagtatgaatggtaacttaattagaggtttggttctgatgatggtgaccctttcatgaacatctccaaataagatg

SEQ ID NO: 29178 - DNA, 544 bp, Zea Mays
tcggcagtgaccgccgtagaccgttaacgagtgaacgccacattagcgaactctagtgactcttcccccttctcaccgtgagcgcttctccattcaaattcgccctcctcgcggccttcctctataaattgatgcctcgacctgttccgcctagttgttacgaaccctgtgaaccactcctcgctcccgatcgtccaccgtagcgccctaattcggattttcccccgaatcggttgtctgtgccgcggtgagacgtcctgccgtggccagccacctccagaaaatgaagaagaggatgtagtcgaggaagaagttgtcccgcaagctgagaatccaccggttgagaacaacttctattttgacatctgtgggacagacccagaacctccttcaacacaaggcaagcccgggtgatgaaacagccgagttttgctgtttctgctcgaaggtggtgccaaagcaggaggaaaatcagtaaacttgttggcgggaggatgttttgcctccaagttatgtaatattaagtgctgcactcgaacacccg

SEQ ID NO: 29179 - DNA, 2719 bp, Zea Mays
gggctgtgtgaggataatattggaagtgggaggtgggtatccttcctccactgtcctttttcatctctctctctctcttttctctctctaaaagactttgctaattggcctgctagccggtctccctcccccggcctctttccctttcagctggaggagatagatgagagagaggatcagaggaagcaggaaggagagagggatatataggccggtgtcttctgtagagagagagattgagagcaaaagggaaataaaggagctctcgcaggcactcggtactgacatgagtgatctcatgctcttgataccttggcaaaaccacctgcttacgatcttgcagtcatcatcacgctattagttgaggataatttcgcgcacaagagcacgacaagccgagatttttgggggcgtcggcgtcgacctgtaggcgatggcggcgtactaccacggtggcgccggcacggacatccaggccagcaccgacggcctgcagacgctgtacctcatgaacccgagctacgccgtcgggctacaacctgtggaccccggccatggctggcggcgccgcggacatgtcgccgcaggcgcaggcgcagactcccggcgccgcgggtgctgctggggtcagcgccgtgctcagcctgtcgtcccgcgaggcgccgccggtcaccgtggccgcggtggccgcctgcaccgacgagggcaagtacctgggcgtgtcggccacgccgcaggggcagatggtcatgagctccaagtacctcaaggccgcgcaggagctgctcgacgaggtggtcagcgtcagcaagggcgtcgaggacgctaagacggccgctgccgccgcgaccaagagcctggccgcggtgaagaagaaggaggactcggagggcgcgtcaggtggcggcaccgacgacggtgccggcgcaaagagcggcggtggtgccgcgccagagatgtccacggcggagcggcaggagatgcagatgaagaagagcaagcttctcaacatgcttgacgaggtggagcagcggtaccggcagtaccacgggcagatgcaggcggtgtcgtcgtcgttcgaggcggcggcgggggccgggtcggcgcggacgtacacggcgctggcgctgcgcaccgtggggtcccgcctccgctacatcgaccaccagctccggcagcagcgcgcgctgcagcagctcggcatgatgcagggcggcgcctggcggccccagcgcggcctccccgagcgctccgtctccatcctccgcgcctggctcttcgagcacttcctgcacccataccccaaggattcggacaagatcatgctcgccaagcaaaccgggctcaccaggagtcaggtgtccaattggttcatcaatgcgagggtgcggctgtggaagcctatggtggaggagatgtacctggaggagacaaaggaccaggacgctggaggcggcggcaacgacgagggcaagtccggtggcggcggcagcaagagcagcgacaccgtcgacggcgtcatgccgagggcggacgtgatgtccaagtccgcggtgcgcgtgggaggcggcggggcgggggcggagagcgcgtccaccaacaagggcatccatggctcctccctgctcgagctcggcggcggcgatcaccagcagtcccacgcggggttctacgacgacgatgaagacgacggcgacgacgtgatggggcggaggctcaagaaggcgcgcggcaacgagccggcgccggcgttccaccacgtgcacgacatagccacgctgcacgcgcaggccgcggcggccgcgaggcagcagcacgaggaggtcagccaccgggagctcctcatgaagttcatggagagcggcggcggtggcggcgtgagggaccaccaccaggacggcggcgggtactcgctgttcgcgccggggccgtacgggcagttcaccacggagcccttcgcgttcgctgggaacggcggggtgtcgctgacgctcggcctcccgcacggcgccggaggcagcgccgagcagaccgcgtcgttcctcatgggcagcaccacggccggcgacagcggcagccacggcgccgccaccagctacgacatgaacatgcagagcaccaagtcgttcgcggcgcagctcatgagggacttcgtggcctagctcccttaggacgcatagcatagcagtcgtccacgcaattaatcaaatcatctctccatcgatcaattaatttagagcttgtatagaaataaagggttcaagcctaaatatgctttgcgtatataaagcagttaagcttggactcataggtcttgctgggaatgtaaagatgggatatatatcatggggccatgtatatataggtataggaggataggtaactagttgatacccaaacattgtacaagattttatatgtagatcatagggattggggggtatacagtaaagtatgcgaaaagggtatattggaactggacttagtgtatgctgtagaaattggcctactagtattatctgcagcaattcagtatttgttttgcttactgtaaacatagcacattgtgattcattggcagcaccatgtgctgttagatgacattgtggataatgctgctccagtgagatgtttgttggtggcctcagctagaatccagtgatctagtacctctgaatgttgccagcagtatctgttcggagcaatgacaaatctgctc

SEQ ID NO: 29180 - DNA, 900 bp, Zea Mays
agaaataaccacgagacaccacttcctagcttcccttcccctcggctgccctcaaaaccccctcaaaatcctccgaaccccgccgccgacgagcgagctatggcgctggcgcggcggctgctccgccttactccctacctcggcacgctctcgctcccaccccccaactcgcatctcctccggaatcgcacctatatctctgacatgcgccgctctgccttcgtcgaccgcttgctccgttccgtacgctccgagatctccttcctcgataactccgccccgccaccgccaccaccgcctcctaagccattcaccattgaggaccgcccgggcgagcagtgggcccgcctgcgccgcgtgttccctgcggccgagggggaggaagaggaggtcagggtggacgccacgttggtcgacggcgcgctccctccctcccgctcgggcgcggacacgggcggcccgcccagaatgcatatcagtgttaaggttgaggtctccaaggccgcgcggcctggagtggcgctcaccttcgagtgctccgcgtggcctgacgagatggaggtgcggagggtctttcccgtccgccgcggcgggcctgccccagtgcagcagtacgtcggccgccaattcagtgagttggatgaggaaatgcaaagtgccgtacaagactacctggagaaaattggagtgaatgatgaccttgctgcatttttgcacgcctacatggaaaacaaggagcacactgaactgatcagatggctgaaaaacgttgagtgccatatcaagaagtgaacattctagtcgggagaagatgaggtgggtccactggttgccagacatgtgggtccactggttgccagacatgtgagtataggccttctgtgaggaaaacaagctaga

SEQ ID NO: 29181 - DNA, 2294 bp, Zea Mays
gatagggcatgtcgggtctggtgggaaaccctttcatcgtcctcctgcgtcgccagagcggagcaacgaggggcgcgcgcgatggcaggcggcggtctccagggagcgaagaagcgcaagcgcgagcacgcggaagggaaggcaaagcctcggaagcaagtcaagggaggcggggacggagcgaagcggaagagccactcggccgccggcggctacacggcccatggcggcgccggcgaagttgtcgcgaggaagaagaccccggttacccccaaggagaagcgcctcgcggccaaggaaatgtcggaggccaggaagatgaagaggaggcagcattacagccttgagaaggaactaacgaaattgtgggaaaagatgagatgtcacgatgtgagcaaagaggagaggtccaaggcagtaagtcaggctatccataaaatggatgggaaatatttggacattgccacatcacatgttactgcacgtgttcttcaaacatgtgtaaagtggtgctcggagtcagagagggatgctatctttgatgttctacagccacatttgcttaccctttcttgcaagaaatatgccgtttttcttgtaaagaagcttatagaactcgcctctaaaaaacagtttgccagtttcatatcttcccttcatggtcgtgttgccaaccttcttcatcatactattggagctgcagtcgttgattatgcatttcagcgaggaacacaacgtcagaaaaggcaattgttagttgaactgtactcccctgaacttcagctattcaaggatctgactgtgcaaagttcctcctgtttgatagatacaatttccaagcttgggttgcagatatcatctgtcctgcttcatatgactattgtgattgataaaatcttggagaaagatggagatgaacctacaaacgctccagaactaccaaagaaagcaaaagctaagaagaaaaggtcgaaagagccacttattgttcggatcatgcagacaagggaaggattaaaactaggaattagttgcgtcaagtatggcagtgcaaagactaagtgggcgcgagaatgtatttcaggacaggaagaagattattaaaagtttgaagggccacattatgaagcttgctctaagtgattttggatgtctttttcttatctgcattatttctattgttgatgacacaaagcttgttaataagattgtcattcaagagctggtaaaacatttaaagcagctcatttttgacaagaatgggagacggccattgctgcaactacttcaccctttttgctcacgctatctttctccgaatgatctagcttgtctgaactacaatgtgccttctcttagttcaacagaggttgagacatcagagagtgctataggagttataacagaaaataaattagatgatgtgactgctcaagatcccaatggcttagaaggcaagcaaattgtgtttgagagcaagaaggatccattacaaaggcgacatgaactgttgataaaaagtgagcttgccgaggctctcgttcagtcatgcattgaaaatgttggagaattacttcgaacaaattttggcaaagaagtattgtatgagatggctgttggtggtaaagacaacgttctggatggcctcaccgataggatccacatgttgcacgatgcaatagcgtctgatgcggcccaaccgaagactgaagatacggaacatgcatttgaaaacttcttttccagccgtgtaatcagaagaatggtaatcgattgcccagcgtttgcagtcactctctggagaaaggctcttcaggggaagtgcaagatatgggctgaaggacacagttcgaaggtggttgcgagtttcctggagtcgccaagtacggaggtcaaggatcttgcaaaacctgagttgcagccgctggttgatgctggcatccttaaagtgccagaccctaaggttgttcaaaaatgactcgtgcgcgggggcctttttgcgccagtaaatgactcgaggaccatcccttgtttaagggatacggataggttttttgaagctcgttctgccgataaaaattgttaaatcactcgttcgtgtgtacgccagtccgttgtacacataccctggatatatggtgaatcggatacgttattttgttttaaactcggaatgctcctttttatctataaatttttttaggagatttgtgttcttgtcctgctttggaaggccaaaaattattttactcttgtttttttttaaaaaaatccgaggttcttgtaagctcact

SEQ ID NO: 29182 - DNA, 1401 bp, Zea Mays
cgaatattcgaatctgatataattgcaagttatatatactctgagcctggctgccgaaacttccttttggtgtccctgttacattcggtttcgtttttgatgacttcatcaagaagcaagagcaggagccacagtcgcagcaggagcaggagccgcagtcctcagcgaagagataggttgcgcagcgaacgtgcaccccgccacagtcgcagtcgcagcaggagccgcagcccataccgtcgcagagaacggcgtggatacaaggatctcgtatgcaagaactgccggagacctgggcactttgctaaggagtgcccatctgcgcctacgtgcaataactgtaaccttccagggtaaaataaaccagcaacaatcttaatatagttgcactcattccatttttgttggaatcagatgcacttatgacttattgttgtacagagtattaatttaatcattgctgcatatttcattcttccgatgttttgtttgtagtggaccataaccccatcccctttattttctacagccacttcgcagcagaatgcacctcaaaaactgtttgctggaactgcaaagagcctgggcacattgcgagtgagtgcaagaacgaggccctgtgccacacctgcaacaaaacaggtcacttggcgcgtgattgccctacttcaggggctaacgtcaagctatgcaacaaatgttttaaatcaggccacatcgccgttgactgcaccaacgaacgggcatgcaacaactgccgtcagccagggcacatagctcgagagtgcaagaacgatcctgtttgcaacctgtgcaatgtctctggccatgtcgcgcgcgtctgtccaaagacgactctggcttcagagatacacatacagggtggcccgttccgtgatatcctgtgccgcatctgtggtcagccagggcacatcagccgcaactgcatggccaccgtcatctgtgacacatgtggcgggagggggcacatgtcttacgagtgcccgtcggcaaggatttttgatcgcgggttccgcaggttctgagagcctttcaccgctttgtttctgatggtttgagtttcgccaggatgtttaatttgtttgtgacaatattggaacaattttccctatggttgttgaggaatgattctgtgaggatgtgttgcgggtgaaactcttttttttttacttttaggttttgtttgattactctagtatttatctcattacacatggattgaggtgtattggggtagcttacatgtgtattgaagtaaatactagagcatccaaacaaggtcttaatcaggatatatggccctttgtggactctaacagtgctgtcacggctcatgtgaaaattgccaggtcatgtttaactcttgtgctcatgctctgc

SEQ ID NO: 29183 - DNA, 1332 bp, Zea Mays
cccacgactcctctccccttctcctcaccatcttctagcaagacagttgtgctaaatgaaaaaacccctataccccgccagccgccatcccctccgaccaaaccctagccggccatggcgtggcgtggccccgcctcccgggccgtccttgccgccgtccgccgcccagccgcagcgcccgcggccgcacgcctccacgccccgcgacctttcgcggccccgcgccgccgcgtcccgtccgccttcgccacctcctcgctcccgtccgcgcggcctctggcggcgatgatggggtccccggtgacggtggccgcggtgatggcgcgtctcacggcgcaccccggtgccagcgcgcgggcgtgctgcgagctctcccaggggagtgggaaagatggttgatgctggaggctgcacaacttgatggggaccttccgtcctagcataatagtgcagctttcactgttagcagtaccacactaatgctcggatgcattgctggtgttttgattcatcaccaacctttttgtgccgtcatttctgaagcgtggaaagcgtataacgattcacatttatctataatcagttgtttaatgctatattcactttaaccaagttggttacagtgtacagctgttcaaataccctgcctagagaaacatttttacacaatattgaaactttagttgattgtgggtacggttgggatttgttaggaaacggaaaggatgggtgatgcaagaaaggccgttgtagagcctgccaaagaagctggtttgaagcatgtactcctttggtacttgaagctgctgtgtagatcccatccttttcgaaaggataaaaggtgtctttttttttgggggggggggggggggaaatgctattgtggcacttcttccactgcaaagttggaagaatttacccacccagcgatagccagttccctcgttaggatgttagaatatactggaataattttaatgttattcatggcacggtttgagcacatggatttaccttctcttccccttagagattcattgatgtcatgtttcagttggcatgagttaaatgattgtgttaccgtgctttgggcgttagcatagttttcattgtcgtttttgaaatcattggcgacgacacaaatatcccctaaatgacaggccacgtacatccatgtgggcaattttcaggcatgtaataataacagtactcaatctcaaggtcatttatttttttttataaaaaaacagcagaattctgtgtccctgcttcgccccttccctatcctcactctcccctacactctccacacaacatcatccatgacatgtt

SEQ ID NO: 29184 - DNA, 1056 bp, Zea Mays
gtcatggtgctggaggtgggcaccgccgtgggaatacgaaccacctccacttgggctgcaggtccagccgcccggcgcagatcacggggccaggtcgtctccttcgccctcgctcccgcgtcgtcccgccgggtccggcaccgttgccgcgcgatgcaacagcacgaggaggagcaggagcggccgccgaccgtccgcgcggtcaccatccccttcgccgacctcagggtgccggacagggaccttggcgacaagatcgaggaaggtctgggtccccatgggctcggcatcgtcaccattgccgatgtacctgagtttccagagctaagaaaaaggctgctgcgcttggcacccaggattgcaaaccttcctgaagaggtgaagaaacagcttgaagatccagatagcagatataactttgggtggagtcatgggaaggagaaactcgagtccgggaaacttgacacatttaaaggttccttttatgcgaaccctgttttggatgtccctactactgatgatgtgcttgtatccatcatattgccgaccaaatatatggccaaacgataatcttcctgagcttgagatagcatttaaagatcttgggaagctgatgatggaagttggtttgatgttggctcatcattgtgatcgctatgtaatgaggcaaggagtagggtcatatgatggtgacagtcttgagcagacaattgctcgttcaaggtgtcacaagggtcgtctgttgtactatttcccacgacagtttagcaagcagacagacttcgactcggtttcatcatggtgtggatggcacactgatcatggatctctaacagggcttacatgtggcttgtttacgaagaattctatggaggtaccatgtccagacagtgcagctggactatacattcggactcgtgataaccaagttgttaaggttgtgttcgacgaggatcagctagcttaccaaatcggggaaactactgaaatactgtcaagaggttatctatgtgcaaccccacactgtgtgcagtttttttaatgctattgtttcta

SEQ ID NO: 29185 - DNA, 750 bp, Zea Mays
gctacagaagccatctgcacgctgcaacaacagcctctacgctacggttccttctatcctgaaggggcacgctactcccattccgccgcgcccgtagtcgccggtcctcttgctgcttcgtgctcccgcgcaatcagtgaatacctccacgcgcaacgccgcccgtcgactcctccatggaagctgatccgtcgccgccgtcggcgtgcgcgctgactgagtagctcgtggagaaggtcgtgctgcgcaccccatctgctgacccggcgatcctcgtccatgctgcactcgtctgcgcacgctggcgcatcgtgaagggcccgcggttgcgccgatgctgccgcaaccttcaccgcgagtgcgagggtcgcagcccccgatgcttggcttcctccccagcgccggcgcggggattcgcttcgtgctcacgtccaccttcggccccgcacgctggtggatggcgcgtgctggtcaccctccacggctgcgccctcctgtgcagtaacaccggcctccacgcgtccgtcgacttgcagctgattgatgcagttaaagagctggacgaatagatgagatggataagaagcaggttgaacttcctctgaagcaactggaaaccatcttgacataataaaaccaagctctaatatcattgtaagaatctatggtaggttttgttagttttactgataatgtttttcctctcatttattgctaatgaatggtcaatgaaaaaccaaaattttccat

SEQ ID NO: 29186 - DNA, 366 bp, Zea Mays
caggtttagcaaacgctaatcgctcgaccacaaaaccctaatcgacactttgagaggaaccgatcccctaggcgctcggagcgactaaccctaatcggtacacctgtaaacagggacagcaagtgactcgggatccaacgatccacggccaagaaacaatcaacaagaaacaaaaactgcaaggattaagtgcacagagcactatcaatataatccatggactggtttttcagtcaaaggtacagaaattaatcacagaaaataacagaaatagcgcaagggctcagatctacgttttatcaactcataactcgatcccgaataaaactttgataccattgttagaatctttggtgcttaggatca

SEQ ID NO: 29187 - DNA, 3841 bp, Zea Mays
gcgctgcgccggtgctgttgcttggagtgaacgagctcgagcgggtgctcgtggattttgtggggtctgtcggttgatttgtccggttctagctgcctgtaaactgatccagtgtgcagtgctcgtattcgggtggactgattacttcgttaaagcctcagcatagtgatgtagccttcctccctctgctggctatatgctttgcccatcatggtgaggaagaagagaactggccctggtggctctggagaaacttctggagagtcttcaggagcctctggacaaggttcctcacagcagcctgagcgaactcaacaacctgggggaggacgtggctgggtgcctcaacagggtggccatggtggtgggcaacaccagggtcgtgatcgacattatcagggacgtggaggaccagggccacatcaccttggtagtggggcacctgagtatcacccgcgtgaataccagggacgtggtggtgaatatcagggacatggtggtgagtaccagggacggggtggtgactaccagggacgtggtggtggccgctccagaggtggaatgccacagccatactatggtgggcataggggaggtaatgttggacgcaatgttcctccaggtccgtccaggacagttcccgagctgcaccaagccccatatgtccagtatccagccccggtggtttcgccctccccatcgggacctggctcatcctcacagcctatggcagaggtgagctctggacaagtccagcaacagtttcagcaacttgccgatcgtggtcagagttccacgagccaagaaattcaagtggcaccagcatcaagcaaatcggttcgattcccgttacggcccggcaagggcacttatggggacaggtgcattgtgaaggcaaatcatttttttgctgagcttcctgacaaagaccttcaccaatatgatgtatctataacacctgaggttacttcacgtggcgtcaatcgtgctgtcatgggtgagcttgtaacaatatatagacaatcccatttgggtgggcgtctacctgcatacgatggaagaaagagcctgtatactgctggaccattgccatttacttctatggcatttgaaattaccttgcaagatgaggaagatagtcttggcggtcgccaaggtggacataggcgtgagagagtatttagggtggtgatcaaatttgcagcccgtgctgatctccaccatctggctatgtttctagctggaaggcaagcagatgcccctcaggaagctcttcaagtgcttgacattgtactacgtgaattgcctaccgcgaggtattctcctgtcggtaggtcattttactctcccaacttagggagacgtcaaaaacttggtgagggattggaaagttggcgtggtttttaccaaagcataaggccgacacagatgggcctttcactgaatattgatatgtcctctactgcatttatcgagcctctccctgtgatcgattttgttgctcagcttcttaacagagatatctcagttaggccattgtctgattctgatcgcgtgaagattaaaaaagccctaagaggtgtgaaggttgaggtgactcacaggggaaacatgcgcagaaaatatcgcatttctggcctcacctcacaagcaacaagagagctatcgtatgtgtctttcattgctggtatgagattccctgttgatgatcgtggtactgtgaagactgtggtgcaatacttcatggagacttatggttttagtatccagcacaccactttaccatgcttgcaagtgggtaatcaacaaagaccaaattatctgcctatggaggtttgcaagatagttgaaggacagcgttactcaaagcgactcaatgagaaacaaatcactgctctactgaaagtgacctgccagcgccctcaagagcgcgagctggacatcttacagactgtgcatcacaatgcatactatgaagacccctatgcactggaatttggtataagaattgatgaacgtcttgctgcagttgaagctcgtgttctgccaccaccaagacttaaataccatgatagtggccgagagaaggatgttttgcccagagttggccaatggaacatgatgaataagaaaatggttaatggtggcagagtgagcaactgggcatgtattaacttctctcggaatgtgcaagatagtgccgctaggggtttctctcatgagttggcagtcatgtgccaaatatcaggaatggattttgctcttgagcctgtgctgcctccagtgactgcaaggccagaacatgttgagagagcgttaaaggcacgttatcaagatgcaatgaacatactgaggccacagggaagggaacttgatctgctgatcgtaatactgcctgacaacaatggttctctttatggggatctcaaaaggatctgtgagactgaactcggattggtctcccagtgttgtctgactaaacatgtttttaagatgagcaagcagtaccttgcaaatgttgcactcaaaataaatgttaaggttgggggaaggaatactgtacttttagatgctttgtcaaggagaatcccccttgtcagtgacagaccgaccataatatttggtgctgatgttacccatccacatcctggagaagattccagtccttccattgcagccgttgttgcttcgcaagactggcccgaggtcacgaaatacgctggactagtgagtgcgcaagcccatcgccaggagctgatacaggatcttttcaaagtatggcaggacccgcagagaaggacggtaactggcggcatgataaaggaacttctcatttctttcaagagggcaactggacagaagccccagaggatcatattctacagtttttgagtttcagggatggtgtcagtgagggacagttctatcaagtattgctgtacgaacttgatgccattagaaaggcctgtgcgtccctggagcccaactaccagcctccagttacttttgtcgtggtacagaagcgccatcacactaggctgtttgcgaacaaccacagtgatcagcgcacagtcgatagaagcggaaacatactgcctggcaccgtggtcgattcgaagatttgccatcctactgagtttgacttctacctgtgtagccatgctggcattcagggaacgagccgccctgctcactaccatgtcctgtgggacgagaacaagttcacagctgacgagctgcagaccctgacgaacaacctgtgctacacgtacgctaggtgcacccgctccgtgtccatcgtgcccccggcgtactacgctcatctggcagccttccgagctcgcttctacatggagccagacacctctgacagcgggtcactggccagcggtgcccgtggccccccacccggtgcggcacgcagcagcacgagaggggccgggagtgtcgaggtcaggcccctacctgctctcaaggagaacgtgaagcgtgtcatgttttactgctgagacgctggtgggctgccttcgccaaggaaaatgccctggagcattcccatgtacccgcactgtttcggtgatacagtactatctaacgccgattttgcgcgttaagacttccagtgatctgggaaatttcttgtacgactgttgtagtgttgtgtattcgtaatgtgatgacgcggcagttcttctaggagcttagtgccgtgtaaaatatctgttgtaagttgtaacctgtcaccctctagtgttatgtcatgatgaaccaaattatttgttgtcattccatgtacttcgccaagtatttgttgtcacgatgttctaggatgatttttttt

SEQ ID NO: 29188 - DNA, 2140 bp, Zea Mays
actgtcttgcctgttgcctctgcggctttgcctgcgctcacggacggtcactggctcacgctcccctcgcctgcgtcgcctcgcctagacaagagacaagacgcctagtcgcctccgatcgaaatcgaatcgagtcgggtgggctcgggcccggtcttgttgtcttgtctcccagctaggaatagcgcaacgagatccctcgcgcgcgcggaccccggagaggccgagggagggtgacagggcgtgtcctcgaccgcgaggggaatgggatcggagggacgggcctggaacggcgcgggcatggccgccggcagcggctatggcggcggggtagaggcgaaagcgaccaccacggctgtgtcggccgcggcccccgcggaggttcccacgtcggcggcctccgtcgacatctcgctgccgctcctgaagatgtcgcctcgcatcatagctctctgcaaggaattggtcgaagggtggtcgtcgattgacagctcgctcttctccatcgagaccgtgtccgggggcatcacgaatctattgctgaaggtttctgtcaaagaagacaacggcaatgagtcttctgttactgttcggttgtatggaccaaatacggacttggtgattgataggaaaagggaattgcagctgcagggttcggggctcggctacttggaatatttgagaatggagtagttcagtcattcatctatgctcgaacactgtcaccagcaggtaggcatagatcctgtctgaataacatatgggtgtggggtcctaatcaacctagtgcaatagtttctttgttctcctttgtagtttcagttgcaatttcaaatgcaagttgaaaggatttatgttttttcctttccctgtagtcagcattatccacgatttggtatgccaatttgaagccttggatgtttggaggttttatgaaatgcttctgtaaacaaatctactgatcctcgttattttgttttgtagacatgaaagaacctaaaatagcagctgaaattgccaaggagctacgcaaattccatcaagtagacataccagggtctaaagaaccacaattgtggaatgatatattcaagtttttgaagaaagctgcagcattgaagtttgaggataacatgaagcagaagagatatgaaaagatctcatttagagaaatacaagatgaagttcaagaacttaaggatctcttggacattctgcgcgcgcctgtggtttatgcacacaatgacttgctttcaggaaatctgatgctcaatgatttggaagggaagctatattttattgattttgagtatgggtcatacagctaccgtggctatgacattgcaaatcatttcaatgagtatgcaggatttgattgtgactataatttgtacccagataaagatgcccagtatcacttcttcaggaattatctacacactgatagacctagtgaggtggatgcacaagatatggaagtactttatgtggaaacaaacactttcagactagcatcgcacatttactgggcattatgggcccttattcaggcaaaggtatccccaattgactttgactatcttggatacttcttcttgcggtatggtgagtacaagaaacaaagggagtcctgcttctccttggcacaaagctttctctccgagctaaaaaatggctagagcctgagaatctgttcacgagtttatactggtgtacgcatgctcggagcgggtacgcgttgtgatcatcgactgctacccagaaactctattatagcggttgtagcagcccctcattgttgtatctgatgttaggttcatcattgtctaaggactagtttggatactctagtatcgagctcaattcatgtgtatgagatggattcgggtgtaacttaaactaatttacacactaatccaactcaacacatgtggattggggtcaatactaaattacccaaacaaagcctaacagggaagtcaccagtggcaaattatgtacttatatttataataataaacacaatcctgatgggttgtgccctgttgaatttgttcttcgattaattctgccctgtgcaatctgttctgcacttccgagtatatagtttttaatgactgggtagtcctttgaaggtccg

SEQ ID NO: 29189 - DNA, 3312 bp, Zea Mays
agcttacacagacagggaaggaagcaaccgaagcagccaggaagcagccgttggcaaggcgcagtccctctcacctcacattccccgtctgggcatctccctcgcatctcctccacaggccacagcgccaccgcggcggcgtgccttttacaaatccgaggggcgtaaggaattccgccgcgtcctcccagaagaaaaacaaaagcgacaagcggctcgccctgcgggaggacccgacgacagctcactcgcgtgcgccacccatccacctccccgagacccgacccagatctcatctcgcgcgcggcggtccatggccaccgccgccaccgcttcccacccggcttccgcctccacctccggccgcgacgctctcgccgccgcctcctcctcccccgccgccgtctgcctcgtcccgttcaggtggtgggcgcgggtgcgggaggaggaggcggcgggcggggtgcagtacgcggccaccgccgccgcgtcgccctcctactacggcctcaggctgcttcacagcttgctgcacccggatctcgtcctgcgcctcgagcgcggggagtgccgcgccggtggcgggaacggaggcgggcgcagctacgcgctcgtcccggccgacgagctctccagggcgctcgccaggcaaaactctggtttgggtttacaaaataagcactcctttgctggagatagtgctggtgcttatcctttggtgcttaggatctctgtccgagaaacaagtatcttgacactgaagatcagcaaaaaggacaatccatttgagaattacaaacgggctaacaagatttttaatgtggattctcaaccagttcatgtttgggatttttcagggcagacaaacctaatattaatgaatgaatggaatagactacatgactgctgccatgcagatcaagagaatcttctggaagtgcaagtctatgcaatgtctgactccttaacatccaaaattggtggtaccaacaaagaaaattatggagatattagtgatatgaattctgattcgtcttacagaagttttggaagagctggttctatggggttaataggattggagaatctcggaaatacttgctttatgaacagttcaattcaatgtttggctcacacaccaaaacttgttgaatacttccttggtgattatgccaaaaatataaaccggactaatccattgggattgaacggtgaacttgccttggcgtttggagaactgttgaggagcttatggaccactgacggaaaaccagttccacctcattatttcaaggaaaaaattgcatgttttgctcctcagtttggtggctttaatcagcatgattcacaggaacttcttgcttttttactggatggtctccatgaagatcttaaccaggttaaatgtaaaccgtatgaagaagcaaaggatgcaagtggccgtcctgacgaagaagtagcagatgagtactggagcaaccatttagctcgaaatgactctgttatagttgatacatgccatggacagtacaaatctacattaacttgtcctacttgcacactgatggtagcagagaaccatgctcgtatgacgtcagtgtgccaaaatttgggactctgagtgatcttgttcaggctttaagcattgtttgcctacttggagatgatgagatcctgctggttacagaggtctataataactgcatcatccgatacttggaggagccttcagattcagtttcattgctgagggatggagataaactagcagcataccgtctacccaaaagacatgagaaatccccccttgtggtttttacacaccaacattttgtccagcattctagtgatggtaatttaactccacaaatgagggagtttgaggccccacttttggcagcacttccagaggaaattagtggattatctcttcaggatatctacctaaagttgttgagtccatttcaactttccaacggggctagttcgcttaatgattgtatggagtctaatagtgactccgtcgatacgccttctgattcaggcagtatcaattttcagaacagccaattggaagatggccctgaaagcaaccactgtagtgctagtgaatgtgaagtaacaaaaggacctgatgatttatacgatggggtttctggttctaacaaggaagcacatatggacttcgaattttatttaaaaagtgaaaggggcgagggccagcaacagaagatagaaattaatgagctccatttattattggagacagcaccaagccggttgcatgtgaatgtccactggctacagaatgcttcaagaaaatatgccacctcaatgctgaacaatctacctgagatccacaagctcgagcttatcccgaaaggaactgaagattctgttgcactacatggttgtctggaagcctttctaaaagaggaaccgttggggccggaggacatgtggtattgcccgcgctgcaagaagcatcagcaagcgatgaagaaactggatctgtggaggctgcccgaggttctggtgatccacctcaaacggttctcctacacccagttcacaaggaacaagctggagacgttcgtcgacttccccaccgtcgatttggacctgtcgtcctacgtcgcggacaagagcgagcagccgagcagccattatcgcctgtacgctgttagcaaccactacggaaacatgggagggggccattacaccgccagcatctatcatgaggaagggaaggggtggtacaagttcgatgacgactgcgtgacccctatgagcgaggacagcataaagaccccggctgcctatgttctgttctacagacgagagtgactgactggggattgaagcgcatttttctgcaggtgggttttggcgtgtctgagttttctaacgtttcggcatttgaatctctcaagccatactgacgcctaccggtgatacaacaacattatgtacagattcatctgccaacaggagagagagagagagagagagagagagagagagagagagagagagagagagagagagagagagagacctagctcagtgcaatattctttttttcgcatcagctcacagtattcttatatgggtagtacatggaccccacccacccgcacacaccaacattgtaattcctccgacttcaaccggtgatcacatcacattcaccattaaagaaagggtcaatagacacatcttttgtcgtcgcgcatcgaatcggagccagggcgatgtagtggcagtcgtgaccagcccccgttctgatcggttgggcgtgcgacaacgacg

SEQ ID NO: 29190 - DNA, 292 bp, Zea Mays
cttgaccaacgatattgtagatttattgtatcttgctggctgacaaagatggagtagcattataacaatgcaattctctactctctactatattaaagcatcagtttcaacgatcgtcatgcgtcatatttttacaaataacctctcacatctatttcaaattaacccgctacatgcccaccgcgcagacaacctccacgtcccaaaccacaccttcgcatgtagatggccaaacgggcggcccagcacggtcctgctagacccaacgcccacagctccggcccagtcacga

SEQ ID NO: 29191 - DNA, 4878 bp, Zea Mays
ctttttagtatggtgggttgatgaacacaaaggtgcacttagctgagaaagagaagcaaaagctgcaagtatggtctcgaatcatgccttataaagagtcatttgcatgggccatgattcctctgtttgaaagtaaccgtgcgggtggtcttagtgatgctgcttctcctagcagtcctctagcaccgagtttatcaggatcaagttctcaagatagtattgtggaccctatttcgaagcttgctttagatggaaaagtcaaccattactcaagtggaagctcagttattgtagagatatcaaacctaaacaaagtgaaggaaagctatatagaggactccctccaagacccaaaacggaaagtacataaaccagtgaaaggtgttttgagattagaagtggaaaaacttcatgatgaccataatgatgtggataacgcttctgaaggtggaagcatggccaatgatttgaatgatgctggtgacatcaataatggcagaagcaacagaagtagctttgatgggattcacagttctgtgaattctattgccattgccaaaaaagatgctcatcacaatggacacacttctaatgctgagaatgttgacaattttcaagcttttgactttcgggtgctgacccgaagtgagccattttcgcaactttttcattgcctctatgtgtacccattgactgttagcttgagccgcaaaagaaacctctttgttagagtggaactgagaaaggacgattctgacatcaggaagcctccattagaggctgttcatcctagggagcggaatacgatgctacagaagtggggccatacacagattgctgttggaacaagaatggcttcctaccatgatgaagttaaaatcagcctacctgctcttttgacaccccaacatcatcttgtgttcacatttttccatgtagatcttcaaatgaaacttgaagcaccgaaaccagtgatcattggatattctgtacttccactgtcgacacatattcagttactttcagatgtgtccttgccgattttgagagagctcgttccacattacctgcaggaaagtggaaaggagagaatggactatctggaagatgggaaaactgttttcaggttacgtttaaggctctgctcttcattgttcccaattaatgaaaggataagggacttttttgttgagtatgatcgccatactctacatacaagtcccccatggggttctgagcttcttgaggttgctgcatttcgagccatggttaacattttaacccgtgtgcagcaggagtcatcagatggggctgaaagaaatagattccttattaactatgttgattttgctttcgatgacttcggtgatcggcaagcccctgtgtatcctggtctgactactgtttggggaagtcttgctcggagtaaggcgaaaggtgaagatgtcccaccactgcaattgaaagaaggtgtcttcaggtgcatcatgcagctctttgattgccttctaactgaggttcatgagcgttgtaaaaagggtttaagcttggcaaaacgcttgaacagcacacttgctttcttttgctatgatcttttatcaattattgagcctcgccaagtttttgagctggtttcgttgtacatggacaagtttgcaggagtttgtcaatcagtccttcatgactgcaaattgacattcctgcagataatatgcgaccatgatctattcgttgagatgcctgggcgggatccttctgatagaaactatctctcgtcagttctcatccaagagatctttctgaccttagaccatgatgatttatctcaacgagcgaaggctgctcggattttggttgtccttatatgcaaacatgaatttgatgcacgctatcaaaaaagcgaagacaaattgtacattgctcagctgtattttcctcttatagggcagatccttgatgagatgcctgttttctataatctgaatgccattgaaaagcgtgaagtgctagttgtcattttgcaaattgtgaggaacttggatgatgcaactcttatcaaagcatggcaacaaagcattgctagaaccagattgttcttcaagcttcttgaagaatgtataatccatttcgagcacaacaaaacaggagacaacatgctacttggtgctagttctcggagcccagatgtcgagcatcctgcatccccaaagtactctgaacgattgtccccatcggtcaacacatatttgtcggaggcttcgaggcatgaaataaggcctcagggaacaccagaaaatggatacatgtggaacagggttagccctcaattaagttcccctaatcagccctattcattgagagaagcacttgctcaagcacaatcttcaagaatcgggtcaaccgccagggcattgagagagtctctacatccagtgctgagacaaaaaatggaactttgggaagaaaatctcagtactgccgtgagcctcgaagtgttgggaataactgagaagttttcagttgctgcaggcgctcgaagcatcactactgattacgcgaagctagattgtgtaacatcaatcttaatgggtcttttatctaggaaccaatccttggctttttggaaggctttccttcctgtggtctacaatatatttaatgttcatggtgcaacactaatggcaagggagaatgaccgcttcttgaagcaaattgcttttcatcttttgcggcttgctgttttccgaaacgattcgattagaaaaagagctgttgttgggctgcagattcttgttaggaactcattcaactatttcaaaaacactacaaggttaagggtcatgttgacaattactttgtccgagttgatgtccgacgtgcaagtaactcaaatgaaattcgatggttctcttgaagaaagtggtgaagctcggcgccttaggaaatcactggaggaaatggctgatgtgagaagcaaggatctgttaaaagattgtggcctccctgttactgcattggaggcggcccctgaaggctcctctgataataggtggtcttgggtagaggtgaaacatttgtctaaatgtctagtccaggcccttgatgctggtctggaacacgccctcctgggttctgtagtgactgtagacaggtatgcagctgccgagggtttctataaactagctatggcctatgcacccgttccagatcttcacattatgtggttgcttcatctgtgtgatgcacaccaggagatgcaatcatgggctgaagcagcacaatgtgcagttgctgtagctggcgtgatcatgcaggcacttgttggaaggaatgatgctgtgtggagcaaggagcatgttgcttcgctgcgcaagatttgccctattgtcaacactgatgtgagtgcagaagcatctgcagctgaagtcgagggatatggtgcatccaaattaacagtggactcagcggtcaaatatcttcaactagccaataaacttttcacacaagctgaactctaccatttttgtgcaagcattcaggaactcataattcctgtgtataaaagcagaagggcttatggacagctggccaaatgccacacatcgctcacaaacatctatgagtcaattcttgaacaggaggctagccctataccattcattgatgccacatactaccgagttggtttctatggtgagcgttttggcaagctcaataaaaaggagtatgtatttagagaaccacgggatgtacgtcttggtgatattatggagaagcttagtcatatatatgaggctaaaatagatggaagtcacactttacacataattccagactctagacaagtcaacgctgatgagttgcagcctggcttctgctatttacagatcactgctgttgatcctgtgatggaggatgaggacttgggtagcaggagggaaagaatattttctttatctactggtactgttcgtgcacgtgtttttgaccgttttcttttcgatacaccattcacaaaaaatggaaaaacacaaggtggtctagaagaccagtggaagaggcgcacagtgctccaaacagagggttcctttcccgctttggtgaaccgtctgccagttatcaaatctgaatctctggagttctctcctgtcgagaatgcgattggaatgatcgaaacaaggacagctgcattgagaaatgagctagaagaaccacggagttctgaaggtgatcaactcccaaggcttcagagcttgcaaaggatactccaaggaagtgtggctgtgcaggtcaacagtggggtattaagtgtgtgcactgcattcttatctggtgagccagcgactaggctcagatcccaagaactgcagcagctcatcgctgcattgcttgaattcatggctgtctgcaagcgtgcaatccgtgtgcatttcagattgataggggaagaagaccaggaattccacacccaacttgtcaatgggttccagtcactcaccgctgagctatctcactatatccctgctatactctccgagctatgatagaactgtagcaagccagaaattaggtagcatgtgaatggttgttcattcattcagttgcaggttcccaccaaatgtccatatttccattagctttggttgtatagttctaggaaccggaaattaactagtcttcgaagttctgtaccgtattgcagaaccgattcctgattttggagtgtaaagtctgtataatacctagtgttatctgttatgcaccagttatatgctgagttccttcttttttgcagtttgctactatgtcacaactagcggacattttgcacttgtattgtgatacatagtgcatatatatatatatatatatatatat

SEQ ID NO: 29192 - DNA, 1772 bp, Zea Mays
ggctgtctccgtccggttgtagcgaagtccgacggcgggatccgattgtggcgaagtcacgcccgtgcagtgcgcccacagcaaaaagctccgcggcggtcgcgtgacgtcgcggcaaacggcaaacagcgaattcacagcagcaaacagtgtgaatcctgcaatctccaaacccaagcccggcggcgagatccgcgcggcaggcggacggggccgctcgaccgccttcgtgccttccaattcatgacggtgcggccggggtgggtggtgagggtggcgcatggctcggcggcggcgtggcagcgcgtggcgtgcaacccggagacgctcccgcctgaccgcgtcctcgcgctcatctgctgcgcgccactccacctcctcgcgcgcctcgccgccttcctctgcgtccccttcctccccgggcccgcacacaccccgctccgcctccaccgccgccgcttcctcgtcctccgccccccggagtttgcgccgcaccctttcgcttactccccctcgtcttcctcttcttcgtcggatgaggaagaggacgacgacgatggggacggcatccacgaacacgtcgattgaggtttgtaggccaaaaaggaaaaatggagataactttctcagaacatatctattcatgtgtttttgctacaaggttttgggtcatacctttgtgggagcacaatgtgatcctgatatcctctgcgtctctaattggtcatagcatgctaacttatgggaggtataagaattaaggccatggaattgtgtgtcttgtgcaaactcatgcatatgagtgcattatatgtttttcgttatgattctctttgctgcagtgtcttgcttctctgaatttctagcttggttaaaagaatcacctcgttgtgtccatttctggcttggttaaaaaaatcttctcgttgtgttccgtcctctcacgagttatgtcctgcgcaccactctctggctgggccattgcagagtggatggtgacggcccgcaagtgatgggggaccagggttcggagattttttagctgggaccatgttttggtctcttcttagccattagtgggttgtgtgcgtcttgagtgccgacccaagcattatatcgggagggtggtctttctctccccgaccgagttttttttagtatggacagtaatttcgggcaccacacagtcagccccttttgcctaaactgatgcaaaaggggggaaacataaatggagttgacgaccaggtaatattttttgtaaggtcaagattttgacatctaacaacggtttgctcatagtgagaggtggggtgaagtctctaagagcattgtgcattcttcttgaaattatggccctacagtaatgaatcatctgaaagctgcaatgtggaagatgatgataagattttaagaacactagttctgcacatctaatcttgctgatttcgcacatctaatgttgccactccatctgccattgataagaggtactttgtagggttggccatctggaactttgggcacaatatattagtatcctgaatgagttttgcagcctcgcgttccaatgtctttatctcagagaggaaacatgttttgcctttgtcaagtactatttggtcaaatttactgcgcgcttgagctgcatttgtttgtggctgtatcttgttcacacttcaaatttttctgttacctcaatgagctattatcctcattagtggaactaagttactgaaacaggtcttcttaaagttatcaaatatactaaa

SEQ ID NO: 29193 - DNA, 2167 bp, Zea Mays
tagagaattttatttctttcttttaagtaacgaaaaagaaaagagattcacgcggaacataattaattaaggatacgtggtacccagctttggattaaaaaaagataccgtcaactcttgcttcatgcgtggtttcttgtttttgagcttgcagattcataggaaagatcatgctcttcctcgcgaaaaaaaaaccatgcagaatatatactcattcatcatacttaattatgatggtaagaacgatttttttcagttttgatgagtaacagcagtaccacactccgaaagcacaattttgaatacaagcagttccctgttgcgttcactaacaatttgttcttcagtcagtcccaggctgacttccatgtttgcttcaatatctccaccgattattttatccgtaatcacaaacaattggctctttatttttatacagaacattgcatgcactgatacacacaaggtcccagtgtatgcaattccctatgaacgtttgcctcattggagcatagaaaggcaaggcatgaggtccacaacttcagcgagtgcctgtcagttactccgatttgttctcagagttaatctgctgggctagcaacagcagcccaaaagccgcgaataaggataggccggtagatgtgtagccaagaacaagcagtgcggtcttgagcgacttggccaactgcagtgcattgtcatttgtgtattgcgttgtattgtcaggaatactttgcacgcctcgtgctagttgccatgagattaatctggatcaagtaacaagtgtcagatcagatgtatttactttctaatatcacagatgcgctaaaccaaacagtatgacagtccaatgataacacaaaattatgtggaggtgaattctttacagaaagaaatgggttgaccagcgtttgaactttgaacctcgtttcgatgccagggggcaattctaccctctaaccgtgacaagaaaacagaagggaaaatgtagcccaattctaccctctaccaatcaagggcacagctaggttatccatttgataaatggtgttaactagttgcagataactttggagaatcttttgacgacaaatcacaaatcatgttggcataaactatgtagccacatgaagtgaagcatcaacttcataccacgcatctattgtatttccatatgtattcacatgcatacttgagaattaaccgatatcaatctagtgaaaccaaattatactttcagaatatgaaattttgtgttagtttgaatgttacccaaaaattgccgctactgcagaaccgatagtggcactttgagcagtcactccgaactcaaaagcaattacctttagtctccttttttctttcatagcctgaacatcagattgaaccactgggtgtttcgatagcagcttaccattcttgatcattgtttcagcaatctacaaaatcatgttacatttgcacatgccctgtggtttaatctcttgacaatagccgataaaaggtaaattagcaatgatgcagagaaaaaatgcattgatttcagtagtgataaattggccatgctggaatcaactttttataaaacagaaagaaagaagatatgtttatgtggaaccaatttttttagcaaaaagacaacaggcaattggtggcctgaactttatatataaatcatatgccaaggtcagagcatacatgatttgtgaaggtacgtggaaccattttaatctctgatcccactcatagcaaatagcatcaacaaggtatcaaatttggtcatatcatcaagtagttagccaggtataaggttgaaagcaactaatagccgggtggctagagcgtgagcaagtagctaacctttttgagttctccctggttgtactgtcccattgactgaaacctccttccagctgacaccagccgcttgccaaacgctacactatgtaaagcaaacagcaagggacgcgaccttcagacaattgaggactgaattctgacaagtgacaacatcatatggatgcagtccatgcctgatttggcgctgcgcgtcaagtagggctccatcaacggcagctgcttggcaatgctatttgatgttgacgtatcagctaactcccatgcttttgccaggttcaggagcagatcacccacttcttggccacac

SEQ ID NO: 29194 - DNA, 1981 bp, Zea Mays
ctgatttcaacttcttttgtcacttcaggaaccgtgatggatccagaaaaacaaaatgagatgagcctgatcgacaagagagaactagtatacgaagttgcaagatggcctcaaggtgccatggagattcttcggtgctggacccgcagggaacttcttgagcttatttgtgttgagttgggcaaagagaggaagtataccaatgtcccaaaagctaagatgattgcttacctattgaaattagtttcacggaatagtggaaagaatggacaactcaagaatgataatccgaatgttatgttattagggcaggataacaaagatgaaatacaaatgaaggaatctgatgaacaatcacgaccactcaaaactgcaaactctgactcatcaataagcagagaggcttgtgccggtagttcagtggtgtgcagcaatgttgcatgccaagccacaccaaatgcaggagataaatattgcaaacgttgctcttgctgcatttgcaataaatacgatgataacaaagaccctagtttgtggttggtttgcagctctgataatccatacagtggttgttcatgtggtgtctcttgtcacctaaactgtgctctaaagaataaaagggctggcattgtcaagaatgggtgcaacaagttagactgtagtttctactgtgttagttgtgggaaaatcaactggctaatgaggtgtttgcagaaacaacttgcaattgctagggaggcaagaagagttgatgtgctttgtgagcggttgtcattgagccataaaataatacaagggtctgaacgttacaaggaaatagcgagcataatcagctcagctgtgaaaacacttgaaatagaagttggtagtgcattggatcaggtctctgtgatcacggggcgtggcatcgtgaaccggcttacttgtggtgctgaagttcagaagctttgttcaagtacattagaaattgtagactctaaagtggataacatcttggagttcgagtccaataatagtccaaaactcctaggtcctcagccccaaatcctttttcatgagatcactccattttctgtggttattgtgttgaactatcagcatgacatcggtaaggagcagattgatggttccaaaatttggcaccgaagtgccagggtttgcaactattcatcagagcccacatgccacatactgaggccaaacactaggagcctggtttctggtctgagcccttcaactgaatacttcttcaaggttttgccttttagcagcacacatgggtttactgagtgggagacaaaatgcagcacacgcagcctggaccatggcagcagccagtgctcaactcagaactctgagagcatgtgcctcaaagacgattcaatgcagcatcacaaaaaggatttgaatgtgcagaatcaccagagaaccattcaatatgattcacctaagggttctacaaattcaagtgagaacaatttatcatgtgatcggtattccaagcgggctaaggttgcaaggctagatggtgcaagcgacaacgatgaaagccagttgccgccaacttctgaagttttaccatttgcaagctccaactcttctccttccgaagctccaagtaaacctgacttgcttattggcaccccagattcggcctccaagaactatgtggagcagcagtacgagtactgcgtgagggtggtcaggtggctggagcatgaagggcacatggacaatgacttccgtgtaaagttcctcacttggttcagcctgaaggcaacaacacaggacaggcgaatcgtgggcgcctttgtagatgttctcatcggtgatcctgcaagcttggttggccaactggttgatgcattcaaggatgccatctgtatcaaggagaagccctctcaagcacaacagaaagatgcatgctgcaagctggaagaccaggcaatctccatccaccagcttctgctggacggcaaac

SEQ ID NO: 29195 - DNA, 3063 bp, Zea Mays
atactattctactactcgatccgccacgcccggcagcagcgctcacatcacatgggaattcaaggctgaccgtgccgccgtcactcctcccgttcaggtccagcagcgttcgtttcgttgctccactcatcagatccatccacgccagagacggaggcagccatgccgctgccgccgctcctgctctgcgtctgcctctacctcacccacctcccccgcctcgcctcctccgagcccgacgccgacaaggcggcgctgctggcgttcctcgccggcgtgggccgcggcgccaccgcccgcgcgcgcatcaactggcccaccaccccgctcgcctgcgccagccccggccacggccccggctggacgggggtcacctgcagccccgacggcgcgcgcgtcgtggcgctgcacctcccggggctgggcctctcgggcgccgtccagtccggcacgccgttcctggtcgcgtcgcatcaccacaggaatggcggatctcgccgctcaaccaccgtaacaagaaatcgttgccgacgacgatttcagaattcgaataaattcctacgccgtccagcagcgttcgtttcgttgctccacctccactcatcagatccatccacgcgagagaccgaggcaggcagccatgccgctgccgctgccgctgccgccgctcctgctctgcgtctgcgtctgcgtctgcctctgcctctacctcacccacctcccccgcctcgcctcctccgagcccgacgccgacaaggcggcgctgctggcgttcctcgccggcgtgggccgcggcgccaccgcgcgcgcgcgcatcaactggcccaccaccccgctcgcctgcgccggccccggaccgggctggacgggagtcacctgcagccccgacggcgcgcgcgtcgtggcgttgcacctcccggggctgggcctctcgggcgccgtgcaacccggcacgctcggccgcctcacggcgctgcagctgctcagcctgcgctccaacaacctgtcgggcccgctccccgccgacctcctgcgcctgcccgcgctcgcggggctccacctccaccgcaacgccttctccggcgcgctcccgcccgggctcgcggggctcgccgcgctccaggcgctcgacctctcctccaacggcttcggcggcggcatccccggcgcgctcaccagcctcacccgccttgtcgcgctcgacctctccaacaactcgctctccggccgcgtcccggacctcggcctccccgcgctccagttcctcaacctctccaacaaccgcctcgacgggcccgtgccaccgtccctcctccgcttcgccgacgccgcattcgcgggcaacgacctgacgcgcccgcccgcagcagctcctcccgccgccgccgcccccgccgcgcggacgcggcgggtcaggctcagcgaggcggccatcctcgccgtcgccgtcggcggctgcgtcctcgcgttcgccgtcgccgcggtgctgctcctcgcattctgcaacagggagggccgcgacgacgacgacgacgacacgggaggggccggcgggaagggcggggagaagaaggggagggagtcgccggagtccaaggccgtcatcggcaaggccggggagggcaaccggatggtcttcttcgagggcccggcgctggcgttcgacctggaggatctgctccgcgcctccgccgaggtcctcggcaagggcgcgttcgggacggcgtaccgggccgtgctggaggacgccaccacggtcgtcgtcaagcggctcagcaaggaggtgagcgccgggcgccgcgacttcgagcagcagatggagctggttggccggattcgccatcgcaacgtcgtcgagctccgcgcctactactactccaaggacgagaagctgcttgtgtacgattactacgccagcggaagtgtatccaacatgcttcatgggaagaggggagaggagcgaacgccattggactgggaaaccaggtggaagatcgctctgggtgcagcaagaggagtggcacacgtccacgccgagaacaacggcagatttgtccacggcaacatcaaggcctccaacgtgttcgtcaacagggacggatacggctgcatctcggacctcggcctggcacagctggcgaacccgatcgcggcgaggtcccgctccctcgggtactgcgcgccggaggtcgccgacacgaggaaggcgtcgcaggcttcagacgtgtacagcctcggcgtcctcgtgctggagctgctcacggggaggtcgcccgtccaggtatccggcgggcgcggcagcgaggtcgtccacctcgtgaggtgggtgcagtcggtcgtccgcgaggagtggaccgccgaggtgttcgacggcgcgctgctgcgggtccctgacatcgaggaggagatggtggagatgctccagatcgcgatggcgtgcgtgtccaggacccccgaccggcggcccaaggtggcggacgtggtcaggacggtcgaggaggtgcgccggagcggcaccggcacacggccgccctccccgccggccaccgccgcggatgcagaccagagtgagatggagagctcctcctcggcggcggcggcggcggcgcagtgacggcgggagttgatgcttcgcagccgcatctggtgatccgttcgtcgccctttgtgttgtgctcttccaaatccacggccattccattcttttggcgggtgctgtaccattccattctttttttctctctctcttgtgttaagaagattccgtgttacgaaattgtaacacagtgtcacgtggagacggtggtccgtccgatgctcatggcagcagttgctcactccttgccgatgagatgagagtgtcagcgcatgaagacaagcaattaacattcggtgctgctttgctctgttgcttcttcagcttcggatcagatgcccttgagggcatggcaatggtttgcatcgtttgagtactcaacttgggcttgttcggttagctcttaatctacgtgtattgagtgagattagatgagtttgaatcccaaataagttaaaattattctt

SEQ ID NO: 29196 - DNA, 2081 bp, Zea Mays
caaagccacaaaggcctgttaggctagctgcttgccttggctgacggctcccccacggaccacggttgtttggctgcgcggcgtgtgcccttgcggtcattcgtcgtccagccagccgtccagtggccttgcccggcggccggagcgggcgagcggcggtccggccttctcggctcctcgccgtccggcgtcctccgtcactctcgctcagccgctgtgtccggccagcaggtagcagctgtgtccgtccgagtgtccgacgtcctccggcgctcagccattgtctccggcgctcagccgccttgtccggccagccggccaggccgacagggccagcgccgagcgccgctccagcctccaggctcaactccaagtcagaattgagaaataagatggaaaatgattggttgaatcatagaatggtatgctatatagagcgagatatctttgcaattattcgaagtgatgatattttataccattttcaagaattgaagagtatatgaaaaaacttgccatgcgtatgtttaaattcacgtgctaatgttgatgaagttattagaggcggggaagaaccaaatcttctctaattaggtacttttatatttttttatcaagtttattgtatttttatatgctgaattgagattaatactatcttagtctatgtttgtggtatattttgttttagcggtatatttagccgctcaatatattgggggctgtttaaagtaaacttaaagtattatagagtggcccgggacgttaattttatagagctccgccactgatcacagcagcacaagcaggcgcatcacttcgccttccatgcgtactagacggtgttggtcgcgctcgaggtttacttacggggctccgttagcgtcgagcccccggatgtgcctctccttcgggacctgttcctaatcgagggcaaggtcagtattcagtacctgtagtctcaattgctgtacttctgttgtttaatcgtattagaagtcattactgctattggtgccaaaattaagctgtggtacatgaccaaagctagccttatctcagctaagcgcatacgtagcatctaacagaaactatttggtgttttaaggtgaatgcattctcatccactgctatgttgcaacaacaaaattatattgtgttctttgtttacattaattttgatcaaatatgttggatctgtgtactgccatttgactgctggggaaggggaaccggacggtcggaagatgacggcgaggaggtgtacttggacagagggagagggagggcgtccaggtctttagtatttttgcctttttcccatgtcatgaatagtgagaacagactattgcaactaagaaatgggagcaaaagagagaaaaccctcagattcaaagagttcgtttatgcagggttaaattttcaaaggcgtgtgaattagatgtcaaatgtagaggtgcacgtattgagggttaaatattaacatttctccctcactagtcactaggtatttattttcatctcatcatgtggatcatacaaccttctgaacaattttagtccaattatcaaatcaattagaaattttatcttcgccgtagttatttctgtgtgtgatattactgggcccattctgtgtctattagggtagatgtaaaatggtttgttttctgcaaggctgcatctcggctgagtaaaacaagtactgaggcagtagactggtatttgcacatcgcacatgcttgaaattggtgattgatagattgtaaaatatgaaccggtagttgatagacaatagtaaattgtgaaatgtgaatcagtagttggtagacagtagagactagagacaaaggtttccatatgccaaaaattggtgattgacagattgtgaaatgcgacatgtttagtgtcctagttctttggaccccggtggctgccacgacacccgacacccgccgcctgctccaccgtcgcggctgctcatgccctcgctgctgacctagcgcatgcaaacctcacatttcgaggcctaaaaccctcagcgtcagtggccggcacgtggcctctctagtgcccatcgg

SEQ ID NO: 29197 - DNA, 2043 bp, Zea Mays
ccttgggtcggaaaaggccaaaaactcatcggcaacctccatctgaaaattctctcgcctgaacgtccaagcacaatcccgaaccctaaccagcgccccagctcgccgtcggcatgtccgccaggttgctccggcgagtcctccaggagcgtgaggccaccccgcaggacaccgacgtcgccgacgacgaccagtcggtggaggaggaggcttctcctccgcggtcctccgcgcggaacctcttcgatctcctcgacgacggaaacggcgacggcggcgaagaagatgaaaaggaagatgaaacagaaataattcaagctgtgagctatacagaacagagacattctgtgcaaaagaaagcgaacgctgttcccgaaacaaacaaaaaatccaagaaaaagaaaaaaaagagcaaggcggagccgtcatcaacaaaggcaaaggatgcacagtcgttggagtcaattctggaagacttatgtattgaaaagaatccaatacaacaaagagctcatcagagtgacagggcagctggaaaggaatttgagacaaatgaagctactcatgtggcatcctctgttcttgcaatagacccaaaacatctaaagggtgaaaatgagatgaggcgcatttttggatcaaaggtagtggattcatttgaaaatcaacggagtatgccaagcagttcaaggcaagtacgtggtgctaggcgtgttgcccataatccaagaaaaactcttcttgtgtctccacctagctactggccaccatgggataagtcaataacaatggatcttcttgagatgaagaatggtttgaattacttcaggtacacatatgacccttcagtcagccatgtgcaggaattatttgaagccgccaaagcagcaaatgatctcaatgctattgcagctatattagggaaatatccatatcatccagaatcactgttgacatttgctgagcttttcaaatattctggagagcatcaatcatcagcagatgcagtggagaaatgcctatttgcattggagtgtgcttggcatcctttatttagcccacttcagggcaactatcagttgaaattcaaccatgacacaaataagccactgtttacagcactctttagtcacatgaaaaatctggataggcgtggctgccatcggtctgctttagaggtctgcaagtttctgttgtcactggacttcgatgatccaaagggttctctattttgcattgattactttgctctaagatcacaacagtacaaatggctggagcaatttgcagaagagtaccagtgtgataactccttgtggttatttccgaatttctcattttctcttgctactgcacggttttaccttgagtgtgatgcagcgtcagagggttctgatgatgctgacaaatcaacatctcttgatctcatgaagcaagctctgatgcttcatcctatggtgcttcgcaagatagttgacaaggctcctctgaaagactcatcatggacccaaatactcagaaatgtattctttggatcagcaaaaccgggaagcccttcacttgagcatatgatcaatatatatgtggaacgccattatatcatgtggagattcccagaactgcagaacttgctgaaagaggctgctcttttggtgattgaatcactaaagcaggataacagagaagccctggactgggcttgtgttagaaaagaagcattctcgtcagacaagaatgagtactctcatctgcttgtttcagacttcactgacacaacgccgtcgctcccaccagaagaactgcgaccatttatggtcggtccaggaatgttgcatgagatgccacctgttgaacaagaagctggacccgagagactccgtgctcctcgtgaagtcgctgggcgtaatcctgcagtagtcttccttgaatcactgctcccatgggtcgactatggtgacaatcatcaaggtgcaaatgacgacgacaacgacgacgaatgatcagttggatattccgctgggtcagccactacctcaatgctcc

SEQ ID NO: 29198 - DNA, 3576 bp, Zea Mays
atgtgcataaatttattatcatctatttaaatatggacttatgagagtttttctcacataaacgaatagggaaagaaactagtagaaaaaaatggcatggccattgtggtgtggctttacctggttttctcacggtcacggcttgcttcgtctcccttccgtcgccgaccgagaaggagtgggaagaaatggattggaaaagctagggttttcgccatggccatcgcccacctccagctccccgttgtcgaatccattctccccacgctctcctcctagctgcggcatctcacatcgccgaaaaaaggggcccgcccgcttctactccgctccccaattggagggtttccctccccttcccccaaatcgaatcgcagcattacccgccgagcaagcaacccacacccactcacccgcctttcaaggttcctactgcgctggcgatccagctgggggcgagcgcagcggtggcggccggataatccaatgtgtatgctctgcgccgtgcagcgctggtcgcggcgcgtcgccaccatgctcccgtggctcgtcgtcccgctcattgccatctgggctgctacccagctactcctcccggccgcctaccgcttggaggtcacctccccgcgcctcgcctgtgtctccgtcctcctcctcaccctcttctggtatgagatcctcctcccgcggctctccctctggcgcgctcgtcgctccgcgcgcctccgggaggagcgccgcgcccacgccctcgagctccacaagctccgcaagattgccacccgacgctgccgcaactgcagcaacccctacagggagcagaaccccggcggcggcaagttcatgtgctcctactgcggccacgtctccaagcgccccgtgctcgaccttaattcgaccgggaaggcctcctccaggtggccctgcgctcaagattgtggagactggctcgacctgcgctgctctgccagccccagtacctccttctgggggttctcatggcacctactgttgtcgttttttacaacaacagtgaggtggctcttgaggaagacattcagatttacatcgtcaggtgacggtgagggcttgggcccagatggtaagaggttggcaaaggcaggggataatggaggaaaagctgaggagagcagggtcgagaaggcgaggaggaaggcagaggagaagaggctggcaaggctggagagggaaatgctggaggaggaagaaaggaagcagcgggaagagatgacaaagctggtggaggaacgcaggagactgagggatgagaaagctgcggcagaggagcggtccaaaagcgctacccctgttggggagaaggatgctaggaaggaggcagagaggcggcgccaggagaggaggaagaaagaggacaaggggccaagcaagagtaattcagattgtgaggacattgatagacggttgggccgagaaggcgacatgaagcgggccttcgatagaaagattgagtctgacagacgtgagggttacaagcctcattactttgaagctaacaatcgtagtaataagacagtggagagcagggcaaagtactttggccgtatgacgggtggtttcttatcttcgtcaagagggtttggtggtggttccttctttggcagaagtatccaggcccctgcccctcaagttaacaaggttagtagacccatagttcctgcaactgaccagggcaatgcagccaaaagggatgtccaacatgcatccacacaagctgcagccaaatctacttcagctggggaaaccagaaattcatggactaattttaatcgaccggtcagcccaaatgtgcagccagcccctaccagctttaaaaagtcatggcatcagctgtttagtcgttcagcatcagtctccccttgtcctgatgctacaacttcagctcgtgatacgaatcagaagccagagccaaatggagcgcaactaagcaatgcttatacattcctctttcagtaccctcctcttgacagcaagccaagttcgagccagtccatgcaatttccaggttttccaccgcttaatggagcacctcccaataagccactacctcattttcctgctggacatatgccattctatgatgatgcagaatctgtggtatttgaagatccagaacagtttgaggacccatgctatgatcccgatgcaatcgcattgcttgggccagtttcagagtctttagataatttccctccagacttggattgtggattcatctcgagtgatgttgtcaaggaatcacatgggaggccttcaccaattgagtctcctctctctaggtctcgtatggttgaagaaaatcctatcaagcccctgcacttgttagttgcaaaaaggcctggtggtcctattcagcctgaggctagcagtgagcaacgcacatggcaaatgtggagcacaccattggttcatgaaagtttaggtctccaaggtcatcaaagtcagtggcttcaacagacaaatcaattaaactatagtgccaatgttttcaatggcagaacaaacgcccccctgggtactggtttgaatgacagtgatccttggctgcagaaagcacctttcaagcaattgccacctgatactccaagcctgttccttccacatgaaataccagggaaattacacaacgacttggtttttgggtctccaaacaaatcagcacgtgaacacccctttggatcacctggtccttcttggcccaaggaggaactgtcgttgagtggagcccaggaaggtggtggccatttttcattgctgtcgggcgcacatgttggcggcagcggagacttattttgctccacaagtcctgatgtgcagtccttggtgtggtctttcaacgaaaaggagacagcatagcagggacggactttgttgtggaaggaaatggaggatgtctgactgagccaaaacctccttgcctcctctgagtgtcacagggcggggttaatcggcgaggagataagtagtctccctccatgtcccttggcgcaaagaagatttgggggggggggggggggggcattttgtttagtatcgactcctctcacctgacctgttaccacgcgccatcttactttcacctgatgggtcgttgtatgaactctgggattcaatgaaaaatggggctgatttgtttcaaggtggctgttgggctgtagtaagtattccttggttgctggatgtagatgctaaggttttcagttagtttctccgtgacatacagtacaaagctctgctacatttccagtacaaacaagccaccacccaagatgtgcagtgaacctctctggtcggcctacaaggcaccgacgacggtggcggcgcgcatccatgacggcggcaaactctccctctctgttcgtttctcgcagtggcggttctcctgtccaaggcgctccagatcacacggaggatcccaataaacgcctgacggctacggaatcccgaatccgtaaccacccaagagcgcaattttcttcttttcaattttcctttctattccttattccaatttaaatttccaatttcaagtacaaa

SEQ ID NO: 29199 - DNA, 2223 bp, Zea Mays
atgcaggtcttagacggtggagtcaatggcatagcagccaagcacgtggatgaaagacgcaaacctctcaatctcctagatggcctcgtggacgcgcgggaccgtgtcgcagagccagccatgcgcgacgtccgtccctcactctcttcgattctggactgctcgcgcctctcgcctccgtgttcacatcgccctacccgccgtaccacatgccagacgctggccaccggctccgccgccgcagcgactacatcgggggtgtgcagcctcccatcagactcccgccagcgccaaacccttcgactcggcgatggccacaccggagaagaagtcatacccacctgccatggtcgcggaggaggtgagggtgtgaggctgactggcgattggacccgtccccccattccacccgccgtcgccgacgtgtctgtccaagaggcaggaacacaagcacaaactactgtccagattgacgaggagccaggttctgatgaagacgacgatcttccaccacttgaagcaaacaccaacatgaatagaccatatgaactaatttctcaacggaacaactaattgaattttttgtccagtgcaaggtattagttgtgtaacaaattgttaaattctcacatgtcagatagtggtgcattccatggcttgatctgtctctttttactctaggccagcggcagacgcgctgcctgcctcccctggcttgctcctggccatctagcgtctgtcatgtgttctgcctgatgggttttctccttttttgcatatgccatatgttctgcccatctgttaattgccgccgctgttttcaggaaggtttagcgattgaggctgagtttgggcagacctcatcattgttagtttgtttgttatagagtaagctagcccaggggaaaaatagtgaacctggcagatgatggtatggagtaacctgttgttccattcaataggacaatctgagattgtagagatgtggtttctgcacttaatttttgggcgacaatttcaagggagtaacgtggtagtgatttctctccctttattatgatgaagttgtggcttgtatcaatgtcgtatctgcaatttgaaatatgtatatatgccatgtccgattagcaacacaagacattgggatctccaaatttcacggcattgattcagggtgtacatcatccttatggcttatctggaaatggattgccatgtttctcaattctctcccagctactacaacctacccttcacgctttcctcaagcccaccgtgtgccagcccacgcatgcttgtttaaaacgcgcggcgggtgtgcgcgttagtcgttggtttcttgtgcgctgtgctgccgcgcttgcatatgctcagacttgcaggcaatctgtcgtgtgcgcggctgggctggaccttcaaatgcagatgcacagcagacggagtgtacaggtaagtgtatatgctgtgggcaggtggtgactactgacatcgtgcacagggtttcgtcgagtcggaacggacctgccgggtttcgtttcttccaagcttgggcatctcaagcatgcatggatgctgagctgtctgacgctttaaaatcgcctgcgggtaggagatgatgggaatgggagcagcaaagcaaagaacgatcaggcggcgggccattgcttaaacttggttgcttcggacgatatgatgcgcgacgagtctacatgcaagatcggttggcactgtggctcaaattaaaggctggtttaaagcatgcatcattggtgttagatacagaaaggaaaagaaaaaactggcacggcaggcgcgatacatatacactgcgcccgtctcttcggtggacactgaagaggagctggtgaatggacgggaaaaaaagaattctatgcatacggaatgcaaatctattggacagaaaaagattctatacataccaaatacaaacatattatgagttacattgcaggcccacacgaacaaaaattacatctctttagactttttgtagcttctgtccgtaagggtctgtaggttataaatgtgagaggctgcaacagaacgagtttgcatccggtatgctgtcgatcagagcccgaccaaacactcaggagtcgagaggcacgctacaccacacccgtgttcggaaccgcgcgataaccatcttgtcgaactatggaaatgttgctaagcaacaacgatctctaataccatgcagag

SEQ ID NO: 29200 - DNA, 2627 bp, Zea Mays
gtatcctctcctctccggaactcctctctgctcacgagtaaagcctgccgctagcccgcgctctggacgtcgcctcctcccccaccccaccggctgtcgccgcccccgccgacgttacctccttacccgccgcaccccccccccccctgcccccccgtccttgccttggcggatctgcctgcctgtgccgcctggcgctgcctcttatcccgccggccgccgctgcctcacgttagctcctcccccatcgtatccggacctccgcgccgcccccacgcctccctgacttggtggatctgtccaccattcaccggaaacagttggtcgctgcctagcttgctgcagccactcctcgccggcgatggatttcatgaaggttttcgatcagactgtgcgtgaaataaagagggaggtcaatctgaaggtactcaaggtccccgagatcgagcagaaggtacttgatgcaacaagtgatgaaccgtggggcccccatggaagtgctctttcagaacttgcacacgctaccaagaagttcgctgagtgccagatggtaatgaatgtcctatggactaggttgtctgagagaggcgcgaattggcgtcatgtgtataaggcattaactattatcgagtactttatagccaatggttctgagagggcagttgatgacattcttgatcattattctaagatctcggttctttcaagttttgagtatgttgagcctaatggtaaagacgctggaataaatgtgaggaaaaaagtagaaaccattgtgggcatcataaatgacaaggagaaaataaaggccgtgagagataaagcagccagtaatcgtgataagtacattggactatcatccacaggcataacatataaatcaagctcagcctcatttggtagcaactgcagttcaggcgaacgttatgggagtatcagtggtacaaaggaagctgactcatacggtgatagttacagggacaaagaatctgttaaaacttccacaagcaatagcggcagtcggaaatttggcagcaagctgaggaaggatgcgaagcctgataggaggaatgaggattatagttcacccagctctttgagacccccatctaatacaaataacactgaggacgactttgatgacttcgatcctcgtggatcaaatggcaaaacaactgctaagtcaaatgaggtggatctgtttggcccaaacttgatggacgatttaattgatgcatctgcagcaactccagctacagacaatgctgcagaaccacaggttgatctgtttgctgatgcagattttcaatcggcaaccgcaagtacagagacagctgcaaatacagatgtcaaggtcaatgttgacctttttgcggaaaaggcatcttttcctgcagcatttccaccacaggctgggtttattccaccaccaagtgccgggacatcttctgaagtaaatacttccgtatccaagaaggcagctccggaaccttttgatccttttggcgctattcctttgaacaattttgatggacctgacccatttggtggcttcagctcaaatgctggatcatctaccgcagcagcacccacccacggttctactggaaatatcagcacatcgaaccagaaccttcatgctgcatccgactttgctgcctttgtatcaaacaacgagggagcagcgaaagacccatttgatctttcttcgagtgccaatgttggaaaaacacctttggcagctcccaagatcgacgcatctgatttcggtgcatttgtatctagcaccgaggaagcagccaaggaccctctcgatctttcttcgggtagcaaccttggaaagacaggccaagcacccgcggcagcctccaagcctagcgcaaagaaagacaattttcaggtcaagtccggcatatgggcagactcgctgagccggggattgattgatctgaacataactgcaccgaagaaggtgaacctagctgatattggcatcgtcggtggccttggcgatgggtccgatgagaaggccctgccctcttggaccatgggcgccggatccggcctaggaatgtctggtattccaccgtcaacacaacaagctggtggcatcgagagcttggccaactacaacaagcatcatttcggcttcaaataggcctcgatctttcatactggaaaatacccgtcatctgcggtttcctcctctgtcggcctgcttcttacacgtgctgccctattgatttaatcacttttttgtttttggttttggtgatcacattacatggtgtcgaccaatcttggccccgtcttgtcacacgtgtatgttatttgtcgggtttgtgggtaagcatgcaactacatacacatcacaccccctgtgttccagctcgatgataggtggtatgttggccatgcagtttgtgtaaattccgtggcctgccttttctacttgatacagtactctacgcagcgatttgcagtgcttgagtttatattcaataataagagaacctatgccctttatgtcttgaattgtggctgatgctgtttgatgtatcactgaagtggcaaagtgaggcggttttttatcaacggatgttgtaaatggagccatcacatcaccc

SEQ ID NO: 29201 - DNA, 961 bp, Zea Mays
aataggtgattgatttctcgatttgggtcgattggagcaatcgttggctattctatcggcatgaataattgatgagacaaactcaatgtcaaacatatttctttgagttttcttcattgatagagtcaaaggcataaagataggacgacaactgacagcacacccctgactaagcagtggagaggtaaagcatcacagtagtctggaggaaaccgacaacacaccggtgaccaagcagtggagaagaggagcatcacagtagtctcgcattgcttatggattgtggggaatggaaccactctgttcaacagcaattttgtttggcaaaagattgtcaaggacacaagggatagaggttgtttttaaatgccactgatgagaaggagttgttgaatgcaattttcaagcttgctgttgagtatcctcacgcggacaatttagctggcgaggagacaaggcagcgattgagtaccaggataagtctattcaatgtcgctgaggcaacagttacaagatcctagaagaaaacccgtggcagctctacactacaataaaggtgataaatatgtctcacccaatggaagacatgatcaaggtagcaagatgttgaccccatgggtccttttggtggaataatgatagagtgcggcaccaatcaacctattgagaaagtgcttgcagctgaagatgcagcgcgaggatgttgcagcattcgaacaacgccaacgagctgctcttgcgccggaagctggaggagcagcagcaggctgccgaacttcagcacgccattgagctccagagccgccgcctcatgggtctccagctgctcgacctcaaggctcgcgcagctgcgacagcagcggcggcatcggcactgccaacaccagttgccaatgccttcgcgtccagccatcctttgagcaccatggcagtcgagtcgccactagagtccggagagtag

SEQ ID NO: 29202 - DNA, 1291 bp, Zea Mays
gtttatattcaaatatatggaaataaatctaaacacatatattaaacaatatttaatttgaaacggacgaaatattatttataatacaaaatagtattttggagaactatatacaccatctgacaccatatctccgagcagatagtctgacttactgcactggcttgcagtatagctgcatccaccgtcccttccgcgccccccggagacaggctaaaaagtgatgtgttgtgcacagtctaaagtccattttgttgctttgcccgcaacttttgcttgccacgatggaggccagatccagctcctgcctcttgggcgtccgtcatccttccatctcccgccctccctcgtcggagcacgagcaccaaaggtgcccagatcttcgtcggccctgcccctgcttccttcaactccaccaccaggcgatgccctagacttaattgaatgggctctcttctcaccaggactggcgtcctgccatggctccacgccaagattgttgatcccatgctgcaggtcatcagaaggggagcagaacccaagcaactagccttctctgctgcccttggtatcacgattgggatctttccggtatgtgggacaactgttattcttggtgctgttgctgtagcagtgttgggaagtcgttgcaatgctgttactgttatggttttaaatttggccgccactccaattgagctaagcttgatcgtccctttcttgcgtttgggggaaaccatcactggcagtgggcacttccccttgacagccaacgcactgaagaatgttctcactggtcatgcatcaaaggatgtgctgctgagcatcgtcaatgcgatgctgggttggcttattgctgcaccatttgtacttgccgtgctgtacgctgtttcgttcccttgtttcaaggtcctggttaacaggtttggcggcattccatcgagccccaggaccccactcaaggcggtgtaggtagtgtgtagcatgctgaatgctcctgaaattgtgtacaccaaattctttgtgatgccgttgggttgagatgggttccggcgtcatgttgctcggccatcccaggcactggcgaataaatccgacttgagaggcacgtgtcctctataattctgtatgctggcttggtaatcatatagtgagatgtgtatttatgaatttacaaactcttcatgaataaagccatgtttggataaaggattaaattttagtctctattctatcggatgttttggatatagttaaaagtattagatagagcctaattataaaactaatt

SEQ ID NO: 29203 - DNA, 15947 bp, Zea Mays
ggtctcgctactttgcctgaatgtttgttggattggccagatgttgtaacagtaggaaatcatagcatgggaagcccgttcgtgcttacagctactttaagaaagagttacgaggtagctttgatggcagttggccagaagtggcctgtacttctctatgggcctgttggtgcaggaaaatctgcacttattaacaagttggcacacatagttggaaatcgagtactttttatccacatggatgagcaaatggatggcaggaccttattaggaagttacgtttgcacagagaaacctggtgaattcaagtgggctcctggttcgcttacacaggctattgtcaaagggttttggattgtgtttgaagacatagacaaagcacctagcgatgtgcgttcaattttagtgcctttattggagggttcaaataccttttcagttggccatgcagaggccgtggaagttgctgagagttttcgcttctttgcaaccgtcactacatcaaagaacgatgtttcccatgatctgccagggagactcacatttagtgcattgtggagaaaagtgatggtgggagaacctaatcagagtgacatggttaatataattaaagggtgctacccaagcttggagcccatctcctccaaactcatagatacctttgaaaaggtcaactctcttggatcttatcagtttggtagtctcaacttggcagggggtttatctgatggtgttctgcacagattttcattaagggacctgctaaaatggtgcaagagaatattagggactgacctcaactttgaggacctcagatttgcatctagtggatgcaaattaatctatcatgaggctgttgacattttcactgcttcattatcatctccggagaaaaggttgtatgtagcaggagaaattgctagaatattatgtgttccttaccgaggagaaacagtgcaacctactgaaaagcccgtcatccaggctcgacatatggaattgcaagttggtagagttacattgccatgctgcgacaaacctacattaatccagaaagggccttttgctgatattcggcgtgcattagaaattcttgaaagggttgcatgttctataaaattcaatgagcccattcttcttgttggtgaaactggtactgggaagaccactactgtgcagaatcttgctgcctggcttaaacaaccgttgactgtggtgaacttaagccagcaaagtgacatttctgatctccttgggggatttaagcctacagatgctcgatcgatatgttttcctctttatatggagttcaaggatcttttttctcgaagtttttctgcaaaggacaatgaagctatgatacgttattgtgatgagtttgtaatgaacaagaattggaaaaaactactaaccactttggaaagatatgttgcgaaggctcagaagctaattgaagggtctaagtcttcaagtggttcaaagaggaaacgacctttgccagcccatgttgtttctgattgggacaccttctcttccagactgaatatggcttgtagtcaaattggttcagcaactggcatgtcatttcagtttgtggagggtgcttttatttcagctttaaggaaaggccattggattttgcttgatgaggttaaccttgcacctccagagacacttcaaagaattggtgctgtactggatggagagaggggcacactttgcctagcagagaggggagacgtggattatgttgaacgtcatccttgcttcaggatatttgcctgcatgaatccagcaactgatgctgggaaaagggaactgccgtacacttttaggaaccgctttactgaatactttgttgatgatcttatggatgacgatgatctacgtctttttgtcaggaaatatctggatggtctgaatgctgcaaatggagttatagatagtattgtgcgattttataaagtggcaaaaaaggagtgtgaggagagactgcaggatggagctaatcagaagcctcaatttagtttgagatctctatctcgtgctttaggatatataaaaaacgcagagaaaaaatttggcttcaggaaagccatttatgatggtttctgtatgttctttcttacattgttggatcctcctagtggaaaaatcatgaagaacttaatagtttcacttctgttagatggaagagtgccacctaacatttcttttgttgactacttcactgataagcctttgcaattaggtggctgtgaatcggatgattttttgcagagctatgttttaactcaaagtgttactgagcacataatcaaccttgcccgtgctgtttacattagaagataccctgttcttctacaagggccaacatcaagtggcaaaactagccttgtgaggtatcttgctgcaaaaactggacatgagtttgtccgaatcaacaaccatgagcatactgatctccaagaatatctgggtacttatgtgacagatagtcaagggaagcttcagtttcaggagggtgctttggtgaaggctgtgcgggaggggcactggattgttttggatgagctaaatcttgcaccgtctgatgtcctggaagctttaaataggctgttagatgacaacagggaacttttcattccagagctgcaagagactataccagcacaccctaattttatgctcttcgctacacaaaacccacctatgctttatggggggcgtaaaatgctgtcccgggcgttccgcaatcgttttgttgaagtgcatgttgatgaaataccagaagatgagctagccacaattttggagcagcgatgtagaattgctcccagttatgcgaaaaggatggttgaggttatgaaagaattgcaaacacatagacaaaatagtagagtgtttgctggcaaacatggtttcataacacctagggatctatttcgttgggccaatcggtacaggacatttgaagggaagtcatacgaagatctggcgaaagatggttatttactgctggcagagagattaagggatgtcaatgagaaagttgttgttaaagaagctttggagcgtcacctacgtgtaaaactcaatatagctgatttgtataactcggaagtcacccgtgaagataatttattcattgatgttatcaaactaagagtacaagattgcgttgggaatatcacttggacaaaaagtatgtggaggctatacttccttattgagcgttgctacagatcacgcgaacctgtcctccttgttggcgaaactggtggtgggaaaacaactgtttgccagattctaagtgctgtccttgggttgaagttacatattttgaactgccatcagtatacagagacatcagacttcattgggggattctgccctatacgtgatagatcaagaatagcaattgagttcaaagatcttgttgcaaaaatcaaacagatgaaaatgtttttttatgttgcagggaatgttccgcttgaaactgatgtatctggagctgatagtgtcatcagtcatctggatgaaatacttgacagatacagaaagaaaaaatatctgtttcctgaggtgtctgctcaagatcttggtgccatggagcaaatcaagttggatttgatgcatctccacaagaggtggcaagcaattttcctgtggcaggatggaccgcttgttcaagcaatgaagaatggtgatcttttcctcattgatgaaatttctttagctgatgacagtgtgcttgaacgcttgaacagtgttctagaacctgaaagaaaattgtcattggctgagaaaggtggttctgtgttagagaagattgtagcacatccaaacttcttcatccttgcaacgatgaaccctggtggtgactatggaaaaaaagagctttctcctgcattaagaaatcgatttactgaaatttgggttcctgctgttattgatgttgatgaacttaggagcataacttttgggaggttcaccaaaactgacttctcttgccttggagattgcattgttaacttctggaagtggttcaaccaattgcacatcgggagaacattgacgatacgggacctgctgtcatggatttcatttataaacgtgactgaacaaaatcttgggcccgagcaagctttgatacatggcctgtttcttattttgcttgatgggctctcattaggtctaaatgtttctaaaactgaggctactgagatgaggaatacttgcttgtccttccttctagaagaattgcagaaagttgggggcacggcagtagattcatacttgaatgatctaaataattatggctggggtgacaatatgaaaaaaaaagatatagatcatggttgtttggaagatcatttcggcattgcaccattctatattcctaaaggccattttccttgtaagcaacaggactttgaaataatggcgcccacgaccagtaagaatgtcttgcgagttttgcgtggtatgcaactacctaaacctctccttctggaaggtagtcctggagttggaaaaacaagtttaattgtagcattagctggattttctggtcatgatgttgtacggataaatctatctgaacagacagatatgatggatcttctaggttcagacctgccagctcaagggggaaatggaatggaattttcctggtctgatggtattcttctccaggctttaaagaatggaagctgggttcttttggatgagctcaatcttgctccacaatctgtcttagagggcctgaatgccattctggaccaccgtgctgaggtcttcatacctgagcttggtcaaacttacaaatgctcatcgtcttttcgggtctttgcatgccagaatccttcatcgcagggtggtggacggaaaggccttcccaagtcctttctgaaccgcttcaccaaagtttatgttgatgagctatcagaggaagattatctattcatctgtaaatcacgatatggttcattgatttctgaaagtttcatccgaaatcttattcactttaatagcagactgtatatggataccatggtatataggaagtatggccaacaaggttctccctgggaatttaatctacgtgatattatcagatcttgtgagatgatagcaggttccccaaatcctatgatggatgattcttttttaaatactgtttatctgcaaagaatgcgcacattggttgatcgccatgaagttgtcaagctttatgaggatgtctttaagaaaaagatcagcattcaccaaccaaaaatgctccatgttaatccacattgcttggttgttggaagtgcctctattagaagaaataacatccaatcatataaagtgcaaaacaatcaactcaacatatttccaggtgtccttaatagtcttgaagcagccatgcactgtatccagcaaggttggttgtgcattcttattggacaaaattcagctggtaaaacatcattaatccgcttgctggctcagctttctggaaatacgttgaatgagttaaatctgtcgtctgcaactgatgtgtccgaattgttgggatgctttgagcagtataacttctttaggcactacaaaactgttttatcagaagttgagcattatgttgatgtgtatttcagcctgagtattgatacgaaccagaagaattttgttgcagaaagaaggggtttgtttaccaaatggtttgaatttgtggctgcaaaagggcactcctcaattaagacttcgaaattaatgagtgggaatgcatctttgccttcattaagcttgcttgctgaaatagttgagcagatgaaatgtgatctggaaatgtttgacttctctataccattgacaaaagatgatcttagtgaaacactgaagtccatcaacaacttgcagcaaaatggagctgcacaccaaccagttagattcaaatgggttgcgggagatttgattagagccattgagcgtggtgaatggattgttttagataatgcaaatttttgtaaccctactgtacttgataggataaactccttggttgagcaagaaaggtctattatggtcaatgagtgtggtcttgttgatggaaatcctgtagttatcaaagcccaccctaagtttcgaatgtttttgacagtaaattcaaactatggtgaagtttcaagagccatgcgaaacagaggagtggagatctttctgatggaccaaagttggaatctgaaaggatttagcaatgtacctggggacagtgaacggaaggatgtgataagatttttaatttcttgcggaatacccagaatggaactggtctcgtcaatgtgtgaagcacacatgtacgcaaaaggtgaaggttcacgtgttggtgtgaacattacccttcttgaaatcacgcgctgggttcagttgttccaacaactgattgttaaaggaaatcagttcctttggagcctgcatttgagctgggaacacacatatctaccatgtttgggtgaaattaatggatctggcattgtggaggaaggaaaaaataagtttttgactaattttgacagatctgaaattttggctagaaactttagttttttgactgtttttgatggttgttcaactagtttgcattctggattatctttgtccttgccgggtggttggccaattgagcaaaaactaagggatctcatttggtattcaaaagaaacttgtgtcatgaggaattgcatgtttctacagtcattgggtgcccaatacgctgcttatcagataagcagtttgaatgataattcattattgttgggtcagattagtctcatccacccatctattcttcctgctgcaagcttacgcgaattacagtttcctacggttaatggtcagcctgtcaaaatttgtgtcactggggcattcaattcatacttagctgatcagatgcttttctttgctgcaaactgggtaatggagcaatgtactaaaaacgatcttgaactatatggcaaatggtttaattggtataactctctggtccagccttattgcaacttctttgagagctattggtatattctggagcaagaaagtgagcatcctatttggcataacatccttgaatattacagggaaatagttgcctatcacaatattgatattgttactcagcatattccattactctcgaagaagttgctggatatggctggttgtgatagcctgaaagcatgccaaaaccggctgcatcgttcttttaaggctttgggcttgttgcggcttactctgcagcaatggcaaattgagacaaaatgtcctgatctttctgtcctggaatgtactttgttgccagcattgaagtccctcagatgcttagagggcgaggtacttaaaacgattgcgaaatcttggaagcggctcaaaatatactctctccttcttgattaccacagatcaatatggaaaatgatgattgcatctcagttagaggggctaccaattgtttggaatcttttgaggaaagaaatactgaagttgcagcagaagttcccggttgaagttgacgtctttttgatggaatgtgtgaatctcaacaatataaatgataccaattttcaatatggtaaaccaactttgtgggattatggtggtcatcctcatctgccatcatctagcgagatatttgacaaaatgcaagaacttttgtccttcacaacagatgtgtggccaaggaagaatcttttgaatatagagcttgatgataggaaacagttgactgatgctatgctgtcagccaacaaggatcttagacaccttgcaatggaaggtgtctctatggcttgcattgctacaatgaaaactgaggaagatgttttagctgttgtcccccaattggatgaagttcacaagcggcttgtaggaaaggttaactctgtgagggataatcttggattattgtccaagacatcagtgcctgaatttaagttctgttgctcagtgtcctctgagattctatgtaacatttatggtttcaatggctggctagcaagtcttcctttgctcaacttgaagagcttaaacttggatacccttttacttcaacagctatgcaagtgcacacaaaaagattcttctgaaactcatgagattcttgttaattctgagtacctgctgaagtatgctatggattactcactgggttcatcttcaagatctcctctggactatattcaacatcagatcatttggtggatttgtcatgactgggccaaagttgacaatgcacatttaaaagttgctagttgtattcttgaaatgtggtacaactatcactcttccttgtggacttattgctcaggaagcccaaagtgtctattctcagtcacacatgatgattcctgtgacttggcacacctgacaaaaatggacgccatcaatactattatccagcaggatttacatgtggtggattatctgaagagtggtgtaatgcttaaagttgcatctagaaacctctgggaaggtgtttcgtgtttgggaaactttgtttctagtctgcactctgctgctgattccctctttaagcagattatatttgtccataagaagcatttcgaggaagagaactataaccagttagagtctctcctgttccaacaatcgagacgtttgatagagaaagaagatctggacactgtttgtgctctgttatcatcttcaagctgtagagtattggcttcgctctcagagtcagataaactcgtagaatccttgcttatggacttgtattcatcctactcccgtgactctttgttgcataccggagctgcttgggtccgtattggagagttacgcttccggttattgttgagctcatacagtccagatcctacatttaagtctagatacaagcattcacatattttggaaaaaattacacttgtgaagcttgaggaaaaggttcgtcatgattgtgaggaattagctggttctaactcccctgaagatagccatgacaacgagttattgcaattgctggaaattaaagagaaagacacccgtgcaaaggttgtatttcgtcctcgacaatctaagcataagagtctcattgctgcatgccttgagtttgaggaccgcctgtctgagtgcaaggacttgttagctagcttaacttgcgaaggacttgggcaactagaggttgaccgagtgtgcaattggcagataatatccatgaactttatcaagaggctgacagaagattatagggaatatgttgatttgatccagccaattcaagttgctgtatatgaaatgaaacttggcttagcaattgctctatctggttctcttcagagggagtatttgaagaagattaaagaagatgatattaatagagttcttggagcaatttatgcttttatgcagtttccctctggatcttttactgaaagggttgtaactgacgtgactgatgatcttacaaattatacaatcactggccaactaggaaccctaaacagttgttctggagatgtagatatgttgaagaagcttgctgctatgtcaagtcagttgaatgtttgtaaagttgctggcaaagtgaagtccctgtccgagatgcttgcttcagtgcatcatatttttttagtaagaacagctgattgtgtcagctgttcccttgtcatggataagtcatcttatgcgtcattgaaggatacctttgatcattttacaagcatgtggatcaacatgaaataccgtttgaaggctaaagaaagcgatgattctcagtacttcaagttcaaatcgcgaatgatcagtatagacgacatctttaaagatgtgccgttgctttctgatatggaatcagaagacagcattttagataatgaagaaaaactagagcatgaatttttcaaaattacggaaagtattgatgacgataatggtgttgttgaagacaactgggatttgataccagagtctgctcttaaatgtattgtgaccatacatgaccaattgtttggttcgcccgatctttttgagaagcgccgcaaatgtcaagttagtgatgcacagaaagtccagtctttcatagaatcatatgagctgggaacaagaatacttaaagacctcccggaattaacatgttctatgtttgatgaaaagctcatgcctgagcacctatttcgtgtttgtcttgaataccaacgatcctgtgcaaaaacacatcaagattgtagtggttataatgcttacaaggatccaaatcctcctgtcttgtttaaaatggttgagtcactaactacacttcaggagagagttaatagctatctggatgaatggcctgatcatcctggtctcttgaaaatactggacctaatcgcttcccttttagcgatgcccctaagcacgccaatttcgaaggtcttgcttggattgcaattgctggctgggaaagctcaaacattgcaggaaaatgactccaagttctttgtaaaagatcatcttgcatcgatatttttgcttgtgtattcatggcaaaggctcgagttagattgttggcctatactgcttgaggaggtccagacaaagtatgagttgaatgctgcaaagctgtggtttccattgcgagccttacttactcaaacttctggtattccagtggatgatgatttgtctattatcagaagtgttgaggaatttgttcaaacatcaagtcttggagaatacaagagacgattgcatatcctctttgccttccatggtgagatttctgctggtgctagcttgggtagttattcaagtaatgcggtgaagaaaatccagaatattctgtacagtgtgtttggttactatatgcagtttttgtcactcgttcatgggaaaattgaagaaggtaaaaaaaacattgagaaggagttgaaagatcacgtcaagctttacagctgggagcaagcaccatatagcagcgcttctattgaaaattttaaaaggactaggcaaaagatttttaagcttctgcaacggttcaatgatattttgaaaagtcctgtcatctttctactgaatgaagaagccacatcaaggaagattccatgctggcttgatcctcagaggcctgaatcacaccttcctgttgactctgaaaaatttaacaaaaggtttctgtggtaccacaagtgggcaagtgagacgtctttatcattacaaacattgcagcaatcaaatggtagtactgttggagttcctactgccaaagaatatgcagatatggtatatgatgtgaagcactggcagaatgaaattgagctcaatgacagattgcagttcttctggatctcacttgagagaatatgtggggcagctaattttggtagtacagtgaagcatgggaaaaagaatcagaagaaaacagctctatccaatctgttcaagactcttgaggaatgtggactatctaagcacaggccaatgagtcatgagtggggagatgagctggcagcaccaagtccattgttcttggagcagtcatatgattctgcacatttattacagcaaataaactctcagaaaatgctggaagatgttagcatcaatcattccacactattgaacacagataactggaagcatgcaaatcagcaatacttcaaatgtttagcaatgatgcaacaacttcgacaggtttctttgaagtttaacaaagatctaggtttggaagaggttaacaaggctatgtcatttatgagtcatctgttgactgtgttgtctgaacaacgacatcttgcttataatctatttgatcaacggaaccaattcaagcatgctattttcttattaggttctggaggaaagagtaaatctctatcatcaagccaaaatgtgctgctgagttccatgtggcagcaaaagaaattgtttgatgctgtaatcactttgataacagactccaacttattgctcagaagcttcaaggattgccattataactcttgtaacaactttatagaagttgaagggatctcatctctccttggaaagttcatcttgaatttttctgaatccaaggagttgttagatgaatgcttgcttggatccactaatatatttgctggtgcatataagagcatgcctcattctgcaacagagatggaacaactttttactgataattgccagcatatagattcattgttggatggatacttgcctggatccaataatatatttccagatgcatataagagtattcctcttgctacaacagagatggagcaactttttgctgataattgccagcttatagattcattgagagaagatatgaaggttctatgccacagggatctttcagtgggatctgttaagaaagttcttatctctcgtttggaagaattgttggagaagggcaagatggcaatggagaaccgaagacatgttgaagaaaatcataagctatgcttaaagcttgaagcttcgtatatagaaattttgaaggaaactttcatgttagttgttggtgctgtcagaaagctcactgatcatgaagtatgcagtaatggaactgaaaaatcgccagttggtaatgttgcatcatggaaagatactttgcagacatgcattatgaatcttaaattggatgatatttgtgttgctggtgaaaagattcgtattctagtgaggttgctggttgactataaacctgatatacgtactagtatagagctgcacctaatgcatcttcatgcttggctgagtgtgatcctatcatcagcagaagggatactttccgaacttttagaagcacacataacaacttctgaaatgactcttgcacttggggacctttttattcatttatttacggatgggtttggttccactgaagatacagccgaagatgcagatgaactacagcaagatgctgttggaagtggaactggaatgggtgagggggatggtcaaaagagtgtaagctctgatatagatgatgaatcacaacttggtgacagtaaggacttgacatgtaaggcagatcccgctcctaagaacgatgataaagctgttgaaatgcaagacggttttaatgcacaattatctgatgtttctgaggatcttgaaggcaaagactcgggtggcgaagatgaggataccttggataatcagatgggtgatactggtgatgcaagtgaagtggttggcaagaaatcatgggataaggatgaagatgatgatcctaagacatctattgagaaatatgagtcaggctcatcagccaagggaacacaacaggatgatagggaaatgagagctaaggatgatggttctattgaggaggaagatccgatggaaatggattctgaggaaggaaagaataataatcttgaacatgatcctagtacccatgatgaaaccgaactgaatactgatgaagtcatggacaaagctgatgcatatgatgaccggactggacctgaactccctgaaccagagaatgattccattgatgttgacatggtggaacaagaacaaacggatgaaataaatgctgacaatgaagatataggtacagaagaagctgaacaagcagatcagaggttagatgcttcagatgatatggaggaaggagatatggcacaacatagcgatggtgtggtagataatgaaggggagcatgttgaagatgcaaatacagacgcaggtgagatggattcacaccaattggacaaggcggattcacttatgcctctgtcacaaggcctacagcctgacaatatgcaaataaattctaatggagaatctgaagcgaacttggccaacagcagtgatatgcatggcgctgttgctccttcagtaaatttttcaggaaatgaagtgcccaatatggaaatatctatgcccaatactggtaacgattcaatactatcgtctaactccaagccagatatgcaaaatgatgctcagcagcacatcaagcagacaaatcctttcagaagcatcggagatgcattggaggactggaaagaacgggccagagtctcagctgatactcaggatcatcaaccagaaactggaaaagatagtagtgagaacactactgaatttcgttatgtgcctgagggtgaggagagcacctctcaggcattgggtgctgcaacagctgaccagatcaattatgacaatcagattaatcaatctttcttggaagatgaaagctgtatcaggaatttggaacatagtgatgagagaacacctgataaccctgaggtgccttaccttcaaacttcacaagcacttcccaacaagtctgaaaatgccaatgaattggatggaagagaaattcaaactgatgcatccgttcaaaatttagttgaaagaacagatcacactttccaagatctagtttctttcaaacaacccccggcagatgataaaatagctcttattgacctaactactgacagggaattgccttctcagatggatctcgacatcactgatgcagagacaaaaagatctaatgcggtctggaaaaatcttgagctcgcaaccatgaaattgtcccaagaactggcagagcaattgcgcctggttatggaaccaactcttgctagtaagcttcaaggggattatagaactggaaagagaataaacatgaagaaggttattccatatattgcgagtcatttccgcagggacaagatatggttgcgccgaactaagcctaataaacggaattaccaagtggttattgctgttgatgactctagaagtatgtctgagggcaaatgtggaaaatttgctatcgaggcattagttactgtgtgccgtgctatgtcacagcttgaggttggacaatttgcagttgcaagttttgggaagaaggggaacgttagtgtgctacacgattttgatcagatctttaatagtgaagctggagttaatgtgatctctagcttgtcgtttgagcaagataacaaaattgaggatgaaccggtgtctgatctcttgacacatctgaatgttatgcttgatactgccgttgcacgggcacgcaccccatcagggcaaaatcctctccagcaactgatactgataatatctgatggaaaattccatgaaaaggaaaacttgaggcgccatgttagagacgttctaaatcgaaagaggatggtcgcgtatgtgctcctggatagccccgaggattctattattaatctaaaggaagcatgcttcagagtaggggagaaggtagagctgaaaaaatacatggattcctttccgttcccgtattatgttatgctacagaacattgaagctcttcctcgcacattggccgacctgcttagacagtggtttgagctcatgcagagcgccaacgagtgacccttgggagttgggagtagtgccacgcatttagctgtacagcaaactacattctagcttccatttttgcttgggcctggacagttctgtggtggcaagcttgattgtgcacaaatgccttcacggttcaaatcgctttcctgaaatatgatctctggtcgcaggcttgattgtctaaaagcatcatcacaattcaaattgtttttgggaaatttgaatagaatttccgctttcctgaaatatggtctctgctcgcaggctttattgtgtaaaaacatcatcacaatttaaattgtttctggcaaatttgaatagaatttccgtgctcaagagttatagtttgttttttttttcaatggagaattgttgctcacgtgctacatgcgacctgagtgtgattgatccttcaatcttgccctgctgttcatcttgtgttgtttgtcatgtttggctttgttgatgtacatgtttcttccactgcatgtgctacgcgttgacgatgtacgcaactgtcgctgccaacgcgaccactttatatatgtgacagtgacacatgccaggggcag

SEQ ID NO: 29204 - DNA, 1119 bp, Zea Mays
gcaaagagaaacggggaggcggacatccaaccggattggcgagaccgcaacggcgcaacgggcttctcccgttctccgtcggtcgcggtcttttcccgtccgccccgcctccagctcccgtctcccaccccaacccggatctcgcgcgcgacgccgcgcaggcgaaccccacctcctctcagaagcctctagaagttcctcaccccgctcccgcgcggatgagtggcagctcgggccccctcccctactcgatgcgcgatgtgggtgctggcggcgcctacaacaacgccaagttccgccaccggtctcgcctcaagcttgctgaagatcttgccaaaacatgtgttgagatgtacttcgtgacctctaccggccttgctcctgaaatagcttatttccacattgagggtgatacagaaggggggcctgatggtgggaataaaagctccaaatatatcaatgatatcgtaataaaaccacttgaccgtcacaatcttctacgcccagagactgtggaatcactatttgttttgtatagaatcacagaggattccaagtatagggagtggggttggcagatctttcaggcttttgagaagtacacaaaagttgattctggtggttacacatcattggatgatgtcacaagcctacctccttccacgagagataaaatggaaactttctttcttggagaaacattgaagtatttgtatttactgtttgatgaaaacaatacccttcccctagataagtatgtgttcaatacagaggcccatcctcttccagttatgcggtctgcagaacaggcttcacattctgtgtagtttcccaagtttatagctgttgtaccatggtgagaagtacagatctgtgacaaatatacttgacaacatagttggaggaacgagaaattgagaatcccttgcatgactgttcttggaggcaagctcatggttctggaatctccatgcctgatttgaggatttgggggttttacttgtatttactggaaggccatacaacctttgtactctgtactgtctgtagtctgtaatacctaacttcaaattttgaaatcggctagcagttataccaagatttttatcttcaacaatt

SEQ ID NO: 29205 - DNA, 160 bp, Zea Mays
gcgtgacgcccaggcagacgtgccctacgccagaaggcttcgggcgcaacttgcgttcaaaaactcgatggttcgcgggattctacaattcacaccaggtatcgcattttgctacgttcttcatcgatgcgagagccgagatatcctttgccgagagtcg

SEQ ID NO: 29206 - DNA, 2272 bp, Zea Mays
cgatcgagcgaagcagaagcgccaaggcagccgacgcgcatggggaggacggacggcaacgcaacggtgtcgccacgtgcacagccgctagcgaaaccgggcaggaaggaccgcagtagtatatagagacctctccggccggcgcgcgcgacgtcagcgacgacgtccgcgccacgcgggcggaacttcgtagtttgcgacggggcacgcacgcacgacgcaccccacgcattttcaactatataaaaagcaccccccgcgagcgcggccggccggcgaacagaggagaggagaggagagactagacccgctagctgaggccggccggcgcgctggacacgaacatgatggggagaaaggcgccgctcggctgtgctactactcttctcctcctcttggccgccgccgtcgctccggccgagctcagcgtattaggcctaggcggcggggcggcggctgcctcgggcgcggtcacccgggccgacttccccgccgggttcgtcttcggcgtcggctcctcggcgtaccaggtcgaaggtgcagttgcagaggacggaagaaagcctagcatctgggacacattcacacatgaaggctactccctcgacaacgccacaggcgacgtaactgcggatcagtatcataagtacaaggacgacgtaaagcttctgcatgagatgggtgtcgatgcctaccggatgtcgattgcctggcctcgacttatcccagatggtcggggagccgtgaatccgaaggggctggagtactacaacaatctcatagatgagctccttagctacggctcttcaggacgagtacagcgggctgatcagtcccagattcatagaggacttcacggcgtacgcagacgtgtgcttcagcaacttcggcgacagggtcaagtactggagcaccgtcaacgagcccaacgtcgagacgatcggcgggtacgaccagggaatcctgccgccgcggcggtgctccttccccttcggcttcggctgcgaggaaggcaactccaccacggagccatacgtagcggcgcaccacctcctgcttgcgcacgcgtctgcggtgtccctgtacagagacaggtaccaggctgcgcaaggaggacggatcggactcaccttgcttggttggtggtacgagcctgggacgcagactcccgacgatgtcgcggcagccgcacggatgaacgacttccacatcggatggttcatgcatcctatggtgttcggggactaccctccggtgatgaggaggaacgtcgggtccaggctgccgaccttcacggacgaggaggcggcgcgagtgagggggtctttcgacttcgtcggattcaaccactacatcgtcgtctacgtcaaggctgaccttggccgcctagacgaccaagtgcgagactacatgggcgatgcagccgtgaatgccgtttctcaagtcacgcaaccagttcccgttcggcgccttgacgagcgacttcatgacgtccaccccctgggctctcaagaaaatgctgaggcatctccgggtgacatacaagaaccctgcagtcatgatccatgaaaacggtactaaataatgatacccctaaagtatgtttcgtacgttgctgctcgatcacgcctcaaatcacttcaggagctgccggacagcctgatccatccggcgtgaacagctacgacgacgagttcaggtcacagttcctgcaggactacatcgaggccacgcttcagtccatcaggaacggatcgaacgtgcaaggctacttcgtgtggtcgttcctggacgtgttcgagtacctgttcggctaccgcctccggttcggcgtctacggcgtcgagttcaactcgacggcaaggacaaggtaccagaggcactcggccaagtggtacgccagcttcctccggggcggcgagctgaggccagtcgctctgcctgacggagcatattcacagtgaccagttacacgtgtacgctccggctccaggggaatatctggcgatcagcgctctcggtgaggtggagagaaaatagagagtttgtaagcaaggatagtcggggtggtatatatagcagtgcttagatacggttttcttgggtaaatgtggtacgagttgaataagttgtggcatgtttggttagaggttagaggattggctctacccgaaaccagctgattcagatggtcgtttctatatatttggttagggggatggagtggatccattttttgtttaggaagcaggtcttcactaccggaatccgg

SEQ ID NO: 29207 - DNA, 1834 bp, Zea Mays
cagctttggaggaacgcagaaacgtcgaaaccagcacccggaaacccagacaaagcacgagccacgcacgccccgctgtctccctcccgccgtcccgccgccaccgctactgccggagtctctcgccaccgtcgttgctctcccgccttcaccgtgccaactcccctccttgcctcccccgcgcttcagtcgctccactccccatcgctttcgcctggtcagaattccagatccaggtgtcctttgacccagaccgcgcctgcctttccctccgctcggattcttcgccgtcttcgttcctactgggcgccgccggggtggagcggagatcggatccgccaggagctgattccttctctcgtagttgccgccccgtgatagtgtaggggggcacgcagaagaacacgacgtgctggctgatggaacacattcgggtgagagcgaggtgatcaacccgtctgaagaagtggaaatggaagccacctcgcaatcccaggacataaagccccgagttcctgagggggttcaaggccattcaccgaaggttgttactaaatctccgcgacagagccctcggggcggggataagagtgaagccaggaaaatctctcccagtccttatcctaaggtgcccatcgcacgggtttctgatctagatatagttgatagctcttcgagcaatggtgatactggtgccagtaagaaaaagactgaaaagagcagtttccgcccaattgccaaggagagcctgtcacttgaggactcaaaagagaagaataaaactcagaaggcatcaaaccaacgctctgccaaaaacgatattgacgaagaatcaaatgaaagtgtgaaacctcaaagggtgggcagcactccttcatatggatttagttttaagtgtgatgagagagctgaaaaaagaagagagttctactcaaagctcgaggagaagattcatgcacaggaactggagaaaagcaacttgcaggcaaaatcaaaggaaactgaagaagctgaactcaaaatgctgagaaagagtttaaagttcaaggcaacaccaatgcccagcttttataaggaaccacctcctcccaaggttgagttgaagaagatcccaacaacaagagctcgatcaccaaagcttggtcgctccaagaacacaccctcaggagggacagaaggaaattcaaaccccccagctcgttcagctcgactgagtctcgatcaaagggtcccccaaaatggtgccaagaaagcacctgctgcaaatgcggcgaagaagccccaacggaaatctctccctaaattgccttcggagcaaacagccaaagttgttgacattgcagcgtctgttccatctggagaagagctggggaagaagccatcgttgacgggtcttgttcgagagccaatccgcgcgcaacttacgcctgatgaacctggactcagcgtgtaggaaaggaacctatcaagccgactcatgaaagaagagagttgtgcctcagcttcctttatcacactttgctatttctgcattaactgctggctggtattatgtactaaaattagtctcatcaccaggatggagttgggagtttggagaatggcaagtgacccccgtgtattgtttatgctagtttctgttgacatacgaagtgtttgtagttggcaaattttttcagattatcatgtctcctatctccagggctcggagccaattttcttgccgtcgtagagaagccttgtgattcggtgcattagttcttgcagtttgatttcggctattgttcattgcttgtactgatacacaggtgacaaggaacattctgcacgtaaa

SEQ ID NO: 29208 - DNA, 1075 bp, Zea Mays
aaaaaatacgaggaaacaaacagggttcgtcacatcgcttgcgcctctctctctcggggacaactgcttcacccctgccgccgccctacgcttggtgcctaggtcttcatcggatcgttcaccgggcacaagcatcacccagcagactgggatcgcttctcccccgccgaccaagccgtgcctcccctgttgccggcgtcgcccctcccccaccagtgaaactcgcggtctctctccaccgcacgcacctcgtgtagttgtcgccgcgtgcaccccctgtagccccggcgttgggtcctactgctccatccggtttgcttccggcaacaagatcaacaacaagcgagcgagctgtgatctctggaggtgctcttcctactctttgctggtattttgatggtggcttgatggccagtaatatgcaggcttctgggctgcctcagcctcccagacctcccatgatgggttctagcgctcagccacaaaatcttggaccaccaatgcctatgcagtttaggccagtgattccttcgcagcctcctcctcagttcgtgccaccagcagcacaacagttccgttctgttggtgagcctatgccgggggctaacgttggcatgccagggcaaatgccacattttccacaacctgggcagcacatgcctcactcaaatcaagttccacctgtatcacaaggggttcccatggtatatcagccagctagaccaatgtcatcagcacctatgcaaccacagcaacaagctgcgtatgctgggggccatttgctcaccatgggtgctcctatgcaacccctgacctatacatatcaaccaacatcgatccctcctgtagtgcaaccctggagtacaggcccaggacagagtgtaactcatgtgcctcctctagtgcagtctgggcaccagcaggtgtcagctccaacgactttgcctcctgtcaacttgtctgaacctagctcttcagattggcaggagcacactgcagccgagggaaaaaagtactactataataagaagacaaggcaatcaagttgggagaaaccagttgagttgatgacacc

SEQ ID NO: 29209 - DNA, 1094 bp, Zea Mays
ttcagtactactacaacacacgtgccagatatcaggtgaaagcgtgggagaggtgagggtcgtggacgacatgcaccagaggaaagccgagatggctcgtcagtcccaagccttcatcgctctcccaggtgccagaccagaccagacgtcccctgctaaaacataaccatcatcgaccgaccgcgctggcaataattcagagccccccactccaacttgcgtttgcttacgtacggctacggcctgttggtctctctgctgccaggggggtacgggacgatggaggagctgctggagatgatcacctggtgccagctcgggatccatgacaaaccagttgggttgctgaacgtggacggctactacgaccccctgctcgccctgttcgagaaaggcgccgccgagggtttcatcagcaccgactgcagccagatattcgtctcggcgccaaccgcgagcgagctgctcacaaagatggaggtggcgagctagctagctagtacatgtacatcttcgatatacatacgctttttttgttcacgtacgctagctgttgtggctctttgcctgtgtccagcaatacacgcgggtgcaccaggaggtagccccagcgacgagctgggagatctcggagctcggctacggcagaggaggagacgccggcgccgccacgccgccagcagcagcagcaggaggagcagaagagggaaaaggcggctcgtagcacccacatccatctcctgaagcgttaccttcctccacctactgcttgctgatgtgatgacgcgtctgttacggtttcctggcaaatttgtttcgtcaaagtcgacctctccaaagtccaaaacccggttgaaccaggtgccgggtcgggacgtactggggagacgacgatgatatctctgtgttgggtgcttggattgtgtaagcttgctgctgctggtactattcttgttttctttactttttccccggtgtgtggtgcttgtggaaatggaatctgtgctggtgcattgcagtgcagctaccctaccccgtccccggccccggggacgcacgcgacgacgtcacacacaggtgcgcccggccactga

SEQ ID NO: 29210 - DNA, 547 bp, Zea Mays
acaaattcacaattacacattcacaattcacaaggcaagataaaaattcacaattacaagatcacacattcacaattacacaaattcacaattacaaattcacaattcacaagtaccagcaagctaaaaatgagaaggcaagataagttgaataatattggagctgttagtgcaatgctgcctcattaaaaaccttcctaggtaaaaactcacacctcgtgagaaaaccctaggaaggaaaagagtacagccagctcctaattgttcaagtgttcattaagttcattacatcagtagaaaagtaaaacatagcagacagaagtaaactaagaagagtccaaccaactcctaagacctaagttgagggaccagtttccacatctttgtctttccccctcttgtttgaactatcttcaacatcaaggtacatgttctcaaaggttgattcgagttccttggtctccttctccacagtattctgcatatgcttatctgccagctcccaatccttaatacaagataagacctcaaccatatctgttgtaag

SEQ ID NO: 29211 - DNA, 2352 bp, Zea Mays
cgctcctccgggaatccagcccttcctatcttctcgcggcgcttcctcctcaaataggccgcgcggggtcacgatccgtgcgtactgagaccgtgcagcagcgtcgagggaggttcgtcggtcgggttgacttgggcgcggatgggcgggaccggcgcgagcagccggcggaggtgggcgcggcggtccttccggacggcgggtggtggaggaggaaggggaaccggtggggttgtcaggcggaccgtcgcggcgtcgacgaccatggctccgcggggtacccaagggtttgctcatgtggacaagcaacagcgtcatgttcatggagtattatcagatttcagatgcaacagtggatcaacagatcatctttctttgtatgtcgaggaatttaagcataagagctcacacagatcatctgttagatgtcttcctagtgcacagggaaatgtaacagaaatcagtcgcatgcaacctgttgcaaggaaagttcaggtagatatgaccttcaatgataaaggattgtgtcgtgctagcagaactgtttcaggaatgcgaattcaacctaaatattatatcagcagtcccaacaacaatttgaagaattctcctactgtgaagagttatagtgggatgagtgatttcaattatcaactggtcagaagtgctaaaaggtcagctttgccaaagatgggtttaaccagcacaaactgttccctttctgagaaaatgtcttttctgcgtcgaccacggcatggtgataatcatcagaaccaaagccgtatcagtgctttgaatcgaagaaacaaaattgtgaatcctaggggagcagctcacctgctaagtaaagataaggttcatgaacaccttaattcctcattggaaagacattcacaggctttgttaagtaatgcattgattcgagaaaagcaactgtgctgttcagatatactcaatcaaaaagaacctgaacagctatggagctctgcttacagtgaatctgagaagatgttatgcttttcctccagtgacagcattgatgatctgcaagtatcgtcttcaagtgacactagtgatagcttcaacttatcatctctgggtgtaatagatggtgatgaatggaatacgaccttcaagagggtgtactaccctcatgctgcatgcctagactctatatctgtcatatacgctaaagaaataggtcaggttagcccaatatctgttcttcagcctctatctgaagattgctcagattctgaaaacatcagacacgagcctgcagatccatatgacttgagcttggcacatctgcaccaagggagactgctgcagaggcaagtaattttcgcggaactagtgtctgtttaacctccgaagtgcagtcaagcgatgagaaacccatacaactggttgaagacatccttgaagaatttgaagatgatgaggaaagggacttctcttacttgctggatatactgattgcttctggaattcatggaactgccgaggatcaaatgtacaaggtgtgtcagtctctcgaccaccctgctggtgatgacgtatttgagaagctggaaaagaagtacaacaaagttgttcagtggtcaagatcagacaggaagcttctattcgacatggccaacacaatactatcacagatccttgccccgtgcttgaacatgcaaccttgggtctataccactaggaacttggccccactttggggcccagatggtcttctggagaaagtcttgcagatgctagttcagagacgggaacaccttgcacccagtgagactaagccagagaagaaaggatttgatccgaagtggccaggtttagcagactgcatcgacagggcaggaagggacattgagagaatggtaaaagatgacctgttggaagagctggtcgttgagctactgtccagttaggtttccacaattccacggccgtagtaggttttatcatagcagtacagattctttgttcttttgtttagtttttttagtcagttgtagttgttcctttggtccctgtccctgctatcactgctattttttttctcttcgttgttaaagcagtgggggagagttttttttttggtctagtcgccgtgcttccggtggtattatgacgtgaattccattggattagaggatctctgtagggaaaagttcttttctacctctccataaagagtaccttttgaagtgaggtttgtaagaatataaaaatttcctgtcgagctttgtcggctgtgagccctcaaatctgtatatgaggtaaaattataacttaattgtgttatgctttaaaggaaaaggaagatagtggcctatgctttggtct

SEQ ID NO: 29212 - DNA, 2735 bp, Zea Mays
agtacgccgtttgcgccatcgttacgtccaccagaaggaaaacccaagccaacgacgacggcacggccaagaaacggggagtgccttccaaggcgaccgccccctctcgcgctccatacgtccatccgtcggcccagagccacaagataacgcagccaagaacaagagacaccgccgagcgagcgaggcggggagaagcaggtccaggaccaggagaaaggaaaaggaagcccagctctctctagcctggagccgagaagccgagggggcgaaggagcagcaaggcatggaggagcccgttccggctgatccccccaggattttctggaagtcaaggagttcaggttcaggtgtctgcttgtctcaattcatgttgctgcatacaaaatctcgctgatttcaattgcttcttcttcttctttctttcttttttttaacccccgaagaatcgtattctcgtggcttatccgtttctatgttgttgaaagatgctaatttcagctcagtcatctgcaaatttctctgtcgtaatacagttcatgcagcaatacagttagaatcacacctaaacaccattaatctcagctacttcgtttcggtccacaagcaacagcgctgaccagaaacatttctacctttttgtccatataagttttggtactgatgcccaaaatgtggcggtgagatatttcgtgtggggatagatgatagccagctcactcacgttatgtaactgcgctccgttcttttttatttgtcgctgtttagtttaaaaataagttaacagtaagacgtgaatcacgcacgcacccgtgctactgaactgctgttggttagcccgtttggtggttcacgagacgaccgtagcaatcccttgccaggtacaactacaagaagagctagcgattgcagcaagaaatcgtattcctagtaggcacgctttgcagcaagactagtgattgctaattagctagatttctgcgtgtctcttgtctgtttctgcccttccatcactgttcccctcctcctgcggttcagacgtggccaaagacttgtacgcgttctgcaaccgatgtagcgtcgtcctagagtttctaggcatggcaacagaaacaagcacgaaccgttctaaccgtctaggcatggtcacagacaagcagataaactacaatctttgtgtattatatgcaaattaaattatatgagtattttcgtagcccatgtccggacggcagcatggccgggtctcgtgtgggtcaaattaaattatatgtagcctttgtgtcttgtgtgggccggcttattattggaatgctacatctggttaatactactgaccataatgtgacgctgacagattagtttagggaaaaataaaccagccttggaaattgctctctatgttcgattcagtgtttcggccccttgttactttgcttctgtgtggggggctggtacatatacatatagcatacttgcaagacactgaagggctgtaaggaaccaaagaacccccagaacaaaaaaatgaaagcaagggctgtaaaaaaaatctcactatgaactgaatagaagcaagcatcccttggcctctccaaaagagctgttcacatatggcagccaaactcatcctcaccactcgctaacatattggttgtccaagtgaacgatcgtgctgtagagccaagggtcggtcacgcgtgcattagattttagggatccctagattttaactggggaattgcactggctcctgatctgactaacaatgtgtgtgttccagccaatggccggagcctgcaacaagagcctgacaaagacgctaccgaggaaactaacgagcaggctcaagaggaacccatgaagaccgacgacgcaacggacacagcagcagcagcagcagctacagctgagccgtacccgaaagctaacctatccgagaagcggaaggctctcttcgagcctctcgagccgatcaacggcaagcgcggcgctgctgagacgctgctcccaccgccggactttgagcccgcgtcgtaccccaaggggtggctggtgggcaagaaacgcaagctcgtcaacgtagacgtcgtggagagcatgcggaggattgcgatccaggaaatgaacagaaaggaccgtgagatcaatgggctgaacgagcagctagaggaagactcccgcgtgctggagcttctgcagaagcagctggctgacgagcgcaggaagcggacagagatcgagaaggagaactccatgctccatgagcaggtcaccatgctgatgaacatgctcgacgagaacgagggtttcgacgaggacggagaggccccgccgcccgattccttcgattaagcgttgttacagtactatatccgttttctttttcccgtcagtgtgaaatcatacgtctctaggtgctggtttcagagtatccgagagatatgggctagctgtgtagtaggatttcattggtggtcgtattccattacatggctttggcttctgtagataaagggtgcattgcatgtctgttgtactgtactgtacctactccttttctaggcttcaaaagtgtatgtgagaaactagcaacatgttatgtttgaatcgaagtgtatgtacatgttacttaaaattcttccttgctatgccaaaattgcaggaaatgtaaacaagatgtgatttcccaatgttgcatgcgtgtggtgtttctcgatcggcgcggatgaggc

SEQ ID NO: 29213 - DNA, 1704 bp, Zea Mays
ccgccgcctccgtcctttctctctcttaccccttcacccggacccgcgcccgcgccaagccaacgccacgccatgccgctggctcctctgtcgctggaaccccctcccttccgtctcatccgccccgccaccggcagcggcggacgcgtcctcccggtcccagggcctgcaccgcgcctatgtcgatcgctgagggcggctccggtggcacccgacaccacggaggagccgtttgcggccgcgcggggccggctagagtcgctgagccaggtcacaggagtgctgggcacgcagtggggcgacgaggggaagggaaagctcgtcgatatcctctcccagcgcttcgacgtcgtcgctcgctgccaggcatccttaatgaaaacactcaatgtgtaattggtaatggagcagttgttcatcttcctggattcttcaaggaaatcgatgggctagagtctaatggaatttcttgcgagggaaggcttttggtatcagatcgtgcccatcttttgtttgatcttcatcaagttgttgatggtcttagggaggcagagcttgggaattcctttataggaacaacaaagagaggaattggaccatgctattcgaacaaggttacaaggaatggacttagagttggtgacctgcgacatatggatatctttggtgcaaaactcaacaccctattaagagatgcagctctacgcttcaaagattttgaatatgataacaagattctgaaagaggaagttgagaagtataaaaagtttgctgaacgattggaacctttcatcaccgataccgtgcatttcgtgaatcagtcgattttgcagaagaagaaaatattggttgaaggtggtcaagctaccatgttagacatagactttgggacctacccctttgtcacttcctctagtccctcagctggtggaatctgtaccgggcttggtattgctcccagaagtctcggtgatatcattggagtggtaaaagcctacacaactagggttggatccggtcctttcccaacagaactattgggtaatactggcgatttgcttcgtgcttctggaatggaatttggtaccacaacaggtcgccctaggcgttgtggctggcttgatatagttgccctgaaatactgttgccaaatcaatggtttctcgtctttgaatctcacaaagctcgatgtcttaactggactcaaggaaattaagctgggtacctcatactacaccgatgatggtaactctgtccaatcattcccagcagatctctctcttttggagcaagtaaaggtcaaatatgaggccctgcctggatgggaggaagacatttcgtcaatacgagattacagtgatctcccagaaacagctcgtcgctacgtggagaggatagaggaactggtcggcattccagtacactacattggtgtcgggcctggacgcgacgccctcatatacaaataataactcgtctggctctggtttcaaagatctctcgcttagttcaataatgtaattgctttggttactaataaaacaggctgatcgtggaagatgtagaattcagcatcctttgctaagtgagttcaaattagctgcatctctccataaaatgccttttgcatttgttatttttactggccaactaatctaaacatctcatttcaaaaacttgacagaccaaaaatgggcaagaatt

SEQ ID NO: 29214 - DNA, 620 bp, Zea Mays
gccgaccttcgcgccagctgggttccaaaacccccttccttaccctgcgcctataaaacccgagccattgttctccttcttcccccagtacgccccatcaatcacgtcacctctggtgcacatcgatttggagaaagccgggaggaagcaccaccgttgcggatctcccacgccgtgaatcctcatctcagaagtgtaccagggtcaccgcagaagcctcgcggaccgattccgagactaggctgcgtgagtactcccgtgggcgcctcaaaatttctcgccgatcctggttgtcaccgctggagccgctctgcaccgtggatcggcttcaactcacggtctgagatgacgaacaagtgaccgaggacccaggtgttcagcagaaggaaattgctgagcaggagctcgttgaaggagaagaacaggtggtacaggagcaaccctacaacgaagagtacgagcttatctatgtggcgtctcccagtcagctttatggcaccgaggaataatatttagtttgctttattgttatcatttatttttgtaagacttccgctatgtaataatgatatttaatacatttatctctatacactttgtcattatatgtgatgttcttc

SEQ ID NO: 29215 - DNA, 1128 bp, Zea Mays
ggttgacgtggggctggctccacgcgtcagcccccgaagctgacattgttgggccctgcgacatcatctttttcctaccactgctggttgttccctggttcaaaggccatcgaccgatcaataaataaacatggacagaatcgaattggcaagcaggtcatgatcaacaaactgtggttcctgctgatcccttcagttttaatttgctgagcgatccgccgatcccatccattagcaaaccatgcacatcgtggtgaagacgtgatcatctgctatctggtttttctgcaaaatttagccctgcaaaaaaaaattggttccccggcgagacactggcgaattggacgctctaaccaggaggaagagtagcattgcacactcacatatcacatggtaataatatctgttgcactaacgagctggcatgcacggtttttttttgtgaaggacgacactggtggccgcgctctacccaagttcggcgagtgggacgtgaacaacccggcgtccgcggacgggttcacggtcatcttcagcaaggccagggacgagaagaaagctcccccgacccaaggccacatcaggaacaacaggtcggtgtcggctgacagcaaggactccagggccgagaagatgacctcctacaacgccaggaccaacgcgtcgaagaaatggttctgctgtgtctcgcccagccccacacaatcttgaggaagctaacgacagagaaatggtccattgcatcgctgcggctggcagaccggccgcgagtgaactctccggatacttgccagtgacagtgtatagccgccgttgcaaatgacagtgtatagcgttcttagctgcctgtgcataccgtcagttcaggttgatgtctgcttgtaatttttcttttctcgcctcttctctacggtgtgtaacccttcctcagcgttaatcctcctgctgcattttgctgtaacttgggcgagggtggatttgtttcggctctgaccaaaaccaggtcacagcgaattctcagattgctgcagtgaccgccaccaacctgacaaacaaaaatgctgcgacgttttcagagctgtagaggatgttctcatggaaatacgttatatattcatataattctta

SEQ ID NO: 29216 - DNA, 2071 bp, Zea Mays
atttcagtttggaactgaactgggaatgacgtggccgaggacaaaagcaaattgacaccttctccgttcccgacgactcccgtgagcgtggagaggcgactaggcgaggccatggcctccggcatcggctccggccagcagcaacccccaggttcagcagttagattggatgccctagcagcgccggcggcagatgctgacccgggagccgtcggcgacaagctcgtcttcgaagcgccgcctcagcccgtgagggaggactacgtccagaacgccgtcaagtttctctcccaccccaaggtcaggggctcccccgtcgtctacaggcgatccttcctcgagaagaagggccttagcaccgaggagatcgacgaggccttccgaagggttcctgatcctcaacccagcactacggctaccacttctccgcagcagcaggtcaacagccagaatcaatccgtcggggtgcaagcttatgcgccagcacaacctgtgcacccagcaaacgctggccctgtcgtccttccaacgcagcccaggtttagctggtaccaagcattcctggctgcagggctcttgcttggttttggtgctagcgctgctgtctttatcaagaaactgttccttcctaggctcaagtcttggatccgcaatgttgtagcagaaggtaatggcactgaaggcaaccagcttaagcctaggattgatgatgaaacggctgatgctgtaaaggcttctgcttcggctgtttctgctattgccaaaacaaaccaacaactgcttgcttcaaaggatgaagcagaaaagaagatactagtgacgttgacacaagctctagattcccaagccaaggagttaaaatccttgaccgattcaatcggtcataccagggaacccataaatattaccagggatgataggttttctcagtaccgcccactggaagaccatgcccctactgttataaggaatggggcaattaacagttcatggagagcctctcaggtatgcgcttataatatccacccatattcctgttccacaagcatgcacgtgctttgaattaccgtcctatttcttaccactttcccttctgtagcaaactaacatgtatggtgtgtcaaatggcgactttggttccgcagtgaggtcttcatttgcgccagcacctgctgaacctacagctggatcattttcaagatcctatggcgagcagccgatgtccactgcacaacgaagcgataggtcttctggcagtaagccatgggagatgcattcgtattcacaacagaggcctggttatggatccaactcccagttgagtgatgatggatcatactctgatgcccaggacagctatgctccttcctatcaccagaatggaaaggcccctgattttcaagcggatgaacctaggcctttgacttacaacactggggttgaggaaagaccgccaccgcagcgccgctgggtgccccctcagcctccaggtgttgcgatgccagaagcagcagctgccatacgtcaaccaaaggcccttccaaagcagccctccagcgatgcctctgaggcagctggtgagatgcaggtgaatggttcaagtgcatcggatgctgtgactgaggttcctgttaatggtgctactgcaagcgatgctggacgcagtgagatccaagaacaatcagtggcggcctaagtgaaaccaagaccagctaagaactgggaagcaatctaagagagattcaggatctctagtacatctggggggtttgtcatacatctctgaataacgtctgtatcagaacagcggggcaaccacgccgatgggtacccgtaataatgcaataagtagcagatagtttctgcatttagattaatgctacttgtacacaggagaacatatcaataatatttttttggctgttcgattgagggtgcttaaaaagtgtgcttgtgaattgttgtattttgatcttgatcttgtgatgactagcaatcgcaatggaccaaatggagatggtcgtttgttttcttgttgctgtctcgctttattccattcaggtgttgtttt

SEQ ID NO: 29217 - DNA, 4495 bp, Zea Mays
aagattgtgcctatatcgattgttctagttttgaggcaaataacatcccacggtctatccgttacctatccatttccatgcaagatcattgtgctcagaatttcgaggaacaaatgggaaaactgaaagaaaagatatacattaacaatttgcggagtttgatgatatttggaaaatacattatgttacatctgctcaatattttaagggacacatttaaggaaataagacgtcttcgtgttctatctatattcatatactcccatagttccttgccaaacaacttttcagagcttcttcatctccgctacttaaaacttttgtcaccttattactcagaaatgtcattgccaaacacggtctcaaggttttatcacctgaaatttctagatcttgaacaatggggaagtgatcgttctttgcctaaggacattagccgccttgaaaatctatgccattttgttgtttcggaaaagattgattccaatgttcctgaggtggggaaaatgatcttcttacaagaattgaaagaattccatgttaataaagagagtgttggatttgagctacaagaattgggtaaactagatgagcttggagggaagctcaatatatacgggcttgaaaatgtgagaaccaagaaagaagctaaagaggccaagctgatgtcaaagaggaatttagttgagttgggattaatttggaacatgaaacaagagtccaccgaagatgatatcctagatagtatccaaccacactctaatgttaggagtctttttattgtaaatcatggtggtaccctcggtcctagttggttgtgcagcagcgacaccatatacatgaaaaacttggagactctacatctagagagcgtatcgtgggctaaccttccacctattgggcagttctatcacttaagagagctaaggctgagtaaaattgttggcatatcacagattggacctggcttcttcgatagcacgacagaaaaaagtgtctcacacttgaaggcagttgagtttaatgatatgccagagcttgtcgagtgggttgggggagctaactggaatctgttctcaggaattgaaagaatcaagtgtactaattgtcctaggctgacagggttgctggtttcagattggtctatttcttctatataagacagcactgtatggttccctaatcttcatgacctttacatttatgaatgcccgaagttgtgccttccacccttgcctcacacttcaaaggtatcccgtattcatatgggagacttttcttatgaaggtcgtaccatgttgaaaattaataacccctctagatttgccttcgaaaatctgggtgacctagagacattggtagcttgggatgcactacccttgtcctttatggatcttaaaaagctacattccttgagacgtataaatgtcactagatgtgaggaaacatttttgagaggactggatgatggtgttgtgctacccacagtccaatctctctaccttggacgatttacacctaccaaaaattatttgtcaaaattattcaaatgttttccagcactttcttctttgcatgtgatggcatcaccatcagatgaggacaacgaggaagtggtactgcattttccaccctctagctcgctgagagatgtcaacttcacagggtgtaagaatctgatcctacccatggaggaaggagctggattctgtggcctctcgtcgctcgagtcagtgaccatacacaaatgtgacaggttattctctcgatggtccatcggaggacgagcaactcagactcagagcatcatcaaccctctcccaccctacctgaggaaactcttcctttcttatatggaaactctgcctcaggaagctctgctcatgaatttgacatctcttgagaaactcacactatgtaattgtcttggctgtgagcaaagcaccgagcgaatggctgtactcgcgaatctaacatctcttaccacgctatatttatataattgcagaaatatcacaatggatggattcaatcctcacatcacatccagcctcaagtatctatgcgtgtacaatgagagaaatgatggaactgatccgtattctgtagcagcagatctacttgtagcggtggtgaggaccaaaacaatgcccgacgtttccttcaaactggtgggactttatgtggacaacatctcgggagtgcttgttgctcccatctgcaagctgctctccgctaccctcgagacgttaaacttcagtaatgattggcggacagagaacttcacgaaagagcaggacgaggcgcttcagctcctcacgtctctccaattccttgagttttataactgcagggctctgcagtccctcccccaaggactgcaccgccttccttctctccacggaataactatctatgggcctcaaaacattagatcactgcctaaggagggcctccccgattcactacgaatactacgtataactaactgttgtgctgagatttatgaggcatgccagcaattgaagggaacaaggccagatataaatgtacttgcctccaaagctcgtgtgcaaaattgaatacctgcttctgcatgtcttcacagtcagctctgcttcaacatgcctttcactctacaggtaaatactgtgaaaacatcttcctatacgtgagatagttgatcttcatcgattctacagccaggatgatgtcttattggatgatgtgttggtcatggttggcacaaaattcagtaggacaacggcagactgcgcatggacgcagccatccaatcagcgttcaaggcaataaacgagaacaagcatgggatgtggaaaattttagaaagtaaagacaagtgaattcttgacgacgttggcttggcaccttagtttgagtacataatgaaagaacaaccttttagcaaccctggagcatctagaaaatatcagtcatgtaactatcgttaatcatttgaaaaccactggaagacaggagatgtagcaccacaagccattcctttgatcatttgaaaaccattgcggctctttctgattatatcaaccagaagggctcacaattgtggataataaggcatccagtattatagaggaaacaaaggaaattcaaattagacggaaacctgctagtccaagttcttatatgccaaattcatcaatttgcatcctactggagacattgctggcagaggaattgagactggcataggagaactcaatatatgcttgtgaataacgcatccagtgaaagatagtagattttcatcaattcactacccaggatgttgtcgcattggatgagaatgacatggaagacggcgaactagaggaagacaacaacctcatctaagctgaaaatgtgttgcctgtggttgaagaaaatctagcagatgaacaacactgccttccctgtcctctctagacctgaatctctctgatggtttggattcgtccatgattgatcctgtacgatgaaggatcagctcgtccaacgtttttcaaggaacgaactcaatctgaggaattaccttttcattggtcacctggggtactacgaggaatgacttcacgatagacgactcggttttgcgacgcaaaccaaacgccatggttaggctcagatgttggatcagatgattcctcgtggcttcgtgacgcaaaccaaacgacatggctaggctcagatgttggatcgtatgatttctcgtggcttcgtgacgcaaaccaaacagcctgtaagtccgcacaccttatctatcatggtcattgttgagctgatcagtaattggagtcgtgtgataagcttaatggacctcctatttgtcgtgatcttcacagatcaacaagtgagcggcctttgcatgctgcatgagatcaagcaagccgccgactggcaatgctccacctgccattcagttcgttggtgaggtattaatcaccagccatgttggcacttggcggcatgcagatggagcagaacatccaggtgaagcggacagatacatgatcgatcatgagttggcgcagacacaggccagacaaccagaggctatattccaattcatacattccatgataagcaaaggaagatccaagacaacacaaatatacaaatagttagttatacaagcaaaaatcctgttgttttgtgcctcccattttctagtccagaattaatatgacaatttttcactgaaactggttggatcagagaccaggaaaaaaagggaaatgacaactacagctgtgttttttttttcaaagaaggcagctgcccgtcgatgatgtgctcacttgaggatttcctctgccttttcagtgacactgcttcatccttttcagagtcaaatgaatctctacctcatttcactgcacatacttccaaactgatttgctgtaacatacttgagtttcggtatgacattaatttttaactcataagagaacaaaatcagaagaaaaaaaaacaacaa

SEQ ID NO: 29218 - DNA, 970 bp, Zea Mays
caactccggcagtccggcagagacagtggcattcctgcaatacggcggaatcgcatgccgaaccatacaccgccattactacgctacggcgatgaaacaaagagaggatatgctaccataccaaagccactttctttctccatcactccagccatccccaaccccaactcccttcactgtatatatgatacatccatccaccattcgtgaggacagcagcatctgtgcgtctcttccacgagaggcaacctaccgtatagtactgccgacatggtgctctccggcggcctagtcgtgccgtggctcgcggcggtggccgcgctggccatcaccgccgccccgctcggcgccgatgcctacaagaactacaccgtcggcgacgacaagggctggtacgacggcctcagcctgcccggggtcgactaccaggcgtgggctgacggcaagaacttcagcctcggggatttcctcattacagcagcaggtaggcaggcaggtagctccgcagctagatgaagatgacccaagcaagcaatgactgacccatgggccatggccctttcaggctcagctttgctttttgccaacgcgctctgtttccgttccgttccgtctgggaatctgctcgctttctctgtctctgatgcacatggtctgtgggggtagaggctcgatattatgccactctgttttcaattcaggtcgtcaagttatcagtcaccaccatcacaatggtatcactttgtttgctgtcatttcacgttggaagaacatggccaaagcgtacagcatcaggatgcttttgttgggggatggatctggagtacgaacgaacaactgctagcgcttctctgctagcatgacgattagcactctgtatagccagcccactcagatacgaagagagctgctagcagcagcagcagcagctcagctctctcattagctagctcctcgaccctgactagct

SEQ ID NO: 29219 - DNA, 1130 bp, Zea Mays
ctcgcgtccactgtgccccttcacttataggattcctcagatttatgccatgcttgtcagttagggtgccaggttctgctgttggtttcaggttggatagcttgcttaaacttagtgacacccgtgctcgtaacaataagatgactttaatgcactatttatctaaggtgctttctgagaaacttccagaacttctagatttcccgaaagacttgtctagcttagagctggcagcaaagatacaattgaagtctttagcagaggaaatgcaggctgtcaacaaaggactcgagaaagttgagcaagagcttactacatctgaaaatgatggtcctgtgtcagagatcttccgcaagacactgaaggatttcctcattggtgcagaagctgaagttaggtctttgacttcactttattctaatgtgggccgaaatgcagatgcgttagcgctttattttggagaagatccagcacgatgtccatttgagcaagtagttacaacactccaaaattttgtgagattgttcacgcgttcccatgaagagaactgtaagcaactggatcttgaaaagaagaaagctctgaaggaagcagaagacaatagtaaacaactggaccttgaaaagaagaaaacccagaaggaagcagaaacagagaaaataaagaagaaatctgacagtgagaaagcttgtaagaaagaactggaaaatgataaatcttctaagaaggattcagcaaatgagaaaggcaagcttaacaatcccatcaaagagctagatatatcacttcaatcacctgcacaaactgccagtgccaaatgacgaccgtaccagatgaactaacagtagcttttccgaaagaggaaaactagttttggctgctcccaacagtgcttccttttgacgaatcatgcaggataaggaagccgaaaactgcacttttaatacgttctcaggggattgtcgaagaaattaacctggcgacaagctgtacagatctgacataataatagccttttcttttggaaggcgaacattcccctaggccagttttatatctgcaactggaagtaaagatgcaagcatgcgggaactacaaaaataaagcctatttgtaggctaaggataaag

SEQ ID NO: 29220 - DNA, 302 bp, Zea Mays
cgggactgggcaggacaggacccttcacgcgccgtgcctgtcatgaaaacttgcataactccattgacgaagctatcatgttgaaggtattgatcaagatcatatcaagaaatcagaacaagttatgttatacttatataggatatgtaccacttccatgcgcacctgtggtgggagatcgagatccagtgtggcctcaaccaccccaacgttccacgatgaagaacgagtcgtcctcatcctcgagcacgcggcccttggcgagatcaataagatccttcacgccactggccgctcagtaa

SEQ ID NO: 29221 - DNA, 4475 bp, Zea Mays
tggcttcatattgagctggacttgaaggaacttagaagagcagggagtagggaaactacatgcgagatattcaatttatgcgaattgttgataaacaaaatggatcaattcacttgccttgttaaataattcttttccatctgtagttcaattatactccctctgttccacaatagaagtcgttttagactttcaacaaattcattcaataattgatgtatatgttatgtaatgtgtctagattcgttgccattcatttgaatatagacataaaaagaagacctaaaacgactactaatttggtacagagggagtagtactgttggatgtagaagggcttctttttggaggaaaatatatcttttatctcatcttacttgttcttgatattcctttcaagttgctaactttttcatgccttcacatgaaacaaagatatgccaccaagagtacaaccagccaacatgtatattccttggtgttcaagctggattgtctttgttgacgtcagagctgactatgatttttggcatagcactcggattcaacctcctgtttgaatatgatgatctcatcacagggatatgctttgcaacagtgatggaagggacaataaatgcctgcatagcaggatttgcacttcttagttatgtgcttggcttattggttagccagccacaaattcctctcacgatgaatgtaatattccccaagatcagtggtgagagtgcttactctctgatggcgcttcttggtgcaaacataatggcacacaacttctacattcattcatcagttgtccagggtcagaaaaagtcatctgcagttggtcttggagccttatttcacgaccaccttttttcaatattgttcatttttactggaatctttatggtgaactatgttctaatgaactctgcagcagcggaatctactaatactcttctcattaccttccaagatgttgtagagctaatgaatcagatatttgtaaaccctctggcaccaactatatttttagtggttcttctcttctccagccacatcatctcgctgacatctgctatcggtagccaagtgatttcacaccatttattcggtataaaccttcctctttctggacatcgtctcctactgaaggtttttgccatagttcctactctgtactgggcgaaagttgcaggagctgaagggatataccaattattaattatatgccagattattcaagccatgcttcttccatcttcagtcgtcccactttttcgtgttgcttcatcaagatcaataatgggagcccatagagtgtctttgcatctggagatactggtttttcttgcatttctccttatgctattttcaaatatcatatttgtggcagaaatgctatttggcgacagtgggtggatgaacaatctgaaaggatatactggaagccctgtggtgctcccatataccgttttagttttagttgcacttatatctgtggctttttcactgtacctggctgttacaccattgagatctggaagtcatgaagctgaatcccatgaatggtctgtgcattctcagagagaactcttgaatacttctcaagaaagggaagatgttaaggtggacaatgttacatatgaggaagatcaaagatcagatgttgtcccttctcccagggatgtgcctgacagccatccggaactggccttggactatattgatacttctgacactgctgtagaatctgatcacgactctcaacaatctactgcttatgcatccactgctcctgaaacctgctcctccccgtcgtttactcgcgaggagtcaaaatcagttgttgcagtcaactggccggagcctttggagaaggttcctacttctactgtgatggaggaaagcacagtagaaaatgtggtctctaggatcacgactgaaagagatgttttagtagaaacagatgttgtctcgggcaaggataaggaagatatccgtactttggagtctgagaagtcaattgttgatagcaccccatatgtgtctgatgacggtccgccatcccttactttcagcaggggaaagggctcagatgcaggaaatggcagtggtagtctctcaaggttatctggtttgggccgtgcagcaaggagacagctagctgctactcttgatgagttctgggggcatctgtttgattaccatggtaagctcactcaagaagctagcaccaaaaagtttggtatcttgcttgggatagaccttagaacacctagcacatctgtaagaacggataaacaagctgctgaaatacttaagagcccactggtgagagactcaatgcggggggcagcttttttgtcaagctcagtggacatgatgtcccctaagaatgaaacgtcgaatttggaacttgcatatgggcttcagaggggacctggcatgggattgtcaagctggtctcagggtatgcagctaccaaatacacagctgcagagctcaagcaatagcctacttgagcagagtgcaagattaaactcaaattttagttcatcttattcagacaacaatcagttctaccaacctgcaacaattcatggataccagctcacatcttacctgaaacagatgaatgccagcccaagcctttactctagcatgccgctggacccacaacggcttccaaaatcatctgtgtctgctgtgccaaactatgctgattccatgatgcatgctcgtaatcataacctgcttgcttcactgggtggtactactacacagcttcctgcaacatcccgcgtaggctcaatgatgcctgaaagatcgtattatgatccttccagcgttgatgggaatgaaaacgctggttcacctgcttactcaaaaaagtaccacagctcacctgatatgtctggaataatcgctgcaagtagagctgcactcttgaatgaagcaaagttgggtgctgccattggaccacagtcatacctcagcaggctggcggcagaaagatctcaatatgcaagctcaacagccaggcccgcggctccattagcatttgacgagctttcacctcctaagctccagagtgatatcttctcggcgcagtcaagcatgagaccaagtgctagatccctttgggctaagcaaccatttgagcaattgttcggcatgtcaagtgcagagctcagtaaaggtgacttcaatcttccaggcagatcaggtggcgtggccaaggatgatttctcttataaggaatctgagacgaagcttcttcagtccctcaggctctgcatcatgaagctccttaagctagagggatcagggtggctgttcaagcaaaatggtggttgtgatgaagatctaatcgaccgagtcgctgcagccgagaagctattgatgcaagggactgccgagaatcaactgctgcttcatggtggtgatctccagcaacattcttccgaccaggccggcatccagtacatgcgcacgcttcccaactgcggggaggactgtgtttggcgcgcgtcactcgtcgttagtttcggtgtctggtgtgtccgccgagtgctggacatgtctctggtggaaagcaggccagaactttggggcaagtatacctatgtccttaaccgtcttcaggggatcttggaccctgcgttctccaagcctcggggtgctctgacaatatgcacctgccttcagaaagacaccagagtgcgcaatagcccaccccacagtgggctaacagccatgggcccggtccccacaccgatccggggcgccttcacgaccgcaggcgtggttctggagatgatcaaggacgtggaggctgcggtctcaggccgcaagggcaggagcggcacggcggcgggcgacgtcgccttccccaaggggaaggagaacctggcctccgtgctgaagcggtacaagcggcggctcgccagcaagggccagtagcgcgcgggtgtcagacaggcaggcgatcgcaagcaatgttaggaggagcctgactattgttctccaggggggctgccactggcgccggcctccctgagccctggattttttcgttgcacgacgttcctagggaccggtggttgcccgatggtcgtcttggtcccttccagcaggttttttttttccttccctctttctgttggtttctttttgttggctttgtgatgttttgtaaggggcaactagggtatgtgctcagaaggactcaagatgtacacgcgaagatgtactagtctgctgatgcagcgttgtaaagtccacactctgcaggttaaccctttttggggccgtcaagtgttagtgcgtgccctatgtatgttaatcacccctgcagagaggttgcgaatactgaactactcacagacctgcacctgtcgagatcgtttgtaatatccgacgtcttgttcagaattgttctcactcttttttgcccgttgtgtaatttaccctgaagggacttcaag

SEQ ID NO: 29222 - DNA, 1773 bp, Zea Mays
gccttcactctgtcgctcagttattattatctcactgttccgcatgtgcagcaggccttcacctgggactgcggcctcgcttgcgtgctcatggtgctcaggacgctagggattgattgctgcgacggcattgccgatctagagaggctctgccgcaccacaagcatttggacggttgacttagcatatctgttaaacaagttttcagtcagcttttctttctgtaccgtgacccttggagcaaatccacaatattctgctgaatccttttatagggagcaattgcaagaagacatcgatcgagtggatgagctatttgggaaggcgctcgatgctggaattagcattcaagtccatcaccgcatacgacattgcttttctactgttatctgggcactgcattgctattgctttagtggacaaatcgaagctaaagtgagtgctttcatgttgctgttactagagtgatatgtatctgcttttgattcactctttctccatgaactaaaaatttcatagaaacaaagttgaagttggttttaaaaatggtgatggttagcctatcgttatttcaactttcaagtgtgttgtgtacttgtgtgacagaagaggtgatagttgaaaagctcaactatatactggttgctctgctcccagcttttcaagagtgtcatctctgttgaagcagcagtggatacgagaacagtctgcagttcttgaaattcacttcgggtgaactttttttttgtttcataagacaaacatctgtccatgcatccatgtgtgcatgtactacaaataaacagcctattatttaggttacttaggtgcaaaatcatttggttttcaactgaaaacaagtggtcctatattgttatggttatgaaatttgaggtgccgacagaacataataataaccgtaatcttgaatgcagtttgccctgcatgagtgatcatgatgtacaacagcacaacgatgagcctgactacatgggacactatgtcgtaatatgtgggtatgatgctgatgattgtgaatttgagataagagatcctgccagttccaggaaacgcgaacgggtgacaatgaagagcttggacgaggcccggaaatcctttgggacagacgaggacattctcttggtctctttaacaggaaagagtgggatgaagctgtcgcgtaagctacttgcctgctccatgtagataaataaataggtcactagcaaccttgtgaatacgctgtacatgtccctgtagtagttatgactgtcgagtgccagccctgtacgtagctgagaacgttctcgcagttaccgctgataacagcagtgtggtagtgagcttagtaggcaccctgtatgttggcccatgccgtcgccaaaccatggccgcgcaaaggggttcagcggcagcaaaaggctctgctgaccttgtaaacgagcaagtgttctatgtacgattgttaactgaacgtgtacagatctccggaaataagaattaaaatcgtgctcctctctgcaaccgtgctccgtccgcttgctgtgctgtgctgggagcgctcgcgttgctgtcgcctgtcggagtgtcggtcgtgtctgaatctcgccaatcattcgaggtagcttctgccagacccaaccgctggtgagttgagtgttaggtcgcaggaatcgaactggcgccgaatccaacctctcactcacccttcctacctgcctgcacgttgctttctactagcggtttgcattttagagggagcgataataattg

SEQ ID NO: 29223 - DNA, 1816 bp, Zea Mays
ccctcctcctcctcctcctcctctctctctctcctgggttagaagacgctcttttcttacggcggcgccaaagtggtgttcgaccagatgggagcgatgtgcgtcggctattcgcccctttctggtgcggtcaggtttgccgtatgtttcatgtgatctattgaactggattttcgagcgtcgtgctggttgatcttgttattgtaagttcttatgaatgtttgaggcatgaggatatgtaattagtggagtccgtacggtgagttgcctctgcaaaaaaaaaaggacctcacaggtgattcaatcctgaaggcatcaactatgttcaattttcaagaaatgtcttgctgttttacgtgtgcgacgggcatggaacgaaataatgaaaacgaaggaggaagcaaggtgaggattttttcctacagtgagatgaggaaagctacgcatgattttagtggagcaaacaagattggcgagggcggtttcggctccgttttcagggggaagcttaaagatggaacgatcgtcgcggtgaaagtcctttctgctaattcaaggcagggtgttcgagagttcgtaaccgaacttacagcaatttcagatatcgtgcatgaaaacctaattacattggttggttgctgtgccgaagggtcccagaggattcttgtgtacaattatctcgagaacaatagtctttcatatacacttctaggttcgggccggagcaacattcggttcaactggagagcccgtgtcaagattgctgtaggcgttgctcgtgggcttgcttatcttcacgatggaattcggccccctataattcatcgagatataaaggcgagcaacattctccttgacaaggacctcaccccaaagatctctgatttcgggctggcaaggctcctccccccaaacgcaactcatgtgagcactagggttgcaggaacaataggatacctggctcctgaatacgctgtgagggggcaagtgacgaagaaatcggatatctatagtttcggcgttttgctactggaaattgttgctggtagatgtaactacaacagtagattgcctcagggagaccagtttctgcttgagaagacatgggcatactacgtgcagggaaagctagagaaggtcatagacgccgaagcaggggaggacctgaacgtcgaggaggcatgccgtttcttgaaggttggcctactatgcgcccaagacgcgatgaagctgcgtccgaacatggccagcgtcgtcctgatgctgataggagagaagggaatctccgtggacaggatcaccaagccagccgtgatcggtgacccgtacctcgaccggaggccaagcaacgcagactctaccacgatgaagtccttcgccacgaccgaagctttaacgtcatcagaggcaaacacggagtggtctctgtgatggggggaaaaaacgtcatcatcgatggagatttgtttttgtggatgctgcagttgccaaacaaataccgcatcgcttctgttgattatgtttgtttgttatttttgtgtgtgtgtatatatacttgaaatggaaccacgggagtgaaacgaggattgaatatgctttacccatctttggtacaagtagaatcgtttgtgtttctatcatattcactctctttttttttcttctggaacatgtatgttatcttttcagtctgatcacctttgtaggtcagttccagcagactgatgatgtgatgcgtagcgttgatgcaacggacatacaccaccaccctttgtagcaagttgcatcgaacagtttcgttttccggaggaatacg

SEQ ID NO: 29224 - DNA, 2523 bp, Zea Mays
tttgaggtttctgacaagtcttccggttttcatgatgattataactattttactgtggccagaatgccagatgattctacatgttcctgcttggcacttataaacttgctgttttaagctgtttctggctactcaattatggctgtggtcaaagttttcataggaactttggttccctccacctatcatttcaaaacgaaattaccgtttagattttcaaaagggcatcttatggctgcaagactattgtagaagacttcatgtggatctaaagcattgtggtatttaatgatattactgtttttgtacggttttcaaaaggccaaattaaggcttgcaaaactattgtaaaagacttcctgtgggtttaaagcactgagctatttaatcacaacggttttgtttcatatgtatggtttttaaagaggcgattgtgtggcttgcaaggctgctgcaaaagattgtggatttttactatgtttctgttttcacttttttttacaataaacctgctgctatgtttagacataatttgtactctgcactgacaagtgtcattttagttgccatacttatttgcaggcaatgcaggtctatttgttcaggaaatcaatagtgcttttcagtatatttctaaagaaagttggatatttcttctatttatatataaagtaatacttcctagtttgcaaataatgtgctttatgttgataaaatgttgaagttgagaacgtttgctactccctcagccccaacaatgtgctgttttaggttcgagatgagtccagtgttcttaaggccgcgcataggtgagcaagcaaacaggtcaaccgccttagctcctaggtgagcaaggcggcaagatttctccgagcgtctggacacgcctaggcaacgccttaaaaaccctggacgagtcaaactttctttaaatataagtttagtgtgaaaatatatttcataacgagtctaatgatatttatttggtatcataaatgtttgtaatttttcatatagatttgttcgaaattctttttgcgatagggggagtagttcaagtaaaatatttgtttatggtatataatggtattgaaggagaggctactaagtatctgtctatttttcgttgctacttgctagggccttttgttgctggaatgatcttggtagcttatctttctcgtatctgaccgtactattgattacatatgtggcagatgcacactgctgtatactatctgactctctacattatcggcaaagaaaacctctgttttgttatgaatctcattgctttttagatgtgaatgttcattgctcatttgacatactcctttgcatgggcacactagattatgatagtgccacttcttgaatcaaaagcttttgaattttttggtagaatttactcagataaactatctactgtgttgcccgagaactaatagtaatgtttctaaagctttgcgttttctttttatgaccaccaaaactattttgttcttattcctttattgataacttacagcaatttatgcttaggtatagattgtgacattgtcatgttgccatttcattgttgcgtgtattcttgaatggtatacataattgttactttctgtaatataatatctttggaatatgattcgacattgttatctgtccgggaaatcaatagtgcttttcagtgtattgtgaccacagtttaacccttgtttaaaagcagttaaagaaagagttctggtgctggttgatagaattcatggccctgaagtggcagattaccatggtgcatggacgacccaatatcactttatttccttgttttaatgtcacggcaggccggttgaggtctcaagtttgcctttgagacaggtaagtacgaaatgcatacattagcaggtccaagtgatgcaaatagcagcagaaagctctcgagcttgttcgcttatgccgaaaaagggtatctacttattttgtctgtataaattagtataaattacagctgcaagcctgcaacagtctgaacagctggcttatagccgcacgtcatctgtaagagcaagtttaataatagagcctattattggctctaacttcttaccgtgtcatatagagccagcaataaacacactcatgtagtaaaactggctttaagattgactcttagatgaatttcttgtctcttatctcttttatccttttgtcttgaaacctgtgtagcacctaactcttgcatgagagctcactacctctattttttgatgtctctcttccacgtaagcaaaaatgacatgtaattagacttgagtccattattgtacttgctctaatttgtgaattcgtgagatgggagagttgcagtgatgtgctgtctcttcgtctcacggtgttgcccgcaaggagagagtggcaaggtagtgctgagacgtgggagcctgcgccctgcttcggaggctgtgcttcagcttcaaacgggtacacggaccgtaatcaaatgatgtatatgttgaattaggaaag

SEQ ID NO: 29225 - DNA, 3638 bp, Zea Mays
cgcgtcagttggccccacaactgcaccccatttcgaattcaaaccacctcctacggcccttcagccctcttcctgctccccctcctcgtctccttccatcgaagcttctacgccctcgccgaaggcccttgcccggggagcgcgaggcgcagtcatgacggagccgcgcagggtgtcgttccgcgacggctgcctcgcgtcgcggaaggccgaggaagcagcatggaggcggcatcaggctgcagcctggctccaagcaatggtgggctccttgggcctgcctccttatccgtcggagcaagagtttgttgcttctctaaggaatggcattgtcctatgcaaggcaatcaacaagttacagcctggtgccgtgacaaagattatcacaaatgcccccagcaatagccagccgttgacggcttttcagtatttcgagaacatccgcaacttcttagtcgctgtcaacaaactgaagctgacgagttttgaggcatctgacttagataaggacaatcttgatgctgggacggttggcaagattgttgactgtgtcatttcattgaagtcttaccatgaatggaagcaagccggcggagccaatgggcctaacaagtacatgaaatcacctcttgcagtgcgttcttcgcagattcaatccgaaaatgttgcttcgggaccttctccctccctaaagcgtctagacttgactgaggttgatgctgacacacagacatttcaaaatctagatcctaacatgaaagattgtgcatttgcagacgcagtggagaaacttcagaaagttatagtagattctatgttgagttctaaggaaaatattgaccaagacattctgaaaaaggttccatcaaagcttattggtgctgttttagcaagccaactgggaaaagaacagttcaaacatcttcagcttttatctccggaaaagcttatagcggagaatgagccaactcattgtattgagcatcccaactcaccgattgagagcaaacaattgctgttgcaagcacatgaaactgaacttttggacctcaagaaaatgtttcaagatgttaaagtcaacttcaggtctttgcagacccaatttcgagatgacatggccaaattaggtgaaaatatccaagatctttccaaagctgcccttggttataaccaagccgtaaaagaaaacagaaatttgtataacatgcttcaagaactgcgaggaaatatccgagtcttctgccggataaggccacttcttcattcagagtctatttcttcaattgaacatgttggaaccgatggctcagtgatggtctgtgatccagttaaaccacaaagtgcacataaaatattccagttcaacaaagtttttgggccaacaactactcaagatgaagtgtataaggagacacaacctttggttagatccgtcatggatggatataatgtatgcatatttgcttacggtcagacaggttccggcaaaacccatacaatgtgtggcccatctggtgggctgtccaaggattatggaattaattacatggccttgaatgatctcttcaacatatcaacttctagagaagatgtcaagtacgacatacgggtgcagatggttgaaatatacaatgaacaagttcgtgatcttctaaatgaggacagatcaagcacaaaattagatataagggcttccttgaacaatggtctatccaaccttccagatgcaaagatctgcccagtgcagtccccttctgatgttatcaatttgatgcagttgggtgaaaagcaccgagcttccggatcaacagcaatgaaccataggagcagtcgttcccacagtatcttaactgtccatgtaaatggaaaggacattgctggcaatgtgagccgtagcagtttgcatttggtagatcttgcaggaagcgaaagggttgataggtcagaagccacaggagacagattaaaagaggctcagcatattaacaagtcactctcctgccttggagatgtcatcaacgcattagctcagaagaactctcacattccttatagaaatagtaaactcacccaactactacaaagttcattaggtatatctggctgcacattataaaatgatctaccaattttgtgaacattaatcaacaacttattaggtggttcaatggttctacatctctgacccatctttttagcatcataatttaacttcatggcttcatcatgcctgaagttggctgatgccagttgttttctgttcgagtaaaattaagcttgctatgtcatttttttcaaattcaaactatatatgcaactctaacttctctatacattttgcaatatcaatgagtgacaggggggaatgcaaaaatgctaatgtttgcccacataagtccggatgcagaatcttgtgcagaaacccttagtacactaaaatttgctcagagggcttctactgtagaacttgggactgcactcgcaaacaaagaaagcagtgaagtaagagagcttaaggaacaggtagatactctgaaaaaggcattagcaagtaaagaactggaaaaaacaactcttaaagtgaagggaagtgcaaccacgagtgagagaacaaagcaagtactggattgcactccccctaggccacggagattaagcctagagaatgctagtgataaagccaggatgccagaaagaaagatactgaaatcccctcgttcagctgtgggtataacccacgacaaggaatgcaacactgatgccttccgtcacgccaaccaccacgaatcactaatacagatgtcagcggcatgcgctgaagttcttgttagagaggaggagaagataatttgtacagttgatacagtggaattttgtcagctacccactgaagcttataatctacttaagcaatcaggattaaatactccagaggcagcaccttgtaggtcaaggaacctgcgcactgaagcaagttgcggtgatgctctttcttccactaccaaattggagaaaataatggcaggtactgcagtgaagaagggatctcaactaaagaagtcaattcaaagcagcatagggagattgattcatggtactgaaagaaggaacgcgcagcattcagcacaagggactccaactaaaatcatagctagcggatgccataataatgtctccccagttacagctgatatcaggttaaggagaagacagtcactgacaggtatcccaccaccgctcccaactatgtcacgcagatcctcacttggagggaggtcggatacaagttcaaacgacaaaagaggtgcaaaaacaccacctcccgtgaactcggcagcaaaggctaaaagatggctttgaatctgaagcagaactgtcagaaaattttgactccaagcagagctcaaggcagacacgtatttggtgccatcacttaactgtggttttaggccttgggtggtggttacattctttgtaacagctgaagcattagttgtacaagggggaagggtgtgtgtttgttgtattctggatttctatgatggagcattggagcaactcacttgttcgatttattatgggatgtttgttttgaggaaatcaccccatctaagatgaagtggtgcattatgagttca

SEQ ID NO: 29226 - DNA, 1313 bp, Zea Mays
attttggatgttacaaacacctaaattctaaccactccacaactactattgccaaacacctcgatagattttctctgtaatcaacttcaccttacagccatcagaaaaaagctataccaaaaggctggcatagcacgtggagatccacacaacgtcgtcctgcacatcgcagccgtccagccagatgccccgccgccgtcggtccatagcatcgattcactccgcgcgcgccgctgtctcctcgtcgtcgccgcgttcctcgattatctctccatggcggccgcctcatcccccgctgcatccgccgcctcccccggtaggggtgccggcgaccctcccgcggcagccgcggcggcgacggcgaggacggctgggtgcccctgccccatatgcctcgaagccttcaaagacgaggcctacctcgacacttgcttccattccttttgctacaggtgtatatgccagtgggtaaggatagtagcgagcaagcacgcagaacctttgtcttcagttagatgtccactttgtaagactgagaatctatccgtcatacatgcttttgatggcgaatcatttgagcggtggtacataaatcaggaacctaggaagaggcgtctttcagatgcacacgagttggtgtcacaattctataacatgaaagagaccacaagcaacatttctggggtgcagcaatactgggagcaacaaagatatctccgtaagaaaatttggcttcaaacctggctaagacgggaaattcaggcccttactcgggacgagaacgttgaggtcatagtccaccacattcacggtgtcatgggatccttcatgaagaggctcgaaaaggagcacacgtcgtcaaggtggacgacttcaccggagaaaaggagggaagagttcaggagattggtttccgatgctgctaggccgttcctcctcggccgaacggagcgattcgtcgccgaggtggagctcttcctggcatcggatctcaacatggaagcctacaacaaactgcgcgtccagaggtttagggagtccagctctcatctaacgagagagcaagatgcactgcctcgtgatcggtcgcttgaggagcactacatgtatttcctgtgtaacgacacggactgtgatgagatgtagtgatctgtgatccctggtactatgatgcctttttttagcctggccccgattactagagagttcacggtacaacctaatgctgatacatggaacatacatagcagtggcgaacttgtttgatttttttaataaaatagaaaagaaaaactaagggatgaacttcggat

SEQ ID NO: 29227 - DNA, 2546 bp, Zea Mays
tagatccattatgcaactattttcatagttcacttctttgatatggtccagtatagaatgcatccttgcctctcggagttcccatccaactgcttctatgaaggcacactgcaaaatggagtgactgttaatgagaggcaatcgtctggaattgattttccttggcctgttccaaatcggcctatgttcttctatgtgcagatgggacaagaagagatcagtgctagtgggacatcctatctcaatagaactgaagctgcaaatgttgaaaaaattgtaacaacatttttaagaagtggtgttgtaccaagccagattggagttatcacaccttatgaaggacagagggcttacatcgtaaattacatggcaaggaatggctctcttcgccaacaactttacaaagaaatcgaggttgctagtgtagactcatttcagggtagagagaaagactacattattctatcttgtgttagaagcaatgagcaccagggaatcgggtttctcaatgatccgcgcaggttaaatgttgcgctaactcgtgcacgttatggcatagttattcttggtaatccaaaagtactaagcaagcagccactttggaatagcttgttgacacattacaaggagcatgagtgcttggtagaaggacctctgaacaacttaaagcagagtatggtgcaatttcagaagccaaaaaagatatataatgaccggagattgttcctgggcggtggtcaaggtgttatgcatggaactaactttggggctggggcctcaagccaagcagcagataagagaagtggcagagggaaagaaggacaatcgtttgctccttatggccctccaaatggggtgcataagcctggtgtgcacccggttggctatgctgtaccacgtatgccttttcctccatttcctggggctccacattctcaaccatacgcaattccaacccggggtttgcatgggccccttggagctgttccaccggtgcatcaacctggaagtagaaactttgggtcagctcgttcaaatactggtgggcctattggtggccaccttgctcatcaacagaactcccagcaagctatggggagcattgggtcaaattttaactacactggaatggagaatccaagtagtcagccttctggtggagcacaaatgtcccaaactggattaatgacccaggtgcctgtccaaggactaagtcaaacattccgtgatggtttttctattggtgggatgtcacaggacttctttgtagacgattttaagagccaagggtcacatgtgccatacaatattgctgaattttctacccaggcttctcaaggtggttatggtgttgagtttactcaagcgccccaatctggatactctgggaattatatgaaccaaaattcacatcctggatactcccatattggtacaacaaatgacattgtatctcaggatcacatggcccatggatctcatgggatgtttacacaagcgggatataatgatccctcacaagatgagtcgtctcagattcattatggaatggctgccgctggccctctacagtcgcagtctcttcaacctccgccccagtgataatgaaagcttgtgataggatgaagccaaattttggaagtttggtgggttgcatcttttggcccacatgtgcacttctccgctgtttcagactcgatggtgcatagacatcagatgcaagcaatgaaggcacactatgtattggctatttatcggggcaggcttgactgaggggcacaaggattgcaacgtatcattgatcgttgtagttcactgcccactttggccacaggagaggtcatatcatcgagaggttgacggcactaccctcatccctcacctgtatagaaaggcaatcggggccaatagtggtacgatgtgaatattccaggatttgctgccattcagaaagtcaagttgcagcaactgcatgcctccatggtaccatgaagacacgcccgtagagtggctttgtatagaggtgctataggcgaggtggacaaccctttcggatatcgcacatggcaagatatttacattgacattttgtatgcacctgatatggttttgatatttatgccacaaatcatttaggtggtgatgcaagtagtttgttgtgattggaaatttgggagtgttcgtgaaagcaagtttgatcctgaaatcttatgggggaatggttgagtgggggttattttgttgtgaaacaggtgtctttgaaaagaaacctttccaggagtgatttcatcaagattgattgttagaatagacattagtaactgttataaatggttaacatggtcaccaaagcggtacgtctagttaacatggccacaaagacattaatcaactttgagacgaatgacaggacctaaaggggcatgttctttggcaaagtagaagtggtcgtctcgcagttttatagcaagacggccattgacttatggttccaccactcccaccccttcccatctttggtagattttctatcatatctcatattt

SEQ ID NO: 29228 - DNA, 1798 bp, Zea Mays
gtaaccgcgcagcagttctagttcctttactcaacgaaggagggggcccagactgcagatttagttgatagctagcgagcggttactggttagggtcagttggtagattcagcagtccatggaccagtcggcttttctactggcacttgtcttctccctgttccccttgttggaaattcagccagctgacctcagatccagattccaccacgctacagatagttcggcctttctagatatattctgactggttactggtaacctaacgtcgtagatacctctagacttctagagtgtgtcacggtcagctagtctttgctgccgagaagaccactgctgatttccacttggtgtctactgcagattttttttttaatcttgcccagaagtggtcatcagcatgtggaagttccggtcccttcggcgaaaaagaacgagcttctgctgaagctggaggcagcaagcatcaacccagtggactggaaggtgcagaaaggcatgctgaggcctttcctgcctcgtaaattaccttttatcccagtgactgatgtggcaggagtcgtggctgatgttggtccaggaatcaatgggttccaagccggagatcaagttgttgctatgctcaactcatttgtaagcacatgctcttaactatgtatgttaagtgcatcacatcagtcggcctccatatgttgtgttcgaacggaggtgggcttgcggagtatgctgtggcatcagaaaatctgaccgtcaagaggcctcctgaggtatctgctgccgaaggcgcagggctgcccatcgccgccggcactgccctccaggcgctcaggaccatcggcgccaagttcgacggtactggaaagcccatgaacgttctggtcaccgcggcatcaggtggcgtcggcctctacgccgtgcagctcgcgaaacgggctggtctccacgtcactgccacctgcggcgcgcgtaacgtagagctggtgaagagcctgggcgccgacgaggtgcttgactacaggacgccggagggtgccaccctgcagagcccctcgggcaagaagtacgatggcgtcgtccactgcactgtcgggaccagctggtcgacgttcgagcctgtgctggccgccacggggaaggtgatcgacatcaccccgaacttgactgccatcctcaaatcggcgctgcacagtgtgaccttcgccaggaagcggctcgtgccactgctcctgtcgcccaacaaggcggacctagagttcctggtcgggctgctgaaggacggcaaactcgagacgctgatcgactcgaggttcccgctgagcgaggtgagcaaggcgtgggagaagagcatcgagggccatgccactggaaagatcattgtcgagatgggagactgatctgggacgcgtccattgccgatagagacttgcagtagcatccactaggctgttggacactacagggttaaagtcaacatatacgaagtagtactagtatctgagtttggtcgtcgtacaaattgttcgtgagtggtgagccagtttataggcttgtttttcttttgttttcagctataaacttgaacttcttgtacagtttagggttttatggggttgcatgatagatccgcaaagttgcattgtaattacatatttgggacttgggagttgctatatttctgcttgaaacttcagaaatgtttagacaacataactacttaaggacacctcacaagaagaaatttagggtttttttctatatccaaacaacaaaactacatgttgcctaaataataataaaa

SEQ ID NO: 29229 - DNA, 196 bp, Zea Mays
gcacagaatcgaatgtcacatctttactatataataggagttatgtacaaaataaataaataattatattataagaagacaacggtccagcaacccaaagttgactgggagacgatggcctagacctctcacgaactcgtcacaacatcctccatgtgcctcatcctgcactacttgttcttgacctgtgggggtg

SEQ ID NO: 29230 - DNA, 1079 bp, Zea Mays
tcccctgcatggcctgctcatccgtccgttctttgcctctcgatcgttcttcctgggacggcgagctggatctcgagctcggtctgggctgcgccagcagcgatccgtccacggtcgccgtcgaggcgttcagccccgcgacgagcagcagtagccgcaagcagaggacgatgacgctgacgctcggtctgccggaggaggaggaggagacgggcgccggctaccctcacagcagcagcagcaggcgtcccccggcgcctgctgccggcatgttcgggcgcccggctgacgaccacgtccacgtagcaccgccgtcacaccggcaatggcagcagcagggacggcacgcagctccagatgcggcgcctgagcgacgagcggcagagccagcagatcggcagcggtggggccggggcgcgcgctggcccatcgccagcggcagcggcattaactgggactgggcgccgccgtacgccaccgcccgcgccggcaccgacgacgacgacgccagcagcgccgccgctgcagcatcatcaggattcccactgtggcagctgggtgcggcgtcgtccaggtccagctggcccagccgctgagcctttcctgtcgtcccgcgccagcaacagtgacgctgctgggccacgtactgacggcgactggtgacctgctgaaaccgccgccggcctgtttcccttttctaggtaaaagcagtggcagaggggcgagctagcgacagcgtgcctcgtcatccatcgtccctgcgccgtggctggcggggtgggaaaaaggtctgagcagttttgagcgtccggaggagctcgacgatttcctgccctcgaatagtcacttggggtggccactagttattatttctttccttccccctcgttgattctgctacccattatagcttctgtatctagctacatgcatgatgctgctctagcgctgttggacgttgatggcacggtgtacggatatgggacagggttcgtgtgaccccatgtccactgctaggcctgtttccaaatggaatatttctgcagtaccatggcttatagaaatgctagagtatttta

SEQ ID NO: 29231 - DNA, 464 bp, Zea Mays
gtcactatcatgtcttgtgtgcactagataagagcatcaaacatgtttggtgttgttttttcagtgctaatgtcacacccaggtttcgggggcaccaagacccgagcgcgaacataatcaccaagtgtgctgggaccaagtctcacacatatgatgactcatggtacagaaacgaatgtcacatctttactatataataggagtattatacaaaataaataaataattacatcatatgaagacaacgatccagcaacctaaagttgactgggagatgacggcctagacctctcacgaactcatcacaatatcctttatgcgcctcatcctacggtacctgttcttgacctgtgagggtgtgagacagcaagggtgagctcacatacgttcatcactcaacaagttgtggggaataatgtgcatgaactcgctaaaggtgggagctcatgtgaagtgtaaggctt

SEQ ID NO: 29232 - DNA, 2131 bp, Zea Mays
gttccgggttcgagccccaacctctgcatattatgcgggcggagctggagatgtatatccctctctcattcaggcagttctacctcgaatactctatgctgctgcacctcctggaaactcagcttgggagaatcgaaagcaatgtctcaaggttttgaaactttggcttgaaaggaaaacactttcagaatatatcatccgtcaccatattagagaaattgagactatcaacgaggcatcatttggaagttctcgccgtccttcaagaacagagagagctctaaatgaccctttgcgtgacaatgaaggaatgcttgttgatgagtatgggagtaatgctggttttcagctacccaacttaatttgcacaaaagtacttgaagaagaggaagaaaactcttctgaaggcaggagcttgagctttgaagctgttacacctgaacaggatgccccatataatgatgacaatgaagaatctcaaatgcctgttgagaagcatcaccatattctggaagaggttgatggtgagcttgagatggaggatgtagctccaccatctgatattggggcaaccaccaagtgccaaccagagcaaagtgacaccaatcgtgcaccatctgaccaacgcccttcagatgctggccctccacttcctgtggaccggcctccatctcctccgccattgccatcatctcctccacctgtccccgttcctcagagtgcacagatgcagcctaaattacaaatggcatctgatcccatggcgccacatcctcaaagagctacatatagtgttcaaagtcaacaacagcattctattgcagagcacccagttcaggatatggagggcaacaaaatcagataccacctcccccaccaatggcaccactcaatcctcctggtccccatggcagtttccctgctcccccagcaccttaccatgggaacaactatcatcggcctccaaccacatccatgcctaacgagggatatcatcagcaaccaccaccccctccaccgcctccaaatcaattcccttctgtgccaccagaacaccaacataggccacatcactggggtaataactgtccaccgtatcccgagagatatcggtacaatggacatgatcgaggtaatcacagacatgatagaaggcatcatggacatgacagacaacaccattatgatgatagaggataccactacgatgatagaggatatcactatgatgatagaggccattactttgatgatagaagacatcattttgacgatagaggacatcactttgatgagagagctattagggggccaatgcacaatgatgccgctgaccagggaagatattcttttcctccaggtcctcctcggattcctgaccattttgaagctccaccagccccaatgcactatgggcgaccatcagatcctccgccaaggccttgtgcaggctggtctaggccgcctaggatatctgataactattctccctcgagacattctgtggagcctccagtttcacatacagctggaggtcatggtggatggagacctagataacctttttcggtatcgaagcggtgctctgatgctttccttggtctgtgggggcttaacctgtgggagagtctgtctggtgtctctgcttcaggttgaaggcacccacggaggtggagcactccaggaaagtgggagctggtacctgcctccttgtacagatgtatctcatggattctacggcggtcgggctgcctgaactgctgtttgtaccctagtaggggtttagactgcgcgaccacacgcagagctgagttgtaggggtgtagggtgtcttctatcaaccgatcgtagtcttacattgtactgtttgttagtgcaacagtcctcgattccattgctgaattcctcctggcctcatcagacgacagccagctgctctgatgtcttgccgaaactgtttgagcacagcgtacatatatgcctaaaaaagagaaatataaatcattttgcccgttgcacctgcttatatataagagcatggtcgaactaaggggtgtttggtttctaggttcgctcaattttattttatttaatatggaaattttagttaacctagaaattagtctctaga

SEQ ID NO: 29233 - DNA, 534 bp, Zea Mays
aaataatggaggctcgctctcactaagctccctgtttgctaaatcgcaactaatccgatgcaaaatatttgtagaagaagagagaatagagggttcaacgcagaggcagaacaacagctgccccaccaagcgccgtcctgtcggagatggcagctgcggctccggcggcgtgcaaggggaaacgaaagcggcacctctccgaggacgacgtctggctcctcctccacaggtaccatccagggacgatcctgacggcgctgcaggaggtggcgcagcacgcggatggccggcgcatagactggagggcggtggtggcgaagtcggccacggggatcacctccgcccgcgagtaccagatgctctggcgccacttcgcctatcatcacgacgtagacgagagcgtcgacgccgatgaccagcctctggacgatgacagtgacctagaactggagcttgaacccgatcccaacctgaccaaggaagctttatgtgaggcctctgcattagccaaggaaagagaggcacctgcttgtg

SEQ ID NO: 29234 - DNA, 2916 bp, Zea Mays
taaggttaacccgcaactgtcaaatctcatttgggagggcggggcggaggaagtggaggagggtcgtgctcatcgccgtcgctgttggctatcacgatcgagagaatggcttggggaggggatggaggtggaggacccacaatacccttcaaatgtgatctgtgaagacatttacatatgagtcactgaacaacattgcaaggttcataaatggaatgtcagcactcctattgacactattacctggaaaaggcaacattttagaagggataaatggctgggaacttaagccagcactccgtgggccgcgtcttcctcgttggatggaaagtggggtatcttcgtttaatgagttcatccatgaactttctgttgattctgatgctgattcaattgctgactctgtcgctggggacgatgatcatgaagagtttgtctgccctccgtctccattgtcccaaagttcacggttatcacatgcaagcagctttggtagacatgatcgtcgactcaggagacatatcagatatgcagtttcttggatactatggccattgagattctttgtttctttaatattcattttgttcaatgccattaaatttcggatggtaagatcaactgctaaaggtgctgaaactcctcacctctcaagaactggtcttgccaagaaatcatttcatataagggaccagtttctccaacgcacaactgataggaggcgtggagtttttgaggatctgcatctggcaattgagattttcatcgaatcagtctttgacatcgttcacaaagcagcacattatattctttctccttcagaagtgtggcagaacctgttttgctggattcaaggaagtggtcatgatactagttctgtcgttgatgtattgactgctaatgttggcagtgataatcctgttccaacagagaggaagactgtgtatcgtcattctctgaacacagattcccggacatgtgaagatgttattactgagcttgggtatccttttgaggctataaaggttgttacttcagatgggtatgtcgtgttactggagagaattccaaggcgtgattcgcagaaggttgttttgttgcaacatggaatattggactcatctatgggctgggtgtcaaatggtgttgttggctcaccagcatttgcagcttatgatcaaggttatgatgttttccttggaaatcttcgtggcttggtctcaagggagcatatagataaaagtatttcctcctacaaatactggaaatattctgttaatgagcatgggactaaagatatgccagcaattattgaggaaattcacaagatcaaaatatcggaacttggcaaaagtcagcctcaatcagcagaggggacaggagatcaaaatgataagttaaaaagtttggaagtacaggcttcacaggaagacagtatagaagaccaaccctacaagctttgtgctgtatgtcacagcctgggtggtgcagttatgctgatgtatgtggttacttcaaggatcacacaaaagccccacagattgtctagactggtcctgctatctcctgcaggttttcatgaggattccaatgtggtattcagtatggtagagaagctcatcttgtttgttggtccagtgcttgcaccacttattcctggactttacataccaactcggttctttaggatgcttctgaacaaattagcaagggatttccacaattatccagctttgggtggacttgtccagacccttatgggctatgtcgttggcggtgacagttcaaattgggtaggagtgctcggtttgccccactacaacatggatgacatgcctggtgtgtcatttcatgttgcgcttcaccttgcccagataaagagggcaaagaagttccaaatgtatgactacggtagctctgcagcaaatattgaagcgtacggaacaccggaaccattggacttgggagctcattatggtctcattgacattcctgtggacttagtcgctgggcagagggacagagttatctcaccatccatggtaaagaagcactacaagctgatgcggaagtcaggggtggaggtttcatacaatgagtttgagtatgctcatttggatttcacattctcgcatagggaggagcttttgtcctatgttatgtcccgcctacttttagtgactgatccaggtaaaggccgtatcaagcagaccaccgtgcgactcaggaggcagaagaaagttcagtcagagattgaggagagcattgagtgcagagccaaggaggaatctgatgaactagctggacatttggagtgatgtggagcctgcaggttaagagtgtgttgtaagtttgtgaataggatactcgtgtcgtctctcatatgttatacaccatgtggaagatcaggggagaataggtctctgtttctagtatcatgttcatggggatcgctttttttaacccctgtaagtaacagtagaggtatatgcatcgactccgttgagcattaggtgtcctgctcttttaagtatcgagaacgaggagaatggtcaggaaccggatgtttacctggcaaatatccagtgttcttgcgacttcttttgtagaatgtcacagccattcaaaggatgtgatgtcaggcgtgcaagcgatggacagtatgttttctgcatatgttatggacagtatgtttcaactaaaacgtttttggtttggaaccaattgttactgttgcatgagtgttattgagcatggataattagcatagaaatgtaattctagtttcactggaatggaagaaagcttgttcactagaacgtaaaattggatctggacgctcctgaagaccggatcttgtaaaattagggtctgtgatccgttcttttgttttctccagcccccatgaacactgcg

SEQ ID NO: 29235 - DNA, 823 bp, Zea Mays
ctctgttctgcccccgaaaaagcgccctctgccctcaccacaacctcatttctcgcttgggtctctctctcactcacaagtcacaactggcctgtcacctctgtgggttctggaagtcgaggaaatggcatgtccttgcaaggtctcttcctgggccatgaccccaaattggcaccgccattaaatgtttgaggtgaaaggattaccagggagacgacgccctgcagcttgattaacacccagatgactagcactcctgggtccacgagatccggccactcttgccaccgcagggtgaacgctcctccggtgcacgccgtcccaagttctagggagatgaatgagtacttcgctgccgaacagcgacggcaacagcaggatttcattgacaagtacaacttcgatcctgcaaacgactgccctctcccaggcaggtttgagtgggtgaagctagactgatggattcagagggacgagagagcagcaggcatggaatggaactcactccccgctccctccacaccaccccagcgttgtggcagaggcgcataccgtcgtgttagcttcgtttctgctgtaaaaaaaaacccttagtgttttatttagcatgtagccttaactggtcgtgtgttacagtacagaactgatgctgagttacaacaccctgatctgatccctcaactccaatgtaacccttaacagctcattctgtaaggaacctgtcaccctgttacctgttgctgaactaatgaagtagagctagataatgacgttttatcgtagttattattaataacttatcctctgtgatgttgcacctgaa

SEQ ID NO: 29236 - DNA, 1108 bp, Zea Mays
gcttacacgcgggcctcacggatggacggtcccactgtcattgagaatcgcaaccacccgatccccaaccgcccggcccgacattccctccaaccgccgctgcggctgcgccgcccaccgccgacaggcgacagcatcgacaggcgcagcagtcaacaggaaccgagccatggcgagcgcggatctgctgcggagggaggaggagttctactcctccctgtttgattccgccaaaggcgatggcgccaggtcgcgctcacagctgatcgagaggaagatcgaggccctggaggacatggccaccagggtcagtaaccggagatcgcggaagtggtttaacgaccgtttgctgattgaactcgtcccgcgtctttacgttgaagagatcaaaggcctattcgctcctccgccgtggggtgagcaagtgcccttgtcagcattctacagggcaaatgttggtgaatgggattccttcaggagcattgacatggatgctgaggcaagattgatgcagcatatgaaaaaatcattggaaaaacccaggaatcatgtcgatgaaggggaatcgattgcgctgaatgcttggcatcgaatagatcgacacactagagaagcaataaagagaaatttccttcctgatctgcttggaatatatgaagaacgcgttagggccttcattgaagacgctagtgacaaagatgctcttgtgctgaatgttcaggacccatttcagagactactgctccacggtgtttgtgagttctacaacgtgagctcgacaaccaccagcagtgtgagagaagatgggaggccttggaaggcaaccaccatcaagaagaggcagggcaccggcgttccctctagaatcacactagttagctttctgagaatgaagaagaatggatcgcagtaacgttagttagcgttcaagaatacaacaaaattgctttagattccgtttaggctgttgcaagacaagtgagtggtcactggcaatgtgttcttatatcgcatcagcctgctggctacggtttggaacttcctgacagaaagtagaaacttccggttctacaatctttgtgcgggaacttacctcaacacatcgcaa

SEQ ID NO: 29237 - DNA, 1602 bp, Zea Mays
tttccttcccacatggcaggcgctgcacccgcgtgggagttttgctgctggggcccagacctttttccctgcatgcaaggcgaccgccgccgtctccatggcaatgccctggatgcctaacacgaaaggtggacgcctaggaaggcaaggcagggacaccatatctaggcgatcctggcatctaaagttttttctcgcctgttgctccaactcgaggtggacgatttgaggttatttttgtttccccaactggtgaggaagttaagagcaagagacagctaacccagtacctgaaagctcatcctggaggccctgcatcctcagagttcgattggggaaccagtgatactcccagacgctcagcacgcttgagcgagaaggtcaaggcaactgagagcccagagggtgagaagacccctaaacggggaagatcaagttctaagagaggcaaaaaggaggaaaaagaagacacagaggctgcaaatgaggctggagaagatggtgcttcggaggaaggtaaaggtacagatgtggagatgaaagatgctgaaaacgctgaagacgagaagaaagaggtcccaaatgcagatgctgcagagaagactgaggaaggtgaagataagaaagaggaggcccctgctgtagatgcagcagagaagactgaggaaggtgaagataagagagaggaggaggcccctgctgtagatgcagcagagaagactggtgagaaagaggtggcccctgctgtagatgcaacagaggagacagaaaaaagcaccgaaggccaagcacagcctaattatgttgctgccccagaatctgagtataaaggagacggaaagccaggtgaatccgaagcagctccccttgcatttgttgatgaaacagctccccatgtaattattggtgaagagaagaaagaggaaaatactgagaatgagaacagtcaggcagccgaatctgccgtgccttccctggcatctttagagggagagaagaaagagaatggtggtgcccctgaacaaccagccctgcctgtagctgagacgaaggcagatgctcctccggcagaggcagaaaagggggctgaaaattcaggccagccgaataccggctctcaagaaccgaaggcagcaaactgcgacgaggggcagattcaacctggtgcctctgctgtgaggtgcacataagggagcttgatctcagatgggactctgttgcgttatgtctttaggacgatacctcgcatttgctttgagaattgtaatcgtggttaacctgacagcgctgtgtagcactaggctgcccagcacgtagttatcctttcgtttcttttataacggtggtgttgcagcatgggtaatgggccggcctgtgctgcctcagccaccactgcatacccagtgtaagtgtaactcgttattagcgtggtcgacattgatctgtggagaggactgcaggacagtactgtcctcgacagctgtaacgttacgttttgtgtgttcccttgtgttattgaacttatattatgatccataaataaagccataagcgtggcagggtcattccctgaccaccttcaggcatcaccatttgttggcc

SEQ ID NO: 29238 - DNA, 2597 bp, Zea Mays
  misc_feature (2596)..(2597): n is a, c, g, or t
caggagcagcgcagcgcagcgcagagcggcgccgcgcgcagcacctccacgcccccagctgcctgcacatgtgagcggccgcggagggcgagagctaggtacatttcgttgtgccgccgctgcggggtccgtgcgcgaccgagatccggtggggcggtggacagagatggaggcgagcgcggggctggtggccggctcgcacaaccggaacgagctggtggtgatccgccgcgagtcaggagcgggcggcggcggaggaggcggcgcggcgcggcgggcggaggcgccgtgccagatatgcggcgacgaggttggggtgggcttcgacggggagcccttcgtggcgtgcaacgagtgcgccttccccgtctgccgcgcctgctacgagtacgagcgccgcgagggctcgcaggcgtgcccgcagtgcaggacccgctacaagcgcctcaagggttgcccgcgggtggctggggacgaggaggaggacggcgtcgacgacctggagggcgagttcggcctgcaggacggcgccggccacgaggacgacccgcagtacgtcgccgagtccatgctgcgggcgcagatgagctacggccgcggcggcgacgcgcacccggacttcaaccccgtccccaacgtgccgctcctcaccaacggccagatggttgatgacatcccgccggagcagcacgcgctcgtgccgtcctacatgggcagcggcggcggcggcaagaggatccacccgctccccttcgcagattccaaccttccagtgcaaccgagatccatggacccgtccaaggatttggccgcctacggctacggcagcgtggcttggaaggaaaggatggagggctggaagcagaagcaggagcgcctgcagcatgtcaggagcgagggtggcggtgattgggatggcgacaatgcagatctgccactctcggcagccattgtccagaaaagttccaatatcgtcaagccgaataaatccctacaggatgattatcgttatccggttggtggtgttgggtttcttcttccattaccgagtgatgcatccagcgaaagatgcatttgcgttatggctcatatctgtaatctgtgaaatttggtttgccatgtcctggattcttgatcagttcccaaagtggcttccaattgagagagagacttacctggaccgtttgtcgctaaggtttgacaaggaaggtcaaccctctcagcttgctccaattgacttctttgtcagtacggttgatcccacaaaggaacctcccttggtcacagcgaacactgtcctttccatcctttccgtggattatccggttgagaaggtctcctgctatgtttctgatgatggtgctgcaatgcttacgtttgaagcattgtctgaaacatctgaatttgcaaagaaatgggttcctttctccaaaaagtttaatattgagcctcgtgctcctgagtggtacttccaacagaagatagactacctgaaagacaaggttgccgcttcatttgttagggagaggagggcgatgaagagagaatatgaggaattcaaggtaaggatcaatgccttggttgcaaaagcccaaaaggtacccgaggaaggatggacaatgcaagatggaagcctctggcctggaaacaatgtacgcgatcatcctggaatgattcaggtattccttggccaaagtggtggtcgcgatgtggaaggaaatgagttgcctcgccttgtttatgtctcgagagaaaagaggccaggttataaccatcacaagaaggctggtgccatgaatgcactggtccgtgtctctgctgtcttatcaaatgctccatacctattgaacttggactgcgatcactacatcaacaatagcaaggccataaaagaggctatgtgtttcatgatggatcctttggtggggaagaaagtgtgctatgtacagttccctcagaggttcgatggtattgaccgtcatgatcgatatgctaacaggaacgtcgtcttttttgatatcaacatgaaaggtttggatggtattcaagggcccatctatgtgggtactggatgtgttttcagacggcaggcactatatggttatgatgctcctaaaacaaagaagccaccatcaagaacttgcaactgctggcccaagtggtgcctctcttgctgctgcagcaggaacaagaataaaaagaagactacgaaaccaaagacggagaagaagaaaagattatttttcaagaaagcagaaaacccatctcctgcatatgctttgggtgaaattgaggaaggcgctccaggtgcagatattgagaaggctggaattgtaaatcaacagaaactagaaaagaaatttgggcagtcttctgtttttgttgcatcgacacttcttgagaatggtgggaccctgaagagtgcaagcccagcttctcttctaaaggaagctatacatgttatcagctgcggctatgaagacaagactgactggggaaaagaggtctatataccatatataacctgattcaaagacttttgactgttctatttaaataaagatataatgtgctaagtggatcgtggtttgttgcnn

SEQ ID NO: 29239 - DNA, 3948 bp, Zea Mays
ccgaacttcacggggacagcgtataggagtaggtcgcagcggcggaggaaacccgcttggcaagggatctatcccctcgtattccccttgcgtgcaaagctcactccccgtgccctcgccacgggcacccgaggaaagcctcgtgcactcgcggataggcagtgggccctgggtggaagagagtttgctccggggacgcgaagccgggtggggagaggcaaaccgggtgggatttcttgggattatttaagggcgagggagggagataggcacacgaaagcaacagcgaggagagagaagggaaaagggtgaaggaagccagggcccagggagttgttgaatttcggttctggtcggcgtcggaggggaagggacgacgagcggcgaggaagaggtgtgcgaggggaggagggatatggtggccagctgagtctgcggattgcggcggcagcggggatcggaggcagtgaggggcggcggcactcggatggtactggctttcgccagccccggaggcggcgatcgtggatgggcagcggcgggattgcggggcgggggttgtaggagcggtggcggcggggaagttggactcggagcgggtgcttgtgctggtctccgggctggggcagggagaggaggtgagggagcggcggggagggatgaggcgggggaagggggcaaggaatgggttgctgccgagttcgctgcggatcatatcgtcctgcctcaagacggtgacctccaacgccggctccgtcgcgtccagcgtgcgctcggccggcgcctccgtcgccgcatccatctcctcccaggcagaggacgagaaggatcaggttttgtgggctggattcgataaactagagcttcatccatcatcattcaagcatgtcctgcttgttggttattcaaatgggtttcaagtgcttgatgttgaggatgctgcaaatgtttgtgaattggtctcaaaacatgatggcccagttacgtttttacaaatgcaacccactccagtcggctctgaaggcattgaaggattcagagcatcacatcccatgcttctagttgttgctggtgatgagacaaacggcctgggtgcgattcaaggtggtcgcttaagtgctcttatcagagacacaaacagtgagcatcaagctgtaaattgcatttcaaccccaacagttgtccgtttctactctttgaagtctcacacctatgtacatgttcttcgattccggtctgctgtatatttagttcgctgcagtcctaggattgttgctgtagcacttgcagcacaaatctactgctttgacgctgttactcttgagaacaagctcagcgtcttgtcatatcctttgcaaggtgcacctggggtaaatattgggtatggcccgatggctgttggccccagatggttagcctatgccacaaatactcctttattgtcaaacacaggccgcctaagtccacagaacctcacaccttcgccaggagtgagcccatctacttctcccagcagtggaagtttagttgctagatatgcaatggagtctagcaagcagttagcttctggtattattgacatgggatatacattttcaaagtactgccaggaacttctgccagatggttctaactcccctttgtcatcgagcccaggcaggagatctggtaaaattctttccagtgtgcatccactggaagctgacaatgcaggcatggtagtcatcaaggatttcacatccaaaattgttgtctcacagtttaaggctcacacaagtccgatatctgctctttgttttgaccctagtggaacacttttggtgacaacctctgttcatggccataacataaatgttttcaggatcatgccaacctgcattgctaatggctcaggcgcaacacgttatgattggacagcttctcatgttcatctctataaactgtatcgtggcatgacatcagctgtcatacaagacatctcgtttagtcattttagtcaatggatatctattgtttcatctcgaggtacctgccatatttttacattgtccccatttggtggtgatgccagtctgcagccacagaattctcacagtgatgggccccctcttgccccatgtcagtcaaggccatggtggtcaaagccatcctttcttatggaccaacagcttcaccaagttccctcaactgtgacacattcggttgtcagtaggataaagaataacacttctggttggctaaataatgtcagcaatgtggctgcttctgcaagtggaaaactatctgtaccatctggcgctgtaactgctgttttccataattccatctaccagggttctttgccagttccatctaaggctaatgctttagagcatctactggtgtattcgccatctggtcatgtcattcaacatgaacttttaccttcttcaggttctgagtcctctggtagcagcccaagagttggttcaggtcctaacttgcaactacaagatgatgagatgcatgttactgctgaaccaattcaatggtgggatgtgtgccgtaggacaaactggccagaaagagatgaaaacattgccaacattgtattgtataaccaaagaagcagtatgatggctatgggtgcttctgactgtgaagatagcgagcattcggattccactgcatcaaatgatggtatctctgggaaagagattatgagaatccgagaaaggtcaagctggtatctatctaatgcagaagtacagataaactcgtggcggattcccatctggcagaaatctaagatttgcttctatgtgatgggctatcctgctgcagagttggtcgaatcagttagcagtggtggtggagaaattgagattgagaagttacctcttcacgaggttgagatcaggagaagggaattgctccctgtattcaagcagttccaatattctgatcgacattccagtgataggaatattgcaaatggaggctttcagaatgccttgtcccacatcagtaatgcacagaatagctctgtaaaggataatggtgaatatgaaaccaaaccggtggctttgtctgggttttacgcagacacgaggaaaacagctaacacaaatggtctagctaggcaaacattctcagctgttaatcttcagcaagtggggaagtgcaattctattgaatctcttaacactgcaattgtgtctggcaaaacagagaatgggaacaatggctatatatccacgccacctgaaacaaaagcgtctatcagatcattgagcagctattctctcttggatggacatgtggacggaatgctgtctccaaatagcgcatcacacaagccagaaacaacaaataattctgtgctcagcaatgctgcaagcactgatgtacaaaatgggtgtctcaccactgtcgattctggacagcaggaggcgtctcattctcacagctcagtggagtttacccagtatttccaagagggctattgtaaaatatcagaactcgatgactgccgtgagttaactgaagctgttactgatgctgacagcagcagcagccactgcgagagagagaagcccgaggaagatggggataacgatgatttgctcggaggagtttttgccttcagcgaagaaggttctagccatctattcatataagttataggtttccatgtgtctactgatattcatcatcttatttctgccccttatcacgtcgcaggttgaacttactatatactgccttacttgagatcgagatataacgaaaaatgtgctcaaaacaaaacattcagtgtgcaatagtatgtaggggatggctttcatggaataaagctgtgtggaatcgatcatctggtacatatttttcaaggctcgctcctgtgtccgtcttcgtagtttgtacccgtgtctctttgatggagtcgagaaagttcccatttccaat

SEQ ID NO: 29240 - DNA, 3500 bp, Zea Mays
gaagcaggctctccgcatttgcgggggcaaagcttgcctcgatttatcccttcctagacccgactcacgtgggagcatccgacactgcaaatgtggagaggctacttcgaacccgcgacctgatgactttgagatagctttcaccactacccttggtctatccttttatgctccatttctcttgaagatggatttaatttttatatattcagcatttgttaagggtgataacacatattttgaaattgacttgtcaattgaaaggaaatcaactgtatccccatgtaaattatacaacagtgaacgagtaattggatactctagtttagaatatttgatcaatttatatctttcttgtaagtcataaacaatgctttttttgttccaaatggagtattaaaagaagtggagtcatgaatacctgtccatctttgtttgttctgacaagtgaatgtggtgatgatctgacattttttatcctgcataattgatgtgatcttaggtcacgcgtaaatcataatgggcccatatccaagcaaaagacaaatcttaaacaaataaaaactctctgacaattcagtaggcatcttgaactttccttaccgaagtttgtaaggttcacagaatgataaaacggtgtgaaagaatagatatcagtgttaggaagtcatagaacagtattttattgctgctagatcctacataagctgtctcctttaaatatatgttttatgttcctaggaatatatgatgatttttggaataagtggcctaggtaatggggtagaatggcttcttctctcctttggtttattctgcacttggagtagaagaagaggacaagaatgccatctggcaaaacagaaaggatgtttttttcttgtcttccttctttgttgtctccttataactcttgcttttgtccttcagttggctctgcgactgggtgtttgaagaatgccatatgtttttccttgagagcaacttagggcataataggcattctcgcaatgatgtttccacaaagcacaaaagtggctatgaaccttctgacacagaaactgagtggcatgaaagcccttggaacgatggagcattggcatcgaataggaatcgtcttcctaaagattctggtaggaatgaccaagttggtactaggaggcaaaacatatctcctaactgcacactagattatcatgctgagaaaacttcaaacttgagatacagtcgtactcctccaagggtcacagaacaaaggcgccatccttctccatttacagctgtgaagaatgaatcacgtaagaagagcagccggacgcctcccagatttcgttcttctatggaaacctttagtagatcatcaataaaggcaaggttttcccgcaatcgttcaatttctgcaccaaaattacggccacaagagaaggaacatcctgctagagctcctgcatttcctggcagtaaccctgtctcaacacatccagaaagagaagttgctgataatatagaagaagattcacatgcagaaaactgttcccaggagatcagtgaattgattgcaaatggcaagttacctaattccagatataatgagtatgcatttacgagcacagagtcgatacctgcaggtgatatcttcttctcccgtgattgcagggctccacttgagaaaacgtcaacaaagcttaacaatattgaccaatcatttacctctgactcaaatgtccatactgagaatgatggcactgttactcaaagtaatttgggccagccatcacaatttgtttcagctcggacaggtctttcgcgcacaactacgaaatccagttatgctactggtcgccattgccagatgagcaccaccaccactttgagtagcccatatagcaatggaaaattaagtggggagagtggaaagtttagtgaaatcactgggaaactagttggaggcgtcatgaaattcacatccagcaaggtgcaaaacgatacgtggcttccatgtatgactgggaaggcatgtcgaaaatcaagaacatcaaacaacaaaaaaaatgatgaatctgaatcaagtttcattcagaaggcacttgtcattgagaagattagacttttttgggctgataaatatcgtccacaaaatttaaatggatttacttgccacagggagcaagtccagcagcttaaacaatcggtctctgcagaattttgcccacatattattttcaaaggtcctccaggatcaggaaagagatctttgtgcagagctgtcctcactgaaatttttggcgattcatctttgaatgtctctcactatttgaagagctgcaatggccaggggtccatatctgtgcctattctcgtcccagtttcatccagcaataaccatgtggaactccacatgaggtttcaatcgaagaacgctagatatgctttgatgactctagcaaatgaaatgtctgataagtgtaaaatcactgagccaattgtgagaaagagctttaaagtgattgttctctatgatgttgataaagtcagccaaaataaccagcgtctgataaaatggataatagattcctcctctgatgcatgcaagataataatgacttgccaggatgaatctaatctcctagattctataaagagtcgttgcaagattatttcaattggtgtgcccagtacacgtgaggtggtagatatccttacctatacatcaagaaaagagagttttgatcttcctacaagttttgctactaccattgcgaatcaatccaggaagaacttgagggaggctatattggctctagaggcatgtaaagccaacaattatcccttcattgatggacaagctataccactaggatgggaggaggttctggaggaacttgcagtagaaattttggatgatcctgcccctaaaaggttatttctggcacgaggcaagctccaaaaactcctggtggaatttgtacctcctaaactaatactccagaagctcgtagaactcttcttgaagggaattcagactggcgtgaagagggaagtctactattggcatgcctactatgacaagaggttgcctgttggtgcaagtgctctgcttaaattggaagaattcgttgccaagttcatgagcatccaccggaagagcatgtcgcatgagcccaagattcctgaggtgccgcagtgaaacctggcagagcatgtcctcgtgcggttcggccgtgtcgaaatcccgtttgtggtggtggtttttctgttttatataattcaccttacgtgatcaactgtcatggtccatgtttttcttgttctatgtatatactatatggtacacatatatgctactactgagtacacaaatatgtccagccgaataaatgtctatacggctataccatctgtgttggcaatatcttgttgcaaaagtttgggagtggacgtataataatcttttgatttgaggtacgtgaattttggctatcagtttgttcttttctttt

SEQ ID NO: 29241 - DNA, 1016 bp, Zea Mays
ccttaatccttatctccactcggtggattctttttttgtcaagccaccgcatggaagaagctttctccctcacgttctctatctccatttatctcccacgcgcgcagcttccttgtcttcaatttcctggcagctgtgctcctctccctcgccgtgcagctcccgtgcgagctcctctgctggccgctgctgctcggcttccagctcgccatgtctatctccctgctaccgctcgcccatagcgccctcgccttccaacagccagcgatgccagccctctccctgctcgcatccgtacagaaccgcgcagctcctgtgttgagctctgcagcagtgcttcctccaacagcagatgcgtcaccaggccctcgacgtcgtgctgtgcgctgggactatccgtagctcgcctgcgtgcccagccgtctcgaatcacgtcgtcgattctcggcaccgcgagctcaccttcccttacgcacatctctacagaccctacctcatcacccgtctgcgtcatcgatttcgtcgtcgtgcgtcatcaagaaatcccaaaaattgaatgaagacgaagctagcagtgtgaaattcacaaagtactcgacgaaaagcctgtattagaaagcatcgtggttcttgcgaagttcccgtctgattttactaatgaaaaatatcagtgtgtcttggagaagaagaaagtgacgtttcgatgcgtcactcgccaagtgttcgatcgaagacttaaatcgaagcttgtcatcgttcttgcaaatattgagccgatgttgattatggtgagcaaattctgtacgttattactttgttttaataaatggattgatagatatgtaggtttcgatgattctcgtatttttagtgtaacacccctgttgttacgagaactaaaaatttggcatgtcatcatatgcacttacattaacttgcttgatacacttagaatgcattcgctaggatccaaaataatctatgtatgatgttgtgattagtgaagagtgaaggac

SEQ ID NO: 29242 - DNA, 1609 bp, Zea Mays
atgccatttaccgatttacatattgcaacatctatcaagtaacagcaaaactgtggtatcaggtaaaatgctcttctgtttgtcgccttagcccttatcagacctgagttcatacagccattaaactgcaatcaaacaatccggtatacctatacattgtagccacattctaattttttaacagctacaatccataaagccaccaaggataattattttgtgcaacatcttgaaattttataaacataaatgtgtactgcagtatcctcatagctggatgttttataaggctcttactttggttcatgttgttcaacattctcagtaagtagcatctcatattgtgcaaagtccatttgccatggaagtacatatcttgcattaatacatctctatgcaaagcaccagtactgaatctcaaattggcaagaaatgattcagtttcctccaaaaatatgcacaaatttccataccgagctacctatacatgtgatgcaggttgcaatttggatttgtgtaactccaaaatggaatccataccaacatgtggacagtgatatcctaagagtggtcaagtttttcatacgagcccatgtaggtaggtttgatgttggcaatcaccagttctcatgcagctgtacaatactagaaacaagctgattgtgttcaacactattaagttgcatgcattaaccagtccaatccaaaaactttagctaatagaaataagtggtcaattcacttatattatattccaacactccccctcacgtccagactttttctcggtctcagatgtggaataagagtgagcaacaattatttttattttaattgcgctaattaggatttgaattcgaaacctctgactccaacatcatattaagttgcatgcaccaatcagttaaatccaaaagtttaatctgatatgaagaggtggtaaattcacttatattatatttcaacaaacaccaccatatcaaccatgcagtcttactgcatgttcagcaactagcaaagctcatgataaagactgcctgataaatattagaccatagaacaccttaagattctatacttgatcctcccccaagcttgtcgatccaatttttcatttcaaatatgctactgacaactattcccgtgagatccattcttccaatgacactttaatcttcaactcatgcatacaatgcaagtttccattattcatatcattcaaccaggactgactgttgtaatcttgcagagtagagagtacgttatcactgctttggatgcctcagaataaaaatcttatgaagcttgtacacacatgtacatcgaagtatggttcagacaacatttccgtctttagggcatttctatcgtgctgtagctttcagtgatttctccttttgtcttggatctgacgaacacattcagcaaccaaaacactgaactttagggtgaccttgcctgtaaggggtgggttcaagccaaccttcttataagcttgtgcaatgtttttctggcatttttgcaagtgaatattacagagggagggagctgcagactttatgatcggcctactacaggggataagcccaccttgtagcccactggaaaa

SEQ ID NO: 29243 - DNA, 1265 bp, Zea Mays
aggtaaatgtgaggagcagatacgggctggcaaagatgctaggcacggtggtcaccatagcgggggcaaccgtcataaccctctacaaagggacgccattattgacagaaacagctcatgcagagggcaccacgcacacgctggaaggcacccacacgctcggaggatgggtcgcaggatgcctcatcatgttcgcgaactgcatttgcttgtctgcgtggatggttctgcaggtcccggttctgaagaaatacccagctaagctgtcgtctttcaccatcactctggcgttgggtttcgtccagctcgctgtcgtcgcgccgtttttcgagagcgacgttgagaggtggaagatcagctcaggaggcgagcttttcaccatcctgtatgctggcgttgtggtgcttggaatcgcctggtatctcatgatctggtgcataaacaaaggagggcctcacttcgtttccgtcttccagccactgcaaaccgtcatggtcgccatcatggccgccatcttccttggcgacacactctacattggaggtcgcgggtctgtactgtgtactgtgggcgaagagcaaggagaccaaaagcagcggcgatctcctagtccttcctgaaagaagccccgcgcagcagaatctcctccagcgtgaagattgaagcgagaccactcactgtactgtacggttctcggccggctgtagctgccccaacaagaaatatgggggtgtttggtttgagaaatcacttcatccaaaatgtggtggtgcatcatgagtccattactcaaatttggtgggatgaccttatgcctcatattagtactaactaaataactataagaaatggggtgatgatggatcaactcaatccattccacaaaccaaacaaaaaagtgaggagtgagaagacgatggactagatcattcctcaaaccaaacagcttatatattccttgtatcgtcagttggacaggccaatagatgatgtcgcctgtgcaaccttgttggccgagggccactttcgattttgtctattggttcttttagagcaaccatcccgatgcgatgacactgtagctctcttaggatgtgtttggttgcaatgacagaacgggacgggataggacgatctctcgaataaggttgtttggttcagagccaaaggttaggacataactatccgaatgttgtccccagttgtccctcaattttggagggacgggagaggacgccaggggacgtctctgtcctagcttgatg

SEQ ID NO: 29244 - DNA, 325 bp, Zea Mays
tgtactcctcgcatgcgtcctcctcatggcccgcttaaccgccctgctcctctcccacgcagcgccatagtcggtgggctctggcttggtgccccaggaaaaggcctgcctgatctagatctgatgcgccatgagagagcagggaagcggacacgattcgcgggcggagaggattgcgccaggagagagcagggaagcggacgcggttcacggatgaaaagaattgcaccaggaggaagcggacgcgattcgcggatggagagagcagggaatgggcgtagaagcggacgtagtttctcgtggctgggattgcggagactccgta

SEQ ID NO: 29245 - DNA, 906 bp, Zea Mays
caggaattgagaggaatttaaaagtcagtcataagataaacagactaagttttggagaatactttccaggtgttgttaatccacttgatggggcaaattgggtgcagcattcatcatatggaatgtatcaatacttcatcaaggttgttcctacagtctacacggacataaatgaacacattattctctctaatcagttctctgtaacggaacattttagaagtggtgagagtggtcggatgcaggcccttcctggtgtgttcttcttttatgacctttctccaatcaaggtcacattcacggaacaacatgtgtcatttttacactttttaactaatgtttgcgctattgttggaggtgtgttcaccgtttctggaatcatagattcgtttgtataccatagtcaaagagcaatcaagaagaagatggaaataggcaaattcaactgatgttgccttactattgctgcaattaagtagctcctgttgcagctccaagatccagaaatgcaatgtggcttttcctcgaactcttggcacagttgcgtagttgacaaacaattgctcatcagataactcttgatgtgcttgccaacttgcttccggcaaagataccagcgagcaagatggtcatcttgtatacttcgatgttacatttttgtacgcttagtctgacaagaaaacattttacttcctcgagctgcaggtgttcgtgtactgttgtaaatttgtggtagagggagcctatctgtagtttttttttacaattatgtgtttgtaccagttttttctgagacatttgtagcttagacaggtaaagattgtttgaaatacatataaaccatttttgaaggaaagcaagcttatcgttgtaacccctggattctcattctgaactcataccgag

SEQ ID NO: 29246 - DNA, 1395 bp, Zea Mays
cgaacgcgtccttaaccgaaatggcggaatcggcctcgcagagggatagccggaggcccagaagcgtccggaaagacagcgcacgaagcaatctttccctttccccaagatgggattcggcttcgttcgtctcgccgcccgcgccgcggtttctcgccggggcatgacgccagcaacctccgcccgccgcgcgctcgccccacccgccgtgccggcggagccccgctgcgggccccactggctcgtggccgcccgcggccacgtgggccactcgcaccaccgcggcggggaggacgagggcgagacatccgagaggatctttcgtctgggactcgccgctgacgtcgtactcaccgcggggaaggccgtcacaggctatctctccggcagcaccgccatcgccgccgatgccgcccactccctctcggacatagtgcttagcggggtggctctgctgtcttacagggcggccaaggctcccagagacaaggaacatccctatgggcatggaaagtttgaaagtttaggagctcttggaatttcaagtatgctgttggttacttcaggtgggattgcatggcatgcttttgaagttcttcagggagttatgtcttctgctcctgatataattggcaatacattgcatgcacaccatgaccatggtagcagtgggcatcatcatggaatagatttggaacatccagttcttgcattgagcatgacaactttagcaatatctatcaaagaagggctatactggataacaaaaagagctggggaaaaggaaggcagtggtctgatgaaagctaatgcatggcaccatcgtgcagatgctatttcatctgtcgttgccctagtaggggtggttccattcttgggttgcctcttcttgatccactagctggacttgttgtctctggcatgattctgaaagctggtattaagactggatatgagagtgttctggaattagttgatgctgctgtggatccttcacttttagaaccaatcaaggaaactattttgagggttcacggtgtgaagggatgtcatcgattgaggggaagaaaagctgggacatcattatatcttgatgtgcatatagaggtatatccttttctgagtgttagtgcagcacatgatatcggtgaaactgttcgtcatcaaattcaaaaggagcacaatcaagttgctgaagttttcatacacatagatccctcgtacttagtaggcccgaccatggacctaaaaaggatcctgaaggactctgatggaacaaattcagaagctatcccacggcaacaaagtgcagaagccatcgtgtctaatattatttcatctcatttttcggaggtccttaggagtttgttttgtccccaaggatgcaaaattgtg

SEQ ID NO: 29247 - DNA, 636 bp, Zea Mays
attccaagcgtccaaaccccccatacaaccaactcgcaactcctcgcgcggttcctcgatcgaagtctccagacgcccagcgtcgatcgcgacgacgtacgccaagccgcagcaaagctccggcggtgtgcggtgagatggcggtggtgtcagcgctggccaagtacaagctcgtgttcctgggcaaccaggcggtgggcaagacggccatcatcacccgcttcatgtacgacaagttcgacgacacctaccaggcgacgatcgggatcgacttcctgtccaagacgatgtacctcgaggaccgcaccgttcgccttcagctctgggacacagctgggcaggagaggttccgcagcctgatcccgagctacatcagagactcctccgtagccgtcatcgtttacgatgtgaccgacaggcagtcattcttgaacacgtcaaagtggatcgaggaagtaaacacgcaaagaggtggagacgtgctcatcttcctcgttggaaataaaactgaccttgtcgacaagaggaaagtgtccaccgacgaaggagaagccaaagcacaggagcatggtgctatgttcatggagaccagtgcaaaagctgggttcaacgtcaagcatcgacattcaatttcac

SEQ ID NO: 29248 - DNA, 2623 bp, Zea Mays
agatagaaatgctggaaggaatgagtatgcaacaccataccatggagaatcagagttgaaaaggagaaggtccagaagcagggatcatgatcgagaaagatacagtaggtctatctcaccgccactaagggaacaaaggtataattaccgtggacgtgattttggcaatcctccttactactctatggagaaatcaagggggaagtatgctgaagttgataaacaaagatcgtcggggagtggtggatacattggtgggttgcaccagagatatgaaagccggcttggtggatactcaccaaggaaaaagaaaacatcactgcaagctgagcaggcaactaccaagactccttccaaggtcattcagtccccagaaaaaaaatcagccacatgggatcagcctcctgttaaagcaaaccaatctaactttcctaccactttcctgccaactgttggccagatggctcctactccattcagtttcagcgtgataaaggacccttcaactacagctgtgacaatgttggcaggtaatagtttgactgcagattctgtccagcttacacaagcaacgcgcccactcaggaggttgcacattgaaaatttgcctgattcagctacagaggataagttgattgactgcttgaatgacttcttattgtctactggcagtaaactccagcggtctaaaccatgcctcagttgtacgataaacagagaaaaacgtcaggcttttgtggaatttcttacaccagaggatgctacagcagctatttcttttgatggaaggtctctaaatggatctgtgttgagaattcgacgccccaaagaatatgttgaaacggtgggtattttaattgggtgtgtcataattcacgttcagcagcatcgtgaagcaaaggaattgtaaagcaggcttcctggtgtagtgcaaatactataatgttacccctaagaaggcagaagagactgctttgatatctgatgttgttgcagattcaccatacaagattttcatagcgggcattgctggagtgatctcatctaagatgctaatggagattgttagtgcatttggcccattggctgcataccgctttctttttaacaatgagctcggtggaccctgtgcatttcttgagtacgccgaccgctccgttacttctaaggcatgtgctggcctcaatgggatgatgcttggtggacgtgtactgactgctgtgcatgtgtttcctaatcctcatgtggaggctgctaatgaggcttccccattttatggtattcctgacaatgctaaattgcttctgaaagaaccaacaaaggtcctgcagctaaaaaatgtgtttgaacgagaagagtatatgctactttcaaaatctgagctggaagaaacattggaagatgtacgtgttgaatgtacgaggtgcgcacatttcttttacattcattttgtgttattgattgtggtggattttgaacttacagtatggacaagattcacaggtttggagcagtcaaatctgtaaatgtagttgagtatcctgctgctggtgtcagtgctgcagaggagaacatagttgagctcaagattgaatgcactgaattttctgatacggaaaacattgcaaaggctgtatcagaatattctgtaccgattattccgagcatagatgttctaaatcattctgtcgcttcggatactaaagatgtggatcttattccagagagtcaggatcagaaggacaaacacctcccttcaaatgcagcactttgtgagagtgaggcacctgtagcagatgaggacgcagagcttgatgaaactcagtctagagctgctctccccacaccgcaacatgctgaagctgatcatacggaagcagctgtggatgagaataaacatacaggagcagggaaggttactgctactgcaacggacgacgatgcagtagaaaagagtcatggagacccaagaacctcagagacctgcaatcctgctggacctacagacaaagcggagaaacctggaaggtactccgaacaaggcgctggtgatgtgactgaagatcgtccagaaaaagaagcccaagctgttgggaccagcgacactggtttcgtgtttgaacctggttctgtgcttgtggagtttttgcgggaggaggctgcttgcatggccgcacattccttacatgggcgtcgcttcgggaacagaactgtgcatgctggatatgctccgtatgatctctacttgcagaaataccccaggtgattctgcgtttgcgactgcatgagttgcgatacgagctttgcctatgtgccagtatttcacagaaacttcagacttgtagttttggcttttgagcctttggatggttcttccggtccagatagtggtaccattagttgaacgaaatatttggaaatgttgttccacagtagatatcggatggacaataggatataagtactggatagagacacaagttgtcgttaacatcgttctttacttcgctattaatgtttttgatgacgtcagacattagtgtggatggatggatggaatggatttattgcaagattttgactgctataatctcatttttttactatctgctcacttgtgctc

SEQ ID NO: 29249 - DNA, 1156 bp, Zea Mays
actgattacctatgaaggtttcttaaggttgaggttgagcgtattgacattggtgaaccagaaaatccaggcccgaaatacaacagcaggagtacatatcaacctgttagcatagacccatttgccctttcacctgatccaaatgagcaagagaaccttgacatatttggtgatgatgatggcaatgcttcaccgaataacttggcctccggagaaggggcacctgctcgtggttttgacatcaacttaccaaatcaagacaatatggatgatgaaattgctgatgtagatgtaaatgatgaggcagatgaggggctcaatgcagccgatgcgctgcgagctcaagtgaacgcagaggggcagcaggggcaggacagctcaagctctagtggaaccagcagtagcagcagcagcggaagtgggagcggcagtggaagtgggagcagcagcagtgacagcgatggtagtgatgccgattcggcaagctccggaggtgatgttgatatatgagcttgataatgcaagcttttgttttgacagatgccttgcttcacaatttttggttcacaagggaggtgtagggtatgtatatgttcagctaatattgctccggtcagtgagtgcattaaatttccgcaattcatggcgggcttggtctgttttatgtttgttaaaacctgggctggaagaatagaaatctgtaaacatatctgtacaactatgtctatgtgcttatgtggcattgctgttaccttggatgatggatgttacaacattgttcagttgaaatgacaaaaggtataaagagtagtgcaagcaggccttaatgcaagcctgaaagtgagtcttctggtccgttagatgatacgatggcgagctgcttctgcaaggcgttcatgcatgacaatgtggagatagccctgttgcctcctcccgcagttgctgttgctgccgcttgaagtacctagattctcacgatccgtttggtattcccggaagactggtactgtatgatattatgaaattgcgatgctcaagaaattgccttgcttgcgtatggttgcgttgcttaagaagttcaatgctggtataacattcatatcacgagacatgaaactaagaaaacagcaggttggacataatgcccgtgagagat

SEQ ID NO: 29250 - DNA, 2945 bp, Zea Mays
ccacaactgagtcctgactcctgagctttgtcgacatccacgccaccttcaaagcaatgcattccgccgcctccaccaataccaccgcctttgccgccgccgcgctctctacgctcctgtcgcgctgccgttccctcgcctccgtcaagcagctccatgcccacatcctcgcacgttcaaacagcccattcccctacaatcatttcctctccaaactcctctccctctcctgctccgcctctgcctccgccgccaactatgccctcctcctcctctcctcccacccggcgcccaccgccttcacctacaatgtcacaatccgcttattcgcctcatcgcgcccggacacctcccttcgcctcttcctcagcatgctccgcgccgaggtccgcgtccgacccgacgcatacaccctccctttcctcctcctcgccgcggcgcgctgcccggcaccggccctcgcccggtccgcccatgctctcctcgagaagatcggtctcggtgaccacgaccacaccgtccactccctcatcaccatgtactcctgccttgatgatcacctcgccgcgcgcagggtgttcgacggaatttcccaccgggatgtcgtctcttggaactcgatggtgaaggcatacgaacgggcagggatggtggccgaggttgaagggatgttgcggtcgatggtcaccgagggcgcagtggcacccaatggggtgactctggcggttgtgctcacagcttgcagggacgctggcaatttggtgcttgggaggtgggtggaggagtgggtgaggtctgcggggatggaggtggactcgctcattgggtcagcacttgtggggatgtatgagaagtgtggagagatggcagaggcacggcgtgtgtttgatggcatcagacacaaggatgtcgtggcatggaatgccatgatcaccgggtatgcgcaaaatggcatgtcaaatgaagcgatagccttgtttcacagcatgagggaagctgggctgtgtccggacaagataaccttggtcggtgtcctctcatcctgcgcagcagttggtgcactgaagcttggagttgaattggatacgtatgccatgcgcagaggcctctacaacaatgtctatgtaggaacagccttagtggacatgtatgctaagtgtggagatcttgagaaagccacgcatgtttttgggaagatgccattcaaaaatgaagcctcatggaatgcattaatctgtggacttgccttcaacggtcgaggctatgatgccattcagcagtttgaactaatgagagatgagaaaggactccaaccagatgatatcacattcataggtgtgctttcggcttgtgtacatgctgggctactcgagtatggccgccagttgttcaattctctgacacctgtttttaagatcattcctagaattgagcactactcctgcattgttgatttgttggcacgtgctggtcatttagaagaagcatgggattttattgaggaaatgcctggcaaggtagatgccgtcatgttaggcgctttgcttgctgcttgccggaaatgcaagaacactgaggttggtgagagggtcatcaataggattatgaagctggagccatcaaactcgtggaactacgtggtgtcatccaagatttatgcaacctcagataaaatggatgaatctgcaaggatgatagggctaatgagggagaggggtgtcaacaagactccagggtgcagctgggttgaggttaatggaaaagttcttgaattctatgcaagcactgaaccacagcatggtgcggaagatatgtatcaactcatgggcgtactggtaaatgagatgagactaaagggatatgttccaaaccttgatctggtgtagcacgtaataaagcatatttcctgttcttcttggagcaaaaggaatgacttatgctaattcacaggaggaggaaaatcgcaaaatgaaataaacagaggaacgacaagaacagcagcagccaacaatatgatgggataccatactataatataaaacgaaaaagagggaacacccaaatgctaaacctcaatagctgatactctttgcctgatttcaacttcttccttaatgcagtgaaccatttgcagcgtgctaagcaatcgttattgacaattatttaccttctcacttgttcaataaagtgtgccgcatggaatctctcatttggctattgggacctttttatggtctacttcctatcaccaccaccaagtcagtttgtttgtaagctgggaagataagagtccagttacaccgtgtggctccttaaatacgcacatgatttttaatgttacaggacaagagggcaagaagagcgtggagacgcacaagatctacatcgctgaagcaggtgcaccctggtattggaatcccctgcgaggtcatgtctgtcatgaactcgctcatcaacgacaacttgccggcgaggctgccaagttcatccgccacaataagatgggcaccatcacatcccaggacatccaagggcatcaaggccgtcaccaagttcacctcgtctttgtcttcttctcccgtgtgactgtcttcgtgtgagtaacatgttggttggtcggaggcttggctgttgtggtctcgcgtaattgccgcggtggctttttggcagaatggaatgctatggttatgtgaatgttgatctctcagcactccgtacacctgcttgccacactgttttggccattgtgtcggggtctagattgggactgacttgagagtgtttcaggtctgttcagttgggtgttctggggccatgcagtctgattcagttcagcgtttcctttatcgtacctgctcaatgaatctaataccagatccgaaagagtgatcgcttcttcctcattgagtaaagggttaaccaagcatatgattgtttgctgtacc

SEQ ID NO: 29251 - DNA, 3571 bp, Zea Mays
agatagaaatgctggaaggaatgagtatgcaacaccataccatggagaatcagagttgaaaaggagaaggtccagaagcagggatcatgatcgagaaagatacagtaggtctatctcaccgccactaagggaacaaaggtataattaccgtggacgtgattttggcaatcctccttactactctatggagaaatcaagggggaagtatgctgaagttgataaacaaagatcgtcggggagtggtggatacattggtgggttgcaccagagatatgaaagccggcttggtggatactcaccaaggaaaaagaaaacatcactgcaagctgagcaggcaactaccaagactccttccaaggtcattcagtccccagaaaaaaaatcagccacatgggatcagcctcctgttaaagcaaaccaatctaactttcctaccactttcctgccaactgttggccagatggctcctactccattcagtttcagcgtgataaaggacccttcaactacagctgtgacaatgttggcaggtaatagtttgactgcagattctgtccagcttacacaagcaacgcgcccactcaggaggttgcacattgaaaatttgcctgattcagctacagaggataagttgattgactgcttgaatgacttcttattgtctactggcagtaaactccagcggtctaaaccatgcctcagttgtacgataaacagagaaaaacgtcaggcttttgtggaatttcttacaccagaggatgctacagcagctatttcttttgatggaaggtctctaaatggatctgtgttgagaattcgacgccccaaagaatatgttgaaacggtgggtattttaattgggtgtgtcataattcacgttcagcagcatcgtgaagcaaaggaattgtaaagcaggcttcctggtgtagtgcaaatactatgtgattgctgctacttcagattttcattggctgattacagtactgcagacaggcagagtccttatggtgttcagttcatggaaacattaggaagacagcttgtacagcatggttcaagtaaatgtaatattagcaaagatttgagtatgatggttgctaagtgctaaccttaattgtgcaaatatctacagccgagtgcaatttggcagcaagggctgtcatttagacattgataaacttcaaagttattctgcatttagtttaacaaactttgactttactttttctcttgtttgtgttcaatctctaacattttcctgttcagcttatttcatggatattgccttacatcttagttcctctatttttgtctctggcctcaacttggtctctttacttctaaaaagacaagattagttcctttacttgtataggtagatatggttagtcgttccacccatagccaataatggaatatatatcacagaaaataccagtgagatagaatcatagaaggagataggttattagtctggtccagtttggtttgcttgactagattgctttgttttgtgctgtatcactataccaacatgaatagctaaacactaggatcatgcaaatatgtgatatgtctcctcaaggaccaggctttcctctacacataacgatggtccacaatgattattttccatcactattagctgtccataatatctgggatagtcaacagcagaaggaaccacactgattttgctgtattatattgagagtgttacaacattgtttttttgagacctctcacctctgttttaaatgtggcggcatctagatttttagatattttattttaaatatcagttcattttttcttgcagaatgtaaatcctgttgatttttctgtattatatttagagtggtacgatattgtttttttggagatctacgttttaaatgcgaggatattcagatttttagatattttattttaaatgtcagttcatatttttttccttgcagaatgttacccctaagaaggcagaagagactgctttgatatctgatgttgttgcagattcaccatacaagattttcatagcgggcattgctggagtgatctcatctaagatgctaatggagattgttagtgcatttggcccattggctgcataccgctttctttttaacaatgagctcggtggaccctgtgcatttcttgagtacgccgaccgctccgttacttctaaggcatgtgctggcctcaatgggatgatgcttggtggacgtgtactgactgctgtgcatgtgtttcctaatcctcatgtggaggctgctaatgaggcttccccattttatggtattcctgacaatgctaaattgcttctgaaagaaccaacaaaggtcctgcagctaaaaaatgtgtttgaacgagaagagtatatgctactttcaaaatctgagctggaagaaacattggaagatgtacgtgttgaatgtacgagattcacaggtttggagcagtcaaatctgtaaatgtagttgagtatcctgctgctggtgtcagtgctgcagaggagaacatagttgagctcaagattgaatgcactgaattttctgatacggaaaacattgcaaaggctgtatcagaatattctgtaccgattattccgagcatagatgttctaaatcattctgtcgcttcggatactaaagatgtggatcttattccagagagtcaggatcagaaggacaaacacctcccttcaaatgcagcactttgtgagagtgaggcacctgtagcagatgaggacgcagagcttgatgaaactcagtctagagctgctctccccacaccgcaacatgctgaagctgatcatacggaagcagctgtggatgagaataaacatacaggagcagggaaggttactgctactgcaacggacgacgatgcagtagaaaagagtcatggagacccaagaacctcagagacctgcaatcctgctggacctacagacaaagcggagaaacctggaaggtactccgaacaaggcgctggtgatgtgactgaagatcgtccagaaaaagaagcccaagctgttgggaccagcgacactggtttcgtgtttgaacctggttctgtgcttgtggagtttttgcgggaggaggctgcttgcatggccgcacattccttacatgggcgtcgcttcgggaacagaactgtgcatgctggatatgctccgtatgatctctacttgcagaaataccccaggtgattctgcgtttgcgactgcatgagttgcgatacgagctttgcctatgtgccagtatttcacagaaacttcagacttgtagttttggcttttgagcctttggatggttcttccggtccagatagtggtaccattagttgaacgaaatatttggaaatgttgttccacagtagatatcggatggacaataggatataagtactggatagagacacaagttgtcgttaacatcgttctttacttcgctattaatgtttttgatgacgtcagacattagtgtggatggatggatggaatggatttattgcaagattttgactgctataatctcatttttttactatctgctcacttgtgctc

SEQ ID NO: 29252 - DNA, 3378 bp, Zea Mays
tcgtggcccacggacgtgtaggaggggacacgccgccgggcctcactaaccgcaggttcgggagtactccggaacccgccgccgcatccacacgacgccacgactgacgacggagagccccggtctccttccacggctccaccgccaccaccccgcataaaacagcagaagaacaagggtatggcgaaggatgggggtcccgactggaacggcctgctcaagtggagcctcgcccacggcgacggcaccaacccgccgcgtgctctcagcgaggaagacagaaaatggttcatggatgctatgcaagccaacacggtagatgttgtgaagaggatgaaggagatcactcaggtgatgaaaactccagaagatgtcttgcagtctcagggcgtgacccctgagaacatcgaagatatgttggatgagctacaggagcatgttgaatccattgacatggcaaatgatctacattctattggtgggctggatcctctacttggttacttgaaaaattcaaatgctggcatccgagcaaaggcagcagaagttgttagtacaattgtgcagaataatcccaagagtcagcaacttgtcatggaatccaatgggctagagccactgttgacgaacttcaaatcagatccaagtacaaatgcacgcacaaaagctttaggagccatatcttctctaattcgtcataaccagcctggagtttccgcatttcgattgggaaatggctatgctggattgaaggatgctcttggttccgatgatgccagactccaaaggaaagctctcaatctcatacaatacttgctgcacaactacaaggcagacaggagtgttgccacagagcttggtcttccgaagctgatgatgcaccttgtgtccagcgatgattccttagtgcgtgaagctgctctaggcggcctccttgagttggcgcgggacaagacatctggtaacgcgctacctgaccaagaaaagctgaaagacatgctcaagagccgaatagaagggatcagcgcaatggacactgacgatctccacgctgctcgcgaggagcggcagctggtggattcactctggaaggagtgctacaacgaaccttcgtctctcagggagaagggcctcgtcgtgcttccgggagaggatgctccccaacagccgccaccagacgttgcagggaagatgtttgagccaccgcttcgtgcgtgggcggctgcaagacctgctcaggaagatgactctgactctggcagcggaaagaaggctccgccattgctgcttaagttttgacggccttcttatgccgatactagttcttaggctccaccatgggtgttgaaagctgaaagatcagatctgatggatgcctgaccttcttcgaacctcagttgtggttcttgtaatttgcaccgcatttctgttctgagtatgtttttatgagaagactgggaagatgacagacagatactgtatcacgtgatgctcgtaaattaacactacatgcgaattctcttgctcgattgctcattttctgatgcttccatgattgctgatatatcttaatccgatccgatagttataatttcacgggtctagttctagagatgctgaagagcttgcgcctgcttgcaggcatatgttactttcagcttgaaggatggccgtccgattctcgcgttcgatctggacggtgggtgattttgcctactcccgtccgtcgatgattcgtcgcgagccattcagaaggcagcaaatctagctatctcctctgcctcctgctggcggtcctgctgcgccatggcgctacagctgcgggccgccgctctctgtccgcccctgccactcaccgccttccatggccgcctcgttgcaccttggcctccgcctcccttggtcagcatagctgtcgccgccgcctccagcccgggtccctccgcgcccctctcctgccgcggcccggcgcctcgctggcgacgttcgagcgtgagggcgcgcaccggggccggcggcggcgggcagagggagtccccatacgaggtgctcggcgtgtcgccgtcggcggcgcccaacgagatcaagcgcgcgtaccgccgcctcgcgctcaagtaccacccggacgtgaacaaggagcccaatgctcaggagaagtttctgcggatcaagcacgcttacaacactctgatgaactcagagtcacgatccaagtacgcgagcagcagttcggattcgtcctggtcctccagctcccgggagagcaaatcagctgctgcagaagagccgttctatggatttgcggacttccttaaagatttgcaaacagaatttcagaactgggaagctgggttgaattcggatcagaaacctaaaagcctttgggaagagttggcagcaattggcgaggaatttgtagagtttctggagaatgagttgaagattgatgactcgagaccagaggacgtcactggagatgacccatacacccagtttggacagcaggcaaaaagcgctaaggatgacaagacgtcgacgaacagctttgatgatggtctttctgaaatagaggccgctcttgagaatctgaagaaggaactcggactgggctaaaccgttgatgtggcaactagaggtgttgctgctgctactgacttagttccttgttcatacaaagatacaagatctggcatatacctagatggctagcaaaagctaagtgccagaaagccaaaacggcctataatttgggatggagaggattatcaatagctcaagagcttctttctgaattctaattgttcagcgtgttcggaaagaaaaagggacaaatgtttgatcgcctttagaattttgtgggtagaggcgttctgattttgtgtgatgggggggtacaaaagaaaaaagttttgcaccgatagcactgttggggaccttcggcgtccgaaggtcctcaaaaactggatttaacagtatttctgtagtacaatgtgtgaacaggtaccctcaaactaaagtcggcattgcagcagaccggaataatacgaagcttgattcagagccgaaggtgctgagcaggaaagcttcggcgtaacagcaaagagtggaaccgacttaaagatgaaaaggctatccagaccccgatagattactatagagttattatcaaatgtaaagggcatgaatgtaattttgtaagggctgtgtcccttgtctataaataggtgaacagtatccccgtactgttcacgctgacttggcattcgttttttgcgccaagcttgtactgttattcccttccgattgaaggtacacttgtaattcgacaatgtttctgtttatgccctatcataatatatgattgcttatattgtcttt

SEQ ID NO: 29253 - DNA, 3846 bp, Zea Mays
  misc_feature (1)..(1): n is a, c, g, or t
naagcttgtcaaatgctcgattgaaggcgcatgcatgaaaggcctctctagtaggacatctgcattgaacacagcatctgaatgtttacatatcctcaggttctggagcagggattatggaagaggcatttcattagctgaaagttcacattcactaacagtgctcgtctcgattgtatcattcttgcaagctgaactgaacatctctgataaaccagcaaatgccactggcatttcttcccgcaattctggatctgcgaatagtaaaaattccaatatttgggatatgaagatatcagcattttcgatgctcgaagatatattgagtaaggttgcatcaaatatgacagaaaatctgtggcagtctgtcatcgaggtcttgaggaaagttatggattttgtcacagcaaggaaccttgttatagagagtagcatcatgtcaagattttatacatcttttcttcgttgtctacatttggttcttgtggatcccaaaggaccactttcagggcatgttgcagggtttgtagcaaatctgcagatatttttcgtatatgggctgaggtcatcttcacctcctacactagctccaaaagaaactagaacagattcaaaacccagagcttcacgtggacgatatagaccacctcatttgaggaacaaggagagaagagagaatgattcactggaaggtcaaaattcagatagtgagtattcttggtatgatatgagctcatcagactcagacctgagtgatagtgatggttatgcaaaaagtggagaccgcttccggagttcgaaggctagattagctgccattctttgtatacaggatatctgccatgctgatccaaagttacttacttcacaatggccagtacttttgcctgagaatgatgttctccaacaaaggaaatatcaagcaactctgatgacatgcttgctttttgatcctataacgaaggtacgtgttgaggcagcatcaaccattgctaccatgctggaacggcaagcattagttttgacacaagttgcagagtacaaggagtcgtctaagcgtggatcattcactacattatcttcctcacttggtcaaatattgatgcaactgcatacaggagcactgtacttgatacagcgtgaaactcaagctactttgcttgcggcattattcagagttctcattcttttgatatctgctacaccgtacgctcggatgccaaaggaattgttgccaacagtcattaaagtattgtgcagtagattactgaacaaacactcgaataagactgaacattatgccgtgctggttactgttctaagttgcttggagacagctttttcaaaagtgccacctactttggatgtctttgcggttctcactgaggattgctgtgctggaccatcacatgagcaggaagaatcaaatgttatagcttttcttcttcattgtatagaggaggaaatgcattacagtgttagacatggagccttccaggtgctgagatcagcggttcacaactacccaagctgtgcaaacatgatttgggaaaaacttcgagacaatgttcttaacttgttgcaaatacaaagttttgaagaccaaaagtatgatgctaactttgggcctcctggagctaaagaagaatcatcaatcaagggaagatgtcttgtagctggaataaaggtaatggatgaatgtctgcgtgtttcatctggattcacaggagcagatgacatcaaagaatgcagattactggatattcagcaaatttctgattgtaccataaataaaactattaagtctgcacctcactttgaaatggaagctgctggatcatcacagaattgcactttggacataacacttggaattaaccgttggatcgaggtgatagagactcatctccctcagggattatcccatggttctgctatggtcaggacagcatccctcacatgctttgctggcatgacttctgatgtattcttctccctgcctgaaaataagagagactatgtgacctcttcttctgttcatgcggcgttaaatgatatggttcctagtgtaagatcagctgcatgtcgagctattggcattgttgcatgttttcctcagatattgtcaagctctagcctaccaggcaagttcatagatgccattgagttcaatacacataactcatcaactccagttcgtgtcaccgctgcatgggctttggcaaatctctgttcttgtattcgttttagagcactggaagtgcatacagatccctatgcaggtgtaggtgtattgagcaaatcaagcatatctcttttggttgaagttgctttgcgtctggccaaagatagtgaaaaagtaaaatcaaacgctgttagagctcttggttatctttcaagatttatcagattcaattaccacgccggcacaataaatgacccaagtgattcagttttttatggagatcctgtgtggcttgaaagaatggtgcaggctttgatgtcttgtgtgacaactgggaatgtaaaggtccaatggaatgtttgccatgcccttagcaacttgttcatgaatgataccttgagacttcaagacatgccttgggcatcaagtgtttatagcatacttctacttctaatccgggactcaaacaattataagataaagatgcatgcagctgttgctctatcagtgccagtgtcaaggcttgattacggcagctcgtttccagatgttgttcgaggcctcgtccatgctctcgagtcattgaactcaaacaattcatcgttaccttcaaatttcaaacagagagacaacctcgagaagcagcttacgtttactgctctccatttgcttagttttgtgtcaccaaacgacgatccaagcctgaaagattttcttaccaagaaatcgtcgttcctagaagactggctgagatcactatgcgcatcgttcaacagctcggagcgccagcccttgccaacggaggccacaaacgacgaggacggcttcagcccaaacgtgactcagaaaggcatgctgtcttccgccctgcagtccttgctcggcgtgtacgcgggcaggacccagcaggtcatcacccagagatttgagcaactggctagaagcgtcgcttgaatggtgagcagcgacgagcagtcaggtgtggtctccactccagcctccattaacaagcagcgatatattggtcgtcgtctacccctcaggacggacagcgcgtcaggcagtggatccttaaattctgccgaatcccatgagctccaggcggcacttgtctcggatcttggctgtcatcatgcacaggctctgcaagcctggcttggtcggtgttttcgtcgttgtttacttgaaacatcgttactgtgagtacacacacatatatatatatatatatatatatatatatatatatatatatatatatatatatatatatatatatatatatatatataagttggcagtcttcaaagctcagcgtgaccggacctcagcagcactgggtatctcttaactacttttctggcgttcctgacaaacaggatggcgctgttatgtagatgggccttttccctggtcctggggcttcctgcttgcttgataaaaggttggtatcacccgaccacggtccacgtggacgatattacaagatgttcattgttcttggcaagaggggtcatgaatgccgtccaaatctgttggagtccgtcgctagtgccactgctgttattgagcccatgtgtgtgtgtgcgcgcgtgtgttttgttcatgtaccaaccttcataaattgcttgacgctctgcactgttcgacgatcacttcca

SEQ ID NO: 29254 - DNA, 2602 bp, Zea Mays
gttggtctgcttctctcacttccgccgagaagctgaaattgctaagcactcctgaggagcgtgctcgtaggctcaatgaagaacctgaaatacatgctgaccctgcaatggatccatattatgaatctccggaagaacaggagcaggagattgaaagaagtagcttcaataagtccagaagttctttcttgaggaaagatggtagtcttgtgtctccaggtaaaggagatggtagaaatgctgcacagcgagatccaaaaactaactgggaatctaatcgaaacacaagggctgaatcgagttctcatatggaatcacccctttcacggaggtccacatattcttctcaaggagaaagtgttggttatacaaataagccagagggcttgaacattgatgcacaaaccgttagactggaaggcaccacgcgcagtgctccacaagggtcacctggtgcctcatctggaagtctagctactaacataggttcaggggcaaaaactgcatctcaatcagccattaacgagtctgagaagatctggctgtacatggatccttctaataaaatccaaggtcctttctcaatcatacagctgcggaaatggaacagcaatgggtacttccctcctagtttgaaaatatggaaagctagtgagaagcaggatgattccattctattgactgatgctttggcagggaagtttgagaaagaccttcctccatgggaaccaccacatgttagtttgtctcaaattaacaaaacccctcttgagcaaagcacaatagctgatgaacaaactccaaaatcagtaattgcaaagtctttctcaagcagtgatcaaagacatgattatagttcaacgaaccttggaacaaccatgatccattctggctcacaaggttattatggaatgcaaaattcccatgcagcatacacaagccagcaatctcttactgggagttggaatgccacgtcaagtcagtttggggttgcaataagtcctttgacacctacccagcctgccatgcaaagcctttcaggacaaaatattgtggctgcagaaaatatgggtcatttaactactggaatggctcctgcaactgcaaatgcagaaatggttaattcagatttgacttcccagaaccaaatgttgtcttctttaccgcaaacggatgacagattagctgatggaattgaatccaaatcaggagaagatgtttcacatggaagagtgaggtcttcggctgaagctatcggaccacaggatgcacagcttggaccagtgcaactaaacgctcagcaacttgaaaacacaagaaaccatatgtcatcaattgatctctccaagtcaatgatgccatcacagatgatgtcagcaccatctgctgcatcagtacagccttcattgacaaccactgctcgcagtgataatcaaagcagtgggtgggctgtacctgcacaaatggcgaacacacctggccagtctcagataactggaaatctaacctggggaaatacacctcagggtgacgcaagcttaggttggggaatggtgggacagagcaatatgaatatgccttgggtagcatcagctcaaggtgcttcaggctacaacatgggtgtagccatgccgacgcagccaaatgcagttccaaacatgggctggttaccaaatccaggaaacaccagcatgaacatgatctgggctgcaactcaaggccaggggactccaaatgcggctcctatgatgggaggtcagatgcaaggagtcccaatggccccttggggtggtgttgcagcaggaagtgcaaattcttatcctgcctggggaaaccaacaagctggaaacatgaaccaaaatgttggctggagtgctcctgtgcagggaaatccaggtcaggcaaataacaacatgaactggaacgcaccaaatggtaatcctaattggaataatcaacagagagagaatgggggcaggcactctggacaccgcggtgcttttagtggtggtgactcaggcggaaggtcatggaagtcacgctctggtggcgatggggggtcaaggggacatagcagattctcccattcaacaaacacagagggatatccatccaggactgatcggcattacgataggcagaattcaggcaacgagaggcgatatgagaatcacaatgagagaaatggtcgacagtttgataggcagccttcggataatgaaaggaaccatgataggcctgatggcagacatggtggcagggatgacgataggcaggctgataggtccgagtcaagagagctgcgttagaactggtttctgtttcttacattcgtttccttgtatgtgcagtagcaaactagcatagtagcttccgtgcatgttttgaactttatgctctgtagcgatctgcatacatgtgcagatcaccgtgtataacatttgtagtttaatgctgtgtgcatcctagttccgaatttgtaatttacttgaataaatcgtcttgtctgatttctgatgtaaagcaggggctacacgcccaggttcttggactagggttgttggagcatcaatggaagacaagggagagccagtggtggttg

SEQ ID NO: 29255 - DNA, 1956 bp, Zea Mays
aggcaaactgcaggtggtcagttgaggcttgatttcctatccccggctttctggattagtccatctggttttatatctgggactgtgcaagtgtgctacactgatacttgcatcttcgccactgccagcgcgctggccctggagcggaggcaagaggggtgactacaaggagcttttcgtcatggcactgcctaaggacggctgcctcgatggtgccaagatcacagaggtaggaggggtcggctacaaggagcttcttgtcatggcgctgcctaaggacgacagcatcgatggcgccaaggtcgcagaggccatcggcgtcaagctgccagacgtcgggggggccataaggactattttgaatagcagagaggccagagaatttgccagtggggcactagctggtgctatgtcaaaggctattcttgcacctctagagactatcagatattgtgcttaccgtattttgagcttagtggttgggttgacaggaggcattaatggcaggacaagaatgattgtaggagtaggacctaggcacatttttggtagtttggtggatatcatccaacaaaacgggtggcaagggctttgggcagggaatacaatcaacatgctccgcatcattccaacccaagcagtcgaactcggaacatttgaatgcgtcaagaggagcatggcagaagcacaagagaaatggaaagaggacggatgcccaaagatacagcttggtaatatgaaaatcgagcttccacttcacctcttatctccagttgctattgccggtgctgctgctggaatagctgccacactggcgtgccatcctctcgaagttatcaaggatcgcttgactatcaaccgagaggtttatccaagcattggccttgccttccgcaggatctataagacggatggtataggtggtttctatgctggcctgtgtccaacgctgattggcatgattccttacacaacatgttacttctttatgtatgacacgatcaagacctcttactgccgcttgcataagaagtcgtctctgagccgccctgagcttctacttatcggcgctctttcaggtcttactgcaagcacaatcagcttccctctggaagtagcaaggaagcggttgatggccggcgccctgcaggggaagtgcccgcctaacatgattgccgccttgtcggaggtgatccaggaggagggcgtcatggggctttaccgcgggtggggggcgagctgcctgaaggtgatgccgaattctggcatcacctgggtgttgtacgaggcatggaaggatgttcttctggctgacaggaacaagccacgctctttagcgaactaaacaggccgtccttgagcaatggaggcgttgctgggattcctgatctattttcagttttggaatcccggctgcggcgagtggggtacatagggcgcgtttctctcttttttgattgactgatgagtggtaagcgttttgttgtgtcatcggcacacagacaaacatcattaatgtgtcaaaaaactaagcgaaaagacaaacccttctgtatttcctgagtggaaagatggggaacctaaccctacctggagcctctgcaggaaccttttccttcatctaccaatcagatacagggagcttcaggttgacagatcgcaccaactgaaggacgaacctgttctgcgacaacaagcaggataagctgaggaacctgttttgcaagctaagttgagatgtaatttttgtcttgggctgggtggttatagtgttttctttcggcttttcttttctttctgcctcaagtctgaagcgaagtttataaattatttttcctcggctaatataatttgggtggcaaagcttttgccgcttccttaaaaaaagagtggtaagcattttgttgtgtcatcaattctgaattcttgtgctgttataagaaaaaaggatttggg

SEQ ID NO: 29256 - DNA, 957 bp, Zea Mays
aaaaaccacaccgcggcggcagctatataaaagccttcacctgacccgggcgctagggtttattcgctcctcccgcccgccgccgtcgccgcctcctctccccagcacccggagctcgcccgaccgccgctcaccatgatcatccccaagaagaaccgcaatgagatctgcaagtacctcttcaagggtatgtggttcttggtccactagactcgcagtagggtaacctgggctgattggttgtttcaccttctaggaggtgacaggtcttcaaattattttcgtattactaggagggagtgctcgtgtattattttgagttcacttttttggtccaatttcagcatctcacaaacttacgatctgatatataggcttgacacagcgagcattgtcaaatatttttgtgctccaaatttatttgccccctaaactatggattccttgttatacattcatctgcgttatgttcatgcgatttctgttagtttgatgtatttgctgctgcagagggcgtgctgtatgccaagaaggactacaacctggcgaagcacccgcagatcgatgtgcccaacctccaggtgatcaagctcatgcagagctttaagtccaaggagtatgttagggagaccttctcctggcagtactactactggtatctcaccaacgatggcattgagcacctacgcaactacctgaacctcccgtctgagatcgtgcctgccacgctcaagaagtctgccaagccacctggccgcccatttggctctggccctcctggtgaccgcccaaggggcccaggtcgttttgacggcgacaggccaaggtttggtgacagggatgggtaccgtggtggtcctcgtggtgctcctggtgactttggtggcgataagagtggagctcctgctgagttccagccatcattcaggaggcctcaaatgtggactggtaaagcaa

SEQ ID NO: 29257 - DNA, 3288 bp, Zea Mays
ctgcaggcatacatcgctgcgggtgaagttcggctatctgatttgccgcccgcgatacggcgaaaccctagctccacagcgccgttgcatggagtcccagcgatacaactacggcagcggcgccggcaccggcggcaaaatccgccgctaccctccctctcgcgccgtggctgcgtcaccatatgctcgaccggccaccgccccgacccacgctcctggaaccgccacggcggcggtttcgcatgagggcgggtggctgtcccggatcatagccgccggcacctcgcgattccttccctccttgttcagcttcagcacgtctcaacctcagcaagccgcgccggccccgtcgccaacgcgcgaccagctgccagtcgtcgagccgccttcgccgcttcccccacctttagtggatgatcgtccagaatgtgaagaaaacggtggagtggctgccaataatttgtgtactgaaaatcctcaaagttgtaccaaggaagaggaagaaaacatgctaagaaattctgatgaccatggtggaacggctcttgaagaattattgaagcagagaactttcacgaggagtgagtttgaatatttggccaatttgttatggtctaaaactattggagcaaattcactgaagctagaagatggtaacgtcaggaaaatgattgtttatgacaaagaaaatgcctcggaatactccaacttacctcttaatttttccactacaacattcagcgctgatgatcaagttgccacgcctgcagaaattgcaaaagcttatatgggtttaaaatcttccaagggttcccctctacgccttagattgcacgatccctcctctatgcctatcacatctatggaagttagtatgtcacaaaaagctaagcctcccacaatcccacttgcccaaggctcaagattgcatacttccaaaacttctgattgtcttgaaagcaactacacaacaccgaatggagtaatctgcaaaatgtcatcatctccttatttcaagagtggtgtgtcttcaaaggagctatttggttctgtatcttcacattaccagacctcaaatagtgttcatacttttggcagacaggttttgaagaggaagagtactgtcagcaatgagtttgtatctgctggtccgatacgcagaattcatcaaagatacaacagaacatcaccactgttggaaacacagctgggttatcgtagataccctgtgggctatggaagcaaactcgaaggttctgagcaattggcacggactcaaaaacgccggtgtctggataaagttggtgatgccagtctcggtagcgtagaggacaaaactaatgtgaactatcctggtcaggtgccagagaagtcagctgagatggcaactaagatactgaagcagcttgacacattagtaccttcacagaaggaaaacacatcagaaacaaagcagaaacatgagagtgccatatatttcgaggaagatgtttctcgacaaaagaaagtacaagcagagagagatcttttggaaccttctccatcagaagtacctgatggtattgcatcgaacaaatcaatctcacaaattaccttgaacaaggaaaagcctccagccttttcttccagaggtaatgctcccaatctggtattatctgatgaaattggacgaagcaaaatgtccactccaggaaatggcttcaccttccctgccccgactgtcaacaatgcctactcacagggccctccaacacctacattgacatctcctatactaacagttgaaaagcagccttcagtattctgcagtgcttcagtcacttctgcacaaagtgaccctaggatttcaaaatcagttttgggaggaccagttacacagaaattagaaagcaagttaaatggagataatcaacgagtgccttccaagaattctggacaagttgcatctttcacaagtaatcctgtatttaagagctgttcaactggaggcagtttcactttctccaatactcgttttggtagtttatcggcaacctcaaatatgtttgcagcaaaatctttagcgttgtcttgtacagcaagccccggtgcttctttgggtttccctccagttcatactgcaagttctccagctgctcaccgcaaatctgaagcagcaaatagcagtatcagttttagttccatgcagcagtttggcattgcaggttcttccacagtgcaggacaaatccaaggcagtagacagcagtaccccttttggctttccccagaagtttgacaccgtgagttccgcttcagaggatatgtccaaggcagactctcctgagccgacatttttttctgggaatcataatgtgcaatcagaaaattgcagttccctgttcacacagagtccaggaaataatttgagttccaaatcttcagaaaatttgaactctggaagctcgcatagttttgcagattcaccagttggttcagcaacaatgtgctctagcccttcgaattcaaactctctgttttcttgggctgctggctcagctcaatgccaagcgctgtattttcattcacgtcagctactccttcaataccaaatccatcacccacaacaccaatatttggtgaccctactgtacagatgaatggagggaacatagttattgacaggaatgggtccccttcccctgcaacttcgccatttggcttgccaagcagctctccatcgactccaactttcagtacgcctgcaactcagtttgcttctagtacatcaggctcacctggagtttttgaaattggcaagtatagtcaagcttcttcaggtgggttctcaatgggccctagtggtggcaacgacaaatcaaacagaagaattgtcagagttaagagaaggaaatgaaataccaatatttttcaagttgctctgagcatttataagactaaggcaatcagcacgtagaactttttgtttcacatcatttgtctgcggtggcaatgagaatgagatgccattcttaaattgatgatcacaattctggcacagtagcagcaatggaactagccttttcgcgatacggtcgcccatgacattttgttgtacggtttgtcacaacaatgctataatgaaatatataggtacttctccaacttgtattaaacatgttcagcgatcaagctgccctttttttgtgcaattggatcctgaaactaaatttcatcctaataataataatttaggcacgccaattattattattgattatgcaggtgagatttatgtactatatttttt

SEQ ID NO: 29258 - DNA, 4005 bp, Zea Mays
gttgaaccagcttccctgcctggctgcatttgcaaacggtaggaacccagccggcctacccgcgccgtcgggccgcaagcatttctactaatctgctcttctcgtagacagaaaacccgcgagccccgagccccgaccaataggaagccgaggtccagccgtagtgacgtcgatttcgattaacccgagcggcgcaaatccggtgtcaccgaagcacatcttccatctccagcaattcttccttcctcctcgtcgcattccacgtccggatctcaaattgtcccatcccgtgctcctcctccccgatcccatccctccgctccagatccgcacgccgccaccggatccgcagccagcgcggccggcatggaggagacgccgccggggcagcgcccgcagccgccgccggcgcacgcgtctcctccgttcgcctcggcgcccttcacaccgccgccgcgcgtcttctctccaggcctcgccgccgcgcggggcacgcccagccccggctcggggcccggccacgcgctgccgcacctcagcacgccacccggcccgcccgtcttctcctcgccgctgcgccctgcggccgtgcccttccgcgccaccccggcctctccccaccccgtgtccttcgccgcttcggggggctactcctcgtcctcctccgccactgccgctaccaccgcctccctccccacctcatcagcgccgcactttctcaacggcgctgccacgcttcacggggaccatgcccctgcgccatcatcaatccagggagacggcctcgacagtccctatgtacagttctccgcaaacaaggttctgaagcagaagaagctgctcaatgcccctagcttggggttcggagctctggtttctccagggaaggaggtgtcacctggcccagaggttgtggagcgtgatccacgccgttgcctgaactgtggcgcctatgtgaacttgtactgtgatgtccagatcggctccgggcagtggcaatgcgtcatttgcaagaagctcaatggcagcgagggggaattcgttgtctccagcaagcaggacctgctccagtggccagagcttgcatccacgactgtggattatgtgcaggtggggaacaggcgtccaggctttgtcccagtgtctgacacgagggtgtccggccccatttttatcctcatagatgaatgcctcgatgaggcgcacctgcagcatcttcagggctccttgcatgcctttgtggattcgctccctcctaccgcaaagataggaataatcacctatgggagaactgtctcagtgtatgatttctcagagggggcagcagtgtcagcggatgtgctacctggaaacaagtcgcctacccatgagtctttgaaggccctaatctatgggacaggtgtttacctgtctcctatacatgcttcgctacctgttgcacacacaatattctcatctctgagaccctatcagctgagcgtgccagaagtgttaagggatcggtgtgttggagcagcagtagaggttgcccttggtattattcaagggccatcagtggagttgtctcgtggaatcatcaagagatctggtggaaactgtaggatcttggtgtgtgctggtggccctagcacctttggaccaggatcggtgcctcattcagctaaacatcccaactatgcttatctggagaagacagctatgaagtggatggagagtcttggtcatgaagcacagagacacagtactgttgttgatatcttttgtgctggacagtgtcctgtgagggtccctgttctgcaaccattggcaaagtgttctggaggtgtgctcttagctcatgatgactttggagaggcctttggggtcaatttgcaaagggcatcaactagagcagctggttcccatggcttatttgagatcaggtgttcagataacatgtatgttactcaagttattggccctggtgaagaggcttctcctgattctcatgaaacgttcaaacatggtagttccttctgtatccagatgcatagtgttgaggaaacacagagtttttctgtgtctatggagacaaaggctgatatcaaaagtgattttgttttctttcagtttgctgtccattattccaatatatatcaaacagaaatcactcgggtgatcactatgaggctgcagactgatgatggtttgtctgcatatctggcaagtgtgcaggaggatgttgcggcagttatcattggtaaaagaactgtattgcgtgccaggactgcctctgatgctattgatatgaggctctcaattgatgaaagagtaaaggacatagctctaaaatttggtagtcaggctcccaaatcaaagctttaccgcttcccaaaagaactagcatcactcccagagtgcttgtttcatctgaaaaggggaccacttttaggtagcataatcggacatgaagatgaaagatccgtacttaggaatttgttcctgaatgcttcgtttgacctttcgctccgtatgttggcacctcggtgcataatgcatcgtgaaggtggtacatttgaggagctgccagcatatgatcttgtcatgcaatctaatgctgcagtggtactggaccatggaacagatattttcatttggttgggtgctgagctagcagcccaagaaggacaaagtgcagcagctttagcagcatgccgtactctggcagaagagctcagcgagaaacgttttccagctcccaggatactttcattcaaagttagtttgcttgttctcattctttactgttatttctagatgttcttctgatgacatctgcacaaatttggatgtgagcacacctttatagtgtggtataccagaattcatctaatatctactatttcagcaataaatttattgtcttaactagtgtaggccatgtctggtggattgcaacttgtgattataaattttggtgctagactattgttacatatgttcacttccatttaaatatttggtttgctttgtggtgcttaatagtttttgctttgaagtgtttaatagtttacatgacatcggactgaagataactgtggcacgggagttttcttagtataaatgtggaaaattctttcaaattattgggcttttaatacttttttcaatcaagtaaactagagtgaaagatcacttacacagagtgcagcatgctttccttttacaattgactgttcttccttatattttggcacagcaaggaagctctcaggctagatattttgtctcacgcctgatcccagctcacaaggaccctacatatgagcaggagtcaaggtttcctcaattgcggacactcactcctgagcaaagggctaggctaaagagcagcttcatccagttcgatgactatagtttttgcgagtggatgcgcagcctcaaattggtcccaccagaaccaagctaacacaactagtctggggggtacacttccgaacggtggatagcaacaaaatctatggcgtggcatctgatagagctttccctctaagatagatgtgatcttcatgaaccaaattatggcatcgccagatattcgtgagccgatcatacgtttggtttggtgggcagccatttaggtgcggtggaactgtatgattttgcataattcattttcttctccttttgaccatgatgtagtagagtaagttcataaacagttccttgtcaattgtcatacaggtggagaaatctacacaataagtttgtcaattgtcccaaatgttacatgtatacaacctttgtttgaagaggtctcactatattatttgaaattccttcatttctcaggggtagccgcagctctcagcctctcaccttcctgggaggatcaaggcctttgcagtataactctgccatttgcatgctagatcaattccattctgtttatgagcagatgtgaaaatgagggcctctaaaataatgttcattttgtttgcctttttgaaaccaagtgcacttttg

SEQ ID NO: 29259 - DNA, 1599 bp, Zea Mays
tgcagggctgaaggtctgccagggcgcgctctactgcctgggcgcggagggcgtgctgcgggtcagcctcggctgcttcgtcttcttcttcgtcatgttcctgtccaccgtgaaggccaggaaggtgcacgactgccgcaactcgtggcactccgagtggtggccggccaagctcgccctctggctcggcctcaccgccgtcaccttcctcgcgccgtcgccgctcgtccagctctacgggaaggtggcgcatttcggagcaggggctttcctggtgatccagctgatcagcgtcaccaggttcatcatgtggctcaacgactggtgccgcgcagagatgacccagaagagataccacttgcagattcaggcggtgtccatcgtcacgtacgtggggtcgctcctggggatcgtgctcatgtacgtgtggtacgcgcccagcccggcctgcaggctcaacatcctcttcatcaccgtcacgctggcgctcgtgcagctcatgaccttcgtctccatgagctccaaggtgaaggcagggtacgtggcgccggggctgatggggatctacgtcgtgttcctgtgctggtcggcgatcagaagcgagccgcacacggaggtttgcaacaggaaggcagaagtcgccacgagcgcagactgggtgaacatcgcgagctttgtgatcgccgtcgtcgtcatcgtggcggcgaccttctcgacggggatcgactccaagtgcctccagttcaagcaggcggagggggagtcggaggaggaggaggaggacgacatcccctacggcctcggcttcttccacctggtgttctccatgggcgccatgtacttcgccatgatcttcgtcggctggaacgcgaacgcgagccacaccatggagaggtggacgatcgacgtcgggtgggcgagcacgtgggtgcgcgtcggcaacgagtggctggcggcaatcgtgtacatatggatgatgatcgcgcccgtcatctggaagacgaggcaggtgggatcggcggcggagacgtgagcagtttttccgctgattctgagtttctgacagccggaatctatatatacatacaaacacaagagcaaatcaaagggacgggaaacgggaagagctcgggtagtttttgctaagctggaggtgcagcagacaagacaacaagaaagaggaggcaactaaggagtagtactatactgatgccactagtccatcgtggagctcggttcaggaagctcatcgatctcgttgtacttgtaccgaactatctcaaaaaacatagtgcctgtttgtctggattgctgctcggccacaagcacagctgtctggcccggggcaccatccaaacaatcccatatagagcgtgtttggacgcagtcatgcgcttgggttttgcttttgcctgtctgtgcccggcagattcatgggcctgtaagcaaacacgtcccaattatctgaactcggaattatttacgcctcggcaagattcatcaactcaatttttttgtgaacaatcttattgtgttactaggtgaatgcccgtgcgttgctacggagtaaacatattatgataagatatattgaaattc

SEQ ID NO: 29260 - DNA, 728 bp, Zea Mays
gaaggaaaaaaacttgtccgggctcgcgtttctgattcccgtggatctctcatctcgcttgtctcctccatagcagccaggcagccagcatggcggcggctagggtttgcatcgccggtgcatcttgagatccgctgctgctcacgtgtccacgttgcatcgcctttaatccccacatgctccatccatacgctgctggtgctcgtcgctattctcttcatcgtcgggacttgtcggcactactaccatcgccatctgaaccgagctcatgtgcatttacagcggtgaccgagcttggatcctagcgagatgaggaaaggacacaggcaacaatgtgctaaagtatgagatcaatagagaattttttatgaacttcaagaattaaaaaggttcatttgttatgggtcaagggcaaaagcactccgaaggtgtctgctgatggtacttacaaggtggacatattgtactggatttacactagcctgcttgcaggtcgtcatccatttttgggacattgttgtgaagattggcatgagaaccacctgtatgaactttggaatcgttaactttggagtgccttctgccttgtggcaatttatgtaatttgaatttgtatggaatgttttgttcgattcacgtatttataccgaacaaagtttatccttgctaccaattttgtggattgtaacaacattttagaattctttgttttttcctgtttttctatg

SEQ ID NO: 29261 - DNA, 388 bp, Zea Mays
ggcagggccatgtgggggagtgctagacgaatggaatttgatagggatgcaaagattcttcgaaggaactttgtaattgatctgttaagttacgaggacaattcatgccgctatgctatccttgcaaacatacaataaagacttatcaatatcgcttaaaaggattagattaatgtacggttgtcgacatatttgcttattattaaaatttgtaagacatcacattttttaattgaggttgcatcaataaacaggttgatgtagaccaataaggtttgtgtgtggtttacatgttttaaatataaatatatgtgggcagctagcacatctaaggtgccgtttggttcatgtattggtaacgtaatggataactgataacgttaaatca

SEQ ID NO: 29262 - DNA, 3244 bp, Zea Mays
ctcgtttcctccccgcctctccccctccccggctctaagggctcttctacaccgaagcaccgcacctcccgccatgcactgcatcgccccccgcctgctcctcctcccgctcccgaccgtctcccgccacgcgctatcgccaacccagacgccacctcttcctcccctcctcccctcccgcgcctgtaagttccacctcgcctcggcgcgctcgccgtcccgcgccgccgcttcggtttccggcgacgacgaggatgaggaggttgacgtggatgacgacgaggacgacgagacaaccatccgcaacgtagacgatgaatacgacgacgatttcgaggacggggatgagggagatgagggcgatgaggaggcggtggacgaggagagcggtggtgagtacgaggaagaggcgggggaggacgaggacaagcgggaggataccgcagcgcggaggcgggactcggaggagtataagtcgcggcgggtggcgaagctggtcgccgaggtgcgggagttcggggaggacgtcatcgactacaacgagctcgccgggatctacgacttccccatcgacaagtttcagcgcttggctatacaagcatttttaagaggttcatctgttgtagtttctgcacctacaagtagtgggaaaacattaatagcagaagctgcagcagttgcaacagtagcaagaggaaggcgtctcttctacacaacaccattaaaggcattgtcaaaccagaagttccgtgatttccggagattctgctatcaacaaagatgctcagatcctaatcatgacaacagagattttacgtaacatgctgtaccaaagtgttggcatgacagcctctgaaggtagattatttcaagttgatgtcattgttttggatgaagtccattatttgagtgatatctcacgtggcactgtttgggaagaaactgtcatatattgtccaaaggaagtccaacttatatgtctgtcagccactgttgcaaatcctgatgaattagctggctggataagtcagattcatggtaaaacagagcttgtaacatcgaacaaacgtccagttccgcttacttggcacttctcgaagaaatattcattacaaccgcttcttgatggaaaggggaaaaaaatgaataggaaactgcggatgtctaactcccaaaacttagcatctccaaagagtgagttctattatgtgaaagggaagaggaggtttagaacaaataaaattgagcaaggtaatagcaggcctttggacatatcgaaacaggttcagttatcaaagcatgaactcagcaatatgcgtcgttcccaagttccactaatacgtgacactttatcacaactatgggaaaatggcatgcttccagctatctggtttatttttagtagaagagggtgtgatgcagctgttgagtaccttgaggattgcagactgttgcatgactgtgaggctagtgaagttgagctggaacttaggaggttcaagatgcaatatcctgatgctattcgagaaagtgctgtgaaaggactcatgcgaggagttgcggcccatcatgctggttgcttgccactgtggaaatcatttattgaagaattatttcaacgtggccttgttaaagtagtttttgcgacagaaacccttgcagctgggattaatatgcctgccaggacggctgtaatttcttctctcagtaaaagaatagatgctgggcgccagctcttaaccccgaatgaactattccagatggcaggtcgtgctggaaggagagggattgatacagttgggcatgctgttcttgttcagactccatatgaagggcctgaagagtgttgtgacatcatctttgccggacttgagccacttgtctcacaattcactgcatcatatgggatggttttgaatcttcttgccggttcaaaagttacacataaacagaaagaatcggatgatgttaaggacaagcattctggaagaaccttagaagaagctcgaaagctagtggagcaaagctttgggaattatgttggtagcaatgtaatggttgctgccaaagaagagactgaaagaataaggcaagaaatacaatacctctcttcagaaattactgatgaatctattgatcgaaaatgcagggaagaattatcagaagaagactatgctgagatttccctcctacagaagagactaaaggaagagaagcagatcagaaatgagctgaaaaaaaagatggaactggagagaatggctgcatggaaaaatcggttagaggaatttgaaagtggccatcttcctttcatgtgcctgcaatacaaagataaggattcaattcagcacacgatccctgctgtatttattggaaacctcaactcatttgctgatcaaaagatcatgaacatggtggaagatgattcacttgtttctggcaagccgaaacgtgatagtggggaacaactttatcgcccatcttactatgtagctttaagttcagataattcatggtatctgttcacagaaaaatggattaaaactgtttacaagacaggtctacctgctgtcccttctgttgaagggggcacactccctagagaaaccctgaaacagctcctcctgcgtgaagagttggtgtgggataaagttgaaaaatcagaatacggctctttgttaagcatggaaggttctttagacacatggtcgtggagtctcaatgttcctgtgcttaatagcctttcggaagacaatgaggtagaacgattctcccaggaacatcaagatgctgtagaatgctacaagcaacagaggaggaaggtttcacatttaaagaaaacaataaaggctactaggggtttcaaagaattccaaaagatcatcgacatgagaaattttacaaaagagaagattgagcgcttagaagctagatcccgtcgcttgactcgacgaataagacaaattgaaccgaccggttggaaagaatttctccagattagcaaagtcatacaagaggctagagcattggatatcaatactcaggtaatctatcctttgggtgagacggcagcggctatacgaggggaaaatgagctatggcttgctatggttcttaggaacaaggtcctcttggatctaaagccatctcaactggcagcagtttgtggaagtttagtttccgaagggatcaaacttcgtccttggaaaaatagcagaacaatgacgaaagatggactaaccat

SEQ ID NO: 29263 - DNA, 2946 bp, Zea Mays
attttggcgcgaaaggatcccatctgttaccgccaaaacccgctccttctcccccttcttcctccccgtctcacaatcacaatcccattcagacgcggccgcccctaccctagcaggcgcggacgcagccaccatgccggcccatccaacccctcccgccgcgcgcctcagcggcgtcacatcccgccgccacgcggagctgcttctccacagcggcgtcgacggcgtttctgtcaaggacctccgcctccgccgcatcgtcccacccgccgccggctccctcgacacctcccccaagtgcgtctcacccgtgaaacccggatctgttgacagcacgcctccggaggctgtgtcgtcagcggcggcggcggcggccggggaccttgaccggaagttggcgcccccgcggtctaagctcgtccgcgatccacgctcgtttggctaccggcgcctgctgcctttcctgaacgagatgacgaaaaacaatagctcaatcggcaaggaggtgttcctgcaagacacggctgcacacccaacggatgagctcagccgatctgattctcggttagctgatgaatctataggcgttagtcacagcgaacctgatgccatggatcctgtcgagccggcggtggtgagcactggaggagacaccgatgggaaggctacctgcggcaatgtcatggaagagaccaagactgcccctcatgacctaactaacaagccgttgcttgcccgatgcacaaggtcgaggtttgtccatcatccaagctcgttcagctacaagaggatgctgccatttctaatggaagacgaaatatatgctcaagaaagtggcagggtcaaaattcgaaaagttgctgaggaaaggcagtttgcggcaaacaagcatgatgcctcagccaatgggcagcagtgtcttgctgtctcggatgactcttctcaggaaggcaatagagctcaatttaaaatagtggaagaagaaaagccactaaaagcagatgtgaatcatattcttgatgacagacagcttaagcctcctgtcatagaagcgtctcctgattgtagtgcaactgaagtgcaaaatgtcatgcagcaagaagctttagcttcaagtcaagttcccctaacttcttttgatggtgaattaacatcagacggggacaatgtccagtccattggacaacatcagcttgttgtatcagaagagtctcaagaggaatgcaaaagagatgaagtcaacagaagcattcacgatgaagcagtacaatcagatgggggctatgctctggatagcagagaatttcagcctgctgcatcagaagtctcttgttcagaaaacagcatggctggagtgcaaggggctgcacaagaagaaccgttacctttagatggagttcaggaaaattcagacatgggcgacgatgtttccacagagcaggctcagctctgtgtcacaagtgaatccttgtctgcgcagctgcaaaacaatgctgaattcgctgaagtactgccgtgccaagacttggactcaggatgtcacgacattggtttcggtagtcctaccaagagagtcgtaccatcgttgcatcggcattgcgcacaacaacctcaggactctgtggtttctcatgatgatcagcttcttgacgatgacatacaaatggtcggcagactttctgatccctgtgctgctgacagatcctcatcaatggaggaaatgtctggccgcattctgttcacccaatcagcatcgagcaaagcagccatatcatggccaagtggtgcccattcaatggaaaaaagagctcggtctcctaaggagctttccccaaagaaagggatactcaagaggagtacacgggggtgcaagggtatctgcatgtgcctggactgctgtacgtttcgcctacacgccgaccgagctttcgagttctccaggaagcagatgagagaagccgatgacatcataagtaacttactgaaggaggtggacagtcttaggagcctgctggagaagcatgctggccaagtaagtataaatccgtgcatttcagtttttgtttctttttttttcttctcctcatcatcatgaagtttttgtgcaattaggaatgctaatatccactcttcactagtatgacgagttctacattgacctgtggtgaccatttgacctgaatacttactttgtcctgagcttcccatctcctttacattatttggctggctgttccagtgtctgaaattcgcgttgaatatgccttgctaaacgcacgggcagttctgtactcaccaaagtatacggaaccctcgattcttacttcttaccgtcgtctgaaaattgcaaccggaatcaacacaggcagcccgaagacaggcctgccgggtgcaggaggtggccaggaaccgctgccagcagatgtttgcggatctaaactcccactgcagaatccccggaccaagggttaggttcgccgaatacgtcgaggagaaggccgcgtcgtctccacgcaggagcagccggaggtgactggatttcaggaggtggcaggtgaactggcctgcccgatcgtgttgctgaattgttcggtacaataactaagtagtgctgcttggcgaaccatcacccttgtcactggtttgtgttggtttgccatgctttgagctttgagttttgtactgtatactatgtgttccctacattccagaaaattgtaagtcgatttgactttttagttatatgcctagttacatagcaaaagttattacatatctagaaaagtcggagtgacttgtaatttgaagaggaggggatacaatttatatattcatagacaatagcttcagattcgttgagttggtcagcatgagttctggtttgtttcaggtcttctttttgaacgttagactgtctccagcagcgtcccctaaatttcgtcccct

SEQ ID NO: 29264 - DNA, 924 bp, Zea Mays
attggagctattcagtattatgtaataggattgcacatatctcatgatagactaggagtaaagaatgtcacttgtggaagtccataatgctgaccttctgatattgttaagaacctcttaactacttataatttgccattttgtttagctggtgtctgcaaatgtgacttgtccggggaagtttgtgtgagaccttctggaaccaatgaagcattagattaatgttgacgtgaaatctggtcacacatcagcaagagctacgttggcctagcacgtagcagacagaggtcaaaatcactgaggctgaccaacaggactgccgtacagatccgacgctcgttcttggccgagcccacgaacagctcccattaagacccgtctgggagcacagcgggattaaccttggactgggtgacattcgtcatcgctgaggcgtgcttgctagctggtcttttgcaatccgcctaccacactggctaccggaaggtgtttttccagaacccgccggactgcgagacggtgcggaggggcacgttcggagccggcgctgcgtttgcccttttcacctgcgtgctcacctcggcctactactactgcttctccaaggcgcggatctactaccaccgcccggaagccgccatcggcatgactccgttgtaaacagatttaccggtctctctgcagtaacagttttgatagcaactatatatgtctgttaggtttttgcatatattgtgttgggctggtatgtgacagttttttcaggaccatgtatctgactgagttgaactcaatctctactaataattaagatccctctgtagaccgcccccgccccctaaaaccccgcgcccacctccgcccacctgcgcacgtcggaaacgtcgccgccaaatccgcccacctccgctcgcctcgatccca

SEQ ID NO: 29265 - DNA, 1653 bp, Zea Mays
caaaccgccgcacggatcaccccttctcactgcctgtccaggcgccgccgcttcgccgctgcccgtttcttcgaaccactccgaagctgccccgccatggacagctccgccactgacggcgcgaggctaccgccgccaagggccgggagtcgcctctgcgtcaggtgcggcgagaggaaggccgcgctgaagcggcccaaaaccctagaacagggaatgcttctatatcatctttgaggacgaaattcatcaaactattgtccagaattctctgtttaaagctggtgagcgtgtggcaatcggagcttctggtggaaaagattcaaccgtgcttgcatatgtgttatcggagttaaaccgtcagcacaactatggtcttgatttgttccttttatctgtcgatgaaggaatcacaggatatagagatgactcactagaaactgttaaaaggaatgaaatacagtacggcctgccactgaagattgtttcctataaagatttgtatggctggacaatggatgatattgtcaaagcaattggtctaaaaaacaattgtactttctgtggagtttttcgacgtcaggcactagatcgaggtgctgctctcctgaaagctgataagattgtaactgggcataatgcagatgacattgcagaaaccgtcttgctgaacattctgcgtggtgatattgcaaggttaagtagatgtacctttataactactggtgaagatgggccaataccaagatgcaagcccttcaagtatacctatgagaaggagatcgttatatatcctgtctatgaaatatcttatattttcatttttttactatgttgacttcatttaatatattttaaatccttaactgcatgacacgtatgcatacttcaaaaagctggattacttttccacagaatgtaatgtctggatcttttttctgttcagttcttttcattttttcccgcattgaaggagaccactttattccaatatcagaaaatgctaggatgtcacttgaatcaaaatataggtctcaaacatcactgtcagctctaccatttataggttatactgtgttctcttccactaagaccgtaaacttaagtgcacttctgctcaacttcattcctccaaacgtaacgtatatcagaaatatattaattctattgacctgtgccacgattctgttagaattgagaatgggttaatttggctatatcatgatccaggcatctattcaccaaatgcataccgtggttttgctcgtgaatttattaaagatttagaaagaatgaggcctagagctatactagacatcataaaatccggtgaaaatttcagaatctccacaacaacaaggatgccagagcaaggaacgtgtgaacgatgtggctacatttctagtcagaaattatgcaaagcatgcgtcttgctggatggattgaatcgaggcttgccgaaactaggcattggaagtaccaaagcaggtgctagagctgacagtgatgtcgtgaaccaaaagaaattatgtggccacaattttgacgccatctttagtttgcttaaatcccaaaaactgccatgcttttggcgatacataagaacgtcttcaacagatcccaataatcctaattctgaatcttaatttaagg

SEQ ID NO: 29266 - DNA, 5622 bp, Zea Mays
tgtgtcccctccccccctcagatcagatctctccctctccttctcccggccccgagtggagctgtggaggcacctcgcatcaccgccttcgtctctccagactagccgagagagatctcgacaccgccgcccgttgccatggcggcggccaacgcccccatcgccatgcgcgaggcgctcacgctcaccagcctgggcatcgcgccgcagtttgtcacgtttacccatgtcaccatggagtcggagaagtacatctgcgtccgcgagacctcgccgcagaacagcgtcgtcatcatcgacatggccatgcctatgcagccgctccgccgccctatcaccgccgactccgccctcatgaaccccgacgccaggatcctcgcgctcaaagcccaaatacctggaacaacacaggatcaccttcaaatatttaacatcgaggctaagactaagatcaagtctcaccaaatgcccgaacaggttgtattttggaagtggatcactcccaaattgttgggtttagtgacacaaacatctgtttaccactggtcgattgaaggtgattctgagcccaccaagatgtttgataggacagctaacttggcaaacaatcaaatcatcaactatcgatgtgacccagcggagaagtggcttgtgcttattggaattgcaccgggagccccagagagaccacaactggtgaagggaaatatgcaacttttttctgtcgatcaacagcgtagccaggcgcttgaagcccatgcagcatcttttgcaacatttaagggaaacctggcttttctaagaaacaagcggaccttttcttcccaccagatttccaggatgattttcccgtagctatgcaggtttcacaaaagtatgggcttatctatgtaattacaaagcttggccttttgtttgtatatgacttggaaactgctgctgcagtttacagaaatagaatcagtccagaccctatattcttgacagcagaatcttcctctactggtggattttatgccatcaacagaagagggcaggttttacatgccacggttaatgatgcaactgttgtaccatttgttagcggccagctgaacaaccttgagcttgctgttaatcttgccaagagagcaaatcttcctggtgcagagaacttggttgtgcaaaggttccaggaactgtttgcgcaaacaaaatacaaggaagcagctgagctggctgcagagtctccgcagggcctcttgaggactcctgaaactgttgcgaaatttcagagtgttcctgtgcaagctgggcaaacacccccactcttgcagtactttggcacattgctaactcgagggaagctcaatgcctttgagtctcttgagctatctcgacttgttgtcaatcagaacaaaaagaaccttctggaaaactggttggctgaagacaaactggagtgcagtgaagaactaggagatcttgtcaagactgtggacaatgatcttgcactgaaaatatacatcaaggccagggcaacccctaaagttgttgctgcttttgctgaaaggagggagtttgacaaaatacttatatattcaaagcaggttggatacaccccagattatctcttcctcctgcaaaccattttgcggacagatccacagggagctgtcaactttgcattgatgatgtcacaaatggagggaggttgtccagtagactacaacactatcactgatctcttccttcagagaaatatgatacgggaggctacagcttttctgctggatgttctgaagccaaacttgccggatcatgcttttcttcaaaccaaggttttggagatcaacttagtgacttacccaaatgttgcagatgccattcttgcgaatggtatgttcagtcattatgaccgtcctcgtattgctcagctctgtgaaaaggctggattatacttgcgtgccctccagcattattcagagttgcctgatatcaagcgtgtcattgtaaatactcatgccattgagccccaggcacttgttgagttctttggcaccctttcaagggagtgggcactagagtgcatgaaggaccttctactggtaaatctgaggggaaatcttcagattgttgtgcaggctgcgaaagaatattctgaacaactaggagttgatgcttgcataaaattatttgaacaattcaaatcttatgagggcctctactttttcttgggatcctatttgagctccagtgaggatccagatatccatttcaaatacatagaagcagctgcaagaactggacagatcaaagaagttgagcgtgtaaccagagagtctaatttctatgatgcggagaagacaaagaactttttgatggaagcaaagctacctgatgcccgcccactgattaatgtttgtgaccgctttggatttgttccagatctgactcactatctatatacaaacaatatgcttcggtatattgagggctatgtacaaaaagtcaatcctggtaatgctcccttggtagttgggcaacttctggatgatgaatgcccggaagatttcatcaagggtttgattctctctgttcgttctctgcttcctgttgagccactagttgatgaatgcgagaagaggaaccgcctacggttgcttactcaattcttggagcatctagtgagtgaaggtagccaagatgtgcatgtccacaatgctcttgggaaaatcatcatcgacagcaacaataaccctgagcatttccttactaccaacccattttatgactctcgtgttgtgggcaaatactgtgaaaagcgagatcctacacttgctgttgttgcttatagacgtgggcaatgtgacgacgagcttattaatgtcactaacaaaaactcattgttcaagctacaagctagatatgtggttgagagaatggatggtgatctgtgggataaagttcttcagcctgagaatgaatatagaaggcaactcattgaccaagtggtttcgaccgcattgcctgaaagcaagagccccgagcaagtctctgctgctgttaaggcattcatgactgctgaccttcctcacgaattgattgagcttcttgaaaagattgttcttcagaattctgcattcagtggaaacttcaacctgcagaacctactcatcctgaccgccatcaaggcggatccatccagagtcatggactatgttaacagactagacaattttgatgggcctgctgttggtgaagttgctgtcgaggcacagctgtacgaggaggcttttgctatatttaagaagttcaacttaaatgtgcaggctgttgatgttctcttggataacatccgaagcatagacagggctgaggagtttgccttccgtgttgaagaagatgctgtttggagccaggttgctaaagcccagttacgtgaaggtctggtcagtgaagcaattgagtccttcattcgtgcagatgatgcagcacacttccttgatgtcatccgtgcggctgaggaagccaatgtgtacaatgatttagtgaagtaccttctgatggtaaggcaaaaggcacgggaacctaaagtcgacggagaactcatctttgcatacgctaagattgacagactcagtgacattgaagaattcatacttatgccaaatgttgccaaccttcaaaatgttggtgaccgtctatatgatgaagaactatatgaagctgcaaagatcatatatgctttcatctcaaactgggctaagctggctgttaccctggttaagctgaagcagtaccaaggtgctgtggatgctgctcgcaaggctaacagtgctaaaacatggaaggaggtctgctttgcttgtgttgacgcggaggagttccgtcttgcacaaatatgtggtctcaatattattgttcaggttgacgacctggaagaagtcagtgagtactaccagaacagaggatgcttcagtgaacttattgctctcatggagagtggtcttggacttgaacgtgcacacatgggcatcttcacagaattgggagttctatatgctagataccgctctgagaagcttatggagcacatcaaacttttctccacccggctcaacattcctaagcttattcgagcttgtgacgaacagcagcactggaaagaacttacctacctgtacatacagtatgatgaatttgacaatgctgccaccacaattatgaaccactctccagatgcatgggatcacatgcagttcaaggatgtctgcgttaaagttgcaattgtcgagctatattacaaggcagttcacttttatctgcaagagcatcctgatctcatcaatgatatgctaaacgtgcttgcacttcgtttagatcacaccatagttgtagacataatgcgcaaggctggtcagttgcatcttgtgaaaccatatatggttgcagttcagagtaacaatgtatctgccgtgaatgaagccttgaatgagctttatgtcgaagaggaggactacgagagactccgtgaatcagttgacatgcatgacaactttgaccagattggtcttgcccagaagcttgagaagcatgaattgctggagatgaggaggatcgccgcctacatttacaagaaggctggcaggtggaagcagtcgattgctctatcgaagaaagacaacatgtacaaggactgcatggagacatgctcacaatctggcgaccgtgaactgtcagaggacttgctcgtgtatttcattgagcagggtaagaaagaatgttttgcttcttgcctcttcatttgctacgacctgatccggccagatgtggctcttgagcttgcatggatgaacaacatggtggactttgccttcccgtacctgttgcagttcattcgtgaatacactagcaaggtggatgatttagtgaaggacaagatcgagtcgcagaaggaagaaagagccaaggagaaggaggagaaagaccttgtggctcagcagaacatgtatgcgcagctgcttcctctcgctttgccggcgccgccaatgcctggcatgggtggtcctccacctccgatgggtggaatgggcatgcctcccatgggcgggatgggtatgccgccgatgggccctggtccgatgccagcattcggaatgggaggctactgagtggtggttttgcagggagcttagatgatgatgtgaattgttccattgcaagcataagtggaacctcattggagctgtagatggttttacagtttgggaaatcaatattctttattgtaccaggaaacttttttttgggcgagtgagtgaaatcagcctgacccatagtttgagaagcgcaacctgtgatatgttttacgatgggatcggaaataggatgattaggttgtttcagcatgagctgttaaaagctggtaccatgtgtatgtatagtggtgtgataaaatcttttgcgtgtcggcagagtgaagatagacaaatgtatgtttccttgttacgacctgttaatctatatattagcccgacttgtagttcaaatgccctacattattttcttctagctcctccaacttgtagttcaatcggtaatactatatttattaataaattcaatggatatgttctctat

SEQ ID NO: 29267 - DNA, 1443 bp, Zea Mays
ccatacggtccaccgagaaccgtgtccacgccatcttcctcctcctcccctactctgacctctcgtcgtcgacgaaggaaggattccgcccccgccccggccgccttcgccctcgccgctgcattttccggtggcctctccacgtgttggtgtttcggttgcaatagagtgattggggaaactgatcagccagaattgttggtcaaccgatgggaagcaatgaccctaacacaccctcgaaggcttcaaaggcgtcagaacaagatcaacctccagctaccaccacatccagtggaacagcttcagtgtaccctgaatggcccagctttcaggcctactcagcaattccaccgcatgcgttcttcccccctaccgttgctgcaaatccacaggcccatccatacatgtggggggctcaggtgcttcctatatctgaaactttgcccccagggcccccctctgttctctgctacaactgttaacgttgatctgtattatgtgttatatattgcgagaacatgtgatttttcatatgtgatcgaaagcaatgtccttcgattgcagcccatagtgccaccttacgggacaccgccaccaccaccttatgtgatgtatccacctggaacagtatatgcccatccctctacacctcctgccatgcatccatttggccattatcctatgccaacaaatgggcatgctgaaactcatggagctgcgccaagcgctccggaaatgaatggtgcgtcttttccaaggtgaacagctcattatcaaagtcagttggagcaaggagattaaattagacttctggtaacaatttcagggaaaagcgagcctggcagaacgtctgctccatccgccaacgggattacctcgcacagtgagagtggaagcgagagtgagagcgaaggaagtgacgacaattctcaaaacgattcacactcaaaggacaatgatgggaaggaagatggcaattctcagaacggcatgtcttattcaggatcgcaaggagtggtaaaccaaaccatggcgatgcttccaatgcaaccgggtgcaatggtcggaggagttcctagctccacggcagctaacctgaatatcggagtggactactgggcagctccgggttctgcggctgtccccgcagcgcacggcaaagcgccagctggttcagctcgaggagaccaatgggatgaaagggagctcaagaagcagaagcggaagcagtcaaacagagagtccgctcgcagatcccggctgcgcaaacaggctgagtgtgaggagcttgggcaacgtgctgaggctctgaggtcggagaactcgtcgctgagggccgagctcgagcggatcagaaaggagtacgaacagctactttcacagaacgcttccctaaaggacaggacaggtggatttttcagtcacaagtgcaataaagtaata

SEQ ID NO: 29268 - DNA, 3885 bp, Zea Mays
ggaagccaagacaaaaatgaggggcggagaaagcgagcgcgcactcaagaacccaaaatcaaaccaaactcgtgcgggatttcaaaaggcatctgacaaaaacccgtcgcgttcccatccaaattcacgccgaatccccacgaaatttattattatatataacaaatgtaaacaaagaaagaaagaaacaaacaaaccgccgcacgcgctagggcgaggcgacctcgccgtctccaccccgccaccgcctgcttcacgccgcgctccctgctccgcgtcgcctttattatagtctgatgccactacgcccgccaaggcacctgccaatccctcctctttcaactcaaaatccccacaccccgggcaggcgccccgccgcgggaacagggagactactacagcaggcggggtccgggggccgagagcttctcgccgcggccgcagtcgtccgggaccgaggtggggcgccctcctgcgccggctcgtgtgcttccgccgcctcgtccacaggcttctggttcaattgaatgatcacagccacaggcatggagcggaatggcgagagccacctcaaggacccgcttctgccgacgacatctggcgcctctcctgctggggcgtctccaaggaaggagaggaagacgaggaaggtcctgttcagtgtccggggcatctcctgcgcttcttgtgccgtgtcgattgagaccgttgtggccggcttgaacggggtggagagcatccaggtctcctcacttcagggccaggccgtggttcagtacaggccagaggaaactgatgcaagaaccataaaagaagctattgaggacctcaactttgaggttgatgaacttcaagaacaagaaattgctgtgtgcagactacgcataaaaggaatggcttgtacaagctgttctgaatctgttgaacgggcgcttcaaatggtacctggagttaagaaagctgcagtgggtcttgctctagaggaagccaaggtccattacgatccaaatgtcactagtcgtgatcgcataattgaagctgttgaagatgctggatttggtgccgatctcattagttctggggatgatgtgaacaaagtgcatctaaagcttgagggtgtgaattctccagaagacaccatactcatccagtctgtactggaagctgtggaaggggtgaacaatgttgaatgggacacagttgagcagacaatagaagttgcatatgatcctgatttcactggtccaagattacttattcagtgcattcaggacactgcacagccccctaaatgctttaatgttaccttgcactcaccaccaaagcaaagagaagcagagcgcaatcatgaaattaggaattacaggaaccaatttctttggagctgcctgttttcggttcctgtattcctgttctccatggttcttcctatgctttctccttttggggattggttggagtacagaatctgcaacaacatgacaataggcatgctactacggtggttgctgtgttccccagttcagtttattgttggttggagattttatgttggagcctatcatgcactcaaacgaggatactcaaacatggatgtgctggttgctttgggaacaaatgctgcttacttctattctgtgtatattgttctgaaagcacttacatcagactcatttgaaggccaggacttctttgaaactagcgctatgttgatatcttttatattgctgggaaaatatctcgagatagtggcaaagggaaagacatcagatgcgttgtcgaaattgacagagcttgcaccagaaacagcgtgccttcttactttggacaaggacggaaatgccatttcagaaacagagatcagcactcaattacttcagagaaatgatgtcatcaagattgtgcctggcaccaaagttcctgttgacggcgttgtcataaaaggtcaaagccatgtcaatgaaagtatgataactggggaagcaaggcctattgcaaagaaaccaggcgacagggttattgggggtactgtaaatgataacggttgcataattgttaaggcgactcatgttgggtcagaaacagctttgtcgcaaatagtccagttggttgaagctgctcaacttgcaagagctccagtgcagaagttagcagacaagatttcacgtttttttgttccaactgtggtggtggctgcatttcttacatggcttggctggttcatacctgggcaacttcacctctacccccagcaatggatcccaaaggccatggatagttttgagcttgctttgcagtttggaatttctgtcctagttgtcgcatgcccatgtgctttgggacttgctacaccaactgctgttatggttgcaactggtaaaggtgcttctcaaggtgttctcattaagggtggaaatgcacttgagaaagctcataagattaaggctatcatatttgataaaactggaacgctgacagttggtaaaccttctgtcgttcaaacaaaggtcttctcaaagataccacttctagaactctgtgatctggctgctggtgctgaggcaaacagcgagcatcctctatcaaaagctatcgttgagcacacaaagaagctcaaggaacaatatggatctcacagtgatcacatgatggaatctagggactttgaggtgcatccaggagcaggtgtcagtgcccatatcgaaggcaggctggttttggttggaaacaaaaggctgatgcaggaatttgaagttccgttgagtcctgaggtggaggcgtacatgtccgaaacagaagagcttgctaggacctgcgtacttgttgctatcgataagatcatctgtggggccctcgctgtttcggatcctctgaagcctaaggcaggccaagtcatttcttaccttaagtcaatgggcatctccagtatcatggtgaccggtgataattgggctaccgcaaaatcaattgcaaaggaagttgggatcagccaggtgtttgccgagatcgacccagtgggaaaagctgaaaagatcaaagacttgcagatgcaagggttgacggtggcaatggttggcgatggggtaaacgactccccagcattggcggcggcagacgtgggcatggcgatcggtgctggcacagacgtggccatcgaggctgctgacatcgttctaatgaagagcaaccttgaggacgtcatcaccgccattgatctctcgcgcaagaccctctccaggatccggctgaactacgtgtgggccctgggctacaacgtcctgggcatgccgatcgccgccggcgtcctgttccctttcacgggcatccggctgcccccttggctcgccggggcatgcatggctgcctcgtcggtgagcgtcgtctgctcctccctgctcctccagctctacaagaaaccgctgcacgttgaagacgcgcccaggcccagggaggactcagatttggtgtgactgcgagtgaggactgatccctcgatctcgatgtgtactaacgagagcttgctggcgtcactgatgcttaacgagccaacacctgatcgatccgtgtacagcaagcaacacgttttggaacagttcgccaattgattgtgcaataattcaagacaaggtttataactttatatgatactagtacaatgacagcacataatcatagattttttttcggaaattacaagaaaacatttgctcttttgccataacatacaatcgagatagaaatgatacaatgcgagcctcaactacctaagaaacattagggattaagggtctgggcctgtttgattcgtgattaactgtgtcatactttgactaaggttagtcgtctgaattgaagaactgaccttagacagaaaagttagataaa

SEQ ID NO: 29269 - DNA, 1053 bp, Zea Mays
cctgagttgcatcacggttctcgaatcggcctctccttcgcatggttccggccagagcttgcatcttgccgcgcaaaacgcaaggagggagagtgggagggtgtcgttttgggtttcgccaaaagggaataaagctgatggaagggctccattgaactgggagacaagggtcaagatatctctggacgtagcccgtggaatcgcacatcttcatgctgagggaggagggaagttcatccatggcaacatcaaagcgtcgaacgtccttctatcgcagaacctcgacggtcgcgtctccgagttcggcttggcacagatcatgaccactccacagacgtccctgccacagcttgtcggataccgagcaccagaagtcctcgagacgaaaaaaacgatccagaagtccgacgtctacagctttggtgtcttgctccttgaaatgctaaccggaaaagcccctctcaggtctcccggtcgcaaggattccgtagagcacctcccaaaatgggtgcggtctgtggttcgcgaggagtggaccgcggagatcttcgacgtggacctgctgaggcaccccaacgtcgaggacgagatggtacagatgctccagatcgcgatggcgtgtgtggccgccgaccccgagcagcggcctaggatggacgaggtgatcaggaggatcacggagatccggaattcttactcttcttcttctgggacaaggacgcccctggaggacaggccagagaccgcgcaagcaccgtgatagtagtttagcaagagatgttagctaggttgcatagtgaattggttatagagcttcggcaaagttgatagccacctgcatagcgcagtttccgtcggttccatatcgtttccagtaaatctgttgtgcattttcttttttccgtcggttccagtaaatctgattgacagtccatgccattgtattgctaagttaaatcagtatctcttctgattttcataggatagtgtcgttctgtaatttgacataatctcctgaggccgtgattaatgatttgaatttcccttctattt

SEQ ID NO: 29270 - DNA, 1419 bp, Zea Mays
aaaaaaattaccccccggacctcctcctccgatcggcttcctcctcccagtcccgaaccgcacgcgctcgatttcccgcaccccctctagcctctagcggccatgtcgcccgccgccgccaccacaaccttcgtcgcaatctccatcgccgtccccaaccctaccgctccatcccgcggtcgcgtgcgccttccgctaggcggggtccccgctgctccacgccgcgccgtcgcctctatggcagtgtccgcccccaggtccggcgccgccacctcgtttctcgagcgccgcgagtcggagcgcgctctccactttgtcaaataccagggcctcggcaacgacttcataatggtggacaacagggattcgtcggtgccgaaggtgacgcccgaggaggctgcgaagctgtgcgaccgaaacttcggcattggcgccgacggtgttatcttcgtcatgccgggggtcaatggtgccgactacaccatgagaatcttcaactctgatggcagcgaaccagagatgtgtggtaatggagtccgttgcttcgctcggtttatagccgagattgaaaatctgcaggggacaaatagattcactattcatactggtgctggaaagatcgttcctgaaatacaaagtgatgggcaggtaaaggttgatatgggcgagcctatcctttctggactagacatccccacaaaactgctagctaccaagaacaaagctgttgttcaagctgaattggcagttgagggcttaacatggcatgtcacatgtgttagcatgggaaaccctcactgtgtcacatttggtgcaaatgagttaaaggtattgcaggtcgacgatttaaaacttagcgaaattgggcctaaatttgagcatcatgaaatgtttcctgctcgcacaaacacagaattcgtacaggttttgtctcgctcacacctcaaaatgcgggtctgggaacgtggtgctggagcaactcttgcctgtggtactggtgcttgtgcagtggttgttgcagctgttcttgagggtcgagctgagcggaaatgtgtagttgatttgcctggcgggccattggaaattgagtggagggaggatgacaatcatgtttacatgactggtcctgcagaggtcgtcttttatggatctgttgttcactaggtaagagggggaggtcttggtggccaggtgatatggtgggtgtgatttggagctccctaaagatcctatattccaccatttgggttgccctcagattctaactgataaagtagcttttttaattggctcatgttgcgcatattgtattgcaaaatcataggtgtgcatgttaggacatcagctttattgacgtctggaatttgcagaggtatattcttgctttttgttaataaactacagtatacaataaaagtt

SEQ ID NO: 29271 - DNA, 856 bp, Zea Mays
ctggctcacctgtgtgtggcggaggtccgaacctctggaggcccagctgggcgagcccgagtgctagcccaattcacccccaggtcacaccaaattgccaaccgccctcattccaaaccctagccgtcgccagccttggagctctcggacacggcggctcctcctccactccccctcgactcctcctccatccccgacgcgacggctccatccccgacgctgagctccatatctgcttgtccgccggcggcggctaccactcgccagcaagccatctcctggagctggaggggtctgcttcctccttgactgcccatcgacatcttcgccctcgtggccttcgcgtcggtgcccctcgcctgtgatgcaggggtctcatccatgtggtgccacactactggttgccaacgaccgggaaggaaggtggtgtggatgccgtgctcgtgtcttcctctacagggatgctcagattccccttcctcactgggctccttagattcgccaacacgaagatatcaaatgcagagtttacattttcaccgtggacaccttttcctaccaagaggttcaaattttactgcaaaatcaacgagttcttggtggtgttggtatggcatccgatccaatggtggcacgtagaagtaaaatctgaaacatttgttttgatggttagcttgcattttatgctataattacctcaaatcacgtgttgcctttttcaccaatttatgacatctattgacatgttttactttaatttacgacatttattgatgtgttttgcgacaacctcatgtggggccacatttgccattatgaaatagatcgatgatttatgctaaaattcatacccatt

SEQ ID NO: 29272 - DNA, 868 bp, Zea Mays
tgtagttacatgccgtgaaaacactgacttcaaacaaagctacaggtttagatgggacgtttcctcctgcttggattggtacaggcattgcctatgctgctcaagaggaaggtgaccaagcaatggctgcatttcggacggcagctcggttatttcctggatgtcatctgccaactttatacatgggcatgcaatatgtgcgaatgcacaatttcaaacttgcagagcagttcttcacacaagcaaaatccatctgcccatctgatccacttatttacaatgagttgggggttgttgcgtataatatgaaggagtaccgaaaagcagttcagttgtttgagttaacattggaccatacttcatcctctctgaatgaaatgtgggaaccaacattggtgaatcttgggcatgcacttcggaaactcaaggaatatcagaaagcagtatcatgttatgaaaaggcactcacttttccaaccaaaagtttgagtgcatttgctggtcttgcttatagttaccatcttatggataattttgaggctgccataaattattaccacaaggctctatggttgaaaccagacgaccagttttgcacagagatgctaacatatgctcttgagtccatctgtcaaagcactgctcgtagaaggcctagttgaggtttgctaatcgcaacatgctaggatattctttaccttacaagactagtagccaaattatatgtaaatttgttgttgtacaatatgtaattgctcaagttcatttcagccacttgaggctgatcgcattgtaaagccaaagttttcgatcttttaatttttatacaccccctccgttgtcatataataattaagttcgtcccgat

SEQ ID NO: 29273 - DNA, 4200 bp, Zea Mays
cgagtccccatatcgagcgtgacctacgccttgcgcctgccacgttatccgaactgtctggctgaacaaaacctcaccccgtccgtccatccatcgagaaggcgagaaccacagccggtgcacgagctccgcctccgcaatggcatcgcggctcgctgtacaggcgctgtccgcgagcctgttgtcgcttgcggaaactacgtcccccaaaccaccgaagcaacagtcgcagaggccaagggcagccagcagcagcagcagcagccggaggaggctagcagcgacggcgggggcgataatcctggcgtcccagctactgccgcccgtggcgagtagcgccgccggcacgttcgacctgcagctcatgctgccggagaagtccagcgaggaggccgaggccgtggtgcggatccacgcgcgcaacctgctgggggtgaagcgcttcatcgacgccggggcgtggcgggagctgcaggcggcgctgcgctccaatgcgtccaacctcaagcaggacctgtacgccatcatacaggcgaggcccacggggcagcgctctgagctccgcaggctctactccgacctcttcaacagcgtcaccagcctggattacgccgccagagacaaggacgcgctccaggtgcaggagcactacggcaacatcgtctccgctctcgacgagattttctccaagatcacgtaggatactcagaaatctatatttccagttcgtggatacaaaggcggagcacggataagagagaactaggaacttagatcacgttcacatgaaggaagaactagcagcaaatggcgacaggcaaaaaggatccttcttgctatgtagcgacattttttttcttctagagagaactatttagctagttcttgtgagcttcctccgctacatctatttaccctactgtctgaaggggaaaccagaaagaatcacagttttttacaggtgcagcaaggccacaaaaactgcagttcctaaaaccctcgctgtgtagccaccaacgtctaagggtagctgcagggcagctgaacggtttcatccacctctcctttcgctttcagatagagaaagcagggggtccttggtgaatggtgaccctattcaccgccacttggtgtgcaaaatgaagcagtagttctccatatggtccatccatctaccaataaactgaaacatgctggcagtggatctaccatcctcttggctcctccttcaaatcgttgcttccaagaacttgatcctgataataaggaacataaattgggcagtaagccaagaagaacacatgtgtgcaatttgaagtaaacaaaaaaaacatgaaaggacctgaaatctcaagataaaatgcagctgtctgtgcgaaaagagtgctaattagcgttacgtcacttcaaattcttaccattgtaatgccaggaagcacgaagctagcaagattttcatctattgccacagtaagtggaggcatcttggtcctcagcccaggcagttgggtcgtgctgtttacataagcattatcatcagtgagagaagcagctgtatcacaaaaccaaacccttacaagcataactctagtattcgtgcaaaacaaaccgccaacatgtttcattagatgatgcttacatttgtacaagatcattaatgttccttcttgcccgatggaagagatcgatgttgttatgaggctgaaatctctgaatatttgtttcgatttgattaagaagcctattattttcctccagcagatgcagcactggacgatctatctctgaggctacataatacaaaaaacggcattgtcatatcatattacagacaaagcattggttaaatcttgccaaagtttaggacatgaatctgttatggtgcactactgaaaagtacaaggatctaaagtgcaatttatatgatgaacaaaatcaactgattaatcaaggaagaaacagcacgctacatgtttgtgtgtacttttgaatagtagcaagtagaaggctgtgtaatcccaaatttgttctaacaagttccacatgcccaaagctattctcattcatgttcttgaacagtaaacatccaaagtgtcaactttttttatccctttcagccactcgacactagaaactctgacaatatatatcattacaggcatacaggacttacaagtaaaaacagatgcattatgattatatattaaatatcaagctccggtggggtgcctacctgcgataaacttggcaatggagtcattaataaaatgaagtagttcagtcactctagtattggcagcagtatttatatatcctctcaaatgcaaaaaattcaaatgccggatcatgatattgataattgcacgagacagttaacagcatataacaagaaacaaagaagatagatggaagcaaacaattagacatgatactcatgtaatcaagtgacctaccaacctccagatataaacatagcgttttggccattatgcggcacaaatgaagaggctgtcatgcctgtttgaagaggatgatttgttccccacagcgcaggctctacaaatttatcctgataaacaaccataacggccaccatttaaaaacatataaatgcaaatgatgtatgaatagacccaatagagaactgacatggtatatattgatgggaatgaatttgagctcaacccccttaggctatctccagcagcgttcctatcccacccatatctcactacttattttaaacttcactctacaaacaatacactctacagtacaaaacaatgttttgcacgaccatatgcacgctctgttgagcacgatcttaggtgctccaatgatttcacaaaataaaaaagtgcacgaacacttccaccagaaacatggacggatagtgatgcaatgatctatgatgcaaactttgagattgaacaaaactttgtgcaaacgaaaagagaaaaaaaaaactaaaggtcagcatgcaattgggtcgggtgcagttttatctggatcagcaacccacaccaaatcacatgctgatcctctttttttttgtttcttcttgaaatttttttgaacttcaatattgttttcccttgaatctatcattgcatcatctaaattctaaacatccatattttggtggaaccgtaatgtgcatcgacctcaaaattggatttggaaacacgccttaacttttcgaactgaattattttctatttttcgtataatcagtggcagtaaataaatataaagagcacaatacagaacaaaattcatcaaatagaaaagaatattaatacctttctttcttttgtatttctcccagtatggtgttcttggggtttccttcgtcttgtatttactttcttctacaagatatatccaaattgttggtaatattaatactaatactaaataaaatgagcagaacagttaagttggacagaaaatgctcattcaagtagagacggattggtgcagaaattatctgtttttaaaatggaaatggaaaaatatatttgttattcagctagctatatttatgatggaagttccaaatataaaacaaatttagttcatcatatacatcaaatgaaatagttatcacacattcataccttagttgaatttgaatattagtgtccatagcaatcaaaaggaatatgtaagtgatggtcagtttattttagcagtagacctgttgcagctaacaaacatatagaacaaaaaagctggaatactgccaatagagagataagtgtgctttgtcatgaaataaggtcatgttgtcttttgatatcccttcccttttcttcagaatacaaataaaaagcgatacaataatagaccaaaatggtacagcgattgccaactcaggtctcactatgatcatggtccaaatgctcaagtcctattttgtaaatatagattgaaaacaagttcgtctatcattcatgctagtattagtatatgcacacatggttaatggaatcctatattcagatcaactttcagatgtaagataagttttggcatggcaagtaggaaaacagatcaaggaacaaaaggaactatgtaaatctatacacaaggaagtggttgatattcatgaacatttttgcacaagttgcatacattcagtgttcttccgtattatgcatcttaagcggatagtatccttgtagtcagaaatgggac

SEQ ID NO: 29274 - DNA, 1043 bp, Zea Mays
ggttgctgcagcagctccaaggcattctagactggaggtctcaagttcgattcctcttaaatgcatcttttttttgcaattactaggggcaacaacgtccaaatcccagacccacgcgcgctatgacttctttttgtgcacgctcggtcacgcgcaggatgacttcttttactgcaccggagggagtgggtggcctcgccggacggcggacgatccccgcggtgccagtgccactgccaccacctcggcccgccggacagcgggcgcggaagaagatgaggctcccggagatccagcagatggtgcggtcgctgtcggtggagaacgacgccctccgcaaggagatgagagcgttgcagagggattgcacggcgctgtcccaagagaacggcaagctagagacaaggctccatcagtccattacgctgagcgaggcgatctccgtggagaacaaggggaagccacgcccactacagcctgagcaggaagctccgagcggcttcgtgctccctgacctcaacctcccggcagacgtctgatgatggctgagtttgtcggcgtggctacagtacgtcttcagatcgaactagcacgctaacctgatgattaactgtacatagaagaagctgggccgggttctggaagatcacgcttgccaggatactgaagacgaacggagattatctttttttttgtttcatatgttgttgacatttagggtttagagctgtcgtcgtcgtagtcctccggcctgaatgacgtcgtttttctgttcagggtggaggatcggttttaacgtttattacctcacgtacgttttctggtaaggttgtagatgctgccgcagtcttcactaacagctatagaagatgagagaactcgagccattggaggcccgatcggagccgtcacaggatcgacactagtggcgcggaagtgattagggatcaggtccaactacctcaatgatgatcgtcgtatcttcgactcagaccacttctttcttactcttttttgttggaggaggggaatttagcttctcg

SEQ ID NO: 29275 - DNA, 1611 bp, Zea Mays
gattttcgcatgtcctgaagcttgcatctcaatctcatattaggcgcacgatcgtaatctacggctcctgcggttacagctcgtgaattgccttgagggtgtcgggtttagcaactggttacatgtgtctgccatctgatttgttgcaaccctcttgctcactgttaatcacatgtccactagaatgatctgacagtttaattcacagggtactgtaaatatgtcggcaacatacaattccaggagtcaagacatcgagagttctgttgttgcacatggagacctctggaggctagaggcatcgcgtggtggatcaacttctggaaatggcacttcgcctctgtaccttgttcagttggggcctctactttttgttcgagactctacacttctgttgcctgttcatctatcaaagcaacacctgctttggtacggttatgatcgcaagaatggtgtccattcactctgtccagctatatggtcaaaacataggagatggttgatgatgtcaatgatgtgtctcaatccaatagcttgttcgtttatggatttgcaattccctaatgggcaactaacatatgttgctggtgaggggatatcagccagtggttttcttccgttatttggtgggttgcttcaagctcaaggaaaatatcctggagaaacaagagtgagcttttcttgcaaggagttactcaagccttggcatggaaaagatctggtcttatggtgagacccagtatacaagtcagtgtgtgccctacgtttggaggaagtgatcctggggtacgggcagaagttgtccattcattgaaagaggaattgaatctgatgtgtggcctctcttgctcgcggcatccatcagcttatactgctctatctattggacgatcaaagtggaacggtcaagtgggcagttctggagtggtaatcaccttggaaacacctcttaataacattggaaggccgtcgttatctgttcaactgaatggtggttttgagttgtgattcttcagactccagcgctgaagctgtacataccagtgtgtatatattgccatcaccaatgttcgtgctccatagtttgtggaagtgggctgcagcctgccggcttgcaggtcgtttttgttactgtagtctataggtagtctcaactcagcaaatcagctgccatggtacccaacccatgcgggcacagaagtcaactactttgttgttcaatcattatgacaatccttaggtcttatttggatactctcgtattcacattaatctcacatttattgaagtgaaatttaaattaatttacactccaatcaacttcaatacatatggattgaagtcaatacgagagtatcgaaatacggccttaagggattgtgacgcttgcagcaggtgagctcatattagaagttcgtgaaagtggaggaccacgtaatcatgcaagttgttcatccagaatcacattcttttggtgcaggactggcaggttgggatgtaaacggacggatgatcttgttttaacattataactcggacacgcaaaatgataaaaacgaactaatatgaaaaaatacgtgggtaacggtaaaaaggataacaaagctacaa

SEQ ID NO: 29276 - DNA, 1946 bp, Zea Mays
acttttgatcggtttggagaattaggaaggatgggggcatcgaccaaatcgtgacctttcgatcacaaggaaaaactgcacacgcctagggctcctttttccccccctagagattgagatcaagcgggagatttcgactatgaagctgatcaaacatcccaatgtggtacagctgcatgaggttatggcgagcaaaacgaagatatacatggttcttgaatttgttgatggaggcgagctattcgataagatcgtcaattctggaaggctaggagaggatgaagctaggatatactttcatcaacttataaatgcagttgattattgccatagccgaggagtgtaccatagagacctgaagccagagaatttgcttctggattcaaatggagctcttaaagtttcagacttcggcctaagtgcatttgcaccacaaacaaatgaggatgggcttctgcatactacctgtggaactccaaactatgtagcacctgaggtgcttgctgataaaggttatgatggtatggctgcagatgtatggtcctgtggcataatcttatttgttcttatggctggatacttaccctttgatgatgccaatctgatgagactgtacaaactgatctgccaagcatatttttcttgcccaccatggttttcttctggagcgaagaagtttattaagcgcattctcgatcctaatcctgatacgaggataacaattgcagaaattttggaagatgaatggttcaaaaaagattataaaccaccacgttttgaacaaggtgaagatgttagccttgacgacattgatgctgcattcaatgattcagaggaccgtcttgtggcagagaaaagagagaaaccggaatccatgaacgcgtttgctcttatttcgaggtcgcagggtttcaaccttggaaatttgtttgagaaggagatgatgggaatggtaaagagggaaacatctttcacgtctcaatgcacagcacaggagatcatgacaaaaatagaggatgcatgtgggccactcggtttcaacgtgcggaaacaaaattacaagatgaaattgaaaggtgacaaatctggaagaaaaggtcacttatctgttgcaactgaggtttttgaggttgccccatcacttcacatggttgagcttcgtaaaaccggaggagacacattggagttccacagcttctacaagaacttctcatcggagctgaaagatatcgtgtggaaagctgaatctgacgcaaataataaacagacgaataagtgatacccagagaatctgtgtagccctcatgaggccacattcagatagatcacctcttcgggtgataccacctgcttggtactgtatgcttttttttttactggtaccacattagcagccaaaatctcttgtaaacgggaactccttctgaatgagcgcaattgtacaaaacacatatgaagaggccctccgtgagatgctccgaacactgcaatgggatgtcaaatagttctgaatggtgagtgctgtttttgcatctataggggcatatatgtttccattccatgtgcatgtaccgttgttgtatgcgcatgggggtacgtgtgcagcaggagagagagaacatctgaacgtgtcctgagaggaaaaaaaaagtctatgtccgtttctaaaatgctttggttgtcaccagggttgagtgcctttgttttatgaaaatggacaatggagaatgatgtatgaagcttaactctagtatttgggagtaaaagtatgtttggttggatgtataatgaggaatggaagggggtcgtcacactttctatagtgtttggatgaaagttaagcggtgaagaggtaaatgccggagtaattttttggtggtgtagggaatgttgagatccacatagttgtacttggttggatacgctattatttttagcacatatta

SEQ ID NO: 29277 - DNA, 2338 bp, Zea Mays
ccttactctaactgctgcaagcctcagtgcagttactggcggcagccgttcccgtgtttgtccatgtccatccaatccaactcatgcacttcatcactcctagaggagtgcagaagctgggaattgtacttccactactaaaaaattgctgtagcctccttcgtcttgagcgagcatggagatgtcagccatggaggaagccctccccaaggcgatggagaggaggaagggaggcctcagaaccattccgttcatcatcttaaacgagatattcgagaaggtggccacgttcgggctgtcggccaacatgatcctgtacctcaccgagcggtatctcatgaccaacgcctttgccaccgtcgtcctctacttctggcatgccttctccaacttcctgcccatcttaggcgccgtgctcgccgacgcccgcctcggccggttccgggtcatcaccctcggctcctgcgttagcctcttcgggatgtgcctgctgtggctgacggcgatccttccggtgtacaagaacaccccggagtgcgcgccggggcggccggtagggtgcgcggtgctgccgtggcagctgccgctcctcttcacgtcgttcgcgttcatgtccctcgggtcgggcggcatccggccctgcacgctggcgttcggggccgaccagctggacaagcgggacaacagcgccaataacgtgaggacgctgcagaccttcttcaactggtactacacggtgctgggcctctccatcgtgttcgcgtccaccgtcatcgtgtacatccagcaggccaggggctggggtcgtcggcttcgccgtgcccgtcgtgctcatggtcaccgcgctcacgctgttcctcctgggctcgcccttctacatcaaggcggcggccaacagcagcgtcgtcatcggcttcgtgcaggtgctcgtcgccagctacaataaccgccacgagcccttgccgccggagactgccgactcctcgagcttctacaacaaagcaggctgcaaacctaggactcccacgaacaagctaatgtacttgaaccgggcttgcgtgctcaggaacccgagcaaggagatcagccccgacggggcggcgtgcgatccgtggaggctgtgcacggtgcagcaggtggaggacaccaaggccgtcatccgcgtgcttccgatatggtcgacggggatcatgccgggcgtggtcgtcgggcagcagatgttcccgacgctgcaggcgaagacgatggagcggagggtgggcaagctggagatcccccctgcctccttcggcgtcttcgccatcctgacgctcaccgtctgggttgccgtgtacgaccgcgtgctggtgcggcccctgtcccggctcaccggccacgcgcgcgggctcagcctgcggcagcggatgggcgccggcctggtgctcttcgccgtggccatggccgtggccgcgcacaccgagagcgtccgccgagccgccgcgctcgccgaggggctccgcgactccaacccgctgacgggggagcgcccggtgcgcatgtcggccatgaatctggtgccgcagcactgcctcacggggctcgccgagggcctgaacctgatcgggcagatcgagttctactactccgagttccccaagaccatgtccagcataggggtgtccctgctcgcgctcggcctcgggtttggcgccgtgctgggcagcgccatcgtcggggtcatcgacgcggggacccggagcggcggcagccacgacggctggctgccgagcaacctgaacagggggcactacgactactactacttggtactggcggtgctatgcgccgccaacgtgctgtacttcgcagtgtgtggctgggcatacggcgacgaggggcaaaaccgggtggtggccgccgacgccgcggtggacgacgtcgacgacaaggaggaggagcaaaaggcggtaatcatctaggcttaggccacggtggactttgagcagagcactaggaacagtatagcgttgatctgggatgatctcttgctctagtgtgtacctcgtacatatgctaatcaatatggtgacatttcaagagtagataatcttgaaatgttaatatggacagtaagtactgtcgtgtagcgtgtcaaaaatgccgcatgcattctctcttccgaattaggaggtagagagaacttcagtgatccagtattccagtggtcgcccactcgcccatacgttaacccactttgactttctcattcccctcatccgtctccttcccctcaagttcaatgccactgctagtgctaggtgtcagctgccccagcctattatgaactcatggaatcagg

SEQ ID NO: 29278 - DNA, 3425 bp, Zea Mays
caaactgacacctcaaagactcgtctattcgaactgtccctccccatggcgagcacgcgaagcagctcattgccctctcgcggcgccaccgatggagagaagcgcctcgaagcactggccctgggcagggtagcggaggctgccgacgcagttgcctccgctgcttgcgccggcgaggtggtccgcgcgattcacgctgtcgcatccctcctcttccccgtggactctgaggccgtcgccggtaccgtcgaggaaccattcaggagccagattcttgatgctgtaactgtaaccctcagcaatgaggagagggaatcttggaggcatgccttttatcatggtcctgcatttcctactatgtctaagatattgcttggcaatgttgccttgaagtggttgccgaagattaatgtctctgcaaggcaagagatttacgactcattttttgtcaaagggcctccaactgaagtgattcaagctcttgttccagcgctatctgaaaaagaattttctaaggaggaccaccagactttttgcttgaaccttgaaaggctactgattctatggttacttgataataagggtgttttccaaattgttgtggacttcatttgttctaaaaagcatggtgaagatattctcagcccagataaaacaatatccgtatcaagggttgcacaactacttgcatctgttccagataaagcaagattgggagcttcagctgcacttacatcaccctcattcttcaagcatgttgtcagccaacttcttgctggtgcagaagcaacaactattgagttggctgctgacaaagaagctaatgaacattatgtcttgagttctatgtttcactttgtgggcgaagtgctatctcgtgtttgtcgtcgtgggtctactggtgttttagttgctgaattgattcctaaggttcgcaatcacatacatagatgtgtgccaccagatcatagggccacaattcctgagatggtccaacatgtttgccagtctcaattttggttcaatatggttgaagcaatgagagatcagcattctattgaaaggttgacagaagagctgttgcgtcaacttgcgtcacaacatataagcgatgaagaggcttattggattctgtggaccctctttaatcagagcttcaagcgtttaactgtcatgagggcgatgtttgttgacaaatttttgctctggaaaacatttcctttatgctgcctgagatggattcttcactatgctgtctttgaatgtccaccaaattcaaccacagaaattctgatgcaaaggacaccaaacttttttggtatattgcaaagtttggttagtatttggtccaggaaagagtttattcagtcatattcagtggagcaacaagcttatatcactgcagcaattggattatgtttggaaaagctaacaaaaaaagaattagaaacaactaaagatgtattgaattctattcttcaaggagtaagctgcaggttagagagcccaattgatttattacggaagatggctagtgctgttgcattgacattctctaaagttgttgatccgaaaaatcctctgtaccttgatgacaactgttgtgaaaatgttgattgggactttggggttctatctccaaaggagtttaaagctcctttagatgctgtagaaactaaaactaaaccaaaaacacgtgagaacaagaaaaaagcaggtgagaagaagacaaaagcaataaaacgtgatattccagacgtcagagcgaaaatcgtagagatcaattctatagatcatgatcaaatgtctgatactgctacgaatgggcagtttgaggaggaagaatgtgatgaagaagacatgaacatggatgcatacagtgattcatccctcgagccatatgatctatcagacgatgacacagatttgcaaaaaaaaattagccacctgagtgatcttgcagcagcactaagaaaacctgatgatccagatggtgtcgaaaatgctcttaattatgcggaaaagcttgtgagagcatcacctgatgaattacgctacaactctggtgaccttgttagagcactggtgcatgttcgctgttctgacgtggcaatggaaggagaggaagattctgctgaagaaaagagacagaaggcattggtttccttgttggtaacctgcccatttgaatctctagatgttctgacaaaattgctatattcatctagtgtggatattggtcagcgcattttgattattgatgctatgactgaggcggcacaggagcttgctgaaactaaaactgtgaagatagaacagcgacgtggtaacttgataactgacacttctccttcttggctggttccgagtaatataggacctcctggggcaggcccttggagagaggtatctgaaccaggcacacttctaagttggtcacaccgttatgaaagagaggttccatctaaatcgggtcaattgaaatcaggaaaatctcgtaaatggggtcttggaaaagcgaaagacttgcaggttgagtggtctaaaaatagatttcctttgtatgccgctgcttttatgctccctgtgatgcaaggatatgataaaaggtcacatggtgttgacttgcttaatcgggactttgttgtcctcggtaaattgatatatatgcttggtgtctgtatgaagtctatggccatgcacccagaagcatcagctctagctcctgctctccttgacatgataagatctagagatatttcacgacatgctgaagcatatgtcagaaggtccgtattgtttgcagcgtcttgcatattgatatctttgcatccgtcatatgtggcgtcatctcttattgaaggcaaccaggacatttctactggattagagtggatacgcacatgggctcttcaaattgctgaagctgatcctgatacagaatgctcatcgatggccatgacctgcctgcggctccattctgagatggctcttcagacatcgcgcgcactggaatctgcaaatcactccaagactggcagagccataccttctaagctcgacagcattattctaccattcggcaacatgatgtgataggtaaactatatataagttgtgcagggatgtgtcctgctgttgtacagaacttacgtagcaaattctggttatttagaaggtggaccgtcaagttgtaccagctggttcctgtggttgtctgaaaggtgagagtgagagattggaactctgcatttcttttggtaacaactgtggtctttggcgtattcagtgtcagatttgtcaaaagccaacatttttacggtgttattttgtttccagtccagtttaaatgagcagccccaccgtaaaaatgttagtatgttaaggatgtatttaaatcttttttgtttcttgttgaaaaaaaa

SEQ ID NO: 29279 - DNA, 2165 bp, Zea Mays
gatctgcggcgaacgtctcaatatttatggagttcttggtagtgagacttcttgtctttggaactaggaatagcctatccattctgtataacacatagttcgaacgcggatgtgaaggacagctcgttaatagggtactgttgctgtaaattccaaacccgtgagtgccatttcttgtgatcctgttggaagtgccccttgaatccttgatctagtattgctatttaatgcagaggatgcaagttccacttattttcggtcattgggattgggttgacccaaaacttgctagaatgaactaaaacggcctgccacctaatttttttaggggggtgaaatgaactaaaatgtcataccacgtaattaataattaattacctgaaccccaaagcaccattgggtacctgcttgcatccctaaatgcactttcagaatatgatgctacttcattgaagtggctggctacaatggtttcttttgaacttctgatattttctgtctgtactgaaactatctgtggctaaattgtgatgagtgtgcttgtttccatttggacaacttgctgacatgcatatattagccaggtatgcatgacaggtgttctaacggatcaaatagtgtctataagtaactccactgaaattctctgatagccatgatgcatgttctctagatagctaatgaatatatgggatgatggaggagataggggactgagatgctgcaaattcatttctcagggaaagcatgtaggtcttcctggtgccagtgagctacataatgaacaatcagaatgtaagcgatatgtagaatataagggctaaccatcttgtactgtttcttgtaatttgtctaagttcaaggcagaccctccccaaacactaccagtggccatgcttttagaacactggggaaaaaattagctgaatatcatgtaaacaccattacaaggcaagcaattcattgttatattttgtgaaaacagcattcaccacaccaggaagataaatggagcatttgtgctttctaagtttcaaaatgattttagactacttataacagtcatgagggtggctctcgctgcacatgtaggtaacctagtggaagcaaagcacataatctacttaattctgagaagagttttacagacgtatgataggtttgttctgtcttatggtatctttcacagaaaatggaaataaccaatgtaggaatgtgcattttctgttctgaagcaaatggtattctgaaacatggacatgtcgtactacttagggtacggcaaaggtgcaaataatgtgactgaagctaggtcaactattaaattatggagcatttggtttgccattgtttgatgtgttggaaactgcacctatgtctgctttgccactgatgttttgaatggcatgctgtgcacctgtgagagcgtgataaaccgagtagagtctctgaaagtgtgctgcatttgagcaaattgtttcctttttcaatgtgagaaatgtgctacattcacatctagaacaatctgaaaacttcatattattagttctatgtaagtgagctatgagtacatgctaaactgaatatctgcttgactgagaacgtgtacgtacataatacaataaggaactgctatttgtgttatatggttcaggtaccagagcttggccctttttttcaggctggagccatgttgctaaaagacagcaacgcccgcatcacccagtccggccaatcccatctcaactgtggtgcaaaaactttggtaagaaggaatactgaaggaccctccaactagcatgaagtgcgggcaccttgcttttgccttctttttgtggaaacctgtgcctagccataatgctgggttaagtgttaggagcatctctggaatgcttcgcgtagtatcttttgattcttctttccttcgtgttacatgtgaaatgcctgatgaactcaaataatgaccggtgatacaaaagcctgtgatgaatttactcgagggttttgatcatgtaattgtaaacatggcatgtcgtctgcacacttaatgttgaagcttgattcataagcctcgtgtatgtgtggttggctgacggttatggtgtgcctacgtgtcaaggttcgttttcagaagtgattttttagggtgtttggttcccacctcc

SEQ ID NO: 29280 - DNA, 934 bp, Zea Mays
gtcagcttggttattttgaggtgaagaaacaaagttcatgtgttgtctgcctaaccaacaagtccaacgaatatgttgcttttaaggttaaaacgacatcccctaaaagatactgtgttcgaccaaataccggggttatccttccgaggaaaacatgtgaattcacagttaccatgcaagcgctccggactgctccaccagacatgcaattaaaggacaagtttttagtacagaccacagttgttccttatggcacatctgatgaagaactcgttcctgccgttttctccaaagaaactggcagatacatcgaggaaagcaaattgagagttgttcttgttagttcataccaatccctcgaagagcaacccactaatggaattcatgacactgagccaggagcgaagtaccagatgttgcaaaagaaattcctgcccctctggtacaaggtccagcaattgtgaccggaataccttcacctgtcaaagaggttccaggcctgagagaaattcctgtgccactgaacgaagcaccaactttattggcagaatttccttcccctcaaaaagatccctctgctattacagttgaacatgcctctaatgttacaattgagcatgcccctgctatttccattgaatccccacctttgaaacaaagtgttccagtttttaaggaatctcctctgaaacaaagcgttgcagtttttaaggaatctcctcctttgaaacaaagcatttcagtttttaaggaatctcctccactggaggaaactactcctaaagaagctgttatgctaagtgaccgagggcttttcaatgtgcagaatcatcaattatcccatgtaacagaagatgttcagaatatgaaatcaaagctcaacaatcttgaatcaaaattggaagagatacttcaatatgtttctattttgtag

SEQ ID NO: 29281 - DNA, 2368 bp, Zea Mays
agattgaaacggggcctaatggaagaggggccgtagagagagagagagagagagagagagacgagacgagagggaaagaacaaacagggggagcccatccgccgtgatcaacagcacagaaggtgagaaagcgagagagggaagagccgagctggcaagcccattgattccatccatcctcggtgcacgccagccggcggcctcccagtttccggcggcgctccggccggcggcgctccggccggaggccgggtggatcccatcttgtagggagtgcggaagccgtcaggggcaggagagctcttcctgccttcggcgcgtggagagctgacgcttggtctccaccaggagcttgtgatgcaacaatatgctcatgaaggggccatcttcagatgttctcagagcaagcatttctagcgccccaagtacatctagccatggttctgcacaagatgaatgtgattcattaggggatgtttcaactggcaggattgacattctcctcccgaagccattggagtccaatttagttcttgatgtgtatcatgtagattgtggggttaagcatgctgcattggtcatgaaaaatggtgaggtttttacatggggtgaagattctggaggccgccttggccatggaacacgagaagattgtgttcgtccacgtctggttgagtctttgacagtttccaatgtagattttgttgcctgtggtgaatttcatacatgtgctgttacaacaacgggtgagctttatacatggggagatggaacttacaatgttggccttctcggacatggcaatgatgtaggacactggatacctaagaggatttctggagcactggaaggtcttcaagttgcttatgtttcatgtgggacctggcatacagccttgataacatccatgggccagttatttacctttggggacggttcatttggtgtattaggtcacggagatctgaaaagtgtttcttacccaagggaggtagagtcactatcagggttgaaaacaattgctgtggcatgtggtgtgtggcacactgcagctatagtggaggttattgtcactcggtccagttcaagtgtaaagctatctgctggaaagctgttcacatggggagatggtgacaagcatcgacttggtcatggtgacaaagaaactcgacttaagccgacttgcgtggctacacttattgatcatgatttttatagggtggcatgtgggcacagccttactgtagccttgacaacttctggacaagtattgagcatgggtaatgctgtttatggtcagcttggaaatcctcattcagatggaaggataccatgtttagttgaagacaagattgtgggtgaacaagttctccaaattgcctgtggatcctaccacgtcgcagttttgacaaataggagtgaagtttttacatgggggaagggagctaatggaagattgggccatggagatacagaggatcggaaggtgcctacactggttgaagccttgaaagatagagctgttaggtacatagcctgtggtgcaaacttcactgctgctatttgtcaatataaatgggtttctggagctgaccaatcacagtgctcctcatgtcgacaaccatttgggtttacacgaaagaggcgcaactgctataattgtggacttgtccattgtaattcctgcacctcgcggaaggctttgagagcatcactggctcctagtcctgggaaaccctaccgtgtttgtgattcatgtttcttgaagttgaataatgcctcagatcctaatgcagctaaccggaggaaagatcctgttccctatcaacctgttgaaagcaatggcgatgctaaagtaggaaaggctagtttgcctagcaatatggaaatgattcgaaatttggatatcaaagcagcatggcaagggaagaaaactgatgggctatcgtttctccggaatcctcaagttagttcgctcctgcagctgagtgatattgctttatctggtggcttgggcatgaacagatcagctccgagagcggtacacatatctgcagctcgctcggttactacttcaagagctgtttcccctttctctcgcaagcccagtccaccgcgttctactacaccagttccaacagcccatggtctttctttctcaaaaagtgctactgataatattgtgaaagcaaatgagctcttaaatcaggaagttgaaagactgcgtgcacaggttgataacctgagaaatcgctgtgagcttcaagaacttgagcttcaaaaatcagcaaaaaaagtactagaggccatgacactggttgccgaagaatctgcaaaatccaaagctgcaaaagaagtgaatcaagct

SEQ ID NO: 29282 - DNA, 1438 bp, Zea Mays
tagtaggccagaccaaccaaccatatcctttccccaccccgcatcgtcggacaccctccaaagtccaaaccctctccccgccgcatcgccgccgccggaagcgcctccctcgatccagatccaggagatatgcctcgcaatgatgatcgctatgggaatacacgcttgtatgttggaagattgtctccccgcacccgttctcgtgacctagaataccttttcagcaaatatgggaggtttttcggttttttacacaaccatggaggtgtggtggaagggtgcccttgatggaattggtggccatagttccaatgtttgtggaggactttggtgaagggcgcccttggtaattcgagaagtggagttgaagcgtgactatgcattcattgaattcagtgacccccgtgatgctgatgatgcacagtacaacctagatggcagggacgtcgatggaagccgcattattgttgaatttgctaaaggggttcctcgtggttctggtggttcacgtgattacaacggaagaggacctccaccaggaacaggccgttgttttaactgtggagttgatggtcactgggcaagagactgtcaggctggtgactggaagaacaaatgctaccgttgtggcgaaaggggccatatagaaagaaattgccagaacagtccaaggaacctcaggcgtgagagaagctattcacggtctccatccccacgccgaggacggggccgcagccggagctacagcagaagccggagctatagccgatccagatccccgtctggatctcctaggggtggacgccgagaccgtgatgagaggagatcaaggagtcttagctacagcaggagcgcaagccctaggcgttctgtgtcacctgtaaaggaaaaggagcgcagccgcacacctgatggcagtaggagccccagcccaagggacaaggtgagcccaccaccaaaggataatggtgcccacaatggctcggaccgtgaagacagccctgggggcagggagatgagcaagaggagtcggagcccgtctgatggctaccgtagccctgtgggcaatgggcgcagcccgagccgtagcccaagccccaaggtcaacaatggtgatgacccaagccccaagggcaacaatggtgacgacccaagccccaagggcaacaatggtgatgacgagcaccgcggttcaccaagaggaagtcagtccccctgaactgaaaaactccccgtgcaatttggggagcagtgtgcctgatttgagaaaacaaactgtattttgccatttctcagacttgtgatctttttgagcaagaaaactcggtgtaagaatttgttgccctcgggtgtaagacagatttgtggtatttgagcttttcatcctgccaaaagctgaatattcattcaattgccaagtatctcgagtttatctgct

SEQ ID NO: 29283 - DNA, 1034 bp, Zea Mays
cggccttttgatcccctccacgcccgtgctcgcctacgcggcggagattatgttaagctaatgctcctatcccagttcggcctcggagttgctcttgctcctcccctccacttcctgtcggcctcttgcgctttccggcctcggattctttgtgtgcccaccattgcatctagctgcggcttctctccttcgctctgcatctgagtcgagcactcgagctggagcatcgatccgcctcgtccttccagacgcggcttcagctagaatccatcgctctttttttagttcggtttccatttcccatcagagcttccaaccggttctactcgatttggatttttggagctggagtctcccagagcaaaacttcccctccccttccctcctcctccccccttgcatttgacatgaggaggagaagagacgctgcaatctcccccatgttataaggctaaggcatgctgtcgttgaacaaaatgcatttcctcaagttatattccagcaccagcagcaacagcaacagcttcaggaatggctcctcggaacaccccgcccggacgtcctcccagggcagcaacaaggccgggcggacggcgaggatggccgagtctcccaccggcctcagccccaaggtggaccgccgcacggcggtgagcgccgagagagagcaaactgtcagttaggctgaaacagacaagtgtagccaagctcccaaatcaaatggtccaggtccagggtatcgaatggccagcaaacccttggaataattgaagctggtcctcgtgttgccacccaactgatggattaagatggcggtaccagctctgctaccaccagtgtcgctgcaaccaacggcaaaacaggcgtgtctgatagaactgatgacgcaaactcttgtttgggaccgggaccaggaaccgtaattgacaccggacaaaaaccctgaaaataggaaggctatcagtcatatatcccatcatgctagtcattttctcatacagaaactagaattcggtagcaagacaagattatcg

SEQ ID NO: 29284 - DNA, 239 bp, Zea Mays
ttgtcatgtgttgttgccggcgtaaccggtgctccggcctagacctagccgtgagaaactggtgcgccggtgatggagagtcaacatgatgcgaccttcgtcaaccatgagctcgtcatagataggtttttaatgagacatccattgcattagctcagttaatctatatatatcatctgttgtgacagtgtgtgatgatgcctgtgcaagtgtaacacaagctgtgttttctgttcttg

SEQ ID NO: 29285 - DNA, 2747 bp, Zea Mays
gcagaaagtggaggcccccgcgtcgcccccgcttgggcggcgctaaccgtcgtctcctcctcttcctcccctctctacctcgccgccgtcggagctagccggcgggttgttcgcccggctcgtgaggaaggcggcggtggggcgtttcggcgtgtcgtggctcgcggcggcggtggcctgtgctcgcgcgcacgccaacggcggtggcattgctgtgctccaacgcgtggccgaccggtttggttccatgtttttggaattggaacaaggtcacttgggttcaacatcagggtacaagttaagaaaggttcatctgtatcggtaggatttgaaattctgcataagagttccaactagtatcacgtgaggactagggcataaatcatcagattgctcatgccagtttcttgcttggttaagcatacattcccatgatctgtgctgagaaagttccacaaccttactatgttatttgtttattttgagatcgttcttctttctagaaactaaattatgaattttggtgtttacttatcaaaccaaagtttgttttaaaggggttttcctgccaatctgcagcagattttttgttatgtcagtatgtcactcacttcagaagtgtttttatatctttccccaattgcactgtaggaggttgttgttggtccagagaatagaactgttgtttctaaagacaactttctgagagtgaatctcattggtgattttggtggttataccagcatcccagcatttgaggacttctatcttgtgacccctaggaagagtgctggtagtggtgagccacaaaaccttggtgctgaatatagaaagtggatgctgttggagagagttcgttttacagacggtgtcgaatgtaacaagattggtgttggttatgaggctttccaaaaccaacctaacttttgtgcatcgccatttgagagctgtttgaacaatcagctatggacctttttggagtctgacaaaaaccggataagcatgagccgacagccccaatatgttgtgcagggaaggtttcagaggatcaatcaacatccagatgcaagtgttcattctttttctattggagtgacagaagttattaatagcaatttacggatagagctgagtgctgatgacatagaatacatgtatcagaggtatatttgttggccacggccctactaatttgaaattagcaagtacagacagatttatgtttatcaggtgttcatactcattggtgttcatactcatttcaatttagctattacaaccatatttatatttgttgaccacggccctactcttaaaattagatgctatccaaataacaagtgtccctttaaatctatgccatgtttgacaaacagtagggaaacaaacattggtactacaggtttcttctcaagtcctactctttacatttttatgttctttattaatatataggagaatgtctaatatgttgtgcttccacatcaggagtccagggaatataacagacattagtgttccagcatttgaagtcttaagtcaatatggtactgcaaaggtcacaactaagaatattggtacactggaggcttcgtataccttgacatttcactgctcaagtggcatcagttttatggaggagcagtactatatcctcaaaccgaatgaagagagtacccgtttattttacttgcacgcatctacagatcaagcagcaaagtatcaatgtacagctattctgaaggcgtcggattctagtgaactcgacagacaagaatgtgttttttctactacggctacagttcttgataatggaacacagattatcggttcaaatggctacaaattgggtttctttgacaccatcaaaggctatttggttagcttctgggattttctgattgatttaatcagtggcaaatcctgcaggctgaacaaatgtcggagcttttttgacttcagctgccatgcgcagtacagatgcataacctggctcgtcatgttggtgctgctactttttatgttacccgcaggcgcaattgtcctgtatcttcttcatcagaaaggcttcttcgacccagtatacgactggtgggatgacctgctgggggcggactaccgcgcgcaccggaggcacaagaaaggccgccgccaccaccatcaccaccacgaccaccatcaccaccggcaccaccaccaccacgggcactcgcacggccatgaccaccacccccacagtcaccaccacgcgcaccagaggagaaagatcgagcccagccaccaccacgtcctacacaggcagcagcccgggacagcggcagaaggccaccggcacaagcacgacccggcgctcggcgtgcagcacagggaggccgggcacttggggcacaagcgtcggcatggcaaagcggtggtcgcggaggacgccctggacctggagttcagggaacgaaggccatacgaggtcaggcatgccgggcacctgcaccgcgaccaccaccaccaccaccactcctgggaagtgtaggaatagttctgaccgtctgaactttaagacatctagcgtaagatgaagttggtgtaccgtgggcacgggacatgcccttttgcatgcatgcagtgagttagtgggtgtttaatttctagtaaactaatttgtatcgcttcattttatttcattttagtctttaatttgcttaatattgaaactaaaatttcatattcgacaaattagaaaataaaataaa

SEQ ID NO: 29286 - DNA, 2540 bp, Zea Mays
acacgaaatcccgctttcgcccccgtcctcttccccgctccacctccctttccccctccctccttactccagtcctcccatggcttccagtgccacgggacctgcccgctccccgtgagtccgagacctcctccccgaccgagccctgccctgatcccgacccgggacccacccttgatccggaccgtcctaaatcccaacggggtctctggcgatggcggcggcctccccgccgcaggatcagcagcagccggcggcggagggggccgttgcgcgggaggaccccgcggcgctgaccccgaggagggctcggttcccgcgcgcgtgccactaccgtccgaacgcgccgccgctcacgcccacacccgcgccctcgcctccgccgccgcggccgaggcggaacgggaatgcggggtacgagacgccggagtaccgcgtggtaacgccgctggtggaggaaccggcgtcgcccgctgagctgccgcggtggagattgcgcggcatgtgggagctcgcctccgtcctcaacttcctccacgtgttccggccattgctgaacattccggtggagttcactgcagaggagctggaggacgcgatcataacacccaatggaacgttggatgacgttcatatgcctttattaaagtcaattcctccagtaactcgaatggccatgggacgtggaacatggatagcggtgttatgtaaaaaattgaagcactggtggcattgggttgcagaaggcgatataccgattgtagcctcacatggagcggaaactgagctttacaaggcacttgagccaggaattcgattagtgatcctgaaagccatatgtgatatacgcagtgagcaagaggacgttcggaacttcattgatagttctttgaagcatggttatcatctttccatcttccgtaaagaaaggattggaggagattcacatggaatctcatactggagaaactcttttcaagcaggaacaggacagaagtctctcttggcaagaagctgaagttcacttatcttccagagattgaaaagattcacaagaagaaggagaagttgctaaaaaagcaacaaagagaagccatcctccttgacagctgcttgacagtgaatggattgacatctggccgctctcgacgtgaaagaaaacatgtgacttatacttttgatgattatgagcgttcaataaatgaagccataaaaacaataaggaaaaatgagaatgctgttgaggttggcccctccccattatgcaaaggattttatggagaaactccagagaagttgtattacaaagcaaaaacagatgaaggaaaggctgaaactctccatcgcagctacaggcagagaaaaagatcccaaaggtacacaaaggactatgttgaggccatatcagatattgacctagattttgacagcgatgatgatatcatgggtgaagcagtctatgatgaggaatatcttagaagaaggaaacgatacaaggcaagcctttctgaaaatgatgatgagtttcagttggatcaagtcgccaatgatggtgatgatgaagtgggtacttctttgaatgttaatgaagacacaaaagatctccaatggtacaaaagatttccacttctcacccctcaagggaccaagttgaaatctattgatgaaatccaaactggcatccgacgcagtaagcgctccacccgttcccgtattaactatcgacagcttgatacttttggcgcaaatacaaaatatggaaagtcagagaaatgcaatgcatcagatccggatgctagttctgatgcactaaatgatacggagctctcaacaagtcaagatcgagaggaagaagacggagtaaacaaagcacaacagcagtacacagagaaaccaatcgttcctgtcaaggagagtagaagtgtccggagaaaattcctcgtcctaaatgagcttgtgcctatagctggttttgatgatgcttcagtcttagtgaaagataagcacgtgaataacaacggaggaaaatgttctgcagcacattagggcgttggggaagctctttttttttggtcacatgggtagcaaatactgggtagaactgctcgcttaagcatggaccaacgagaatccaatgagatggtgatgcaacattggtcttgtttgggcagactgctgcttactacttccagtgtcatgccagcgaggagatgagatggtccatgggtgctgtgtggctgaattcccagcccataaagccaagtccctctctgatacttggaggtcttgctgagatgtgcactaggcacaccgcgtcgattggcgctgtacaattgtcacagctgtacgtgtatctcctccatgtatatacagtgattgggagcaatagcgtcttctggtttcaggatgcctatgggtagttgtctcttcttccttttcccctcttctgagcatctgaagttcggcaataaactcgattcaactgtggcatttacttatttctgtatgcggtaattaatatcgctcgatcttacactact

SEQ ID NO: 29287 - DNA, 1175 bp, Zea Mays
cgtcggtccatagcatcgattcactccgcgcgcgccgctgtctcctcgtcgtcgccgcgttcctcgattatctctccatggcggccgcctcatcccccgctgcatccgccgcctcccccggtaggggtgccggcgaccctcccgcggcagccgcggcggcgacggcgaggacggctgggtgcccctgccccatatgcctcgaagccttcaaagacgaggcctacctcgacacttgcttccgttcctttctgaaactcctagctgcttctgcagattccttttgctacaggtgtatatgccagtgggtaaggatagtagcgagcaagcacgcagaacctttgtcttcagttagatgtccactttgtaagactgagaatctatccgtcatacatgcttttgatggcgaatcatttgagcggtggtacataaatcaggaacctaggaagaggcgtctttcagatgcacacgagttggtgtcacaattctataacatgaaaggacttatgcttgctgaattaagcagagaccacaagcaacatttctggggtgcagcaatactgggagcaacaaagatatctccgtaagaaaatttggcttcaaacctggctaagacgggaaattcaggcccttactcgggacgagaacgttgaggtcatagtccaccacattcacggtgtcatgggatccttcatgaagaggctcgaaaaggagcacacgtcgtcaaggtggacgacttcaccggagaaaaggagggaagagttcaggagattggtttccgatgctgctaggccgttcctcctcggccgaacggagcgattcgtcgccgaggtggagctcttcctggcatcggatctcaacatggaagcctacaacaaactgcgcgtccagaggtttagggagtccagctctcatctaacgagagagcaagatgcactgcctcgtgatcggtcgcttgaggagcactacatgtatttcctgtgtaacgacacggactgtgatgagatgtagtgatctgtgatccctggtactatgatgcctttttttagcctggccccgattactagagagttcacggtacaacctaatgctgatacatggaacatacatagcagtggcgaacttgtttgatttttttaataaaatagaaaagaaaaactaagggatgaacttcggat

SEQ ID NO: 29288 - DNA, 1607 bp, Zea Mays
catgtccaacgtggttctgggtggtttgtgcaacctgaagctgactgggggacctcctttgctccttgtgctagacatgagacgccggcatggtttggacttgaatggtctctcctactgttacgcgatgaaagtatgctatcaggatgaagaatgcatgactggaacaaggaaggaacgcagcttcatggagtggttagggtgggttccgtcaaatgacactgttctcacagaatcacaagcaggggccgttggatgtctgcacttcgcagcagcaacaggatgacgatgacgaggatgcccgtgaatgcaggtggcagtgcaaatgtgcggtttcctgaaagcgaaaaaaaagggtggtgtttcgagtggcctccagtacaaagaccgcacagagtccagagtcttatattgcgctgccttcagatgtacatggaccagaaagaagtggtcgatgccctctcccaccactcgaagatagagccctgcattactgaacttgtttggcgacaacttgagcatcaaaatcctctgtttttcaaggcgtactatatgagactaatgcttaagaatcaaataatggtcttcaacaagcttcttcaggatcagtttgaggttatcaataaagaattttcttcagggatcccttctatgtcgcttcctaatggctctaactccaacctattgaagcaaaatccatgctttttgccagagactgctcctggatctgcaatgccagatggtataatgcacaatggaagttcgcgtggtataataaatggcacaccatctggcgatcaattgctcaatgctagtaaagacttgcatggccttcataatggaatagatgcttcgactagtctgcagtcagaccagaacgcagctgctgtgctgtatggtgtagacaacgagacaagtgcaacgataaagaccgagtcttgctattcgagcaatgctgattttgctttctgtgggaatactttcctggaatcgtgccagtcaataggcgatgcatctggtggtggatccttcagtagctcagagctgaacgggcaaccactaaacgattcaattctggatatggaatcatcgtcatttagcttcttgaaccaaatgccccaaagcttcatctttccggacttgggagacgatttcaaccaaagtgcagagataacacaatttctcaccccggaaacaaatttctccgattcgacagggggagaccatacagcaggttgagcggggtcatgcacagcgcaccaaccatttgtacatacgctcatgggcagtcaaacctgcactgatgaagagcttgaggaccttttgatctagctgtttcttttttctactcttctcgtcttatattgtggtagtttatgggttggtcttctggtatgccctgcgatggcgtcgttatcgtgccttgtacattgccgtgcttgtgtaagaaacattaggagcggcgttgttcgcgtcagcattgatttggctaattcctccgcttggcttggcttgtacaacgaattttatcaaaatattaactggattctgaaatcgagattttcgaccatcggtttgtgctattgtgtatgctgcttccaactatc

SEQ ID NO: 29289 - DNA, 773 bp, Zea Mays
tccacctgcagccagatcgtcactgcaaatctgcaattagtccttgactttgccaagtgaccacgtggactggcggagggaaccgagcgagtggcccagacgtcgcgactcgcgaggccgaggcgcggcggcagcgacgactccaacaaccacgcgcggaggctgcagtgctccagccaagggtttcgcgctcggtatcttagctggagcaggcgtgatcaaatcccaccatttctggcgggacgtggagcacatccaggaggccatccagaacgtgctggtgatcctcgagatggtcgtgtttttcgtcgtcccctctacgggcttgttcggttctaccccaatccatatggattgagggggtttcaatccctgcggcgctgacagggccaaattcgagaagaagaacgaatgaaccaggtttccggaaggaattggggggggggggggggggggggaaccccgtgctgcttctctctgctctctggtctgccggccggaaatggagcaccagtattttcctcacggatggacatacacaggtcccttagcaagggactggtcgtcttgtacgtacgctattctcagctggggactggccgaggccgactgcgggatccttttgcgaataaatctacagtcctgttctacagtggccgcactggactgattgattccgatgagcaggtttcgtcctacttgaggcagaggctacgagcgctgacttgtcaaaccagggctgacgacgcacgtggtgagtcactcgaaacggg

SEQ ID NO: 29290 - DNA, 1275 bp, Zea Mays
gtcggtgtctctcggtccaaccatatacatctgagactttcccaccgaaccgttgtggcccatttaaaagcccattaaccaaaccctacgatcgcacacagccgccgccgttttttcgccatccacctccgtctttctcgcactgcgcaaacgcatctgggcgatctgcgcccgcacgacgatgttccgcgccgccgcaggctcctactccgatgagttcatctgcctccaccgacccctcctcccgcctccactatggcagcacgtccctcaaagccgacgatatgacggcgagctcacctgggcgctcgcgaaccgcttctagggcatcggttccttctttgctccggcggcgcttggaggcagaggtgttctgtgtcagccagatctgggcgagatggccctacacatgatttagcgacggtcgtggacgacacgccccgtgtgcctcgcttgctttgctgtaacaggggcaatgggttctcgcccaatcggcttcgcgtgatgctgctgggggtggacaagcgtcgcaagggcaggacggtgccgccgtggaggaagaggacagcggtggcggcgactacgacactgtgctgaaggcccacgctagatccggtggcggcgactacggcgccgtgctgaaggcccgcgctagatccggtgccagcgacgggttgctgcatgactgtcttctcatgtatgaggtggtggaggcgccatgtgtgaagaaatacaagaatgtttatgtggtgagcaccatctcagagttctcatcctcgctggagacagcgggtgggcactggcgggtggactgtcttctccgtgctaaaggaatgccatcctatttcgccgtgctggaccagggtgctcgaagtgtttcttcagatatggacctcggtggttttctccacattaggaaagctggaagagcctttttgaactcagatttttttgctaacagtggtgttatggtgaaacaaagttttgtttgtatgtaccaacagctaaaatgtaaacacgacattatcatagttgagtacaggaataattatctcttatatcttattgcaaaatctgaaacagttctcctgtagatggttagcttgcattttacgctacaattacctcagatcacttgtatcttacaccaatttacaaaatttgttgatgcgttttatgacaacctcatgcgctgagagatacaaaaattttatgctattttgtatacatatttatgccaatgtcaataggattttatgacctatatttcagttc

SEQ ID NO: 29291 - DNA, 1356 bp, Zea Mays
ttcaccaagacatataggttctttctttgatggtcgtaaccatatttgatgaacttgtgaagcttggcattgtggatggtgtgatggaggcagatttggaacactcaacaatatggacagcagggctgtacttgatccttttacttcagtttctggaaaacaaagttgctgtggaacttacaaggtcagaatttgttgaagcccaagaggctttagctcagatgaaaaactggtttactcgcttccccacaattcttcaaggttgcgaaagtatcattgaaaatttaaggggacaatatgcacattctgttggctgcttcgatgaagcagctttccactttcttgaagcaaaaaagctgacagagagtaaatcaatgcaatcgatgtgtgaaacctatgcagctgtgtcatatatttgtaagggtgatgcagagtcgtcttcacaggcactagaactggttggtcctgcctatagaacaatggactcatttgttggtgtgcgagagaaaacctgtatcatttttgtttatggactattacttatgagacagcataatccgcaggaagcacggaaccgccttgcaagtggtttgaaaatagcgcaccaacagttgggtaacatccagttagtttctcagtatttgacaatactgggcacattggcgcttcagctacatgacgcagcacaggctaaagagatcctgaagtcttcgttgaccttagctaagacgctatttgatattccaacccaaatctggatcttgtcagtatttacagagttatatcgtgaactggaagagaaggaaaatgaaatggagaactctgagtacgaaggaaagaaggaagacgatctgcagagaagactttctgaagcttattctcattcttttcaccatgagctggtggaaaaatcaagaatccagccgctgcacatgtcaagtaagcagccagagatggctgttccatcagctaatggtgatcttgacatcccagaatcagtggggctttccgctccccagccattcctcaaaagacttgttgaggccgagccgatgaggcgcagtaccaggaggcggcggtagtaatgaaactagtactgtaattaatagcgtagtgaatttgttggttaagtgttgttatgacttgtaacttttagcagtttaggtttttattttcttttgtttgttgtgttgattatgtgtatcttggtttagaatttatagatttggagaactgttggattgacaacattctgagtggtaaaataccaattattccactgtgttgggacggcgtgttacacctgcatctccaccatcagcacctgagggtcttcgttcggctcgcgtgcaaggg

SEQ ID NO: 29292 - DNA, 2925 bp, Zea Mays
ccgtgatgcgcgccgtctcctcccccgcgcgacccctcccgtgatggccgccgccgcctaccccgcgcgacaccagccgccacctaccccgcgcgacaacgcccgtgatgcccgccgccgcctaccccgcgcgacaccaccaatggtgcccttccttccccggcacccgcaacccgccagctccgcgcgagccgccggcgggatacccgcctcccccgcgcccccgccagctccgcgcgaggcgccagctccgcgcgtccgccgcagtgatgccgcgcgatgaaggccgcacgggagagacgctgggaaagccgctccttccggcgttgcagtgggggcgtccacagctgtgccatgcccccgccccgtccgagacgccgaccacgacccaggattctcgcttcccgtccacgtccgtgattttcccagcgaagctgaccacgcctccctgtacgcacctcccgacatcctcgccgacatgctcgcactcctgtccccgtctgagatcctcgcgtcggcgccttcggtggaagtccggaatcgcccggctctcctccaccgcgccgccagcctcactgagaagagttcatctgcctcctcctcaacgcttgaccccaccgccgctggatccaacaccctgccctcgtccttcttctccgacctactcaccagtgacgacgtgggcaccctggccagacgcacgccatggacagcaggtgggcaggaacaccttctacgtggatcctcttctcccgtgctcctcgacgcacgagagcgagctcggactggatcctctcctaccgctccatgcaggtgctcctccgcccgatcccaatgtaaaacctacagttttgttagatgttgctgccactgtttggagaagactcgcgctagaaagcggtactgggtgaaaactgcagagcgatctagagctcgcaagcctgccattgctctctgtagcaatagaaatcccccaacccacccacccacacaagttgcaattgccctcttacatctattttttggtggaacaactaaattgacattgaagaagttttttggagtgtgctcgttctgcaattagaagacttctggagagttctataattattctggtttgtagtccgtgaatttatagtggattgcttgagatactgggtaacaggaatgcatgtttatgattttcgttttgaccttgcattgcatctacaatgaccagaggatgcagtctatggatccagttaatgtgtatggaaatccaatggaaggtgacatgattacaacagggacacctcttgttgtcccaccacttattgacatgattagcaatgacccaatttttggtaatatatgaacctaattggctgttaaatatgcatagcagtttgtataataatcgatttcctcaacatattgtagtttcatggttcttgttctcactacttcctccattgtatttatagcccattgctgaagatgggatgcaggaggcctctatcaagtaggtcaattacctcattaacagggacacctcttgttgccccaccacttattgatatgattagcaatgacccaattttttggtaatatatgaacatgattggttgttaaatatgcagagcagtttgtataataatcaactgcctcagcatattgtaatttcttggttcttgttctcactacttcattgtatttatagctcattgctgaagcatgggatgcaggaggcctctatcaagtaggtcaatttcctcactagaatgtttggttagagtggaatgtaaaggtctggacactctatgaattcgatgatctcgagagcatcattgataggacactaaagcgcgattttgacaccgaggaagcactctggttgcttaagataggtcttgtgtgcatcccggatagccctaagatcaagccctccatgtcaatggttgccaagatgctgcaagttcatttaggattgaatgaagttactggtatgaccttgtcgagactgaagtaaggagggatagagctaaaaactctcttggcacaactataaagttcaagctatatgggcgtgtttggatggcagcctcccatgcaactgcctggcaggcaaatgatcctagccacaccacaggcataggaaatcgaacggtcggcattgtttcctgggccagctgataaaatccattgaagtgcaagaggccgataaacttaggcgtatagtgctggatgctccatccactggacatacacttaagcttctgtcagtttctgattggattgaaatgttccttactttgagcattaagacagttccaccacattctggcgccgccttcgtctgatcctggaggcaattggagccgctgcaagtcggatcctggtggatgcagcgcaacacagatcgcaaccctccaaggactgagaagtggaatgttgacatctctgagacagtctgaaagcaaaccgaaggcaggggtgttcatcaactcctgcttcgcgcattgctagagtgagctacaggacacatggttcgcaccaaattctccatccatatataacaagaaaattgcagaggtggtaggtgattggtactttgaaagaggagctgacgtggagattgactgcgcctatccctgtgattcacagtcttgtcgcaaccttataccaattgataaggctgaccatcctagattaaacttcaaagaccggtaccctgagccatacagagattctcatccgactgcccccgttgctgtgcatggatgtcaggtgtcattactgtaatgtagtggtgaaataggtagattaaaacaatgaaatttatatgtggctaggatcataaatgaattgcaaaattttttctcagaacagtataacacatatttgtacataagttgttgtgttattatatgtttccgttgcaacgca

SEQ ID NO: 29293 - DNA, 339 bp, Zea Mays
cttcagatgatatagaatgaagaggaaaagtttgtactgtaaagaacacttttaggaaaaataggtcatacggttaggatttgacaaggagcaagaacagtgtacccttgattccaagttcatcagaactacagattcggttgcccctttagcatgatcaggtggttctacaactaaaacgaatgcaacatactcaactcttgatgatgcaagaaacaacgcgcggcgagggtgaggaggacggctaacaacattgacgaccacctcggcttccccaaggaggactccatcgcctccgtgttctttttggacaagctagcgccggcgagcccactgtct

SEQ ID NO: 29294 - DNA, 4095 bp, Zea Mays
atagacgtccactgtagatccctcgcgtcaggggtataaacgtccaatcccccacttaaccgtcaccacgcccacttgcatcgccgttgcggaattgcggagcgcgccgccaaaacaaacgcgtcctgctgccggaatcagaagatcccgaggggttctgatctgagggcccaccatcctctctacacggcacaggaacccaactactactactacaatcgttgccagggagctcaaccgactcgggaccaaaatcggctgctgttgctggctgggacgaaatcggaggcatccgcctttctcgagagatcgagctccgcgccggagcaggcgggccaggcggtgccgctgctgcctgctggtgggtttacaacatagggatggagtcgagatccatccggattcgacattcgaggtcttctgctttgctgttttaaacctgtagaggcagaggacttgggaatgctgaaaaatgtgcctgcaaaccgacgggggaattttttgtgcaaacaagattcgacctctgttcaagcagatattgttggcttctcatgagtatgggcttcatgctgatactgcccttattttcaatgatttaaagcacagtagattgaaggcctttatatttgttggccatcaccttggagacgacggttaaaatcttctacattctttgataagtggtgtggcgcttgttcattattctatcgttgcatagtttgatacgatggatgggaggaggacaattttgatgggacgatatgaaattggtaaacagctgggacaaggaacctttgcaaaggtcttttatgctcgtaatcttactactggcctggctgttgccataaagatgattaacaaggacaaggtcatgaaggttgggctcatggagcagataaagagggagatctcaataatgaggttagtgaagcatccaaatattcttcagctttatgaggttatggctagcaagagcaaaatttattttgttctggagtatgctaaaggtggtgagcttttcaacaaaattgctaaggggggaaagctcagtgaggatgctgcgaggaaatatttccagcagttggtcagtgctgttgatttttgccacagtcgaggtgtctatcaccgtgacttgaagcctgaaaaccttctacttgatgagaatgaaaaccttaaagtctcagattttggcctaagtgctctagctgagtccaagaggcaagatggtctcctgcataccacatgtggaactccagcttatgttgctcctgaagtgctgagtagaaaaggttatgatggtgcaaagtctgatgtgtggtcttgtggagtaattctttttgtgcttgtggctggttaccttcctttccatgacacaaatttgatagagatgtacaggaagatttccagagccgagtttagatgccctcgttttttctcaactgagctgaaggatctgctacataaaatccttgttccagatccaagcactagaatttctatctcgaggataaagaggagtgcttggtacagaaaaccggttgaagcacatgcaaagaaaaatgaggcagaaacaagcgagaatacttgtacgggtgaaggtacaacttctgtctcaacagagtgcagtacgtctgagggaaatcaagggccattaagcctcccaaacttgaatgcatttgacatcatctgtctctcaacaggttttaatctttctgggttttttgaggataagtatggtcgcagggaagagagatttactaccagacagcctgtaacaacagtatttacaaagctgaaggagcttgccaaacgcctaaagttgagggtcaagaagaaagaaaatgggaccttgaaattggcagctccgaaggaaggaaagaagggtatgcttgagcttgatgcagagatttttgaggttgctccttctttgctcttagttgagttgaaaaaaaccaatggggacacgctggagtatcaaaagctagtgaaagaggagataaggccggcactgaaggatattgtttgggtttggcaagatgatcaacaccagtgctcacaatcaccagagtctctattatcaccaccggagacacaggatgaattgcgattatcattgcctcagcaagagggtcaagacttcttagaagccccattgccatcactatcgcttgaccagttgaaatcaccaactgccccagagcaagcagagcaactgccacaaccagaacagttgcaaacgccaatcgctccagaggagcaaattaactagctctaacagccagctgatcgtagtacacttgctgtccatgtcctgcagaggaacgtctctcctggagacatacaaaggcatccagatatgtccccatcgaagaaacagttaacaaacaacaatgattcgctgtactggtcaaatgaaaaatatgactactcttgctcttggttggatgaccgggcaatgatttcagctttgcttgatgtggtcatagaagaagactctgcaagtctactccccccggagcgctctcccctcttcctcttgtagctggtgtggaggctgagctgcatccggtctctgttggccataagagcatggatgcagaaatgaaacagccacttgagggatccatgtccctgaacatcgacagcgaaggtgaaccccacattggaaatggatcgatcgtcgtcgagaaccctgcatctgacctggtgaagtcagaatctgaccgaataaaaaccttttaccagacggtcctgtcggctatcatggtgttcgtcacggcagcgctatcaagctacaaggacatgaagcctctttactcgaccacaagccacggcaaagctcacctcagcaacctcctagtcgacgagggcctattcatattcatgaccttcttgtgtgctatggtcctaatgatgtctgagttcgtcgtgcaccagcatggccggcggggccatgtctggtgctgggttcgcaccattctcgttgcagtcaccggtgtgatgctaatcgtggctgacacaatcctcctcatcgtgacgaaccgaagcaacatgttgctgtcagttcttcttgtaccggaggtgttgcttttcggcgtggccgtgagcgttggagcatggatgcaagagagtttacccagctcggagcttggcagcaggtacgattccgccatgaagggaacctttgatatagctacagttggcaccattgtctcgttcacgcttcaggggggcatcgtctttggctacctgaaaaccccagacagtaatcaggtcaagcatgacccgccgctggacctcgctgcgtgctacgccacctcgacgctctccctgaccggaatgacaatgtgtgccatgccgctggcatatctccccaacggcatgctggaggttctcgtcagagtcgtcgagaggcttaggagtgctgtgctggccgctctggcgatgatggcgctggtcgtctcagtggagttcctggatggattcgtcgtggtctccttctttcccgacgccgtcacgattgccctgtactacgtggtgaagctgttctcggcatgtcaaccccgagaggagatctcacagctggacttcaccttccggatcgttgccgccgcggggttcacgctaatgactggactctatgcggcttttacggggacagatcactatggcttcaacctcaagaccgctatgttcatcctgttgcttgcagttgtgtcgagcttgagccgtctggcaatcccacttcacatgcctgaggcgggagtgggaggagtcatcgagttcggcattgttagtatagctctctcttttcccctgctggcgcttctggctgccattccattggtgttcaaggtcttcgtcgaccattacatcaatcgctagtctttgggttgtctggcgcaattcttcctgtggtacagtgccagtaatgaatgatgcgtttttaaactaagggcataaatttaaaaatcttatttttattactgcatttactcagtctaggttgcttgtttggaagagcaacagcaagagactagccagatcctttgtaaggataaatttggctattattagaagaaaaatgtctttaaa

SEQ ID NO: 29295 - DNA, 3541 bp, Zea Mays
aaaaaactgagtccgcgttgtgcgttggtgctgtcgcacgaactttcctcttccaacctcaagcttttactggagttcgcagtgctgctgcagcagcagcacacgcagcttcgtagcatcaggccagggcgtgggactcggaagagacgccaccatcggaggagctctctcctcgctgaacatcatttgagatggcagaggcagcactccttgctctctcgaagattgggtcctatttgggaggagaagcggctaccttcattgcaaccaaattttctaatttgatcgagctaccaaatactgtgaggcgtattcggagggaacttctgatgatgaacatctttatacgtaagacaggtgcatcctatctcagtgacgagctcctcaaggcttggatcacagaagtgagaatactggcctaccgtgtcgagaacataatcgacaacttttcataccactctcttcaattcaagcaagaccctaaagggaaaaagttggcgaatggattaagctacggtctagtgtttagtgggattgctgctgatctagctcagatagagaaggaaatagagcatgtttcgaagttgaagaatctctggttgaactcagtccatgagcttcttcatactcaagttagcagtgctgaacagcaattccctcaatacagtttgccccaaattctaaaagatgaaaacctggtggggttaaaggaagaaagagagcagttaaaggaatggttgattcccaatgcacctgtcaacatgacaaatataccagctctcaaggtggtaactttgtcgggtatgggtgggatgggaaagaccaccctgctcactagtgtgtatgataagctgaaagatatcttcgaaatccatgcttggctcactgtctcacagacatacagaagtgtcgatactttgctgaaggagctactaaagattgttagtgcctctgagcacacaactcttgttaacaatgactatcagaaggaagtgattgtaccagttgatattgatataagagacaagaaacagctgaaaccagatgtcatcgacaagatgggcatcttagacttgaagagtactttaaaagcagtcctgaaacataagagatatatagttgtgttagatgatgtatggaatcgttgtgttcacgatggaataagcgatgtgtttgaagattgtgggaaggaaagtcgcattgtcatcacaacaaggaaacaagatgtagctgcacttgccacaccaggttaccagctcaacctaaacccattagatatcaaagatgctctccagcttttctgtacaaaagcttttcccaacaaaaaccactttgattggacatcagtacttcttgaacatgctaaagatatgatgaagagatatgaaggtcttccattggaaaagtgcccactcgagcttcaagagcttgctactcatattgtaaggaaatgtgaggacttctcagtgtcaaagtgtccatctgagcttcaggatcttgcaacttataccgtaaacaaatttaagggattctcactatcagcatgcccatcagagcttcagaatcttgctactgatattgtaaaccattgtaaggatttacctctggtgaagtgtccatcagaacttcaggagattgctattgacattgtaaagaaatgtaggggtttgccgctggctattgtatcagtaggcagtaggttgtcttcaagaaagcaaatagtgccagtttggaggcagatgtgcaatgaacttccttgtgagctggaaaaagatgaccaggttcgaggaattctaaatcttagctactatgacttgccaagtgatcttcgaaactgcttcctgtactgcagcctgtttccggaagattaccacttctcaaaggacgatcttgtgcgactgtgggttgctgaaggatttgttgaaaagaaaggggacaacactcctgaggaggtagcagagggctatcttactgagctgatccaccgtaatatgctgcaacttgtggaaaatgatgagcttggcagggtgaacacatgcaaaatgcatgacattttaagagagttggcccttcacatctctaaagccgaaatgtttggtacagtaaatgattttggtgcaatggtgcagatggacacagatgttcgtcgcatatcttcatatggatggaagaagatgaaaaaaaataaatccaagttgaaatttccgcacctccgaaccctgatggcaagtgataccattgtggactatgtaccatcaatactatctgaatccaagtaccttactgtccttgagctccagaattctgatttccaggcactgcctacatctataggaaatctctttaatctgaaatacattggcctaagaaatacaagaataacgtcactgccagactccattaagaatctctccaatcttcaaactcttgatgtcaaatcaactagtataaaagctctgccacctggtatagtgaacctcactaagctaaggcaccttcttgctgacaaatttgctgataagaaccagtcagagtttcggtactttgtcggagtggacgctccagaagggctttcgaaccttgaagagttacagactcttgagactgtgcaagcaagcatggacttaccggaacaacttgataaccttttgcaactaaggagcctgtgggtagataacatcacttctgcccactgtgcagggctttttgctaccttatcaactatgccacttctttccagtttgcttctatctgcagctgatgaaaaggagacacttctcttgaaccatttcaatccaacttgcacgaagctccacaagctaattgtgagaggattgtggtctctaacaggttgtccgatacttcagaaccatggcaggtatctcaagtatcttgccctaagcagatgccattttgtaggagacccgctggtggttctagcatctactgtaccgaacatcacatatctgagacttaacaatatacctagtccacctactttggaccttctggaaggatccttcccacaactgaagacgctagttttgaagaacatgaatgatgtcagccttctgaaaattagtagcggtgcacttccagtcatagaatgtctatatatcacatcactgcccaaattgcagacagtccctcgaggcatcaaatccttgagctccttgaaaaagctctggcttctgggtctccacagtaacttcaaggctcgatgggacatggagggaatgcagaaggatctacagcatgttctggagatacgtacctaacagcagaagctttgtttttgtgtttgtcaaacgtgattgctctttctgtagtaaaagtgtcctagaatgcaactgtatccacttcaaaatccatcaagtttgcagttagacattagggattggtgcatttgtggatcatttgtcagatgattgtttccgaaataataattccgaaaacatggtttactatctttgccatcagtatgcaatctagacttgccaaagtcgatgttctttaatacttgttatatctaagtcgtcgg

SEQ ID NO: 29296 - DNA, 2721 bp, Zea Mays
cttccctctcgttctccgcttccgcctccgcctccggccacgagtcaccagggaagggacaaacgcacaaaatcaacgaacgcccagcgcccagtcaaacactaccccttcctccctcccccctcgccgcctccccggaccccgccccgaccccaccgaacccatggcgtcggagatcgaggtgctcgaggacaccaccacctcctcgacttccctcgtcgcggccgcgtccacagtcccttctctcgcggagggcgcggaggcgccggcggaggacgactcgctgaagaacgacgtgtacaccgcggcggcgtacggcgatctggagaagctgcagcgactggtggagggggagggccgcccagtcaccgagcccgacggcgggggctaccacgcgcttcagtgggccgcactcaacaaccgcgttgccgccgcgcagtacatccttgagcatggagcagacataaatgctgtggatcacactggacaaacagcacttcactggagtgctgtacgtggtcatattcaagttgctgaactacttctgaaagaaggagctaaggtggatgctactgatttatacgggtatcaggccacgcatgttgcagcacagtatggtcagactgcattcatttaccacattgttgcaaaatggaatgctgatccagatatccctgataatgatggaaggagccctttacactgggctgcttataagggatttgcagactccatacggcttcttttgtttttggatgcttataggggacggcaagacaaagaaggttgtactccattacattgggctgctattcgggggaatcttgaggcatgcactgtcttagttcaggttggcaaaaaggatgatttgatggtgaaagacaaaactggcttaactccagcacagcttgctgccgataagaatcatcggcaagttgcatttttcctcgacaatgctagaagggtacacggcaaaggatgtggtgcgaacaccagatttgggaaattgtcaaaattagggctcgctcctcttctttggtgcaccattattggcatgcttattacatacacacactctgttatatcaggacaatatgccatgactacgacagcaccatttgggatattcgcatggtcaggagtttttcttgcaactgctggcttggtcatgttctataaatgtagcaggaaagatccaggttacatcaacataaatgcaaggggctcgcaaaatcaaagggatgatgaaccgttgctgaagatggagttagaaaatcctgcacttctttctggcaactggtcacaactttgtataacctgcaaaatagtcagacctgttcgttcaaaacattgttctacatgtgatcgctgcgtggagcagtttgaccaccactgcccttgggtatctaattgcataggaaaggaattgtaagagatccaaattctccatcatcctttggtgcttggattcattattctgcgtttcagcatcctggggtggtttcatttctcgcattggattgttttcttttctttggtgttgcagttcttacagttgttcaagcatcacagatagcaaggaacattacaacaaatgagatggcaaactccatgagatatgcatacctcagaggcccaggtggcagattcaggaatccgtatgatcatgggattcgcaagaactgctctgacttcttgttaaatggatacaatgaggacactgaacggctagagcagacattgcccactgatgaggaaatgggaatgatacagatgacaagtgcagtttcgcagcagaacggtgacaatcatttacatcatggtaatggcactgaccatagttgcgctgtttcacaagcaaactcaaaacctcatagccaagtgggttcgtctcagtgttgtgaccacagtaagaggactgataggacaccgttgggcctaggattgggccttggacgaaacagtgcgtcccggcagtatgttcggtctcttatcccattgtgatccatcatttggcgatcatgtgtttgtttgactgtagattggatttgttcacttattctgttatacgtgcccttgacatggttcaccatggctgggcagggttaacgttattgtgccatgagctccggaatactaagatatatctggtgttgtagtttagcgttgaactcagagaagttgaaggtaacgacctggtttgcgagtatcagctgatcagcagtctggaatcagagagtttgtgcagaaaatgtaagagttatggactcatggcagatgcagtagcatgagatgtcttcagaattgttgtgtacatcaggttcggtggtacccccattgtttagcgtgatacgagtttggaaaaaaaaaaagtagtcgtaaattgagaaaattgtaaattgattagtaagctcactgcaacactagctgttttcctagttttcattcatttttgggtctggttattgttatgaaccacggaaagaattttcggttttcgggtatgggtacctcagttatatttggtctggttatggtacttactggtggtgcatgtttgtgtgagtgcttagagtttaggctatggccatcagatcatgtatatgactatatgactgtgtaaaacactgttttttatctgattgtgtaaaacagtgtttttgtatcgtacactattgttttatagattgaagtttaaaataagagatgtgaatgagtaag

SEQ ID NO: 29297 - DNA, 3691 bp, Zea Mays
caaccccatgcgtcaagggatcaaaccatggcgcgtgtgcacatcgccaccgtcggcgctgcccagtcaccgcgccgacggcgaaatatattccggggtcccacgtggaagcatccggaggaatacacggatacacctccgcctcggtccatcgcaactgcaatcttctgctccgtcctgtaggctgtagctgcagcctgcagggagcgagccataaaggagactacgtagcggccgcggagcgcggggacgacggagggagacagacgggcgcggcagggaccagggagccagcagggctaggcgacgctccttccagttctcctatccatgatttcattctgagacattcacatgcttccatgtgattgaccttgtccctaatgttctgatcaagattgccatggttgaaaggctatagtttcttatggtccatgtccacgattcaagaataaaatattgtttggcccatccattgtgataatggtctggttgcaagaccagctggaaatgcacaagttccactgtgtggcggcgaaagatcagtttaagctggatgaaaataattgccagatcgaagaggaagaattttgaaagaaaccatgaggttcctactgctgaacatgtttggaacacagaatcattgattcgtgcaaaaggaatgatgtgctgtgtatgcttggaatctatctcacctgctcagccccttgggcagatgatgacatcagaaaatatggttcaccgctgcaatgtttgcggtgcagctgcgcacataatatgctcttcaaattctcagaaagactgcaaatgcatctcaatgtttgggttcaaacatgtggtccatcaatggactgtactctggacagacatagctgaccaatccgaagaaggccagtactgtagttactgtgaggagttatgcagtgagtcttttctgggaggtcctcccatatactgctgcatgtggtgccaacgattggtgcatgctgattgccagtctgccatggctactgaaaccggtgaaatttgcgaccttggtcccttcaagcgccttattctgtcgccactttttgtccgggccattagcaaacctggtagcatcttgagttctataactcatggagcaaatgagtttgcaaccactgtgcgggggcgtttaaaccgaactaaaaaggagaagcatcagaacagattttcatctgacagcaacgatgattcatcaagtgataccacgttgaactcaaaccagagggctggagaattaaaaacaattggcgacagtgctcaaaggagtcctgagaatgagcatgatagcagtgagagtgatggtagagaactcatatcggagtccagaaggctcggtaatgatgagaccggtgaagttaaacttaagtacgcattgtctgaattgcctgctgattccagaccccttctaatttttatcaacaagaaaagtggggctcagcgcggagatcttctcaagcacaagctacattttcttttgaatccggtgcaggtttttgaattaagttcttcacaagggccagaaacaggattatttttgttcagaaagctggcactggcaatgatctttcgagagttttatcatggggaggtggcctaggtgctgttgagaagcaaggtggcctttgcacaattttacatgacatagagcatgcagcagtcactatccttgatagatggaaggtgacagtagaagataagaaatcaaagaatgtgcttctagtaaagtacatgaacaactatctcggtatcggttgtgatgcaaaagttgcccttgacattcataatctccgtgagggaaatcctgagaaattctacagtcaggaagtatcaggcctgctatagatattcagaacactgccaatctacgatgtacagagcaatctgtaatggtacgactaggacacaaaggagcaggtccagatctgaaggtaggtaggtactgacctcgccggagcttgatcttcttcttgtgggtgatgccctgcacggctgcacggagatccggccttggagtcgtccggcggtctgcgtggccttgggtgatgccctgcatggagcttgatcttcttcctgttcgggtcggcggtctgcgtggccttggcgtcgtccggcgcgaagagcacgacgtcgatgccctgcacggagatcctgccgtcggtgtagatgtccgggtccaagaggtagcggatcttgtgcggcagaaaccagaatgaaacgtaccttgtgcggcagaaaccagaagcaaaccggaatcaaacgacggaggcgctcagggcgttggagcgacggaggtgctggtgcatagcgaagacgagacgaggcggcggagaatcgcctggcctcctaaggccagggttgtttccgacgggaaaatggaacgaatatctgcacgagattgggctgccaaatgacacacatgaataatccgaggacaattttctggtgggctttctcccaggagaaaaggccaggaaacccgctggattttgggctgccaaaccagtcctgatatgtcttttttcccccctctagcgcgtctcagtaagacattaaggactaacgcggaggctttaaagagaatctttagttattaaatattaagatgactcttatgtttctttgttgggcttcatcagttcttaaataaggtgctatatgcgagggaaggggccaagagcatcattgacagggcttttgtggacttaccatggcaagttcggttggaagtcgatggcaccgagatcgagataccagaggactcggaaggcgtgcttgtcgcgaacatcccgagctacatgggaggggttgacctgtggcaaaacgagggtgaggatcccgaagattttgacccgcagtcgatccatgacaagatgctcgaagtggtcagcattacaggagcatggcatctgggaacactccaggttggactttctcgggcgcggaggatcgcgcaaggccagtcgatcaagatacagatgtttgcccctttccccgttcaagtcgacggtgagccttgggtccagcagccctgcacgctcaagatatctcatcacgggcttttatgttgaggagagcagttgaagagccactgggtcatgccgctgctatgatcaccgacgtccttgagcatgcagagtccagccatgtaatcactgcttcgcagaagaaagccctcctccgagaaatggctctacggctgtcatgaagcaagcgccgctcattcggacgtcgcagaagaacggtttcctgcctctgcctgcacatcggtggttagtacgaggatctgtgatctcaacatgagctcgatcatgttgttagcagaagatacaggcccggagggacgtgtccacgtgcacatagagtttttttttttggggtcatgttcacgttttggaaatagcgaggcaatgttgtgtgcagctatgtatggtgtgtagacctcgggtaagccagttccttccttctgtgcaaaactagttacgcctgcggcctgccattccgtgttaggttgactggatggatttttagggctgcgtcgctgccacttcggttggtgccccatatgtaaacgagatgggcttgaatgcttggttgtaacctttttttttaatgataggagctctgtcctttaattaagacgaaagaaaacatatgtacaagaaga

SEQ ID NO: 29298 - DNA, 3783 bp, Zea Mays
atgtcgatctgcgggtaccactccccacgcttctccgaggatattacttggctcccgcaatggcttcagccgtatagcacgccggtggttggcgagcaccggaacaacagtaccgccgtttcatcgctttcttgccagaattgtgcgtttgtcgggcacccttcgcaggagcatcaggattgtcagaacgccactgatggttatagcggcttcatcttgcacttgtcaggagatgaggacacggtggttagttcaccggtcagcagcaatgtgctacctttctctttgcgtgtgtcttcagaaagtgccgcacaaccttccctagctgaaggcagtggcaatcctcagataccaaactctggtacgtgcaatggtctatccgagagcctctgtgcagatggtgaagaacaagaggtcaatgctgtctcccagaatcagtttgaggctaacgatcctcaggttgatatgccgacaaaagtggctcgcaaggagatcagtatacaacctgatacaatcagacatagaagacatggtttcaatggtggaaaggttgatgttcgaaagcttcgtaatgttgatgtaaatgatgcgattgaactatcgattgctgcatctgaggccatggttattgcagagatgatacttgatgattctcagcctgataaatcggctgcagctgctatagaagctgctctacacgtgaaagaagcccggaagcaattctactttgaggagccacaacatgcttgtggatcctcagaaggtggtcttgatgagattgattggcttgcagaattggatgagtctgaaatggttgacgcataccaagatgttgctctgtccctcatccacattgcttgctcatctcaagatcataacacaggtgatttgaagcaacaaaattcccatcctacttgtcccccatgtgatgcagacacacacatcttatgggattcttcttctgagaggcaaaataaaaaatggaacagccaaaatgctgatagtgatgaccatgtatctgattcttttccaaacaatcagtcagcaggtgtgccaccaaatgaaccaactccatgctctgcctctgtaaagcaagcagctctatgtaaaacaatttcatgttcaagaaataagaaaactgtcctccaggcgtcaactcaaaacaatgctgcttttcatggaaccttgggagctcttgcaacataccaaaatgttcataagaaagttgcaggagttgctgcacagacgaatgttggtatgaagaagcgtgtaaaaggtttgtttgaggaagaaaatagctacatttctgattcaattagcacagataggcgctgtcctacttctagagcatcatccatggaaattgtcgcctcttcaagggcatctttgtattgcaaagctgaaggtttacttgaagaaaatcatcatcctggaactgaagagttgtgttgccaagtagtatgttctagcttgtcacaagtggatcctttatgttccattgttccatgtagcatatcttgcgatgaaggtcccagtagccaggctcctgtgtgcaaacagagtgaaggccatgaaggtcccagtaaccaggctccttcgtgcaaaaagaacgaaggcaatgaaggtcccacttgcctgacacctgaacgcgaacatagtaaaaaaaaggaggaagaatttatgcataccaaagaatttcctatgatgcaatacctggatgaggaggctggtccatcttgtgtgcctttagttaagccagcagattctaatgttccattccggcgaaggaaatacagttcactaaggccatttagcacaatagcaactaagtcaaacatatttggaagtacatcaaattctaatgctgatgttccagtttgtcagcttgagagattcacacccattgttctaaataagaatgtacagcgtgtgcaagctgccaaggaattcatagaaaatagtgctggggctgaaaatttggaagatttctctgcagttcggaagcagacatattatcctcaggatggcagtgaggatcaaatcagggagctacaggtcccacgggaagtctttccgccaacagagaatttggttgttaaacagcaccttaaaagaaaaagggtccaattttcagaagcaaagcgtagtagcagaagaaccaagaacaatagaaggatcctgactaaatcaagattcagtcgatcagatagcagaacaggagagatgcttgagaccagagagtacactgataacaaagaagacacatttcaaggagtagagtttctgttgactggatttcctaaacagaaggaaaaagaaattgagtccctaatacgaaaatctggtggctatgtactttctaaagtgtcaccctttccacttgataaaagaaagaacatggctgagtttccaagctggaatcctcccatagtactttcgcctaaaaaggtgtcaacagctaagttcttatatggctgtgctatagatgcctggatattgaatcccatttggctcttcgattctcttcaagccggcatcatgctgccacctggaaagtatttaattcgacaaaggaatgcccagaagcataattcatcattcgaccgcccacttcacccaaaatgtaatacattgatatttgatggagtaggattcttgatccacggcaaaatcagcttctgttcaaaattttccaacattgtcaagcatggagggggccaagtttttatatctcttcagggattagttcaaagcttgaaggatggaagtacatcgcgtggaatcattcttattgcaaacgcggctagtgcgtctcgtcatctaacccattgtggtttggagcatgacataaatacagcgacagcaagctggatcatcgctagtttattttctggtaaattgattccattgaagaaagatcgctgtgcttcatttcgccgaatcaagatgccattgttccaacaaaagcaacatgtattttacatgagtcaagagatatgatctctgctgcatcacatagctacaataccatgggaatctcaaatacttctcactgaaacatgactgctatgcattcactctgatgaacctcttttaaaagaagagtttgtcacagcatttttttgtcactcagaaatccctctgttcagcaccaaggtcgtattcttttgtcacttcacaattgaaggggaagctaggaaatagagcattcttcaatcatggatttacggcgccctatcaggctacagctgagaaagggttagttactgctcgaggtgagcaaagtattcatcttccagctacatcattctggaaacttggtttctcaacaacatgacaagtgatccaacaacatgacaagtggatcacggaaggtttgaaggggattgagggggaaatgaactaatttcctcctcaattccctctaattttccgtgatcgctggtcaccaaatcagctctaatcatggcatcataacacaattttgcagtccagaatcaactgtaagcagttccttatatgttgtagattgtagcatgtaaatcgtaaatagaaataccagatgtaatccccctcctcacccagtttgtaatcactaacctgcgatgcgctgactattaagcccttgttcggtttcatggaaatcgaatgggattaaggcctggttcggtttggcctggaacggcctggaagattgcttgctccatctgaaattattccacctggattaaaactggaagcaacccagaatgctgttcgcgtagacccaatcctgaatgaaac

SEQ ID NO: 29299 - DNA, 2679 bp, Zea Mays
tcacacccgcagcagcggtcacactcaagtcccaacaataggaagcagcagaagatgataggagggtcagcgtgactgcgtgagcggccgtggtcagacacgagacgcggtccaagagtcccgcagccgcagggcccaactaatcggccgtcagtcctttgtcccccacctgctcagtgcataatcaacgggccctacccgcgtctcttcttgcctcgcctgctgctgctcgctcctgccgcgacggccgccggcgaccctcccggcacccgtgtagctggttggcccttcggcatcgccgtccgcgcgccggtcaaccgctccgcgctcgtgctccccttccctccccaccaactataccagcacctatagatccagctcggcacggcagcttaagaccagtctccctctgcttcctccctcccttgtcccttgtcccttccttgtttcttcgcctggcgttcccgttccctgccacctcgcccgctctcctccccctctctcgaccacctcctcgggagtagaggggggctgctctgggcgtggtgcggcccccagatctgggccggcgggcggagggcgggatgaagtcgtcgctgagaagccggcaggagtcgcggcgggtcagcaacggcgtcatcatcggcgccatgctgctgtccctctgcgtcctcagtttcgtcaaggccagatactgcgccacccccctcggcaaggccgaggaccagctcgaggagcagatgaacgccagcatccggatggagccggaggagtcgtcgccggccaggacgcccggagcctcacgacggtcagcgctgacaaattacttctcttccggcggtctatcagaggaggaggacgagcaggaagcggaagaagagaatgtggtgaccaagccgccgcctccgccgccggccgtcacggctaacaggggcagcaagaagaagaagggcaagggcaagccgacgtgctacatgacgagcaagcggtcggagcggtgcgacgcgtccggcgacatccgggtggacgggaaccgctccaccatctacgtcggcgggatagagagggagtggaggacgaagccgtacgcgcgctaccacgaccccgtggccatggcccacgtccgcgagtacacgctgaaggcgctcccggagccgggggcggcggcggcgcccgcgtgcaccaggaaccacagcgtccccggcttcctcttctccaacggcgggttctccggcaacctgtaccacgactacacggacgtgctggtgccgctgttcatcagcacgcaccagttccgtgggcgcgtgcagttcctggtgagcgggatgaagccgtggtgggtgggcaagttcacgcccttcttccggcagctcacgcggcacgacgtgatcgacgtggacaaggacggggaggtgcactgcttcccgcggatcgtggtgggcgccaccttccacagggacatgggcgtggacccgcggcgcgcgccgggccacgtctccgcggtggacttcaagcgcgccctgcgcgccgccttcgggctgaagcgcgaggcggcgtcccgcggcggcggcggcggcgccacgggggacgggaaaccgcggctgctcatcatctcccggcgtgggtcgcgccggttcctgaactcgcgggagatggcggtcgccgcgggcgacgccgggttcgaggtgcgggtggcggagcccgaccagcgcacggacatggcggcgttcgcggcgctggtgaactccgcggacgccatggtgggcgtgcacggcgccgggctgaccaacatggtgttcctgccccgcggcgccgtgctggtccaggtggtgccgttcggcgggctggagtggctgacgggcgtcacgttcaaggagcccgcggcggacatggaggtgagctacatggactaccacgtgcggctggaggagagctcgctggtggaccagtacccgaggggccaccaggtgctcaccgacccctacgccgtgcaccggcaggggtgggacgcgctcaagacggcgtatctggacaagcagaacatccggatggatctcgacaggttcagggccacgctgcgggaggtcatggcccggttgccgtctccatgaccggccggcggccgccgtcagctccaaccgcccaaccgtccggtctggaggtagataggttggtgtatctaaatctgtcgtccccgctgcatgctcaaactagcttaatcttccttcctttttttccttccttttttttaactagcaagattctttcgatccctccattgttttgctgtgttattactgctacataaggaacctcatgggaaaacgatgagcaagcaaagcaagaagaccaagctgtcgcttttaaaaaaaaaataaaaaaaaatgtatacagtgagagagagagagagcagggccagctgaatctagcacagatgtcgatctgttaatttgtactagtatacagcaacccttttttttttgtgattattggttactcatgtagtcatgtgtgtatcagtgtgtggatggatgccaagatgtaaagaactctagcaaggaccatgagacttatgattaggtcatctccgacctcacccatttctggattttttttttcctgcgatgctttgtcaggtctggtcggccattgtcgtgcacaacgagtgtgcaagttccc

SEQ ID NO: 29300 - DNA, 1009 bp, Zea Mays
tttctatcactatttgacatttcatgagatacagaagcttttgagcaaaaccaacgggaaggttattgctgatgttatgaccccagcgcctctcgtggtgcgtgaaacaactaaccttgaagatgctgcaaggttactccttgtgactaagtaccgcaggcttccagtggtcgatagctcaggcaaactggttgggatcattacaagagggaacgtcgtccaagccgccctcgaaatcaagaaaaaggttgaagggacactctgagatgactacctccaggtatcctttttgctgccacatggggggcttaggacttggacacatctctagttggcaactgatcaatcaaagcgactgtcagagtgagcgatgaaagtcgctatgtttatgaagatttgcccggagaagcacaggtgtatgtgtagtgtttgttatatatgctgatgcagtccttgctggccaaaacacaggttaccgattgttctggtttcctgggcttctttggacaccaaattcttaacctaggtcttgtttgggtgcacacgtatctagttcaacttacttgtattgaggttcattgaagtggaaaatcaactagttttcgcacttcaaaacacatgcactgtagtaaccgagcgcagccaagagattttgaaatttgacacccaatttgcaagcctttcaatatttgacaccactgtcacaatgacatgtaggaccattgtgagttattgacatgtggaccaggatgttaaatcttgaaaggcttgtgaattggatgtcaaatttcaaaatttcatgtcttacatgtgtattatggatagtcgtctggtaggatgcgtactcaaagatgcgccaaaagattatccataatacaaaatttcttgtctcgaggataatcttgaaagactattcaaaatttcttgccaagaggtgttaaatctcgaggcttgtgaattggatgtatagcgctaccccatatgtgatcaacatgaagagaccattgaa

SEQ ID NO: 29301 - DNA, 438 bp, Zea Mays
caccgctgcagttagcgttacggtccgttctgcaatccaaacatccgatggagcccctatcctgcacgcccgcagaaccgtgccaccgcccctcccgagacttccgccacgcctccccaccgtgcgagattgccgcccccggccgcgagtgtgctgtgtgcccgtcgagacaactgttgtctccttccccaacctgcagaatcgtgcccaccaccgccacctctcgcgcgaggcccgggtctgcggccaccggcacagccagcatccttccctgcctgctcgctatgcatcatgtccgcgttcagcgagacaaccgtcgtcctcccttgctgagttaagtctccttgtgtgcagatgaaggcaatggagtatggatctgtgccagtatagataagcttttccagctatgaatcaaggggggtcagaggtgtatggttg

SEQ ID NO: 29302 - DNA, 1559 bp, Zea Mays
caaacattcagatctacgcacattcatctgatgtggtttctgagggacttgacaggaatgcttggagggatattgttcaccttttaccagggatctaatcttgatagcaatgctaaaatgtggcgtctagttgcagactttatgaatgaccttggaatgttgatggatcttttgagccctctgtttccttcatcgttgatagttataatgtgcttaggcagcctgtctaggtcattcactggtgttgctagtggagcaactagagcagcactaacgcagcattttgcacttgcaaataatgcagctgatatttctgcaaaggagggcagtcaggaaacacttgctacaatgttagggatggggttggggatgctgttagctcaaattaccagagggcatgctttgagtgtatgggcatcttttctttctcttacgatgttccatatgtatgtgctgaagcgtagcctatttgctaacacactctaaatctgcccctacatggaaagatcggatactgcatacttagactcggatacggatcggagctcaacgcttttagacagataatatccgtaccatttacatccctacggctatcccatatttctgtgtgattttcttccttagcatatcacgtttcttcatgcttcagggatttagttttaaaaaggcatttcttaacatacttccgcttgttttgtttctgatgatccagcaaattacaaggcagtgcagtcactttcactcactacgctaaactatgagagagcttccatcttgctacaatacttcaaggaatgtggtgaagttcttgtgccacggaaggtttcccagcaggaacatattcttccttcttggtcaaactggaggaaactgaacagaattaaactgccacatgagcgtgtgcacttgggtgctaaagcctcgatgcttacacacagtgacatgttggtgattgcaaaaacaagataccactatgaaaacgcgaactactttttgctggataaacaaggcatcgtttacgttttcatccacaaggaggcaacaccagccgatgttttaaggtccttcgtacacgggctcgtgctagctagctcgacacagaacagcaaacctcagcacttagaggcccgtcgatggatggacgagatgtataccagttttatctcgaagctgcagactgaaggttactcgacggaacgccttctgtcgcattcgattctttggagggcacactggcttcacggccagctggatgagaagctcaagtaggaggaacactgcaagaccgcgtctgcttatccaaggacaggtcacagcgaggttacgacaaacttggagctcgaattggagaagtatctggagtttcaccaaaaaggtcaagagcaggtactgctggaggagaatcatgaaggcgagtttagagtggtctagaccgtcgtcttctagttaactttgattatggaggatcgtcgtcgtcatatgatgtattttacttagttattttgtacaaaagctcctattatgtaataaagatgtgatgttgctttctatactga

SEQ ID NO: 29303 - DNA, 2637 bp, Zea Mays
cagcctcaaactcttgccctccccccggcaccacactagcctagtgagaagtgcagcagcagcaccagcggcagaagtgttacttagttgctcctcctacctgtgctgctgcgcaggagcagagcctgaaaggacgacggccgtcggcgtaaggggagcgagcgagcgagcggccatgaagtacgtgctggtgaccggaggggtggtgagcgggctcggcaagggcgtgacggccagcagcatcggcgtcgtgctcaaggcctgcggcctccgcgtcaccaccatcaagatcgatccatacctcaacaccgatgctggaaccatgtcgccgttcgagcacggggaggttttcgttttggacgatggcggagaggtggacttggaccttggaaactacgaacgttttctggacatcaaattgacccgcgacaacaatataaccacgggaaagatcttccaggctgtcattaacaaggagaggagaggcgactacctagggaagaccgtccaggtagtgccgcacatcacggatgagatacaggactggatcgaacgcgtcgcggtggtcccagtggacggcaaggaagggcctcctgacgtctgcgtcatcgagctcgggggcactataggggacaaaatcttttcgccgcataacgacagtggcattcttgatgcaggggatatcgagtcaatgcctttcattgaagcgttaggtcaattctcgtaccgtgttggacctggaaacttctgtctcgttcatgtcagtcttgttccggttctaaatgtagtcggtgaacagaaaactaagcctacacagcacagtgttcgagggcttagagggcttgggttagcgccggatgttttagcatgtcgcagtactgagccattggaggaacatgtgaaggccaagctttcacagttttgccatgtcccggtctcaaatatagtgaacctccatgacgtgacaaacatctggcacatccccttgctgctaagggaccagaaggcccatgaagcgattctgaaggttttagacctccagtagtactgatggaaaggtgcctcgggaacctgagctaacaaagtggactaaaagagccaccaagtttgacaagttgaagactccggtcaagattgccatggttggaaaatacactggcctgtcggattcctacctgtctgtcataaaggctcttttgcatgcatcggttgctatggaaagaaaacttgtagtcgagtgggttccttcctgcgacctggaagattcttcagctaaagagacccctgaagcccataaaaaagcatggaaattgctgaaggtaggtgcaggcatcaaacggtagtttcttgaaagtcatgtgcttatgtacatacagtccgtctcacggaattccattccatcccagggcgcagatggcgtactcgtccctggagggtttggggacaggggagtccagggcaaaatcctcgccgcgaaatacgcacgcgagaacaacgttccttatcttggcatctgcctgggaatgcaaatcgcggtgatcgagtttgcccgctcggtgatgaagctacgaggtgccaatagcacggagttcgatccagctacgacgtcaccctgtgtcatcttcatgccagagggctcaaaaacccaaatgggagccacgatgaggcttgggtcgaggaggacctatttccatgtcagtggctgcaaatctgcgaagctgtacggcaacgccagctctgtagatgaaagacatcgccacagatacgaggtgaaccctgacatggtcccagactttgagaaggccgggcttcagttcgtgggcaaagatgagagtgggaaacgcatggggatcgttgagcttccctctcacaagttcttcatcggtgcacagttccatcctgaattcaagtcgagaccagggaagccatctccgcttttcttagggctgatagccgcggcgtctgggcagctagaaccattgcttcagcgcagcaatccgacaacgaaagcatgttcgatcagtaaagtcccgaaactgaaactgtaccccactgggcctgtgaataatccactgaacagcttggtgaacgggtactacccaaatggcactgggatccacacctagaagcgtagcgcttagcgatggtttggttggtatttgctgctatggtttttttgcttgtacccctcctttttcatgtgttcctttttttcagtttgttatttgtctctgatcaactgagagaagagaaggctaagattcagcaagcccccagctccagcgacacatggttccgacatttttaacgaggaacgccttccagtccgttgaagcgagctagccatagggtggtgaggtctagtgtgatgttgttgttgtttttttctctttcctttttttttggcctggaactaaggcgcgaagtgttttgagtagcgctagtagagcctggaagaagttatctaaactatttgtacattatggaagaacttatctaaggactgaatacacaaatgcttggccatgattgctttgttgccacaatatgaacaaccacgctcagatgaagagtattggtgttgttaaaaaatgccagtgaaattgttgttgttaatgtttgtgcctgtgttgccct

SEQ ID NO: 29304 - DNA, 1664 bp, Zea Mays
ataaataaataacatgtcccgtttgtatctgttgacttttttctccaattacatttcaatagtttttgggaggaatgtatctcgataggatatgttaaatcagtatctgtactcagctggatgaatatgtcccattactcagctggttgaatatgtctcgaagcacatagatttgggtttgtggacccattctacactagatatatctgggggttactctgcctttacactactatttcttaatagagatagtgctaagacctgtggtgttgccttatctgtttaaaatggcagattcttaaatcttcggtgtgctatgaacttctgcagtatgacattataatgattcccttttagttaaaattccacgacaataatattcgctaagaatttcttggcagcgatggaaatatttatttgtaacatgccaatcaaaagctatggtattgttttcattttattgggttatcttttgcttatttagatcaaggcgatcatggaaaccaaatgttcaggagaagcgtcttttcagctatgttcatgatcagcacattagagtcaaggttaccacacacgcacttcgatgtattgacaaagctggtgggatagatgaatacctcctgaagacaccttacaataaaatggataccgagatggggatagtgtggaaagcaaatatcgaaaagatgtattcagatttggctgaaatagaagtaggcttcttccctcccgaggttgaggctaagattaaaaagggcttagacgaggttcgagctgcgaagagggactttcgcagggaaggaagacgagctttggcaaagcaaagccagctagaagcaagtagtgttggtgatgaccaaacgagtgaagtcatagatacaaagcaagtatttgccgctaaagtctgagcctaaacctatgtgcctgtattgaatgatcaaaggaggcggcaaatcattggatgcacctgggcaaataatggaaggcttgctacttgcgcactaactgtacccccttttcgggagcagcagtgcgcggaacttccaatttgacgccttccgatatattacgtggatcacttgttaaggctgctggaaaatgtttctgatgttccatccgcccgcaaaggctagcttggcgaggacgtcgccgagcgcatctttggttgctgcgaagtatttctcggcctccggggtgctcttgatctttgcggcatggtcaagctgccaaaaacgagaagataagctcacgtgttatttccatgccgaaaggagattccgcagtgagctcgggtccacttacatcgtcgatggtgctgaagagcttgccggtaggaggcccggaggcggaggtcgttctggacgtacggccacgccttcttgtcgatgagtggcttgaggttgatgatgtcctgcgccgacgtcttcaccctcgccaccgcctccgccggcggcagcggctgcaggtagaaccgctccttcaaggggaggtcgaagtccctcgcctggtcagagttcagagtcccggctgtgccatagcaaattaaaagtaggcgcatcagatgaatactgtagttccaaagaaaaaaaaaaagctatgtgaggcgcgggcgggcaggcactcacggagtccaccggagggcggcggcggggctccgatcttga

SEQ ID NO: 29305 - DNA, 2326 bp, Zea Mays
cagccagtacgcaccgaggcggggcaactgctccacactccacagaccacagtcgccgccggctcatctcctccgtgcccggcacacgaactccggcgccgccgacccacaatggaatcccccgacggcagtcatggcacgaatactcggcccactctgcagcggcccaacaaagtgaggaaacaccaagacccatacaacgcgacgtcgcgatcccattgcccatccccagatctcaacccgaacctcccagccgcgccgccctgatggcctacaccacctcgccgtcgacatcgacgtcgacggcagcggcggtggcctgggccttcgctgccgccacctgcgtgaaactcctcctcgtccccacctaccgttccaccgacttcgacgttcaccggtactggctcgccctcacgcacgcgctccccgtgcggcagtggtacaccgacacctcctctcagtggacgctcgattacccgcccttcttcgcttacttctcccgcctcctctccctccctgcgccgctcgtcgacgccaccctcgtttcaatccccgtgcgtgacgcgacgcccttcgcgcatctcatctacctccgcctcactgttgctttctccgacctcctcctcctcggatccgtcctcttactggcgagggacgcgcagcggaaacagcggccgttcctcgctctcgctcttgtcgtatggtcgccggcgctgttagctgtcgaccacgtccactttcagtacaatggattcctcattgggttgctgctgctttcgctgcacttcctcgagcaggggtgggatcttattgggggagtcgtgttcgcatgcttgctgtgctcgaagcacctgttcctcgtggcagcgccggtgtactttatgtatttgttccggcattattgctgtggccggggtgtcgtgaaggggctgggaaggctcgtgctcatgggttctggagtggctgctgtttttgccgcagcatttgtgcccttcgtgtactatggtcagatgcaacaactaattagccgattgtttccctttgggcgaggcctatgccatgcttactgggcgccaaacttttggcttcgtttactgggggacttgttggtgattcgtctccttttgctgttcttccaaaggtcaccccaattgctacattcttattggtcattcttgccatggctccttgccttatcaaagcattctctaatcctcaaccaaagcatattattagatgggtctcgtatgcatgcacatgtgggtttatgtttggatggcatgtacatgagaaggcatcacttcatttcactatcccacttgccctaatcgccatggatagcttgaacgatgccaggcattactttttgttgtccatagtttcatgctactctctattcccgttgctgtttgagaaccaagagtacctgataaaggtgctgctgctgctgacctacgctgccctcatgtgggtaggctttacggtccattttgctgcaaagtctgacctggaaggaaagaaaataagtcggtcaggcagcacagtgaagaagaatggcatcattggatggattggtttaagctatcttttgggaattgcaggcatagaattatggtctcaagtatttcaccatcatgtattcggcgataggctccccttcctacctcttataatggtgtcattctattgtggccttggaatgatgtactcctgggtgtggcagcttgtacatatagtccgacacacatgatttgattaccggtcatcagtggaagcattctcttgcctttcttgggttgaggctaatcgcgatgacaatgctgcctggaccgatgcagcggccaacacagtcatgtctgggcacagcattttctttttagctgtcgaagtcattgtctgtgtgcaagaaatttttagagatgtgtgaccgtgttatgatgtaattaatgtcagtttatataagtaacagaaaatctgcttgtatcaacccgcgcttcatgcgtgccgctcttttccccatctcaataacatctggcttctgcatcgagtaactgagtgtgtgtatgatatatgaacgattctattttctaggaaggaaagacatcaaatgtgatgtataatctgcttgttatctttctgcgtacatgcctattacgtctggcagatgatgcgaatatatcaacgattctattttcgactcgcctgctgatgatgctgatggcgcacgacaaatggggctcgtagttgcggccagccagcaagtttagaattgactgaattgaaatggaaaggaaaaccagggacgccgggacagaaaggaattggg

SEQ ID NO: 29306 - DNA, 1003 bp, Zea Mays
taggtggaaaacctggtacatcaacacacattgctggggtacaggatgatagggctctctacctagatccccatgaagtttagatggtaatagaataaacatagaaggcgctttcagtttgccgtgttccgcaaggaagagagctagttatagatctttctgagtgtacagtttatttggaggggagaaggataaagatgagaatggcgatgaagcgccatcgaaagtattggcaaatattaagtggcctgaaacactcgagactgattttatctacagtgctttatcatttgggacttcaattaatccacagttcattgcaagctttgcttctgctgctggtaaacgtcctcatcaagatttcgactctcaagaatctgatccagagtggggttggtggatagcaaaccatgagctgaagaagccatcaattagtctgttgtttccaacaatcatcctcctcagtcgccgccatcaacagcagcagcagcgatgctaaatagtagtggtggatctggttctaactactctggtggcgagatcctacctccaccatttttttatctttattatctgtgattctgcaatccacatgtttgattttttacttagtttctctttgagaccggtcgccatgtttggttagcacatctagaatgcattacaattggaggcaatagctgttcactatccactataacctgaaagcttagctgttcaactgagctttctgattcttccatttttttccattcaagtatatgatattcttgtgtgctattcaatattacaaataacaaatttgcatatgagaataattaagtaaatttggccacctaatcagtaggattgtttggttggaggaatttttgtagcatgtgaaacttgagctaattagaaagcaaccactaccttctcttcagcatgaaaaaatagcttagccatttcttagagttaagcccttagccacttgctggccttatcgtctggaagaagaaatggt

SEQ ID NO: 29307 - DNA, 4576 bp, Zea Mays
gaaagagaggaaagctacgcctgagtcggggaacgcctacgaagcagacaagctaggttttactgcttcattgagcacaaagatccgctgacctcttgctcttgatgattggatcagtggtttcaggcttcggggggttcgatcagatgttgtatgaataatagcaggattgcttgagagactatagtttgggtactgtttgcttctgtatttactggtacggtttcctactgatctgcggctgcgcaggaaggcattctcttttttgccgtaccatggatgcaccggatgttcaacagagcatgggatataaggagtccaggggtggtatgcctaagtttttccatgcccttggaccagcactcctgatttcaatgggttacattgatctcgggaagtgggtggcagccgttgaagctggttcttgttttggattcgacctggtgttgctggctctccttttcaatttcactgccattgtatgtcagtaccttgctgcttgcattggcactgtcacagggaagaatcttgcagagatatgccaccaagagtacaaccagccaacatgtatattccttggtgttcaagctggattgtctttgttgacgtcagagctgactatgatttttggcatagcactcggattcaacctcctgtttgaatatgatgatctcatcacagggatatgctttgcaacagtgatggaagggacaataaatgcctgcatagcaggatttgcacttcttagttatgtgcttggcttattggttagccagccacaaattcctctcacgatgaatgtaatattccccaagatcagtggtgagagtgcttactctctgatggcgcttcttggtgcaaacataatggcacacaacttctacattcattcatcagttgtccagggtcagaaaaagtcatctgcagttggtcttggagccttatttcacgaccaccttttttcaatattgttcatttttactggaatctttatggtgaactatgttctaatgaactctgcagcagcggaatctactaatactcttctcattaccttccaagatgttgtagagctaatgaatcagatatttgtaaaccctctggcaccaactatatttttagtggttcttctcttctccagccacatcatctcgctgacatctgctatcggtagccaagtgatttcacaccatttattcggtataaaccttcctctttctggacatcgtctcctactgaaggtttttgccatagttcctactctgtactgggcgaaagttgcaggagctgaagggatataccaattattaattatatgccagattattcaagccatgcttcttccatcttcagtcgtcccactttttcgtgttgcttcatcaagatcaataatgggagcccatagagtgtctttgcatctggagatactggtttttcttgcatttctccttatgctattttcaaatatcatatttgtggcagaaatgctatttggcgacagtgggtggatgaacaatctgaaaggatatactggaagccctgtggtgctcccatataccgttttagttttagttgcacttatatctgtggctttttcactgtacctggctgttacaccattgagatctggaagtcatgaagctgaatcccatgaatggtctgtgcattctcagagagaactcttgaatacttctcaagaaagggaagatgttaaggtggacaatgttacatatgaggaagatcaaagatcagatgttgtcccttctcccagggatgtgcctgacagccatccggaactggccttggactatattgatacttctgacactgctgtagaatctgatcacgactctcaacaatctactgcttatgcatccactgctcctgaaacctgctcctccccgtcgtttactcgcgaggagtcaaaatcagttgttgcagtcaactggccggagcctttggagaaggttcctacttctactgtgatggaggaaagcacagtagaaaatgtggtctctaggatcacgactgaaagagatgttttagtagaaacagatgttgtctcgggcaaggataaggaagatatccgtactttggagtctgagaagtcaattgttgatagcaccccatatgtgtctgatgacggtccgccatcccttactttcagcaggggaaagggctcagatgcaggaaatggcagtggtagtctctcaaggttatctggtttgggccgtgcagcaaggagacagctagctgctactcttgatgagttctgggggcatctgtttgattaccatggtaagctcactcaagaagctagcaccaaaaagtttggtatcttgcttgggatagaccttagaacacctagcacatctgtaagaacggataaacaagctgctgaaatacttaagagcccactggtgagagactcaatgcggggggcagcttttttgtcaagctcagtggacatgatgtcccctaagaatgaaacgtcgaatttggaacttgcatatgggcttcagaggggacctggcatgggattgtcaagctggtctcagggtatgcagctaccaaatacacagctgcagagctcaagcaatagcctacttgagcagagtgcaagattaaactcaaattttagttcatcttattcagacaacaatcagttctaccaacctgcaacaattcatggataccagctcacatcttacctgaaacagatgaatgccagcccaagcctttactctagcatgccgctggacccacaacggcttccaaaatcatctgtgtctgctgtgccaaactatgctgattccatgatgcatgctcgtaatcataacctgcttgcttcactgggtggtactactacacagcttcctgcaacatcccgcgtaggctcaatgatgcctgaaagatcgtattatgatccttccagcgttgatgggaatgaaaacgctggttcacctgcttactcaaaaaagtaccacagctcacctgatatgtctggaataatcgctgcaagtagagctgcactcttgaatgaagcaaagttgggtgctgccattggaccacagtcatacctcagcaggctggcggcagaaagatctcaatatgcaagctcaacagccaggcccgcggctccattagcatttgacgagctttcacctcctaagctccagagtgatatcttctcggcgcagtcaagcatgagaccaagtgctagatccctttgggctaagcaaccatttgagcaattgttcggcatgtcaagtgcagagctcagtaaaggtgacttcaatcttccaggcagatcaggtggcgtggccaaggatgatttctcttataaggaatctgagacgaagcttcttcagtccctcaggctctgcatcatgaagctccttaagctagagggatcagggtggctgttcaagcaaaatggtggttgtgatgaagatctaatcgaccgagtcgctgcagccgagaagctattgatgcaagggactgccgagaatcaactgctgcttcatggtggtgatctccagcaacattcttccgaccaggccggcatccagtacatgcgcacgcttcccaactgcggggaggactgtgtttggcgcgcgtcactcgtcgttagtttcggtgtctggtgtgtccgccgagtgctggacatgtctctggtggaaagcaggccagaactttggggcaagtatacctatgtccttaaccgtcttcaggggatcttggaccctgcgttctccaagcctcggggtgctctgacaatatgcacctgccttcagaaagacaccagagtgcgcaatagcccaccccacagtgggctaacagccatgggcccggtccccacaccgatccggggcgccttcacgaccgcaggcgtggttctggagatgatcaaggacgtggaggctgcggtctcaggccgcaagggcaggagcggcacggcggcgggcgacgtcgccttccccaaggggaaggagaacctggcctccgtgctgaagcggtacaagcggcggctcgccagcaagggccagtagcgcgcgggtgtcagacaggcaggcgatcgcaagcaatgttaggaggagcctgactattgttctccaggggggctgccactggcgccggcctccctgagccctggattttttcgttgcacgacgttcctagggaccggtggttgcccgatggtcgtcttggtcccttccagcaggttttttttttccttccctctttctgttggtttctttttgttggctttgtgatgttttgtaaggggcaactagggtatgtgctcagaaggactcaagatgtacacgcgaagatgtactagtctgctgatgcagcgttgtaaagtccacactctgcaggttaaccctttttggggccgtcaagtgttagtgcgtgccctatgtatgttaatcacccctgcagagaggttgcgaatactgaactactcacagacctgcacctgtcgagatcgtttgtaatatccgacgtcttgttcagaattgttctcactcttttttgcccgttgtgtaatttaccctgaagggacttcaag

SEQ ID NO: 29308 - DNA, 349 bp, Zea Mays
cacaaagccatcggagcgccaccaggagagactcgccgcgagcagaggagtgatctgagggcggccgccgtcggtgaactcttgacgccatcgttggggcttcggtgtggaatttgggtgctgtgctgggcatcaagagcatgttggtggccttggcgggggtcgcggtgcatcgagaacgggcgaatttctcgccgtcgtcgcgtcgccaccgcggttccgcccttcaccgtgggctgctgcacctcctacgtgcacctcggtgagaacgaccctcatcgcttcgtactgttatcctctacatgtagcatagggtggattaggggatagccgtggagatcgccgtagc

SEQ ID NO: 29309 - DNA, 2295 bp, Zea Mays
atggctgcggcggaggcgcggcgccggtcagcggtctgggccctgctgccgctgctgctgcggctgctccacccggtcgcgctcgtgctggccaacaccgaaggttggccctaccctgctctttttaaggctgaaatgccctggtcagcctgaagaggaaatctctcagagaaacaaagagtcttcaaaatggtgaaagggctcctcttcttggatcgactgcagcagttagatctgcacatgtatatctttgtttaattatcgtctccgtattgtaagattaatttgagcttccattctacttttgctccacatatgaaacattaaaagatactctaattatgctatttaactccaagggtggaggtggaatgggtgattataaccacctgcaggttgtgtacatatctttagtacatatccattatgctatttaactccgaaaggagacaatatgcatcagtttcaacaactttgttgtttccttttcatgctgtcttataggatggcattttctgctcaatttgtccgttgctgatttcagtcgggtaatgttctttctgcacaatgacttttgcttgcaaagtcgagtttggcattatgctttgtgtagatgtatctgagaattgcatgactgcatacccttaacatgaaatttcatttttagagattagattagattagatatgtcgctgatggaagtccaactaatagcgaactgaagaccgccgaccttgtgtctacacccgcacattctgttgcatctatacctccttctacaccagcacttcatgttgctcctgcacttttgtctacccctgtcagatgctcatctccatttatcacgccaccatattgttcctcaggtatgcaagcaatttttatttttgatctttctccttgttagcttgattgatctttctccagtatttatttgtgggcttggttaatctaggttccatttagttgttgaattagttctaaaatcatagtggaaccaaaataatgtgtggatatttgcaaacgagtttctcttgaagtcatggtgtgaggaaaaaagttgattgactggcatgagggtggatacttgactgttgatttaccaatgtctcggggagaagttgtcattgggggtccaaatgtaactaaaggctatttcaaggatgaagctaaaacaaatgatgattgtgagcccatatatggagaacattataatcaatactgatcctttccataattactgtgttgcgcttgtggcagctgcacaaattgagctgtaaagctaggcttcccaacaaggagttaaaacaacaattcctcaaatttgtgctagaagcaagaggctgttaaagaagtgctctttagcaaaggtttcgtcattcttgcctaccgctgtccctttgcttcagaatacggtgaaacagaagtccttcattggctcttctcatcttggctcacatgcagtacttgaataccagtttcttcctgagcagccaagtgatgcatatgagaggggaagccagttgcgcttctatgatgctctagcagaagtgttaaactcaagggtagattcgttttctataggatcacactttacccatgtagttgagcaggcacctagctatacatttcacagtcaatcatctggttctagctgtttgtcaaatattattgctagcatggctcaaatccaaatattattgctagcatggctcaaatccacggtcaaaaattggcatccctcaagttgtcagatttgaaagctccctcgcatcccctaaaagattgggttatcatgatgaagaacatgtcacgtggacagaaaaacacaagaactatatttatggatatactatttttttcttcttttgtattattatattcatatccttttttacctttatattattattttttatatatgttgtatttgtctaatattacttcatcataatgaggaagctaagattgctagggaggttgaggctcatgaaaagagaattaaaaaggagcttgagagttgagaagcaaggtctactaaatagaaagaaagaagaacaaatgtagagggaaatggagagacatgatcacgagagatgtaatgaagagaggttcatgcgtgaaaggcaaaggaaagaagaaaattccattagcaacagagacgtatacttataactattatggtagataaaaaatgttacaatgtctctcttctatagaacgaaactgggatatcattcattgatatatgttcgattttattcaataattattatataattgtgcaccgtcgca

SEQ ID NO: 29310 - DNA, 1564 bp, Zea Mays
tcaatctcgttataatatcactgcaacttgcagttgggagcatcaccccagaacttatgaagttcctaataaggcgagatgtttacagatgtcgttggaagcccatactatgttgcacctgaggttctgctaaaatactatggccgtgaggttgatgtctggagtgctggtgtcataatctatatcctgttgagtggagtccctccattctgggatgaaagtgaacaaggaatatttgaacaagttttgaaaggtgacctggacttttcgtcggagccctggcctagcatctcagagagtgcaaaggatttggttaggaaaatgcttattcgtgatccaaaaaagagattgactgcccatgaagccttatgtcacccttgggtgtgtgttgatggagttgctcctgacaagcctcttgattccgctgttctaagccggttgaaacaattttctgcaatgaataaactaaagaaaatggcccttagggttattgctgagagcttatctgaggaagaaatcgcggggttaaaagaaatgttcaaaatgattgacagtgacaacagtggtcatatcacattggaggaactaaaaactggcttgcagagagttggtgctaatttgatggattcggaaatcaatgctctaatggaagctgcagatatcgacaacagtggcacaattgattacggggagttcattgctgcaactttgcatataaacaaagttgaaaaggaggataagctctttgctgctttctcatactttgacaaagacggcagtggttacataactcaagatgagctccaaaaggcatgtgaggagtttggtttaggggatacccgacttgaggacattattggggacatcgatcaggacaatgatggacgaatcgactacaatgagttcgttgcaatgatgcagaaaggagataatcctctggggagaaaggggcatcaaagtaatactagttttggtcttggagatgcacttaagcttcggtaaaataggagcagatgtttaccttcataacgaagttagcattcagagactaagaaaagttgaccaaacaacagccccaaaaccgtgtcccatgcctgtactctggtctccaagcttcagtggtgccctatcaaaattcgggggggtcgttgaagcaacctaggagcgtgaacttttgccggaaagcatcgacctcataaaattaacagtagggtcctcatgctcaacatggcatcttttgatttccctcctttctagttcatacgtagtggcaatgaaaccttgaggccaccgtgtaatttaagtaagcatgagagtaggtgagattgcttttttctgccccctttattcttccattgtgaatcgacgacaggaagagagtgaatcatcctacgtctgcattccaagactcatgtttcagttatgtgcatccgtgttgcataggtgtagttcttagtgcctgtaagaatataatattgtattttaggagtctgaccagtgaaacaattcttttgtgttgattctcctttgttaccaaaatatgatgaatgattactgaaatcgc

SEQ ID NO: 29311 - DNA, 436 bp, Zea Mays
gctcgcattcagttaccatcagatgtaatcctatcgatctgttcgccgatcaacgactcacacacgtcgtcttccccatgaccacacacgggatgatgcatgagcgtcccacggcgtgacctcgtcggcgatcacccacatctacaccgattgccccaaccacaaaatagagcggtcctacatgaagcgaaaaacaaggcaaaataagggagaagtagctcactgcaggtggaggcagaaatagagctacccacgaggcgaggtggaccgacagccgtaccccaacatcagcgacgaggaattgtgcagcgtgtggccacaaccctggcctggctagacgtcgataacgagtggtgtgcgtcgaagatggcacaacgagtagtaaggaaggagctttggcggggaaaaaaggccgcttcggaaatctggagaggag

SEQ ID NO: 29312 - DNA, 4299 bp, Zea Mays
ccggcaaaggcacccggtggccgcgtccagcgcctaccgtttccgggggggctcctcgcctcctcttcccccgtccacccattctcctggccgctcttccccttcgtcgtcgcactccgctagctcacctcctcgtccccatataaaccatatccctctccgggccccgcgcagccgccggcgacaagcgcgcaggagcagcagttgtcgcgcctcactgatggcgaccgccgtggcgtcgcagccgtgccaccttcccctcagcgccggcggagatcccaggtgcgcggccagcacttcgaatgttcatactctggagaaagtatatggtttcagattcatatgcagaagcattgttgatgtaaagactcacaaattccactcccgcatttcaaagaggaagtgctacttgaggaactcactgtcggagtgtgacaggaccatccacagtggtagatggttggagtttcggagacacaagggagtcttccagagaactagaaggatggttcacattattccattggcttctgatggtgatggcaaccatatatctgttaatggagctctgcaagttggttctacaagcaacattgatgaaataaagttgaaattgaataaagcattgcagagtgaagatatcagcaatggactcgtccagtcgatacatgatgctgcaagatctattgagttggctctcatagagcacagcaaattgccaaagagctcttggtttccaaagacatggctaggcgttgagaacaatgcttggataaaatcactgtcttaccaggctgctgtagactcattgttgaaagcagttatcgatgtttcatctcgtgggaatgacagagatagagatattaatgtgtttgttcaaaggagtttgtcccgcctgctcaccccccttgagagtgttatcaagaatgaattatctaagagggaacctgcattgtatgaatggtattcatccgatcaaaatcctttggtggtgagacaatttgtaaacatttttgaaaatgatccaatgttttactctgctacagcaatatgccttgaaggcgagccgatgaatactagtgaaagtgatctttctctgcttatgctaggtttgatctgtcttgctgcaatcacaaagtttggatcagcaaaagtttcttgtcagcaattctcttcaatggtgcctgatattattggtcgattcatggatatgcttcttgagtttgcccctctaagtaaagcatataacttggcgaaagatattggtcttcggagagaatttttgtataattttggtcctcgtgctgctgttcctaaacttggcaatgaccatggacttgaaatatcattttggattgaactggtgcagaagcaattactctgggctcttgatcgtgaaaagatatggtcaagactgacaacaagtgaaagcattgaggttctggaaaaggatcttgcaatatttggtttttttgttgctttgggtagaagcacacaaggatatttgtctttcaagggtttgactgatttggatgattcactgaatggtattgtaaggtatcttatcggtgggagtgtactatattatccacagctgtcctcgattagttcatatcaactgtatgtggaggtagtctgtgaagagctcgagtggcttcctttttacaatgatgatgttttaagtgcaaaaactgatactgaaggtagagaagaagtgcctaaaggagaagtcatatcaagagtcctaaatgtgtgctcttactggatgactagttttacaaagtacagctcatggcttgagaacccttcaaatgtgaaggctgcaaagttcctttctaagggacatgtcatgttgagtgactgcatgaaggagcttgacatatcaagtggcttcctagaacctgaagaagaattggatactggaacagaattagcttcctttgacaagtcgcttgaaaatgttgaagaagctctggttaagttagaaaatttgcttcaagaattacatgtttccagttcgcactctggtaaggaggatctgaaggctgcatgctctgatcttgaaatgataagaagactgaagaaagaagctgagcttcttgaggcatcctttctagcaaaagcagaatatctggaggccgatgcaagtagcggatcactatctcctgcagaggaaggacctgtaaagacaagtagcaggacgaacgatacatcagcaccacaaaaaacaggaagcagggtggataataaacgtcgcccattttgggacttctttggtcggtctttgaaagttgatccagctcttgcagatcaggatctgatcactgtcgccaatgtggagaaggaaggcatggagtcaaatgacatcctccgcttcgaacagttaagacgtgagctgattgagttagaaaagagagtgcagaagagtgcggatgaagctcaaaaggaggaggagatggttgtcgcagaaaaaacaactgcaccatcgcctggatcatcagtttcttctcgtcagactaccaagaaagaaaatgtcataactaaatcagtggagaaggtcaaagagactacaacgactgtgttgcaggggacacaactattagcaattgatacaggagctgctatgggtttgctaaaaagagctcttattggggatgaactaactcagaaggaaaagcaggctcttcaaagaacattgacagatttggcgtctgtcgttcctataggaatactcatgcttttgccacttaccgccgttggtcatgctgctattttggctttcatccagagatatgtgccatcgatgatcccgtccacatatgcccccggtaggttggatctccttaggcagattgagaaggttaaggaaatggaagttgctgaaggcagcagtgaagatatattggaggaactgaacaaatgaaataagctgggcatgtacagatggacatgattatactgcttagcttacggtctttcctgtaaagttgttttggaacaagacatttgagggggtttgttttatctaaagattctttgaatggcatacccgctggaaacagaagtgcaaggccctaggaataagtaaccaatcattgtgtcgacaaatgttccacgtctgcaggctggtgtatacataaaacatactccacattatacattacatgggcggctcacggtgcccttcaacatagtagaggatgaatgtccaagttcctcctggacagtgttctgtgtagggtagtggttttgatagaggattgtatatctagttggtatgttggtgatcacctttgttttgttttttaggaaccaagcctactacatgcattattgtctgtacccaaatgccaagttcagtgatctcctacgggattgagtggtgcgggcattttctaataataagccaagcccgtgagcaagatgtaggcgtgaacagtgttcgtcagtcgccgccaccgtctcccctcctgatccaatccaatggcgcgcctccacctcgtagccgtggcaatgggcttgctcttggccttgacgacggcgcaggcaccgggcgcgtccacgatgcccgcgcccatggcgcagcctccggcgacctcggcgcctcctcgtcccgcgccatccccgacccagaagaccgctccagctccggcgcccaatgccacggtacccgcccccgcctcgccgccggcgccgagctctatcgggcagacgccgaccgaggcgccgtcctcccctccgccgcccagcgccgcgtccagcgttgcctccgccttgtacgtggccgccgctatggcggctgtcgtgtttttcttctgaggtcggtactcggcgccgatggatccgccgcctatggtatggtacggtgcggtgtggatttgacacgatggctcccgctaccgctggtcgagtttgcttattaggatactagtagttaattaatagttgggttgatcagatcagatctagcgtttttgttgagtggggatattatttcttctacggatctgcacactagggttatgtcactatggttgccattgttattagggaaggtgcaaacttctaatttgaatcacatgatgttgatccaagggacgcataagggacgccaagcttattaaaacgataaaacgatggaacgctcatgggtgaaattttgacttttaaacgtttaaactttgtttaaacatagttttaaacaacataggaaaaataccaatatatcataatttcagacaataatatgaagttaaatactccctccgtcccaggatataaggcgtaactactttttat

SEQ ID NO: 29313 - DNA, 1399 bp, Zea Mays
gttccggagagacgcggccgcatgggtccaccaccaaagccttgggagcgatctggaactgaaggaacttcaggtccagcacctttcaagcccccatctggtggaagcaccagtgatgttgttgaagcttctggtaccgctaaacccagcgaaaatgttactgcgatggaggggaatgccgctcctaatgtaaatagcactgtttcaaggcctatgccacagcggccttggcagcagacaggttatggaaacacctatggagggtatggtggatccaacatgtatagttcatatggtggatttggcaacacttatggtaccggtggactcggaaatagcatgtactcgagttacggaggaggttatggtggtggcatgtacggcggtggcatgtatggaggaggcatgtatggtgggatgggaggttatggtggttacggcatgggcggaatgggtggtatgggcatgggtccatacggtaatcaggatccaaattcgatgggccctcctgcatccccgccaggtttctgggtgtccttcctccgagtggtattggtcacaaccacttgcagtgccattacatttacaaaatgtcgaatcacctcactttttatttccagaaggacccaaatgcatggtgttgtcaatttcttcggacgaatctcattccttgttgaacagaacactcaggcatcctatttcttcatgacagcaatgctgcagctcttcgaccggtccggtatgctctacggtgagcttgcacggtttgtgctgcgtttgctaggagtgagaagaaagccaaagaaggggggcagcattcaggggccagaagcgctggcgttcgagggacctagccggcagtctaccgaggcaccgaaaacgaacaactgggacaacgtctggggaaactgagatcatgcctatgggtgcaacgagttgaatcatatagaagaagtgcaagggctatgacctatgggagtttgcttgccttttgattcatcaaaaagaagattgcggccagataccgcctttggtggcaacttaggggaagctgtgaagaagaaactgctgggcctctcttgcttttcccagctttgccttgatgtacctgcgagggccatggcccatgacactggtaggttttttttttcatcgcaactgtaaggtttggtgaagaacggtttcacagtgcactgatatatatgtagctgcttgctgctgttgtgatatcagtgtgggtatcgattgtttgtatatctctatctgggtaaatagtgtccgccttcgaaaagaatacatcaaatgtttgtgcaccctttacagcctcgtctaacttggttttgaatttggacttggacttgttgagagtccccaccccatgcaagtgtcgattctgttg

SEQ ID NO: 29314 - DNA, 2042 bp, Zea Mays
gccaaacccccctccccaaaagctcaacccccccgcagtcgggctgtcccataccacctaccccctccatccatttgaatctctccccctccccgatcatcgcaggccgatcgatcggcggctgcggcggcgatggggcggaggaatgacgacatcgactggaagagcgtgtttctgtcctacttctctcatggcgcctcctccgaccccgccgcgacgcgggcgtcgggcgtcgcgatggcggcgtcatcggacgacgacgagcgacggcgggggtctccgggcctccaccaacggtccgaggagccgcgcagcgagctggagcggcgcttcggcaagtgctgccgccccggcgcgcaggttgatggcggggcgcaggcgcagcactgccgagtcacccgtgcggcggccaaggctgctgttggtttgggaccggatgtttcttctgcttctaacgttgtatatgacctcagtccaataaatgatgacaaagaaggggaacatgtccatgacaaaaactattctaagttatctcccaagtttagcgagaagaagaattatggccaggtacccttgagcaaacagaaaagtcaaggccatggtggaaaaaggaaatctataccggtggccaagatttactcaagccaaccaaattcaacaactcatgccattgatttaaaggagcctgatcatcaaagttcacttcccagtaaattctctaagaggaggaagcaacaactccaaaaatcatcttctatttattctcgaaaggttcaagatgtggttctattggatgatgaagatatcgaacctaaggaagaagtaaaacttgagatgtctgacagactgaatgaaccaaagatctactacccatcaagagatgatcaagaagttgtcgagctcaccagatctgatatcagatgtcttgatcctgaagtatttttgtcgtcacaggtgatcaatttctacatcaagtacatcaaaatgaccagattgtgcgatgaaaatttcagagacaaattctacatatttaacacatacttctatggaaagcttgaggaagcattgcgtcggccgcgtgacttcccaaagttgagaaggtggtcgaaaggtgtcaatatattcaataacgcatacatcatcttgccgatccatgggaaggagcactggagcttggtaatcatttgccttcctccaaaagagaggacttcttcagaaccgatcattatacttcatctggactccttaggcatgcatcccagcactaagatcttgaacacggttgggaggtaccttgaaaaggagtggcgcttcttatccgttgcatggccgtgtcttctgaatgatatacgcaaggaagctgtccaggttccgcagcagaacaatgcgtacgactgcggtatcttcatgctgtattacattgaacagtttataaagaaggcaccggcaaggttcaccaccgataaacttggcatgtttaatcgcagttggttcaagcctgaagaagcatccggtctaaggcagagaataagagagctactgctgcaagagtttggaagtgccaggccggatgaagctgcatcagaggcagatgttgctgctaagagaaaagaaggcatcagtgctgcagagtggaacgaggaggaggaggaggtccgtggtagtagcatgccagtcccggatgcagtttgtgagatcactgggaccaaggtgtggatcaagagggtctacagacgaacagggtggccacctggaaattggtgctggagcagtggcggatccagcagggatgcacgcagggcgttcatagaacaattctctcgaaagtagttagaactaagagcacagatgttggtttgctatcctgaggcgcctgttgttgacactggctagacgatgcttccaggtcggtcgggcacctgcagttgtcatcaacctctcgataaaccgataactttagcaagtgctgcatatactcctgcaagtgctgcattttgttttttataatggaaacaagagttccagcttttcgcacattgtca

SEQ ID NO: 29315 - DNA, 678 bp, Zea Mays
agggcaacttgatcaatgctgaggggcgagtttagcctgtgtcgactctacaccaaatctgggagcctgagacagtttgaccggcggccgctcgcagctacgggaggtgtcgtcgtccctggcgaggacccggcgggtccattcacggcagtggccgcgtcgccgccggacgatgatgatggctccggcagctccatgcaacagcagcagcagcagctgacggggggaggtgccaacaacgatccatacggtgacggcgtggtgacggagagggaagacgcccacgatcctttcggtgacgacgtggccatgttggatgcccttttatactggcctggagactagaagtcgtgcacttgcaagactactcatttcctcaactcaaaacgtgctccaaatttggagaggcggtagacgatatgtatcaagtagtagctgatggtttcaatttaccacttaccattttatttaatttggtgcaggaacaagctaggctaattcaggccgcctgaccgtttggacatgtaatcgttcgttgcattattaacagtttacagttttgcgatgtttgcacttgttggttttgggggcatcctattgcagatttcccgttggcctgtgtgctagtacacggctgatatgtgtcatgtatgtcaattgataataagtgattattag

SEQ ID NO: 29316 - DNA, 615 bp, Zea Mays
ctcgtgctgggcaaacgagctcaacaaacccgacgcgaatctcgtggagtcgcgcccgtaaagctaaccgacccattccctggccctatatgagtgtccgcaaatcgccccttgaataccgagcggagaatccagtcgccatcgagagacccaaggaacaaggacgccgccgcgcggaaaactcgtcgtcgccgccaatcctcgctcccatcgccaatggggcctgggggtcaacccagggggcttcgtcccatcgtcggggttgtgcccgtggccaagttgggggggaaacgaccattatggcgagcccaattgcacaccgaagattgtaatccacatcgaatccgcccttgacgcggtcagagatctctgcgcccctattctccgcgcgaggttacgagccacctgaggagcaagttggtacctggaatctcaagtcccaggcaagttgtgcccttgatcacttctttttacccaatcatgttctgattaatcataatgatctgcatagtttaattttgatgggacccaataggttaccctagtttgactatctttataccttgtttaccactgaattcttggatagtacctgttattgctatatggggtttt

SEQ ID NO: 29317 - DNA, 1574 bp, Zea Mays
gattggtattggctggccaccgcctgtagccctctcctgatcttcctctcgcctccctcctctgcctctgcgcttcacttcaattctcctcctcgccgagcgggagcgccgagagagatgcgaccgcgatgcccccactcgtcccctcccagctcctaccaccaatcccaaccctgatcctacccgcgccacctcgcctctcctgccgccgccgccgccacccgcccgcaccgctcgccgcgtcgtcgtcctcctccgcgtccccgcactccaggcaaccataccgccgccgccgccttgaagcccagcggcagacaccgacgcctgcgccgcgcccgccctcccagccaaagccgcctccgcgccacgcaaatgccaccgcgtcccgcgctcggggccaggaggagctggaggcggcgatttacgacttcatgtgccgctccgccaagccgggagccggaaacagaggagaccaggttcaaatcaggaatcgaggggatgctcaccaggctgcagaaggatagggagcaagcgcggccacctccacggagtagtacccacgacacacgggaacaaagtgatgatgatgctttagctggcaacagtggcgctcctagtcatatagcggctggcggcagacatattcgaagggtacctgagaatggaagtgtccgtggatctcattatcaaaatggaataatagagggcaacaacaccttagagagttcgagcaatgatgcatggaaaacatggacccttggcaagggtggtttatctcattttgaagtggctgaggtcctacctactgaaagaagaaaattatcccaacatggtgacattgcatctgtgcaaaatgatgttcaaaggtcatctaatggtgtggctgtaagtgattatcctagtgatggtgttggcactgaaagagatgagatacattcacgtcttcaaagtctggaattggacctttcttctgctctgaagacattaagatcaagatttgataaagtcttatcacatatgtcaaatagtaatggagcaactgtgctagatgacatctctgatgattgggaacttgaggagacaaaggtaatgcaagctcaggaggagcttagatcaatccgggccaaaatagctgtgttagaagggaagatcgcacttgagataattgaaaggaacaaaataattgaagataaacaaaggaggcttgatgaagttgagaaagcactgaatgagctccgtactgtttgtattatgtgggccaaccctgctacagatgttttgctggttgggtcctttgatggctggacaagccaaagaaagttggaaagatcagaaaacggcatgttttccttaaatctgagactgtaccctggtagatatgagattaagtttatcgttgacggtgtttggaagaatgatccgctgcgacccaccgtgcataacaatgggcatgaaaacaaccttctgcttgtcacttgacttgaagtttgcacccggtagcatttttgtagatcatttgcctagcaccttgtcggtcccccatgagttacattatcgtcgttctaacccccaca

SEQ ID NO: 29318 - DNA, 1929 bp, Zea Mays
atatgtccttattgtaggcgtgcacacccgtgttctgcctctcgacgcctgtctgcccgcgccccccgcttgtgatgcccatctcgtctccccgctgtggcagccgccttcgcgtccgccgcgagatccctccgcgcacgggcgcgtcccccacaaaccgcgctccgtgaaatccgcactcccctcgccgcctccccagcccgcagcctctcctcaacctccctccccaaggagctggcggcggcgcgactgcgtcgggagaggacgcagaggacgccgcgcgggggctgcggcaggagctcgactccgagcaggcctccccggagatggcagccagatccggctattgagccccctaaccgagcggatccaagcaagcatacttgcctatggcaaacaagcagtggacttacacaatgatcgaaatgacagagtatactgttcgtgctatcggtttggaaagaacatgtggaaagctaatctcggatcttgcttccttcaggtacagacaacccttgtttttataggagttgtcagagaattgttttcgtgattaaacatgtgtgtttgtttagtggctggtattgttatcatatacccttgtttttagttctatacatattccttaagcatgagcaaattgggggcatttttagtgaagcaattactggtatgtacatgcaattactggtatgtacatggttaatcaaataatttgcatcatggatgttgttttagtgattaatcactcagaaccgatttcctgatgaactggatacactgtttagtgccagctattatttaagcacaagaagtagtcatatacccttgtttttatgtctgtacataccacctggaaatttacacatggggccattttttagtgaagcaattactaaacctgtatagttctggtggctgctataatttttcctgattaatcagagaattgttttagtgattaaccatgtgtgtttagtggctggtattgttgtcatataccttgtttttaggtctgtacatactacctgagcatgaccacatcagccttatgtttgaacaatttcacacatttacatttgtgaatgtgttgaccgtaagcatcatctttatttaaatcagaaacttggttttacaatgatgtctcattgaagttcttgcttttccttgtttgcaaatctgaaatacccttgtatgttctggcggaaagaagacccaaaggaccttgaacagcaaaatctaaggtttcaacattgcagacacacaagagtccagcatgcgccaacgctcctgcagttgatgcttcttccagtagtttgtgacagattgctcaaagaaaagcaagacagctcgccaatcctagaagtggaaaaaaacaacatagaataattagccagctacagggagtaaaccattaagagaagaaacatcgtaatgccatgtttccaaatgggcacaaagaaacttcaagcacctctagacggaagctgtctgcactgaagatcaggacacgaatatcgcgagctttatcaaggctcgccttgtgcggaaggtgtatttctgtgagatctccaagatgaagcattagggggtcaatcgccccagattttacatgtagctaacttagtagggcacccataatccataatttattctctgtagttgtagcagcgacctagaggtgttattctgtagcacattgtgtaacatgtaggagagagataaacacatatccccattctttctactgaaacaccagaaatagttgctcttgctccataattcattaatgtgaacttctgaagccatgccaaggtcttatattgatcctctgttgtcatattgataaaaatagggtatgtaaaaccttttctcataacagtttaacacatattttatatataagttatcgtaatattacatgtttcc

SEQ ID NO: 29319 - DNA, 711 bp, Zea Mays
ttggtctatatatattcttattttataaacatggataaacatcaataatatttatattacaattgtactttcatcttgacagaaggtgaaaaaagcaggaatgacgcgagagtgattacaagtcagcgtgaatagtatggtgttactgttcatctatttataggcacaagacgcggcctggacaaaattacactcatgtccctgacatttactgttgaccataaggcaaactgtcgaggactaaggagtcttttctcctttaggtcagtttcgtctctcatcatcatcctggtgttaagccgaagctccttcagccacaacttcggagccggtttatccttcctttagaccgcaccttcataccatgcacaccttcatctcaaagccgaagcctcctgtaacagtctgttatactgaaaaatatgttggttaagtttttgaggaccttcggaagaggaaggcccccaacagggcacaacttgccttatacttgagatcccatgtaccaaagttagtcttcagattctcgtgacctcaccgctattcgtagcaatacatacaaatagtcaagaagtacataaaaataacagtacacctaacaagagaacaaacagtgtaagaatattctatgcgatgctacgagagcgtagattcgagaaccactaaaatcggagtttcggttaaagagttatgatttttggaagattttca

SEQ ID NO: 29320 - DNA, 7943 bp, Zea Mays
cgcaactcctgctaccaccaccatcgccgctacagcggcgcatgcagcagccggcacgacgatgggggagcgagacgcgctcccgccgctgccgctcgccctcggtccgccgcatctaatcccgccggcgcccacccgcgacccgcgcgccatcgccttcctccctgacctcgtgggcttccactgggtcgcctacgctgccggctccttccttgtcgtatcccacctcccctccccttgccgggacgacaacaacaacgacagttgctccccgttcttccgccaggtcatcgacctccgcgcccccgtgtccgcagttgcttggtgccgccgcgggagcggagaggtcgccgccgctacagacaattctatacacatattccagcctgcgcccgcctcttctccaggttcgtttggatggctcctgagatggtctatcaccgagacgttcgccatcgttgctgtatcctggaccggctgcggcaatggcattgtggcagttggcgcaggtgtttccatgtgggcaagattggagtcctcctggcagctcgcttggaggtctacaccgcaggtgccgcaagcccttgtctccactacctgttccatgcaaggtcctgtcgcgacagtggcagctcttgctccagccgagggcagtgtgcctgttcttgtgtttctgaacgatgccaggagggggctggagcaagctgagcttgtgcatcctcagcctgtttgtatgatccagtggagatcctgttcgttatacccccatgatctgtctgagatcaggagagagatcctcatgacttgctgctttgatgggactgtccggctatggagtaaggatgaggtgtctaggtcgaagaagcagcgtggtttgctaatatcattcagtgtcattgcagtaatagaggtgaacaacactctgaatggagtcctcggagttgatattattgtgagatggtccatggaatctggcagcgttgtgtcaagggacgaacaaggtagattcaagttgttttcaggtgatttgagggagagccaggttggtaaatgtgagtggcttgtaagtcttggccccgggccttgcattagcttttgggctatccattgtttggatgatgtatttccgccaaggtacccacggattactttatggaaacagagcaaacttcagggctggggggattcctatgttaaatcaggtcctctaaaatctatggaacagtcaatttttgttgaggctgtcatctcaagaaggctatgctctggtccacctgcaacatgttttttgcttcatttgctggtggatgattcgtttgcttggtcaaccgtatccaccaaactgttagctgattctgggaaccatgctttaagtgattctgctaaaaatatcttgtgttgtttgactaaacctgtcaaacaagatggacataagggtagcatcagacaagtgtctgtccatccatatagctgcgaaatagagttagctgtctccatggattcaaacagaatgatatttttctggtctctgtcaactttctcaactctcataccgacaatgcatgcacctatgtatcctctatggaagctgttgtgcaaatttgatttgcgtaacatttctgaagatttcgagtactcatgtttgtgttgggcaccttctgttactcgtgataatagatttcttgttcttggatgggaaagtggagtcgattgtttcgtagttagaattcagaaagaagaggttctttcatgccagaagattttcacaatccccttccttgcagaaagcaatacagaagggccacctgacagcattcatacgataccattagcttctaaatgcagcagctctctttccaccacaaaccaaggggcacatgcatgcttcagcaatgaaatgttttcagcagtggtttatgaaggttcttcagtctttccttctggcctggagggagaatataccacgtgcatttctgtaatgccgctgaataatactgtactgcctatacaacaacatgacccttacagaactgttccaggctatcatattgctactggttgctctgatggcactgtaaaactttggaagatgacttgtgcagaggactctttgcagactaagaaagaaagacacatctgggagctagtaggcatgtttggtgctcatcaaggaccaattgacatagtttcattgtcaggctgtggtagagttattactgttggcagaaatttgaagaaaaatagcacctccattcatatctgggaagcaacaaaaatcaggggagacgggaattttctgctaggagatacactaatgttgcaagaccatattgttggtttagatggactatccttaggtgatggacgatttctacttgcagtttatctagctaatgagttacgtatatattctcataagcacccgtccttccagaatgtactacacactaagaattcaaaagaagagcatctttggagctgtattgtattatcccattctcatcatgatattgttggctttctttggggaccaaaggcaactgttgtgcttgttcatgagaaccatctttcactcttcagttcatggctagtaactggagataatgagtacatgacccagatacattcttgtcctgtagttcatgagatgttgccatgtactaacaattttaacgaagctacttttggtaaactcaagttaccagaaaatttcaacagtggaaacattgatagcaataatgtcctgctaacagaccaacatagccactattctcatggtttatggagcttgctgcacatagctcatagattgagtggaccgttggcatcatatcacccaagagcacttatccagtatctttattcaggtgaatggaaacgtgcggatgctgctctgcaccatcttgttcggtccatgaaagtgagtgaaacttcaaagggcgtgtcaaattacagtacatgccatagtattccagaacttcctttgtctgaatactttgcggcaacagtgtccaacaacatttctaccaaggggtttatgtggggtgagaatagaagtaacacaacttttaatttgttgtcaccttcaacttcatttctttacgaggatggcaatttaggtattaatactacaactagtgcatctgaaaaaccagacattgttgagctccttgacaagagtttcagcaaatatggtataagtgactcagagaaaaatcagatacttgcaatttctgatcttatggctggaatcactgatcagagccattcctctccctacaaaaatcttgacgaagcaggaagaaggttctgggttgctgtgcagttcgaacaattccatgctcttagaagatctgcagattcatccagtaatgaagggtgccgtgttgattctgcttccatagcctgggccttccaatctgattgtcaggatgatctacttaattctgtgcttcctgcagagccaacctggccagagatgcgaaagcttggtataggattatggtatacaaatgtgtcccaactaaggacaaggatggagaagttggcaaggttgcaatatcttaaaagcaaggatcccaaggattgtgctttgctctacatagcattgaacagaataaaagtgttggttggtcttttcaagattagtagagatgaaaaggataaacgtctatatgagtttctgtccagaaacttccaggaagaaaggcacaaggctgctgctctaaaaaatgcttatgtactaatgggaaggcaccaatgggagcttgctatagcttttttcctccttggtgatgatacttcatcagcagtgaatgtttgtgcaaagaaccttcaagatgaacagcttgccattgtaatttgtcggcttattgaaggatctggagggcctctggagcgtaatctcatttctaatgtgctacttccagatgcagttgagagaggagataactggctgtcaagcctgcttgagtggatgttaggaaattattgccagtccgtcaatagaatatttggttgccatccaaagttgcttattgatcaaaatgtgcttgcagacccagaattgggtcattattgtgcaattctctcagcaaaaagtagtttcagaaactctgttggtgaagctgtatctgcaaagttatctaagctttcatttgcagtggctgcatgtgccttgaataagtgcggactacctcttgaagcactagaatgcttgtctactaactcgagcatagatggcaaggatagcataatcgcacatggtgatggagaccacaagattttttatggaatactgagccctgtctctgcttctaagaattggctgtcttcatctgtcattagtggcattgagtccaaccttaaactaactatggcttcaaaatatctatctagccttctgagaaagcactcactctgttcacaattgaacgcaccattatctgaagaaaaggtccttaatgagtacaacaatcatcaaattgaaaaactgacgtgtgatattacaacagtaatctcaatatttgataaaaggttctccctcaaatttgctgatatagctgagaagatcctaatcttttgtagccatgatggtttattgtttctagcgtatgttttgttatggggtactaggtcaccagatgttgcaactgataattatattcttgaatgtcaccctctctgcccaattgattatctgttattgttttcattcaaagagagctgcaagttttttagtcgatatgttgtcctctcctccatgtgttctgttctgaatatggaggacaccaattctactgcatgggcacttaaagagagacataagtacattgtaataagtttgtcaaattacctgaatgtcagcaggttacttcttaaacatgacaaaagtggaaattatattctggatgacaggtcagctatgctggcagttatggatctgtttgagtacattatagagttttctttttcttggttgtattatgacataaaatcattacttatcatgataaatccagtcctagctacttctgttaatggggattcctttcaagtactattagatcaactgatgcatgctatatgccacaaaaatcatgatatatcatcaagtacaggaggaatgccccatgctgcattgagtaaaacacaactgaaaaagagtgtgaattcaaatcttttagcagatgagaagtggcatttgataggcgcttctgtgtgggttcggttgatatctgtgcttgaacatcgtctaagggaattctttgagaaagagggacttgaacatgaagctggtgttagtggttcagaattcaggggtcttatcacttctgttgctgcaaagtttgttatggattccattcattttgtgtcatcttcattagtaccactgcatgcatcgttcttgaggaagaatttaccgatgaattcaagttcaagtttgctcttctggttagagtccaagttgcctcagcaactcccagtcagtgatagctatgatcacctctcgaggatttcacagctttcaaacagtgagaatatggaggcattgtttaatattttgtgggaaatatctgttaatcctgtggatgtttgtaatgcctttgtgagtgaaggagttaattgtttttccttaagcaacacgaatgtcactagatcttggaaggacataagatgtcctgtggttgagtgtgataaaattattactgaaagaagtggagaggaacatgaacacagacttggctccaagagattgggacagggattcgctgaaaaagcctcttataatggtgaagtgttgtatgaaactaaaaggagggagttgatcatacaaaaagagtttcagagcccaagggaaattctaaggagaagcggggagcttcttgagtactgcattttaaccttttcagtggcgcaggcggtatgtcttaactctgtcaatgagaaacaagctgctattgctactaatcgaaagggccttgttttcttcaattggagtgacaagcagcataacaagagtttttcagagtacgtctggtcaggatctgattggccattagatggctgggctggctgtcagtctacacctactccaacttctatctctcctggtgttgatcttggtcggaaaaaagggtcacaacttggttcagttggagcaactacaggtttgagttctttagcaaagccaggaagagatctaactggtggtggagcatttggaattccaggctatgctggtattggggcctctgggtttgggtggggcgaacctgaagaatttgaggatttcattgatcctccagcaacacttgagaacatacattcaagagcattatcccgccatccctcattaccattgtttcttgttggttcaagcaatacacatgtgtatctgtgggagtttggtaaagctagtgctatggctacatatggtgttctacctgctgctaatattccaccgccttatgcactggcctccatatcatctgttcaatttgactgttatggacagcggtttgccactgctgcattagatggtaccatttgtacatggcaagttgaggtgggtggaagaagcaatgtctatcctacagagtcatctatatgctttgacagccacgcctcggatgttgcctatgtgtctgcaagtagatcagttattgcttctgctggatatagttcaaatggttcaaatgttgttatatgggacacactgtctccaccagctacatctcaaacatctatcatgtgtcatgaaggaggagctcggtctatttctgtgtttgatagtgatagaggctatgggtctatctcaccgcttgttgtaactggtgggaaaaatggagatatagctttgcatgattgccgcttcctttctactggaaagtccaagcatcatagagttaccactgagcatggtgtcgaggcatcttccatgcatgacatcaaatctagtacttttggtggtactgacagtgggatggtctggcatataccaaaggctcatctaggtagtgtcacaaaggtaacgaccatcccaaataccagcttgttcttaaccggaagcaaagatggagatgtgaaactttgggatgctaaaaactcccagctagtctttcactggacaaagatgcatgaacggcacaccttttttcaaccaacctccaggggctttggcggtgttgttagagctgctgtaacagatctccaggtgttgcctaatggtttcgtttcatgtggaggtgatggttctgtgaagcttgttcagataaaagatgatctcgctgcagcatatcagcgttaaaacaagcaaagagggaagaagacatgctagaaaatgcgatggatgcagttggtcacttgatatcattctattttgctttgctcattatacttttgagatgctttactcctttcaggggtggtatagcaaggaggaagctatgatttaagagcactagagcagacatctaggcaatttgacatcagcatttatacgtcgagtttttatacgagcctggtttgtggctagtcaaactgccctcagtggtttttttgaggcctgaattttcgcactttggacagggcaatgcggaccataattttttgtacatctgtacagtcaaatatcttgttttgttggccaggatgttgatggagggtgtaaagttgtaagctagaagtatggagataccaagctacaatacctttttgttacttaatacaaaagtgctgggtttagggttaatgtacaatggcagagcaaatggaccaaacaaatattgtatttggtacgggagtatgtatgcggtttgtcaaggggaccgcagtagttcatcattcaaaacaatattttgcattattttgtactgtagatttcactgtttctatagtgaagtttgaatatgagaatgtagatgagtaaattgctagagata

SEQ ID NO: 29321 - DNA, 3234 bp, Zea Mays
atggcggcccacgaggccacagcacgcctgcagcctgcaggctgcaacgtcgcggtctaccgcacgaatctcgaagcgtcccgcacccacatttgcccatcgccagctatatcaccacgaccacgggactcctgtcgcaggttccagtattccaccacgcggcgtcgcctgccgaaccccgaaccttctcgaggtcgaggcccctcccctttcgccaggagaaaacaatgagcaggcgcaacagccgtaccatctatgtaggcaatctccctggggacatccgtgagagggaggttgaggatctcttctacaagtatggccgtattttggatattgacttgaaaatacctccgagacctcctggatacgcattcgttgagtttgaggatccacgtgatgctgatgatgcaatttatggccgtgatgggtataactttgatggctacaggttgagggttgaattagctcatggtggcagaggccagtcttattcttatgatcgttcaagcagctatagcagtgcatgccgtggaggtgtttctaggcgctctgatttccgtgttatggtcactggtttaccctcatcggcatcgtggcaagatctgaaggaccacatgcggcgcgctggtgatgtctgtttctctgatgtataccgtgaggctggagaaactattggaattgtggattatacaaattatgacgatatgaaatacgcgattaggaagcttgatgactcacagttcaggaatgcattttcaagagcatatatcagggtgagggagtatgatgctagatcacgaagcagaagccgtagccactcgtactctagaagccccagctacagcaggagcaggagtccaaaatctgtttctcagtcaccctcatctgtggatgaaaggtatgtgaatctatgtcatttagaaatgtacatttgtgaaactgagagtgctaatattgttcgaaggaacccgattgtcaaataaatggtgaaagcaatcagatcttgttgtgaatcatcattgatgtattctgcactacacctatggcgctaaaaatatttgaatatgacatgtcatcattttgtatacaagcttaaagcagggccatggtggatgtaacaactgataggagattgcacattaacttaattatttcctactatctgatacactttcgtcaaacaacgaaatgcctttccagagctgagactgccttatacaaacttctacaaatacagcttaagtttttaagtgtgtgctctaccctaaccttatagaacatgctgaaggtttggctcacaaacttctagataaatctttcaatgtcgtagcagggagtattagatccatcagaagcttgccaaattgagagggtatataaagaggtgttaccagaactttccttctttcaaaacaatagttttgtcgccttttcctgtcgtatcagtcgtctacatagcatgccaaaacccctctgtttctttttcctcatggaaaagcttcagtccccttcttatttatcaacttcatacaacattaacccatagttatcatggcagcgcgtaggcgctgactaggcatccaagcggtcggcagtggatgccatgcctcgtcgcctcgcctgaacccagttaggcgatggtaagacatctcctagaagcccacctagctgttgaactaggctttaatgggtctgccttgtgcactatacgcccagtttcctcttctttcctctgctgccaccaccgttagagccgctagatcgctcacgccggctgcctgccgcgtgcctgtgccgcgcgcccgcgtggcctacacagtgcaccgcccacaagtcgcctacaccagcgttgctcgtgcgtcgtgccgcctgagctcgaccatggatgcttgctacttgctggatttatatttatttgctagtttttcatatatcatgtgatatatgactatatgttgcatttttgctgctggagaaaagggcgtcttggcagcacctaggcggttgtctagaacctaggcgtctaggtgaccggctggcgagaccgtggcgccatgataaccatgcattagcctagagctcttttttctgagttgtaacaacatattttcgtgttttatattttaaacgtagaaaaagactacagataaaattcaccccagattttaatgataataacaatatatttcaaaagatttttttctgttttttgttaaagcaagaggaaaaacaaagtaaggtgccagaattttaacttgatatactttggaacacctactaaaatcatctgtgttatgttatttttttgatgtattgatatctctttaaattagtataactttttgtgttgtactgatttctctttaaaatagtatgacataaatttgctctgtggttcaatgattaaacataccgagcttgttggctaacctccattgttcaaggtttgcttttgtttttcctagatttggccatgcggcgatctgggggctgcattgatataatactggatgttttgagaatcggagtggatggtttgggacttcggatagtagagatggattgtgatgcatgtatgacaagtgggctacaatcagtcctaggagcaagataggctgacaatcgctatcaagatctcgatccccaatttcttctccttctcatgcaagatatgcgacaagccctaggagcagaagcgcatcccgttctcggtctcctgtgagatccgattgaactttgagagcccttgaagcagtgagcagccccagggagaagaaaggaacttgagagtatgccgtgccatcacaatggtccgagtgattatgctgttgccactgctccctcacatttaagaggtttcctcttatttagacggagcatttaattaacattatcttgctaaagagagacttatgcgtagtctacttgtgtactcgttcgtttgtcctcatgttcttggcttcaggaactctggttttttatcattgtacccatagtaaaacctagatgtagttggggtatgccgtatgcgtctatattcggttggtcgaatgtaaatctggatgcatatatgcatctgtttggtttcatttaggcctttccttggtttcgtgattaatgacaacataagcttattgctgtgatcaaagtatattttgtagaggtaattaaagctagtcacacaataatggagattgcttagacaacgtatggtttttatgcctctaattatgg

SEQ ID NO: 29322 - DNA, 2026 bp, Zea Mays
gtctgcgagccgactagtcccggcacccgactccccactcctgaccggagtagccagctcccagacattgacgagacataaacccacttgcccacgcgcacggcaagccggcaaggccacgcgagaaattccatctcgagcagagcgcagcaacacgtgcgcggaggtcacagctccgatcgacaagccggccaagcagccacacatgcctcctcacatggcggcgatctcgcaccggatcgcaggatccggcccgcgcgtcgccgttgtggcgccgcctcgcccgcgggggcgcgctgccgtggtcgcgggtgctgcggcgaagggcgcacatcgggagcggacgctggagggcgcgagtgacgacctgagggccgccgcggctcagtgtctggactgggctcccgcgcggcgtcgggtgcgggccgccttcgcgcccgtgctccccaccctcgaccactgccttttcaagatggctcacaatgaaatccagatggaagaggtacgggcgtgatgggatttctgaattgaccttgcattccattttgttcaacgttcaagtagttccctcgctgaaatattgtggcacaagcaaactttctgttggaaaatctttaccatgtccctgtttgtttgaactaaaaaggctttccatcttgagtagccaatagtagattttcgaagatatttttagctttctggactcaagaacctcatgaaagctcagaaaagtgagcttttaagctttccgtataaactcaggttcttcgggattctggcttttcgaaagctagatgaaaaagcctattgacttttcacactaaaaagctgtccagaagctcatacaaacagggctgattcaagagcttctttccttgctttgagtattgatagatactgctagttactgtagaattacgagaccaattcaaagggcgttgaaatattctggaagagttggctgccaagagagggcactgcaactaaggctgcacttttcttctgccatggatatggggatacctgcactttcttttttgaagggattgctaagaggatagcagctgctggttatgcagtttatgctatggattatcctggttttggcatgtcatatggtctccatggctatattgcaagctttgatggaatggtggaccatgtcattgaacagtatgcacgaataagaggcatgaaagaagtgtgtgagctgccacactttctcttggggcagtcaatgggaggtgcagttgccctgaaagtacacttgaagcaacaacaagaatgggatggtgtgcttcttgtcgcacctatgtgcaagatttcagaagatgtaacaccacctgcacctgtattgaaggcactgagcatattgtcatgtcttcttcctgaggcgaagttatttccgcagaaagatataggagatttggcatttagagatccaaggaaaaggaaagtagctgagtacaatgccatctcatattctgaccaaatgagattaagaacagcagttgaacttttaaaagccacgaaggacattgaatcacagttggaaaagatctcctctccattgctgattcttcacggagccgcagacatggtaaccgatcctcaggtcagcaaattcctttatgagaaagccagcacgaaggacaagaccctcaagctctatgaaggcagctaccattcaatcttagagggagaaccagatgaccggatttcaactgccattaacgacatcatttcatggctagattcacactgttaaatacccctttgtctatagcctctcatgtcctcatccattgttttggatttatagttccttattagagtaccatgggtctctagtgctttaaattttgccatggtgtgcagagataagtatctctcgaattaattagttgtgcttgctatcttgacactgttggttttatgttaattgcggacaccgcattcaatagcttggatcctgtcaacaagtatcagcattaccaggtccgattatcaaacaaaacaaaatgac

SEQ ID NO: 29323 - DNA, 1953 bp, Zea Mays
cagccctcctgcgttatccgagaaaaagaaggtcctcggacaatggttggaattgcaacatttgattctgctattcacttctacagtcttaaacgtgctcagcagcagcctttgatgctcatcgttcctgatgttcaagatgtatatacacctcttcagactgatcttattctcccagtttctgagtgccgggacaatctggagcagttgctagaaagtatcccaagcatgtttgagaataatagggttgctgattctgcttttggagcagctatgaaggctggcttcctggcgatgaaatctaccggcggaaaacttctggttttccaatcagtgctgccatcacttgggattggttctttatcagctagggaagctgaaggtagagcaaacattacaactggtgacaaggaagcccataaacttttgcagcctgttgacaacaccctcaagacaatggcactagaatttgctgagtatcaggtctgtgtggatgtattcctcaccacacaatcctatgttgatattgcttctatatccgttgtgcctcaaactacaggtggccgggtctactactactatccgttttctgctctttcagatccagccaagctcttcaatgatctcagatggaatatcagtagaccccagggttttgaggctgttatgcgtgtaaggtgcagtcagggtctccaagttcaggactattatggcaatttctgcaagcgtgttcccaccgatattgatcttccagcgattgattctgacaaaactgtgatggtcacgtttaagcatgatgacaagttacctgaaaatgtggaatgtggcttccagtgtgcacttctctatactactgtatatggacaaaggaggatccgagtcataaacctttcactttcatgcacaaatttgcttgccaatcttttccggtatgctgatttggagacacagttttcatgcttcctgaagcaagcactggtcaaaagcttaggcttgagaaccgatgggcgattggatgaccgttcctactggatatctgtagcctcgtcagtttctgtagtactagctgttcctttggtgttccctagattgattcctatccacgatctcacatcaagggatgacgatgattctcttatacccagtccccttatgctcaatagtgagaatgtacaagaggatggagtttatttattggaaaatggtgaggatggtttaatttatgtaggaaacatggtaaatccggctaccctggaacaaatattcggtgtctcttctttggctgcattaccagcccagttggcgttggagcaatttgacaacgaactctcgaggaaggttaacgaagttgtaaatgaaataagacgccagaggtgctcatacttgaggttaagacaatgcagaaggggtgaaccatctggtgattttttccggtcatttttagtggaggacaaggcgcctggcgtcttctcctacgtcgagttccttgtgcatgtccacaggcaaatccaaagcaagatgacctgagggcccaagatcctggttgtaacatttcggtcagtagatggattgtatgtaccccgggagtttgatttctgcataaggagacagcaaagtggcgattccatatcaatgtggagcataaagagtgctcggataatagaactcaggaatagaggcttgtggtgtttacagcaccgtttttggagtgggtggtatatgtgttgtatacagagatgagaggggtggagctttagtttttgtgttgtcttttatcatcgtgcatccttgtttatctcatgtgcaaaaagtgttggattatgttggttggaaggttatagaggtttcgtaataaaatgcacctagctaatcgatagtatgaatcagatatactataatttaactattatgtttgcctattcgaatttaaccctgtgatgatgttttgtgatt

SEQ ID NO: 29324 - DNA, 1615 bp, Zea Mays
tatatgcatctttaatggttcaaactatataataataaaatcatcaccaaaagattgtcctttatatcttgctatttctaagagcttcattgttgtcctccttaggatttctttcaggtataggtttattaattgttctatcattacgacagagatatcatcctcaataaactcttgcctagatgaatttgttttatatttcataggaaaaaatgttttcaaaatatatagcgtctatagactccataattgtatcaacgtaacaaagcatgttatgtacgtactctagattttactataaaaatctgtaaccaacacagtgcataacatgcataacccaaaaattaagacacaataatccacagtttttcgtccaaagtactacatacgggaaagctctcttccatccatgggcctatatgtatatgccctagcaagcttgcgggttaatccaacgaagagctggccggccggccggccagatgcactgcacctcacctttcactgatgatcgagaagctaatttaaggtcgaggcgatggcggagggcacgtcacgctccgacccaggaataggatggcctctgacaaggatacggaggaagaggggtcaccctggctgaaaacaataggttaaccaaaaagattaggcgcaaaaggcagcatgcatgcatgacccttgaatgattttattctatttgttctcagagcggaggagccaaaactaattaaaaggcacgccacgtacgggcggggccacgtacggccgacctcttctattagcagtattattctagtctattaggcccgtgcatatggcaatggaagtcgccgccggccgacctagctagctcgatcggtggatcgcgcatctcacgctccctgcccccgccgccggccggccaccacctttctgtgcatgcgccatcggcggcctttaccgttcgccgtcgaacggccgatgccaaagcaagccgccgccccagacgtgcgtacaccgacgcggcaggcgacacgcgagcgccggtcgccccgccgcgccggtggcgaccacacaccacacgtacgcaccgcaagaagtctgcaacgtgcatgtcggcggccgcatggtacggtcgtccgcgcaacaaatgcgagacgacgacggtccgtgtgggcagctcgatcggtttttgtctcgttttccttggctcatagatgatcgccggccgagcgcgtggccgcaatcaatatggttggtgatcgcgacgacgacgcgcggtcgtcatgatgctcgtagtgtattcatgcatacacgatccggctaaatatatactataaactatttactgcaccggtaccgccggtttttattggccaaaacatgtagtgccatttttagatgatgccgatacgcgctacggcatgcagatccagctggtatctttgcacacgggtctctggttgaaaggatggatttgtgttatgcatggcacatgctgggatcatacaagtggtgtggagctagtcaacttatgctgcgcgcgtgcgtgctctctgtacctagagtgaactttgaatatgtggagggactaagatatacgtgttgtactaaattcacggatatatatatatat

SEQ ID NO: 29325 - DNA, 687 bp, Zea Mays
atctccaaaagtccgttctaatctaatctcttcgtgagtcgtcctaatcagcgcgagccgcagcccccgctgacgcgaatcgcgacctccgcgcgaccctccgctgacccggtctccctgccgcctggagcgatgaaaccgcaccctcgcgcccaagcccagactcaaaactcagccaaacccttcgcatcttcctgtggtggcgtcctcctccaacgttggtccgtgtttgtctccatggcgctctcgaatgcctaagccaaggccgaccgcgtcgagctggtgctgcaggtgctcgacgaaacgccccgcaggaccgagttctcgtagaccatgctcgtcgattctctggcgagggccggccgacagcacgacgcattctgcctctccgcggagatgcgggcctccagcgtggcctgcgactcccacgtctgcgtatgtcactacgggaagagctacatattcatcgtaaattatgtggaaaggatgtacaagcaagctgcccttgtgcagacagactcagaggtgtagagaagacatggtgtccgctgaggattgcaagatccattgctgcataggctgatgtatgcggcacaccatcaggagcagactgatcccgcacacataaggtcagggatggcctatgaccctttaagaactcatctagagcgaagagcagctgagcag

SEQ ID NO: 29326 - DNA, 672 bp, Zea Mays
agatatttggaatacaccccgtttgcggttcctgtcccgaggcgggaaactacacagcggagctttcgcggggaggcggcggcggatccgcgctcggttcgccttgccttgccgacgccgccgacgtgccatgggaatcaagggcttgacgaagctgctggcgcagcacgcaccgacagccgcggtgcagcggcgggtggaggactaccgcggccgcgtcatcgccgtagacgccagcgtcagcatctaccagttcctcgccgtggttggaaggaaaggatcagagcttctgaccaatgaggctggtgaaatcacaagtcatctgcagggtatgttgaaccggacgataagaatgctagaagcagggataaagcccgtgtttgtgtttgatggcgagccacctgaaatgaagaaaaaggagcttgcaaaaaggtccttgaagagggatgatgctattaaagatcttaatagagctatggagattggggatgagaatgcaattgaaaaatttagtaaaaggactgtcaaggttacaggaaggcataatgatgactgcaagaggctgttaagatcagattctgccttttattgatgtcttcttccagttccatgaggggtcagcagaatattgataatcttttgaacttaaagaatagtttggcactagtagaa

SEQ ID NO: 29327 - DNA, 1271 bp, Zea Mays
cctccatcctccttccctgcagcgctcgcctcgttcttcacctggatccggcgtcggcgtggggacgggccccgccgcgtggcgctggacgcgacagatcttgagctgcgcgtggcgggctccagtccgtggctgtggcatgctggaccggcggctaggcgggcgcgtcctgctccaatccggctaggcgggcgcgtcagccgcgagctaatgagcagatggaattataaagctcccaagaacagcaaatccggattaggagtgcacctattttgattctgcgaactgagtaactgattctaaaggatagggcaagaaggctcctttctaagcctatcaagtttttcaatgaaatgcaagagttgtttattaacagcagtgctgatggctctctagccatggaagctacaacttgtatgaatgaaactcatcctggagatgacagtgacttcaatgatgatgtgtgcagtgacttctccaactatcctcagcctgtgcatgatctaggtgatgattctgacactttacaatctcccaatcatcatccatctcaaagtgttgatcatagctcgtcaagttctggactgaagcgcccacaaggagagggagtaccagcgaagaggaacgtggaaccaaagagtcgcacaacaaaggtagtagatgaactcagtgctactttggtagaacttcaaaatgatcttaagaagccaccacctccagtgcctatgccttttgttaaccctgatgcaatattgtggcaaaggcttgagaatatgacaattactactgatcaaaagttaatggtaggaatgtatctagcacacaaagatcaaaagggtatgcgtggtttcttatctgctgcatcagacataacatttgagtcatgggtactaaagcatctgagtgatttggacctatgaatcgactagcaggatgatccatgtaggagatgaatggtgtgatagttggggtttttgcatttcttctaggttgatggatgtcaattgatggagatatttggtggttgtgactagtgttacattgctctttttgttgatttttaactttgagggtaccaatgagcatagtgcatagcaccagtaccttttacaattatggaatctctgcaaagcaaggaaggcattggactgtaataaattttgctccaatttcgcattgcaaatgttctagtagtgtcagatttttctctaatgcttctagtgaaaaatgagaccttttggagacagtttctaaattttgtgtgctgctag

SEQ ID NO: 29328 - DNA, 1184 bp, Zea Mays
cccaagacaagcaccgaagatggcttgacgcccgaatccagaccctcgtctgttatggcggcggcggaggcggcgccaccgccgatactcgagctggacccgtcgcacgatcgagccgtcagcgttgtcgaggacatcgtgcgtctagagcggaggatctttccgaagcacgaatcgctggcgcggtccctgcacgacgagctaaagcggcggaactccgggctgatctacaagacgtccagcgccgacgagggggaggtcatcgggtatgccatgtacacctgcaacacatccctctgcgccaccatcaccaagctcgccgtgaaggagaactgcaggcggcagggccacggcgaggcgctgctggcgggcgcagtggagcggtgccggcggcggaaggtccagcggctctccctccacgtcgaccccacgaggacggctgccgtggcgctgtaccgcaaggccgggttccaggtcgacaccaccgtcgagggctactacgcgcctcacagggacgcctaccggatgttcttggatctgtagtagaaccgtcgaggacgagaaaaccagcccatgtgttccggcagctgctgccggcttgtagctggtctggtctggtgatacaatacctcgtgagtaggatacagccaacagccgagcagggtggatgattcgaagctgtaagaacgatctgctagaaagttttcataccaccaaggagggagcaaaccaatcccgcaagtgtgcctggcccatcggaaggccgatgcgctggagtctcggagaacacccagcgggcagtgcctatgcaaggccggcggcggcgacggcgggtcagctcacaggaagattgctcgggacggacggagagggaggctttgcgtcaaggaagaagtcgttggtggtactcattacccagtggtcatgttcaaactcttatccaccttttttttttgaaaggggtcttatccacctcatttaggctttgttcggttagctctcaatccatgtggattgagcgagattggatggatttgaatctcaaataagtcaaacttcttctcaattttttccaatctcatccaatccatgtgttttagaaataaccgaacaagcccttacagggtagaatagaatacgggagtggattatccatgggtgaatcttcagctcaattcacgtag

SEQ ID NO: 29329 - DNA, 2257 bp, Zea Mays
tatcttttttctttgtctgtttgtgctgctaagtgctaacacagtgctactttcattggcagattagtattttaaactcaagatggttaacttcgggaagaaattgatggctgatcaaattccagaatggaaaggatattatatcaattacaagttgatgaagaagaaagttaaacagtatggccagcagctccagcagggcgagaaagatcgtcgccgggttctgaaggatttctcgaagatgcttgatgatcagatagagaagattgtgctgtttctgttggaacagcaaggaatgttggcaagcaggattgaggagttaggaaagcaaagggcaatactacaagaccagccagatatatctggtattgctgagttacgagaagcttatagggaagttgggtgtaggagctgttgtaggagctttgtcacgtaaccttgctgaacttcaagaacgtcaaggaagctacttatctatttatgatcagccatcttctgctcttaaggaccccatcattgatatgataaactcctcagttgataagttgacaaggtcaactaattttcttcgctttttggggcaacatgccttgattgtggatgaggagtctcctagtactgcaggagaggaagaaatagaagatcagaaataccatttcatgtcccttatgctgaacctggtgaacacatttctttacatggtcaacacatacatcattgtgccaactgcagatgactattcagtaagccttggggcagcttctactgtttgtggtgtggtcattggttcaatggctgttgcacaaatattttcctctgtttacttcagtgcatggtccaacaagtcatatttcaaaccgcttgttttcagtagcattgttttgttcttggggaatgtatgctatgcaatggcatatgatatgaagtccctaacagtccttattatcggccgtttactctgtgggatgggttctgcaagagctgtcaaccgtcggtacattagtgattgtgtccctgcaagaatacgcatgcaagcttcggcaggattcgttagcgcaagtgcacttggcatggcctgtgggccagcgctagctggtttacttcaatggaaattcaagatctacatggttactttcaatcaatcgactctacctggttgggtgatggcagttgcgtggctattgtatttgatttggctatgggtctcattcaaagaaccgaaccgtgctactgaggtgaatgaagccccacaaaatcctgcttctggacaaacggttgatattggacaagtagagaatggacttgctcagcctctgctcatggattccgtagataaacaaaatgaagatgaagatgaagaagttgatgaaagtgaagaagctgcagatgattcacgcaagcctgcaacatcaattggctcagcatacagactgcttactccatcagtaaaggtccagttgttgatatacttcatgctgaaatacgcaatggagattttgctttcagagtctagtgttatcactaatcactatttcagttggaacacaagcgcagtggcaatttttctagcaatccttgggttgacggtgcttcctgttaatgctgttgttggaacatacatcagcaatatgtttgaggacaggcaactcctcatggtctctcaaattacgttgctagtaggcattatcttcagcttcaaggttacgagtacatactctgttgtccagtatgttgtctcagcacttgtcacatttgtttctgcagaagttcttgaaggtgtgaacctttccctcctatcaagcgtgatgtcatctcgcctctcccgtggcacatacaacggtggcctcctctcgacggaggccgggaccctggcgagggtggtcgctgactgcaccatcactgcggcggggtacctgggcgtggggaagcttctcaacgtcaccctgctaccatccctggtgatatgtgttgcgtccattgcctgcaccttcctgacgtataactcgcttttctgatggagcttcacaatgtatttgtgtcatcatgattcgttccatattagcgcaaatcaaggcagctgggagaccgccattgccattgcccgaaggggctattgtattactattattatatgttcgtcgatttaattgctgtaaattgattgataaaatgatggtagctactgaacctggtcttgccgtgcaaaattttgaccgactctatccttgtcatgaatacatgctgtccatattatggc

SEQ ID NO: 29330 - DNA, 4914 bp, Zea Mays
  misc_feature (1)..(2): n is a, c, g, or t
nnaagcttcctcagttaattgatgatccaaatgctgagtttcagccaagtcctttttttacggaacaactgacggcttttgaagtgtggcttgatcatggctctgaggacaagaaacctcctgaacagttacccatagttcttcagtcagcctacaaaaaaaaaacgattgttatttgctctggtgcgcattgagattgggcatttgaaaatattatggctagatttgtcccaaaacatactccctccgattcgttttagtagtcgttttggacatcatttcacataccaaggtgaaggctactttccagtcttacccttattatatacattcagttgtttctttcaacaagctctgtttcctgtttcaactggttatcaacgcttgtcaaggcaccccgtctgatgcggcttgggttcgaaacccttgctgttgtgtgccttaatattttttttgcgatttttgcacgttacttgcatgcgggtttttttgcatgcgcatgcatatgcaccctatctttctgaatcaaggacttgacaacgaagaaccctccggttccttttatcagtcacaagtaagtttattttttgaaccggccacatataacttgacaatttttcttgatttagttttattaaccaaataaaaaaactaacattttcttgatttagatggtggtgctactaggaggaaacgaagcgcgtgtgtggtgccaaggcttgctggcatggctgtatgcatgcaaacactcggcatagttaacggccatcaactatagacggctgctgacggtcctttgccgagggtcacgtttcgccaagtgtttgacgctcggcaaagactcctttgccgagcgtcagcttatgccgagtgtttggcactcgacaaagggggtctgtgccgagtgccgttcgtcgccgatagtggccctcaacaaagcttgttttgctgagtgcccaataaaatgcacttggcaaagaacttgacgctcggcaaagagccggattccggcagtgtacgcgtggcttaggaagtggaaacgctgcagcggtaatcgtgtgagcaattaacgctgcatgcagccgctcttttggatttaatttccaccggctgcatgcaagggcaaggacatccaaaatccccttgaaacgtgccagcaacttcattttagattgttttgaaaaaacggcagaatgactagtaatgggaaccggagggagtaaaacaaatagtcatgcaattttattattccttataaattaccgtagtacaaattacttgacaaagttatgttttgtggatcatgccattacccaaaatacactataatatgactggagggcttatatttcttttattgttttactttgcttacatctcttttttgcaggtactgcttagtcagtcacacagatttagagcgcttgttctgcttggaagatttcttgacatggggccatgggcagttgatttggccctgtctgtcggaatatttccttatgtactcaaactgcttccaacaaatacaatagagttacgtcaaattttagtgtttatatggacaaaaattctctctcttgataagtcttgtcaggttgacttggttaaagatggaggacatacatattttattaggtttcttgacagtttggatgctttcccagaacagcgtgcaatggccgcttttgttatagcagtcatcgtggatgggcataggatgggtcaagaggcttgtatgaatgcagggcttatagatgtttgcctgagacatctgcaacctgagaatcttcatgcacaaacagaacctttgcttttgcagtggctttgtttatgccttgggaaactctgggaagatttccctgaggctcagttacttggtctgcaaacaaatgcaccagaaactgtaatatgcttattgtcggagcctcgacctgaggtcagagctgctgctgtttttgcacttgggaatcttactacattatcaaattgccctgatgatgattctgatgatgatgaaaaggtgaaagctgaaataaatgtagttcgaagccttctccagatatcttcagatggtagtccccttgttagatctgaggttgctatagcgcttactcactttgcgttgggtcacaacaaaaatctcaaatctgttgctgcggagtattggaaacctcaatccaaatcgttgctgaagtcattaccatcattggcaaatataaataatccaagcaatgtttacagtcccaataatattctccaaggcagcattggtcctgtgctgagggttggcagtgatagcggtgccgctggtcgtgatggacacatttctacaagtagcccaattgcagcaagtagcatcatgcatggctctccccagtcagatgattcttcccaacactctgattcaggcatattactgagggagaatgcaagtaatggtggtctcagctacactaggtcgaggcctgttgataatgtcatttattctcaatttatatcaactatgtgttctgtttctaaagatcctgacccaagaattgcaactattggttggagagcactgacccttataggtgttgaacaagtggccatgaaaagtactcgatttaacagtggaggtctacaccgaggagagacatctgcgtcaacctttggaatggcacactcttcttcttggagagatatgaattctggaagcaactcgatgaaatttatgacccctcctgttagccctcctcagcatgattatcttctactaggattgcgccgagtgtgttctatggagtttggacagcatcctataaattcacctgatggctttgctaatctccttttaagctctgctacaggtcccagtaatgcagaactaaagaaacttcccgaatcaacaatttacaactggagttgtggtcacttctctaggccacttttaactgcctctgatgataatgaagaaaccaatgctagaagagaagagagagaacggattgcactagatttcatcactaagtgccagcgctcctcagcctgcaagattacaagccaaattgctagttgggatacaagatttgagttggggacaaaggcagctttattattgccattttctccgattgtcgtagcagctgatgaaaatgaaaaaataagtgtgtggaactatgacgatgcacaaccagtgaactcttttcacaaccataagttgtccgacagagggctatctaaacttttgcttatcaacgagcttgatgagtgcttgcttttggctgcctcaagtgatggaaatgtacgcatatggaaaaattttgcttgtaagggagggcagaaacttgtaactgctttttcatcagttcagggacatcgagctgctggtcgcagtattgtgattgactggcagcagcaatcttgttatctgtacgcatctggtgacatgtcttccatcttggtatgggatcttgacaaggaacaacttctcaacaccattccgtcatccgctgatagtgccatttctgccctgtctgcatctcaggtccgctctggatactttgctgctggttttgctgatggttctgtcaggatatatgatgtttgctctcctgatagtaggcctgtctatgtggccaggccgcatgccccaagaacagaaaaggttgtgggcatagggtttcagcctgggtttgatccatacgagattgtaagtgcatctcaagctggagacattcagtttcttgatgttagaatggcagcagaaccctacctgactattgaggcacacaggggttcacttacagcattagcggttcatcggcatgccccagttgttgctagttcagccaagcagatgattaaagtgtttagtcttgaaggagaacagttgaggataattcgctacctgccatcttttatgggccaaagaacaggcagtgtaaattgcctttcttttcacccatacaaatcactcctggctgccggtgctggtcataatgctcttgtctctatctatgctgaggaaaattacaagtaagatcgaggcctatatctcatgctcatgataatgcagacacagtgcgatcgacaggccttacatttttggccaagtgatgctccacagcatggtgcagcttcaagatccaagatgatggtaagctttgtcacagagaaggtgttgatggctccatggctttcggtgcatattgcctgttggacggcgtgtgcaatttgtatgatacagtcaagaactcaagattcattaggcctccttgcattgtgaaccctaccctgatcctgccgttgaacttggaggccccatcaacaaattaatcatacctaagttaaccaaaatgtaaatagccagtgcattcgggttgtactttgtcagcattaatccctttttcaagtgtaaaaaggtctgaaggtgcttgatatgataaacatggcttggtagtggctgctgactgggcaagtggggttgtgcatatgggcctggtcgcacatttctgctcacagatgatgttgaatagatagatgtctgctcacagatgaggttgaatagatagatgtctgctcacagatgttgttgaatagatagatgcatttgtccagctaatatagcgctagatgggggtagcgttggcctgcatgaatgaaggaaagttgtcgagtgaggagtgaccttcattgccattctgtgccgcaacaagtctccatgtgttatcagatggccctgtagataatacatatatttgtagatgtgttttgttcggtgaattgtgctgaccgctgagtaaaatgtattgtgaacgttgttgataaatgctattgtaatgaatttgcaacaagaaaaaattatatgctattgtagtgtatatcacaactctggttgctttttatttttatttttttaaaaaaagatctttc

SEQ ID NO: 29331 - DNA, 1351 bp, Zea Mays
aatgctttgggctgatctgcaaacttgcggtgaaattccggcttcggcggtttggccagcctccttccgcggggtggatttggatagcgcggcgcagagaaaaatggcggcttcggctctccacctccaccgccggcgggtgtgaagcttcagcagaggcagctgcgctcgcggcagggtggcctatctcgaagacttttgaaagttgtgtcctattacagtctcacaactccaccatataaactggatgctctggaaccttacatgagcaagaggacagttgaacttcactggggtaagcaccatcaagattacgtggatggcttgaataagcagctggctaccagccctctgtatggatatacgctggaggatctgataaaagaagcctacaacaatggcaatccattaccagaatataacaatgcagcacaggtctggaaccatcacttcttctgggaatcgatgcaaccagaaggtggtggcttacctgagggaggtgtgctgcagcagattgaaaaggattttggctcgtttactaattttagggaagagtttatccgctcagccttacaactattggggtctggttgggtttggcttgtcttgaagagaaatgagacaaagctttcagtggttcatacacaaaatgctatcttcccacttgcttttggtgatatcccaatcatcaacctagacttatgcatgcttactacttagactacaaggatgataggctaacatatgttacaaactttatgggccatctcatctcttggcatactatcactctacgcatgatgcgtgcagagtcttttgtgaaccttggtgagcctaatattccggtggcatgagctacagatacaccctagttatcatcatgaggcatcctttggatacgtcgggtcaaatcctgctggaggaaccagagacatgcttatcactcgaatgccatacacgcaaagataagctgcatgcttgattttcaccactgcccttggatattgctacagggaaaccactagtcagcatccaatctgaagatgtgcagcaatgcagctttagaagctctgggagctggtaggtagcgatccaacttgggcttcgaagccatggcgctttcgctagatggctatgcccgtggcacgatctggagcagcagaccagacgctactggtgacagatgattcagacatgaaaagattaaattgtgcccggccctatgacactcgaacagggttccccaggaccctgaattctgctgtcatcacagacaaaacgaaggacacgaagaatagattgtgtcggatcggtagcagcagtgacaggtttgccacaaccagactaaaag

SEQ ID NO: 29332 - DNA, 182 bp, Zea Mays
cagctcactcatggtgcccagctcgcgtccacctcctcagttgttgacaccgtgcgctcggcttctctggctccgatccgcgctcgcccatgtcaccatcgtcgtgtcgtcgctggtgatagcttcgcatgccgtcgagcccatcgttttcctcgtccagtgcttgcgtggccttacccgaa

SEQ ID NO: 29333 - DNA, 884 bp, Zea Mays
cagcagcccagcccatttggcccatctcaaccgaaggaggcaaagacgcaacgcgaggtctcatgggcgaccgggccattcgtcgtctccgttgtctttgttgcagatcggtgctcctctcaccaccaggccgccacagctcgccggctttcccctccctgccatcgagcaccacctggtacgctctccgcttgatctccccttcctgctgcggagccgtgcgagcaaaccttaacgtagtccgtagagcaaacagagcaaggaaatagtttaagaatggctgcgcggagcagttctatggttgccgaggatgactacgagacggatcagaagaagcaagctgctgcagatgttctttttcactattcacaatttgttatggtttgcattggtgaggatgttcgccctactgatctcaggttacatcttatgaaggaagtttcaggaatgtccacttctctgaaggagcctcaacaggctgctgcctcaccggcttccagtggggaaccgtcttcctctggaacgatgaaaggtgacaagaatgaaatctcctaagcttcataaattattatccaactcaggacttcttctgttccttacgcactgagaagattgtaatgttcagaacttcggatgatgaggcttacttgcaatataggaatgtaaatatgttaggaacattgttcatagctgtctgctgttctgctgctttagcttctttcgtgacagcctgcttcatgtatgaaactttgaatccatttttattcagggggcagtaacgtaaatgctgctgtatttttttttaaatggcaggtgaatattgtattctgaataagtcatgtttactagaatcgttgctgtggctttgattggatcggctagga

SEQ ID NO: 29334 - DNA, 4850 bp, Zea Mays
atggcgtggggagaggacgaggctatcggccccgacgtggcctcggcgggtcttcacgtctcggagcggatcggccgcgacgccgccgcgcagcccgacctggaggaggcccttgaagcctcgcgctacgcgtctcacccctactcctcgcaccccaaggaatggcctcctttggtggaagttgcagaaattcgtcaactccctcctatgttgattgaaagatataacacagctgctggtgaaggaacagctctttgtgggattttttctgacatacatcgggcctgggcaacagttgacaattcatttttcgtctggcattttgataaatgggatgggcagtgccaagagcataatgtcgatgagcaagcaatttgtgctgttggccttgctagggcaaagtctgggattttcattgaagccattcaataccttttagttttagcaacacctgttgagctgatacttgttggagcttgctgttctgctagtgctgatggaacagacccatacgctgagctttcattacaacctttacctgagtacatgattgccactgatggtgtcacaatgacatgcatcacatgtacagaaaagggccaaatttttctagctggtcgtgatggccatatatatgaattgcagtatacaactggttcaggttggcgtaaacgctgccgtaaagtttgtcttactactggtattggcagccttctttctaggtgggtagtgccaaacacattcaaattttcaactgttgatccaatagttgatatggtcatggatgaggagagaaatactatctatacgcgtactgagggcatgaaaatgcaattatttgatctaggagctaatggtgatggccctttgacaaaaattactgaagaaaagaacattgttgatccactggatgcaccttatggtggccggaggactaatgcaccgccaccaagaactgcacgatcaccaaaaccatcaattgtttgcatctcacctctatccgctatggaatcgaaatggctccatgctgttgttgttttatcagatgggaagagattattcctcactacatcaggtgggattggttcttcagttggattgaacagtggtctgcggaggcccacctgtttaaaaattgttgctactaggccgtccccacctctgggggttggtggcgggcttacatttggtgctgtttctgcagctggcagagttcatcctgaggacctagctttgaaagttgagtctgcgttctattctgctggtgctcttataatgtcagattcatccgctacagccatgtcatctctgctggctgtgcagaaaggttcagctgcacagctatcccttcccagtacctttggaacagcttctagagcctcccgagctctacgggaaacagtatctgctttgcctgttgagggtcgaatgctttgtgcctctgatgttttaccacttcctgacgctgcttacatgttgcagtctttgtatgctgatgtggaatgcttcacaggtttcagaaaaccttttgagaaggcatgtataaaactttgggcaaaaggagatcttcctacccagcatatcttgcctcggaggagggttgttgtattcaatactatgggtttgatggaggtaatttttaacaggcctgttgatattctaaggaaattgtttgatgggaacaccttgagatcacaaatcgaagaattctttaatcgctttggtgctggagaggctgctgcaatgtgcttaatgatagctgcgaagctactttatgctgaagatagtctgataagcaattctgtttctgagaaagccgctgaggcatttgaggaccctgggcttgttgggatgcctcaaattgctggtaccactgctttatctaatacacgaactcaggctggaggctttagtatgggccaagttgttcaagaagcagaacctttgttttctggtgcatatgaagggctttgtttgtgctcgtcaagactactttatcccatatgggagtttcctattatggtgattcgaagaccggctggtactaataaatgcgaggatggtgtaattgtttgcaggctttcagctggggccatggaaattcttgagagcaagattcattcactggaaacatttttaagatctagaagaaataagagaaggggcctttatggttatgttgccggccttggtgattctggttccatactctacaaaacagggcctattattggtcctggagggcatagcaatgggaggagtccatataactcccaaattcaagatatggaccctgcggacaaatcagcatcaaataaaaagccaaggttgctttatacatcagcagaactagccgctatggaggtgagggcaatggagtgtcttaggcggttgcttaggagatctggtgaagcactctttctgcttcaacttatttgccagcataatgttgcccgcttggctcagacactgggcaatgatttacacaagaaattagttcaattaacatttcatcagttggtatgttcagaagatggtgatcagcttgcaatgtgtcttatttctgcactcatggagtactatattggcccagagggcagaggaactgttgaagaaattagcactaaattgaaggagggttgccctagttacttcaatgaatcagattacaaatattacttggcagtggagtgccttgagagagcagcatctatggctaataaccctgatgagagagatattcttgctagagatgctttcaaccttttgactaaaattccagaatctgctgatttgagtgccatatgcaagagatttgagaacctaagattttatgaggctgtagtccggttgcctctgcagaaagctcaagcacttgactccaatgctgatattaccaatggtcaaattgatccaaggcatcatgataccataatgttgcagcgtgaacaatgctatgagattgttatgaatgctctgcgcactctcaagggcgtcgggcatagtcgaatgcaaagtgcagacaagtcatctggtgtagcaactgctgttgatccagcttctcgaaccaagtatatcaaacaaattctccaacttagtgtccaatggccagacacagttttccatgaacatctatacaagacacttattgagctcggtctggaaaatgagcttttggagtatggtggttctgatttggcttcttttctgcagagtgctggtcgtaagcatcaagaagaggttcgggcagtttcttcagttacatctggagctgctaagttgcatgatttaagtgcacctatcttgactagtcaaacaaagtatctcgagctcctagctagatactatgttcgcaagggggagcgtattgctgctgccaggatgtttttaatattggcagagagacagtgctccaattctgaagaagttccaactcttgacaagaggtatgaatatctcagagatgcagtgcttcaggccaaaagcgcaggcatagaggctgattcgtctagaaaacctattgacagtagcacagtggatttgcttgaaggcaaacttaccgtgctacgcttccaaatgcaaatcaaacaagaattggagctcatgactgcacgggttgaaaatatttcgagcagttctgaatcccctagtggtctgttccctcgtgacaacattcttgctgatgcagaggctgctaaggctgctaaggataaggcaaaagaactatcattgaatctcaagagcatcactcaactgtataatgattatgctgttccatttgagctctgggaggtttgcctggaaatgctgagcttcgctaattactctggagatgctgatagcaaaattcttcgagaaatttgggctagactccttgatgaggcacttacaaaaggtggtgttgcagaagcatgttctgtagtgaaaagagtaggctcgaaacttgatcctgcagatggagcttgtttacctttagatataatatgccttcatcttgagaaggctgcattggatagattaagttcaggagaagaattagtcggtgatgatgatgttgcaagagctcttcttggtgcatttcttgcgatcctccgtgagtgggggatatctgtcattgcacataggcttggcaccacaagtactggggcttcaatctttcttgatggaacattttcactgaaccaaacagggactgcgaatcaaggtgctcgagataaaataattagtttggctaacaggtacatgactgaggtgaggcgattaaaccttccacagaaccaaacggagaatgtctaccgtggtttccgtgaacttgaggagaaattactatctccttattaggcaattttcagttgttcttcaagattgtaaaagaagagtcgaaggctctggattcactgcagcatgatctctattgttctgtacatatatctgcaagaacccaaggcttctttaatcattattaattagaggttattcatgacggtgtgcagccttcttttatttgacttagagccagtatggattacagagctgttgttgtggaaattgtctagctgtcttcattacttcttaataatcttttggtagatgctgttgatcctgttttacctgaatttaggaaacagctagagaactcaggcaggactttccaccagaaatacaagttggttttcatgttggaaatcgaaatttagtatgtaccatgacattgtacagttcgttagtagattatttagagtgttgtaagccttgtagcttatgtttttgttggcatcaaggtatcattcctgtagctgaaaaataaacgttatattgtcagaaatatggaattctaggttgtttttgtt

SEQ ID NO: 29335 - DNA, 487 bp, Zea Mays
acactgagtctgacagagggttttgccacccctttttctctaaatcctacaccatatcaagccaactctctacatgaaacttgctatacttcagatgatctttaactttgctacatatagtagggctcatactccatggattaattaccacagagctccaaacagataacccaacactgaaattcagtcttcagtacactgaatataactcagtttcagtcacctgacaatccaactttgagccagttttactccacttttcgtgtagaatcatgttatacccacttactgaaaattattcactatcatatggtctttatttcatctacaaacaccatagcctaaaaccctatagaatagccacaaatagacttcaaaactgctatcaaaacactgaaattcagttttagttactgtttccaatctgaaaattcagaatacagcagcaccacttggaaccactctttttcctgggttccaaatgttt

SEQ ID NO: 29336 - DNA, 594 bp, Zea Mays
caaatatccccaaaggctaaaaccctaaatctctaatcctcactctcctctcacgcggtcacgttggcggctggccagtggccactccctgtctcgtgctcacggcgggcggcagaccgccaggcgccagaccggcaggcggcagtgcaggccgtcacggctcacgggctcacggccggcggcagactgccagaggccaggtcgggagtgcagccgtgcaggcggccggccctctccggctctccctcaggccctcactcccttggaggcggcggcggcaagctgaggttataagtgaagttaaatactcccttgtttgcttgttaatccattctggacgccacgagatcctactcccgcgggcagaatattgaagaatatgcatctccgttcatggacttgttattaatccatttcaagtttttttatttctatttgtaatgtcaactccgggagacagtgcgttcattttatcttagcaaatattgtaatgactcattatatgtttgagacttgtgtttctggatgatcaatgttccttatatgccattatattatatctgtcaaactgttgatacatttagtgaaatgaac

SEQ ID NO: 29337 - DNA, 3657 bp, Zea Mays
ggacagtggacataacccttgccaaaattgttacagagaagagaagtaagtaagtaactagcatagcaacagcgtaaatagttaatagataaacacaggagtgagaaaaaaccagaaatggctctatgcatatatgtgtagcatattccaataaaccccttaacacaaggtgcagctgcttcgctgagtttggagaggcacaaactatatgctttgctatgcggctatgcccgggacttttggggacggaaaacaactagctggagctactgaaggaatagcaaggataaaaacatgctgatctacactcagattcatgtagcagcatagcaagcatccagaccaaatataaggtgagctaatacttctagggatcaggagtcatgttaatcacaatcagcacatcaactatgaacacgctgatctacacccagattcatgtaacgttaacctagctcgagaagcccaattatgcctaacctgttcgctgtggcacatcccaccttatacaaggaccaagctccaattatgcctaactgaatatcgcccaattaattaacaaatcgaatagacgcaaccatactgagggccagcagcagctagaagcaaagcaactagcagcttcgatgccagggtcaatcgactcaacgacagcgcctatggtccagttacgaacaggggcaagaagagaagaaccaacctggtgccagctctgcctcccgtcccagagagcacaggctgccggacgaggcccgcctatcctcatccaccgtgggggtcacgtactcacgagtctccacagatcctacaaaggcgcgaggtaagtcggagatacgcggcgccaacagagccgctgccgtaacagcagcagcatttgctcttcaccggcgagcgagcggcggcggagtagagaagggaaaggggacgacgacgacacggtgcctcccagtcccacctccgggttggactggtcactggacccgatccttcacctaatcaccttcactcgatcagtcgggctcgagcggcttcatttcactgacatgtgggtccctatccgcagctaggattctgggcccctgtggcagccagtggaagagttcctctcacttaacagcatctcttctctctcccacggttgcttccaggtcccaccacgtagggaggggattggagacgccgagctccaccggaggcgaaggcggaggcgcgtggcgcgccctcggactcctcgctgtcttgtttttcaggacaaaatggaccttgcacctcagggtttgataacacagcaacaaaaggcaaatgagcgaaggccagttggtagctcacaaatttggacagtatgtaactttctcattccttgtttctcttattacttgggcatcttaaacaaaatacaacctgagataatgaaaattttgtagcggtatggtgttctgcttccaagccagcagactcgaaagctaaaagaatggattctgactgatgagcagcaacagcttgttaatgctagtggtcttggacatctggcacttaccactgggtttaccattgaccgttctttgctgacatctttttgtgaaagatggaataatgaaacaaatactgcacatttcatgggatttgagattgcgccttcacttcgtgatgtttcatatattcttggcattccagtgactggtcatgtggtgaccgcagagccaattggtgatgaagctgtgaagcggatgtgcttgcattatttaggagagagccctggaaatggagagcaactgtgtggcttaattaggctgacttggttgtataggaattttcatcaactacctgaacatccaaccatcaataagattgcatatagcacccgagcttaccttctataccttgttggttccaccttgtttcctgacaccatgaggggatttgtatccccaagatatctaccactgttggcagattttgggaagatccgtgagtatgcttggggggctgcagcccttgctcatttgtataggggattgtctgttgcagtaacacctaatgccacaacacagtttctcggcagtgcaactttgctcatggtgtgctatttatttgtgcctggatttatgagtatcttcctattactcaaccacaacagaagaaccagagcacattgctgccccgggcttgccggtggaactttggaggagcaacacgtggacagagaaaaaaagtcatggactggagaaaagtttttgagcaacttcaattttccgaggtcaactggaacccttacaaggacatgaatccagcaattgttccggaatattgcattgcagcagataacatctgctactctcgtacttggctaatcagctttaacataaaggaggcgtatgtgcctgacaggtttgctaggcagttcgggagggaacaaggacgcctccatggtgtgccaatgtggacaagaagaacttggagtaagtggaaagactggaggactgagtatgctcgtgagattgaggagttccatcaattggttggctgccatttcacccctcctgcggaaaccaatatcaactcctttccactacatgagtctagtgctggacagaatgatgcaggatgcagtctgaatatctctcataatttttctgcaatggttgaagatttgaaaaatgatctcccagtaattggtcgatatcttgagggaaacttgcttccttcagatgttgcaagcttcctagagagggtgagcacgatgatcaagagttataccccaccacagggcagccgaaggaaagatcgagtaagtcatggccccgctgacccagtcaggtcaaagaacccaagaaaaaggggaagacattcactctttcaagattcttttcctcatcggtatctaggcaccccggtaaacatagtgtttgatggcaccattcctctactaaatgggggtgaggcattgaaggaacaagtggccatggatccctggcgggtctcccagtcccatttgacgatgaccacatcttcttcatctctagactcaagctcaccagaatcaatgaagcggaggcgggaaggtggggatgaaattccaatcacaagggacactgattgcctccaaagtggaaggctctgtgtgcagctgaaaatgttcaagcacagagatggagtgaatgccgaggcagctaatccgattttccgctgacgaagacaaaacttcgcttggtcttcatattgtacaaagtagcaaagaaacatgacttgtttgctgcactgctgacagttagctggccaccaacaccgctctgcggtattgctgtctgcaatttgcgaggattttcctgtgtttatatcgttgtgaaacagttgcctctgtgaaatagatgccttttcagaagcgatagagttgtaactgtttatgacaattaacatggctattaaaggggcaagtcttttggcacagatagtgggaatggttgttctatcttttagggttagtttgggaactacgtttttccaagggatttctattttttcaagggaaaatgaactaattttccttggaaaaatgaaaatcccgtggaaaaatggggttcccaaactagcctttaatgataaggcatttcttcacgttttatattcgggagttagatcaatgtaaaatttaagctc

SEQ ID NO: 29338 - DNA, 6069 bp, Zea Mays
gaagtcggctgatatgacgtacctcatttggataacaatttgatcggcaccataagttacagaaatatgcaggaggagctagggcaaaggatgcatgtacctcatggtatcaatctgtgtttctcaacttcttccgagctctttcaggtggaatcttccattgagctgggtactgcagaagtgaaccctgtaccatctgaaaagttatctgctaactcacaagctgttagagatgatgctggagcagttgaaggtattgacatgaatggaaaacctgtccaaaaacctaagaggaaaaaacataggccaaaggtcattaaagaaggacaatcagcaaagttgcagaagcctaaaactccaaagcctcccaaagaaaatgggaatcagcctactggaaagagaaagtatgtcaggaagaagggactaagcacaccagccaaacaaattccatcagaaggtgctgatacacacactagagctaaaccaggaatagcccaaagatgtttggactttgatgtggaggaccaacatggacatttggatctggtatcacaaacccaggaaacggagatacagactggtcctggggacacacagccatcaatatctggagttgaaagaagtaatgcccaggtatcatgccattggggttggggtggtacaagcagttctattatttcagctgacccaatagttgatatacaaggattacaggcagactgcatacctaaaagagtcaattttgatttgaacaattctatggcaagtcagatgccaaccaattattctagtcgaatggacagctctggacaatttttccagtttggtttaggagaaaaagttcaaacaaatcagttactggattataattgtaatctgccagctagacgtgtctctcatctcagcagctcggtcgatcatatgcgacaccccttagccaattttgaccaatacataagcacatctcaagtttgtacagaaaattcacgcagacattatcagatgcctagtagttctagaatttcagaaaataggacagcagcttctcagtatactgaaagggtgtcaatggggggcaatttcaatcccggagcttgtataggagaaggcacggtaatcaaacaaatggcccaatgttatagacttccagaaagtccacttgtacctcccaaacataatgaaagggatgtgatgaatggaaatctaaacgagttttctgtgtataatgattacttgaatttttctagcaatagtaactaccaaactggagcagcttttggttttcatgattctccagtctattcagatgttcttgcaatgggtaaaaaaagagaacacaatgctatcagtggtcaccagatttcttttgacatcgactttgttaactcaaatagtacaaggaagttctgtattgatgaccttctttccactagctctcaaacatcttattatcctgaagcatgcaaaaggatgagaccagagaatcatagcaatcagctcaatgtaactacgggaaagctttcttcttcatcagcattttctggtagtttgaatacaaataacgtttcaactataaaccctggaattggtaccttggctgatatacaaaggttgatggcccttgagaaatcacaagcttcacaacaaatgattgactttattacgtcgcaaaacaacatggccggtgaaagtactgaacttgctcagcaaaataattctgacaaaggatttgttgctttacataataaaaagttccaaagcctcactgcgcagaacataccattgcctgacagtactgtgaaccaatcgggagaaagtaatatcttgaggaatggaatacatcaaacacaaccttgggaaattacatctaggtcgcatcactctagcgacaattttgctttgccaaataaatggtctggttacttgacagcagggaacacacagttatcaagcatcacagtaaacccatccacagaaaactatattcaaagtaatgctatttatcaatatcaatgtttagaaaacgttgtggctaaggtgccagtattgtctggaacacacaatacttccagtcaggagggccataaccacagcactgctgctactaatgagcatatcagaactacaagtgaggaagttgttagatcctttacccaacgagcaagtgaaccaaccacacatgggaactacaatctcaactcttctagagtaactgcagaagcaaactccactgagaagccaagaaaaaggggccgtccaagaaaagtagtaaaacccaatggggagccaaaagaaagaggtactaaagggaaacaaaatgttagtcatgaaaaacctacatcgcaaaaaggttcacatactgacattttgaaaactaatggtatttcttatgcttctgaaccttccactggaattactcctaggatggctattgtggagtcgaaaagctctgatcaagataaggaaattcatggaggtgtcattcctcaagctacagcaatatcagttgatcttttagatggcataattcaaaagattaagctcttaagcataagcagaccagacaatgttgtggcagagataccaaaagatgctcttgttccttatgaaggtgaatttggtgcactggttgcatttgaggggaagacaaagaaaaaccgttctcgggccaaagtgaacatcgatccagtcaccactatgatgtggaacttattaatgggaccagatatgggtgatggtgctgaagggttagacaaggataaagagaagtggcttgatgaagaaagaaaagtgttcagaggacgtgttgattcattcattgctcgtatgcatctagttcagggggacagacgtttctctcgatggaaaggatcagtcgtggactcagtcgtgggtgtatttcttacccagaatgtttcggatcatctttctagttctgctttcatggcggttgctgccaaatttcctgctaagccagaggtccctgaaaaacctgtggctgagatgtctcatactcctgaacagaaggatagttgctcttgctctggactgtttggtgattctatcaaattgcagggcaagatgttcattgaagagataagtgatgttagatcattaattactacagaagataatgaagaaagtaatagtaatgaattgattggaagctctgccgggtatggagtaaaccatgcaactggaggctgccatgtttcttataggaagtcactaactgaatcccatgaaaatgggctttcaggatctgtttttccaactaccggcttttcaagtgtagtagaaactgaagatggctcattagaggatgttatttcttctcaaaattctgctgtttcttcccagaattccccagattacctttttcacagaacggatccaataggttctagttcgttgcaaaatttcaccgaagagggctatatcatgagaaatatatccaacgggactggcagctcaactgactgctcagggtttctgccaattcaagatccaaaaggcacgcttggattgtcagaatattatggacataatcctcttctagtttcaggtgtgaacaagggtgtgttgcttgatctaaacagatcatatcagccattacatacttctatgccctatgttcagaatagcgagtctgatttcacaggtgtgtcatgtttcagccatatggataaatcattccacacaggccctaatagagtgaatctttctagtgttacacaatctgaggccagtctttaccctactgatcctttgcaacaagacgagttttcaccagtaattaaacaaaacttccaaccattatatagttcagacaaagtgtcattattcaaggagcactgttcctatggaaatgatttttcgaggaacaaaactgaagctgctattatggaaccacttgtctactcaaatcctcaagagctgtacactacctcaacagagcaaatgggtgttgaacaatttcaatcaggatgtggccaacaggacaatgatgtgagagttcagacaacatcatatgaaaggcatcagtcttcaaccttgtgtggaaaccagaactctcagttagagatcttgcaaggagttgcttcaggctcaacacagaagttcattgatactcaaaagagtccgtcagaagttcaacaaaacggatcaaaagctaagaaggtacggggtcgacctaaaacgaaaacttatgactgggacagtttacgaaaagaagtgttttctaatggtggggataaacaaagaaataatgatgcaagggatactgttgattgggaggcagttaggcaagcagaagtccgagaaatatctgaaactatcagagagagaggaatgaataacatgctagcagaacgaataaaggaattcctgaaccgattggtgacagaccatggaggtattgatcttgaatggctaagagatgttccaccggacaaagcaaaggacttccttctaagcattagagggcttggactcaaaagtgttgagtgcgttcgtctcttgacgctacatcatatggcttttccagtggacacaaatgttggtcggatatgtgtgaggcttggatgggtgccgcttcaaccattgccagagtctcttcagttgcacctattggaaatgtatgagcttcactaccaaatgattacttttggaaaggttttctgcacaaaaagtaagcctaattgcaattcatgtccattgagagctgaatgtaagcactttgctagtgcatttgcaagtgctaggcttgctcttcccgcacctgaagaaaaacgtttggctacatcggaggatccaaatgttgtagagttttgtcaccaaacatacataaattcaggggctgttggcgaacttgagtggagtgcgaactatcctaagcatgctgtttgtggtaacctgcagccgttcattgaggaaccactgagcccagaacctgaacctgaaaatgtagaggcgaaggacggtgcaatagaggatttctttaatgaagaccctgatgaaattcctactattaatcttaatattgaggagtttacacagaacttgaagaactatatgcaagcaaaccatgttgagattgagtatgctgacatgtcaaaggcattggttgccatcacccctgaagctgcttccattccaactccaaagctcaagaatgtcagtcgtcttaggacagaacaccaagtttatgaactgccagattcacaccctcttctggaaggatttgaacagagagaaccagatgatccctgtccatatcttctttccatatggaccccaggtgaaactgcacaatcaaccaatgcgcccaagacattctgtgattcaggggagactggtcaactatgtggaagtttaacatgctttagttgcaacagtttacgagaaatgcaggctcagaaagtcagaggaacactcttgataccatgccggacagcaatgagaggaagcttcccacttaatgggacatattttcaagttaatgaggtttaacgactgaagagatacaacaatgcttttggagaggattcgtttgtgtgaggggctttgataggacagtaagggcaccaaggcccctttatgcaaggttgcattttcctgccagcaaggttgttagaggcaaaaagcctggagcggcaagcgtcgaagaataataggtacatcgaagaaatatagaggagctaacaaaacggatggatagccctaaatgagatgctgacccaataagtcgccgaatcacctccaagttctaacccaatttttgaggcgacatgacctgttaaattatgttccatctatggtaacagcttagatgttcttgtgagtcgcatattctttactctgaaattcaatatagcaaatgaaaaaaaacacagtgcatagtctagttctaattgtacctgtgagtggaatcagttgttgtacaacatgaagatgggcctatttgtacaatggtcatacatgttctttgatcatatactataaacaatgtaacctcatcggccgttatttgattgtttcaaaacaaaggaaaagccttttcaattcatg

SEQ ID NO: 29339 - DNA, 794 bp, Zea Mays
tgcatgcataagctgtgaaaagccactctattagggaaaattgaggacattaacaggagcaaaatcaattaccattatgcagccacagaaacagaagctaagtgccatcagaacgttggtagcaatatcctctagaaaatttgttataccagatgtgcctgctgatattgttaactcactggaaccagaggttcttgtatcataccatagtaaacaaactgccgcagtaagtattagatccacaggcagatcaacatctcgctctacaacctgcatacctcctctctccaaagctagtatctgctgataagatgatcttcgagagaaaagcatattttttccatgatttccagtattgacaacaatcgccacctctgggccaggcaatcttcctgctttggtgctgtccattttctcactgagaggaaggacaccggcagattggttgacttggggggcttttatcacattcgcagatacaacagtcgaactgctcttctcaactacaggcacaaaattttgtaaattggcaatggttatttggttcaagccattgggctgttcagttgcagtcactaagttgtgtgaatcaacaatattcttttcgttcagatttcccgcattgtgcagttgaacatctgcaggaattttttttgatgaatccacagtgagatgattggtctgcaaatgttgctgttgatttgttgccggtataaagtttaatgaatcaacaatgcgcattttgttcatcttctcttgcaagtccttctgaagtgtatgcaaagcagcatcct

SEQ ID NO: 29340 - DNA, 1598 bp, Zea Mays
tgaaagtttcccttctttctaatggtaaatcatcaagaccatatgttggagaagtcattccaccatgtctactactgccttcctatggtgttatatctactcttgggaccatagcaaattcacaaagtctcgacacaatcggatggtttgcacgagatccatgtattcttcatcgtgttggtgaagttcttttaccagccgctgtaggtggacttaagcaaacaaggcaatttgtttttgccgatgactgctttcagctgctaaaggtctctaatcagaaaactgtgcatgccataaaaaatgctgtccaggcattacgtggatatcagccacctaaacacatcaatattggccaatatatttattccaatgtacctagcctgaaggagttttgcgaaccagctacaaagttagaagaaggaacatcagccctgaaagcaatctccacagtgatgttgttattacagagatatgagtttaaagcaaaccacgaggagtgggttaacactgttaaacctaagcttggccttgatatctctactcgtgtgctacaagccgtgaattttgcacgggaaaacatcaaatctttgtacgcaataagaaatgaattgcgggttgcactcaagaatcttctaaaggatactggaattttagttctaccaaccacagctggatatcctctgaagagaaactctaaagaaagactatcatctggatttgaggatagaatgtacaaatttgtaggcgttgctgcactttctggatgttgtgaggtcactattcccatggaaaatctggatcatcatgtatctctttcatttgtagcagcacatggatcagacaagtttctactccgtaatatcttggatacatattctctcatccaggaccaagtagttttggcatccaagttggaaactgcaccagtaaccaatgttgatgttgatgtcaatgcatcagagcttctaaaagaaaagggaaatagcgctttcaaaagaagacagtggatcaaggcaattgagttttactcagaggccatcagtttgagtgacacaaatgcaacatattactgcaacagagcagcagcttatctggaactgggccgttttaagcaggccgaagcagattgtgaccgggccttactgttggatagaaagatttcaggcatgctttggcattggagccacagaataaaacagctcttgcagcggaaaggaggctgcagaaactcctgaagtgatgtggggagcagcagcacatccgacttgtaaattattttgaagacttgcctggttgaaggcaattttgatcggcagcatgtgaaaggaagatgcgatctgctggataagagtcattaaactattttttgtttgccatcattcgaaaatttgtatctcacgacgattgtcagcaagttttgatatagcttcttgctatgaccgtctattaagggaaaatcttgtatatgcattgtatactacttcgatctgaaggccgagaacgcgagaacccatgcgagcgcttggctctgctggagtgtatgattgtgtagtgcaggatctaatttgggaggcgttgagacgccccttattctccta

SEQ ID NO: 29341 - DNA, 76 bp, Zea Mays
tagacaccactccaaagacacaattcaagagatcgatccgctcaaagcctcaaaatcaactctagcgcatttaggc

SEQ ID NO: 29342 - DNA, 1332 bp, Zea Mays
caactatgccctccagggccatctctctttggtggtgctcgccccagggaacaagttctcaaagaacgtggagtggatgttttggccagtgatctcgagaagacttcaccagttggcaggttgttatatgttgtgatgcatcatgttaacattgatagatgcatttcagttgtggcagggcataagttctgatttatttattggatcttgatatcaaagggtgttagagcatcttcaagagttcctaaaaagacaattggtaaatcaatgaattctctatgtggttaaaaaaagttgggttcctccaattgtttccaaaaatctttcttttaagagatataaggaatttttttgtatcagaaatcccggactatttacagatcacccattaactttaatattttctttcgttcttgtacatttgcattgtgaaccctgtccttactcttacagttccccacatccttccacctccagattggctgattgacacgttcgtgtatatttgggcacgattgggtcgatttccccacgtgtggaaagattgggagttgttggagatagttttttttttcaattttaccaaaaaattaaggttggaagtgggttttggaagctcttggagatgcacatagatggtagtttgttattactacatgaagaaacaataaacaaatataagataactccatggtttaaaagtcgtcgcctaggcgtcgcctaggcgacgcctaggcgtccaggcggggaaatcttctaggcgtcggcgccgcccagaggaaatcgtgtatggcgtccgccttggcgaggtaggcgtccgccttggcgtcgtaggcgtctgggcgacgccttttcctccctgggcgacgccttatctcgttttgggctttagggttttggcggctaggcgcgcgttctgttttgggcctgttccactgtgcgcgcgcggcaaaaatacattgtgcgtgcgcggcgccgcggctgctccttcgcgcgcaaatctctctgcgctctctccctgctgctcctctctccctgcgcgcggcggctgctcctctctccctgcgcgcggcggctgctctgcgcgcggcggctgctgcgttctccctgcgcgcgcgcggctgctgcgtgctcccagcgcgcggctccctgctaccagcgcgcggctgctgctctctgcgcgtggtcttgcggctccctgctccttgccgcagtgctagctgctgctgctgactgcgcaacgagtaggtttctgtcaagtgtcaagactgcagcgactagcgacaagccgacaacataatgtcttctcgaaatgaagctccatcttctgtg

SEQ ID NO: 29343 - DNA, 228 bp, Zea Mays
aagcttggattttcttgctctgctagattttgattgatttgtgagcttcggcatttgcacaagtgcttactagatggctaaagagaagaaggttattgaccctgcactagctgggttttacgaggctatggagaatacaaacacagagaagatcaccaatgaaatgctagctgggttgtctgaagattctggcgatagcgaaagctttgatttggaaagtggaaacga

SEQ ID NO: 29344 - DNA, 3785 bp, Zea Mays
cccatagaggtatggcattgtagccgacggacgaccgacgcgcaccccccgccatgctctccagccgaagatgcttcgcggcggcggccaaccgggtccggccgctcgccagggccttctgcgacgcgccggcctcgcgcgcggatgcgggggcctccgggacgcccagcccgcaggatcacgccgagaaggttgctgccctgaaggatccgcccgatgtgctagacgttgctatcgttggtggaggcatggtgggcttggctgtcgcttgtgcattgtcaaatatgccgttaacgaaacaccttagagtcgctattatcgatagcaatccagcgctgaagtcaaggagttacctggataaaaacagtatacccgattctagggtcagcaccgttacccctgcaaccatttctttcttcaagggtatgattctgaatcaactatgtgtatcatcgattcatcgtatttaattttagttgtatttcatcttgattcttgcaacggtatttggatttatgtttgagcttgtatgttcaggtggcatttcgtctagatgacctttcatgttgtttccacagatatttacacattttgtttgatcaactataccatgtgaccacattggatgtacataaaaagcagttcaatcatcattagttagcgtttggttcaaagttcgagcttgccatggtgtactagccctggagtcctgaacccagctgtcactcatggttgcaaaggcgactaggcatccaggctagagcttggtgtgccttgacacctaggcgataaggccccattgttccccaaggcgagctgggtatgcctaggtggcgcctttgaaaccgggttgacactcacccattttcttttcatagcttgcacaagtttgccgaaccgatttggctgccacagatggctccccaaatgaaatacagtaaagcatttctttcataatctccacgttccaaatcacagtttactttagctttggtctaagtcaaattttactaactttgacctagttctttaggaaaatatactaacatccatgatatcaaataaatatactattaataaatgtttaatagaaatttagtgtaactattttgatgttctagatttgatgattttttctataaacttcatcaatgttactccatccagtgttttcttagtttcctatccagtgggacatattatggtgatatgtcggaaatcagttagaaacaagcatgtcaatatatatggttctgacaaccactctttaatttatccaaccttcttcaaagtttatcacaacaaatgccaaattttccattattgtgttgttctttgattgtttctgtttcattgtggcagtggcaacactgccaattttctttcaggtcaccagtttagactttcagctgtgtgtacatttattttgacagaggtaaacctggctttcataaaaagcttagaatgttacagataagcaactgctagggattctagcttagagataagcaacacaactaacaacagagaacagagttacagaaaagctaagaaaggggatacagcagaaagcctaaaccacaagctcctcaactgagtccacctcaaaacaaaactaaaaagcctaacgactggcgactccctccacctctagatcttcagttttcttccaaaatgcctgcaaccaactctttgttcttccaaaatgtctcagaagaattcgtcatttctgcaagaacactatgatctgtggtttcatttttttagttgtgtgtacatttcactactgtaactgtaacaatcacaaattaccatctgttgttaaattttctgcactttgtgcacattggaaatacaaaaataaatgtctattttcaccaagtataatttaaaaatgatacttttccatgttttaatgtgcatggcttgttttgctaccggagacaatagtgcattattggtaatgttcttcgtgagtgtgtgtgcattattgtggcagatattggcgcctgggagcatgttcaacagcaaagacatgctttctttggtaaaatgcaggtgtgggattacactggacttggatacacgaggtataatgctagagatgtgggcaaagaacaccttggatgtgtggtggagaacaaggtgctttgcaactcactgctcttacgtttacaggaagaattggatgatattgaaaatgtgatatatcctaccagattggtgtctcttactttcccgttgaagaccagacaagcaggaatgaaaccaacatcaagagaaccattatctgttggtcatactacagaagagttccatcgcagtcatttagttaaacttgatctcagtgatggacggagtttatattccaaattggtgataggagctgatggttcgaagtccaatgttagacagattgcaggcataaaaacaactagttggaattatccgcagagtgcaattatctgtacagtagagcatgttgtggaaaatgattgtgcgtggcagaggtttctcccttctggtccaattgcgctacttccgataggcaataacttcagcaacattgtatggacaatgagtccagaggagtcactgcgccataagtcaatgagcccagaagagtttgtgaattctgtgaaccacgcattggattttggttatggtccgcatccacactctaccgctcttgaccattacatggaacagttcttttctggcattgggagcagtgcagcatctacaaaggaatgcttcgaagtgccaccgaaagcaacccgtgtagtttctgagagaatggcgtttccattgtcgttgatgcattcccatgattatgtttccaaaaggttagcattagttggagatgctgctcatactgtccaccccttagccggccaaggtgtaaacttgggctttggtgatgctgctgctttagcaaaagttattgctgagggagtttcagtgggctcggatgttggggatctgactttgctacagcggtatgagaaggagaggaaggctgccaatgtggcgatggcagcagtgctagatggttttcagaagatgtactctgttgatttggggccccttaatgtagtgagagctgctgcgttccacggtgcccagtacatatcaccactaaaaaagaacatcatctcttatgcaacgggtgacacgaaatggtcactatttcagtgaacagcactgctttgaaactcttgtcctcacctcgttctttgtttcggcatgtactggaaacaaagaacgcaatcagtaatttcgttcgaaagacatcctcatttgggctgtttggttactgggacacgtcaagcgcccgtctcgcgctagcctggatccctgggaacgtagctcttctgcgtttctgctcgtacaggccagcgaccaaaaaaagctctatactgcatgcgcgggtgcaagcagtcgtcatgcactacagtcatccaaacacgagctcagcatggtcaacgtgacgccgtgggcctagacgccaccagccaatcaaccaatcatgcgaattgtgttgctttcgatcttagtgttaatttgagcgcccgaggcccgacctagtttgtgaggggtttgtcgacggatgagcttgctctggctggtgcatggatggaagaagcgggatcagctgacgccgtcgaacttgctgctcatcagagacaaggtcgcgctcggcagcacccggctcacctgaggttgctctgcatgcgttaagcaaggatcagatcgacagagcacctcatatgcatgcatggcat

SEQ ID NO: 29345 - DNA, 3934 bp, Zea Mays
atggatcgcgccacgccgcgcgtttgcggccgccgcggcgtatcccaagcggcggtggaagctgcgccgtcctcctcccgcgcgcgccgccgcgataaggcgccggccgttgtcatggaccttggcgacgacgactgcggcggtggcggggccaggaagacggttggtggcgctgcaggtaggtgcgagggatccacgaaggctcctttgcctctgctgccgccgatgatggtgccggcgggagcggtggcgctgcggacacgatcgaggaggcgggcgatgctggcggcggcagtggtggaagaggcgccaacgaagaagaagaagaaggaaggagcgatcccagatgccgcggaggcgccccgtggccacgggagcaaggccgctgctacctcgatggcgacgtcgagccataagcggcgcgctgggacctcgaggtcgacgtcgagagataagcggcgcgcgcgctcgggacgtgcctcggagccagctcgcgtgggccgcgcgcgcaagcgcaaaaggaacgagttggaggcccccgctcggagagaacgtgtgaaggcgccatgtgtcagtgaaagtgatgacaacagcgggcgaggcgatgacgcttctcatgacggggatgcggagcctcgcgtcggggtcgccattggcactgatctggttaacggggatcatccggcagctaaagaggtagtggaaggtgctggtgacgaggacacaggggacggagggaacagtggcctggcatcgactgctgatgtgtttgctgaggagatggcaccctttgaagatgactacgatgatgagatgttggaggagcagcttgttggagatgtgattcgtgcttacagtaatggcagaaacttcgattcagatggagtggattgggaggcagaggatgagatggagttcaatgacgatgctgacaatagtgattttatggatgatgctgacgatagtgattttatggatgatgcttatgaaggtggcaattccaaaccaattcaaaatcatgctaagttggaaatacaagactgggtgaaccagaaagttgttttgagtggagggaggtgtgaggcgaggggcgagggggatctggaggaagaattggatgtgggaaaggaagcagatgaggaggacgtggaaccaaagagtgaagcggctccaggttctgataaaagggtcttgcagttagaaatcctaggttccgatgaggaaatcaaggtgcttgaaaatatgagtagtgccccatccaggaaggcgtcagttcaatcgaagttaccaactattccatcttgtgttgcatggagaacccgatcatcatggggggtaaatcaagatagactatcgtacgatacatattttgaggaattatctgatgagccaaaagaggatgatgatgatacagaggtggaacttgatgaagttgaggatgacaacaatgacgatgacagtagtgatgcttatgataaagatgacgaagagaaggaggaagaggaagaagaggctgaaagaagaaaacttaataacaggatttgcacatccgatgaagacatgatcaatattactgttcctacatcaagatatgatatgtttaagaaaaaaaattcctcaagatatgatattgagtgggtggaggatgaagatgcaagtgttgatatgttacagccagtttcctttaagaaagatagcagctggaagcctgtggctgttggcaacgacacatttactgagcaacaaaagcgatcacgatttacttgggagcttgagaggaggaaaaagcttaagcttgagatgaagacaaatcctttgcatgagcgggatttggactcagatccgaactcatcaggttctgaccagatcagaaagtatggtttcaaaagtgatgggagtcataaagttgataggaaaaagaagcatacatcgcccaaatcgggcaagaaacccagcagcgcaatcatactaaagcggcagtctcttttgaagcttttggtagataaaatgagtggtgataaaagtttagcatcttttccatttgatcagaatcctcagcttcagtttattttcaaagaaatgcatccattggtattttcatttggagatgaagatctagtagcagctgacaggccagagcaagatgttggattggatatgttatgggctgactttgactttgctttagagtctgagaatatcggtacttattatgatgatgagtgtcaagaaggcaatcaactagatttttctcttgccccagtaacaccctgttctcgtgggaagcatgaatttgttattgatgatcaaatagggatcagatgcaaatactgttccttggtaaacctggagatcaaattcatgtttccatcactggtgtcagtgtttgccgagaaatcagcatggccaaatgacaaaggcgtgaaaaatacactgatgtttcatgatctttatgaacaaggagtcaatgacactgaacaatctcaagatattcatcaatatggaacggtgtggaatcttattccaggggtcatcagtactatgtatgagcatcagcgtgaagcatttgaatttatgtggacaaatttagttggtgatattagacttgatgagataaagcatggagcaaaacctgatgttgttggtggatgtgttatctgtcatgctcctggaacaggaaagacacgattagctattgtgtttatccagacatacatgaaggtgtttccagactgtcggccagtgattattgcaccacgtggtatgctctttgcttgggatgaggaatttaagaaatggaatgttgatgttccttttcatatactaaacacaactgattacactggaaaagaggatcgggagatatgcaagttaataaagaaagaacataggacagaaaagttgacaagactagtcaaactgctttcatggaacaaaggtcatggtattcttggaataagttatggtctgtacacaaaactgacctctgaaaaacctggctgcacagaagaaaacaaacctctagagttgataaaagagcatcttcgcaagttcttcaaatggagagaagggaaagaaattcttcaaatggatggaaagatccttccaagatatcgccaggcttccattgaagccttcaataatccaaataatgattccagggtgttacttgcatctacaagagcatgctgtgaagggattagcttgacaggtgcttcaagaattgtgcttctagatgttgtttggaacccagctgttggaaggcaagccatcagcagagcatttaggataggtcagaagaaatttgtatatacatataatttgataacttatggaacaggtgaaggtgacaaatatgataggcaagcagaaaaggatcacttatccaagttggtcttctctacagaagacgagttcaataatgttaggaacatgttatctaaagctgaaatggagcactgttctaagtttatctcagaagataaagttttggaggagatgacttcccacgatcaacttaaaggaatgtttttgaagatccattatccaccaactgagtcaaacattgtctatagttacaatcaaattgctactgagtgaagtcggtggtaatagtcagtaccagattgtttgtctatatctatggctaggcatgcgtgggaggaccctgcaggcttcattttctttattattgtctaccgcacaatgaatctgcaattttgtatcttgggaaggactaaaagcagaagttaataatgggtggcagagccacaatgtacatggtggttcacaaggttgtgggcattacgatgcccatacctatatccaaatgtcatgtctaataataaaactattggacctttttggcggttcaattttatttacataaaagacagcctcaattcgaatacataggctctgccccctttcagca

SEQ ID NO: 29346 - DNA, 221 bp, Zea Mays
gaggtatggacttacatctgggccgtcgaacgcgctgggctcaagggctcgaatgagtcggagtactcctcggacaaggagaactcctccgactcgtccgaggagggtagcggcagcgacggaggtgacggtgacggcggcggcgacagcggcaagggcggtgacggcagcggcaagggtggcagctgcgacggtggcgacggcagcaagggcagcaacaa

SEQ ID NO: 29347 - DNA, 1412 bp, Zea Mays
ccgccgagaaacgagatcattttttccaatgcgagcggcggcgccaggaaaggcaagcaactgatatcactgccacgtgggcccttccccttcgaggagcggcgcaaccgcgcttcgcgttatccgaattccgaaaaaaaccaacagcgcgggcgtggggtaactgacgtgtgggccgagaaacatgtcgtctcacctcgccgcggccgcttccgcccttcctctccctcttcctccgccggcggtcgccgcgccttcccgcgccctccgagctctaatcctgtcccggggcggcgccgccgccgtatgctccagtctgcgccgcggcggcacgccggcatgcctcgtgcgtcgcctgtgctcccaccactccgccgcggcggcggcgacggcgttggaggaggcgcggcgcgggcggaagcagctcggaatgacgcctgcgctctacgactacctcctcgccaacgtccgcgagcaccccattctccgggagcttcgcgaggagaccgcggctatgagggggagccagatgcaggtttctcccgctcaggctcagctgttgtcaatgcttgtgcaaatccttggggcgcgccgttgcattgaagttggggtattcatcattagctgttgcactggcccttcctgaatctggtcacttggttgcttgtgagagggatgacagatgcctagaagttgccaagaagtactaccaacgtgctggtgttgcacataagattgatgtgaaacatgctttggctgcggattctctaagatctcttcttgattgcggcgaagcttccagctatgacttcgcatttgttgatgctgacaagagaatgtatgaggaatattatgaacttctactgaagctagtaagagttggtggtttaattgtaatggacaatgtcctttggtatggaagggttgccgatctactggttgatgaccaaaagacgatcagtataaggaacttcaacaagaaagttttagaggacaagcgtgtcgatatcagcatggtgccaattggagatgggatgacaatttgccggaagctagtagatacttgagttcacaacgtttttgtgtagatgcggaaaacttcttaccaaggtcaagccctgaaaaatcaaactgtggcctgggctctactaaccacagtggtggggaagcagttggtggcagtaattttgattcgctgcttagaacgctgagatgagtgtggcgtgtcttgcacacagtataacttgaattcaagtacaaaaccagtgttatggtgttttgttgatagaccacagtttcatctcaggtgtatatggaactatggaagtgtggtgcacgtattaaattgtgagtcgtgatcatccattttatatctaatggttgctctatatattttacaaacaacatcttct

SEQ ID NO: 29348 - DNA, 259 bp, Zea Mays
tctctctatatatatatatgcacctcccaccgatgcgaacccgcttccctctctcttttcgcaaacagtagtacccagcgccctgaaaggctgatgcgtcatggtgtccctacgcacaagcagcagaaccgtcgtagcctgctccatcttcggcgaacttcaccttgcctcagcggctcagcctatgtgtcgtgcggctggccttgctcacgtagcgccacccttcctgtcctcatgggcgtcgccgtgaacgcctccg

SEQ ID NO: 29349 - DNA, 2566 bp, Zea Mays
cattatactgccataaatttcttagagctgataaaatacatactgcgcgttgcaagctcccacttcctgaggaacaggaactccatgagatccgcggcatccgccgtcccgttcatctgcacaaaaagaccgtaatccttctttttcctctcctccccatccgcggagtgtaaatcgtctctcgctagcgcgttcagtagaaaccctaaaccccgcctcctcccctcgccggggtaggggctacgggtgtcaacgcccgccatggacgcattccggaagcaactggatgtgctcatgggcgctaaccgcaacggcgacgtcgaggaggtgagccgcaactactacgaccgcgacgtctgccggctcttcctcgccggcctttgcccccacgacctcttccagctcacgaaaatggatcttggtccttgttctaagattcactcgcttcaactgcggaaagattatgaagaagcgaaagcaaagggaacagagaattttgacagagaactcgaggatatgatagaaaggctcattgtggagtgcgacaggaaaattcagagggccctgaaacgacttgcggatgacgatgccaaggctgctattgcgatatccgtctcggaggttactctgacggatgacatactgcagctgtcaaaacagatcaaggaaaaaatggtagaagttgatgcctttgattttgaagggagaactgatgataaaataaaggcccaggaagtagtggaagaactcagaactaaaagagctgatatgcaggctaccctcttgcttgatgcttttaacaaggacagagcttcattaactcagcctgctcaacctcctcaagtggcggcagcgccaccaccagctccacccgatgctcgtactcaagaaatgatcaatgaaaagcttaagaaagctgaagagcttggggaacaaggcatggttgatgaagctcagaaagctttggaagaggcagaagctctgaaaaagctggcgcgacgtccggagccaccttcagacccttctaaatatactgccgctgatgtttggattaccgatcaaaagttgcgcctctgtgatatatgtggagcatttctgagtgtatatgacaatgatcgacgtcttgctgaccattttggagggaaactgcatctaggctacatgctgattcgtgacaaacagaaagaacttcaggtgctgagtgtaatgtaccgttttctgctttaaagagttactctgttttgggccttttggcatctgaattagtccatgtcgcgtgattggaatctcatgcgatgatcttcatacctatggctacaacagtcactgtctgttgacaaatgtaagcataggagcgtgcggaccatggtatgaaaaaaatcatgtttacttaattgtgacaaactgctcatgtgtctgcttagtatcgattgttgggcagaagctggaggttgcctttttactgcctgagccatattatgtagaccaggtgacaaataatactggttaagttatcctgaaagcacacttcttttgccaacattttgctgtaagtgacaacttgttctgttttctatctgctacctcctccataagtttgcaagttacattttgctgaagcaaccttgcctgtaaagtatcgcccgccctatcttttggaacgttgtctctgattttaaatatgccaaaatatcattatctgtactgtcaataaacaaaatacactgtggcatcttgcaggagcagagaaacaaaaggaggacaggcaaaactgaagatgataggcgatctagagagcagagcaaggatcgaaacggcccgccgtccagggatagagattcagaaaggagagacagggttgagtctcgagatggaagaagagattatgatagggaacgcgataggcgtcacgatagggaccgtcgccatgaccgcgaccgggatagggattatgaccgctcccgcggatatgactcaaggagaagagagcgttcacgctccagggagcgcagcaggcgccatgagagatactaaatgttactccatggctgacagattttggattgctggcgtctgttctggtttgtgttgtgctttgtgtcttatcttccgaagtttcctgttcctgctcgagaaatccgaaagccaatctgcgttctgcatcatgtcatgtcctagtgtcgtactgtttagttatatgccgagaacatctctttcatcaaatgaatatttggaaacaccaacgcacttgacgctaaatgggaatgaagtgtggagtatttaaacgcctctgaaatcaaatgaaagttgtacttgtacgaatctcttccacaaattgcactgtatatgcttgtactgttgcagatttacgatgggtttggactgttctccatccccggagcgcgctcaggctcgacgctacctagctacggacctttatttttggtacctgatgaaacatgatggttttaggaggcgcggtgtttctctggcgaacgatggccggacgtccattttcgagaaccacaagacaagaaacatattcaaaaaaaaaaaactcaacaat

SEQ ID NO: 29350 - DNA, 1641 bp, Zea Mays
gccaggtccatgggaccactctcactcatactccctcgtccctccgtgccaaaacgaaagggaccgctgctctgctctgcctgcctccccttcatcctccacttcttcctcttggtctggttcgggcagagcatccgcacctgctcggccgattaccccggcgttttctgttccctttcaccccgcgtgcgggcgctatccttcccgtggcgacgtctgggtgaccgctgccgcagccctacactaggttcctaggtattcgccgggcccttccccggcgacgagcacccaccatacatttggatcaagaacctcagcagccacctacaacatatcctactttgactccttctcagtcatcagaaggacgcaaccatcgtaccagtggtattgttttgcatcttggatgtatctcaatttcttgcccaaggcttagtgtgctggcttatcacttcaagacaggtgttgactgtttctttgctgtatggtttgttgttggcaatgtgtggatttttggtgggcgcagtatttcatcagatgctcaggacgctcccaatatgtacaggttgtgtttggcattccttgcgcttagttgtgttggatatgccattccttttataatgtgtgcagcaatatgctgctgctttccatgcttgatttctgttttgcgtcttcaagaagatttgggtcaaaatagaggagctactcaagagctaatagatgcattgccaacctacaaattcaaaccaaaacgtgtcaaaaactgggggattgaccatgcttcaagctcagagcatcttgatgagggtggcattcttggcccaggaactaagaaggaaagagttgtttcagctgaagatgctgtgtgctgcatctgtcttacgaagtatggagatgatgatgagcttcgtgagcttccttgcacacacttctttcatgttcaatgtgtagataaatggcttaagataaatgcggtgtgcccactctgcaaaacagagattgggggtgtggttcgatctttctttggcttgccatttggccgccgccgtgtcgataggatagcggcaagaggtgtagctagctcaagattcagtgtatagaacaatgctgtttttccgcataaagagctctgctctgttgcaatggtttgattgattgtcaaggaaagcgctgtgtgcatgacttgaagacaatgacacctggtgggagacctgatgcttgtaggggcaaatttctaagaaatgtaacggactgaaggtgctgctatactctgatgaacattttttttccaagtatgtaaataaggaacacgaagttcgcttgccaggtataatgcaactttgcaagcaacttcacaggtgctctagcatcggccttggtgttctttccttccttctggttctgtgattctcttcataacggcaatgcactgcatgcattgtaaggctgtcttcagtagcttactcattctagtttctatcatcatatattctattttaaacttcaccttgtaaacagtgtaatttataatataaaatagttatttataatataaaatggtgttttatgcgatcatatgcatgatttgttggagattgtctaaattgtgaaataaaaggcaatgacctatttatggaaccc

SEQ ID NO: 29351 - DNA, 216 bp, Zea Mays
gcccgcgtggaggtggaggcagacgaggaggcgagcagagaggctcacggtggcactcctgaatcctgatgcgtcatgcgggcagcgttggtcggctttaatttgggctttgttctttacaccaatccgacttctggattagcatggattgaaattaaattcatgctccaatcaatgactatttaaatttttttattcggttaaacacatcataca

SEQ ID NO: 29352 - DNA, 1545 bp, Zea Mays
atggcttccgaatcccgacgcgtgagaaacgctagaggcccattttggttcccatgccactaccgggctttgacagtgcaccagcccgtgcagtcgagcaaggtattgcggcccgccatacagtcagctgcttctccactgctgctgctctcgcctttattgctacttcgttcttcctcgtttgcttcgtccccgcggcgacaacatccaccaccaagtcgtccactccgcgtgaacgcatccacgctccaatctcatctgttcgcggccgcctacgcttcctccgcctccagcgccatgatgaaggacaagatgaagggtttcatgaagaagatcacctcctccggctctgggaccccgtcctcattcaagggcacctcccacgtcctcggctccggcccctccccctcctcctcctcctcccaccccgcttcccgcccctcagaccctagcgcaaaccccaagcctgcccctaagcggccctcgccacctcccccgcccacttcaaccaccgatttcaccccgtacacgcccctcgtctcctcctcctcctcctcctcccgccgctccgtcgcgaatggcaccgcggccgccgccactatcgcgtgccccagctgcgaagacgcgttcccttccgagcttgccgtcaccgagcacctcgacggctgcctcgcgtccgcggggggcgcccgcgcgcgcgccgccgcgtacctcgctgccgacccacccccgccgcccgctgccgttgaagtggtcaaacgcctgctgggcaacctgctccgggagcccagcaacgacaagttcaggcgggtgaggctgggcaacccgcggatcaaggaggccgtggcggacagagaaggcggcgcggagctcctggaggccgtcgggttcagggtcggggatgagggcggggagcccttcgccgtgatggacgaagtgcccagcgacgccaggctcaacggtatcaggagggccctcctcctgctcgagggggcacactcctctgcggctccagggaaggtggaggctgaggccaaggagagttgcagcaatgtgcctgatgtgctgcaggacggtgctatgacaattgatcggcagattcgagtatttgtctctgttcccgggagttctgtgccacaaaatgatgtaccagattccttttacaagcttagtggtgaggagataaggaatgaagcaaagatgaggagggaaaggttagaacaatctaggttgctgataccaaagtcttacaaggagaagcacgcattggctgctcgacagaagtataaacaagcagtcatacgagttcagtttccagatagaatgattcttcagggcatattcctaccaggggaggccaccggttcgctgtatgagggctgccaatttccaacaaaaaactgaggaggactgatctctggttttgggttgaaaagattgcagaccggttacctagttggaaggcttcccttcttaaccttgctgggagaactgctctagtccggtttgtcctttctgccatcccagtttatcttctcattgcct

SEQ ID NO: 29353 - DNA, 688 bp, Zea Mays
ctcacattgtactgtactaacagctatttcagagattggacactcagcatatgttgattctccactcgggccagatgcgtttcgggaatatgaaaccttacttattcaggaccatgatgagcttcttaagaaatctgagaatttagacagacataaagaaaacattcataaagaggcgagtgattttacctctgacgttgataattattctaagtggggttctggggtgcattatggctctaattctgagtctagcccaacgaaaagggattttttgatgacgaaatgggccagggtttttgttttgccctctgaaggcataattgctgactcaagcctgtcgaatcatcatgaggattcccttggctctggtttaccctccatatctactggtaaaccttttgatagtgacgaggtaccaccaggagtgacattgactgcccagtttctgtaccatttggccaataagatggacctaaagcttgatatattttcacttggtgatacatcaaagccagcaaatggtgaagcagcaagccccaagaagcagagcccatctggctcacgctctcctgatttgttaatggcaaacacagctgaactgacaacaatcggtcaaaatttgcaggcgaagcctgaataaaattgctatgctgttaaaggattccagatggagtcaggagctctt

SEQ ID NO: 29354 - DNA, 2378 bp, Zea Mays
ccgcaatggcgggctctctctttcccgctccgaaacattaaaccctagctccgcgcaccatttcccgaatccccaacccagcgatccgcctccagcgccgggccccaatcactgtgcgaccacgatgaggccgctgccgaagaaaccaaatgcagcgctgccggtgccgaagcaactcaaggtgcatcacccggaaaatgagtccctctctcgtttcttcctagagaagtggcgggcgatgatgcaggagccggatgggctctcgcagaacaactacctggccttcgccaacgccaaccgcagcctctgctcctccaaggagccaatccggaccctcaaggacttctcgaacgtcaagggtgtgggaacatggctcataaatcatatgaaaagtttctttgaaaagtcgagtcaggatttatctcctgccaaaggaaagaaagcaaaagggacaaaaagttatttgccaaggaagaacactgctgcttatgccatactaataacactccatagggcaaagactagcgggaaagattttatgatgaaacaagagcttattgatgctgctgaagccagtggactgtcacgagacgcgattggtccaaataaaagtaaagcaaaacagagttacgggaaggactggtacactggttggagctgcatgaagacacttctatccaatcgacttgtcaccaagtggagtaacccagcaaagtatatgctaacacaagaaggggaaggcactgcacgtgactgtctttcacggtctggattagatgattctgcacggcctctaacgataattggtgctcacaacacatctgctatggatccttctgttgccaggcacagtcctgagcttgtcagcgacagttctctgacaaaaaagaagagcaattgctaccgtcaagttcaagctactaattacgaaggaatcatttgttgcgattcagattcagaagagccatgtggaaaggacattcccctaaaaggcatggagcctattactagttgtggaccaccagatatttctcgtccattccaaggaacacccaaactgcaatcttctacaatgggttctgctaaactagctatgccacctcgtcgagccaatgaaaactttcttgaagcctatgaagttattttaatattggatgaccgtgaaaaattcgggtctcgttcaagaaaagttgctgataacatttgttccctgagccattttgctgtggatgtcaggcaattgcctgtgggagatggtatttggattgcccgtcataaggaagatcacacagagtatgttcttgatttcattgttgaaaggaaagaggttatggatttagatggctcaattgaagacaaccgatatagagatcagaaattaaggatgaagaaatgtgggctgaggaagttgatatatcttgttgaaggtgatctcaaccgtgcaccaaagagggttaaaacagcctgtttcaccactgagattctcgatggatttgatgttcagagaactactgggtttgccgatacccagaagagatatgttgatcttacacgttcggtaatagcatactatgatgcaagtttctcgatcgttggtaaagcttcccctgtttgcccaacctacgatgacttcaagagaaagtgttatgatcttaagaagaaaacagtgagcgacatatttggctgtcagcttatgcaggtaccacaagtaacagaagaagctgcacaagctgttgtagagctctatccaacccctttgttactggcaaaggcatactctatacttggtggcgatacctctgcacaagagaagatgctaaagaagaagaacgagatggtaaatgcaggagcaagccgaaacatatttcaccttatctggggtgacggatgaaaaatactctggactggaaccagttgcgggccaactgaactttggtggcttatggtgtcaccgtcgtggtgaccatcttttgtgtctccgagatttagaggctcccatgttctaaagcaaatagtggctccatagaacactagggatctagattaggaagagtttctctctacgtcgcgtctagagagtactctgctgtggtgtcgtggttgcacagtggaatgaagtggtcccttggatttacgtggtcgggatttcgtgtatcggtctgggttgtctggattatgtgctgtctcgagctacctcggggctgttaagtctacaggatagcataaaatatcgcagtgtacctacagggaagattgtatgggtcgcccatgtgttccatggtcggcgccttgtctggtcatctttggctgaggccctcctacatacaatgggtgtcgctttggctggccaagacaagagcagactgccctgccgtttg

SEQ ID NO: 29355 - DNA, 3088 bp, Zea Mays
gctgtcaatcgcctccccactgcggcagatccgcaatccgctcctccaccaccgcgctcctcacccacgccagggacaagactgtctacctccacgcccgcctcaccaactccgcggccaccgccaccgccacgcccctcccccatggtcgtcgagtccgagtggtggaaccagcgacgcatgcgcgtcgagggcgacgtgaaataggtgctccaccgcgggcacaacgggcacagtggaggtggaacgagcaccatcgagttctggttccaccgaatccaccgctcgcacaccggatccatcgctcccacatgcccgcacaccggatccaccgctccctcccccgcgatggcctggttccaccgagacaactgcggggctagggtttggattcgtgggtggagcccaaggctagatccagcagggggagggaggtagaggaggggagggaactgctggtggtcggcagtgggcgaaggcgcgacaatccaggatatggattcctgagcgtcacccacccgcccatccacgtcgcgcggtgtagtcatcccctatccgcagccgcctcgctccctctcccacaacaaatccattctcctcctcccactcgacgaggatcgcgaggatgctggaggacgtcgtcgctgtcacgcttgacgttagggcctccgatgcttgacgttagggcctctcgcttgaagaggaacacaaacagagctcatgttttttattttgctctgcattatctactgcttctctgtgggggcgttatttacagtatgtggcctgtttgttgtgttgttcctgcggaagggcgggcgggccgaaggtgtttaagaaaatgttgttgtcaacatcaacctcctggaagggccagaacgcaggcagcgcctcaactcgtcaccccatcagcacggtgagccccttatctggattgttatcatggtacgcggtgcgctgcaagcctgcaagtgacatcaaattggattggtagtcagcgggtgtcatagtgtcagttcgatggaatggttctgcagtgcatgtgcttctgtaatttccgcaagaagcagtcaacttctccctgatatggcactaggacattgtagtgattcccgcacgtttgtggaactcgacaacctaccagagcgccagatgtttcattgagaagagaactcctccagtctggctttccactggtctagtctctcctttaaaccaaatttgataccactcattgaagtcaatagctgggatgtagacatgtgaaaccacacctgtggaactttcagcgtgtgatgactgggtcactggtggaataccgtgttttttgagctgctcgctttcagttcgcggtcatagtcctgtgttttttgccttcagtttcttgatgtagttattgcctaaaatttctatatcttgttcatcgtactggagatgctacttcatgtggagctggtatgtaggatgattatcacgagtacttcaagcgctcattttaggaagacatcgctgcgcaagtgcctcaaggagtggaatgtaccggtttttggttgatggtgtctggaggtgtgatgagacaaaaccctttgtacgtgatgaatatggactgatcagcaatgaagtgcttgtggaaaacaatgtactacccgttgtgcagccagagccttctatcagaggaactaatatggataagggtaccattttgaaaacaatgcccctggagccatcatctcagaacccaagcatgcaaatagcagttatccgccatgtggtctctggaatattattacacaataccatatatgacgttgttcccctttctagcaagggtcttgctctggttcctttttgggatgaccgtcagggaaccataacaggcatgctcactgcatcagattttgttttaatcttgagaaagttgcagagaaacattcaagttattggcaacgaagagcccatttctgcttggaaagaagcaaagctacagttctatggtgggcctgatggtgctgtcatgcagagaacgccattaatccatacaggcaacattgatctcagggccaagaaagaagctcaactcggcatgcttcctgtttgaagcaagggcaacaaacttaccccaccagatctctgtcgccaaagcagggctagtgaataagctgtgtttcctcccggattgtcactgcttttatatttgtgcatttattttgagggaaacattttgcccaaaaaaggcctgcagtgcacgttttaaacaagtcatttgaaccaactcttatgctgaaaactgtatgtgatactgcagaaggcaacacactagcttgataggaaagttggttggcaagcataggtggactctggtgccttcatatatctatatatatattttaagttgacgatcttcgtgatgctgaaactgatgaagacctccgatgaaaaaagagacatgctgcacatgcacgagggtacttgcagatcgatgtcggctctatggacgaacactcgaccaagtcagatgaggagtatgagggcctagccatgcgcgacgtgatggctactggtccgacgatgagcagcaagctgtgagttaaagatgaactcacctgccctggagagtaacatccataggagtgaggcaaaatggctggtaccaccacaacatggacccgttcctgaagatgtccaaggaggtggtagccgacaccataatgtcttgtgtcattgtgtcaccggtcggcaacacactgcgctggtaccggcgggtgttgtgtttcttaggcgtctgcttctgtgctttgagttgtgctatagagtggttgtgccaactactgattttaaaagaaaaaggtgagctgagaatcattgttgaaaacaaacatgtaattgttcgttctcatcagttgtgccaactaccaagcatttcattgatcagaatttatcgttgctcatgagaaccaaaagtaagacacttctcaataacattggatgcaaatttctgctagcttatcttcactatcttttctcgtatcaatataacacacatttatacataatttttgtgttattatatgttttcgttgcaacgcac

SEQ ID NO: 29356 - DNA, 2928 bp, Zea Mays
attttgtcggactcggcttcttcatggattcatggagaaatttatttacatgaagataggaggattcgtatcagcgtgatatggataggcagactgccagccacaatagtagtgaatcattatgttcttctggaatacagtatggtctaaatcgtggacctggaactattggaggcctgcactctagcaatagtttacgaagcttggatgaaattccgaacaatgatctgccatcaaatacatttgcttctcttttagggtcatctctttctaggagtgcatctccagatcctgagcttgtgaggagggcccctagtccatcccttcctccaatcggtgtgaaagttggcaacactgataagatgaatggtggttcctcttctttccgtcgtagttcatccgcaatcggtggatctgatgatctggtggctgccttatctgggatgaacttatcatctagggcaatgagtgggcaaactatggaccagtctcagctctatcaggatgttgataacgtccagaagtttctttttgatcgacagggtgaccaaccaaatggcaatcagcagcactacatgaggcgtcctgagcatggacaatctaagttatctgatggatattctgccaatttggccaattcatccacgatgagaaaccagattaattctggcagtttcacatcttttgacagtttgtctcttggatctggctttccttcccctaggattggttctagatcccctggagggactgtatcttctcgacaaaatttagctggtatgtctaacatgctaaactataatggaattggaagtccaactgcgtcaccttctcttcagacttctattgatccagcgtatatccagtaccttgctcaaattgcagctacctgggatgatcctctaatggacaggagccatctgggaagttcttacatggacttacttggtacacagaaagctaaccttggccctttacttcagtcacaaaagcaatatggttactgtggcaatcttggatttaaccttggtggttatgctggaagtccattgacaagtcctgttcttccctcttcacctattgcaccaggcagtccacttaggcatggtgaccgcaacatgcgctttccaccaggcatgagaaacttcggtaattcctttggttcatggaattcaggcatgagtggaaagatggatgctaatttgatgccctctctcctggaggaattcaagagcaacaaaagtaaatcatatgagctctccgaaatagctggccatgttgttgagtttagtgctgatcaatatggaagccggttcatacaacagaagctagaaacagccagtactgaagaaaaggacatggttttttcagaaattatgcctcaagctctcacattaatgactgatgtatttggaaattatgttgtccaaaagttttttgagcatggaagcactgcccagataaaggaattggctggtcagcttattggacgtgtccttgctcttagtcttcagatgtatgggtgccgggttatacagaaggctatagaagttgttgatttggatctgcagactaaaatggttgcggagctggagggtcatgtcatgcgctgtgtacgtgatcaaaatgggaaccatgttatacagaaatgcatagagtgcattcctcagcatgctatcgagttcattgtctcgacattctatggccaagttgtaatgttatccactcatccatatggttgccgagttattcagagggttctagagcattgtgatgatcctaagacacagcaaataatgatggatgagattctccagtctgtttgcttgctagctcaggaccagtatggcaactatgtggttcagccccatgagagatcagccattattgagaagctaattggccaagttgtgcaaatgagccagcaaaagtttgcctctaatgtcattgagaagtgcttagcctttggaaatcctgtagaacgtcaggttctgatcggtgagatgcttggatccactagcgaaagcgaacctcttgaggtaatgatgaaagaccagttcgcaaactatgtggtgcagaaggtgctagaaacttgtgacgatcagcagagggagatgatcttaacaaggataaagacacacttgaacacactcaagaagtacacatacgggaagcacatagtagcgcgtgtagagaagcttgttgctgctggagagaagcgccttgggcttcaaccagcatgcaccgccgcctgaagggcaaactctctaagttgtacagctaacagttgctaggtttgcctcatgtttttttctctactaaaaaccttatatgaaggccccttttggcctcgccaggaaaaaaaataaatactgtatgtttgcggggaagagtgtacattaattctgtagcagaaagaccccctacccatgtggcggaatcaagggaggagtgatgcgtgtgagtccgatcgatctgaaggctgctgtaaagaggaagatggaaggggaaggagtgagaagcatgtcagttactctgctgctgtacaaattaaacttagctcttagagtgaggagaaagtaagctgttagctgtctgcctaaaggaaagaaaggaaaaaaaaaagaagctggaggccattggcaccctgtttcatgtgttggtatagctgctgtggctctcctgttgtctgtctggcctttgttgtaacataaagctgaggcgcactagcctgccttcgttttcacagttaagctgaagttattagtatcagctttcctgaactgcttggtatgtaatgtgactctgtttcttccttgtactaatgcttgtctcatgtaatccaggcccctaatgtctgaatgttttaatctcatttttcacctctgataaacgttgtttttttgtttggttttgttgctgctgagg

SEQ ID NO: 29357 - DNA, 946 bp, Zea Mays
cgcgtcgccccttcgccactccccatcgcaccctcctcactcagcggtccttgtcctccgctcctcctgtcgcggaaatcggaatcccctgctcggccgtcgtcgccgtcgccgcccccgccgcctcctgtcactccaccagatccatagcggctagcgctggacgccggcgcttgcaaatcgagggtcagcgcagcgaatcagtgctagcggcgggcaggcaaatcagcgcggacaggtcgcgtattggggtcgaattggaccgacgcgtccgcgcgggcaaatcctagaggccgtgctcgtgccgtactgatacggctgcggcctgccggccgacgttgctcatttgcgcacaggacaggcgacggtctccagctcgagttcggcgccccgggcggctggcagcagcagaagagcaggtgctccgagtggcatcacatgccttccgattgtggtgatcaaacacaacacactggtgtgtttgctgcaatgcaagaatacacctgttccactggtaacaatggtgtgatttatccacaatctgggattagccattcatctggtcaaaatggggcacagggcacatacttgcaacaccaacattttgaaggctgcatgtatatgagcgggaatggacagatgtgcggaccttacctgcctgaacaactgtatgaggggctatctagtggtttcttgcctcaaagccttgctatctatgctgtttttggtgggaaaacagtcgatcctgtgcaattgatctttctgaaacaattcctttcacaatggaatgtcggtgccgtggcttccaccccaaatgtatcgacagagacagagagagtgacttcccatgctaaaatggtttttccagattctctttcaagtgaagaatcatgctggatgtttgaggatgcagaaggttgccgacaagggccacattctcttgctg

SEQ ID NO: 29358 - DNA, 506 bp, Zea Mays
cgctgctcgctccccctgcttcctctttctccccctcctcgactcctcgtcaagctcccctgaatcgcggcagcagcaccggggcagcaaggcgaggattttcctgctccgaatctacccggctcggcccgatgggctcgctgatgtcctgcctctccgacccaatcccgtcggggaacaggtccccgccgccgcagccgaagcggcgctcgtccacctcttcccgcggccgtggcggcggcgggagggactccgctaaggcctccgtgtccatagacgaggaggcgcttactgcagcagcggcgctcgtgctggggcagaggggcgcgtccggtggcctgggcgcgttcgagcggtccgcgtcggtgcggtacgcggccaagcggcagagccagggcccgccgctgccccgaagttgcagcacgcggccgaggtcgctcgctgaccccgagctccagccacagcaactcctagccaagttgatgaatactcttgagagaagtgag

SEQ ID NO: 29359 - DNA, 2299 bp, Zea Mays
ggggcaaactgcaagaagagcaaaaactgaaagctctccagcggcgtcgcgagcgtgctctcccccacttccttcccactctccctcgccccggcatcgccatctccgcgccgcagccgcccgcccgccggcccagatcccaccggcgagccgcagcatggaccgtctccgggcgggaagccccgtctacgggcggcagcggagcggcagcagcacgggctcctcctcccccggcggcgtctccccctcgcaccaccgctcctcctccacctcctccgctgcctccgccgcgggcgcgcccggcacctccaacatccgccgcacgcagaacgtcgccgcgcgcgccgcggccgcgaggctcgcgcaggtcatggcctcgcagaacgccgccgcggccgccggcgacgatgacgacgacgatgactacccgcccccggctcctgggaggttcggaagtggaagagtggcgcacggcagcaacggcgtgtccctgcttggacgctccgcgagatctccctctcctgcggtcggaatattgtagagccacctcctacggcccgctcatcatcggcaggcaggccagctgttgcatcacgacccaccaccacagtggtgccgccaatcaaaaccaacacgacgctgcgaacaccgtcccctattccaccggtggctgtggagcctccagcggatcgcactcgaccgaaaagatttgatgcagcgcttcatagctcaagagaatcaggactgaaaagagaggcatctacacttcacgatgagcttgatatgctacaagaggagaatgaaagtgttctagaaaagttgcgacttgctgaagaaagatgtgaggaagctgaagctagagccaaggagcttgagaaacaggtagctgctcttggagaaggagtatcattagaggctcgcctcttgagcaggaaggaagcagcacttaaacagagggaggctgcgctaaaagctgcaagagaatcaaaggatggcagagatggggaagtaacaacactaaggcaagaacttgagtctgccaaagaagaggttgcatcagcaatggaccagctaaaggaggcagagtctgaaacgaaggctctccgatctatgactcagagaacggtcttaactcaagaagaaatggaggaggttgtcctaaaaagatgctggcttgcacgctattggggcttagcagttcaatatggtgtgtatcccgaaattgcggtatcaaagcatgaacattggtcatcattggctcctcttcctcttgaggttgttctttccgccggtcaaaaagctaaggaggaacctcgaaaacaaggtgacaatgttcaagggagaaataaacttgcacgagaaatgagtgatgtaatgggagaaggcaatatagagagcatgctttcagttgaaatgggccttagagagctttcttcattgaaggtggaagatgctgttgtagttgcagttggccaacatcgcagacctagcatagttcgtcagttcacatcagatttcaaatcacctggtgaacctaaatacttggaggcatttgatcttagcccagaagaggctgaagatgttagctttaagcaggcatggcttatatacttctggagaagagccaaaactcatggtgttgaggaagatattgctgatgaccggcttcagctttggattggtcgcaacgcacaagctccaaattctcatgacgctatcgatgtggagagaggtctaacagagctgaggaaattgggcatagagcagcaactgtgggagggctcgcgagcagatatagatcaagcttctttggcgatggagaatcagtaagaattttccacggctgtctatgcttcgtgtatcatcccagttttggagaaacgggaactccatttcccagcaggtctcggccctttgcatcatcaggtatcacagtcacaggattgtgctccgatcttggggtgtgaccgatggacttccgatgagtttgtgtagtgcatgtgcaagccattcatctgttgttattaaaatagctttgtgaaatgtgtaatagctctgctttggcaagagaaacgatggcaacgacgaccccacttccagcaattgtgaattttgtgattatcccaccttgtttgttctctgctgtcgagcccaacctctccgcaccagggaacgtgtgtgttcctgcaacggatgaacgaaatggtttttgtgtatctctgggtagtatgagttctgtgcaaatggttctggagttttctataagatcttaaaaaccatcacccttcgatccagcatc

SEQ ID NO: 29360 - DNA, 4059 bp, Zea Mays
cccctctccgcttccgtctcactcgtaatcgtcctcctcttcccatttctgcttcctcctcacgggcgtgcgacgacgtcagcaaccccgccgagtacccctccttcccctcgcagtcgccgagggagcaattccgcccccaatcggccgcctgaacccttcttccttcccttcccgcggcatccgatgtgcgttgccgccgccgccgcgctcagatagcccagcctagctggcgacgacgaggagggggaccgtagccctaacgatccggtccccacatggcggggagctttcgcgagggcgcggggccgggggacacccacgctcccccgcccccgcccaccccacccttcttgcagttcctcgcgctcgacgcgctcgcctcctggggctccgaccccaagcagccgcactggcgccaccccgagctccgccgggcgctcgcctccaacgaccagaccgacgagctcaggcggatccgcgccagcgtccaggactccgcggtcaaggccaaggagaaggtcaggtcgctgcacgaggccatccagaagctcgacaagtacaagaacattgtcacacgcaagcgccagcgcgccaccgaggcgtcgtcctcgcccgacaagctcggggctgccggtgcctgctcctcgtccacaggcgcgctcaggatgggggcgcagaacaactctgctgtcttgagcaagcgcgtgcgctcctctctcgctgatgcccgggtggaaggacgtggtagtgttcctacaaggcaaggccctttgtgaagggtgggaaaaaaagatgaagcgtagacgctctgttggaacaatgctcagcagaggcagtgatgctgatcgagatgtcaaatccatgggtcagcatagaccagccaatgaagcacgcccacgatctagtgatggccttggatatagacatggagtttctgctggagcactagcaggtaacaagttggatggcacttctcagcagaacaacattgtatcctgcattctgcccaagtcagatgtcgattatgtggctcagccaaatgaaagaagagaacgccatgctggagttgaaaaggaaaggactacagtaaaaggaaacaaggtaaatacttctgatgatatgcaaaacggaagcttaagtcccctgcccaaggctaaagcatgcagggcaccaagaaccagttcacttgctataaactcatgttctaatttccaacgttcaactggaggaaatgatgaatgggaagaagcaccgtacccaaataaagtgtcacctttggcgggcatgacgaatcgcaaacgttccacacattcaaatgcttcctcacctcctattgcctgggtagggcaacgcccacagaagatgtcacggacaagaagagcaaatgttgtttctccagtgtcaaattttgatgaagtgttatctgaaggatcaccacttgacactgccactagatcagcacctatagagtctggcagtgtcttgctgacaaagaacacatcaacaaccaaaatggatagcatcccatctcctgctgggttgtcagaaagtgagggatcggctgtggctgaaagcaagtccaaggagaaaaccatgcatagtggtgaagtggggaacgagggtgcaaatacagcccataatgcaatgggattaatatttttgtcaaataaaaataggattcctttgaaagaagagctcgaagatggtggtgttcgtcgtcaagggaggagtggaaggggtgctatgcatgtcaaggggtgttctctaatgccaaaagaaaaactggtcactgcagaaacaagaaagccaataaaaggtggaagacctggatctgaaaagaacgagagtaagttggggcggccaccaatgaaaaaaggctctgaccgcaaagcttcatcctggcattcacaggctctaaatagtgatcttacagacataacaggtgaaccagaagatgaccaagaggagcttttagctgctgttaatgctgctcgcagtgctattgttagtgcctattctggccctttttggaagaaagtggaacccatgctaacttttatgagctcagaaaatttttctttcttaaaaaatcagatcaaccttgttgaagagcttgagatgagcatgtcctgcatgtatgacagtgaacatgatattatagcatcagttgatcacagaataatgtcaaagatggaggagcattcatctcagggacttgctctgtctaatttccccccctcatcccagcaaagtaaaactaatggagttggagcaaaaggattaatcggctgtttttctcatggtgacaaaatccatactggaccacaaaagctggaagctgataaatggtttaatgaaatggctccaatggcacacagactcctttcggctttaattatggaagatgacttgcctgataccaatggggtgcaaagcgatatacttgttgaatttccaaatagccacaacccttacactgtcaacggatacatggaaaatgaacttcaagctagtaccataacatctaattttgggctgagtgtggatttcgtgcactcaaacagtacttctgtggtacatcagagcatgtgcaatggttttacaagcaatttcaacaattcaaacagtgaaaattctgttcatagtgaggatttatcagatggactcaattttacagtatacacagaaagtggccctttgcatgacttgataccaccgattccacagcaatgtcaaaatccagggaaaaatttccctttatctccatatgagtatcaatatgggcagatgtctgtggaagataagattttaattgagctgcaaagtattggcatttgtccagagacagtgccaaagctagatgacggagaagatgacaacattaataaaatgatttcggagttgaggaaaaggctgcacgatcaggtgaaccaaaagaaatgtagattacataagctagataaatcaattcaagacacaaagaatattgaggagaggagcttggagcaacatgctatgaacaaactggttgaaagggcatacagaaaactcaagggtgggcgcattggctctagtcacaaggccggtgtcagtaaatctgccaataaagctgcgaaacagcttgccttggcttttgccaagcgtactcttgttcgatgccacaaatttgacgaaacagggaaaagctgcttcagtgagccttctctttggagtgtgctgtctgcacccttgccaagcagtgacgcgagattcacggagggtgtagagaggctgaagcatcagaagctcgacagaactccattttgatcaaggtggtgcgaaatggaaaaagggcgacagggaacgggatcacagcagggatgcgtctgcaaagggctctggactgaaatcagggcgccattcctcaggcggcagcggcaggagcggcggcggcgagcgcaagaacaagacgaagccaaagcaaaagctggctcagctatcgacttccggaaacgtgctgggtagagtggttgagccattctcatctccagcggcgcaagcgcaagagccccctgaacctgcaagcgagaagaagactcagcatccctctaggaacgtggccccgcggctgaccgtggatgctggactgccagcattgcctggattagatgacatattggacgtccctggagggctggatgggcagggcaacgacatcagctcgtggttcacggatggccttgacgactcgttgcaagacattgatctttcaggcgccctggagatcccggacgatgacctcacccagctgggttttatatgagaaggaagcacttgttgcttgctctgtgcatatatgttctttttttgggtgcttacctaatgtatggtagtagatataattaaccggtttaatctccctgccacaaccctgtaatcgaacctgcatggcatggaatggttagttgcagatgagttattcgattctcgtagcagcaagaacatgttgagatttgctaatggtatcatgtggttctgcctcctggattgtcctgtcggaatcctacagttcgtgaa

SEQ ID NO: 29361 - DNA, 2085 bp, Zea Mays
ggttctttctccaccccgatgcccctccccctcccccgtgtgatcccctctccagatcgatgtctgccccggccgtaacccccgcggctcaccgcacgaaaccgccgcgagatcttggagctcagcctctgacgatggctacgactacctcgccaacctccgcgagctctgtccccctccctctcctccaccggcggcgggggatccttggccatgttcctcccgaggcgccggtccacgcgcttcggcctccgcgtggtcatcaagcctttctgatggctcggaacagaggtcagctatgcgatgtggcgtggcgaggttaccgcgggcgccgcggaggtggagggggaaggggaggacgagggcacgggcaagagagcgcatcgctgtggacggtctcgtgagagggaccttgggtgatccgggtgcttggtttcttggttctacggctttcgctgctgttggatttgccgagccggagccgacggagatgaccgtcgacgagctgaagctgcaggcaagggccagcggcggccacgacctaaggaccagttccccgtcggcatgcgcgtgctcgccgtcgacgacgacccgacctgcctcaaggtcctcgagaacctcttgttccgctgccagtaccatgtgacaacaatgggccaggcagccactgccctgagctgctgagggagaagaaggaccagtttgaccctgtgatcagcaacgtccacatgccggacatggacggcttcaagctcctcgagcttgtgggcctcgagatggaccttccggggattaacagctgaaaacctcgcccgatttgtaaagaagttttcttgttcaatgcggcattgaatttgggaggaatgacaagtctcatgaaaacttctgtatgccctacacgtgaccactaaaagaaagagttagacaggacaaaaggctgcagcggcagaagaagagcttttacatacccttacaatgctgattttgatggagatgaaatgaatttgcatgtccctcggacggaggaagctcgcactgaagcgcttaattctcataggggttcaaaataatttatgtactcctaagaatgtgatgggggatacttcaatgcaataatgagcttcccacaaaattacccaaacagcccaccatcagtcagatttacctctgaaatgtggcatccaaatgtctaacctgatgggcgggtttgtatctctattcttcatccacccagtgaagatccaaacggttatgagctcgcaagtgagcgatggacacctgtgcacacacttgtaggtactgatcacagcacattcaactccacacagattgtccatgtttctttcagtcaccatgatttatcactaggtcattgtgtttgtggccaacgagtattgttctaacagttatgttcccatagctagctagattcattgttgtgttttgttcagggtactttcaccacttctggtatggttctgtctgtaatgtgccagggattattatattgtttttggtttggatttggaatggtttggggtccacaacgatgatgcgtcagagctgttccaaggattggatgatttccattcccctgctgccaattcgactaggctcgccgtctccgctctgcccaactggcaccaagcagccaatggaacttgagcagccaatggatgatttccattcccctgctgccaattctccgaactgctttgacccttcaactcaatccgcatgtacccagtaaatgttcaatctgaatttggatcattgctagcaggattctttgcttgctcttctacttctgaaaattcgcaaaatggatagataattccagttaattttaatccattacagcctattgtggcagcaaacagcgactgggtgcggaagccggaagggagaggcgcttggttgacccagaacggacgacaagacaccgccgggggttcgctgcaaccgcacgcgtggtggccggtgtgggaaggagcccactgctcaagcagcgacgacttccgtaacttctcaggccaagttgtagggagggagggcagcaaagaaagcaagcaagaaagaagccga

SEQ ID NO: 29362 - DNA, 4660 bp, Zea Mays
gttgtgctccgccagtccgccactcggtacattacctcagctgagacaaaaatggcaggaggggatggaggaaggcaggggcaaaatatctcggcctcccactccggcttccatttcatccacgatgatgatctcgttctcgtctcccagccccgtcgccgctgacgtggcgcccaccgcgcggaaaaaaatattgcagatattttcctcaccgctccttcccccctctctgctcgtccttgcctcccaccgcaccgccggctcttgctctgctcggttcctcctggcagcaaccgaatgtctcccgacgccgacgccgccgccgggggaggaggaggtggagaggcgagcgccggcgccggcgccggcgcgtcgtcgcctcccgcgtccgcgtccgcggcggcgaacggccgggcgctggtgcggtgggaccagatcctgccgcgccgctccctgcgggtgcttctcgtcgagcacgacgactccacgcgccagatcgtcaccgcgctcctccgcaagtgcggctaccgcgtggccgcggtcgcggacgggatgaaggcgtgggaggtcatgcgggagcgtgcctacgacttcgacctcgtcctcaccgaggtcgccatgccctccctctccggcatccagctgctctccaggatcgccgccgccgccgagtgcaagaacatccccgtcatcagtaagccttttttttaacccttttccattagctgctctttgatccaagcccgatccatatcccccttccctccaaatgcttcgtgtgtgctcacgacgtgcctcgatttcttctcttctttcttctggatcaaatcgcccctgggaatggattagacttcactattattagccaagctgtaacttcaagcaagcgactggtgcgatttacagtacataactttatgctcactgctcagctccgcttgtttttttatattatgctctgcacatgcttgttactaaaaccgggatgcttgcatcatgcctgtttcgtgtcagcagctttaaggttactgtctcatcattgttagattagatttctctcctttgtgctgtaagccaagtgttgcgttgatatgtgagtggaagcagtttgtttgcagagtttctatggtcactgctgttctgttctgcaagaacttgattccaagtatactatttttgagtggtatatataattctttgagagtctataaatcaatcacatagtttgactgggaaatggggttcagcttaacaaaaaaagaggtggcagtagtcgtggagatcaaactaaaaaaaatattgaattgcagtgtctggttcatagccgctgaaaccaagatagccgtggcgttacatcaagtacttagggagtctttgaatgcactagtgttaatagttagcgactaaaattagctggagacatccaaacaccctagctaatagttcaaatattagctatttttagtaaattggttaatagttagctagctaattccactagcaattttttagccaactaactattagctctagtacattcaaatacccccttagttaatgccactaaatctaagctaaatataggggatgcttgcattgagtgcgcaaaaagacaaaaaagactttactaaatatgaacagcacttgcaacaaagaacagaaaatgagctgtaaaacatgtgattgatgtgtttatgtgaactcaaccgttattgcagctctgttttcctaattacctaatgtgatcacaaccacttgatcagctgatcagcctagtatagcgatgtgttcatatgatataacataatgccacacgtgcatcacaagcggccttgacctaatagaattgctgaacctgatatttagatttgttatgggtttcatttgttttgcactggttgcctatggcagtgatgtcatcccaagattctattggcacggtgctcaagtgtatgcagaagggtgcggtggacttccttgtgaaaccagtaagaaagaatgagctgggtaacctgtggcaacatgtgtggaggaggcatgcaatgaattgccagacaaatggatcagaaaataatgcagccagcaatcatgtaagtaccaatgttgctaatgggtcaaagacaggagaaaacaatgatgaggaaagtgatgcccaagtaagtatctaaccttgcttacagcgtacctgttcaactggcattaatgcatgtgttaagtttcacatttgcatccctgcttagcttgacaacaccagtttaatagaaagtaatgaagtttggcagtatagcactatagcatttatagacatgtccttttctatgatggttctttttcttgactttaacatagtgagtgtaactggcactgtttaatggaatcagttagagttcatcatttcatcctttatgcggttctgatataacattcatattggatttctttgccatgttacgttatggagactgttttgtcttgactagagctttggtaacaaaagggagactgaaattaagagtgctgagacgttaccagatattcgtagagatgaaatggctggctcatccaaaaaaattgaactacaaaataagtctaatgatggagtaaacacaaaagtggatgcgtcaaaagatagcgatggtaaagaattcaaacctggtcacatgattttatgttaacttatgctctgttgccggtaagttagtgtgtgctattctattgtgcacatgtagcagtaatttgttatttcattgcatgcaggtgctccaagtgaaagtgagaagaatgtgcgttccaaatgccttaatggtattacttctgcaaaggtggctgagcaaataatggataatgccttgaggatcacggatgcaagttcacgtcgtccaaccaatcttggcaaagatttggctatgactgaaccagcagctgatagaaaatgccaatctttagtgatggaaaataatgctgtcaaagaaaagaaccctggtgaaaagtcgaagagtgctgtaataggtcatgctgattcttacccctcccaatttctcgagaccaacttgggaaaacaacagtatcgtaatggttacaagaatcaagaattcagggaaaaagatatctttaatcactcgaattcttctgccttctcgagatatggcaatagaaggatagaatcatcaggtgagatacagtttcttccttctcgttgcattgttgggcaagagcagcatgttcatggcaaggacccagttttccaacccaatggggtcttgctgcctcccaatgaccataatacaggtgagagtacaaggcaagctcgaattactctggacagtagcatggagggtgctgacatcatttgctccagtagtgctagggaagatgctggtgcaagtagttcttcccatagaaaggacagtatgagccatccctcatatgggtttgtacctgttccaattcctgtcggtgccatgatgccctatcattgtggtgcaattctgcagccagtatactacccacagggtccacttatgcactgtaattcatctgcaatcaacaaggcaacaattcatcaaacctctggccaatctaactaccgtgaagattgtggtagtggtagaccatctcaggttgatgaacacaaacagtcagaggaaaagcaccagttgcatcattcaagacaaattcatcgggaatcaggacaaccagttgacatggttagagctcacatggatcatgctaaccagagtgcaagctgcagccgggatatctgtaaaggaagcggatgcacgggtagcggtgaagccgataccaatgcgaacacgacggttgccctagagagtggcaacgagagtggcatccaaaatagtgacaggtctcaccgagaagctgctttgatgaagttccgcatgaaaaggaaagacagatgcttcgataaaaaggtcaggtatcatagcaggaagaagcttgcggagcagaggccaagagttaaggggcagtttgtaagccagaagctgaaagcagctatggcaacggaagccgaaactgactcgtgacgggcgctagtccagaactgtaattttggttcttcccttcgcgccaggtgtgggcgattggactggtaagtctgaaggctggcaaaagtttttttttcttccttccatggttagcctttctgtacaaaggtgaactccacgtcgggtgtttgttggcatccaagccttattttttgcgaggtacatcaagttgacaaaatgttcggagggatagggtgaaaacggtgcaagcgccatatttcgtccatacgcttaggtgtttgtggagtgtgaaagcagagcctgtacagcatattcaccacccattctgttgccattacaattgtagtaacttgtaattactactatgacaaaagtagacactgttgtagaacttacagccagcaggtcttttccatatgggacagtagcattttatttattaattggttgatcatatgaggacagtcccgaatgcaggacagttaagatttgtttgatccaatccaatcatccagcattttgcttgccttaaactggacaaggaatcagcagggtgcacaccttgtccttgtcagctattggtacacagcagcatatatcctttgcctgtgtttgctgtactactactctgg

SEQ ID NO: 29363 - DNA, 1992 bp, Zea Mays
cttttctacttccttagctaacttcccagccccgacaccttggccgccgctccgtgcgcacccagttgctgaggttgcaacgctgcagccggcgaggatcggatgaaccaccaacccctcctataaatcctaagtgcaacatgcagtgccccatggacactgctgctagtggaacctcgccagtgatgcaattccatagcaatgctgatgagtctatcgcccattcatctccattggcaacattaatacaacgttcacagcgccattgctatggggatggatccccaggcgaatttccccttgctgtgagcccctccattgttctccatgtgctctcatcttgtgatctaggtccgaaagatctcgccaatctggaggctacatgcgtatttttcggcaaacctgcaagttttgcaccagactttgcattgtcacttccggagcttgcggcatttgatatgtgccagaaaaggaccatgtttaagcagatgaagcaagaagatcaggagtgtctgaaacaacggtgtggaggctcttggaagcatgttcttgggtacattctggttagggagaagaatggttctcgggtgattgccgggccaggccatagcatcattatcacctcaaatggagatgtatattcgtttggagcaaactgctccggtcagcttggccttggggattcagaagaccggttcaagccatgtgttattaggtctctacaaggcatcagaatcacacaagctgcagttggttcgagatgcacaatgcttgtgagtgacacaggaagcgtctactcatttgggaaggaggatttcagggtcgcagaactagttgacggtgctcattttcagatcacaactcctaggattgaggagtcactgaagggtgtgtttgtagttcaagcagccatagggggttacttctctgcagttctgtccagagagggtcgagtgtacaccttctcatggggcaaagccgagaggcttggccacagttcggatccttcagatgtcgagcctcgtcttctccctggactcgaggatgttcctgtcgcatacatctctgcaggaaattgctaccttcttatgctggcctaccagccaaatggaatgtctgtgtactctgtaggctgtggtttagggggcaagcttgggcatggatgcaaaaccaacaatgggatgcccaaattggttgaacagttccagtccatgagcttcaaaccagtttcaatagcagctggcacttggcatgccgtggcccttggcgctgacgggcgtgtgtgcacctggggctggggccacaccggttgtctggggcacggcgatgaggagtgcagggctgttcccacagtggtagaaggattacgcgacgtgaaggcggttcatgtctccacgggtgaatacacgacgtttgtcgtcgctgagaatggggacgtctactcctttggatccggtgaatccttggctttccagttggacgatgaggcggaggaggaaccggattcctcgacaccgagcatagtcagctcgctcaaggatctgaacaagaaggtcgtgcagatcagccacacaaacgcctcgtactggatgaactcggaaatgggccacccgcacacatttgcggtcatggactccggcgacgtctgtgccttcggaggaggggtcagaggccagctcggcgtgaagctgcatgagggcgtcgaaaaagtgcgcgtcccgatgaatgttccaatcggtctcaattgatccccttccaccagcattcgcctgaacattttgcgatggcactctgcttccgcgaacattctgtttgggccttcagaccagtggcgtaagcttagacatgctaggatgtgaatattagggatgatttgtttttatctgaactcttcgaagtgatatagatcgtctgcataaagtttacctaatccgtgaccgctcttttatccaaaccatttaaagcacctatgtctctagttagatttcggta

SEQ ID NO: 29364 - DNA, 1483 bp, Zea Mays
gtccggtcggcctctctctctcacacacacacttttttctccggacgcgctcgttcgttcgcgaaggcgccccttcctgccctcacatccgctcctccctccccgacaccgaccgacccctcgtccgctcgcctccctccccgatccccaccgccatggccgccgccgccgccgccgcgtcctcctcttcctcctccgaggttccgatcgccgcccgcacctgcgtctccgtcggcgaggtggcggtgggcgcggtggctacaggcagcggcgaccgggtggcggcggattgcggggtgtgcgccatctgcctcgacaggaaagcgctccaggagacggccctcgtcaagggttgggaccacccctactgtgtgacctgtattttgaggtgggcatcctacaaggagaaccctctctgcccacagtgcaagcatccattcgaattcctcagcgtgcaccgctctctcgacggctggtaaccccttgttcatctgaaatggtgggagggtggctgaaaattttcagcttggtttgaacctctgatcgtagaggctcacgaggaggctctggaagaagaagagtttctccaccagcagtaccaatacgatgatgacgaagatgatcttgacgaggaatcttattacatgaacaggtccccaagcatccgtattggtaacaggagatggggtgacaatgggtacatcaggggaggcaggaaagaggcgaggccagtgaatactgatgtggctgctggtccatccaggactccgaagaagaaagagaaagccgcatcctcttcggcgtcggtgtcagtgtctggttcggggtcaggatcggggtctgtatccaaggatgtcgctggaaggcgggcgaagagggcgcagaagcgagaagctgcagacaaggcagctgcagagaagcacctgaagcacctgcagaggttggggctgagaaaatcgccagagcctgtagtgcccgaggaggttgggccacaggtgaatgagtgacttaagccgccgcctagtgctatatggtgctgctaaaaacactgcagccctttgggccacaaaataatcttccactgtgaagagcttgagcgtggccttgtatcatggcagcttttcgcctcgttgtacatagtctagtttctcatcactgttttagattcagcacagaaatgcagctgctgtctgcacgactgttgcagctatgaagctgtatgtacctcactgttggtgcactattttagttattgctaatcacaggggatgcaatcggcatctgtgttgattactatggggacaaatgaggcgtggaaccaattctacaacgcaaacttgtaaccatatggaatcactcgccgttgacatgatactaatcctgttaactagtctggtccttgcttgctgtgccttgtccgtcatcatcgaattttgtcccacaatcgaagaatctgtgttgttgcccaactattctgcacggg

SEQ ID NO: 29365 - DNA, 280 bp, Zea Mays
atgagcccgtccagcccgcccacgggcgcgccgcccacgaacagcgccggcacggcggcggcggcggcggccgacgccgtcgcgtgcgcgcccacggccgccagcagctgccgcatcacgtggcacatgcagcacccgcgccaggcgaagatcaccacggggctctcgcggaccaaccgccccacgcgctccgcgggggcctccccgtcgccagccgggtcgatggtcaggctccttggttgggacttgggagactgggatttcagggggggggctatga

SEQ ID NO: 29366 - DNA, 6461 bp, Zea Mays
aagaagctttttgggaaaatcaccctggtgtttccccgtcgccccaactcggatcccctgggcgccgagcttctgcgcgccacggcttccttttccccgagctctctctgttcgttcccaagctgcgctctactcggattcctgttgaccacgtgcccctgtttctccttggccagagctccctgcgcgccatggcctcgtcaagaccccagccgagctcgcccctgcacatcctgctcgcccctacttttctctgttggccgctatgcagctccttcgccttggtcggttgttgctccctgcgccagattttctcccctgcgcatctctgatctctagcacccagcctacttgtatctggtgtcgtgcgcacccctggttcgcccctgctcggactacgttcacccctgctgcgtgttgtcgagctctcatgccgaatccttttctagctcgccgtgacgcctggcgtgctgcctgctttgctcacccgcgtcgactactcgctggtgctccaactcgtcagctgtcgttatcctattcgcgtcagcacgcgactgtggtcgtgttcatcgaatttgccaacgctctgttgccgatttgactatcgtcgctggtaatagcttcgcgtgttgtcgagccggtcattttccctgttctgtgctcacgcggtttcctgctcgccagcgcgtcctctctgctcgcttggccttaatccccatcacgtcgtcgatcttgccgggtatcgtcgttcgccgtcgacctcgcttggtcctatatcgttaggctagtcaaccaaagtcactaccatgcgcgcttgtccctgatgcccatcgcgcgatatttggatctcgccgattggccgctcttgtccgccattaattttgcttcgcagctcacctgctgttgtggtgctgctatcccgcgacactcatgccggtgcatcgtcgcctggccgggagttgtcgccactagtttactttcgtccaaatcgccaccgcggatgcttgggtctctgatcgcgcgtctttctatcccgcgctcatctcgtctgatgcctcagcaacaccgtggtcatccttcctcgcagtgttgttatttaccctgctattgtaatcatgcctcatgcgctgctcgtctgaaatactcaagtcaagtgagcatcttgtgcgactcaagcctagttcgtcaagattttttagtcaaggagagattccaagagtatgtggagaaacaagccccaggtcgatgccccaagtgctcggcgaaaggcctgaacaaggatcatcgtcgtttattcgaattactagtcgatatggtacgctagttgatcgcgcgatgtggaagacgagccaagtcgaccccaagcgcgggctactccgcatggtggtgctggtagacgaacctgcccgatcaagtgctaggacaaggatgatcgtcaagtggacgtcgcctaacaaacactaacctagtgttattcaggcaagccccggtgcatttgccacctccttgtgttttaaaatctttatcaccttatttgatgcattaggtgataggagttgtgtgctaaaccgttgatgcatttccttccttgaaaattgattacttttccttgataccctttttgaaaagaattttatgatgcttagccttgctttagcaaacaaaaaaattttgttttaaaacaaaggtgatgcttcagtgggtgggaatgtttttaaaaataaaacttgatggtgaatccatcatggccatgatgggttcaacattggaaaagatgtacctctgccatgtaccaaactttaggttgaaaataataaagctgagaccgggcgattgacttgcacgagaagggagtctcggtgtagtgtctccgtctgagtcgattaaggaccttgtcgatgtaggcttgatgattgaggaccttttaactggtcacatgcctcatcatgggtaagctttgcctcgggcagactaataccagaataagataacacacaatgggagtggagagatggcgacaatagcgtgtaccctccgtggcaagaggctggacgatggtgtatctgtgctctcggttggcgtgaacctgatctggtcttaagaaccccggtggcgagttgacatatgcaagggttaagtgctacatatgtcgtgtgattggagatccctaactgggtattaatcgattcggattgccgttacttcttggacatgaagacttggtcactgccctacacgtaacaatccagtgaactgaagggatgataaaaagacgactagtataggccaagtgcttgaactagggtagaaagaactctagatgcaggtaactttacttaacctgacaagtaaaattggattttaaggatccactcatagtaagcttttctgcaaaacagagtctttgattcttcataagccataccttgaatccctctaaccagcatacccttgagagtcttttctttagtcgggtaagtcttgctgagtaattccatactcagggttttattccctgttgtttttcaggttatagttttgtgctgctgatgatggtgttaagtgccggtgggctcgaccttcttataagtctaagtaacccttctatacttcttattgaggatggtcacttgagctagcatatatttcaaacttacaaataatttataacatttcaaagttattcctttgaaccacttttgtaaccactccgataaatacaatgtaaacttgttataacttgtaaaatttggtaataaatttccactgcaagatgttggtgtgtgatttgtgtttactttatcctgcggtcctggttgtaagtggtttatctgaggtccttggggcactcggacagatcctgttaagttatctggtgcacatgcatagccgtctgaggtctttgagacaaggacaggtgcatgtgggcccaataacttgggaggttctaccacaaggatgaccctgacgacccgagcccatgcagcggcgacacgagctgagagaggaatgcgccaagcggcttagtgggtgggtccatgagtcagtgcgtggacgcagcgggcaaagcaacgtgcgtgcgaagtcgctgatgggcccgatccacgttccaacgaaacgatgcttacacatagagaccatcgaccggggtccataggtcagcgcacgacgtacagaggctgccccgtggggcccacacatgcacggagggggaggagaaatgggccaagatatggggaatttggcccaaatacaggtttggtttcttttctgcttttcttttctctctctcttttctttcctatttcaaatcccaaattcaattattcaaattcaagtttaaatttttccgatttccaaatgtctaataccatcctaataggaacataaactatattgtttacaatttcattcttctttccttatttaattctaacaattagcagatgattttattacaaatttcttttctcattttatattctgcattcccatttatggtttggggttaaatcttattttcaatagaatgtatcacaacaacatcattagcaagagatgtacctttcttcatttctttattaatttaataccattaattgattatgaaaataaaatgtcctactaaattccaaaggtttcaaaaattctagagacactattatagatacctttatttctttattttactattttttcttccaccaattttgggctttacataggtcctcccctaaaccagggagtccctgatcatcccacttagttggtgataagggtgaatacccttcatcatacaccttttgaaaacatttctctttttagaaaaattgttacctcaacccacattttgtaaccaaaagatattctttaatgcaggctatctctcggctcacaatgcatagaacccaacccatatcccggcttaggtagtggtagaaagagtaggtaatttatgcatcaagggtagaatggacttgccttcgtcgaagctctcttggcacgaaacctctatttccgggaggtcgggctcctgcccttcttccggagctacgttttccggagggttggacccctctccgccttgcaaaagtaggcaataaacaatacatcaaaattgcttgctaaaaagtgtgtcaagttctaagtattactattttgtgacttaaagaatatttggatttttttgtgcataaaatattaacatgtgtatatatataagaaaatgggaaaaagagagaaaaggaaaaagaaaaaggaattcttggttaagcgggccgggggggattttggcccagcctggcgcgcgtgcggccgcacgggcagcctgcccagctaggcccaccaacggggcacgacgcagggatggcgccgtgggcgcaggcccacatgccagcgaggggaagggggaacgacatcaggggggtgggaaacgacggtccgcccacgggggaggaggaactggccgctggtggcttgacggtagttcctcatcgatgattcggttctgggtggtcagggtggtggcatagcacgggcaggagtaggggccacggtggtggggtcaattttgccggtggtggctcaggacggccgatccacggtgaggtggtgggctcccacggcggtgaggtcgtcggtgaggccacggggcgcgataggggaagaaggatggtgtgccgtgttcgcggtgaagtggtgaaacttgtgaactatgttaattggactctaggccaccagagaagggagggaggactcaccaaagtggagggggagggcggcggcgccggcttgatttagctcaggggggatgaggggtggctaaggccggtgtgaggagaggtggagctcggggtggtgccttttataggcgcccaggggggaacgaccgaaaccagctggcgccgatgaggtgcacaacggtggcgatgatggcgcacatcgctggggatgagacggctcggggcaggctgccgtgaagggatgcgagcacagtgaactgggggggcagagcggtgcctaacttcactggcgcaggagtaatggcggtgagagagagggaggttggtggtcagcggggtttgtgccggtgagggcacgggcgaggaagaagggctgactggcgtggcccatccgtaagaggaagagcgggcgcgagagagcggggcggtgcgcggctgacaggcggggccgagcggtcagtggttgagggggagagcgcagcgcgggctgtgcgcgcggaggatgggccacactggcagttgtgttgggtttgtaataaaattgcctacacaatagcaaaccttattttgttatataacatacctttataattagatatttatttacctgtatagtaaactaacctttctaatcaaaggtgatatgtccataattataaactgaccaaagtatgatatttaaattgagttatgatttagattaaggttgaattagttatattctttaatctccctcacataatttataataatagtttattacttaatcacctaaaactctagaaaaccacatctctttcactgtaactcagaatttagtcattctcgaaccttcgctctcgtagcatcgcgtagaatattcttactctatttgttcttatgtttggtgtattgttatgtttatgtactccttgtctatctgtatgtattgatacgagtagcagcgaggttacgagtcacccgaagaccagtttggtgaagtatgtgggatctcaagtttaaggcaagttgtgcccttgatcactcttctttacctaataatgttcctgttaatcactttgacatgctcaggttaatttgatgggacctaataggttttcctagtattgtttatctcataccttgcaaacaaatgaactattgggtagatttgctattgctagcggctcggacactcacatgattaactcatagaattaaacttaatctatcatttgcattgcattgtgggtttattattaattgtgatctcttatttgattgggttggtatatacttatacttagtaactgctaataaaactttgaccaactttaaaaagcaatgctcagctttaaccatctcttttggtaagccttacacctcacatgagccccactataagtgagctcatgcatattattccccacaacttgttgagcgatgaacgtatatgagctcatccttgatgtactcacatccccaagtcaagaataggtaccgacaagatgaggagcatgaaggatgtcgcgatgagttcgtgagaggtctaaggccttcgtctcccagtcaactatgggttgctagatcgttgtcttcatatgatgtaattatttaactattttgtacagaactctgttatatattaaagatgtgacattcgtttctataccatgagtcatcatatgtgtgagaattgatcctagcacacatttgattcgtgcccgcgcccaggtttgg

SEQ ID NO: 29367 - DNA, 1977 bp, Zea Mays
gcgcccccgccgcccgtcaccacccgcagcgagccttgctcgtcaccaactcaccatcacgcgcgagcgcgacgcttcagctctctctcgttgaagagctgcatctccagccagtgcctagcccgtcgagggaccggtcgccttggcggactcccgctggaattttacaggaatcgcgctggaatttcacaggaatcagttcaatttcacggaacaaacgcaggagcaaggaaattttgtcacgttcccctcatttgtttccttcggcgacgactaggcgagtgctgcccgctcttcacgaggttttcacctgcgagtctgcgacgaacatcctccagttgatcttctggctggaaaatcacgttgacggtggcaagtaggggttctatcatccgcagcctcatctcaagaagcaaaattctttcatgatccctttgaaccggagggcaagcctgcccagggctgggatggagtactttgatgcaaggcggaagcctcgtaatgttggaaaaatcattgcagccctggtcctcacaacactctgtatatttgctctgaagcaatctcctggttttggtggcaatagtgtgttttctcgccatgaacctggtgttacccacgtcttagtaacaggaggagctggttatattggttcacatgccgctttaaggctcttacaggatagctatcgagttaccattgtggataatctatctagaggaaatatgggagcagtaaaggttctgcagggcttatttccgcagcctggtagactacaattcatctttgctgatctgggggaccagaaatctgtcaacaagatatttgctgaaaatgcatttgatgctgtgatgcactttgcagctgttgcttatgtgggagagagcacattggaaccccttaggtactatcacaatattacatcgaacactttactgattttggaggctatggcatctcatggagtcaaaacccttatctactccagtacatgtgctacctacggagaaccagagaagatgcctattacagaagccacacctcagttccctatcaatccatatggaaaagctaagaaaatggcagaggatatcatattagatttctcaaagtcgaagggagctgacatggctgtcatgattttaagatatttcaatgttattggctctgaccctgagggaagattaggtgaggctcctaggccagaactccgagagcatggtcggatatctggggcatgcttcgatgcagcattaggagtcattacaggattaaaggttaaaggaacagattatcccacaactgatggaacctgcataagagattatattgatgtcacagatttagttgatgctcatgtgaaagcactcaacaaggcagagcctagaaaagtcagcatttacaatgttggaacaggaagaggtcgctcggttaatgagttcgtcgatgcctgcaagaaggcaactggggttaacatcaaaattgagtacctcagcagaaggccaggagattatgcagaagtatatagcgacccaacaaaaatcaacaaggagctcaactggacagctcgatatactgatcttaaagagagtctgtcagtcgcatggaggtggcaaaagtcgcatcccagtggctacgggccaaatcgaatatagcctgctgatttataattcactgaatcaatacatattaattctttagttagcgataaaaaaatcttgctatgacactcctctcaaaatcactccgtattcttctcgttctttttatttcaaaggtttgctgtttttttactagtagaaacatgaacggtgatttggatacaaaaaacttgtgatgacaatttcattgtttttgacacaaattgttgatagaaaaaatgtacatttttcagccagtgagctgcaaggtttggttgcatcgagttaagaaaaaccttatgttgtgaccaatggaaatgctgtggattttgtgctg

SEQ ID NO: 29368 - DNA, 1096 bp, Zea Mays
ttcaatcccagcaacagccgccctatcctcctcgtcagccgtcaccgccgccccacagcctcgcctctaccatcgcccccgccggtgctagctgcatccggccaggaggtcagtgcccggcactagccgcatctagcctggtgattagtgctccacctcgctccagcctccagcccacgcctataggggcccctgcctagcagccagccactgtcggctaggtggtcaatgcccccgcccgccgcccatgccacgccgccagccggccagctggctagccggcccgccactgctccactgtgctccagtagatgctcgattgtttgccggcgatggtgcagaccaacctctccatcgacaagattaatgccatgcttaaggcattcgaccatacgagagggttcatgtagcatgattaccaccttggctagaggcacaacatgctcattatgtggtcagagtagaaccacaaatatttatcacttcaatttccattctcatggaggttgtcttaggtcactggaatcaaaatgggaaacctcctatgcagaatgttttgtaatatgtttttcataaggcataggaaaaattagcataggcaaagaaatgggtcaaacctcatgttgagactgctaagatgaaatggattcctgttaaggagaaattggttctcctcaagaaaatgtagaacataatgtacaaaaggtatcaacaaggtgttaatgaattcaacctcatattgagattgctaagatgaaatggatttccgttaaggagaaattggttgtcctcaaggaaaatgcagaaccttatgtacaaattggttgtcttcaaaatgttggtcatgtagctgcaagcctacaacaaagagaatcaacaatggtggtgatgctacacatgtagaagtagcaatgttggtcttgtaaatccaagatttggttgttgatgaatgatatctatgataatatattgctaagtatatgtgatgatcattaattgtcgtttaattataatgagttgtgccttttgtgccacattgacattggtgatagttaaaaattaaaatggtcttgattgaccaaatgttgtgatgaac

SEQ ID NO: 29369 - DNA, 3068 bp, Zea Mays
cttctccttcactctctgctatgctatgcttaccccgttctctctctcctccctttctttctcatctactactactagactactagtaactccgcttcgcttcttccgaagcggcgcgggcggaagcgagggcagctcacaccaccgtgccgcgcgcgcgcgctctccacccaccacctaattccgccgccgagctcgccgacgcggccacccgcgatcgggcatttggacccgtccccgctcgccgcccgcacggcggctcgttgcgggaaaagtttctcgaggccgtctgtgaccccgctccctcggccgcgagatcccgcccagccgaatggcgcagagcaactgggaagcggataagatgctcgacgtgtatatctatgactacctgctgaagaggaacctgcagacgacggccaaggctttcatgaccgagggaaaggttgctgctgatccagttgcaattgatgctcctggagggtttctgtttgagtggtggtctgtcttttgggatatattcatcgcaaggacaaatgaaaagcattctgaagttgcagcggcatatctagaggcacagcaaataaaagcaagagagcaccagcagcagatgcagatgcagcaattgcaacttatgcatcaaagacatgctcaacttcagcgaactaacgcgaatcatccttcacttaatggtccaataaatgctttaaattctgagggcattttggggccatcaacagctagtgtcttagctgccaagatgtatgaagagcgattgaagcacccacattcaatggagtctgagggatcacaacttattgaagctagtagaatggctcttctcaagtcagcaacaaaccatgcagggcaattagttccagggactcctggaaatgtgtctacaactctgcagcaaatccaggcacggaatcagcaaacgattgatattaagagtgaaggtaacatgggagtaccccagagatctttacccatggatccatcatctttatacggtcaaggattaattcaacctaaacctggattgagcggtgcagggctgaaccaaggtgtaagcggtttaccactgaagggctggccattaactggaattgaccagttaaggccgaatttgggtgctcaaatgcagaagccatttctttcaacacagtcacagttccaacttatgtccccacagcagcaacaacaatacttagcacaggcccaagcacaagggaaccttggaaactcaactaattatggggatattgatccccgcagacttacagcattgaccaggggtagtttgaatggtaaagatagtcagcctgcaggaacggatggttgtattagttcccctatgcaatccagttcacccaaagtcagaccagaccaagagtatctcatgaagatgcagcagacatcttcccagcaaccccaggaacagcttcagcagcagcagcagaaccaacagcagcaacagagccaacaacaaatgcaacagaacaatagaaaaagaaagcagcctacttcttcaggaccagcaaatagtaccggtacaggaaacactgtgggtcctgcaaactccccaccatctacaccatccacacatactcctggggatggacttggaatgggtggtaatatgcgccacgttccaaagaacttaatgatttatggtgcggatggaactggacttgcctcctcttcaaatcaaatggatgacctggagcagtttggtgatgtgggctctttggacgataatgttgaatccttcttatccaatgatgatggagatcccagggatatttttgctgcactcaaaagaagtcctgcagagcctagcccagccgtttcaaaaggttttactttcagtgaagtcaactgttggcgcacaagcaacagcaaaattgtttgctgccacttctcttcagatggcaagattttggctagtgcaggacatgaaaagaaggctgtactttggaacatggaaaattttcagacacagtatacaccagaagagcatgcccttattatcactgatgtccgtttcaggcctaactctagtcagctggcaacatcttcttttgatagaactattaaattatggaatgctgccgatcctggattctctttgcatacattcactgggcacaacggccaggtcacatcattagattttcatccaaagaaaacagaccttctatgctcttgtgatggcagtggtgaaatccggtactggaatgtgacccagtttgcatgcttgcgtgccataaagggtggtagtgcccaagtccggtttcagcctcatgttggacagtttttagccgcagctgctgaaaacgtggtttccatatttgacattgagacacatgggaaaaaatacactctacagggccataacactgatgtgcagtcagtgtgctgggacaacaatggggaatatattgcatctgtcagtcaggacctagttaaggtttggtcaatgtcaactggggattgcatttatgagcttagttccaatggaaacaagttccattcttgcgtgttccacccgagctattccaatctcttggttattggaggctaccagtctctcgaggtttggaacatggtgaaaaaccagagcctaaccgtacaagctcatgaaggtctaattgcggcgctggcgcagtcaccagtcacagggatgatagcttctgctagccatgacaactctgtcaaggtgtggaaataacagtaacaacgattatgatgcatctaggtagttttttttccagggcaagtgaaatttctcctgctgaggcataaaataaggaagagtagtaaattagatggttgccggtcgcggttcagctgtccaagagcagtgagtttgttgatgggttgtattgtatttatgctgataggctgtttgtgtagctcagaaacaaaaaagaatacattggctgaaaaggtgtccgcctgttttattttttgtttctgccgtatcatatgtaaccatttaacgttccctgttttttaattggaactcgctgcgattggcatctggcagaaaaaaaaccagagatact

SEQ ID NO: 29370 - DNA, 1709 bp, Zea Mays
tcactgtccgcatctcgagcgctctattccgccctgtgttctcgaacggtcccaaaccctaggcctaggcgcgaccagagtccatgtcggggtcttacggatccgacgactaccgcggcggcggcggcggcggcgtggtggtggaggcgggggcagaggaggatacaatcaaagtggtggtagtgaccgtggttttgatgaccaccgtggtggcagaggtggcagctatggaggacgagaccaggagaaccaaaagggtagtgaaggtggctacaatgctggtggttatggacaaactcctcaaggtcctccttcctacggtggtcctgcaggctcatacccaccaagctatggtgccccgcctccacaccaatatggtggtgccccaggcgggcaaggcggcctgcctcctacatatgctggtggatatggtggtcagtccatgcctgggggtggaggatctgggggtgcaccgccaccttatcgtggcggcgctagtgtttatactggtagtgctggtcctgaaccagctggaaaagtcaagcaatgtgatgaaaattgtgacgagacatgtgacaacgcaaggatttacatatcaaatttgcctcctgatgtcactgttgaggaattacaggagctatttggaggaatcggccaggttgggaggatcaagcaaaaacgtggttacaaagaccagtggccctggaacataaaaatctacactgatgactctggaaaagccaaaggagatgcttgccttgcctatgaagatccttctgctgctcattcagctggtggattttacaataattatgacatgagaggctacaaaatcagcgttacgatggctgaaaaatcagcacccagagcagcaccttcttatggtcatggcggtggccgcggtggtggatatggtggaggtggacgcagggataattacagagatggtgggggccatggacccaatagaaaccagggtggtggttcgcgttcccgaccatactgaaagcaactaatattcttactgtgattgttgcctgtgagaaaccatttctattcctgttctacggatttgtactcattcaggcgcataagatggggatataagctccaaatgctggtaggtttgtgatactatttcagccggtggatcactcctgtaagctttggattttgctgcaaagaacaggtagcgtggtttatcatgtgataggtttattagatttcgtctatattagatgacatatcaaacaacattcatagaatgttccacacccatttttgtttgaatgcacagagggtttgtagcatgtacttagcttaggttgccacaaacatttggcttcatatagatggtgaattgtgcctctgggtaataagcttgttttggtaaagagcctactcttggataaaggctgcagctccacttgtgccccaactaaacatccttagcaacacaatttgactttttttgtgctaaagtgatgatttataaatagaaaaggaacaagaattgggtggattattgcttcatttgccatttgaggcctctcgggagtatgggactgggtcactgggagctcatgcctttggttaattgacctggagactttgacaacttcatagtgcacaatccttgcaccgatcagacatatcagtcgcctgtgcgtgcagatggcgaaccagcattggtattttcgtgtgctgag

SEQ ID NO: 29371 - DNA, 1530 bp, Zea Mays
gttagtaggaaaaaaagtttgtacctttggttgagggaaatatcatggtgtgcttgttattcccgaaggacttatagaaagcattccagaaatgtatgctcttattcaggaaatcaatatccttcacaacagtaatgttcctgtggctgagatgtcatcacaactgtctccgtgggcagctgctctgttccagttcttgccacccttcatcaggagagagctgctgctccaccaagaatcagataactctgcgcagttgtcccaaattgacacggagcaactgctggcccatctagtagaaacagaaatgataaagagaacgaaagaaggaaggtacaagggaaggaagttcagttcagtatgtcatttctttggatatcaggctcgaggatctacaccatcaaatttcgactgtgactatgcttatgctcttggacgtatctccctgcatatgattgcagttggattgactggctacatggcaactgtggctaatctgaaagaccctgttgacaaatggagatgtgctgctgctcctttaactgtaataagatgtcactgaccatgccttcaagatcagatgctgaaaggttacttatctatttatgttgacctagttgcacaatctgttgtctctaccaggcgatgatgagtgtgaagaggcatttacgtggccctggagcaatccctatagggaggccttccattcacccttctccaattgacctgaaagggaaggcttatgagttgctgcgagagaaggcttcaagcttcctccttgacgacttctacaggactccaggaggcattcagttcgaagggcctggttcagatgcaaagcccatcacgctgaccattgagaaccaggactacatgggtgacattgagatactgaaagagtaccttggcaaggttaggaccatggtgaagccagggtgctcccgggagatcctgaaggcggcgatcagttccatggtgtcggtgacggatgtgctgactgtgatgtcccaccccctcaacgccgagctgcccctctaccatttcaagtgagcgagggcatcagtctggttgttattcctagagtgtttttgaaacagcagaagattctgcttcatggctgccggtcttctttttttttaatttgggtgagaattaagcaatgggttgtactaataaacactgaaacagtacttgatactgaactgagtcgcgtgctagttgtattattggtggcagtattccagttttcaagaggtctctagaatatccaagattgataacactcatctttcagcctagcaatatagtagtagttctttctttacttactattaatgcactttctctcctcgcaaagttaagaattgcccaaccacctcttcttcctcgctgccctccaaggtggccaagagccaacagatcgatgacagaaactacaaattaaaaacaaacaaataaaaaggacatgcatgacctgatcaccacccatctcatagagagttttttttatcaccacctgaccaccaacca

SEQ ID NO: 29372 - DNA, 1618 bp, Zea Mays
gaaaatcttgaaaagaagctccatgtacaggtgcacgccacttcgcatcattgactggatcatcaggagctgatgcctggaggtgttaattcgccggtccgtgccttcaaatctgttggtgggcagccagtagtgttcgactctgtaaagggttctcgtatgtgggatgttgatgggaatgagtacattgattacgttggttcctggggtcctgcaatcatcggccatgcagatgataaggttaatgctgcattgattgaaactctgaagaaaggaactagctttggtgctccatgtttgctggagaacgtattggctgagatggtcatctctgccgtgccaagtatcgaaatggtccgctttgtcaactcagggacagaagcctgcatgggagcgctccgcctcgtgcgcgcattcaccgggcgggagaagatcatcaagttcgaaggctgctaccatggccatgccgattccttccttgtcaaagctggcagtggtgtcgccacccttggcctcccagactcccctggcgtccccaagggggccacctacgagactctaacggcaccctacaatgatgtcgaggcagtgaagaaactgttcgaggacaacgcgggggagattgctgccgtcttcctcgagccagttgttggcaacgctggtttcatccccccacagcctggtttccttaacgctctccgcgacttgaccagacaggatggtgcgctcctggtcttcgatgaagtgatgaccggcttccgtctgtcttacggtggagctcaggagtacttcgggatcacccctgacgtgacgaccttgggcaagatcatcgggggtggcctccccgttggtgcctacggtgggagaagggacatcatggagatggttgcccccgcagggccgatgtaccaggcaggaactctcagcgggaaccctctagccatgaccgctgggatccacacgctcaagcggctgacagagcccggcacctacgagtacttggacaagatcaccggcgaactcgtccgtgggatactggacgtcggtgcgaaagcagggcatgagatgtgcggaggacatatcagaggaatgtttggcttcttcttcaccggcgggcccgtccacaatttcggggacgccaagaagagcgacaccgagaagttcgggaggttctaccgtggcatgctggaggagggcgtgtacttcgctccatcgcagttcgaggcggggttcaccagcttggcgcacacctcccaggacatcgagaagaccgtcgaggccgctgagaaggttctgaagcggatatagggggtccgcttcaagcaagcatgcagagagcatttcctcgtatttacgttcttgtactcttagttctatatgccaccgaggttttgtattgtgcagcagcaggacagcttctgtaagttcctctttctgaattagtgggtcttgtttttgtcagtgccaataaatctatggtccacgattacggtttcgttgttgtactgatgttcagatacaggattgtctagaacctttttttttagaaaaaaaaaacaatatccacattagtaatgcactgacccgggacttgcataagccatctcggactcttccc

SEQ ID NO: 29373 - DNA, 4921 bp, Zea Mays
tttataatgacaaaaatctcgcgagtcgtaggctcgtggtcgtgggtcgtggccctagcgacaggcacaacaggcccctccgctcctggcctcctcctcggcgtcgcgtcaacgttgcgcctctccagagtcgccggccgccgagggcactctccacctcttccgtcggcgcccgggagaaggagatgggagttcacggtctgtgggaactactggctccggttgggcgacgcgtctcagtggagacccttgcgggcaagcgggtggcggtggacgcgagcatctggatggtgcagttcatgcgggcgatgcgggacgacagcggcgagatggtccgggacgcgcacctcctagggttcctccgtcgcatctgcaagctcctcttcctccgtgttcgccccgtattcgtcttcgatggcgccacgccggcgctcaagcgccgcaccctcgctgcccgccgcaggcaccgtgacgccgcgcaggccaaggtccgaaagaccgccgagaaactcctgctctcccatctcaaagctagaaagcttgaagaattggcagaacaaatcaggagtgacagagctaagcatgatgccaagggcaagcaagttgagagcagtaatggaggagaaactgagaaaacaagtcaaaaccaaatcggtgataccaacaacagtgagggaaatgttgcatcgatcaatcaggagaaagtggatggaatgctggccgcatcgcttgctgcagaggaagacacagatttcactgacgagggaacacaccatcttacaagtgctccattgccagaaggagatgaaattgatgaggatgaagatgatgatgaagggatgatcttccctatgacaactggtgacattgatcctgcagtattggcttcccttcctccatcgatgcagttagatcttcttgttcagatgagggagagagtgatggctgaaaacaggcagaagtaccagaaaataaaaaaggaacctgcaaagttttcagagcttcaaatacagtcctatctcaaaacagttgctttccgtcgagagatagaccaagttcagaagtcttcgtcagggaagggtagtggaggtgtccagacatcaaaaatagcatcagaagctaatagagagtttattttctcatcatcattcactggtgataaacagatgctggcacaaagaggtgaaaaggagcataatgttgaaaacactagatcaaaaaaggaaattcattcttctgtcttcgcatctaaccccacaagtagtttgggaacaatgaagcctcccaacagcaaaactttgagcgattttgggcctgatgttgagacctatcgtgatgagagaggacggattagagtaagcagggtcagagcaatgggaattcgtatgactcgtgacattcaaaggaatttagattttattaaagagaatgaacaggttaaaagtaagggacagacacagaccaattttcacaatggatcaacaggcaatgaagagcctccagattttccagaacatctttttgaaagtaacaagctccagagttcttgtagtcctgatgtggatctttctgaaactgacagagacaaccatcagacctcgtcacaaataggaacagatatcatttctgagagttcttgttatggaaacaaggaagcaatagagatatctttctcggttgatcaaactgaagtgaaggatggcgatgaagatatatttttgcaattagtgtccgggatggcacccaacaacatattttctggaaataattgtttggttaaaaagatggaagaatctgtagattctgagtgtatttgggaagatggtgttattgaagcaggaacttctcctgtgaaaattgacatgaaggatcataagtcatctctgccagagaattgcagcgatgatgagatggagtgggaggaaggtgatagctttgtacctggagttgcttctagtagtgaacataatccatgtaatgcaccaaagggggatctggaagaagcagctcttgtacaggaagcaataaggaggagtttagaggattttgagaagaaggcatctgagaatgtgagtactggagatatacaagcatctgttgaagatagatctttgcagttctccaacaatgttcctaagatatctgaatctcttggtgaaaatgattcacattctggagtacctgttgttgacgagataaacaatgaaacaagaacagaaatcaattatgataaggatgatatggtacaaggcactggactacttggaactgagagacaagaatctgaatcacaacccccactggtgaataatgattggcatgccgatatgcacagagctcatcctctggggtctgtgcctccatgtactacattcacgagtgatctggctgaaaaaccatctgtcagtgcagaaactaacggtgaagatgtaatgatatttacaacaaaaattcctggaacagctttaggcgattgtgataaaacttccaacctaaacattatgaattctgatcaatcaaaatgcagcaaagatattgcttcaactggagaatccttgtcacaccaaaagaaccttttaattgatgaactactagccgtcactgccgaacaaaaagaaaatgctacccaggtagatttgaagtttgccacatctgaggtagattatacacaaatttgtggcaacgatgacaaccatacaatatcagcgagttatgttgacgcggagctatctcgtcttagacaagaacagatatatcttggacatgaaaggcgaaaacttgaaagtcatgcagagtctgtaagcagtgagatgtttgccgaatgccaggagttgctccaaatgtttgggttgccatatattattgcaccaatggaagctgaagctcaatgtgcatacatggaaataaataacctcgttgatggagttgtcaccgatgattcagacgtatttctgtttggagcaaggaatgtttacaagaacatatttgatgataggaagtatgtagaaacatattttatgaaggacattgagtctgagcttgggttatcacgagaacagttaatccgcatggctctgcttcttggaagtgattacactgaaggtgttagtggtatcggcatcgtgaatgctattgaagttgtacatgcatttcctgaagaagatggactgcagaagtttaaagaatggattgaatcaccagatccatcaatatttggtaaactgcatatggaaataagtggtagatcgaagaaaagaaaactcgatgaaaatgattcagatggaaaggggaaaggcctggaacctgaatgcattcaaggttctgatgataaacaatcttctaatgaggatgaacatgtcaaggaaatatttatgagtaaacataggaatgtgagcaagaactggcatgtccctgcaacttttcctagtgagaaagttgtaaatgcatatatttctccacaagttgacagttcaacggagcctttttcctggggaagaccagatttaggcctactacgtaggttatgttgggaaaggtttgggtggggcaaagagaaagctgatgaactgctgcttccagttttgagagagtataataaacacgagactcagctgcgcatggaggcattttattcattcaatgagagatttgcaaaaattcgcagcaaaaggattaagaaagccatcaagggcattacaggcaaaagctttcttgacgcagatgaatctgagcaggataatcccagtactagcaagacgatcaagaagaaagaggccagctcctcaagccatgccagaggtagagaaaaaaggaaaaacgattatggagtcatgggaagtcaagaagataatataattgacaataccaacagtttggcagagacagttgagaatactagagaaaataacaatactactaagataaaaagagggagttcctgtggtcgccccaaaggtagaggacgaagcaggacaactgcgggaagtgatgcaacaataaatcaggaggattatgaaatagaatattctacttcagcttcagatgaggattcatgtaaaaggcattccaacagttacggatcggaaggaagggcattgcgaaggtcaagtaggaaacggaaacaggtgacatacatggaagatggtcacgaagcatatggcaatgatgttccaatgcatcaaaacgatgaaaataacccaggccaacctgctgcagccgcagacgtggctggagaagacacaggatttaatatttaccatcaggatacaagtgaactaaacagcagtcagatgcatacaggtgcaggcattaccgaagatatcaatgaagattcccagcgttttgagttacgggaggacaatcaggtggattcaacaccgaaagactatttgttcaatggtggtggtttttgtatggagggcgagggcgatgaacaagaaccagcgtgtgatcaatctggtgcagaagtagaacctggaccaagtggtccatgtggcgccatggatgaagtttcagagagtgcaagcatatcgacggctatggagtgtaccgagaatgcaagaatggaggcacgcggtgcatcttcgtcgcagcaaagacgcaaggcaagccgaggtttgagtgccatgccgacgcttatcaagcgtaggagaaaatcgtgatttatttgcagtttcactgcatgtatagcacgccattacggcctctgtttggttcaagcgcttatgatttcgcatcagtctttggccaccagtgacgagcgctgtttcgcggacgcaaaatgcacgtctgtgctgtgatttagttccgtctttttttctcgtctgattggttgctcatcgtctcatcctgagcgcattgattttatctgagcttctgtttggttaagagcctgctgggttcgccttttacttaacacgcg

SEQ ID NO: 29374 - DNA, 199 bp, Zea Mays
cgattcctcaagtcgcccttcttcgtcggtcgctcctgagaagaatgttgcaaaatagaaaaacattgcgtgttttgagcgcgcggttatcgtgctcagatatttcgttagaggacacctgcttgatatttgaatgctactgttattctcctgttgtttagaattcgacagtatcacattttgcagaagtaaaatgtcg

SEQ ID NO: 29375 - DNA, 4291 bp, Zea Mays
cgtaaaccctgcctctccctatcccccaagtccgcggcgcccagctgcccctgcctcctcctaccgccgccgtttcgctccattcgcctcccggaggccgccgaatgcccgcgcccagcgccacccgccctcaaacctagactagacgtgtgcctcgcccgcgccgtgcggtctggtccaagacggcgccctgcgggctcggctgctgcggcgggggagcgaggggagggggcgggaggctgaggcggctcgtggggtccatggcagtggccggattggcgccctcaccggcgcccgcgctgctccggaggttcccgtgctctgcgcctccctgggcgccctcgcccttccgcccccgccgcccccgccgcggccgctccatgatgtcgccgttcactggcgccagaaggcaggagtactcccatagctcagtccttggaattcaagacaaccgagctcttaagcttccagtatgtgtcaactttaatctgcaaaacggcggcgcacaagaatgggctgacgagagcaggaggttatcattaagcaaagccggcaatagtaatggttccactcatctagggtctggtattttccatcatgaacccttggaagatttcaagagctccaaccaatctctattgcacagtgtaagacaaagaatggcaccaaattctcttgcgaataggcacgtcaacacggaattggcaaagcatcatgcgattaagcatgctgcagttgctgtgtcagcactgaccagtgttgttaatgatgaccttaaatcagtgaagaggcctaaggaatctgaagtggaggttcattggtctaatggccccaagtttcattctcatattccgaaaatctctgaagttgaaacaagcctgcgatttgatgaaaatgctacagatggctatgctaaagatgtgaatgaatgctcacctgaggagacagtacaaccctctcgaactagagcgccctcatcccaggagtctctagatgcacggaaggcactcagtaccatatatgacaaagttctggtggttgacaatgtcatgtcagctaggagtgttgttcaactgcttactacgaagtacagaaattatattcatgcatgtgacacagaggtagctaatattaatgttaaacaagagacaccagttggccatggaaaggtcacatgctttagcatttactctggcactaaaggtgctgaggctgattttggaaatggcaagacatgcatttgggtggatgtgctagatggtggaccagatgtactcatggagtttgtcccattttttgaggattcatcaatcaggaaggtttggcacaactatagttttgatagtcatgttatagagaactatggaattaaagttgctggatttcatgctgatacaatgcatcttgcacgactttgggattcttcaagaagaacagatggaggatattctcttgagggacttacaaatgatcatagggtcatgggtgttgttccaaaggaattacaaaagattgggaagagatcaatgaaaaccatctttggtcggaaaaaaataaagaaggatgggtcagaagggaagattactgcaattgagcctgttgaaattttacaaagagaagacagagaattgtggatctgctattcttcgttagattccatgagtaccttgaggctttatgagagcttgaaaagcaagcttgaaaggaagccctggacttttgacggttaccccagacccggaggttcattgtacgatttctacgaggagtattggtgtcctttcggtgctattcttgtaaaaatggaaacagctggaatgcttgttgaccgtgcttacctttcagagattgaaaaggttgctgttgcacagcgcgaatcagctgcagataaatttcggaagtgggcatctaagtattgccctgatgcaaaatacatgaatgttaatagtgacactcagattcgacaactcttcttcggtggtatagagaacatatacaaatctggtgattttttgccgaagagtaaagctattaaagtgcctaacaatgaaactgctgtttcagaaggcaagaaggttccaaagtatcgcacaattgaccttttcagcattgtggaagacctgaaaactgatatatttactgcaagtggttggccttcagttagtggggctgcattgagaaatttggctgggaaggttccatcagatcttgtttactcaacagatgatgtaaatgatgatgaatgtggtattcattctgaaatttcccattgtgatctagaagacacctcttcttatggtactgcatatgatgcatttgggggaggaaaggaaggaaaagaagcatgccatgccattgcagctttgtgtgagatctgttctattaactcgttaatatccaacttcattcttcctctacagggaaatcatatatcatgtaaggaagggcggattcactgttccttaaatatcaacacagagacaggacgtttatcggcaagggcaccaaatttacaggcaagcagtatcgtaggaggaaagggggccagcatagctaggagttgggcccagatgcacagctggaagataggggtcaggagatatttttttgaagggaaaggctgtagggaaaacccctacagcacgattttattaaataatgagaagaagggaacaagaaatggaccaagaaaagaaaaaaacaaaaaaacaaaaaacaaaaaaatcggctatcgagagtttagccaaagacaccctaagcctccaaacgctattaaacctaagcatttgcaacttgagcatgtcattgaagctgcccttccaagaaaggaaagaaggggccatgttcttgaagatgaagtcattcatctgcttccaaatgcaccatactaccactgccagaatatccatgaagaagttgtgcccaaaggcaccccttgcagcttcgataaaaagggcgtacccagtgccaaccaacctgcacttgaaaaggataggtataaaatccgccaagcttttgttgcagctccagggaacactcttattgttgctgattatggtcagctggaactcaggatcttggcgcatcttgctgattgcaaaagcatgttagatgcttttaaagctggcggcgacttccattccaggacagccatgaacatgtatcagcatattcgtgaggctgttgaagaagagaaagtaattcttgagtggcatcctcaacccggtcaagagaaacctcctgtgccgttgttgaaggatgcttttggtgctgagaggaggaaagctaagatgctaaatttctccattgcatatgggaaaacggctcatgggcttgctcgtgattggaaggtttctgttaaggaagcaaaagatacactgaaactctggtatagcgatagaaaggaagttctggcttggcaaatgaagcagaaacagctagcacatgagaagcgtgaagtttatactttgcttgggcgatcacgccgttttccaaatatggctcatgcaacttctggccaaaggggtcacattgagcgtgctgctatcaatgctcctgtacagggcagtgcagctgatgttgctatgtgtgcaatgcttgagatagacaggaatactcgtcttaaggagcttggttggacgctactcttgcagtgatactggaagggccttcagagtctgcggagctggccaagtccatagttgttgagtgcatgtctaagcccttctatggcaccaatatcctgaaggtcgaccttgctgttgatgccaagtgtgcacagaattggtatgcggccaaatagacctgttaagtgtcccagaagggcgtcaattccttcggtgaaactcggtggattttgaactggtatctgctggctgctgctagtagcctagtgagctcatctccacgtggatgccatgcactgattatttcgctgttgatctggacagtgaggggtcagcactgagcagcgaaggcactgtacactattccgtattccctataggtcgggtagcttcaccttccacactccctgttaggatctctcgatcattcatgcctgatgtagttggtcgtcctggatagcagtgaagactaagcatgccgtgttcataagatttatttagcatgctgatgtgttgagttgctgaccagttctgctgacgtctaacactgttgcacgcactgcaacaatgttttgatcacaagagaatgtagttgattgtgagcgttcttaatctccttatttctgctgttgaactgtgcgtcttgttaattgtatcttctctaa

SEQ ID NO: 29376 - DNA, 1459 bp, Zea Mays
cgtaattcaacaactagctgcatcgtcttctccaccgaccttgccgccgtcgccccgccgctccatccgatctggaggacgacgccgcgaagcggtctgtcgaggagcagcagcagcgtacagccatcgacgctcacgacagcgatgtcgcgctagtgatggcgcaagcaaagcaggcgagcgaggaggccgagcggctggccacagcgagggctaaggtaggcatgcagatggccgagaagcagggaaggattgccacgctggacatcgagtgcgccacactgaagcaggaatggtttagtatgaagaataagattactagacaggagccacatgttgccaaatctcagagcaagcaaaacttcattgaaggtacaggtttctctgaaaacagaaaaaatacttagcgtctttccatgccatttcatgcctgtgttgtattcatgttgacatgcttccacatatggggagtttattgcacagggtacattagccatttcatgtgtgacatattttattattgtttacattgtgtgtctgttaaactagtgattctgctttctcccctcctaccgaggtctattgaaatctacataatcttgccttttcagatgtatggatacaagattatgcaaaacatagatgagtagctagtcaaatcatcaaaactgaataatttgtaatttcgactggacttggatgtggtgtttacatgcaggggagaaacatgtcatatttaactcagaagggagcctggataagtttgttagtatttactctcctccctcccttcccacaactatgcttttcagtttttaatcaaacaggaaagtgatgctcagaacaagcccgggaaactctacacacaactggtgtcagctcagctcaagatccaagacatcaaatcacaaagatcagcgcttcttttagaaatcagcagaatcaagcagattctggagcaagagaaaaacataattcctggctgcactacagcagatggatatgaagtcattggaggaggaatacaaagctctgcaaggtgataaatcgggggaagttgagtacttccagtctcttgatgaaacaattaatgggatgaaggggattttggatcctgtcaaatgccaatgtggactggagtacaacttaaaacttgatggtgaagccatggatataagctaagcaagaacgaccacatacgcagatgcccatctccaccagatttcgtgcattttagatctgtacagtgtgagagatggattattctttggaaggtacagaatcttctcgcatgtatacgggtggatgctttgggcagagcttgacagcgtcatcgcgaataatatagaattctgatgttagaactatctggagcttgaacggactatacggccatagttttgttcaataattgtttttccttacgctcaaccgcttgtccagattgcagacataaaag

SEQ ID NO: 29377 - DNA, 2341 bp, Zea Mays
cccacatatcgaactgcggcgagaacagagaaccacccacaggccacagtacagaatgacagaagcgaggcgcgcccactgcccacgccacgcactcctatactcctatgctatgcctctcctcccctccacagagtggcagtggcggggtgaggtgagagagagtgagactgtgagagtgagagaccactccatctctccttttactctcctctcccctcccgctcgcttttttcagcggggggagagaggccgcggcggcagcttgcagcaccagagagagagagagagcgagcgagcgagcaaaggccaacagatcacagctagctccgccccgccccgcctaccagagttttcaatttcaccgcgacgtcaaaagaaagcagcttttggtggtaatctcttggagcattgcagcggcgagcgagatctgccacgacgcgccagctcctgcagcggcccggcggccccggcctgccactgctactcatctgcgccgctggcagaggagctgccgctaccgctgccgccgcacccattgcctgcccctgcagcctgcccaagcagcaagcacaaagccccatcccgcatcaccctcaggctactccaaactactgcaccgtccactgtcgcccgcgcgcctcagccacgcagtcttatgcatcaatgcatgccctagcattctgcggcttcccccgtgcggcgcccaccgctggagagtagagacacgcggatagcaccaagaccagcgccggctacgtagctgctgctcggtgtctcttcagactcttcttactaggggggaaggaggaggaccaaggcaggcagtcggcagcgaggaggtgaaaagggcagcagctgcccgtgccgtaggagaggccgggcggcggccgcgtacgtccgttgcagcgcgcgcgcgcgcgctctggcctccgtgcgataccacgcgacgctgaatcgccgatcgacatgacgctggaggctctgtgcccgaccagcagcgacgtcctcgtctacgacaccttcaacgccgccgccgcatgcgccgctgcttctgcggggaccttccttttcggcaatgcaccaccggtggaggtgccggcggcggcggcggcccaggcgaacggggagaacagcgtgcagcaggggcggaggaagcggcggcgacggcagaggagcaccaagaacgccgaggacgccgagagccagcggatgacccacatcgccgtcgagcgcaaccgccgccgccagatgaacgagtacctcgccgcgctccgctcgctcatgccggactcctacgtccaccggagcgatcaggcgtccgtggtcagtggcgcaatcgatttcgtgaaggagctggagcagcagctgcaatccctggaggcccagaagctggcgctgaagcggcagctgcagcagcagcagcagcgcagcgtcacggccgcgatacgcgacgacgcggcgcagccggctcgaggccgtgatgacatcggcgcgggcgcgggcggggacgccgcggcgcgcagcgaggtgtcggcgccggagccagacccgcctccgttcgcgcggttcttccggtacccgcagtacgcgcggcggcacgcggcggcgcgggaggacgccggcgcggaggagacgagccgcgcctccgcggtggcggacgtggaggtgggcgtggtggtggacgcgcacgccagcctgcgcgtgatggcgccgcggaggcccgggcagcttctgcggatggtggccgggatgcaggcgctcggcctcgccgtgctgcacctcaacgtggccaccgccgcggtcgacgcgacggcgctctacacgctcagcctcaaggtggaggaagggtgcgccctggcgacggcggaggagatcgccgcggcggtgcaccacgtcctatgcatcatcgacgccgaggcgacgccgcagaggctgctcgctgccggagcaccagggacagggcagccggacgtctagctagtcaggatgattcaggacgaggtcttcccggcgtaacggggcggcatgggctgcgcggggtgtctgcttccgtttcttgtaaagtgcagtggcgtgcgtgcgtggctggccagcacacgagagcctgatggcgtagcgtaggtacagagtatgtaacgggcaataacacgcaggttcgtgtctggacctgtggtctctcgttcgtgcatgcctatgcgtgcccttgtgtttgcgtgtgacgggaattggaattgaggacgggaagcaggaatgcaggaacagggaagggatcggacgttgttttcttcatgcgctcagcacaactgcgcaagggaaggggagccgtgctgaatcttgc

SEQ ID NO: 29378 - DNA, 207 bp, Zea Mays
cgatcacgacgggatgcgatatcggccggtacaaatttgttaccgctcctctccgcccgtcggacaattacgtagaatgtgtctacaaccaaacatatgtcggcaatcattacatcgtataaggtagcagcggcattcatttccattgtcgttactgctcttgttggccaaccaaacagctccttactgttgatatgttggttctat

SEQ ID NO: 29379 - DNA, 261 bp, Zea Mays
acgaacccttcatgccatcacaaccatcgccagtggggtgaaattgggagagagggagaagaggtcgccgccgcaccgattccttggatcaccgtcgtctggactaccagaaaggtgcgattggctagcgcggtggtgcgtagattgtctgtgagccaacctcttggcgcggggtcatcgggactccactaaattcgtcgccggaatatcctacgctactaccccgggcgggcggatgtggacaacccacctggacaccca

SEQ ID NO: 29380 - DNA, 578 bp, Zea Mays
cagaccctcacccgtcggaaaggtttagaaagttagctaggtttcactgctcgtgcctcgagcaccacggcggcggcggcagcgggactgttctggccgacgacggcatcgatgacgacgaggagtgttaaaacagctcgttgttttgggatttgccgcctcaagtttcatctagctacctccaacaaacccttcaatctccatggctacatcgatatcaactcaatatactaacgaggaggaaattaaaaggaagagaaagaagcgaaagagagttgttgtattagcctagtgtacaataaagaccaagcaaatggagagggtgctaaaacagcagctgaaagttcaaaggaaatgggaaaagagaatgatatcggaggcaaggatgctccatattctgtatcttcctcgagtagtttaaaaagacaaagatcagatgattcatttaactctatatggtgtgataagtttgacatgtatctgcattgaaagatgatggtccaaagctaccctcttccgccgaagttctcgccacattacaagaggttgagggacttgatgaagacacagaacttgag

SEQ ID NO: 29381 - DNA, 2742 bp, Zea Mays
ccgagaccccgacccaccccgcctcccccgccgccgcgctcgcgctcccccgcgacagccgccatacgccctatctccgccgtgcctgcgcctcctcccccgcccgcccgagacccgccaagtttcccttccttgcacggcgagatccaccatcggcgcccccttccctggcgagccacagccgtccatgttcctggccaccggcgacctcccttctctagcccttggcggcgagccaacacctcctcccatggctgccccccagaccccagtcccgtccgcgcatccgctcttccgtcagcgacgcacctattctcccctctctccccgacgtcgcccatggcgtggacggcgacctccctcaccctgcaactctgcacgtgtaagggccgtgttgcccgcctcctttccccacaccggcgcagccccctgtcgccgcggccccttccccaaacagcacggcaccacatgctccccctgccgcgcccgcactctccttccccaaataacacggccccacatcgctggttgcctcgcctcgccggggacccagcacgatggtcagggagctggtgggtgggggagacagggaggagcggaggaggaggtcaagctcaacatggacattgtgttcgtgacgctgccttccccaccgacaccaacgactcactccagaacccggatctggggcccttcctcctcaagccatggtattgggcgagggtggcgccgcctcgcgtgcttgagttcgccgagcgcgccgccagggtgctcgagcgaagaggtgagggcaccgagctcgagctcgccatgaatctccacatcgctgctggcatccactgcggactcagccaccaagccctgacattgtagccagtttcttgcaatcagaacgaatgccagttggtaaccatttaacatttcttttgctgtgtcaacttattggagttggagagaggctatcactatactgacctttatatcatcagaattgacataaatgtgatttacacgtagatacaagtttgtggcagagatttctctgacacgccaatcagtcttcgatgcgaatgcttgttgctcatatggacttgtggttgtgataatgagttcatctccgtgcacatttgtcgtccttgtggttacagcagttaactgagtagtctctcttgactgcaaaacaagcaatctgttgcctctgctgtgatggtggagcaatttcagcgccaagaatgatatctcgcattttagattgtgtcagtgcagaagtattaacattgtttttctttgcataatcagaaaggatgaggtcccttagtgcacactcaaccttcaaccactgttcatcattcagagatggccatatatgatgtgtttcagtaataattgttttgtcagttctgtgaagacaggtatggttcatatattcaaatatccaaacctcatttggagttgtgataccagcaacctttgacatcgattcaagatgctactggagtgttattcatttgttcctgacagatgccactgcacaaatggacgttgacacgttgtagtgatcacactgtcacgagagctgagcaaactacagcctgcaagagctacacgtggcatgcttgaccacatcatggtggagaatgcaagtgttaaagttgcattgaatcgcattgccgttgtttctgtcctggatgcacataccctgtcagtgatgtcttatgaagcttggaggctcatacatctgtttctgttggctctctctagctatatgcagtggagctgctaatatgcatgaagtttgggctaggtgagcttcctctttcacttttcaaaccagtataggtattggccgatgtcaagaagacaaggccggcgacgagaggacgacagcgtgcaagaagagaaggcccatgttaggcgcaactatagggctcaaggtcaatcagttgtggtcacacttttccatttttacgttcagctaaactgaccccctgtctcatggtgcaactgtgcaaggataggcaacaagtgttcaacaatatgtctgtggatcaattgacctgcatttcagcttttagttgaggatcaaaatctcgtgtcgttcagggccctcggtagagagacattaatgtgtcggcaccgtggatcgtcgcagttgtgggtcactgtaacggcactggtcacaggcaccatctgcctctgttcgtcctcctctattggcctcctcagcacctacagggtccagatggaaaagtttctataatacatatgtaacaaatacatactccttgttcaagagatcgtaagcaagattgtaaacggtatccaacgcagaagcacctaatatggttacagagtattactgatgggcttacctgcagactgcagatgttgttgcaaatgagttgtggagaaccgtagatgcaaatggttggagagcatcttctgcaccacacatctattggcctcacataccagctgaatctgagagcaatgggtacttgtgtgtccggtgcaacggcggcttgaccttacaaatcagtgttgtatgactaatataaaactctctctctctaaagtagcatagttcaccatgcaagttttgtgtattcatggcaacatatctgaaagatttaagattacttctaccttgattttgtagatatgaaatgttgttgtcattgcacgaatcattaatgacttgattttgctctctatatgctatcttagaagtttcagagttca

SEQ ID NO: 29382 - DNA, 1400 bp, Zea Mays
ctgcaaatgtagagaggccgcttcacaacccgcgacctggttgtggatgcaagtgcacgtgctcttagaatgatatatcaatcaagattagctccaaagtttgatgttaatagggggaaaaacatgaattttgttctttctcttttggacagtgagaatgagaatgtcacagagctggctgctgctattatatctcactcttgtaagagtagtgcagaacaattggcactatgcagtgctggagttccacaaaaacttgttagcctttttggaggttctgtgaatctacgggatgcttgtttaggttctgtcactgtagtcgttcagaataaccaagatgttgcttccagatttgtaacaacggttcatggaaaatgttttcgttcagtagttgggttaatacatgatcggaatccaagcacaagactacttgcttgccgatgcttgattgcacttgggcatgcttctcctggccattttcaggacaaacagattaagaccaagttgattatggttttacttgagctaatcgaagaacctggtcacatcggagatgaagctcccttggcattaaccaccatgattaaagatagcttcgaactgcagaaacaagctcttgcaacgaacgcagttgagaagctcagcaaccatctgctagcgaaaccattggagacaaggcaagcagtggccatattgcttgcgttatctgaactttgctcaaaacttgaagagtcaagatctcaaatgatgtcagatgaggtatcaaccttactccttgatgcattgaaacatgattgggctgatatccgcgttgcagcatgttcgtgtctgaagaatatctccaggtcaccaaaggtacttagtggaggtcgattatcctgcgatacagttattggtcctctagtccagcttttaaacgactcgtgtacttcggtccaggttgctgcccttggtgccatttgcaatattgccattaatttgacacccaggaaatcagttcttcttaactctggggtcgtctcacatcttgttcatttgtcaaagtccatggatccaattttgaggctaaaatctgtatgggctctcaggaatattatgtttcttcttagtcctaaggataaagacttcattgttaaggagttgaccttatctactctttcaagcctcatatgcgattctgaacattttgttcaagaacaaaccctggcacttgtgcgcaatcttgttgatggatatgtggactctgctaattttgtcattggtgaagatggaataattatgaatgctattgcaagacaactgaacaatgcgtctgccccgggagtattcgttcagcaggacatgagaggatagaaacatctattgtagtgaactgcatagtttttatcccattctttgat

SEQ ID NO: 29383 - DNA, 2552 bp, Zea Mays
gaaaactcctcacttggggttctgctgatgacatgggccaaagttatgtgactgctgggaagcacgaggagactccagaggcttttccacttcctagaggcgtcgcaatagtgcgggcagatgctggatgggctcactgtgttgcaataacagatgaaggtgatgtttatacatggggttggaaagagtgtgttccaactggaagggttattggagaccaatcttcagttggaaccaaggagaaggatgaaagacaaatggcaatggccactgaccaaggtgtgagccccaggtcgcaggtgtctaggacaagcagcggggcagcatctggtccttctgaaagcagaggcactgatgatagcacaaagcgacgaaggttgtcttcagcaaaacatggccctgagagctcgacatccagtgacgaaagtctttccgcacccccttgtgttgtgacatttaatacaggagtgaaaatagtgtctgtagctgctggtggtcgtcatacattagcactgtcagatttaggtcaggtatggggttggggatatggaggagaagggcaactaggtctgggctctagaatccgaactgtttcttctccccatcctgtaccgtgcattgaatcagcactatacagcaaggatcgcccatcagctatgaaaggtaacaaggctgctgaaggacatgtcagtaaagtcttgggaaattgtgtgagggccattgcttgtggaggtcgtcacagtgctgcagtaacagattcaggagctcttcttacatttgggtgggggctgtatggacagtgtggacaagggaatacagatgatgttttaagtccaacgtgtgtatcgtctatcctgggatccaagatgcaagacgttgctgcgggtctgtggcacactgtatgtacatccgtagatggtgatgtttattcctttggaggaaaccagtttgggcagcttggcactggttctgatcaggctgagactgttccaaaattggtagatgctaccagcctagagaataagaatgccagatctgtttcttgtggagctcgccatagtgctattataacaggtaactttaagttgttctaatgtttgtttgtagggatctcaattgtatcatcttgtacgcccatttgcctttcttacaagaccacactactaatacatgctcatgcagggtacgagttctaatcttcgcttacatgcatcttgctattagctttgttatatatacgcgtgccttgctgcaaatggacctaatgttacctcctctttttttattgctacctcatccttggatgctctcgtttgaatcgagaacaaaaggttctgtgctaatcagtgactgaacttaccattgggtaacccaggagtattttttttatttcattaagttattcttgccgtgctgagccaccaggccttgcctcggtttatttcttccctagactccactcatacaaaggtctatggcttttttctcagagctacacatcattatattaagaagaaaaataaggtgtccaaaatagaccaataccaaaaggaatgccaccttcccgtggccaaaatcgagaaatacataaaggtatccataagaccaaaatatcgagaacaaactaccaaagacgacaaatcctagtcctgggatagtggcagtagggagagacactgctggctcttctagccacattcacatttggagtaagcctctctaagacacatccatccattcctgtgatttcaaagcggccaaaacccaagaataattagggagttaagcccctttgcagtaatgctttgcacctgatcattggccttgatctgtttttttttcctggccgagctgagccggtagaagttcacaagggggcagcagccatttacacgtacatactgatcacttaggcctactggaagtagaccaggggcagaactaaggcggtgaacaaaaatgtatctagagaaatcgaaaggggtaactatatcctcaggaagtcttctcatctgacaaaggttacacaactattgcagatgaaggcgaggtattctgctggggatggaacaagtacggccagcttggccttggcgactcaatggacaggaacgtgccttgcagtgttcctgtggacgcttaccaccccctaaacgtgtcctgtggctggtggcacaccttggtgctcgcggactcgcctacttgaaacctgacaaagaaattaccttagattgacaattttgttaggaactcgtaggctcgtgcagatgcggtgatgctgcatttcatcgtgtacatacatggcagtgcatgcagatatgtgtattcattctttggcggtgcactcttcaacctgtgcaacgtagacaaagcttgtatcgcaccgcgtatacagttgagtaggattgcctcgacaaattgtgcatttcctccgttgctgctaatgtacaaaattccacaagctagacagggcaaccgatgcgttcctcgttgcagaagacagatctccaaaataattaatgtttgtgtatcgtgatggttgcgattccgat

SEQ ID NO: 29384 - DNA, 818 bp, Zea Mays
agcagccactgaagtcgaatcccctcacactataaagctcctccattgcgccgccgccactctcctttcggaggaggcggaccaggtaagcagcagcaggaaccctagcaccgccgcatccgcagccatgggtatcgacctcgttgccggtgggaggaacaagaagaccaagcgaccgtttcttggtcaggaggaccaagagcaacttcaatgctgtcattctcaagaggctcttcatgagcaaaaccaatcgcccaccaatctccatgcgccgccttgtcaagttcatggaaggaaaggagaagaacattgctgtgattgttggcacagtcacagatgacaagaggatccaagaggttccagcaatgaaggttactgccctgaggttcaccaagccatatgtgcgctccaagggaaggaagttcgagaaggctcgtggcaggaggaacagccgtgggttcaaggtttaagaaagttgtgggccatcagcatagtaatcacttcctaccgagtagtagcacattttgttgccttggcttggattttgaaagatatttaaggattttcgtgccttgtctactggttactggttgagcaagaagacaatgttcttttgcacctctttttattggtcggcatattttgcgctgtgattggaactgtgttgtgttatctgctggatgtacttactgcatcacctagaaaggtggcttgggccatttggaatcataaaacgaaagttgctcgcttcaagctagaatacacgattcctcgaacccttgttttgagttacaaagtgaaaccacttttgttttgag

SEQ ID NO: 29385 - DNA, 3631 bp, Zea Mays
aagcacataaatgaactcagttgtctttctaccatgttttctcattatatattggcataccagtttttttgaagcagtattaatttccattctcatcatcattaattaaaacaaaatagcgattttttcccgaactgttggtgccactgttactcattcaattgaaccaaacactttcttttccctctctataaccacccatcccatatccatcagcactgagttgagcacccctgctggctgcttgccctgctcctctcttctgcccatgtcttctccctcccccattccactgacgacagtagcaaccaacggtgtctcctctgtcctctctcctaagttacttgcagccctatcctgtctatcctcatcttcctcctctccctgccatcttttgcaagatctctccttcgtcttctctttccccttttaaatccaccggaatccctcttttgtcacgagccaagccgccgagcgcagcataaagcgagcgaagcaccagcaaaagagagcgacgccgcctgcgccaaagcttcggattcccgtctattttaccccccaccctcgccgactcaccggcgcgagatccatccgcaggtgtcggcggcctgcagccccccttgaaagatggcgcctttctgaggctccccgggggtttctcgtcgtttcttgcttggcccctaaagcgggagagcggcttccagggagctcctcccgttcccggccaattcagctgaagtggcggcaagtgggtttagggctcgatccggttttgtgcccgggcgtgtctgactctgacccgggctagggagcggtggttcttggctagttcttgagctggttgcggcgcttatccctcttcttggagctcttggattggtttgggggaaagcaggttcttgcaagcagctgcttcggttctcgaggatgttaattttttgaattcagtcggggggaatggggctctcgcggtctctggattgagcatttctttattggaattcgacatttcgtgcggcctccagtccatggaggatttggggctgtggaagcaggcgtggatgtgggtgttgtcccagaagcacatcctagcgtgggcgcacacggctgcgtgcggcagcagggagcgcctcgccttcctggtcgatcggcactggcccgccgtgtcccgggcctgcgccacctcctcgcgactcgcgctcgccgcgctgcggcaatggcgcgggtgcacggcgcgcggggtgctggcggtggcgagcctcggccctgccgccgtcttcgtcatcctctggagcttcttcgtgtgcatgacctcgccggcgtgcgccctctacgcgcttcttagcctgggggctgcagcagcagttgttcactatatgggctatacacctggccttttcattgttgggctgtttggaatattaattatgtggatgtatggctacttttggattacaggaatgcttctagttgctggaggttgtatgtgctctttgaaacatgctcgatatgtgatacctgttttgacttcatatggtgtttattctgtggctgttcgtgttgggtggcttggagtcttcttgacactaaacctttctttcttgacaaatgatcttcttaataagttagtgcaaggatacgaaggaagcactgaagaaagccagtttgaagacatgaaggattctgatccagttatggatgagttctatcgtagttgtgaattcccatcagttcctgacagtgaacctgagaccgtgtcttgcgcgaagccatactgctcagcacccatccaagatgtattacatgtacaaaaagaggaacctcctagtaaagtagtgaaatctgattctacttcattggatgagattaagaggataatggatggttcaaaccattatgaagttttgggtgtacctcgtaatagaagcattgatcagaagacactgaaaaaagaatatcacagaatggtcctgcttgtacatcctgataaaaatatgggaaatcaattggcttgtgaatcattcaagaagcttcaaacagcttatgaggcaagtgtttggatgtttatgctttgactcatcattgtctagattagtgtttaatacagtattgtatcttttatttaacagctagttgttataggctccttgcgttctggtggcttggattgcctctcttcctggacccgtggtgtctaggagagatggctttagcgttgctttttgtgatgtttaccatgtgtatcacaaaactctgtaatttgttgtgttcggattcaaccatggtcctctctgatttcacaaagaaaaacagctatgatgagcaactgaggaaagaagaatcacagaaaatgaccccaagatcatgtgttgtctctcaacagagtggtggtgtggagtttctctcagaagagtccaggcgaatacagtgcactaagtgtggtaatttccatatatggatatgcaccaagagaagcaaaacaagggcacgattctgtcagggctgtgatcagtttcatcaagccaaggatggagatggatgggttgaaaccagattttcgacctccatcaagatggaaataccacgggcttttgtctgtgctgagagcaaaatatttgatgtgtctgagtgggctacttgccagggaatggagtgcaagcctaacactcacggtccaacgtttatggtaaacatggttggcgcagataggatgcctcagagatcctacagttcccggtatcccttcagcttggacgcagagatgatcccggaagacgagttcgagctgtggcttcagcaggcgctggcgtcaggcgtcttcgctgacagccccaagcgcaggaaaagttggagcccattcaaactgcctcaaaagggaattaaaagttggcgaagatcgtcatgagggtgcagcaggcattacacagcgaggggtgtaggcgactacatcattggaaagaaggcaatggtgcagggcttcatgaatgtaaataaactgaccaacaatttgcccggatggacaagtgatttttgttcgaagggaaatttggatccataccattaaaagatcaccactttggatccataccattactatctcacttacatgtgggtccacatgagtcaatgacatgtggggtccatggtatatatctaaagtttggatcttttaatggtatagatccaattgttccttgttcgaaaggagaaagagggtggagaagaaacactcatgaataggtataacacataccactgctgaacttggttccctctgcagcaatcccacgagtttagccgtgaaccagtggtgctatcccccctacgatcaaagtaccggtggatctgtggtgtgttagtttcagtagtttagggatctgacatggaagaacgccaagacatcgttcctaagacggctgagatatggagcggtgttcattttaatcgtcaataatatttctgagaagcattgtctttgtgtagaagggaaggaaagaaggatgaaagtgatattggggactggctgtaaagtgtaaatacactaaaagctccctcctgtggaattactgcttgtaacattgtatacactgactgattaacctagtaaaaaacttccatgtttcaaattctc

SEQ ID NO: 29386 - DNA, 1073 bp, Zea Mays
tttgtttatctgtttttcctgagctctggactgggtgcataaaaacagagaaagacaggggcctaaagcacaatttccccaagactcattcaccccgcgtggatggcgggttgattcgggaaaaaaacagggtctctttagcaaaagagacaggacaaaggggtatcctcttatcagatccgttggatgacaatcgcacggcccagaaaagatctcgttcacaataatccggtacaaagccgaggtcctaggatcaaagatcgacgacaaggatttaaagagcgaagaggtacgctctctgacccgttggatcacagatcagcggttcaaactctcccacacctagacccgtcgggagcccttgagttttagatgaacgaccgagatctcaaacaactaaaaagggggaggggtgccaccgatcacatccaagccgcccaaagccaatcggacgaccagggggatttcttccacgctcgaccgccgagcacggcggggcgagcgctcgggacggcggtgctcacaccgaagatcgattatgcggcgcacccagacttgattcgaagcgtaactaggtgctaaataatgcagaggaggtatcgaatcgatccaaggggcattatcgatggctgagaggctgggtgaagctgtccatgcggcacggcgggttcatggcgtcgctgcgcgacggcgagaaattcccccgccagcacgcactccttcgttcggcaacggtcccacacatttcccacatagtttgccgccccatctggaactcccaccgaggtgacatcgccagcgaatgcgcaggtcaacggtggcaatgaatggcccacggcgccgaggtcgggtgctccctgtttgcgagctccaaaggttctcggatcgagggctcgcgcgcacgtagtccacgcaggttgatggccattcgcgaccccaccctgggacccgaacgacaggaattgccgcctgcgacggcggcggcgcgagcacctccctctctccctcacggcacgcacgaacggccactcgggcagggtcaaccgcggctgacagactcaattccctctttg

SEQ ID NO: 29387 - DNA, 2129 bp, Zea Mays
cgcgtgttctgcctcccgcgatctcgctcgtgatattccagccccgccgccgccgtccccgcccccatccgtgacaccccaccatcaccgccgcgccacgcgcgacaactccatcccccgtccgcacccctaccccgagcatcgcagcgcctcccgcacgaggtcgttgcgcttgtcgatctgatggcggcccatggcaaaggagcaggtagaaaatggccgatgccgaggatatccagcccctcgtctgcgacaacggaactggcatggtcaaggctgggttcgctggcgacgacgccccgagggccgtcttccccagcatcgtggggcgcccgcgccacattggtgtcatggtcgggatggggcagaaggacgcctacgtcggtgacgaggttctgcaaaccgatcatgacaaaaccaaaggtagctttgaagccgcagactctgtctccacaacctgaagcccaagcacctcatgatcctcaaacaccagagcaacaacaaagcgggactggtgtaggcgtgtagctggtgagccgggtagtgaaggaggtgtgtaccaggcctccagtgagcaaatgggcatggtgccggatgcatctgcggccggtggcaggaaggtcgagctggatggggacatgcgatggacatcacaggttggcccctccagtgatccatctcaaacactagccaggccataggaaaaacgttgaatcaaagcaaacttgatgcttaccgaaagcatgttcgatgagttactcagattcatggcccaggaattgaatctacacggtttaataactatttgcatggctctaaatgcttaattagaagacgaaatgaatcgcaaggggaaactaacatgcgagagaggaggagctagccacaaccaaagagcttggttcaatacttcaatggctagaataatgaacgatatgaagatcaggtagcattatatatgtcaataagaagcagaggagagaagcagcccacatcgcaggagacaaggacttcacttgtttggccagttcaggacttcaggatgttgtcgatgatgtccatgctatattccctcgcttcatgcttaacaatgagggagagactaagtgaggggctgaaggccgttggtgctgtcagaatgtttttttggagttttggtggatgatgctcagtgactgcaatgcaaaggatccttctgttttgtatattgaatgagattacatcactgtttttttcttagcgatatgttgagctcatgtgctcgtttatgttagtcgatctctggctcttgtagtaacttggaaagcttgctgctttttttaagggcatacatgcctgtgatgtgtggtcatgatcatttttttctcctgttattttagttgtcgtatcataaatgccatgtttgcattggtgttccaacatgtcaatattattgaataaatgtttgcattggcggcagcggggacgacgctaagtcgagcaatggcgaagcggcccgtggtggcagtaacggtggagagaagcagggggatgaatccaacggtggcgggatacttagcgctgtggcttccaggattggcgtggtcgtgtccagcgccaacggggaccgcagcggcagcgctgaggatggtgccaagacgagcgctggcgacgctggtcacggtagcaagggcgaggagaaggggcgtggtgtgaacggtggtagaatagtcgagcagatcatttccaatctgccctcagatgatcaggcgcctgatgccgatgaagcttccttgctcatcgccattatcgaagattagctccatgttccgaaggctctctaggtcgtcctcaacgccaggatcaaatcatcagctgagccggagactgaaaacaataaagaaaagcaagcagctggtcatagtaaacatcatgtagcgaggcttagcagattgcttttttttcccgttagaatcagtccacatgtcctcgacacgggctagatttgttctaggattatttttccagtagtaagccatgtatccatggacagtccacagcgcgacgtctaatgtaacatcatcaaggttcttttgactatcccataagaaaccattccttaagacaaccgatattgtgagttgataacc

SEQ ID NO: 29388 - DNA, 3124 bp, Zea Mays
ggctccctccctcctcccctctcccctgtcccctctctctttctcaccgtccacgcgcgactgcgcgggacactggtcaacgccccggtggcaggcggctccgttggggggtgagtctagctccgtctgttgcgccggaataacgcggcgggtgctacctccggccctcgggttccatggggaggaacggtagcgtgaggcgctcggcgttttcgggcgccgcgggtgctgccgcggggccgccgtccttctctgtgaatcccgccgactaccggttgatggaggaggtggggtacggtgcgcacgccgtcgtgtaccgcgcgatcttcctcccgactaagggtgttgtcgcggtcaagtgcctggatctcgatcagctcaataacaacatcgatgaaatacaaagggaggctcaaataatgagcttgatagaccatcctaatgtcatcagggcttactgctcatttgttgtggagcacagcctctgggtgataatgccattcatgacagagggttcttgtttacacttaatgaagatctcataccaggaaggttttgatgagccgatcattggctccattctcaaggaaactcttaaggctctggattaccttcaccggcagggtcaaatacatcgtgatgtcaaggctggtaatatccttatcgatggtgctggggtagtgaagcttggagactttggtgtttctgcttgtatgtttgatagaggtgataggcaaagatctaggaatacatttgtaggaacaccatgctggatggctccagaagtgctccaacctggcactggatataatttcaaagctgacatatggtcatttggaatcactgctcttgaactagcacatggccatgctccattttctaaataccctcctatgaaggttcttctcatgaccctccagaatgcaccacctggtcttgattatgaacgtgacaaaagattctcaaagtcatttaaagaaatggttgcaatgtgcttggtcaaagatcaaacaaagagaccaacagctgagaagttgcttaagcattcatttttcaaaaatgcaaagcctccagagttgactattaagagtatcttatctggtttacctcctctctgggaccgtgtaaaggctctccagcttaaagatgaagcacaattggctttgaagaaaatgccttcttctgaacaggaggccctctccctgagtgaatatcaacgcggcgttagtgcatggaacttcgatatcgaggatctcaaggctcaagcatcattaattcatgatgacgagcctcctgaaataaaagaagatgaggacattgcaagaaacattgaggacttgtcttcacggaaccatttgggaaagtcatttgcaaatgagtgcaattccaggcagcgagcctttgtcaccactttaaaatcggatggaaacagacccaccacgaatgaagcttttgattttgattttgattttagcgaggctgccactacaagaagggctgatggacatgaaagaaacataagagagaatgattcattgccctctacagcaaagcgagatccagagtcgaatcattggacaagtgacgttgggcagagacaactgtcttctggtgggagcaatagctcaacagctgaaaggggctatggttttgagagggatgcagttgtgcaaacaatacctgaaaaacaaagaagtgaggcgagaaaaacagcaagccttagtggtccactttcactgccaactcgtgcttctgcaaatagtctgtcagctcctattcgatcttcaggaggttttgtagattcatcaggtgacaagtccaaacgaagtgtagtagagattaaaggccgcttttcagtgacatctgagaatgtcgatcttgcaaaggttcaggaaggtccacttagtagcctctcacggaaatcaccagagggttcactgctaaaaaaatctgccagcactggtgattgtttgattaatactaagctgatgcgtaacgctaatcagctgaaggaattctgcaatagttctgtatcatcttcagtattaattccccaccttaacaaccttgtgcaacagaccatgtttcagcaggatgtaatcatgaacctacttagtaacttgcaacaggatgagaaagttgatagaacacagcctggaatatcttctcaagtccgaacgatggagaatggtaaagtggctgatacagctaactctgagaaggaacggtcattacttgttaaaatttcagaattacagtctaggatgataacactgactgatgaactaattgcagctaagacaaaacatgttcagttgcagcaagagctaaatgctttgtactaccgagaagaaattgaggatgttagggatgaggatatcgaagaaacatagtgtatgaattatctgcctctccctgagacagatcaattacccgcctctccctgaggtcaggggagaacaagagaaggaaagcggcagggagaactagcgatggaaagtggcgatgccgcaaatatttgctggatctagagaccagctgcggttctacggaatttgttctttgaaggttgccgtgcccctggcctgctgccatccagtgtgtataaccgtcttagttcgttttttttttgtggccacaagattgaggcgtggtcatgcagctatttcggccatgcctatcattgggagtagctgtagtccgtaggctaccgggtggttatctatgcagaatttcagaagactgcaaaataaactgtattttatctagcaataggatgtatattggcgcattcgttgatatgtatcatatagggctattcgcaaacatccaaacagagttgtttgcacatatctaataaagtatgcatttactgcatttatcactgccatgtactaaatgattgttttaaaggcattatacattacatgatctgggtaaatcttctctataattggatcttcatgctattttccagcggtgtttctatctcattacatattttacctcctatttcaaatttcactatgcaaataatactatttacaatacaaagcaatgttataaacgattggaaagcaatgttataatactatttagtgatctttctttctttttcttttcc

SEQ ID NO: 29389 - DNA, 1831 bp, Zea Mays
ttgtgcgcagatggatgggtttaccttgccaccatttgagtcaacctgcatctttagggacaacgatattataaggggacaaaggctgaaggtgacaaattctggaaagcatatagattacagcaagaaggaacaaaatggatctaaaaagttgaagctgtcagttattgatattgaagctaagaaagcaactccacaacatgaaactaccactaccttagtggagcagcaaaaatcagaggggaactatcaaactgagttgaaatgtgaggcaaaggtgacaaactatgatgctcaaagtgacacaaaaaagaatgtgcatggagattcaccaatagctgctgattgtccatcatcaagcaatcaagatggcttgcctgtcccatcaagcaatcaaaatggatcacatgttcatttttcaagcctcaaagcagatgaggacgaatctgaaacgtcggatgagattgtcccagttgtggttcggcctggtcacattcgctttgagccagcaggcagagaacccgacaaatcgccagcaaaagaattacagggcacattccaatggagtggaacattgagcaaaaagaagggccagaagtggggaataaatagctcaaacaagaaaaatgccgatgtcggctatcatgcaggaatagctggaagcaacacagaagttaataatcttgtcatggacattaaggttactgaaaatggcttctgtgctgtcagtaatagaaggatcgatgaaggcagtaatgttgagatgtccagtgtgaaggctgttgctaatgaagaaaagtctagaggtgtaccttttgatttcgagagcttgtaccccctaacgcaacttccaaaggagggagatctgattgcataccgattggttgagctgtcttccatgttgtgtccggagctgtcttcgttccgtgttggaaaagttgtgttatatgatcccatatcattgcgtatcattctcttacccgttcaagagtatccaatcaccaccgaggaaaacgaagacaaggacgagccagatatgcttgtggacttgtcaccgtacaaggaagatggctccttggagatcgagtactcttcacttcttgatgtaaggctactgaagggtattgaaccagtccccggggctttcagtactcccttggcagaaacatgcaatgaagttggatcggcactggccaaaggaaggccagttaccttacacaaaaatgaaggcaatattgagagccagaaatcacccttggttgcaaacaacactaatggaaagtcagaaaagacggtttgggaaaaaaatgacgaacccggtgatgaggtcgatgttcagcaaaatggctggggaacatggaaacaaaatagtacgtcagcttggtcttatagagcccttaggagcagcgcccttggcccgacgatggcacttctacgagggaagaacaaccagaggggtaaaccaccctatcgaaagaagggcaagtaattgcctatgtgtttagtgtttaagttcaacgatacctatgtaatcctgtgttggtccaatcttttagcagttgatcttatttatgtaaaatttggcgaggaagagtgactgccgttgctgccctggtcattttgaagtctggccaagcgaattgttatcgtttgcaaaggatcgttatgatttgctccgacacttgtcaaatgctggttttagagttttgcatgtgcactaaaaatgttcataattccatatctgccacaaaaggttgtagcaccaaacgctccacctaaggccttgttcagttatttccattacatatgaattgggtgggattggaaaaaa

SEQ ID NO: 29390 - DNA, 362 bp, Zea Mays
caactgcaacgcgtgaagccgtgaacacgggcacaccagtacgacagtaccacgccacatgaactcgtgaagaatagagccgccactgaggaaccctagcgacggcggcgcgctaccggtgacatcgtccaactcggcccctccatccccgacgcggcggcgccagcgtgcaattcaaagcctgaagccatgtcctggcggccgcgaagaacctgcgcagtgcgcacggaggccgcctcgggagcgcagagcgattaatcgggctgatcgtcgactaatcgtaattagtcggctgatcgcccttctggcgatcagaggctaatcgccgatctgaaaactttgctctgctggtgctgcaacgg

SEQ ID NO: 29391 - DNA, 3388 bp, Zea Mays
gacaggtccagcgttcccccgagcggcgggatgatgccccggaagatgttcagatatactctttgatggttttagagcattcaagcaaggttccccgaacatgaactctctagtaggatttggatctgcagctgcatttactatcagtgctgtgtccttgctgaaccctgactgggagtggaattcaaccttttttgatgaaccggtcatgcttcttggatttgtacttcttggacgatctcttgaagaaagtgcaaggcttaaggcatccagcgatatgaatgagctcatttcactgttatcacctcagtcgaggttaattgttacttcctcaagtgacaacccttctgcggacagtagtttgaattctgatgcgatcacagtcgaggttcctgttgatgatgtccgtgttggagactcaatattggtcctgccgggagagactatacctgtagatggtaatgtcattgaaggatcaagttttgttgacgaatcaatgcttactggagagtccttgcctgtagccaaggagactgggcttcctgtattttcaggaactgtgaactgggatggcccgctaaagattagagcaacatgtactggaccatcatcaacaatagctaagatagtccgcatggttgaggatgcccaagcacgtgaagctcctgttcaaaggctcgcagattccatcgcaggaccatttgtgtatactgttatgacgttggctgcaacaaccttttccttctggtgtgctcttgtttttttatttcttctatgaaaatcttatgactaaaaatattgcctttttatccctcacccccttcccaaggtattacattggcacacacttatttcctgaggttcttctgaatgatattgctggtccggatggggattcattacttttgagtataaagcttgctgtggatgtattagttgtttcctgtccttgtgcacttggattagctacacctacagctatcttaataggaacttccctaggtgctaaaagagggttactggttagaggaggtgatgttttagagcgtttggctggaatagatactcttgtgcttgataaaacagggacgcttacagaaggaaaaccagtagtgacttctattgcttctctggcatatgaggagacagaggtccttcgtcttgctgctgcagtggagaaaacagcattgcacccaattgcaaatgctataatgaacaaggctgaactactcaagttggatattccgatcacaagtggtcagcttacatcgcctggatttggttgtttggctgaagtagatgggagtttagttgcagtgggcactttggattgggtgcatgatcgttttgaaactaaagcatcgccaactgaactgagagaccttagaaaccggctggagtttatgttgtcaagtgaagcatcatcatcaaaccagtcgaagtcaattgcttatgttggccgtgagggagaaggaattataggtgctattgctatatcagatattttacgagaagatgcaaacttaactgtggagaggttgcagcaggaaagcattacaacgttcctgctgtcaggggataggggagaagcagtgacaagcattgggaggaccattggaatcaggaatgaaaacataaagtcttccctgactccgcaagacaaagcaagcattatatcaactttgcaagcgaagggacacagagttgcaatggttggtgatggaataaacgatgccccgtctttagcagccgcagatgttggaatagccatgcgaactcattcaaaagagaacgctgcctctgatgcagcttcagttgttctactaggcaacagactttctcaggtggtagatgcgctatccctgtcgaaggcaacgatggcaaaagttcaccaaaatttggcctgggcagtggcatataacatagtagccattccaattgccgctggagtgctgctgccacaatatgatttcgccatgacaccatctctctcaggggggttgatggcccttagctcaatctttgttgtcagcaattctttgcttctgcagctgcatgggtcgtttcagaacacagaaaaacggcagggtgatctgagctcaagattaaactgaattgttgggtttagtttgacccagccgaaggacagtggtattgaattatagagggttctgatactggttttccagctccggctaattgaactgagtcagaactataagtagcaagctattcgtgtcagtagtagcatgttcctgtactgtttgtcaacccaactatagtagcaagtatgacccagaaggacaataatctaccacggccttcaaaaacattgtaaattagtaatggtactgctgtaagcctgtaaacaaagttaaggcgtatgactatcgttcatggtctagcaatgtgcaacaagctataagcttcatttcacacaggtatgggaagttcagtcaacagaactagtcgaatagcaagcagtacacatagcaactatggccacactataatggcaatcatacccctgaacaatagcatagctaggagattactggcgattcttctacttctacttctacttccatgtgttggttgttctaggcttctagcactcttcgtatccatcgttgttggcccagtgcaccttcttgccgctgctgctccgcatcaccttctcgtcgacggccttcaccccggcctccgcagctgccgccgactcggcctgcacacgcgccatcttcctccctcgctttctcgccgcggccgccttctccgtctcggcctcctggtactccctcgcccaacgccggctcagcacgcatgttgcagctagcgcgacggcctgcgccatgaacatggccagcagcagtagctcctcgaggaacgccagcacgaactgctcccggcgatccctggcggagccgaggaggcggaggctgtggtcgtggcggaggaagaaggccagggaggccagtgcgtggccggacagcgcggcgagcgcgagcgccgtgctcgcggcgaggcagaggtgggtgagctgcgcgtggagcgctgcgagtgcggagagcagggtggtggcgtgcacggagacgagcgcccagccgaagggcgtcggccgcgggcggaggaggaagaccgggccgagcgcggcggcggcgaggacgaggagggagaggttgaggagccagaccagtaggttgggaagagaggagcatctccgtaggctcgagttctcggtggcggacgccattgctttactgggtgcttgtgttctcagtgcgacagtgatcgtgtgagtctgatctgttgctgaatgctgagttcagaggagcggggaagtgcgtggcgcgtggggtaaggtttatacagagtgggaagactgacc

SEQ ID NO: 29392 - DNA, 2054 bp, Zea Mays
atgtgattcagtctcgccggcagactactcgcacattattttgcttccagtcagaggtccaaaatatcaaagggatgcagaaagatgtggttgcatgatggagtaccttgcctggaaattggcaggatacacaaacatagttgtactttacttgatctcgatgacattggactgcaaatatatgcacaacaattgcctcatgcacacacacataatggggccgcgagttgtagctcaaccatcgtctctggtttctttctaggtggagatggttaaaattgctggtcacttataattaccagcatcttatacgtcattgttgttcatcgccaacttattcaagtttgaaagtagaacactgagaagatggctgagaaagagaatattctaatgcagagatatgagatgggaaagttacttggaaaagggagttttgccaaagtttaccatgctcgcaatgttaagacttcagaaagcgttgctatcaaggtgattgacaaagataagatcaagaagtgtggtcttatggatcaaataattcaagagatttcggtgatgaagttggtaaaacatccaaacattgtccaattgtatgaggttatggctaccaaaaccaagatatattttgtgatagagtatgtcaagggaggagagttgttcaaaaaggttcaacgtggaaggttaaaagaagatgttgctcgtacatatttccaacaattgatcagtgctgttgacttctgccatactagacaagtttatcatagagatctaaagcccgaaaatcttcttcttgacggaagtcacaacttaaagatttcagactttggtttgagtgcacttccaaactgcaagagaaaagatgggttactccacacaatttgtgggactcctgcatatgttgctccagaagtaattagtcaaaaaggatatgatggtgcaaaagctgacatatgggcttgtggagtgatcctctatgtgttgttggcgggctatcttcctttccaagacaagaacatgatggacatgtataagaaaatttgcaaagcagaactcaaatggccaagttggttttcttcagatgttcgaaagcttctgcggcgcatccttcatccaaaccctaatagacgaatatctattgaagaaataaggactcatccttggtttagaattggtcttgatgcaagattgtttgattctacaacgagagattatgtgcctagtgacatggatttggctttgaattccttaaatagcaatatggtcgagtgtaattcagcggcagagaaactgactattttgaatgcttttgatatcatctccctgtctaacgggtttgatctctctggtatatttgagaactcaaacaaggagtctaaatttatgtctaccaacacagctatgacaattatcacaaagctaatggaagttgcaaagagcctggatctgaaggttataacaaaaactggtggattgttgaatatggaagctgccaaatcaggaataaaaggtgtgatgtctataaatgctgagatatttcaaatcacaccaaattatcatctcgtggagatcaagaaaatcaatggtgacatccttgagtatcataactttatgaaccaaagcatgagaccggcactagaagatattgtgtgggcatggcatggtgaacaacctgacgagaagtagactcatcaactttagataatcatcaacctacaaccttagatattgtggcagctttaatgctattagaaagtgtatcaggcattcaggccaaaaaaatgtcatgggacttaataatattacttatatgttgtttttattctcacgttcatgcagtggaatgttctttctgttgaccaatactactggaacatggtttctatctcaagggaatattttcataatcaattactttgattggtgaaaaaaaaggtattagagaatgggtgaacctaatagagctgctttattgtatgaattttccgtggtaacgttagctagaaagttctttactctagtaatttattaagaaagtgatgtctgatgtgttgtag

SEQ ID NO: 29393 - DNA, 2544 bp, Zea Mays
gaaacaaacaggggctttcatttctccccgccctgcagcacgaccgcgaccagccaccgtctccgcccccgccccggttgcttcagatctcctcctcccccacccggccacccccagccgcaccagccaccggccagctcctccgcaccaggataatctctgcccttcgtaccccctcgccattgcgcgcgcatataaatcccacatccccatcgctctcgcctctgcccacccacccgccgcgcccctactgcgcagcacgcacgtcccctccgcggccctggatctaggctgatcggtcgccggccgggagcgaggatcgggatctcggcccggggctgcccccccgccggaatggaggtcttcggccccgtcacgcccggacaggtgtcatttttgctaggtctattccctgtcctcatctcatggatctactctgaaatcctcgaatacaagaaatctttgtctcatgggaaagttcattcagacgctaatttggataatggaaccatcaaggaggatgaaaagtcagtattacttgaaggaggacagttgaaatcaccatctacaaagttcaggaacttgtctaccaaagcgaatttgttacggtttataactatggacgagtcttttctgcttgaaaaccgtgctgtactgagagccatggctgaatttggcgttgttctggtttacttctatatctgtgaccgcacagacatatttccagaaagcaagaagagctacaatcgtgatctgttcctgtttctatacattcttctcatcatagcatcaacacttacttcactaaagaagcatcatgaaaaatcagcattttcaggaaagtctatactctatcttaatcgccaccaaactgaggaatggaaagggtggatgcaggtcttatttctgatgtaccattattttgctgcttctgagatatacaatgcaatccgtgtgttcattgcttgctatgtctggatgactggatttgggaatttctcatattactatatcaagaaagattttagtattgcaagatttgctcagatgatgtggagattaaatttctttgtggcattctgttgcattgtccttgacaatgatctcatgctctattatatatgcccaatgcacacactatttactcttatggtatatggatcacttggtctgtttaacaaatacaatgaggtaccatcaatcatggctattaagattgcttgctgcttcttgtctgtaattttgatatgggaaatccctggggtatttgaatcattgtgggccccctttacgtttctgctaggctataaagatccatcgccatccaaggcacacttacccctgctacatgagtggcatttccgatctggcctcgatcgatacatatggattattggaatgatttatgcttacttccatcctaatgttgaaagatggatggagaagctggaagaatctgagactaaggttagattatcaatcaagggaaccattgtcactctttcattgacggttggctttctgtggtatgaatatatatacaagctagacaaagttacatacaacaagtaccatccctacacatcatggatccctataactgtttatatctgcctgcgcaattgcacccagcagttgaggaatgcctctttagctcttttcgcatggcttggcaagattacactcgagacttatatttctcagatccatatttggcttaggtctagcatgccaaatggacaaccaaagtggcttctttgtttcataccagattatcctatgcttaacttcatgcttactacagcgatctatcttcttctatcataccgtgtgtttgagatcacaaacgtcttgaagtcggcttttatccccagtagggataatagccgcctataccaaaatttgattgctgggatcgccatctcagtgtgcttgtatctctgctcgcttattcttctgaagattcctggtgtataggatgtttcagctcgggcctcgatccccttttgctgttgtggagatagttgggatgcgcggagaagcggctaaagttggacatacggggaattgaattgccagaggctgcagatacagaagtccgaatcttgatctttttgttcattcaaaacacggatggatacaacaagtaggcaatccttccattcttttggaagttgtagcaactgttcgctagactatgttgatgcaacctcgttgtatgagttatcctgtagaactgcaccgtgttgtgccataggtattctgaagctgtaaaaaaaacgacgggcatttcttcttccttgaaaagaagaaatataaaggcagaggcgcagagccctttcttctcctaattgtaatgtcgtgtttgctttggagtttgaaccatccagtctatatcctgcttcttcaagtgttcgtgctcgtgctgtacgtgcgtacccgcgggctcagtcgaccggtggacggtggtagactgtatgcacggctcaaacttggtgtatgtgtgaaaaattacccgccactgttgttggttacattgaaata

SEQ ID NO: 29394 - DNA, 2052 bp, Zea Mays
cctgaaaacaaaatctccaacagaatactgttgcgctcgatttggacgggatccgatcacccggggcttcacctccaccctatataactcgagcctgcgcctcctctcgagccatctaaacgcagagagcatctcttccgaatgcctcaccacggtcagagagggcggagagagaagaagtcgccgccaccgtcaaaagccggagttctcctgggtcgctaggaacctgtacgcgaaggaatcaggcgcggtgaagactttgtacccagggtattgctcaacggagcaggatctccgccccggtgccgcgattcgccgtgaatcgaagcctccgcgccatcaggaagggaggcataatcgatctacctgccaataaccgtcgcaggaagattgttaaccaacctcaaccagagatgaatccttcaccgaaccctccaccggctggagtagatctagtagctgccactcagatgcaactgctgcaacaaatggcaaacaccatgatagaaatggctcagatgcgacaagaatgtcaggagatgcgccaggagttgcaggaaatgcgacaggaactccggcaggaacgactggaacggcagcaacaacaaccactacctccaccaccaccagctccaccccgggacaagcaccgggaattcatgagtcacaagccacctacattctccaactctccagatcctcttcaggctgatgactggctaaagacagtagataaaatgctcaacattgctcaatgtactgatcaggagaaagtgctctatgcgtcgggtcgtctcactggccccgctgctgattggtgggactcttactgtgctgcccatgctgctgccaacactatcacctgggcagaattctctacacaattcaggaactatcatattcctgcaagcttgatgaaaattaaaaagaaggaattcttgtcacttaagcaaggcaacatgacagttagtgaataccatgataaattcattcagctgtcaaggtatgctcccgacgaggttgctgatgatgaaaggaagcaggagcagttcatggagggactcattgggccactccagtaccagctggtatctcacaccttctcatctttccagaggcttctggacaaggctatagctgttgaacacaaacgtgttcagctaggcgagatgaaaaggaagactattacccagggacaggggagcagtagcgtccgccgtcgctatgttccaccccagggtacaccagctcgtcctggaggagggcaacagtcctaccagcgacctgctcagcagacaccacaggcgacaccgcagactccgcatactcgtcaggatgcccccactgtcaccccggcgagacctacaggacagggcactgctacagacaccatatgcttcaagtgtggcgagattggtcactatgctaatgtttgtccgaagaggaaccccaacacaccggctcgtggtaattctcaagtcaagcagacacagactctaggaagcaaccgtggctatagcatcgctaaggttaatcaaatcaatgttgaagctactgaggatggtcctaacatcgtcattggtacattcttcattaattccatgctagctactatacttttttattctggagcttcgcattcattcatatctgctcgttatgttcttgcaaatagtctaccttaccttgccctgcatagacctatgatagtcattacacctaaaggggcttatgaagcaacatatatgagtcatagaatagaattaacaattttaggaagaaagttttgggctatgcctgtagtgctagaagaaagtataatagacttaatccttggcatgaactggttaaaacagtggaatgcagtaatacattgtgctagaggaacagtagaactttctagtcctgatggggataggtttgaagtcacagttgcaccacccacatctaaccatggcttgtgggtaaagatgtgcaacctctgcagagtgtaaaactggtatatcagccgtgctcatggtcatgagcggctcagacactcacatgattaat

SEQ ID NO: 29395 - DNA, 3959 bp, Zea Mays
ctattaccgagtggcaaaaacgaaaaacgtctccggagtccggagtagttgccgattctgcctctcctgtctcctcccctgcccgcggtcccgcacccacgcgttgccggcgaccagccgcccatttccggcggctatccatctagccgccgccgcttcccgtgatggagaagcggctagcgtacgcggccttgctcccactgctcctcctcacgctccgcatcctccccctgccctccggctcccccaactgcagcggcggcgagggggaaaccccgcccgcgtccaggcacgtggtgcggttcctggagtaccgccgcgcggaggagcaccgggagtacctggacgcggggctccgtgacggcgcccccgcggcggcgtggcgctgggtggagcggcggaaccccgcggccgcgttccctaccgacttcgcggtgctcgagatccgcgacgcgcaccgcgaggccgtcgtggcggcggtgcgggcgctcggccgcgtgcgggacgtgcacgccgacgccacctactcgcgctccgccctttcggcggcgccggatcggtcgcgtcctccccggcgggggaagctgttcaccgccatgtcgttcgagggcgaggaggagggtggcggagagaccggcaattcgtcttctgctgcctgggggcggaagcttcttctgcagagatcacaagttacatccctttttggagctgaacggttatggggaagaggcttcactggcaagaaagtcaaaatggccatttttgacactggtattcgggccgatcatccacattttcgcaatattaaggagcgcacaaattggacaaatgaagacacactaaacgacaaccttgggcatggaacatttgtagcaggagttattgctggccaagatgcagaatgccctggatttgcacctgatactgagatatatgcttttcgagtcttcacagatgctcagatatcttacacatcatggttcttggatgcatttaactacgcgatagctaccggtatggatgttttaaacttgagcatcggtggacctgattacctggatctcccctttgtggaaaaggtctgggagctcacagcaaacaacattattatggtatcagctattggaaatgatgggcctctatatggcacattaaacaacccagctgatcaaagcgatgttattggtgttggtggtattgattacaataaccatatagcttcattttcctctagaggcatgactacgtgggagcttcctcatggttatggtcgtgtgaaacctgatgttgttgcatacagtcgagatataattggatcaaagatcagcacaggctgtaagaccctttcaggcaccagtgtagcaagcccggtggttgctggtgtagcccttgtggagggtgcttctaaactttcaggaccaaacatgtatgaacaaggtgctggcaggcttgatctctggcagtcatatgaaatcttaaaaaattaccaaccacgtgcaagcatatttcctactatgcttgacttcaccgactgtccatatttctggcctttttgtcgtcaacctatgtatgctggagctatgccagtaatcttcaatgctacaatcctgaacgggatgggggtgattggttatgtaaaggatcaacctttatggcaaccttctgaggatattggcaatcttcttagtgttcacttcacctactcagatgtcatctggccctggacgggataccttgctctacatttgcaagttaaagatgagggttctcagttttcaggcataattagtggcaatgttactctgactatttataccccagcagctcatggagaaagcagcccacggagtagtacatgtattcttcacatgaaggtcaaggttgttccaacacctgttaggtcaaaaaggatactgtgggaccaatatcataatattaagtatccttcaggatatgttccaagggattcccttaatgttcataatgatatccttgactggcatggtgaccacttgcacacaaacttccacattctgttcaacatgctaagagatgcagagtactatattgagacacttggatcaccacttacttgctttgatgctagcaattatgggacattgcttatggttgatcttgaggacgaatactttgatgaagagattcagaaacttagggatgatgttatacacaagggacttggtattgctgtttttgctgagtggtaccatgttgatacaatggttaagatgacattctttgatgagaacacccggagttggtggactccaattactgggggtgcaaatattcctgcaattaatgaacttctggcaccatttggcattgctttgggggacaaaattcttactggtgacttctcaatcaatggtgagcagacccactatgcttctggaactgatatagtgcaatttcctgcgggaggtttcttgcatagcttccagctccaagaaaactcaaagacggtgcaagatcacataggaacactggatacagaaagcacccaggggaaaggcaagctctcctcaattcttggagtaatagaagcaggggaagggaggattgcagtgtatggtgattcaaattgtcttgacagtagtcacatggtaacaaactgctattggcttttgagaaaaatattggagttcactggaaacagagtgaaagataatgtccttttctcagaggcagcacagttaaagtttcctgtttttgagaatatccatcatccatcacgtagaacggatgtaaacttttcaacatactcaacagttgttggcaaggaattaatctgccaccaagattcccggtttgaggtttggggaacgaaaggctatggtgtccaaccaataggcacatcaagaaagcttccagagtaccagatgcatgaaagttctagttctcccaatgtaacaatacaaattgctggcagtagacaagataaagttgaaaggcttcaaagaaatctttcgataccaaatgctgctaaatttgatgataaaagagattattttggatttattggtcatgaggaggttgacataggaatgttaatggcaagccaatggatgataccttgcttcgctgccactgcttgccttatgttgtatcttagttgtagagtgcaacaaaaacgccgcagacgaaggaaggggtcggtggctagtgctaatcggctaacaagtatggtataattcgtcattcgcgcggtggtgctgaaaaggtttttttagcgtatctaagtttcaggcctccagccatgatggataaccaggaagcgccatctgcgcagcatgacagaattttagtagccagaaatccctggtagtgaagacacattttaactcggcaactagaggctgaacttgagagaaagctggctcgtcacttctgtggtcacatggaaagcagcttgtcttcccagattcagccattcgtggcatctactgctgttgcttgtagtcgctcacaattttgttcttcgccacacgtagttgtagccacaaaaatcgctgctaagggctagtttgatgaccagagatcacgagaggatccataaatagcaatgggattcctctgacatggatctcctcgtcatccctggccaccaaattagcccttagatcatggagatcggaagggattgagagcaaaattagttcatttctcatcaatctcttccaatctctcccaatcttccgtgatcccctttgtcactaaatcaaccctaagagccaatatctagggtagaagctagagctagtcatttgtcatctccttggaatatgtgaaggagatttgagcttctctgtagatccatgagcaataaggggcagggggactcggcatgagcttggcaggtacaaaggaggcttaggcttattgggaactttgtaaagtaaattttgtattgttaatttaaaaaaaagaaccaggcc

SEQ ID NO: 29396 - DNA, 7526 bp, Zea Mays
gtgcttttgagaaggcctttaattgtgctgtctgggccacggaacggcaatgtcgcagcttggattagctgcaactgcctcgaaggccttgccactactccctaatcgccagagaagtccagctgggactacatttccatcatctgcattgccgaggccctcaaaccgaaggaaaagccatactcgttcacttcgtgatggtggaaatgaggtatcagatgccaaaaagcacagccagtcagttcgtcaaggtcttgctggcattatcgacatcccaagtgacgcagtttcggaagtcgatatttcacatggacctaaggatcctagggggccaacagattcctatcaaatgaatgggattatcaatgaaacacataatggaagacatgcctcagggtccatggttgttgaattttgtgcagcactaggtggcaaaacaccaattcacagtatattagtggccaacaatggaatggcggcaacaaagttcatgaggagtgtccgtacatgggctaatgatacttttggatctgagaaggcaattcatctcatagctatggcaactccggaagacatgaggataaatgcagaacacatcagacttgctgatcaattcgtagaggtgcctggtggaacaaacaataataactatgccaacgttcaactcatagtggagatagcagaaagagtaggtgtttctgctgtttggcctggttggggtcatgcttctgagaatcctgagctgccggatgcattgaccgcaaaaggaatcgtttttcttgggccaccagcaacatcaatgaatgcattgggagataaggttggttcagctctcattgctcaagcagccggggtcccaactcttgcttggagtggatcgcatgttgaagttccattagagtgctgcttagacgcgatacctgaggagatgtatagaaaagcttgtgttactaccacagaggaggcagttgcaagttgtcaagtggttggttatcctgccatgattaaggcatcctggggaggtggtggtaaaggaataagaaaggttcataatgatgatgaggttagagcgctgtttaagcaagtacaaggtgaagtccctggctccccaatatttatcatgaggcttgcatcccagagtcggcatcttgaagttcagttgctttgtgatcaatatggcaatgtagcagcacttcacagtcgtgattgcagtgtacaacggcgacaccagaagattattgaagaaggcccagttactgttgctcctcgtgaaacagttaaagcacttgagcaggcagcaaggaggcttgctaaggctgtgggttatgttggtgcggctactgttgagtatctttacagcatggagactggagaatactattttctggagcttaatccccgactacaggttgagcatccagtcactgagtggatagctgaagtaaatctgcctgcagctcaagttgcagttggaatgggcatacctctttggcagattccagaaatcagacgtttttatggaatggactatggaggagggtatgacatttggaggaaaacagcagctcttgctgcaccatttaattttgatgaagtagattctctatggccaaagggccattgtgtagcagttagaattactagtgaggacccagatgatggtttcaaacctactggcgggaaagtgaaggagataagttttaaaagcaagcctaatgtttgggcctacttctcagtaaagtctggtggaggcattcatgaatttgctgattctcagtttggacatgtttttgcatatggactctctagaccagcagctataacaaacatgtctcttgcattaaaagagattcagattcgtggagaaattcattcaaatgttgattacacagttgacctcttaaacgcttcagacttcagagaaaacaagatccacactggttggctggatacaagaatagctatgcgtgttcaagctgagaggcccccatgaaaacagtaaccaccaatgcagccactgtttctgaatatgttagttatctcaccaaaggccagattccaccaaagcatatatcccttgtcaattcaacagttaatttgaatatagaagggagcaaatacacaattgaaactgtcaggactgggcatggtaggtacaagttgcgaatgaatgattcaacagttgaggcgaatgtacaatctttatgtgatggtggcctcttaatgcagttggatggaaacagccatgtgatttatgcagaagaagaagctggcggtacacggcttcagattaatggaaagacatgcttgttgcagaatgaccatgatccatcaaagttattagctgagactccctgcaaacttcttcgctttttggttgctgatggtgctcatgttggtgcggatgtgccatatgcggaagttgaggttatgaagatgtgcatgcctctcttgtcacctgcttctggtgtcattcattgtatgatgtctgagggccaggcgttgcaggctggtgatcttatagcaaggctggatcttgatgacccttctgctgtgaaaagagctgaaccatttgatggaatgtttccactaatggacctccctgttgctgcctctagtcaagtacacaaaagatatgctgcaagtttgaatgctgctcgaatggtccttgcaggatatgagcacaatatcaatgaagtcgttcaagatttggtatgctgcctggacaatcctgagcttccttttctacagtgggatgaactaatgtctgttctagcaacgaggcttccaagaaatctcaagagtgagttagaggataaatacaaggaatacaagttgaatttttaccatgggaaaaacaaggacttcccatccaagttgctaagagacatcgtcgaggaaaatcttgcatatggttcagagaaggaaaaggctacaaatgagcgacttgttgagcctcttatgaacctactgaagtcatatgagggtgggagagaaagccatgcacattttgttgtcaagtctctttttgaggagtatcttaccgtggaagaacttttcagtgatggcattcagtctgacgtgattgaaaccttgcgtcatcagcacagtaaagacctgcagaaggttgtagacatcgtgctgtctcaccagggtgtgaggaacaaagctaagcttgtaacagcacttatggaaaagctggtttatccaaatcctggtgcgtacagggatctgttggttcgcttttcgtccctcaatcataaaagatattataagttggcccttaaagcaagtgaacttcttgaacaaaccaaactaagtgaactctgttccagcattgcaagaagcctttcagatctggggatgcataagggagaaatgactattaaggatagcatggaagatttagtctctgccccattgcctgttgaagatgctcttatttctttgtttgattacagtgatccaactgttcagcagaaagtgattgtgacatacatatcacgattgtaccagcctcatcttgtgaaggatagcatccaaatgaaattcaaagaatctggtgctattgttttttgggaattttctgaagggcatgttgatactagaaatggacaaggggctattcttggtgggaagagatggggtgccatggtcgttctcagatcacttgaatctgcatcaacagccattatggctgcattaaaagattctgtacagtacaacaactctgaggtcaacacaatgcacattgtgttattgaatgctgaaactgaaagtaatataagtgggacaagtgatgaccaagctcaacataggatggaaaagcttaccaagatactgaaggatagtagtgttgcaagtgatctccaagctgctggtttgaaggttataagttgcattgttcaaagagatgcaggtcgcatgccaatgcgccacacattcctctggtttgatgaaaagaactgttatgaagaagagcatattctccggcatgtggagcctcccctctctgcacttcttgaattgggtaagttgaaagtgaaaggatacaacgaaatgaagtatactccatcacgtgatcgtcaatggcatatctacacactaagaaatactgaaaaccccaaaatgttgcatagggtatttttccgaactattgtcaggcaacccaatgcaggcaacaagtttacgtcggcacaggtcagcgacactggattaggatgtcctgaagaatctctgtcatttacatcgaatagcatcttaagatcactgatgactgctatagaagaattagagcttcatgcgattaggacaggtcattctcacatgtttttgtgcatactgaaagaacaaaagcttcttgatctcgtcccattttcagggagtacaattgttgacgttggccaagatgaagctactgcttgttcacttttaagatcaatggctttgaagatacatgaacttgttggtgcaaggatgcatcatctttctgtatgccagtgggaggtgaaactcaagttggactgtgatggacctgcaagtggtacctggagagtcgtaactacaaatgtcactagtcacacctgcaccattgatatctaccgagaagtggaagatacagaatcgcagaagttactataccattcagctacttcgtcagctggtccaatgcatggtgttgcactgaataatccttatcaacctttgagtgtgattgatctaaagcgctgctctgctaggaacaacagaacaacatattgctacgattttccgctggcatttgaaactgcactgcagaagtcatggcaatccaactgttctagtgttcctgaaggcagtgaaaatagtaaatcctacgtgaaatcaactgagctggtgtttgctgaaaaacatgggtcctggggcactcctataattcccatggaacgtcctgctgggctcaatgacattggtatggtcgcttggatcttggaaatgtcaacacctgaatttcccaatggcaggcagattattgttgtagcaaatgatattactttcagagctggatcattcggcccaagggaagatgcattttttgaagctgtcaccaacctggcttgcgaaaggaagcttccccttatatacttggcagcaaactctggtgctaggattggcatagctgatgaagtgaaatcttgcttccgtgttgggtggtctgatgaacgcagccctgaacgagggtttcagtacatctatctgactgaagaagactatgctcgtattagctcttctgttatagcacataagctgcagctagataatggtgaaattaggtggattattgactctgttgtgggcaaggaggatgggcttggtgttgagaacatacatggaagtgctgctattgccagtgcttattctagggcatatgaggagacatttacacttacatttgtgactgggcggactgtaggaataggagcctatcttgctcgacttggtatacggtgcatacagcgccttgaccagcctattattttaacagggttttctgccctgaacaagctccttgggcgagaagtgtacagctcccacatgcagctgggtggtcctaagatcatggcgaccaatggtgttgtccacttgaccgtttcagatgatcttgaaggtgtttccaatatattgaggtggctcagctatgttcctgcaaacattggtggacctcttcctattaccaaacctttggaccctccagatagacctgtcgcatacatccctgagaacacatgcgatccgcgtgcagccatccgtggtgtagatgacagccaagggaaatggttgggtggtatgtttgacaaagacagctttgtggagacatttgaaggatgggcaaaaacagtggttactggcagagcaaagcttggaggaattcctgtgggtgttatagctgtggagacacagaccatgatgcagctcatccctgctgatccaggtcaacttgattcccatgagcgatctgttcctcgggctggacaagtgtggttcccagattctgcaaccaagacagctcaggcattattagacttcaaccgtgaaggattgcctctgttcatcctggctaactggagaggcttttctgggggacagagagatctctttgaaggtattcttcaggctgggtcagcaattgttgagaaccttaggacatataatcagcctgcgtttgtctacattcctatggctggagagcttcgtggaggagcttgggttgtgatcgatagcaaaataaatccagaccgcattgagtgttatgctgagaggactgccaaaggtaatgtgctcgaacctcaagggttaattgaaattaagttcaggtcagaggaactccaagactgtatgggcaggcttgacccagagttgataaatctgaaagcaaaacttcaagatgcaaagcatggaaatggaagtctaccagacatagaatcgcttcagaagagtatagaagcgcgtacaaaacagttgttacctttatatacccagattgcagtacgctttgctgaattgcatgatacttccctgagaatggcagctaaaggcgtgattaagaaagttgtagactgggaagaatcacgctctttcttctataaaaggctacggaggaggatctctgaagatcttcttgcaaaagaaataagacgaataattggtgacaacttcacgcaccaatcggcgatggagcttatcaatgaatggtacctggcttctcaggccacaacaggaagcactgctggatgggatgatgatgatgcttttgttgcctggaaggacagtcctgaaaactacaagggatatatccaagagctaagggctcaaaaagtatctcagtcgctctctgatcttgctgactccagttcagatctacaagcattctcgcagggtctttctacactattagataagatggatccttctcagagagtgaagtttgttcaggaagtcaagaaggttcttggatgatgatatgataccaacacatccaacacaatatgcgcatgctacatgttatttttcaagtacatacatagaaggatattgcttggccttgattgatcatgtctgatctaagtcgatcattattttcttgaaacttcctttcggacgtggtgctatggttgatgaatttggatgtgtgcgttctgccaggtgtaagcccaaaggtttatacagaccgagttaaggttaggaagagcacgagtgaacttgttctggttttgcagtggttaaggcagaaagttgtttcactgtagttctgagatgtattaccagcggcgctgtaattttagggtgtataatgcggatgctagtaaacaattgagtggttcattaaattttgaactcgaataatatgtttctgtaggcacatgtgacgtaccactacatgaaataaatgtcgctgaactagggcaccagagttttggtaggactaaggttttgtttggttatgggataaggtgagcatctccagcgttcccaaacttgaatttccc

SEQ ID NO: 29397 - DNA, 3304 bp, Zea Mays
cccctatcctctctcctcgcccaccggaaacgcaacgcaacgcaacgcaaccagagggggaggggggggggggggaaagccggagccgactgcccgcaccacccacaggaacgccgcggggcaggggggcaggaggaagacgccggcggcggcggcttaaaagggcagggcgccattacctgcttccctgtcttccccttcccctcatgtactatagtactgcgctgcgccctttcatttacccggagtagtaaacgagaagaggaataattgtgtcgcaaactaatccgtttcgccgctgcctgctgcttgagccaatcttccgcgggtcggggccgatgacctgccaactggcaatggccacagagaagagccaaagacatgatgggtattttttacaacacggacgtgctggtaatgtctgtggcggaggcagggttggcttctgtctgttatggtgttctgctgcctccccgtgtggctgtggcagccatcagctctaccaggagcagctgtatccagagatggtgtgaagcacacacaattctactctgcgcagggtctgtttcacttgccattttggataggatcgctcgttttggaattaactttatgctaacagaatctaggtgtcattaagctagattaagcttgctgcttgacttagtagtgtaaatctgtaaagaaaattacctggtttgggtttagtctctataaaagaaatggaacagaggaatgttctggcattgggtgaacatgttctaaaagctactgtttggaagcggaagcataagactgctatggagcaccctgaaggcaatgatgtgatggtgttctctcagcatgatcaaagaaagcaccctgtgatatttgacgacagagctaaatgtaagaagtctaaattaatttcctgtgggagtggagttatattggagtcatattggaactttaagacaagtgggctgcctgtgcgcgtgcttttctaccaacatggtgactggagtgattttccagaggatgttgtaaatctagcacaacaggacttccagttgaagaagccaattacaactgctgtgttccagaacaagcacatcctgttggacttcattcacatgatttgcatagattatgagatgaccatagacaaaccactagcatgggttgatgataatggcaaacgcttctttccagatttatctgctgggctctacacatctaaaccatctcagcatgagaatggtgaagctgatgagtgtgatggaacgcctacaagtgtagctgaaagttctagttcggtatctgttggtgaagtagtttctcatggtaagaggatcaatgatattgcagaggacaacatgagagcacataacatattgtatgaagctgttggtgaaaatatttcaggtccttcattccatttgaatgaatattctagtggaaccatacaagctactggcaagccaaacgattgtcgacgtattgattcagctgtgcggaatttgttgctcaaaggattaggtcagccgtttagtgaggaagatattattggtatctatagaacaccactgctagatcagcgagggcaagttcgttgtggtctcttccagaaggagatcgaagagaccaggagtcgtcgggggaatgcaaatgtacgttatgcttggcttccttgctcaagatataccatggagcagatggcaatgcggggtgctctggaaatcgcgaagcctcataaggggtccatttgtggtgttgggacttgtcttgctcctgcaaactgtacaaattcatgtgccagatattctgattttcatgaagatggcatcatcagaatgatgttgtgccgtgtaataatgggtaatgttgaggttgttttgcctggatcaaagcaatttcagccatccaatggaagttttgataatggtgtggatgatcttcaaaatccacagaattacatcgtatgggatgctaatgtgcataaacacatatatgctgaatatgctgttattgtccaagcacctctcgtgaccaatgaatgttcgggcttgaaggatagcgtgcccaacatatctgagatcataagttctggttctcgagacaatctaaccaaggtatacttgttggggttcggcttgtgtgggtgcatatagctcaagttcagcatcctttatatggagcacagcagcacatgtatgcctaatatgtgttgcattactgcacgtctcatagcacatagatactatggtctaaaatgatgtgtgatcagatcacatcttgtttccatcatttgctttttttattggcaagtcgtgaaccaacatagaaataggctgtcaatggttaacctttatttatggcagaaggcagatatcatttacctagcctttgaaatttagatgcttcttattggcaatcccaatcccgtggttaggaaatggaatgtattgtattttgacaaaaccatgtactttgttccgtgcttcttggccggagccatattcttaggttgatgagaactattggaatgatggatcctcttttccttgtttgttttgatcaggaggataggttcgcgccttgtggtgtcgaacaagaagcacctaggctggggcgtgctccaagggccccctcctcaccatggatgcccttttcgatgctttttgctgctatttccacgaaagtgcctcgttcggacatggagttggtcatcagatactatgaagaattcaagaggaagaggatgagccggagcgacctggtggtacggatgaggcaaatagtcggtgataagatattggtttctacaataatgaggcttcaccaccagaagaagcccccatcgatggcagcagcagcagctgggctagcaagagcactcgcaaggggggaagagggagggggagtagccgagtaagattagtttaagccgccttgtcttttgagaaatttatggagcacatatgctttgtcgacatggccagacccaaggtgtcaaaagggagggagatgagctgagcaactgttgtagtgtagtctcaaactcaaagcgtttaggtcttgacatttgacaaactaaaactcagaaacattatcatgagtagtgtttttttttcgtttctctttcctggatttaactattgttattgctatttcgtggatatctgggcactgaaggccgtgctattgttggttaatgatggtatgattaagggtgcgcttgccattttaaccctttgaccacatccaaacaatcacggctccttgtgccagctcaaaggcaacatctatcatgtgaaaatttaag

SEQ ID NO: 29398 - DNA, 1997 bp, Zea Mays
ttcttttcttggcctccccgcttcgcctgtttcagcttcccacgcggcgcggccaccccacgttcccacccatcccccctccgaaaagcacaacgccacaacccgctcactcgcaaagtcgcaacgcgccccacgaggccacgacgcacgagcgcgcgctccgggcgttcgggaactcgaacgcgccggtgggagaggagaaccgcaccgcggcgcagacatgggcgagtactgcccctccccgcagggggactccgcgctggcggcgccgcccttgacgctcccctcctcgtccccagcgacggcggttaggccaagctacgggagctgcgaccgcagctacgtgaagcaggtcttcgacaacctccacggcagcatctccgtagacccgttggccctgcaatttgttgatacagaggagtttcagaggttgcgggatttgaaacagcttggtcttacatacctcgtctatcctggagcggttcacacacgctttgaacactcattaggtgtctattcgttggctggaaaggcaataaataatcttaaaacatatcagggagtagagcttggaattgatcctgtcgacatgcagactgtaaaacttgcaggtctcttgcatgatattggacatggacccttcagtcatttgtttgagcatgagtttcttcctcgagttgatcctggctcatcctggtcccatgaaaagatgtcagtgctccttttggacagtattgttgacaaacatgcaatagatattgaaaatgattacctcaaaatggtcaaggacatgataactgccagctctgatcctgccagcacaacaagtgcaaaggagaaacattttctttatgacattgtcgctaatggtcgcaatggtatagatgttgacaagtttgactacattggccgtgactgcagagcatgtggtcttggatgtaattttcagtattggaggttgatggaaggcatgcgagtgatgggtgatgaaatttgctaccctgccaaagattacttgagcatccataaattgttttcaacacgtgctgatctgcaccgaacagtctacacccatgccaaagtgaaggctgttgaactcatgctcgtggatgcccttgttgaggctaatgattacttggggatatcattgcatgcacatgatccagaagatttttggaagttggatgacacaatcattaaaacaattgagactgctcctaacaatgaactgaagaaagcaaaagaaatcattcaacgtattcgccgaagagaactctacaagttttgcaaccagtattctgttccaaaggacaagctggagcatttcaaaaatattactgcacaggacatagtttgttcacagaaatcttctgaggtgctgctgaaggaagaggatgttgcagtatgcaatgttaagatagatcttactcgtggaaaatataaccccctcgaaaggattttggttgcgatgagaagttcccgatcatagatgatagagtcagccacttgctacctgcgtacaatgaggatagaattgtgagggtctatgccaagaaccctgagttggttgatgtggtgtcagaagccttcgagaatctccaaatgagaatgtatggtgagaagactcaagtgcacgagacgcccaagaaaaagaagattaggtccaactagccggttgtatgttgtcaaatcagtctttaaatagcaatacaattacgtcacatgaaaatagcttgacaaacaagaagctgtatagataaagcatcccagaataaacaggttttagatggtagtctccactggtaaggtatagatatttagtgtacatctgaagtacaaacaacactgcatgaagtataaaaactcacgttgacgtacgtggtgcgatgttgcatgtgcgtatagattggatagtttgccaaatacattttttatggcgaggctggacttttaaacacttaatacacatgtatcgcctttttaagcgatcgaccgtg

SEQ ID NO: 29399 - DNA, 1205 bp, Zea Mays
tagcaatatccacaggcccctcgagttatcgacgcacacgtaccactagaatgcagccatgatcgtctcctccttcctcccgctccgctcctccgtcttcgtcctcccctccagcgccgcctcccgctcccgtcccgccaccgccaccctccttccctttccaaggatcaccctcagccggcgccgccgcttggccgccgccgcgactgagagcagcagcagcagcagcgaagaaggagaaggagaagcggcgggcgggagtacgaacgggtccctcccgggcctgccccctgtggaggaggaggaggagctgtgccccgtggactgcgtgacggagttcaagacggacgaggagttccagcgccacctgaaccggtccagggccacgggcgctctggtggtggtggacttctaccggccctcctgcggcagctgcaagtacatcgagaaggccttcacgcgcctctgcaaggggtccggcgacgacggcgctcccgtcgtattcctcaagcacaacgtgatcgacgagtacgacgagcagtcggaggtggcggaccggctgcgcatcaagatcgtgccgctcttccatttctacgtggacggggtgctggtggagtcgttcccaacgagggacaaggagaggatcattgccgtcatccggaagtacacctcggtcgagccagaaccagaacctgagtaagtcaccactctctgatatgctttgatttgacaaagataccatcagaattcagaacccgatcttgaaccaacgatctcaacgactaagatgtgaagatttttttttccccgaatatgtagctgagtgtggataaggaagagcagcaggagtgattccatttccactccagtggtggacatcagtttcctcgagggtgcagatagcctgctgaatcagagatatcatgcacaacagcaccacaggattgtttggagattggagtttatacacctatcccagcatttgggatgtgtgagctaccaccagcagtatatcatgaatctggatcaatgtaccactatctgtaatacgagatgatgtatagtttctgaatcaaacatgagcacttatcttgtacgccgtatctcgaacggaactgtgcaggacgcaaattagaacctataaaatttgatatatcgggagagtaaataacaaagtacatcaatacattttttgagaggtttgc

SEQ ID NO: 29400 - DNA, 2504 bp, Zea Mays
tcttcttacacaactttttttgctgctacgggggagagatatactaggatgaaacacctatttttatgtgtttatttatacaactagatgtatccttaaatgtgcaatggaccatctagagtcgtaggaaatgtgttttaacgtaaaccaaaattattttttttcacatggacagctctcaacgtgtgtgatgtgcaatttgtccgcagtgatttggtggttcgatattgtaaaatgttggatgggttatggtgtccttcagcactgtacaaagaagatcagtgatgggggttttatagtcatagactcataggtagtacttgcttgcccgttacatccttgtgatgcctcaaccgaactttctcgggctggctgcatagcttcttacacagctttattgttgctccacagctgcggggatgaggaacatactaggataaaaataactattattagtgagggagggatgtctctggatcatgatgtgtatgcaggctaggggcacatgggtttccaggtggaccgagccagcccacttcttaccccttccttcttttttcttttcttttttcctattctttctccttcacgctggtgtgttgcatttccttacgttggtacctcatgcctcacttaccgaagttgtattgagactccatgcctcgctttaccaccttgataaccatggttccgcatttctattgatatagttctacttttctgagttatgttcgtttttaaatgttgaattcttgaaagtaactgctgctgatccaatgtataatttctttcttcctgcttagacaaatcaagatcacagggtggaccagaatctaagaaggacctgattatacatagggatgggaatagtcaaaatattgcagcacatactttcacttttcgtgaacttgctgcagccactaagaatttcaggcaagattgccttttaggggagggaggttttggtcgtgtatataaaggacgcttggagaatggacagatctgccaccagataaagaacctctagactggaacacacggatgaagatagctgcaggtgcagctaagggcttagagtaccttcacgacaagacgagtcctcctgttatttaccgggattttaagtcgtcaaacattcttcttggagaaggatttcatccgaagctatcagactttggccttgcaaaacttggcccggttggtgacaagacccatgtttcaacacgtgtgatgggtacatatggctactgtgccccagaatatgcaatgactgggcagctcacagttaaatccgatgtgtatagctttggagtcgtgttccttgaacttatcacagggcgcaaagcaattgacaacaccaagacccaaggggagcaaaacctagtggcatgggctcgtccactgttcaaggaccgcaggaaattccctaaaatggctgatccaatgcttcagggccgcttccctatgaggggtctatatcaggccttagctgttgctgccatgtgcttgcaagagcaagctgctacacgccctcacatcggggatgttgtcactgctctctcatatctcgcttctcaggcttatgacccaaacgcccctgttcaacacagccggagcaacgcatctacccccaggtccagaaaccctgctgcatggaacggtgatcagcgcagtgtgcgctcgcctaatcatcaccattctccagacccgcggcggagggaccctgccagggcatccaagtatggagcagaggttagcaggactagctctgccagcgattctggccggcggtcaggtctggatgacatggacccgaccgggtcgcaagtgggaagcccagctcaaaccggaagaagaagagaagctccaagggccaccgacagacagcgcgctgtcggagaggccaggatgtggggggagaactcaagggagcgaacgaatggccatggtagcttcgacagcacgcatgagtgaagccgtcaggttccactccaggcatcatttcagacgaacgatgggtttgagcccactcatcggcaccggtcggatctgatcttgggacatggcgtggtgccgcccggtccgggtgtctgtgaataaggctctctctcttgccctcatgtggcgaatgcaattctcctcatgtccatcccttccgaaggcgatgcttccggcgacggggagcctgaggagcctcctgtaggattcagtcagaggtagacaggtcagtgaagaaaaaggatgcgcggagtcacattggcgagtgtgtgtttttggtggctagagctgagtattttcagctgcatgtatccttttttgtgtatgggtaagagcaaccgtgtcaggtttggctacctgagagacctttgaagctagccagctgctgttgctgctgcttctgcttcttcctccccccttttgggagttcagagctggaatgtaggtaggataggcgatgatgttgagtacagcaactgttttacacccttccatgttgaacagta

SEQ ID NO: 29401 - DNA, 2614 bp, Zea Mays
agcagcccctccaaaaaatctcaaacaactcttcagcacgggaaaacccgtacacaccacagcaccgtcgccaatgtccgccgccgcagccgactggcttccgtcagcgtccgtgacggcatccggccgcccggtgctttccgcgggcgaggtggagcggaatctcctcccgctcgtcgacctcgagcccgaggaaaatccgcgccttgctcccctccgcgcctgcctcctcgcgctgacttcccaccgcctcatcttcctccacgagccctcccgctccgcgcgcggcctgccgctcgccaccgtcgtccatgcgtaccctccccaccgcaggcacagccacaaccccctccgctccctcttctccgccccgtcctcatcttcctcgtctcagcatcaccgcatccgcctccagatctccatgccacccgtgcgatcagaggtcatcgccatcgtcgtgacctgcaaggctgacgttgatgtgttcttcgggaggctgctcgaggcgatccgtgcaagggcttgggaggtgacccctgcagctgctccgtcgagtggcacgtcggtggcagagggggccgcgcctacggaggacatcgcgatacggatgccggttgttggggtctcggggatactgcggatggagcaggagtcatgggagaacgccgggcagaacttgcaagatgcgttccaggatctcaatgccctcatgagcaaagctaaggaaatgatgcagttagcagaaaaaatgaggctcaagctattaatgaactcatccactgaatcaaattccaatgatgaagagatgggttctaagcaagacatgcaggatttgctgttgagtgttggcattgtgtctcctgtgacgaaagaaactgctggtgcgttgtatcatcagcagttgtcactacagggtttgattgtatgtgtatgaactctgtcacacacttcctacaagcacaaacaaccacacccgagaacacaagcggaaatacaaatacatatgcagtatgaataagcacgaggcaaaccaatcaggagacgcaaggatttgtttgactagagaacgggccaccacaactccacaaggcgccctacgtctccattgtggaagtcagtgagggacccatcaaggtctactcttggtcagacttgaaataacctctttccaccaatccactaagaagtcttctttccactttcagtgggaagactagcctttcttacaagaccaacgcaaacagcctacacaccctcgggtcctgctggtgacattttcccacctaagaacaaagttccaagagaaagatagcaacgaaccaaagatcttcgacttgctcaagttctcgaggatgggataactctcaaagcttcccaagctctgtattgccacaaaggcaagctcacgaagtttgggacaccccctaatcaaggtttaagctttctctattcaaacactcacaaagagagggagaggaatgcccaaggactattctggtcgttgataagagtggggaggatcaacaacatgaaatgctggcggactttgtaagaataccacttgagaaagcaggtggtatgatggcactagtcgatgtttattgtctcttcaaccgtgctaggggaacagagttgatctcaccagaggaccttttgcaagcttgttccctgtgggagaaagttgatgtatgttgatttctaatgagcagcccagtcatgctcaggaaatttgatagtggagtgaaggtgatccagaccaaaacacatagtgatgaagaggtatttgcaagaatctcatcacttgcacagaagccagatgctcttcagaaagggattagcccaagtgatgctgcattcacactgggaattgctccagctttagcaaaggagcatcttctaaatgcagaaaacaaaggcctgttgtgcagagatgttagtccagatggattccgcttttttagcaatttatttaatgacattgatccccaaaatattcactcgcaaaaaccccatgggatgtacaaggcgtggatctccgttgcgatggcgtctcactgaaaaagttcgactgggatatattgagatactggttgatcaagctggacatcgatgcaattatagtgtactctttgaaaacgtccgatcaagccagtcattggtgcgatcacaatgtatcctttgaaaacgttagtctgcatatctcgccattatgtaccataacaccaaaagatgtgatatagcaattagcaagcccatttgttctgttgaatgaagagcgtttgagtacgatgtatgaggattcgggctacattggtaaccgtattagcatgcgaccagattaacttttctgtactgactccatccaaaaataatgcaactctggtatagtcctaagctgtactacctcaattttcatcaaaattataagacgagttatgatactaaaaagtactgctagatatatatatttttgataaatataatttaacaatgggtctctgtcctttggagatgctcacaagaataaggataagatgtgtgtgtgtgtgttcataggtgtaaatgtatggacatgtatgagcatctatgttggagtgtgatttcaaaataaaaa

SEQ ID NO: 29402 - DNA, 1959 bp, Zea Mays
ttagaattaggaagttgtatgcatgctagaagcctataattcgctgagcagtggacactttctctggtatcagaggatcaatgtccaattattatgatgactacgatgacattgacgggatggaggatgattatgatatggatgatcccattgatgacatggtagacgagcagcaagggattagggattctgatgtggaagataatgattatggacaaccaagtgatgtcctcacacagttgcaaaatgtcctgctgaaaattgcaactacccaaattatggatttgaatgataagatcccagatacttcatcagcagatgcaagaaaaggaagggacattcaaggaataccctgggagcagataaacataacccgtaaaaaatacagacagtccagattagaacagtacaaaaattatgagaatgtacctaactctggagaagaagctatgaaggattgcaaaccaacagagaaaggtgggatatactatgagtttagacgaaatactagatcggttaaatcaactattctacattttcagcttagaaatttggtatgggcaacgtccaagcacgacatctacctagtatctcattactcaattcgtcactggtcagcattgagtggtgtggatactgaacttatcaacgtccaaggacatgtggcaccaagggagaagcatgcaggaagtttattagaggggttttatcagactcaagttagtaccttgacagtcaaggacaatttactggtagctggtgggtttcaaggagagctgatctgtaaacaccttgatcaggaaggtattagtttttgctgtcgaacaacttatgatgataatgctattacaaatgcggttgagatatttaatacctctagtggcgccgttcacttcatggcatcaaataacgactctggtgtgagatactatgacatggagagattccagctattcaagcattttcagtttgaatggccagtgaatcatgcttcgttgagtcctgacagaaaggtggttgttattgtgggtgatgatcctgatggtctacttattgatgcaaactctggaaagacagttcattccataaaaggacatcgggactactcatttgcatcggcttggagccctgatgggcgaacatttgctaccggcaaccaagacaagacatgccgaatctgggacgtgaggaacctttcaaaatccgtccatgtgttgaggggtaaccttggagccatccggtccatccgcttcacctcggatggccagttcatgtccatggctgaacctgctgactttgtgcacatctacgacgtgaagagtgactacaacaaaaggcaggagctggacttctttggcgagatatccggcacatcgttcagcccagacactgacacgcttttcgttggtgtgtgggataggatgtatggcagcctgctacaatttggccgcctgtacaactactcgtatcttgactccctgttttgatgtggatccaaacgggtgttgaactgttgggttttggtgtacctcagtgctctgaatgttgtcagcataaattaggtggttatccctaatcaggatattaagttgcaaagataattgaattaataaatgttgtaccgtgcccgatgtgtatatgtaaaaagaaatgtatacatgtgcctattgagagaccgagttgagatgtgacttaggggttgtttgtttgggattataatctattcagattatataatctaatttatttgttttaggggttgtttgtttgggattataaatataatctaacttatttgtttgtttgagattagtctagcttgaaaagtatgtttgaccttgtgtgcataggattgaatacagtgtgtgtagtttcatgtagacgcaggtaatgtatgtttctgtcacgggactgaccggccgtggtaggaatgtgtgtcgaaggaaaatatcttttggc

SEQ ID NO: 29403 - DNA, 2294 bp, Zea Mays
cgcgattccccaccccgcgcccgcagcccccccccccgtcctcccggccgcagccgagcacagccgccgcgcccacaaatcacgcgactcccgcttccatgtcctcgcgtcctccattgcagccgcatacatagcgtcgccccttccatcgatggcagccagccgcgcccgcaaatcacgcgactcccccttccatggcgtcgcccccttccatccatggcaggtccgcgcccctacgccccaaatcacgcggatggaaggtatgcgcctcctctccctattgctcagtgtaggcagtccccaaatccgcgcgtccgcgccacctcctactctgcgctccccgttccatgtcacgcgcacctgctcccgcaccggagaacccaccgcaagccgacctcgtcctgagatggcggtggcgctgtgcttcccaggggtcgcgagggagtctctctctggacgcgcccgtcgccgcctccaagctcaggagggagcggcgcccggcccccgcgagcgtgaacccggggccacaatgcttgaggcggaggaggggcctggcggttcgctgccagacggggtccaccgcagcgcccttcctcaggacggaggagccccccgcggctgcggcgggggcaaggaatgcccaggcggggttcaccttcgtcatgaagttcggcggctcgtcgctcgcgtcagccgagcggatgcgggaggtggccggcctcatccttagcttcctcgacgagatgcctgtcgccgtcctctccgccatggggaagaccaccaataacctcctcctaggaccttccatttctagctctcagcgcctgagtcagggtgctcgattctttcgcttactagctaacaaggctagatgcgcgtgtgcctgattcgttgtctgtgtaggccgaagagaaggcggtgagctgcggcggaggaggggcatctgaaatccctgagctcgctgtcatcagggagctacatcttaggacaattgatgagctcggtttagataagtcgattgtttcaggtatgttgttgtttgctccactctgctcttggaacgcctcagttgttcctcttgctctatcatgaatgcttctgttatacaatgggatgtcgttctcttggatgtgccaaagttttctctccccttagtctgaataacaattcctggtggatgtatgtatgtattctcttggatgtgcgaaagttttccccttggatgtgcgaaacacatttactcctcaccgcaatctgcgcctccactctcgacccctcctccttcctcctctccctagggacccttctccccaacacgcaggggtagcgtaggaggtgttgtggcggcattatctaggaagcggtctgtggacatgaggcagatcaacccgaaggtgcctaaggaggaggctgtcaccatctccggtcgactcgtccagatcctctccgaccatgggcccctcaccatcggcaacacctagaacaacacgaaggtacccaatcaaccagtcagtcaggcagagtggcaaaagctggggagcgatgcaggcgtcagagcagcaacaacggaggactctgccagtgtagatgagaaggaaacacgcaaagagcatcaaaagcaagttcaacgatcttatgtcaacccatccacctctgaatgaggcatattcagatgtgtgtgtattcagcactcatgctgccttcagtttacagagctcaatatgttacatcgaccttcccaacccgccggcagagcttaagaagctcaagcacaagaagtgcctcgtccagtccccccaactccttcatggatgtcaagtgccaacgatgcttcagcatgtccaattcgcttgtggcataggaatctcatcctagattcaatagaggggctgcaatgccggcatcgccatagctggaaatcgagcactgacggacaccgggcgccgagatgggccgtcttgtccaccgccgcaagaaccgcatgcgttggagccatccttacacctgctcctacttccgcgccagcaacccaacacgccgacgacacgagctcctccttataaaagtgacatctttattgtatagataacgaatggttatagttatttattcttgtgtccaagtggtattggatttttttagcttggggttaaagaaaagacagtcatgtactttgcatcttttttgtatttatgttttatgctaaattgtggaataacactatattagttgttagcaaagaatttctgagatattaaggttgatgataatatatgttgttatttcatttaatc

SEQ ID NO: 29404 - DNA, 1243 bp, Zea Mays
atggctggcatcgggcatctccactcccactccaccggccccacctccgcgaggggcgacccgagaacaccaccacgcccgccatgtggcgccgcctccaaaccctagccccctcgctccgccgcgccgccgcatcgtcgtccccggcctccgcccgcgccgtgcccttgtccacggtgccggtggccgcgttccggcgcacttcgaccctcctctcctctcccggcgacaagccggcgcccagcaaggtcgaggatgtcatgccgatcgccacggggctggagcgcgaggagctcgaggcggagctccaggggaagaagcggtttgacatggatcctgccgtcggccccttcggtactaaggtgaggtgcccctgcttttgcgacttagctcagagcctcggactctaggggatcacgtcaggtgtttggtgtcgtgcagagaaatttgcacaagtacttgctccgtcctagaaagaatgcaattatgggaaccgtcccagtgaaactagctcaagtttgaccaaattatagtaaataatattaacatgtatatctccaaataagtttatcatgaaaatatattttgtaattagttcagttatacttaatttgtaccataaatattattgtttttatataattttagtcaaatttcaaataggttggtttctcgagaagcaatgattgcattttttgtgggacggagagagtagtttcttcctcaagctgagtcctgttaggactgtgaagttagccgtgattgaatcctactataacaagagaatagttggctgccctggtgccgaaggagaggatgaacacgatgtcgtctggttttggttggaaaaggataaaccgcatgagtgcctagtctgctcacggtactttgtgctcaaggtcattggtgatgggggtgatccagatggccacgatgacgaggatgatcatcactgaggccttgtgtcgataatgataataagaactttgtgaaacatggttttgtcctatctttgcagcatcagactgccctatagagtattgtaattgataagtgtttgaccatgaaccaggtcgggtggtgttttacacctacgaattttgttcagatcttttcgaccatacggttgcttctgtttggaatatagatttttttttctggagtgcaacatcaaataaaggatgagtgcatcggtttcactctattgaccatctatttttgggttatattttgttcctgattg

SEQ ID NO: 29405 - DNA, 3735 bp, Zea Mays
gatggtgctgttcatgttcgtttctcatgcatagtacaagagcggacagaatgaagacaatcaaaagaaggtttatggaatggataacagagtagttcctacaacattctacattcataactttgtccatgaatttgcaagacatgttgcttgtgatgatattataattttcgatggtaccaaaatgcaaaagggctgtgcaaaaagacaaaccttccaatatgcactcttgacatgttaccgggtgcagtcaacattttcccactcaacgctgacaaggacaagggcattgcatatcatgaactctgaggcgataacatttcctcgtgaagcatttgaattactgaagcacttgcgtgttttgaatcttagtggatgttgcattgaagaattaccagcctctataggttgtctaaagcgtctaaaatatcttgatgtttctggtgtgcagatacaaacattgccattcccggtgagtaggttgacaaaccttgaggtactggatctatcaaaaacatgtatgaaggaattaccctctttcattggtaatttacagaacctaaaatatttaaacatgcaaggttgtgataaacttcaaaacctacctttatcccttggtcatctacaacgacttgagcaacttcgactgtcatgctgcagatgcattgctatgctaccagactctttgtgcaaccttatcaatcttcgaattttggatttatcaagatgcactatgctgcgacacttacctgctttatttggtaacttagtgaacttggaggatctaagcctatctagttgtttcaaccttaagcagttaccagaatcttttggtaacctttattttcttaggttcctgaacctatcaagctgctatgaacttcagcagtttcctgaatctgttacaaacctcgagaaactggaagttcttatactccggagatgttgtagacttcgaattctccccccctcctttgcaatgattaagtaccttcgaattcttgatctggctggctgtgaagcacttcatgtaagtactgagatgctaacaaccaatttggagtatctgaacctacaacggtgcctaaatcttcagactcagccatactatttcgaaaacttcaataagttgaagtttttgaatctttcccattgcctccctaccgttgattgcctggaatctattagttacttgttcaacttagaatatctagatctgtcagaaacttcccttgacatacctatgtcttttgcaaggcttcagaagttgcacacactgaacctcactggttgtgctccaatgcatccatcctctaatgtacaccaaacatggccaggtatattagcaaaaattacaagtctcaagtctgtgctgacgatggacccagtattagcggcctctcttcaaggacacaccgagtgctctgctgactatgattatcactcactcacaacaaccgatgagcttgttattaaagagatcacaggcggttcccgaggccttcgtattgctgagcagttgaatctgcagaatcgactggaggtttgtttccttaagctggaatgggttcctaggtcccaatcagctcaagatcaactattggaatatacagatgaggaagtgctggagaagttccaaccaaatgagactctggagcattttatgctagttaaatatacaggcaatgtgtttcctacatggatgatgaacaaactgacttcactcccataccttgtcaatctttgtttgttccacctgcataactgcagtgctctccctccaattggccatctacaaaatctgcgttacttgcatattaaagatatgcccaacctcacaaatctagagatgggtctttctggggggcctgtgtccttggggaaattgactcacctcaaactggaagcactgaatttagaagagctgtctatactcttgtcagccaacaatgagagtccctgtttcatgtttcccaatcttgaggagttatctgttctatcatgctctaagcttgtcttcaaaccatctgtgcctaagtgtgcgaaatatgtaataaaagagagtaacatggttctgtcatgttggcagcctctggggccattctcatctccaccaatagaaaaagtagagataagtgggtgtgtgatgccttctggttggttgcaatggcttagatccatacagactcttgagaaagtagtgatagatggtgaagctctttcatcttttgagctccagaagatatatgcatttcaagaagcatctggtagtaagatttcaaaggaaactgtaagttcatctaggacaaatatgtcacgtgagttgaccactgaggatggtgcccttaaagctattggtatcgacaactcaacaatcaaacatattccaaggtttaacaccacttctgaactctcagtggatactatttcatcctctaaagtaagcacaccatccaaggagatcccatcaactttacgccgtccggacaagtcaaaaatgcctgcactaatacctggagatggatctttaaacttaagccttaagcaggttcagaaggttactcataatttctcacctttatttgagttaggtgaagggggaacctgggcagtttacagggctgtattatcagataaccaggttgttatcatccggagagctaaaaagggccacgttcaagaggcaaaacatcttatggaagtgaagctccttacaaaaattaatcactggagtttggtgagattcttaggttttattgatgaaaaagatgagtgtattcggatcacagagtatgttccaaatggcactcttagggaacacctacatggggacgctttaatctgttacaacttgaggacgtcaaacatcctactgacagagagctaccgagccaaagtgtgctgttctgaactgtcaaaaagtggtaatatcgtgctattaaagggaacagggggctacattgatccagagtacttggagacctcagagctcactgccaaatctgatgtctactcttttggaataatactcttagaaatcatatcttctcatgggccacaagactgggatgtattgatgaaccaccggcaaagcagtgttgtacaatgggctcttgagaaattctatgacgacctcatgaatgagatattggattaccgtatggaggatcgcgtggatggagatgtggtcagggacttgctcagcttagcgttgagttgtgtggtttcgcgtggcgctgatcgcccaagcatcgtagttgtcggggagcgactgtggaaaatatggcaagatcatcgaagaaacgtaggggaacagcacgagtaccaaggaagctgggcagaatttatcgaacaagagggaatcctgaggcatcacaagtgtgtgctcaagagaagttgggagccttcaacaacgcagcaggattggtctgtgtatgttaggcagattgaattagttcaagaagcttacgataccccatggggagaggaaattttttcggggtctgtttcattggacgatatcacagtatattctcggtagaaagcttcaatacgattatattactcctgttttctccgcggtattacatgtgtagattggaggacaataacctatttgttctatttctgtttcattggacgataaatcatagtgtctcctcggtatgaactcttgaaagtttcaactcgttgttttcctcactctatttattcagtgatattgctgttagaaaa

SEQ ID NO: 29406 - DNA, 4377 bp, Zea Mays
tatatcgacctcacgggtcccatcgtcaaagtcttcctaacattgaaggttgagaatgctcccacggcctctgaagcatcacgagttctcctcgccttcacgcccacagagtttcaacatctctctattgtcaaggccacaagagcggaggggaagcgcaagaagaaggcattcgtacccctctcggtccaagcctctgagctcgccaccaccgctcccgacgcccctcgcctctactctgttctgctcagcactcctctgaaaccgggcgatgcaaccactctagaagtgctatacatgctcactcactctttagagcccttccccgctgagattagccagtcagagtcccagttggtttactaccgtgacagtgcggtgcttctctcgccctaccatgtcctggagcaggttacctacatcaaaatgccaagcaataggatcgaatccttcacaagggtcgatcctaccacacgagctggttctgaagtgaaatatggcacatacagtaaccagatgccaaactcctatttgccagttcttgtgcattatgagaataaccgcccatttgctgttgttgaggagcttgtacgcaaggtggagatttctcactggggaaacatccaaatcaccgagcagtataaactgaaacacggtggtgctcgtcacaaaggagtcttttccaggcttgagtatcaatctaggccatctatcagtggagcttcgtcctttaagaatcttcttgcaaggctgccacctcgggttcattcagtttactatcgtgatgagattggtaacatctcctcatcccatctgcgcactgattcacacaagtccgatctagaaattgagcccagatatccgttatttggtgggtggcactgcacgttcaccattggctatggtcttccattgcaagattttgtctttgagtcagttgatggccggcgctacatcaaccttacttttggttgccctctattggatactgtggttgacgatcttacagttaaagttgtgcttcctgaaggatcaaaaaatccagagcatgtagttccttttgtgacagagaaacatcttgagactagttattcataccttgacgttgttggaaggacgacggttgtactgaagaagaaaaatgttgtaggggagcacaacgttcctttccaggtgtactatgaattcaatccgatcttcatgctggcggaaccattgatgctgatatctgcagtgttgctgtttttcgttgccttcattgcgtatcttcacatggatctttccatcagaaaatcatcataggcctgttggcaattctgtccaccacagtattttttgaggcacatgttctgctaactgtgattgatgaagtaacaatccttgttctagcgcactagttgaactgtttatcagtgcaccatcctcaatggagaaggacgatgtttttttttttgtgtgtgtgtgggtggaatatgattgcttcatgtagggctcacaacgatcagaaacgatatcatctataggaaaacgattgcctagaaatttagctggtttcataattaatcaacgtggtgactacaatacgatattgatatatgtttgaaattcaaattttaaatacagtaaacgttattgtctttatagaaatgatatgattattacgagccctcagttacggttttagcttattagttacggtttagcttcgtgcaggaataagaatgagatgaaccacgaactgaacattgaatgatagcgaaggtatgtatccatctgttcattaactgtaatccacttgtatccatgaaaacatacatctacaggtgacgcatgatggatgccaccgttaacgtggcatcaagaattcactgctgacgttgtattgtaccaaaaatcgtatgtggtcacggcttccatgatgacggcggcggcggcgtggccgggaacattggcggcacggcggagaacatggtgttcttgtcgacggtggtgacgccggctcccctaccgctgttggtgagagccaccagggccgcgacgaggccggcgttgcccaccagcgtcggctcgttctgcccgaaggtgttgcgcgagtccttgaagccgtcgttcttgtcaggcccgccgaccatggcgcccgccagcaggttggggtccgccttcttgctgtcgcgccacttgtagccgccggtgcacgagtacttgacgccgttgtgcggcgtggacgcgccacggtggtgcacgtgccgcgggtacttgctgccgaacccaaccacgtagctcatcttcttggggttgtcaccgagaatgtagttgacctgagacctggcgaactcccggaggtcgttggtggtcatgaagtttgggccgcagtaccagccggggacgttgacggcctccatgtagtcggcgtagagcgcggcgatgaaggagttggcgacgacgtactgcagcggctgccccctgccgtggttgaagagcgccatcccgcccttggtgaagttgaaggcggcgaagcgcgggaagtacatgcacatgttgaggctggtggcgttgtggtagccggctagcgactcctcgtacgggtagccggggttgaggaacatgcgcaggcgcgacagcagcagctgggcgcccgggagcttgttgtcccagctgaacacggagaagtcgaggatgctgaagaaggccttggcgttcttgggcagccgcgggtcggtggcgaaggtgatgtagctgctgttgccagtggcgtagtacatccaccccgcgctccacatgtactcgtcccagtagctggtggagttgtagtagtactcgatgtccggctgccggagcgagtagggggtgcgccgccccgactgccgcgcgaacttgtacacggtggccgcgccctggctgagcttcttggagtaggcggcgttgtcacggaacacgatggaggcagccgcaagtgcagcggcgacctcgccacccagatcaggggcggagctcacggacagtgaagggcgagggtacgccatgtcctccggccggttccagcagtaatggtcgtccggccggctgccgttgatcttagcagcacccacctgggcgtataacttgtcgatggtggaagcagaggagttgaaggtgagtagcagatagtcggtgccccacttgatgagctccctgacatggtcatactcccccatggccttgtacttggcgctgtactcgatcaccgaccagctcagcagcgtcatggagaaggccatcgggaagtggaacttgatgttgtcgccagcgtcgtagtagccgccgacgaggccacccttgacgtccttggcgtcggagccgtctgacaggccagagttcccgcgccacttgatgccattgttcttgggaaggtggccggctgcaagaattctcttcgattttatcagagaagggatcggagagacggacctttgcaatttgagcgatcacgtacagagaatacagatctacaggtgtgtgctccgtgcaagagattacagtacaggaatgaattcagcaagatctacaggcacgcagttagcagcttgattgagatccatccctaccgaaagcaattagaaaaacaaatacgtacatttctgggcgttgaagaagaggagcgccttgtgcagcgcctctgtgtactgatctggcggcggcgggcctggcttcttgtgcgggatggacttggcgatgatgatggggaggccgatgaggacgaaagcggcgacgacgcaccacaaggcccaccagaggagcttgcgcttgacgacgacacaaccgaggtccacgtacttgtccttcttcttggcctccggcgggcctagcagccagctctgctgcgtctcgtccagctcgtggtgctgccgcgccgacagcgcgccgcggtccaggtccatgttgcggctgtggtcatcctccgccgccccatcggcgatctcgaacgagccgccccagtggttggccgaatacatggcgggcgccgggcggtgggtgaaggtgaggtgaccgggccaccggggtagggagttttcaagaggaggcggccaggcgggggtgggtggttgacccgccgacggtgctggccttcccgtggaggggcagctggcactgtcggtgccgaattaaaaagcgtctcttttccgtgcaaatgcaatgcaacgtagcatgcttgccgatctgtcggttttgcgagttttgtagtttaattgtcacccacgtggccagctgcctccactaataatcaaacaaagaaacatatcctatgcgatgtaaagttgtaaactatattccatgtttagtctaacgactacgtattagtattactataaatatactaaatttaattaaacttttaag

SEQ ID NO: 29407 - DNA, 755 bp, Zea Mays
tggacatgaaaacattgatatggggattgagatgctgtcattgggatcatttaaaaccagagtcattctctcgtcgtgtttgcaggcctttcagattgaaccgattacttcaacggtgtcatacatgattggtagggatgtgatggaggggagggggcaatgcaggtgcaggtgttgtactgtttcttagaattatccagcaacttcgatgggaggaattttgtttgagcttgtgggcccaatttgagaagttttacatatagagtaaaaaaaggtcctgctctcgtgttttcgtgtaaaactggattttgttcagttcttactgtggagctatgcttcctagataaaacttctcgatttgtataacttctcgatttgtataaaaacttctccatttacatattgggaagtctatatgtaaaacttctcgatttatatatcaactatgcttcctgtggagcaaggaagcgaacgcaagctagccttttgtattagtgcattctgttcagttcttacttgatcatcccgtgttctcgcgtgtgccatggctgagtggcaagctcaacactggtattgttgtcttgtctcaaatgaagtccggttccacaagttaaccggaaatcttcatgggtgatagctgcgtcagattcttccgcgcatagggcaagtaatgcaagtgatagctgtgtcagtttacccccattttcttgggcatcacttgtctcaaatgaagtccattggaggttcgcaattta

SEQ ID NO: 29408 - DNA, 4718 bp, Zea Mays
gcttccgtagtacagggcccccatgtgcgccttgccgccttgcctccactccacacaaccgtgtcagtacggcacccggacaagaggcaaacggcaaacccgatcggccgatccattctccaaccctagccgccggccgccgccacctacccggctaccccacgtttccagtccccactccctccgccggcgcatcctgcttccagcctccatcggcgcatcctgctcctggcctcccgccaccggcgcatccttgctcccggcctcctgccaccggccgcatccccagggccgcgagatcctgctcccgccaccggccgccgcaacctgccagcgtccagggcactcgcccccaccatccgccgccgccccccaccggcagtcgcaacctgccagcgtccagggctccaggcaagggccgccacgtgaccacgtctcgcaggtcccttgcctccttccatggcgcatgctggtaggagcggaaccggcgctcaagcacaaggtgccccgaggccgagcagtcatcaagttccctcaaagacaagtgctgtggctgcaggaggttcctcaagtgcacctacaccgacgagtgctgctgcaaatgcaatgccatcttcaagtgctcaagctccaccatcagaaggtcctgacacccttgctgacaagaaacgggcagcgggcggtggctctgtgtttaagccaccccctcccatggtagctgttgctgtgggttccatcgatgaagatgagaagccaggacctacagagaatgacgcgacaagcctctctacgacaattcgcagtaactcattgcgacgctaccgaggaagtggttccgatgataaaacatctttgaatgaatcaacagtcactgatgaggacgaaagggccccatcacccaaccatcaggatgagccccaccggcaagaggcccacatctctagaagctctcaaggttctcgtcctcatggcactcctcgtggttatggttactatgatgatagaggatcccatgataaacatggtgatcgtgagagatctgcatccattggctatagtaatagtggaaggcgaagataccatgatgatagagaatctcatactaggcgcgctgagcgtgagaggtctacatcaaatgaatatactaacaagagaagtcgacatgagcatagctcaagaagctcaagaacatctgcacgatctgattgggatgatggacgctgggaatgggaagatacacctcgtcgagattatcgtgataatcgtcctggctcccggagacaacatccaacacgatctcctatgctcgctgctgcatccccggatgcacgcctggtatctccttggttagacgggaatacaccacgtctagcagcgtccccgtgggataatgtatccccttcacctgctccaatacgtgcttctggttcctcaaaagggtcttcttattcacattccagtggaagatcacaccagcttaccttttcatcaactactagttctaatattattgatgctgatagaagcccctcaaatcctgataggaacagtgagataaccgaggaaatgatgcaggagatggactacaatgctgaccgtgcatggtatgactgcgaagaacacactaccatgtttgatggtgatcattctatgtatcttggagatgataattcctacaaaaagagggaagcagagatgccgaagaagctgactcgtagagatggtagcctgatgacccttgctcaaagcaaaaagatgtcacagatgactgctgataatgctcagtgggaggatagacaattgttgagatctggagctgttaaaggaacagaagtgcaaactgaatttgatgatgaggaggaacggaaagtaatacttcttgttcatgacacaaagccccccttcctggatgggagagttgttttcacaaaacaagcagaacctgtaatgcctctgaaggacccaacatctgatatggctattattgcacgcaaaggttctagtctggttagggaaatccgtgaaaagcaaagcatgaacaaatcaaggcaacgattttgggagcttgctggatctaagcttggcaatatcttgggtgttgagaaaacagctgaacaggttgatgcagatactgctgttgttggtgaccaaggtgagattaattttaaagaagaagcaaagttttcacaacatttgaaggataaagcagaagctgtcagtgattttgcaaaatcaaaatccctttctcaacaaaggcaatatcttcccatatttaccgtccgggatgatctgctacaggttgtgcgtgaaaatcaagtggttgtggttgttggtgaaactggttctgggaagactactcaactgactcagtatctgcatgaggatggatatactaccacaggagttgttggttgtacccaaccaaggcgtgtggctgccatgagtgttgctaagcgagtcagcgaggaaatggagactgatctgggagataaagtcggatatgccatacggtttgaggatgtcactggtccaaacactataataaagtatatgacagatggagtgcttctccgtgaaaccttgaaagatgctgacctcgacaaatatcgtgttgttgtcatggatgaagcacatgaaagatcactcaacactgatgttttgtttggtatactgaagaaggttgttgcacgtagacgggattttaaactaatcgttacatctgcaaccctaaatgctgacaagttctccaagttcttcggaggtgtgcctgtattccatattccgggtcggactttcccagttaacattatgttcagcaaaacaccatgtgaggactatgtggaagctgcagtgaagcaggccatgactatccacataaccagcggccttggtgatatcctaatcttcatgactgggcaggaagaaattgaggctacctgctatgcgcttgctgaacgcatggaacagttaatatcgtcatccaccaagactatccccaagctagagattctgcccatctactcacagttgcctgctgacttgcaagccaagatttttcagaaggctgaagagggcgctcgcaagtgtattgttgctaccaatattgctgagacctcattaacagttgatggtatcttctatgtcattgataccgggtatgggaagatgaaggtgtacaacccgcggatgggtatggacgccctccaggttttcccagtcagccgggcagctgccgaccagcgtgcaggtcgggcaggaagaactggccctggcacatgctacagattgttcacagaatcagcctaccagaatgagatgctccctaaccctgtgccagagatccaaaggactaacctggggaatgtggtgcttttactgaaatccctcagagttgaaaacttgctcgactttgactttatggacccaccgccccaggagaatatcctcaactcaatgtaccaactctgggtgttaggtgcattgaacaatgttggtggccttacagaaattggctggaagatggtggagttcccgttggatccaactctggcaaaaatgcttcttatgggggagcagctagagtgccttgatgaggtgctgaccattgtatccatgctatcagtgccgtcagtcttcttccggccaaaagaccgagcagaggagagtgacgcagcaagggagaaattctttgtcccagagtctgaccacctgacactcctgaacgtgtatcttcagtggaagtcgaatcagtatcgaggcgattggtgcaacgaccacttcctccatgtcaagggtctccgcaaggctcgtgaggtgagatctcagctgctggacatactgaaaaccctgaagatccccctgacatcatgccatatggaatgggacgtggtgaggaaggctatctgctctgcgtacttccacaattccgcccggttgaagggtattggggagtacgtcaactgccggaatgggatgccgtgccacctgcaccccagcagtgcgctatatggccttggctacactcctgactatgtcgtctaccatgagcttgtcctgaccaccaaggagtacatgcagtgcgtcaccgcagttgatccacagtggctagcggagatggggcccatgttcttctctgtgaaggagacagacacctctcttcttgaccacaagaagaggcagaaggaagagaagacggcgatggaggaggagatggagaagctgaggcggcagcaagcagaggccgcgcgcatggagaaggagaaggaacgggagaagagagctaagcagcagcaacaggttgctatgcccggcctgaagaagggtgcgacttatctgaggcccaagagaatgggtctgtagataagacctgatataacttaactgtctccggtgattttgttactaggctgagggaacttgtaatgtgtagcctgctcaagcagcatgtaaaacaacacgtcaatgtgaatgtatacaacatcgacatgtgaaaaaatgaaaagaaaaatagagtgttgtcgacatagagtttgattttttgctgagttagctcttaaaagtatgcagtcattatgtttgatatggtatgtcctcttaatgaaaaatatgattcttgaaggtctatgaattctgcaggcaagctaaattagctcttaaaacatttcaagaaacaacgtgaccctgaatggactcaaccaatcgtccattgctgattagag

SEQ ID NO: 29409 - DNA, 698 bp, Zea Mays
ccatttaagtctgcacacactagaattcttatctgttggtttactgtctacagaaagggacaaatcagatatttggctgctagaagtgaccaagttcagtttttcttgccgtgaccaactttggaataggatgaagattgggatggagtgctggcaggggtattcagatttgttcatcactgaaatatcacctgtgcaaatatccagaacagtgccatcctatcttcacctccctcccttgccctggataatcttcaccctgcagcaccggcgtgggcttccttgagtaagccacgactgcaccccatgcacatagttatcccccctgtaaactcaagaatccagtcccttgatattttccctgcctatataaagagcaacagggtgagggaaagaaagcagaagccagtgcagtgatccgtgcctcgatcatcaaccgtagtgagtagcttcagtcagcagtattgctcttccttccccaaatcataccctggacgcgcccaattccatcgatcaaggcactgaatgtgtctggtgaccacacctgcagatcttccactttaccgtggccagaaaacgaagaagagagtaaagtgactgaagagaagacaccaccacctttggaatctcaggcagggacttggctctacttcgacatctgcggatccgagcctgactcacctgtgaacaaaggcaag

SEQ ID NO: 29410 - DNA, 2511 bp, Zea Mays
gcctaacatcccaggccttttcctcccgctctactctgccgctagttcgctactcgtacctgttattattactggcggtggtggtgtggtgctgtcccccctgctcctgctcctgcctccggggcgcggcgccttcccgtctcccttcctcctcctctcccaccgctcggcctcctccaccacacgcgctcggcggtgccctccccggcgcggcgccgaaatgcaggtggggcctcgtcggcttcccgcggctgcgacgggccggagcagctaacgccgcggcctggggctgtgatctggggccgcgccgcattgccgactgcctgccgccgggctcgcgcgcgcagttcctgcctgccggtggcgaggggaggcaagatgcggcatctcgctctcctcgcgcttcttctcgctcccgttctcggatccacaggcaccactctgtccccttctccggccgccactgattctcctgcaaaccaaggacaggcttctagtcctcctcaatctgcatttgctcttggtccagtagctgttccaactgcgccgaccactccatcggcgagtccttccccggagaaagccgcggctgtaagtcctgctgctcccacggagccacgaattgccccggctccagtggctcctcctaaagagtatagtgcacctcctccagttgaggttgcacccactgatcccaccgatgaggttcctccaccagtagctccaccacaagctgcagttggaaatcccactccaattcttcctgggacacctgcattgctaccttatgttcaggctcctgctccatctgtcgttctcaagcctaatccaccagtcgtggtgtcacctccacctgcgaataatcaaccaagtaggccggttgggtctgtccctccttatccaccccctgcatcgccccctccggcaaatggcattccaccatacccaccttcaggaaggtttcctgctattcctcctgccacttcagcagtcccacctccagccacatcacctgttattgcacaagcaccacagcgacgagcagatcctccaagtagagattataagaacggaaacgcagtgccgccagcaaatacttaccctcctacaaatctcaagaagcatcatgttccacatgcatcccctccaaagggatccactggtcaaactgtcccaggtcacaaatcaccagttacaggatctgcgcctgcaacaagtcctttgccccagaacacaaacatgccttcaatcccgaagaatgcttcatcagtgccacatgcccatccctcaccaccaagtatagctccagaattggcacccactggtagatctcatgctcagggatggaaatccagtaatcccaataacaaaacaaatagattacatgccccatcttatccaccgcctcgtgctcaagggcccgaggtctcacgaaccccaagacagactgggactaaaaactatactcaccatgcgcctccaccattccctcaaggacaccctagctttcctgtacactccccatccccttcaccagcctcatcgaggggtcctgcgaacgcgaagaaaagaaatcatatttctcctactcttccttcaatccctcccctaccagagccaaaagcaccgtcagcgcatcctatttggacattacctccaccaccacctaattcagattgcaattccttatcatgcccagagcctctaacagatccacctgcgggagcaccatgtgcatgtgtgctaccaatcagagttggaattcgtctaagcgttgacctttactcattttttccattggtctctgattttgctgaagaggtagcttcaggggtaaacatggcacagaggcaggtccgtgtaatgggtgcgaacgttgcaggtgatcaacctgacaaaacaatggttcttgttgatctagttccagtgcaagtgaagttcgacaatgctacagcattttcagcatttgaaagcttgtggagcaaaaaagtttctttaaaaccatcagtctttgggaactatgagattctctatgttgtatatccagggcttcctccttcaccaccttcagggcaaggtgttggggatggggcgtttggcaacaacagaaatgcaagggccgtgaagccccttggggtcgatctctttgattcgtagcagaataacagtaacttttctccaatgaagtagtgccactgttgaaattcatcatgaacttgtagtctataagcaagttttttttatttggtatcctttccaaggaaaattccattgcttatttgaaatgccagccaacagtgcttgcaatgacttttcagttaaaaggctttcgtttcagtttctgcatcgtgttatgtgcccttgctagaataatatgcacagtttaggcagtactagttttcgttctgaccagtgttttaaaggtgtcgcctaggcgtccaggcgtctcagtcgcctagctaaatcagcaagagggcagaggggaagaggaaggggcggtgccgaatcggg

SEQ ID NO: 29411 - DNA, 1204 bp, Zea Mays
ccgccttagacagtcgttaggcagcatgctttctgtctcagattgttcacacaaatctcaaagttataaggtgatacttacaccaacacatcttatgattgtgatggagtttgcagcaggtggagagctttttgatcggatctgtgatcgtgggcggtttagtgaggatgaggcccggtatttctttcagcagttgatctgtggagtgagctattgccattacatgcaaatatgccatagagatctgaagctggagaatgttctcttggatggcagcccagctccacggcttaagatctgcgattttggctattccaagtcatcagtgttgcattcaagacccaaatcagcagtaggaacgccagcatatattgcacctgaggtgctatcccgtcgcgagtatgatggaaagaaaagtggagcggggctagttgatgacagacatccacaaaaaagagcttgcagacgtatggtcctgtggggtgactctttacgtcatgcttgtgggagcatacccatttgaagacccagatgaccccaagaatatacgcaacaccattcagcaaataatgcaagtgcaatacaagataccagatcatgtccacatatctacggaatgccagcaacttattgcccgtatctttgttgccaatccaatgaggagaatcacaatgaaggaaataaagagccatccatggtttttgaagaacctaccacgggaactcacggagactgcacaaggcatgtactacaggagggataacagggtcccttcttattcagaccaaacgtcggaagaaatcatgaagatagttcaagatgcaaggaccatgccgaaatcatccagatcaggctatgggtggagcagtgagtattcggatgaagaagaagagaaggaagaggaacacagaccagaggagcatgaggaagaggaagatgaatacgataggagggtgaaggaggtccatgcaagcggagaactccgtatggacgctcttcacatatgaaagctagtggaagagaaagttgcatgtagataactgggttgttgcggatctgaaggatccagtgggatgtatgcagttttggcttgagaatttgcttctgtttgtcaattttcatgtaacataatttaatacaccgagacaacagactaccatgttcttatattggtaaatatgaagcatgtaccttctatctgcat

SEQ ID NO: 29412 - DNA, 529 bp, Zea Mays
aagatctacattgccgaatgatcatgacattggtgtagggtttagtgtacttaccatataggggagccgatgatcctcttggccataatcgtggcgccatctttcttcgccactcccaccaagcgaggaagtagtatgcttcctggggttggggcttcttcaacggatctccgcctcctctgatcgccgctatgtgtaccggccaccgtcgccagcgatgaagtcgaggagatgggcaacagaggaggaaatctttaatccgcaactgggacgcacccaggacctgcactggatgcgcgatttcgggggcggctgcaactggcgcagcgcttcacttcgttgctgcgaatctcaagcagcgactgcggcgggaggtcgcggccgtgggcgacgtgtggcggcgcctggcggctggtcagagtttggtgctttaaactcgcgcggcgtcagtaatcctccaatgccaagcatgacgatgttgggggcacggtgtgtacggtcaacgacagttattagcgcgtacagagcg
